United States Patent Application Publication US 2007/0042381 A1 - sequence listing, part 77

SEQ ID NO: 3515509 - RNA, 16 nt, Human
caauuaaacggauuau

SEQ ID NO: 3515510 - RNA, 13 nt, Human
caauuaaagaaau

SEQ ID NO: 3515511 - RNA, 15 nt, Human
caauuaaagaaauaa

SEQ ID NO: 3515512 - RNA, 22 nt, Human
caauuaaauguagguaugaaua

SEQ ID NO: 3515513 - RNA, 21 nt, Human
caauuaaggauuuuaugcuuu

SEQ ID NO: 3515514 - RNA, 18 nt, Human
caauuaauaguuugucua

SEQ ID NO: 3515515 - RNA, 13 nt, Human
caauuaaugcuuu

SEQ ID NO: 3515516 - RNA, 19 nt, Human
caauuaauugcuauugugu

SEQ ID NO: 3515517 - RNA, 18 nt, Human
caauuaauugucuugcac

SEQ ID NO: 3515518 - RNA, 13 nt, Human
caauuaauuuuuu

SEQ ID NO: 3515519 - RNA, 23 nt, Human
caauuaauuuuuuuauuguuuaa

SEQ ID NO: 3515520 - RNA, 19 nt, Human
caauuacaacggagucaaa

SEQ ID NO: 3515521 - RNA, 16 nt, Human
caauuacaggaaguac

SEQ ID NO: 3515522 - RNA, 17 nt, Human
caauuacaggaaguacu

SEQ ID NO: 3515523 - RNA, 18 nt, Human
caauuacaggaaguacug

SEQ ID NO: 3515524 - RNA, 17 nt, Human
caauuacugguccaaaa

SEQ ID NO: 3515525 - RNA, 17 nt, Human
caauuacuuuagaaaau

SEQ ID NO: 3515526 - RNA, 15 nt, Human
caauuacuuugguag

SEQ ID NO: 3515527 - RNA, 21 nt, Human
caauuagcaauugacugucac

SEQ ID NO: 3515528 - RNA, 17 nt, Human
caauuagguuuuuccuu

SEQ ID NO: 3515529 - RNA, 14 nt, Human
caauuaguuuccuu

SEQ ID NO: 3515530 - RNA, 21 nt, Human
caauuaguuuccuuuuuaaua

SEQ ID NO: 3515531 - RNA, 22 nt, Human
caauuauaaacucauuuugcuu

SEQ ID NO: 3515532 - RNA, 16 nt, Human
caauuauggaaaaaaa

SEQ ID NO: 3515533 - RNA, 18 nt, Human
caauuauggaaaaaaaau

SEQ ID NO: 3515534 - RNA, 18 nt, Human
caauuauugauauauauu

SEQ ID NO: 3515535 - RNA, 22 nt, Human
caauuauuguuacacauuaagu

SEQ ID NO: 3515536 - RNA, 23 nt, Human
caauuauuguuacacauuaagua

SEQ ID NO: 3515537 - RNA, 15 nt, Human
caauuauuuccccca

SEQ ID NO: 3515538 - RNA, 16 nt, Human
caauucaaaaauguac

SEQ ID NO: 3515539 - RNA, 17 nt, Human
caauucaaaaguuccaa

SEQ ID NO: 3515540 - RNA, 14 nt, Human
caauucaacccuuu

SEQ ID NO: 3515541 - RNA, 17 nt, Human
caauucaauacaaacaa

SEQ ID NO: 3515542 - RNA, 20 nt, Human
caauucauauuuaugaaucu

SEQ ID NO: 3515543 - RNA, 18 nt, Human
caauucauccucacucag

SEQ ID NO: 3515544 - RNA, 13 nt, Human
caauucaugaacu

SEQ ID NO: 3515545 - RNA, 15 nt, Human
caauucaugaacuuc

SEQ ID NO: 3515546 - RNA, 15 nt, Human
caauuccaaaggaau

SEQ ID NO: 3515547 - RNA, 22 nt, Human
caauuccaacaguuuaaugaag

SEQ ID NO: 3515548 - RNA, 21 nt, Human
caauuccacucugauagaauu

SEQ ID NO: 3515549 - RNA, 22 nt, Human
caauuccaugacaauaugcccu

SEQ ID NO: 3515550 - RNA, 13 nt, Human
caauuccccucug

SEQ ID NO: 3515551 - RNA, 16 nt, Human
caauuccuagauaaaa

SEQ ID NO: 3515552 - RNA, 21 nt, Human
augaccuccagcuuuccugua

SEQ ID NO: 3515553 - RNA, 19 nt, Human
augaccugugaccagcacu

SEQ ID NO: 3515554 - RNA, 13 nt, Human
augaccuuacauu

SEQ ID NO: 3515555 - RNA, 14 nt, Human
augaccuuacauuu

SEQ ID NO: 3515556 - RNA, 16 nt, Human
augaccuuacauuucc

SEQ ID NO: 3515557 - RNA, 17 nt, Human
augaccuuauccuuccu

SEQ ID NO: 3515558 - RNA, 19 nt, Human
augaccuuguaauguaacu

SEQ ID NO: 3515559 - RNA, 20 nt, Human
augaccuuguaauguaacug

SEQ ID NO: 3515560 - RNA, 18 nt, Human
augaccuuucaauaggaa

SEQ ID NO: 3515561 - RNA, 23 nt, Human
augaccuuucaauaggaaaaacu

SEQ ID NO: 3515562 - RNA, 19 nt, Human
augacgacgacaacgauga

SEQ ID NO: 3515563 - RNA, 13 nt, Human
augacgcaaagag

SEQ ID NO: 3515564 - RNA, 17 nt, Human
augacgcugauacauaa

SEQ ID NO: 3515565 - RNA, 14 nt, Human
augacuaaaaauau

SEQ ID NO: 3515566 - RNA, 12 nt, Human
augacuaaagag

SEQ ID NO: 3515567 - RNA, 21 nt, Human
augacuaauuaggguacauuu

SEQ ID NO: 3515568 - RNA, 16 nt, Human
augacuauguaaacua

SEQ ID NO: 3515569 - RNA, 14 nt, Human
augacucaaagucu

SEQ ID NO: 3515570 - RNA, 21 nt, Human
augacucaagauucccaggag

SEQ ID NO: 3515571 - RNA, 23 nt, Human
augacucaagauucccaggaguu

SEQ ID NO: 3515572 - RNA, 15 nt, Human
augacugccaagacu

SEQ ID NO: 3515573 - RNA, 16 nt, Human
augacugccaagacug

SEQ ID NO: 3515574 - RNA, 13 nt, Human
augacuggaauuu

SEQ ID NO: 3515575 - RNA, 13 nt, Human
augacuggcauuu

SEQ ID NO: 3515576 - RNA, 19 nt, Human
augacuguuuuucggacag

SEQ ID NO: 3515577 - RNA, 17 nt, Human
augacuguuuuuguagu

SEQ ID NO: 3515578 - RNA, 18 nt, Human
augacuguuuuuguagug

SEQ ID NO: 3515579 - RNA, 16 nt, Human
augacuuacuguacau

SEQ ID NO: 3515580 - RNA, 17 nt, Human
augacuuacuguacaug

SEQ ID NO: 3515581 - RNA, 19 nt, Human
augacuuccccaauaucuu

SEQ ID NO: 3515582 - RNA, 23 nt, Human
augacuuuauauggaugauucag

SEQ ID NO: 3515583 - RNA, 18 nt, Human
augacuuuauuauuuauu

SEQ ID NO: 3515584 - RNA, 17 nt, Human
augacuuuuccauguau

SEQ ID NO: 3515585 - RNA, 20 nt, Human
augacuuuuccauguaucua

SEQ ID NO: 3515586 - RNA, 21 nt, Human
augaguuuuugauagcuuuau

SEQ ID NO: 3515587 - RNA, 17 nt, Human
augauaaaaaauuuugu

SEQ ID NO: 3515588 - RNA, 15 nt, Human
augauaauagauucu

SEQ ID NO: 3515589 - RNA, 15 nt, Human
augauaaugaacaga

SEQ ID NO: 3515590 - RNA, 17 nt, Human
augauacaagauuagaa

SEQ ID NO: 3515591 - RNA, 13 nt, Human
augauacaaugaa

SEQ ID NO: 3515592 - RNA, 17 nt, Human
augauacaaugaacacu

SEQ ID NO: 3515593 - RNA, 22 nt, Human
augauacccugaauuuggccug

SEQ ID NO: 3515594 - RNA, 23 nt, Human
augauacuucgacacuguucuua

SEQ ID NO: 3515595 - RNA, 21 nt, Human
augauacuugaaaauuaacau

SEQ ID NO: 3515596 - RNA, 17 nt, Human
augauagauuugaccuc

SEQ ID NO: 3515597 - RNA, 20 nt, Human
augauagcgggaaaaggaga

SEQ ID NO: 3515598 - RNA, 17 nt, Human
augauauaacuuuagaa

SEQ ID NO: 3515599 - RNA, 22 nt, Human
augauauguaaacauaauucuu

SEQ ID NO: 3515600 - RNA, 17 nt, Human
augauauugcugaagaa

SEQ ID NO: 3515601 - RNA, 21 nt, Human
augauauuuuuuuaagucuuu

SEQ ID NO: 3515602 - RNA, 14 nt, Human
augaucaaauguuu

SEQ ID NO: 3515603 - RNA, 19 nt, Human
augaucaaauguuuaauca

SEQ ID NO: 3515604 - RNA, 20 nt, Human
augaucaguggacagucugc

SEQ ID NO: 3515605 - RNA, 20 nt, Human
augaucaguguuguugcucu

SEQ ID NO: 3515606 - RNA, 19 nt, Human
augaucccugcuuaaaaga

SEQ ID NO: 3515607 - RNA, 21 nt, Human
augauccggauuuaauuugau

SEQ ID NO: 3515608 - RNA, 15 nt, Human
augauccuaaugaau

SEQ ID NO: 3515609 - RNA, 17 nt, Human
augaucggcaggacacc

SEQ ID NO: 3515610 - RNA, 14 nt, Human
augaucuacucaga

SEQ ID NO: 3515611 - RNA, 18 nt, Human
augaucuacucagaaauu

SEQ ID NO: 3515612 - RNA, 21 nt, Human
augaucuagguuuaacucaga

SEQ ID NO: 3515613 - RNA, 12 nt, Human
augaucucccug

SEQ ID NO: 3515614 - RNA, 14 nt, Human
augaucucccugcc

SEQ ID NO: 3515615 - RNA, 15 nt, Human
augaucucccugccg

SEQ ID NO: 3515616 - RNA, 17 nt, Human
augaucugccucuaaaa

SEQ ID NO: 3515617 - RNA, 20 nt, Human
augaucuggauccaccaaga

SEQ ID NO: 3515618 - RNA, 14 nt, Human
augaucuugugaca

SEQ ID NO: 3515619 - RNA, 16 nt, Human
augaucuuuaaaauac

SEQ ID NO: 3515620 - RNA, 12 nt, Human
augaugaaugag

SEQ ID NO: 3515621 - RNA, 17 nt, Human
augaugacgacgacaac

SEQ ID NO: 3515622 - RNA, 20 nt, Human
augaugaucaauuauaguuu

SEQ ID NO: 3515623 - RNA, 15 nt, Human
augaugauccuaggc

SEQ ID NO: 3515624 - RNA, 22 nt, Human
augaugccacaccaagcugugc

SEQ ID NO: 3515625 - RNA, 17 nt, Human
augaugccaugaggaac

SEQ ID NO: 3515626 - RNA, 22 nt, Human
augaugccucugucuucuggac

SEQ ID NO: 3515627 - RNA, 21 nt, Human
augaugcuuguaacaagaaaa

SEQ ID NO: 3515628 - RNA, 15 nt, Human
augauggaugccaau

SEQ ID NO: 3515629 - RNA, 19 nt, Human
augauggaugccaauauua

SEQ ID NO: 3515630 - RNA, 23 nt, Human
augauggggcccuaauucagcca

SEQ ID NO: 3515631 - RNA, 18 nt, Human
augaugguugcaaaagac

SEQ ID NO: 3515632 - RNA, 20 nt, Human
augauguaaguuuaccuaug

SEQ ID NO: 3515633 - RNA, 18 nt, Human
augauguacagauucuuu

SEQ ID NO: 3515634 - RNA, 23 nt, Human
augauguauguugaagccuuugu

SEQ ID NO: 3515635 - RNA, 23 nt, Human
augauguccagaagaauauucag

SEQ ID NO: 3515636 - RNA, 19 nt, Human
augaugucuuuuuauuaaa

SEQ ID NO: 3515637 - RNA, 17 nt, Human
augaugugaaacacuuu

SEQ ID NO: 3515638 - RNA, 20 nt, Human
augauguggugccugagguc

SEQ ID NO: 3515639 - RNA, 23 nt, Human
augauguggugccugaggucugu

SEQ ID NO: 3515640 - RNA, 19 nt, Human
augauguuaguuuuccuua

SEQ ID NO: 3515641 - RNA, 17 nt, Human
augauguugaauauuug

SEQ ID NO: 3515642 - RNA, 21 nt, Human
augauguuucgugaaguauac

SEQ ID NO: 3515643 - RNA, 17 nt, Human
augauguuuuuaaaauc

SEQ ID NO: 3515644 - RNA, 18 nt, Human
augauguuuuuaaaaucu

SEQ ID NO: 3515645 - RNA, 21 nt, Human
augauguuuuuaaaaucuuau

SEQ ID NO: 3515646 - RNA, 14 nt, Human
augauuaaaaauau

SEQ ID NO: 3515647 - RNA, 19 nt, Human
augauuaaauaagauucua

SEQ ID NO: 3515648 - RNA, 24 nt, Human
augauuaaauaagauucuaacggu

SEQ ID NO: 3515649 - RNA, 14 nt, Human
augauuaaguaaug

SEQ ID NO: 3515650 - RNA, 22 nt, Human
augauuagaaauuaccugugga

SEQ ID NO: 3515651 - RNA, 23 nt, Human
augauuagcaaguuacagugaug

SEQ ID NO: 3515652 - RNA, 15 nt, Human
augauuauuuucauu

SEQ ID NO: 3515653 - RNA, 13 nt, Human
augauucaaaaag

SEQ ID NO: 3515654 - RNA, 21 nt, Human
augauucaaaugucuauaaac

SEQ ID NO: 3515655 - RNA, 14 nt, Human
augauucagaaauu

SEQ ID NO: 3515656 - RNA, 17 nt, Human
augauucagaaauugga

SEQ ID NO: 3515657 - RNA, 22 nt, Human
augauucaggugcagaggaagu

SEQ ID NO: 3515658 - RNA, 13 nt, Human
augauuccagcca

SEQ ID NO: 3515659 - RNA, 12 nt, Human
augauucccagc

SEQ ID NO: 3515660 - RNA, 23 nt, Human
augauucuaauuuuuaagcaaaa

SEQ ID NO: 3515661 - RNA, 15 nt, Human
augauucugcuuuua

SEQ ID NO: 3515662 - RNA, 21 nt, Human
augauugcagaauuguuuaga

SEQ ID NO: 3515663 - RNA, 15 nt, Human
augauugcuuuuaaa

SEQ ID NO: 3515664 - RNA, 16 nt, Human
augauuggauuauuca

SEQ ID NO: 3515665 - RNA, 15 nt, Human
augauuguaaaauag

SEQ ID NO: 3515666 - RNA, 18 nt, Human
augauuuaaaacauguaa

SEQ ID NO: 3515667 - RNA, 18 nt, Human
augauuuaauaaaauaau

SEQ ID NO: 3515668 - RNA, 17 nt, Human
augauuuaauuugaaau

SEQ ID NO: 3515669 - RNA, 15 nt, Human
augauuuacucauua

SEQ ID NO: 3515670 - RNA, 20 nt, Human
augauuuauaaacagacaau

SEQ ID NO: 3515671 - RNA, 14 nt, Human
augauuuauaccua

SEQ ID NO: 3515672 - RNA, 12 nt, Human
augauuucacaa

SEQ ID NO: 3515673 - RNA, 17 nt, Human
augauuucacaaauauu

SEQ ID NO: 3515674 - RNA, 23 nt, Human
augauuucacaaauauuaaaaag

SEQ ID NO: 3515675 - RNA, 16 nt, Human
augauuucagaaacaa

SEQ ID NO: 3515676 - RNA, 17 nt, Human
augauuucagcucacug

SEQ ID NO: 3515677 - RNA, 19 nt, Human
augauuucagcucacugca

SEQ ID NO: 3515678 - RNA, 14 nt, Human
augauuucaguagc

SEQ ID NO: 3515679 - RNA, 21 nt, Human
augauuucaugcuaucucugu

SEQ ID NO: 3515680 - RNA, 16 nt, Human
augauuuccuugaaug

SEQ ID NO: 3515681 - RNA, 18 nt, Human
augauuuccuugaaugug

SEQ ID NO: 3515682 - RNA, 19 nt, Human
augauuuccuugaaugugg

SEQ ID NO: 3515683 - RNA, 17 nt, Human
augauuuguaguggaaa

SEQ ID NO: 3515684 - RNA, 21 nt, Human
augauuuuaaguuucucugca

SEQ ID NO: 3515685 - RNA, 18 nt, Human
augauuuuauuugacaaa

SEQ ID NO: 3515686 - RNA, 23 nt, Human
augauuuuauuugacaaaauuug

SEQ ID NO: 3515687 - RNA, 14 nt, Human
augauuuuuaaaga

SEQ ID NO: 3515688 - RNA, 17 nt, Human
augauuuuucuuuacaa

SEQ ID NO: 3515689 - RNA, 15 nt, Human
augauuuuugucauc

SEQ ID NO: 3515690 - RNA, 17 nt, Human
augauuuuuuaaaagaa

SEQ ID NO: 3515691 - RNA, 19 nt, Human
augauuuuuuaaaagaaau

SEQ ID NO: 3515692 - RNA, 17 nt, Human
augauuuuuugaaaguu

SEQ ID NO: 3515693 - RNA, 23 nt, Human
augauuuuuugaaaguuaacauu

SEQ ID NO: 3515694 - RNA, 17 nt, Human
augauuuuuuuuucaua

SEQ ID NO: 3515695 - RNA, 13 nt, Human
augcaaaaaaucu

SEQ ID NO: 3515696 - RNA, 17 nt, Human
augcaaaaacucuuuga

SEQ ID NO: 3515697 - RNA, 23 nt, Human
augcaaaaacucuuugagagggu

SEQ ID NO: 3515698 - RNA, 12 nt, Human
augcaaaaagaa

SEQ ID NO: 3515699 - RNA, 11 nt, Human
augcaaaaauc

SEQ ID NO: 3515700 - RNA, 13 nt, Human
augcaaaagcaag

SEQ ID NO: 3515701 - RNA, 23 nt, Human
augcaaaagguucacuaaagcag

SEQ ID NO: 3515702 - RNA, 11 nt, Human
augcaaaaugg

SEQ ID NO: 3515703 - RNA, 18 nt, Human
augcaaaauuuuuuuaau

SEQ ID NO: 3515704 - RNA, 20 nt, Human
augcaaacauaacaaaauca

SEQ ID NO: 3515705 - RNA, 17 nt, Human
augcaaacauuggaaga

SEQ ID NO: 3515706 - RNA, 13 nt, Human
augcaaagcacug

SEQ ID NO: 3515707 - RNA, 15 nt, Human
augcaaaguacaaug

SEQ ID NO: 3515708 - RNA, 20 nt, Human
augcaaaguauaaauuugug

SEQ ID NO: 3515709 - RNA, 14 nt, Human
augcaaaguucugu

SEQ ID NO: 3515710 - RNA, 17 nt, Human
augcaaaguucuguguu

SEQ ID NO: 3515711 - RNA, 21 nt, Human
augcaaaguucuguguuuaau

SEQ ID NO: 3515712 - RNA, 16 nt, Human
augcaaauaacacaaa

SEQ ID NO: 3515713 - RNA, 19 nt, Human
augcaaaugagcucugaaa

SEQ ID NO: 3515714 - RNA, 20 nt, Human
augcaaaugagcucugaaau

SEQ ID NO: 3515715 - RNA, 16 nt, Human
augcaacaacauguau

SEQ ID NO: 3515716 - RNA, 18 nt, Human
cacaaggauugaaaauuc

SEQ ID NO: 3515717 - RNA, 17 nt, Human
cacaaggcagcaaggcc

SEQ ID NO: 3515718 - RNA, 22 nt, Human
cacaaggcagcaaggcccgagc

SEQ ID NO: 3515719 - RNA, 19 nt, Human
cacaaggcugaccaagaga

SEQ ID NO: 3515720 - RNA, 17 nt, Human
cacaagggaaggacaga

SEQ ID NO: 3515721 - RNA, 22 nt, Human
cacaagggaaggacagaaagga

SEQ ID NO: 3515722 - RNA, 18 nt, Human
cacaaggucauggccaca

SEQ ID NO: 3515723 - RNA, 22 nt, Human
cacaaggucauggccacacugu

SEQ ID NO: 3515724 - RNA, 23 nt, Human
cacaaggucauggccacacugug

SEQ ID NO: 3515725 - RNA, 20 nt, Human
cacaaguagaugccugaacu

SEQ ID NO: 3515726 - RNA, 22 nt, Human
cacaaguagaugccugaacuug

SEQ ID NO: 3515727 - RNA, 18 nt, Human
cacaaguggguaccccca

SEQ ID NO: 3515728 - RNA, 19 nt, Human
cacaaguggguacccccag

SEQ ID NO: 3515729 - RNA, 15 nt, Human
auggaauugauuugc

SEQ ID NO: 3515730 - RNA, 18 nt, Human
auggaauugauuugcauu

SEQ ID NO: 3515731 - RNA, 17 nt, Human
auggaauuucucccagu

SEQ ID NO: 3515732 - RNA, 15 nt, Human
auggaauuuguaagu

SEQ ID NO: 3515733 - RNA, 17 nt, Human
auggaauuuuuuuguac

SEQ ID NO: 3515734 - RNA, 21 nt, Human
auggacaccccuuauccagga

SEQ ID NO: 3515735 - RNA, 19 nt, Human
auggacacuacacccagca

SEQ ID NO: 3515736 - RNA, 22 nt, Human
auggacacuacacccagcaaua

SEQ ID NO: 3515737 - RNA, 15 nt, Human
auggacacuccagug

SEQ ID NO: 3515738 - RNA, 16 nt, Human
auggacacuuuucacc

SEQ ID NO: 3515739 - RNA, 19 nt, Human
auggacagaagaaggcagc

SEQ ID NO: 3515740 - RNA, 13 nt, Human
auggacagaauuu

SEQ ID NO: 3515741 - RNA, 14 nt, Human
auggacaggcuggc

SEQ ID NO: 3515742 - RNA, 23 nt, Human
auggacaguucacacccugcaag

SEQ ID NO: 3515743 - RNA, 20 nt, Human
auggacauccuguauaagca

SEQ ID NO: 3515744 - RNA, 17 nt, Human
auggacaucuugucauu

SEQ ID NO: 3515745 - RNA, 20 nt, Human
auggacauuuagaagaaaga

SEQ ID NO: 3515746 - RNA, 18 nt, Human
auggacccaaugcacaca

SEQ ID NO: 3515747 - RNA, 20 nt, Human
auggaccggagagugggggu

SEQ ID NO: 3515748 - RNA, 14 nt, Human
auggaccuaacauu

SEQ ID NO: 3515749 - RNA, 18 nt, Human
auggaccugccugcauag

SEQ ID NO: 3515750 - RNA, 13 nt, Human
auggacggugcuc

SEQ ID NO: 3515751 - RNA, 21 nt, Human
auggacuaaccccaacgcaca

SEQ ID NO: 3515752 - RNA, 20 nt, Human
auggacuaucugucuggugg

SEQ ID NO: 3515753 - RNA, 18 nt, Human
auggacucagaaacucca

SEQ ID NO: 3515754 - RNA, 18 nt, Human
auggacucuacacuguga

SEQ ID NO: 3515755 - RNA, 17 nt, Human
auggacucuucccccac

SEQ ID NO: 3515756 - RNA, 16 nt, Human
auggacugaugcuuuu

SEQ ID NO: 3515757 - RNA, 17 nt, Human
auggacugguuugagau

SEQ ID NO: 3515758 - RNA, 16 nt, Human
auggacuguggugacu

SEQ ID NO: 3515759 - RNA, 22 nt, Human
auggacuguggugacuuuggau

SEQ ID NO: 3515760 - RNA, 14 nt, Human
auggacuucuggau

SEQ ID NO: 3515761 - RNA, 17 nt, Human
auggacuuguauauuug

SEQ ID NO: 3515762 - RNA, 17 nt, Human
auggacuuuauaagcca

SEQ ID NO: 3515763 - RNA, 22 nt, Human
auggacuuugcacacuuuggcc

SEQ ID NO: 3515764 - RNA, 15 nt, Human
auggacuuuggaagc

SEQ ID NO: 3515765 - RNA, 17 nt, Human
auggacuuuggaagcag

SEQ ID NO: 3515766 - RNA, 12 nt, Human
auggagaaagcu

SEQ ID NO: 3515767 - RNA, 16 nt, Human
auggagaaagcugacu

SEQ ID NO: 3515768 - RNA, 22 nt, Human
auggagaagcagaaauacauau

SEQ ID NO: 3515769 - RNA, 14 nt, Human
auggagaaggaagg

SEQ ID NO: 3515770 - RNA, 20 nt, Human
auggagacuccugcccuguu

SEQ ID NO: 3515771 - RNA, 21 nt, Human
auggagacugguccugugugc

SEQ ID NO: 3515772 - RNA, 18 nt, Human
auggagacugucucaaga

SEQ ID NO: 3515773 - RNA, 14 nt, Human
auggagagagggga

SEQ ID NO: 3515774 - RNA, 15 nt, Human
auggagagaggggaa

SEQ ID NO: 3515775 - RNA, 13 nt, Human
auggagagcccug

SEQ ID NO: 3515776 - RNA, 11 nt, Human
cacaugugugc

SEQ ID NO: 3515777 - RNA, 12 nt, Human
cacauguguggu

SEQ ID NO: 3515778 - RNA, 18 nt, Human
cacauguuuagaguugca

SEQ ID NO: 3515779 - RNA, 12 nt, Human
cacauguuuccu

SEQ ID NO: 3515780 - RNA, 15 nt, Human
cacauguuuccucua

SEQ ID NO: 3515781 - RNA, 15 nt, Human
cacauguuuucucug

SEQ ID NO: 3515782 - RNA, 13 nt, Human
cacauguuuuuau

SEQ ID NO: 3515783 - RNA, 13 nt, Human
cacauuaaaaaau

SEQ ID NO: 3515784 - RNA, 12 nt, Human
cacauuaaagaa

SEQ ID NO: 3515785 - RNA, 20 nt, Human
cacauuaaagaagaccugag

SEQ ID NO: 3515786 - RNA, 13 nt, Human
cacauuaaaugac

SEQ ID NO: 3515787 - RNA, 19 nt, Human
cacauuaauauuugcugac

SEQ ID NO: 3515788 - RNA, 21 nt, Human
cacauuagaagacaauugaca

SEQ ID NO: 3515789 - RNA, 17 nt, Human
cacauuagacuauccau

SEQ ID NO: 3515790 - RNA, 23 nt, Human
cacauuagauuuuauuuuacuau

SEQ ID NO: 3515791 - RNA, 21 nt, Human
cacauuaggaaaaguugcuau

SEQ ID NO: 3515792 - RNA, 14 nt, Human
cacauuauuugcau

SEQ ID NO: 3515793 - RNA, 22 nt, Human
cacauucaaaauaggguauauu

SEQ ID NO: 3515794 - RNA, 23 nt, Human
cacauucagggcuauuuuuuccc

SEQ ID NO: 3515795 - RNA, 16 nt, Human
cacauuccugaugcuu

SEQ ID NO: 3515796 - RNA, 18 nt, Human
cacauuccuugccugcac

SEQ ID NO: 3515797 - RNA, 19 nt, Human
cacauuccuugccugcaca

SEQ ID NO: 3515798 - RNA, 17 nt, Human
cacauucuuauaaauau

SEQ ID NO: 3515799 - RNA, 18 nt, Human
cacauucuuauaaauaug

SEQ ID NO: 3515800 - RNA, 13 nt, Human
cacauucuuggcu

SEQ ID NO: 3515801 - RNA, 22 nt, Human
cacauucuuggcuuaaucauuu

SEQ ID NO: 3515802 - RNA, 16 nt, Human
cacauugcauucuauu

SEQ ID NO: 3515803 - RNA, 18 nt, Human
cacauugcauucuauugc

SEQ ID NO: 3515804 - RNA, 19 nt, Human
cacauugcauucuauugcc

SEQ ID NO: 3515805 - RNA, 23 nt, Human
cacauuguuuuaaaaagaaacaa

SEQ ID NO: 3515806 - RNA, 18 nt, Human
cacauuuagucucuuuau

SEQ ID NO: 3515807 - RNA, 16 nt, Human
cacauuucacugucug

SEQ ID NO: 3515808 - RNA, 18 nt, Human
cacauuucucaacaaggc

SEQ ID NO: 3515809 - RNA, 21 nt, Human
cacauuucuuuuuaaaaaaag

SEQ ID NO: 3515810 - RNA, 21 nt, Human
cacauuugcuuuuugugauau

SEQ ID NO: 3515811 - RNA, 16 nt, Human
cacauuuggaauacuu

SEQ ID NO: 3515812 - RNA, 18 nt, Human
cacauuugguaauguuuu

SEQ ID NO: 3515813 - RNA, 22 nt, Human
cacauuugguucuaagaaaccc

SEQ ID NO: 3515814 - RNA, 12 nt, Human
cacauuuguaca

SEQ ID NO: 3515815 - RNA, 23 nt, Human
cacauuugucuucuuucugucuu

SEQ ID NO: 3515816 - RNA, 19 nt, Human
cacauuuuauuuuauuaug

SEQ ID NO: 3515817 - RNA, 12 nt, Human
cacauuuugauu

SEQ ID NO: 3515818 - RNA, 12 nt, Human
cacauuuuguau

SEQ ID NO: 3515819 - RNA, 21 nt, Human
cacauuuuguauaauuguauc

SEQ ID NO: 3515820 - RNA, 21 nt, Human
cacauuuuuuaaaugcaccug

SEQ ID NO: 3515821 - RNA, 22 nt, Human
cacauuuuuuaaaugcaccugg

SEQ ID NO: 3515822 - RNA, 17 nt, Human
cacauuuuuuaggaaau

SEQ ID NO: 3515823 - RNA, 12 nt, Human
cacauuuuuuau

SEQ ID NO: 3515824 - RNA, 19 nt, Human
cacauuuuuuuuuuuaauu

SEQ ID NO: 3515825 - RNA, 21 nt, Human
cacauuuuuuuuuuuaauuuu

SEQ ID NO: 3515826 - RNA, 19 nt, Human
caccaaaaaaauccagaaa

SEQ ID NO: 3515827 - RNA, 14 nt, Human
caccaaaaaauauc

SEQ ID NO: 3515828 - RNA, 17 nt, Human
caccaaaaaauaucuag

SEQ ID NO: 3515829 - RNA, 12 nt, Human
caccaaaaacaa

SEQ ID NO: 3515830 - RNA, 13 nt, Human
caccaaaaacaaa

SEQ ID NO: 3515831 - RNA, 13 nt, Human
caccaaagcugcc

SEQ ID NO: 3515832 - RNA, 14 nt, Human
caccaaaguucuaa

SEQ ID NO: 3515833 - RNA, 13 nt, Human
caccaacccagcc

SEQ ID NO: 3515834 - RNA, 21 nt, Human
caccaacccagccgcugcccg

SEQ ID NO: 3515835 - RNA, 18 nt, Human
caccaacuacuaccugua

SEQ ID NO: 3515836 - RNA, 19 nt, Human
caccaacuccuaguucuag

SEQ ID NO: 3515837 - RNA, 19 nt, Human
caccaacuggcccucuucu

SEQ ID NO: 3515838 - RNA, 15 nt, Human
caccaagaugucugu

SEQ ID NO: 3515839 - RNA, 17 nt, Human
caccaagaugucugucu

SEQ ID NO: 3515840 - RNA, 13 nt, Human
caccaagccaagg

SEQ ID NO: 3515841 - RNA, 15 nt, Human
caccaagcccacagg

SEQ ID NO: 3515842 - RNA, 16 nt, Human
caccaagcuaggugcu

SEQ ID NO: 3515843 - RNA, 15 nt, Human
caccaagcugugcca

SEQ ID NO: 3515844 - RNA, 16 nt, Human
caccaagcugugccac

SEQ ID NO: 3515845 - RNA, 21 nt, Human
caccaagcugugccacccugg

SEQ ID NO: 3515846 - RNA, 23 nt, Human
caccaagcugugccacccugggc

SEQ ID NO: 3515847 - RNA, 18 nt, Human
caccaagggcgcaagagu

SEQ ID NO: 3515848 - RNA, 20 nt, Human
caccaaggucuucagccauc

SEQ ID NO: 3515849 - RNA, 23 nt, Human
caccaaguuggaacauccuugga

SEQ ID NO: 3515850 - RNA, 23 nt, Human
caccaauguacccaccgggccac

SEQ ID NO: 3515851 - RNA, 21 nt, Human
caccaauuggauaaagcagcu

SEQ ID NO: 3515852 - RNA, 18 nt, Human
caccacacacaacagcca

SEQ ID NO: 3515853 - RNA, 15 nt, Human
caccacacaucccag

SEQ ID NO: 3515854 - RNA, 15 nt, Human
caccacacccagccc

SEQ ID NO: 3515855 - RNA, 18 nt, Human
caccacacccagccucag

SEQ ID NO: 3515856 - RNA, 15 nt, Human
caccacacucagccc

SEQ ID NO: 3515857 - RNA, 13 nt, Human
caccacagacaca

SEQ ID NO: 3515858 - RNA, 15 nt, Human
caccacagacacaca

SEQ ID NO: 3515859 - RNA, 13 nt, Human
caccacagcaggu

SEQ ID NO: 3515860 - RNA, 19 nt, Human
caccacagccagcaccugg

SEQ ID NO: 3515861 - RNA, 18 nt, Human
caccacauccuccgucca

SEQ ID NO: 3515862 - RNA, 14 nt, Human
caccacaucuaagc

SEQ ID NO: 3515863 - RNA, 18 nt, Human
caccaccacuggccacca

SEQ ID NO: 3515864 - RNA, 14 nt, Human
caccaccaggucuc

SEQ ID NO: 3515865 - RNA, 16 nt, Human
caccaccccccacucu

SEQ ID NO: 3515866 - RNA, 18 nt, Human
caccaccccccacucugu

SEQ ID NO: 3515867 - RNA, 20 nt, Human
caccaccccccacucugugc

SEQ ID NO: 3515868 - RNA, 22 nt, Human
caccaccccccacucugugccu

SEQ ID NO: 3515869 - RNA, 18 nt, Human
caccaccucacuccuguu

SEQ ID NO: 3515870 - RNA, 14 nt, Human
caccaccucuuugg

SEQ ID NO: 3515871 - RNA, 15 nt, Human
caccacgauguggcc

SEQ ID NO: 3515872 - RNA, 18 nt, Human
caccacgauguggcccug

SEQ ID NO: 3515873 - RNA, 19 nt, Human
caccacgauguggcccugg

SEQ ID NO: 3515874 - RNA, 12 nt, Human
auguauaguaaa

SEQ ID NO: 3515875 - RNA, 20 nt, Human
auguauaguauuugaaaaca

SEQ ID NO: 3515876 - RNA, 16 nt, Human
auguauaguuuugaau

SEQ ID NO: 3515877 - RNA, 13 nt, Human
auguauauaaaaa

SEQ ID NO: 3515878 - RNA, 12 nt, Human
auguauauacac

SEQ ID NO: 3515879 - RNA, 17 nt, Human
auguauauacacauaua

SEQ ID NO: 3515880 - RNA, 22 nt, Human
auguauauauuuuuuaaaaauc

SEQ ID NO: 3515881 - RNA, 14 nt, Human
auguauauuaaaaa

SEQ ID NO: 3515882 - RNA, 21 nt, Human
auguauauuaaaaaagagaca

SEQ ID NO: 3515883 - RNA, 18 nt, Human
auguauauuuuuuuaauu

SEQ ID NO: 3515884 - RNA, 14 nt, Human
auguaucaaacugu

SEQ ID NO: 3515885 - RNA, 15 nt, Human
auguaucaaugagua

SEQ ID NO: 3515886 - RNA, 11 nt, Human
auguaucacua

SEQ ID NO: 3515887 - RNA, 17 nt, Human
auguaucauagaaaugu

SEQ ID NO: 3515888 - RNA, 12 nt, Human
auguaucaucug

SEQ ID NO: 3515889 - RNA, 16 nt, Human
auguaucugaaaguca

SEQ ID NO: 3515890 - RNA, 13 nt, Human
auguaugaaggcu

SEQ ID NO: 3515891 - RNA, 14 nt, Human
auguaugaaggcuu

SEQ ID NO: 3515892 - RNA, 15 nt, Human
auguaugcacacaca

SEQ ID NO: 3515893 - RNA, 17 nt, Human
auguaugcagcuaucug

SEQ ID NO: 3515894 - RNA, 13 nt, Human
auguaugcauaau

SEQ ID NO: 3515895 - RNA, 14 nt, Human
auguaugcuucaua

SEQ ID NO: 3515896 - RNA, 16 nt, Human
auguaugcuucauaca

SEQ ID NO: 3515897 - RNA, 20 nt, Human
auguaugcuucauacaggga

SEQ ID NO: 3515898 - RNA, 21 nt, Human
auguauggguaggguaaauca

SEQ ID NO: 3515899 - RNA, 22 nt, Human
auguauggugcaauguguguau

SEQ ID NO: 3515900 - RNA, 15 nt, Human
auguauguaaaaaug

SEQ ID NO: 3515901 - RNA, 22 nt, Human
auguauguaaauagguuucuaa

SEQ ID NO: 3515902 - RNA, 17 nt, Human
auguaugugcacuguca

SEQ ID NO: 3515903 - RNA, 14 nt, Human
auguaugugcauuu

SEQ ID NO: 3515904 - RNA, 16 nt, Human
auguauguguaaguau

SEQ ID NO: 3515905 - RNA, 14 nt, Human
auguauguguguau

SEQ ID NO: 3515906 - RNA, 12 nt, Human
auguauguguuu

SEQ ID NO: 3515907 - RNA, 12 nt, Human
auguauguuacc

SEQ ID NO: 3515908 - RNA, 19 nt, Human
auguauguuuacacuguca

SEQ ID NO: 3515909 - RNA, 19 nt, Human
auguauguuuggcucugcu

SEQ ID NO: 3515910 - RNA, 22 nt, Human
auguauuacaguggggaaugaa

SEQ ID NO: 3515911 - RNA, 20 nt, Human
auguauuauguccugugaga

SEQ ID NO: 3515912 - RNA, 20 nt, Human
auguauuauucugcagcaug

SEQ ID NO: 3515913 - RNA, 16 nt, Human
auguauuauuuauaau

SEQ ID NO: 3515914 - RNA, 14 nt, Human
auguauucaaauac

SEQ ID NO: 3515915 - RNA, 21 nt, Human
auguauucauauuuguacuuu

SEQ ID NO: 3515916 - RNA, 20 nt, Human
auguauuguaaacauguguu

SEQ ID NO: 3515917 - RNA, 12 nt, Human
auguauuguacc

SEQ ID NO: 3515918 - RNA, 15 nt, Human
auguauugugcaaug

SEQ ID NO: 3515919 - RNA, 18 nt, Human
auguauugugcaaugugu

SEQ ID NO: 3515920 - RNA, 19 nt, Human
auguauugugcaaugugua

SEQ ID NO: 3515921 - RNA, 20 nt, Human
auguauugugcaauguguau

SEQ ID NO: 3515922 - RNA, 19 nt, Human
auguauugugucuuuugca

SEQ ID NO: 3515923 - RNA, 20 nt, Human
auguauugugucuuuugcau

SEQ ID NO: 3515924 - RNA, 22 nt, Human
auguauugugucuuuugcauga

SEQ ID NO: 3515925 - RNA, 22 nt, Human
auguauuuaccaaaaauuuugu

SEQ ID NO: 3515926 - RNA, 19 nt, Human
auguauuuccuggauguuu

SEQ ID NO: 3515927 - RNA, 15 nt, Human
auguauuugcugaca

SEQ ID NO: 3515928 - RNA, 15 nt, Human
auguauuuguagugu

SEQ ID NO: 3515929 - RNA, 13 nt, Human
auguauuuuaugu

SEQ ID NO: 3515930 - RNA, 15 nt, Human
auguauuuuauguau

SEQ ID NO: 3515931 - RNA, 17 nt, Human
auguauuuuauguaugu

SEQ ID NO: 3515932 - RNA, 14 nt, Human
auguauuuuauguu

SEQ ID NO: 3515933 - RNA, 15 nt, Human
auguauuuuauugua

SEQ ID NO: 3515934 - RNA, 23 nt, Human
auguauuuuauuguaacagacau

SEQ ID NO: 3515935 - RNA, 20 nt, Human
auguauuuugugaguuuguu

SEQ ID NO: 3515936 - RNA, 16 nt, Human
auguauuuuucuacau

SEQ ID NO: 3515937 - RNA, 23 nt, Human
auguauuuuucuacauuauugcu

SEQ ID NO: 3515938 - RNA, 17 nt, Human
augucaaaaauauuuag

SEQ ID NO: 3515939 - RNA, 13 nt, Human
augucaaacaaau

SEQ ID NO: 3515940 - RNA, 19 nt, Human
augucaaauauuuagaugu

SEQ ID NO: 3515941 - RNA, 17 nt, Human
augucaacuucuggcuc

SEQ ID NO: 3515942 - RNA, 16 nt, Human
augucaacuuuaugca

SEQ ID NO: 3515943 - RNA, 14 nt, Human
augucaagggcagc

SEQ ID NO: 3515944 - RNA, 17 nt, Human
augucaaggugcuguug

SEQ ID NO: 3515945 - RNA, 19 nt, Human
augucaauaaacaacagcu

SEQ ID NO: 3515946 - RNA, 16 nt, Human
augucaauaacaguau

SEQ ID NO: 3515947 - RNA, 15 nt, Human
augucacaggcaggu

SEQ ID NO: 3515948 - RNA, 13 nt, Human
augucaccaccuu

SEQ ID NO: 3515949 - RNA, 19 nt, Human
augucaccaccuucccagc

SEQ ID NO: 3515950 - RNA, 23 nt, Human
augucaccaccuucccagcucuc

SEQ ID NO: 3515951 - RNA, 22 nt, Human
augucaccguggaccuuccugc

SEQ ID NO: 3515952 - RNA, 23 nt, Human
augucaccguggaccuuccugcc

SEQ ID NO: 3515953 - RNA, 16 nt, Human
augucacgaauaugga

SEQ ID NO: 3515954 - RNA, 19 nt, Human
augucacguacugucugau

SEQ ID NO: 3515955 - RNA, 14 nt, Human
augucacuagaaug

SEQ ID NO: 3515956 - RNA, 16 nt, Human
augucacugugguccu

SEQ ID NO: 3515957 - RNA, 15 nt, Human
augucacuucuggau

SEQ ID NO: 3515958 - RNA, 10 nt, Human
augucacuuu

SEQ ID NO: 3515959 - RNA, 20 nt, Human
augucacuuuuugaggcaaa

SEQ ID NO: 3515960 - RNA, 23 nt, Human
augucagaaaaacaauaagagcg

SEQ ID NO: 3515961 - RNA, 13 nt, Human
augucagacacag

SEQ ID NO: 3515962 - RNA, 20 nt, Human
augucagacacagauuggcc

SEQ ID NO: 3515963 - RNA, 21 nt, Human
augucagacacagauuggcca

SEQ ID NO: 3515964 - RNA, 19 nt, Human
augucagacagaacuugaa

SEQ ID NO: 3515965 - RNA, 14 nt, Human
augucagauacaau

SEQ ID NO: 3515966 - RNA, 18 nt, Human
augucagauuccuuuccc

SEQ ID NO: 3515967 - RNA, 13 nt, Human
augucagcaaaaa

SEQ ID NO: 3515968 - RNA, 13 nt, Human
augucagcaguug

SEQ ID NO: 3515969 - RNA, 21 nt, Human
augucagcaguugcugguaaa

SEQ ID NO: 3515970 - RNA, 19 nt, Human
augucagccgagccgggcc

SEQ ID NO: 3515971 - RNA, 12 nt, Human
augucaggccug

SEQ ID NO: 3515972 - RNA, 20 nt, Human
augucaggguaccuggggcc

SEQ ID NO: 3515973 - RNA, 19 nt, Human
augucagucugcuuagaaa

SEQ ID NO: 3515974 - RNA, 21 nt, Human
augucagucugcuuagaaaua

SEQ ID NO: 3515975 - RNA, 22 nt, Human
augucagucugcuuagaaauaa

SEQ ID NO: 3515976 - RNA, 13 nt, Human
augucagugugac

SEQ ID NO: 3515977 - RNA, 16 nt, Human
augucaguucugauau

SEQ ID NO: 3515978 - RNA, 21 nt, Human
augucaguucugauauggaag

SEQ ID NO: 3515979 - RNA, 17 nt, Human
augucauauauuacuag

SEQ ID NO: 3515980 - RNA, 15 nt, Human
augucaucauacaug

SEQ ID NO: 3515981 - RNA, 14 nt, Human
augucaucccauug

SEQ ID NO: 3515982 - RNA, 13 nt, Human
augucaugcugcc

SEQ ID NO: 3515983 - RNA, 14 nt, Human
augucaugcugccu

SEQ ID NO: 3515984 - RNA, 21 nt, Human
augucauguguacaaaaguuu

SEQ ID NO: 3515985 - RNA, 16 nt, Human
augucauuaaacauga

SEQ ID NO: 3515986 - RNA, 15 nt, Human
augucauuaaugugu

SEQ ID NO: 3515987 - RNA, 16 nt, Human
augucauuucagaagu

SEQ ID NO: 3515988 - RNA, 18 nt, Human
augucauuucauuuccua

SEQ ID NO: 3515989 - RNA, 22 nt, Human
aaaagaaaaucuuuauaaaugu

SEQ ID NO: 3515990 - RNA, 11 nt, Human
aaaagaaaauu

SEQ ID NO: 3515991 - RNA, 10 nt, Human
aaaagaaaca

SEQ ID NO: 3515992 - RNA, 20 nt, Human
aaaagaaacucuauggucuu

SEQ ID NO: 3515993 - RNA, 12 nt, Human
aaaagaaacuuu

SEQ ID NO: 3515994 - RNA, 18 nt, Human
aaaagaaaggcuguuaaa

SEQ ID NO: 3515995 - RNA, 14 nt, Human
aaaagaaauaauaa

SEQ ID NO: 3515996 - RNA, 14 nt, Human
aaaagaaaucaaua

SEQ ID NO: 3515997 - RNA, 14 nt, Human
aaaagaaaugacua

SEQ ID NO: 3515998 - RNA, 15 nt, Human
aaaagaaaugacuaa

SEQ ID NO: 3515999 - RNA, 15 nt, Human
aaaagaaaugcacaa

SEQ ID NO: 3516000 - RNA, 17 nt, Human
aaaagaacaugcaguuu

SEQ ID NO: 3516001 - RNA, 18 nt, Human
aaaagaacaugcaguuug

SEQ ID NO: 3516002 - RNA, 11 nt, Human
aaaagaaggaa

SEQ ID NO: 3516003 - RNA, 14 nt, Human
aaaagaaguagugu

SEQ ID NO: 3516004 - RNA, 19 nt, Human
aaaagaaucccuguucauu

SEQ ID NO: 3516005 - RNA, 23 nt, Human
aaaagaaugacguuuacauauaa

SEQ ID NO: 3516006 - RNA, 11 nt, Human
aaaagaaugau

SEQ ID NO: 3516007 - RNA, 20 nt, Human
aaaagaaugggcaguuacau

SEQ ID NO: 3516008 - RNA, 15 nt, Human
aaaagaaugucagaa

SEQ ID NO: 3516009 - RNA, 19 nt, Human
aaaagacaauucuuuauac

SEQ ID NO: 3516010 - RNA, 15 nt, Human
aaaagacauucagga

SEQ ID NO: 3516011 - RNA, 17 nt, Human
aaaagacuaagaucggu

SEQ ID NO: 3516012 - RNA, 10 nt, Human
aaaagacuca

SEQ ID NO: 3516013 - RNA, 12 nt, Human
aaaagacucauc

SEQ ID NO: 3516014 - RNA, 13 nt, Human
aaaagacuccaaa

SEQ ID NO: 3516015 - RNA, 14 nt, Human
aaaagacugucuua

SEQ ID NO: 3516016 - RNA, 20 nt, Human
aaaagacuucccuaacacuu

SEQ ID NO: 3516017 - RNA, 15 nt, Human
aaaagacuuguuucu

SEQ ID NO: 3516018 - RNA, 13 nt, Human
aaaagagaagaag

SEQ ID NO: 3516019 - RNA, 21 nt, Human
aaaagagaccacccauaucau

SEQ ID NO: 3516020 - RNA, 21 nt, Human
aaaagagagaaaacuuauuug

SEQ ID NO: 3516021 - RNA, 14 nt, Human
auguccauuuacac

SEQ ID NO: 3516022 - RNA, 22 nt, Human
augucccaucacguguacuggc

SEQ ID NO: 3516023 - RNA, 19 nt, Human
auguccccaaaccugcaag

SEQ ID NO: 3516024 - RNA, 21 nt, Human
augucccuacaccccuccccu

SEQ ID NO: 3516025 - RNA, 24 nt, Human
augucccuaccgagucucuucucc

SEQ ID NO: 3516026 - RNA, 14 nt, Human
augucccugggcca

SEQ ID NO: 3516027 - RNA, 15 nt, Human
augucccugggccag

SEQ ID NO: 3516028 - RNA, 18 nt, Human
augucccugggccagggu

SEQ ID NO: 3516029 - RNA, 16 nt, Human
augucccuuucuucuc

SEQ ID NO: 3516030 - RNA, 18 nt, Human
augucccuuucuucuccc

SEQ ID NO: 3516031 - RNA, 20 nt, Human
augucccuuuuccuaaguca

SEQ ID NO: 3516032 - RNA, 19 nt, Human
auguccuaaggacacacua

SEQ ID NO: 3516033 - RNA, 15 nt, Human
auguccuaaugguga

SEQ ID NO: 3516034 - RNA, 16 nt, Human
auguccuaauggugau

SEQ ID NO: 3516035 - RNA, 20 nt, Human
auguccuacuaucacugaac

SEQ ID NO: 3516036 - RNA, 15 nt, Human
auguccuagacaggu

SEQ ID NO: 3516037 - RNA, 17 nt, Human
auguccucaccacaugc

SEQ ID NO: 3516038 - RNA, 20 nt, Human
auguccuccagaagccucug

SEQ ID NO: 3516039 - RNA, 22 nt, Human
auguccuccagaagccucuggc

SEQ ID NO: 3516040 - RNA, 23 nt, Human
auguccuccagaagccucuggcu

SEQ ID NO: 3516041 - RNA, 13 nt, Human
auguccugccuuu

SEQ ID NO: 3516042 - RNA, 22 nt, Human
auguccuguaaacacucagcug

SEQ ID NO: 3516043 - RNA, 13 nt, Human
auguccuguaaag

SEQ ID NO: 3516044 - RNA, 19 nt, Human
auguccugugagaugugua

SEQ ID NO: 3516045 - RNA, 11 nt, Human
auguccugugu

SEQ ID NO: 3516046 - RNA, 21 nt, Human
auguccugugucaguuuaugu

SEQ ID NO: 3516047 - RNA, 16 nt, Human
auguccuucugagccc

SEQ ID NO: 3516048 - RNA, 13 nt, Human
augucgccucugc

SEQ ID NO: 3516049 - RNA, 15 nt, Human
augucgccucugcau

SEQ ID NO: 3516050 - RNA, 23 nt, Human
augucgucaaagcugaaauggac

SEQ ID NO: 3516051 - RNA, 20 nt, Human
augucguggacacacacaga

SEQ ID NO: 3516052 - RNA, 13 nt, Human
augucuaaaauug

SEQ ID NO: 3516053 - RNA, 17 nt, Human
augucuaaaugcugaaa

SEQ ID NO: 3516054 - RNA, 17 nt, Human
augucuaauguauuuua

SEQ ID NO: 3516055 - RNA, 19 nt, Human
augucuaauguauuuuauu

SEQ ID NO: 3516056 - RNA, 14 nt, Human
augucuauucagcu

SEQ ID NO: 3516057 - RNA, 14 nt, Human
augucuauugucca

SEQ ID NO: 3516058 - RNA, 13 nt, Human
augucuauuuaag

SEQ ID NO: 3516059 - RNA, 14 nt, Human
augucuauuuaagc

SEQ ID NO: 3516060 - RNA, 20 nt, Human
augucucaaggcaguuaauu

SEQ ID NO: 3516061 - RNA, 15 nt, Human
augucucacugagca

SEQ ID NO: 3516062 - RNA, 19 nt, Human
augucucacugagcacugu

SEQ ID NO: 3516063 - RNA, 20 nt, Human
augucucacugagcacuguu

SEQ ID NO: 3516064 - RNA, 15 nt, Human
augucuccuaagcac

SEQ ID NO: 3516065 - RNA, 15 nt, Human
augucucgugguagg

SEQ ID NO: 3516066 - RNA, 19 nt, Human
augucucgugguaggacug

SEQ ID NO: 3516067 - RNA, 17 nt, Human
augucucugagcauuag

SEQ ID NO: 3516068 - RNA, 15 nt, Human
augucucuuccuggu

SEQ ID NO: 3516069 - RNA, 16 nt, Human
augucucuuccuggua

SEQ ID NO: 3516070 - RNA, 13 nt, Human
augucucuucuga

SEQ ID NO: 3516071 - RNA, 17 nt, Human
augucucuucugagcua

SEQ ID NO: 3516072 - RNA, 17 nt, Human
augucugaacucuccag

SEQ ID NO: 3516073 - RNA, 14 nt, Human
augucugaacuuug

SEQ ID NO: 3516074 - RNA, 17 nt, Human
augucugaacuuuggga

SEQ ID NO: 3516075 - RNA, 11 nt, Human
augucugcagc

SEQ ID NO: 3516076 - RNA, 13 nt, Human
augucugcagccc

SEQ ID NO: 3516077 - RNA, 20 nt, Human
augucugcagugugcccccc

SEQ ID NO: 3516078 - RNA, 19 nt, Human
augucugcuccuuuccccu

SEQ ID NO: 3516079 - RNA, 14 nt, Human
augucuggagacca

SEQ ID NO: 3516080 - RNA, 12 nt, Human
augucuggggca

SEQ ID NO: 3516081 - RNA, 12 nt, Human
augucuguaaau

SEQ ID NO: 3516082 - RNA, 16 nt, Human
augucuguagcuccuc

SEQ ID NO: 3516083 - RNA, 13 nt, Human
augucugucauug

SEQ ID NO: 3516084 - RNA, 16 nt, Human
augucuguucuacaua

SEQ ID NO: 3516085 - RNA, 23 nt, Human
augucuuaaaaccugcuuuucaa

SEQ ID NO: 3516086 - RNA, 12 nt, Human
augucuuaauga

SEQ ID NO: 3516087 - RNA, 11 nt, Human
augucuuauuu

SEQ ID NO: 3516088 - RNA, 16 nt, Human
augucuuauuuuuaga

SEQ ID NO: 3516089 - RNA, 19 nt, Human
augucuucaaggcuucagu

SEQ ID NO: 3516090 - RNA, 21 nt, Human
augucuucauaccuacaugua

SEQ ID NO: 3516091 - RNA, 22 nt, Human
augucuuccauguaucuuuuga

SEQ ID NO: 3516092 - RNA, 22 nt, Human
augucuucguacaguucuucgg

SEQ ID NO: 3516093 - RNA, 20 nt, Human
augucuucucacaagccagc

SEQ ID NO: 3516094 - RNA, 15 nt, Human
augucuucugccugu

SEQ ID NO: 3516095 - RNA, 20 nt, Human
augucuucuguauucacuua

SEQ ID NO: 3516096 - RNA, 16 nt, Human
augucuugagcucuau

SEQ ID NO: 3516097 - RNA, 19 nt, Human
augucuugcuguugacaua

SEQ ID NO: 3516098 - RNA, 20 nt, Human
augucuuggaacauuggaau

SEQ ID NO: 3516099 - RNA, 13 nt, Human
augucuuggacac

SEQ ID NO: 3516100 - RNA, 19 nt, Human
augucuuggacacuguaca

SEQ ID NO: 3516101 - RNA, 13 nt, Human
augucuugguacu

SEQ ID NO: 3516102 - RNA, 13 nt, Human
augucuuguuaau

SEQ ID NO: 3516103 - RNA, 22 nt, Human
augucuuuaggcagcagcuuuu

SEQ ID NO: 3516104 - RNA, 19 nt, Human
augucuuuccaaauuauuu

SEQ ID NO: 3516105 - RNA, 18 nt, Human
augucuuucuccaaaguu

SEQ ID NO: 3516106 - RNA, 22 nt, Human
augucuuucuccaaaguuaucc

SEQ ID NO: 3516107 - RNA, 17 nt, Human
augucuuugguccucuu

SEQ ID NO: 3516108 - RNA, 15 nt, Human
augucuuuguaaguc

SEQ ID NO: 3516109 - RNA, 22 nt, Human
augucuuuguaagucaguguug

SEQ ID NO: 3516110 - RNA, 18 nt, Human
augucuuuuagaagauag

SEQ ID NO: 3516111 - RNA, 18 nt, Human
augucuuuuauaguggaa

SEQ ID NO: 3516112 - RNA, 19 nt, Human
augucuuuuauaguggaaa

SEQ ID NO: 3516113 - RNA, 21 nt, Human
augucuuuuauauuuguaucg

SEQ ID NO: 3516114 - RNA, 16 nt, Human
augucuuuucccauuu

SEQ ID NO: 3516115 - RNA, 15 nt, Human
augucuuuucuuggc

SEQ ID NO: 3516116 - RNA, 18 nt, Human
augucuuuuuaagcuuau

SEQ ID NO: 3516117 - RNA, 20 nt, Human
augucuuuuuaagcuuauuu

SEQ ID NO: 3516118 - RNA, 23 nt, Human
augucuuuuuaagcuuauuuaau

SEQ ID NO: 3516119 - RNA, 21 nt, Human
augucuuuuuucaaacuuuau

SEQ ID NO: 3516120 - RNA, 19 nt, Human
augucuuuuuuuuaaugug

SEQ ID NO: 3516121 - RNA, 16 nt, Human
augugaaaaucaaaua

SEQ ID NO: 3516122 - RNA, 18 nt, Human
augugaaaaucaaauaca

SEQ ID NO: 3516123 - RNA, 21 nt, Human
augugaaaaugguccaggaga

SEQ ID NO: 3516124 - RNA, 22 nt, Human
augugaaaaugguccaggagaa

SEQ ID NO: 3516125 - RNA, 15 nt, Human
augugaaaccuuuuu

SEQ ID NO: 3516126 - RNA, 22 nt, Human
augugaaaccuuuuuuaagauu

SEQ ID NO: 3516127 - RNA, 23 nt, Human
augugaaaccuuuuuuaagauuu

SEQ ID NO: 3516128 - RNA, 12 nt, Human
augugaaagcac

SEQ ID NO: 3516129 - RNA, 18 nt, Human
augugaaaggauaugaau

SEQ ID NO: 3516130 - RNA, 14 nt, Human
augugaaaucauuc

SEQ ID NO: 3516131 - RNA, 17 nt, Human
augugaaauguaacugu

SEQ ID NO: 3516132 - RNA, 23 nt, Human
augugaacaguuguguuugaagc

SEQ ID NO: 3516133 - RNA, 12 nt, Human
augugaaccauu

SEQ ID NO: 3516134 - RNA, 14 nt, Human
augugaacuagcug

SEQ ID NO: 3516135 - RNA, 19 nt, Human
augugaacuagcuggaauu

SEQ ID NO: 3516136 - RNA, 17 nt, Human
augugaacuuguagcug

SEQ ID NO: 3516137 - RNA, 22 nt, Human
augugaacuuguagcuguaaaa

SEQ ID NO: 3516138 - RNA, 12 nt, Human
augugaagccuu

SEQ ID NO: 3516139 - RNA, 15 nt, Human
augugaagccuuccc

SEQ ID NO: 3516140 - RNA, 13 nt, Human
augugaaguguua

SEQ ID NO: 3516141 - RNA, 20 nt, Human
augugaaguguuaauacuag

SEQ ID NO: 3516142 - RNA, 21 nt, Human
augugaauaaaauuauuuugg

SEQ ID NO: 3516143 - RNA, 21 nt, Human
augugaauuacuaacuucuaa

SEQ ID NO: 3516144 - RNA, 22 nt, Human
augugaauuacuaacuucuaaa

SEQ ID NO: 3516145 - RNA, 20 nt, Human
augugaauuauugacacuga

SEQ ID NO: 3516146 - RNA, 18 nt, Human
augugaauugccugcaga

SEQ ID NO: 3516147 - RNA, 15 nt, Human
augugaauuuuuaag

SEQ ID NO: 3516148 - RNA, 16 nt, Human
augugaauuuuuaagc

SEQ ID NO: 3516149 - RNA, 18 nt, Human
augugaauuuuuauuguu

SEQ ID NO: 3516150 - RNA, 15 nt, Human
augugacaauaauau

SEQ ID NO: 3516151 - RNA, 15 nt, Human
augugacaccaaagc

SEQ ID NO: 3516152 - RNA, 19 nt, Human
augugacaugcgggcuggg

SEQ ID NO: 3516153 - RNA, 18 nt, Human
augugacauuaacaaaua

SEQ ID NO: 3516154 - RNA, 21 nt, Human
augugacauuaacaaauaaaa

SEQ ID NO: 3516155 - RNA, 23 nt, Human
cacuguaguaaauaaugcuuuga

SEQ ID NO: 3516156 - RNA, 17 nt, Human
cacuguaguucuaagac

SEQ ID NO: 3516157 - RNA, 21 nt, Human
cacuguauaaauaggagagga

SEQ ID NO: 3516158 - RNA, 15 nt, Human
cacuguauaccccgu

SEQ ID NO: 3516159 - RNA, 14 nt, Human
cacuguauccaggu

SEQ ID NO: 3516160 - RNA, 22 nt, Human
cacuguaugauuuauaaacaga

SEQ ID NO: 3516161 - RNA, 16 nt, Human
cacuguaugcuggacg

SEQ ID NO: 3516162 - RNA, 16 nt, Human
cacugucacuguuucu

SEQ ID NO: 3516163 - RNA, 18 nt, Human
cacugucacuguuucucu

SEQ ID NO: 3516164 - RNA, 16 nt, Human
cacugucccucaaaug

SEQ ID NO: 3516165 - RNA, 22 nt, Human
cagacuguguaaaaagagagcu

SEQ ID NO: 3516166 - RNA, 23 nt, Human
cagacuguuagaaaauggacacu

SEQ ID NO: 3516167 - RNA, 24 nt, Human
cagacuguuagaaaauggacacug

SEQ ID NO: 3516168 - RNA, 16 nt, Human
cagacuguugucccug

SEQ ID NO: 3516169 - RNA, 18 nt, Human
cagacuuaccaggaagca

SEQ ID NO: 3516170 - RNA, 14 nt, Human
cagacuucacacug

SEQ ID NO: 3516171 - RNA, 15 nt, Human
cagacuucacacugc

SEQ ID NO: 3516172 - RNA, 12 nt, Human
cagacuucccac

SEQ ID NO: 3516173 - RNA, 24 nt, Human
cagacuuccuugagacacggagcc

SEQ ID NO: 3516174 - RNA, 20 nt, Human
cagacuucuccagacccacc

SEQ ID NO: 3516175 - RNA, 21 nt, Human
cagacuugccaugugacucug

SEQ ID NO: 3516176 - RNA, 14 nt, Human
cagacuuggcucag

SEQ ID NO: 3516177 - RNA, 17 nt, Human
cagacuuguauauucua

SEQ ID NO: 3516178 - RNA, 20 nt, Human
cagacuuuacaugacacagc

SEQ ID NO: 3516179 - RNA, 16 nt, Human
cagacuuuuguacauc

SEQ ID NO: 3516180 - RNA, 21 nt, Human
cagacuuuuuuaaacaucaaa

SEQ ID NO: 3516181 - RNA, 20 nt, Human
cagacuuuuuuuaaauagua

SEQ ID NO: 3516182 - RNA, 14 nt, Human
cagagaaaccagcu

SEQ ID NO: 3516183 - RNA, 16 nt, Human
cagagaaaccagcuuc

SEQ ID NO: 3516184 - RNA, 18 nt, Human
cagagaaaccagcuuccu

SEQ ID NO: 3516185 - RNA, 22 nt, Human
cagagaaaccagcuuccuucag

SEQ ID NO: 3516186 - RNA, 23 nt, Human
cagagaaaccagcuuccuucaga

SEQ ID NO: 3516187 - RNA, 20 nt, Human
cagagaaagaagagacagga

SEQ ID NO: 3516188 - RNA, 17 nt, Human
cagagaaagcgcagaug

SEQ ID NO: 3516189 - RNA, 18 nt, Human
cagagaaaggggagccca

SEQ ID NO: 3516190 - RNA, 19 nt, Human
cagagaaaggggagcccac

SEQ ID NO: 3516191 - RNA, 20 nt, Human
cagagaaaucuaagcugugu

SEQ ID NO: 3516192 - RNA, 11 nt, Human
cagagaacagc

SEQ ID NO: 3516193 - RNA, 24 nt, Human
cagagaacagcgaaguagcuugcu

SEQ ID NO: 3516194 - RNA, 22 nt, Human
cagagaacccagcccacccccg

SEQ ID NO: 3516195 - RNA, 19 nt, Human
cagagaagaaagaacggaa

SEQ ID NO: 3516196 - RNA, 21 nt, Human
cagagaagauucuuguauuua

SEQ ID NO: 3516197 - RNA, 18 nt, Human
cagagaagccagcuuguu

SEQ ID NO: 3516198 - RNA, 14 nt, Human
cagagaagccauca

SEQ ID NO: 3516199 - RNA, 19 nt, Human
cagagaagccaucaccuca

SEQ ID NO: 3516200 - RNA, 21 nt, Human
cagagaagccaucaccucaga

SEQ ID NO: 3516201 - RNA, 22 nt, Human
cagagaagccaucaccucagau

SEQ ID NO: 3516202 - RNA, 13 nt, Human
cagagaagccuuc

SEQ ID NO: 3516203 - RNA, 21 nt, Human
cagagaagcuggggaggagcu

SEQ ID NO: 3516204 - RNA, 15 nt, Human
cagagaaggcagcag

SEQ ID NO: 3516205 - RNA, 13 nt, Human
cagagaaggcagg

SEQ ID NO: 3516206 - RNA, 18 nt, Human
cagagaaggccaggggcu

SEQ ID NO: 3516207 - RNA, 18 nt, Human
cagagaagggcauaaaac

SEQ ID NO: 3516208 - RNA, 19 nt, Human
cagagaagucacagggcag

SEQ ID NO: 3516209 - RNA, 16 nt, Human
cagagaagugacaggg

SEQ ID NO: 3516210 - RNA, 21 nt, Human
cagagaagugacagggaagcu

SEQ ID NO: 3516211 - RNA, 20 nt, Human
cagagaagugacgguuccua

SEQ ID NO: 3516212 - RNA, 19 nt, Human
cagagaauauaacaugaaa

SEQ ID NO: 3516213 - RNA, 20 nt, Human
cagagaaugaaagggcccag

SEQ ID NO: 3516214 - RNA, 21 nt, Human
cagagaauugcugauucuuga

SEQ ID NO: 3516215 - RNA, 23 nt, Human
cagagaauuucuaccauuucaga

SEQ ID NO: 3516216 - RNA, 12 nt, Human
cagagacaaaau

SEQ ID NO: 3516217 - RNA, 13 nt, Human
cagagacaaggag

SEQ ID NO: 3516218 - RNA, 14 nt, Human
cagagacacaagcc

SEQ ID NO: 3516219 - RNA, 14 nt, Human
cagagacaccugca

SEQ ID NO: 3516220 - RNA, 16 nt, Human
auuaaggcaacugaac

SEQ ID NO: 3516221 - RNA, 17 nt, Human
auuaaggucucucuuug

SEQ ID NO: 3516222 - RNA, 18 nt, Human
auuaaguaaacuaaugag

SEQ ID NO: 3516223 - RNA, 15 nt, Human
auuaaguaacuuauu

SEQ ID NO: 3516224 - RNA, 15 nt, Human
auuaaguaaucaaua

SEQ ID NO: 3516225 - RNA, 20 nt, Human
auuaaguucucaaugugaaa

SEQ ID NO: 3516226 - RNA, 13 nt, Human
auuaaguucuuua

SEQ ID NO: 3516227 - RNA, 20 nt, Human
auuaaguuguuaauaaaagu

SEQ ID NO: 3516228 - RNA, 16 nt, Human
auuaauaaaaaaugga

SEQ ID NO: 3516229 - RNA, 22 nt, Human
auuaauaaaaaauggaaagaau

SEQ ID NO: 3516230 - RNA, 13 nt, Human
auuaauaaaaaga

SEQ ID NO: 3516231 - RNA, 13 nt, Human
auuaauaaauaga

SEQ ID NO: 3516232 - RNA, 20 nt, Human
auuaauacaaugaugcuauu

SEQ ID NO: 3516233 - RNA, 16 nt, Human
auuaauacuaaaauau

SEQ ID NO: 3516234 - RNA, 20 nt, Human
auuaauacuaaaauaugucu

SEQ ID NO: 3516235 - RNA, 19 nt, Human
auuaauagcuuuuauugua

SEQ ID NO: 3516236 - RNA, 18 nt, Human
auuaauaguaauuuguaa

SEQ ID NO: 3516237 - RNA, 17 nt, Human
auuaauauauauuaucu

SEQ ID NO: 3516238 - RNA, 21 nt, Human
auuaauauauguauuauuuau

SEQ ID NO: 3516239 - RNA, 22 nt, Human
auuaauauauguauuauuuaua

SEQ ID NO: 3516240 - RNA, 15 nt, Human
auuaauaugaaaacu

SEQ ID NO: 3516241 - RNA, 16 nt, Human
auuaauauucauugua

SEQ ID NO: 3516242 - RNA, 13 nt, Human
auuaaucacuauu

SEQ ID NO: 3516243 - RNA, 14 nt, Human
auuaaucacugugu

SEQ ID NO: 3516244 - RNA, 19 nt, Human
auuaaucaucuauaaagaa

SEQ ID NO: 3516245 - RNA, 17 nt, Human
auuaaucuuaguguaug

SEQ ID NO: 3516246 - RNA, 19 nt, Human
auuaaucuuaguguaugau

SEQ ID NO: 3516247 - RNA, 21 nt, Human
auuaaucuuggauagcuaaua

SEQ ID NO: 3516248 - RNA, 17 nt, Human
auuaaugaaaauaagaa

SEQ ID NO: 3516249 - RNA, 15 nt, Human
auuaaugaaauaucu

SEQ ID NO: 3516250 - RNA, 19 nt, Human
auuaaugaaauaucuguau

SEQ ID NO: 3516251 - RNA, 16 nt, Human
auuaaugacagagcca

SEQ ID NO: 3516252 - RNA, 16 nt, Human
auuaaugcacuuucua

SEQ ID NO: 3516253 - RNA, 14 nt, Human
auuaaugcccagac

SEQ ID NO: 3516254 - RNA, 17 nt, Human
auuaaugccugcuuuuu

SEQ ID NO: 3516255 - RNA, 22 nt, Human
auuaaugccugcuuuuuggaaa

SEQ ID NO: 3516256 - RNA, 23 nt, Human
auuaaugcuaagggcaggcccaa

SEQ ID NO: 3516257 - RNA, 13 nt, Human
auuaaugcuuugg

SEQ ID NO: 3516258 - RNA, 23 nt, Human
auuaauguacuuguuucucuguu

SEQ ID NO: 3516259 - RNA, 21 nt, Human
auuaauguauccaaugaaaua

SEQ ID NO: 3516260 - RNA, 12 nt, Human
auuaauguuaau

SEQ ID NO: 3516261 - RNA, 14 nt, Human
auuaauguugauuu

SEQ ID NO: 3516262 - RNA, 17 nt, Human
auuaauguugauuucua

SEQ ID NO: 3516263 - RNA, 17 nt, Human
auuaauguuuucaaaag

SEQ ID NO: 3516264 - RNA, 18 nt, Human
auuaauuccuguuugucu

SEQ ID NO: 3516265 - RNA, 19 nt, Human
auuaauuggcagcagauuu

SEQ ID NO: 3516266 - RNA, 19 nt, Human
auuaauugggccagcuuuu

SEQ ID NO: 3516267 - RNA, 22 nt, Human
auuaauugggccagcuuuucaa

SEQ ID NO: 3516268 - RNA, 13 nt, Human
auuaauuguaauc

SEQ ID NO: 3516269 - RNA, 20 nt, Human
auuaauuguaaucugaauaa

SEQ ID NO: 3516270 - RNA, 14 nt, Human
auuaauugugugaa

SEQ ID NO: 3516271 - RNA, 16 nt, Human
auuaauugugugaacu

SEQ ID NO: 3516272 - RNA, 21 nt, Human
auuaauugugugaacuuggaa

SEQ ID NO: 3516273 - RNA, 19 nt, Human
auuaauuguuuugcacuuu

SEQ ID NO: 3516274 - RNA, 20 nt, Human
auuaauuguuuugcacuuuu

SEQ ID NO: 3516275 - RNA, 14 nt, Human
auuaauuuaaauga

SEQ ID NO: 3516276 - RNA, 19 nt, Human
auuaauuuaucagauugcu

SEQ ID NO: 3516277 - RNA, 13 nt, Human
auuaauuucugcc

SEQ ID NO: 3516278 - RNA, 20 nt, Human
auuaauuucugccauuucau

SEQ ID NO: 3516279 - RNA, 16 nt, Human
auuaauuugauuaaca

SEQ ID NO: 3516280 - RNA, 21 nt, Human
auuaauuugauuaacaaauau

SEQ ID NO: 3516281 - RNA, 17 nt, Human
auuaauuuuuuuucauu

SEQ ID NO: 3516282 - RNA, 10 nt, Human
auuacaaaua

SEQ ID NO: 3516283 - RNA, 14 nt, Human
auuacaaaucagaa

SEQ ID NO: 3516284 - RNA, 23 nt, Human
auuacaaaucagaagucaucuug

SEQ ID NO: 3516285 - RNA, 13 nt, Human
auuacaaaugguu

SEQ ID NO: 3516286 - RNA, 22 nt, Human
auuacaagcgugagccacugca

SEQ ID NO: 3516287 - RNA, 14 nt, Human
auuacaauauuucu

SEQ ID NO: 3516288 - RNA, 13 nt, Human
auuacaauauuug

SEQ ID NO: 3516289 - RNA, 13 nt, Human
auuacaauuuuau

SEQ ID NO: 3516290 - RNA, 17 nt, Human
auuacacaaaacaaaug

SEQ ID NO: 3516291 - RNA, 18 nt, Human
auuacacaaaacaaaugc

SEQ ID NO: 3516292 - RNA, 18 nt, Human
auuacacaaauacuuauu

SEQ ID NO: 3516293 - RNA, 14 nt, Human
auuacacccaaaga

SEQ ID NO: 3516294 - RNA, 19 nt, Human
auuacacuugguaauugua

SEQ ID NO: 3516295 - RNA, 17 nt, Human
auuacagagaggagaaa

SEQ ID NO: 3516296 - RNA, 21 nt, Human
auuacagagaggagaaacaca

SEQ ID NO: 3516297 - RNA, 15 nt, Human
auuacagaggaaguu

SEQ ID NO: 3516298 - RNA, 22 nt, Human
auuacagauaaaauguaaacug

SEQ ID NO: 3516299 - RNA, 21 nt, Human
auuacagaugggcaaauuaag

SEQ ID NO: 3516300 - RNA, 17 nt, Human
auuacaggcuccugcca

SEQ ID NO: 3516301 - RNA, 15 nt, Human
auuacaggcuugagc

SEQ ID NO: 3516302 - RNA, 19 nt, Human
auuacaguggggaaugaag

SEQ ID NO: 3516303 - RNA, 21 nt, Human
auuacaguggggaaugaagau

SEQ ID NO: 3516304 - RNA, 18 nt, Human
auuacauaaucuguacaa

SEQ ID NO: 3516305 - RNA, 18 nt, Human
auuacauccuuguggcac

SEQ ID NO: 3516306 - RNA, 16 nt, Human
auuacaucuuucacau

SEQ ID NO: 3516307 - RNA, 17 nt, Human
auuacaucuuucacauu

SEQ ID NO: 3516308 - RNA, 17 nt, Human
auuacauuccuugauaa

SEQ ID NO: 3516309 - RNA, 20 nt, Human
cacugugggugugugacucu

SEQ ID NO: 3516310 - RNA, 18 nt, Human
cacugugguaaaugccac

SEQ ID NO: 3516311 - RNA, 20 nt, Human
cacugugguaaaugccacac

SEQ ID NO: 3516312 - RNA, 12 nt, Human
cacuguguaagc

SEQ ID NO: 3516313 - RNA, 14 nt, Human
cacuguguauauuu

SEQ ID NO: 3516314 - RNA, 15 nt, Human
cacuguguauauuug

SEQ ID NO: 3516315 - RNA, 14 nt, Human
cacuguguauuguu

SEQ ID NO: 3516316 - RNA, 15 nt, Human
cacuguguauuuaac

SEQ ID NO: 3516317 - RNA, 13 nt, Human
cacuguuagaaca

SEQ ID NO: 3516318 - RNA, 14 nt, Human
cacuguuagaacac

SEQ ID NO: 3516319 - RNA, 15 nt, Human
cacuguuagaacacu

SEQ ID NO: 3516320 - RNA, 17 nt, Human
cacuguuagaacacuau

SEQ ID NO: 3516321 - RNA, 18 nt, Human
cacuguuagaacacuauu

SEQ ID NO: 3516322 - RNA, 19 nt, Human
cacuguuagaacacuauuu

SEQ ID NO: 3516323 - RNA, 20 nt, Human
cacuguuagaacacuauuuu

SEQ ID NO: 3516324 - RNA, 21 nt, Human
cacuguuagaacacuauuuuc

SEQ ID NO: 3516325 - RNA, 23 nt, Human
cacuguuagcuuuuuaaaacauu

SEQ ID NO: 3516326 - RNA, 19 nt, Human
cacuguucaugcuggcgag

SEQ ID NO: 3516327 - RNA, 20 nt, Human
cacuguuccagccugcccuc

SEQ ID NO: 3516328 - RNA, 21 nt, Human
cacuguuccagugucuauaaa

SEQ ID NO: 3516329 - RNA, 17 nt, Human
cacuguucccccugugc

SEQ ID NO: 3516330 - RNA, 19 nt, Human
cacuguucccccugugcag

SEQ ID NO: 3516331 - RNA, 16 nt, Human
cacuguucccucugcu

SEQ ID NO: 3516332 - RNA, 17 nt, Human
cacuguucccucugcuc

SEQ ID NO: 3516333 - RNA, 15 nt, Human
cacuguucucugccc

SEQ ID NO: 3516334 - RNA, 16 nt, Human
cacuguucucugcccu

SEQ ID NO: 3516335 - RNA, 17 nt, Human
cacuguucucugcccuc

SEQ ID NO: 3516336 - RNA, 21 nt, Human
cacuguucucugcccuccaag

SEQ ID NO: 3516337 - RNA, 21 nt, Human
cacuguucuuagcucaaugag

SEQ ID NO: 3516338 - RNA, 23 nt, Human
cacuguucuuagcucaaugagca

SEQ ID NO: 3516339 - RNA, 17 nt, Human
cacuguugaaaauuauu

SEQ ID NO: 3516340 - RNA, 17 nt, Human
cacuguugaauuuucuc

SEQ ID NO: 3516341 - RNA, 17 nt, Human
cacuguugauaaaaacu

SEQ ID NO: 3516342 - RNA, 17 nt, Human
cacuguugauguaucug

SEQ ID NO: 3516343 - RNA, 14 nt, Human
cacuguugcccagg

SEQ ID NO: 3516344 - RNA, 16 nt, Human
cacuguugcccaggcu

SEQ ID NO: 3516345 - RNA, 17 nt, Human
cacuguuuacaagaaaa

SEQ ID NO: 3516346 - RNA, 18 nt, Human
cacuguuuacaagaaaaa

SEQ ID NO: 3516347 - RNA, 15 nt, Human
cacuguuuagauuug

SEQ ID NO: 3516348 - RNA, 21 nt, Human
cacuguuucacuacucagcau

SEQ ID NO: 3516349 - RNA, 14 nt, Human
cacuguuuccuggg

SEQ ID NO: 3516350 - RNA, 15 nt, Human
cacuguuuccugggc

SEQ ID NO: 3516351 - RNA, 14 nt, Human
cacuguuucucugc

SEQ ID NO: 3516352 - RNA, 22 nt, Human
cacuguuucucuugagcuggcc

SEQ ID NO: 3516353 - RNA, 18 nt, Human
cacuguuucuugcuugua

SEQ ID NO: 3516354 - RNA, 15 nt, Human
cacuguuuguuuuua

SEQ ID NO: 3516355 - RNA, 18 nt, Human
cacuguuuguuuuuauuu

SEQ ID NO: 3516356 - RNA, 17 nt, Human
cacuguuuucuagugua

SEQ ID NO: 3516357 - RNA, 22 nt, Human
cacuguuuugaaucucauaauu

SEQ ID NO: 3516358 - RNA, 14 nt, Human
cacuguuuuuagac

SEQ ID NO: 3516359 - RNA, 20 nt, Human
cacuguuuuuagacaccuuc

SEQ ID NO: 3516360 - RNA, 14 nt, Human
cacuguuuuuccau

SEQ ID NO: 3516361 - RNA, 15 nt, Human
cacuguuuuuccaua

SEQ ID NO: 3516362 - RNA, 14 nt, Human
cacuuaaaaaaugu

SEQ ID NO: 3516363 - RNA, 16 nt, Human
cacuuaaaacacguuu

SEQ ID NO: 3516364 - RNA, 22 nt, Human
cacuuaaaacacguuuuaagga

SEQ ID NO: 3516365 - RNA, 15 nt, Human
cacuuaaacuugcau

SEQ ID NO: 3516366 - RNA, 23 nt, Human
cacuuaaauaucaaucauuuucc

SEQ ID NO: 3516367 - RNA, 18 nt, Human
cacuuaacaaacaaauuu

SEQ ID NO: 3516368 - RNA, 22 nt, Human
cacuuaacaagcucccaggccg

SEQ ID NO: 3516369 - RNA, 13 nt, Human
cacuuaacagaug

SEQ ID NO: 3516370 - RNA, 21 nt, Human
cacuuaacauuccuaaaaugc

SEQ ID NO: 3516371 - RNA, 21 nt, Human
cacuuaagacuguguauucua

SEQ ID NO: 3516372 - RNA, 20 nt, Human
cacuuaagagaauauuuuaa

SEQ ID NO: 3516373 - RNA, 21 nt, Human
cacuuaaguuagccuccacca

SEQ ID NO: 3516374 - RNA, 18 nt, Human
auuacuuguaaauauaaa

SEQ ID NO: 3516375 - RNA, 21 nt, Human
auuacuuguaaauauaaagac

SEQ ID NO: 3516376 - RNA, 17 nt, Human
auuacuuguugccuaua

SEQ ID NO: 3516377 - RNA, 11 nt, Human
auuacuuuauc

SEQ ID NO: 3516378 - RNA, 15 nt, Human
auuacuuuaucacuu

SEQ ID NO: 3516379 - RNA, 16 nt, Human
auuacuuuaucacuuu

SEQ ID NO: 3516380 - RNA, 21 nt, Human
auuacuuuuccacaaaucagu

SEQ ID NO: 3516381 - RNA, 22 nt, Human
auuagaaaaaaauuacuaauuu

SEQ ID NO: 3516382 - RNA, 17 nt, Human
auuagaaaaauuccuaa

SEQ ID NO: 3516383 - RNA, 13 nt, Human
auuagaaaauauu

SEQ ID NO: 3516384 - RNA, 17 nt, Human
auuagaaacauaaauaa

SEQ ID NO: 3516385 - RNA, 22 nt, Human
auuagaaauagacaguauauuu

SEQ ID NO: 3516386 - RNA, 12 nt, Human
auuagaaauauu

SEQ ID NO: 3516387 - RNA, 14 nt, Human
auuagaaauauuuu

SEQ ID NO: 3516388 - RNA, 21 nt, Human
auuagaagauauuagucuugg

SEQ ID NO: 3516389 - RNA, 18 nt, Human
auuagaaguguuaacuua

SEQ ID NO: 3516390 - RNA, 20 nt, Human
auuagaaguguuaacuuagc

SEQ ID NO: 3516391 - RNA, 21 nt, Human
auuagaaucaaacauuuugaa

SEQ ID NO: 3516392 - RNA, 19 nt, Human
auuagaauuaccauuuguu

SEQ ID NO: 3516393 - RNA, 14 nt, Human
auuagaauuauuua

SEQ ID NO: 3516394 - RNA, 15 nt, Human
auuagacuccuccuc

SEQ ID NO: 3516395 - RNA, 16 nt, Human
auuagacuccuccucc

SEQ ID NO: 3516396 - RNA, 15 nt, Human
auuagacuggacagc

SEQ ID NO: 3516397 - RNA, 20 nt, Human
auuagacuggacagcuugug

SEQ ID NO: 3516398 - RNA, 15 nt, Human
auuagacuucuguuu

SEQ ID NO: 3516399 - RNA, 20 nt, Human
auuagacuucuguuuucaau

SEQ ID NO: 3516400 - RNA, 20 nt, Human
auuagacuuuagaaauaaau

SEQ ID NO: 3516401 - RNA, 15 nt, Human
auuagagaacauccu

SEQ ID NO: 3516402 - RNA, 19 nt, Human
auuagagaguguugaaacg

SEQ ID NO: 3516403 - RNA, 20 nt, Human
auuagagauuaccuccugag

SEQ ID NO: 3516404 - RNA, 16 nt, Human
auuagaggggaaaagc

SEQ ID NO: 3516405 - RNA, 11 nt, Human
auuagaugaau

SEQ ID NO: 3516406 - RNA, 14 nt, Human
auuagaugcauguu

SEQ ID NO: 3516407 - RNA, 20 nt, Human
auuagaugcauguugaccau

SEQ ID NO: 3516408 - RNA, 14 nt, Human
auuagaugugauuu

SEQ ID NO: 3516409 - RNA, 13 nt, Human
auuagauguucuc

SEQ ID NO: 3516410 - RNA, 21 nt, Human
auuagauguucucuaucauuu

SEQ ID NO: 3516411 - RNA, 14 nt, Human
auuagauuauauug

SEQ ID NO: 3516412 - RNA, 16 nt, Human
auuagcaaaaaaaguu

SEQ ID NO: 3516413 - RNA, 18 nt, Human
auuagcaaaaaaaguugu

SEQ ID NO: 3516414 - RNA, 19 nt, Human
auuagcaaaaaaaguugua

SEQ ID NO: 3516415 - RNA, 21 nt, Human
auuagcaaaaaaaguuguaug

SEQ ID NO: 3516416 - RNA, 14 nt, Human
auuagcauuuaguc

SEQ ID NO: 3516417 - RNA, 22 nt, Human
auuagccaggaucaugguguaa

SEQ ID NO: 3516418 - RNA, 14 nt, Human
auuagccaguaauc

SEQ ID NO: 3516419 - RNA, 16 nt, Human
auuagccaguaauccu

SEQ ID NO: 3516420 - RNA, 18 nt, Human
auuagccgggcauggugg

SEQ ID NO: 3516421 - RNA, 14 nt, Human
auuagccugaguag

SEQ ID NO: 3516422 - RNA, 17 nt, Human
auuagccugaguagaaa

SEQ ID NO: 3516423 - RNA, 12 nt, Human
auuagcugcuuc

SEQ ID NO: 3516424 - RNA, 21 nt, Human
auuagcugcuucuauguuuca

SEQ ID NO: 3516425 - RNA, 15 nt, Human
auuagcugugauuuu

SEQ ID NO: 3516426 - RNA, 17 nt, Human
auuagcuuggggccagg

SEQ ID NO: 3516427 - RNA, 18 nt, Human
auuagcuuggggccaggg

SEQ ID NO: 3516428 - RNA, 20 nt, Human
auuagcuuuacuguuuguua

SEQ ID NO: 3516429 - RNA, 13 nt, Human
auuagcuuugugu

SEQ ID NO: 3516430 - RNA, 22 nt, Human
auuaggaaguguaacagcugag

SEQ ID NO: 3516431 - RNA, 16 nt, Human
auuaggaauaaauaaa

SEQ ID NO: 3516432 - RNA, 14 nt, Human
auuaggauuucaug

SEQ ID NO: 3516433 - RNA, 21 nt, Human
auuaggcagacucuuuaugcu

SEQ ID NO: 3516434 - RNA, 16 nt, Human
auuaggcaugguuuug

SEQ ID NO: 3516435 - RNA, 14 nt, Human
auuaggcuguaacu

SEQ ID NO: 3516436 - RNA, 15 nt, Human
auuaggcuguaacua

SEQ ID NO: 3516437 - RNA, 17 nt, Human
auuaggcuguaacuacu

SEQ ID NO: 3516438 - RNA, 21 nt, Human
auuaggcuguaacuacuuuau

SEQ ID NO: 3516439 - RNA, 16 nt, Human
auuagggagagaagau

SEQ ID NO: 3516440 - RNA, 19 nt, Human
auuagggcauuugagaaau

SEQ ID NO: 3516441 - RNA, 15 nt, Human
auuagggcccugugu

SEQ ID NO: 3516442 - RNA, 18 nt, Human
auuaggugugacugaauu

SEQ ID NO: 3516443 - RNA, 15 nt, Human
auuagguuaacuaug

SEQ ID NO: 3516444 - RNA, 13 nt, Human
auuagguugugaa

SEQ ID NO: 3516445 - RNA, 15 nt, Human
auuagguugugaaug

SEQ ID NO: 3516446 - RNA, 13 nt, Human
auuaguaaauguc

SEQ ID NO: 3516447 - RNA, 17 nt, Human
auuaguaaaugucuuug

SEQ ID NO: 3516448 - RNA, 13 nt, Human
auuaguaacaugu

SEQ ID NO: 3516449 - RNA, 12 nt, Human
auuaguaagauc

SEQ ID NO: 3516450 - RNA, 21 nt, Human
auuaguaagaucucuuucuaa

SEQ ID NO: 3516451 - RNA, 20 nt, Human
auuaguacuccccuccuuga

SEQ ID NO: 3516452 - RNA, 13 nt, Human
auuaguauuguug

SEQ ID NO: 3516453 - RNA, 13 nt, Human
auuagucccuggc

SEQ ID NO: 3516454 - RNA, 23 nt, Human
cagacaagcaacagguuuuauaa

SEQ ID NO: 3516455 - RNA, 17 nt, Human
cagacaauaugugagug

SEQ ID NO: 3516456 - RNA, 14 nt, Human
cagacaaucuucug

SEQ ID NO: 3516457 - RNA, 13 nt, Human
cagacacaaacaa

SEQ ID NO: 3516458 - RNA, 17 nt, Human
cagacacacacacgcac

SEQ ID NO: 3516459 - RNA, 20 nt, Human
cagacacagggacuugaagu

SEQ ID NO: 3516460 - RNA, 21 nt, Human
cagacacagggacuugaaguu

SEQ ID NO: 3516461 - RNA, 22 nt, Human
cagacacagggacuugaaguug

SEQ ID NO: 3516462 - RNA, 12 nt, Human
cagacacccagg

SEQ ID NO: 3516463 - RNA, 13 nt, Human
cagacacccagga

SEQ ID NO: 3516464 - RNA, 15 nt, Human
cagacacccaggacu

SEQ ID NO: 3516465 - RNA, 17 nt, Human
cagacaccuugacaggg

SEQ ID NO: 3516466 - RNA, 18 nt, Human
cagacaccuuggacaucc

SEQ ID NO: 3516467 - RNA, 18 nt, Human
cagacacgccuuccccuc

SEQ ID NO: 3516468 - RNA, 11 nt, Human
cagacacuaag

SEQ ID NO: 3516469 - RNA, 13 nt, Human
cagacacucuggc

SEQ ID NO: 3516470 - RNA, 22 nt, Human
cagacacugguuugaagaaugu

SEQ ID NO: 3516471 - RNA, 15 nt, Human
cagacacuuuggaag

SEQ ID NO: 3516472 - RNA, 15 nt, Human
cagacagaacuugaa

SEQ ID NO: 3516473 - RNA, 18 nt, Human
cagacagaagucuccuca

SEQ ID NO: 3516474 - RNA, 16 nt, Human
cagacagacacacaca

SEQ ID NO: 3516475 - RNA, 14 nt, Human
cagacagagccagg

SEQ ID NO: 3516476 - RNA, 17 nt, Human
cagacagagccaggaga

SEQ ID NO: 3516477 - RNA, 14 nt, Human
cagacagagcccug

SEQ ID NO: 3516478 - RNA, 16 nt, Human
cagacagcagcucagg

SEQ ID NO: 3516479 - RNA, 18 nt, Human
cagacagcagcucaggca

SEQ ID NO: 3516480 - RNA, 19 nt, Human
cagacagcagcucaggcac

SEQ ID NO: 3516481 - RNA, 19 nt, Human
cagacagcaggcagcgcca

SEQ ID NO: 3516482 - RNA, 14 nt, Human
cagacagcccucca

SEQ ID NO: 3516483 - RNA, 13 nt, Human
cagacagccugua

SEQ ID NO: 3516484 - RNA, 21 nt, Human
cagacagcuccacccuggccg

SEQ ID NO: 3516485 - RNA, 12 nt, Human
cagacagcuccc

SEQ ID NO: 3516486 - RNA, 18 nt, Human
cagacagcugccugggau

SEQ ID NO: 3516487 - RNA, 15 nt, Human
cagacaggaaaggga

SEQ ID NO: 3516488 - RNA, 20 nt, Human
cagacaggaaagggaaggcc

SEQ ID NO: 3516489 - RNA, 23 nt, Human
cagacaggaaagggaaggcccca

SEQ ID NO: 3516490 - RNA, 13 nt, Human
cagacaggaccag

SEQ ID NO: 3516491 - RNA, 17 nt, Human
cagacaggaccagggau

SEQ ID NO: 3516492 - RNA, 18 nt, Human
cagacaggcaaauaaaag

SEQ ID NO: 3516493 - RNA, 22 nt, Human
cagacaggcucuuagcagcuuc

SEQ ID NO: 3516494 - RNA, 16 nt, Human
cagacaggucccuccc

SEQ ID NO: 3516495 - RNA, 18 nt, Human
cagacagguuuucacaua

SEQ ID NO: 3516496 - RNA, 20 nt, Human
cagacaguuaagagaaauga

SEQ ID NO: 3516497 - RNA, 12 nt, Human
cagacauaaagc

SEQ ID NO: 3516498 - RNA, 22 nt, Human
cagacauaaagccauguuuccu

SEQ ID NO: 3516499 - RNA, 15 nt, Human
cagacauaaaggaaa

SEQ ID NO: 3516500 - RNA, 19 nt, Human
cagacauacgaaacacaaa

SEQ ID NO: 3516501 - RNA, 15 nt, Human
cagacauauuuaacu

SEQ ID NO: 3516502 - RNA, 17 nt, Human
cagacauauuuaacugg

SEQ ID NO: 3516503 - RNA, 15 nt, Human
cagacaucaugaauu

SEQ ID NO: 3516504 - RNA, 17 nt, Human
cagacauccaaacuaaa

SEQ ID NO: 3516505 - RNA, 19 nt, Human
cagacauccauguuuguaa

SEQ ID NO: 3516506 - RNA, 22 nt, Human
cagacauccauguuuguaaaac

SEQ ID NO: 3516507 - RNA, 23 nt, Human
cagacaugguggcaugcaccugc

SEQ ID NO: 3516508 - RNA, 12 nt, Human
cagacauguuuu

SEQ ID NO: 3516509 - RNA, 16 nt, Human
cagacauuaaauaauc

SEQ ID NO: 3516510 - RNA, 13 nt, Human
cagacauucugcc

SEQ ID NO: 3516511 - RNA, 11 nt, Human
cagacauuguc

SEQ ID NO: 3516512 - RNA, 15 nt, Human
cagacauugucagca

SEQ ID NO: 3516513 - RNA, 14 nt, Human
cagacauugugcua

SEQ ID NO: 3516514 - RNA, 15 nt, Human
cagacauuguuuugc

SEQ ID NO: 3516515 - RNA, 20 nt, Human
cagacauuguuuugccaaca

SEQ ID NO: 3516516 - RNA, 23 nt, Human
cagaccaacguuacucagggcuc

SEQ ID NO: 3516517 - RNA, 20 nt, Human
cagaccacaucuuuaucugu

SEQ ID NO: 3516518 - RNA, 15 nt, Human
cagaccacaugcccc

SEQ ID NO: 3516519 - RNA, 19 nt, Human
cagaccaccccgccugccc

SEQ ID NO: 3516520 - RNA, 24 nt, Human
cagaccacgcccguccugccugug

SEQ ID NO: 3516521 - RNA, 15 nt, Human
cagaccagagcucug

SEQ ID NO: 3516522 - RNA, 13 nt, Human
cagaccagcucuu

SEQ ID NO: 3516523 - RNA, 14 nt, Human
cagaccauggacac

SEQ ID NO: 3516524 - RNA, 21 nt, Human
cagaccauuggggcucccagc

SEQ ID NO: 3516525 - RNA, 22 nt, Human
cagaccauuggggcucccagcc

SEQ ID NO: 3516526 - RNA, 17 nt, Human
cagaccauugucucaga

SEQ ID NO: 3516527 - RNA, 14 nt, Human
cagaccccagcggc

SEQ ID NO: 3516528 - RNA, 15 nt, Human
cagaccccagcggcu

SEQ ID NO: 3516529 - RNA, 14 nt, Human
cagacccccacccc

SEQ ID NO: 3516530 - RNA, 20 nt, Human
cagacccccaccccuucccc

SEQ ID NO: 3516531 - RNA, 13 nt, Human
cagacccccagca

SEQ ID NO: 3516532 - RNA, 18 nt, Human
cagacccccagcaacccu

SEQ ID NO: 3516533 - RNA, 15 nt, Human
cagaccccuggcuuu

SEQ ID NO: 3516534 - RNA, 16 nt, Human
cagaccccuuggccag

SEQ ID NO: 3516535 - RNA, 16 nt, Human
cagacccggcugcgug

SEQ ID NO: 3516536 - RNA, 13 nt, Human
cagacccugcccu

SEQ ID NO: 3516537 - RNA, 21 nt, Human
cagacccugcccugugggccc

SEQ ID NO: 3516538 - RNA, 15 nt, Human
cagacccugcccuug

SEQ ID NO: 3516539 - RNA, 14 nt, Human
cagacccuggaggc

SEQ ID NO: 3516540 - RNA, 20 nt, Human
cagaccgcgggcacugccgc

SEQ ID NO: 3516541 - RNA, 19 nt, Human
cagaccgucuuccuccaac

SEQ ID NO: 3516542 - RNA, 15 nt, Human
cagaccuaaugcucc

SEQ ID NO: 3516543 - RNA, 18 nt, Human
cagaccuauuccuccugg

SEQ ID NO: 3516544 - RNA, 19 nt, Human
cagaccuauuccuccuggg

SEQ ID NO: 3516545 - RNA, 16 nt, Human
cagaccuccccagccc

SEQ ID NO: 3516546 - RNA, 12 nt, Human
cagaccucugga

SEQ ID NO: 3516547 - RNA, 17 nt, Human
cagaccugagcucccca

SEQ ID NO: 3516548 - RNA, 13 nt, Human
cagaccugauccu

SEQ ID NO: 3516549 - RNA, 14 nt, Human
cagaccugauccug

SEQ ID NO: 3516550 - RNA, 20 nt, Human
cagaccugcagacgcccaga

SEQ ID NO: 3516551 - RNA, 23 nt, Human
cagaccugcuuuuugaaaugaaa

SEQ ID NO: 3516552 - RNA, 21 nt, Human
cagaccuggaagaacaggccu

SEQ ID NO: 3516553 - RNA, 13 nt, Human
cagaccuggagcc

SEQ ID NO: 3516554 - RNA, 14 nt, Human
cagaccuggagccc

SEQ ID NO: 3516555 - RNA, 19 nt, Human
cagaccuggagccccuggg

SEQ ID NO: 3516556 - RNA, 21 nt, Human
cagaccuggagccccugggug

SEQ ID NO: 3516557 - RNA, 17 nt, Human
cagaccuguccuccugg

SEQ ID NO: 3516558 - RNA, 14 nt, Human
cagacgcccagauu

SEQ ID NO: 3516559 - RNA, 23 nt, Human
cagacgccggggacagaggccug

SEQ ID NO: 3516560 - RNA, 19 nt, Human
cagacgcucauucagcauc

SEQ ID NO: 3516561 - RNA, 18 nt, Human
cagacgcugcugucacaa

SEQ ID NO: 3516562 - RNA, 17 nt, Human
cagacggcacccaccca

SEQ ID NO: 3516563 - RNA, 13 nt, Human
cagacggggcugg

SEQ ID NO: 3516564 - RNA, 19 nt, Human
cagacggggcuggagugug

SEQ ID NO: 3516565 - RNA, 19 nt, Human
cagacgguucaccagccuc

SEQ ID NO: 3516566 - RNA, 20 nt, Human
cagacguaugcuuauuuuaa

SEQ ID NO: 3516567 - RNA, 14 nt, Human
cagacuaagccagc

SEQ ID NO: 3516568 - RNA, 18 nt, Human
cagacuaagccagcaccg

SEQ ID NO: 3516569 - RNA, 16 nt, Human
cagacuacacaggaug

SEQ ID NO: 3516570 - RNA, 12 nt, Human
cagacuacagcu

SEQ ID NO: 3516571 - RNA, 15 nt, Human
cagacuacuauuuuc

SEQ ID NO: 3516572 - RNA, 19 nt, Human
cagacuacuauuuucuuuu

SEQ ID NO: 3516573 - RNA, 23 nt, Human
cagacuagaauucuagugcugcu

SEQ ID NO: 3516574 - RNA, 22 nt, Human
cagacuagauggaccugccugc

SEQ ID NO: 3516575 - RNA, 21 nt, Human
cagacuaggauaauguccaac

SEQ ID NO: 3516576 - RNA, 18 nt, Human
cagacuauuuaacuugag

SEQ ID NO: 3516577 - RNA, 22 nt, Human
cagacucaaaugcucagaccag

SEQ ID NO: 3516578 - RNA, 15 nt, Human
cagacucagcucuga

SEQ ID NO: 3516579 - RNA, 16 nt, Human
cagacucaguuuguca

SEQ ID NO: 3516580 - RNA, 16 nt, Human
cagacucauacagaag

SEQ ID NO: 3516581 - RNA, 17 nt, Human
cagacucccauuccuga

SEQ ID NO: 3516582 - RNA, 18 nt, Human
cagacucccauuccugaa

SEQ ID NO: 3516583 - RNA, 19 nt, Human
cagacucccauuccugaag

SEQ ID NO: 3516584 - RNA, 13 nt, Human
cagauuccuuccc

SEQ ID NO: 3516585 - RNA, 19 nt, Human
cagauucguggucuuuucc

SEQ ID NO: 3516586 - RNA, 15 nt, Human
cagauucuugcaucc

SEQ ID NO: 3516587 - RNA, 14 nt, Human
cagauucuuuccug

SEQ ID NO: 3516588 - RNA, 18 nt, Human
cagauucuuuccugaggc

SEQ ID NO: 3516589 - RNA, 20 nt, Human
cagauucuuuccugaggcug

SEQ ID NO: 3516590 - RNA, 12 nt, Human
cagauugaaaag

SEQ ID NO: 3516591 - RNA, 13 nt, Human
cagauugaacuua

SEQ ID NO: 3516592 - RNA, 17 nt, Human
cagauugcaacaggcug

SEQ ID NO: 3516593 - RNA, 18 nt, Human
cagauugcaacaggcugg

SEQ ID NO: 3516594 - RNA, 12 nt, Human
cagauugcaugu

SEQ ID NO: 3516595 - RNA, 15 nt, Human
cagauugcaugugac

SEQ ID NO: 3516596 - RNA, 20 nt, Human
cagauugcaugugacucuga

SEQ ID NO: 3516597 - RNA, 12 nt, Human
cagauugcuuuu

SEQ ID NO: 3516598 - RNA, 12 nt, Human
cagauuggauuu

SEQ ID NO: 3516599 - RNA, 21 nt, Human
cagauuggauuuuauguugac

SEQ ID NO: 3516600 - RNA, 20 nt, Human
cagcaccuacaguguacagu

SEQ ID NO: 3516601 - RNA, 14 nt, Human
cagcaccuccaggc

SEQ ID NO: 3516602 - RNA, 16 nt, Human
cagcaccuccucagcc

SEQ ID NO: 3516603 - RNA, 19 nt, Human
cagcaccugccuccucguu

SEQ ID NO: 3516604 - RNA, 15 nt, Human
cagcaccuugugccu

SEQ ID NO: 3516605 - RNA, 20 nt, Human
cagcaccuugugccuggggu

SEQ ID NO: 3516606 - RNA, 14 nt, Human
cagcacgauuucug

SEQ ID NO: 3516607 - RNA, 20 nt, Human
cagcacgauuucuguuuaga

SEQ ID NO: 3516608 - RNA, 15 nt, Human
cagcacggacaauaa

SEQ ID NO: 3516609 - RNA, 17 nt, Human
cagcacguguggccugu

SEQ ID NO: 3516610 - RNA, 20 nt, Human
cagcacuaaagcaguggaca

SEQ ID NO: 3516611 - RNA, 10 nt, Human
cagcacuaac

SEQ ID NO: 3516612 - RNA, 17 nt, Human
cagcacugccugcuccc

SEQ ID NO: 3516613 - RNA, 23 nt, Human
cagcacugccugcucccauccug

SEQ ID NO: 3516614 - RNA, 18 nt, Human
cagcacugcuugaggaaa

SEQ ID NO: 3516615 - RNA, 17 nt, Human
cagcacuggcucucucc

SEQ ID NO: 3516616 - RNA, 19 nt, Human
cagcacuggcucucuccag

SEQ ID NO: 3516617 - RNA, 16 nt, Human
cagcacugucccuugc

SEQ ID NO: 3516618 - RNA, 14 nt, Human
cagcacugucucag

SEQ ID NO: 3516619 - RNA, 13 nt, Human
cagcacuuauuua

SEQ ID NO: 3516620 - RNA, 19 nt, Human
cagcacuuggagaggcuga

SEQ ID NO: 3516621 - RNA, 15 nt, Human
cagcacuuggcccuu

SEQ ID NO: 3516622 - RNA, 19 nt, Human
cagcacuuggcccuucuac

SEQ ID NO: 3516623 - RNA, 15 nt, Human
cagcacuuguccagc

SEQ ID NO: 3516624 - RNA, 14 nt, Human
cagcacuugucuca

SEQ ID NO: 3516625 - RNA, 22 nt, Human
cagcacuuuagaauaugccuug

SEQ ID NO: 3516626 - RNA, 20 nt, Human
cagcacuuugggagaccaag

SEQ ID NO: 3516627 - RNA, 18 nt, Human
cagcacuuugggaggccg

SEQ ID NO: 3516628 - RNA, 19 nt, Human
cagcacuuugggaggcuga

SEQ ID NO: 3516629 - RNA, 13 nt, Human
cagcagaaggauu

SEQ ID NO: 3516630 - RNA, 13 nt, Human
cagcagaaggggg

SEQ ID NO: 3516631 - RNA, 16 nt, Human
cagcagacagagccag

SEQ ID NO: 3516632 - RNA, 17 nt, Human
cagcagacagagccagg

SEQ ID NO: 3516633 - RNA, 19 nt, Human
cagcagacaucagaacaca

SEQ ID NO: 3516634 - RNA, 14 nt, Human
cagcagacauuguc

SEQ ID NO: 3516635 - RNA, 21 nt, Human
cagcagagacuugggacauug

SEQ ID NO: 3516636 - RNA, 11 nt, Human
cagcagagcac

SEQ ID NO: 3516637 - RNA, 16 nt, Human
cagcagaggcacuggg

SEQ ID NO: 3516638 - RNA, 22 nt, Human
cagcagaggcggucuucaacau

SEQ ID NO: 3516639 - RNA, 15 nt, Human
cagcagagugcuuua

SEQ ID NO: 3516640 - RNA, 20 nt, Human
cagcagauaacaaugcagca

SEQ ID NO: 3516641 - RNA, 12 nt, Human
cagcagaucugu

SEQ ID NO: 3516642 - RNA, 15 nt, Human
cagcagauuauucac

SEQ ID NO: 3516643 - RNA, 15 nt, Human
cagcagcaaauuuuc

SEQ ID NO: 3516644 - RNA, 14 nt, Human
cagcagcaagaaaa

SEQ ID NO: 3516645 - RNA, 17 nt, Human
cagcagcaagaaaaaaa

SEQ ID NO: 3516646 - RNA, 14 nt, Human
cagcagcagcaggu

SEQ ID NO: 3516647 - RNA, 15 nt, Human
cagcagcagcaggug

SEQ ID NO: 3516648 - RNA, 16 nt, Human
cagcagcagcccaagc

SEQ ID NO: 3516649 - RNA, 13 nt, Human
cagcagcauuuuu

SEQ ID NO: 3516650 - RNA, 21 nt, Human
cagcagcauuuuuauuucaga

SEQ ID NO: 3516651 - RNA, 14 nt, Human
cagcagccagccaa

SEQ ID NO: 3516652 - RNA, 14 nt, Human
cagcagccagcccu

SEQ ID NO: 3516653 - RNA, 16 nt, Human
cagcagccagcccugc

SEQ ID NO: 3516654 - RNA, 18 nt, Human
cagcagccagcccugccu

SEQ ID NO: 3516655 - RNA, 21 nt, Human
cagcagccagcccugccugga

SEQ ID NO: 3516656 - RNA, 22 nt, Human
cagcagccagcccugccuggag

SEQ ID NO: 3516657 - RNA, 13 nt, Human
cagcagccagcuc

SEQ ID NO: 3516658 - RNA, 17 nt, Human
cagcagccagcucucag

SEQ ID NO: 3516659 - RNA, 20 nt, Human
cagcagcccaagcuucccuc

SEQ ID NO: 3516660 - RNA, 16 nt, Human
cagcagccccacacca

SEQ ID NO: 3516661 - RNA, 18 nt, Human
cagcagccccacaccagg

SEQ ID NO: 3516662 - RNA, 11 nt, Human
cagcagcccua

SEQ ID NO: 3516663 - RNA, 16 nt, Human
cagcagcccuaaggau

SEQ ID NO: 3516664 - RNA, 23 nt, Human
cagcagcccuaaggaucucucag

SEQ ID NO: 3516665 - RNA, 11 nt, Human
cagcagcccuc

SEQ ID NO: 3516666 - RNA, 23 nt, Human
cagcagccucgccccuggcagag

SEQ ID NO: 3516667 - RNA, 20 nt, Human
cagcagccugcuucccaccu

SEQ ID NO: 3516668 - RNA, 14 nt, Human
cagcagccuggacc

SEQ ID NO: 3516669 - RNA, 15 nt, Human
cagcagccuggaccc

SEQ ID NO: 3516670 - RNA, 17 nt, Human
cagcagccuuuaaugca

SEQ ID NO: 3516671 - RNA, 21 nt, Human
cagcagcgaccaccccugccu

SEQ ID NO: 3516672 - RNA, 17 nt, Human
cagcagcgccuuuccca

SEQ ID NO: 3516673 - RNA, 17 nt, Human
cagcagcggaaccgccc

SEQ ID NO: 3516674 - RNA, 13 nt, Human
cagcagcucaggc

SEQ ID NO: 3516675 - RNA, 20 nt, Human
cagcagcugaacagccaaau

SEQ ID NO: 3516676 - RNA, 17 nt, Human
cagcagcuucaccagag

SEQ ID NO: 3516677 - RNA, 15 nt, Human
cagcagcuugcugca

SEQ ID NO: 3516678 - RNA, 11 nt, Human
cagcaggaggg

SEQ ID NO: 3516679 - RNA, 18 nt, Human
cagcaggaggggggaggg

SEQ ID NO: 3516680 - RNA, 21 nt, Human
cagcaggaguggugcagacag

SEQ ID NO: 3516681 - RNA, 22 nt, Human
cagcaggaguggugcagacaga

SEQ ID NO: 3516682 - RNA, 12 nt, Human
cagcaggcagcc

SEQ ID NO: 3516683 - RNA, 15 nt, Human
cagcaggcagcgcca

SEQ ID NO: 3516684 - RNA, 13 nt, Human
cagcaggcccacc

SEQ ID NO: 3516685 - RNA, 18 nt, Human
cagcaggcccaccuaccu

SEQ ID NO: 3516686 - RNA, 12 nt, Human
cagcaggcucuc

SEQ ID NO: 3516687 - RNA, 18 nt, Human
cagcaggcucucaggcca

SEQ ID NO: 3516688 - RNA, 19 nt, Human
cagcaggcucucaggccag

SEQ ID NO: 3516689 - RNA, 13 nt, Human
cagcaggcugcca

SEQ ID NO: 3516690 - RNA, 14 nt, Human
cagcaggcuggccu

SEQ ID NO: 3516691 - RNA, 21 nt, Human
cagcagggacuguaaacacag

SEQ ID NO: 3516692 - RNA, 22 nt, Human
cagcagggacuguaaacacaga

SEQ ID NO: 3516693 - RNA, 15 nt, Human
cagcagggaugcccu

SEQ ID NO: 3516694 - RNA, 16 nt, Human
cagcagggaugcccug

SEQ ID NO: 3516695 - RNA, 22 nt, Human
cagcagggaugcccuggaggug

SEQ ID NO: 3516696 - RNA, 20 nt, Human
cagcagggguuggggaaaca

SEQ ID NO: 3516697 - RNA, 18 nt, Human
cagcagggucuuuucauc

SEQ ID NO: 3516698 - RNA, 21 nt, Human
cagcagggucuuuucaucugg

SEQ ID NO: 3516699 - RNA, 16 nt, Human
cagcagguagccugcu

SEQ ID NO: 3516700 - RNA, 21 nt, Human
cagcagguccccagcuuuggc

SEQ ID NO: 3516701 - RNA, 23 nt, Human
cagcaggugauuggaccaggcca

SEQ ID NO: 3516702 - RNA, 14 nt, Human
cagcaggugcugcu

SEQ ID NO: 3516703 - RNA, 17 nt, Human
cagcaggugcugcuacc

SEQ ID NO: 3516704 - RNA, 14 nt, Human
cagcaguagacauu

SEQ ID NO: 3516705 - RNA, 19 nt, Human
cagcaguccuuuguaaaca

SEQ ID NO: 3516706 - RNA, 21 nt, Human
cagcagucucugccuugccuu

SEQ ID NO: 3516707 - RNA, 15 nt, Human
cagcagugaaaacaa

SEQ ID NO: 3516708 - RNA, 17 nt, Human
cagcaguguuccccauc

SEQ ID NO: 3516709 - RNA, 13 nt, Human
cagcaguucagag

SEQ ID NO: 3516710 - RNA, 22 nt, Human
cagcaguucagagcugcccucu

SEQ ID NO: 3516711 - RNA, 17 nt, Human
cagcaguugaaaagacu

SEQ ID NO: 3516712 - RNA, 20 nt, Human
cagcaguugcugguaaaaug

SEQ ID NO: 3516713 - RNA, 23 nt, Human
cagcaguugcugguaaaaugaag

SEQ ID NO: 3516714 - RNA, 17 nt, Human
cagcauauucaggaagc

SEQ ID NO: 3516715 - RNA, 23 nt, Human
cagcauauucaggaagcucaggg

SEQ ID NO: 3516716 - RNA, 20 nt, Human
cagcaucacuccccaaggaa

SEQ ID NO: 3516717 - RNA, 22 nt, Human
cagcaucacuccccaaggaaga

SEQ ID NO: 3516718 - RNA, 20 nt, Human
cagcaucauuuugcauucaa

SEQ ID NO: 3516719 - RNA, 22 nt, Human
cagcaucauuuugcauucaaau

SEQ ID NO: 3516720 - RNA, 23 nt, Human
cagcaucauuuugcauucaaauu

SEQ ID NO: 3516721 - RNA, 20 nt, Human
cagcauccccuugaacucuu

SEQ ID NO: 3516722 - RNA, 18 nt, Human
cagcaucccuugaccagg

SEQ ID NO: 3516723 - RNA, 19 nt, Human
cagcaucccuugaccaggc

SEQ ID NO: 3516724 - RNA, 19 nt, Human
cagcauccuggcacccggc

SEQ ID NO: 3516725 - RNA, 21 nt, Human
cagcauccuggcacccggccc

SEQ ID NO: 3516726 - RNA, 21 nt, Human
cagcaucgcacucuggcagca

SEQ ID NO: 3516727 - RNA, 22 nt, Human
cagcaucggacaagacccccag

SEQ ID NO: 3516728 - RNA, 13 nt, Human
cagcaucucagcu

SEQ ID NO: 3516729 - RNA, 17 nt, Human
cagcaucuccaagcagc

SEQ ID NO: 3516730 - RNA, 17 nt, Human
cagcaucucuaccuucu

SEQ ID NO: 3516731 - RNA, 20 nt, Human
cagcaucucuaccuucuccc

SEQ ID NO: 3516732 - RNA, 20 nt, Human
cagcaucugggccuuggccu

SEQ ID NO: 3516733 - RNA, 12 nt, Human
cagcaugaauuu

SEQ ID NO: 3516734 - RNA, 14 nt, Human
cagcaugaauuugu

SEQ ID NO: 3516735 - RNA, 21 nt, Human
cagcaugacauaacagugcag

SEQ ID NO: 3516736 - RNA, 23 nt, Human
cagcaugaccugugaccagcacu

SEQ ID NO: 3516737 - RNA, 15 nt, Human
cagcauggcacuccc

SEQ ID NO: 3516738 - RNA, 22 nt, Human
cagcauggcauccaagacucuu

SEQ ID NO: 3516739 - RNA, 17 nt, Human
cagcauggucccugccu

SEQ ID NO: 3516740 - RNA, 16 nt, Human
cagcauggugcaugcc

SEQ ID NO: 3516741 - RNA, 22 nt, Human
cagcauguacggauuuucaguu

SEQ ID NO: 3516742 - RNA, 13 nt, Human
cagcaugugccuu

SEQ ID NO: 3516743 - RNA, 18 nt, Human
cagcauuaccucuuugga

SEQ ID NO: 3516744 - RNA, 21 nt, Human
cagcauuccagccccucuggu

SEQ ID NO: 3516745 - RNA, 15 nt, Human
auugcuuuuaaaacu

SEQ ID NO: 3516746 - RNA, 20 nt, Human
auugcuuuugugcauuggau

SEQ ID NO: 3516747 - RNA, 15 nt, Human
auugcuuuuucuaau

SEQ ID NO: 3516748 - RNA, 18 nt, Human
auugcuuuuuuguauugg

SEQ ID NO: 3516749 - RNA, 12 nt, Human
auuggaaaaauc

SEQ ID NO: 3516750 - RNA, 12 nt, Human
auuggaaaugga

SEQ ID NO: 3516751 - RNA, 23 nt, Human
auuggaaauggaugcaaaguaca

SEQ ID NO: 3516752 - RNA, 16 nt, Human
auuggaaauuuagcau

SEQ ID NO: 3516753 - RNA, 15 nt, Human
auuggaacuggaggc

SEQ ID NO: 3516754 - RNA, 22 nt, Human
auuggaagagcagcaccuccuc

SEQ ID NO: 3516755 - RNA, 22 nt, Human
auuggaaggagacacagauguu

SEQ ID NO: 3516756 - RNA, 18 nt, Human
auuggaaugggcagcuca

SEQ ID NO: 3516757 - RNA, 19 nt, Human
auuggaauuaaccuggugc

SEQ ID NO: 3516758 - RNA, 16 nt, Human
auuggacauagauauu

SEQ ID NO: 3516759 - RNA, 22 nt, Human
auuggacauuaagcaucacaaa

SEQ ID NO: 3516760 - RNA, 17 nt, Human
auuggacauuuucuuca

SEQ ID NO: 3516761 - RNA, 13 nt, Human
auuggaccaggcc

SEQ ID NO: 3516762 - RNA, 22 nt, Human
auuggagaaguaauccuaggga

SEQ ID NO: 3516763 - RNA, 16 nt, Human
auuggagcucguggaa

SEQ ID NO: 3516764 - RNA, 17 nt, Human
auuggagcucgugggac

SEQ ID NO: 3516765 - RNA, 22 nt, Human
auuggaggaccaaaaaaauaag

SEQ ID NO: 3516766 - RNA, 15 nt, Human
auuggauacagcagu

SEQ ID NO: 3516767 - RNA, 16 nt, Human
auuggauuauccugag

SEQ ID NO: 3516768 - RNA, 19 nt, Human
auuggauuauucauuuaaa

SEQ ID NO: 3516769 - RNA, 21 nt, Human
auuggauuauucauuuaaaau

SEQ ID NO: 3516770 - RNA, 22 nt, Human
auuggauuauucauuuaaaaug

SEQ ID NO: 3516771 - RNA, 17 nt, Human
auuggauuauuuaauaa

SEQ ID NO: 3516772 - RNA, 18 nt, Human
auuggauuauuuaauaac

SEQ ID NO: 3516773 - RNA, 19 nt, Human
auuggauuauuuaauaaca

SEQ ID NO: 3516774 - RNA, 17 nt, Human
auuggauuuuauguuga

SEQ ID NO: 3516775 - RNA, 21 nt, Human
auuggauuuuauguugacauu

SEQ ID NO: 3516776 - RNA, 18 nt, Human
auuggcagcaggugcugc

SEQ ID NO: 3516777 - RNA, 14 nt, Human
auuggcauggcuuu

SEQ ID NO: 3516778 - RNA, 23 nt, Human
auuggcauggcuuuauuuguuuu

SEQ ID NO: 3516779 - RNA, 14 nt, Human
auuggcauguguau

SEQ ID NO: 3516780 - RNA, 22 nt, Human
auuggccauucuauuguggcaa

SEQ ID NO: 3516781 - RNA, 12 nt, Human
auuggccuggag

SEQ ID NO: 3516782 - RNA, 20 nt, Human
auuggccuguagaguugcug

SEQ ID NO: 3516783 - RNA, 22 nt, Human
auuggccuguagaguugcugag

SEQ ID NO: 3516784 - RNA, 20 nt, Human
auuggcuagagguucaaaga

SEQ ID NO: 3516785 - RNA, 22 nt, Human
auuggcuagagguucaaagaua

SEQ ID NO: 3516786 - RNA, 17 nt, Human
auuggcuaguugaaucu

SEQ ID NO: 3516787 - RNA, 17 nt, Human
auuggcuauuuaaaacu

SEQ ID NO: 3516788 - RNA, 17 nt, Human
auuggcucacacugaga

SEQ ID NO: 3516789 - RNA, 21 nt, Human
auuggcucacacugagaaugu

SEQ ID NO: 3516790 - RNA, 21 nt, Human
auuggcucacccaagcaaggc

SEQ ID NO: 3516791 - RNA, 22 nt, Human
auuggcugaacucaugagaagu

SEQ ID NO: 3516792 - RNA, 14 nt, Human
auuggcugagagac

SEQ ID NO: 3516793 - RNA, 14 nt, Human
auuggcuuguagaa

SEQ ID NO: 3516794 - RNA, 15 nt, Human
auuggcuuguagaau

SEQ ID NO: 3516795 - RNA, 16 nt, Human
auuggcuuguagaauu

SEQ ID NO: 3516796 - RNA, 23 nt, Human
auuggcuuuaaacacccuucaca

SEQ ID NO: 3516797 - RNA, 16 nt, Human
auuggcuuuucaugcg

SEQ ID NO: 3516798 - RNA, 20 nt, Human
auugggaaggggacccccgc

SEQ ID NO: 3516799 - RNA, 16 nt, Human
auugggaauaaauaug

SEQ ID NO: 3516800 - RNA, 17 nt, Human
auugggaauaaauaugc

SEQ ID NO: 3516801 - RNA, 20 nt, Human
auugggaauaaauaugccuc

SEQ ID NO: 3516802 - RNA, 20 nt, Human
auugggaguccaggcacagg

SEQ ID NO: 3516803 - RNA, 17 nt, Human
auugggcacaucauuuc

SEQ ID NO: 3516804 - RNA, 21 nt, Human
auugggcacaucauuucaaga

SEQ ID NO: 3516805 - RNA, 19 nt, Human
cagauccuuguuucaaaca

SEQ ID NO: 3516806 - RNA, 13 nt, Human
cagaucucccaca

SEQ ID NO: 3516807 - RNA, 20 nt, Human
cagaucucuaacuucaccau

SEQ ID NO: 3516808 - RNA, 14 nt, Human
cagaucugccuaag

SEQ ID NO: 3516809 - RNA, 19 nt, Human
cagaucugccuaaggacuu

SEQ ID NO: 3516810 - RNA, 23 nt, Human
cagaucugccuaaggacuucuuu

SEQ ID NO: 3516811 - RNA, 15 nt, Human
cagaucuggaaccuc

SEQ ID NO: 3516812 - RNA, 20 nt, Human
cagaucuggaaccucagccu

SEQ ID NO: 3516813 - RNA, 17 nt, Human
cagaucuggucccuugc

SEQ ID NO: 3516814 - RNA, 13 nt, Human
cagaucugucuga

SEQ ID NO: 3516815 - RNA, 19 nt, Human
cagaucuuggacucaugag

SEQ ID NO: 3516816 - RNA, 22 nt, Human
cagaucuuggacucaugaggag

SEQ ID NO: 3516817 - RNA, 15 nt, Human
cagaugaaaauuuga

SEQ ID NO: 3516818 - RNA, 17 nt, Human
cagaugaaaauuugaga

SEQ ID NO: 3516819 - RNA, 13 nt, Human
cagaugaauaaac

SEQ ID NO: 3516820 - RNA, 14 nt, Human
cagaugaaugauaa

SEQ ID NO: 3516821 - RNA, 17 nt, Human
cagaugaaugccgugga

SEQ ID NO: 3516822 - RNA, 15 nt, Human
cagaugaauguauuu

SEQ ID NO: 3516823 - RNA, 19 nt, Human
cagaugaauguauuuauuu

SEQ ID NO: 3516824 - RNA, 23 nt, Human
cagaugaauguauuuauuuggga

SEQ ID NO: 3516825 - RNA, 23 nt, Human
cagaugacaagaaaggcugcugu

SEQ ID NO: 3516826 - RNA, 13 nt, Human
cagaugaccccuc

SEQ ID NO: 3516827 - RNA, 17 nt, Human
cagaugaccccugccca

SEQ ID NO: 3516828 - RNA, 18 nt, Human
cagaugaccccugcccag

SEQ ID NO: 3516829 - RNA, 19 nt, Human
cagaugaccccugcccaga

SEQ ID NO: 3516830 - RNA, 23 nt, Human
cagaugaccccugcccagaucag

SEQ ID NO: 3516831 - RNA, 19 nt, Human
cagaugagaaacucuugag

SEQ ID NO: 3516832 - RNA, 19 nt, Human
cagaugagaacaaagcugu

SEQ ID NO: 3516833 - RNA, 19 nt, Human
cagaugaggugaaaaggcc

SEQ ID NO: 3516834 - RNA, 16 nt, Human
cagaugaguaaaggag

SEQ ID NO: 3516835 - RNA, 16 nt, Human
cagaugauuucccccc

SEQ ID NO: 3516836 - RNA, 16 nt, Human
cagaugcaaagaggca

SEQ ID NO: 3516837 - RNA, 21 nt, Human
cagaugcaaugugcuacugau

SEQ ID NO: 3516838 - RNA, 17 nt, Human
cagaugcacaugagcug

SEQ ID NO: 3516839 - RNA, 22 nt, Human
cagaugcaccagcccuuagcag

SEQ ID NO: 3516840 - RNA, 16 nt, Human
cagaugcagagagcca

SEQ ID NO: 3516841 - RNA, 20 nt, Human
cagaugcagagagccauuuu

SEQ ID NO: 3516842 - RNA, 12 nt, Human
cagaugcagcuc

SEQ ID NO: 3516843 - RNA, 18 nt, Human
cagaugcagcucuuccug

SEQ ID NO: 3516844 - RNA, 19 nt, Human
cagaugcagcucuuccugg

SEQ ID NO: 3516845 - RNA, 16 nt, Human
cagaugccacccuagc

SEQ ID NO: 3516846 - RNA, 13 nt, Human
cagaugccagagc

SEQ ID NO: 3516847 - RNA, 15 nt, Human
cagaugcccagaggg

SEQ ID NO: 3516848 - RNA, 19 nt, Human
cagaugcccagagggccca

SEQ ID NO: 3516849 - RNA, 20 nt, Human
cagaugcccagagggcccag

SEQ ID NO: 3516850 - RNA, 18 nt, Human
cagaugccccagagcugu

SEQ ID NO: 3516851 - RNA, 14 nt, Human
cagaugccuccuuc

SEQ ID NO: 3516852 - RNA, 14 nt, Human
cagaugcuccaaga

SEQ ID NO: 3516853 - RNA, 16 nt, Human
cagaugcuccaagauu

SEQ ID NO: 3516854 - RNA, 21 nt, Human
cagaugcuccaagauucuaga

SEQ ID NO: 3516855 - RNA, 13 nt, Human
cagaugcucugag

SEQ ID NO: 3516856 - RNA, 15 nt, Human
cagaugcugugcaaa

SEQ ID NO: 3516857 - RNA, 22 nt, Human
cagaugcuugcggcaaaaggaa

SEQ ID NO: 3516858 - RNA, 14 nt, Human
cagaugcuuuucug

SEQ ID NO: 3516859 - RNA, 18 nt, Human
cagauggaaaaacugagg

SEQ ID NO: 3516860 - RNA, 16 nt, Human
cagauggaaaggagcc

SEQ ID NO: 3516861 - RNA, 17 nt, Human
cagauggaaauauuuug

SEQ ID NO: 3516862 - RNA, 14 nt, Human
cagauggaaccgca

SEQ ID NO: 3516863 - RNA, 19 nt, Human
cagauggaaccgcaggaag

SEQ ID NO: 3516864 - RNA, 12 nt, Human
cagauggcacuu

SEQ ID NO: 3516865 - RNA, 16 nt, Human
cagauggcagcuuuua

SEQ ID NO: 3516866 - RNA, 19 nt, Human
cagaugggggaaagcacag

SEQ ID NO: 3516867 - RNA, 18 nt, Human
cagaugggugcuuggagg

SEQ ID NO: 3516868 - RNA, 16 nt, Human
cagauggucauccaga

SEQ ID NO: 3516869 - RNA, 19 nt, Human
cagaugguuuccacauuua

SEQ ID NO: 3516870 - RNA, 22 nt, Human
cagauguaauguuuucuuugca

SEQ ID NO: 3516871 - RNA, 15 nt, Human
cagaugucuauauug

SEQ ID NO: 3516872 - RNA, 15 nt, Human
cagaugucuucugcc

SEQ ID NO: 3516873 - RNA, 18 nt, Human
cagaugucuucugccugu

SEQ ID NO: 3516874 - RNA, 14 nt, Human
cagaugugaaccau

SEQ ID NO: 3516875 - RNA, 14 nt, Human
cagaugugcagcag

SEQ ID NO: 3516876 - RNA, 16 nt, Human
cagaugugcagcagau

SEQ ID NO: 3516877 - RNA, 23 nt, Human
cagaugugggccaccauugcaac

SEQ ID NO: 3516878 - RNA, 20 nt, Human
cagaugugggcuuugauuuc

SEQ ID NO: 3516879 - RNA, 16 nt, Human
cagauguuaaaauaaa

SEQ ID NO: 3516880 - RNA, 18 nt, Human
cagauguuaaaauaaaug

SEQ ID NO: 3516881 - RNA, 20 nt, Human
cagauguuaaaauaaauggu

SEQ ID NO: 3516882 - RNA, 17 nt, Human
cagauguuagauauuuu

SEQ ID NO: 3516883 - RNA, 17 nt, Human
cagauguucccccaucu

SEQ ID NO: 3516884 - RNA, 17 nt, Human
cagauguugaauucuuu

SEQ ID NO: 3516885 - RNA, 19 nt, Human
cagauguugaauucuuuug

SEQ ID NO: 3516886 - RNA, 17 nt, Human
cagauguuuaaaacacc

SEQ ID NO: 3516887 - RNA, 19 nt, Human
cagauguuucuuuuguaug

SEQ ID NO: 3516888 - RNA, 22 nt, Human
cagauguuucuuuuguauguaa

SEQ ID NO: 3516889 - RNA, 20 nt, Human
cagcugaggucucuugaggg

SEQ ID NO: 3516890 - RNA, 18 nt, Human
cagcugaguuaugaugua

SEQ ID NO: 3516891 - RNA, 16 nt, Human
cagcugauacuucauu

SEQ ID NO: 3516892 - RNA, 21 nt, Human
cagcugauacuucauuuaaaa

SEQ ID NO: 3516893 - RNA, 15 nt, Human
cagcugaugacucaa

SEQ ID NO: 3516894 - RNA, 16 nt, Human
cagcugaugacucaag

SEQ ID NO: 3516895 - RNA, 21 nt, Human
cagcugaugacucaagauucc

SEQ ID NO: 3516896 - RNA, 23 nt, Human
cagcugaugacucaagauuccca

SEQ ID NO: 3516897 - RNA, 18 nt, Human
cagcugauguuggaagag

SEQ ID NO: 3516898 - RNA, 17 nt, Human
cagcugauuuuaacaau

SEQ ID NO: 3516899 - RNA, 12 nt, Human
cagcugcaaagu

SEQ ID NO: 3516900 - RNA, 13 nt, Human
cagcugcaaagug

SEQ ID NO: 3516901 - RNA, 16 nt, Human
cagcugcaagggaguu

SEQ ID NO: 3516902 - RNA, 18 nt, Human
cagcugcaauucccugga

SEQ ID NO: 3516903 - RNA, 12 nt, Human
cagcugcacccc

SEQ ID NO: 3516904 - RNA, 14 nt, Human
cagcugcaccccuu

SEQ ID NO: 3516905 - RNA, 23 nt, Human
cagcugcaccccuuccugggcac

SEQ ID NO: 3516906 - RNA, 16 nt, Human
cagcugcaccugccag

SEQ ID NO: 3516907 - RNA, 18 nt, Human
cagcugcaccugccagcc

SEQ ID NO: 3516908 - RNA, 22 nt, Human
cagcugcaccugccagccuggc

SEQ ID NO: 3516909 - RNA, 12 nt, Human
cagcugcacuga

SEQ ID NO: 3516910 - RNA, 17 nt, Human
cagcugcaucuacucag

SEQ ID NO: 3516911 - RNA, 13 nt, Human
cagcugccagaga

SEQ ID NO: 3516912 - RNA, 14 nt, Human
cagcugccagagaa

SEQ ID NO: 3516913 - RNA, 15 nt, Human
cagcugccaggagca

SEQ ID NO: 3516914 - RNA, 17 nt, Human
cagcugcccccagagcc

SEQ ID NO: 3516915 - RNA, 22 nt, Human
cagcugccccggccccuccccc

SEQ ID NO: 3516916 - RNA, 13 nt, Human
cagcugccccucc

SEQ ID NO: 3516917 - RNA, 19 nt, Human
cagcugcccuaugggccug

SEQ ID NO: 3516918 - RNA, 18 nt, Human
cagcugccgaccagagcc

SEQ ID NO: 3516919 - RNA, 14 nt, Human
cagcugccucacuu

SEQ ID NO: 3516920 - RNA, 15 nt, Human
cagcugccuccccuc

SEQ ID NO: 3516921 - RNA, 23 nt, Human
cagcugccuccccuccucugcuu

SEQ ID NO: 3516922 - RNA, 24 nt, Human
cagcugccuccccuccucugcuug

SEQ ID NO: 3516923 - RNA, 12 nt, Human
cagcugccuggg

SEQ ID NO: 3516924 - RNA, 14 nt, Human
cagcugccugggau

SEQ ID NO: 3516925 - RNA, 18 nt, Human
cagcugccugggaucccu

SEQ ID NO: 3516926 - RNA, 15 nt, Human
cagcugccuuagcuu

SEQ ID NO: 3516927 - RNA, 16 nt, Human
cagcugccuuagcuuc

SEQ ID NO: 3516928 - RNA, 22 nt, Human
cagcugccuuagcuucaggaac

SEQ ID NO: 3516929 - RNA, 17 nt, Human
cagcugcgcuugcuuuu

SEQ ID NO: 3516930 - RNA, 17 nt, Human
cagcugcuacuacuccu

SEQ ID NO: 3516931 - RNA, 21 nt, Human
cagcugcucaauaaaguacaa

SEQ ID NO: 3516932 - RNA, 15 nt, Human
cagcugcucagaucc

SEQ ID NO: 3516933 - RNA, 18 nt, Human
cagcugcucccuggcauu

SEQ ID NO: 3516934 - RNA, 23 nt, Human
cagcugcuccgaggacccaggaa

SEQ ID NO: 3516935 - RNA, 12 nt, Human
cagcugcuccua

SEQ ID NO: 3516936 - RNA, 18 nt, Human
cagcugcuccuagaggga

SEQ ID NO: 3516937 - RNA, 23 nt, Human
cagcugcuccuagagggaggggc

SEQ ID NO: 3516938 - RNA, 15 nt, Human
cagcugcucugccca

SEQ ID NO: 3516939 - RNA, 16 nt, Human
cagcugcucugcccag

SEQ ID NO: 3516940 - RNA, 19 nt, Human
cagcugcucugcccagagc

SEQ ID NO: 3516941 - RNA, 23 nt, Human
cagcugcucugcccagagcuggg

SEQ ID NO: 3516942 - RNA, 13 nt, Human
cagcugcugagcc

SEQ ID NO: 3516943 - RNA, 17 nt, Human
cagcugcugagccgcag

SEQ ID NO: 3516944 - RNA, 18 nt, Human
cagcugcuggagacuccu

SEQ ID NO: 3516945 - RNA, 19 nt, Human
cagcugcuggagacuccua

SEQ ID NO: 3516946 - RNA, 23 nt, Human
cagcugcuggagacuccuaggca

SEQ ID NO: 3516947 - RNA, 12 nt, Human
cagcugcugucu

SEQ ID NO: 3516948 - RNA, 14 nt, Human
cagcugcugucuuc

SEQ ID NO: 3516949 - RNA, 11 nt, Human
cagcugcuucu

SEQ ID NO: 3516950 - RNA, 12 nt, Human
cagcugcuucuc

SEQ ID NO: 3516951 - RNA, 15 nt, Human
cagcugcuucuccca

SEQ ID NO: 3516952 - RNA, 18 nt, Human
cagcugcuugggcuucau

SEQ ID NO: 3516953 - RNA, 21 nt, Human
cagcugcuugggcuucauccu

SEQ ID NO: 3516954 - RNA, 14 nt, Human
cagcugcuuguguc

SEQ ID NO: 3516955 - RNA, 15 nt, Human
cagcugcuugugucc

SEQ ID NO: 3516956 - RNA, 15 nt, Human
cagcugcuuuguuac

SEQ ID NO: 3516957 - RNA, 16 nt, Human
cagcugcuuuguuacc

SEQ ID NO: 3516958 - RNA, 14 nt, Human
cagcuggacagagg

SEQ ID NO: 3516959 - RNA, 15 nt, Human
cagcuggacagaggg

SEQ ID NO: 3516960 - RNA, 19 nt, Human
auugggcagcgcccuuccu

SEQ ID NO: 3516961 - RNA, 14 nt, Human
auuggggaggaggg

SEQ ID NO: 3516962 - RNA, 15 nt, Human
auuggggcucccagc

SEQ ID NO: 3516963 - RNA, 19 nt, Human
auugggggcuggugccagc

SEQ ID NO: 3516964 - RNA, 22 nt, Human
auugggggcuggugccagccuu

SEQ ID NO: 3516965 - RNA, 22 nt, Human
auugggggggccaaaaggaaaa

SEQ ID NO: 3516966 - RNA, 13 nt, Human
auugggguaguug

SEQ ID NO: 3516967 - RNA, 15 nt, Human
auuggggucccucua

SEQ ID NO: 3516968 - RNA, 12 nt, Human
auugggguuauu

SEQ ID NO: 3516969 - RNA, 14 nt, Human
auugggguuauuuu

SEQ ID NO: 3516970 - RNA, 22 nt, Human
auuggguaucaagacauagcau

SEQ ID NO: 3516971 - RNA, 15 nt, Human
auugggucuauucca

SEQ ID NO: 3516972 - RNA, 18 nt, Human
auugggucuauuccagcu

SEQ ID NO: 3516973 - RNA, 19 nt, Human
auugggucuauuccagcuc

SEQ ID NO: 3516974 - RNA, 20 nt, Human
auugggucuauuccagcuca

SEQ ID NO: 3516975 - RNA, 18 nt, Human
auugggugggcaggaaaa

SEQ ID NO: 3516976 - RNA, 21 nt, Human
auuggguggggggcuucauac

SEQ ID NO: 3516977 - RNA, 23 nt, Human
auuggguggggggcuucauacac

SEQ ID NO: 3516978 - RNA, 13 nt, Human
auuggguuaugaa

SEQ ID NO: 3516979 - RNA, 23 nt, Human
auuggguucaugaugcagucucc

SEQ ID NO: 3516980 - RNA, 13 nt, Human
auuggguucauua

SEQ ID NO: 3516981 - RNA, 18 nt, Human
auugguaaagaauggaag

SEQ ID NO: 3516982 - RNA, 15 nt, Human
auugguaacauccuu

SEQ ID NO: 3516983 - RNA, 23 nt, Human
auugguacugccuuaaagauaca

SEQ ID NO: 3516984 - RNA, 18 nt, Human
auuggucuaauuuauuca

SEQ ID NO: 3516985 - RNA, 17 nt, Human
auuggucuccucucagc

SEQ ID NO: 3516986 - RNA, 19 nt, Human
auugguguaagguacuuuc

SEQ ID NO: 3516987 - RNA, 13 nt, Human
auugguguugcca

SEQ ID NO: 3516988 - RNA, 19 nt, Human
auugguguuuuuuucuaug

SEQ ID NO: 3516989 - RNA, 15 nt, Human
auugguuaauuuuua

SEQ ID NO: 3516990 - RNA, 17 nt, Human
auugguuuaaagaaagu

SEQ ID NO: 3516991 - RNA, 15 nt, Human
auugguuucucuucu

SEQ ID NO: 3516992 - RNA, 20 nt, Human
auuguaaaaaaaaaugccuu

SEQ ID NO: 3516993 - RNA, 15 nt, Human
auuguaaaaauggca

SEQ ID NO: 3516994 - RNA, 20 nt, Human
auuguaaaaccugucaauga

SEQ ID NO: 3516995 - RNA, 17 nt, Human
auuguaaaacugaggca

SEQ ID NO: 3516996 - RNA, 19 nt, Human
auuguaaaagcauuuugua

SEQ ID NO: 3516997 - RNA, 21 nt, Human
auuguaaaagcauuuuguaau

SEQ ID NO: 3516998 - RNA, 17 nt, Human
auuguaaaauaauucug

SEQ ID NO: 3516999 - RNA, 19 nt, Human
auuguaaaauagcuuguau

SEQ ID NO: 3517000 - RNA, 20 nt, Human
auuguaaaauuauuucauga

SEQ ID NO: 3517001 - RNA, 14 nt, Human
auuguaaaugugcu

SEQ ID NO: 3517002 - RNA, 15 nt, Human
auuguaaaugugcuu

SEQ ID NO: 3517003 - RNA, 15 nt, Human
auuguaaauuauauu

SEQ ID NO: 3517004 - RNA, 16 nt, Human
auuguaaauugaauca

SEQ ID NO: 3517005 - RNA, 14 nt, Human
auuguaacagacau

SEQ ID NO: 3517006 - RNA, 17 nt, Human
auuguaacagacauugu

SEQ ID NO: 3517007 - RNA, 15 nt, Human
auuguaacguugcug

SEQ ID NO: 3517008 - RNA, 22 nt, Human
auuguaauauagaaaaaaacau

SEQ ID NO: 3517009 - RNA, 23 nt, Human
auuguaauguugugaauaauuac

SEQ ID NO: 3517010 - RNA, 15 nt, Human
auuguaauuauaucu

SEQ ID NO: 3517011 - RNA, 15 nt, Human
auuguacaaaauuaa

SEQ ID NO: 3517012 - RNA, 16 nt, Human
auuguacaaaguauua

SEQ ID NO: 3517013 - RNA, 19 nt, Human
auuguacacaccuuauauu

SEQ ID NO: 3517014 - RNA, 17 nt, Human
auuguacagcuguuuaa

SEQ ID NO: 3517015 - RNA, 14 nt, Human
auuguacaguuugu

SEQ ID NO: 3517016 - RNA, 17 nt, Human
auuguacaguuuguuua

SEQ ID NO: 3517017 - RNA, 19 nt, Human
auuguacaguuuguuuaca

SEQ ID NO: 3517018 - RNA, 15 nt, Human
auuguacauaaaaga

SEQ ID NO: 3517019 - RNA, 12 nt, Human
auuguaccucuc

SEQ ID NO: 3517020 - RNA, 18 nt, Human
auuguaccucucuuauag

SEQ ID NO: 3517021 - RNA, 15 nt, Human
auuguaccuuuuaac

SEQ ID NO: 3517022 - RNA, 17 nt, Human
auuguaccuuuuaacac

SEQ ID NO: 3517023 - RNA, 15 nt, Human
auuguacuaaagcca

SEQ ID NO: 3517024 - RNA, 22 nt, Human
auuguacuaaagccaaacauau

SEQ ID NO: 3517025 - RNA, 20 nt, Human
auuguagcauccuggaauau

SEQ ID NO: 3517026 - RNA, 16 nt, Human
auuguagcauuucuug

SEQ ID NO: 3517027 - RNA, 18 nt, Human
auuguagcauuucuugau

SEQ ID NO: 3517028 - RNA, 13 nt, Human
auuguaguaaucu

SEQ ID NO: 3517029 - RNA, 22 nt, Human
auuguauaaacuaucaguuugu

SEQ ID NO: 3517030 - RNA, 14 nt, Human
auuguauaacaggu

SEQ ID NO: 3517031 - RNA, 22 nt, Human
auuguauaagauuagaaugaaa

SEQ ID NO: 3517032 - RNA, 15 nt, Human
auuguauagagauau

SEQ ID NO: 3517033 - RNA, 22 nt, Human
auuguauagagauaugcagaag

SEQ ID NO: 3517034 - RNA, 17 nt, Human
cagcuuauucacaagac

SEQ ID NO: 3517035 - RNA, 16 nt, Human
cagcuucaccagagca

SEQ ID NO: 3517036 - RNA, 14 nt, Human
cagcuucacuucug

SEQ ID NO: 3517037 - RNA, 12 nt, Human
cagcuucaguug

SEQ ID NO: 3517038 - RNA, 21 nt, Human
cagcuucaugccuuuguaagu

SEQ ID NO: 3517039 - RNA, 20 nt, Human
cagcuucauuuccugugucu

SEQ ID NO: 3517040 - RNA, 13 nt, Human
cagcuuccagcag

SEQ ID NO: 3517041 - RNA, 19 nt, Human
cagcuuccuacccacaccu

SEQ ID NO: 3517042 - RNA, 13 nt, Human
cagcuuccuguca

SEQ ID NO: 3517043 - RNA, 21 nt, Human
cagcuuccuguccccaucugu

SEQ ID NO: 3517044 - RNA, 14 nt, Human
cagcuuccuucaga

SEQ ID NO: 3517045 - RNA, 19 nt, Human
cagcuuccuucagagagca

SEQ ID NO: 3517046 - RNA, 21 nt, Human
cagcuuccuucagagagcagu

SEQ ID NO: 3517047 - RNA, 22 nt, Human
cagcuucguuuauuuucaagaa

SEQ ID NO: 3517048 - RNA, 11 nt, Human
cagcuucugcc

SEQ ID NO: 3517049 - RNA, 19 nt, Human
cagcuucugccacauaaaa

SEQ ID NO: 3517050 - RNA, 15 nt, Human
cagcuucugccacuu

SEQ ID NO: 3517051 - RNA, 17 nt, Human
cagcuucugccacuucc

SEQ ID NO: 3517052 - RNA, 18 nt, Human
cagcuucugccacuuccc

SEQ ID NO: 3517053 - RNA, 16 nt, Human
cagcuucugcugggcu

SEQ ID NO: 3517054 - RNA, 20 nt, Human
cagcuucugguacucuccua

SEQ ID NO: 3517055 - RNA, 15 nt, Human
cagcuucuucaucuu

SEQ ID NO: 3517056 - RNA, 23 nt, Human
cagcuugaccugaggcugugguc

SEQ ID NO: 3517057 - RNA, 21 nt, Human
cagcuugagccgggccccugg

SEQ ID NO: 3517058 - RNA, 22 nt, Human
cagcuugagccgggccccuggg

SEQ ID NO: 3517059 - RNA, 14 nt, Human
cagcuugaggguug

SEQ ID NO: 3517060 - RNA, 20 nt, Human
cagcuugaggguugggcugg

SEQ ID NO: 3517061 - RNA, 23 nt, Human
cagcuugaucaaaggcacacagc

SEQ ID NO: 3517062 - RNA, 20 nt, Human
cagcuugccagaugcugcag

SEQ ID NO: 3517063 - RNA, 12 nt, Human
cagcuugccccg

SEQ ID NO: 3517064 - RNA, 14 nt, Human
cagcuugcgaauaa

SEQ ID NO: 3517065 - RNA, 22 nt, Human
cagcuugcguuagaaugaggag

SEQ ID NO: 3517066 - RNA, 15 nt, Human
cagcuugcucuucag

SEQ ID NO: 3517067 - RNA, 13 nt, Human
cagcuugcugcac

SEQ ID NO: 3517068 - RNA, 14 nt, Human
cagcuugcugcacc

SEQ ID NO: 3517069 - RNA, 17 nt, Human
cagcuuggcccuuuccu

SEQ ID NO: 3517070 - RNA, 18 nt, Human
cagcuugggcccagcugg

SEQ ID NO: 3517071 - RNA, 19 nt, Human
cagcuugggcccagcuggg

SEQ ID NO: 3517072 - RNA, 21 nt, Human
cagcuugggcccagcugggcu

SEQ ID NO: 3517073 - RNA, 23 nt, Human
cagcuugggcccagcugggcucu

SEQ ID NO: 3517074 - RNA, 18 nt, Human
cagcuuguaaauagcuca

SEQ ID NO: 3517075 - RNA, 16 nt, Human
cagcuuguagccagcc

SEQ ID NO: 3517076 - RNA, 23 nt, Human
cagcuuguaugcaauggauuuuc

SEQ ID NO: 3517077 - RNA, 15 nt, Human
cagcuugugcacaau

SEQ ID NO: 3517078 - RNA, 18 nt, Human
cagcuuguggagccccac

SEQ ID NO: 3517079 - RNA, 21 nt, Human
cagcuuguggagccccacacu

SEQ ID NO: 3517080 - RNA, 18 nt, Human
cagcuuguggcaagugaa

SEQ ID NO: 3517081 - RNA, 21 nt, Human
cagcuuguggcaagugaauuu

SEQ ID NO: 3517082 - RNA, 13 nt, Human
cagcuuguuuaca

SEQ ID NO: 3517083 - RNA, 14 nt, Human
cagcuuguuuacau

SEQ ID NO: 3517084 - RNA, 21 nt, Human
cagcuuguuuacaugcuuauu

SEQ ID NO: 3517085 - RNA, 16 nt, Human
cagcuuguuuuggacu

SEQ ID NO: 3517086 - RNA, 21 nt, Human
cagcuuguuuuggacuuuguu

SEQ ID NO: 3517087 - RNA, 17 nt, Human
cagcuuuaaaaaauuaa

SEQ ID NO: 3517088 - RNA, 13 nt, Human
cagcuuuaaacaa

SEQ ID NO: 3517089 - RNA, 15 nt, Human
cagcuuuaaacaaau

SEQ ID NO: 3517090 - RNA, 20 nt, Human
cagcuuuaaacucagggaca

SEQ ID NO: 3517091 - RNA, 20 nt, Human
cagcuuuaaccauuaaaacu

SEQ ID NO: 3517092 - RNA, 19 nt, Human
cagcuuuacaugcaauuua

SEQ ID NO: 3517093 - RNA, 16 nt, Human
cagcuuucaaagcauu

SEQ ID NO: 3517094 - RNA, 17 nt, Human
cagcuuucaagugccuu

SEQ ID NO: 3517095 - RNA, 19 nt, Human
cagcuuucagggccauggu

SEQ ID NO: 3517096 - RNA, 20 nt, Human
cagcuuucaugauuagcaag

SEQ ID NO: 3517097 - RNA, 17 nt, Human
cagcuuucccugccucu

SEQ ID NO: 3517098 - RNA, 22 nt, Human
cagcuuucugaccuucagcuca

SEQ ID NO: 3517099 - RNA, 13 nt, Human
cagcuuugacccg

SEQ ID NO: 3517100 - RNA, 18 nt, Human
cagcuuugagaagccuuc

SEQ ID NO: 3517101 - RNA, 19 nt, Human
cagcuuugagaagccuuca

SEQ ID NO: 3517102 - RNA, 20 nt, Human
cagcuuugagaagccuucag

SEQ ID NO: 3517103 - RNA, 14 nt, Human
cagcuuugccuucc

SEQ ID NO: 3517104 - RNA, 16 nt, Human
cagcuuugccuuccac

SEQ ID NO: 3517105 - RNA, 22 nt, Human
cagcuuugcuaccaaagcaccu

SEQ ID NO: 3517106 - RNA, 22 nt, Human
cagcuuuguuuguugucagcug

SEQ ID NO: 3517107 - RNA, 15 nt, Human
cagcuuuuaaccauc

SEQ ID NO: 3517108 - RNA, 21 nt, Human
cagcuuuuaguacccaccuga

SEQ ID NO: 3517109 - RNA, 13 nt, Human
cagcuuuucaaac

SEQ ID NO: 3517110 - RNA, 17 nt, Human
cagcuuuuccugggaca

SEQ ID NO: 3517111 - RNA, 21 nt, Human
cagcuuuucucaacugggucc

SEQ ID NO: 3517112 - RNA, 12 nt, Human
cagcuuuugcaa

SEQ ID NO: 3517113 - RNA, 17 nt, Human
cagcuuuuuaccaaguu

SEQ ID NO: 3517114 - RNA, 14 nt, Human
caggaaaaaaacuu

SEQ ID NO: 3517115 - RNA, 15 nt, Human
caggaaaaaaacuuu

SEQ ID NO: 3517116 - RNA, 19 nt, Human
caggaaaacugacagagga

SEQ ID NO: 3517117 - RNA, 17 nt, Human
caggaaaagccucugug

SEQ ID NO: 3517118 - RNA, 19 nt, Human
caggaaaagcugcugacag

SEQ ID NO: 3517119 - RNA, 14 nt, Human
caggaaaaggccug

SEQ ID NO: 3517120 - RNA, 18 nt, Human
cagcagcccuccucaccc

SEQ ID NO: 3517121 - RNA, 18 nt, Human
cagcagccucgccccugg

SEQ ID NO: 3517122 - RNA, 19 nt, Human
cagcagccucgccccuggc

SEQ ID NO: 3517123 - RNA, 19 nt, Human
cagcagccuggacccugug

SEQ ID NO: 3517124 - RNA, 21 nt, Human
cagcagccuggggcuggccuc

SEQ ID NO: 3517125 - RNA, 15 nt, Human
cagcagcucaggcac

SEQ ID NO: 3517126 - RNA, 16 nt, Human
cagcagcucaggcaca

SEQ ID NO: 3517127 - RNA, 18 nt, Human
cagcagcugaacagccaa

SEQ ID NO: 3517128 - RNA, 15 nt, Human
cagcagcuuauaaug

SEQ ID NO: 3517129 - RNA, 23 nt, Human
cagcagcuuauaaugggcucucc

SEQ ID NO: 3517130 - RNA, 12 nt, Human
cagcagcuucac

SEQ ID NO: 3517131 - RNA, 16 nt, Human
cagcagcuucaccaga

SEQ ID NO: 3517132 - RNA, 18 nt, Human
cagcagcuucaccagagc

SEQ ID NO: 3517133 - RNA, 17 nt, Human
cagcagcuuuuaauaca

SEQ ID NO: 3517134 - RNA, 14 nt, Human
cagcaggaggccag

SEQ ID NO: 3517135 - RNA, 18 nt, Human
cagcaggaggccaggccg

SEQ ID NO: 3517136 - RNA, 15 nt, Human
cagcaggagggacag

SEQ ID NO: 3517137 - RNA, 22 nt, Human
cagcaggagggacagucucacc

SEQ ID NO: 3517138 - RNA, 16 nt, Human
cagcaggaguggugca

SEQ ID NO: 3517139 - RNA, 15 nt, Human
cagcaggcagccuug

SEQ ID NO: 3517140 - RNA, 13 nt, Human
cagcaggcagcgc

SEQ ID NO: 3517141 - RNA, 16 nt, Human
cagcaggcagcgccaa

SEQ ID NO: 3517142 - RNA, 21 nt, Human
cagcaggccagguccagagag

SEQ ID NO: 3517143 - RNA, 23 nt, Human
cagcaggccagguccagagagac

SEQ ID NO: 3517144 - RNA, 14 nt, Human
cagcaggcccaccu

SEQ ID NO: 3517145 - RNA, 23 nt, Human
cagcaggcggccuuuguugcuca

SEQ ID NO: 3517146 - RNA, 15 nt, Human
cagcaggcucucagg

SEQ ID NO: 3517147 - RNA, 16 nt, Human
cagcaggcucucaggc

SEQ ID NO: 3517148 - RNA, 17 nt, Human
cagcaggcucucaggcc

SEQ ID NO: 3517149 - RNA, 14 nt, Human
cagcaggcugccag

SEQ ID NO: 3517150 - RNA, 18 nt, Human
cagcaggcugccagugcc

SEQ ID NO: 3517151 - RNA, 22 nt, Human
cagcagggaaaaugcagcaggg

SEQ ID NO: 3517152 - RNA, 23 nt, Human
cagcagggaaaaugcagcaggga

SEQ ID NO: 3517153 - RNA, 18 nt, Human
cagcagggaugcccugga

SEQ ID NO: 3517154 - RNA, 16 nt, Human
cagcagggccacuccc

SEQ ID NO: 3517155 - RNA, 17 nt, Human
cagcagggccacucccg

SEQ ID NO: 3517156 - RNA, 11 nt, Human
cagcagggcua

SEQ ID NO: 3517157 - RNA, 20 nt, Human
cagcaggguagucugguuuc

SEQ ID NO: 3517158 - RNA, 21 nt, Human
cagcaggugauuggaccaggc

SEQ ID NO: 3517159 - RNA, 11 nt, Human
cagcaggugcu

SEQ ID NO: 3517160 - RNA, 19 nt, Human
cagcaggugcugcuacccu

SEQ ID NO: 3517161 - RNA, 13 nt, Human
cagcaguagacau

SEQ ID NO: 3517162 - RNA, 15 nt, Human
cagcaguagacauuu

SEQ ID NO: 3517163 - RNA, 19 nt, Human
cagcagucgguuggagcga

SEQ ID NO: 3517164 - RNA, 13 nt, Human
cagcagucucugc

SEQ ID NO: 3517165 - RNA, 21 nt, Human
cagcagucuuaugcuuccaga

SEQ ID NO: 3517166 - RNA, 14 nt, Human
cagcagugaaaaca

SEQ ID NO: 3517167 - RNA, 17 nt, Human
cagcagugaaaacaagu

SEQ ID NO: 3517168 - RNA, 16 nt, Human
cagcagugagagcaga

SEQ ID NO: 3517169 - RNA, 21 nt, Human
cagcagugagucucuucagaa

SEQ ID NO: 3517170 - RNA, 16 nt, Human
cagcagugucaucaga

SEQ ID NO: 3517171 - RNA, 17 nt, Human
cagcagugugaggccag

SEQ ID NO: 3517172 - RNA, 19 nt, Human
cagcagugugaggccaggg

SEQ ID NO: 3517173 - RNA, 21 nt, Human
cagcaguguuccccaucuggg

SEQ ID NO: 3517174 - RNA, 22 nt, Human
cagcaguguuccccaucugggu

SEQ ID NO: 3517175 - RNA, 23 nt, Human
cagcaguuccggauuggcuugug

SEQ ID NO: 3517176 - RNA, 22 nt, Human
cagcaguugaaaagacuccaaa

SEQ ID NO: 3517177 - RNA, 21 nt, Human
cagcaguugcugguaaaauga

SEQ ID NO: 3517178 - RNA, 18 nt, Human
auuucaguaagucucaua

SEQ ID NO: 3517179 - RNA, 17 nt, Human
auuucaguacuucagca

SEQ ID NO: 3517180 - RNA, 14 nt, Human
auuucagugccaau

SEQ ID NO: 3517181 - RNA, 16 nt, Human
auuucaguguaguuaa

SEQ ID NO: 3517182 - RNA, 19 nt, Human
auuucaguguuaccugugu

SEQ ID NO: 3517183 - RNA, 22 nt, Human
auuucaguuauugucccuggcu

SEQ ID NO: 3517184 - RNA, 10 nt, Human
auuucaguuu

SEQ ID NO: 3517185 - RNA, 12 nt, Human
auuucauaaaga

SEQ ID NO: 3517186 - RNA, 23 nt, Human
auuucauaauuuguuuccagcau

SEQ ID NO: 3517187 - RNA, 20 nt, Human
auuucauaccuaucaucuua

SEQ ID NO: 3517188 - RNA, 16 nt, Human
auuucauaguucagaa

SEQ ID NO: 3517189 - RNA, 15 nt, Human
auuucaucacaagaa

SEQ ID NO: 3517190 - RNA, 19 nt, Human
auuucaucacaagaacaca

SEQ ID NO: 3517191 - RNA, 17 nt, Human
auuucaucagaacagcu

SEQ ID NO: 3517192 - RNA, 18 nt, Human
auuucaucauauuauaca

SEQ ID NO: 3517193 - RNA, 19 nt, Human
auuucauccuuucacuucu

SEQ ID NO: 3517194 - RNA, 13 nt, Human
auuucaucuauuu

SEQ ID NO: 3517195 - RNA, 18 nt, Human
auuucaucuauuucugag

SEQ ID NO: 3517196 - RNA, 15 nt, Human
auuucaucucauuua

SEQ ID NO: 3517197 - RNA, 16 nt, Human
auuucaucugcucucc

SEQ ID NO: 3517198 - RNA, 19 nt, Human
auuucaucugcucuccuuc

SEQ ID NO: 3517199 - RNA, 20 nt, Human
auuucaucugcucuccuucc

SEQ ID NO: 3517200 - RNA, 20 nt, Human
auuucaugcucugcaaaagg

SEQ ID NO: 3517201 - RNA, 16 nt, Human
auuucauguacugcau

SEQ ID NO: 3517202 - RNA, 21 nt, Human
auuucauguccauaaaagaga

SEQ ID NO: 3517203 - RNA, 22 nt, Human
auuucauguccugugucaguuu

SEQ ID NO: 3517204 - RNA, 23 nt, Human
auuucauguccugugucaguuua

SEQ ID NO: 3517205 - RNA, 14 nt, Human
auuucauguggcug

SEQ ID NO: 3517206 - RNA, 16 nt, Human
auuucauguggcugua

SEQ ID NO: 3517207 - RNA, 14 nt, Human
auuucauguugggu

SEQ ID NO: 3517208 - RNA, 14 nt, Human
auuucauuccuaac

SEQ ID NO: 3517209 - RNA, 14 nt, Human
auuucauucuucuc

SEQ ID NO: 3517210 - RNA, 18 nt, Human
auuucauugccuguguau

SEQ ID NO: 3517211 - RNA, 12 nt, Human
auuucauuucuu

SEQ ID NO: 3517212 - RNA, 22 nt, Human
auuucauuugugccagaaugcu

SEQ ID NO: 3517213 - RNA, 23 nt, Human
auuucauuuuucaauagcacaua

SEQ ID NO: 3517214 - RNA, 16 nt, Human
auuucauuuuuugcau

SEQ ID NO: 3517215 - RNA, 16 nt, Human
auuuccaaagagaaaa

SEQ ID NO: 3517216 - RNA, 13 nt, Human
auuuccaaauaaa

SEQ ID NO: 3517217 - RNA, 18 nt, Human
auuuccaaauaaaaugag

SEQ ID NO: 3517218 - RNA, 17 nt, Human
auuuccaaaugaaugac

SEQ ID NO: 3517219 - RNA, 21 nt, Human
auuuccaacaccacagacaca

SEQ ID NO: 3517220 - RNA, 23 nt, Human
auuuccaacaccacagacacaca

SEQ ID NO: 3517221 - RNA, 21 nt, Human
auuuccaagcaaguauuagaa

SEQ ID NO: 3517222 - RNA, 19 nt, Human
auuuccaaguaauauaaug

SEQ ID NO: 3517223 - RNA, 22 nt, Human
auuuccacucaggucuguuuuc

SEQ ID NO: 3517224 - RNA, 13 nt, Human
auuuccacugugc

SEQ ID NO: 3517225 - RNA, 22 nt, Human
auuuccagaaccacacuugaaa

SEQ ID NO: 3517226 - RNA, 10 nt, Human
auuuccagag

SEQ ID NO: 3517227 - RNA, 17 nt, Human
auuuccagccaaagccu

SEQ ID NO: 3517228 - RNA, 21 nt, Human
auuuccagcuuucuccccgcu

SEQ ID NO: 3517229 - RNA, 22 nt, Human
auuuccagcuuucuccccgcua

SEQ ID NO: 3517230 - RNA, 13 nt, Human
auuuccaguaccu

SEQ ID NO: 3517231 - RNA, 13 nt, Human
auuuccagucucc

SEQ ID NO: 3517232 - RNA, 22 nt, Human
auuuccaguguucuaugaacaa

SEQ ID NO: 3517233 - RNA, 18 nt, Human
auuuccauguaugcauaa

SEQ ID NO: 3517234 - RNA, 20 nt, Human
auuuccauguccccucccag

SEQ ID NO: 3517235 - RNA, 17 nt, Human
auuuccauuauuuauau

SEQ ID NO: 3517236 - RNA, 16 nt, Human
auuuccauuccagaau

SEQ ID NO: 3517237 - RNA, 16 nt, Human
auuucccaaagcagug

SEQ ID NO: 3517238 - RNA, 18 nt, Human
auuucccaauuaggaagu

SEQ ID NO: 3517239 - RNA, 21 nt, Human
auuucccaggcugaauuggga

SEQ ID NO: 3517240 - RNA, 15 nt, Human
auuucccaucugcac

SEQ ID NO: 3517241 - RNA, 21 nt, Human
auuucccauuugugccagagg

SEQ ID NO: 3517242 - RNA, 15 nt, Human
auuuccccaacagug

SEQ ID NO: 3517243 - RNA, 17 nt, Human
auuuccccaacagugug

SEQ ID NO: 3517244 - RNA, 14 nt, Human
auuuccccagggca

SEQ ID NO: 3517245 - RNA, 14 nt, Human
auuucccccuuucu

SEQ ID NO: 3517246 - RNA, 18 nt, Human
auuucccccuuucuuccu

SEQ ID NO: 3517247 - RNA, 20 nt, Human
auuucccccuuucuuccuca

SEQ ID NO: 3517248 - RNA, 16 nt, Human
auuuccccuaaucuuu

SEQ ID NO: 3517249 - RNA, 22 nt, Human
auuuccccuuuugcauucuccc

SEQ ID NO: 3517250 - RNA, 21 nt, Human
auuucccguggccccagccug

SEQ ID NO: 3517251 - RNA, 22 nt, Human
auuucccguggccccagccugg

SEQ ID NO: 3517252 - RNA, 20 nt, Human
auuucccuacauuaaacaug

SEQ ID NO: 3517253 - RNA, 23 nt, Human
auuucccuucuugcauccuuccu

SEQ ID NO: 3517254 - RNA, 23 nt, Human
auuuccgcacuucagaauuccau

SEQ ID NO: 3517255 - RNA, 14 nt, Human
auuuccuaaauaua

SEQ ID NO: 3517256 - RNA, 18 nt, Human
auuuccuaguucuguaga

SEQ ID NO: 3517257 - RNA, 15 nt, Human
auuuccuauaccauu

SEQ ID NO: 3517258 - RNA, 21 nt, Human
auuuccuaugauguauacugc

SEQ ID NO: 3517259 - RNA, 13 nt, Human
auuuccuccuggc

SEQ ID NO: 3517260 - RNA, 18 nt, Human
auuuccucuauugaugua

SEQ ID NO: 3517261 - RNA, 19 nt, Human
auuuccucuauugauguac

SEQ ID NO: 3517262 - RNA, 19 nt, Human
auuuccucuguaaucuauu

SEQ ID NO: 3517263 - RNA, 14 nt, Human
auuuccuggauguu

SEQ ID NO: 3517264 - RNA, 15 nt, Human
auuuccuggauguuu

SEQ ID NO: 3517265 - RNA, 16 nt, Human
auuuccugugucaauc

SEQ ID NO: 3517266 - RNA, 18 nt, Human
auuuccuuaaacugugug

SEQ ID NO: 3517267 - RNA, 14 nt, Human
auuuccuuaaagca

SEQ ID NO: 3517268 - RNA, 10 nt, Human
auuuccuuua

SEQ ID NO: 3517269 - RNA, 16 nt, Human
auuuccuuuaugugaa

SEQ ID NO: 3517270 - RNA, 21 nt, Human
auuuccuuuaugugaauuuuu

SEQ ID NO: 3517271 - RNA, 19 nt, Human
auuuccuuuuugacacuga

SEQ ID NO: 3517272 - RNA, 19 nt, Human
auuuccuuuuuuguuauua

SEQ ID NO: 3517273 - RNA, 20 nt, Human
auuucggauuuuuuccaaaa

SEQ ID NO: 3517274 - RNA, 20 nt, Human
auuucuaaaaagauuagcaa

SEQ ID NO: 3517275 - RNA, 21 nt, Human
auuucuaaaucuccaaaauaa

SEQ ID NO: 3517276 - RNA, 22 nt, Human
auuucuaacucugauguaaaug

SEQ ID NO: 3517277 - RNA, 18 nt, Human
auuucuaauguuggacac

SEQ ID NO: 3517278 - RNA, 21 nt, Human
auuucuaauuauguagcucuu

SEQ ID NO: 3517279 - RNA, 17 nt, Human
auuucuaccauuucaga

SEQ ID NO: 3517280 - RNA, 15 nt, Human
auuucuacucuccca

SEQ ID NO: 3517281 - RNA, 16 nt, Human
auuucuacugugacug

SEQ ID NO: 3517282 - RNA, 21 nt, Human
auuucuagaacaucccugcca

SEQ ID NO: 3517283 - RNA, 23 nt, Human
auuucuaggacugaauuaugaaa

SEQ ID NO: 3517284 - RNA, 11 nt, Human
auuucuaggua

SEQ ID NO: 3517285 - RNA, 19 nt, Human
auuucuagguaggaaaugu

SEQ ID NO: 3517286 - RNA, 20 nt, Human
auuucuaguccaaaauuaca

SEQ ID NO: 3517287 - RNA, 18 nt, Human
auuucuaguuauuuauuc

SEQ ID NO: 3517288 - RNA, 16 nt, Human
auuucuauauuuucau

SEQ ID NO: 3517289 - RNA, 17 nt, Human
auuucuauauuuucauu

SEQ ID NO: 3517290 - RNA, 18 nt, Human
auuucuaugaaauauuau

SEQ ID NO: 3517291 - RNA, 17 nt, Human
auuucuaugagaaaaga

SEQ ID NO: 3517292 - RNA, 14 nt, Human
auuucuauuauuaa

SEQ ID NO: 3517293 - RNA, 16 nt, Human
auuucuauuuauuuac

SEQ ID NO: 3517294 - RNA, 17 nt, Human
auuucuauuuauuuacu

SEQ ID NO: 3517295 - RNA, 20 nt, Human
auuucuauuucuccuccaug

SEQ ID NO: 3517296 - RNA, 12 nt, Human
auuucuauuuuu

SEQ ID NO: 3517297 - RNA, 22 nt, Human
auuucucaacaaagcacagugu

SEQ ID NO: 3517298 - RNA, 24 nt, Human
auuucucagaagucuuucagcaag

SEQ ID NO: 3517299 - RNA, 22 nt, Human
auuucucauugacuuuuauaaa

SEQ ID NO: 3517300 - RNA, 12 nt, Human
auuucuccagaa

SEQ ID NO: 3517301 - RNA, 16 nt, Human
auuucuccagaaccca

SEQ ID NO: 3517302 - RNA, 11 nt, Human
auuucucccag

SEQ ID NO: 3517303 - RNA, 12 nt, Human
auuucuccuccc

SEQ ID NO: 3517304 - RNA, 21 nt, Human
auuucuccuuugauaaaauaa

SEQ ID NO: 3517305 - RNA, 17 nt, Human
auuucuccuuuuguguu

SEQ ID NO: 3517306 - RNA, 17 nt, Human
auuucucuaauuaugca

SEQ ID NO: 3517307 - RNA, 17 nt, Human
auuucucuacagauguc

SEQ ID NO: 3517308 - RNA, 22 nt, Human
auuucucuaguaguuaaaaaaa

SEQ ID NO: 3517309 - RNA, 21 nt, Human
auuucugaggugcacugggag

SEQ ID NO: 3517310 - RNA, 17 nt, Human
auuucugauauagaauu

SEQ ID NO: 3517311 - RNA, 13 nt, Human
auuucugauuuua

SEQ ID NO: 3517312 - RNA, 16 nt, Human
auuucugauuuuaugu

SEQ ID NO: 3517313 - RNA, 17 nt, Human
auuucugauuuuaugua

SEQ ID NO: 3517314 - RNA, 16 nt, Human
auuucugcagguucuu

SEQ ID NO: 3517315 - RNA, 15 nt, Human
auuucugccauuuca

SEQ ID NO: 3517316 - RNA, 18 nt, Human
auuucugccauuucaugu

SEQ ID NO: 3517317 - RNA, 16 nt, Human
auuucugccuuccuug

SEQ ID NO: 3517318 - RNA, 22 nt, Human
auuucugcugaauuuucacaug

SEQ ID NO: 3517319 - RNA, 17 nt, Human
auuucugcuuucuuuga

SEQ ID NO: 3517320 - RNA, 20 nt, Human
caggcccccgccuuggccug

SEQ ID NO: 3517321 - RNA, 22 nt, Human
caggccccgcuuguccagcgcc

SEQ ID NO: 3517322 - RNA, 12 nt, Human
auuuggaaaaua

SEQ ID NO: 3517323 - RNA, 13 nt, Human
auuuggaaaauaa

SEQ ID NO: 3517324 - RNA, 18 nt, Human
auuuggaaacuaauaaaa

SEQ ID NO: 3517325 - RNA, 15 nt, Human
auuuggaaauaaagu

SEQ ID NO: 3517326 - RNA, 20 nt, Human
auuuggaaaucuuuaaaaaa

SEQ ID NO: 3517327 - RNA, 16 nt, Human
auuuggaaccuuguuu

SEQ ID NO: 3517328 - RNA, 17 nt, Human
auuuggaaccuuguuuu

SEQ ID NO: 3517329 - RNA, 14 nt, Human
auuuggaauuagaa

SEQ ID NO: 3517330 - RNA, 15 nt, Human
auuuggaauucuguu

SEQ ID NO: 3517331 - RNA, 17 nt, Human
auuuggaccauuuuccu

SEQ ID NO: 3517332 - RNA, 15 nt, Human
auuuggagagaaaua

SEQ ID NO: 3517333 - RNA, 23 nt, Human
auuuggaggcuggaguaaucaga

SEQ ID NO: 3517334 - RNA, 16 nt, Human
auuuggagggccuggg

SEQ ID NO: 3517335 - RNA, 22 nt, Human
auuuggagggccugggccuggc

SEQ ID NO: 3517336 - RNA, 12 nt, Human
caggcugggaga

SEQ ID NO: 3517337 - RNA, 20 nt, Human
caggcugggagagccuucca

SEQ ID NO: 3517338 - RNA, 22 nt, Human
caggcugggagagccuuccagg

SEQ ID NO: 3517339 - RNA, 10 nt, Human
caggcugggc

SEQ ID NO: 3517340 - RNA, 17 nt, Human
caggcugggccaugucc

SEQ ID NO: 3517341 - RNA, 22 nt, Human
caggcugggccauguccaaaga

SEQ ID NO: 3517342 - RNA, 14 nt, Human
caggcugggcuggg

SEQ ID NO: 3517343 - RNA, 17 nt, Human
caggcugggcugggcac

SEQ ID NO: 3517344 - RNA, 16 nt, Human
caggcugggcuucagu

SEQ ID NO: 3517345 - RNA, 19 nt, Human
caggcugggcuucaguggc

SEQ ID NO: 3517346 - RNA, 23 nt, Human
caggcugggucgcccuggacugu

SEQ ID NO: 3517347 - RNA, 18 nt, Human
caggcugggugacagagc

SEQ ID NO: 3517348 - RNA, 14 nt, Human
caggcuggucucaa

SEQ ID NO: 3517349 - RNA, 20 nt, Human
caggcuggucuugaaguccu

SEQ ID NO: 3517350 - RNA, 15 nt, Human
caggcuggugggagg

SEQ ID NO: 3517351 - RNA, 21 nt, Human
caggcuguaucccaugagccu

SEQ ID NO: 3517352 - RNA, 16 nt, Human
caggcugugggccuca

SEQ ID NO: 3517353 - RNA, 22 nt, Human
caggcuguguuuggcuuucagg

SEQ ID NO: 3517354 - RNA, 18 nt, Human
caggcuguucugcacuga

SEQ ID NO: 3517355 - RNA, 20 nt, Human
caggcuguucugcacugaaa

SEQ ID NO: 3517356 - RNA, 21 nt, Human
caggcuguucugcacugaaaa

SEQ ID NO: 3517357 - RNA, 22 nt, Human
caggcuguucugcacugaaaag

SEQ ID NO: 3517358 - RNA, 21 nt, Human
caggcuuagucacugagacag

SEQ ID NO: 3517359 - RNA, 21 nt, Human
caggcuuaugaauauauuuaa

SEQ ID NO: 3517360 - RNA, 15 nt, Human
caggcuucacccuga

SEQ ID NO: 3517361 - RNA, 22 nt, Human
caggcuuccugcaauuuucuaa

SEQ ID NO: 3517362 - RNA, 17 nt, Human
caggcuucugcuggggc

SEQ ID NO: 3517363 - RNA, 19 nt, Human
caggcuucugcuggggccu

SEQ ID NO: 3517364 - RNA, 18 nt, Human
caggcuugccugcaggca

SEQ ID NO: 3517365 - RNA, 23 nt, Human
caggcuuuguuuauagcuugcgc

SEQ ID NO: 3517366 - RNA, 13 nt, Human
cagggaaagacug

SEQ ID NO: 3517367 - RNA, 15 nt, Human
cagggaaaggccagu

SEQ ID NO: 3517368 - RNA, 23 nt, Human
cagggaaccguuauuauaauugu

SEQ ID NO: 3517369 - RNA, 19 nt, Human
cagggaacuaggaaggcac

SEQ ID NO: 3517370 - RNA, 15 nt, Human
cagggaagagcagaa

SEQ ID NO: 3517371 - RNA, 19 nt, Human
cagggaagaggggugcaga

SEQ ID NO: 3517372 - RNA, 17 nt, Human
cagggaagcagcagccu

SEQ ID NO: 3517373 - RNA, 13 nt, Human
cagggaagcccag

SEQ ID NO: 3517374 - RNA, 18 nt, Human
cagggaagcccagcucca

SEQ ID NO: 3517375 - RNA, 23 nt, Human
cagggaagcccagcuccagggcc

SEQ ID NO: 3517376 - RNA, 23 nt, Human
cagggaagccccacauguccagc

SEQ ID NO: 3517377 - RNA, 16 nt, Human
cagggaagccuugugg

SEQ ID NO: 3517378 - RNA, 20 nt, Human
cagggaagcuacagguuaca

SEQ ID NO: 3517379 - RNA, 14 nt, Human
cagggaaggaggag

SEQ ID NO: 3517380 - RNA, 15 nt, Human
cagggaaggaggagc

SEQ ID NO: 3517381 - RNA, 13 nt, Human
cagggaaggcagg

SEQ ID NO: 3517382 - RNA, 18 nt, Human
cagggaaggcaggcaggg

SEQ ID NO: 3517383 - RNA, 16 nt, Human
cagggaaggccugacu

SEQ ID NO: 3517384 - RNA, 15 nt, Human
cagggaaggggacaa

SEQ ID NO: 3517385 - RNA, 16 nt, Human
cagggaaguccccagg

SEQ ID NO: 3517386 - RNA, 21 nt, Human
cagggaaguguaagaaacaca

SEQ ID NO: 3517387 - RNA, 18 nt, Human
cagggaauccaagccucc

SEQ ID NO: 3517388 - RNA, 16 nt, Human
cagggaauuucuaucu

SEQ ID NO: 3517389 - RNA, 17 nt, Human
cagggacaaagaggccu

SEQ ID NO: 3517390 - RNA, 18 nt, Human
cagggacaaagaggccuu

SEQ ID NO: 3517391 - RNA, 19 nt, Human
cagggacaccagccaggcu

SEQ ID NO: 3517392 - RNA, 22 nt, Human
cagggacaccagccaggcucug

SEQ ID NO: 3517393 - RNA, 17 nt, Human
cagggacacgggcagcc

SEQ ID NO: 3517394 - RNA, 14 nt, Human
cagggacagaggcc

SEQ ID NO: 3517395 - RNA, 16 nt, Human
cagggacagaggcccc

SEQ ID NO: 3517396 - RNA, 20 nt, Human
cagggacagaggggguggcc

SEQ ID NO: 3517397 - RNA, 14 nt, Human
cagggaccaaggac

SEQ ID NO: 3517398 - RNA, 22 nt, Human
cagggaccacacccuguacugu

SEQ ID NO: 3517399 - RNA, 13 nt, Human
cagggaccacagc

SEQ ID NO: 3517400 - RNA, 15 nt, Human
cagggaccacagcaa

SEQ ID NO: 3517401 - RNA, 15 nt, Human
cagggaccccagaau

SEQ ID NO: 3517402 - RNA, 22 nt, Human
cagggacgaagaagagccacag

SEQ ID NO: 3517403 - RNA, 23 nt, Human
cagggacgaagaagagccacagu

SEQ ID NO: 3517404 - RNA, 20 nt, Human
cagggacugaaaaccucucc

SEQ ID NO: 3517405 - RNA, 19 nt, Human
cagggacuugaaguuguua

SEQ ID NO: 3517406 - RNA, 21 nt, Human
cagggagacgguuuccaggga

SEQ ID NO: 3517407 - RNA, 14 nt, Human
cagggagagcccag

SEQ ID NO: 3517408 - RNA, 16 nt, Human
cagggagaggccauga

SEQ ID NO: 3517409 - RNA, 17 nt, Human
cagggagagggggcugg

SEQ ID NO: 3517410 - RNA, 20 nt, Human
cagggagcagggaaggccug

SEQ ID NO: 3517411 - RNA, 21 nt, Human
cagggagcaugagaggaggca

SEQ ID NO: 3517412 - RNA, 19 nt, Human
cagggagcauggcugugag

SEQ ID NO: 3517413 - RNA, 20 nt, Human
cagggagcauuuuccuccau

SEQ ID NO: 3517414 - RNA, 13 nt, Human
cagggagccuccu

SEQ ID NO: 3517415 - RNA, 15 nt, Human
cagggagccuccugc

SEQ ID NO: 3517416 - RNA, 16 nt, Human
cagggagccuccugcc

SEQ ID NO: 3517417 - RNA, 13 nt, Human
cagggagcggaaa

SEQ ID NO: 3517418 - RNA, 18 nt, Human
cagggagcggaaagcagc

SEQ ID NO: 3517419 - RNA, 19 nt, Human
cagggagcggaaagcagcu

SEQ ID NO: 3517420 - RNA, 19 nt, Human
cagggagcggccggccagc

SEQ ID NO: 3517421 - RNA, 21 nt, Human
cagggagcggccggccagccc

SEQ ID NO: 3517422 - RNA, 14 nt, Human
cagggagcugcagg

SEQ ID NO: 3517423 - RNA, 15 nt, Human
cagggagcugcaggg

SEQ ID NO: 3517424 - RNA, 17 nt, Human
cagggagcugcaggggc

SEQ ID NO: 3517425 - RNA, 15 nt, Human
cagggagcugggaca

SEQ ID NO: 3517426 - RNA, 22 nt, Human
cagggaggacgcucucuggccu

SEQ ID NO: 3517427 - RNA, 13 nt, Human
cagggaggcacca

SEQ ID NO: 3517428 - RNA, 12 nt, Human
cagggaggccga

SEQ ID NO: 3517429 - RNA, 13 nt, Human
cagggagggccug

SEQ ID NO: 3517430 - RNA, 17 nt, Human
cagggagggccugggcc

SEQ ID NO: 3517431 - RNA, 16 nt, Human
cagggaggggaagagg

SEQ ID NO: 3517432 - RNA, 12 nt, Human
cagggaggggac

SEQ ID NO: 3517433 - RNA, 19 nt, Human
cagggaggggacuauuuau

SEQ ID NO: 3517434 - RNA, 12 nt, Human
cagggaggggcc

SEQ ID NO: 3517435 - RNA, 16 nt, Human
cagggaggggccggcc

SEQ ID NO: 3517436 - RNA, 21 nt, Human
cagggaggggccggcccugug

SEQ ID NO: 3517437 - RNA, 19 nt, Human
cagggaggucaggcccugg

SEQ ID NO: 3517438 - RNA, 16 nt, Human
cagggagguccgggag

SEQ ID NO: 3517439 - RNA, 23 nt, Human
cagggaggugugaggcaggagag

SEQ ID NO: 3517440 - RNA, 23 nt, Human
cagggagguuaagugacuugccc

SEQ ID NO: 3517441 - RNA, 23 nt, Human
cagggaguccccuccccggcccu

SEQ ID NO: 3517442 - RNA, 14 nt, Human
cagggagugcuggc

SEQ ID NO: 3517443 - RNA, 22 nt, Human
cagggagugcuggcucacagua

SEQ ID NO: 3517444 - RNA, 17 nt, Human
cagggaucuugcauucc

SEQ ID NO: 3517445 - RNA, 21 nt, Human
cagggaugcccuggagguggc

SEQ ID NO: 3517446 - RNA, 20 nt, Human
cagggauggccguuggccac

SEQ ID NO: 3517447 - RNA, 18 nt, Human
cagggauggggccacagc

SEQ ID NO: 3517448 - RNA, 12 nt, Human
cagggauguggg

SEQ ID NO: 3517449 - RNA, 13 nt, Human
cagggaugugggu

SEQ ID NO: 3517450 - RNA, 18 nt, Human
cagggauuaaccucugca

SEQ ID NO: 3517451 - RNA, 16 nt, Human
cagggauugauuuuaa

SEQ ID NO: 3517452 - RNA, 21 nt, Human
cagggauugauuuuaaaaugu

SEQ ID NO: 3517453 - RNA, 18 nt, Human
cagggauuguuucuguuu

SEQ ID NO: 3517454 - RNA, 13 nt, Human
cagggauuugagg

SEQ ID NO: 3517455 - RNA, 21 nt, Human
cagggcaaaauauucacuggg

SEQ ID NO: 3517456 - RNA, 13 nt, Human
cagggcaaagcca

SEQ ID NO: 3517457 - RNA, 14 nt, Human
cagggcaaagccag

SEQ ID NO: 3517458 - RNA, 17 nt, Human
cagggcaaagccagguc

SEQ ID NO: 3517459 - RNA, 22 nt, Human
cagggcaaaugacaugcacuga

SEQ ID NO: 3517460 - RNA, 18 nt, Human
cagggcaagcuccgcagg

SEQ ID NO: 3517461 - RNA, 22 nt, Human
cagggcaaggguuaaggccuga

SEQ ID NO: 3517462 - RNA, 12 nt, Human
cagggcacagga

SEQ ID NO: 3517463 - RNA, 15 nt, Human
cagggcacaggagcu

SEQ ID NO: 3517464 - RNA, 21 nt, Human
cagggcacaggagcuaccugu

SEQ ID NO: 3517465 - RNA, 15 nt, Human
cagggcacaggccau

SEQ ID NO: 3517466 - RNA, 23 nt, Human
cagucagauuuccagucuccacc

SEQ ID NO: 3517467 - RNA, 14 nt, Human
cagucagccucucu

SEQ ID NO: 3517468 - RNA, 22 nt, Human
cagucagcucuucaucugccca

SEQ ID NO: 3517469 - RNA, 18 nt, Human
cagucaggaaagagaacu

SEQ ID NO: 3517470 - RNA, 19 nt, Human
cagucaggcucucugggcu

SEQ ID NO: 3517471 - RNA, 16 nt, Human
cagucaucaucagggc

SEQ ID NO: 3517472 - RNA, 19 nt, Human
cagucaucaucagggccug

SEQ ID NO: 3517473 - RNA, 20 nt, Human
cagucaucaucagggccugg

SEQ ID NO: 3517474 - RNA, 22 nt, Human
cagucaucaucagggccugggg

SEQ ID NO: 3517475 - RNA, 23 nt, Human
cagucaucaucagggccuggggc

SEQ ID NO: 3517476 - RNA, 22 nt, Human
cagucaucguaggugauuugaa

SEQ ID NO: 3517477 - RNA, 19 nt, Human
cagucaugcauaaauaugc

SEQ ID NO: 3517478 - RNA, 20 nt, Human
cagucaugcauaaauaugca

SEQ ID NO: 3517479 - RNA, 23 nt, Human
cagucaugcauaaauaugcagug

SEQ ID NO: 3517480 - RNA, 19 nt, Human
cagucauuaaauuacuaua

SEQ ID NO: 3517481 - RNA, 22 nt, Human
cagucauuagacuccuccucca

SEQ ID NO: 3517482 - RNA, 13 nt, Human
cagucauuaugag

SEQ ID NO: 3517483 - RNA, 21 nt, Human
cagucauuggcugucuccuag

SEQ ID NO: 3517484 - RNA, 11 nt, Human
cagucauuuaa

SEQ ID NO: 3517485 - RNA, 18 nt, Human
caguccaaauguccucca

SEQ ID NO: 3517486 - RNA, 22 nt, Human
caguccaaggaaaccacagcug

SEQ ID NO: 3517487 - RNA, 18 nt, Human
caguccacccugccugcc

SEQ ID NO: 3517488 - RNA, 15 nt, Human
caguccaccugagcu

SEQ ID NO: 3517489 - RNA, 20 nt, Human
caguccaccugagcugccau

SEQ ID NO: 3517490 - RNA, 20 nt, Human
caguccaccugaggaacugu

SEQ ID NO: 3517491 - RNA, 20 nt, Human
caguccacuucugacagccu

SEQ ID NO: 3517492 - RNA, 17 nt, Human
caguccagccuggagau

SEQ ID NO: 3517493 - RNA, 19 nt, Human
cagucccaaauccuuccca

SEQ ID NO: 3517494 - RNA, 19 nt, Human
cagucccaagcggugucuc

SEQ ID NO: 3517495 - RNA, 21 nt, Human
cagucccaagcggugucucuc

SEQ ID NO: 3517496 - RNA, 16 nt, Human
cagucccaaugcacau

SEQ ID NO: 3517497 - RNA, 15 nt, Human
cagucccagagcagg

SEQ ID NO: 3517498 - RNA, 13 nt, Human
cagucccagcagc

SEQ ID NO: 3517499 - RNA, 17 nt, Human
caguccccaccccugcc

SEQ ID NO: 3517500 - RNA, 18 nt, Human
caguccccaccccugccc

SEQ ID NO: 3517501 - RNA, 19 nt, Human
caguccccaccccugcccc

SEQ ID NO: 3517502 - RNA, 20 nt, Human
caguccccagaacucugccu

SEQ ID NO: 3517503 - RNA, 16 nt, Human
cagucccccaacccca

SEQ ID NO: 3517504 - RNA, 14 nt, Human
caguccccccaccc

SEQ ID NO: 3517505 - RNA, 21 nt, Human
cagucccccuauccuuggcac

SEQ ID NO: 3517506 - RNA, 17 nt, Human
cagucccccugccccag

SEQ ID NO: 3517507 - RNA, 18 nt, Human
caguccccgugccccgcc

SEQ ID NO: 3517508 - RNA, 12 nt, Human
caguccccuccc

SEQ ID NO: 3517509 - RNA, 23 nt, Human
cagucccugagaccauuuaacau

SEQ ID NO: 3517510 - RNA, 14 nt, Human
cagucccugaggca

SEQ ID NO: 3517511 - RNA, 20 nt, Human
cagucccugaggcagguccc

SEQ ID NO: 3517512 - RNA, 23 nt, Human
cagucccugaggcagguccccag

SEQ ID NO: 3517513 - RNA, 12 nt, Human
cagucccugcca

SEQ ID NO: 3517514 - RNA, 20 nt, Human
cagucccugggggaagcccu

SEQ ID NO: 3517515 - RNA, 15 nt, Human
caguccuaagaaaga

SEQ ID NO: 3517516 - RNA, 15 nt, Human
caguccuacucaagc

SEQ ID NO: 3517517 - RNA, 13 nt, Human
caguccuagcugc

SEQ ID NO: 3517518 - RNA, 23 nt, Human
caguccuagcugcacagggcagc

SEQ ID NO: 3517519 - RNA, 21 nt, Human
caguccuaucugggcuuccug

SEQ ID NO: 3517520 - RNA, 15 nt, Human
caguccucccaucuc

SEQ ID NO: 3517521 - RNA, 14 nt, Human
caguccuccccuca

SEQ ID NO: 3517522 - RNA, 18 nt, Human
caguccuccccucacagc

SEQ ID NO: 3517523 - RNA, 20 nt, Human
caguccuccccucacagccu

SEQ ID NO: 3517524 - RNA, 21 nt, Human
caguccuccccucacagccuc

SEQ ID NO: 3517525 - RNA, 22 nt, Human
caguccuccccucacagccucu

SEQ ID NO: 3517526 - RNA, 20 nt, Human
caguccuccgguugcauacu

SEQ ID NO: 3517527 - RNA, 21 nt, Human
caguccucucccaaguccaca

SEQ ID NO: 3517528 - RNA, 13 nt, Human
caguccugcucuc

SEQ ID NO: 3517529 - RNA, 13 nt, Human
caguccuggccug

SEQ ID NO: 3517530 - RNA, 12 nt, Human
caguccugggag

SEQ ID NO: 3517531 - RNA, 21 nt, Human
caguccugggagaaccucagg

SEQ ID NO: 3517532 - RNA, 19 nt, Human
caggaaggagcugccugga

SEQ ID NO: 3517533 - RNA, 21 nt, Human
caggaaggagcugccuggacc

SEQ ID NO: 3517534 - RNA, 18 nt, Human
caggaaggaugagcauuu

SEQ ID NO: 3517535 - RNA, 13 nt, Human
caggaaggccugg

SEQ ID NO: 3517536 - RNA, 20 nt, Human
caggaagggaugcaggcucc

SEQ ID NO: 3517537 - RNA, 22 nt, Human
caggaagggccuacagcccauu

SEQ ID NO: 3517538 - RNA, 21 nt, Human
caggaaggggguccacccagc

SEQ ID NO: 3517539 - RNA, 16 nt, Human
caggaaguagaggagg

SEQ ID NO: 3517540 - RNA, 17 nt, Human
caggaaguagcacaggc

SEQ ID NO: 3517541 - RNA, 21 nt, Human
caggaaguccuuaucuagcug

SEQ ID NO: 3517542 - RNA, 16 nt, Human
caggaagucuucaggg

SEQ ID NO: 3517543 - RNA, 23 nt, Human
caggaauaaggccuuaauauguu

SEQ ID NO: 3517544 - RNA, 17 nt, Human
caggaauauaugugugc

SEQ ID NO: 3517545 - RNA, 16 nt, Human
caggaaucaagagcug

SEQ ID NO: 3517546 - RNA, 16 nt, Human
caggaaucaguuuaaa

SEQ ID NO: 3517547 - RNA, 19 nt, Human
caggaaucuguauauauuu

SEQ ID NO: 3517548 - RNA, 18 nt, Human
caggaauuugggacccug

SEQ ID NO: 3517549 - RNA, 21 nt, Human
caggaauuugggacccugcuu

SEQ ID NO: 3517550 - RNA, 23 nt, Human
caggaauuugggacccugcuuua

SEQ ID NO: 3517551 - RNA, 16 nt, Human
caggacaacgaggaag

SEQ ID NO: 3517552 - RNA, 14 nt, Human
caggacaagcaugg

SEQ ID NO: 3517553 - RNA, 18 nt, Human
caggacacaggccugugu

SEQ ID NO: 3517554 - RNA, 19 nt, Human
caggacacaggccugugua

SEQ ID NO: 3517555 - RNA, 13 nt, Human
caggacacaguca

SEQ ID NO: 3517556 - RNA, 15 nt, Human
caggacacagucaga

SEQ ID NO: 3517557 - RNA, 19 nt, Human
caggacaccacacccagcc

SEQ ID NO: 3517558 - RNA, 21 nt, Human
caggacaccacacccagccuc

SEQ ID NO: 3517559 - RNA, 15 nt, Human
caggacagcauggug

SEQ ID NO: 3517560 - RNA, 17 nt, Human
caggacaggagaugcug

SEQ ID NO: 3517561 - RNA, 21 nt, Human
caggacaggagaugcugugcc

SEQ ID NO: 3517562 - RNA, 12 nt, Human
caggacaggccc

SEQ ID NO: 3517563 - RNA, 16 nt, Human
caggacagggguuccu

SEQ ID NO: 3517564 - RNA, 16 nt, Human
caggacagugcuucag

SEQ ID NO: 3517565 - RNA, 20 nt, Human
caggacagugcuucagccug

SEQ ID NO: 3517566 - RNA, 21 nt, Human
caggacaugcgguagccagca

SEQ ID NO: 3517567 - RNA, 22 nt, Human
caggacaugcgguagccagcac

SEQ ID NO: 3517568 - RNA, 13 nt, Human
caggacaugcuga

SEQ ID NO: 3517569 - RNA, 12 nt, Human
caggacauuucu

SEQ ID NO: 3517570 - RNA, 15 nt, Human
caggaccaagccaca

SEQ ID NO: 3517571 - RNA, 12 nt, Human
caggaccacaaa

SEQ ID NO: 3517572 - RNA, 16 nt, Human
caggaccacaggcuca

SEQ ID NO: 3517573 - RNA, 17 nt, Human
caggaccacaggcucag

SEQ ID NO: 3517574 - RNA, 23 nt, Human
caggaccacaggcucaggcaggg

SEQ ID NO: 3517575 - RNA, 20 nt, Human
caggaccagccagcagcagc

SEQ ID NO: 3517576 - RNA, 13 nt, Human
caggaccagcuca

SEQ ID NO: 3517577 - RNA, 14 nt, Human
caggaccagcucag

SEQ ID NO: 3517578 - RNA, 14 nt, Human
caggaccagcuggg

SEQ ID NO: 3517579 - RNA, 13 nt, Human
caggaccaggacu

SEQ ID NO: 3517580 - RNA, 13 nt, Human
caggaccagggau

SEQ ID NO: 3517581 - RNA, 21 nt, Human
caggaccagggauuuccauga

SEQ ID NO: 3517582 - RNA, 19 nt, Human
caggaccaggguuggcacc

SEQ ID NO: 3517583 - RNA, 16 nt, Human
caggaccaucuucccg

SEQ ID NO: 3517584 - RNA, 14 nt, Human
caggacccagagga

SEQ ID NO: 3517585 - RNA, 21 nt, Human
caggacccaucacgccugugc

SEQ ID NO: 3517586 - RNA, 12 nt, Human
caggaccccagc

SEQ ID NO: 3517587 - RNA, 14 nt, Human
caggaccccagcuc

SEQ ID NO: 3517588 - RNA, 16 nt, Human
caggacccccuucccc

SEQ ID NO: 3517589 - RNA, 17 nt, Human
caggacccucgcuggcc

SEQ ID NO: 3517590 - RNA, 19 nt, Human
caggacccucgcuggcccc

SEQ ID NO: 3517591 - RNA, 22 nt, Human
caggacccucgcuggcccccac

SEQ ID NO: 3517592 - RNA, 18 nt, Human
caggacccugaaggggcc

SEQ ID NO: 3517593 - RNA, 12 nt, Human
caggacccugcc

SEQ ID NO: 3517594 - RNA, 13 nt, Human
caggacccugcca

SEQ ID NO: 3517595 - RNA, 15 nt, Human
caggacccugccagg

SEQ ID NO: 3517596 - RNA, 19 nt, Human
caggacccugccaggcaca

SEQ ID NO: 3517597 - RNA, 17 nt, Human
caggacccuggacccag

SEQ ID NO: 3517598 - RNA, 17 nt, Human
caggacccuggaccuga

SEQ ID NO: 3517599 - RNA, 15 nt, Human
caggaccgccaaaga

SEQ ID NO: 3517600 - RNA, 23 nt, Human
caggaccucaggugagaagcaga

SEQ ID NO: 3517601 - RNA, 20 nt, Human
caggaccucccuuccgaccc

SEQ ID NO: 3517602 - RNA, 23 nt, Human
caggaccucccuuccgacccucu

SEQ ID NO: 3517603 - RNA, 13 nt, Human
caggaccugacua

SEQ ID NO: 3517604 - RNA, 17 nt, Human
caggaccuggcugccau

SEQ ID NO: 3517605 - RNA, 20 nt, Human
caggaccuucgggcugugcc

SEQ ID NO: 3517606 - RNA, 13 nt, Human
caggaccuuuuga

SEQ ID NO: 3517607 - RNA, 19 nt, Human
caggacgcugaccguggag

SEQ ID NO: 3517608 - RNA, 21 nt, Human
caggacgcuucugaaugcugc

SEQ ID NO: 3517609 - RNA, 17 nt, Human
caggacgugggcugggc

SEQ ID NO: 3517610 - RNA, 16 nt, Human
caaaagggugucugag

SEQ ID NO: 3517611 - RNA, 20 nt, Human
caaaagggugucugagcccu

SEQ ID NO: 3517612 - RNA, 22 nt, Human
caaaaggugccugugaggcagg

SEQ ID NO: 3517613 - RNA, 19 nt, Human
caaaagguucacuaaagca

SEQ ID NO: 3517614 - RNA, 11 nt, Human
caaaagguuua

SEQ ID NO: 3517615 - RNA, 16 nt, Human
caaaaguaucgggggc

SEQ ID NO: 3517616 - RNA, 15 nt, Human
caaaaguauuuuccu

SEQ ID NO: 3517617 - RNA, 19 nt, Human
caaaaguauuuuccuguaa

SEQ ID NO: 3517618 - RNA, 13 nt, Human
caaaagugcuuug

SEQ ID NO: 3517619 - RNA, 14 nt, Human
caaaagugcuuugg

SEQ ID NO: 3517620 - RNA, 16 nt, Human
caaaaguggccucuuu

SEQ ID NO: 3517621 - RNA, 17 nt, Human
caaaaguggccucuuug

SEQ ID NO: 3517622 - RNA, 16 nt, Human
caaaaguuacauguuu

SEQ ID NO: 3517623 - RNA, 18 nt, Human
caaaaguuacauguuugc

SEQ ID NO: 3517624 - RNA, 19 nt, Human
caaaaguuacauguuugca

SEQ ID NO: 3517625 - RNA, 17 nt, Human
caaaaguuagcugagcg

SEQ ID NO: 3517626 - RNA, 18 nt, Human
caaaaguuauuaaaauug

SEQ ID NO: 3517627 - RNA, 22 nt, Human
caaaaguuauuaaaauuguugu

SEQ ID NO: 3517628 - RNA, 21 nt, Human
caaaaguucccugaaacacga

SEQ ID NO: 3517629 - RNA, 15 nt, Human
caaaaguucugacuu

SEQ ID NO: 3517630 - RNA, 15 nt, Human
caaaaguuuuccuga

SEQ ID NO: 3517631 - RNA, 22 nt, Human
caaaauaaaaagugacacagca

SEQ ID NO: 3517632 - RNA, 15 nt, Human
caaaauaaaacaaag

SEQ ID NO: 3517633 - RNA, 18 nt, Human
caaaauaaaacauagcaa

SEQ ID NO: 3517634 - RNA, 19 nt, Human
caaaauaaaacauagcaaa

SEQ ID NO: 3517635 - RNA, 14 nt, Human
caaaauaaaacuuu

SEQ ID NO: 3517636 - RNA, 18 nt, Human
caaaauaaaguuacauug

SEQ ID NO: 3517637 - RNA, 22 nt, Human
caaaauaaaucagugggauuug

SEQ ID NO: 3517638 - RNA, 15 nt, Human
caaaauaagaaaaga

SEQ ID NO: 3517639 - RNA, 17 nt, Human
caaaauaauaaaaauca

SEQ ID NO: 3517640 - RNA, 15 nt, Human
caaaauaaugucuug

SEQ ID NO: 3517641 - RNA, 17 nt, Human
caaaauaaugucuuguu

SEQ ID NO: 3517642 - RNA, 14 nt, Human
caaaauacaugaag

SEQ ID NO: 3517643 - RNA, 17 nt, Human
caaaauacaugaagcuu

SEQ ID NO: 3517644 - RNA, 22 nt, Human
caaaauacaugaagcuucaugc

SEQ ID NO: 3517645 - RNA, 23 nt, Human
caaaauauuaugcaaacuacugu

SEQ ID NO: 3517646 - RNA, 18 nt, Human
caaaauauuuaaaaaugu

SEQ ID NO: 3517647 - RNA, 16 nt, Human
caaaauauuuuuaaaa

SEQ ID NO: 3517648 - RNA, 19 nt, Human
caaaaucaagcaagccucu

SEQ ID NO: 3517649 - RNA, 15 nt, Human
caaaaucagguaacu

SEQ ID NO: 3517650 - RNA, 16 nt, Human
caaaaucauuuuaaug

SEQ ID NO: 3517651 - RNA, 22 nt, Human
caaaauccaaaaagaaaugaug

SEQ ID NO: 3517652 - RNA, 12 nt, Human
caaaauccccuu

SEQ ID NO: 3517653 - RNA, 21 nt, Human
caaaaucucuccacuuucagc

SEQ ID NO: 3517654 - RNA, 17 nt, Human
caaaaucuguucuaaca

SEQ ID NO: 3517655 - RNA, 11 nt, Human
caaaaugaaac

SEQ ID NO: 3517656 - RNA, 15 nt, Human
caaaaugacaaugau

SEQ ID NO: 3517657 - RNA, 19 nt, Human
caaaaugacaucuuuuuaa

SEQ ID NO: 3517658 - RNA, 20 nt, Human
caaaaugagaucucauuaaa

SEQ ID NO: 3517659 - RNA, 18 nt, Human
caaaaugaggaauguaua

SEQ ID NO: 3517660 - RNA, 19 nt, Human
caaaaugaggaauguauau

SEQ ID NO: 3517661 - RNA, 23 nt, Human
caaaaugcuuuuuauuucugcau

SEQ ID NO: 3517662 - RNA, 17 nt, Human
caaaauggaauaaaagg

SEQ ID NO: 3517663 - RNA, 18 nt, Human
caaaauggauaaaaucug

SEQ ID NO: 3517664 - RNA, 16 nt, Human
caaaauggauacauaa

SEQ ID NO: 3517665 - RNA, 15 nt, Human
caaaauggcuucagu

SEQ ID NO: 3517666 - RNA, 11 nt, Human
caaaauguaac

SEQ ID NO: 3517667 - RNA, 12 nt, Human
caaaauguaacu

SEQ ID NO: 3517668 - RNA, 13 nt, Human
caaaauguaacug

SEQ ID NO: 3517669 - RNA, 22 nt, Human
caaaaugucuguagcuccucaa

SEQ ID NO: 3517670 - RNA, 19 nt, Human
caaaaugugagugguugaa

SEQ ID NO: 3517671 - RNA, 14 nt, Human
caaaauguguauuu

SEQ ID NO: 3517672 - RNA, 20 nt, Human
caaaauguguauuucuuaua

SEQ ID NO: 3517673 - RNA, 21 nt, Human
caaaauguuaucuucucaagu

SEQ ID NO: 3517674 - RNA, 16 nt, Human
caaaauguuauuuccc

SEQ ID NO: 3517675 - RNA, 21 nt, Human
caaaauguuggucauuuuaug

SEQ ID NO: 3517676 - RNA, 22 nt, Human
caaaauuaagcaaauguuaaaa

SEQ ID NO: 3517677 - RNA, 13 nt, Human
caaaauuagccag

SEQ ID NO: 3517678 - RNA, 22 nt, Human
caaaauuauaggagacuuguag

SEQ ID NO: 3517679 - RNA, 15 nt, Human
caaaauucaaagcau

SEQ ID NO: 3517680 - RNA, 19 nt, Human
caaaauugacauugcuuua

SEQ ID NO: 3517681 - RNA, 23 nt, Human
caaaauugggaaaggaguagaaa

SEQ ID NO: 3517682 - RNA, 21 nt, Human
caaaauuuaguuuuuguucuu

SEQ ID NO: 3517683 - RNA, 20 nt, Human
caaaauuuauuuuauaagaa

SEQ ID NO: 3517684 - RNA, 21 nt, Human
caaaauuuauuuuauaagaaa

SEQ ID NO: 3517685 - RNA, 12 nt, Human
caaaauuugaaa

SEQ ID NO: 3517686 - RNA, 22 nt, Human
caaaauuugcugccaaaugcgu

SEQ ID NO: 3517687 - RNA, 23 nt, Human
caaaauuuuauagcucaguuuau

SEQ ID NO: 3517688 - RNA, 16 nt, Human
caaaauuuuauuuugu

SEQ ID NO: 3517689 - RNA, 22 nt, Human
caaaauuuucucauuuucuuuu

SEQ ID NO: 3517690 - RNA, 15 nt, Human
caaaauuuuucaacc

SEQ ID NO: 3517691 - RNA, 22 nt, Human
caaaauuuuucaaccccacccu

SEQ ID NO: 3517692 - RNA, 14 nt, Human
caaacaaaauuucu

SEQ ID NO: 3517693 - RNA, 15 nt, Human
caaacaaacaagcua

SEQ ID NO: 3517694 - RNA, 14 nt, Human
caaacaaagccaga

SEQ ID NO: 3517695 - RNA, 16 nt, Human
caaacaaagccagaag

SEQ ID NO: 3517696 - RNA, 20 nt, Human
caaacaaagccagaagcuga

SEQ ID NO: 3517697 - RNA, 22 nt, Human
caguccugggagaaccucaggc

SEQ ID NO: 3517698 - RNA, 14 nt, Human
caguccuguaguuu

SEQ ID NO: 3517699 - RNA, 16 nt, Human
caguccuguaguuuua

SEQ ID NO: 3517700 - RNA, 19 nt, Human
caguccuuaccagcagagc

SEQ ID NO: 3517701 - RNA, 20 nt, Human
caguccuuaccagcagagca

SEQ ID NO: 3517702 - RNA, 21 nt, Human
caguccuuaccagcagagcac

SEQ ID NO: 3517703 - RNA, 12 nt, Human
caguccuuccac

SEQ ID NO: 3517704 - RNA, 14 nt, Human
caguccuuuguaaa

SEQ ID NO: 3517705 - RNA, 21 nt, Human
cagucgccuuucagcaggcag

SEQ ID NO: 3517706 - RNA, 23 nt, Human
cagucgccuuucagcaggcagcc

SEQ ID NO: 3517707 - RNA, 18 nt, Human
cagucgcgcugccugugu

SEQ ID NO: 3517708 - RNA, 16 nt, Human
cagucgggggcuggcc

SEQ ID NO: 3517709 - RNA, 18 nt, Human
cagucgggggcuggccua

SEQ ID NO: 3517710 - RNA, 17 nt, Human
cagucgucgcacagucu

SEQ ID NO: 3517711 - RNA, 15 nt, Human
cagucgugccugugu

SEQ ID NO: 3517712 - RNA, 17 nt, Human
cagucgugccugugucc

SEQ ID NO: 3517713 - RNA, 23 nt, Human
cagucuacccaccucagccuccu

SEQ ID NO: 3517714 - RNA, 14 nt, Human
cagucuaguuccug

SEQ ID NO: 3517715 - RNA, 13 nt, Human
cagucuauccaca

SEQ ID NO: 3517716 - RNA, 16 nt, Human
cagucuauccacagag

SEQ ID NO: 3517717 - RNA, 17 nt, Human
cagucucaccauuuccc

SEQ ID NO: 3517718 - RNA, 21 nt, Human
cagucucaccauuuccccagg

SEQ ID NO: 3517719 - RNA, 21 nt, Human
cagucucagaaugucauuuug

SEQ ID NO: 3517720 - RNA, 18 nt, Human
cagucucaggagcauggg

SEQ ID NO: 3517721 - RNA, 23 nt, Human
cagucuccucuuuaaaacaaaac

SEQ ID NO: 3517722 - RNA, 13 nt, Human
cagucucgucucu

SEQ ID NO: 3517723 - RNA, 21 nt, Human
cagucucuauaccaauaaagu

SEQ ID NO: 3517724 - RNA, 22 nt, Human
cagucucucuucucuccagcug

SEQ ID NO: 3517725 - RNA, 15 nt, Human
cagucucugagggcu

SEQ ID NO: 3517726 - RNA, 18 nt, Human
cagucucugcuccaccuu

SEQ ID NO: 3517727 - RNA, 20 nt, Human
cagucugacuguuuccauca

SEQ ID NO: 3517728 - RNA, 14 nt, Human
cagucugcugcccu

SEQ ID NO: 3517729 - RNA, 15 nt, Human
cagucugcugcccuc

SEQ ID NO: 3517730 - RNA, 21 nt, Human
cagucugcugcccuccauccc

SEQ ID NO: 3517731 - RNA, 22 nt, Human
cagucugcugcccuccaucccg

SEQ ID NO: 3517732 - RNA, 14 nt, Human
cagucugcuuagaa

SEQ ID NO: 3517733 - RNA, 15 nt, Human
cagucugcuuagaaa

SEQ ID NO: 3517734 - RNA, 23 nt, Human
cagucugcuuauccuuccacgga

SEQ ID NO: 3517735 - RNA, 12 nt, Human
cagucugucaug

SEQ ID NO: 3517736 - RNA, 22 nt, Human
cagucugucuucuguauauaaa

SEQ ID NO: 3517737 - RNA, 23 nt, Human
cagucuuauagcaagacuguuag

SEQ ID NO: 3517738 - RNA, 16 nt, Human
cagucuuaugcuucca

SEQ ID NO: 3517739 - RNA, 18 nt, Human
cagucuuaugcuuccaga

SEQ ID NO: 3517740 - RNA, 20 nt, Human
cagucuuaugcuuccagaaa

SEQ ID NO: 3517741 - RNA, 17 nt, Human
cagucuuccauuugcaa

SEQ ID NO: 3517742 - RNA, 20 nt, Human
cagucuucccuagggcuggg

SEQ ID NO: 3517743 - RNA, 16 nt, Human
cagucuuccugacacu

SEQ ID NO: 3517744 - RNA, 17 nt, Human
cagucuuguauuaaguu

SEQ ID NO: 3517745 - RNA, 12 nt, Human
cagucuuuuucu

SEQ ID NO: 3517746 - RNA, 21 nt, Human
cagucuuuuucuguuguaacu

SEQ ID NO: 3517747 - RNA, 14 nt, Human
cagugaaaaacuau

SEQ ID NO: 3517748 - RNA, 13 nt, Human
cagugaaaacuag

SEQ ID NO: 3517749 - RNA, 20 nt, Human
cagugaaagaaaauaacaau

SEQ ID NO: 3517750 - RNA, 13 nt, Human
cagugaaagcauc

SEQ ID NO: 3517751 - RNA, 14 nt, Human
cagugaaagcauca

SEQ ID NO: 3517752 - RNA, 21 nt, Human
cagugaagagccacugccauu

SEQ ID NO: 3517753 - RNA, 20 nt, Human
cagugaagauauuuuauuuc

SEQ ID NO: 3517754 - RNA, 13 nt, Human
cauaaucuucugc

SEQ ID NO: 3517755 - RNA, 22 nt, Human
cauaaugcauucuucucuguug

SEQ ID NO: 3517756 - RNA, 18 nt, Human
cauaaugcuaauuuaaag

SEQ ID NO: 3517757 - RNA, 23 nt, Human
cauaaugggccacugaaaucugu

SEQ ID NO: 3517758 - RNA, 12 nt, Human
cauaaugugaag

SEQ ID NO: 3517759 - RNA, 19 nt, Human
cauaaugugaaguguuaau

SEQ ID NO: 3517760 - RNA, 22 nt, Human
cauaauguuucuggauuucaua

SEQ ID NO: 3517761 - RNA, 17 nt, Human
cauaauuaaagugucca

SEQ ID NO: 3517762 - RNA, 18 nt, Human
cauaauuaaaguguccau

SEQ ID NO: 3517763 - RNA, 18 nt, Human
cauaauuagauccauuaa

SEQ ID NO: 3517764 - RNA, 14 nt, Human
cauaauuaugacag

SEQ ID NO: 3517765 - RNA, 19 nt, Human
cauaauuaugacaguuaua

SEQ ID NO: 3517766 - RNA, 18 nt, Human
cauaauuauuauuuggcc

SEQ ID NO: 3517767 - RNA, 17 nt, Human
cauaauucacucugagu

SEQ ID NO: 3517768 - RNA, 18 nt, Human
cauaauucuaagacuaau

SEQ ID NO: 3517769 - RNA, 17 nt, Human
cauaauucugaaguuau

SEQ ID NO: 3517770 - RNA, 22 nt, Human
cauaauucugaaguuauauuuc

SEQ ID NO: 3517771 - RNA, 17 nt, Human
cauaauucuuguauauu

SEQ ID NO: 3517772 - RNA, 13 nt, Human
cauaauuuaaaaa

SEQ ID NO: 3517773 - RNA, 20 nt, Human
cauaauuuaguuguuucuag

SEQ ID NO: 3517774 - RNA, 14 nt, Human
cauaauuuguuucc

SEQ ID NO: 3517775 - RNA, 16 nt, Human
cauaauuuguuuccag

SEQ ID NO: 3517776 - RNA, 19 nt, Human
cauacaaaugcaucuuuga

SEQ ID NO: 3517777 - RNA, 15 nt, Human
cauacacacacacac

SEQ ID NO: 3517778 - RNA, 21 nt, Human
cauacacacacacacacagcc

SEQ ID NO: 3517779 - RNA, 14 nt, Human
cauacaccagcauu

SEQ ID NO: 3517780 - RNA, 21 nt, Human
cauacacccccaccuccugca

SEQ ID NO: 3517781 - RNA, 22 nt, Human
cauacacccccucuucugagca

SEQ ID NO: 3517782 - RNA, 23 nt, Human
cauacacccccucuucugagcac

SEQ ID NO: 3517783 - RNA, 23 nt, Human
cauacacuuauuggaacucugcu

SEQ ID NO: 3517784 - RNA, 14 nt, Human
cauacacuuuuucu

SEQ ID NO: 3517785 - RNA, 15 nt, Human
cauacagagaaguca

SEQ ID NO: 3517786 - RNA, 16 nt, Human
cauacaguuugcacuu

SEQ ID NO: 3517787 - RNA, 15 nt, Human
cauacauaaaagaaa

SEQ ID NO: 3517788 - RNA, 20 nt, Human
cauacauaaaagaaauaaac

SEQ ID NO: 3517789 - RNA, 17 nt, Human
cauacaugcaaaaagaa

SEQ ID NO: 3517790 - RNA, 16 nt, Human
cauacauuaauuaaua

SEQ ID NO: 3517791 - RNA, 17 nt, Human
cauaccaacacgagcag

SEQ ID NO: 3517792 - RNA, 14 nt, Human
cauaccaaugaaaa

SEQ ID NO: 3517793 - RNA, 22 nt, Human
cauaccagcucgcaccccccug

SEQ ID NO: 3517794 - RNA, 12 nt, Human
cauacccacccc

SEQ ID NO: 3517795 - RNA, 15 nt, Human
cauaccuacauguau

SEQ ID NO: 3517796 - RNA, 13 nt, Human
cauaccucugacc

SEQ ID NO: 3517797 - RNA, 17 nt, Human
cauaccucugaccaaca

SEQ ID NO: 3517798 - RNA, 15 nt, Human
cauaccuggcccugu

SEQ ID NO: 3517799 - RNA, 14 nt, Human
cauaccuuccuucc

SEQ ID NO: 3517800 - RNA, 19 nt, Human
cauaccuuuauugugaucu

SEQ ID NO: 3517801 - RNA, 17 nt, Human
cauaccuuuuauuuuuu

SEQ ID NO: 3517802 - RNA, 16 nt, Human
cauacgaaacacaaac

SEQ ID NO: 3517803 - RNA, 14 nt, Human
cauacguaaaaauc

SEQ ID NO: 3517804 - RNA, 15 nt, Human
cauacguaaaaaucu

SEQ ID NO: 3517805 - RNA, 13 nt, Human
cauacguacacau

SEQ ID NO: 3517806 - RNA, 13 nt, Human
cauacguccacca

SEQ ID NO: 3517807 - RNA, 21 nt, Human
cauacuaaccagcagaaaugc

SEQ ID NO: 3517808 - RNA, 18 nt, Human
cauacuacugaaacagau

SEQ ID NO: 3517809 - RNA, 14 nt, Human
cauacuauuaaaca

SEQ ID NO: 3517810 - RNA, 12 nt, Human
cauacucagccu

SEQ ID NO: 3517811 - RNA, 17 nt, Human
cauacucagccugcugc

SEQ ID NO: 3517812 - RNA, 14 nt, Human
cauacucaugcaug

SEQ ID NO: 3517813 - RNA, 15 nt, Human
cauacucccaucugu

SEQ ID NO: 3517814 - RNA, 18 nt, Human
cauacucccaucugugaa

SEQ ID NO: 3517815 - RNA, 15 nt, Human
cauacucgagucuga

SEQ ID NO: 3517816 - RNA, 17 nt, Human
cauacucgagucugagg

SEQ ID NO: 3517817 - RNA, 22 nt, Human
cauacucuagauuuuguuuugc

SEQ ID NO: 3517818 - RNA, 15 nt, Human
cauacucugucuccc

SEQ ID NO: 3517819 - RNA, 11 nt, Human
cauacugcugu

SEQ ID NO: 3517820 - RNA, 15 nt, Human
cauacuggacucuuc

SEQ ID NO: 3517821 - RNA, 12 nt, Human
cauacuggccuc

SEQ ID NO: 3517822 - RNA, 16 nt, Human
cauacuggccucgccu

SEQ ID NO: 3517823 - RNA, 17 nt, Human
cauacuggccucgccug

SEQ ID NO: 3517824 - RNA, 18 nt, Human
cauacuggccucgccugg

SEQ ID NO: 3517825 - RNA, 21 nt, Human
cauacuggccucgccuggccu

SEQ ID NO: 3517826 - RNA, 18 nt, Human
cauacuggccuggacugu

SEQ ID NO: 3517827 - RNA, 19 nt, Human
cauacugugcuggagccac

SEQ ID NO: 3517828 - RNA, 15 nt, Human
cauacuuaagcaaaa

SEQ ID NO: 3517829 - RNA, 14 nt, Human
cauacuuaccuagu

SEQ ID NO: 3517830 - RNA, 18 nt, Human
cauacuuaucucucugug

SEQ ID NO: 3517831 - RNA, 18 nt, Human
cauacuucaaaaguauuu

SEQ ID NO: 3517832 - RNA, 18 nt, Human
cauacuucaugaaauccu

SEQ ID NO: 3517833 - RNA, 21 nt, Human
cauacuugaacguuuucuaau

SEQ ID NO: 3517834 - RNA, 14 nt, Human
cauacuugaagggc

SEQ ID NO: 3517835 - RNA, 17 nt, Human
cauacuugaagggccag

SEQ ID NO: 3517836 - RNA, 18 nt, Human
cauacuugaagggccaga

SEQ ID NO: 3517837 - RNA, 15 nt, Human
cauacuuuguaaaua

SEQ ID NO: 3517838 - RNA, 17 nt, Human
cauacuuuguauuuuga

SEQ ID NO: 3517839 - RNA, 15 nt, Human
cauagaaacaugaca

SEQ ID NO: 3517840 - RNA, 19 nt, Human
cauagaacuggguaaaugc

SEQ ID NO: 3517841 - RNA, 23 nt, Human
cauagaacuggguaaaugcaaag

SEQ ID NO: 3517842 - RNA, 21 nt, Human
cauagaauagcauguuguaga

SEQ ID NO: 3517843 - RNA, 20 nt, Human
cauagaauugcaaucuauaa

SEQ ID NO: 3517844 - RNA, 15 nt, Human
cauagacagaagaaa

SEQ ID NO: 3517845 - RNA, 16 nt, Human
cauagacccucucaag

SEQ ID NO: 3517846 - RNA, 21 nt, Human
cauagagagcaagacgcugug

SEQ ID NO: 3517847 - RNA, 21 nt, Human
cauagagccggguguccccaa

SEQ ID NO: 3517848 - RNA, 22 nt, Human
cauagagccggguguccccaac

SEQ ID NO: 3517849 - RNA, 15 nt, Human
cauagaggcuucucc

SEQ ID NO: 3517850 - RNA, 23 nt, Human
cauagaggcuucuccgccagccu

SEQ ID NO: 3517851 - RNA, 21 nt, Human
cauagauaaaacaucuuugaa

SEQ ID NO: 3517852 - RNA, 23 nt, Human
cauagauaauauuguuugguaaa

SEQ ID NO: 3517853 - RNA, 24 nt, Human
cauagauaauauuguuugguaaau

SEQ ID NO: 3517854 - RNA, 14 nt, Human
cauagauauuuuca

SEQ ID NO: 3517855 - RNA, 13 nt, Human
cauagaucuucug

SEQ ID NO: 3517856 - RNA, 14 nt, Human
cauagaucuucuga

SEQ ID NO: 3517857 - RNA, 19 nt, Human
cauagauuaauggcacuga

SEQ ID NO: 3517858 - RNA, 18 nt, Human
cauagauucaccuguaaa

SEQ ID NO: 3517859 - RNA, 17 nt, Human
cauagauucccugagca

SEQ ID NO: 3517860 - RNA, 18 nt, Human
cauagauucccugagcag

SEQ ID NO: 3517861 - RNA, 21 nt, Human
cauagauuuauuuuucaguuc

SEQ ID NO: 3517862 - RNA, 16 nt, Human
cauagauuucugauuu

SEQ ID NO: 3517863 - RNA, 17 nt, Human
cauagauuucugauuuu

SEQ ID NO: 3517864 - RNA, 15 nt, Human
cauagcaacaggaaa

SEQ ID NO: 3517865 - RNA, 16 nt, Human
cauagcaacaggaaaa

SEQ ID NO: 3517866 - RNA, 20 nt, Human
cauagcaagacacaucccua

SEQ ID NO: 3517867 - RNA, 18 nt, Human
cauagcagauuuuaauuu

SEQ ID NO: 3517868 - RNA, 19 nt, Human
cauagcagcuuauucacaa

SEQ ID NO: 3517869 - RNA, 19 nt, Human
cauagcauccaaguggcau

SEQ ID NO: 3517870 - RNA, 15 nt, Human
cauagcaugacauuu

SEQ ID NO: 3517871 - RNA, 16 nt, Human
cauagcauuaacuaau

SEQ ID NO: 3517872 - RNA, 16 nt, Human
cauagccaaaauguga

SEQ ID NO: 3517873 - RNA, 15 nt, Human
cauagccaccccaga

SEQ ID NO: 3517874 - RNA, 11 nt, Human
cauagcccagu

SEQ ID NO: 3517875 - RNA, 13 nt, Human
cauagcccauccc

SEQ ID NO: 3517876 - RNA, 16 nt, Human
cauagcccaucccugc

SEQ ID NO: 3517877 - RNA, 18 nt, Human
cauagcccaucccugccu

SEQ ID NO: 3517878 - RNA, 23 nt, Human
cauagcccaucccugccugguca

SEQ ID NO: 3517879 - RNA, 12 nt, Human
cauagcccucac

SEQ ID NO: 3517880 - RNA, 15 nt, Human
cauagccuauauuua

SEQ ID NO: 3517881 - RNA, 16 nt, Human
cauagcgcugcucuua

SEQ ID NO: 3517882 - RNA, 16 nt, Human
cauagcuaucaagugu

SEQ ID NO: 3517883 - RNA, 15 nt, Human
cauagcuccugcucc

SEQ ID NO: 3517884 - RNA, 18 nt, Human
cauagcuccuucucucuu

SEQ ID NO: 3517885 - RNA, 16 nt, Human
cauagcucuguacauc

SEQ ID NO: 3517886 - RNA, 19 nt, Human
cauagcugguuccugcuag

SEQ ID NO: 3517887 - RNA, 14 nt, Human
cauagcugucuaga

SEQ ID NO: 3517888 - RNA, 18 nt, Human
cauagcugugauuuuugg

SEQ ID NO: 3517889 - RNA, 21 nt, Human
cauagcuugauaaagggccaa

SEQ ID NO: 3517890 - RNA, 23 nt, Human
cauaggaaaaguacauuuaauac

SEQ ID NO: 3517891 - RNA, 24 nt, Human
cauaggaagggaccaaggcaaggc

SEQ ID NO: 3517892 - RNA, 19 nt, Human
cauaggaaguuaaaagcac

SEQ ID NO: 3517893 - RNA, 17 nt, Human
cauaggaaguuagccuu

SEQ ID NO: 3517894 - RNA, 20 nt, Human
cauaggaaguuagccuuuau

SEQ ID NO: 3517895 - RNA, 17 nt, Human
cauaggaguuuggagga

SEQ ID NO: 3517896 - RNA, 14 nt, Human
cauaggccugggug

SEQ ID NO: 3517897 - RNA, 16 nt, Human
cauagguauuucaaaa

SEQ ID NO: 3517898 - RNA, 14 nt, Human
cauaggucacuggc

SEQ ID NO: 3517899 - RNA, 21 nt, Human
caacagguagcauagcucugu

SEQ ID NO: 3517900 - RNA, 19 nt, Human
caacagguuuuccugaaga

SEQ ID NO: 3517901 - RNA, 17 nt, Human
caacaguaaaccacuga

SEQ ID NO: 3517902 - RNA, 14 nt, Human
caacagucaaaaca

SEQ ID NO: 3517903 - RNA, 16 nt, Human
caacagugagagacuc

SEQ ID NO: 3517904 - RNA, 19 nt, Human
caacagugugaaguuagaa

SEQ ID NO: 3517905 - RNA, 14 nt, Human
caacaguuccuuca

SEQ ID NO: 3517906 - RNA, 15 nt, Human
caacaguuuaaugaa

SEQ ID NO: 3517907 - RNA, 19 nt, Human
caacauacucccaucugug

SEQ ID NO: 3517908 - RNA, 23 nt, Human
caacauagugagaccccugucuc

SEQ ID NO: 3517909 - RNA, 15 nt, Human
caacaucaacaucuu

SEQ ID NO: 3517910 - RNA, 18 nt, Human
caacaucaauguucauug

SEQ ID NO: 3517911 - RNA, 16 nt, Human
caacaucacagcccag

SEQ ID NO: 3517912 - RNA, 20 nt, Human
caacaucacagcccagcccg

SEQ ID NO: 3517913 - RNA, 14 nt, Human
caacaucagcuuga

SEQ ID NO: 3517914 - RNA, 17 nt, Human
caacauccugccagccc

SEQ ID NO: 3517915 - RNA, 14 nt, Human
caacaucugagugc

SEQ ID NO: 3517916 - RNA, 22 nt, Human
caacaucuuggucagauuugaa

SEQ ID NO: 3517917 - RNA, 23 nt, Human
cauauugcugagagaaauaugga

SEQ ID NO: 3517918 - RNA, 11 nt, Human
cauauuguaca

SEQ ID NO: 3517919 - RNA, 20 nt, Human
cauauuguacacuuuuuugg

SEQ ID NO: 3517920 - RNA, 20 nt, Human
cauauugugccaauauguau

SEQ ID NO: 3517921 - RNA, 23 nt, Human
cauauugugcuucacaguagagc

SEQ ID NO: 3517922 - RNA, 18 nt, Human
cauauuguggcacaagca

SEQ ID NO: 3517923 - RNA, 13 nt, Human
cauauuguuacug

SEQ ID NO: 3517924 - RNA, 16 nt, Human
cauauuguugaaaggu

SEQ ID NO: 3517925 - RNA, 19 nt, Human
cauauuguugcauugcuuu

SEQ ID NO: 3517926 - RNA, 14 nt, Human
cauauuuaaagaca

SEQ ID NO: 3517927 - RNA, 13 nt, Human
cauauuuaacugg

SEQ ID NO: 3517928 - RNA, 14 nt, Human
cauauuuaacuggu

SEQ ID NO: 3517929 - RNA, 13 nt, Human
cauauuuaauguu

SEQ ID NO: 3517930 - RNA, 14 nt, Human
cauauuuaauguuu

SEQ ID NO: 3517931 - RNA, 23 nt, Human
cauauuuaauguuuuaaauguac

SEQ ID NO: 3517932 - RNA, 13 nt, Human
cauauuuacuacc

SEQ ID NO: 3517933 - RNA, 14 nt, Human
cauauuuacuucuu

SEQ ID NO: 3517934 - RNA, 16 nt, Human
cauauuuacuucuuau

SEQ ID NO: 3517935 - RNA, 12 nt, Human
cauauuuauaaa

SEQ ID NO: 3517936 - RNA, 12 nt, Human
cauauuuaucca

SEQ ID NO: 3517937 - RNA, 12 nt, Human
cauauuucaauu

SEQ ID NO: 3517938 - RNA, 24 nt, Human
cauauuucuaauuggcuuuacuau

SEQ ID NO: 3517939 - RNA, 16 nt, Human
cauauuugaagggucu

SEQ ID NO: 3517940 - RNA, 15 nt, Human
cauauuugagacuag

SEQ ID NO: 3517941 - RNA, 12 nt, Human
cauauuugcacu

SEQ ID NO: 3517942 - RNA, 14 nt, Human
cauauuugcacuaa

SEQ ID NO: 3517943 - RNA, 17 nt, Human
cauauuugcauauguau

SEQ ID NO: 3517944 - RNA, 23 nt, Human
cauauuuggaauaaaaauuccag

SEQ ID NO: 3517945 - RNA, 21 nt, Human
cauauuuguacuuucuguuaa

SEQ ID NO: 3517946 - RNA, 23 nt, Human
cauauuuguacuuucuguuaaaa

SEQ ID NO: 3517947 - RNA, 20 nt, Human
cauauuuguuaaauauuuac

SEQ ID NO: 3517948 - RNA, 13 nt, Human
cauauuuuaaaau

SEQ ID NO: 3517949 - RNA, 14 nt, Human
cauauuuuaauuuc

SEQ ID NO: 3517950 - RNA, 13 nt, Human
cauauuuuagcua

SEQ ID NO: 3517951 - RNA, 16 nt, Human
cauauuuuauagaacu

SEQ ID NO: 3517952 - RNA, 23 nt, Human
cauauuuuauuacuguuuauuac

SEQ ID NO: 3517953 - RNA, 14 nt, Human
cauauuuuguaacu

SEQ ID NO: 3517954 - RNA, 13 nt, Human
cauauuuuguaua

SEQ ID NO: 3517955 - RNA, 13 nt, Human
cauauuuuuacaa

SEQ ID NO: 3517956 - RNA, 14 nt, Human
cauauuuuucacau

SEQ ID NO: 3517957 - RNA, 18 nt, Human
cauauuuuucacauaucu

SEQ ID NO: 3517958 - RNA, 22 nt, Human
cauauuuuuuuccuuacauaaa

SEQ ID NO: 3517959 - RNA, 15 nt, Human
caucaaaagacaauu

SEQ ID NO: 3517960 - RNA, 20 nt, Human
caucaaaagacaauucuuua

SEQ ID NO: 3517961 - RNA, 21 nt, Human
caucaaaauauuucagugaau

SEQ ID NO: 3517962 - RNA, 17 nt, Human
caucaaaccuuugagua

SEQ ID NO: 3517963 - RNA, 14 nt, Human
caucaaacuguaaa

SEQ ID NO: 3517964 - RNA, 15 nt, Human
caucaaauggaagac

SEQ ID NO: 3517965 - RNA, 17 nt, Human
caucaaauggaagacac

SEQ ID NO: 3517966 - RNA, 16 nt, Human
caucaacaagauuucc

SEQ ID NO: 3517967 - RNA, 17 nt, Human
caucaagaagggcugca

SEQ ID NO: 3517968 - RNA, 21 nt, Human
caucaagaagggcugcaugau

SEQ ID NO: 3517969 - RNA, 21 nt, Human
caucaagaggugggagggccc

SEQ ID NO: 3517970 - RNA, 18 nt, Human
caucaagcacagaaggag

SEQ ID NO: 3517971 - RNA, 12 nt, Human
caucaagccacu

SEQ ID NO: 3517972 - RNA, 17 nt, Human
caucaaggcacugccug

SEQ ID NO: 3517973 - RNA, 16 nt, Human
caucaaggggucacuu

SEQ ID NO: 3517974 - RNA, 19 nt, Human
caucaaucaaauaaguauu

SEQ ID NO: 3517975 - RNA, 14 nt, Human
caucaaucauugua

SEQ ID NO: 3517976 - RNA, 15 nt, Human
caucaaucauuguac

SEQ ID NO: 3517977 - RNA, 16 nt, Human
caucaaucauuguaca

SEQ ID NO: 3517978 - RNA, 20 nt, Human
caucaaucauuguacaguuu

SEQ ID NO: 3517979 - RNA, 14 nt, Human
caucaauccugauu

SEQ ID NO: 3517980 - RNA, 18 nt, Human
caucaaugaaugaaugaa

SEQ ID NO: 3517981 - RNA, 19 nt, Human
caucaauggggccagucag

SEQ ID NO: 3517982 - RNA, 15 nt, Human
caucaauguucauug

SEQ ID NO: 3517983 - RNA, 22 nt, Human
caucaauugaauggucagcguu

SEQ ID NO: 3517984 - RNA, 15 nt, Human
caucacaauacagau

SEQ ID NO: 3517985 - RNA, 20 nt, Human
caucacacacauggaaaccc

SEQ ID NO: 3517986 - RNA, 15 nt, Human
caucacaccugcccu

SEQ ID NO: 3517987 - RNA, 13 nt, Human
caucacagcagcc

SEQ ID NO: 3517988 - RNA, 14 nt, Human
caucacagcccagc

SEQ ID NO: 3517989 - RNA, 17 nt, Human
caucacagcuaacaauu

SEQ ID NO: 3517990 - RNA, 13 nt, Human
caucacagggugg

SEQ ID NO: 3517991 - RNA, 14 nt, Human
caucacaggguggg

SEQ ID NO: 3517992 - RNA, 15 nt, Human
caucaccaacgucug

SEQ ID NO: 3517993 - RNA, 20 nt, Human
caucaccaacgucugugcca

SEQ ID NO: 3517994 - RNA, 20 nt, Human
caucaccuacucacacaggc

SEQ ID NO: 3517995 - RNA, 20 nt, Human
caucaccucagauggcagcu

SEQ ID NO: 3517996 - RNA, 22 nt, Human
caucaccucagauggcagcuuu

SEQ ID NO: 3517997 - RNA, 15 nt, Human
caucaccuuagacca

SEQ ID NO: 3517998 - RNA, 20 nt, Human
caucaccuuaggcagggaag

SEQ ID NO: 3517999 - RNA, 14 nt, Human
caucacgccugugc

SEQ ID NO: 3518000 - RNA, 15 nt, Human
caucacgccugugca

SEQ ID NO: 3518001 - RNA, 17 nt, Human
caucacguguacuggcu

SEQ ID NO: 3518002 - RNA, 22 nt, Human
caucacuauccaugcaccaaac

SEQ ID NO: 3518003 - RNA, 14 nt, Human
caucacuccccucc

SEQ ID NO: 3518004 - RNA, 17 nt, Human
caucacugaguuuucca

SEQ ID NO: 3518005 - RNA, 16 nt, Human
caucacugcgccacug

SEQ ID NO: 3518006 - RNA, 20 nt, Human
caucacugcuugaugaagca

SEQ ID NO: 3518007 - RNA, 14 nt, Human
caucacuggcaugg

SEQ ID NO: 3518008 - RNA, 12 nt, Human
caucacuguggc

SEQ ID NO: 3518009 - RNA, 17 nt, Human
caucacuguggcugucu

SEQ ID NO: 3518010 - RNA, 14 nt, Human
caucacuguucaug

SEQ ID NO: 3518011 - RNA, 14 nt, Human
caucacuucccuac

SEQ ID NO: 3518012 - RNA, 15 nt, Human
caucacuuguacaaa

SEQ ID NO: 3518013 - RNA, 18 nt, Human
caucagaaaggaaaaaca

SEQ ID NO: 3518014 - RNA, 20 nt, Human
caucagaaaggaaaaacaaa

SEQ ID NO: 3518015 - RNA, 23 nt, Human
caucagaaagggagggcucugag

SEQ ID NO: 3518016 - RNA, 11 nt, Human
caucagaaaug

SEQ ID NO: 3518017 - RNA, 12 nt, Human
caucagaaaugu

SEQ ID NO: 3518018 - RNA, 18 nt, Human
caucagaagccuauugua

SEQ ID NO: 3518019 - RNA, 11 nt, Human
caucagaagga

SEQ ID NO: 3518020 - RNA, 14 nt, Human
caucagacagaugg

SEQ ID NO: 3518021 - RNA, 16 nt, Human
caucagagcaaauuug

SEQ ID NO: 3518022 - RNA, 17 nt, Human
caucagcuagcaaaaga

SEQ ID NO: 3518023 - RNA, 15 nt, Human
caucagcugcucaga

SEQ ID NO: 3518024 - RNA, 16 nt, Human
caucagcugcucagau

SEQ ID NO: 3518025 - RNA, 18 nt, Human
caucagcugcucagaucc

SEQ ID NO: 3518026 - RNA, 13 nt, Human
caucagcugcuga

SEQ ID NO: 3518027 - RNA, 18 nt, Human
caucagcugcugaaacaa

SEQ ID NO: 3518028 - RNA, 17 nt, Human
caucagcuguaagaaga

SEQ ID NO: 3518029 - RNA, 23 nt, Human
caucagcuuaggggcugcugacc

SEQ ID NO: 3518030 - RNA, 19 nt, Human
caucaggaaggaaaugaca

SEQ ID NO: 3518031 - RNA, 15 nt, Human
caucaggacucuugu

SEQ ID NO: 3518032 - RNA, 22 nt, Human
caucaggagaaaaagccuccag

SEQ ID NO: 3518033 - RNA, 17 nt, Human
caucaggaugaacccag

SEQ ID NO: 3518034 - RNA, 16 nt, Human
caucaggccaggcccu

SEQ ID NO: 3518035 - RNA, 21 nt, Human
caucaggccaggcccucugcc

SEQ ID NO: 3518036 - RNA, 15 nt, Human
caucaggcuuucuua

SEQ ID NO: 3518037 - RNA, 14 nt, Human
caucagggacagga

SEQ ID NO: 3518038 - RNA, 16 nt, Human
caucagggccuggggc

SEQ ID NO: 3518039 - RNA, 18 nt, Human
caucagggggaagaagca

SEQ ID NO: 3518040 - RNA, 21 nt, Human
caucagggggaagaagcagag

SEQ ID NO: 3518041 - RNA, 23 nt, Human
caucagguuaggcaguauaaaga

SEQ ID NO: 3518042 - RNA, 17 nt, Human
caucagguuccaucccg

SEQ ID NO: 3518043 - RNA, 20 nt, Human
caucaguauuaauacuaaaa

SEQ ID NO: 3518044 - RNA, 16 nt, Human
caucagugcucccuca

SEQ ID NO: 3518045 - RNA, 13 nt, Human
cagguccugcuca

SEQ ID NO: 3518046 - RNA, 14 nt, Human
cagguccugguggg

SEQ ID NO: 3518047 - RNA, 21 nt, Human
cagguccugguggggcagcuc

SEQ ID NO: 3518048 - RNA, 16 nt, Human
caggucgggcucagcu

SEQ ID NO: 3518049 - RNA, 20 nt, Human
caggucucagaaucuuuccu

SEQ ID NO: 3518050 - RNA, 19 nt, Human
caggucucccacgugggag

SEQ ID NO: 3518051 - RNA, 19 nt, Human
caggucuccuccaccgcca

SEQ ID NO: 3518052 - RNA, 21 nt, Human
caggucugaagcucaacucuc

SEQ ID NO: 3518053 - RNA, 17 nt, Human
caggucugggagaggca

SEQ ID NO: 3518054 - RNA, 18 nt, Human
caggucugggagaggcag

SEQ ID NO: 3518055 - RNA, 20 nt, Human
caggucugggagaggcagag

SEQ ID NO: 3518056 - RNA, 20 nt, Human
caggucuucaucgaaucuac

SEQ ID NO: 3518057 - RNA, 20 nt, Human
caggucuugaacuccuggcc

SEQ ID NO: 3518058 - RNA, 21 nt, Human
caggucuugaacuccuggccu

SEQ ID NO: 3518059 - RNA, 19 nt, Human
caggucuuuccuaaggcug

SEQ ID NO: 3518060 - RNA, 14 nt, Human
caggugaauuguuu

SEQ ID NO: 3518061 - RNA, 16 nt, Human
caggugacagugaggu

SEQ ID NO: 3518062 - RNA, 19 nt, Human
caggugacagugagguccu

SEQ ID NO: 3518063 - RNA, 21 nt, Human
caggugacagugagguccugg

SEQ ID NO: 3518064 - RNA, 12 nt, Human
caggugacaugu

SEQ ID NO: 3518065 - RNA, 17 nt, Human
caggugacaugugaaac

SEQ ID NO: 3518066 - RNA, 21 nt, Human
caggugacaugugaaaccuuu

SEQ ID NO: 3518067 - RNA, 13 nt, Human
caggugagaaacu

SEQ ID NO: 3518068 - RNA, 22 nt, Human
caggugagaaacuguuugaaaa

SEQ ID NO: 3518069 - RNA, 20 nt, Human
caggugagaagcagaggaag

SEQ ID NO: 3518070 - RNA, 23 nt, Human
caggugaguccuagagcuacagg

SEQ ID NO: 3518071 - RNA, 23 nt, Human
caggugauccacccaccucagcc

SEQ ID NO: 3518072 - RNA, 22 nt, Human
caucauuacccuucccugcacu

SEQ ID NO: 3518073 - RNA, 13 nt, Human
caucauuagaaca

SEQ ID NO: 3518074 - RNA, 12 nt, Human
caucauuauuau

SEQ ID NO: 3518075 - RNA, 20 nt, Human
caucauucacuucacugugc

SEQ ID NO: 3518076 - RNA, 14 nt, Human
caucauucccucuc

SEQ ID NO: 3518077 - RNA, 16 nt, Human
caucauucccucucau

SEQ ID NO: 3518078 - RNA, 15 nt, Human
caucauuccuuuuua

SEQ ID NO: 3518079 - RNA, 19 nt, Human
caucauuccuuuuuauuua

SEQ ID NO: 3518080 - RNA, 24 nt, Human
caucauucucugucucauccauca

SEQ ID NO: 3518081 - RNA, 21 nt, Human
caucauugaaaucuuuuugcu

SEQ ID NO: 3518082 - RNA, 13 nt, Human
caucauuguuucu

SEQ ID NO: 3518083 - RNA, 12 nt, Human
caucauuucacu

SEQ ID NO: 3518084 - RNA, 15 nt, Human
caucauuucacuugu

SEQ ID NO: 3518085 - RNA, 22 nt, Human
caucauuuuccauauccuggug

SEQ ID NO: 3518086 - RNA, 18 nt, Human
caucauuuugcauucaaa

SEQ ID NO: 3518087 - RNA, 20 nt, Human
caucauuuugcauucaaauu

SEQ ID NO: 3518088 - RNA, 18 nt, Human
caucauuuuuccuucccu

SEQ ID NO: 3518089 - RNA, 14 nt, Human
caucauuuuuuacu

SEQ ID NO: 3518090 - RNA, 15 nt, Human
cauccaaccccccac

SEQ ID NO: 3518091 - RNA, 19 nt, Human
cauccaaccccccaccugc

SEQ ID NO: 3518092 - RNA, 14 nt, Human
cauccaaccuuccc

SEQ ID NO: 3518093 - RNA, 15 nt, Human
cauccaacugagaaa

SEQ ID NO: 3518094 - RNA, 14 nt, Human
cauccaaggagaaa

SEQ ID NO: 3518095 - RNA, 14 nt, Human
cauccaauccucac

SEQ ID NO: 3518096 - RNA, 20 nt, Human
cauccaaucuauuauuucuc

SEQ ID NO: 3518097 - RNA, 14 nt, Human
cauccaaugcucaa

SEQ ID NO: 3518098 - RNA, 23 nt, Human
cauccaaugcucaagaaacaacu

SEQ ID NO: 3518099 - RNA, 18 nt, Human
cauccacaauaaccaaga

SEQ ID NO: 3518100 - RNA, 21 nt, Human
cauccacauuguuuuaaaaag

SEQ ID NO: 3518101 - RNA, 12 nt, Human
cauccaccccau

SEQ ID NO: 3518102 - RNA, 14 nt, Human
cauccaccccaucc

SEQ ID NO: 3518103 - RNA, 20 nt, Human
cauccaccguccccucccag

SEQ ID NO: 3518104 - RNA, 14 nt, Human
cauccaccuccuuc

SEQ ID NO: 3518105 - RNA, 16 nt, Human
cauccaccuccuucuc

SEQ ID NO: 3518106 - RNA, 14 nt, Human
cauccacuagugca

SEQ ID NO: 3518107 - RNA, 15 nt, Human
cauccacucuacccu

SEQ ID NO: 3518108 - RNA, 20 nt, Human
cauccagagauucauuuucu

SEQ ID NO: 3518109 - RNA, 20 nt, Human
cauccagagucccugccugg

SEQ ID NO: 3518110 - RNA, 23 nt, Human
cauccagcagauuuccagccuuc

SEQ ID NO: 3518111 - RNA, 16 nt, Human
cauccagcagucucug

SEQ ID NO: 3518112 - RNA, 15 nt, Human
cauccagcuugccag

SEQ ID NO: 3518113 - RNA, 19 nt, Human
cauccagugacaaaccauc

SEQ ID NO: 3518114 - RNA, 13 nt, Human
cauccaguucaug

SEQ ID NO: 3518115 - RNA, 12 nt, Human
cauccauaaauc

SEQ ID NO: 3518116 - RNA, 17 nt, Human
cauccauaaauccaguu

SEQ ID NO: 3518117 - RNA, 14 nt, Human
cauccaugccucag

SEQ ID NO: 3518118 - RNA, 15 nt, Human
cauccaugccucaga

SEQ ID NO: 3518119 - RNA, 11 nt, Human
cauccaugggg

SEQ ID NO: 3518120 - RNA, 12 nt, Human
cauccauuccca

SEQ ID NO: 3518121 - RNA, 14 nt, Human
cauccauucccaag

SEQ ID NO: 3518122 - RNA, 18 nt, Human
cauccauucccaagaaau

SEQ ID NO: 3518123 - RNA, 16 nt, Human
cauccauuccucaggg

SEQ ID NO: 3518124 - RNA, 16 nt, Human
cauccauucuccugag

SEQ ID NO: 3518125 - RNA, 19 nt, Human
cauccauuucaucuauuuc

SEQ ID NO: 3518126 - RNA, 20 nt, Human
caucccaaacccuucagugc

SEQ ID NO: 3518127 - RNA, 23 nt, Human
caucccaaccaggcaccucuucc

SEQ ID NO: 3518128 - RNA, 15 nt, Human
caucccacaaguggu

SEQ ID NO: 3518129 - RNA, 23 nt, Human
caucccacucacaacagcugccu

SEQ ID NO: 3518130 - RNA, 13 nt, Human
caucccacugcca

SEQ ID NO: 3518131 - RNA, 23 nt, Human
caucccagacaggucccuccccu

SEQ ID NO: 3518132 - RNA, 11 nt, Human
caucccagagg

SEQ ID NO: 3518133 - RNA, 15 nt, Human
caucccagcaccugc

SEQ ID NO: 3518134 - RNA, 12 nt, Human
caucccagcccc

SEQ ID NO: 3518135 - RNA, 16 nt, Human
caucccagccccaaug

SEQ ID NO: 3518136 - RNA, 16 nt, Human
caucccagccccaauu

SEQ ID NO: 3518137 - RNA, 22 nt, Human
caucccaggacaccacacccag

SEQ ID NO: 3518138 - RNA, 19 nt, Human
caucccaggggaccacacc

SEQ ID NO: 3518139 - RNA, 13 nt, Human
caucccaguggcc

SEQ ID NO: 3518140 - RNA, 20 nt, Human
caucccaguggccucaaccc

SEQ ID NO: 3518141 - RNA, 20 nt, Human
caucccaucuaagcugcagc

SEQ ID NO: 3518142 - RNA, 12 nt, Human
cauccccagggg

SEQ ID NO: 3518143 - RNA, 18 nt, Human
cauccccaggggucccag

SEQ ID NO: 3518144 - RNA, 18 nt, Human
cauccccauccuccagcu

SEQ ID NO: 3518145 - RNA, 21 nt, Human
cauccccauccuccagcuucu

SEQ ID NO: 3518146 - RNA, 14 nt, Human
caucccccaaaguu

SEQ ID NO: 3518147 - RNA, 12 nt, Human
cauccccccuca

SEQ ID NO: 3518148 - RNA, 14 nt, Human
cauccccccucacc

SEQ ID NO: 3518149 - RNA, 17 nt, Human
cauccccccucaccagg

SEQ ID NO: 3518150 - RNA, 16 nt, Human
cauccccgcuggcugg

SEQ ID NO: 3518151 - RNA, 14 nt, Human
cauccccugccucc

SEQ ID NO: 3518152 - RNA, 14 nt, Human
cauccccuggacug

SEQ ID NO: 3518153 - RNA, 17 nt, Human
caucccgcucuuuuccu

SEQ ID NO: 3518154 - RNA, 16 nt, Human
caucccggaggaaauc

SEQ ID NO: 3518155 - RNA, 21 nt, Human
caucccgggacgcagcaggag

SEQ ID NO: 3518156 - RNA, 18 nt, Human
caucccuaaugcugcaga

SEQ ID NO: 3518157 - RNA, 23 nt, Human
caucccuaccgacccaggguucc

SEQ ID NO: 3518158 - RNA, 13 nt, Human
caucccucaccca

SEQ ID NO: 3518159 - RNA, 15 nt, Human
caucccucuggggcu

SEQ ID NO: 3518160 - RNA, 19 nt, Human
caucccucuggggcuguuc

SEQ ID NO: 3518161 - RNA, 11 nt, Human
caucccugaag

SEQ ID NO: 3518162 - RNA, 13 nt, Human
caucccugaaggc

SEQ ID NO: 3518163 - RNA, 21 nt, Human
caucccugaaggccccgccca

SEQ ID NO: 3518164 - RNA, 23 nt, Human
caucccugagacagggagggaag

SEQ ID NO: 3518165 - RNA, 16 nt, Human
caucccugccugguca

SEQ ID NO: 3518166 - RNA, 12 nt, Human
caucccuggccc

SEQ ID NO: 3518167 - RNA, 13 nt, Human
caucccuggcccc

SEQ ID NO: 3518168 - RNA, 22 nt, Human
caucccuggcccccucccugga

SEQ ID NO: 3518169 - RNA, 17 nt, Human
caucccugggccugcug

SEQ ID NO: 3518170 - RNA, 20 nt, Human
caucccugggccugcugcug

SEQ ID NO: 3518171 - RNA, 22 nt, Human
caucccugggccuugggcuccg

SEQ ID NO: 3518172 - RNA, 23 nt, Human
caucccuugaccaggccugggcc

SEQ ID NO: 3518173 - RNA, 14 nt, Human
caucccuuucccuu

SEQ ID NO: 3518174 - RNA, 17 nt, Human
caucccuuucccuuggu

SEQ ID NO: 3518175 - RNA, 16 nt, Human
cauccgaccagguugu

SEQ ID NO: 3518176 - RNA, 13 nt, Human
cauccgaggcagg

SEQ ID NO: 3518177 - RNA, 22 nt, Human
cauccgaggcagggucaggaga

SEQ ID NO: 3518178 - RNA, 13 nt, Human
cauccgcaggugc

SEQ ID NO: 3518179 - RNA, 14 nt, Human
cauccgcaggugcu

SEQ ID NO: 3518180 - RNA, 16 nt, Human
cauccgcgugugccug

SEQ ID NO: 3518181 - RNA, 17 nt, Human
cauccggggccagcucc

SEQ ID NO: 3518182 - RNA, 17 nt, Human
cauccgugccucuuuuu

SEQ ID NO: 3518183 - RNA, 14 nt, Human
cauccuaacuccau

SEQ ID NO: 3518184 - RNA, 15 nt, Human
cauccuaagaaauau

SEQ ID NO: 3518185 - RNA, 19 nt, Human
cauccuacccccugugccu

SEQ ID NO: 3518186 - RNA, 19 nt, Human
cauccuacccucgggccca

SEQ ID NO: 3518187 - RNA, 20 nt, Human
cauccuagucucuaucauua

SEQ ID NO: 3518188 - RNA, 16 nt, Human
cauccuaucagccugu

SEQ ID NO: 3518189 - RNA, 17 nt, Human
cauccuauccacugggc

SEQ ID NO: 3518190 - RNA, 17 nt, Human
cagugccuuccauaauu

SEQ ID NO: 3518191 - RNA, 23 nt, Human
cagugccuuccauaauuaugaca

SEQ ID NO: 3518192 - RNA, 14 nt, Human
cagugccuugggga

SEQ ID NO: 3518193 - RNA, 18 nt, Human
cagugcgauucuggauaa

SEQ ID NO: 3518194 - RNA, 12 nt, Human
cagugcggccag

SEQ ID NO: 3518195 - RNA, 15 nt, Human
cagugcuaaaaaugg

SEQ ID NO: 3518196 - RNA, 19 nt, Human
cagugcuaaaaaugggacu

SEQ ID NO: 3518197 - RNA, 22 nt, Human
cagugcuaaaaaugggacuucu

SEQ ID NO: 3518198 - RNA, 13 nt, Human
cagugcuacugaa

SEQ ID NO: 3518199 - RNA, 19 nt, Human
cagugcuagugagcugggc

SEQ ID NO: 3518200 - RNA, 19 nt, Human
cagugcucacccacaccau

SEQ ID NO: 3518201 - RNA, 14 nt, Human
cagugcucccucac

SEQ ID NO: 3518202 - RNA, 14 nt, Human
cagugcucgcuguu

SEQ ID NO: 3518203 - RNA, 18 nt, Human
cagugcucgcuguugcug

SEQ ID NO: 3518204 - RNA, 23 nt, Human
cagugcucuuuucuccucacugu

SEQ ID NO: 3518205 - RNA, 12 nt, Human
cagugcugccug

SEQ ID NO: 3518206 - RNA, 22 nt, Human
cagugcugucugaucugugcuu

SEQ ID NO: 3518207 - RNA, 12 nt, Human
cagugcugugcu

SEQ ID NO: 3518208 - RNA, 15 nt, Human
cagugcuucagccug

SEQ ID NO: 3518209 - RNA, 16 nt, Human
cagugcuucagccuga

SEQ ID NO: 3518210 - RNA, 13 nt, Human
cagugcuuccaag

SEQ ID NO: 3518211 - RNA, 12 nt, Human
cagugcuucuca

SEQ ID NO: 3518212 - RNA, 15 nt, Human
cagugcuugccacag

SEQ ID NO: 3518213 - RNA, 18 nt, Human
cagugcuugccacagagc

SEQ ID NO: 3518214 - RNA, 13 nt, Human
cagugcuuggccc

SEQ ID NO: 3518215 - RNA, 14 nt, Human
cagugcuuggccca

SEQ ID NO: 3518216 - RNA, 16 nt, Human
cagugcuuggcccagg

SEQ ID NO: 3518217 - RNA, 20 nt, Human
cagugcuuggcccaggaguu

SEQ ID NO: 3518218 - RNA, 12 nt, Human
cagugcuuuugg

SEQ ID NO: 3518219 - RNA, 18 nt, Human
caguggaaauucagguga

SEQ ID NO: 3518220 - RNA, 13 nt, Human
caguggaagaagc

SEQ ID NO: 3518221 - RNA, 23 nt, Human
caguggaauauaaggaaagcaau

SEQ ID NO: 3518222 - RNA, 22 nt, Human
caguggacucagaaagccaaca

SEQ ID NO: 3518223 - RNA, 17 nt, Human
caguggacuuuccaccc

SEQ ID NO: 3518224 - RNA, 20 nt, Human
caguggacuuuccacccccu

SEQ ID NO: 3518225 - RNA, 21 nt, Human
caguggacuuuccacccccuc

SEQ ID NO: 3518226 - RNA, 22 nt, Human
caguggacuuuccacccccucc

SEQ ID NO: 3518227 - RNA, 23 nt, Human
caguggacuuuccacccccuccc

SEQ ID NO: 3518228 - RNA, 14 nt, Human
caguggaggugcug

SEQ ID NO: 3518229 - RNA, 21 nt, Human
caguggagugcaaaaggcuug

SEQ ID NO: 3518230 - RNA, 14 nt, Human
caguggauacgugu

SEQ ID NO: 3518231 - RNA, 12 nt, Human
caguggcagggc

SEQ ID NO: 3518232 - RNA, 13 nt, Human
caguggcagggca

SEQ ID NO: 3518233 - RNA, 19 nt, Human
caguggcagggcacagggc

SEQ ID NO: 3518234 - RNA, 14 nt, Human
caguggcagggcuc

SEQ ID NO: 3518235 - RNA, 17 nt, Human
caguggcagggcucagg

SEQ ID NO: 3518236 - RNA, 18 nt, Human
caguggcagggcucagga

SEQ ID NO: 3518237 - RNA, 17 nt, Human
caguggcauggcuccag

SEQ ID NO: 3518238 - RNA, 13 nt, Human
caguggccacuca

SEQ ID NO: 3518239 - RNA, 16 nt, Human
caguggcccauggcau

SEQ ID NO: 3518240 - RNA, 21 nt, Human
caguggccucaacccucccuc

SEQ ID NO: 3518241 - RNA, 18 nt, Human
caguggccuggcuccgcu

SEQ ID NO: 3518242 - RNA, 19 nt, Human
caguggccuuccccagcau

SEQ ID NO: 3518243 - RNA, 19 nt, Human
caguggcgaaaucccugcu

SEQ ID NO: 3518244 - RNA, 20 nt, Human
caguggcgaaaucccugcuc

SEQ ID NO: 3518245 - RNA, 21 nt, Human
caguggcgaaaucccugcuca

SEQ ID NO: 3518246 - RNA, 21 nt, Human
caguggcgcgaucucagcuca

SEQ ID NO: 3518247 - RNA, 13 nt, Human
caguggcucuuuu

SEQ ID NO: 3518248 - RNA, 19 nt, Human
caguggcugguccagggcu

SEQ ID NO: 3518249 - RNA, 19 nt, Human
caguggcuucaucugucaa

SEQ ID NO: 3518250 - RNA, 21 nt, Human
caguggcuucaucugucaagu

SEQ ID NO: 3518251 - RNA, 12 nt, Human
cagugggaaaua

SEQ ID NO: 3518252 - RNA, 14 nt, Human
cagugggaaauauu

SEQ ID NO: 3518253 - RNA, 22 nt, Human
cagugggaacgugacugcccca

SEQ ID NO: 3518254 - RNA, 16 nt, Human
cagugggacagggcau

SEQ ID NO: 3518255 - RNA, 22 nt, Human
cagugggagcaaacugcaugcc

SEQ ID NO: 3518256 - RNA, 18 nt, Human
cagugggagccagggcug

SEQ ID NO: 3518257 - RNA, 15 nt, Human
cagugggagcugccu

SEQ ID NO: 3518258 - RNA, 16 nt, Human
cagugggagcugccug

SEQ ID NO: 3518259 - RNA, 17 nt, Human
cagugggagcugccugu

SEQ ID NO: 3518260 - RNA, 20 nt, Human
cagugggagcugccuguuca

SEQ ID NO: 3518261 - RNA, 12 nt, Human
cagugggaggcg

SEQ ID NO: 3518262 - RNA, 17 nt, Human
cagugggaggggcaggc

SEQ ID NO: 3518263 - RNA, 21 nt, Human
cagugggaggggcaggcugac

SEQ ID NO: 3518264 - RNA, 21 nt, Human
cagugggaggugagaccaccu

SEQ ID NO: 3518265 - RNA, 14 nt, Human
cagugggccuggcc

SEQ ID NO: 3518266 - RNA, 20 nt, Human
caguggggaggggcuguggg

SEQ ID NO: 3518267 - RNA, 20 nt, Human
caguggggccugaggcuccu

SEQ ID NO: 3518268 - RNA, 13 nt, Human
caguggggccugu

SEQ ID NO: 3518269 - RNA, 17 nt, Human
caguggggccuguggaa

SEQ ID NO: 3518270 - RNA, 23 nt, Human
cagugggguuucgcagccugagu

SEQ ID NO: 3518271 - RNA, 14 nt, Human
cagugggucccacu

SEQ ID NO: 3518272 - RNA, 17 nt, Human
cagugggucccacuucc

SEQ ID NO: 3518273 - RNA, 18 nt, Human
cagugggucccacuuccc

SEQ ID NO: 3518274 - RNA, 23 nt, Human
cagugggucccacuuccccuccu

SEQ ID NO: 3518275 - RNA, 16 nt, Human
cagugguaagaauagu

SEQ ID NO: 3518276 - RNA, 20 nt, Human
cagugguaugaucacggcuc

SEQ ID NO: 3518277 - RNA, 18 nt, Human
caguggucaaaccgcacu

SEQ ID NO: 3518278 - RNA, 15 nt, Human
caguggugccaucau

SEQ ID NO: 3518279 - RNA, 20 nt, Human
caagcagcuuagaguuggcc

SEQ ID NO: 3518280 - RNA, 17 nt, Human
caagcaggacagugcuu

SEQ ID NO: 3518281 - RNA, 19 nt, Human
caagcaggagacgacaggc

SEQ ID NO: 3518282 - RNA, 12 nt, Human
caagcaggaggc

SEQ ID NO: 3518283 - RNA, 13 nt, Human
caagcaggaggcu

SEQ ID NO: 3518284 - RNA, 15 nt, Human
caagcagggcucugc

SEQ ID NO: 3518285 - RNA, 15 nt, Human
caagcagucgugccu

SEQ ID NO: 3518286 - RNA, 18 nt, Human
caagcagucgugccugug

SEQ ID NO: 3518287 - RNA, 20 nt, Human
caagcagucgugccuguguc

SEQ ID NO: 3518288 - RNA, 22 nt, Human
caagcaguugggacuacaggcg

SEQ ID NO: 3518289 - RNA, 13 nt, Human
caagcaguuucaa

SEQ ID NO: 3518290 - RNA, 20 nt, Human
caagcaguuucaauaaaguu

SEQ ID NO: 3518291 - RNA, 15 nt, Human
caagcaucaggggga

SEQ ID NO: 3518292 - RNA, 22 nt, Human
caagcaucagggggaagaagca

SEQ ID NO: 3518293 - RNA, 18 nt, Human
caagcaucuccugaggau

SEQ ID NO: 3518294 - RNA, 20 nt, Human
caagcaugcuugugaaaaug

SEQ ID NO: 3518295 - RNA, 18 nt, Human
caagcauggcuauuuuau

SEQ ID NO: 3518296 - RNA, 21 nt, Human
caagcauggcuauuuuauauu

SEQ ID NO: 3518297 - RNA, 15 nt, Human
caagcauguauuuuu

SEQ ID NO: 3518298 - RNA, 13 nt, Human
caagcauucuccu

SEQ ID NO: 3518299 - RNA, 15 nt, Human
caagcauucuccugu

SEQ ID NO: 3518300 - RNA, 17 nt, Human
caagcauucucuccauu

SEQ ID NO: 3518301 - RNA, 19 nt, Human
caagccaacgacaaagcca

SEQ ID NO: 3518302 - RNA, 18 nt, Human
caagccaacuuguaaaua

SEQ ID NO: 3518303 - RNA, 13 nt, Human
caagccaagcagc

SEQ ID NO: 3518304 - RNA, 15 nt, Human
caagccaagcagcca

SEQ ID NO: 3518305 - RNA, 19 nt, Human
caagccaagcagccaagcu

SEQ ID NO: 3518306 - RNA, 18 nt, Human
caagccaagggaaccugu

SEQ ID NO: 3518307 - RNA, 22 nt, Human
caagccaauccccuccuugggc

SEQ ID NO: 3518308 - RNA, 11 nt, Human
caagccacaga

SEQ ID NO: 3518309 - RNA, 22 nt, Human
caagccacucggcggcagcaug

SEQ ID NO: 3518310 - RNA, 13 nt, Human
caagccagaggcu

SEQ ID NO: 3518311 - RNA, 16 nt, Human
caagccagaggcuggg

SEQ ID NO: 3518312 - RNA, 22 nt, Human
caagccagcaacacagagcacu

SEQ ID NO: 3518313 - RNA, 14 nt, Human
caagccagcuggag

SEQ ID NO: 3518314 - RNA, 19 nt, Human
caagccaggcucacucaca

SEQ ID NO: 3518315 - RNA, 22 nt, Human
caagccagggauggggccacag

SEQ ID NO: 3518316 - RNA, 23 nt, Human
caagccagggauggggccacagc

SEQ ID NO: 3518317 - RNA, 20 nt, Human
caagccaucuugagugguca

SEQ ID NO: 3518318 - RNA, 12 nt, Human
caagcccaggag

SEQ ID NO: 3518319 - RNA, 14 nt, Human
caagcccaggugcc

SEQ ID NO: 3518320 - RNA, 22 nt, Human
caagcccaggugccagccugag

SEQ ID NO: 3518321 - RNA, 15 nt, Human
caagccccaggcagg

SEQ ID NO: 3518322 - RNA, 17 nt, Human
caagccccaggcaggcu

SEQ ID NO: 3518323 - RNA, 16 nt, Human
caagccccauccugcc

SEQ ID NO: 3518324 - RNA, 14 nt, Human
caagcccccccuuc

SEQ ID NO: 3518325 - RNA, 16 nt, Human
caagcccccccuucca

SEQ ID NO: 3518326 - RNA, 17 nt, Human
caagcccccccuuccac

SEQ ID NO: 3518327 - RNA, 13 nt, Human
caagccccugccc

SEQ ID NO: 3518328 - RNA, 17 nt, Human
caagcccuacagagcug

SEQ ID NO: 3518329 - RNA, 14 nt, Human
caagccuccacagc

SEQ ID NO: 3518330 - RNA, 16 nt, Human
caagccuccacagcga

SEQ ID NO: 3518331 - RNA, 19 nt, Human
caagccucgaggugccuuc

SEQ ID NO: 3518332 - RNA, 21 nt, Human
caagccugaccacgcuuucua

SEQ ID NO: 3518333 - RNA, 21 nt, Human
caagccugagggaaaggccag

SEQ ID NO: 3518334 - RNA, 13 nt, Human
caagccugcaacu

SEQ ID NO: 3518335 - RNA, 22 nt, Human
cauggcagaauaaucuuugggu

SEQ ID NO: 3518336 - RNA, 19 nt, Human
cauggcagauguaggaggg

SEQ ID NO: 3518337 - RNA, 12 nt, Human
cauggcaguggg

SEQ ID NO: 3518338 - RNA, 23 nt, Human
cauggcauauuuuucacauaucu

SEQ ID NO: 3518339 - RNA, 17 nt, Human
cauggcaucccuuuuuc

SEQ ID NO: 3518340 - RNA, 23 nt, Human
cauggcaucccuuuuucauaaau

SEQ ID NO: 3518341 - RNA, 21 nt, Human
cauggcaucuucgucuucacu

SEQ ID NO: 3518342 - RNA, 14 nt, Human
cauggccacacugu

SEQ ID NO: 3518343 - RNA, 15 nt, Human
cauggccacacugug

SEQ ID NO: 3518344 - RNA, 16 nt, Human
cauggccacacuguga

SEQ ID NO: 3518345 - RNA, 18 nt, Human
cauggccacacugugaca

SEQ ID NO: 3518346 - RNA, 20 nt, Human
cauggccacacugugacaca

SEQ ID NO: 3518347 - RNA, 22 nt, Human
cauggccacacugugacacacu

SEQ ID NO: 3518348 - RNA, 22 nt, Human
cauggccagcagcaccugcccu

SEQ ID NO: 3518349 - RNA, 15 nt, Human
cauggccagguggcc

SEQ ID NO: 3518350 - RNA, 12 nt, Human
cauggccccucu

SEQ ID NO: 3518351 - RNA, 17 nt, Human
cauggccccucugaccu

SEQ ID NO: 3518352 - RNA, 16 nt, Human
cauggccccugugagu

SEQ ID NO: 3518353 - RNA, 22 nt, Human
cauggcccucccaguaccuccu

SEQ ID NO: 3518354 - RNA, 18 nt, Human
cauggccggcuuucagga

SEQ ID NO: 3518355 - RNA, 14 nt, Human
cauggccgugaacu

SEQ ID NO: 3518356 - RNA, 17 nt, Human
cauggccuaugcacaua

SEQ ID NO: 3518357 - RNA, 19 nt, Human
cauggccuaugcacauaug

SEQ ID NO: 3518358 - RNA, 19 nt, Human
cauggccugcaaacuggga

SEQ ID NO: 3518359 - RNA, 22 nt, Human
cauggccuuugcuugaaagaaa

SEQ ID NO: 3518360 - RNA, 14 nt, Human
cauggcuaacuggc

SEQ ID NO: 3518361 - RNA, 20 nt, Human
cauggcuaagcuuaaaaaaa

SEQ ID NO: 3518362 - RNA, 15 nt, Human
cauggcuaagcuuua

SEQ ID NO: 3518363 - RNA, 18 nt, Human
cauggcuaaggcaccagc

SEQ ID NO: 3518364 - RNA, 14 nt, Human
cauggcucacugca

SEQ ID NO: 3518365 - RNA, 16 nt, Human
cauggcucaggguggu

SEQ ID NO: 3518366 - RNA, 20 nt, Human
cauggcuccagucugcugcc

SEQ ID NO: 3518367 - RNA, 22 nt, Human
cauggcuccagucugcugcccu

SEQ ID NO: 3518368 - RNA, 17 nt, Human
cauggcucccccuccac

SEQ ID NO: 3518369 - RNA, 11 nt, Human
cauggcugaac

SEQ ID NO: 3518370 - RNA, 13 nt, Human
cauggcugagcug

SEQ ID NO: 3518371 - RNA, 17 nt, Human
cauggcugccaauggga

SEQ ID NO: 3518372 - RNA, 15 nt, Human
cauggcugcuguugc

SEQ ID NO: 3518373 - RNA, 18 nt, Human
cauggcugcuguugcuua

SEQ ID NO: 3518374 - RNA, 24 nt, Human
cauggcugggaacugcagaccugu

SEQ ID NO: 3518375 - RNA, 12 nt, Human
cauggcuguguu

SEQ ID NO: 3518376 - RNA, 23 nt, Human
cauggcuguguuugcagccugcu

SEQ ID NO: 3518377 - RNA, 14 nt, Human
cauggcuuccuccu

SEQ ID NO: 3518378 - RNA, 17 nt, Human
cauggcuuccuccugcg

SEQ ID NO: 3518379 - RNA, 18 nt, Human
cauggcuugccacagcuc

SEQ ID NO: 3518380 - RNA, 20 nt, Human
caugggaaaugucaacaagu

SEQ ID NO: 3518381 - RNA, 19 nt, Human
caugggaagacgaggcccu

SEQ ID NO: 3518382 - RNA, 18 nt, Human
caugggaccuauaacugc

SEQ ID NO: 3518383 - RNA, 22 nt, Human
caugggaccuauaacugcccag

SEQ ID NO: 3518384 - RNA, 13 nt, Human
caugggagccggg

SEQ ID NO: 3518385 - RNA, 21 nt, Human
caugggagcugguuagaaaug

SEQ ID NO: 3518386 - RNA, 21 nt, Human
caugggaggccuuucccuaag

SEQ ID NO: 3518387 - RNA, 12 nt, Human
caugggagggag

SEQ ID NO: 3518388 - RNA, 16 nt, Human
caugggauaaaugcca

SEQ ID NO: 3518389 - RNA, 17 nt, Human
caugggauaaaugccau

SEQ ID NO: 3518390 - RNA, 16 nt, Human
caugggauuauuagaa

SEQ ID NO: 3518391 - RNA, 17 nt, Human
caugggcacugcugggu

SEQ ID NO: 3518392 - RNA, 20 nt, Human
caugggcaucuaugggagag

SEQ ID NO: 3518393 - RNA, 16 nt, Human
caugggccagccccuc

SEQ ID NO: 3518394 - RNA, 14 nt, Human
caugggccccucug

SEQ ID NO: 3518395 - RNA, 17 nt, Human
caugggccuccugugug

SEQ ID NO: 3518396 - RNA, 18 nt, Human
caugggccuccugugugu

SEQ ID NO: 3518397 - RNA, 23 nt, Human
caugggccuggccaccucucucc

SEQ ID NO: 3518398 - RNA, 15 nt, Human
caugggcuucacugu

SEQ ID NO: 3518399 - RNA, 16 nt, Human
caugggcuucacugua

SEQ ID NO: 3518400 - RNA, 17 nt, Human
caugggcuucacuguau

SEQ ID NO: 3518401 - RNA, 16 nt, Human
cauggggaagggauau

SEQ ID NO: 3518402 - RNA, 15 nt, Human
cauggggaggaggag

SEQ ID NO: 3518403 - RNA, 11 nt, Human
cauggggaggg

SEQ ID NO: 3518404 - RNA, 14 nt, Human
caugggggcagggc

SEQ ID NO: 3518405 - RNA, 17 nt, Human
caugggggccucagggc

SEQ ID NO: 3518406 - RNA, 15 nt, Human
cauggggucucucac

SEQ ID NO: 3518407 - RNA, 19 nt, Human
cauggggucucucacagac

SEQ ID NO: 3518408 - RNA, 23 nt, Human
cauggggucucucacagacagga

SEQ ID NO: 3518409 - RNA, 16 nt, Human
cauggggugggccucu

SEQ ID NO: 3518410 - RNA, 19 nt, Human
cauggggugggccucuggu

SEQ ID NO: 3518411 - RNA, 21 nt, Human
cauggggugggguagggcuga

SEQ ID NO: 3518412 - RNA, 19 nt, Human
caugggguuggcugggccc

SEQ ID NO: 3518413 - RNA, 15 nt, Human
cauggguagccuggg

SEQ ID NO: 3518414 - RNA, 15 nt, Human
cauggguagcuucug

SEQ ID NO: 3518415 - RNA, 16 nt, Human
cauggguagcuucuga

SEQ ID NO: 3518416 - RNA, 17 nt, Human
caugggucgcccaugag

SEQ ID NO: 3518417 - RNA, 23 nt, Human
cauggguuuuguagguacuuuug

SEQ ID NO: 3518418 - RNA, 23 nt, Human
caugguaauuuauaguuuauaca

SEQ ID NO: 3518419 - RNA, 18 nt, Human
caugguacccccuucugg

SEQ ID NO: 3518420 - RNA, 16 nt, Human
caugguauuugagaca

SEQ ID NO: 3518421 - RNA, 16 nt, Human
cauggucaacccucag

SEQ ID NO: 3518422 - RNA, 15 nt, Human
cauggucacacacug

SEQ ID NO: 3518423 - RNA, 17 nt, Human
cauggucccacaucccu

SEQ ID NO: 3518424 - RNA, 20 nt, Human
cauggucccacaucccuggg

SEQ ID NO: 3518425 - RNA, 13 nt, Human
cauggucccugcc

SEQ ID NO: 3518426 - RNA, 15 nt, Human
cauggucccugccuu

SEQ ID NO: 3518427 - RNA, 17 nt, Human
cauggucccugccuuag

SEQ ID NO: 3518428 - RNA, 17 nt, Human
caugguccgguguccuu

SEQ ID NO: 3518429 - RNA, 20 nt, Human
caugguccgguguccuuuuc

SEQ ID NO: 3518430 - RNA, 17 nt, Human
cauggucggaaaacaug

SEQ ID NO: 3518431 - RNA, 23 nt, Human
cauggucggaaaacaugcuacac

SEQ ID NO: 3518432 - RNA, 15 nt, Human
cauggucugcccucu

SEQ ID NO: 3518433 - RNA, 17 nt, Human
cauggugaaaagcucca

SEQ ID NO: 3518434 - RNA, 18 nt, Human
cauggugaaaagcuccau

SEQ ID NO: 3518435 - RNA, 19 nt, Human
cauggugaaaauguacuga

SEQ ID NO: 3518436 - RNA, 21 nt, Human
cauggugaaaauguacugaga

SEQ ID NO: 3518437 - RNA, 19 nt, Human
cauggugaaaccccgucuc

SEQ ID NO: 3518438 - RNA, 14 nt, Human
cauggugaagugcu

SEQ ID NO: 3518439 - RNA, 20 nt, Human
cauggugacuuuugaaaaga

SEQ ID NO: 3518440 - RNA, 21 nt, Human
cauggugaggcuuaacaaugu

SEQ ID NO: 3518441 - RNA, 21 nt, Human
cauggugcaguugacagcagg

SEQ ID NO: 3518442 - RNA, 15 nt, Human
cauggugccccagga

SEQ ID NO: 3518443 - RNA, 18 nt, Human
cauggugccccuagcuuu

SEQ ID NO: 3518444 - RNA, 22 nt, Human
caaguaauccaccugccucggc

SEQ ID NO: 3518445 - RNA, 11 nt, Human
caaguaauugu

SEQ ID NO: 3518446 - RNA, 23 nt, Human
caaguaauuucaguguaaagugu

SEQ ID NO: 3518447 - RNA, 15 nt, Human
caaguacacugagag

SEQ ID NO: 3518448 - RNA, 16 nt, Human
caaguacaguacuuug

SEQ ID NO: 3518449 - RNA, 16 nt, Human
caaguaccaaaguuuu

SEQ ID NO: 3518450 - RNA, 14 nt, Human
caaguacugcugua

SEQ ID NO: 3518451 - RNA, 16 nt, Human
caaguacugcuguaaa

SEQ ID NO: 3518452 - RNA, 16 nt, Human
caaguagaccaugguc

SEQ ID NO: 3518453 - RNA, 20 nt, Human
caaguagaugccugaacuug

SEQ ID NO: 3518454 - RNA, 19 nt, Human
caaguagcugggauuuuaa

SEQ ID NO: 3518455 - RNA, 13 nt, Human
caaguagucugcu

SEQ ID NO: 3518456 - RNA, 15 nt, Human
caaguagucugcuca

SEQ ID NO: 3518457 - RNA, 19 nt, Human
caaguaguucuguauuuga

SEQ ID NO: 3518458 - RNA, 20 nt, Human
caaguauaauuuuuuguaau

SEQ ID NO: 3518459 - RNA, 18 nt, Human
caaguauacuagggagcc

SEQ ID NO: 3518460 - RNA, 19 nt, Human
caaguauagaaaaucuuca

SEQ ID NO: 3518461 - RNA, 18 nt, Human
caaguauagccuauggca

SEQ ID NO: 3518462 - RNA, 22 nt, Human
caaguauccaaccaacuugguu

SEQ ID NO: 3518463 - RNA, 16 nt, Human
caaguaugaauaaaga

SEQ ID NO: 3518464 - RNA, 19 nt, Human
caaguaugaauaaagacac

SEQ ID NO: 3518465 - RNA, 17 nt, Human
caaguauuacuaaauug

SEQ ID NO: 3518466 - RNA, 23 nt, Human
caaguauuagggguaauauauug

SEQ ID NO: 3518467 - RNA, 18 nt, Human
caaguauucugccuuugc

SEQ ID NO: 3518468 - RNA, 15 nt, Human
caaguauuuaagccu

SEQ ID NO: 3518469 - RNA, 22 nt, Human
caaguauuuaagccuaaagauu

SEQ ID NO: 3518470 - RNA, 16 nt, Human
caaguauuuuuaauua

SEQ ID NO: 3518471 - RNA, 17 nt, Human
caagucaagugaaaaag

SEQ ID NO: 3518472 - RNA, 15 nt, Human
caagucaaucauuuc

SEQ ID NO: 3518473 - RNA, 16 nt, Human
caagucaaucauuucu

SEQ ID NO: 3518474 - RNA, 12 nt, Human
caagucacaaag

SEQ ID NO: 3518475 - RNA, 18 nt, Human
caagucacaugcguaaac

SEQ ID NO: 3518476 - RNA, 14 nt, Human
caagucacucccaa

SEQ ID NO: 3518477 - RNA, 20 nt, Human
caagucagcuuugccuucca

SEQ ID NO: 3518478 - RNA, 20 nt, Human
caagucauagguuaauauuu

SEQ ID NO: 3518479 - RNA, 16 nt, Human
caauuuuugucucaga

SEQ ID NO: 3518480 - RNA, 17 nt, Human
caauuuuuuuaauuuug

SEQ ID NO: 3518481 - RNA, 21 nt, Human
cacaaaacuccgcccccagcc

SEQ ID NO: 3518482 - RNA, 18 nt, Human
cacaaaaguuagcugagc

SEQ ID NO: 3518483 - RNA, 22 nt, Human
cacaaaauaaccaauccuggac

SEQ ID NO: 3518484 - RNA, 22 nt, Human
cacaaaauauauuuuguuuaca

SEQ ID NO: 3518485 - RNA, 15 nt, Human
cacaaaaucugucca

SEQ ID NO: 3518486 - RNA, 16 nt, Human
cacaaaauugggaaag

SEQ ID NO: 3518487 - RNA, 19 nt, Human
cacaaacaaacaagcuagg

SEQ ID NO: 3518488 - RNA, 13 nt, Human
cacaaacacaagg

SEQ ID NO: 3518489 - RNA, 13 nt, Human
cacaaaccugccu

SEQ ID NO: 3518490 - RNA, 23 nt, Human
cacaaacguuuacuuaucuuaug

SEQ ID NO: 3518491 - RNA, 23 nt, Human
cacaaacucuaucggagaacaug

SEQ ID NO: 3518492 - RNA, 20 nt, Human
cacaaagagaaaaagaaaug

SEQ ID NO: 3518493 - RNA, 21 nt, Human
cacaaagaguucuggaaaaga

SEQ ID NO: 3518494 - RNA, 14 nt, Human
cacaaagcccaagg

SEQ ID NO: 3518495 - RNA, 18 nt, Human
cacaaagcccuuccaugu

SEQ ID NO: 3518496 - RNA, 13 nt, Human
cacaaagccuuau

SEQ ID NO: 3518497 - RNA, 16 nt, Human
cacaaagcuuuugcau

SEQ ID NO: 3518498 - RNA, 21 nt, Human
cacaaaggaccucagcugcuu

SEQ ID NO: 3518499 - RNA, 19 nt, Human
cacaaaggccaaacugcug

SEQ ID NO: 3518500 - RNA, 18 nt, Human
cacaaaguaauuuggaaa

SEQ ID NO: 3518501 - RNA, 13 nt, Human
cacaaaguggcau

SEQ ID NO: 3518502 - RNA, 21 nt, Human
cacaaauauuuauuuucuuuc

SEQ ID NO: 3518503 - RNA, 22 nt, Human
cacaaaugacuuuauuauuuau

SEQ ID NO: 3518504 - RNA, 16 nt, Human
cacaaauuaguuauau

SEQ ID NO: 3518505 - RNA, 17 nt, Human
cacaaauuauuaaugaa

SEQ ID NO: 3518506 - RNA, 20 nt, Human
cacaaauuauuaaugaaaau

SEQ ID NO: 3518507 - RNA, 21 nt, Human
cacaaauucugucucuggauu

SEQ ID NO: 3518508 - RNA, 15 nt, Human
cacaaauuucucugu

SEQ ID NO: 3518509 - RNA, 12 nt, Human
cacaacaaaaau

SEQ ID NO: 3518510 - RNA, 16 nt, Human
cacaacacacacacuc

SEQ ID NO: 3518511 - RNA, 22 nt, Human
cacaacacacagauuugagcuc

SEQ ID NO: 3518512 - RNA, 21 nt, Human
cacaacagccaacagcuacaa

SEQ ID NO: 3518513 - RNA, 23 nt, Human
cacaacagccugacaacauuucu

SEQ ID NO: 3518514 - RNA, 20 nt, Human
cacaaccaacgcgaaaccaa

SEQ ID NO: 3518515 - RNA, 21 nt, Human
cacaacccaucuaccccugga

SEQ ID NO: 3518516 - RNA, 15 nt, Human
cacaacccccagcuc

SEQ ID NO: 3518517 - RNA, 17 nt, Human
cacaacgugcauugugc

SEQ ID NO: 3518518 - RNA, 14 nt, Human
cacaacuauuuuuc

SEQ ID NO: 3518519 - RNA, 19 nt, Human
cacaacucacuccuuuuaa

SEQ ID NO: 3518520 - RNA, 15 nt, Human
cacaacugacacagg

SEQ ID NO: 3518521 - RNA, 18 nt, Human
cacaacuugauggcugcg

SEQ ID NO: 3518522 - RNA, 18 nt, Human
cacaagaaaugaaagcag

SEQ ID NO: 3518523 - RNA, 20 nt, Human
cacaagaaaugaaagcaggg

SEQ ID NO: 3518524 - RNA, 12 nt, Human
cacaagaaauuu

SEQ ID NO: 3518525 - RNA, 20 nt, Human
cacaagaacacacacauaua

SEQ ID NO: 3518526 - RNA, 19 nt, Human
cacaagaagaccagacugu

SEQ ID NO: 3518527 - RNA, 17 nt, Human
cacaagaaucacuugaa

SEQ ID NO: 3518528 - RNA, 14 nt, Human
cacaagacccuugu

SEQ ID NO: 3518529 - RNA, 16 nt, Human
cacaagacccuugugg

SEQ ID NO: 3518530 - RNA, 18 nt, Human
cacaagacugcacaucaa

SEQ ID NO: 3518531 - RNA, 14 nt, Human
cacaagagcccagg

SEQ ID NO: 3518532 - RNA, 19 nt, Human
cacaagagcccaggccucc

SEQ ID NO: 3518533 - RNA, 18 nt, Human
cacaagauggaauuuauc

SEQ ID NO: 3518534 - RNA, 15 nt, Human
cacaagauucccaga

SEQ ID NO: 3518535 - RNA, 16 nt, Human
cacaagauucccagag

SEQ ID NO: 3518536 - RNA, 18 nt, Human
cacaagauucccagagac

SEQ ID NO: 3518537 - RNA, 22 nt, Human
cacaagcaaaaaaaaaaaaaag

SEQ ID NO: 3518538 - RNA, 17 nt, Human
cacaagccacagaagcc

SEQ ID NO: 3518539 - RNA, 15 nt, Human
cacaagccagggugu

SEQ ID NO: 3518540 - RNA, 21 nt, Human
cacaagccucgaggugccuuc

SEQ ID NO: 3518541 - RNA, 22 nt, Human
cacaagccucugcccaggcacu

SEQ ID NO: 3518542 - RNA, 15 nt, Human
cacaagcuccaagcu

SEQ ID NO: 3518543 - RNA, 19 nt, Human
cacaagcuccaagcuccca

SEQ ID NO: 3518544 - RNA, 12 nt, Human
cacaagcugccu

SEQ ID NO: 3518545 - RNA, 14 nt, Human
cacaagcugccucc

SEQ ID NO: 3518546 - RNA, 16 nt, Human
cacaagcugccucccu

SEQ ID NO: 3518547 - RNA, 14 nt, Human
cacaaggaagaaau

SEQ ID NO: 3518548 - RNA, 22 nt, Human
cacaaggacuuccuguccagcu

SEQ ID NO: 3518549 - RNA, 17 nt, Human
cacaaggauagaugcug

SEQ ID NO: 3518550 - RNA, 11 nt, Human
cacaaggcagc

SEQ ID NO: 3518551 - RNA, 14 nt, Human
cacaaggcagcaag

SEQ ID NO: 3518552 - RNA, 15 nt, Human
cacaaggcagcaagg

SEQ ID NO: 3518553 - RNA, 16 nt, Human
cacaaggcagcaaggc

SEQ ID NO: 3518554 - RNA, 15 nt, Human
cacaaggccaucugg

SEQ ID NO: 3518555 - RNA, 18 nt, Human
cacaaggcuccaagaccu

SEQ ID NO: 3518556 - RNA, 16 nt, Human
cacaaggcuguugcau

SEQ ID NO: 3518557 - RNA, 16 nt, Human
cacaaggucauggcca

SEQ ID NO: 3518558 - RNA, 17 nt, Human
cacaaggucauggccac

SEQ ID NO: 3518559 - RNA, 19 nt, Human
cacaaggucauggccacac

SEQ ID NO: 3518560 - RNA, 21 nt, Human
cacaaggucauggccacacug

SEQ ID NO: 3518561 - RNA, 14 nt, Human
cacaaguaagagac

SEQ ID NO: 3518562 - RNA, 21 nt, Human
cacaaguagaugccugaacuu

SEQ ID NO: 3518563 - RNA, 21 nt, Human
cacaaguccuggauguugugu

SEQ ID NO: 3518564 - RNA, 16 nt, Human
cacaaguccugugaau

SEQ ID NO: 3518565 - RNA, 20 nt, Human
cacaaguccugugaauuucu

SEQ ID NO: 3518566 - RNA, 12 nt, Human
cacaagugaaaa

SEQ ID NO: 3518567 - RNA, 16 nt, Human
cacaagugaaaaacau

SEQ ID NO: 3518568 - RNA, 20 nt, Human
cacaaguuaagauucuuggu

SEQ ID NO: 3518569 - RNA, 16 nt, Human
cacaaguuauuuaaau

SEQ ID NO: 3518570 - RNA, 14 nt, Human
cacaaguuguguuu

SEQ ID NO: 3518571 - RNA, 21 nt, Human
cacaauaacacuaaaauuuua

SEQ ID NO: 3518572 - RNA, 20 nt, Human
cacaauaacuccucccaggg

SEQ ID NO: 3518573 - RNA, 21 nt, Human
cacaauaaggucaaugccaga

SEQ ID NO: 3518574 - RNA, 11 nt, Human
cacaauauuuu

SEQ ID NO: 3518575 - RNA, 22 nt, Human
cacaauccuaacacauuaucgg

SEQ ID NO: 3518576 - RNA, 22 nt, Human
cacaaucucggcucacugcauc

SEQ ID NO: 3518577 - RNA, 23 nt, Human
cacaaugagauugaauuucacug

SEQ ID NO: 3518578 - RNA, 21 nt, Human
cacaauggcuaauucccagag

SEQ ID NO: 3518579 - RNA, 16 nt, Human
cacaaugucaguauuu

SEQ ID NO: 3518580 - RNA, 15 nt, Human
cacaauguucuuuau

SEQ ID NO: 3518581 - RNA, 22 nt, Human
cacaauguucuuuauauacaau

SEQ ID NO: 3518582 - RNA, 16 nt, Human
cacaauuagauuucuc

SEQ ID NO: 3518583 - RNA, 17 nt, Human
cacaauuagauuucuca

SEQ ID NO: 3518584 - RNA, 13 nt, Human
cacaauuugcacu

SEQ ID NO: 3518585 - RNA, 18 nt, Human
cacaauuuugauaaaaau

SEQ ID NO: 3518586 - RNA, 16 nt, Human
cacaauuuuuaauggc

SEQ ID NO: 3518587 - RNA, 21 nt, Human
cacacaaaaagugucucugcc

SEQ ID NO: 3518588 - RNA, 13 nt, Human
cacacaaagagag

SEQ ID NO: 3518589 - RNA, 14 nt, Human
cacacaacaaaaau

SEQ ID NO: 3518590 - RNA, 19 nt, Human
cacacaagggaaggacaga

SEQ ID NO: 3518591 - RNA, 16 nt, Human
cacacaaggggcccuu

SEQ ID NO: 3518592 - RNA, 16 nt, Human
cacacaaguaagagac

SEQ ID NO: 3518593 - RNA, 18 nt, Human
cacacaaugugucugaga

SEQ ID NO: 3518594 - RNA, 16 nt, Human
cacacaauuagauuuc

SEQ ID NO: 3518595 - RNA, 13 nt, Human
cacacacaaaccu

SEQ ID NO: 3518596 - RNA, 14 nt, Human
cacacacaaaccuu

SEQ ID NO: 3518597 - RNA, 15 nt, Human
cacacacaacaaaaa

SEQ ID NO: 3518598 - RNA, 13 nt, Human
cacacacaacagc

SEQ ID NO: 3518599 - RNA, 15 nt, Human
cacacacaacagcca

SEQ ID NO: 3518600 - RNA, 13 nt, Human
cacacacacaaaa

SEQ ID NO: 3518601 - RNA, 15 nt, Human
cacacacacaacaaa

SEQ ID NO: 3518602 - RNA, 13 nt, Human
cacacacacacaa

SEQ ID NO: 3518603 - RNA, 15 nt, Human
cacacacacacacag

SEQ ID NO: 3518604 - RNA, 16 nt, Human
cacacacacacacagc

SEQ ID NO: 3518605 - RNA, 14 nt, Human
cacacacacacacu

SEQ ID NO: 3518606 - RNA, 14 nt, Human
cacacacacacagc

SEQ ID NO: 3518607 - RNA, 16 nt, Human
cacacacacacaggag

SEQ ID NO: 3518608 - RNA, 14 nt, Human
cacacacacacaua

SEQ ID NO: 3518609 - RNA, 16 nt, Human
cacacacacacaugca

SEQ ID NO: 3518610 - RNA, 14 nt, Human
cacacacacacgca

SEQ ID NO: 3518611 - RNA, 11 nt, Human
cacacacacag

SEQ ID NO: 3518612 - RNA, 15 nt, Human
cacacacacagaaaa

SEQ ID NO: 3518613 - RNA, 12 nt, Human
cacacacacagg

SEQ ID NO: 3518614 - RNA, 14 nt, Human
cacacacacaggag

SEQ ID NO: 3518615 - RNA, 14 nt, Human
cacacacacauaca

SEQ ID NO: 3518616 - RNA, 14 nt, Human
cacacacacaugca

SEQ ID NO: 3518617 - RNA, 13 nt, Human
cacacacacgcac

SEQ ID NO: 3518618 - RNA, 20 nt, Human
cacacacagaaaauauacug

SEQ ID NO: 3518619 - RNA, 23 nt, Human
cacacacagaggaagagcaggca

SEQ ID NO: 3518620 - RNA, 12 nt, Human
cacacacagcca

SEQ ID NO: 3518621 - RNA, 13 nt, Human
cacacacagccac

SEQ ID NO: 3518622 - RNA, 15 nt, Human
cacacacagccacac

SEQ ID NO: 3518623 - RNA, 15 nt, Human
cacacacagcugggc

SEQ ID NO: 3518624 - RNA, 12 nt, Human
cacacacaggug

SEQ ID NO: 3518625 - RNA, 14 nt, Human
cauugagcugugca

SEQ ID NO: 3518626 - RNA, 10 nt, Human
cauugaguau

SEQ ID NO: 3518627 - RNA, 18 nt, Human
cauugauaugaaaaauau

SEQ ID NO: 3518628 - RNA, 14 nt, Human
cauugauauuguga

SEQ ID NO: 3518629 - RNA, 16 nt, Human
cauugauauugugaac

SEQ ID NO: 3518630 - RNA, 20 nt, Human
cauugauauugugaacauuu

SEQ ID NO: 3518631 - RNA, 23 nt, Human
cauugauauuugugcauuuucua

SEQ ID NO: 3518632 - RNA, 15 nt, Human
cauugauugcugugu

SEQ ID NO: 3518633 - RNA, 16 nt, Human
cauugauugcuguguc

SEQ ID NO: 3518634 - RNA, 18 nt, Human
cauugauugucagcuacu

SEQ ID NO: 3518635 - RNA, 13 nt, Human
cauugauuugauu

SEQ ID NO: 3518636 - RNA, 22 nt, Human
cauugauuugauuuuuauuauu

SEQ ID NO: 3518637 - RNA, 15 nt, Human
cauugcaacaaaaua

SEQ ID NO: 3518638 - RNA, 19 nt, Human
cauugcacauaagcuucca

SEQ ID NO: 3518639 - RNA, 18 nt, Human
cauugcacccagcccaga

SEQ ID NO: 3518640 - RNA, 16 nt, Human
cauugcacuccagccu

SEQ ID NO: 3518641 - RNA, 22 nt, Human
cauugcagaauaauguucuauu

SEQ ID NO: 3518642 - RNA, 16 nt, Human
cauugcauauaacuua

SEQ ID NO: 3518643 - RNA, 20 nt, Human
cauugcauucuauugccuuc

SEQ ID NO: 3518644 - RNA, 17 nt, Human
cauugccagugucuuuc

SEQ ID NO: 3518645 - RNA, 21 nt, Human
cauugccagugucuuucuuug

SEQ ID NO: 3518646 - RNA, 19 nt, Human
cauugccauucccugccug

SEQ ID NO: 3518647 - RNA, 20 nt, Human
cauugccauucccugccugg

SEQ ID NO: 3518648 - RNA, 23 nt, Human
cauugccccaaauggauuccugu

SEQ ID NO: 3518649 - RNA, 17 nt, Human
cauugcccccagggcac

SEQ ID NO: 3518650 - RNA, 21 nt, Human
cauugccguggcaucuuaaaa

SEQ ID NO: 3518651 - RNA, 22 nt, Human
cauugccuaacuacuaguuuuu

SEQ ID NO: 3518652 - RNA, 20 nt, Human
cauugccuauuucaguggca

SEQ ID NO: 3518653 - RNA, 18 nt, Human
cauugccuccuccuuccc

SEQ ID NO: 3518654 - RNA, 17 nt, Human
cauugccuggccuuccu

SEQ ID NO: 3518655 - RNA, 21 nt, Human
cauugccuuaacuggagcccc

SEQ ID NO: 3518656 - RNA, 21 nt, Human
cauugcgcucuagccugggca

SEQ ID NO: 3518657 - RNA, 19 nt, Human
caucagcacgauuucuguu

SEQ ID NO: 3518658 - RNA, 17 nt, Human
caucagcauaccuuuau

SEQ ID NO: 3518659 - RNA, 18 nt, Human
caucagcccaaucccuga

SEQ ID NO: 3518660 - RNA, 18 nt, Human
caucagcuaaacaccacg

SEQ ID NO: 3518661 - RNA, 13 nt, Human
caucagcuagcaa

SEQ ID NO: 3518662 - RNA, 15 nt, Human
caucagcugcugaaa

SEQ ID NO: 3518663 - RNA, 19 nt, Human
caucaggaugaacccagga

SEQ ID NO: 3518664 - RNA, 19 nt, Human
caucaggccaggcccucug

SEQ ID NO: 3518665 - RNA, 20 nt, Human
caucaggccaggcccucugc

SEQ ID NO: 3518666 - RNA, 22 nt, Human
caucaggccaggcccucugccc

SEQ ID NO: 3518667 - RNA, 23 nt, Human
caucaggccaggcccucugccca

SEQ ID NO: 3518668 - RNA, 15 nt, Human
caucaggcuuucuuu

SEQ ID NO: 3518669 - RNA, 18 nt, Human
caucagggacaggaugac

SEQ ID NO: 3518670 - RNA, 18 nt, Human
caucagggccuggggccu

SEQ ID NO: 3518671 - RNA, 22 nt, Human
caucagggccuggggccugaga

SEQ ID NO: 3518672 - RNA, 20 nt, Human
caucaguauugaagcauuuu

SEQ ID NO: 3518673 - RNA, 15 nt, Human
caucagucccuaugu

SEQ ID NO: 3518674 - RNA, 17 nt, Human
caucagucccuauguau

SEQ ID NO: 3518675 - RNA, 15 nt, Human
caucagugcucccuc

SEQ ID NO: 3518676 - RNA, 24 nt, Human
caucagugcucccucacaugucag

SEQ ID NO: 3518677 - RNA, 14 nt, Human
caucaguggagcca

SEQ ID NO: 3518678 - RNA, 16 nt, Human
caucaguggcauggcu

SEQ ID NO: 3518679 - RNA, 22 nt, Human
caucaguggcauggcuccaguc

SEQ ID NO: 3518680 - RNA, 21 nt, Human
caucaguguacccccgcccag

SEQ ID NO: 3518681 - RNA, 18 nt, Human
caucaguguuaaaaaauu

SEQ ID NO: 3518682 - RNA, 12 nt, Human
caucauaaaaua

SEQ ID NO: 3518683 - RNA, 14 nt, Human
caucauaaaauaaa

SEQ ID NO: 3518684 - RNA, 20 nt, Human
caucauaaaauaaaguauau

SEQ ID NO: 3518685 - RNA, 23 nt, Human
caucauaaaauaaaguauauaua

SEQ ID NO: 3518686 - RNA, 23 nt, Human
caucauaggaagggaccaaggca

SEQ ID NO: 3518687 - RNA, 20 nt, Human
caucauaguaaaagaaauga

SEQ ID NO: 3518688 - RNA, 13 nt, Human
caucaucagagcc

SEQ ID NO: 3518689 - RNA, 13 nt, Human
caucaucagggcc

SEQ ID NO: 3518690 - RNA, 15 nt, Human
caucaucauggccag

SEQ ID NO: 3518691 - RNA, 16 nt, Human
caucauccuaagcuau

SEQ ID NO: 3518692 - RNA, 14 nt, Human
caucauccucuggc

SEQ ID NO: 3518693 - RNA, 13 nt, Human
caucaucuguaag

SEQ ID NO: 3518694 - RNA, 13 nt, Human
caucaucuguaga

SEQ ID NO: 3518695 - RNA, 16 nt, Human
caucaugaauuuuaca

SEQ ID NO: 3518696 - RNA, 23 nt, Human
caucaugacacucguauaagcau

SEQ ID NO: 3518697 - RNA, 17 nt, Human
caucaugaguucugcug

SEQ ID NO: 3518698 - RNA, 16 nt, Human
caucaugcaucuuacu

SEQ ID NO: 3518699 - RNA, 13 nt, Human
caucaugccucug

SEQ ID NO: 3518700 - RNA, 14 nt, Human
caucaugccucuga

SEQ ID NO: 3518701 - RNA, 15 nt, Human
caucaugccucugag

SEQ ID NO: 3518702 - RNA, 16 nt, Human
caucaugccucugagg

SEQ ID NO: 3518703 - RNA, 19 nt, Human
caucaugccucugaggcca

SEQ ID NO: 3518704 - RNA, 20 nt, Human
caucaugccucugaggccag

SEQ ID NO: 3518705 - RNA, 14 nt, Human
caucauggccagcu

SEQ ID NO: 3518706 - RNA, 15 nt, Human
caucauggccagcug

SEQ ID NO: 3518707 - RNA, 21 nt, Human
caucauggccagcuggaggca

SEQ ID NO: 3518708 - RNA, 15 nt, Human
caucauggcuaucug

SEQ ID NO: 3518709 - RNA, 14 nt, Human
caucaugucuauug

SEQ ID NO: 3518710 - RNA, 22 nt, Human
caucauguggccccacccaauc

SEQ ID NO: 3518711 - RNA, 19 nt, Human
caucauguuuacagaggac

SEQ ID NO: 3518712 - RNA, 21 nt, Human
caucauguuuacagaggacag

SEQ ID NO: 3518713 - RNA, 15 nt, Human
caucauuauuuaugu

SEQ ID NO: 3518714 - RNA, 19 nt, Human
caucauucacuucacugug

SEQ ID NO: 3518715 - RNA, 18 nt, Human
caucauucaugcuacugc

SEQ ID NO: 3518716 - RNA, 12 nt, Human
caucauucccuu

SEQ ID NO: 3518717 - RNA, 17 nt, Human
caucauuccuugagaaa

SEQ ID NO: 3518718 - RNA, 22 nt, Human
caucauucucugucucauccau

SEQ ID NO: 3518719 - RNA, 14 nt, Human
caucauugcacucu

SEQ ID NO: 3518720 - RNA, 21 nt, Human
caucauugcugucugcagccu

SEQ ID NO: 3518721 - RNA, 14 nt, Human
caucauuguauaua

SEQ ID NO: 3518722 - RNA, 14 nt, Human
caucauuucaagaa

SEQ ID NO: 3518723 - RNA, 14 nt, Human
caucauuucaggag

SEQ ID NO: 3518724 - RNA, 12 nt, Human
caucauuucugg

SEQ ID NO: 3518725 - RNA, 23 nt, Human
cauccaaaauaguuaagacauga

SEQ ID NO: 3518726 - RNA, 15 nt, Human
cauccaaagcagaca

SEQ ID NO: 3518727 - RNA, 21 nt, Human
cauccaaccccccaccugcca

SEQ ID NO: 3518728 - RNA, 15 nt, Human
cauccaacuccagca

SEQ ID NO: 3518729 - RNA, 21 nt, Human
cauccaaggagaaacagagac

SEQ ID NO: 3518730 - RNA, 15 nt, Human
cauccaauccucacu

SEQ ID NO: 3518731 - RNA, 19 nt, Human
cauccaaucuaaccacauc

SEQ ID NO: 3518732 - RNA, 20 nt, Human
cauccaaucuaaccacauca

SEQ ID NO: 3518733 - RNA, 16 nt, Human
cauccaauuagcuuau

SEQ ID NO: 3518734 - RNA, 23 nt, Human
cauccacaaaugcaguuuuagaa

SEQ ID NO: 3518735 - RNA, 14 nt, Human
cauccacagucucc

SEQ ID NO: 3518736 - RNA, 14 nt, Human
cauccacucuaccc

SEQ ID NO: 3518737 - RNA, 14 nt, Human
cauccacugugcca

SEQ ID NO: 3518738 - RNA, 17 nt, Human
cauccacugugccaugu

SEQ ID NO: 3518739 - RNA, 23 nt, Human
cauccacugugccaugugccagg

SEQ ID NO: 3518740 - RNA, 18 nt, Human
cauccacuuacauauauu

SEQ ID NO: 3518741 - RNA, 17 nt, Human
cauccagacucagagcu

SEQ ID NO: 3518742 - RNA, 21 nt, Human
cauccagacucagagcucucu

SEQ ID NO: 3518743 - RNA, 13 nt, Human
cauccagaugugg

SEQ ID NO: 3518744 - RNA, 14 nt, Human
cauccagauguggc

SEQ ID NO: 3518745 - RNA, 15 nt, Human
cauccagauguggcu

SEQ ID NO: 3518746 - RNA, 18 nt, Human
cauccagcagucucugcc

SEQ ID NO: 3518747 - RNA, 20 nt, Human
cauccagcagucucugccuu

SEQ ID NO: 3518748 - RNA, 22 nt, Human
cauccaggaggaauaagcuccc

SEQ ID NO: 3518749 - RNA, 12 nt, Human
cauccaggcagu

SEQ ID NO: 3518750 - RNA, 11 nt, Human
cauccagggcc

SEQ ID NO: 3518751 - RNA, 21 nt, Human
cauccagggcccccaucucau

SEQ ID NO: 3518752 - RNA, 15 nt, Human
cauccagguucagcu

SEQ ID NO: 3518753 - RNA, 17 nt, Human
cauccaguuaaccaagu

SEQ ID NO: 3518754 - RNA, 16 nt, Human
cauccauaaagaagca

SEQ ID NO: 3518755 - RNA, 17 nt, Human
cauccauaaagaagcaa

SEQ ID NO: 3518756 - RNA, 14 nt, Human
cauccaucaucaug

SEQ ID NO: 3518757 - RNA, 12 nt, Human
cauccauccagg

SEQ ID NO: 3518758 - RNA, 17 nt, Human
cauccaugccucagaag

SEQ ID NO: 3518759 - RNA, 14 nt, Human
cauccauggccagc

SEQ ID NO: 3518760 - RNA, 19 nt, Human
cauccauggggcugauugu

SEQ ID NO: 3518761 - RNA, 20 nt, Human
cauccauggggucucucaca

SEQ ID NO: 3518762 - RNA, 21 nt, Human
cauccauggggucucucacag

SEQ ID NO: 3518763 - RNA, 16 nt, Human
cauccauguguggacu

SEQ ID NO: 3518764 - RNA, 18 nt, Human
cauccauguuccgagaag

SEQ ID NO: 3518765 - RNA, 15 nt, Human
cauccauguuuguaa

SEQ ID NO: 3518766 - RNA, 19 nt, Human
cauccauguuuguaaaacu

SEQ ID NO: 3518767 - RNA, 18 nt, Human
cauccauuccucagggac

SEQ ID NO: 3518768 - RNA, 22 nt, Human
cauccauuuauuuggcaucugu

SEQ ID NO: 3518769 - RNA, 14 nt, Human
ccaaagcauggacu

SEQ ID NO: 3518770 - RNA, 13 nt, Human
ccaaagccaccag

SEQ ID NO: 3518771 - RNA, 22 nt, Human
ccaaagccaccagacugacaaa

SEQ ID NO: 3518772 - RNA, 23 nt, Human
ccaaagcuaggguggcccuugca

SEQ ID NO: 3518773 - RNA, 21 nt, Human
ccaaagcugagccugcaggga

SEQ ID NO: 3518774 - RNA, 13 nt, Human
ccaaagcugccca

SEQ ID NO: 3518775 - RNA, 13 nt, Human
ccaaagcuuuccu

SEQ ID NO: 3518776 - RNA, 14 nt, Human
ccaaagcuuuccug

SEQ ID NO: 3518777 - RNA, 23 nt, Human
ccaaaggaagcacaugccucucu

SEQ ID NO: 3518778 - RNA, 19 nt, Human
ccaaaggacgcacugagca

SEQ ID NO: 3518779 - RNA, 12 nt, Human
ccaaaggaggcu

SEQ ID NO: 3518780 - RNA, 15 nt, Human
ccaaaggaggcuggc

SEQ ID NO: 3518781 - RNA, 17 nt, Human
ccaaaggaggcuggcag

SEQ ID NO: 3518782 - RNA, 19 nt, Human
ccaaaggaugugauauaua

SEQ ID NO: 3518783 - RNA, 14 nt, Human
ccaaaggcucccug

SEQ ID NO: 3518784 - RNA, 16 nt, Human
ccaaaggcucucuccu

SEQ ID NO: 3518785 - RNA, 20 nt, Human
ccaaagggagaguuccagag

SEQ ID NO: 3518786 - RNA, 18 nt, Human
ccaaagggagucugccag

SEQ ID NO: 3518787 - RNA, 21 nt, Human
ccaaagggagucugccagggc

SEQ ID NO: 3518788 - RNA, 19 nt, Human
ccaaaggggaccuggaagg

SEQ ID NO: 3518789 - RNA, 22 nt, Human
ccaaaggugaaggaauauaugg

SEQ ID NO: 3518790 - RNA, 15 nt, Human
ccaaaguacacuguu

SEQ ID NO: 3518791 - RNA, 20 nt, Human
ccaaaguacacuguuucaaa

SEQ ID NO: 3518792 - RNA, 19 nt, Human
ccaaaguccugggauuaca

SEQ ID NO: 3518793 - RNA, 14 nt, Human
ccaaagucucccuu

SEQ ID NO: 3518794 - RNA, 16 nt, Human
ccaaagucucccuucu

SEQ ID NO: 3518795 - RNA, 14 nt, Human
ccaaagucucuaau

SEQ ID NO: 3518796 - RNA, 18 nt, Human
ccaaagucucuaauucua

SEQ ID NO: 3518797 - RNA, 16 nt, Human
ccaaagucuuaaaaua

SEQ ID NO: 3518798 - RNA, 23 nt, Human
ccaaagugccacucauuccugua

SEQ ID NO: 3518799 - RNA, 19 nt, Human
ccaaaguucuaauaauuuc

SEQ ID NO: 3518800 - RNA, 23 nt, Human
ccaaaguucuaauaauuucuaau

SEQ ID NO: 3518801 - RNA, 19 nt, Human
ccaaaguuguuguaaccug

SEQ ID NO: 3518802 - RNA, 16 nt, Human
ccaaauaaaaacuaaa

SEQ ID NO: 3518803 - RNA, 20 nt, Human
ccaaauaaaaacuaaauugu

SEQ ID NO: 3518804 - RNA, 12 nt, Human
ccaaauaaauaa

SEQ ID NO: 3518805 - RNA, 15 nt, Human
ccaaauaacuucagu

SEQ ID NO: 3518806 - RNA, 17 nt, Human
ccaaauaagaaaccuaa

SEQ ID NO: 3518807 - RNA, 23 nt, Human
ccaaauaauauguuuccuucccu

SEQ ID NO: 3518808 - RNA, 16 nt, Human
ccaaauaaugucucug

SEQ ID NO: 3518809 - RNA, 19 nt, Human
ccaaauauauucucuuugg

SEQ ID NO: 3518810 - RNA, 16 nt, Human
ccaaaucaaaaucucu

SEQ ID NO: 3518811 - RNA, 19 nt, Human
ccaaaucaaaaucucucca

SEQ ID NO: 3518812 - RNA, 20 nt, Human
ccaaaucaaaaucucuccac

SEQ ID NO: 3518813 - RNA, 20 nt, Human
ccaaaucacugaacuuugcu

SEQ ID NO: 3518814 - RNA, 24 nt, Human
ccaaauccgaaccuccucugugaa

SEQ ID NO: 3518815 - RNA, 19 nt, Human
ccaaauccgcucucuuccu

SEQ ID NO: 3518816 - RNA, 20 nt, Human
ccaaauccgcucucuuccug

SEQ ID NO: 3518817 - RNA, 18 nt, Human
ccaaaucucuuccacaag

SEQ ID NO: 3518818 - RNA, 20 nt, Human
ccaaaucugccuauugcagc

SEQ ID NO: 3518819 - RNA, 23 nt, Human
ccaaaucugccuauugcagcugg

SEQ ID NO: 3518820 - RNA, 15 nt, Human
ccaaaugcaauguga

SEQ ID NO: 3518821 - RNA, 16 nt, Human
ccaaaugcaauuugau

SEQ ID NO: 3518822 - RNA, 12 nt, Human
ccaaaugcagcu

SEQ ID NO: 3518823 - RNA, 15 nt, Human
ccaaaugcuuuaaaa

SEQ ID NO: 3518824 - RNA, 17 nt, Human
ccaaauggaaacagagg

SEQ ID NO: 3518825 - RNA, 22 nt, Human
ccaaauggaaaugggcagagca

SEQ ID NO: 3518826 - RNA, 14 nt, Human
ccaaaugguacaaa

SEQ ID NO: 3518827 - RNA, 22 nt, Human
ccaaauguaauugaauaaaguu

SEQ ID NO: 3518828 - RNA, 19 nt, Human
ccaaaugugugcccagcuu

SEQ ID NO: 3518829 - RNA, 20 nt, Human
ccaaaugugugcccagcuua

SEQ ID NO: 3518830 - RNA, 18 nt, Human
ccaaauguucaucaauga

SEQ ID NO: 3518831 - RNA, 17 nt, Human
ccaaauuaaaaaagaua

SEQ ID NO: 3518832 - RNA, 18 nt, Human
ccaaauuaaaaaagauaa

SEQ ID NO: 3518833 - RNA, 17 nt, Human
ccaaauuaguacagaaa

SEQ ID NO: 3518834 - RNA, 19 nt, Human
ccaaauuaucaagcuaaua

SEQ ID NO: 3518835 - RNA, 19 nt, Human
ccaaauuauuucuuaauua

SEQ ID NO: 3518836 - RNA, 18 nt, Human
ccaaauuauuuguguaau

SEQ ID NO: 3518837 - RNA, 15 nt, Human
ccaaauucaguuuca

SEQ ID NO: 3518838 - RNA, 20 nt, Human
ccaaauuccuuggcaugccu

SEQ ID NO: 3518839 - RNA, 20 nt, Human
ccaaauugcugggauuacag

SEQ ID NO: 3518840 - RNA, 14 nt, Human
ccaaauugugcuuc

SEQ ID NO: 3518841 - RNA, 12 nt, Human
ccaaauuuauca

SEQ ID NO: 3518842 - RNA, 20 nt, Human
ccaaauuugauugauuugaa

SEQ ID NO: 3518843 - RNA, 14 nt, Human
ccaacaaagcuguu

SEQ ID NO: 3518844 - RNA, 19 nt, Human
ccaacaagaauaaaggcag

SEQ ID NO: 3518845 - RNA, 16 nt, Human
ccaacaagggcagugg

SEQ ID NO: 3518846 - RNA, 17 nt, Human
ccaacaagggcagugga

SEQ ID NO: 3518847 - RNA, 22 nt, Human
ccaacaauccuagugcuuuccu

SEQ ID NO: 3518848 - RNA, 19 nt, Human
ccaacaccaagcacagcag

SEQ ID NO: 3518849 - RNA, 14 nt, Human
ccaacaccacagac

SEQ ID NO: 3518850 - RNA, 21 nt, Human
ccaacaccacagacacacaca

SEQ ID NO: 3518851 - RNA, 23 nt, Human
ccaacaccacagacacacacacg

SEQ ID NO: 3518852 - RNA, 12 nt, Human
ccaacaccaggg

SEQ ID NO: 3518853 - RNA, 14 nt, Human
ccaacacucaagaa

SEQ ID NO: 3518854 - RNA, 15 nt, Human
ccaacacugccagca

SEQ ID NO: 3518855 - RNA, 14 nt, Human
ccaacacugugccc

SEQ ID NO: 3518856 - RNA, 12 nt, Human
ccaacacuucca

SEQ ID NO: 3518857 - RNA, 13 nt, Human
ccaacacuuccag

SEQ ID NO: 3518858 - RNA, 19 nt, Human
ccaacagaagaacuguguu

SEQ ID NO: 3518859 - RNA, 22 nt, Human
ccaacagaugcuuuucugucuc

SEQ ID NO: 3518860 - RNA, 15 nt, Human
ccaacagccaugccc

SEQ ID NO: 3518861 - RNA, 22 nt, Human
ccaacagcgacauagcccaucc

SEQ ID NO: 3518862 - RNA, 23 nt, Human
ccaacagcgcccaaaggacgcac

SEQ ID NO: 3518863 - RNA, 13 nt, Human
ccaacagcuacaa

SEQ ID NO: 3518864 - RNA, 17 nt, Human
ccaacagcuacaacagc

SEQ ID NO: 3518865 - RNA, 23 nt, Human
ccaacagcuacaacagccucacu

SEQ ID NO: 3518866 - RNA, 12 nt, Human
ccaacagcugga

SEQ ID NO: 3518867 - RNA, 22 nt, Human
ccaacagcuggacccugaccag

SEQ ID NO: 3518868 - RNA, 17 nt, Human
ccaacaggaggacaauu

SEQ ID NO: 3518869 - RNA, 18 nt, Human
ccaacaggaggacaauuc

SEQ ID NO: 3518870 - RNA, 23 nt, Human
ccaacagguggcaggaccaggac

SEQ ID NO: 3518871 - RNA, 19 nt, Human
ccaacagucaaaacagaga

SEQ ID NO: 3518872 - RNA, 15 nt, Human
ccaacagucauguuu

SEQ ID NO: 3518873 - RNA, 12 nt, Human
ccaacagugagu

SEQ ID NO: 3518874 - RNA, 14 nt, Human
ccaacagugugaag

SEQ ID NO: 3518875 - RNA, 19 nt, Human
ccaacagugugaaguuaga

SEQ ID NO: 3518876 - RNA, 23 nt, Human
ccaacaguguuaggccuggcaca

SEQ ID NO: 3518877 - RNA, 14 nt, Human
ccaacauacuccca

SEQ ID NO: 3518878 - RNA, 16 nt, Human
ccaacauacucccauc

SEQ ID NO: 3518879 - RNA, 18 nt, Human
ccaacauacucccaucug

SEQ ID NO: 3518880 - RNA, 16 nt, Human
ccaacaucaacaucuu

SEQ ID NO: 3518881 - RNA, 17 nt, Human
ccaacaucacagcccag

SEQ ID NO: 3518882 - RNA, 18 nt, Human
ccaacaucacagcccagc

SEQ ID NO: 3518883 - RNA, 15 nt, Human
ccaacauccacucuc

SEQ ID NO: 3518884 - RNA, 17 nt, Human
ccaacaucccauugccc

SEQ ID NO: 3518885 - RNA, 20 nt, Human
ccaacaucccauugcccugg

SEQ ID NO: 3518886 - RNA, 17 nt, Human
ccaacaucgugaaaccc

SEQ ID NO: 3518887 - RNA, 17 nt, Human
ccaacaugcacugaugu

SEQ ID NO: 3518888 - RNA, 23 nt, Human
ccaacauggagaaacccugucuc

SEQ ID NO: 3518889 - RNA, 17 nt, Human
ccaacauguggcuccuc

SEQ ID NO: 3518890 - RNA, 13 nt, Human
ccaacccagccgc

SEQ ID NO: 3518891 - RNA, 14 nt, Human
ccaacccaucagaa

SEQ ID NO: 3518892 - RNA, 17 nt, Human
ccaacccccaccccaca

SEQ ID NO: 3518893 - RNA, 19 nt, Human
ccaacccccaccccacacu

SEQ ID NO: 3518894 - RNA, 20 nt, Human
ccaacccccaccccacacuu

SEQ ID NO: 3518895 - RNA, 21 nt, Human
ccaacccccagcacccgggcu

SEQ ID NO: 3518896 - RNA, 18 nt, Human
ccaaccccccaccugcca

SEQ ID NO: 3518897 - RNA, 13 nt, Human
ccaaccccccagc

SEQ ID NO: 3518898 - RNA, 15 nt, Human
ccaaccccccagcac

SEQ ID NO: 3518899 - RNA, 19 nt, Human
ccaaccccccagcacugag

SEQ ID NO: 3518900 - RNA, 19 nt, Human
ccaaccccuuaagcccugg

SEQ ID NO: 3518901 - RNA, 22 nt, Human
ccaacccgucuggcccaccagg

SEQ ID NO: 3518902 - RNA, 15 nt, Human
ccaacccguggaggc

SEQ ID NO: 3518903 - RNA, 18 nt, Human
ccaacccguggaggcugc

SEQ ID NO: 3518904 - RNA, 12 nt, Human
ccaacccuagca

SEQ ID NO: 3518905 - RNA, 19 nt, Human
ccaacccuaucuccugaca

SEQ ID NO: 3518906 - RNA, 20 nt, Human
ccaacccuaucuccugacag

SEQ ID NO: 3518907 - RNA, 15 nt, Human
ccaacccucagagcc

SEQ ID NO: 3518908 - RNA, 12 nt, Human
ccaacccucauc

SEQ ID NO: 3518909 - RNA, 13 nt, Human
ccaacccucauca

SEQ ID NO: 3518910 - RNA, 21 nt, Human
ccaacccugccgucaccacca

SEQ ID NO: 3518911 - RNA, 18 nt, Human
ccaacccuggcacccagg

SEQ ID NO: 3518912 - RNA, 12 nt, Human
ccaacccuuccc

SEQ ID NO: 3518913 - RNA, 19 nt, Human
ccaagcaggacagugcuug

SEQ ID NO: 3518914 - RNA, 20 nt, Human
ccaagcaggagacgacaggc

SEQ ID NO: 3518915 - RNA, 13 nt, Human
ccaagcagggagg

SEQ ID NO: 3518916 - RNA, 20 nt, Human
ccaagcaguugggacuacag

SEQ ID NO: 3518917 - RNA, 13 nt, Human
ccaagcauagaga

SEQ ID NO: 3518918 - RNA, 16 nt, Human
ccaagcaucaggggga

SEQ ID NO: 3518919 - RNA, 19 nt, Human
ccaagcaucagggggaaga

SEQ ID NO: 3518920 - RNA, 13 nt, Human
ccaagcaucuugg

SEQ ID NO: 3518921 - RNA, 18 nt, Human
ccaagccaagggaaccug

SEQ ID NO: 3518922 - RNA, 12 nt, Human
ccaagccacuga

SEQ ID NO: 3518923 - RNA, 17 nt, Human
ccaagccagaggcuggg

SEQ ID NO: 3518924 - RNA, 22 nt, Human
ccaagccagggauggggccaca

SEQ ID NO: 3518925 - RNA, 23 nt, Human
ccaagccagggauggggccacag

SEQ ID NO: 3518926 - RNA, 20 nt, Human
ccaagccauggguagccugg

SEQ ID NO: 3518927 - RNA, 21 nt, Human
ccaagccauggguagccuggg

SEQ ID NO: 3518928 - RNA, 13 nt, Human
ccaagccguggcu

SEQ ID NO: 3518929 - RNA, 21 nt, Human
ccaagccguggcuucccgcuc

SEQ ID NO: 3518930 - RNA, 15 nt, Human
ccaagccuccacagc

SEQ ID NO: 3518931 - RNA, 18 nt, Human
ccaagccuccacagcgag

SEQ ID NO: 3518932 - RNA, 19 nt, Human
ccaagccuggucagcccaa

SEQ ID NO: 3518933 - RNA, 20 nt, Human
ccaagccuggucagcccaaa

SEQ ID NO: 3518934 - RNA, 22 nt, Human
ccaagccuuggggauucuucca

SEQ ID NO: 3518935 - RNA, 13 nt, Human
ccaagcgcccugg

SEQ ID NO: 3518936 - RNA, 14 nt, Human
ccaagcgcccuggc

SEQ ID NO: 3518937 - RNA, 22 nt, Human
ccaagcgcccuggcccccacau

SEQ ID NO: 3518938 - RNA, 15 nt, Human
ccaagcggugucucu

SEQ ID NO: 3518939 - RNA, 17 nt, Human
ccaagcuaagcacugcc

SEQ ID NO: 3518940 - RNA, 15 nt, Human
ccaagcuagaauucc

SEQ ID NO: 3518941 - RNA, 17 nt, Human
ccaagcuagaauucccu

SEQ ID NO: 3518942 - RNA, 22 nt, Human
ccaagcuagaauucccucucuc

SEQ ID NO: 3518943 - RNA, 13 nt, Human
ccaagcuauuccu

SEQ ID NO: 3518944 - RNA, 16 nt, Human
ccaagcuauuccuuuc

SEQ ID NO: 3518945 - RNA, 18 nt, Human
ccaagcuauuccuuuccc

SEQ ID NO: 3518946 - RNA, 20 nt, Human
ccaagcuauuccuuucccuu

SEQ ID NO: 3518947 - RNA, 19 nt, Human
ccaagcucacaguuccucg

SEQ ID NO: 3518948 - RNA, 14 nt, Human
ccaagcucagaagg

SEQ ID NO: 3518949 - RNA, 16 nt, Human
ccaagcucagaaggcu

SEQ ID NO: 3518950 - RNA, 17 nt, Human
ccaagcuccaagcccca

SEQ ID NO: 3518951 - RNA, 13 nt, Human
ccaagcuccuccu

SEQ ID NO: 3518952 - RNA, 14 nt, Human
ccaagcuccuuggg

SEQ ID NO: 3518953 - RNA, 17 nt, Human
ccaagcuccuugggagg

SEQ ID NO: 3518954 - RNA, 17 nt, Human
ccaagcucugcuccucu

SEQ ID NO: 3518955 - RNA, 18 nt, Human
ccaagcucugcuccucuc

SEQ ID NO: 3518956 - RNA, 23 nt, Human
ccaagcugaggugcccaggagaa

SEQ ID NO: 3518957 - RNA, 19 nt, Human
ccaagcugaguuuccuaug

SEQ ID NO: 3518958 - RNA, 22 nt, Human
ccaagcuggagugcaguggugc

SEQ ID NO: 3518959 - RNA, 14 nt, Human
ccaagcuggcuggg

SEQ ID NO: 3518960 - RNA, 17 nt, Human
ccaagcuggcuggggug

SEQ ID NO: 3518961 - RNA, 23 nt, Human
ccaagcuggcugggguggccugu

SEQ ID NO: 3518962 - RNA, 11 nt, Human
ccaagcugggc

SEQ ID NO: 3518963 - RNA, 18 nt, Human
ccaagcugggccccagcc

SEQ ID NO: 3518964 - RNA, 21 nt, Human
ccaagcugggccccagcccac

SEQ ID NO: 3518965 - RNA, 14 nt, Human
ccaagcugugccac

SEQ ID NO: 3518966 - RNA, 22 nt, Human
ccaagcugugccacccugggcu

SEQ ID NO: 3518967 - RNA, 14 nt, Human
ccaagcuguuuucu

SEQ ID NO: 3518968 - RNA, 11 nt, Human
ccaagcuuccc

SEQ ID NO: 3518969 - RNA, 16 nt, Human
ccaagcuuggcagccg

SEQ ID NO: 3518970 - RNA, 23 nt, Human
ccaagcuuguccaacccgaggcc

SEQ ID NO: 3518971 - RNA, 18 nt, Human
ccaagcuuuaaauuaugu

SEQ ID NO: 3518972 - RNA, 18 nt, Human
ccaaggaaaccacagcug

SEQ ID NO: 3518973 - RNA, 20 nt, Human
ccaaggaaaccacagcugcu

SEQ ID NO: 3518974 - RNA, 22 nt, Human
ccaaggacagaaggcuccugcc

SEQ ID NO: 3518975 - RNA, 13 nt, Human
ccaaggaccaggu

SEQ ID NO: 3518976 - RNA, 14 nt, Human
ccaaggaccccuca

SEQ ID NO: 3518977 - RNA, 16 nt, Human
ccaaggaccccucacc

SEQ ID NO: 3518978 - RNA, 18 nt, Human
ccaaggaccccucaccuu

SEQ ID NO: 3518979 - RNA, 15 nt, Human
ccaaggacugaggga

SEQ ID NO: 3518980 - RNA, 23 nt, Human
ccaaggacugagggacucugaag

SEQ ID NO: 3518981 - RNA, 17 nt, Human
ccaaggagcacaggucc

SEQ ID NO: 3518982 - RNA, 22 nt, Human
ccaaggagcugagaauagaagg

SEQ ID NO: 3518983 - RNA, 15 nt, Human
ccaaggagcugcuau

SEQ ID NO: 3518984 - RNA, 22 nt, Human
ccaaggagcugcuauagccugg

SEQ ID NO: 3518985 - RNA, 22 nt, Human
ccaaggagucacugagaccaag

SEQ ID NO: 3518986 - RNA, 11 nt, Human
ccaaggauccc

SEQ ID NO: 3518987 - RNA, 15 nt, Human
ccaaggcaaggcagg

SEQ ID NO: 3518988 - RNA, 17 nt, Human
ccaaggcaaggcaggug

SEQ ID NO: 3518989 - RNA, 22 nt, Human
ccaaggcaaggcaggugccucc

SEQ ID NO: 3518990 - RNA, 23 nt, Human
ccaaggcaaggcaggugccucca

SEQ ID NO: 3518991 - RNA, 21 nt, Human
ccaaggcaaggggugccuggg

SEQ ID NO: 3518992 - RNA, 21 nt, Human
ccaaggcagaagcagcagggg

SEQ ID NO: 3518993 - RNA, 16 nt, Human
ccaaggcagaggccug

SEQ ID NO: 3518994 - RNA, 16 nt, Human
ccaaggccaaaggaag

SEQ ID NO: 3518995 - RNA, 17 nt, Human
ccaaggccgaagcucug

SEQ ID NO: 3518996 - RNA, 20 nt, Human
ccaaggccgaagcucuggcu

SEQ ID NO: 3518997 - RNA, 19 nt, Human
ccaaggccuuccccuggca

SEQ ID NO: 3518998 - RNA, 14 nt, Human
ccaaggccuucucc

SEQ ID NO: 3518999 - RNA, 16 nt, Human
ccaaggccuucuccuc

SEQ ID NO: 3519000 - RNA, 20 nt, Human
ccaaggcgggcggaucacuu

SEQ ID NO: 3519001 - RNA, 18 nt, Human
ccaaggcuagaaccaccu

SEQ ID NO: 3519002 - RNA, 19 nt, Human
ccaaggcugauuaaaccaa

SEQ ID NO: 3519003 - RNA, 16 nt, Human
ccaaggcuuucucuac

SEQ ID NO: 3519004 - RNA, 21 nt, Human
ccaagggaaaggggugcuuuu

SEQ ID NO: 3519005 - RNA, 22 nt, Human
ccaagggaaaggggugcuuuua

SEQ ID NO: 3519006 - RNA, 17 nt, Human
ccaagggaaccuguguc

SEQ ID NO: 3519007 - RNA, 18 nt, Human
ccaagggaaccugugucc

SEQ ID NO: 3519008 - RNA, 16 nt, Human
ccaagggaauauugcc

SEQ ID NO: 3519009 - RNA, 21 nt, Human
ccaagggaucugguccuaccc

SEQ ID NO: 3519010 - RNA, 15 nt, Human
ccaagggcagaaagu

SEQ ID NO: 3519011 - RNA, 18 nt, Human
ccaagggccgacuaagag

SEQ ID NO: 3519012 - RNA, 16 nt, Human
ccaagggccuggccug

SEQ ID NO: 3519013 - RNA, 14 nt, Human
ccaagggcuucugc

SEQ ID NO: 3519014 - RNA, 19 nt, Human
ccaagggcuucugcacccu

SEQ ID NO: 3519015 - RNA, 21 nt, Human
ccaagggcuuuguuuugcaca

SEQ ID NO: 3519016 - RNA, 19 nt, Human
ccaagggguccccuccagg

SEQ ID NO: 3519017 - RNA, 23 nt, Human
ccaaggguauccaaguuggacug

SEQ ID NO: 3519018 - RNA, 17 nt, Human
ccaaggucuucagccau

SEQ ID NO: 3519019 - RNA, 19 nt, Human
ccaaggucuucagccauca

SEQ ID NO: 3519020 - RNA, 13 nt, Human
ccaaggugggagg

SEQ ID NO: 3519021 - RNA, 18 nt, Human
ccaaggugggaggauugc

SEQ ID NO: 3519022 - RNA, 23 nt, Human
ccaaggugggcugagcccuggca

SEQ ID NO: 3519023 - RNA, 21 nt, Human
ccaaggugucauuuauguguc

SEQ ID NO: 3519024 - RNA, 13 nt, Human
ccaagguguccua

SEQ ID NO: 3519025 - RNA, 17 nt, Human
ccaagguguccuacaga

SEQ ID NO: 3519026 - RNA, 19 nt, Human
ccaagguguccuacagaaa

SEQ ID NO: 3519027 - RNA, 21 nt, Human
ccaagguguccuacagaaaaa

SEQ ID NO: 3519028 - RNA, 20 nt, Human
ccaagguuggagcccagggc

SEQ ID NO: 3519029 - RNA, 23 nt, Human
ccaagguuuggggaagaacgaag

SEQ ID NO: 3519030 - RNA, 19 nt, Human
ccaaguaaagguuaaaaau

SEQ ID NO: 3519031 - RNA, 13 nt, Human
cauguauaaauga

SEQ ID NO: 3519032 - RNA, 15 nt, Human
cauguauaaauguga

SEQ ID NO: 3519033 - RNA, 20 nt, Human
cauguauaauauuuuuaauu

SEQ ID NO: 3519034 - RNA, 18 nt, Human
cauguaugucuuggacac

SEQ ID NO: 3519035 - RNA, 21 nt, Human
cauguaugucuuggacacugu

SEQ ID NO: 3519036 - RNA, 17 nt, Human
cauguauuggccuggag

SEQ ID NO: 3519037 - RNA, 19 nt, Human
cauguauuggccuggaggu

SEQ ID NO: 3519038 - RNA, 15 nt, Human
cauguauuuauguaa

SEQ ID NO: 3519039 - RNA, 18 nt, Human
cauguauuuguuugcaua

SEQ ID NO: 3519040 - RNA, 21 nt, Human
caugucaaacaugagaugugu

SEQ ID NO: 3519041 - RNA, 19 nt, Human
caugucaagagucgcugug

SEQ ID NO: 3519042 - RNA, 23 nt, Human
caugucaccguggaccuuccugc

SEQ ID NO: 3519043 - RNA, 13 nt, Human
caugucacugugg

SEQ ID NO: 3519044 - RNA, 14 nt, Human
caugucacuguggu

SEQ ID NO: 3519045 - RNA, 13 nt, Human
caugucagacaca

SEQ ID NO: 3519046 - RNA, 23 nt, Human
caugucagcaaaaagcaaaauca

SEQ ID NO: 3519047 - RNA, 18 nt, Human
cauguccaagaagcccag

SEQ ID NO: 3519048 - RNA, 19 nt, Human
cauguccaagaagcccagg

SEQ ID NO: 3519049 - RNA, 20 nt, Human
cauguccaagaagcccagga

SEQ ID NO: 3519050 - RNA, 19 nt, Human
cauguccagcaccuugugc

SEQ ID NO: 3519051 - RNA, 16 nt, Human
caugucccuaccgagu

SEQ ID NO: 3519052 - RNA, 23 nt, Human
caugucccuaccgagucucuucu

SEQ ID NO: 3519053 - RNA, 18 nt, Human
cauguccuaugugugacu

SEQ ID NO: 3519054 - RNA, 22 nt, Human
cauguccugccuauuaucuguc

SEQ ID NO: 3519055 - RNA, 18 nt, Human
cauguccugugucaguuu

SEQ ID NO: 3519056 - RNA, 16 nt, Human
caccugcuucucugcc

SEQ ID NO: 3519057 - RNA, 12 nt, Human
caccuggacccc

SEQ ID NO: 3519058 - RNA, 15 nt, Human
caccuggaccccugc

SEQ ID NO: 3519059 - RNA, 23 nt, Human
caccuggcaucgcaccauucuga

SEQ ID NO: 3519060 - RNA, 12 nt, Human
caccuggccacc

SEQ ID NO: 3519061 - RNA, 14 nt, Human
caccuggccaccug

SEQ ID NO: 3519062 - RNA, 15 nt, Human
caccuggccaccuga

SEQ ID NO: 3519063 - RNA, 17 nt, Human
caccuggccaccugagg

SEQ ID NO: 3519064 - RNA, 15 nt, Human
caccuggccccaugu

SEQ ID NO: 3519065 - RNA, 16 nt, Human
caccuggcccucucug

SEQ ID NO: 3519066 - RNA, 20 nt, Human
caccuggcccugcuuccugc

SEQ ID NO: 3519067 - RNA, 13 nt, Human
caccuggcccugg

SEQ ID NO: 3519068 - RNA, 14 nt, Human
caccuggcccuggg

SEQ ID NO: 3519069 - RNA, 19 nt, Human
caccuggcccuggggccug

SEQ ID NO: 3519070 - RNA, 14 nt, Human
caccuggccucugc

SEQ ID NO: 3519071 - RNA, 17 nt, Human
caccuggccucugcacu

SEQ ID NO: 3519072 - RNA, 18 nt, Human
caccuggccucugcacuc

SEQ ID NO: 3519073 - RNA, 19 nt, Human
caccuggccucugcacucc

SEQ ID NO: 3519074 - RNA, 16 nt, Human
caccuggcucucaccu

SEQ ID NO: 3519075 - RNA, 13 nt, Human
caccuggcucugu

SEQ ID NO: 3519076 - RNA, 14 nt, Human
caccuggcucugug

SEQ ID NO: 3519077 - RNA, 19 nt, Human
caccuggcugagccuggcu

SEQ ID NO: 3519078 - RNA, 14 nt, Human
caccuggcuuguuu

SEQ ID NO: 3519079 - RNA, 16 nt, Human
caccuggcuuguuuau

SEQ ID NO: 3519080 - RNA, 16 nt, Human
caccugggagaaaucu

SEQ ID NO: 3519081 - RNA, 14 nt, Human
caccugggcccugg

SEQ ID NO: 3519082 - RNA, 19 nt, Human
caccugggcccuggggccu

SEQ ID NO: 3519083 - RNA, 22 nt, Human
caccuggggagugggacagagu

SEQ ID NO: 3519084 - RNA, 23 nt, Human
caccuggggcagucaccugccca

SEQ ID NO: 3519085 - RNA, 20 nt, Human
caccuggggugugggaggcc

SEQ ID NO: 3519086 - RNA, 18 nt, Human
caccugggucuuuaugca

SEQ ID NO: 3519087 - RNA, 20 nt, Human
caccugguacucccucucag

SEQ ID NO: 3519088 - RNA, 20 nt, Human
caccugguuccggaauccug

SEQ ID NO: 3519089 - RNA, 14 nt, Human
caccuguaaaccug

SEQ ID NO: 3519090 - RNA, 16 nt, Human
caccuguaaaccugag

SEQ ID NO: 3519091 - RNA, 22 nt, Human
ccaccuccccuauccacccagc

SEQ ID NO: 3519092 - RNA, 15 nt, Human
ccaccuccccuuggg

SEQ ID NO: 3519093 - RNA, 16 nt, Human
ccaccuccccuugggc

SEQ ID NO: 3519094 - RNA, 15 nt, Human
ccaccucccucacca

SEQ ID NO: 3519095 - RNA, 16 nt, Human
ccaccucccugcccag

SEQ ID NO: 3519096 - RNA, 18 nt, Human
ccaccuccuaaaaggccc

SEQ ID NO: 3519097 - RNA, 17 nt, Human
ccaccuccuucucuguc

SEQ ID NO: 3519098 - RNA, 14 nt, Human
ccaccucuccaagg

SEQ ID NO: 3519099 - RNA, 16 nt, Human
ccaccucuccaagggc

SEQ ID NO: 3519100 - RNA, 17 nt, Human
ccaccucuccaagggcu

SEQ ID NO: 3519101 - RNA, 17 nt, Human
ccaccucuccccaccuu

SEQ ID NO: 3519102 - RNA, 14 nt, Human
ccaccucucucacu

SEQ ID NO: 3519103 - RNA, 10 nt, Human
ccaccucugc

SEQ ID NO: 3519104 - RNA, 20 nt, Human
ccaccucugcggaccccagc

SEQ ID NO: 3519105 - RNA, 15 nt, Human
ccaccucugugaccu

SEQ ID NO: 3519106 - RNA, 18 nt, Human
ccaccucugugaccucag

SEQ ID NO: 3519107 - RNA, 19 nt, Human
ccaccucugugaccucagg

SEQ ID NO: 3519108 - RNA, 23 nt, Human
ccaccucuucucuuccuguaaca

SEQ ID NO: 3519109 - RNA, 16 nt, Human
ccaccugacacaccag

SEQ ID NO: 3519110 - RNA, 12 nt, Human
ccaccugagcuu

SEQ ID NO: 3519111 - RNA, 20 nt, Human
ccaccugaggaacugucucg

SEQ ID NO: 3519112 - RNA, 15 nt, Human
ccaccugcagggcug

SEQ ID NO: 3519113 - RNA, 18 nt, Human
ccaccugcaucuggggcc

SEQ ID NO: 3519114 - RNA, 16 nt, Human
ccaccugccagggaca

SEQ ID NO: 3519115 - RNA, 22 nt, Human
ccaccugccagggacagagggg

SEQ ID NO: 3519116 - RNA, 20 nt, Human
ccaccugcccaucacagggu

SEQ ID NO: 3519117 - RNA, 12 nt, Human
ccaccugccccc

SEQ ID NO: 3519118 - RNA, 22 nt, Human
ccaccugcccccuucucccaca

SEQ ID NO: 3519119 - RNA, 22 nt, Human
ccaccugcccuuuuuucugccu

SEQ ID NO: 3519120 - RNA, 16 nt, Human
ccaccugccuggccgg

SEQ ID NO: 3519121 - RNA, 14 nt, Human
ccaccugcucugcu

SEQ ID NO: 3519122 - RNA, 14 nt, Human
ccaccuggaagccc

SEQ ID NO: 3519123 - RNA, 21 nt, Human
ccaccuggaccccugcauugg

SEQ ID NO: 3519124 - RNA, 21 nt, Human
ccaccuggccccaugucucuc

SEQ ID NO: 3519125 - RNA, 17 nt, Human
ccaccuggccucugcac

SEQ ID NO: 3519126 - RNA, 20 nt, Human
ccaccuggccucugcacucc

SEQ ID NO: 3519127 - RNA, 18 nt, Human
ccaccuggcucucaccuc

SEQ ID NO: 3519128 - RNA, 14 nt, Human
ccaccuggggcagu

SEQ ID NO: 3519129 - RNA, 23 nt, Human
ccaccugguacucccucucagga

SEQ ID NO: 3519130 - RNA, 14 nt, Human
ccaccugucccacc

SEQ ID NO: 3519131 - RNA, 18 nt, Human
ccaccugucccaccucaa

SEQ ID NO: 3519132 - RNA, 11 nt, Human
ccaccugucuc

SEQ ID NO: 3519133 - RNA, 12 nt, Human
ccaccugucuca

SEQ ID NO: 3519134 - RNA, 18 nt, Human
ccaccugucucagccucc

SEQ ID NO: 3519135 - RNA, 20 nt, Human
ccaccugucucagccuccca

SEQ ID NO: 3519136 - RNA, 14 nt, Human
ccaccuuaaauuaa

SEQ ID NO: 3519137 - RNA, 16 nt, Human
ccaccuuaaauuaaac

SEQ ID NO: 3519138 - RNA, 20 nt, Human
ccaccuuaaauuaaacaauu

SEQ ID NO: 3519139 - RNA, 19 nt, Human
ccaccuucaauuccugggc

SEQ ID NO: 3519140 - RNA, 20 nt, Human
ccaccuucaauuccugggcc

SEQ ID NO: 3519141 - RNA, 19 nt, Human
ccaccuucccagcucuccc

SEQ ID NO: 3519142 - RNA, 21 nt, Human
ccaccuucccagcucucccuc

SEQ ID NO: 3519143 - RNA, 14 nt, Human
ccaccuugcgggga

SEQ ID NO: 3519144 - RNA, 14 nt, Human
ccaccuuggcugca

SEQ ID NO: 3519145 - RNA, 18 nt, Human
ccaccuuggcugcaggga

SEQ ID NO: 3519146 - RNA, 18 nt, Human
ccaccuuguuggagccug

SEQ ID NO: 3519147 - RNA, 23 nt, Human
ccaccuuuccucaaauguugaca

SEQ ID NO: 3519148 - RNA, 20 nt, Human
ccaccuuuguuucuccccca

SEQ ID NO: 3519149 - RNA, 23 nt, Human
ccacgaauuugcuggggaaucuc

SEQ ID NO: 3519150 - RNA, 16 nt, Human
ccacgagagcgcagca

SEQ ID NO: 3519151 - RNA, 19 nt, Human
ccacgagggcuggcuggcc

SEQ ID NO: 3519152 - RNA, 19 nt, Human
ccacgauccugccacccug

SEQ ID NO: 3519153 - RNA, 17 nt, Human
ccacgauguggcccugg

SEQ ID NO: 3519154 - RNA, 19 nt, Human
ccacgauuuucuccagcuc

SEQ ID NO: 3519155 - RNA, 22 nt, Human
ccacgauuuucuccagcucaga

SEQ ID NO: 3519156 - RNA, 13 nt, Human
ccacgcacuccau

SEQ ID NO: 3519157 - RNA, 14 nt, Human
ccacgccacagccc

SEQ ID NO: 3519158 - RNA, 17 nt, Human
ccacgcccccacuggug

SEQ ID NO: 3519159 - RNA, 22 nt, Human
ccacgcccguccugccuguggc

SEQ ID NO: 3519160 - RNA, 21 nt, Human
ccacgcccuccccuccccugc

SEQ ID NO: 3519161 - RNA, 17 nt, Human
ccacgccuguaauccca

SEQ ID NO: 3519162 - RNA, 19 nt, Human
ccacgcugacuacagggcc

SEQ ID NO: 3519163 - RNA, 14 nt, Human
ccacgcugucucca

SEQ ID NO: 3519164 - RNA, 18 nt, Human
ccacgcugucuccagacc

SEQ ID NO: 3519165 - RNA, 14 nt, Human
ccacgcuucuccgg

SEQ ID NO: 3519166 - RNA, 17 nt, Human
ccacgcuucuccggauc

SEQ ID NO: 3519167 - RNA, 20 nt, Human
ccacggaaaaugccaaucuc

SEQ ID NO: 3519168 - RNA, 17 nt, Human
ccacggacgcuggcucc

SEQ ID NO: 3519169 - RNA, 20 nt, Human
ccacggacguuuccaucagg

SEQ ID NO: 3519170 - RNA, 17 nt, Human
ccacggacuccagucug

SEQ ID NO: 3519171 - RNA, 20 nt, Human
ccacggagccacuccucuga

SEQ ID NO: 3519172 - RNA, 20 nt, Human
ccacggcaccugggcccugg

SEQ ID NO: 3519173 - RNA, 13 nt, Human
ccacggccacugg

SEQ ID NO: 3519174 - RNA, 13 nt, Human
ccacggccaggcc

SEQ ID NO: 3519175 - RNA, 14 nt, Human
ccacggccaggcca

SEQ ID NO: 3519176 - RNA, 18 nt, Human
ccacggcucuaggugggg

SEQ ID NO: 3519177 - RNA, 22 nt, Human
ccacgggacaucacaggguggg

SEQ ID NO: 3519178 - RNA, 17 nt, Human
ccacggucuguucuuga

SEQ ID NO: 3519179 - RNA, 21 nt, Human
ccacggucuguucuugaagca

SEQ ID NO: 3519180 - RNA, 17 nt, Human
ccacgguggucacugga

SEQ ID NO: 3519181 - RNA, 14 nt, Human
ccacgguguucugu

SEQ ID NO: 3519182 - RNA, 15 nt, Human
ccacgucccccuggg

SEQ ID NO: 3519183 - RNA, 15 nt, Human
ccacguccugucagu

SEQ ID NO: 3519184 - RNA, 19 nt, Human
ccacguccugucagugccg

SEQ ID NO: 3519185 - RNA, 23 nt, Human
ccacgucuauuucaucagaacag

SEQ ID NO: 3519186 - RNA, 22 nt, Human
ccacgucugcgccgccgccgga

SEQ ID NO: 3519187 - RNA, 17 nt, Human
ccacgugacagugccug

SEQ ID NO: 3519188 - RNA, 23 nt, Human
ccacgugccaggcccggggcugg

SEQ ID NO: 3519189 - RNA, 17 nt, Human
ccacgugcguguuuucu

SEQ ID NO: 3519190 - RNA, 15 nt, Human
ccacgugcuaccccc

SEQ ID NO: 3519191 - RNA, 15 nt, Human
ccacgugucuuccac

SEQ ID NO: 3519192 - RNA, 15 nt, Human
ccacguucaccccuc

SEQ ID NO: 3519193 - RNA, 15 nt, Human
ccacguuccuuacug

SEQ ID NO: 3519194 - RNA, 14 nt, Human
ccacguucucucug

SEQ ID NO: 3519195 - RNA, 23 nt, Human
ccacguucugcucaucauucucu

SEQ ID NO: 3519196 - RNA, 20 nt, Human
ccacguuggagaagcccgug

SEQ ID NO: 3519197 - RNA, 12 nt, Human
ccacuaaaaaua

SEQ ID NO: 3519198 - RNA, 23 nt, Human
ccacuaaaaauauuguuucugca

SEQ ID NO: 3519199 - RNA, 11 nt, Human
ccacuaacuag

SEQ ID NO: 3519200 - RNA, 18 nt, Human
ccacuaagaacaccugca

SEQ ID NO: 3519201 - RNA, 13 nt, Human
ccacuguccuggg

SEQ ID NO: 3519202 - RNA, 14 nt, Human
ccacuguccugggc

SEQ ID NO: 3519203 - RNA, 19 nt, Human
ccacuguccugggccugca

SEQ ID NO: 3519204 - RNA, 16 nt, Human
ccacuguccugggcgc

SEQ ID NO: 3519205 - RNA, 15 nt, Human
ccacugugaagagaa

SEQ ID NO: 3519206 - RNA, 18 nt, Human
ccacugugccucagagac

SEQ ID NO: 3519207 - RNA, 20 nt, Human
ccacugugccucagagacca

SEQ ID NO: 3519208 - RNA, 15 nt, Human
ccacugugccuuugc

SEQ ID NO: 3519209 - RNA, 17 nt, Human
ccacuguuucucuugag

SEQ ID NO: 3519210 - RNA, 19 nt, Human
ccacuguuucucuugagcu

SEQ ID NO: 3519211 - RNA, 19 nt, Human
ccacuuaaaaaauguccau

SEQ ID NO: 3519212 - RNA, 21 nt, Human
ccacuuacauuuacaaacuga

SEQ ID NO: 3519213 - RNA, 14 nt, Human
ccacuuaccuucaa

SEQ ID NO: 3519214 - RNA, 22 nt, Human
ccacuuaccuucaauaaaguau

SEQ ID NO: 3519215 - RNA, 14 nt, Human
ccacuucaaaacaa

SEQ ID NO: 3519216 - RNA, 14 nt, Human
ccacuucagccucc

SEQ ID NO: 3519217 - RNA, 23 nt, Human
ccacuucauucuugaaagcugug

SEQ ID NO: 3519218 - RNA, 15 nt, Human
ccacuucccacccug

SEQ ID NO: 3519219 - RNA, 15 nt, Human
ccacuucccugacac

SEQ ID NO: 3519220 - RNA, 23 nt, Human
ccacuucccuggguuagacugcc

SEQ ID NO: 3519221 - RNA, 13 nt, Human
ccacuuccuuuua

SEQ ID NO: 3519222 - RNA, 18 nt, Human
ccacuucucaucacacac

SEQ ID NO: 3519223 - RNA, 20 nt, Human
ccacuucucaucacacacau

SEQ ID NO: 3519224 - RNA, 23 nt, Human
ccacuucucaucacacacaugga

SEQ ID NO: 3519225 - RNA, 19 nt, Human
ccacuucugacagccucag

SEQ ID NO: 3519226 - RNA, 14 nt, Human
ccacuucugccaga

SEQ ID NO: 3519227 - RNA, 15 nt, Human
ccacuucuggguggg

SEQ ID NO: 3519228 - RNA, 14 nt, Human
ccacuucuggucaa

SEQ ID NO: 3519229 - RNA, 18 nt, Human
ccacuucuuccuuucucu

SEQ ID NO: 3519230 - RNA, 20 nt, Human
ccacuucuuguuccccacug

SEQ ID NO: 3519231 - RNA, 17 nt, Human
ccacuugaaauguuagu

SEQ ID NO: 3519232 - RNA, 22 nt, Human
ccacuugaggccugaucugccc

SEQ ID NO: 3519233 - RNA, 12 nt, Human
ccacuugccucu

SEQ ID NO: 3519234 - RNA, 22 nt, Human
ccacuugccucuuccuugaaga

SEQ ID NO: 3519235 - RNA, 21 nt, Human
ccacuugcugcacucuugcac

SEQ ID NO: 3519236 - RNA, 18 nt, Human
ccacuuggcaucagcugg

SEQ ID NO: 3519237 - RNA, 21 nt, Human
ccacuuggcuacacagggaug

SEQ ID NO: 3519238 - RNA, 15 nt, Human
ccacuuggucuguga

SEQ ID NO: 3519239 - RNA, 18 nt, Human
ccacuugucacugacaca

SEQ ID NO: 3519240 - RNA, 20 nt, Human
ccacuugucccacuaucugg

SEQ ID NO: 3519241 - RNA, 21 nt, Human
ccacuuguccuuagccuggac

SEQ ID NO: 3519242 - RNA, 14 nt, Human
ccacuuuauugcca

SEQ ID NO: 3519243 - RNA, 15 nt, Human
ccacuuucagcuguc

SEQ ID NO: 3519244 - RNA, 20 nt, Human
ccacuuugcacagcucuccg

SEQ ID NO: 3519245 - RNA, 21 nt, Human
ccacuuugcauaugagccgug

SEQ ID NO: 3519246 - RNA, 17 nt, Human
ccacuuugcuguuccuu

SEQ ID NO: 3519247 - RNA, 15 nt, Human
ccacuuuguucuuua

SEQ ID NO: 3519248 - RNA, 20 nt, Human
ccacuuuguucuuuaggaga

SEQ ID NO: 3519249 - RNA, 16 nt, Human
ccacuuuuauucauuu

SEQ ID NO: 3519250 - RNA, 12 nt, Human
ccacuuuuccag

SEQ ID NO: 3519251 - RNA, 14 nt, Human
ccacuuuuguucuu

SEQ ID NO: 3519252 - RNA, 21 nt, Human
ccacuuuuguucuugguuugu

SEQ ID NO: 3519253 - RNA, 22 nt, Human
ccacuuuuguucuugguuugua

SEQ ID NO: 3519254 - RNA, 14 nt, Human
ccacuuuuugcagc

SEQ ID NO: 3519255 - RNA, 18 nt, Human
ccagaaacgccacauccc

SEQ ID NO: 3519256 - RNA, 15 nt, Human
cauuuuauauugaaa

SEQ ID NO: 3519257 - RNA, 18 nt, Human
cauuuuauauugaaaaaa

SEQ ID NO: 3519258 - RNA, 22 nt, Human
cauuuuauauugaaaaaaauaa

SEQ ID NO: 3519259 - RNA, 14 nt, Human
cauuuuauggugcc

SEQ ID NO: 3519260 - RNA, 17 nt, Human
cauuuuauggugccuag

SEQ ID NO: 3519261 - RNA, 13 nt, Human
cauuuuauugcuu

SEQ ID NO: 3519262 - RNA, 14 nt, Human
cauuuuauugcuug

SEQ ID NO: 3519263 - RNA, 22 nt, Human
cauuuuauuuuauuaugcauga

SEQ ID NO: 3519264 - RNA, 11 nt, Human
cauuuucaucu

SEQ ID NO: 3519265 - RNA, 17 nt, Human
cauuuuccauauccugg

SEQ ID NO: 3519266 - RNA, 12 nt, Human
cauuuucccaga

SEQ ID NO: 3519267 - RNA, 21 nt, Human
cauuuuccccccacucucccc

SEQ ID NO: 3519268 - RNA, 17 nt, Human
cauuuuccucugcuuug

SEQ ID NO: 3519269 - RNA, 20 nt, Human
cauuuuccucugcuuugaaa

SEQ ID NO: 3519270 - RNA, 14 nt, Human
cauuuucuaagaaa

SEQ ID NO: 3519271 - RNA, 12 nt, Human
cauuuucuagau

SEQ ID NO: 3519272 - RNA, 21 nt, Human
cauuuucuagauacaauaaau

SEQ ID NO: 3519273 - RNA, 23 nt, Human
cauuuucuagauacaauaaauug

SEQ ID NO: 3519274 - RNA, 14 nt, Human
cauuuucucucagg

SEQ ID NO: 3519275 - RNA, 12 nt, Human
cauuuucucuuu

SEQ ID NO: 3519276 - RNA, 15 nt, Human
cauuuucugaaacua

SEQ ID NO: 3519277 - RNA, 12 nt, Human
cauuuucugcaa

SEQ ID NO: 3519278 - RNA, 17 nt, Human
cauuuucugcaagccug

SEQ ID NO: 3519279 - RNA, 18 nt, Human
cauuuucugcaagccugc

SEQ ID NO: 3519280 - RNA, 10 nt, Human
cauuuucugg

SEQ ID NO: 3519281 - RNA, 16 nt, Human
cauuuucuuaauccag

SEQ ID NO: 3519282 - RNA, 20 nt, Human
cauuuucuuauugcgcugcu

SEQ ID NO: 3519283 - RNA, 12 nt, Human
cauuuugaaagu

SEQ ID NO: 3519284 - RNA, 22 nt, Human
cauuuugaagcuaauuauuuua

SEQ ID NO: 3519285 - RNA, 15 nt, Human
cauuuugagaacaaa

SEQ ID NO: 3519286 - RNA, 22 nt, Human
cauuuugagcugaaaugcugca

SEQ ID NO: 3519287 - RNA, 14 nt, Human
cauuuugcaaaauu

SEQ ID NO: 3519288 - RNA, 15 nt, Human
cauuuugcaaaauuu

SEQ ID NO: 3519289 - RNA, 17 nt, Human
cauuuugcaaaauuucc

SEQ ID NO: 3519290 - RNA, 16 nt, Human
cauuuugcagcaguga

SEQ ID NO: 3519291 - RNA, 18 nt, Human
cauuuugcagcagugagu

SEQ ID NO: 3519292 - RNA, 20 nt, Human
cauuuugcagcagugagucu

SEQ ID NO: 3519293 - RNA, 18 nt, Human
cauuuugcuaaaugugaa

SEQ ID NO: 3519294 - RNA, 17 nt, Human
cauuuugcuauuguaaa

SEQ ID NO: 3519295 - RNA, 19 nt, Human
cauuuugcuauuguaaaua

SEQ ID NO: 3519296 - RNA, 13 nt, Human
cauuuugcuuuaa

SEQ ID NO: 3519297 - RNA, 14 nt, Human
cauuuugcuuuaau

SEQ ID NO: 3519298 - RNA, 21 nt, Human
cauuuuggcgcuauuacaaau

SEQ ID NO: 3519299 - RNA, 19 nt, Human
cauuuuggcgcucgaaguu

SEQ ID NO: 3519300 - RNA, 20 nt, Human
cauuuugggguacccacugc

SEQ ID NO: 3519301 - RNA, 21 nt, Human
cauuuugggguacccacugcu

SEQ ID NO: 3519302 - RNA, 23 nt, Human
cauuuugggguacccacugcucu

SEQ ID NO: 3519303 - RNA, 22 nt, Human
cauuuuggugucuuucucuuuu

SEQ ID NO: 3519304 - RNA, 16 nt, Human
cauuuugguucuucuc

SEQ ID NO: 3519305 - RNA, 14 nt, Human
cauuuuguauaauu

SEQ ID NO: 3519306 - RNA, 15 nt, Human
cauuuuguauaauug

SEQ ID NO: 3519307 - RNA, 21 nt, Human
cauuuuguauaauuguaucgu

SEQ ID NO: 3519308 - RNA, 13 nt, Human
cauuuugugaagc

SEQ ID NO: 3519309 - RNA, 18 nt, Human
cauuuugugaagcccugu

SEQ ID NO: 3519310 - RNA, 12 nt, Human
cauuuugugaau

SEQ ID NO: 3519311 - RNA, 21 nt, Human
cauuuugugaauggauuggau

SEQ ID NO: 3519312 - RNA, 15 nt, Human
cauuuuguuguaaaa

SEQ ID NO: 3519313 - RNA, 19 nt, Human
cauuuuguuguaaaaagaa

SEQ ID NO: 3519314 - RNA, 23 nt, Human
cauuuuuaaaguagaagaggguu

SEQ ID NO: 3519315 - RNA, 16 nt, Human
cauuuuuaaauuguua

SEQ ID NO: 3519316 - RNA, 21 nt, Human
cauuuuuaagugcugcauuua

SEQ ID NO: 3519317 - RNA, 16 nt, Human
cauuuuuacaauguaa

SEQ ID NO: 3519318 - RNA, 18 nt, Human
cauuuuuaccaucacuga

SEQ ID NO: 3519319 - RNA, 20 nt, Human
cauuuuuacuauuguuacau

SEQ ID NO: 3519320 - RNA, 12 nt, Human
cauuuuuacugu

SEQ ID NO: 3519321 - RNA, 18 nt, Human
cauuuuuaguagagacag

SEQ ID NO: 3519322 - RNA, 19 nt, Human
cauuuuuaguagagacagg

SEQ ID NO: 3519323 - RNA, 12 nt, Human
cauuuuuaucua

SEQ ID NO: 3519324 - RNA, 22 nt, Human
cauuuuuauuacccuucuuucc

SEQ ID NO: 3519325 - RNA, 20 nt, Human
cauuuuuauuucaaaauaua

SEQ ID NO: 3519326 - RNA, 23 nt, Human
cauuuuuauuucagauuuugaua

SEQ ID NO: 3519327 - RNA, 14 nt, Human
cauuuuucaaagca

SEQ ID NO: 3519328 - RNA, 14 nt, Human
cauuuuucaacuuu

SEQ ID NO: 3519329 - RNA, 18 nt, Human
cauuuuucaacuuugaau

SEQ ID NO: 3519330 - RNA, 17 nt, Human
cauuuuucaauagcaca

SEQ ID NO: 3519331 - RNA, 18 nt, Human
cauuuuucagauauaaaa

SEQ ID NO: 3519332 - RNA, 18 nt, Human
cauuuuuccuaacaggau

SEQ ID NO: 3519333 - RNA, 17 nt, Human
cauuuuugauuuaugca

SEQ ID NO: 3519334 - RNA, 12 nt, Human
cauuuuuguaca

SEQ ID NO: 3519335 - RNA, 21 nt, Human
cauuuuuguacaguuugcugu

SEQ ID NO: 3519336 - RNA, 22 nt, Human
cauuuuuguacaguuugcugua

SEQ ID NO: 3519337 - RNA, 20 nt, Human
cauuuuuguacuaacuagca

SEQ ID NO: 3519338 - RNA, 23 nt, Human
cauuuuuguuucuaccucccaga

SEQ ID NO: 3519339 - RNA, 13 nt, Human
cauuuuuuaagcu

SEQ ID NO: 3519340 - RNA, 14 nt, Human
cauuuuuuaggaaa

SEQ ID NO: 3519341 - RNA, 15 nt, Human
cauuuuuuaggaaau

SEQ ID NO: 3519342 - RNA, 20 nt, Human
cauuuuuuauauauaugcau

SEQ ID NO: 3519343 - RNA, 19 nt, Human
cauuuuuugggcagcaauu

SEQ ID NO: 3519344 - RNA, 23 nt, Human
cauuuuuuuuaagaaaaaggaug

SEQ ID NO: 3519345 - RNA, 15 nt, Human
cauuuuuuuucuuug

SEQ ID NO: 3519346 - RNA, 22 nt, Human
ccaauuguugacaguucugaag

SEQ ID NO: 3519347 - RNA, 20 nt, Human
ccaauuuguaaaaacagcau

SEQ ID NO: 3519348 - RNA, 21 nt, Human
ccaauuuuaauuuaguaaaug

SEQ ID NO: 3519349 - RNA, 12 nt, Human
ccaauuuuccuu

SEQ ID NO: 3519350 - RNA, 13 nt, Human
ccaauuuuucugc

SEQ ID NO: 3519351 - RNA, 14 nt, Human
ccaauuuuucugca

SEQ ID NO: 3519352 - RNA, 17 nt, Human
ccaauuuuucugcacug

SEQ ID NO: 3519353 - RNA, 23 nt, Human
ccaauuuuuuaagugaaaauaua

SEQ ID NO: 3519354 - RNA, 23 nt, Human
ccaauuuuuuguucuucagagau

SEQ ID NO: 3519355 - RNA, 14 nt, Human
ccacaaagccuuau

SEQ ID NO: 3519356 - RNA, 23 nt, Human
ccacaaagccuuaucaagugucu

SEQ ID NO: 3519357 - RNA, 9 nt, Human
ccacaaagg

SEQ ID NO: 3519358 - RNA, 18 nt, Human
ccacaaaggagagcuagc

SEQ ID NO: 3519359 - RNA, 16 nt, Human
ccacaaaggcaaaggg

SEQ ID NO: 3519360 - RNA, 20 nt, Human
ccacaaaggcaaagggucca

SEQ ID NO: 3519361 - RNA, 17 nt, Human
ccacaaauaaaugacaa

SEQ ID NO: 3519362 - RNA, 22 nt, Human
ccacaaaugggaaaaccagacu

SEQ ID NO: 3519363 - RNA, 23 nt, Human
ccacaaaugggcgccccccccuc

SEQ ID NO: 3519364 - RNA, 12 nt, Human
ccacaacaugag

SEQ ID NO: 3519365 - RNA, 16 nt, Human
ccacaacaugaggcca

SEQ ID NO: 3519366 - RNA, 15 nt, Human
ccacaaccucuuccc

SEQ ID NO: 3519367 - RNA, 15 nt, Human
ccacaacuauuuuca

SEQ ID NO: 3519368 - RNA, 19 nt, Human
ccacaacuccuacaugaug

SEQ ID NO: 3519369 - RNA, 14 nt, Human
ccacaacugacaca

SEQ ID NO: 3519370 - RNA, 16 nt, Human
ccacaacugacacagg

SEQ ID NO: 3519371 - RNA, 16 nt, Human
ccacaagaaaugaaag

SEQ ID NO: 3519372 - RNA, 16 nt, Human
ccacaagagcccaggc

SEQ ID NO: 3519373 - RNA, 17 nt, Human
ccacaagagcccaggcc

SEQ ID NO: 3519374 - RNA, 19 nt, Human
ccacaagagcccaggccuc

SEQ ID NO: 3519375 - RNA, 20 nt, Human
ccacaagagcccaggccucc

SEQ ID NO: 3519376 - RNA, 21 nt, Human
ccacaagagcccaggccuccu

SEQ ID NO: 3519377 - RNA, 16 nt, Human
ccacaagauucccaga

SEQ ID NO: 3519378 - RNA, 17 nt, Human
ccacaagauucccagag

SEQ ID NO: 3519379 - RNA, 18 nt, Human
ccacaagauucccagaga

SEQ ID NO: 3519380 - RNA, 12 nt, Human
ccacaagccucu

SEQ ID NO: 3519381 - RNA, 21 nt, Human
ccacaagccucugcccaggca

SEQ ID NO: 3519382 - RNA, 20 nt, Human
ccacaagccugagggaaagg

SEQ ID NO: 3519383 - RNA, 14 nt, Human
ccacaagggcucuc

SEQ ID NO: 3519384 - RNA, 20 nt, Human
ccacaagggugcccaccucu

SEQ ID NO: 3519385 - RNA, 15 nt, Human
ccacaagucuuccag

SEQ ID NO: 3519386 - RNA, 22 nt, Human
ccacaaguggugguaacccugg

SEQ ID NO: 3519387 - RNA, 20 nt, Human
ccacaauauaaaacuguacu

SEQ ID NO: 3519388 - RNA, 16 nt, Human
ccacaaugcaguucug

SEQ ID NO: 3519389 - RNA, 22 nt, Human
ccacacaaggauagaugcuggc

SEQ ID NO: 3519390 - RNA, 13 nt, Human
ccacacacaacag

SEQ ID NO: 3519391 - RNA, 11 nt, Human
ccacacacaca

SEQ ID NO: 3519392 - RNA, 24 nt, Human
ccacacacacacacaugcauacac

SEQ ID NO: 3519393 - RNA, 12 nt, Human
ccacacacacag

SEQ ID NO: 3519394 - RNA, 15 nt, Human
ccacacacacagaaa

SEQ ID NO: 3519395 - RNA, 19 nt, Human
ccacacacacagaaaauau

SEQ ID NO: 3519396 - RNA, 16 nt, Human
ccacacacacccacac

SEQ ID NO: 3519397 - RNA, 23 nt, Human
ccacacacacccacacacucgcc

SEQ ID NO: 3519398 - RNA, 17 nt, Human
ccacacacagaggaaga

SEQ ID NO: 3519399 - RNA, 15 nt, Human
ccacacacgcaggaa

SEQ ID NO: 3519400 - RNA, 22 nt, Human
ccacacacgcaggaacucccag

SEQ ID NO: 3519401 - RNA, 20 nt, Human
ccacacagacuugggcaggg

SEQ ID NO: 3519402 - RNA, 13 nt, Human
ccacacagagugg

SEQ ID NO: 3519403 - RNA, 15 nt, Human
ccacacagcuacagc

SEQ ID NO: 3519404 - RNA, 16 nt, Human
ccacacagcugccggu

SEQ ID NO: 3519405 - RNA, 20 nt, Human
ccacacagugcucaaggcca

SEQ ID NO: 3519406 - RNA, 12 nt, Human
ccacacauccca

SEQ ID NO: 3519407 - RNA, 20 nt, Human
ccacacaugcaagggaugaa

SEQ ID NO: 3519408 - RNA, 18 nt, Human
ccacaccaagcugugcca

SEQ ID NO: 3519409 - RNA, 19 nt, Human
ccacaccagggccagccuc

SEQ ID NO: 3519410 - RNA, 20 nt, Human
ccacaccagggccagccucu

SEQ ID NO: 3519411 - RNA, 20 nt, Human
ccacaccauaagcuacugcc

SEQ ID NO: 3519412 - RNA, 15 nt, Human
ccacacccaaagcug

SEQ ID NO: 3519413 - RNA, 16 nt, Human
ccacacccacacucag

SEQ ID NO: 3519414 - RNA, 14 nt, Human
ccacacccagccca

SEQ ID NO: 3519415 - RNA, 16 nt, Human
ccacacccucacugcu

SEQ ID NO: 3519416 - RNA, 21 nt, Human
ccacacccucccccgccacuc

SEQ ID NO: 3519417 - RNA, 16 nt, Human
ccacacccuguacugu

SEQ ID NO: 3519418 - RNA, 16 nt, Human
ccacaccguguaaacc

SEQ ID NO: 3519419 - RNA, 23 nt, Human
ccacaccuccacaguucaguggc

SEQ ID NO: 3519420 - RNA, 17 nt, Human
ccacaccucccugaacc

SEQ ID NO: 3519421 - RNA, 13 nt, Human
ccacaccuccucu

SEQ ID NO: 3519422 - RNA, 16 nt, Human
ccacaccuccuucccu

SEQ ID NO: 3519423 - RNA, 13 nt, Human
ccacaccuggccc

SEQ ID NO: 3519424 - RNA, 23 nt, Human
ccacacuaaccuggguucccuuu

SEQ ID NO: 3519425 - RNA, 18 nt, Human
ccacacuauuaccaugag

SEQ ID NO: 3519426 - RNA, 17 nt, Human
ccacacucacuccugag

SEQ ID NO: 3519427 - RNA, 14 nt, Human
ccacacucagcaca

SEQ ID NO: 3519428 - RNA, 14 nt, Human
ccacacuccagcug

SEQ ID NO: 3519429 - RNA, 14 nt, Human
ccacacugcaacag

SEQ ID NO: 3519430 - RNA, 23 nt, Human
ccacacugcuaggugggccagcc

SEQ ID NO: 3519431 - RNA, 19 nt, Human
ccacacuggggugccgccu

SEQ ID NO: 3519432 - RNA, 20 nt, Human
ccacacuggggugccgccug

SEQ ID NO: 3519433 - RNA, 22 nt, Human
ccacacuggggugccgccugcc

SEQ ID NO: 3519434 - RNA, 23 nt, Human
ccacacuggggugccgccugccc

SEQ ID NO: 3519435 - RNA, 14 nt, Human
ccacacuggugacu

SEQ ID NO: 3519436 - RNA, 14 nt, Human
ccacacuucaaacu

SEQ ID NO: 3519437 - RNA, 20 nt, Human
ccacacuucaggcucuucuc

SEQ ID NO: 3519438 - RNA, 14 nt, Human
ccacacuucccugg

SEQ ID NO: 3519439 - RNA, 15 nt, Human
ccacacuucccuggc

SEQ ID NO: 3519440 - RNA, 20 nt, Human
ccacacuuccuguccagaga

SEQ ID NO: 3519441 - RNA, 23 nt, Human
ccacacuucucaggacacaggcc

SEQ ID NO: 3519442 - RNA, 17 nt, Human
ccacacuugaaaccuuu

SEQ ID NO: 3519443 - RNA, 19 nt, Human
ccacacuugagaggaugaa

SEQ ID NO: 3519444 - RNA, 21 nt, Human
ccacagaagacuucccagcuu

SEQ ID NO: 3519445 - RNA, 17 nt, Human
ccacagaagccaggagc

SEQ ID NO: 3519446 - RNA, 12 nt, Human
ccacagacacac

SEQ ID NO: 3519447 - RNA, 20 nt, Human
ccacagacacacacacgcac

SEQ ID NO: 3519448 - RNA, 18 nt, Human
ccacagacggaaggguaa

SEQ ID NO: 3519449 - RNA, 13 nt, Human
ccacagaggacac

SEQ ID NO: 3519450 - RNA, 19 nt, Human
ccacagcaaccccaggcug

SEQ ID NO: 3519451 - RNA, 19 nt, Human
ccacagcaaggcaccugca

SEQ ID NO: 3519452 - RNA, 22 nt, Human
ccacagcacagcucccugccaa

SEQ ID NO: 3519453 - RNA, 18 nt, Human
ccacagcagcauuuuuau

SEQ ID NO: 3519454 - RNA, 19 nt, Human
ccacagcagccucugaagu

SEQ ID NO: 3519455 - RNA, 12 nt, Human
ccacagcaggug

SEQ ID NO: 3519456 - RNA, 13 nt, Human
ccacagccauccc

SEQ ID NO: 3519457 - RNA, 20 nt, Human
ccacagccaucccagccuug

SEQ ID NO: 3519458 - RNA, 14 nt, Human
ccacagcccacguc

SEQ ID NO: 3519459 - RNA, 17 nt, Human
ccacagcccacguccug

SEQ ID NO: 3519460 - RNA, 13 nt, Human
ccacagcccaggc

SEQ ID NO: 3519461 - RNA, 11 nt, Human
cacucugcccc

SEQ ID NO: 3519462 - RNA, 15 nt, Human
cacucugccucugcc

SEQ ID NO: 3519463 - RNA, 17 nt, Human
cacucugccucugccug

SEQ ID NO: 3519464 - RNA, 20 nt, Human
cacucugccucugccugcau

SEQ ID NO: 3519465 - RNA, 18 nt, Human
cacucugcucgccuuagc

SEQ ID NO: 3519466 - RNA, 13 nt, Human
cacucugcucuga

SEQ ID NO: 3519467 - RNA, 15 nt, Human
cacucugcucugaug

SEQ ID NO: 3519468 - RNA, 16 nt, Human
cacucugcucugaugc

SEQ ID NO: 3519469 - RNA, 21 nt, Human
cacucugcucugcccuuguuc

SEQ ID NO: 3519470 - RNA, 12 nt, Human
cacucugcugcu

SEQ ID NO: 3519471 - RNA, 12 nt, Human
cacucugcuguu

SEQ ID NO: 3519472 - RNA, 19 nt, Human
cacucugcuucucugacuu

SEQ ID NO: 3519473 - RNA, 21 nt, Human
cacucugcuucucugacuucu

SEQ ID NO: 3519474 - RNA, 18 nt, Human
cacucuggaugauggauu

SEQ ID NO: 3519475 - RNA, 18 nt, Human
cacucuggauucagccuu

SEQ ID NO: 3519476 - RNA, 22 nt, Human
cacucuggauucagccuucuuu

SEQ ID NO: 3519477 - RNA, 12 nt, Human
cacucuggcagc

SEQ ID NO: 3519478 - RNA, 16 nt, Human
cacucuggcagcaccg

SEQ ID NO: 3519479 - RNA, 17 nt, Human
cacucuggcagcucaga

SEQ ID NO: 3519480 - RNA, 19 nt, Human
cacucuggcagcucagaga

SEQ ID NO: 3519481 - RNA, 21 nt, Human
cacucuggcagcucagagagg

SEQ ID NO: 3519482 - RNA, 12 nt, Human
cacucuggccuc

SEQ ID NO: 3519483 - RNA, 19 nt, Human
cacucuggcugguuuggaa

SEQ ID NO: 3519484 - RNA, 15 nt, Human
cacucugggcuccag

SEQ ID NO: 3519485 - RNA, 17 nt, Human
cacucugggcuccagag

SEQ ID NO: 3519486 - RNA, 13 nt, Human
cacucuguaauug

SEQ ID NO: 3519487 - RNA, 17 nt, Human
cacucuguaauugcaaa

SEQ ID NO: 3519488 - RNA, 20 nt, Human
cacucuguaauugcaaaaaa

SEQ ID NO: 3519489 - RNA, 16 nt, Human
cacucugucgcccagu

SEQ ID NO: 3519490 - RNA, 12 nt, Human
cacucugugccc

SEQ ID NO: 3519491 - RNA, 20 nt, Human
ccacccccuucagugcccac

SEQ ID NO: 3519492 - RNA, 17 nt, Human
ccaccccgcaagcacca

SEQ ID NO: 3519493 - RNA, 16 nt, Human
ccaccccgcucugcau

SEQ ID NO: 3519494 - RNA, 15 nt, Human
ccaccccggcccccu

SEQ ID NO: 3519495 - RNA, 14 nt, Human
ccaccccgggcucu

SEQ ID NO: 3519496 - RNA, 18 nt, Human
ccaccccggggacccugu

SEQ ID NO: 3519497 - RNA, 19 nt, Human
ccaccccggggacccugug

SEQ ID NO: 3519498 - RNA, 21 nt, Human
ccaccccggggacccugugac

SEQ ID NO: 3519499 - RNA, 13 nt, Human
ccaccccugcccc

SEQ ID NO: 3519500 - RNA, 22 nt, Human
ccaccccugcccccagccccgg

SEQ ID NO: 3519501 - RNA, 12 nt, Human
ccaccccugccu

SEQ ID NO: 3519502 - RNA, 18 nt, Human
ccaccccugccuccaccc

SEQ ID NO: 3519503 - RNA, 22 nt, Human
ccaccccugccuccacccucug

SEQ ID NO: 3519504 - RNA, 21 nt, Human
ccaccccuggaagagcccagu

SEQ ID NO: 3519505 - RNA, 17 nt, Human
ccaccccugggggcucu

SEQ ID NO: 3519506 - RNA, 20 nt, Human
ccaccccugggggcucucau

SEQ ID NO: 3519507 - RNA, 15 nt, Human
ccaccccugugcucc

SEQ ID NO: 3519508 - RNA, 14 nt, Human
ccaccccuuccugu

SEQ ID NO: 3519509 - RNA, 16 nt, Human
ccacccgccccugccc

SEQ ID NO: 3519510 - RNA, 19 nt, Human
ccacccgugguggcucaag

SEQ ID NO: 3519511 - RNA, 21 nt, Human
ccacccguucugcuggccugg

SEQ ID NO: 3519512 - RNA, 22 nt, Human
ccacccguucugcuggccugga

SEQ ID NO: 3519513 - RNA, 18 nt, Human
ccacccuagccaaugucu

SEQ ID NO: 3519514 - RNA, 12 nt, Human
ccacccucacug

SEQ ID NO: 3519515 - RNA, 19 nt, Human
ccacccucagcaccccuuc

SEQ ID NO: 3519516 - RNA, 13 nt, Human
ccacccuccacuc

SEQ ID NO: 3519517 - RNA, 15 nt, Human
ccacccucccagcuc

SEQ ID NO: 3519518 - RNA, 16 nt, Human
ccacccucccuggagu

SEQ ID NO: 3519519 - RNA, 12 nt, Human
ccacccuccugg

SEQ ID NO: 3519520 - RNA, 20 nt, Human
ccacccuccugucuucccag

SEQ ID NO: 3519521 - RNA, 21 nt, Human
ccacccuccugucuucccagg

SEQ ID NO: 3519522 - RNA, 22 nt, Human
ccacccuccugucuucccaggg

SEQ ID NO: 3519523 - RNA, 14 nt, Human
ccacccuccuuuca

SEQ ID NO: 3519524 - RNA, 17 nt, Human
ccacccucguggacacc

SEQ ID NO: 3519525 - RNA, 21 nt, Human
ccacccucguggacaccugcc

SEQ ID NO: 3519526 - RNA, 23 nt, Human
ccacccucugagcuuugcauguu

SEQ ID NO: 3519527 - RNA, 16 nt, Human
ccacccugaaagcccu

SEQ ID NO: 3519528 - RNA, 17 nt, Human
ccacccugaaagcccug

SEQ ID NO: 3519529 - RNA, 22 nt, Human
ccacccugagccggccccaggc

SEQ ID NO: 3519530 - RNA, 20 nt, Human
ccacccugaguugcuuuuca

SEQ ID NO: 3519531 - RNA, 21 nt, Human
ccacccugaguugcuuuucag

SEQ ID NO: 3519532 - RNA, 13 nt, Human
ccacccugccccu

SEQ ID NO: 3519533 - RNA, 11 nt, Human
ccacccugcuc

SEQ ID NO: 3519534 - RNA, 13 nt, Human
ccacccugcucau

SEQ ID NO: 3519535 - RNA, 12 nt, Human
ccacccugcucu

SEQ ID NO: 3519536 - RNA, 19 nt, Human
ccacccugcugccuucuga

SEQ ID NO: 3519537 - RNA, 21 nt, Human
ccacccugcugcuggugcaca

SEQ ID NO: 3519538 - RNA, 11 nt, Human
ccacccuggaa

SEQ ID NO: 3519539 - RNA, 10 nt, Human
ccacccuggg

SEQ ID NO: 3519540 - RNA, 13 nt, Human
ccacccugggacc

SEQ ID NO: 3519541 - RNA, 15 nt, Human
ccacccugggagaca

SEQ ID NO: 3519542 - RNA, 17 nt, Human
ccacccugggagacaga

SEQ ID NO: 3519543 - RNA, 16 nt, Human
ccacccugggcccugg

SEQ ID NO: 3519544 - RNA, 22 nt, Human
ccacccugggcccugggcugga

SEQ ID NO: 3519545 - RNA, 15 nt, Human
ccacccugugcagaa

SEQ ID NO: 3519546 - RNA, 15 nt, Human
ccacccuguuccugc

SEQ ID NO: 3519547 - RNA, 18 nt, Human
ccacccuguuccugcugc

SEQ ID NO: 3519548 - RNA, 12 nt, Human
ccacccuuggcc

SEQ ID NO: 3519549 - RNA, 13 nt, Human
ccacccuuggccu

SEQ ID NO: 3519550 - RNA, 14 nt, Human
ccacccuuggccug

SEQ ID NO: 3519551 - RNA, 15 nt, Human
ccacccuuggccugu

SEQ ID NO: 3519552 - RNA, 15 nt, Human
ccacccuuguuccag

SEQ ID NO: 3519553 - RNA, 20 nt, Human
ccacccuuucccccuucucu

SEQ ID NO: 3519554 - RNA, 13 nt, Human
ccaccgcagacag

SEQ ID NO: 3519555 - RNA, 22 nt, Human
ccaccgcagacaggaccaggga

SEQ ID NO: 3519556 - RNA, 17 nt, Human
ccaccgcaugcccccuc

SEQ ID NO: 3519557 - RNA, 14 nt, Human
ccaccgcuccccag

SEQ ID NO: 3519558 - RNA, 15 nt, Human
ccaccgcugccuaag

SEQ ID NO: 3519559 - RNA, 21 nt, Human
ccaccgcugccuaaguggcug

SEQ ID NO: 3519560 - RNA, 15 nt, Human
ccaccgggccacucc

SEQ ID NO: 3519561 - RNA, 20 nt, Human
ccaccgggccacuccuuccu

SEQ ID NO: 3519562 - RNA, 18 nt, Human
ccaccgguccagcuggcc

SEQ ID NO: 3519563 - RNA, 21 nt, Human
ccaccgguugcuucugggaag

SEQ ID NO: 3519564 - RNA, 13 nt, Human
ccaccguccccuc

SEQ ID NO: 3519565 - RNA, 14 nt, Human
ccaccguccccucc

SEQ ID NO: 3519566 - RNA, 18 nt, Human
ccaccguccgcccugcuc

SEQ ID NO: 3519567 - RNA, 20 nt, Human
ccaccguccgcccugcuccu

SEQ ID NO: 3519568 - RNA, 23 nt, Human
ccaccuaauucgaugaaggcugc

SEQ ID NO: 3519569 - RNA, 20 nt, Human
ccaccuaccuucaaagcuga

SEQ ID NO: 3519570 - RNA, 16 nt, Human
ccaccuagaacacuaa

SEQ ID NO: 3519571 - RNA, 19 nt, Human
ccaccuagaacacuaacuc

SEQ ID NO: 3519572 - RNA, 23 nt, Human
ccaccuagcagcaccguucugug

SEQ ID NO: 3519573 - RNA, 17 nt, Human
ccaccuaggccacuccu

SEQ ID NO: 3519574 - RNA, 18 nt, Human
ccaccuaggccacuccuc

SEQ ID NO: 3519575 - RNA, 22 nt, Human
ccaccuaggccacuccuccaaa

SEQ ID NO: 3519576 - RNA, 16 nt, Human
ccaccuaguggcuguc

SEQ ID NO: 3519577 - RNA, 18 nt, Human
ccaccuaguggcugucca

SEQ ID NO: 3519578 - RNA, 20 nt, Human
ccaccuaguggcuguccagu

SEQ ID NO: 3519579 - RNA, 20 nt, Human
ccaccuaucucgugggagag

SEQ ID NO: 3519580 - RNA, 19 nt, Human
ccaccucaccuagccugau

SEQ ID NO: 3519581 - RNA, 16 nt, Human
ccaccucacuccuguu

SEQ ID NO: 3519582 - RNA, 10 nt, Human
ccaccucagc

SEQ ID NO: 3519583 - RNA, 14 nt, Human
ccaccucagccuug

SEQ ID NO: 3519584 - RNA, 16 nt, Human
ccaccucagccuugga

SEQ ID NO: 3519585 - RNA, 12 nt, Human
ccaccuccagcc

SEQ ID NO: 3519586 - RNA, 14 nt, Human
ccaccuccagcccg

SEQ ID NO: 3519587 - RNA, 19 nt, Human
ccaccuccagcccgggagc

SEQ ID NO: 3519588 - RNA, 20 nt, Human
ccaccuccagcccgggagcc

SEQ ID NO: 3519589 - RNA, 13 nt, Human
ccaccuccccacg

SEQ ID NO: 3519590 - RNA, 23 nt, Human
ccaccuccccacgcccuccccuc

SEQ ID NO: 3519591 - RNA, 15 nt, Human
ccaccuccccagccu

SEQ ID NO: 3519592 - RNA, 23 nt, Human
ccaccuccccaggccguggcugc

SEQ ID NO: 3519593 - RNA, 15 nt, Human
ccaccuccccuugcc

SEQ ID NO: 3519594 - RNA, 13 nt, Human
ccaccucccucac

SEQ ID NO: 3519595 - RNA, 14 nt, Human
ccaccucccugcaa

SEQ ID NO: 3519596 - RNA, 18 nt, Human
ccaccucccugcccaggc

SEQ ID NO: 3519597 - RNA, 16 nt, Human
ccaccucccugccucc

SEQ ID NO: 3519598 - RNA, 20 nt, Human
ccaccuccuaaaaggcccag

SEQ ID NO: 3519599 - RNA, 22 nt, Human
ccaccuccuaaaaggcccagag

SEQ ID NO: 3519600 - RNA, 19 nt, Human
ccaccuccugacacccuuc

SEQ ID NO: 3519601 - RNA, 21 nt, Human
ccaccucgcagguucaagcaa

SEQ ID NO: 3519602 - RNA, 14 nt, Human
ccaccucggucacu

SEQ ID NO: 3519603 - RNA, 19 nt, Human
ccaccucggucacuccaac

SEQ ID NO: 3519604 - RNA, 23 nt, Human
ccaccucucaauauucaauaaag

SEQ ID NO: 3519605 - RNA, 12 nt, Human
ccaccucuccaa

SEQ ID NO: 3519606 - RNA, 15 nt, Human
ccaccucuccaaggg

SEQ ID NO: 3519607 - RNA, 16 nt, Human
ccaccucuccauccug

SEQ ID NO: 3519608 - RNA, 13 nt, Human
ccaccucucccuc

SEQ ID NO: 3519609 - RNA, 14 nt, Human
ccaccucucuccuu

SEQ ID NO: 3519610 - RNA, 19 nt, Human
ccaccucucuccuuugcug

SEQ ID NO: 3519611 - RNA, 24 nt, Human
ccaccucucuccuuugcugaggcc

SEQ ID NO: 3519612 - RNA, 11 nt, Human
ccaccucugcg

SEQ ID NO: 3519613 - RNA, 18 nt, Human
ccaccucugcggacccca

SEQ ID NO: 3519614 - RNA, 19 nt, Human
ccaccucugcggaccccag

SEQ ID NO: 3519615 - RNA, 13 nt, Human
ccaccucugcugc

SEQ ID NO: 3519616 - RNA, 17 nt, Human
ccaccucugcugccucc

SEQ ID NO: 3519617 - RNA, 17 nt, Human
ccaccucugugaccuca

SEQ ID NO: 3519618 - RNA, 23 nt, Human
ccaccucugugaccucaggcacu

SEQ ID NO: 3519619 - RNA, 14 nt, Human
ccaccucuguggca

SEQ ID NO: 3519620 - RNA, 21 nt, Human
ccaccucuguggcauugaaau

SEQ ID NO: 3519621 - RNA, 16 nt, Human
ccaccucuucucuucc

SEQ ID NO: 3519622 - RNA, 20 nt, Human
ccaccugaauaaagaaugaa

SEQ ID NO: 3519623 - RNA, 20 nt, Human
ccaccugacauuccuugcug

SEQ ID NO: 3519624 - RNA, 22 nt, Human
ccaccugagcuuuggacgcaca

SEQ ID NO: 3519625 - RNA, 15 nt, Human
ccaccugaggugggc

SEQ ID NO: 3519626 - RNA, 15 nt, Human
cacugccaugccagc

SEQ ID NO: 3519627 - RNA, 17 nt, Human
cacugccaugccagcuu

SEQ ID NO: 3519628 - RNA, 22 nt, Human
cacugccauggaggcacacagc

SEQ ID NO: 3519629 - RNA, 21 nt, Human
cacugccauuaaagaauauga

SEQ ID NO: 3519630 - RNA, 20 nt, Human
cacugcccaaagugcuucca

SEQ ID NO: 3519631 - RNA, 16 nt, Human
cacugcccacccccuc

SEQ ID NO: 3519632 - RNA, 20 nt, Human
cacugccccaggcugcggcu

SEQ ID NO: 3519633 - RNA, 21 nt, Human
cacugcccccagcucuucucc

SEQ ID NO: 3519634 - RNA, 20 nt, Human
cacugcccccugcugccaug

SEQ ID NO: 3519635 - RNA, 15 nt, Human
cacugcccgagcugg

SEQ ID NO: 3519636 - RNA, 14 nt, Human
ccaucccccugccc

SEQ ID NO: 3519637 - RNA, 19 nt, Human
ccaucccccugcccucgug

SEQ ID NO: 3519638 - RNA, 22 nt, Human
ccauccccuugaggucucagcc

SEQ ID NO: 3519639 - RNA, 19 nt, Human
ccaucccgaaaaucucucg

SEQ ID NO: 3519640 - RNA, 17 nt, Human
ccaucccgacauggacc

SEQ ID NO: 3519641 - RNA, 22 nt, Human
ccaucccgacauggacccggag

SEQ ID NO: 3519642 - RNA, 18 nt, Human
ccaucccgcucuuuuccu

SEQ ID NO: 3519643 - RNA, 14 nt, Human
ccaucccugaaggc

SEQ ID NO: 3519644 - RNA, 17 nt, Human
ccaucccugaaggcccc

SEQ ID NO: 3519645 - RNA, 22 nt, Human
ccaucccugaaggccccgccca

SEQ ID NO: 3519646 - RNA, 13 nt, Human
ccaucccugccug

SEQ ID NO: 3519647 - RNA, 15 nt, Human
ccaucccugccuggu

SEQ ID NO: 3519648 - RNA, 12 nt, Human
ccaucccugcgu

SEQ ID NO: 3519649 - RNA, 13 nt, Human
ccaucccuggccc

SEQ ID NO: 3519650 - RNA, 22 nt, Human
ccaucccuggcccccucccugg

SEQ ID NO: 3519651 - RNA, 12 nt, Human
ccaucccuguga

SEQ ID NO: 3519652 - RNA, 19 nt, Human
ccauccggcccccagagcg

SEQ ID NO: 3519653 - RNA, 15 nt, Human
ccauccuaaaagcca

SEQ ID NO: 3519654 - RNA, 17 nt, Human
ccauccuacccucgggc

SEQ ID NO: 3519655 - RNA, 13 nt, Human
ccauccuccagca

SEQ ID NO: 3519656 - RNA, 17 nt, Human
ccauccuccagcaggga

SEQ ID NO: 3519657 - RNA, 14 nt, Human
ccauccuccagcuu

SEQ ID NO: 3519658 - RNA, 16 nt, Human
ccauccuccagcuucu

SEQ ID NO: 3519659 - RNA, 17 nt, Human
ccauccuccccuucccu

SEQ ID NO: 3519660 - RNA, 18 nt, Human
ccauccuccccuucccug

SEQ ID NO: 3519661 - RNA, 12 nt, Human
ccauccucugua

SEQ ID NO: 3519662 - RNA, 13 nt, Human
ccauccugacuga

SEQ ID NO: 3519663 - RNA, 18 nt, Human
ccauccugaggcuccacu

SEQ ID NO: 3519664 - RNA, 22 nt, Human
ccauccuggcccagggcaucug

SEQ ID NO: 3519665 - RNA, 17 nt, Human
ccauccuguauucuuca

SEQ ID NO: 3519666 - RNA, 13 nt, Human
ccauccugugugu

SEQ ID NO: 3519667 - RNA, 20 nt, Human
ccauccuuucugccucucaa

SEQ ID NO: 3519668 - RNA, 21 nt, Human
ccaucgccagcugaugacuca

SEQ ID NO: 3519669 - RNA, 23 nt, Human
ccaucgccagcugaugacucaag

SEQ ID NO: 3519670 - RNA, 12 nt, Human
ccaucgccggga

SEQ ID NO: 3519671 - RNA, 16 nt, Human
ccaucgcugucaucuc

SEQ ID NO: 3519672 - RNA, 20 nt, Human
ccaucgguccugucuccccu

SEQ ID NO: 3519673 - RNA, 22 nt, Human
ccaucgguguccauuuauagaa

SEQ ID NO: 3519674 - RNA, 17 nt, Human
ccaucgugaagaagccu

SEQ ID NO: 3519675 - RNA, 15 nt, Human
ccaucuaagcugcag

SEQ ID NO: 3519676 - RNA, 13 nt, Human
ccaucuacccucc

SEQ ID NO: 3519677 - RNA, 23 nt, Human
ccaucuagccagccccucuuccc

SEQ ID NO: 3519678 - RNA, 11 nt, Human
ccaucucaggc

SEQ ID NO: 3519679 - RNA, 17 nt, Human
ccaucucaggccaccug

SEQ ID NO: 3519680 - RNA, 23 nt, Human
ccaucucaggccaccugcccccu

SEQ ID NO: 3519681 - RNA, 16 nt, Human
ccagaaaaggacagaa

SEQ ID NO: 3519682 - RNA, 21 nt, Human
ccagaaagcaguugagacaag

SEQ ID NO: 3519683 - RNA, 23 nt, Human
ccagaaaggauauuuaagaaaau

SEQ ID NO: 3519684 - RNA, 21 nt, Human
ccagaaauaaaguuggugaca

SEQ ID NO: 3519685 - RNA, 23 nt, Human
ccagaaauaaaguuggugacaga

SEQ ID NO: 3519686 - RNA, 18 nt, Human
ccagaaaugucccuuucu

SEQ ID NO: 3519687 - RNA, 17 nt, Human
ccagaaauuagaaaccu

SEQ ID NO: 3519688 - RNA, 22 nt, Human
ccagaacaagguucccucugag

SEQ ID NO: 3519689 - RNA, 17 nt, Human
ccagaacacacuccauc

SEQ ID NO: 3519690 - RNA, 13 nt, Human
ccagaacaguaug

SEQ ID NO: 3519691 - RNA, 17 nt, Human
ccagaacaguuuguaca

SEQ ID NO: 3519692 - RNA, 19 nt, Human
ccagaaccaccccggcccc

SEQ ID NO: 3519693 - RNA, 14 nt, Human
ccagaaccuguccu

SEQ ID NO: 3519694 - RNA, 19 nt, Human
ccagaacguggcucugcug

SEQ ID NO: 3519695 - RNA, 21 nt, Human
ccagaacguggcucugcuggc

SEQ ID NO: 3519696 - RNA, 15 nt, Human
ccagaacucuuccuc

SEQ ID NO: 3519697 - RNA, 23 nt, Human
ccagaagaagagaagcugcugac

SEQ ID NO: 3519698 - RNA, 16 nt, Human
ccagaagaauauucag

SEQ ID NO: 3519699 - RNA, 17 nt, Human
ccagaagaauauucagg

SEQ ID NO: 3519700 - RNA, 22 nt, Human
ccagaagauagcuucaccccaa

SEQ ID NO: 3519701 - RNA, 20 nt, Human
ccagaagaugaacagacuga

SEQ ID NO: 3519702 - RNA, 16 nt, Human
ccagaagccaaagacu

SEQ ID NO: 3519703 - RNA, 20 nt, Human
ccagaagccacccaaagcag

SEQ ID NO: 3519704 - RNA, 12 nt, Human
ccagaagcccag

SEQ ID NO: 3519705 - RNA, 19 nt, Human
ccagaagccucuggcuaga

SEQ ID NO: 3519706 - RNA, 18 nt, Human
ccagaagcucccccagca

SEQ ID NO: 3519707 - RNA, 15 nt, Human
ccagaagcuuccaua

SEQ ID NO: 3519708 - RNA, 14 nt, Human
ccagaaggagacag

SEQ ID NO: 3519709 - RNA, 14 nt, Human
ccagaagggguuug

SEQ ID NO: 3519710 - RNA, 16 nt, Human
ccagaaguaccagacu

SEQ ID NO: 3519711 - RNA, 20 nt, Human
ccagaaguaccagacuagau

SEQ ID NO: 3519712 - RNA, 18 nt, Human
ccagaagugugacuggcu

SEQ ID NO: 3519713 - RNA, 22 nt, Human
ccagaaguuguggauuucaguu

SEQ ID NO: 3519714 - RNA, 20 nt, Human
ccagaaguuugucaagucaa

SEQ ID NO: 3519715 - RNA, 16 nt, Human
ccagaauaaacccagc

SEQ ID NO: 3519716 - RNA, 22 nt, Human
ccagaauaaacuggcagcucag

SEQ ID NO: 3519717 - RNA, 15 nt, Human
ccagaauaaguuauu

SEQ ID NO: 3519718 - RNA, 21 nt, Human
ccagaauaaguuauugcaguu

SEQ ID NO: 3519719 - RNA, 12 nt, Human
ccagaauacuga

SEQ ID NO: 3519720 - RNA, 12 nt, Human
ccagaaucaaag

SEQ ID NO: 3519721 - RNA, 13 nt, Human
ccagaaucccagc

SEQ ID NO: 3519722 - RNA, 23 nt, Human
ccagaauggucuuucuaaugugu

SEQ ID NO: 3519723 - RNA, 18 nt, Human
ccagaauuucccaaagca

SEQ ID NO: 3519724 - RNA, 21 nt, Human
ccagaauuucccaaagcagug

SEQ ID NO: 3519725 - RNA, 15 nt, Human
ccagaauuuggaaau

SEQ ID NO: 3519726 - RNA, 21 nt, Human
ccagaauuuggaaauccuagu

SEQ ID NO: 3519727 - RNA, 23 nt, Human
ccagacaagcuguugaccaggca

SEQ ID NO: 3519728 - RNA, 12 nt, Human
ccagacacaaac

SEQ ID NO: 3519729 - RNA, 15 nt, Human
ccagacacccaggac

SEQ ID NO: 3519730 - RNA, 19 nt, Human
ccagacaccuugacagggc

SEQ ID NO: 3519731 - RNA, 20 nt, Human
ccagacaccuugacagggca

SEQ ID NO: 3519732 - RNA, 21 nt, Human
ccagacaccuugacagggcac

SEQ ID NO: 3519733 - RNA, 18 nt, Human
ccagacagacaucucugc

SEQ ID NO: 3519734 - RNA, 21 nt, Human
ccagacagcaacggggaggcc

SEQ ID NO: 3519735 - RNA, 13 nt, Human
ccagacagccugu

SEQ ID NO: 3519736 - RNA, 17 nt, Human
ccagacagccuguaucu

SEQ ID NO: 3519737 - RNA, 16 nt, Human
ccagacauaaaggaaa

SEQ ID NO: 3519738 - RNA, 19 nt, Human
ccagacaucaugaauuuua

SEQ ID NO: 3519739 - RNA, 19 nt, Human
ccagacauguggugggaca

SEQ ID NO: 3519740 - RNA, 18 nt, Human
ccagaccauugucucaga

SEQ ID NO: 3519741 - RNA, 14 nt, Human
ccagacccaguggg

SEQ ID NO: 3519742 - RNA, 12 nt, Human
ccagacccccac

SEQ ID NO: 3519743 - RNA, 14 nt, Human
ccagacccccaccc

SEQ ID NO: 3519744 - RNA, 24 nt, Human
ccagaccccucuggccaggaugga

SEQ ID NO: 3519745 - RNA, 15 nt, Human
ccagaccccuggcuu

SEQ ID NO: 3519746 - RNA, 16 nt, Human
ccagaccccuggcuuu

SEQ ID NO: 3519747 - RNA, 17 nt, Human
ccagaccccuggcuuuu

SEQ ID NO: 3519748 - RNA, 18 nt, Human
ccagaccccuggcuuuuc

SEQ ID NO: 3519749 - RNA, 14 nt, Human
ccagaccugaggcg

SEQ ID NO: 3519750 - RNA, 21 nt, Human
ccagaccugauccuggaggcc

SEQ ID NO: 3519751 - RNA, 23 nt, Human
ccagaccugauccuggaggccca

SEQ ID NO: 3519752 - RNA, 24 nt, Human
ccagaccugauccuggaggcccag

SEQ ID NO: 3519753 - RNA, 21 nt, Human
ccagaccugcagacgcccaga

SEQ ID NO: 3519754 - RNA, 14 nt, Human
ccagaccugccucu

SEQ ID NO: 3519755 - RNA, 12 nt, Human
ccagaccuggaa

SEQ ID NO: 3519756 - RNA, 20 nt, Human
ccagaccuguuagcagacag

SEQ ID NO: 3519757 - RNA, 18 nt, Human
ccagaccuuugaggauau

SEQ ID NO: 3519758 - RNA, 14 nt, Human
ccagaccuuuuauc

SEQ ID NO: 3519759 - RNA, 13 nt, Human
ccagacgaugucu

SEQ ID NO: 3519760 - RNA, 18 nt, Human
ccagacgcacgugggucu

SEQ ID NO: 3519761 - RNA, 15 nt, Human
ccagacggcacccac

SEQ ID NO: 3519762 - RNA, 20 nt, Human
ccagacggcuccacuaggac

SEQ ID NO: 3519763 - RNA, 15 nt, Human
ccagacggggcugga

SEQ ID NO: 3519764 - RNA, 17 nt, Human
ccagacgguucaccagc

SEQ ID NO: 3519765 - RNA, 19 nt, Human
ccagacgguucaccagccu

SEQ ID NO: 3519766 - RNA, 16 nt, Human
ccagacuacuugggag

SEQ ID NO: 3519767 - RNA, 22 nt, Human
ccagacuagauggaccugccug

SEQ ID NO: 3519768 - RNA, 18 nt, Human
ccagacuagauguaguau

SEQ ID NO: 3519769 - RNA, 17 nt, Human
ccagacucagagcucuc

SEQ ID NO: 3519770 - RNA, 22 nt, Human
ccagacucagagcucucucuac

SEQ ID NO: 3519771 - RNA, 23 nt, Human
ccagacucagagcucucucuaca

SEQ ID NO: 3519772 - RNA, 14 nt, Human
ccagacuccaccaa

SEQ ID NO: 3519773 - RNA, 21 nt, Human
ccagacuccugacugucuccc

SEQ ID NO: 3519774 - RNA, 14 nt, Human
ccagacucucugug

SEQ ID NO: 3519775 - RNA, 14 nt, Human
ccagacuugcugaa

SEQ ID NO: 3519776 - RNA, 16 nt, Human
ccagagaaaggggagc

SEQ ID NO: 3519777 - RNA, 23 nt, Human
ccagagaaaggggagcccacugu

SEQ ID NO: 3519778 - RNA, 12 nt, Human
ccagagaacagc

SEQ ID NO: 3519779 - RNA, 13 nt, Human
ccagagaacccag

SEQ ID NO: 3519780 - RNA, 18 nt, Human
ccagauuucacucuccuu

SEQ ID NO: 3519781 - RNA, 23 nt, Human
ccagauuugaagacaaaaauacu

SEQ ID NO: 3519782 - RNA, 23 nt, Human
ccagauuugucuuuuuguuguaa

SEQ ID NO: 3519783 - RNA, 22 nt, Human
ccagcaaaagagcuauugccaa

SEQ ID NO: 3519784 - RNA, 15 nt, Human
ccagcaaaagguugu

SEQ ID NO: 3519785 - RNA, 13 nt, Human
ccagcaaagcccc

SEQ ID NO: 3519786 - RNA, 21 nt, Human
ccagcaaagcccccagagccc

SEQ ID NO: 3519787 - RNA, 24 nt, Human
ccagcaaagcccccagagcccagg

SEQ ID NO: 3519788 - RNA, 21 nt, Human
ccagcaacacaagcuggaagc

SEQ ID NO: 3519789 - RNA, 16 nt, Human
ccagcaacacagccug

SEQ ID NO: 3519790 - RNA, 17 nt, Human
ccagcaacccuccuauc

SEQ ID NO: 3519791 - RNA, 16 nt, Human
ccagcaacugaauaaa

SEQ ID NO: 3519792 - RNA, 18 nt, Human
ccagcaagugagagcugg

SEQ ID NO: 3519793 - RNA, 21 nt, Human
ccagcaagugagagcugggug

SEQ ID NO: 3519794 - RNA, 22 nt, Human
ccagcaagugagagcugggugu

SEQ ID NO: 3519795 - RNA, 21 nt, Human
ccagcaaugacaucucagggg

SEQ ID NO: 3519796 - RNA, 22 nt, Human
ccagcaaugacaucucaggggc

SEQ ID NO: 3519797 - RNA, 23 nt, Human
ccagcaaugacaucucaggggcc

SEQ ID NO: 3519798 - RNA, 21 nt, Human
ccagcaauucauaaaaacugc

SEQ ID NO: 3519799 - RNA, 18 nt, Human
ccagcaauucuccugccu

SEQ ID NO: 3519800 - RNA, 12 nt, Human
ccagcacaaaca

SEQ ID NO: 3519801 - RNA, 20 nt, Human
ccagcacaaacacaagguca

SEQ ID NO: 3519802 - RNA, 14 nt, Human
ccagcacaaagcag

SEQ ID NO: 3519803 - RNA, 23 nt, Human
ccagcacaaccuucaagcugcuu

SEQ ID NO: 3519804 - RNA, 16 nt, Human
ccagcacacagggcag

SEQ ID NO: 3519805 - RNA, 20 nt, Human
ccagcacagcuuagauuuca

SEQ ID NO: 3519806 - RNA, 17 nt, Human
ccagcaccaucucuccu

SEQ ID NO: 3519807 - RNA, 18 nt, Human
ccagcacccccacgcccu

SEQ ID NO: 3519808 - RNA, 14 nt, Human
ccagcacccgggcu

SEQ ID NO: 3519809 - RNA, 18 nt, Human
ccagcacccgggcucagg

SEQ ID NO: 3519810 - RNA, 23 nt, Human
ccagcacccgggcucagggacca

SEQ ID NO: 3519811 - RNA, 22 nt, Human
ccagcaccggccccauuuaccc

SEQ ID NO: 3519812 - RNA, 15 nt, Human
ccagcaccugccucc

SEQ ID NO: 3519813 - RNA, 16 nt, Human
ccagcaccugccuccu

SEQ ID NO: 3519814 - RNA, 19 nt, Human
ccagcaccuugugccuggg

SEQ ID NO: 3519815 - RNA, 24 nt, Human
ccagcacuaaagcaguggacacca

SEQ ID NO: 3519816 - RNA, 20 nt, Human
ccagcacucgcuagcagugg

SEQ ID NO: 3519817 - RNA, 12 nt, Human
ccagcacugagg

SEQ ID NO: 3519818 - RNA, 12 nt, Human
ccagcacugcuu

SEQ ID NO: 3519819 - RNA, 18 nt, Human
ccagcacugcuugaggaa

SEQ ID NO: 3519820 - RNA, 19 nt, Human
ccagcacuuugggaggccu

SEQ ID NO: 3519821 - RNA, 13 nt, Human
ccagcagacagag

SEQ ID NO: 3519822 - RNA, 17 nt, Human
ccagcagacagagccag

SEQ ID NO: 3519823 - RNA, 18 nt, Human
ccagcagacagagccagg

SEQ ID NO: 3519824 - RNA, 22 nt, Human
ccagcagacagagccaggagaa

SEQ ID NO: 3519825 - RNA, 14 nt, Human
ccagcagacauugu

SEQ ID NO: 3519826 - RNA, 23 nt, Human
ccagcagagcaccuuagacaguc

SEQ ID NO: 3519827 - RNA, 15 nt, Human
ccagcagauuauuca

SEQ ID NO: 3519828 - RNA, 22 nt, Human
ccagcagauuauucacugauuu

SEQ ID NO: 3519829 - RNA, 15 nt, Human
ccagcagccagccaa

SEQ ID NO: 3519830 - RNA, 16 nt, Human
ccagcagccagccaaa

SEQ ID NO: 3519831 - RNA, 15 nt, Human
ccagcagccagcucu

SEQ ID NO: 3519832 - RNA, 21 nt, Human
ccagcagccagcucucagcca

SEQ ID NO: 3519833 - RNA, 21 nt, Human
ccagcagccccacaccagggc

SEQ ID NO: 3519834 - RNA, 15 nt, Human
ccagcagccuggacc

SEQ ID NO: 3519835 - RNA, 19 nt, Human
ccagcagccuggacccugu

SEQ ID NO: 3519836 - RNA, 18 nt, Human
ccagcagcgccuuuccca

SEQ ID NO: 3519837 - RNA, 10 nt, Human
ccagcagcug

SEQ ID NO: 3519838 - RNA, 12 nt, Human
ccagcaggaggg

SEQ ID NO: 3519839 - RNA, 20 nt, Human
ccagcaggagggacagucuc

SEQ ID NO: 3519840 - RNA, 21 nt, Human
ccagcaggcucucaggccagc

SEQ ID NO: 3519841 - RNA, 18 nt, Human
ccagcaggugcugacuuc

SEQ ID NO: 3519842 - RNA, 15 nt, Human
ccagcagguggggag

SEQ ID NO: 3519843 - RNA, 21 nt, Human
ccagcaguacaauaaaaguaa

SEQ ID NO: 3519844 - RNA, 20 nt, Human
ccaugcugugcgcccagggc

SEQ ID NO: 3519845 - RNA, 20 nt, Human
ccaugcuguugauugcuaaa

SEQ ID NO: 3519846 - RNA, 21 nt, Human
ccaugcuguuuucccuuugcc

SEQ ID NO: 3519847 - RNA, 19 nt, Human
ccaugcuuacgugauccuc

SEQ ID NO: 3519848 - RNA, 20 nt, Human
ccaugcuuagucacugccug

SEQ ID NO: 3519849 - RNA, 12 nt, Human
ccauggaaccug

SEQ ID NO: 3519850 - RNA, 18 nt, Human
ccauggaaugcuugaaaa

SEQ ID NO: 3519851 - RNA, 20 nt, Human
ccauggacacuacacccagc

SEQ ID NO: 3519852 - RNA, 21 nt, Human
ccauggacacuacacccagca

SEQ ID NO: 3519853 - RNA, 19 nt, Human
ccauggacacuccagugcc

SEQ ID NO: 3519854 - RNA, 15 nt, Human
ccauggacucugucc

SEQ ID NO: 3519855 - RNA, 18 nt, Human
ccauggacucuguccuga

SEQ ID NO: 3519856 - RNA, 13 nt, Human
ccauggagaaagc

SEQ ID NO: 3519857 - RNA, 18 nt, Human
ccauggagaaagcugacu

SEQ ID NO: 3519858 - RNA, 18 nt, Human
ccauggagccagcucccu

SEQ ID NO: 3519859 - RNA, 22 nt, Human
ccauggagccagcucccucuau

SEQ ID NO: 3519860 - RNA, 18 nt, Human
ccauggagccccagcccc

SEQ ID NO: 3519861 - RNA, 19 nt, Human
ccauggagccccagccccc

SEQ ID NO: 3519862 - RNA, 23 nt, Human
ccauggaggaaggcucuguucca

SEQ ID NO: 3519863 - RNA, 17 nt, Human
ccauggaggcacacagc

SEQ ID NO: 3519864 - RNA, 20 nt, Human
ccauggaguggcagcccagc

SEQ ID NO: 3519865 - RNA, 21 nt, Human
ccauggaguggcagcccagcc

SEQ ID NO: 3519866 - RNA, 23 nt, Human
ccauggcaccuucagacuuugcu

SEQ ID NO: 3519867 - RNA, 14 nt, Human
ccauggcaggaagg

SEQ ID NO: 3519868 - RNA, 16 nt, Human
ccauggccugcaaacu

SEQ ID NO: 3519869 - RNA, 21 nt, Human
ccauggccugcaaacugggaa

SEQ ID NO: 3519870 - RNA, 18 nt, Human
ccauggcuuaaugcuucu

SEQ ID NO: 3519871 - RNA, 14 nt, Human
ccauggcuuccucc

SEQ ID NO: 3519872 - RNA, 21 nt, Human
ccaugggaaaugucaacaagu

SEQ ID NO: 3519873 - RNA, 16 nt, Human
ccaugggacagggagg

SEQ ID NO: 3519874 - RNA, 19 nt, Human
ccaugggacagggaggacg

SEQ ID NO: 3519875 - RNA, 14 nt, Human
ccaugggaggccuu

SEQ ID NO: 3519876 - RNA, 13 nt, Human
ccaugggagggag

SEQ ID NO: 3519877 - RNA, 23 nt, Human
ccaugggauacaaccucccucuu

SEQ ID NO: 3519878 - RNA, 17 nt, Human
ccaugggcacugcuggg

SEQ ID NO: 3519879 - RNA, 20 nt, Human
ccaugggcacugcugggugg

SEQ ID NO: 3519880 - RNA, 22 nt, Human
ccaugggcacugcuggguggcc

SEQ ID NO: 3519881 - RNA, 18 nt, Human
ccaugggcacugugggua

SEQ ID NO: 3519882 - RNA, 17 nt, Human
ccaugggccuccugugu

SEQ ID NO: 3519883 - RNA, 11 nt, Human
ccauggggaag

SEQ ID NO: 3519884 - RNA, 23 nt, Human
ccauggggacgcccucagucuag

SEQ ID NO: 3519885 - RNA, 23 nt, Human
ccaugggguaggaggaugggcuc

SEQ ID NO: 3519886 - RNA, 17 nt, Human
ccauggggucucucaca

SEQ ID NO: 3519887 - RNA, 18 nt, Human
ccaugguacccccuucug

SEQ ID NO: 3519888 - RNA, 15 nt, Human
ccauggucacagaga

SEQ ID NO: 3519889 - RNA, 16 nt, Human
ccauggugauggugua

SEQ ID NO: 3519890 - RNA, 14 nt, Human
ccauggugccucug

SEQ ID NO: 3519891 - RNA, 22 nt, Human
ccauggugcuaggaagaggagu

SEQ ID NO: 3519892 - RNA, 18 nt, Human
ccauggugugaucgucug

SEQ ID NO: 3519893 - RNA, 20 nt, Human
ccaugguuaagaguccaaga

SEQ ID NO: 3519894 - RNA, 16 nt, Human
ccauguaacagaaagg

SEQ ID NO: 3519895 - RNA, 14 nt, Human
ccauguaacugccu

SEQ ID NO: 3519896 - RNA, 19 nt, Human
ccauguaacugccuagaaa

SEQ ID NO: 3519897 - RNA, 18 nt, Human
ccauguaagguaucaguu

SEQ ID NO: 3519898 - RNA, 16 nt, Human
ccauguacaugaagaa

SEQ ID NO: 3519899 - RNA, 14 nt, Human
ccauguaccucccc

SEQ ID NO: 3519900 - RNA, 19 nt, Human
ccauguaccuccccugccu

SEQ ID NO: 3519901 - RNA, 20 nt, Human
ccauguaccuccccugccuu

SEQ ID NO: 3519902 - RNA, 16 nt, Human
ccauguagaaaauuug

SEQ ID NO: 3519903 - RNA, 14 nt, Human
ccauguagaagcug

SEQ ID NO: 3519904 - RNA, 15 nt, Human
ccauguagaagcugc

SEQ ID NO: 3519905 - RNA, 16 nt, Human
ccauguagcaggacug

SEQ ID NO: 3519906 - RNA, 17 nt, Human
ccauguauaaaugugau

SEQ ID NO: 3519907 - RNA, 11 nt, Human
ccauguaugca

SEQ ID NO: 3519908 - RNA, 15 nt, Human
ccauguauggccagg

SEQ ID NO: 3519909 - RNA, 21 nt, Human
ccauguauggccaggaaguag

SEQ ID NO: 3519910 - RNA, 16 nt, Human
ccauguauuuaucucu

SEQ ID NO: 3519911 - RNA, 17 nt, Human
ccaugucaagauucagc

SEQ ID NO: 3519912 - RNA, 13 nt, Human
ccaugucagacac

SEQ ID NO: 3519913 - RNA, 15 nt, Human
ccaugucagacacag

SEQ ID NO: 3519914 - RNA, 13 nt, Human
ccauguccccucc

SEQ ID NO: 3519915 - RNA, 19 nt, Human
ccauguccuaugugugacu

SEQ ID NO: 3519916 - RNA, 12 nt, Human
ccaugucgccuc

SEQ ID NO: 3519917 - RNA, 16 nt, Human
ccaugucgccucugca

SEQ ID NO: 3519918 - RNA, 20 nt, Human
ccaugucucugagcauuaga

SEQ ID NO: 3519919 - RNA, 13 nt, Human
ccaugucugcauu

SEQ ID NO: 3519920 - RNA, 17 nt, Human
ccaugucugccccauca

SEQ ID NO: 3519921 - RNA, 21 nt, Human
ccaugucuuucuccaaaguua

SEQ ID NO: 3519922 - RNA, 21 nt, Human
ccaugugaaaaggcaaaaagc

SEQ ID NO: 3519923 - RNA, 21 nt, Human
cccagagaugggacugggagg

SEQ ID NO: 3519924 - RNA, 17 nt, Human
cccagagauucccaagc

SEQ ID NO: 3519925 - RNA, 17 nt, Human
cccagagcaccugcugu

SEQ ID NO: 3519926 - RNA, 16 nt, Human
cccagagcaggaagca

SEQ ID NO: 3519927 - RNA, 19 nt, Human
cccagagcaggaggccccu

SEQ ID NO: 3519928 - RNA, 23 nt, Human
cccagagcaggaggccccuggcc

SEQ ID NO: 3519929 - RNA, 13 nt, Human
cccagagccacac

SEQ ID NO: 3519930 - RNA, 14 nt, Human
cccagagccacaca

SEQ ID NO: 3519931 - RNA, 16 nt, Human
cccagagccacacaug

SEQ ID NO: 3519932 - RNA, 13 nt, Human
cccagagcccagc

SEQ ID NO: 3519933 - RNA, 14 nt, Human
cccagagcccaggc

SEQ ID NO: 3519934 - RNA, 16 nt, Human
cccagagcccaggcuc

SEQ ID NO: 3519935 - RNA, 19 nt, Human
cccagagcccaggcucggc

SEQ ID NO: 3519936 - RNA, 19 nt, Human
cccagagcugguggaccca

SEQ ID NO: 3519937 - RNA, 22 nt, Human
cccagagcuguuuauggccuca

SEQ ID NO: 3519938 - RNA, 23 nt, Human
cccagaggaaggggccagaggcu

SEQ ID NO: 3519939 - RNA, 20 nt, Human
cccagaggagccaccaguuc

SEQ ID NO: 3519940 - RNA, 22 nt, Human
cccagaggagcugggagccggg

SEQ ID NO: 3519941 - RNA, 13 nt, Human
cccagaggaggca

SEQ ID NO: 3519942 - RNA, 16 nt, Human
cccagaggcacagccg

SEQ ID NO: 3519943 - RNA, 14 nt, Human
cccagaggcguccc

SEQ ID NO: 3519944 - RNA, 15 nt, Human
cccagaggcugaguu

SEQ ID NO: 3519945 - RNA, 16 nt, Human
cccagagggcccaggc

SEQ ID NO: 3519946 - RNA, 22 nt, Human
cccagagggcccaggcaggcca

SEQ ID NO: 3519947 - RNA, 20 nt, Human
cccagagggccugcaaggga

SEQ ID NO: 3519948 - RNA, 19 nt, Human
cccagaggggccugccacc

SEQ ID NO: 3519949 - RNA, 21 nt, Human
cccagaggggccugccaccug

SEQ ID NO: 3519950 - RNA, 23 nt, Human
cccagaggggccugccaccugga

SEQ ID NO: 3519951 - RNA, 15 nt, Human
cccagagggucuggg

SEQ ID NO: 3519952 - RNA, 22 nt, Human
cccagagguaacagaacagcuu

SEQ ID NO: 3519953 - RNA, 13 nt, Human
cccagagguccag

SEQ ID NO: 3519954 - RNA, 18 nt, Human
cccagagguccagcccau

SEQ ID NO: 3519955 - RNA, 15 nt, Human
cccagagucccccca

SEQ ID NO: 3519956 - RNA, 20 nt, Human
cccagaguccccccacuccc

SEQ ID NO: 3519957 - RNA, 23 nt, Human
cccagagugugggaagggagagc

SEQ ID NO: 3519958 - RNA, 19 nt, Human
cccagaucagccagaagcc

SEQ ID NO: 3519959 - RNA, 16 nt, Human
cccagauuccccugug

SEQ ID NO: 3519960 - RNA, 19 nt, Human
cccagauuggcucacacug

SEQ ID NO: 3519961 - RNA, 21 nt, Human
cccagauuggcucacacugag

SEQ ID NO: 3519962 - RNA, 19 nt, Human
cccagauuucagucuuuuc

SEQ ID NO: 3519963 - RNA, 18 nt, Human
cccagauuuugcuguaua

SEQ ID NO: 3519964 - RNA, 15 nt, Human
cccagcaaagccccc

SEQ ID NO: 3519965 - RNA, 23 nt, Human
cccagcaaagcccccagagccca

SEQ ID NO: 3519966 - RNA, 15 nt, Human
cccagcaacacaagc

SEQ ID NO: 3519967 - RNA, 20 nt, Human
cccagcaacacaagcuggaa

SEQ ID NO: 3519968 - RNA, 22 nt, Human
cccagcaacacaagcuggaagc

SEQ ID NO: 3519969 - RNA, 16 nt, Human
cccagcaagugagagc

SEQ ID NO: 3519970 - RNA, 19 nt, Human
cccagcaagugagagcugg

SEQ ID NO: 3519971 - RNA, 21 nt, Human
cccagcaagugagagcugggu

SEQ ID NO: 3519972 - RNA, 22 nt, Human
cccagcaagugagagcugggug

SEQ ID NO: 3519973 - RNA, 23 nt, Human
cccagcaagugagagcugggugu

SEQ ID NO: 3519974 - RNA, 22 nt, Human
cccagcaagugguccuagaggc

SEQ ID NO: 3519975 - RNA, 13 nt, Human
cccagcacccagc

SEQ ID NO: 3519976 - RNA, 21 nt, Human
cccagcacccgggcucaggga

SEQ ID NO: 3519977 - RNA, 16 nt, Human
cccagcacuaaagcag

SEQ ID NO: 3519978 - RNA, 18 nt, Human
cccagcacuuguguuguc

SEQ ID NO: 3519979 - RNA, 12 nt, Human
cccagcacuuug

SEQ ID NO: 3519980 - RNA, 18 nt, Human
cccagcacuuugggaggc

SEQ ID NO: 3519981 - RNA, 20 nt, Human
cccagcacuuugggaggcca

SEQ ID NO: 3519982 - RNA, 23 nt, Human
cccagcacuuugggaggccgagg

SEQ ID NO: 3519983 - RNA, 14 nt, Human
cccagcagccagcc

SEQ ID NO: 3519984 - RNA, 22 nt, Human
cccagcagcccuaaggaucucu

SEQ ID NO: 3519985 - RNA, 14 nt, Human
cccagcagcugcca

SEQ ID NO: 3519986 - RNA, 18 nt, Human
cccagcagggccacuccc

SEQ ID NO: 3519987 - RNA, 19 nt, Human
cccagcagguggggagggg

SEQ ID NO: 3519988 - RNA, 16 nt, Human
cccagcaguuugggag

SEQ ID NO: 3519989 - RNA, 17 nt, Human
cccagcaugcaccacgg

SEQ ID NO: 3519990 - RNA, 22 nt, Human
cccagcauuccagccccucugg

SEQ ID NO: 3519991 - RNA, 19 nt, Human
cccagcauucucaggcacc

SEQ ID NO: 3519992 - RNA, 14 nt, Human
cccagccaccccgg

SEQ ID NO: 3519993 - RNA, 19 nt, Human
cccagccaccccgggcucu

SEQ ID NO: 3519994 - RNA, 22 nt, Human
cccagccaccccgggcucucug

SEQ ID NO: 3519995 - RNA, 22 nt, Human
cccagccacggacgcuggcucc

SEQ ID NO: 3519996 - RNA, 15 nt, Human
cccagccacucccca

SEQ ID NO: 3519997 - RNA, 17 nt, Human
cccagccagcaguucag

SEQ ID NO: 3519998 - RNA, 12 nt, Human
cccagccaggcc

SEQ ID NO: 3519999 - RNA, 15 nt, Human
cccagccaggcccag

SEQ ID NO: 3520000 - RNA, 21 nt, Human
cccagccaggccccaggcagg

SEQ ID NO: 3520001 - RNA, 16 nt, Human
cccagccagggcucaa

SEQ ID NO: 3520002 - RNA, 19 nt, Human
cccagccagggcucaaucu

SEQ ID NO: 3520003 - RNA, 18 nt, Human
cccagccaucugcccagg

SEQ ID NO: 3520004 - RNA, 21 nt, Human
cccagccaucugcccaggggu

SEQ ID NO: 3520005 - RNA, 23 nt, Human
cccagccaucugcccaggggugc

SEQ ID NO: 3520006 - RNA, 17 nt, Human
cccagccaugccagcug

SEQ ID NO: 3520007 - RNA, 19 nt, Human
cccagccaugccagcuggc

SEQ ID NO: 3520008 - RNA, 10 nt, Human
cccagccauu

SEQ ID NO: 3520009 - RNA, 20 nt, Human
cccagccauuaccauggaga

SEQ ID NO: 3520010 - RNA, 22 nt, Human
cccagccauuaccauggagaca

SEQ ID NO: 3520011 - RNA, 12 nt, Human
cccagcccaagu

SEQ ID NO: 3520012 - RNA, 13 nt, Human
cccagcccacccc

SEQ ID NO: 3520013 - RNA, 16 nt, Human
cccagcccaccccaug

SEQ ID NO: 3520014 - RNA, 13 nt, Human
cccagcccacccu

SEQ ID NO: 3520015 - RNA, 16 nt, Human
cccagcccacccuccu

SEQ ID NO: 3520016 - RNA, 19 nt, Human
cccagcccacuucugccau

SEQ ID NO: 3520017 - RNA, 16 nt, Human
cccagcccagagacau

SEQ ID NO: 3520018 - RNA, 12 nt, Human
cccagcccagau

SEQ ID NO: 3520019 - RNA, 21 nt, Human
cccagcccagauuccccugug

SEQ ID NO: 3520020 - RNA, 17 nt, Human
cccagcccagcccagcu

SEQ ID NO: 3520021 - RNA, 12 nt, Human
cccagcccagcu

SEQ ID NO: 3520022 - RNA, 13 nt, Human
cccagcccagcug

SEQ ID NO: 3520023 - RNA, 18 nt, Human
cccagcccagcugcucug

SEQ ID NO: 3520024 - RNA, 18 nt, Human
cccagcccagcugguggg

SEQ ID NO: 3520025 - RNA, 21 nt, Human
cccagcccaggguucccccag

SEQ ID NO: 3520026 - RNA, 22 nt, Human
cccagcccauccauuaggccag

SEQ ID NO: 3520027 - RNA, 21 nt, Human
cccagcccaucuugccuccau

SEQ ID NO: 3520028 - RNA, 17 nt, Human
cccagccccagccaggg

SEQ ID NO: 3520029 - RNA, 11 nt, Human
cccagccccau

SEQ ID NO: 3520030 - RNA, 16 nt, Human
cccagcccccacagug

SEQ ID NO: 3520031 - RNA, 17 nt, Human
cccagcccccacagugc

SEQ ID NO: 3520032 - RNA, 16 nt, Human
cccagcccccuuuggg

SEQ ID NO: 3520033 - RNA, 21 nt, Human
cccagcccccuuugggcccag

SEQ ID NO: 3520034 - RNA, 21 nt, Human
cccagccccgacuccagccag

SEQ ID NO: 3520035 - RNA, 14 nt, Human
cccagccccuagcc

SEQ ID NO: 3520036 - RNA, 22 nt, Human
cccagccccuagcccaggagag

SEQ ID NO: 3520037 - RNA, 18 nt, Human
cccagccccucccccauc

SEQ ID NO: 3520038 - RNA, 18 nt, Human
cccagccccugccccuca

SEQ ID NO: 3520039 - RNA, 23 nt, Human
cccagccccugccccucaugcca

SEQ ID NO: 3520040 - RNA, 18 nt, Human
cccagccccuucugaccc

SEQ ID NO: 3520041 - RNA, 20 nt, Human
cccagcccggaccuuggcag

SEQ ID NO: 3520042 - RNA, 14 nt, Human
cccagcccucaucc

SEQ ID NO: 3520043 - RNA, 11 nt, Human
cccagcccugc

SEQ ID NO: 3520044 - RNA, 14 nt, Human
cccagcccugcugg

SEQ ID NO: 3520045 - RNA, 20 nt, Human
cccagcccugcuggccgccu

SEQ ID NO: 3520046 - RNA, 14 nt, Human
cccagcccuggcuc

SEQ ID NO: 3520047 - RNA, 14 nt, Human
ccaggcugccgugg

SEQ ID NO: 3520048 - RNA, 13 nt, Human
ccaggcugccucc

SEQ ID NO: 3520049 - RNA, 21 nt, Human
ccaggcuggacaugcugacug

SEQ ID NO: 3520050 - RNA, 12 nt, Human
ccaggcuggcca

SEQ ID NO: 3520051 - RNA, 13 nt, Human
ccaggcuggccag

SEQ ID NO: 3520052 - RNA, 17 nt, Human
ccaggcuggccagcccc

SEQ ID NO: 3520053 - RNA, 20 nt, Human
ccaggcuggccagccccaca

SEQ ID NO: 3520054 - RNA, 21 nt, Human
ccaggcuggccagccccacag

SEQ ID NO: 3520055 - RNA, 21 nt, Human
ccaggcuggcgcagccaaggc

SEQ ID NO: 3520056 - RNA, 22 nt, Human
ccaggcuggcgcagccaaggcc

SEQ ID NO: 3520057 - RNA, 16 nt, Human
ccaggcuggcgugcag

SEQ ID NO: 3520058 - RNA, 17 nt, Human
ccaggcuggcgugcagu

SEQ ID NO: 3520059 - RNA, 18 nt, Human
ccaggcuggcgugcagug

SEQ ID NO: 3520060 - RNA, 15 nt, Human
ccaggcugggagagc

SEQ ID NO: 3520061 - RNA, 21 nt, Human
ccaggcugggucgcccuggac

SEQ ID NO: 3520062 - RNA, 23 nt, Human
ccaggcugggucgcccuggacug

SEQ ID NO: 3520063 - RNA, 16 nt, Human
ccaggcugggugacag

SEQ ID NO: 3520064 - RNA, 17 nt, Human
ccaggcugggugacaga

SEQ ID NO: 3520065 - RNA, 16 nt, Human
ccaggcuggucuaaaa

SEQ ID NO: 3520066 - RNA, 22 nt, Human
ccaggcuggucuugaaguccug

SEQ ID NO: 3520067 - RNA, 22 nt, Human
cagaggccccaauaccccaugg

SEQ ID NO: 3520068 - RNA, 16 nt, Human
cagaggccccagccuc

SEQ ID NO: 3520069 - RNA, 17 nt, Human
cagaggccccagccucc

SEQ ID NO: 3520070 - RNA, 16 nt, Human
cagaggcccccagccc

SEQ ID NO: 3520071 - RNA, 17 nt, Human
cagaggcccccagccca

SEQ ID NO: 3520072 - RNA, 12 nt, Human
cagaggcccuca

SEQ ID NO: 3520073 - RNA, 20 nt, Human
cagaggcccucgcugccagc

SEQ ID NO: 3520074 - RNA, 16 nt, Human
cagaggccuccugugg

SEQ ID NO: 3520075 - RNA, 21 nt, Human
cagaggccuccuguggccugc

SEQ ID NO: 3520076 - RNA, 16 nt, Human
cagaggccugggcugg

SEQ ID NO: 3520077 - RNA, 19 nt, Human
cagaggcgucccgcaccug

SEQ ID NO: 3520078 - RNA, 22 nt, Human
cagaggcgucccgcaccugucu

SEQ ID NO: 3520079 - RNA, 20 nt, Human
cagaggcuauuauuuucacu

SEQ ID NO: 3520080 - RNA, 14 nt, Human
cagaggcugcccca

SEQ ID NO: 3520081 - RNA, 23 nt, Human
cagaggcugccucucccaucacu

SEQ ID NO: 3520082 - RNA, 13 nt, Human
cagaggcuggagg

SEQ ID NO: 3520083 - RNA, 17 nt, Human
cagaggcuguggcuggu

SEQ ID NO: 3520084 - RNA, 20 nt, Human
cagaggcuucuucagaucag

SEQ ID NO: 3520085 - RNA, 23 nt, Human
cagagggaaaguaaauauuucag

SEQ ID NO: 3520086 - RNA, 22 nt, Human
cagagggaggaaucgaggaacc

SEQ ID NO: 3520087 - RNA, 14 nt, Human
cagagggagugaca

SEQ ID NO: 3520088 - RNA, 16 nt, Human
cagagggcagaggcug

SEQ ID NO: 3520089 - RNA, 15 nt, Human
cagagggcccaggca

SEQ ID NO: 3520090 - RNA, 19 nt, Human
cagagggccugcaagggag

SEQ ID NO: 3520091 - RNA, 11 nt, Human
cagagggcugg

SEQ ID NO: 3520092 - RNA, 12 nt, Human
cagagggcugga

SEQ ID NO: 3520093 - RNA, 13 nt, Human
cagagggcuggag

SEQ ID NO: 3520094 - RNA, 14 nt, Human
cagagggcuggagg

SEQ ID NO: 3520095 - RNA, 17 nt, Human
cagagggcuggaggccc

SEQ ID NO: 3520096 - RNA, 21 nt, Human
cagagggcuggaggcccaggc

SEQ ID NO: 3520097 - RNA, 12 nt, Human
cagaggggaagg

SEQ ID NO: 3520098 - RNA, 15 nt, Human
cagaggggacucugg

SEQ ID NO: 3520099 - RNA, 14 nt, Human
cagaggggcagaug

SEQ ID NO: 3520100 - RNA, 20 nt, Human
cagaggggccugccaccugg

SEQ ID NO: 3520101 - RNA, 21 nt, Human
cagaggggccugccaccugga

SEQ ID NO: 3520102 - RNA, 19 nt, Human
cagaggggcuuucuggaga

SEQ ID NO: 3520103 - RNA, 17 nt, Human
cagagggggacugcugc

SEQ ID NO: 3520104 - RNA, 19 nt, Human
cagaggggguggccuccca

SEQ ID NO: 3520105 - RNA, 23 nt, Human
cagaggggguggccucccaacuc

SEQ ID NO: 3520106 - RNA, 16 nt, Human
cagagggucacagugu

SEQ ID NO: 3520107 - RNA, 17 nt, Human
cagaggguguccugcac

SEQ ID NO: 3520108 - RNA, 20 nt, Human
cagagguaaaagugugagca

SEQ ID NO: 3520109 - RNA, 13 nt, Human
cagagguaacaga

SEQ ID NO: 3520110 - RNA, 23 nt, Human
cagagguaacagaacagcuucag

SEQ ID NO: 3520111 - RNA, 14 nt, Human
cagagguacccugg

SEQ ID NO: 3520112 - RNA, 22 nt, Human
cagagguauuaaaacuaaauuu

SEQ ID NO: 3520113 - RNA, 19 nt, Human
cagaggucucugccggcuc

SEQ ID NO: 3520114 - RNA, 23 nt, Human
cagaggucucugccggcucuuuc

SEQ ID NO: 3520115 - RNA, 14 nt, Human
cagaggucugugcu

SEQ ID NO: 3520116 - RNA, 21 nt, Human
cagaggugcuucacccugagu

SEQ ID NO: 3520117 - RNA, 17 nt, Human
cagagguggccagagcu

SEQ ID NO: 3520118 - RNA, 19 nt, Human
cagagguggccagagcugg

SEQ ID NO: 3520119 - RNA, 18 nt, Human
cagagguggcucuggaau

SEQ ID NO: 3520120 - RNA, 14 nt, Human
cagaggugggcagg

SEQ ID NO: 3520121 - RNA, 15 nt, Human
cagaggugggcaggu

SEQ ID NO: 3520122 - RNA, 17 nt, Human
cagaggugggcaggugg

SEQ ID NO: 3520123 - RNA, 20 nt, Human
cagaggugggcagguggugg

SEQ ID NO: 3520124 - RNA, 18 nt, Human
cagagguuaucuguccca

SEQ ID NO: 3520125 - RNA, 19 nt, Human
cagagguuaucugucccag

SEQ ID NO: 3520126 - RNA, 22 nt, Human
cagaguaggcuauuccugagag

SEQ ID NO: 3520127 - RNA, 22 nt, Human
cagaguaggggucugucuuuua

SEQ ID NO: 3520128 - RNA, 13 nt, Human
cagaguaugaaca

SEQ ID NO: 3520129 - RNA, 13 nt, Human
cagagucagcaga

SEQ ID NO: 3520130 - RNA, 15 nt, Human
cagagucagccagga

SEQ ID NO: 3520131 - RNA, 15 nt, Human
cagaguccaggcccc

SEQ ID NO: 3520132 - RNA, 15 nt, Human
cagaguccccccacu

SEQ ID NO: 3520133 - RNA, 13 nt, Human
cagaguccuggag

SEQ ID NO: 3520134 - RNA, 23 nt, Human
cagagucucacuguugcccaggc

SEQ ID NO: 3520135 - RNA, 23 nt, Human
cagagucucgcucuguugcccag

SEQ ID NO: 3520136 - RNA, 19 nt, Human
cagagugagacccugucuc

SEQ ID NO: 3520137 - RNA, 17 nt, Human
cagagugcacagcuguc

SEQ ID NO: 3520138 - RNA, 15 nt, Human
cagagugcccagaac

SEQ ID NO: 3520139 - RNA, 17 nt, Human
cagagugccccaccugc

SEQ ID NO: 3520140 - RNA, 18 nt, Human
cagagugccccaccugcc

SEQ ID NO: 3520141 - RNA, 23 nt, Human
cagagugccccaccugccacuag

SEQ ID NO: 3520142 - RNA, 21 nt, Human
cagagugcuuuaccaauugaa

SEQ ID NO: 3520143 - RNA, 15 nt, Human
cagaguggccuggcc

SEQ ID NO: 3520144 - RNA, 12 nt, Human
cagagugguggg

SEQ ID NO: 3520145 - RNA, 15 nt, Human
cagagugugcuggag

SEQ ID NO: 3520146 - RNA, 18 nt, Human
cagaguguggacucuggu

SEQ ID NO: 3520147 - RNA, 23 nt, Human
cagaguguggccuucggacaacu

SEQ ID NO: 3520148 - RNA, 20 nt, Human
cagagugugggaagggagag

SEQ ID NO: 3520149 - RNA, 12 nt, Human
cagaguuacagu

SEQ ID NO: 3520150 - RNA, 13 nt, Human
cagaguuacaguu

SEQ ID NO: 3520151 - RNA, 17 nt, Human
cagaguuacaguucugu

SEQ ID NO: 3520152 - RNA, 16 nt, Human
cagaguuccccaugca

SEQ ID NO: 3520153 - RNA, 19 nt, Human
cagaguugaagacagagcu

SEQ ID NO: 3520154 - RNA, 20 nt, Human
cagaguugacaugagauuua

SEQ ID NO: 3520155 - RNA, 20 nt, Human
cagaguugcugcaaaccuga

SEQ ID NO: 3520156 - RNA, 23 nt, Human
cagaguuguaaauauauaaauau

SEQ ID NO: 3520157 - RNA, 14 nt, Human
cagaguuguuacau

SEQ ID NO: 3520158 - RNA, 19 nt, Human
cagaguuugccuuccuuuc

SEQ ID NO: 3520159 - RNA, 22 nt, Human
cagaguuugccuuccuuucucc

SEQ ID NO: 3520160 - RNA, 17 nt, Human
cagaguuuguguguugu

SEQ ID NO: 3520161 - RNA, 17 nt, Human
cagaguuuucauuaaau

SEQ ID NO: 3520162 - RNA, 15 nt, Human
cagaguuuuuaugua

SEQ ID NO: 3520163 - RNA, 12 nt, Human
cagauaaagauu

SEQ ID NO: 3520164 - RNA, 21 nt, Human
cagauaaaugauucaaaaagu

SEQ ID NO: 3520165 - RNA, 23 nt, Human
cagauaaaugauucaaaaaguca

SEQ ID NO: 3520166 - RNA, 20 nt, Human
cagauaacaaugcagcaagg

SEQ ID NO: 3520167 - RNA, 14 nt, Human
cagauaacugagga

SEQ ID NO: 3520168 - RNA, 16 nt, Human
cagauaacuguuauuu

SEQ ID NO: 3520169 - RNA, 19 nt, Human
cagauaacuguuauuuaua

SEQ ID NO: 3520170 - RNA, 13 nt, Human
cagauaacuuuuu

SEQ ID NO: 3520171 - RNA, 20 nt, Human
cagauaacuuuuuuuuuucu

SEQ ID NO: 3520172 - RNA, 21 nt, Human
cagauaagaaugcugguuuuc

SEQ ID NO: 3520173 - RNA, 20 nt, Human
cagauaagcaagagagaugu

SEQ ID NO: 3520174 - RNA, 15 nt, Human
cagauaaucagccuc

SEQ ID NO: 3520175 - RNA, 17 nt, Human
cagauaaucagccucuu

SEQ ID NO: 3520176 - RNA, 16 nt, Human
cagauaaugugaaaau

SEQ ID NO: 3520177 - RNA, 20 nt, Human
cagauacaggaaaagcugcu

SEQ ID NO: 3520178 - RNA, 22 nt, Human
cagauacaggaaaagcugcuga

SEQ ID NO: 3520179 - RNA, 15 nt, Human
cagauacaucacugc

SEQ ID NO: 3520180 - RNA, 16 nt, Human
cagauacaucacugcu

SEQ ID NO: 3520181 - RNA, 19 nt, Human
cagauacaucacugcuuga

SEQ ID NO: 3520182 - RNA, 21 nt, Human
cagauaccuccaacccugccg

SEQ ID NO: 3520183 - RNA, 22 nt, Human
cagauacuacugaccagacaag

SEQ ID NO: 3520184 - RNA, 14 nt, Human
cagauacugcugug

SEQ ID NO: 3520185 - RNA, 21 nt, Human
cagauacuggaaguuuugcau

SEQ ID NO: 3520186 - RNA, 16 nt, Human
cagauagaaagcauua

SEQ ID NO: 3520187 - RNA, 20 nt, Human
cagauaguguagcugaggag

SEQ ID NO: 3520188 - RNA, 23 nt, Human
cagauauaaauggcugguuuuua

SEQ ID NO: 3520189 - RNA, 20 nt, Human
cagauauacuggaacccuuu

SEQ ID NO: 3520190 - RNA, 18 nt, Human
cagauauacuuuguggac

SEQ ID NO: 3520191 - RNA, 19 nt, Human
cagauauauuaagugacug

SEQ ID NO: 3520192 - RNA, 15 nt, Human
cagauaugauaugua

SEQ ID NO: 3520193 - RNA, 15 nt, Human
cagauaugauucaaa

SEQ ID NO: 3520194 - RNA, 16 nt, Human
cagauaugauucaaau

SEQ ID NO: 3520195 - RNA, 12 nt, Human
cagauauuuaua

SEQ ID NO: 3520196 - RNA, 20 nt, Human
cagauauuuauauuuuuauu

SEQ ID NO: 3520197 - RNA, 22 nt, Human
cagauauuuauauuuuuauuuu

SEQ ID NO: 3520198 - RNA, 15 nt, Human
cagauauuugucaug

SEQ ID NO: 3520199 - RNA, 15 nt, Human
cagauauuuuuucag

SEQ ID NO: 3520200 - RNA, 17 nt, Human
cagaucaagcugugaga

SEQ ID NO: 3520201 - RNA, 19 nt, Human
cagaucaagcugugagaca

SEQ ID NO: 3520202 - RNA, 19 nt, Human
cagaucaagggccuaucuu

SEQ ID NO: 3520203 - RNA, 18 nt, Human
cagaucacagcuucagcc

SEQ ID NO: 3520204 - RNA, 14 nt, Human
cagaucacaguguc

SEQ ID NO: 3520205 - RNA, 13 nt, Human
cagaucaccugag

SEQ ID NO: 3520206 - RNA, 15 nt, Human
cagaucauccagaag

SEQ ID NO: 3520207 - RNA, 17 nt, Human
cagaucauguuuuggug

SEQ ID NO: 3520208 - RNA, 19 nt, Human
cagaucauguuuuggugaa

SEQ ID NO: 3520209 - RNA, 23 nt, Human
cagaucauuaucagccugugcca

SEQ ID NO: 3520210 - RNA, 17 nt, Human
cagauccaggagcucca

SEQ ID NO: 3520211 - RNA, 19 nt, Human
ccccacucccuugcuggcc

SEQ ID NO: 3520212 - RNA, 23 nt, Human
ccccacucccuugcuggccccag

SEQ ID NO: 3520213 - RNA, 21 nt, Human
ccccacuccucugcugaccug

SEQ ID NO: 3520214 - RNA, 21 nt, Human
ccccacucuaggggucaggcu

SEQ ID NO: 3520215 - RNA, 16 nt, Human
ccccacucucagaggc

SEQ ID NO: 3520216 - RNA, 15 nt, Human
ccccacucucauucc

SEQ ID NO: 3520217 - RNA, 15 nt, Human
ccccacucuccccac

SEQ ID NO: 3520218 - RNA, 17 nt, Human
ccccacucugcucugau

SEQ ID NO: 3520219 - RNA, 21 nt, Human
ccccacugacagccucccacc

SEQ ID NO: 3520220 - RNA, 15 nt, Human
ccccacugaccagaa

SEQ ID NO: 3520221 - RNA, 17 nt, Human
ccccacugccagcagca

SEQ ID NO: 3520222 - RNA, 14 nt, Human
ccccacugcccuuc

SEQ ID NO: 3520223 - RNA, 12 nt, Human
ccccacugccug

SEQ ID NO: 3520224 - RNA, 16 nt, Human
ccccacugccugccca

SEQ ID NO: 3520225 - RNA, 22 nt, Human
ccccacuggcugugggcucccu

SEQ ID NO: 3520226 - RNA, 23 nt, Human
ccccacuggcugugggcucccuu

SEQ ID NO: 3520227 - RNA, 14 nt, Human
ccccacuggggaaa

SEQ ID NO: 3520228 - RNA, 18 nt, Human
ccccacuuaucccucucc

SEQ ID NO: 3520229 - RNA, 13 nt, Human
ccccacuugccuc

SEQ ID NO: 3520230 - RNA, 15 nt, Human
ccccacuugccucuu

SEQ ID NO: 3520231 - RNA, 16 nt, Human
ccccacuugccucuuc

SEQ ID NO: 3520232 - RNA, 19 nt, Human
ccccacuuguccuuagccu

SEQ ID NO: 3520233 - RNA, 23 nt, Human
ccccagacuuguuggcguaggcu

SEQ ID NO: 3520234 - RNA, 22 nt, Human
ccccagagaaagcgcagaugcu

SEQ ID NO: 3520235 - RNA, 15 nt, Human
ccccagagccacaca

SEQ ID NO: 3520236 - RNA, 14 nt, Human
ccccagagccacag

SEQ ID NO: 3520237 - RNA, 16 nt, Human
ccccagagccacaguu

SEQ ID NO: 3520238 - RNA, 13 nt, Human
ccccagagcccag

SEQ ID NO: 3520239 - RNA, 14 nt, Human
ccccagagcccagg

SEQ ID NO: 3520240 - RNA, 19 nt, Human
ccccagagccccuccucca

SEQ ID NO: 3520241 - RNA, 18 nt, Human
ccccagaggccucucucu

SEQ ID NO: 3520242 - RNA, 20 nt, Human
ccccagauagcuggcugggu

SEQ ID NO: 3520243 - RNA, 14 nt, Human
ccccagcaaagccc

SEQ ID NO: 3520244 - RNA, 22 nt, Human
ccccagcaauuaugaaaauaau

SEQ ID NO: 3520245 - RNA, 19 nt, Human
ccccagcacccgggcucag

SEQ ID NO: 3520246 - RNA, 12 nt, Human
ccccagcacuga

SEQ ID NO: 3520247 - RNA, 15 nt, Human
ccccagcacugagga

SEQ ID NO: 3520248 - RNA, 11 nt, Human
ccccagcacuu

SEQ ID NO: 3520249 - RNA, 11 nt, Human
ccccagcaggu

SEQ ID NO: 3520250 - RNA, 16 nt, Human
ccccagcaucacuccc

SEQ ID NO: 3520251 - RNA, 20 nt, Human
ccccagcaucacuccccaag

SEQ ID NO: 3520252 - RNA, 21 nt, Human
ccccagcauucucaggcacca

SEQ ID NO: 3520253 - RNA, 23 nt, Human
ccccagccagauggacuccagcc

SEQ ID NO: 3520254 - RNA, 22 nt, Human
ccccagccagccuggcugggac

SEQ ID NO: 3520255 - RNA, 17 nt, Human
ccccagccauccagggg

SEQ ID NO: 3520256 - RNA, 19 nt, Human
ccccagccaugccagcugg

SEQ ID NO: 3520257 - RNA, 23 nt, Human
ccccagccaugccagcuggccuu

SEQ ID NO: 3520258 - RNA, 14 nt, Human
ccccagcccaaagg

SEQ ID NO: 3520259 - RNA, 16 nt, Human
ccccagcccagagaca

SEQ ID NO: 3520260 - RNA, 18 nt, Human
ccccagcccagcccagcu

SEQ ID NO: 3520261 - RNA, 13 nt, Human
ccccagcccaggg

SEQ ID NO: 3520262 - RNA, 15 nt, Human
ccccagcccagggcu

SEQ ID NO: 3520263 - RNA, 13 nt, Human
ccccagccccacu

SEQ ID NO: 3520264 - RNA, 15 nt, Human
ccccagccccacuua

SEQ ID NO: 3520265 - RNA, 16 nt, Human
ccccagcccccuaaga

SEQ ID NO: 3520266 - RNA, 19 nt, Human
cagcagcccugccccacac

SEQ ID NO: 3520267 - RNA, 20 nt, Human
cagcagcccugccccacacc

SEQ ID NO: 3520268 - RNA, 21 nt, Human
cagcagccgccuuaagcugau

SEQ ID NO: 3520269 - RNA, 22 nt, Human
cagcagccgccuuaagcugauc

SEQ ID NO: 3520270 - RNA, 13 nt, Human
cagcagccucuga

SEQ ID NO: 3520271 - RNA, 16 nt, Human
cagcagccucugaagu

SEQ ID NO: 3520272 - RNA, 18 nt, Human
cagcagccucugaaguug

SEQ ID NO: 3520273 - RNA, 22 nt, Human
cagcagccuggacccuguggau

SEQ ID NO: 3520274 - RNA, 20 nt, Human
cagcagccuggggcuggccu

SEQ ID NO: 3520275 - RNA, 20 nt, Human
cagcagcgaccaccccugcc

SEQ ID NO: 3520276 - RNA, 15 nt, Human
cagcagcgguggccu

SEQ ID NO: 3520277 - RNA, 12 nt, Human
cagcagcucagg

SEQ ID NO: 3520278 - RNA, 21 nt, Human
cagcagcuuuagaaucccagc

SEQ ID NO: 3520279 - RNA, 15 nt, Human
cagcaggaggccagg

SEQ ID NO: 3520280 - RNA, 12 nt, Human
cagcaggaggga

SEQ ID NO: 3520281 - RNA, 23 nt, Human
cagcaggagggacagucucacca

SEQ ID NO: 3520282 - RNA, 15 nt, Human
cagcaggagggggga

SEQ ID NO: 3520283 - RNA, 13 nt, Human
cagcaggcagccu

SEQ ID NO: 3520284 - RNA, 11 nt, Human
cagcaggccca

SEQ ID NO: 3520285 - RNA, 14 nt, Human
cagcaggcccaugg

SEQ ID NO: 3520286 - RNA, 13 nt, Human
cagcaggccuguu

SEQ ID NO: 3520287 - RNA, 21 nt, Human
cagcaggccuguugcuuuuuu

SEQ ID NO: 3520288 - RNA, 14 nt, Human
cagcaggcucucag

SEQ ID NO: 3520289 - RNA, 15 nt, Human
cagcaggcugccagu

SEQ ID NO: 3520290 - RNA, 20 nt, Human
cagcagggagggcuucugcc

SEQ ID NO: 3520291 - RNA, 21 nt, Human
cagcagggaugcccuggaggu

SEQ ID NO: 3520292 - RNA, 15 nt, Human
cagcagggccucaaa

SEQ ID NO: 3520293 - RNA, 21 nt, Human
cagcagggcuacccugagcug

SEQ ID NO: 3520294 - RNA, 18 nt, Human
cagcagggcugcugugaa

SEQ ID NO: 3520295 - RNA, 18 nt, Human
cagcagguagccugcugg

SEQ ID NO: 3520296 - RNA, 22 nt, Human
cagcagguccuccaucccaaca

SEQ ID NO: 3520297 - RNA, 18 nt, Human
cagcaggugauuggacca

SEQ ID NO: 3520298 - RNA, 20 nt, Human
cagcaggugauuggaccagg

SEQ ID NO: 3520299 - RNA, 15 nt, Human
cagcagucucugccu

SEQ ID NO: 3520300 - RNA, 17 nt, Human
cagcagucucugccuug

SEQ ID NO: 3520301 - RNA, 23 nt, Human
cagcagugaaaacaagugcuggc

SEQ ID NO: 3520302 - RNA, 15 nt, Human
cagcagugagacugg

SEQ ID NO: 3520303 - RNA, 16 nt, Human
cagcagugagacuggg

SEQ ID NO: 3520304 - RNA, 19 nt, Human
cagcagugagucucuucag

SEQ ID NO: 3520305 - RNA, 16 nt, Human
cagcagugcagccggg

SEQ ID NO: 3520306 - RNA, 22 nt, Human
cagcagugugaggccagggcag

SEQ ID NO: 3520307 - RNA, 12 nt, Human
cagcaguguucc

SEQ ID NO: 3520308 - RNA, 13 nt, Human
cagcaguguuccc

SEQ ID NO: 3520309 - RNA, 19 nt, Human
cagcaguguuccccaucug

SEQ ID NO: 3520310 - RNA, 13 nt, Human
cagcaguucuguu

SEQ ID NO: 3520311 - RNA, 14 nt, Human
cagcaguucuguua

SEQ ID NO: 3520312 - RNA, 21 nt, Human
cagcaguugaaaagacuccaa

SEQ ID NO: 3520313 - RNA, 22 nt, Human
cagcaguugcugguaaaaugaa

SEQ ID NO: 3520314 - RNA, 14 nt, Human
cagcaguuguuauu

SEQ ID NO: 3520315 - RNA, 21 nt, Human
cagcaguuuucuuuuaauuuu

SEQ ID NO: 3520316 - RNA, 14 nt, Human
cagcauaaaggccu

SEQ ID NO: 3520317 - RNA, 15 nt, Human
cagcauaaaggccuu

SEQ ID NO: 3520318 - RNA, 16 nt, Human
cagcauaccugcuggu

SEQ ID NO: 3520319 - RNA, 19 nt, Human
cagcauagcaagacacauc

SEQ ID NO: 3520320 - RNA, 20 nt, Human
cagcauaugggggccuggau

SEQ ID NO: 3520321 - RNA, 16 nt, Human
cagcauauucaggaag

SEQ ID NO: 3520322 - RNA, 19 nt, Human
cagcauauucaggaagcuc

SEQ ID NO: 3520323 - RNA, 12 nt, Human
cagcauauuuau

SEQ ID NO: 3520324 - RNA, 14 nt, Human
cagcauauuuauag

SEQ ID NO: 3520325 - RNA, 18 nt, Human
cagcauauuuauagcaau

SEQ ID NO: 3520326 - RNA, 15 nt, Human
cagcaucaccugccu

SEQ ID NO: 3520327 - RNA, 15 nt, Human
cagcaucacucccca

SEQ ID NO: 3520328 - RNA, 20 nt, Human
cagcaucauggagguuugaa

SEQ ID NO: 3520329 - RNA, 22 nt, Human
cagcaucccuugaccaggccug

SEQ ID NO: 3520330 - RNA, 17 nt, Human
cagcauccgcaggugcu

SEQ ID NO: 3520331 - RNA, 23 nt, Human
cagcauccgcaggugcugguccc

SEQ ID NO: 3520332 - RNA, 14 nt, Human
cagcauccuggcac

SEQ ID NO: 3520333 - RNA, 16 nt, Human
cagcauccuggcaccc

SEQ ID NO: 3520334 - RNA, 18 nt, Human
cagcaucgcacucuggca

SEQ ID NO: 3520335 - RNA, 14 nt, Human
cagcaucucagcuc

SEQ ID NO: 3520336 - RNA, 16 nt, Human
cagcaucuccaagcag

SEQ ID NO: 3520337 - RNA, 18 nt, Human
cagcaucuccaagcagcu

SEQ ID NO: 3520338 - RNA, 14 nt, Human
cagcaucuggaaga

SEQ ID NO: 3520339 - RNA, 15 nt, Human
cagcaucugggccuu

SEQ ID NO: 3520340 - RNA, 17 nt, Human
cagcaugaauuuguaau

SEQ ID NO: 3520341 - RNA, 17 nt, Human
cagcaugcaccacgggc

SEQ ID NO: 3520342 - RNA, 20 nt, Human
cagcauggcacucccuccag

SEQ ID NO: 3520343 - RNA, 15 nt, Human
cagcauggcauccaa

SEQ ID NO: 3520344 - RNA, 20 nt, Human
cagcauggucccugccuuag

SEQ ID NO: 3520345 - RNA, 18 nt, Human
cagcauguauaguugcuu

SEQ ID NO: 3520346 - RNA, 19 nt, Human
cagcauguauaguugcuuu

SEQ ID NO: 3520347 - RNA, 18 nt, Human
cagcaugucuauucagcu

SEQ ID NO: 3520348 - RNA, 16 nt, Human
cagcauuagugggaaa

SEQ ID NO: 3520349 - RNA, 14 nt, Human
cagcauuccagccc

SEQ ID NO: 3520350 - RNA, 20 nt, Human
cagcauuccagccccucugg

SEQ ID NO: 3520351 - RNA, 17 nt, Human
cagcauucccagguagg

SEQ ID NO: 3520352 - RNA, 18 nt, Human
cagcauucccagguaggc

SEQ ID NO: 3520353 - RNA, 20 nt, Human
cagcauucccagguaggcca

SEQ ID NO: 3520354 - RNA, 16 nt, Human
cagcauucucacuccu

SEQ ID NO: 3520355 - RNA, 18 nt, Human
cagcauucucaggcacca

SEQ ID NO: 3520356 - RNA, 17 nt, Human
ccccaucucccugccug

SEQ ID NO: 3520357 - RNA, 13 nt, Human
ccccaucugugaa

SEQ ID NO: 3520358 - RNA, 16 nt, Human
ccccaucuucgggacc

SEQ ID NO: 3520359 - RNA, 19 nt, Human
ccccaucuucgggaccagg

SEQ ID NO: 3520360 - RNA, 15 nt, Human
ccccaugaggaagga

SEQ ID NO: 3520361 - RNA, 15 nt, Human
ccccaugauguaagu

SEQ ID NO: 3520362 - RNA, 13 nt, Human
ccccaugcagucu

SEQ ID NO: 3520363 - RNA, 16 nt, Human
ccccaugccacguucc

SEQ ID NO: 3520364 - RNA, 19 nt, Human
ccccaugccuguccagccu

SEQ ID NO: 3520365 - RNA, 21 nt, Human
ccccaugccuguccagccugg

SEQ ID NO: 3520366 - RNA, 23 nt, Human
ccccaugccuguccagccugggc

SEQ ID NO: 3520367 - RNA, 15 nt, Human
ccccaugcuggagcc

SEQ ID NO: 3520368 - RNA, 16 nt, Human
ccccaugcuggagccu

SEQ ID NO: 3520369 - RNA, 18 nt, Human
ccccaugcuggagccugu

SEQ ID NO: 3520370 - RNA, 21 nt, Human
ccccaugcuggagccugugua

SEQ ID NO: 3520371 - RNA, 23 nt, Human
ccccaugcuggagccuguguaac

SEQ ID NO: 3520372 - RNA, 18 nt, Human
ccccaugcuggccuugcc

SEQ ID NO: 3520373 - RNA, 19 nt, Human
ccccauggagcugggcuaa

SEQ ID NO: 3520374 - RNA, 17 nt, Human
ccccauggcccugagcg

SEQ ID NO: 3520375 - RNA, 17 nt, Human
ccccauggcugcacagu

SEQ ID NO: 3520376 - RNA, 19 nt, Human
ccccauggucagcccuagg

SEQ ID NO: 3520377 - RNA, 20 nt, Human
ccccauggugcuaggaagag

SEQ ID NO: 3520378 - RNA, 21 nt, Human
ccccauggugcuaggaagagg

SEQ ID NO: 3520379 - RNA, 18 nt, Human
ccccaugugccugcacca

SEQ ID NO: 3520380 - RNA, 16 nt, Human
ccccauguguccuggu

SEQ ID NO: 3520381 - RNA, 15 nt, Human
ccccauguucugucc

SEQ ID NO: 3520382 - RNA, 23 nt, Human
ccccauuagcuuucaauuccgua

SEQ ID NO: 3520383 - RNA, 14 nt, Human
ccccauucugccug

SEQ ID NO: 3520384 - RNA, 21 nt, Human
ccccauucugccugcccaggc

SEQ ID NO: 3520385 - RNA, 23 nt, Human
ccccauucuuccuaguuuucucc

SEQ ID NO: 3520386 - RNA, 18 nt, Human
ccccauuucccaucugca

SEQ ID NO: 3520387 - RNA, 19 nt, Human
ccccauuucccaucugcac

SEQ ID NO: 3520388 - RNA, 15 nt, Human
ccccauuuucugugg

SEQ ID NO: 3520389 - RNA, 16 nt, Human
cccccaacacugugcc

SEQ ID NO: 3520390 - RNA, 23 nt, Human
cccccaacacugugcccuggugg

SEQ ID NO: 3520391 - RNA, 14 nt, Human
cccccaaccccuga

SEQ ID NO: 3520392 - RNA, 16 nt, Human
cccccaaccccugagg

SEQ ID NO: 3520393 - RNA, 14 nt, Human
cccccaagccugca

SEQ ID NO: 3520394 - RNA, 23 nt, Human
cccccaaggggcagucuggaggg

SEQ ID NO: 3520395 - RNA, 11 nt, Human
cccccacacac

SEQ ID NO: 3520396 - RNA, 16 nt, Human
cccccacaccuggccc

SEQ ID NO: 3520397 - RNA, 17 nt, Human
cccccacacuucccugg

SEQ ID NO: 3520398 - RNA, 20 nt, Human
cccccacacuucccuggcgg

SEQ ID NO: 3520399 - RNA, 22 nt, Human
cccccaccacggccacuggcca

SEQ ID NO: 3520400 - RNA, 13 nt, Human
cccccacccaagg

SEQ ID NO: 3520401 - RNA, 17 nt, Human
cccccacccccagcuca

SEQ ID NO: 3520402 - RNA, 20 nt, Human
cccccaccccggggacccug

SEQ ID NO: 3520403 - RNA, 11 nt, Human
cccccacccug

SEQ ID NO: 3520404 - RNA, 14 nt, Human
cccccacccuguuc

SEQ ID NO: 3520405 - RNA, 16 nt, Human
cccccaccgguccagc

SEQ ID NO: 3520406 - RNA, 19 nt, Human
cccccaccgguccagcugg

SEQ ID NO: 3520407 - RNA, 21 nt, Human
cccccaccgguccagcuggcc

SEQ ID NO: 3520408 - RNA, 15 nt, Human
cccccaccuggcuca

SEQ ID NO: 3520409 - RNA, 19 nt, Human
cccccacugaaucccugua

SEQ ID NO: 3520410 - RNA, 14 nt, Human
cccccacugcaggc

SEQ ID NO: 3520411 - RNA, 11 nt, Human
cccccacuggu

SEQ ID NO: 3520412 - RNA, 15 nt, Human
cccccacuggugaca

SEQ ID NO: 3520413 - RNA, 15 nt, Human
cccccagaaccuguc

SEQ ID NO: 3520414 - RNA, 16 nt, Human
cccccagagccacagu

SEQ ID NO: 3520415 - RNA, 13 nt, Human
cccccagcacuga

SEQ ID NO: 3520416 - RNA, 19 nt, Human
cccccagccaugccagcug

SEQ ID NO: 3520417 - RNA, 13 nt, Human
cccccagcccagg

SEQ ID NO: 3520418 - RNA, 24 nt, Human
cccccagccccgacuccagccagc

SEQ ID NO: 3520419 - RNA, 13 nt, Human
cccccagccccgg

SEQ ID NO: 3520420 - RNA, 13 nt, Human
cccccagcccugu

SEQ ID NO: 3520421 - RNA, 13 nt, Human
cccccagccuaug

SEQ ID NO: 3520422 - RNA, 12 nt, Human
cccccagccugc

SEQ ID NO: 3520423 - RNA, 13 nt, Human
cccccagccuggg

SEQ ID NO: 3520424 - RNA, 16 nt, Human
cccccagccugggccu

SEQ ID NO: 3520425 - RNA, 22 nt, Human
cagccacuucggccaggucaca

SEQ ID NO: 3520426 - RNA, 17 nt, Human
cagccagaaccccgagc

SEQ ID NO: 3520427 - RNA, 20 nt, Human
cagccagaacguggcucugc

SEQ ID NO: 3520428 - RNA, 21 nt, Human
cagccagaacguggcucugcu

SEQ ID NO: 3520429 - RNA, 23 nt, Human
cagccagaacguggcucugcugg

SEQ ID NO: 3520430 - RNA, 23 nt, Human
cagccagaagccacccaaagcag

SEQ ID NO: 3520431 - RNA, 20 nt, Human
cagccagaccuauuccuccu

SEQ ID NO: 3520432 - RNA, 18 nt, Human
cagccagacuggcacagu

SEQ ID NO: 3520433 - RNA, 21 nt, Human
cagccagaguuccugcggagu

SEQ ID NO: 3520434 - RNA, 22 nt, Human
cagccagcaaugauguccagaa

SEQ ID NO: 3520435 - RNA, 12 nt, Human
cagccagcaccu

SEQ ID NO: 3520436 - RNA, 13 nt, Human
cagccagcaccug

SEQ ID NO: 3520437 - RNA, 13 nt, Human
cagccagcagcag

SEQ ID NO: 3520438 - RNA, 14 nt, Human
cagccagcagccag

SEQ ID NO: 3520439 - RNA, 15 nt, Human
cagccagcagccagc

SEQ ID NO: 3520440 - RNA, 19 nt, Human
cagccagcagccagcucuc

SEQ ID NO: 3520441 - RNA, 13 nt, Human
cagccagcaucug

SEQ ID NO: 3520442 - RNA, 14 nt, Human
cagccagcaucugg

SEQ ID NO: 3520443 - RNA, 15 nt, Human
cagccagcaucuggg

SEQ ID NO: 3520444 - RNA, 13 nt, Human
cagccagccacuc

SEQ ID NO: 3520445 - RNA, 14 nt, Human
cagccagccacucu

SEQ ID NO: 3520446 - RNA, 14 nt, Human
cagccagcccagcc

SEQ ID NO: 3520447 - RNA, 16 nt, Human
cagccagcccagccca

SEQ ID NO: 3520448 - RNA, 13 nt, Human
cagccagcccugc

SEQ ID NO: 3520449 - RNA, 14 nt, Human
cagccagcccugcc

SEQ ID NO: 3520450 - RNA, 15 nt, Human
cagccagcccugccu

SEQ ID NO: 3520451 - RNA, 13 nt, Human
cagccagccuggc

SEQ ID NO: 3520452 - RNA, 16 nt, Human
cagccagcgccucccu

SEQ ID NO: 3520453 - RNA, 19 nt, Human
cagccagcgccucccucca

SEQ ID NO: 3520454 - RNA, 20 nt, Human
cagccagcgccucccuccac

SEQ ID NO: 3520455 - RNA, 22 nt, Human
cagccagcgccucccuccaccc

SEQ ID NO: 3520456 - RNA, 17 nt, Human
cagccagcucucagcca

SEQ ID NO: 3520457 - RNA, 11 nt, Human
cagccaggaca

SEQ ID NO: 3520458 - RNA, 12 nt, Human
cagccaggacac

SEQ ID NO: 3520459 - RNA, 20 nt, Human
cagccaggacaccgggcagg

SEQ ID NO: 3520460 - RNA, 22 nt, Human
cagccaggacagucagcucucu

SEQ ID NO: 3520461 - RNA, 15 nt, Human
cagccaggagagcuu

SEQ ID NO: 3520462 - RNA, 12 nt, Human
cagccaggagcu

SEQ ID NO: 3520463 - RNA, 12 nt, Human
cagccaggccac

SEQ ID NO: 3520464 - RNA, 15 nt, Human
cagccaggcccagcc

SEQ ID NO: 3520465 - RNA, 15 nt, Human
cagccaggcgggcuc

SEQ ID NO: 3520466 - RNA, 19 nt, Human
cagccaggcucaggccaug

SEQ ID NO: 3520467 - RNA, 14 nt, Human
cagccaggcucugu

SEQ ID NO: 3520468 - RNA, 22 nt, Human
cagccagggaaagacuggcaag

SEQ ID NO: 3520469 - RNA, 23 nt, Human
cagccagggaaagacuggcaaga

SEQ ID NO: 3520470 - RNA, 20 nt, Human
cagccagggagagcccagga

SEQ ID NO: 3520471 - RNA, 21 nt, Human
cagccagggagagcccaggag

SEQ ID NO: 3520472 - RNA, 11 nt, Human
cagccagggcc

SEQ ID NO: 3520473 - RNA, 12 nt, Human
cagccagggcca

SEQ ID NO: 3520474 - RNA, 15 nt, Human
cagccagggccaggg

SEQ ID NO: 3520475 - RNA, 22 nt, Human
cagccagggccugcgagggcag

SEQ ID NO: 3520476 - RNA, 13 nt, Human
cagccagggcugc

SEQ ID NO: 3520477 - RNA, 14 nt, Human
cagccaggugccuu

SEQ ID NO: 3520478 - RNA, 13 nt, Human
cagccaguaaaug

SEQ ID NO: 3520479 - RNA, 19 nt, Human
cagccagugaccugaggaa

SEQ ID NO: 3520480 - RNA, 23 nt, Human
cagccauacuuaucucucugugc

SEQ ID NO: 3520481 - RNA, 14 nt, Human
cagccaucaacuaa

SEQ ID NO: 3520482 - RNA, 18 nt, Human
cagccaucaagagacuga

SEQ ID NO: 3520483 - RNA, 23 nt, Human
cagccaucucaugaggggagagg

SEQ ID NO: 3520484 - RNA, 15 nt, Human
cagccaucugcccag

SEQ ID NO: 3520485 - RNA, 18 nt, Human
cagccaucugcccagggg

SEQ ID NO: 3520486 - RNA, 16 nt, Human
cagccaugccagcugg

SEQ ID NO: 3520487 - RNA, 19 nt, Human
cagccauguacagacagag

SEQ ID NO: 3520488 - RNA, 17 nt, Human
cagccaugucugcauuu

SEQ ID NO: 3520489 - RNA, 20 nt, Human
cagccauuacccagcuaaau

SEQ ID NO: 3520490 - RNA, 23 nt, Human
cagccauuacccagcuaaauaau

SEQ ID NO: 3520491 - RNA, 21 nt, Human
cagccauugcacccagcccag

SEQ ID NO: 3520492 - RNA, 22 nt, Human
cagccauugcacccagcccaga

SEQ ID NO: 3520493 - RNA, 23 nt, Human
cagcccaaaccaccagaagccca

SEQ ID NO: 3520494 - RNA, 20 nt, Human
cagcccaaaggggacaggcc

SEQ ID NO: 3520495 - RNA, 11 nt, Human
cagcccacccc

SEQ ID NO: 3520496 - RNA, 14 nt, Human
cagcccaccccccu

SEQ ID NO: 3520497 - RNA, 16 nt, Human
cagcccaccccccuca

SEQ ID NO: 3520498 - RNA, 17 nt, Human
cagcccaccccccucau

SEQ ID NO: 3520499 - RNA, 19 nt, Human
cagcccaccccccucauuu

SEQ ID NO: 3520500 - RNA, 15 nt, Human
cagcccaccccucaa

SEQ ID NO: 3520501 - RNA, 13 nt, Human
cagcccacccugc

SEQ ID NO: 3520502 - RNA, 24 nt, Human
cagccucuccacucaugugacucu

SEQ ID NO: 3520503 - RNA, 19 nt, Human
cagccucuccccugauuac

SEQ ID NO: 3520504 - RNA, 21 nt, Human
cagccucucuuccuaucccau

SEQ ID NO: 3520505 - RNA, 20 nt, Human
cagccucugaaguuggacag

SEQ ID NO: 3520506 - RNA, 14 nt, Human
cagccucugacccc

SEQ ID NO: 3520507 - RNA, 16 nt, Human
cagccucugaccccuc

SEQ ID NO: 3520508 - RNA, 18 nt, Human
cagccucugaccccuccu

SEQ ID NO: 3520509 - RNA, 19 nt, Human
cagccucugaccccuccuc

SEQ ID NO: 3520510 - RNA, 21 nt, Human
cagccucugaccccuccucac

SEQ ID NO: 3520511 - RNA, 22 nt, Human
cagccucugaccccuccucacu

SEQ ID NO: 3520512 - RNA, 19 nt, Human
cagccucugagccccuggg

SEQ ID NO: 3520513 - RNA, 13 nt, Human
cagccucugggcc

SEQ ID NO: 3520514 - RNA, 19 nt, Human
cagccucuuaaagcugccu

SEQ ID NO: 3520515 - RNA, 20 nt, Human
cagccucuuaaagcugccug

SEQ ID NO: 3520516 - RNA, 15 nt, Human
cagccucuuucccuu

SEQ ID NO: 3520517 - RNA, 18 nt, Human
cagccucuuucccuucca

SEQ ID NO: 3520518 - RNA, 15 nt, Human
cagccugaccuuccu

SEQ ID NO: 3520519 - RNA, 22 nt, Human
cagccugaccuuccuuccuguu

SEQ ID NO: 3520520 - RNA, 16 nt, Human
cagccugagcaacucu

SEQ ID NO: 3520521 - RNA, 19 nt, Human
cagccugaggcugagacug

SEQ ID NO: 3520522 - RNA, 14 nt, Human
cagccugagucucc

SEQ ID NO: 3520523 - RNA, 17 nt, Human
cagccugagucuccugu

SEQ ID NO: 3520524 - RNA, 18 nt, Human
cagccugagucuccugug

SEQ ID NO: 3520525 - RNA, 19 nt, Human
cagccugagucuccugugc

SEQ ID NO: 3520526 - RNA, 16 nt, Human
cagccugccacucagg

SEQ ID NO: 3520527 - RNA, 14 nt, Human
cagccugccccgga

SEQ ID NO: 3520528 - RNA, 21 nt, Human
cagccugccuugcccacuccu

SEQ ID NO: 3520529 - RNA, 17 nt, Human
cagccugcgccugcugc

SEQ ID NO: 3520530 - RNA, 21 nt, Human
cagccugcgccugcugcaugc

SEQ ID NO: 3520531 - RNA, 18 nt, Human
cagccugcuagcuagcuc

SEQ ID NO: 3520532 - RNA, 12 nt, Human
cagccugcucca

SEQ ID NO: 3520533 - RNA, 16 nt, Human
cagccugcuccagcug

SEQ ID NO: 3520534 - RNA, 17 nt, Human
cagccugcuccagcugu

SEQ ID NO: 3520535 - RNA, 19 nt, Human
cagccugcuccagcuguuc

SEQ ID NO: 3520536 - RNA, 21 nt, Human
cagccugcucuagugggacag

SEQ ID NO: 3520537 - RNA, 14 nt, Human
cagccugcugccca

SEQ ID NO: 3520538 - RNA, 15 nt, Human
cagccugcugcccag

SEQ ID NO: 3520539 - RNA, 18 nt, Human
cagccuggacccccagcu

SEQ ID NO: 3520540 - RNA, 15 nt, Human
cagccuggacccugu

SEQ ID NO: 3520541 - RNA, 19 nt, Human
cagccuggacccuguggau

SEQ ID NO: 3520542 - RNA, 17 nt, Human
cagccuggagacccacc

SEQ ID NO: 3520543 - RNA, 17 nt, Human
cagccuggaucuccuca

SEQ ID NO: 3520544 - RNA, 21 nt, Human
cagccuggaugccauccaagu

SEQ ID NO: 3520545 - RNA, 13 nt, Human
cagccuggcacag

SEQ ID NO: 3520546 - RNA, 17 nt, Human
cagccuggccacgcagc

SEQ ID NO: 3520547 - RNA, 18 nt, Human
cagccuggccacgcagcc

SEQ ID NO: 3520548 - RNA, 22 nt, Human
cagccuggccacgcagccagga

SEQ ID NO: 3520549 - RNA, 14 nt, Human
cagccuggccagac

SEQ ID NO: 3520550 - RNA, 20 nt, Human
cagccuggccagacacaggc

SEQ ID NO: 3520551 - RNA, 16 nt, Human
cagccuggcccagcuc

SEQ ID NO: 3520552 - RNA, 17 nt, Human
cagccuggcccagcucc

SEQ ID NO: 3520553 - RNA, 18 nt, Human
cagccuggcccagcuccc

SEQ ID NO: 3520554 - RNA, 12 nt, Human
cagccuggccuc

SEQ ID NO: 3520555 - RNA, 21 nt, Human
cagccuggcucccacaggcag

SEQ ID NO: 3520556 - RNA, 22 nt, Human
cagccuggcucccacaggcagc

SEQ ID NO: 3520557 - RNA, 19 nt, Human
cagccuggcucccaggaca

SEQ ID NO: 3520558 - RNA, 18 nt, Human
cagccuggcuccccuggg

SEQ ID NO: 3520559 - RNA, 23 nt, Human
cagccuggcuguggccuaaccug

SEQ ID NO: 3520560 - RNA, 17 nt, Human
cagccugggaggcacag

SEQ ID NO: 3520561 - RNA, 20 nt, Human
cagccugggaggcacagcaa

SEQ ID NO: 3520562 - RNA, 20 nt, Human
cagccugggcaacagagcaa

SEQ ID NO: 3520563 - RNA, 19 nt, Human
cagccugggcaaugugaua

SEQ ID NO: 3520564 - RNA, 17 nt, Human
cagccugggcagccagg

SEQ ID NO: 3520565 - RNA, 21 nt, Human
cagccugggcagccaggcugc

SEQ ID NO: 3520566 - RNA, 13 nt, Human
cagccugggccca

SEQ ID NO: 3520567 - RNA, 17 nt, Human
cagccugggccuaugga

SEQ ID NO: 3520568 - RNA, 16 nt, Human
cagccugggcgcuggu

SEQ ID NO: 3520569 - RNA, 19 nt, Human
cagccugggcgcugguccu

SEQ ID NO: 3520570 - RNA, 13 nt, Human
cagccuggggccu

SEQ ID NO: 3520571 - RNA, 17 nt, Human
cagccuggggccuggca

SEQ ID NO: 3520572 - RNA, 18 nt, Human
cagccuggggccuggcag

SEQ ID NO: 3520573 - RNA, 17 nt, Human
cagccuggggcuggccu

SEQ ID NO: 3520574 - RNA, 21 nt, Human
cagccuggggcuggccuccca

SEQ ID NO: 3520575 - RNA, 20 nt, Human
cagccugggugacagaguga

SEQ ID NO: 3520576 - RNA, 19 nt, Human
cagccuggucgccuuccac

SEQ ID NO: 3520577 - RNA, 16 nt, Human
cagccuggugggccuc

SEQ ID NO: 3520578 - RNA, 17 nt, Human
cagccuguaucuugggg

SEQ ID NO: 3520579 - RNA, 16 nt, Human
cagccugucagaucca

SEQ ID NO: 3520580 - RNA, 17 nt, Human
cagccugucagauccag

SEQ ID NO: 3520581 - RNA, 21 nt, Human
cagccugucccauggacacuc

SEQ ID NO: 3520582 - RNA, 16 nt, Human
cagccuguuggacccg

SEQ ID NO: 3520583 - RNA, 21 nt, Human
cagccuucccccucccagggc

SEQ ID NO: 3520584 - RNA, 14 nt, Human
cagccuuccucugc

SEQ ID NO: 3520585 - RNA, 23 nt, Human
cagccuuccucugcagcugaccu

SEQ ID NO: 3520586 - RNA, 17 nt, Human
cagccuucuuuuucugg

SEQ ID NO: 3520587 - RNA, 19 nt, Human
cagccuucuuuuucuggac

SEQ ID NO: 3520588 - RNA, 19 nt, Human
cagccuugaacucugggcu

SEQ ID NO: 3520589 - RNA, 22 nt, Human
cagccuugaccauucuccaccu

SEQ ID NO: 3520590 - RNA, 15 nt, Human
cagccuugagcccug

SEQ ID NO: 3520591 - RNA, 14 nt, Human
cagccuugccagag

SEQ ID NO: 3520592 - RNA, 21 nt, Human
cagccuuggauaaugcuguug

SEQ ID NO: 3520593 - RNA, 17 nt, Human
cagccuuggcaucuaga

SEQ ID NO: 3520594 - RNA, 20 nt, Human
cagccuuucucccaggccag

SEQ ID NO: 3520595 - RNA, 23 nt, Human
cagccuuucucccaggccaggcu

SEQ ID NO: 3520596 - RNA, 20 nt, Human
cagccuuucuggcagguccu

SEQ ID NO: 3520597 - RNA, 23 nt, Human
cagccuuugaucagguggggagu

SEQ ID NO: 3520598 - RNA, 19 nt, Human
cagcgacauagcccauccc

SEQ ID NO: 3520599 - RNA, 20 nt, Human
cagcgacauagcccaucccu

SEQ ID NO: 3520600 - RNA, 18 nt, Human
cagcgaccgcccccuccu

SEQ ID NO: 3520601 - RNA, 12 nt, Human
cagcgacuggca

SEQ ID NO: 3520602 - RNA, 21 nt, Human
cagcgagauaccccaccuccc

SEQ ID NO: 3520603 - RNA, 13 nt, Human
cagcgagcccugg

SEQ ID NO: 3520604 - RNA, 17 nt, Human
cagcgagcccugguggc

SEQ ID NO: 3520605 - RNA, 13 nt, Human
cagcgagccugcu

SEQ ID NO: 3520606 - RNA, 16 nt, Human
cagcgaggaggcucca

SEQ ID NO: 3520607 - RNA, 15 nt, Human
cagcgagggcagcug

SEQ ID NO: 3520608 - RNA, 16 nt, Human
cagcgagggcagcugc

SEQ ID NO: 3520609 - RNA, 17 nt, Human
cagcgagggcagcugcu

SEQ ID NO: 3520610 - RNA, 20 nt, Human
cagcgaucucuccacugugc

SEQ ID NO: 3520611 - RNA, 22 nt, Human
cagcgauucccucucccaggcc

SEQ ID NO: 3520612 - RNA, 15 nt, Human
cagcgcacagcugcu

SEQ ID NO: 3520613 - RNA, 19 nt, Human
cagcgccaagcaaccuggg

SEQ ID NO: 3520614 - RNA, 23 nt, Human
cagcgccaagcaaccugggucca

SEQ ID NO: 3520615 - RNA, 23 nt, Human
cagcgccaagugcgugccgugug

SEQ ID NO: 3520616 - RNA, 20 nt, Human
cagcgccaggcugaccacag

SEQ ID NO: 3520617 - RNA, 14 nt, Human
cagcgcccgcuggg

SEQ ID NO: 3520618 - RNA, 18 nt, Human
cagcgcccuuccucucca

SEQ ID NO: 3520619 - RNA, 14 nt, Human
cagcgccucccucc

SEQ ID NO: 3520620 - RNA, 16 nt, Human
cagcgccucccuccac

SEQ ID NO: 3520621 - RNA, 22 nt, Human
cagcgccucccuccaccccagg

SEQ ID NO: 3520622 - RNA, 23 nt, Human
cagcgcuccugcuaacggugcuc

SEQ ID NO: 3520623 - RNA, 13 nt, Human
cagcgcucugccu

SEQ ID NO: 3520624 - RNA, 18 nt, Human
cagcgcucuggugcugca

SEQ ID NO: 3520625 - RNA, 20 nt, Human
cagcgcuggccgggaccccg

SEQ ID NO: 3520626 - RNA, 22 nt, Human
cagcgcuggccgggaccccgag

SEQ ID NO: 3520627 - RNA, 16 nt, Human
cagcggccccucccac

SEQ ID NO: 3520628 - RNA, 22 nt, Human
cccaggggucucccuggcuccc

SEQ ID NO: 3520629 - RNA, 23 nt, Human
cccaggggucucccuggcucccu

SEQ ID NO: 3520630 - RNA, 18 nt, Human
cccaggggugcccccucc

SEQ ID NO: 3520631 - RNA, 19 nt, Human
cccaggguagcccgccugc

SEQ ID NO: 3520632 - RNA, 18 nt, Human
cccaggguccugggagga

SEQ ID NO: 3520633 - RNA, 15 nt, Human
cccaggguggccaca

SEQ ID NO: 3520634 - RNA, 19 nt, Human
cccaggguggccacaccuc

SEQ ID NO: 3520635 - RNA, 19 nt, Human
cccaggguuaauagggccu

SEQ ID NO: 3520636 - RNA, 18 nt, Human
cccaggguucaguccuca

SEQ ID NO: 3520637 - RNA, 17 nt, Human
cccagguaagcaggagg

SEQ ID NO: 3520638 - RNA, 14 nt, Human
cccagguaccagcu

SEQ ID NO: 3520639 - RNA, 16 nt, Human
cccagguaccagcugc

SEQ ID NO: 3520640 - RNA, 17 nt, Human
cccagguaccagcugcg

SEQ ID NO: 3520641 - RNA, 16 nt, Human
cccagguagcugggau

SEQ ID NO: 3520642 - RNA, 20 nt, Human
cccagguagcugggauuaca

SEQ ID NO: 3520643 - RNA, 21 nt, Human
cccagguaggggccccucuca

SEQ ID NO: 3520644 - RNA, 22 nt, Human
cccagguaggggccccucucag

SEQ ID NO: 3520645 - RNA, 15 nt, Human
cagcggccccugcau

SEQ ID NO: 3520646 - RNA, 16 nt, Human
cagcggccccugcauc

SEQ ID NO: 3520647 - RNA, 20 nt, Human
cagcggccccugcauccccu

SEQ ID NO: 3520648 - RNA, 14 nt, Human
cagcggcccuguca

SEQ ID NO: 3520649 - RNA, 14 nt, Human
cagcggcuggugca

SEQ ID NO: 3520650 - RNA, 18 nt, Human
cagcggcuggugcagggc

SEQ ID NO: 3520651 - RNA, 21 nt, Human
cagcggcuugccugccugcuc

SEQ ID NO: 3520652 - RNA, 20 nt, Human
cagcgggcagguucugccug

SEQ ID NO: 3520653 - RNA, 17 nt, Human
cagcggggacagcuccu

SEQ ID NO: 3520654 - RNA, 21 nt, Human
cagcggggacagcuccuucug

SEQ ID NO: 3520655 - RNA, 18 nt, Human
cagcggggccccagggcu

SEQ ID NO: 3520656 - RNA, 23 nt, Human
cagcggggccuggcgggaugggc

SEQ ID NO: 3520657 - RNA, 18 nt, Human
cagcgggggccagggaag

SEQ ID NO: 3520658 - RNA, 14 nt, Human
cagcgguggccucu

SEQ ID NO: 3520659 - RNA, 14 nt, Human
cagcguaaaauggu

SEQ ID NO: 3520660 - RNA, 16 nt, Human
cagcguaaaaugguga

SEQ ID NO: 3520661 - RNA, 17 nt, Human
cagcguaaaauggugaa

SEQ ID NO: 3520662 - RNA, 17 nt, Human
cagcguagccucuccgg

SEQ ID NO: 3520663 - RNA, 23 nt, Human
cagcguauauauaagaaagacau

SEQ ID NO: 3520664 - RNA, 14 nt, Human
cagcgucccagucu

SEQ ID NO: 3520665 - RNA, 21 nt, Human
cagcgucccagucucuggcag

SEQ ID NO: 3520666 - RNA, 18 nt, Human
cagcgucccuagcaguga

SEQ ID NO: 3520667 - RNA, 18 nt, Human
cagcgucggucugugccc

SEQ ID NO: 3520668 - RNA, 15 nt, Human
cagcgugcuuuaaaa

SEQ ID NO: 3520669 - RNA, 13 nt, Human
cagcguugcaugu

SEQ ID NO: 3520670 - RNA, 17 nt, Human
cagcguugcaugucgug

SEQ ID NO: 3520671 - RNA, 14 nt, Human
cagcguuucuauga

SEQ ID NO: 3520672 - RNA, 20 nt, Human
cagcguuugaggggcuggcc

SEQ ID NO: 3520673 - RNA, 15 nt, Human
cagcguuuugcaagg

SEQ ID NO: 3520674 - RNA, 22 nt, Human
cagcuaaagcccaaccuccuga

SEQ ID NO: 3520675 - RNA, 17 nt, Human
cagcuaacaauugugaa

SEQ ID NO: 3520676 - RNA, 15 nt, Human
cagcuaacacacagc

SEQ ID NO: 3520677 - RNA, 20 nt, Human
cagcuaacacacagcuccca

SEQ ID NO: 3520678 - RNA, 16 nt, Human
cagcuaagaaccugga

SEQ ID NO: 3520679 - RNA, 15 nt, Human
cagcuaagcuaggaa

SEQ ID NO: 3520680 - RNA, 18 nt, Human
cagcuaagcuaggaauga

SEQ ID NO: 3520681 - RNA, 20 nt, Human
cagcuaagcucacguccuga

SEQ ID NO: 3520682 - RNA, 19 nt, Human
cagcuaaggacauuuccca

SEQ ID NO: 3520683 - RNA, 19 nt, Human
cagcuaagggguggggcug

SEQ ID NO: 3520684 - RNA, 12 nt, Human
cagcuaaucugu

SEQ ID NO: 3520685 - RNA, 16 nt, Human
cagcuaaugggacacu

SEQ ID NO: 3520686 - RNA, 13 nt, Human
cagcuacaacagc

SEQ ID NO: 3520687 - RNA, 21 nt, Human
cagcuacccuuuuucuccagc

SEQ ID NO: 3520688 - RNA, 17 nt, Human
cagcuacuaaugauguu

SEQ ID NO: 3520689 - RNA, 20 nt, Human
cagcuacucaagaggcugag

SEQ ID NO: 3520690 - RNA, 20 nt, Human
cagcuacucagaagccugag

SEQ ID NO: 3520691 - RNA, 22 nt, Human
cagcuacucagaagccugaggc

SEQ ID NO: 3520692 - RNA, 23 nt, Human
cagcuacucagaagccugaggcu

SEQ ID NO: 3520693 - RNA, 18 nt, Human
cagcuacucaggaggcug

SEQ ID NO: 3520694 - RNA, 23 nt, Human
cagcuacucgggaggcugaggca

SEQ ID NO: 3520695 - RNA, 13 nt, Human
cagcuacucuccc

SEQ ID NO: 3520696 - RNA, 17 nt, Human
cagcuacuuaagagaaa

SEQ ID NO: 3520697 - RNA, 18 nt, Human
cagcuagaaaacauuuuu

SEQ ID NO: 3520698 - RNA, 18 nt, Human
cagcuaggaacaaaucuu

SEQ ID NO: 3520699 - RNA, 20 nt, Human
cagcuaggaacaaaucuucc

SEQ ID NO: 3520700 - RNA, 21 nt, Human
cagcuaggaagagcaggacuc

SEQ ID NO: 3520701 - RNA, 20 nt, Human
cagcuaguccuagugaaccu

SEQ ID NO: 3520702 - RNA, 13 nt, Human
cagcuagugaccc

SEQ ID NO: 3520703 - RNA, 18 nt, Human
cagcuagugacccacaug

SEQ ID NO: 3520704 - RNA, 18 nt, Human
cagcuauaacaguaggga

SEQ ID NO: 3520705 - RNA, 20 nt, Human
cagcuauaacaguagggaug

SEQ ID NO: 3520706 - RNA, 21 nt, Human
cagcuauaccugugccucggc

SEQ ID NO: 3520707 - RNA, 22 nt, Human
cagcuauaccugugccucggcu

SEQ ID NO: 3520708 - RNA, 23 nt, Human
cagcuauaccugugccucggcuu

SEQ ID NO: 3520709 - RNA, 23 nt, Human
cagcuaucuggucaaccuccugg

SEQ ID NO: 3520710 - RNA, 14 nt, Human
cagcuaugagagga

SEQ ID NO: 3520711 - RNA, 13 nt, Human
cagcuaugggagc

SEQ ID NO: 3520712 - RNA, 21 nt, Human
cagcuauguuauauugaaaaa

SEQ ID NO: 3520713 - RNA, 13 nt, Human
cagcuauuuuuau

SEQ ID NO: 3520714 - RNA, 16 nt, Human
cagcucaauggacugg

SEQ ID NO: 3520715 - RNA, 20 nt, Human
cagcucaauggacuggaagg

SEQ ID NO: 3520716 - RNA, 20 nt, Human
cagcucacagugcugugugc

SEQ ID NO: 3520717 - RNA, 14 nt, Human
cagcucaccagccc

SEQ ID NO: 3520718 - RNA, 19 nt, Human
cagcucaccagccccagug

SEQ ID NO: 3520719 - RNA, 21 nt, Human
cagcucaccagccccagugcc

SEQ ID NO: 3520720 - RNA, 22 nt, Human
cagcucaccagccccagugccc

SEQ ID NO: 3520721 - RNA, 19 nt, Human
cagcucacgcuucacagug

SEQ ID NO: 3520722 - RNA, 15 nt, Human
cagcucacugcaacc

SEQ ID NO: 3520723 - RNA, 14 nt, Human
cagcucagaaccca

SEQ ID NO: 3520724 - RNA, 16 nt, Human
cagcucagaacccagg

SEQ ID NO: 3520725 - RNA, 20 nt, Human
cagcucagaacccagggcuc

SEQ ID NO: 3520726 - RNA, 20 nt, Human
cagcucagagagggugggag

SEQ ID NO: 3520727 - RNA, 14 nt, Human
cagcucagcacugc

SEQ ID NO: 3520728 - RNA, 14 nt, Human
cagcucagcuuccc

SEQ ID NO: 3520729 - RNA, 12 nt, Human
cagcucaggaca

SEQ ID NO: 3520730 - RNA, 18 nt, Human
cagcucaggacagaugcc

SEQ ID NO: 3520731 - RNA, 12 nt, Human
cagcucaggcac

SEQ ID NO: 3520732 - RNA, 21 nt, Human
cagcucaggcacacuucuucu

SEQ ID NO: 3520733 - RNA, 23 nt, Human
cagcucaggcuguuuuugggugc

SEQ ID NO: 3520734 - RNA, 17 nt, Human
cagcucaggggcagcuc

SEQ ID NO: 3520735 - RNA, 20 nt, Human
cagcucauagaguccccccu

SEQ ID NO: 3520736 - RNA, 15 nt, Human
cagcucaucucuguc

SEQ ID NO: 3520737 - RNA, 14 nt, Human
cagcucauuaaacu

SEQ ID NO: 3520738 - RNA, 16 nt, Human
cagcucauucauuuua

SEQ ID NO: 3520739 - RNA, 20 nt, Human
cagcucauucauuuuauauu

SEQ ID NO: 3520740 - RNA, 20 nt, Human
cagcuccaagaccuguuggu

SEQ ID NO: 3520741 - RNA, 15 nt, Human
cagcuccagcucacc

SEQ ID NO: 3520742 - RNA, 16 nt, Human
cagcuccagcucacca

SEQ ID NO: 3520743 - RNA, 20 nt, Human
cagcuccagcucaccagccc

SEQ ID NO: 3520744 - RNA, 22 nt, Human
cagcuccagcucaccagcccca

SEQ ID NO: 3520745 - RNA, 14 nt, Human
cagcuccagcugcu

SEQ ID NO: 3520746 - RNA, 20 nt, Human
cagcuccagggaauccaagc

SEQ ID NO: 3520747 - RNA, 14 nt, Human
cagcuccagggcca

SEQ ID NO: 3520748 - RNA, 14 nt, Human
cagcuccauuuucu

SEQ ID NO: 3520749 - RNA, 21 nt, Human
cagcucccacaagccucugcc

SEQ ID NO: 3520750 - RNA, 14 nt, Human
cagcucccacccca

SEQ ID NO: 3520751 - RNA, 22 nt, Human
cagcucccaccccacccccuuc

SEQ ID NO: 3520752 - RNA, 15 nt, Human
cagcucccaccuccc

SEQ ID NO: 3520753 - RNA, 18 nt, Human
cagcucccaggaccacag

SEQ ID NO: 3520754 - RNA, 20 nt, Human
cagcucccauuucuacucuu

SEQ ID NO: 3520755 - RNA, 13 nt, Human
cagcuccccagag

SEQ ID NO: 3520756 - RNA, 24 nt, Human
cagcuccccagaguccucuaugaa

SEQ ID NO: 3520757 - RNA, 14 nt, Human
cagcucccccagcu

SEQ ID NO: 3520758 - RNA, 15 nt, Human
cagcucccccagcuc

SEQ ID NO: 3520759 - RNA, 16 nt, Human
cagcucccccagcucc

SEQ ID NO: 3520760 - RNA, 22 nt, Human
cagcucccccgacggugggcau

SEQ ID NO: 3520761 - RNA, 22 nt, Human
cagcucccccuguccccucagc

SEQ ID NO: 3520762 - RNA, 18 nt, Human
cagcuccccucggagaag

SEQ ID NO: 3520763 - RNA, 14 nt, Human
cagcucccucugcc

SEQ ID NO: 3520764 - RNA, 15 nt, Human
cagcucccucugccu

SEQ ID NO: 3520765 - RNA, 14 nt, Human
cagcucccugccaa

SEQ ID NO: 3520766 - RNA, 12 nt, Human
cagcucccuggc

SEQ ID NO: 3520767 - RNA, 14 nt, Human
cagcucccuggcuu

SEQ ID NO: 3520768 - RNA, 20 nt, Human
cagcucccugugcccccagg

SEQ ID NO: 3520769 - RNA, 17 nt, Human
cagcucccuucuguuga

SEQ ID NO: 3520770 - RNA, 16 nt, Human
cagcuccggccugucc

SEQ ID NO: 3520771 - RNA, 21 nt, Human
cagcuccggccuguccuccaa

SEQ ID NO: 3520772 - RNA, 21 nt, Human
cagcuccucccuuguucucua

SEQ ID NO: 3520773 - RNA, 22 nt, Human
cagcuccuccgugcuuccucag

SEQ ID NO: 3520774 - RNA, 19 nt, Human
cagcuccucugucucgagc

SEQ ID NO: 3520775 - RNA, 15 nt, Human
cagcuccuguaacau

SEQ ID NO: 3520776 - RNA, 16 nt, Human
cagcuccuuccuggag

SEQ ID NO: 3520777 - RNA, 17 nt, Human
cagcuccuucuguccua

SEQ ID NO: 3520778 - RNA, 12 nt, Human
cagcuccuuggg

SEQ ID NO: 3520779 - RNA, 17 nt, Human
cagcuccuugggaggaa

SEQ ID NO: 3520780 - RNA, 21 nt, Human
cagcuccuugggaggaagcag

SEQ ID NO: 3520781 - RNA, 13 nt, Human
cagcuccuuuggg

SEQ ID NO: 3520782 - RNA, 20 nt, Human
cagcuccuuuuccagagcau

SEQ ID NO: 3520783 - RNA, 19 nt, Human
cagcucgcaccccccuguu

SEQ ID NO: 3520784 - RNA, 23 nt, Human
cagcucgcaccccccuguucuaa

SEQ ID NO: 3520785 - RNA, 16 nt, Human
cagcucggggagccuu

SEQ ID NO: 3520786 - RNA, 18 nt, Human
cagcucuaagucucaacu

SEQ ID NO: 3520787 - RNA, 20 nt, Human
cagcucuagacaacccugca

SEQ ID NO: 3520788 - RNA, 18 nt, Human
cagcucucaguugcagcc

SEQ ID NO: 3520789 - RNA, 12 nt, Human
cccuuccagaca

SEQ ID NO: 3520790 - RNA, 14 nt, Human
cccuuccaggccau

SEQ ID NO: 3520791 - RNA, 23 nt, Human
cccuucccacaggacauuucucu

SEQ ID NO: 3520792 - RNA, 12 nt, Human
cccuucccaccu

SEQ ID NO: 3520793 - RNA, 14 nt, Human
cccuucccagggca

SEQ ID NO: 3520794 - RNA, 12 nt, Human
cccuuccccacu

SEQ ID NO: 3520795 - RNA, 23 nt, Human
cccuuccccaugcuuccuugccu

SEQ ID NO: 3520796 - RNA, 14 nt, Human
cccuuccccauggg

SEQ ID NO: 3520797 - RNA, 14 nt, Human
cccuuccccgaggg

SEQ ID NO: 3520798 - RNA, 12 nt, Human
cccuuccccucc

SEQ ID NO: 3520799 - RNA, 19 nt, Human
cccuuccccucccuggcuc

SEQ ID NO: 3520800 - RNA, 14 nt, Human
cccuuccccuuccu

SEQ ID NO: 3520801 - RNA, 13 nt, Human
cccuucccucacc

SEQ ID NO: 3520802 - RNA, 17 nt, Human
cccuucccuccucccau

SEQ ID NO: 3520803 - RNA, 13 nt, Human
cccuucccugcaa

SEQ ID NO: 3520804 - RNA, 15 nt, Human
cccuucccugucccu

SEQ ID NO: 3520805 - RNA, 13 nt, Human
cccuucccuuccc

SEQ ID NO: 3520806 - RNA, 18 nt, Human
cccuuccgacccucuggg

SEQ ID NO: 3520807 - RNA, 19 nt, Human
cccuuccuaauuccacagc

SEQ ID NO: 3520808 - RNA, 20 nt, Human
cccuuccuaauuccacagcu

SEQ ID NO: 3520809 - RNA, 22 nt, Human
cccuuccuauuccaagcuucca

SEQ ID NO: 3520810 - RNA, 21 nt, Human
cccuuccucccuauuaaccua

SEQ ID NO: 3520811 - RNA, 14 nt, Human
cccuuccuccucca

SEQ ID NO: 3520812 - RNA, 17 nt, Human
cccuuccucuccacccu

SEQ ID NO: 3520813 - RNA, 20 nt, Human
cccuuccucuccacugccuu

SEQ ID NO: 3520814 - RNA, 12 nt, Human
cccuuccucuuc

SEQ ID NO: 3520815 - RNA, 22 nt, Human
cccuuccucuucggcccucaga

SEQ ID NO: 3520816 - RNA, 22 nt, Human
cccuuccugcugcgcaguucuc

SEQ ID NO: 3520817 - RNA, 16 nt, Human
cccuuccuggacagcu

SEQ ID NO: 3520818 - RNA, 17 nt, Human
cccuuccuggacagcug

SEQ ID NO: 3520819 - RNA, 14 nt, Human
cccuuccugggcac

SEQ ID NO: 3520820 - RNA, 23 nt, Human
cccuuccugggcacacgcugcuc

SEQ ID NO: 3520821 - RNA, 12 nt, Human
cccuuccuucuu

SEQ ID NO: 3520822 - RNA, 11 nt, Human
cccuuccuuua

SEQ ID NO: 3520823 - RNA, 21 nt, Human
cccuuccuuuucccugcuucc

SEQ ID NO: 3520824 - RNA, 21 nt, Human
cccuucuauacccacccagaa

SEQ ID NO: 3520825 - RNA, 15 nt, Human
cccuucucacagcac

SEQ ID NO: 3520826 - RNA, 19 nt, Human
cccuucucacagcacaugc

SEQ ID NO: 3520827 - RNA, 15 nt, Human
cccuucucaucacuc

SEQ ID NO: 3520828 - RNA, 19 nt, Human
cccuucucaucacuccccu

SEQ ID NO: 3520829 - RNA, 13 nt, Human
cccuucuccaucu

SEQ ID NO: 3520830 - RNA, 22 nt, Human
cccuucuccaucucucuggccc

SEQ ID NO: 3520831 - RNA, 14 nt, Human
cccuucucccacuc

SEQ ID NO: 3520832 - RNA, 16 nt, Human
cccuucuccccugcac

SEQ ID NO: 3520833 - RNA, 13 nt, Human
cccuucucccugg

SEQ ID NO: 3520834 - RNA, 17 nt, Human
cccuucuccucuuguaa

SEQ ID NO: 3520835 - RNA, 14 nt, Human
cccuucucuccagc

SEQ ID NO: 3520836 - RNA, 18 nt, Human
cccuucucugcccauucc

SEQ ID NO: 3520837 - RNA, 19 nt, Human
cccuucucugcccauuccc

SEQ ID NO: 3520838 - RNA, 20 nt, Human
cccuucucugcuccaccaca

SEQ ID NO: 3520839 - RNA, 13 nt, Human
cccuucucuguau

SEQ ID NO: 3520840 - RNA, 21 nt, Human
cccuucucugugacccacuuc

SEQ ID NO: 3520841 - RNA, 17 nt, Human
cccuucucuuccaggca

SEQ ID NO: 3520842 - RNA, 21 nt, Human
cccuucugacccaugcugccc

SEQ ID NO: 3520843 - RNA, 22 nt, Human
cccuucugacccaugcugcccu

SEQ ID NO: 3520844 - RNA, 13 nt, Human
cccuucugcuacu

SEQ ID NO: 3520845 - RNA, 22 nt, Human
cccuucugggcaucuguucugg

SEQ ID NO: 3520846 - RNA, 17 nt, Human
cccuucugugcccagcu

SEQ ID NO: 3520847 - RNA, 18 nt, Human
cccuucugugcccagcuc

SEQ ID NO: 3520848 - RNA, 12 nt, Human
cccuucuucccu

SEQ ID NO: 3520849 - RNA, 15 nt, Human
cccuucuugcugccc

SEQ ID NO: 3520850 - RNA, 16 nt, Human
cccgucuccagcugcu

SEQ ID NO: 3520851 - RNA, 17 nt, Human
cccgucuccagcugcug

SEQ ID NO: 3520852 - RNA, 22 nt, Human
cccgucucugguuccuccccuc

SEQ ID NO: 3520853 - RNA, 17 nt, Human
cccgucuguccaucugc

SEQ ID NO: 3520854 - RNA, 23 nt, Human
cccgucugugugugaccccuccu

SEQ ID NO: 3520855 - RNA, 15 nt, Human
cccgucuucagccua

SEQ ID NO: 3520856 - RNA, 13 nt, Human
cccgugaccuggu

SEQ ID NO: 3520857 - RNA, 13 nt, Human
cccgugcagacug

SEQ ID NO: 3520858 - RNA, 15 nt, Human
cccgugccaagucca

SEQ ID NO: 3520859 - RNA, 22 nt, Human
cccgugccaaguccagguccug

SEQ ID NO: 3520860 - RNA, 17 nt, Human
cccguggaggcugcucg

SEQ ID NO: 3520861 - RNA, 12 nt, Human
cccguggcccca

SEQ ID NO: 3520862 - RNA, 14 nt, Human
cccguggccccagc

SEQ ID NO: 3520863 - RNA, 20 nt, Human
cccguguaggaaccugcaca

SEQ ID NO: 3520864 - RNA, 15 nt, Human
cccguguccugccug

SEQ ID NO: 3520865 - RNA, 16 nt, Human
cccguugucucccugg

SEQ ID NO: 3520866 - RNA, 12 nt, Human
cccguuucucca

SEQ ID NO: 3520867 - RNA, 16 nt, Human
cccguuucuccaccua

SEQ ID NO: 3520868 - RNA, 14 nt, Human
cccguuucuggugg

SEQ ID NO: 3520869 - RNA, 19 nt, Human
cccguuuuaugauuuacuc

SEQ ID NO: 3520870 - RNA, 12 nt, Human
cccuaaacugua

SEQ ID NO: 3520871 - RNA, 14 nt, Human
cccuaacccuuugu

SEQ ID NO: 3520872 - RNA, 17 nt, Human
cccuaaccucuuuucug

SEQ ID NO: 3520873 - RNA, 12 nt, Human
cccuaagccagc

SEQ ID NO: 3520874 - RNA, 23 nt, Human
cccuaagccagccugguccaugc

SEQ ID NO: 3520875 - RNA, 17 nt, Human
cccuaagccagcugccc

SEQ ID NO: 3520876 - RNA, 14 nt, Human
cccuaauaaagcug

SEQ ID NO: 3520877 - RNA, 15 nt, Human
cccuaauaaagcugu

SEQ ID NO: 3520878 - RNA, 22 nt, Human
cccuaaugcgcaggcuggcccu

SEQ ID NO: 3520879 - RNA, 23 nt, Human
cccuaaugcgcaggcuggcccug

SEQ ID NO: 3520880 - RNA, 18 nt, Human
cccuacacccagacccca

SEQ ID NO: 3520881 - RNA, 13 nt, Human
cccuacaccuuga

SEQ ID NO: 3520882 - RNA, 17 nt, Human
cccuaccaccuccccag

SEQ ID NO: 3520883 - RNA, 17 nt, Human
cccuaccacugucuucu

SEQ ID NO: 3520884 - RNA, 20 nt, Human
cccuaccacugucuucuuca

SEQ ID NO: 3520885 - RNA, 14 nt, Human
cccuaccccaccac

SEQ ID NO: 3520886 - RNA, 14 nt, Human
cccuaccccuggcu

SEQ ID NO: 3520887 - RNA, 11 nt, Human
cccuacccucu

SEQ ID NO: 3520888 - RNA, 15 nt, Human
cccuacccucuagag

SEQ ID NO: 3520889 - RNA, 21 nt, Human
cccuaccgagucucuucucca

SEQ ID NO: 3520890 - RNA, 19 nt, Human
cccuaccucaaccuguaaa

SEQ ID NO: 3520891 - RNA, 22 nt, Human
cccuaccucaaccuguaaauua

SEQ ID NO: 3520892 - RNA, 16 nt, Human
cccuaccucaggcagg

SEQ ID NO: 3520893 - RNA, 22 nt, Human
cccuaccugauuggugcaaccc

SEQ ID NO: 3520894 - RNA, 13 nt, Human
cccuacggaccag

SEQ ID NO: 3520895 - RNA, 14 nt, Human
cccuacggaccagg

SEQ ID NO: 3520896 - RNA, 23 nt, Human
cccuacuauucaguggcgagaaa

SEQ ID NO: 3520897 - RNA, 22 nt, Human
cccuagaucuuucuauuccaaa

SEQ ID NO: 3520898 - RNA, 13 nt, Human
cccuagccauucc

SEQ ID NO: 3520899 - RNA, 18 nt, Human
cccuagccauuccuggua

SEQ ID NO: 3520900 - RNA, 17 nt, Human
cccuagcccaggagaga

SEQ ID NO: 3520901 - RNA, 18 nt, Human
cccuagcccaggagagag

SEQ ID NO: 3520902 - RNA, 18 nt, Human
cccuagccgguuccuguc

SEQ ID NO: 3520903 - RNA, 19 nt, Human
cccuagcgcuaucucccug

SEQ ID NO: 3520904 - RNA, 18 nt, Human
cccuagcuuuagacccug

SEQ ID NO: 3520905 - RNA, 23 nt, Human
cccuaggauaaaaagccagggcu

SEQ ID NO: 3520906 - RNA, 15 nt, Human
cccuagggcugggug

SEQ ID NO: 3520907 - RNA, 18 nt, Human
cccuaggggacacuuccc

SEQ ID NO: 3520908 - RNA, 16 nt, Human
cccuagguguuuuguu

SEQ ID NO: 3520909 - RNA, 17 nt, Human
cccuagguucccggucc

SEQ ID NO: 3520910 - RNA, 18 nt, Human
cccuaguaagugccuucc

SEQ ID NO: 3520911 - RNA, 19 nt, Human
cccuagugacccggaggcc

SEQ ID NO: 3520912 - RNA, 16 nt, Human
cccuaguucccucugc

SEQ ID NO: 3520913 - RNA, 23 nt, Human
cccuaguucccucugcucagcca

SEQ ID NO: 3520914 - RNA, 21 nt, Human
cccuaguuuucuuuccuccuu

SEQ ID NO: 3520915 - RNA, 11 nt, Human
cccuauaaauc

SEQ ID NO: 3520916 - RNA, 18 nt, Human
cccuauaaugcuggagcg

SEQ ID NO: 3520917 - RNA, 23 nt, Human
cccuauacugcuuggagcugagc

SEQ ID NO: 3520918 - RNA, 16 nt, Human
cccuauccacccagcc

SEQ ID NO: 3520919 - RNA, 16 nt, Human
cccuauccuuggcacc

SEQ ID NO: 3520920 - RNA, 16 nt, Human
cccuaucuccugacag

SEQ ID NO: 3520921 - RNA, 20 nt, Human
cccuaucuccugacagaagg

SEQ ID NO: 3520922 - RNA, 14 nt, Human
cccuaucuuugcca

SEQ ID NO: 3520923 - RNA, 20 nt, Human
cccuaugaaguaaagaacug

SEQ ID NO: 3520924 - RNA, 14 nt, Human
cccuaugggccugc

SEQ ID NO: 3520925 - RNA, 21 nt, Human
cccuaugggccugccgggcug

SEQ ID NO: 3520926 - RNA, 18 nt, Human
cccuauuagagaagagau

SEQ ID NO: 3520927 - RNA, 20 nt, Human
cccuauuuagaugauaaaga

SEQ ID NO: 3520928 - RNA, 19 nt, Human
cccucaaaugacccaaaga

SEQ ID NO: 3520929 - RNA, 16 nt, Human
cccucaaccucuucug

SEQ ID NO: 3520930 - RNA, 20 nt, Human
cccucaagagcaaaguagau

SEQ ID NO: 3520931 - RNA, 23 nt, Human
cccucaaggacaaagucuccagc

SEQ ID NO: 3520932 - RNA, 18 nt, Human
cccucaaggccucccaca

SEQ ID NO: 3520933 - RNA, 20 nt, Human
cccucaaggccucccacagu

SEQ ID NO: 3520934 - RNA, 22 nt, Human
cccuccuguugcacccagcccu

SEQ ID NO: 3520935 - RNA, 16 nt, Human
cccuccuucccagcug

SEQ ID NO: 3520936 - RNA, 16 nt, Human
cccuccuuccuugacc

SEQ ID NO: 3520937 - RNA, 20 nt, Human
cccuccuugcucugcaggca

SEQ ID NO: 3520938 - RNA, 14 nt, Human
cccuccuugggcac

SEQ ID NO: 3520939 - RNA, 16 nt, Human
cccuccuugggcacuu

SEQ ID NO: 3520940 - RNA, 19 nt, Human
cccucgaagcgcgccacuc

SEQ ID NO: 3520941 - RNA, 16 nt, Human
cccucgcccaguccca

SEQ ID NO: 3520942 - RNA, 14 nt, Human
cccucgcugccagc

SEQ ID NO: 3520943 - RNA, 13 nt, Human
cccucgcuggccc

SEQ ID NO: 3520944 - RNA, 14 nt, Human
cccucgcuggcccc

SEQ ID NO: 3520945 - RNA, 23 nt, Human
cccucgcuggcccccacuggcug

SEQ ID NO: 3520946 - RNA, 16 nt, Human
cccucgggcccaccug

SEQ ID NO: 3520947 - RNA, 19 nt, Human
cccucgggcccaccuggcc

SEQ ID NO: 3520948 - RNA, 20 nt, Human
cccucgggcccaccuggcca

SEQ ID NO: 3520949 - RNA, 21 nt, Human
cccucgggcccaccuggccac

SEQ ID NO: 3520950 - RNA, 20 nt, Human
cccucggggauguguccuga

SEQ ID NO: 3520951 - RNA, 21 nt, Human
cccucgggucuccucacuccc

SEQ ID NO: 3520952 - RNA, 14 nt, Human
cccucgucuuuccc

SEQ ID NO: 3520953 - RNA, 21 nt, Human
cccucgucuuucccaaaggca

SEQ ID NO: 3520954 - RNA, 16 nt, Human
cccucgugccagucgc

SEQ ID NO: 3520955 - RNA, 22 nt, Human
cccucgugccagucgcgcugcc

SEQ ID NO: 3520956 - RNA, 19 nt, Human
cccucguggacaccugccc

SEQ ID NO: 3520957 - RNA, 23 nt, Human
cccucguggacaccugcccugcc

SEQ ID NO: 3520958 - RNA, 19 nt, Human
cccucguggccagcccggc

SEQ ID NO: 3520959 - RNA, 18 nt, Human
cccucgugguccccaaca

SEQ ID NO: 3520960 - RNA, 20 nt, Human
cccucgugguccccaacagc

SEQ ID NO: 3520961 - RNA, 19 nt, Human
cccucuaaugcucacgcuc

SEQ ID NO: 3520962 - RNA, 21 nt, Human
cccucuacagagcuucccuga

SEQ ID NO: 3520963 - RNA, 15 nt, Human
cccucuaggcucugc

SEQ ID NO: 3520964 - RNA, 17 nt, Human
cccucucacugucugag

SEQ ID NO: 3520965 - RNA, 15 nt, Human
cccucucagcccuca

SEQ ID NO: 3520966 - RNA, 17 nt, Human
cccucucagcuccaggu

SEQ ID NO: 3520967 - RNA, 21 nt, Human
cccucucaggcaugccugugu

SEQ ID NO: 3520968 - RNA, 20 nt, Human
cccucucaucucagguagaa

SEQ ID NO: 3520969 - RNA, 13 nt, Human
cccucucccagga

SEQ ID NO: 3520970 - RNA, 13 nt, Human
cccucucccaggc

SEQ ID NO: 3520971 - RNA, 20 nt, Human
cccucuccccaccccuaccc

SEQ ID NO: 3520972 - RNA, 16 nt, Human
cccucucccucuaggc

SEQ ID NO: 3520973 - RNA, 13 nt, Human
cccucucccuucc

SEQ ID NO: 3520974 - RNA, 20 nt, Human
cccucucccuucccuccucc

SEQ ID NO: 3520975 - RNA, 13 nt, Human
cccucuccgagcu

SEQ ID NO: 3520976 - RNA, 17 nt, Human
cccucuccugccuacuc

SEQ ID NO: 3520977 - RNA, 11 nt, Human
cccucuccugg

SEQ ID NO: 3520978 - RNA, 13 nt, Human
cccucuccugggc

SEQ ID NO: 3520979 - RNA, 21 nt, Human
cccucuccuuuguucccggcu

SEQ ID NO: 3520980 - RNA, 11 nt, Human
cccucucucug

SEQ ID NO: 3520981 - RNA, 12 nt, Human
cccucucucuga

SEQ ID NO: 3520982 - RNA, 14 nt, Human
cccucucucuucug

SEQ ID NO: 3520983 - RNA, 12 nt, Human
cccucucugcau

SEQ ID NO: 3520984 - RNA, 20 nt, Human
cccucucugcaucugaccac

SEQ ID NO: 3520985 - RNA, 14 nt, Human
cccucucugcucug

SEQ ID NO: 3520986 - RNA, 14 nt, Human
cccucucuggagaa

SEQ ID NO: 3520987 - RNA, 14 nt, Human
cccucucugggccu

SEQ ID NO: 3520988 - RNA, 23 nt, Human
cccucucuugcacccgccucucc

SEQ ID NO: 3520989 - RNA, 19 nt, Human
cccucugaaaguuguacau

SEQ ID NO: 3520990 - RNA, 21 nt, Human
cccucugagaauuccaaggag

SEQ ID NO: 3520991 - RNA, 9 nt, Human
cccucugcc

SEQ ID NO: 3520992 - RNA, 19 nt, Human
cccucugccaccagagacc

SEQ ID NO: 3520993 - RNA, 11 nt, Human
cccucugccca

SEQ ID NO: 3520994 - RNA, 12 nt, Human
cccucugcccag

SEQ ID NO: 3520995 - RNA, 18 nt, Human
cccucugcccagcuuggg

SEQ ID NO: 3520996 - RNA, 14 nt, Human
cccucugcccugcg

SEQ ID NO: 3520997 - RNA, 12 nt, Human
cccucugccggc

SEQ ID NO: 3520998 - RNA, 21 nt, Human
cccucugccugaaccuuccau

SEQ ID NO: 3520999 - RNA, 13 nt, Human
cccucugccuguc

SEQ ID NO: 3521000 - RNA, 13 nt, Human
cccucugcucagc

SEQ ID NO: 3521001 - RNA, 14 nt, Human
cccucugcucagcc

SEQ ID NO: 3521002 - RNA, 15 nt, Human
cccucugcugaagac

SEQ ID NO: 3521003 - RNA, 21 nt, Human
cccucugcugaagacuugccc

SEQ ID NO: 3521004 - RNA, 14 nt, Human
cccucugcugcugu

SEQ ID NO: 3521005 - RNA, 15 nt, Human
cccucugcugcuguc

SEQ ID NO: 3521006 - RNA, 12 nt, Human
cccucuggaggg

SEQ ID NO: 3521007 - RNA, 22 nt, Human
cccucuggagggguguggcucc

SEQ ID NO: 3521008 - RNA, 22 nt, Human
cccucuggaguggccacuaagc

SEQ ID NO: 3521009 - RNA, 13 nt, Human
cccucuggccagg

SEQ ID NO: 3521010 - RNA, 22 nt, Human
cccucuggccaggauggagggg

SEQ ID NO: 3521011 - RNA, 22 nt, Human
cccucuggcuccagcuggccgg

SEQ ID NO: 3521012 - RNA, 19 nt, Human
cccucugggaaccucccag

SEQ ID NO: 3521013 - RNA, 21 nt, Human
cccucugggaaccucccagag

SEQ ID NO: 3521014 - RNA, 12 nt, Human
cccucugggcuc

SEQ ID NO: 3521015 - RNA, 12 nt, Human
cccucuggggcu

SEQ ID NO: 3521016 - RNA, 14 nt, Human
ccgagaagccagug

SEQ ID NO: 3521017 - RNA, 13 nt, Human
ccgagaagguuua

SEQ ID NO: 3521018 - RNA, 14 nt, Human
ccgagagccugcuc

SEQ ID NO: 3521019 - RNA, 20 nt, Human
ccgagagccugcucccccac

SEQ ID NO: 3521020 - RNA, 22 nt, Human
ccgagaucacgccacugcacuc

SEQ ID NO: 3521021 - RNA, 21 nt, Human
ccgagauugcaccacugcacu

SEQ ID NO: 3521022 - RNA, 23 nt, Human
ccgagcaaagaucaaaauaaaaa

SEQ ID NO: 3521023 - RNA, 12 nt, Human
ccgagcagcuga

SEQ ID NO: 3521024 - RNA, 15 nt, Human
ccgagcagcugagca

SEQ ID NO: 3521025 - RNA, 21 nt, Human
ccgagccucugucacugcagg

SEQ ID NO: 3521026 - RNA, 18 nt, Human
ccgagcgcuuucuggaaa

SEQ ID NO: 3521027 - RNA, 17 nt, Human
ccgagcuccagagcaac

SEQ ID NO: 3521028 - RNA, 19 nt, Human
ccgagcucguguauccugg

SEQ ID NO: 3521029 - RNA, 20 nt, Human
ccgagcucguguauccuggg

SEQ ID NO: 3521030 - RNA, 21 nt, Human
ccgagcucguguauccugggg

SEQ ID NO: 3521031 - RNA, 19 nt, Human
ccgagcugggggccaugag

SEQ ID NO: 3521032 - RNA, 21 nt, Human
ccgagcugggggccaugagcu

SEQ ID NO: 3521033 - RNA, 13 nt, Human
ccgaggacccaga

SEQ ID NO: 3521034 - RNA, 18 nt, Human
ccgaggaggugucucagg

SEQ ID NO: 3521035 - RNA, 20 nt, Human
ccgaggaggugucucaggcu

SEQ ID NO: 3521036 - RNA, 21 nt, Human
ccgaggaggugucucaggcug

SEQ ID NO: 3521037 - RNA, 20 nt, Human
ccgaggcagggucaggagag

SEQ ID NO: 3521038 - RNA, 11 nt, Human
ccgaggccagu

SEQ ID NO: 3521039 - RNA, 22 nt, Human
ccgaggccuaccccgcagacac

SEQ ID NO: 3521040 - RNA, 17 nt, Human
ccgaggccuucucugaa

SEQ ID NO: 3521041 - RNA, 19 nt, Human
ccgaggguccuggcuccug

SEQ ID NO: 3521042 - RNA, 17 nt, Human
ccgaggguugauuaagg

SEQ ID NO: 3521043 - RNA, 16 nt, Human
ccgagguggcugccug

SEQ ID NO: 3521044 - RNA, 21 nt, Human
ccgagguggcugccuggagcc

SEQ ID NO: 3521045 - RNA, 14 nt, Human
ccgaguacagucug

SEQ ID NO: 3521046 - RNA, 21 nt, Human
ccgaguagaaaaugugacccu

SEQ ID NO: 3521047 - RNA, 19 nt, Human
ccgaguagcugggauuaca

SEQ ID NO: 3521048 - RNA, 13 nt, Human
ccgaguccaagcu

SEQ ID NO: 3521049 - RNA, 20 nt, Human
ccgagucucuucuccacugg

SEQ ID NO: 3521050 - RNA, 21 nt, Human
ccgagucucuucuccacugga

SEQ ID NO: 3521051 - RNA, 17 nt, Human
ccgagucugggacacaa

SEQ ID NO: 3521052 - RNA, 21 nt, Human
ccgaguggauagaugcccugc

SEQ ID NO: 3521053 - RNA, 22 nt, Human
ccgaguuaaggugggcccggcc

SEQ ID NO: 3521054 - RNA, 17 nt, Human
ccgauagagggacggcc

SEQ ID NO: 3521055 - RNA, 19 nt, Human
ccgauccuccccuggacuc

SEQ ID NO: 3521056 - RNA, 15 nt, Human
ccgaugcuccagcca

SEQ ID NO: 3521057 - RNA, 19 nt, Human
ccgaugcuccagccaaccc

SEQ ID NO: 3521058 - RNA, 20 nt, Human
ccgaugcugcuuuccccugu

SEQ ID NO: 3521059 - RNA, 22 nt, Human
ccgaugcugcuuuccccugugg

SEQ ID NO: 3521060 - RNA, 14 nt, Human
ccgauuucccaggc

SEQ ID NO: 3521061 - RNA, 16 nt, Human
ccgcaaaccacacugg

SEQ ID NO: 3521062 - RNA, 21 nt, Human
ccgcaaacccccuuugugcug

SEQ ID NO: 3521063 - RNA, 14 nt, Human
ccgcaagcaccauc

SEQ ID NO: 3521064 - RNA, 13 nt, Human
ccgcacacccuca

SEQ ID NO: 3521065 - RNA, 19 nt, Human
ccgcacacccucacucugc

SEQ ID NO: 3521066 - RNA, 21 nt, Human
ccgcacagcagccugcuuccc

SEQ ID NO: 3521067 - RNA, 11 nt, Human
ccgcaccccag

SEQ ID NO: 3521068 - RNA, 17 nt, Human
ccgcaccccagagugug

SEQ ID NO: 3521069 - RNA, 20 nt, Human
ccgcaccccgauguggaccu

SEQ ID NO: 3521070 - RNA, 17 nt, Human
ccgcaccuaaagcagcc

SEQ ID NO: 3521071 - RNA, 17 nt, Human
ccgcacuuuccacuucu

SEQ ID NO: 3521072 - RNA, 22 nt, Human
ccgcacuuuccacuucuuccuu

SEQ ID NO: 3521073 - RNA, 14 nt, Human
ccgcagaagcagac

SEQ ID NO: 3521074 - RNA, 15 nt, Human
ccgcagacaccuugg

SEQ ID NO: 3521075 - RNA, 15 nt, Human
ccgcagacaggacca

SEQ ID NO: 3521076 - RNA, 16 nt, Human
ccgcagacaggaccag

SEQ ID NO: 3521077 - RNA, 17 nt, Human
ccgcagacaggaccagg

SEQ ID NO: 3521078 - RNA, 18 nt, Human
ccgcagaccuccccagcc

SEQ ID NO: 3521079 - RNA, 17 nt, Human
cccuuccaucugauucc

SEQ ID NO: 3521080 - RNA, 23 nt, Human
cccuuccaucugauuccagcaca

SEQ ID NO: 3521081 - RNA, 20 nt, Human
cccuuccaugucgccucugc

SEQ ID NO: 3521082 - RNA, 20 nt, Human
cccuucccaaucagcacuga

SEQ ID NO: 3521083 - RNA, 21 nt, Human
cccuucccaaucagcacugaa

SEQ ID NO: 3521084 - RNA, 14 nt, Human
cccuucccacagga

SEQ ID NO: 3521085 - RNA, 21 nt, Human
cccuuccccacugccugccca

SEQ ID NO: 3521086 - RNA, 13 nt, Human
cccuucccccacc

SEQ ID NO: 3521087 - RNA, 14 nt, Human
cccuuccccucccu

SEQ ID NO: 3521088 - RNA, 16 nt, Human
cccuuccccucccugg

SEQ ID NO: 3521089 - RNA, 17 nt, Human
cccuuccccucccuggc

SEQ ID NO: 3521090 - RNA, 22 nt, Human
cccuuccccucccuggcuccca

SEQ ID NO: 3521091 - RNA, 18 nt, Human
cccuuccccuuccuucuu

SEQ ID NO: 3521092 - RNA, 12 nt, Human
cccuucccugca

SEQ ID NO: 3521093 - RNA, 13 nt, Human
cccuucccugcac

SEQ ID NO: 3521094 - RNA, 13 nt, Human
cccuucccugucc

SEQ ID NO: 3521095 - RNA, 19 nt, Human
cccuucccuugagcccucu

SEQ ID NO: 3521096 - RNA, 15 nt, Human
cccuuccgacccucu

SEQ ID NO: 3521097 - RNA, 19 nt, Human
cccuuccgacccucuggga

SEQ ID NO: 3521098 - RNA, 20 nt, Human
cccuuccgacccucugggaa

SEQ ID NO: 3521099 - RNA, 16 nt, Human
cccuuccgccacuggg

SEQ ID NO: 3521100 - RNA, 18 nt, Human
cccuuccgccacuggggc

SEQ ID NO: 3521101 - RNA, 13 nt, Human
cccuuccuccucc

SEQ ID NO: 3521102 - RNA, 13 nt, Human
cccuuccucucca

SEQ ID NO: 3521103 - RNA, 16 nt, Human
cccuuccucuccacug

SEQ ID NO: 3521104 - RNA, 13 nt, Human
cccuuccucugcu

SEQ ID NO: 3521105 - RNA, 16 nt, Human
cccuuccucugcuccc

SEQ ID NO: 3521106 - RNA, 11 nt, Human
cccuuccucuu

SEQ ID NO: 3521107 - RNA, 16 nt, Human
cccuuccucuucggcc

SEQ ID NO: 3521108 - RNA, 11 nt, Human
cccuuccugga

SEQ ID NO: 3521109 - RNA, 22 nt, Human
cccuuccuggacagcugugccu

SEQ ID NO: 3521110 - RNA, 18 nt, Human
cccuuccugggcacacgc

SEQ ID NO: 3521111 - RNA, 17 nt, Human
cccuuccuguccgcccu

SEQ ID NO: 3521112 - RNA, 11 nt, Human
cccuuccugug

SEQ ID NO: 3521113 - RNA, 22 nt, Human
cccuuccuuuucccugcuucca

SEQ ID NO: 3521114 - RNA, 13 nt, Human
cccuucgcuccug

SEQ ID NO: 3521115 - RNA, 14 nt, Human
cccuucgcuccugu

SEQ ID NO: 3521116 - RNA, 18 nt, Human
cccuucgcuccugugucu

SEQ ID NO: 3521117 - RNA, 17 nt, Human
cccuucuacacucuccu

SEQ ID NO: 3521118 - RNA, 23 nt, Human
cccuucuacacucuccugggccc

SEQ ID NO: 3521119 - RNA, 16 nt, Human
cccuucuaccugccac

SEQ ID NO: 3521120 - RNA, 14 nt, Human
cccuucuacugcuu

SEQ ID NO: 3521121 - RNA, 18 nt, Human
cccuucuacugcuucuac

SEQ ID NO: 3521122 - RNA, 13 nt, Human
cccuucuauaccc

SEQ ID NO: 3521123 - RNA, 13 nt, Human
cccuucucacagc

SEQ ID NO: 3521124 - RNA, 23 nt, Human
cccuucuccauccacaugggagc

SEQ ID NO: 3521125 - RNA, 17 nt, Human
cccuucuccaucucucu

SEQ ID NO: 3521126 - RNA, 13 nt, Human
cccuucucccaca

SEQ ID NO: 3521127 - RNA, 14 nt, Human
cccuucucccacac

SEQ ID NO: 3521128 - RNA, 19 nt, Human
cccuucucccaccccugcc

SEQ ID NO: 3521129 - RNA, 20 nt, Human
cccuucucccacucuccuag

SEQ ID NO: 3521130 - RNA, 14 nt, Human
cccuucucccauga

SEQ ID NO: 3521131 - RNA, 14 nt, Human
cccuucuccccugc

SEQ ID NO: 3521132 - RNA, 15 nt, Human
cccuucuccccugca

SEQ ID NO: 3521133 - RNA, 21 nt, Human
cccuucuccccugcacuguaa

SEQ ID NO: 3521134 - RNA, 15 nt, Human
cccuucucccuggau

SEQ ID NO: 3521135 - RNA, 21 nt, Human
cccuucucucccugccagagg

SEQ ID NO: 3521136 - RNA, 14 nt, Human
cccuucucugcucc

SEQ ID NO: 3521137 - RNA, 15 nt, Human
cccuucucugcucca

SEQ ID NO: 3521138 - RNA, 23 nt, Human
cccuucucugcuccaccacaucc

SEQ ID NO: 3521139 - RNA, 19 nt, Human
cccuucucugugacccacu

SEQ ID NO: 3521140 - RNA, 13 nt, Human
cccuucucuucca

SEQ ID NO: 3521141 - RNA, 14 nt, Human
cccuucugcucagc

SEQ ID NO: 3521142 - RNA, 20 nt, Human
cccuucugggcaucuguucu

SEQ ID NO: 3521143 - RNA, 20 nt, Human
cccuucugugcccagcucag

SEQ ID NO: 3521144 - RNA, 16 nt, Human
cccuucuugcugcccu

SEQ ID NO: 3521145 - RNA, 19 nt, Human
cccuucuuuuucuucuuuu

SEQ ID NO: 3521146 - RNA, 17 nt, Human
cccuugaaauuuuaaac

SEQ ID NO: 3521147 - RNA, 19 nt, Human
cccuugacaacuggcaggc

SEQ ID NO: 3521148 - RNA, 15 nt, Human
cccuugacaccugcu

SEQ ID NO: 3521149 - RNA, 16 nt, Human
cccuugagaccucagc

SEQ ID NO: 3521150 - RNA, 17 nt, Human
cccuugagaccucagcc

SEQ ID NO: 3521151 - RNA, 18 nt, Human
cccuugagaccucagcca

SEQ ID NO: 3521152 - RNA, 12 nt, Human
cccuugagcccu

SEQ ID NO: 3521153 - RNA, 18 nt, Human
cccuugagcccuccccag

SEQ ID NO: 3521154 - RNA, 13 nt, Human
cccuugagggaga

SEQ ID NO: 3521155 - RNA, 16 nt, Human
cccuugaguccccauu

SEQ ID NO: 3521156 - RNA, 16 nt, Human
cccuugaugaagaagu

SEQ ID NO: 3521157 - RNA, 15 nt, Human
cccuugaugcacaga

SEQ ID NO: 3521158 - RNA, 19 nt, Human
cccuugauuuaaacacaca

SEQ ID NO: 3521159 - RNA, 16 nt, Human
cccuugcagcuaguuu

SEQ ID NO: 3521160 - RNA, 19 nt, Human
cccuugcagcuaguuuucu

SEQ ID NO: 3521161 - RNA, 23 nt, Human
cccuugcaguucagcaccacccu

SEQ ID NO: 3521162 - RNA, 15 nt, Human
cccuugccacuuugc

SEQ ID NO: 3521163 - RNA, 14 nt, Human
cccuugccagcugc

SEQ ID NO: 3521164 - RNA, 17 nt, Human
cccuugccccccuggcc

SEQ ID NO: 3521165 - RNA, 19 nt, Human
cccuugcccugaccuccca

SEQ ID NO: 3521166 - RNA, 16 nt, Human
cccuugcccuugcccu

SEQ ID NO: 3521167 - RNA, 18 nt, Human
cccuugcccuugcccuga

SEQ ID NO: 3521168 - RNA, 22 nt, Human
cccuugccgucuaccugagggg

SEQ ID NO: 3521169 - RNA, 12 nt, Human
cccuugccuccc

SEQ ID NO: 3521170 - RNA, 15 nt, Human
cccuugccuccccau

SEQ ID NO: 3521171 - RNA, 18 nt, Human
cccuugccuccccauuuc

SEQ ID NO: 3521172 - RNA, 19 nt, Human
cccuugccuccccauuucc

SEQ ID NO: 3521173 - RNA, 20 nt, Human
cccuugccuccccauuuccc

SEQ ID NO: 3521174 - RNA, 22 nt, Human
cccuugcuaccacggccuccuu

SEQ ID NO: 3521175 - RNA, 20 nt, Human
cccuugcuggccccagcccu

SEQ ID NO: 3521176 - RNA, 14 nt, Human
cccuugcuguaugc

SEQ ID NO: 3521177 - RNA, 11 nt, Human
cccuugcuuuu

SEQ ID NO: 3521178 - RNA, 14 nt, Human
cccuugcuuuuccc

SEQ ID NO: 3521179 - RNA, 17 nt, Human
cccuugcuuuucccucu

SEQ ID NO: 3521180 - RNA, 22 nt, Human
cccuuggacaagacaaaccaag

SEQ ID NO: 3521181 - RNA, 19 nt, Human
cccuuggagcguggacugg

SEQ ID NO: 3521182 - RNA, 17 nt, Human
cccuuggaggccagcca

SEQ ID NO: 3521183 - RNA, 20 nt, Human
cccuuggcagguccuggcca

SEQ ID NO: 3521184 - RNA, 21 nt, Human
cccuuggcagguccuggccag

SEQ ID NO: 3521185 - RNA, 15 nt, Human
cccuuggcucaaucc

SEQ ID NO: 3521186 - RNA, 22 nt, Human
cccuuggcugugaggccccugg

SEQ ID NO: 3521187 - RNA, 16 nt, Human
cccuuggcuucuguga

SEQ ID NO: 3521188 - RNA, 14 nt, Human
cccuugggcccaca

SEQ ID NO: 3521189 - RNA, 18 nt, Human
cccuuggggagcaggcuc

SEQ ID NO: 3521190 - RNA, 22 nt, Human
cccuuggggguccuccuccagg

SEQ ID NO: 3521191 - RNA, 15 nt, Human
cccuuggguucugau

SEQ ID NO: 3521192 - RNA, 21 nt, Human
cccuuguagcuccuccccugg

SEQ ID NO: 3521193 - RNA, 19 nt, Human
cccuugucggccccaccag

SEQ ID NO: 3521194 - RNA, 12 nt, Human
cccuugucugag

SEQ ID NO: 3521195 - RNA, 14 nt, Human
cccuugucugagau

SEQ ID NO: 3521196 - RNA, 10 nt, Human
cccuuguggg

SEQ ID NO: 3521197 - RNA, 19 nt, Human
cccuuguuugucccuucua

SEQ ID NO: 3521198 - RNA, 23 nt, Human
cccuuuacuugucuuucuggggu

SEQ ID NO: 3521199 - RNA, 18 nt, Human
cccuuuagaucucugaag

SEQ ID NO: 3521200 - RNA, 16 nt, Human
cccuuucagagacagc

SEQ ID NO: 3521201 - RNA, 17 nt, Human
cccuuucagaugucuuc

SEQ ID NO: 3521202 - RNA, 13 nt, Human
cccuuuccaguua

SEQ ID NO: 3521203 - RNA, 12 nt, Human
cccuuucccggg

SEQ ID NO: 3521204 - RNA, 15 nt, Human
cccuuucccucgcua

SEQ ID NO: 3521205 - RNA, 14 nt, Human
cccuuuccucaggc

SEQ ID NO: 3521206 - RNA, 12 nt, Human
cccuuuccuguc

SEQ ID NO: 3521207 - RNA, 22 nt, Human
cccuuucugggcaccggggccu

SEQ ID NO: 3521208 - RNA, 14 nt, Human
cccuuucuuggcca

SEQ ID NO: 3521209 - RNA, 16 nt, Human
cccuuucuuggccagu

SEQ ID NO: 3521210 - RNA, 17 nt, Human
cccuuugaagccucagc

SEQ ID NO: 3521211 - RNA, 14 nt, Human
cccuuugacgccau

SEQ ID NO: 3521212 - RNA, 20 nt, Human
cccuuugguuuuuuucuucu

SEQ ID NO: 3521213 - RNA, 22 nt, Human
cccuuuguccuccugcugccag

SEQ ID NO: 3521214 - RNA, 11 nt, Human
cccuuuuccuu

SEQ ID NO: 3521215 - RNA, 13 nt, Human
cccuuuucuguuu

SEQ ID NO: 3521216 - RNA, 21 nt, Human
cccuuuugcggaugggagggg

SEQ ID NO: 3521217 - RNA, 20 nt, Human
cccuuuuggcccccgagcug

SEQ ID NO: 3521218 - RNA, 22 nt, Human
cccuuuuggcccccgagcuggg

SEQ ID NO: 3521219 - RNA, 21 nt, Human
cccuuuuguuccccagcccua

SEQ ID NO: 3521220 - RNA, 18 nt, Human
cccuuuuuacuccccuug

SEQ ID NO: 3521221 - RNA, 13 nt, Human
cagggcccugcag

SEQ ID NO: 3521222 - RNA, 14 nt, Human
cagggccgaggagg

SEQ ID NO: 3521223 - RNA, 16 nt, Human
cagggccgccagggag

SEQ ID NO: 3521224 - RNA, 23 nt, Human
cagggccggggaacuggccaagc

SEQ ID NO: 3521225 - RNA, 13 nt, Human
ccgccagccuccu

SEQ ID NO: 3521226 - RNA, 14 nt, Human
ccgccagccuccuc

SEQ ID NO: 3521227 - RNA, 15 nt, Human
ccgccagccuccucu

SEQ ID NO: 3521228 - RNA, 18 nt, Human
ccgccagccuccucugga

SEQ ID NO: 3521229 - RNA, 12 nt, Human
ccgccagggccc

SEQ ID NO: 3521230 - RNA, 20 nt, Human
ccgccauucucaagcccugc

SEQ ID NO: 3521231 - RNA, 21 nt, Human
ccgccauucucaagcccugca

SEQ ID NO: 3521232 - RNA, 13 nt, Human
ccgcccaaggccu

SEQ ID NO: 3521233 - RNA, 23 nt, Human
ccgcccacaggaagccugcaguc

SEQ ID NO: 3521234 - RNA, 19 nt, Human
ccgcccacuguccugggcg

SEQ ID NO: 3521235 - RNA, 14 nt, Human
ccgcccagcccacc

SEQ ID NO: 3521236 - RNA, 22 nt, Human
ccucagacucauacagaaggug

SEQ ID NO: 3521237 - RNA, 10 nt, Human
ccucagacug

SEQ ID NO: 3521238 - RNA, 19 nt, Human
ccucagacugcacccagga

SEQ ID NO: 3521239 - RNA, 14 nt, Human
ccucagacugcuca

SEQ ID NO: 3521240 - RNA, 15 nt, Human
ccucagacugcucaa

SEQ ID NO: 3521241 - RNA, 15 nt, Human
ccucagacuggggca

SEQ ID NO: 3521242 - RNA, 22 nt, Human
ccucagacuuaccaggaagcag

SEQ ID NO: 3521243 - RNA, 14 nt, Human
ccucagagaccagg

SEQ ID NO: 3521244 - RNA, 17 nt, Human
ccucagagaccagggcu

SEQ ID NO: 3521245 - RNA, 15 nt, Human
ccucagagccccgca

SEQ ID NO: 3521246 - RNA, 15 nt, Human
ccucagaguccaggc

SEQ ID NO: 3521247 - RNA, 16 nt, Human
ccucagaguccaggcc

SEQ ID NO: 3521248 - RNA, 18 nt, Human
ccucagaguccaggcccc

SEQ ID NO: 3521249 - RNA, 20 nt, Human
ccucagaugcacaugagcug

SEQ ID NO: 3521250 - RNA, 14 nt, Human
ccucagauggcagc

SEQ ID NO: 3521251 - RNA, 15 nt, Human
ccucagauggcagcu

SEQ ID NO: 3521252 - RNA, 16 nt, Human
ccucagauggcagcuu

SEQ ID NO: 3521253 - RNA, 23 nt, Human
ccucagauggcagcuuuuaaaag

SEQ ID NO: 3521254 - RNA, 14 nt, Human
ccucagcaccccuu

SEQ ID NO: 3521255 - RNA, 15 nt, Human
ccucagcaccccuuc

SEQ ID NO: 3521256 - RNA, 14 nt, Human
ccucagccagccuc

SEQ ID NO: 3521257 - RNA, 16 nt, Human
ccucagccaugaggag

SEQ ID NO: 3521258 - RNA, 13 nt, Human
ccucagccccucu

SEQ ID NO: 3521259 - RNA, 19 nt, Human
ccucagcccgccaagguag

SEQ ID NO: 3521260 - RNA, 16 nt, Human
ccucagccuagacccu

SEQ ID NO: 3521261 - RNA, 21 nt, Human
ccucagccucccaaagugcug

SEQ ID NO: 3521262 - RNA, 22 nt, Human
ccucagccucccaaagugcugg

SEQ ID NO: 3521263 - RNA, 23 nt, Human
ccucagccucccaaagugcuggg

SEQ ID NO: 3521264 - RNA, 12 nt, Human
ccucagccuccg

SEQ ID NO: 3521265 - RNA, 12 nt, Human
ccucagccucuc

SEQ ID NO: 3521266 - RNA, 21 nt, Human
ccucagccugaaccccagggc

SEQ ID NO: 3521267 - RNA, 22 nt, Human
ccucagccugaaccccagggcu

SEQ ID NO: 3521268 - RNA, 11 nt, Human
ccucagccugg

SEQ ID NO: 3521269 - RNA, 15 nt, Human
ccucagccuggccag

SEQ ID NO: 3521270 - RNA, 21 nt, Human
ccucagccuggccagacacag

SEQ ID NO: 3521271 - RNA, 14 nt, Human
ccucagccugggcg

SEQ ID NO: 3521272 - RNA, 14 nt, Human
ccucagcucccaca

SEQ ID NO: 3521273 - RNA, 15 nt, Human
ccucagcucggcuca

SEQ ID NO: 3521274 - RNA, 18 nt, Human
ccucagcucggcucagcu

SEQ ID NO: 3521275 - RNA, 11 nt, Human
ccucagcucug

SEQ ID NO: 3521276 - RNA, 12 nt, Human
ccucagcucugg

SEQ ID NO: 3521277 - RNA, 16 nt, Human
ccucagcucugggaga

SEQ ID NO: 3521278 - RNA, 17 nt, Human
ccucagcucugggagag

SEQ ID NO: 3521279 - RNA, 18 nt, Human
ccucagcucugggagagg

SEQ ID NO: 3521280 - RNA, 20 nt, Human
ccucagcucugggagaggau

SEQ ID NO: 3521281 - RNA, 14 nt, Human
ccucagcugccuca

SEQ ID NO: 3521282 - RNA, 17 nt, Human
ccucagcugccucacuu

SEQ ID NO: 3521283 - RNA, 20 nt, Human
ccucagcugccucacuuccu

SEQ ID NO: 3521284 - RNA, 13 nt, Human
ccucagcuucccc

SEQ ID NO: 3521285 - RNA, 15 nt, Human
ccucagcuuccccag

SEQ ID NO: 3521286 - RNA, 15 nt, Human
ccucaggacccucgc

SEQ ID NO: 3521287 - RNA, 13 nt, Human
ccucaggacugca

SEQ ID NO: 3521288 - RNA, 12 nt, Human
ccucaggagccg

SEQ ID NO: 3521289 - RNA, 22 nt, Human
ccucaggagccgaagcccaggg

SEQ ID NO: 3521290 - RNA, 19 nt, Human
ccucaggcacuagccuuug

SEQ ID NO: 3521291 - RNA, 14 nt, Human
ccucaggcagcuca

SEQ ID NO: 3521292 - RNA, 13 nt, Human
ccucaggcaggaa

SEQ ID NO: 3521293 - RNA, 19 nt, Human
ccucaggcaggaagggcag

SEQ ID NO: 3521294 - RNA, 18 nt, Human
ccucaggcaggugggaug

SEQ ID NO: 3521295 - RNA, 22 nt, Human
ccucaggcauaggccugggugc

SEQ ID NO: 3521296 - RNA, 11 nt, Human
ccucaggccug

SEQ ID NO: 3521297 - RNA, 14 nt, Human
ccucaggcugcugg

SEQ ID NO: 3521298 - RNA, 15 nt, Human
ccucaggcugcugga

SEQ ID NO: 3521299 - RNA, 16 nt, Human
ccucaggcugcuggag

SEQ ID NO: 3521300 - RNA, 17 nt, Human
ccucaggcugcuggagg

SEQ ID NO: 3521301 - RNA, 11 nt, Human
ccucagggaca

SEQ ID NO: 3521302 - RNA, 20 nt, Human
ccucagggacagagacaccu

SEQ ID NO: 3521303 - RNA, 21 nt, Human
ccucagggacagagacaccug

SEQ ID NO: 3521304 - RNA, 24 nt, Human
ccucagggacagagacaccugcac

SEQ ID NO: 3521305 - RNA, 20 nt, Human
ccucagggagcagggaaggc

SEQ ID NO: 3521306 - RNA, 23 nt, Human
ccucagggauggccguuggccac

SEQ ID NO: 3521307 - RNA, 16 nt, Human
ccucagggcaaagcca

SEQ ID NO: 3521308 - RNA, 21 nt, Human
ccucagggcaaagccaggucc

SEQ ID NO: 3521309 - RNA, 18 nt, Human
ccucagggcagccugccu

SEQ ID NO: 3521310 - RNA, 20 nt, Human
ccucagggcagccugccugg

SEQ ID NO: 3521311 - RNA, 22 nt, Human
ccucagggcuccuugugggccu

SEQ ID NO: 3521312 - RNA, 23 nt, Human
ccucagggcuccuugugggccug

SEQ ID NO: 3521313 - RNA, 18 nt, Human
ccucaggggaaaacuguu

SEQ ID NO: 3521314 - RNA, 21 nt, Human
ccucaggggaaaacuguuacc

SEQ ID NO: 3521315 - RNA, 22 nt, Human
ccucaggggucugagcuccagc

SEQ ID NO: 3521316 - RNA, 23 nt, Human
ccucaggggucugagcuccagcu

SEQ ID NO: 3521317 - RNA, 15 nt, Human
ccucagggucccugg

SEQ ID NO: 3521318 - RNA, 16 nt, Human
ccucagggucccuggu

SEQ ID NO: 3521319 - RNA, 21 nt, Human
ccucagguaaucgaccugccu

SEQ ID NO: 3521320 - RNA, 23 nt, Human
ccucagguaaucgaccugccucg

SEQ ID NO: 3521321 - RNA, 14 nt, Human
ccucaggugcuguc

SEQ ID NO: 3521322 - RNA, 16 nt, Human
ccucaggugcugucca

SEQ ID NO: 3521323 - RNA, 11 nt, Human
ccucagguggc

SEQ ID NO: 3521324 - RNA, 23 nt, Human
ccucagguggccagccuggaucu

SEQ ID NO: 3521325 - RNA, 18 nt, Human
ccucagguggccaugccu

SEQ ID NO: 3521326 - RNA, 18 nt, Human
ccucaggugggccgcagg

SEQ ID NO: 3521327 - RNA, 15 nt, Human
ccucagguuccuaug

SEQ ID NO: 3521328 - RNA, 21 nt, Human
ccucaguagucccugcacagu

SEQ ID NO: 3521329 - RNA, 22 nt, Human
ccucagucccaaauccuuccca

SEQ ID NO: 3521330 - RNA, 11 nt, Human
ccucaguccuc

SEQ ID NO: 3521331 - RNA, 12 nt, Human
ccucaguccucc

SEQ ID NO: 3521332 - RNA, 19 nt, Human
ccucaguccuccccucaca

SEQ ID NO: 3521333 - RNA, 20 nt, Human
ccucaguggacuuuccaccc

SEQ ID NO: 3521334 - RNA, 16 nt, Human
ccucaguucccuuggc

SEQ ID NO: 3521335 - RNA, 17 nt, Human
ccucaguucccuuggcc

SEQ ID NO: 3521336 - RNA, 18 nt, Human
ccucaguucccuuggccu

SEQ ID NO: 3521337 - RNA, 20 nt, Human
ccucaguucccuuggccuca

SEQ ID NO: 3521338 - RNA, 22 nt, Human
ccucaguucccuuggccucaga

SEQ ID NO: 3521339 - RNA, 16 nt, Human
ccucaguugugcagcu

SEQ ID NO: 3521340 - RNA, 19 nt, Human
ccucaguuuuaucauuuuc

SEQ ID NO: 3521341 - RNA, 12 nt, Human
ccucauacccac

SEQ ID NO: 3521342 - RNA, 14 nt, Human
ccucaucaccaacg

SEQ ID NO: 3521343 - RNA, 14 nt, Human
ccucaucaggauga

SEQ ID NO: 3521344 - RNA, 19 nt, Human
ccucaucaggaugaaccca

SEQ ID NO: 3521345 - RNA, 23 nt, Human
ccucauccagggcucugaccagu

SEQ ID NO: 3521346 - RNA, 20 nt, Human
ccucaucccguguucuccuu

SEQ ID NO: 3521347 - RNA, 14 nt, Human
ccucauccgaggca

SEQ ID NO: 3521348 - RNA, 20 nt, Human
ccucauccgaggcaggguca

SEQ ID NO: 3521349 - RNA, 17 nt, Human
ccucauccuccuucuuc

SEQ ID NO: 3521350 - RNA, 19 nt, Human
ccucaucucucugcccaac

SEQ ID NO: 3521351 - RNA, 19 nt, Human
ccucaucugcucagcagcu

SEQ ID NO: 3521352 - RNA, 15 nt, Human
ccucaucugucccuc

SEQ ID NO: 3521353 - RNA, 22 nt, Human
ccucaucuugaagggcccagga

SEQ ID NO: 3521354 - RNA, 17 nt, Human
ccucaucuuucaucaau

SEQ ID NO: 3521355 - RNA, 13 nt, Human
ccucaugaaugua

SEQ ID NO: 3521356 - RNA, 17 nt, Human
ccucaugaauguaaauu

SEQ ID NO: 3521357 - RNA, 22 nt, Human
ccucaugaauguaaauuuguac

SEQ ID NO: 3521358 - RNA, 15 nt, Human
ccucaugcccacccc

SEQ ID NO: 3521359 - RNA, 20 nt, Human
ccucaugcccacccccugcc

SEQ ID NO: 3521360 - RNA, 21 nt, Human
ccucaugcccacccccugccc

SEQ ID NO: 3521361 - RNA, 22 nt, Human
ccucaugcccacccccugcccu

SEQ ID NO: 3521362 - RNA, 16 nt, Human
ccucaugcugccaaua

SEQ ID NO: 3521363 - RNA, 22 nt, Human
ccucauggcagccuacucuccu

SEQ ID NO: 3521364 - RNA, 15 nt, Human
ccucauggccccucu

SEQ ID NO: 3521365 - RNA, 13 nt, Human
ccucauguggcug

SEQ ID NO: 3521366 - RNA, 16 nt, Human
ccucauguggcuggaa

SEQ ID NO: 3521367 - RNA, 20 nt, Human
ccucauuaaccgaugcuuua

SEQ ID NO: 3521368 - RNA, 18 nt, Human
ccucauuagcauuuugcu

SEQ ID NO: 3521369 - RNA, 23 nt, Human
ccucauuauuuauguccaggugu

SEQ ID NO: 3521370 - RNA, 19 nt, Human
ccuauggagagcccuggga

SEQ ID NO: 3521371 - RNA, 22 nt, Human
ccuauggagagcccugggaccg

SEQ ID NO: 3521372 - RNA, 23 nt, Human
ccuauggcagaaaaaaugucugu

SEQ ID NO: 3521373 - RNA, 15 nt, Human
ccuauggccucaugu

SEQ ID NO: 3521374 - RNA, 14 nt, Human
ccuauguauuugca

SEQ ID NO: 3521375 - RNA, 18 nt, Human
ccuaugucauuucauuuc

SEQ ID NO: 3521376 - RNA, 20 nt, Human
ccuauguccuaaggacacac

SEQ ID NO: 3521377 - RNA, 24 nt, Human
ccuauguccuaaggacacacuaau

SEQ ID NO: 3521378 - RNA, 11 nt, Human
ccuauguguaa

SEQ ID NO: 3521379 - RNA, 20 nt, Human
ccuauguugauccauccagc

SEQ ID NO: 3521380 - RNA, 22 nt, Human
ccuauguuuuuguucaaagcca

SEQ ID NO: 3521381 - RNA, 17 nt, Human
ccuauuagagaagagau

SEQ ID NO: 3521382 - RNA, 11 nt, Human
ccuauuagugu

SEQ ID NO: 3521383 - RNA, 15 nt, Human
ccuauuaguguuaua

SEQ ID NO: 3521384 - RNA, 21 nt, Human
ccuauucaacacacacaugcu

SEQ ID NO: 3521385 - RNA, 18 nt, Human
ccuauuccugaacuauaa

SEQ ID NO: 3521386 - RNA, 16 nt, Human
ccuauucuauaaaacu

SEQ ID NO: 3521387 - RNA, 11 nt, Human
ccuauucucac

SEQ ID NO: 3521388 - RNA, 15 nt, Human
ccuauucucaccagg

SEQ ID NO: 3521389 - RNA, 16 nt, Human
ccuauucucaccagga

SEQ ID NO: 3521390 - RNA, 18 nt, Human
ccuauugauuuaagcuuu

SEQ ID NO: 3521391 - RNA, 22 nt, Human
ccuauugcaaagguuccaacug

SEQ ID NO: 3521392 - RNA, 18 nt, Human
ccuauugcuagagcuccu

SEQ ID NO: 3521393 - RNA, 13 nt, Human
ccuauuguaauau

SEQ ID NO: 3521394 - RNA, 15 nt, Human
ccuauugucauuaaa

SEQ ID NO: 3521395 - RNA, 12 nt, Human
ccuauugugauu

SEQ ID NO: 3521396 - RNA, 13 nt, Human
ccuauugugauuu

SEQ ID NO: 3521397 - RNA, 14 nt, Human
ccuauugugauuug

SEQ ID NO: 3521398 - RNA, 22 nt, Human
ccuauugugauuugacuguuuu

SEQ ID NO: 3521399 - RNA, 16 nt, Human
ccuauuuaccugcagg

SEQ ID NO: 3521400 - RNA, 15 nt, Human
ccuauuucaguacuu

SEQ ID NO: 3521401 - RNA, 19 nt, Human
ccuauuucaguguuaccug

SEQ ID NO: 3521402 - RNA, 18 nt, Human
ccuauuuccauucaacaa

SEQ ID NO: 3521403 - RNA, 13 nt, Human
ccuauuucucuuu

SEQ ID NO: 3521404 - RNA, 15 nt, Human
ccuauuucuugauaa

SEQ ID NO: 3521405 - RNA, 17 nt, Human
ccuauuugccaugggcu

SEQ ID NO: 3521406 - RNA, 20 nt, Human
ccuauuuugaaaaauuccua

SEQ ID NO: 3521407 - RNA, 22 nt, Human
ccuauuuugaaaaauuccuauu

SEQ ID NO: 3521408 - RNA, 23 nt, Human
ccuauuuugaaaaauuccuauug

SEQ ID NO: 3521409 - RNA, 19 nt, Human
ccuauuuuucucuccuguc

SEQ ID NO: 3521410 - RNA, 14 nt, Human
ccuauuuuuguaaa

SEQ ID NO: 3521411 - RNA, 13 nt, Human
ccuauuuuuguag

SEQ ID NO: 3521412 - RNA, 20 nt, Human
ccucaaaaagauuuccccau

SEQ ID NO: 3521413 - RNA, 13 nt, Human
ccucaaacacugc

SEQ ID NO: 3521414 - RNA, 18 nt, Human
ccucaaacacugcaggca

SEQ ID NO: 3521415 - RNA, 21 nt, Human
ccucaaacacugcaggcauca

SEQ ID NO: 3521416 - RNA, 13 nt, Human
ccucaaaccuccu

SEQ ID NO: 3521417 - RNA, 16 nt, Human
ccucaaaccuccucuu

SEQ ID NO: 3521418 - RNA, 18 nt, Human
ccucaaaccuccucuucu

SEQ ID NO: 3521419 - RNA, 16 nt, Human
ccucaaagaaagugua

SEQ ID NO: 3521420 - RNA, 20 nt, Human
ccucaaagcuuggauuaaau

SEQ ID NO: 3521421 - RNA, 13 nt, Human
ccucaaagcuuuu

SEQ ID NO: 3521422 - RNA, 16 nt, Human
ccucaaaggcccgcuc

SEQ ID NO: 3521423 - RNA, 14 nt, Human
ccucaaagucugca

SEQ ID NO: 3521424 - RNA, 22 nt, Human
ccucaaauaaaaagugcuuuug

SEQ ID NO: 3521425 - RNA, 19 nt, Human
ccucaaauccaggacccug

SEQ ID NO: 3521426 - RNA, 15 nt, Human
ccucaaaucguccag

SEQ ID NO: 3521427 - RNA, 23 nt, Human
ccucaaaugaugugccugcuuca

SEQ ID NO: 3521428 - RNA, 22 nt, Human
ccucaaauuuuuugacuuuuuu

SEQ ID NO: 3521429 - RNA, 15 nt, Human
ccucaacaagggaga

SEQ ID NO: 3521430 - RNA, 16 nt, Human
ccucaacaccucugca

SEQ ID NO: 3521431 - RNA, 21 nt, Human
ccucaacccucccucagcccc

SEQ ID NO: 3521432 - RNA, 12 nt, Human
ccucaaccuccc

SEQ ID NO: 3521433 - RNA, 14 nt, Human
ccucaaccucccaa

SEQ ID NO: 3521434 - RNA, 16 nt, Human
ccucaaccuccugugg

SEQ ID NO: 3521435 - RNA, 21 nt, Human
ccucaaccugcuguccuccag

SEQ ID NO: 3521436 - RNA, 23 nt, Human
ccucaacucuccuccagagucag

SEQ ID NO: 3521437 - RNA, 14 nt, Human
ccucaacucugcug

SEQ ID NO: 3521438 - RNA, 19 nt, Human
ccucaacucugcugagggu

SEQ ID NO: 3521439 - RNA, 16 nt, Human
ccucaagaaauaaaag

SEQ ID NO: 3521440 - RNA, 15 nt, Human
ccucaagagaaggca

SEQ ID NO: 3521441 - RNA, 17 nt, Human
ccucaagaugaaggcaa

SEQ ID NO: 3521442 - RNA, 16 nt, Human
ccucaagccaaucccc

SEQ ID NO: 3521443 - RNA, 20 nt, Human
ccucaaggacuugaaagcau

SEQ ID NO: 3521444 - RNA, 21 nt, Human
ccucaaggacuugaaagcauc

SEQ ID NO: 3521445 - RNA, 22 nt, Human
ccucaaggacuugaaagcaucc

SEQ ID NO: 3521446 - RNA, 18 nt, Human
ccucaaggccucccacag

SEQ ID NO: 3521447 - RNA, 20 nt, Human
ccucaaggccucccacagug

SEQ ID NO: 3521448 - RNA, 20 nt, Human
ccucaaggggccauccuguc

SEQ ID NO: 3521449 - RNA, 20 nt, Human
ccucaagguuuuagguucua

SEQ ID NO: 3521450 - RNA, 18 nt, Human
ccucuccaagggcuucug

SEQ ID NO: 3521451 - RNA, 19 nt, Human
ccucuccaagggcuucugc

SEQ ID NO: 3521452 - RNA, 18 nt, Human
ccucuccacacagugcuc

SEQ ID NO: 3521453 - RNA, 23 nt, Human
ccucuccacacagugcucaaggc

SEQ ID NO: 3521454 - RNA, 23 nt, Human
ccucuccaccuaguggcugucca

SEQ ID NO: 3521455 - RNA, 12 nt, Human
ccucuccacugc

SEQ ID NO: 3521456 - RNA, 14 nt, Human
ccucuccacugccu

SEQ ID NO: 3521457 - RNA, 19 nt, Human
ccucuccacugccuucgau

SEQ ID NO: 3521458 - RNA, 13 nt, Human
ccucuccagccuc

SEQ ID NO: 3521459 - RNA, 14 nt, Human
ccucuccagcuaua

SEQ ID NO: 3521460 - RNA, 18 nt, Human
ccucuccaguuugcaccu

SEQ ID NO: 3521461 - RNA, 20 nt, Human
ccucuccaguuugcaccugu

SEQ ID NO: 3521462 - RNA, 21 nt, Human
ccucuccaguuugcaccuguc

SEQ ID NO: 3521463 - RNA, 23 nt, Human
ccucuccaguuugcaccuguccc

SEQ ID NO: 3521464 - RNA, 19 nt, Human
ccucuccauaaccccaccc

SEQ ID NO: 3521465 - RNA, 14 nt, Human
ccucuccaucuuca

SEQ ID NO: 3521466 - RNA, 16 nt, Human
ccucuccaucuucagc

SEQ ID NO: 3521467 - RNA, 14 nt, Human
ccucucccacccuc

SEQ ID NO: 3521468 - RNA, 15 nt, Human
ccucucccacccucu

SEQ ID NO: 3521469 - RNA, 18 nt, Human
ccucucccacccucuucc

SEQ ID NO: 3521470 - RNA, 19 nt, Human
ccucucccacccucuuccu

SEQ ID NO: 3521471 - RNA, 14 nt, Human
ccucucccaggacc

SEQ ID NO: 3521472 - RNA, 12 nt, Human
ccucucccaggc

SEQ ID NO: 3521473 - RNA, 15 nt, Human
ccucucccaggcccc

SEQ ID NO: 3521474 - RNA, 18 nt, Human
ccucucccaggccccaug

SEQ ID NO: 3521475 - RNA, 15 nt, Human
ccucucccaguuguc

SEQ ID NO: 3521476 - RNA, 17 nt, Human
ccucucccaucccccug

SEQ ID NO: 3521477 - RNA, 19 nt, Human
ccucucccaucccccugcc

SEQ ID NO: 3521478 - RNA, 22 nt, Human
ccucucccauugucccucugcc

SEQ ID NO: 3521479 - RNA, 22 nt, Human
ccucuccccaagacuugguguc

SEQ ID NO: 3521480 - RNA, 12 nt, Human
ccucuccccagc

SEQ ID NO: 3521481 - RNA, 15 nt, Human
ccucuccccagcaag

SEQ ID NO: 3521482 - RNA, 14 nt, Human
ccucuccccagccc

SEQ ID NO: 3521483 - RNA, 16 nt, Human
ccucuccccagcccag

SEQ ID NO: 3521484 - RNA, 18 nt, Human
ccucuccccagcccagag

SEQ ID NO: 3521485 - RNA, 21 nt, Human
ccucuccccagguccagcucu

SEQ ID NO: 3521486 - RNA, 20 nt, Human
ccucuccccccccccuccaa

SEQ ID NO: 3521487 - RNA, 16 nt, Human
ccucuccccucagccu

SEQ ID NO: 3521488 - RNA, 12 nt, Human
ccucuccccucc

SEQ ID NO: 3521489 - RNA, 14 nt, Human
ccucuccccuccag

SEQ ID NO: 3521490 - RNA, 17 nt, Human
ccucuccccuccagccu

SEQ ID NO: 3521491 - RNA, 12 nt, Human
ccucuccccugc

SEQ ID NO: 3521492 - RNA, 23 nt, Human
ccucuccccugcccccugcagga

SEQ ID NO: 3521493 - RNA, 17 nt, Human
ccucucccgucagggcc

SEQ ID NO: 3521494 - RNA, 10 nt, Human
ccucucccug

SEQ ID NO: 3521495 - RNA, 17 nt, Human
ccucucccugcugcucc

SEQ ID NO: 3521496 - RNA, 23 nt, Human
ccucucccugcugcuccuaggac

SEQ ID NO: 3521497 - RNA, 18 nt, Human
ccucuccucauguucugc

SEQ ID NO: 3521498 - RNA, 12 nt, Human
ccucuccugccu

SEQ ID NO: 3521499 - RNA, 16 nt, Human
ccucuccugccuacuc

SEQ ID NO: 3521500 - RNA, 12 nt, Human
ccucuccuggag

SEQ ID NO: 3521501 - RNA, 11 nt, Human
ccucuccuggg

SEQ ID NO: 3521502 - RNA, 13 nt, Human
ccucuccugggca

SEQ ID NO: 3521503 - RNA, 14 nt, Human
ccucuccugggcag

SEQ ID NO: 3521504 - RNA, 13 nt, Human
ccucuccuuccua

SEQ ID NO: 3521505 - RNA, 15 nt, Human
ccucuccuuccugug

SEQ ID NO: 3521506 - RNA, 17 nt, Human
ccucuccuuccuuaccc

SEQ ID NO: 3521507 - RNA, 16 nt, Human
ccucuccuuccuuguu

SEQ ID NO: 3521508 - RNA, 14 nt, Human
ccucuccuuuguau

SEQ ID NO: 3521509 - RNA, 16 nt, Human
ccucuccuuuguauau

SEQ ID NO: 3521510 - RNA, 14 nt, Human
ccucucgcggcccu

SEQ ID NO: 3521511 - RNA, 20 nt, Human
ccucucgcuccucaaccccu

SEQ ID NO: 3521512 - RNA, 22 nt, Human
ccucucgcuccucaaccccucc

SEQ ID NO: 3521513 - RNA, 21 nt, Human
ccucucggaaggcuggcuggg

SEQ ID NO: 3521514 - RNA, 17 nt, Human
ccucucgguugaaaccu

SEQ ID NO: 3521515 - RNA, 13 nt, Human
ccucugucugccc

SEQ ID NO: 3521516 - RNA, 22 nt, Human
ccucugucuggcaaugccacag

SEQ ID NO: 3521517 - RNA, 20 nt, Human
ccucugucuucagcacccuc

SEQ ID NO: 3521518 - RNA, 20 nt, Human
ccucugucuuggcuuucaug

SEQ ID NO: 3521519 - RNA, 17 nt, Human
ccucugugaccucaggc

SEQ ID NO: 3521520 - RNA, 14 nt, Human
ccucugugccuucu

SEQ ID NO: 3521521 - RNA, 13 nt, Human
ccucugugcugug

SEQ ID NO: 3521522 - RNA, 16 nt, Human
ccucugugcugugugu

SEQ ID NO: 3521523 - RNA, 14 nt, Human
ccucugugucacug

SEQ ID NO: 3521524 - RNA, 17 nt, Human
ccucugugucacuggcu

SEQ ID NO: 3521525 - RNA, 21 nt, Human
ccucugugucacuggcugccu

SEQ ID NO: 3521526 - RNA, 22 nt, Human
ccucugugucacuggcugccuc

SEQ ID NO: 3521527 - RNA, 13 nt, Human
ccucuguguccuu

SEQ ID NO: 3521528 - RNA, 19 nt, Human
ccucuguguccuucccugc

SEQ ID NO: 3521529 - RNA, 16 nt, Human
ccucuguucaguguaa

SEQ ID NO: 3521530 - RNA, 16 nt, Human
ccucuguuccuucccu

SEQ ID NO: 3521531 - RNA, 15 nt, Human
ccucuguuguccucc

SEQ ID NO: 3521532 - RNA, 18 nt, Human
ccucuuaaaaaauaaaaa

SEQ ID NO: 3521533 - RNA, 20 nt, Human
ccucuuaaagaaaacccacc

SEQ ID NO: 3521534 - RNA, 21 nt, Human
ccucuuaaagcugccuguagu

SEQ ID NO: 3521535 - RNA, 23 nt, Human
ccucuuaccaguauuuaacuucu

SEQ ID NO: 3521536 - RNA, 16 nt, Human
ccucuuacuaauguaa

SEQ ID NO: 3521537 - RNA, 23 nt, Human
ccucuuagaugcaguucugaaga

SEQ ID NO: 3521538 - RNA, 14 nt, Human
ccucuuagcugagu

SEQ ID NO: 3521539 - RNA, 17 nt, Human
ccucuuagcugagugga

SEQ ID NO: 3521540 - RNA, 14 nt, Human
ccucuuaugggcug

SEQ ID NO: 3521541 - RNA, 17 nt, Human
ccucuuaugggcugggu

SEQ ID NO: 3521542 - RNA, 18 nt, Human
ccucuuauguaccucuuu

SEQ ID NO: 3521543 - RNA, 13 nt, Human
ccucuucagaggc

SEQ ID NO: 3521544 - RNA, 16 nt, Human
ccucuucagaggcccu

SEQ ID NO: 3521545 - RNA, 15 nt, Human
ccucuuccaggcccc

SEQ ID NO: 3521546 - RNA, 14 nt, Human
ccucuuccccagaa

SEQ ID NO: 3521547 - RNA, 22 nt, Human
ccucuuccccagaaaggagacu

SEQ ID NO: 3521548 - RNA, 22 nt, Human
ccucuuccccagacgccuggcu

SEQ ID NO: 3521549 - RNA, 15 nt, Human
ccucuucccccugcu

SEQ ID NO: 3521550 - RNA, 15 nt, Human
ccucuucccccuucc

SEQ ID NO: 3521551 - RNA, 17 nt, Human
ccucuuccccuugcccu

SEQ ID NO: 3521552 - RNA, 19 nt, Human
ccucuuccgacucuuucug

SEQ ID NO: 3521553 - RNA, 18 nt, Human
ccucuuccgugacgucac

SEQ ID NO: 3521554 - RNA, 21 nt, Human
ccucuuccuacuggucucucu

SEQ ID NO: 3521555 - RNA, 12 nt, Human
ccucuuccucug

SEQ ID NO: 3521556 - RNA, 13 nt, Human
ccucuuccucuga

SEQ ID NO: 3521557 - RNA, 15 nt, Human
ccucuucuacucacu

SEQ ID NO: 3521558 - RNA, 17 nt, Human
ccucuucuauuuuguaa

SEQ ID NO: 3521559 - RNA, 18 nt, Human
ccucuucuauuuuguaaa

SEQ ID NO: 3521560 - RNA, 15 nt, Human
ccucuucucaagugc

SEQ ID NO: 3521561 - RNA, 19 nt, Human
ccucuucucaagugccuua

SEQ ID NO: 3521562 - RNA, 13 nt, Human
ccucuucucucag

SEQ ID NO: 3521563 - RNA, 12 nt, Human
ccucuucucuuc

SEQ ID NO: 3521564 - RNA, 14 nt, Human
ccucuucugagcuu

SEQ ID NO: 3521565 - RNA, 16 nt, Human
ccucuucugccaagag

SEQ ID NO: 3521566 - RNA, 16 nt, Human
ccucuucugggccuga

SEQ ID NO: 3521567 - RNA, 15 nt, Human
ccucuucuucucaag

SEQ ID NO: 3521568 - RNA, 16 nt, Human
ccucuucuucuucaga

SEQ ID NO: 3521569 - RNA, 17 nt, Human
ccucuugacccugcacc

SEQ ID NO: 3521570 - RNA, 17 nt, Human
ccucuugagcaguggcu

SEQ ID NO: 3521571 - RNA, 19 nt, Human
ccucuugagccuugaacuu

SEQ ID NO: 3521572 - RNA, 23 nt, Human
ccucuugccacugccucuuccuc

SEQ ID NO: 3521573 - RNA, 13 nt, Human
ccucuugcccauc

SEQ ID NO: 3521574 - RNA, 12 nt, Human
ccucuugcccca

SEQ ID NO: 3521575 - RNA, 15 nt, Human
ccucuugccccaacc

SEQ ID NO: 3521576 - RNA, 16 nt, Human
ccucuugccccaaccc

SEQ ID NO: 3521577 - RNA, 23 nt, Human
ccucuugccccccaccccagccu

SEQ ID NO: 3521578 - RNA, 16 nt, Human
ccucuugcugucucug

SEQ ID NO: 3521579 - RNA, 17 nt, Human
ccucuuggaccucugcu

SEQ ID NO: 3521580 - RNA, 19 nt, Human
ccucuuggaccucugcucu

SEQ ID NO: 3521581 - RNA, 18 nt, Human
ccucuuggagaagucuca

SEQ ID NO: 3521582 - RNA, 13 nt, Human
ccucuuggccuga

SEQ ID NO: 3521583 - RNA, 15 nt, Human
ccucuuggcugccuu

SEQ ID NO: 3521584 - RNA, 23 nt, Human
ccucuuggggaguuuaggguggg

SEQ ID NO: 3521585 - RNA, 13 nt, Human
ccucuuggguuca

SEQ ID NO: 3521586 - RNA, 16 nt, Human
ccucuuguaaagacug

SEQ ID NO: 3521587 - RNA, 12 nt, Human
ccucuuguaaau

SEQ ID NO: 3521588 - RNA, 14 nt, Human
ccucuuguaaauaa

SEQ ID NO: 3521589 - RNA, 22 nt, Human
ccucuugucuuccuauuucaga

SEQ ID NO: 3521590 - RNA, 12 nt, Human
ccucuuuagagu

SEQ ID NO: 3521591 - RNA, 17 nt, Human
ccucuuuagaguuagac

SEQ ID NO: 3521592 - RNA, 12 nt, Human
ccucuuucagcu

SEQ ID NO: 3521593 - RNA, 14 nt, Human
ccucuuucagcucc

SEQ ID NO: 3521594 - RNA, 13 nt, Human
ccucuuucaucca

SEQ ID NO: 3521595 - RNA, 15 nt, Human
ccucuuucccuucca

SEQ ID NO: 3521596 - RNA, 18 nt, Human
ccucuuucccuuccaguu

SEQ ID NO: 3521597 - RNA, 13 nt, Human
ccucuuucucucc

SEQ ID NO: 3521598 - RNA, 15 nt, Human
ccucuuucucucccc

SEQ ID NO: 3521599 - RNA, 18 nt, Human
ccucuuucucuccccaac

SEQ ID NO: 3521600 - RNA, 21 nt, Human
ccucuuucucuccccaacccc

SEQ ID NO: 3521601 - RNA, 20 nt, Human
ccucuuucucuuucuuccuu

SEQ ID NO: 3521602 - RNA, 21 nt, Human
ccucuuugcuuugcuuucugc

SEQ ID NO: 3521603 - RNA, 14 nt, Human
ccucuuuggcuccc

SEQ ID NO: 3521604 - RNA, 19 nt, Human
ccucuuuggcuccccugua

SEQ ID NO: 3521605 - RNA, 15 nt, Human
ccucuuugucuaaaa

SEQ ID NO: 3521606 - RNA, 22 nt, Human
ccucuuugucuaaaacaauaaa

SEQ ID NO: 3521607 - RNA, 15 nt, Human
ccucuuuuaccugcu

SEQ ID NO: 3521608 - RNA, 16 nt, Human
ccucuuuuaccugcug

SEQ ID NO: 3521609 - RNA, 19 nt, Human
ccucuuuuaccugcugcuu

SEQ ID NO: 3521610 - RNA, 21 nt, Human
ccucuuuuaccugcugcuucu

SEQ ID NO: 3521611 - RNA, 22 nt, Human
ccucuuuuaccugcugcuucuc

SEQ ID NO: 3521612 - RNA, 21 nt, Human
ccucuuuucuuacuccuccuc

SEQ ID NO: 3521613 - RNA, 19 nt, Human
ccucuuuuguuaaauaaua

SEQ ID NO: 3521614 - RNA, 21 nt, Human
ccucuuuuuaaaguucaaacu

SEQ ID NO: 3521615 - RNA, 23 nt, Human
ccucuuuuuccaacuuggcugca

SEQ ID NO: 3521616 - RNA, 13 nt, Human
ccucuuuuuucgu

SEQ ID NO: 3521617 - RNA, 23 nt, Human
ccucagggcagccugccuggagu

SEQ ID NO: 3521618 - RNA, 18 nt, Human
ccucagggcucccagggg

SEQ ID NO: 3521619 - RNA, 13 nt, Human
ccucaggggucug

SEQ ID NO: 3521620 - RNA, 16 nt, Human
ccucaggggucugagc

SEQ ID NO: 3521621 - RNA, 17 nt, Human
ccucagggucccuggug

SEQ ID NO: 3521622 - RNA, 20 nt, Human
ccucagggucccugguggca

SEQ ID NO: 3521623 - RNA, 17 nt, Human
ccucaggugagaagcag

SEQ ID NO: 3521624 - RNA, 17 nt, Human
ccucaggugauccaccc

SEQ ID NO: 3521625 - RNA, 18 nt, Human
ccucaggugcuguccaug

SEQ ID NO: 3521626 - RNA, 12 nt, Human
ccucagguggcc

SEQ ID NO: 3521627 - RNA, 15 nt, Human
ccucagguggccaug

SEQ ID NO: 3521628 - RNA, 15 nt, Human
ccucaggugggccgc

SEQ ID NO: 3521629 - RNA, 16 nt, Human
ccucagguugcugguu

SEQ ID NO: 3521630 - RNA, 21 nt, Human
ccucagguugcugguugcugu

SEQ ID NO: 3521631 - RNA, 19 nt, Human
ccucagguuugccugaggg

SEQ ID NO: 3521632 - RNA, 15 nt, Human
ccucaguagucccug

SEQ ID NO: 3521633 - RNA, 23 nt, Human
ccucaguagucccugcacaguga

SEQ ID NO: 3521634 - RNA, 17 nt, Human
ccucaguccuccccuca

SEQ ID NO: 3521635 - RNA, 21 nt, Human
ccucaguccuccccucacagc

SEQ ID NO: 3521636 - RNA, 22 nt, Human
ccucaguccuccccucacagcc

SEQ ID NO: 3521637 - RNA, 15 nt, Human
ccucagucuggcccu

SEQ ID NO: 3521638 - RNA, 20 nt, Human
ccucagucuggcccuuccuu

SEQ ID NO: 3521639 - RNA, 17 nt, Human
ccucagugacccuggcu

SEQ ID NO: 3521640 - RNA, 19 nt, Human
ccucagugacccuggcucc

SEQ ID NO: 3521641 - RNA, 20 nt, Human
ccucagugacccuggcuccu

SEQ ID NO: 3521642 - RNA, 11 nt, Human
ccucagugcca

SEQ ID NO: 3521643 - RNA, 16 nt, Human
ccucaguggacuuucc

SEQ ID NO: 3521644 - RNA, 18 nt, Human
ccucaguggacuuuccac

SEQ ID NO: 3521645 - RNA, 13 nt, Human
ccucaguguauuu

SEQ ID NO: 3521646 - RNA, 11 nt, Human
ccucaguguca

SEQ ID NO: 3521647 - RNA, 23 nt, Human
ccucagugucauuuaugaaaaga

SEQ ID NO: 3521648 - RNA, 15 nt, Human
ccucaguucccuugg

SEQ ID NO: 3521649 - RNA, 19 nt, Human
ccucaguucccuuggccuc

SEQ ID NO: 3521650 - RNA, 14 nt, Human
ccucaguugugcag

SEQ ID NO: 3521651 - RNA, 23 nt, Human
ccucaguuuaauccuucuaguuu

SEQ ID NO: 3521652 - RNA, 21 nt, Human
ccucauagcccucacccuggg

SEQ ID NO: 3521653 - RNA, 20 nt, Human
ccucauaguaugguggcugg

SEQ ID NO: 3521654 - RNA, 21 nt, Human
ccucauaguaugguggcuggg

SEQ ID NO: 3521655 - RNA, 13 nt, Human
ccucaucaccaac

SEQ ID NO: 3521656 - RNA, 21 nt, Human
ccucaucaggaugaacccagg

SEQ ID NO: 3521657 - RNA, 23 nt, Human
ccucaucaggaugaacccaggac

SEQ ID NO: 3521658 - RNA, 13 nt, Human
ccucaucccauga

SEQ ID NO: 3521659 - RNA, 17 nt, Human
ccucauccgaggcaggg

SEQ ID NO: 3521660 - RNA, 18 nt, Human
cauauggguuagauguug

SEQ ID NO: 3521661 - RNA, 20 nt, Human
cauauggucuccauuuuaca

SEQ ID NO: 3521662 - RNA, 13 nt, Human
cauauguaaaaua

SEQ ID NO: 3521663 - RNA, 15 nt, Human
cauauguaaacauaa

SEQ ID NO: 3521664 - RNA, 19 nt, Human
cauauguacauaaauugca

SEQ ID NO: 3521665 - RNA, 17 nt, Human
cauauguagacuauaua

SEQ ID NO: 3521666 - RNA, 19 nt, Human
cauauguagacuauauaca

SEQ ID NO: 3521667 - RNA, 21 nt, Human
cauauguagacuauauacaug

SEQ ID NO: 3521668 - RNA, 23 nt, Human
cauauguagacuauauacaugug

SEQ ID NO: 3521669 - RNA, 17 nt, Human
cauauguagccuucaca

SEQ ID NO: 3521670 - RNA, 24 nt, Human
cauauguagccuucacacagauag

SEQ ID NO: 3521671 - RNA, 15 nt, Human
cauauguauacaugu

SEQ ID NO: 3521672 - RNA, 17 nt, Human
ccugcaccggggccugg

SEQ ID NO: 3521673 - RNA, 18 nt, Human
ccugcaccuccccccacu

SEQ ID NO: 3521674 - RNA, 19 nt, Human
ccugcaccuccccccacug

SEQ ID NO: 3521675 - RNA, 16 nt, Human
ccugcacggugggccu

SEQ ID NO: 3521676 - RNA, 17 nt, Human
ccugcacggugggccuu

SEQ ID NO: 3521677 - RNA, 18 nt, Human
ccugcacggugggccuug

SEQ ID NO: 3521678 - RNA, 20 nt, Human
ccugcacggugggccuugcu

SEQ ID NO: 3521679 - RNA, 21 nt, Human
ccugcacggugggccuugcug

SEQ ID NO: 3521680 - RNA, 23 nt, Human
ccugcacggugggccuugcuggg

SEQ ID NO: 3521681 - RNA, 14 nt, Human
ccugcacuaaagcc

SEQ ID NO: 3521682 - RNA, 21 nt, Human
ccugcacuaaagccagccuga

SEQ ID NO: 3521683 - RNA, 15 nt, Human
ccugcacuguaaaau

SEQ ID NO: 3521684 - RNA, 16 nt, Human
ccugcacuguaaaaug

SEQ ID NO: 3521685 - RNA, 12 nt, Human
ccugcacugucc

SEQ ID NO: 3521686 - RNA, 16 nt, Human
ccugcacuguccugcu

SEQ ID NO: 3521687 - RNA, 19 nt, Human
ccugcacuguccugcucca

SEQ ID NO: 3521688 - RNA, 18 nt, Human
ccugcacuugcagacucu

SEQ ID NO: 3521689 - RNA, 22 nt, Human
ccugcacuugcagacucuacag

SEQ ID NO: 3521690 - RNA, 15 nt, Human
ccugcacuugggggc

SEQ ID NO: 3521691 - RNA, 16 nt, Human
ccugcacuugggggcu

SEQ ID NO: 3521692 - RNA, 14 nt, Human
ccugcagacccugc

SEQ ID NO: 3521693 - RNA, 18 nt, Human
ccugcagacccugcccuu

SEQ ID NO: 3521694 - RNA, 15 nt, Human
ccugcagacucacug

SEQ ID NO: 3521695 - RNA, 15 nt, Human
ccugcagagagaagc

SEQ ID NO: 3521696 - RNA, 16 nt, Human
ccugcagagagaagcc

SEQ ID NO: 3521697 - RNA, 12 nt, Human
ccugcagagaug

SEQ ID NO: 3521698 - RNA, 12 nt, Human
ccugcagagcug

SEQ ID NO: 3521699 - RNA, 17 nt, Human
ccugcagagcugcgggc

SEQ ID NO: 3521700 - RNA, 19 nt, Human
ccugcagaggggaaaccag

SEQ ID NO: 3521701 - RNA, 22 nt, Human
ccugcagaggucugugcugagg

SEQ ID NO: 3521702 - RNA, 15 nt, Human
ccugcagaugccacc

SEQ ID NO: 3521703 - RNA, 19 nt, Human
ccugcagcaaacacuccac

SEQ ID NO: 3521704 - RNA, 24 nt, Human
ccugcagcaaacacuccacccucc

SEQ ID NO: 3521705 - RNA, 15 nt, Human
ccugcagcacggaca

SEQ ID NO: 3521706 - RNA, 16 nt, Human
ccugcagcacggacaa

SEQ ID NO: 3521707 - RNA, 21 nt, Human
ccugcagcagagccuggaaga

SEQ ID NO: 3521708 - RNA, 18 nt, Human
ccugcagcauggucccug

SEQ ID NO: 3521709 - RNA, 19 nt, Human
ccugcagcauggucccugc

SEQ ID NO: 3521710 - RNA, 23 nt, Human
ccugcagcauggucccugccuua

SEQ ID NO: 3521711 - RNA, 23 nt, Human
ccugcagccucccuccgcggcgg

SEQ ID NO: 3521712 - RNA, 16 nt, Human
ccugcagccugcagga

SEQ ID NO: 3521713 - RNA, 16 nt, Human
ccugcagccuggaggc

SEQ ID NO: 3521714 - RNA, 20 nt, Human
ccugcagcuuguagccagcc

SEQ ID NO: 3521715 - RNA, 21 nt, Human
ccugcagcuuguagccagccg

SEQ ID NO: 3521716 - RNA, 13 nt, Human
ccugcaggaagga

SEQ ID NO: 3521717 - RNA, 17 nt, Human
ccugcaggaaggagcug

SEQ ID NO: 3521718 - RNA, 21 nt, Human
ccugcaggaaggagcugccug

SEQ ID NO: 3521719 - RNA, 18 nt, Human
ccugcaggaccucgugcc

SEQ ID NO: 3521720 - RNA, 16 nt, Human
ccugcaggaccugccu

SEQ ID NO: 3521721 - RNA, 14 nt, Human
ccugcaggcagcca

SEQ ID NO: 3521722 - RNA, 18 nt, Human
ccugcaggcagccaggcc

SEQ ID NO: 3521723 - RNA, 21 nt, Human
ccugcaggccaagagcagagg

SEQ ID NO: 3521724 - RNA, 17 nt, Human
ccugcagggccauggcu

SEQ ID NO: 3521725 - RNA, 19 nt, Human
ccugcaggguggugcuggg

SEQ ID NO: 3521726 - RNA, 15 nt, Human
ccugcaggugcugcu

SEQ ID NO: 3521727 - RNA, 20 nt, Human
ccugcaggugcugcugcgug

SEQ ID NO: 3521728 - RNA, 18 nt, Human
ccugcaguacuuuaccuc

SEQ ID NO: 3521729 - RNA, 20 nt, Human
ccugcaguacuuuaccuccu

SEQ ID NO: 3521730 - RNA, 16 nt, Human
ccugcagucuggcuga

SEQ ID NO: 3521731 - RNA, 21 nt, Human
ccugcagucuggcugagcccu

SEQ ID NO: 3521732 - RNA, 21 nt, Human
ccugcaguguucgcuuggcuc

SEQ ID NO: 3521733 - RNA, 13 nt, Human
ccugcaguucccc

SEQ ID NO: 3521734 - RNA, 22 nt, Human
ccugcauaauguuucuggauuu

SEQ ID NO: 3521735 - RNA, 22 nt, Human
ccugcauccauucuccugagga

SEQ ID NO: 3521736 - RNA, 19 nt, Human
ccugcauccguaguucccu

SEQ ID NO: 3521737 - RNA, 17 nt, Human
ccugcaucuaagcccau

SEQ ID NO: 3521738 - RNA, 19 nt, Human
ccugcaucugaccagcagc

SEQ ID NO: 3521739 - RNA, 15 nt, Human
ccugcaucuggggcc

SEQ ID NO: 3521740 - RNA, 14 nt, Human
ccugcaucuuuagu

SEQ ID NO: 3521741 - RNA, 18 nt, Human
ccugcauggcauccucca

SEQ ID NO: 3521742 - RNA, 20 nt, Human
ccugcauggcauccuccagc

SEQ ID NO: 3521743 - RNA, 22 nt, Human
ccugcauggcauccuccagccc

SEQ ID NO: 3521744 - RNA, 16 nt, Human
ccugcauggcugagcu

SEQ ID NO: 3521745 - RNA, 21 nt, Human
ccugcauggcugagcugccca

SEQ ID NO: 3521746 - RNA, 18 nt, Human
ccugcaugggccagcccc

SEQ ID NO: 3521747 - RNA, 21 nt, Human
ccugcauguaaacacgccugc

SEQ ID NO: 3521748 - RNA, 22 nt, Human
ccugcauuggaacuggaggcag

SEQ ID NO: 3521749 - RNA, 23 nt, Human
ccugcauuggaacuggaggcagg

SEQ ID NO: 3521750 - RNA, 14 nt, Human
ccugcauuguaaau

SEQ ID NO: 3521751 - RNA, 12 nt, Human
ccugcauuguua

SEQ ID NO: 3521752 - RNA, 14 nt, Human
ccugcauuucugag

SEQ ID NO: 3521753 - RNA, 18 nt, Human
ccugccacauuagaacuu

SEQ ID NO: 3521754 - RNA, 15 nt, Human
ccugccaccacgccc

SEQ ID NO: 3521755 - RNA, 18 nt, Human
ccugccaccaggccaccu

SEQ ID NO: 3521756 - RNA, 14 nt, Human
ccugccaccaguca

SEQ ID NO: 3521757 - RNA, 17 nt, Human
ccugccacccagcccca

SEQ ID NO: 3521758 - RNA, 24 nt, Human
ccugccacccugggccuggcagcu

SEQ ID NO: 3521759 - RNA, 16 nt, Human
ccugccacccugggga

SEQ ID NO: 3521760 - RNA, 14 nt, Human
ccugccacccugua

SEQ ID NO: 3521761 - RNA, 16 nt, Human
ccugccaccucccuga

SEQ ID NO: 3521762 - RNA, 17 nt, Human
ccugccaccuccugccu

SEQ ID NO: 3521763 - RNA, 15 nt, Human
ccugccaccuggacc

SEQ ID NO: 3521764 - RNA, 13 nt, Human
ccugccaccuggg

SEQ ID NO: 3521765 - RNA, 12 nt, Human
ccugccaccugu

SEQ ID NO: 3521766 - RNA, 13 nt, Human
ccugccaccuguc

SEQ ID NO: 3521767 - RNA, 14 nt, Human
ccugccaccugucu

SEQ ID NO: 3521768 - RNA, 16 nt, Human
ccugccaccugucugu

SEQ ID NO: 3521769 - RNA, 21 nt, Human
ccugccacucacacagccagg

SEQ ID NO: 3521770 - RNA, 13 nt, Human
ccugccacucacu

SEQ ID NO: 3521771 - RNA, 23 nt, Human
ccugccacucaggcccaaagccu

SEQ ID NO: 3521772 - RNA, 23 nt, Human
ccugccacuuugguacauggcca

SEQ ID NO: 3521773 - RNA, 14 nt, Human
ccugccagaccccc

SEQ ID NO: 3521774 - RNA, 14 nt, Human
ccugccagcacccc

SEQ ID NO: 3521775 - RNA, 14 nt, Human
ccugccagccccug

SEQ ID NO: 3521776 - RNA, 14 nt, Human
ccugccagccuggc

SEQ ID NO: 3521777 - RNA, 21 nt, Human
ccugccagccuggcuucugga

SEQ ID NO: 3521778 - RNA, 14 nt, Human
ccugccagcugcac

SEQ ID NO: 3521779 - RNA, 16 nt, Human
ccugccagcugcacug

SEQ ID NO: 3521780 - RNA, 18 nt, Human
ccugccagcugcacugau

SEQ ID NO: 3521781 - RNA, 19 nt, Human
ccugccaggaagccagcag

SEQ ID NO: 3521782 - RNA, 22 nt, Human
ccugccaggaagccagcaggcu

SEQ ID NO: 3521783 - RNA, 23 nt, Human
ccugccaggaagccagcaggcuc

SEQ ID NO: 3521784 - RNA, 13 nt, Human
ccugccaggagga

SEQ ID NO: 3521785 - RNA, 19 nt, Human
ccugccaggaggacccagg

SEQ ID NO: 3521786 - RNA, 22 nt, Human
ccugccaggaggacccagggcu

SEQ ID NO: 3521787 - RNA, 23 nt, Human
ccugccaggaggacccagggcuc

SEQ ID NO: 3521788 - RNA, 15 nt, Human
ccugccaggcacagg

SEQ ID NO: 3521789 - RNA, 16 nt, Human
ccugccaggcacaggc

SEQ ID NO: 3521790 - RNA, 18 nt, Human
ccugccaggcacaggcag

SEQ ID NO: 3521791 - RNA, 19 nt, Human
ccugccaggcacaggcagg

SEQ ID NO: 3521792 - RNA, 20 nt, Human
ccugccaggcacaggcaggg

SEQ ID NO: 3521793 - RNA, 21 nt, Human
ccugccaggcacaggcagggc

SEQ ID NO: 3521794 - RNA, 12 nt, Human
ccugccagggac

SEQ ID NO: 3521795 - RNA, 13 nt, Human
ccugccagggaca

SEQ ID NO: 3521796 - RNA, 16 nt, Human
ccugccagggacagag

SEQ ID NO: 3521797 - RNA, 22 nt, Human
ccugccagggacagagggggug

SEQ ID NO: 3521798 - RNA, 19 nt, Human
ccugccagggagacagagc

SEQ ID NO: 3521799 - RNA, 20 nt, Human
ccugccagggagacagagcu

SEQ ID NO: 3521800 - RNA, 17 nt, Human
ccugccagggcagggcc

SEQ ID NO: 3521801 - RNA, 19 nt, Human
ccugccagggcagggcccc

SEQ ID NO: 3521802 - RNA, 21 nt, Human
ccugccaguccuagcugcaca

SEQ ID NO: 3521803 - RNA, 14 nt, Human
ccugccagugccuu

SEQ ID NO: 3521804 - RNA, 13 nt, Human
ccugcccccaccc

SEQ ID NO: 3521805 - RNA, 19 nt, Human
ccugcccccaccccauucc

SEQ ID NO: 3521806 - RNA, 14 nt, Human
ccugcccccacuuc

SEQ ID NO: 3521807 - RNA, 14 nt, Human
ccugcccccagccc

SEQ ID NO: 3521808 - RNA, 18 nt, Human
ccugcccccaggacuggg

SEQ ID NO: 3521809 - RNA, 22 nt, Human
ccugcccccaggacugggccac

SEQ ID NO: 3521810 - RNA, 23 nt, Human
ccugcccccgcauccccugccuc

SEQ ID NO: 3521811 - RNA, 14 nt, Human
ccugcccccugcag

SEQ ID NO: 3521812 - RNA, 19 nt, Human
ccugcccccugcaggaagg

SEQ ID NO: 3521813 - RNA, 14 nt, Human
ccugcccccuggug

SEQ ID NO: 3521814 - RNA, 15 nt, Human
ccugcccccuggugg

SEQ ID NO: 3521815 - RNA, 22 nt, Human
ccugcccccuucucccacacug

SEQ ID NO: 3521816 - RNA, 13 nt, Human
ccugccccgcccc

SEQ ID NO: 3521817 - RNA, 15 nt, Human
ccugccccucccaga

SEQ ID NO: 3521818 - RNA, 20 nt, Human
ccugccccuccucucugccc

SEQ ID NO: 3521819 - RNA, 22 nt, Human
ccugccccuccucucugcccua

SEQ ID NO: 3521820 - RNA, 15 nt, Human
ccugccccucuuucu

SEQ ID NO: 3521821 - RNA, 19 nt, Human
ccugccccucuuucucuuu

SEQ ID NO: 3521822 - RNA, 23 nt, Human
ccugccccucuuucucuuucuuc

SEQ ID NO: 3521823 - RNA, 17 nt, Human
ccugccccugccccguc

SEQ ID NO: 3521824 - RNA, 21 nt, Human
ccugccccuucuacacucucc

SEQ ID NO: 3521825 - RNA, 13 nt, Human
ccugcccgcacag

SEQ ID NO: 3521826 - RNA, 20 nt, Human
ccugcccgcagaccucugga

SEQ ID NO: 3521827 - RNA, 17 nt, Human
ccugcccgucucucucc

SEQ ID NO: 3521828 - RNA, 18 nt, Human
ccugcccuaccugcccca

SEQ ID NO: 3521829 - RNA, 14 nt, Human
ccugcccuccccag

SEQ ID NO: 3521830 - RNA, 13 nt, Human
ccugcccucgugg

SEQ ID NO: 3521831 - RNA, 16 nt, Human
ccugcccucguggcca

SEQ ID NO: 3521832 - RNA, 17 nt, Human
ccugcccucguggccag

SEQ ID NO: 3521833 - RNA, 19 nt, Human
ccugcccucguggccagcc

SEQ ID NO: 3521834 - RNA, 20 nt, Human
ccugcccucguggccagccc

SEQ ID NO: 3521835 - RNA, 22 nt, Human
ccugcccucguggccagcccgg

SEQ ID NO: 3521836 - RNA, 14 nt, Human
ccugcccugccacc

SEQ ID NO: 3521837 - RNA, 15 nt, Human
ccugcccugcccugc

SEQ ID NO: 3521838 - RNA, 14 nt, Human
ccugcccugguuuc

SEQ ID NO: 3521839 - RNA, 20 nt, Human
ccugcccugguuuccugccc

SEQ ID NO: 3521840 - RNA, 21 nt, Human
ccugcccugguuuccugcccu

SEQ ID NO: 3521841 - RNA, 18 nt, Human
ccugcccugucaggaggc

SEQ ID NO: 3521842 - RNA, 11 nt, Human
ccugcccugug

SEQ ID NO: 3521843 - RNA, 14 nt, Human
ccugcccugugggc

SEQ ID NO: 3521844 - RNA, 13 nt, Human
ccugcccuuggca

SEQ ID NO: 3521845 - RNA, 16 nt, Human
ccugcccuugucccac

SEQ ID NO: 3521846 - RNA, 19 nt, Human
ccugcccuugucccacuca

SEQ ID NO: 3521847 - RNA, 21 nt, Human
ccugcccuuguuuggggcagg

SEQ ID NO: 3521848 - RNA, 22 nt, Human
ccugcccuuguuuggggcagga

SEQ ID NO: 3521849 - RNA, 19 nt, Human
ccugcccuuuguccuccug

SEQ ID NO: 3521850 - RNA, 21 nt, Human
ccugcccuuuguccuccugcu

SEQ ID NO: 3521851 - RNA, 20 nt, Human
ccugccgacacgcucccucc

SEQ ID NO: 3521852 - RNA, 21 nt, Human
ccugccgacacgcucccuccc

SEQ ID NO: 3521853 - RNA, 18 nt, Human
ccugccgaccucguccuc

SEQ ID NO: 3521854 - RNA, 17 nt, Human
ccugccgcagagcuggc

SEQ ID NO: 3521855 - RNA, 16 nt, Human
ccugccgggcugaggg

SEQ ID NO: 3521856 - RNA, 20 nt, Human
ccugccgggcugagggccug

SEQ ID NO: 3521857 - RNA, 21 nt, Human
ccugccgguaaacacgccugc

SEQ ID NO: 3521858 - RNA, 18 nt, Human
ccugccgucaccaccacc

SEQ ID NO: 3521859 - RNA, 22 nt, Human
ccugccgucaccaccaccccua

SEQ ID NO: 3521860 - RNA, 16 nt, Human
ccugccucagccuccc

SEQ ID NO: 3521861 - RNA, 12 nt, Human
ccugccucagga

SEQ ID NO: 3521862 - RNA, 16 nt, Human
ccugccuccacccucu

SEQ ID NO: 3521863 - RNA, 16 nt, Human
ccugccuccagggcug

SEQ ID NO: 3521864 - RNA, 21 nt, Human
ccugccuccagggcuggacug

SEQ ID NO: 3521865 - RNA, 17 nt, Human
ccugccuccauccuagu

SEQ ID NO: 3521866 - RNA, 16 nt, Human
ccugccucccuucaug

SEQ ID NO: 3521867 - RNA, 17 nt, Human
ccugccucccuugacuu

SEQ ID NO: 3521868 - RNA, 11 nt, Human
ccugccuccug

SEQ ID NO: 3521869 - RNA, 12 nt, Human
ccugccuccugc

SEQ ID NO: 3521870 - RNA, 23 nt, Human
ccugccuccugccggcuccuugg

SEQ ID NO: 3521871 - RNA, 15 nt, Human
ccugccuccuuugug

SEQ ID NO: 3521872 - RNA, 20 nt, Human
ccugccuccuuugugaggaa

SEQ ID NO: 3521873 - RNA, 21 nt, Human
ccugccuccuuugugaggaag

SEQ ID NO: 3521874 - RNA, 21 nt, Human
ccugccucuacugggaaggcu

SEQ ID NO: 3521875 - RNA, 18 nt, Human
ccugccucucccaggcag

SEQ ID NO: 3521876 - RNA, 16 nt, Human
ccugccucuccgcccc

SEQ ID NO: 3521877 - RNA, 18 nt, Human
ccugccucuccgccccug

SEQ ID NO: 3521878 - RNA, 23 nt, Human
ccugccucuccgccccugagccc

SEQ ID NO: 3521879 - RNA, 15 nt, Human
ccugccucucugcag

SEQ ID NO: 3521880 - RNA, 17 nt, Human
ccugccucucugcaggu

SEQ ID NO: 3521881 - RNA, 21 nt, Human
ccugccucucugcaggucccu

SEQ ID NO: 3521882 - RNA, 13 nt, Human
ccugccucugccc

SEQ ID NO: 3521883 - RNA, 14 nt, Human
ccugccucuguuug

SEQ ID NO: 3521884 - RNA, 15 nt, Human
ccugccucuucucua

SEQ ID NO: 3521885 - RNA, 14 nt, Human
ccugccugagggcc

SEQ ID NO: 3521886 - RNA, 21 nt, Human
ccugccugagggccccucugc

SEQ ID NO: 3521887 - RNA, 11 nt, Human
ccugccuggag

SEQ ID NO: 3521888 - RNA, 20 nt, Human
ccuggggcuccuuucuccag

SEQ ID NO: 3521889 - RNA, 14 nt, Human
ccuggggcugcugg

SEQ ID NO: 3521890 - RNA, 16 nt, Human
ccuggggcuggccucc

SEQ ID NO: 3521891 - RNA, 13 nt, Human
ccuggggcugggc

SEQ ID NO: 3521892 - RNA, 17 nt, Human
ccuggggcuucuccuga

SEQ ID NO: 3521893 - RNA, 21 nt, Human
ccuggggcuucuccugaccca

SEQ ID NO: 3521894 - RNA, 18 nt, Human
ccugggggaguuuuccuc

SEQ ID NO: 3521895 - RNA, 19 nt, Human
ccugggggaguuuuccucu

SEQ ID NO: 3521896 - RNA, 11 nt, Human
ccugggggccu

SEQ ID NO: 3521897 - RNA, 12 nt, Human
ccugggggccug

SEQ ID NO: 3521898 - RNA, 22 nt, Human
ccugggggccugaccucccccu

SEQ ID NO: 3521899 - RNA, 13 nt, Human
ccugggggccugg

SEQ ID NO: 3521900 - RNA, 14 nt, Human
ccugggggccuggc

SEQ ID NO: 3521901 - RNA, 23 nt, Human
ccugggggccuggcuggcugagg

SEQ ID NO: 3521902 - RNA, 17 nt, Human
ccugggggccuggguug

SEQ ID NO: 3521903 - RNA, 14 nt, Human
ccugggggcucuca

SEQ ID NO: 3521904 - RNA, 21 nt, Human
ccugggggcugggcagaggaa

SEQ ID NO: 3521905 - RNA, 14 nt, Human
ccugggggugccag

SEQ ID NO: 3521906 - RNA, 16 nt, Human
ccugggggugccagga

SEQ ID NO: 3521907 - RNA, 12 nt, Human
ccuggggguggg

SEQ ID NO: 3521908 - RNA, 21 nt, Human
ccuggggguucuuucuuccuc

SEQ ID NO: 3521909 - RNA, 23 nt, Human
ccuggggguucuuucuuccucug

SEQ ID NO: 3521910 - RNA, 21 nt, Human
ccugggguauaaaacuuuccu

SEQ ID NO: 3521911 - RNA, 20 nt, Human
ccuggggucaggccgggcag

SEQ ID NO: 3521912 - RNA, 22 nt, Human
ccuggggucaggccgggcagag

SEQ ID NO: 3521913 - RNA, 14 nt, Human
ccuggggugcaggc

SEQ ID NO: 3521914 - RNA, 15 nt, Human
ccuggggugggguca

SEQ ID NO: 3521915 - RNA, 21 nt, Human
ccugggguguuaguggcaccg

SEQ ID NO: 3521916 - RNA, 14 nt, Human
ccugggucagucug

SEQ ID NO: 3521917 - RNA, 17 nt, Human
ccuggguccaaauaaaa

SEQ ID NO: 3521918 - RNA, 14 nt, Human
ccuggguccuuuuc

SEQ ID NO: 3521919 - RNA, 17 nt, Human
ccugggucugugucucu

SEQ ID NO: 3521920 - RNA, 13 nt, Human
ccugggugacauu

SEQ ID NO: 3521921 - RNA, 21 nt, Human
ccuggguggcuacucugugcc

SEQ ID NO: 3521922 - RNA, 19 nt, Human
ccuggguggggcugcuccu

SEQ ID NO: 3521923 - RNA, 13 nt, Human
ccugggugggugg

SEQ ID NO: 3521924 - RNA, 20 nt, Human
ccugggugggugguggggag

SEQ ID NO: 3521925 - RNA, 22 nt, Human
ccugggugggugguggggaggg

SEQ ID NO: 3521926 - RNA, 18 nt, Human
ccuggguuccaauccugg

SEQ ID NO: 3521927 - RNA, 13 nt, Human
ccuggguucccuu

SEQ ID NO: 3521928 - RNA, 20 nt, Human
ccuggguuuuguauucucug

SEQ ID NO: 3521929 - RNA, 17 nt, Human
ccuggguuuuguucccu

SEQ ID NO: 3521930 - RNA, 19 nt, Human
ccugguaagaaaaagcaaa

SEQ ID NO: 3521931 - RNA, 15 nt, Human
ccugguacccuccug

SEQ ID NO: 3521932 - RNA, 15 nt, Human
ccugguacucaagcc

SEQ ID NO: 3521933 - RNA, 17 nt, Human
ccugguagaauagauau

SEQ ID NO: 3521934 - RNA, 15 nt, Human
ccugguauggcugca

SEQ ID NO: 3521935 - RNA, 21 nt, Human
ccugguauggguuucucccag

SEQ ID NO: 3521936 - RNA, 23 nt, Human
ccuggucacaggacucugccucc

SEQ ID NO: 3521937 - RNA, 20 nt, Human
ccuggucacagggcaugccc

SEQ ID NO: 3521938 - RNA, 21 nt, Human
ccuggucaccuaggaagccuc

SEQ ID NO: 3521939 - RNA, 14 nt, Human
ccuggucagcccaa

SEQ ID NO: 3521940 - RNA, 17 nt, Human
ccugguccacagggcac

SEQ ID NO: 3521941 - RNA, 19 nt, Human
ccugguccaugcagggggc

SEQ ID NO: 3521942 - RNA, 15 nt, Human
ccugguccccuccuu

SEQ ID NO: 3521943 - RNA, 19 nt, Human
ccugguccuaggcuggaag

SEQ ID NO: 3521944 - RNA, 24 nt, Human
ccugguccuaggcuggaaggagga

SEQ ID NO: 3521945 - RNA, 16 nt, Human
ccuggucgccuuccac

SEQ ID NO: 3521946 - RNA, 16 nt, Human
ccuggucuccugcccc

SEQ ID NO: 3521947 - RNA, 14 nt, Human
ccuggucucugguc

SEQ ID NO: 3521948 - RNA, 22 nt, Human
ccuggucugguugggcagccag

SEQ ID NO: 3521949 - RNA, 19 nt, Human
ccugucagugcagcccgug

SEQ ID NO: 3521950 - RNA, 12 nt, Human
ccugucagugcc

SEQ ID NO: 3521951 - RNA, 13 nt, Human
ccugucagugccg

SEQ ID NO: 3521952 - RNA, 14 nt, Human
ccugucagugccgc

SEQ ID NO: 3521953 - RNA, 14 nt, Human
ccugucaugccccc

SEQ ID NO: 3521954 - RNA, 15 nt, Human
ccugucaugcccccc

SEQ ID NO: 3521955 - RNA, 16 nt, Human
ccugucaugccccccu

SEQ ID NO: 3521956 - RNA, 17 nt, Human
ccuguccaaacugccua

SEQ ID NO: 3521957 - RNA, 19 nt, Human
ccuguccaaacugccuaag

SEQ ID NO: 3521958 - RNA, 16 nt, Human
ccuguccaaucuuuga

SEQ ID NO: 3521959 - RNA, 18 nt, Human
ccuguccacacccagcuc

SEQ ID NO: 3521960 - RNA, 19 nt, Human
ccuguccacacccagcuca

SEQ ID NO: 3521961 - RNA, 21 nt, Human
ccuguccacacccagcucagc

SEQ ID NO: 3521962 - RNA, 22 nt, Human
ccuguccacccccgccucccuc

SEQ ID NO: 3521963 - RNA, 14 nt, Human
ccuguccagccugg

SEQ ID NO: 3521964 - RNA, 16 nt, Human
ccuguccagccugggc

SEQ ID NO: 3521965 - RNA, 18 nt, Human
ccuguccaucagccagga

SEQ ID NO: 3521966 - RNA, 15 nt, Human
ccugucccaccccca

SEQ ID NO: 3521967 - RNA, 17 nt, Human
ccugucccacccccacc

SEQ ID NO: 3521968 - RNA, 19 nt, Human
ccuguccccacccuccacu

SEQ ID NO: 3521969 - RNA, 16 nt, Human
ccuguccccaucuguc

SEQ ID NO: 3521970 - RNA, 21 nt, Human
ccuguccccaucugucggccu

SEQ ID NO: 3521971 - RNA, 15 nt, Human
ccugucccccugaca

SEQ ID NO: 3521972 - RNA, 22 nt, Human
ccugucccccugagaucagagu

SEQ ID NO: 3521973 - RNA, 18 nt, Human
ccuguccccucagcucca

SEQ ID NO: 3521974 - RNA, 21 nt, Human
ccuguccccucagcuccagac

SEQ ID NO: 3521975 - RNA, 19 nt, Human
ccugucccucccaccucug

SEQ ID NO: 3521976 - RNA, 21 nt, Human
ccugucccucccaccucugug

SEQ ID NO: 3521977 - RNA, 22 nt, Human
ccugucccucucaggcaugccu

SEQ ID NO: 3521978 - RNA, 23 nt, Human
ccugucccugcgccuuuccuuuu

SEQ ID NO: 3521979 - RNA, 17 nt, Human
ccugucccuggccaucu

SEQ ID NO: 3521980 - RNA, 19 nt, Human
ccuguccgcccucuucccc

SEQ ID NO: 3521981 - RNA, 17 nt, Human
ccuguccuaaggaaccu

SEQ ID NO: 3521982 - RNA, 14 nt, Human
ccuguccucacugc

SEQ ID NO: 3521983 - RNA, 13 nt, Human
ccuguccuccaac

SEQ ID NO: 3521984 - RNA, 22 nt, Human
ccuguccuccugguggguccag

SEQ ID NO: 3521985 - RNA, 21 nt, Human
ccuguccucuuucagcuccug

SEQ ID NO: 3521986 - RNA, 13 nt, Human
ccuguccugaugg

SEQ ID NO: 3521987 - RNA, 11 nt, Human
ccuguccugcc

SEQ ID NO: 3521988 - RNA, 18 nt, Human
ccuguccugccaugcaag

SEQ ID NO: 3521989 - RNA, 18 nt, Human
ccuguccugggcuggugg

SEQ ID NO: 3521990 - RNA, 21 nt, Human
ccuguccuucucucaccuccu

SEQ ID NO: 3521991 - RNA, 12 nt, Human
ccuguccuugca

SEQ ID NO: 3521992 - RNA, 15 nt, Human
ccugucgagacacuu

SEQ ID NO: 3521993 - RNA, 23 nt, Human
ccugucgaguucggcucugggug

SEQ ID NO: 3521994 - RNA, 17 nt, Human
ccugucggccugguguu

SEQ ID NO: 3521995 - RNA, 15 nt, Human
ccugucuaaugaaac

SEQ ID NO: 3521996 - RNA, 16 nt, Human
ccugucuagagaggga

SEQ ID NO: 3521997 - RNA, 18 nt, Human
ccugucuagucucuccug

SEQ ID NO: 3521998 - RNA, 23 nt, Human
ccugucuagucucuccuguaagc

SEQ ID NO: 3521999 - RNA, 14 nt, Human
ccugucucagccuc

SEQ ID NO: 3522000 - RNA, 15 nt, Human
ccugucucagccucc

SEQ ID NO: 3522001 - RNA, 18 nt, Human
ccugucucauccccaggg

SEQ ID NO: 3522002 - RNA, 15 nt, Human
ccugucuccacugug

SEQ ID NO: 3522003 - RNA, 16 nt, Human
ccugucuccacugugc

SEQ ID NO: 3522004 - RNA, 19 nt, Human
ccugucuccccucugcugg

SEQ ID NO: 3522005 - RNA, 20 nt, Human
ccugucuccccucugcuggc

SEQ ID NO: 3522006 - RNA, 13 nt, Human
ccugucuccuggc

SEQ ID NO: 3522007 - RNA, 16 nt, Human
ccugucuccuggcggu

SEQ ID NO: 3522008 - RNA, 23 nt, Human
ccugucuccuuucaccccagggc

SEQ ID NO: 3522009 - RNA, 20 nt, Human
ccugucucucagggccaggc

SEQ ID NO: 3522010 - RNA, 21 nt, Human
ccugucucucagggccaggcc

SEQ ID NO: 3522011 - RNA, 13 nt, Human
ccugucucugccc

SEQ ID NO: 3522012 - RNA, 13 nt, Human
ccugucucuucca

SEQ ID NO: 3522013 - RNA, 21 nt, Human
ccugucugaaggacacuuccu

SEQ ID NO: 3522014 - RNA, 19 nt, Human
ccugucugaauguaccugu

SEQ ID NO: 3522015 - RNA, 14 nt, Human
ccugucugccagcc

SEQ ID NO: 3522016 - RNA, 16 nt, Human
ccugucugccagccag

SEQ ID NO: 3522017 - RNA, 20 nt, Human
ccugucugccagccagcagc

SEQ ID NO: 3522018 - RNA, 13 nt, Human
ccugucugcucca

SEQ ID NO: 3522019 - RNA, 15 nt, Human
ccugucugcuccagc

SEQ ID NO: 3522020 - RNA, 21 nt, Human
ccugucuguagagggcccugg

SEQ ID NO: 3522021 - RNA, 23 nt, Human
ccugucuguagagggcccuggug

SEQ ID NO: 3522022 - RNA, 17 nt, Human
ccugucugucucuccau

SEQ ID NO: 3522023 - RNA, 18 nt, Human
ccugucugucucuccauc

SEQ ID NO: 3522024 - RNA, 21 nt, Human
ccugucugucucuccaucugu

SEQ ID NO: 3522025 - RNA, 20 nt, Human
ccugucugucugucuguccc

SEQ ID NO: 3522026 - RNA, 11 nt, Human
ccugucuguga

SEQ ID NO: 3522027 - RNA, 14 nt, Human
ccugucuucugcuu

SEQ ID NO: 3522028 - RNA, 16 nt, Human
ccugucuucugcuuug

SEQ ID NO: 3522029 - RNA, 21 nt, Human
ccugucuucugcuuuguugug

SEQ ID NO: 3522030 - RNA, 17 nt, Human
ccugucuuuaaggaaaa

SEQ ID NO: 3522031 - RNA, 22 nt, Human
ccugugaaagacucaaugagcu

SEQ ID NO: 3522032 - RNA, 14 nt, Human
ccugugaacccagg

SEQ ID NO: 3522033 - RNA, 16 nt, Human
ccugugaacccaggac

SEQ ID NO: 3522034 - RNA, 17 nt, Human
ccugugaacccaggaca

SEQ ID NO: 3522035 - RNA, 17 nt, Human
ccugugaacugaacucu

SEQ ID NO: 3522036 - RNA, 18 nt, Human
ccugugaaguaaggaugu

SEQ ID NO: 3522037 - RNA, 17 nt, Human
ccugugaaugccacugc

SEQ ID NO: 3522038 - RNA, 22 nt, Human
ccugugaaugccacugccuucg

SEQ ID NO: 3522039 - RNA, 19 nt, Human
ccugugacauggugccuga

SEQ ID NO: 3522040 - RNA, 21 nt, Human
ccugugacauggugccugaga

SEQ ID NO: 3522041 - RNA, 18 nt, Human
ccugugaccacaacauga

SEQ ID NO: 3522042 - RNA, 14 nt, Human
ccugugagaugugu

SEQ ID NO: 3522043 - RNA, 22 nt, Human
ccugugagcuaggaauuguguu

SEQ ID NO: 3522044 - RNA, 16 nt, Human
ccugugagcugcacca

SEQ ID NO: 3522045 - RNA, 21 nt, Human
ccugugaggagccccaucugu

SEQ ID NO: 3522046 - RNA, 14 nt, Human
ccugugaggcaggg

SEQ ID NO: 3522047 - RNA, 23 nt, Human
ccugugaggugcagagugcccag

SEQ ID NO: 3522048 - RNA, 17 nt, Human
ccugugagguuucccaa

SEQ ID NO: 3522049 - RNA, 17 nt, Human
ccugugaucuuauuuuu

SEQ ID NO: 3522050 - RNA, 17 nt, Human
ccugugcaaaaaaauua

SEQ ID NO: 3522051 - RNA, 22 nt, Human
ccugugcacacacacacacaug

SEQ ID NO: 3522052 - RNA, 19 nt, Human
ccugugccacccaccaggg

SEQ ID NO: 3522053 - RNA, 24 nt, Human
ccugcugggcucuccaccucagcc

SEQ ID NO: 3522054 - RNA, 12 nt, Human
ccugcugggugu

SEQ ID NO: 3522055 - RNA, 20 nt, Human
ccugcuggguguggcgcagc

SEQ ID NO: 3522056 - RNA, 12 nt, Human
ccugcugucccc

SEQ ID NO: 3522057 - RNA, 14 nt, Human
ccugcuguguuccc

SEQ ID NO: 3522058 - RNA, 21 nt, Human
ccugcuucagauguggagcca

SEQ ID NO: 3522059 - RNA, 23 nt, Human
ccugcuucagauguggagccagg

SEQ ID NO: 3522060 - RNA, 17 nt, Human
ccugcuucagccuccca

SEQ ID NO: 3522061 - RNA, 23 nt, Human
ccugcuucagccucccacagugc

SEQ ID NO: 3522062 - RNA, 21 nt, Human
ccugcuuccaccucaccccac

SEQ ID NO: 3522063 - RNA, 15 nt, Human
ccugcuuccauggcc

SEQ ID NO: 3522064 - RNA, 12 nt, Human
ccugcuucccac

SEQ ID NO: 3522065 - RNA, 14 nt, Human
ccugcuucccaccu

SEQ ID NO: 3522066 - RNA, 20 nt, Human
ccugcuucccaccucccugc

SEQ ID NO: 3522067 - RNA, 15 nt, Human
ccugcuuccucagag

SEQ ID NO: 3522068 - RNA, 15 nt, Human
ccugcuuccugcuug

SEQ ID NO: 3522069 - RNA, 22 nt, Human
ccugcuuccugucuuugggaga

SEQ ID NO: 3522070 - RNA, 15 nt, Human
ccugcuucuccagcc

SEQ ID NO: 3522071 - RNA, 17 nt, Human
ccugcuucucugcccag

SEQ ID NO: 3522072 - RNA, 13 nt, Human
ccugcuuggccca

SEQ ID NO: 3522073 - RNA, 15 nt, Human
ccugcuuggcccagg

SEQ ID NO: 3522074 - RNA, 22 nt, Human
ccugcuuggguggagaagccau

SEQ ID NO: 3522075 - RNA, 20 nt, Human
ccugcuuugaauaaaugugu

SEQ ID NO: 3522076 - RNA, 19 nt, Human
ccugcuuugcgugcccggg

SEQ ID NO: 3522077 - RNA, 20 nt, Human
ccugcuuugggcugcccugg

SEQ ID NO: 3522078 - RNA, 22 nt, Human
ccugcuuugggcugcccuggug

SEQ ID NO: 3522079 - RNA, 22 nt, Human
ccugcuuugucuccucuauccu

SEQ ID NO: 3522080 - RNA, 13 nt, Human
ccugcuuuucaau

SEQ ID NO: 3522081 - RNA, 21 nt, Human
ccugcuuuucacugcugcaag

SEQ ID NO: 3522082 - RNA, 22 nt, Human
ccugcuuuuugaaaugaaauuu

SEQ ID NO: 3522083 - RNA, 15 nt, Human
ccuggaaaccugucu

SEQ ID NO: 3522084 - RNA, 14 nt, Human
ccuggaaaccuucc

SEQ ID NO: 3522085 - RNA, 17 nt, Human
ccuggaaaccuuccacc

SEQ ID NO: 3522086 - RNA, 18 nt, Human
ccuggaaaccuuccaccc

SEQ ID NO: 3522087 - RNA, 20 nt, Human
ccuggaaaccuuccacccag

SEQ ID NO: 3522088 - RNA, 20 nt, Human
ccuggaaaggcucagucuca

SEQ ID NO: 3522089 - RNA, 20 nt, Human
ccuggaacaauauuuuaugg

SEQ ID NO: 3522090 - RNA, 15 nt, Human
ccuggaaccuugcug

SEQ ID NO: 3522091 - RNA, 18 nt, Human
ccuggaacugucucucau

SEQ ID NO: 3522092 - RNA, 16 nt, Human
ccuggaagaacaggcc

SEQ ID NO: 3522093 - RNA, 21 nt, Human
cauguuuacuuuucagggcau

SEQ ID NO: 3522094 - RNA, 12 nt, Human
cauguuuauaaa

SEQ ID NO: 3522095 - RNA, 21 nt, Human
cauguuuauaacuauucaguu

SEQ ID NO: 3522096 - RNA, 15 nt, Human
cauguuuaugaaaau

SEQ ID NO: 3522097 - RNA, 16 nt, Human
cauguuuaugaaaaua

SEQ ID NO: 3522098 - RNA, 19 nt, Human
cauguuuaugaaaauaaau

SEQ ID NO: 3522099 - RNA, 23 nt, Human
cauguuuaugaaaauaaauagcu

SEQ ID NO: 3522100 - RNA, 20 nt, Human
cauguuuauuacaguauaau

SEQ ID NO: 3522101 - RNA, 23 nt, Human
cauguuuauuacaguauaauuaa

SEQ ID NO: 3522102 - RNA, 22 nt, Human
cauguuucauguuuugugacua

SEQ ID NO: 3522103 - RNA, 13 nt, Human
cauguuuccagca

SEQ ID NO: 3522104 - RNA, 20 nt, Human
cauguuuccagcauucccag

SEQ ID NO: 3522105 - RNA, 13 nt, Human
cauguuuccucua

SEQ ID NO: 3522106 - RNA, 13 nt, Human
cauguuucuucau

SEQ ID NO: 3522107 - RNA, 21 nt, Human
ccuucuggauucuuggcccgc

SEQ ID NO: 3522108 - RNA, 10 nt, Human
ccuucuggcc

SEQ ID NO: 3522109 - RNA, 18 nt, Human
ccuucuggccucccacag

SEQ ID NO: 3522110 - RNA, 13 nt, Human
ccuucuggccuuu

SEQ ID NO: 3522111 - RNA, 20 nt, Human
ccuucugggcagaccuugac

SEQ ID NO: 3522112 - RNA, 19 nt, Human
ccuucugggcaucuguucu

SEQ ID NO: 3522113 - RNA, 22 nt, Human
ccuucugggcaucuguucuggu

SEQ ID NO: 3522114 - RNA, 22 nt, Human
ccuucuguccuacucuguguca

SEQ ID NO: 3522115 - RNA, 17 nt, Human
ccuucuguccugguguc

SEQ ID NO: 3522116 - RNA, 15 nt, Human
ccuucugugaaagua

SEQ ID NO: 3522117 - RNA, 14 nt, Human
ccuucugugcccag

SEQ ID NO: 3522118 - RNA, 15 nt, Human
ccuucugugcccagc

SEQ ID NO: 3522119 - RNA, 17 nt, Human
ccuucugugcccagcuc

SEQ ID NO: 3522120 - RNA, 14 nt, Human
ccuucuguggcuca

SEQ ID NO: 3522121 - RNA, 20 nt, Human
ccuucuguggggacuccggc

SEQ ID NO: 3522122 - RNA, 17 nt, Human
ccuucuuauuauauaua

SEQ ID NO: 3522123 - RNA, 18 nt, Human
ccuucuuauucucacucc

SEQ ID NO: 3522124 - RNA, 15 nt, Human
ccuucuucacccagc

SEQ ID NO: 3522125 - RNA, 18 nt, Human
ccuucuucaggcugccua

SEQ ID NO: 3522126 - RNA, 16 nt, Human
ccuucuucagggccug

SEQ ID NO: 3522127 - RNA, 15 nt, Human
ccuucuucauguuca

SEQ ID NO: 3522128 - RNA, 14 nt, Human
ccuucuuccauccc

SEQ ID NO: 3522129 - RNA, 16 nt, Human
ccuucuuccaucccag

SEQ ID NO: 3522130 - RNA, 19 nt, Human
ccuucuuccaucccaggac

SEQ ID NO: 3522131 - RNA, 23 nt, Human
ccuucuucccaauagcaaggcug

SEQ ID NO: 3522132 - RNA, 23 nt, Human
ccuucuuucacucugucaucuuu

SEQ ID NO: 3522133 - RNA, 20 nt, Human
ccuucuuucuagagagggaa

SEQ ID NO: 3522134 - RNA, 18 nt, Human
ccuucuuugauaauguua

SEQ ID NO: 3522135 - RNA, 21 nt, Human
ccuucuuugauaauguuaaau

SEQ ID NO: 3522136 - RNA, 19 nt, Human
ccuucuuugggauagagaa

SEQ ID NO: 3522137 - RNA, 14 nt, Human
ccuucuuuuaugag

SEQ ID NO: 3522138 - RNA, 23 nt, Human
ccuucuuuuucuggacucuggac

SEQ ID NO: 3522139 - RNA, 17 nt, Human
ccuugaaaaaaaacagu

SEQ ID NO: 3522140 - RNA, 22 nt, Human
ccuugaaaacacuguucucugc

SEQ ID NO: 3522141 - RNA, 19 nt, Human
ccuugaaacuuugggaaaa

SEQ ID NO: 3522142 - RNA, 20 nt, Human
ccuugaacacugggggaggg

SEQ ID NO: 3522143 - RNA, 18 nt, Human
ccuugaaccacuucccuc

SEQ ID NO: 3522144 - RNA, 16 nt, Human
ccuugaaccugugagu

SEQ ID NO: 3522145 - RNA, 17 nt, Human
ccuugaaccugugagua

SEQ ID NO: 3522146 - RNA, 21 nt, Human
ccuugaaccugugaguaaaua

SEQ ID NO: 3522147 - RNA, 13 nt, Human
ccuugaacuagga

SEQ ID NO: 3522148 - RNA, 19 nt, Human
ccuugaacuuugaccucug

SEQ ID NO: 3522149 - RNA, 22 nt, Human
ccuugaagaacugcaggcccug

SEQ ID NO: 3522150 - RNA, 13 nt, Human
ccuugaagauauc

SEQ ID NO: 3522151 - RNA, 13 nt, Human
ccuugaaggacua

SEQ ID NO: 3522152 - RNA, 21 nt, Human
ccuugaauauccccucccagu

SEQ ID NO: 3522153 - RNA, 18 nt, Human
ccuugaaugcugccagug

SEQ ID NO: 3522154 - RNA, 14 nt, Human
ccuugacaaacuuc

SEQ ID NO: 3522155 - RNA, 23 nt, Human
ccuugacaaagucaagccacaug

SEQ ID NO: 3522156 - RNA, 14 nt, Human
ccuugacaccugcu

SEQ ID NO: 3522157 - RNA, 14 nt, Human
ccuugacagggcac

SEQ ID NO: 3522158 - RNA, 23 nt, Human
ccuugacauuguagagcuucugg

SEQ ID NO: 3522159 - RNA, 20 nt, Human
ccuugaccauucuccaccug

SEQ ID NO: 3522160 - RNA, 21 nt, Human
ccuugaccauucuccaccugc

SEQ ID NO: 3522161 - RNA, 19 nt, Human
ccuugaccugcauuguaaa

SEQ ID NO: 3522162 - RNA, 20 nt, Human
ccuugaccugcauuguaaau

SEQ ID NO: 3522163 - RNA, 22 nt, Human
ccuugaccuuccucuggggcuc

SEQ ID NO: 3522164 - RNA, 16 nt, Human
ccuugacuguugaugu

SEQ ID NO: 3522165 - RNA, 16 nt, Human
ccuugacuuagauucu

SEQ ID NO: 3522166 - RNA, 13 nt, Human
ccuugacuuugcu

SEQ ID NO: 3522167 - RNA, 16 nt, Human
ccuugagaccacaggg

SEQ ID NO: 3522168 - RNA, 17 nt, Human
ccuugagaccucagcca

SEQ ID NO: 3522169 - RNA, 21 nt, Human
ccuugaggaaacaacagcuuu

SEQ ID NO: 3522170 - RNA, 21 nt, Human
ccuugaggggagccaggaggg

SEQ ID NO: 3522171 - RNA, 20 nt, Human
ccuugaguaguuuuuaucug

SEQ ID NO: 3522172 - RNA, 23 nt, Human
ccuugaguugauucagcucugca

SEQ ID NO: 3522173 - RNA, 23 nt, Human
ccuugauuguucgggugugcaau

SEQ ID NO: 3522174 - RNA, 20 nt, Human
ccuugauuuuagccuucucu

SEQ ID NO: 3522175 - RNA, 22 nt, Human
ccuugauuuuagccuucucugu

SEQ ID NO: 3522176 - RNA, 22 nt, Human
ccuugcaacacacagacacacg

SEQ ID NO: 3522177 - RNA, 12 nt, Human
ccuugcaccugc

SEQ ID NO: 3522178 - RNA, 14 nt, Human
ccuugcaccugcau

SEQ ID NO: 3522179 - RNA, 13 nt, Human
ccuugcacuuuca

SEQ ID NO: 3522180 - RNA, 13 nt, Human
ccuugcagaacug

SEQ ID NO: 3522181 - RNA, 16 nt, Human
ccuugcagaacugcca

SEQ ID NO: 3522182 - RNA, 21 nt, Human
ccuugcagcacucacacagga

SEQ ID NO: 3522183 - RNA, 19 nt, Human
ccuugcaguucagcaccac

SEQ ID NO: 3522184 - RNA, 14 nt, Human
ccuugcauaauggu

SEQ ID NO: 3522185 - RNA, 15 nt, Human
ccuugcauacaaaca

SEQ ID NO: 3522186 - RNA, 13 nt, Human
ccuugccacacuc

SEQ ID NO: 3522187 - RNA, 12 nt, Human
ccuugccagaga

SEQ ID NO: 3522188 - RNA, 13 nt, Human
ccuugccagagau

SEQ ID NO: 3522189 - RNA, 16 nt, Human
ccuugccagagaucca

SEQ ID NO: 3522190 - RNA, 13 nt, Human
ccuugccagcugc

SEQ ID NO: 3522191 - RNA, 14 nt, Human
ccuugccagcugcu

SEQ ID NO: 3522192 - RNA, 22 nt, Human
ccuugccagcugcugagccgca

SEQ ID NO: 3522193 - RNA, 12 nt, Human
ccuugccagucu

SEQ ID NO: 3522194 - RNA, 20 nt, Human
ccuugcccacuccugcucug

SEQ ID NO: 3522195 - RNA, 13 nt, Human
ccuugcccagaga

SEQ ID NO: 3522196 - RNA, 19 nt, Human
ccuugcccagagaugccuc

SEQ ID NO: 3522197 - RNA, 21 nt, Human
ccuugcccagagaugccucca

SEQ ID NO: 3522198 - RNA, 17 nt, Human
ccuugcccagccuggau

SEQ ID NO: 3522199 - RNA, 18 nt, Human
ccuugcccagggcucagc

SEQ ID NO: 3522200 - RNA, 20 nt, Human
ccuugcccagggcucagccu

SEQ ID NO: 3522201 - RNA, 20 nt, Human
ccuugccccaacccuucuuc

SEQ ID NO: 3522202 - RNA, 13 nt, Human
ccuugcccugacc

SEQ ID NO: 3522203 - RNA, 14 nt, Human
ccuugcccugaccu

SEQ ID NO: 3522204 - RNA, 15 nt, Human
ccuugcccugaccuc

SEQ ID NO: 3522205 - RNA, 19 nt, Human
ccuugcccugaccucccag

SEQ ID NO: 3522206 - RNA, 23 nt, Human
ccuugcccugaccucccagcccu

SEQ ID NO: 3522207 - RNA, 17 nt, Human
ccuugcccuugcccuga

SEQ ID NO: 3522208 - RNA, 20 nt, Human
ccuugccgucuaccugaggg

SEQ ID NO: 3522209 - RNA, 22 nt, Human
ccuugccuaaauuuaaugcugc

SEQ ID NO: 3522210 - RNA, 20 nt, Human
ccuugccucaaugccaguaa

SEQ ID NO: 3522211 - RNA, 17 nt, Human
ccuugccuccccauuuc

SEQ ID NO: 3522212 - RNA, 23 nt, Human
ccuugccuccccauuucccaucu

SEQ ID NO: 3522213 - RNA, 15 nt, Human
ccuugccugguacag

SEQ ID NO: 3522214 - RNA, 18 nt, Human
ccuugcggcuccucaggg

SEQ ID NO: 3522215 - RNA, 21 nt, Human
ccuugcggggauaaagagaga

SEQ ID NO: 3522216 - RNA, 12 nt, Human
ccuugcuaccuc

SEQ ID NO: 3522217 - RNA, 23 nt, Human
ccuugcucaaccauggcugaagg

SEQ ID NO: 3522218 - RNA, 18 nt, Human
ccuugcucucccucuucu

SEQ ID NO: 3522219 - RNA, 22 nt, Human
ccuugcuggacggggacugggg

SEQ ID NO: 3522220 - RNA, 12 nt, Human
ccuugcuggccc

SEQ ID NO: 3522221 - RNA, 13 nt, Human
ccuugcuggcccc

SEQ ID NO: 3522222 - RNA, 21 nt, Human
ccuugcuggccccagcccugc

SEQ ID NO: 3522223 - RNA, 22 nt, Human
ccuugcuggccccagcccugcu

SEQ ID NO: 3522224 - RNA, 14 nt, Human
ccuugcuguccuga

SEQ ID NO: 3522225 - RNA, 20 nt, Human
ccuugcuguuggucaugugg

SEQ ID NO: 3522226 - RNA, 16 nt, Human
ccuugcuugccugcag

SEQ ID NO: 3522227 - RNA, 18 nt, Human
ccuugcuugccugcaggg

SEQ ID NO: 3522228 - RNA, 21 nt, Human
ccuugcuugccugcagggcca

SEQ ID NO: 3522229 - RNA, 16 nt, Human
ccuugcuuuucccucu

SEQ ID NO: 3522230 - RNA, 19 nt, Human
ccuugcuuuucccucuuuu

SEQ ID NO: 3522231 - RNA, 20 nt, Human
ccuugcuuuucccucuuuuc

SEQ ID NO: 3522232 - RNA, 19 nt, Human
ccuuggaaaccugcccugc

SEQ ID NO: 3522233 - RNA, 20 nt, Human
ccuuggaaaucaaauguaaa

SEQ ID NO: 3522234 - RNA, 22 nt, Human
ccuuggaaaucaaauguaaagu

SEQ ID NO: 3522235 - RNA, 15 nt, Human
ccuuggaaguuucau

SEQ ID NO: 3522236 - RNA, 18 nt, Human
ccuuagagguccucugga

SEQ ID NO: 3522237 - RNA, 16 nt, Human
ccuuagauuagcucug

SEQ ID NO: 3522238 - RNA, 19 nt, Human
ccuuagauuuaguagugua

SEQ ID NO: 3522239 - RNA, 22 nt, Human
ccuuagcacaggggggccgccg

SEQ ID NO: 3522240 - RNA, 16 nt, Human
ccuuagccucccugaa

SEQ ID NO: 3522241 - RNA, 14 nt, Human
ccuuagccuggacc

SEQ ID NO: 3522242 - RNA, 19 nt, Human
ccuuagccuggaccucuga

SEQ ID NO: 3522243 - RNA, 19 nt, Human
ccuuagcuggcauuacagc

SEQ ID NO: 3522244 - RNA, 17 nt, Human
ccuuagcuuagaccuca

SEQ ID NO: 3522245 - RNA, 22 nt, Human
ccuuagcuuagaccucagccug

SEQ ID NO: 3522246 - RNA, 23 nt, Human
ccuuagcuuagaccucagccugu

SEQ ID NO: 3522247 - RNA, 14 nt, Human
ccuuagcuucagga

SEQ ID NO: 3522248 - RNA, 23 nt, Human
ccuuaggaagagccuuccaccca

SEQ ID NO: 3522249 - RNA, 13 nt, Human
ccuuaggcaggga

SEQ ID NO: 3522250 - RNA, 15 nt, Human
ccuuaggcagggaag

SEQ ID NO: 3522251 - RNA, 21 nt, Human
ccuuagggaagcuggccugag

SEQ ID NO: 3522252 - RNA, 16 nt, Human
ccuuagggcacugggc

SEQ ID NO: 3522253 - RNA, 20 nt, Human
ccuuagucucaguuugugug

SEQ ID NO: 3522254 - RNA, 13 nt, Human
ccuuagucuucuc

SEQ ID NO: 3522255 - RNA, 15 nt, Human
ccuuagugcaguuau

SEQ ID NO: 3522256 - RNA, 20 nt, Human
ccuuaguggcuuuuuuccuc

SEQ ID NO: 3522257 - RNA, 22 nt, Human
ccuuagugggccagggcugccc

SEQ ID NO: 3522258 - RNA, 16 nt, Human
ccuuaguguuucugug

SEQ ID NO: 3522259 - RNA, 12 nt, Human
ccuuauaaaauc

SEQ ID NO: 3522260 - RNA, 15 nt, Human
ccuuaucaagugucu

SEQ ID NO: 3522261 - RNA, 16 nt, Human
ccuuaucaagugucuu

SEQ ID NO: 3522262 - RNA, 13 nt, Human
ccuuaucaccagc

SEQ ID NO: 3522263 - RNA, 13 nt, Human
ccuuaucagagcu

SEQ ID NO: 3522264 - RNA, 16 nt, Human
ccuuaucauaaauuca

SEQ ID NO: 3522265 - RNA, 15 nt, Human
ccuuaucauucauuc

SEQ ID NO: 3522266 - RNA, 16 nt, Human
ccuuaucauucauucu

SEQ ID NO: 3522267 - RNA, 13 nt, Human
ccuuauccaggac

SEQ ID NO: 3522268 - RNA, 14 nt, Human
ccuuauccaggacu

SEQ ID NO: 3522269 - RNA, 15 nt, Human
ccuuauccaggacuc

SEQ ID NO: 3522270 - RNA, 14 nt, Human
ccuuauccccacuu

SEQ ID NO: 3522271 - RNA, 19 nt, Human
ccuuucuuccucauucccu

SEQ ID NO: 3522272 - RNA, 13 nt, Human
ccuuucuuggcca

SEQ ID NO: 3522273 - RNA, 17 nt, Human
ccuuucuuuucuuucuu

SEQ ID NO: 3522274 - RNA, 14 nt, Human
ccuuugaagaggaa

SEQ ID NO: 3522275 - RNA, 20 nt, Human
ccuuugaauccucucucugu

SEQ ID NO: 3522276 - RNA, 18 nt, Human
ccuuugaauguuaauuuu

SEQ ID NO: 3522277 - RNA, 15 nt, Human
ccuuugaccugccuc

SEQ ID NO: 3522278 - RNA, 17 nt, Human
ccuuugacgccauccca

SEQ ID NO: 3522279 - RNA, 20 nt, Human
ccuuugacgccaucccagcc

SEQ ID NO: 3522280 - RNA, 19 nt, Human
ccuuugagacaguuucuua

SEQ ID NO: 3522281 - RNA, 22 nt, Human
ccuuugagcccacaaagccuua

SEQ ID NO: 3522282 - RNA, 19 nt, Human
ccuuugagugcaguccuga

SEQ ID NO: 3522283 - RNA, 18 nt, Human
ccuuugcacugagggcca

SEQ ID NO: 3522284 - RNA, 12 nt, Human
ccuuugcaggca

SEQ ID NO: 3522285 - RNA, 21 nt, Human
ccuuugccccaccuuuauuaa

SEQ ID NO: 3522286 - RNA, 11 nt, Human
ccuuugccccu

SEQ ID NO: 3522287 - RNA, 14 nt, Human
ccuuugccuccaga

SEQ ID NO: 3522288 - RNA, 14 nt, Human
ccuuugcuccaccc

SEQ ID NO: 3522289 - RNA, 19 nt, Human
ccuuugcuccaccccacuc

SEQ ID NO: 3522290 - RNA, 17 nt, Human
ccuuugcugacccuccc

SEQ ID NO: 3522291 - RNA, 18 nt, Human
ccuuugcugacccucccc

SEQ ID NO: 3522292 - RNA, 14 nt, Human
ccuuugcuucccuu

SEQ ID NO: 3522293 - RNA, 14 nt, Human
ccuuuggagaccau

SEQ ID NO: 3522294 - RNA, 15 nt, Human
ccuuuggagaugcug

SEQ ID NO: 3522295 - RNA, 15 nt, Human
ccuuuggccuuggcu

SEQ ID NO: 3522296 - RNA, 14 nt, Human
ccuuuggcucugga

SEQ ID NO: 3522297 - RNA, 19 nt, Human
ccuuuggcucuggagacag

SEQ ID NO: 3522298 - RNA, 15 nt, Human
ccuuugggcccugca

SEQ ID NO: 3522299 - RNA, 16 nt, Human
ccuuugggcccugcau

SEQ ID NO: 3522300 - RNA, 22 nt, Human
ccuuugguccuaagucccugcc

SEQ ID NO: 3522301 - RNA, 17 nt, Human
ccuuugguccugucccc

SEQ ID NO: 3522302 - RNA, 15 nt, Human
ccuuugguucuggcc

SEQ ID NO: 3522303 - RNA, 21 nt, Human
ccuuuguaaauugucagaugc

SEQ ID NO: 3522304 - RNA, 14 nt, Human
ccuuuguauauuau

SEQ ID NO: 3522305 - RNA, 18 nt, Human
ccuuuguauucucuccug

SEQ ID NO: 3522306 - RNA, 23 nt, Human
ccuuuguauucucuccuguaccu

SEQ ID NO: 3522307 - RNA, 24 nt, Human
ccuuuguauucucuccuguaccuc

SEQ ID NO: 3522308 - RNA, 23 nt, Human
ccuuugucaucauuguauauaug

SEQ ID NO: 3522309 - RNA, 18 nt, Human
ccuuugucaucuuucuuc

SEQ ID NO: 3522310 - RNA, 14 nt, Human
ccuuuguccccacc

SEQ ID NO: 3522311 - RNA, 18 nt, Human
ccuuuguccccaccgcag

SEQ ID NO: 3522312 - RNA, 15 nt, Human
ccuuugucuuucaaa

SEQ ID NO: 3522313 - RNA, 14 nt, Human
ccuuugugaggaag

SEQ ID NO: 3522314 - RNA, 16 nt, Human
ccuuugugaggaagcc

SEQ ID NO: 3522315 - RNA, 17 nt, Human
ccuuugugaggaagccg

SEQ ID NO: 3522316 - RNA, 23 nt, Human
ccuuugugaggaagccgcugggg

SEQ ID NO: 3522317 - RNA, 22 nt, Human
ccuuugugcacauuuauuuccu

SEQ ID NO: 3522318 - RNA, 13 nt, Human
ccuuugugcccua

SEQ ID NO: 3522319 - RNA, 13 nt, Human
ccuuugugcugug

SEQ ID NO: 3522320 - RNA, 17 nt, Human
ccuuugugugcucucca

SEQ ID NO: 3522321 - RNA, 18 nt, Human
ccuuugugugcucuccau

SEQ ID NO: 3522322 - RNA, 16 nt, Human
ccuuuguguguguguc

SEQ ID NO: 3522323 - RNA, 21 nt, Human
ccuuugugugugugucagcug

SEQ ID NO: 3522324 - RNA, 20 nt, Human
ccuuuguuccccacuggagc

SEQ ID NO: 3522325 - RNA, 21 nt, Human
ccuuuguuccccacuggagca

SEQ ID NO: 3522326 - RNA, 14 nt, Human
ccuuuguugcucag

SEQ ID NO: 3522327 - RNA, 23 nt, Human
ccuuuguuuugauguuuguggcc

SEQ ID NO: 3522328 - RNA, 16 nt, Human
ccuuuuaaaguguuuc

SEQ ID NO: 3522329 - RNA, 19 nt, Human
ccuuuuaaaguguuucagc

SEQ ID NO: 3522330 - RNA, 21 nt, Human
ccuuuuaaauccuguugaaaa

SEQ ID NO: 3522331 - RNA, 18 nt, Human
ccuuuuaacaccugaugu

SEQ ID NO: 3522332 - RNA, 20 nt, Human
ccuuuuaacauuuuguucuu

SEQ ID NO: 3522333 - RNA, 17 nt, Human
ccuuuuacauacugcug

SEQ ID NO: 3522334 - RNA, 20 nt, Human
ccuuuuacuacagcuaugaa

SEQ ID NO: 3522335 - RNA, 18 nt, Human
ccuuuuacugguugcaug

SEQ ID NO: 3522336 - RNA, 19 nt, Human
ccuuuuacugguugcaugg

SEQ ID NO: 3522337 - RNA, 13 nt, Human
ccuuuuauuucuu

SEQ ID NO: 3522338 - RNA, 20 nt, Human
ccuuuucacccuucuacucu

SEQ ID NO: 3522339 - RNA, 20 nt, Human
ccuuuucagcuucugcuggg

SEQ ID NO: 3522340 - RNA, 22 nt, Human
ccuuuucauaggucugaaauuu

SEQ ID NO: 3522341 - RNA, 15 nt, Human
ccuuuuccagagcau

SEQ ID NO: 3522342 - RNA, 21 nt, Human
ccuuuucccggggaggagaga

SEQ ID NO: 3522343 - RNA, 15 nt, Human
ccuuuucccugcuuc

SEQ ID NO: 3522344 - RNA, 17 nt, Human
ccuuuucgccuuuccuc

SEQ ID NO: 3522345 - RNA, 22 nt, Human
ccuuuucuagcccgaauacaaa

SEQ ID NO: 3522346 - RNA, 15 nt, Human
ccuuuucuggcaccg

SEQ ID NO: 3522347 - RNA, 22 nt, Human
ccuuuucuggggaaagacacug

SEQ ID NO: 3522348 - RNA, 13 nt, Human
ccuuuucuguguu

SEQ ID NO: 3522349 - RNA, 17 nt, Human
ccuuuucuucuauguag

SEQ ID NO: 3522350 - RNA, 23 nt, Human
ccuuuucuuuucuacccuagcca

SEQ ID NO: 3522351 - RNA, 14 nt, Human
ccuuuucuuuuguu

SEQ ID NO: 3522352 - RNA, 15 nt, Human
ccuuuucuuuuguua

SEQ ID NO: 3522353 - RNA, 22 nt, Human
ccuuuucuuuuguuacuguucu

SEQ ID NO: 3522354 - RNA, 21 nt, Human
ccuuuugaggagccccagcua

SEQ ID NO: 3522355 - RNA, 17 nt, Human
ccuuuugagugccuuac

SEQ ID NO: 3522356 - RNA, 11 nt, Human
ccuuuugcaaa

SEQ ID NO: 3522357 - RNA, 17 nt, Human
ccuuuugcaccccuccc

SEQ ID NO: 3522358 - RNA, 19 nt, Human
ccuuuugcaccccucccau

SEQ ID NO: 3522359 - RNA, 17 nt, Human
ccuuuugcaccugcucu

SEQ ID NO: 3522360 - RNA, 19 nt, Human
ccuuuugcagaagagggug

SEQ ID NO: 3522361 - RNA, 19 nt, Human
ccuuuugcggaugggaggg

SEQ ID NO: 3522362 - RNA, 12 nt, Human
ccuuuuggcacu

SEQ ID NO: 3522363 - RNA, 21 nt, Human
ccuuuuggguuucugcccugc

SEQ ID NO: 3522364 - RNA, 13 nt, Human
ccuuuuggugugu

SEQ ID NO: 3522365 - RNA, 12 nt, Human
ccuuuuguaaag

SEQ ID NO: 3522366 - RNA, 19 nt, Human
ccuuuuguaccauggugug

SEQ ID NO: 3522367 - RNA, 19 nt, Human
ccuuuuguauacauccugg

SEQ ID NO: 3522368 - RNA, 20 nt, Human
ccuuuuguauacauccuggg

SEQ ID NO: 3522369 - RNA, 15 nt, Human
ccuuuugucugccuc

SEQ ID NO: 3522370 - RNA, 14 nt, Human
ccuuuuuacucccc

SEQ ID NO: 3522371 - RNA, 15 nt, Human
ccuuuuuacuccccu

SEQ ID NO: 3522372 - RNA, 16 nt, Human
ccuuuuuaugaggcaa

SEQ ID NO: 3522373 - RNA, 22 nt, Human
ccuuuuuauuuauauguaugug

SEQ ID NO: 3522374 - RNA, 18 nt, Human
ccuuuuucucccucugga

SEQ ID NO: 3522375 - RNA, 14 nt, Human
ccuuuuucugcacu

SEQ ID NO: 3522376 - RNA, 15 nt, Human
ccuuuuucugcacua

SEQ ID NO: 3522377 - RNA, 17 nt, Human
ccuuuuucugcacuaua

SEQ ID NO: 3522378 - RNA, 13 nt, Human
ccuuuuugacacu

SEQ ID NO: 3522379 - RNA, 21 nt, Human
ccuuuuugguacuuauuacug

SEQ ID NO: 3522380 - RNA, 14 nt, Human
ccuuuuuuaagauu

SEQ ID NO: 3522381 - RNA, 14 nt, Human
ccuuuauucuggca

SEQ ID NO: 3522382 - RNA, 21 nt, Human
ccuuuauuggguaucaagaca

SEQ ID NO: 3522383 - RNA, 15 nt, Human
ccuuuauuguguuug

SEQ ID NO: 3522384 - RNA, 20 nt, Human
ccuuuauuguguuugucauu

SEQ ID NO: 3522385 - RNA, 21 nt, Human
ccuuuauuuuuggcguggcug

SEQ ID NO: 3522386 - RNA, 13 nt, Human
ccuuucaaagcuu

SEQ ID NO: 3522387 - RNA, 15 nt, Human
ccuuucaaauuuaga

SEQ ID NO: 3522388 - RNA, 21 nt, Human
ccuuucaaauuuagaaacuaa

SEQ ID NO: 3522389 - RNA, 22 nt, Human
ccuuucaaauuuagaaacuaau

SEQ ID NO: 3522390 - RNA, 15 nt, Human
ccuuucaaauuucac

SEQ ID NO: 3522391 - RNA, 21 nt, Human
ccuuucaauaggaaaaacuga

SEQ ID NO: 3522392 - RNA, 22 nt, Human
ccuuucacaaaauuuuauuccu

SEQ ID NO: 3522393 - RNA, 22 nt, Human
ccuuucacaggcagccagugcc

SEQ ID NO: 3522394 - RNA, 17 nt, Human
ccuuucaccccagggcc

SEQ ID NO: 3522395 - RNA, 21 nt, Human
ccuuucaccccagggccugag

SEQ ID NO: 3522396 - RNA, 22 nt, Human
ccuuucaccuuuguguauuuuu

SEQ ID NO: 3522397 - RNA, 17 nt, Human
ccuuucacuucuuuccc

SEQ ID NO: 3522398 - RNA, 14 nt, Human
ccuuucagaugucu

SEQ ID NO: 3522399 - RNA, 16 nt, Human
ccuuucagcaggcagc

SEQ ID NO: 3522400 - RNA, 17 nt, Human
ccuuucagcaggcagcc

SEQ ID NO: 3522401 - RNA, 15 nt, Human
ccuuucagcccacgu

SEQ ID NO: 3522402 - RNA, 12 nt, Human
ccuuucagcugu

SEQ ID NO: 3522403 - RNA, 19 nt, Human
ccuuucaggaucuauuuuu

SEQ ID NO: 3522404 - RNA, 20 nt, Human
ccuuucagggaauuucagga

SEQ ID NO: 3522405 - RNA, 12 nt, Human
ccuuucauauuu

SEQ ID NO: 3522406 - RNA, 17 nt, Human
ccuuucauccccaccuu

SEQ ID NO: 3522407 - RNA, 14 nt, Human
ccuuucauuuacug

SEQ ID NO: 3522408 - RNA, 16 nt, Human
ccuuuccaaggcuucu

SEQ ID NO: 3522409 - RNA, 20 nt, Human
ccuuuccauaaauccuugau

SEQ ID NO: 3522410 - RNA, 18 nt, Human
ccuuucccaccccaaccu

SEQ ID NO: 3522411 - RNA, 22 nt, Human
ccuuucccaccccaaccugcuc

SEQ ID NO: 3522412 - RNA, 19 nt, Human
ccuuucccaggugcuacac

SEQ ID NO: 3522413 - RNA, 17 nt, Human
ccuuuccccagcaucac

SEQ ID NO: 3522414 - RNA, 14 nt, Human
ccuuuccccagccc

SEQ ID NO: 3522415 - RNA, 17 nt, Human
ccuuuccccagcccagg

SEQ ID NO: 3522416 - RNA, 20 nt, Human
ccuuuccccgacgcccaccc

SEQ ID NO: 3522417 - RNA, 22 nt, Human
ccuuucccgggcuguccacuag

SEQ ID NO: 3522418 - RNA, 14 nt, Human
ccuuucccuaaaga

SEQ ID NO: 3522419 - RNA, 17 nt, Human
ccuuucccuaagccagc

SEQ ID NO: 3522420 - RNA, 19 nt, Human
ccuuucccucacccccucc

SEQ ID NO: 3522421 - RNA, 21 nt, Human
ccuuucccucacccccuccca

SEQ ID NO: 3522422 - RNA, 12 nt, Human
ccuuucccuucc

SEQ ID NO: 3522423 - RNA, 14 nt, Human
ccuuucccuuccuc

SEQ ID NO: 3522424 - RNA, 16 nt, Human
ccuuucccuuccucuu

SEQ ID NO: 3522425 - RNA, 19 nt, Human
ccuuucccuuguagcuccu

SEQ ID NO: 3522426 - RNA, 12 nt, Human
ccuuucccuuua

SEQ ID NO: 3522427 - RNA, 17 nt, Human
ccuuuccucucuccugu

SEQ ID NO: 3522428 - RNA, 22 nt, Human
ccuuuccuggacacucagaccu

SEQ ID NO: 3522429 - RNA, 13 nt, Human
ccuuuccuguagc

SEQ ID NO: 3522430 - RNA, 15 nt, Human
ccuuuccugucccac

SEQ ID NO: 3522431 - RNA, 18 nt, Human
ccuuuccuguucagcauu

SEQ ID NO: 3522432 - RNA, 20 nt, Human
ccuuuccuguucagcauucu

SEQ ID NO: 3522433 - RNA, 16 nt, Human
ccuuucgaggccugaa

SEQ ID NO: 3522434 - RNA, 15 nt, Human
ccuuucuagccuggc

SEQ ID NO: 3522435 - RNA, 22 nt, Human
ccuuucuaguccuauucuauug

SEQ ID NO: 3522436 - RNA, 14 nt, Human
ccuuucuaguugaa

SEQ ID NO: 3522437 - RNA, 15 nt, Human
ccuuucuaguugaaa

SEQ ID NO: 3522438 - RNA, 16 nt, Human
ccuuucuauaauuuua

SEQ ID NO: 3522439 - RNA, 17 nt, Human
ccuuucuauaauuuuac

SEQ ID NO: 3522440 - RNA, 15 nt, Human
ccuuucuccagccag

SEQ ID NO: 3522441 - RNA, 12 nt, Human
ccuuucuccagg

SEQ ID NO: 3522442 - RNA, 14 nt, Human
ccuuucucccaggc

SEQ ID NO: 3522443 - RNA, 15 nt, Human
ccuuucuccccugcc

SEQ ID NO: 3522444 - RNA, 19 nt, Human
ccuuucuccccugccccca

SEQ ID NO: 3522445 - RNA, 20 nt, Human
ccuuucuccccugcccccag

SEQ ID NO: 3522446 - RNA, 15 nt, Human
ccuuucucucucuaa

SEQ ID NO: 3522447 - RNA, 22 nt, Human
ccuuucucucuuuauacagcug

SEQ ID NO: 3522448 - RNA, 17 nt, Human
ccuuucucuucucuguu

SEQ ID NO: 3522449 - RNA, 14 nt, Human
ccuuucucuuucuc

SEQ ID NO: 3522450 - RNA, 17 nt, Human
ccuuucucuuucucucu

SEQ ID NO: 3522451 - RNA, 23 nt, Human
ccuuucuggauuauucugggggc

SEQ ID NO: 3522452 - RNA, 14 nt, Human
ccuuucuggcucuc

SEQ ID NO: 3522453 - RNA, 19 nt, Human
ccuuucugugcccuacuca

SEQ ID NO: 3522454 - RNA, 13 nt, Human
ccuuucugugugc

SEQ ID NO: 3522455 - RNA, 15 nt, Human
ccuuucuuccucauu

SEQ ID NO: 3522456 - RNA, 17 nt, Human
ccuuucuucucccccau

SEQ ID NO: 3522457 - RNA, 14 nt, Human
ccuuucuugacaaa

SEQ ID NO: 3522458 - RNA, 13 nt, Human
ccuuucuugguuc

SEQ ID NO: 3522459 - RNA, 12 nt, Human
ccuuucuuuucc

SEQ ID NO: 3522460 - RNA, 19 nt, Human
ccuuucuuuucccccuuug

SEQ ID NO: 3522461 - RNA, 17 nt, Human
ccuuucuuuuucuucuu

SEQ ID NO: 3522462 - RNA, 23 nt, Human
ccuuucuuuuucuucuucccucc

SEQ ID NO: 3522463 - RNA, 17 nt, Human
ccuuugaaaccugcucu

SEQ ID NO: 3522464 - RNA, 20 nt, Human
ccuuugaagccucagcuacc

SEQ ID NO: 3522465 - RNA, 14 nt, Human
ccuuugacaaaggu

SEQ ID NO: 3522466 - RNA, 16 nt, Human
ccuuugacauuuaauu

SEQ ID NO: 3522467 - RNA, 21 nt, Human
ccuuugaccugccucccuuca

SEQ ID NO: 3522468 - RNA, 18 nt, Human
ccuuugacgccaucccag

SEQ ID NO: 3522469 - RNA, 21 nt, Human
ccuuugacgccaucccagccc

SEQ ID NO: 3522470 - RNA, 13 nt, Human
ccuuugagacagu

SEQ ID NO: 3522471 - RNA, 14 nt, Human
ccuuugauaaaugu

SEQ ID NO: 3522472 - RNA, 21 nt, Human
ccuuugauuaaagacuccagu

SEQ ID NO: 3522473 - RNA, 13 nt, Human
ccuuugcacugag

SEQ ID NO: 3522474 - RNA, 15 nt, Human
ccuuugcagcucaga

SEQ ID NO: 3522475 - RNA, 13 nt, Human
ccuuugcaggcau

SEQ ID NO: 3522476 - RNA, 12 nt, Human
cgccuuguucuu

SEQ ID NO: 3522477 - RNA, 14 nt, Human
cgccuuucccaacu

SEQ ID NO: 3522478 - RNA, 13 nt, Human
cgccuuucccagg

SEQ ID NO: 3522479 - RNA, 13 nt, Human
cgccuuuccucuc

SEQ ID NO: 3522480 - RNA, 15 nt, Human
cgccuuuuguauaca

SEQ ID NO: 3522481 - RNA, 22 nt, Human
cgcgaaaguaucaccagggugc

SEQ ID NO: 3522482 - RNA, 22 nt, Human
cgcgacuaauuucaaaaugcuu

SEQ ID NO: 3522483 - RNA, 14 nt, Human
cgcgaucccacaca

SEQ ID NO: 3522484 - RNA, 19 nt, Human
cgcgccaaauaaugucucu

SEQ ID NO: 3522485 - RNA, 14 nt, Human
cgcgccacaggacc

SEQ ID NO: 3522486 - RNA, 21 nt, Human
cgcgccacaggacccucgccg

SEQ ID NO: 3522487 - RNA, 20 nt, Human
cgcgccccccucccagaggc

SEQ ID NO: 3522488 - RNA, 11 nt, Human
cgcgcgcacac

SEQ ID NO: 3522489 - RNA, 14 nt, Human
cgcgcgcacacaca

SEQ ID NO: 3522490 - RNA, 19 nt, Human
cgcgcgcacacacacacau

SEQ ID NO: 3522491 - RNA, 14 nt, Human
cgcgcucugcucag

SEQ ID NO: 3522492 - RNA, 23 nt, Human
cgcgcugcgugugggacccgccg

SEQ ID NO: 3522493 - RNA, 15 nt, Human
cgcggccagccccgg

SEQ ID NO: 3522494 - RNA, 14 nt, Human
cgcggcccucagua

SEQ ID NO: 3522495 - RNA, 14 nt, Human
cgcggccucaaccc

SEQ ID NO: 3522496 - RNA, 20 nt, Human
cgcggccucuucucucagac

SEQ ID NO: 3522497 - RNA, 17 nt, Human
cgcggcggagcuggccc

SEQ ID NO: 3522498 - RNA, 21 nt, Human
cgcggcggagcuggccccgcc

SEQ ID NO: 3522499 - RNA, 23 nt, Human
cgcggcggagcuggccccgccgc

SEQ ID NO: 3522500 - RNA, 16 nt, Human
cgcggcugggaggagg

SEQ ID NO: 3522501 - RNA, 16 nt, Human
cgcggggcacccgccg

SEQ ID NO: 3522502 - RNA, 22 nt, Human
cgcggugccaugucugcagugu

SEQ ID NO: 3522503 - RNA, 19 nt, Human
cgcgguggcucacgccugu

SEQ ID NO: 3522504 - RNA, 21 nt, Human
cgcgucgcccucccaggcucu

SEQ ID NO: 3522505 - RNA, 15 nt, Human
cgcgucgccgccacc

SEQ ID NO: 3522506 - RNA, 15 nt, Human
cgcgucuacccuggg

SEQ ID NO: 3522507 - RNA, 16 nt, Human
cgcgucuacccuggga

SEQ ID NO: 3522508 - RNA, 17 nt, Human
cgcgucuacccugggau

SEQ ID NO: 3522509 - RNA, 12 nt, Human
cgcgucuccugu

SEQ ID NO: 3522510 - RNA, 21 nt, Human
cgcgucuccuguuuuucuggg

SEQ ID NO: 3522511 - RNA, 12 nt, Human
cgcgucuuccug

SEQ ID NO: 3522512 - RNA, 14 nt, Human
cgcgucuuccugag

SEQ ID NO: 3522513 - RNA, 20 nt, Human
cgcgugcacacaccagagcc

SEQ ID NO: 3522514 - RNA, 19 nt, Human
cgcgugcccucgcugcuuc

SEQ ID NO: 3522515 - RNA, 23 nt, Human
cgcguguccccggggcccagggg

SEQ ID NO: 3522516 - RNA, 24 nt, Human
cgcguugaaauuguaauuauaucu

SEQ ID NO: 3522517 - RNA, 13 nt, Human
cgcuaaaagaaac

SEQ ID NO: 3522518 - RNA, 15 nt, Human
cgcuaaaagaaacuu

SEQ ID NO: 3522519 - RNA, 18 nt, Human
cgcuaaacuuuucugaua

SEQ ID NO: 3522520 - RNA, 19 nt, Human
cgcuaaacuuuucugauag

SEQ ID NO: 3522521 - RNA, 22 nt, Human
cgcuaacuugcuuaaaugugaa

SEQ ID NO: 3522522 - RNA, 14 nt, Human
cgcuaagagggagg

SEQ ID NO: 3522523 - RNA, 22 nt, Human
cgcuaagagggagggagggcuc

SEQ ID NO: 3522524 - RNA, 11 nt, Human
cgcuacccacu

SEQ ID NO: 3522525 - RNA, 13 nt, Human
cgcuaccucccuc

SEQ ID NO: 3522526 - RNA, 14 nt, Human
cgcuaccucccucc

SEQ ID NO: 3522527 - RNA, 21 nt, Human
cggaccaaagggagucugcca

SEQ ID NO: 3522528 - RNA, 17 nt, Human
cggaccccacuccggcc

SEQ ID NO: 3522529 - RNA, 16 nt, Human
cggacccucuaaccuc

SEQ ID NO: 3522530 - RNA, 22 nt, Human
cggaccgcuuguggggacccag

SEQ ID NO: 3522531 - RNA, 23 nt, Human
cggaccgcuuguggggacccagg

SEQ ID NO: 3522532 - RNA, 12 nt, Human
cggacgggcugu

SEQ ID NO: 3522533 - RNA, 15 nt, Human
cggacguuuccauca

SEQ ID NO: 3522534 - RNA, 20 nt, Human
cggacuaagccuaccugcuc

SEQ ID NO: 3522535 - RNA, 15 nt, Human
cggacuccuccuuuc

SEQ ID NO: 3522536 - RNA, 19 nt, Human
cggacuccuccuuucuccu

SEQ ID NO: 3522537 - RNA, 21 nt, Human
cggacuuagaaaaccagcuca

SEQ ID NO: 3522538 - RNA, 16 nt, Human
cggacuuagcugggag

SEQ ID NO: 3522539 - RNA, 15 nt, Human
cggagaaaggaaggg

SEQ ID NO: 3522540 - RNA, 18 nt, Human
cggagaacaugaaucaaa

SEQ ID NO: 3522541 - RNA, 18 nt, Human
cggagaaccuugugccug

SEQ ID NO: 3522542 - RNA, 16 nt, Human
cggagaagagcgcagu

SEQ ID NO: 3522543 - RNA, 24 nt, Human
cggagaagagcuguucacagccag

SEQ ID NO: 3522544 - RNA, 15 nt, Human
cggagacggaguccc

SEQ ID NO: 3522545 - RNA, 17 nt, Human
cggagacggagucccac

SEQ ID NO: 3522546 - RNA, 14 nt, Human
cggagagaaaaaag

SEQ ID NO: 3522547 - RNA, 13 nt, Human
cggagaggacagu

SEQ ID NO: 3522548 - RNA, 19 nt, Human
cggagaguacagugagcca

SEQ ID NO: 3522549 - RNA, 19 nt, Human
cggagauuggacggccuga

SEQ ID NO: 3522550 - RNA, 17 nt, Human
cggagccacuccucuga

SEQ ID NO: 3522551 - RNA, 12 nt, Human
cggagccccagg

SEQ ID NO: 3522552 - RNA, 21 nt, Human
cggagccucauccgaggcagg

SEQ ID NO: 3522553 - RNA, 19 nt, Human
cggagcuaacacuggcccc

SEQ ID NO: 3522554 - RNA, 21 nt, Human
cggagcuaacacuggccccua

SEQ ID NO: 3522555 - RNA, 19 nt, Human
cggaggaaagacaacacaa

SEQ ID NO: 3522556 - RNA, 17 nt, Human
cggaggauaguaugagc

SEQ ID NO: 3522557 - RNA, 18 nt, Human
cggaggauaguaugagcc

SEQ ID NO: 3522558 - RNA, 20 nt, Human
cggaggccugcgacccuggg

SEQ ID NO: 3522559 - RNA, 21 nt, Human
cggaggccugcgacccugggg

SEQ ID NO: 3522560 - RNA, 17 nt, Human
cggaggcuugggaccgc

SEQ ID NO: 3522561 - RNA, 12 nt, Human
cggagggcugcg

SEQ ID NO: 3522562 - RNA, 23 nt, Human
cggagggugggggccaccugccu

SEQ ID NO: 3522563 - RNA, 13 nt, Human
cggagguugcagg

SEQ ID NO: 3522564 - RNA, 19 nt, Human
cggagucagccaggagcug

SEQ ID NO: 3522565 - RNA, 14 nt, Human
cggagucccaccuu

SEQ ID NO: 3522566 - RNA, 20 nt, Human
cggagucccaccuuggcugc

SEQ ID NO: 3522567 - RNA, 23 nt, Human
cggagucccaccuuggcugcagg

SEQ ID NO: 3522568 - RNA, 15 nt, Human
cggagucguggggug

SEQ ID NO: 3522569 - RNA, 22 nt, Human
cggagugaagaggggcagcccu

SEQ ID NO: 3522570 - RNA, 23 nt, Human
cggagugaagaggggcagcccuu

SEQ ID NO: 3522571 - RNA, 18 nt, Human
cggagugaguuuuuuagu

SEQ ID NO: 3522572 - RNA, 23 nt, Human
cggagugcggaccacccucacug

SEQ ID NO: 3522573 - RNA, 19 nt, Human
cggaguguguaugccaaga

SEQ ID NO: 3522574 - RNA, 19 nt, Human
cggaucagagcaggaccuc

SEQ ID NO: 3522575 - RNA, 14 nt, Human
cggaucagcugagc

SEQ ID NO: 3522576 - RNA, 17 nt, Human
cggaucaggcucccagg

SEQ ID NO: 3522577 - RNA, 21 nt, Human
cggaucaucaacaagauuucc

SEQ ID NO: 3522578 - RNA, 20 nt, Human
cggauccuaagcaucuaagu

SEQ ID NO: 3522579 - RNA, 14 nt, Human
cggauccugggugg

SEQ ID NO: 3522580 - RNA, 16 nt, Human
cggauggauggaaggu

SEQ ID NO: 3522581 - RNA, 20 nt, Human
cggauuauuuuuucagaccg

SEQ ID NO: 3522582 - RNA, 24 nt, Human
cggauuccaaagaguagaauugca

SEQ ID NO: 3522583 - RNA, 12 nt, Human
cggauuccagcc

SEQ ID NO: 3522584 - RNA, 16 nt, Human
cggauuccagcccaca

SEQ ID NO: 3522585 - RNA, 17 nt, Human
cggauugcauuagaaau

SEQ ID NO: 3522586 - RNA, 16 nt, Human
cggauuuauuuuucca

SEQ ID NO: 3522587 - RNA, 15 nt, Human
cggauuuggggugga

SEQ ID NO: 3522588 - RNA, 13 nt, Human
cggauuuuuucca

SEQ ID NO: 3522589 - RNA, 13 nt, Human
cggcaaaaggaaa

SEQ ID NO: 3522590 - RNA, 17 nt, Human
cggcaauaaaagcccag

SEQ ID NO: 3522591 - RNA, 14 nt, Human
cggcacagaugcuc

SEQ ID NO: 3522592 - RNA, 18 nt, Human
cggcacagaugcuccagg

SEQ ID NO: 3522593 - RNA, 18 nt, Human
cggcacagggucugcucu

SEQ ID NO: 3522594 - RNA, 19 nt, Human
cggcacagggucugcucuu

SEQ ID NO: 3522595 - RNA, 16 nt, Human
cggcacccccugcagc

SEQ ID NO: 3522596 - RNA, 20 nt, Human
cggcacccccugcagcuugu

SEQ ID NO: 3522597 - RNA, 13 nt, Human
cggcacccucugg

SEQ ID NO: 3522598 - RNA, 17 nt, Human
cggcaccugggcccugg

SEQ ID NO: 3522599 - RNA, 15 nt, Human
cggcacuguggccuu

SEQ ID NO: 3522600 - RNA, 14 nt, Human
cggcagcagccauc

SEQ ID NO: 3522601 - RNA, 15 nt, Human
cggcagcauggagcu

SEQ ID NO: 3522602 - RNA, 16 nt, Human
cggcagccccagccug

SEQ ID NO: 3522603 - RNA, 17 nt, Human
cggcagccccagccugc

SEQ ID NO: 3522604 - RNA, 23 nt, Human
cggcagcuucugcccccugcaga

SEQ ID NO: 3522605 - RNA, 21 nt, Human
cggcaggacaacgaggaagcc

SEQ ID NO: 3522606 - RNA, 11 nt, Human
cggcaggacac

SEQ ID NO: 3522607 - RNA, 14 nt, Human
cggcaggcccugca

SEQ ID NO: 3522608 - RNA, 17 nt, Human
cggcaggcccugcagug

SEQ ID NO: 3522609 - RNA, 20 nt, Human
cggcagggcgggcagagggc

SEQ ID NO: 3522610 - RNA, 23 nt, Human
cggcagggcgggcagagggcugg

SEQ ID NO: 3522611 - RNA, 17 nt, Human
cggcaggggccuggaga

SEQ ID NO: 3522612 - RNA, 20 nt, Human
cggcagguucacaggcgagg

SEQ ID NO: 3522613 - RNA, 20 nt, Human
cggcaguucugggugcuccc

SEQ ID NO: 3522614 - RNA, 21 nt, Human
cggcaguucugggugcucccu

SEQ ID NO: 3522615 - RNA, 18 nt, Human
cggcauguuuccagcaga

SEQ ID NO: 3522616 - RNA, 14 nt, Human
cggcauuccugcuu

SEQ ID NO: 3522617 - RNA, 13 nt, Human
cggcauuuguuuc

SEQ ID NO: 3522618 - RNA, 19 nt, Human
cggccaagauaggaccuug

SEQ ID NO: 3522619 - RNA, 22 nt, Human
cggccaagauaggaccuugggc

SEQ ID NO: 3522620 - RNA, 14 nt, Human
cggccaauggaaac

SEQ ID NO: 3522621 - RNA, 18 nt, Human
cggccacacagcugccgg

SEQ ID NO: 3522622 - RNA, 13 nt, Human
cggccaccucugc

SEQ ID NO: 3522623 - RNA, 16 nt, Human
cggccaccugcggugc

SEQ ID NO: 3522624 - RNA, 14 nt, Human
cggccacuggccau

SEQ ID NO: 3522625 - RNA, 21 nt, Human
cggccagcugggaucugacug

SEQ ID NO: 3522626 - RNA, 12 nt, Human
cggccaggccag

SEQ ID NO: 3522627 - RNA, 24 nt, Human
cggccaggccagagggagugacag

SEQ ID NO: 3522628 - RNA, 19 nt, Human
cggccaggugccuccugac

SEQ ID NO: 3522629 - RNA, 22 nt, Human
cggccaucucuuuguacaggaa

SEQ ID NO: 3522630 - RNA, 22 nt, Human
cggcccaagcccgacuugcugu

SEQ ID NO: 3522631 - RNA, 15 nt, Human
cggcccacagcuccc

SEQ ID NO: 3522632 - RNA, 13 nt, Human
cggccccaccagu

SEQ ID NO: 3522633 - RNA, 18 nt, Human
cggccccaccagugccuc

SEQ ID NO: 3522634 - RNA, 20 nt, Human
cggccccaccagugccucuc

SEQ ID NO: 3522635 - RNA, 14 nt, Human
cggccccagccaga

SEQ ID NO: 3522636 - RNA, 18 nt, Human
cggcccccagagcgcccc

SEQ ID NO: 3522637 - RNA, 18 nt, Human
cggcccccuggucucugg

SEQ ID NO: 3522638 - RNA, 15 nt, Human
cggccccggccccag

SEQ ID NO: 3522639 - RNA, 17 nt, Human
cggccccuccccuccaa

SEQ ID NO: 3522640 - RNA, 19 nt, Human
cggccccugcugguucagg

SEQ ID NO: 3522641 - RNA, 15 nt, Human
cauuuuuaagugcug

SEQ ID NO: 3522642 - RNA, 19 nt, Human
cauuuuuaaucaugaaauu

SEQ ID NO: 3522643 - RNA, 20 nt, Human
cauuuuuaguagagacaggg

SEQ ID NO: 3522644 - RNA, 21 nt, Human
cauuuuuauaccuguuuaaau

SEQ ID NO: 3522645 - RNA, 12 nt, Human
cauuuuuauagc

SEQ ID NO: 3522646 - RNA, 16 nt, Human
cauuuuuauuuaugaa

SEQ ID NO: 3522647 - RNA, 22 nt, Human
cauuuuuauuucagauuuugau

SEQ ID NO: 3522648 - RNA, 10 nt, Human
cauuuuucaa

SEQ ID NO: 3522649 - RNA, 21 nt, Human
cauuuuucaaaaaguaaaaag

SEQ ID NO: 3522650 - RNA, 19 nt, Human
cauuuuucaacuuugaaua

SEQ ID NO: 3522651 - RNA, 20 nt, Human
cauuuuucaacuuugaauaa

SEQ ID NO: 3522652 - RNA, 14 nt, Human
cauuuuucaauaua

SEQ ID NO: 3522653 - RNA, 16 nt, Human
cauuuuucaugauaau

SEQ ID NO: 3522654 - RNA, 13 nt, Human
cauuuuucauuca

SEQ ID NO: 3522655 - RNA, 19 nt, Human
cauuuuuccguuugcuuuu

SEQ ID NO: 3522656 - RNA, 21 nt, Human
cauuuuuccuucccuucucca

SEQ ID NO: 3522657 - RNA, 12 nt, Human
cauuuuucugca

SEQ ID NO: 3522658 - RNA, 23 nt, Human
cauuuuucuuagggaaggauaca

SEQ ID NO: 3522659 - RNA, 13 nt, Human
cauuuuuguaaau

SEQ ID NO: 3522660 - RNA, 13 nt, Human
cauuuuuguauuu

SEQ ID NO: 3522661 - RNA, 15 nt, Human
cauuuuuuaaaacaa

SEQ ID NO: 3522662 - RNA, 17 nt, Human
cauuuuuuaaaacaaga

SEQ ID NO: 3522663 - RNA, 16 nt, Human
cauuuuuuaaaugcac

SEQ ID NO: 3522664 - RNA, 17 nt, Human
cauuuuuuaaggaaaca

SEQ ID NO: 3522665 - RNA, 16 nt, Human
cauuuuuuaauuuacu

SEQ ID NO: 3522666 - RNA, 21 nt, Human
cauuuuuuaauuuacuuguuu

SEQ ID NO: 3522667 - RNA, 22 nt, Human
cauuuuuuauggcugcauagua

SEQ ID NO: 3522668 - RNA, 20 nt, Human
cauuuuuugaaaugcugaaa

SEQ ID NO: 3522669 - RNA, 20 nt, Human
cauuuuuuuaauuuauuauu

SEQ ID NO: 3522670 - RNA, 17 nt, Human
cauuuuuuuccaggcug

SEQ ID NO: 3522671 - RNA, 13 nt, Human
ccacacccagccc

SEQ ID NO: 3522672 - RNA, 15 nt, Human
ccacacccagcccac

SEQ ID NO: 3522673 - RNA, 13 nt, Human
ccacacccagccu

SEQ ID NO: 3522674 - RNA, 21 nt, Human
ccacaccccaacacuuccagc

SEQ ID NO: 3522675 - RNA, 13 nt, Human
ccacacccccacc

SEQ ID NO: 3522676 - RNA, 11 nt, Human
ccacacccucc

SEQ ID NO: 3522677 - RNA, 18 nt, Human
ccacacccucucccagga

SEQ ID NO: 3522678 - RNA, 23 nt, Human
ccacacccuguacuguucugugu

SEQ ID NO: 3522679 - RNA, 15 nt, Human
ccacaccgcagaagc

SEQ ID NO: 3522680 - RNA, 18 nt, Human
ccacaccucaguucccuu

SEQ ID NO: 3522681 - RNA, 22 nt, Human
ccacaccucaguucccuuggcc

SEQ ID NO: 3522682 - RNA, 14 nt, Human
ccacaccuccacag

SEQ ID NO: 3522683 - RNA, 16 nt, Human
ccacaccucccugaac

SEQ ID NO: 3522684 - RNA, 14 nt, Human
ccacaccuccuggg

SEQ ID NO: 3522685 - RNA, 19 nt, Human
ccacaccuccuucccucuc

SEQ ID NO: 3522686 - RNA, 14 nt, Human
ccacaccucugcca

SEQ ID NO: 3522687 - RNA, 15 nt, Human
ccacaccucugccag

SEQ ID NO: 3522688 - RNA, 17 nt, Human
ccacaccuggcacugcu

SEQ ID NO: 3522689 - RNA, 18 nt, Human
ccacaccuggcccugggg

SEQ ID NO: 3522690 - RNA, 20 nt, Human
ccacaccuggcccuggggcc

SEQ ID NO: 3522691 - RNA, 17 nt, Human
ccacacgagaaccugaa

SEQ ID NO: 3522692 - RNA, 19 nt, Human
ccacacgcuccucccucug

SEQ ID NO: 3522693 - RNA, 16 nt, Human
ccacacuaaccugggu

SEQ ID NO: 3522694 - RNA, 22 nt, Human
ccacacuaaccuggguucccuu

SEQ ID NO: 3522695 - RNA, 20 nt, Human
ccacacuauuaccaugagaa

SEQ ID NO: 3522696 - RNA, 18 nt, Human
ccacacucagauccuccu

SEQ ID NO: 3522697 - RNA, 21 nt, Human
ccacacucagauccuccucau

SEQ ID NO: 3522698 - RNA, 18 nt, Human
ccacacucuuucuccugc

SEQ ID NO: 3522699 - RNA, 19 nt, Human
cguggagagcuaggagcaa

SEQ ID NO: 3522700 - RNA, 15 nt, Human
cguggagaugucuuc

SEQ ID NO: 3522701 - RNA, 16 nt, Human
cguggagaugucuucg

SEQ ID NO: 3522702 - RNA, 18 nt, Human
cguggagcagaaucagua

SEQ ID NO: 3522703 - RNA, 22 nt, Human
cguggagcgggguaugaagagc

SEQ ID NO: 3522704 - RNA, 15 nt, Human
cguggagcugccuga

SEQ ID NO: 3522705 - RNA, 17 nt, Human
cguggaggaggaaggca

SEQ ID NO: 3522706 - RNA, 23 nt, Human
cguggagggguaggggcugggaa

SEQ ID NO: 3522707 - RNA, 17 nt, Human
cguggauucgcuugagu

SEQ ID NO: 3522708 - RNA, 17 nt, Human
cguggauugcacguggc

SEQ ID NO: 3522709 - RNA, 17 nt, Human
cguggcaaauauaaaac

SEQ ID NO: 3522710 - RNA, 18 nt, Human
cguggcaaauauaaaacu

SEQ ID NO: 3522711 - RNA, 16 nt, Human
cguggcauagcccaga

SEQ ID NO: 3522712 - RNA, 19 nt, Human
cguggcauguggccugugg

SEQ ID NO: 3522713 - RNA, 11 nt, Human
cguggccagcc

SEQ ID NO: 3522714 - RNA, 17 nt, Human
cguggccaucccuguga

SEQ ID NO: 3522715 - RNA, 19 nt, Human
cguggccaucccugugagg

SEQ ID NO: 3522716 - RNA, 13 nt, Human
cguggcccaaggc

SEQ ID NO: 3522717 - RNA, 15 nt, Human
cguggcccagagaag

SEQ ID NO: 3522718 - RNA, 16 nt, Human
cguggcccagagaagc

SEQ ID NO: 3522719 - RNA, 12 nt, Human
cguggccccagc

SEQ ID NO: 3522720 - RNA, 21 nt, Human
cguggccccagccuggcccag

SEQ ID NO: 3522721 - RNA, 23 nt, Human
cguggccccagccuggcccagcu

SEQ ID NO: 3522722 - RNA, 15 nt, Human
cguggcccugcccuc

SEQ ID NO: 3522723 - RNA, 20 nt, Human
cguggcccuuccuggacagc

SEQ ID NO: 3522724 - RNA, 18 nt, Human
cguggcucagccagcacu

SEQ ID NO: 3522725 - RNA, 14 nt, Human
cguggcugcuucaa

SEQ ID NO: 3522726 - RNA, 19 nt, Human
cguggcuucccgcucagcc

SEQ ID NO: 3522727 - RNA, 20 nt, Human
cguggcuucccgcucagccc

SEQ ID NO: 3522728 - RNA, 21 nt, Human
cguggcuucccgcucagcccu

SEQ ID NO: 3522729 - RNA, 22 nt, Human
cgugggaaccccccucccaccc

SEQ ID NO: 3522730 - RNA, 13 nt, Human
cgugggccauggc

SEQ ID NO: 3522731 - RNA, 15 nt, Human
cgugggcuccccucu

SEQ ID NO: 3522732 - RNA, 19 nt, Human
cgugggcuccccucuuccu

SEQ ID NO: 3522733 - RNA, 12 nt, Human
cgugggcucccg

SEQ ID NO: 3522734 - RNA, 20 nt, Human
cgugggcucccguguuuugu

SEQ ID NO: 3522735 - RNA, 13 nt, Human
cgugggcucccug

SEQ ID NO: 3522736 - RNA, 17 nt, Human
cgugggcucccugacug

SEQ ID NO: 3522737 - RNA, 16 nt, Human
cgugggggggcgugga

SEQ ID NO: 3522738 - RNA, 18 nt, Human
cguggggugugcugggag

SEQ ID NO: 3522739 - RNA, 22 nt, Human
cgugggucuucagggggccagg

SEQ ID NO: 3522740 - RNA, 15 nt, Human
cguggucacugcugu

SEQ ID NO: 3522741 - RNA, 16 nt, Human
cguggucacugcuguc

SEQ ID NO: 3522742 - RNA, 20 nt, Human
cgugguggacaugcacagcu

SEQ ID NO: 3522743 - RNA, 17 nt, Human
cgugguggucccugggu

SEQ ID NO: 3522744 - RNA, 18 nt, Human
cgugguguuauuuaaaga

SEQ ID NO: 3522745 - RNA, 21 nt, Human
cgugguugggaacacagcauu

SEQ ID NO: 3522746 - RNA, 18 nt, Human
cguguacuggcuccucug

SEQ ID NO: 3522747 - RNA, 19 nt, Human
cguguaguguccauuuugu

SEQ ID NO: 3522748 - RNA, 14 nt, Human
cguguauccugggg

SEQ ID NO: 3522749 - RNA, 16 nt, Human
cguguccccggccuca

SEQ ID NO: 3522750 - RNA, 19 nt, Human
cguguccccugacagggcc

SEQ ID NO: 3522751 - RNA, 17 nt, Human
cguguccgacucuucug

SEQ ID NO: 3522752 - RNA, 13 nt, Human
cgugucuggcaca

SEQ ID NO: 3522753 - RNA, 14 nt, Human
cgugucuggcacag

SEQ ID NO: 3522754 - RNA, 13 nt, Human
cgugucuuccacu

SEQ ID NO: 3522755 - RNA, 22 nt, Human
cgugugagaagugaaugcuggg

SEQ ID NO: 3522756 - RNA, 11 nt, Human
cgugugauuuu

SEQ ID NO: 3522757 - RNA, 18 nt, Human
cgugugauuuuucuggag

SEQ ID NO: 3522758 - RNA, 16 nt, Human
cgugugcgugcaugug

SEQ ID NO: 3522759 - RNA, 14 nt, Human
cgugugcuguguuu

SEQ ID NO: 3522760 - RNA, 20 nt, Human
cguguggcucacguguguga

SEQ ID NO: 3522761 - RNA, 19 nt, Human
cgugugggacccgccgcgg

SEQ ID NO: 3522762 - RNA, 15 nt, Human
cguguguagaguuaa

SEQ ID NO: 3522763 - RNA, 16 nt, Human
cguguucuccuuuucc

SEQ ID NO: 3522764 - RNA, 14 nt, Human
cguguuucugacuc

SEQ ID NO: 3522765 - RNA, 11 nt, Human
cguguuugcac

SEQ ID NO: 3522766 - RNA, 16 nt, Human
cguguuugucucuucu

SEQ ID NO: 3522767 - RNA, 11 nt, Human
cguuaacauug

SEQ ID NO: 3522768 - RNA, 17 nt, Human
cguuaacuguguaugua

SEQ ID NO: 3522769 - RNA, 14 nt, Human
cguuaccaggcagg

SEQ ID NO: 3522770 - RNA, 23 nt, Human
cguuacucagggcuccucccagc

SEQ ID NO: 3522771 - RNA, 15 nt, Human
cguuagcuccugugg

SEQ ID NO: 3522772 - RNA, 16 nt, Human
cguuagcuccuguggc

SEQ ID NO: 3522773 - RNA, 16 nt, Human
cguuagggaagagaaa

SEQ ID NO: 3522774 - RNA, 16 nt, Human
cguuaguaaucuguau

SEQ ID NO: 3522775 - RNA, 20 nt, Human
cguuagucgugagcucuugu

SEQ ID NO: 3522776 - RNA, 18 nt, Human
cguuauaaagugugccac

SEQ ID NO: 3522777 - RNA, 16 nt, Human
cguuaugguguuucuc

SEQ ID NO: 3522778 - RNA, 16 nt, Human
cguuauuauaauugua

SEQ ID NO: 3522779 - RNA, 15 nt, Human
cguuauuguugacuu

SEQ ID NO: 3522780 - RNA, 23 nt, Human
cguucauggaacgcguugaaauu

SEQ ID NO: 3522781 - RNA, 14 nt, Human
cguuccacaguugc

SEQ ID NO: 3522782 - RNA, 16 nt, Human
cguuccacaguugcca

SEQ ID NO: 3522783 - RNA, 22 nt, Human
cguuccacaguugccaccaccu

SEQ ID NO: 3522784 - RNA, 11 nt, Human
cguuccagccg

SEQ ID NO: 3522785 - RNA, 21 nt, Human
cguuccagccggcauggcugg

SEQ ID NO: 3522786 - RNA, 13 nt, Human
cguuccaguuccc

SEQ ID NO: 3522787 - RNA, 23 nt, Human
cguuccuagagaagacaggcugg

SEQ ID NO: 3522788 - RNA, 20 nt, Human
cguuccuauugucauuaaag

SEQ ID NO: 3522789 - RNA, 21 nt, Human
cguuccugacaucacagcagc

SEQ ID NO: 3522790 - RNA, 18 nt, Human
cguuccuuacugcagaau

SEQ ID NO: 3522791 - RNA, 22 nt, Human
cguuccuucaaagcaaaugucu

SEQ ID NO: 3522792 - RNA, 14 nt, Human
cguucucacaccca

SEQ ID NO: 3522793 - RNA, 16 nt, Human
cguucucacacccacc

SEQ ID NO: 3522794 - RNA, 12 nt, Human
cguucucccugg

SEQ ID NO: 3522795 - RNA, 19 nt, Human
cguucucucuuugcaugga

SEQ ID NO: 3522796 - RNA, 14 nt, Human
cguucugcucauca

SEQ ID NO: 3522797 - RNA, 12 nt, Human
cguucuguuuac

SEQ ID NO: 3522798 - RNA, 20 nt, Human
cguucuuaggcugcugggau

SEQ ID NO: 3522799 - RNA, 12 nt, Human
cguucuuguaau

SEQ ID NO: 3522800 - RNA, 18 nt, Human
cguucuuguaauuuuaca

SEQ ID NO: 3522801 - RNA, 19 nt, Human
cguucuuguucuguuuugu

SEQ ID NO: 3522802 - RNA, 19 nt, Human
cguugaaguugacucugcu

SEQ ID NO: 3522803 - RNA, 16 nt, Human
cguugaggaugaggcc

SEQ ID NO: 3522804 - RNA, 19 nt, Human
cguugaggaugaggccgcu

SEQ ID NO: 3522805 - RNA, 18 nt, Human
cguugcugacuuagaauc

SEQ ID NO: 3522806 - RNA, 11 nt, Human
cguugcugugg

SEQ ID NO: 3522807 - RNA, 18 nt, Human
cguuggaauuaaaacaau

SEQ ID NO: 3522808 - RNA, 23 nt, Human
cguuggacuuuucguuaacauug

SEQ ID NO: 3522809 - RNA, 21 nt, Human
cguugggccccagccuucuuu

SEQ ID NO: 3522810 - RNA, 13 nt, Human
cguuggucucugc

SEQ ID NO: 3522811 - RNA, 23 nt, Human
cguuggucucugcauuuuucugc

SEQ ID NO: 3522812 - RNA, 16 nt, Human
cguuguccucagcccc

SEQ ID NO: 3522813 - RNA, 16 nt, Human
cguugucucccuggcc

SEQ ID NO: 3522814 - RNA, 17 nt, Human
cguugucucccuggccc

SEQ ID NO: 3522815 - RNA, 17 nt, Human
cguugucuguggauggu

SEQ ID NO: 3522816 - RNA, 11 nt, Human
cguugugaggg

SEQ ID NO: 3522817 - RNA, 21 nt, Human
cuaaauaugaacccuuuguuu

SEQ ID NO: 3522818 - RNA, 23 nt, Human
cuaaauaugaacccuuuguuucu

SEQ ID NO: 3522819 - RNA, 22 nt, Human
cuaaauauggacugcucaggaa

SEQ ID NO: 3522820 - RNA, 20 nt, Human
cuaaauauuaugagaugcug

SEQ ID NO: 3522821 - RNA, 22 nt, Human
cuaaauauuuccuuaaacugug

SEQ ID NO: 3522822 - RNA, 14 nt, Human
cuaaaucagagaca

SEQ ID NO: 3522823 - RNA, 14 nt, Human
cuaaaucuauuuau

SEQ ID NO: 3522824 - RNA, 21 nt, Human
cuaaaucuauuuauuaauauu

SEQ ID NO: 3522825 - RNA, 18 nt, Human
cuaaaucuccuauuuuuu

SEQ ID NO: 3522826 - RNA, 22 nt, Human
cuaaaucuguaagcucuuugaa

SEQ ID NO: 3522827 - RNA, 20 nt, Human
cuaaaucuuuuauaggauuu

SEQ ID NO: 3522828 - RNA, 22 nt, Human
cuaaaugaaaaucgugacaaca

SEQ ID NO: 3522829 - RNA, 16 nt, Human
cuaaaugaauguuuac

SEQ ID NO: 3522830 - RNA, 14 nt, Human
cuaaaugcccugcu

SEQ ID NO: 3522831 - RNA, 17 nt, Human
cuaaaugccuaauaaac

SEQ ID NO: 3522832 - RNA, 17 nt, Human
cuaaaugccuaguuuuu

SEQ ID NO: 3522833 - RNA, 21 nt, Human
cuaaaugccuaguuuuuagua

SEQ ID NO: 3522834 - RNA, 16 nt, Human
cuaaauggaaccacuc

SEQ ID NO: 3522835 - RNA, 17 nt, Human
cuaaauggaaccacucu

SEQ ID NO: 3522836 - RNA, 18 nt, Human
cuaaauggaaccacucua

SEQ ID NO: 3522837 - RNA, 19 nt, Human
cuaaauggccucauguggc

SEQ ID NO: 3522838 - RNA, 20 nt, Human
cuaaauggucgcccaggaga

SEQ ID NO: 3522839 - RNA, 15 nt, Human
cuaaauguaacaguc

SEQ ID NO: 3522840 - RNA, 16 nt, Human
cuaaauguaacagucu

SEQ ID NO: 3522841 - RNA, 18 nt, Human
cuaaauguaacagucuga

SEQ ID NO: 3522842 - RNA, 18 nt, Human
cuaaauguaagaaucauu

SEQ ID NO: 3522843 - RNA, 22 nt, Human
cuaaauguaagaaucauuguaa

SEQ ID NO: 3522844 - RNA, 22 nt, Human
cuaaauguaguucugcuccaga

SEQ ID NO: 3522845 - RNA, 21 nt, Human
cuaaaugugcaauagaaggug

SEQ ID NO: 3522846 - RNA, 22 nt, Human
cuaaauguucuaugguuaugaa

SEQ ID NO: 3522847 - RNA, 14 nt, Human
cuaaauuccacacu

SEQ ID NO: 3522848 - RNA, 17 nt, Human
cuaaauucuuuauuucu

SEQ ID NO: 3522849 - RNA, 19 nt, Human
cuaaauucuuucauuuuag

SEQ ID NO: 3522850 - RNA, 17 nt, Human
cuaaauugaaaccugga

SEQ ID NO: 3522851 - RNA, 13 nt, Human
cuaaauugaauaa

SEQ ID NO: 3522852 - RNA, 14 nt, Human
cuaaauuguaaacu

SEQ ID NO: 3522853 - RNA, 19 nt, Human
cuaaauuuaaauuuaaaga

SEQ ID NO: 3522854 - RNA, 13 nt, Human
cgcuggcucccca

SEQ ID NO: 3522855 - RNA, 14 nt, Human
cgcuggcugggggc

SEQ ID NO: 3522856 - RNA, 23 nt, Human
cgcugggcacuucccugcugccu

SEQ ID NO: 3522857 - RNA, 22 nt, Human
cgcugggugguacccucuggag

SEQ ID NO: 3522858 - RNA, 12 nt, Human
cgcuggugcuga

SEQ ID NO: 3522859 - RNA, 20 nt, Human
cgcugucaggauugcgagag

SEQ ID NO: 3522860 - RNA, 19 nt, Human
cgcugugagccccuggucc

SEQ ID NO: 3522861 - RNA, 15 nt, Human
cgcugugcugcccug

SEQ ID NO: 3522862 - RNA, 19 nt, Human
cgcugugcugcccugccca

SEQ ID NO: 3522863 - RNA, 21 nt, Human
cgcugugcugcccugcccacc

SEQ ID NO: 3522864 - RNA, 13 nt, Human
cgcuucccccaua

SEQ ID NO: 3522865 - RNA, 15 nt, Human
cgcuucccuccugcc

SEQ ID NO: 3522866 - RNA, 14 nt, Human
cgcuucugccugca

SEQ ID NO: 3522867 - RNA, 20 nt, Human
cgcuucuguguaucucuuuc

SEQ ID NO: 3522868 - RNA, 16 nt, Human
cgcuucuugccucugu

SEQ ID NO: 3522869 - RNA, 17 nt, Human
cgcuucuugccucugug

SEQ ID NO: 3522870 - RNA, 21 nt, Human
cgcuugccucggcuccugcug

SEQ ID NO: 3522871 - RNA, 22 nt, Human
cgcuuggagcuauuuuccaggc

SEQ ID NO: 3522872 - RNA, 16 nt, Human
cgcuuggcuccaugcu

SEQ ID NO: 3522873 - RNA, 19 nt, Human
cgcuuguagaacucacucu

SEQ ID NO: 3522874 - RNA, 17 nt, Human
cgcuuguccagcgccua

SEQ ID NO: 3522875 - RNA, 18 nt, Human
cgcuugugcagaaaacau

SEQ ID NO: 3522876 - RNA, 17 nt, Human
cgcuuucuacacuguau

SEQ ID NO: 3522877 - RNA, 13 nt, Human
cgcuuucuaugua

SEQ ID NO: 3522878 - RNA, 21 nt, Human
cggaaaacgguggaggccagg

SEQ ID NO: 3522879 - RNA, 20 nt, Human
cggaaaagguuuuauuuugu

SEQ ID NO: 3522880 - RNA, 15 nt, Human
cggaaaccuuggugu

SEQ ID NO: 3522881 - RNA, 18 nt, Human
cggaaagaagagcgagag

SEQ ID NO: 3522882 - RNA, 13 nt, Human
cggaaagcagcuc

SEQ ID NO: 3522883 - RNA, 12 nt, Human
cggaacagcaga

SEQ ID NO: 3522884 - RNA, 17 nt, Human
cggaacccaagcuuaga

SEQ ID NO: 3522885 - RNA, 19 nt, Human
cggaacccaagcuuagaac

SEQ ID NO: 3522886 - RNA, 18 nt, Human
cggaaccugugagcugca

SEQ ID NO: 3522887 - RNA, 17 nt, Human
cggaacugcaugcugcu

SEQ ID NO: 3522888 - RNA, 17 nt, Human
cggaacuguccuuuccu

SEQ ID NO: 3522889 - RNA, 22 nt, Human
cggaagaagagaucaggaagag

SEQ ID NO: 3522890 - RNA, 20 nt, Human
cggaagaccugaagaguggu

SEQ ID NO: 3522891 - RNA, 13 nt, Human
cggaagagccuug

SEQ ID NO: 3522892 - RNA, 22 nt, Human
cggaagcagugccuuccauaau

SEQ ID NO: 3522893 - RNA, 14 nt, Human
cggaagcuccuggu

SEQ ID NO: 3522894 - RNA, 18 nt, Human
cggaaggaccuauguuug

SEQ ID NO: 3522895 - RNA, 12 nt, Human
cggaagggcaca

SEQ ID NO: 3522896 - RNA, 18 nt, Human
cggaaggguaaacaauau

SEQ ID NO: 3522897 - RNA, 14 nt, Human
cggaauaguuggcu

SEQ ID NO: 3522898 - RNA, 16 nt, Human
cggaauaguuggcuag

SEQ ID NO: 3522899 - RNA, 18 nt, Human
cggaauccuguccucagc

SEQ ID NO: 3522900 - RNA, 22 nt, Human
cggaauccugucgauuagacug

SEQ ID NO: 3522901 - RNA, 13 nt, Human
cggaauuuaccug

SEQ ID NO: 3522902 - RNA, 13 nt, Human
cggacaaaauauc

SEQ ID NO: 3522903 - RNA, 12 nt, Human
cggacaauaaac

SEQ ID NO: 3522904 - RNA, 14 nt, Human
cggacacccccucg

SEQ ID NO: 3522905 - RNA, 15 nt, Human
cggacacuccuagag

SEQ ID NO: 3522906 - RNA, 16 nt, Human
cggacagccacggcca

SEQ ID NO: 3522907 - RNA, 18 nt, Human
cggacagccacggccagg

SEQ ID NO: 3522908 - RNA, 21 nt, Human
cggacagccacggccaggcca

SEQ ID NO: 3522909 - RNA, 21 nt, Human
cggacaguuccagaaguguga

SEQ ID NO: 3522910 - RNA, 19 nt, Human
cggaccaaagggagucugc

SEQ ID NO: 3522911 - RNA, 15 nt, Human
cggaccccagccauc

SEQ ID NO: 3522912 - RNA, 14 nt, Human
cggaccccagcugu

SEQ ID NO: 3522913 - RNA, 20 nt, Human
cggacccggaggccgaggcc

SEQ ID NO: 3522914 - RNA, 21 nt, Human
cggaccuuguagugagccgag

SEQ ID NO: 3522915 - RNA, 14 nt, Human
cggacgcuggcucc

SEQ ID NO: 3522916 - RNA, 15 nt, Human
cggacgcuggcuccc

SEQ ID NO: 3522917 - RNA, 14 nt, Human
cggacguuccagcc

SEQ ID NO: 3522918 - RNA, 15 nt, Human
cggacguuccagccg

SEQ ID NO: 3522919 - RNA, 16 nt, Human
cggacguuccagccgg

SEQ ID NO: 3522920 - RNA, 21 nt, Human
cggacuaagccuaccugcucu

SEQ ID NO: 3522921 - RNA, 15 nt, Human
cggacuggugcccuc

SEQ ID NO: 3522922 - RNA, 16 nt, Human
cggacuggugcccucc

SEQ ID NO: 3522923 - RNA, 22 nt, Human
cggacuuagaaaaccagcucag

SEQ ID NO: 3522924 - RNA, 14 nt, Human
cggacuuuucugca

SEQ ID NO: 3522925 - RNA, 17 nt, Human
cggagaaaggaagggcu

SEQ ID NO: 3522926 - RNA, 12 nt, Human
cggagacagggu

SEQ ID NO: 3522927 - RNA, 15 nt, Human
cggagacagugaucu

SEQ ID NO: 3522928 - RNA, 13 nt, Human
cggagagccagcu

SEQ ID NO: 3522929 - RNA, 19 nt, Human
cggagaggaagagacacuc

SEQ ID NO: 3522930 - RNA, 21 nt, Human
cggagaguacagugagccaag

SEQ ID NO: 3522931 - RNA, 16 nt, Human
cggagcaucccggagg

SEQ ID NO: 3522932 - RNA, 13 nt, Human
cggagccacuccu

SEQ ID NO: 3522933 - RNA, 21 nt, Human
cggagccacuccucugacuca

SEQ ID NO: 3522934 - RNA, 22 nt, Human
cggagccccaggccucuguguc

SEQ ID NO: 3522935 - RNA, 20 nt, Human
cggagccgggaaagaagagc

SEQ ID NO: 3522936 - RNA, 22 nt, Human
cggagccucauccgaggcaggg

SEQ ID NO: 3522937 - RNA, 22 nt, Human
cggagcugccccucucugggcc

SEQ ID NO: 3522938 - RNA, 12 nt, Human
cggaggaaaucu

SEQ ID NO: 3522939 - RNA, 19 nt, Human
cggaggaaggaggacccag

SEQ ID NO: 3522940 - RNA, 21 nt, Human
cggaggaaggaggacccagga

SEQ ID NO: 3522941 - RNA, 15 nt, Human
cggaggaccagggcu

SEQ ID NO: 3522942 - RNA, 14 nt, Human
cggaggacucacca

SEQ ID NO: 3522943 - RNA, 15 nt, Human
cggaggccccaaagg

SEQ ID NO: 3522944 - RNA, 17 nt, Human
cggaggccccacugaug

SEQ ID NO: 3522945 - RNA, 18 nt, Human
cggaggccugcgacccug

SEQ ID NO: 3522946 - RNA, 22 nt, Human
cggaggccugcgacccuggggg

SEQ ID NO: 3522947 - RNA, 17 nt, Human
cggaggcggugggccug

SEQ ID NO: 3522948 - RNA, 20 nt, Human
cggaggcugaggcaggagaa

SEQ ID NO: 3522949 - RNA, 13 nt, Human
cggaggcugcccc

SEQ ID NO: 3522950 - RNA, 19 nt, Human
cggaggcugcccccggccc

SEQ ID NO: 3522951 - RNA, 22 nt, Human
cggaggcugcccccggcccccu

SEQ ID NO: 3522952 - RNA, 20 nt, Human
cggaggcuugucagagcugg

SEQ ID NO: 3522953 - RNA, 21 nt, Human
cggaggcuugucagagcuggg

SEQ ID NO: 3522954 - RNA, 11 nt, Human
cggaggggagu

SEQ ID NO: 3522955 - RNA, 18 nt, Human
cggaggggccuggcagcc

SEQ ID NO: 3522956 - RNA, 22 nt, Human
cggagguugcagugagcugaga

SEQ ID NO: 3522957 - RNA, 18 nt, Human
cggaguaucugggaacug

SEQ ID NO: 3522958 - RNA, 20 nt, Human
cggaguccacucccagugcu

SEQ ID NO: 3522959 - RNA, 21 nt, Human
cggagucccaccuuggcugca

SEQ ID NO: 3522960 - RNA, 22 nt, Human
cggagucccaccuuggcugcag

SEQ ID NO: 3522961 - RNA, 16 nt, Human
cggcuggccuggcccc

SEQ ID NO: 3522962 - RNA, 21 nt, Human
cggcuggcuccccugcagccc

SEQ ID NO: 3522963 - RNA, 16 nt, Human
cggcugggcacacgcc

SEQ ID NO: 3522964 - RNA, 17 nt, Human
cggcugggcacacgccu

SEQ ID NO: 3522965 - RNA, 16 nt, Human
cggcuggggucccagc

SEQ ID NO: 3522966 - RNA, 18 nt, Human
cggcuggggucccagcag

SEQ ID NO: 3522967 - RNA, 15 nt, Human
cggcuucaugccagc

SEQ ID NO: 3522968 - RNA, 16 nt, Human
cggcuucaugccagcu

SEQ ID NO: 3522969 - RNA, 14 nt, Human
cggcuuccuuuccc

SEQ ID NO: 3522970 - RNA, 15 nt, Human
cggcuuccuuuccca

SEQ ID NO: 3522971 - RNA, 19 nt, Human
cggcuuccuuucccaagcc

SEQ ID NO: 3522972 - RNA, 20 nt, Human
cggcuucguuagaccgcucu

SEQ ID NO: 3522973 - RNA, 16 nt, Human
cggcuugccacacccc

SEQ ID NO: 3522974 - RNA, 16 nt, Human
cggcuuuucucagcug

SEQ ID NO: 3522975 - RNA, 20 nt, Human
cgggaaagccagugacucca

SEQ ID NO: 3522976 - RNA, 22 nt, Human
cgggaaagccagugacuccagg

SEQ ID NO: 3522977 - RNA, 17 nt, Human
cgggaacaugcccccug

SEQ ID NO: 3522978 - RNA, 16 nt, Human
cgggaaccaagcagga

SEQ ID NO: 3522979 - RNA, 16 nt, Human
cgggaaccuccccagc

SEQ ID NO: 3522980 - RNA, 22 nt, Human
cgggaaccuccccagccugcgc

SEQ ID NO: 3522981 - RNA, 12 nt, Human
cgggaagagagg

SEQ ID NO: 3522982 - RNA, 14 nt, Human
cgggaagagaggag

SEQ ID NO: 3522983 - RNA, 16 nt, Human
cgggaaggucaccagc

SEQ ID NO: 3522984 - RNA, 17 nt, Human
cgggaauauuguuucuu

SEQ ID NO: 3522985 - RNA, 18 nt, Human
cgggaauuuucaucuagg

SEQ ID NO: 3522986 - RNA, 23 nt, Human
cgggacaucacagggugggccuc

SEQ ID NO: 3522987 - RNA, 22 nt, Human
cgggacccagggcccucggugg

SEQ ID NO: 3522988 - RNA, 23 nt, Human
cgggaccccgagccuggcuccaa

SEQ ID NO: 3522989 - RNA, 15 nt, Human
cgggacguggcaccu

SEQ ID NO: 3522990 - RNA, 19 nt, Human
cgggacguggcaccuccuc

SEQ ID NO: 3522991 - RNA, 16 nt, Human
cgggacucaggcggga

SEQ ID NO: 3522992 - RNA, 22 nt, Human
cgggacucaggcgggacagugc

SEQ ID NO: 3522993 - RNA, 21 nt, Human
cgggagaaucaugugaacccg

SEQ ID NO: 3522994 - RNA, 19 nt, Human
cgggagccucccugccuca

SEQ ID NO: 3522995 - RNA, 17 nt, Human
cgggagcgguggcccug

SEQ ID NO: 3522996 - RNA, 18 nt, Human
cgggaggaauuucugagu

SEQ ID NO: 3522997 - RNA, 13 nt, Human
cgggaggaggugu

SEQ ID NO: 3522998 - RNA, 20 nt, Human
cgggaggcagagguuguagu

SEQ ID NO: 3522999 - RNA, 17 nt, Human
cgggaggcugagacagg

SEQ ID NO: 3523000 - RNA, 17 nt, Human
cgggaggcugaggcagg

SEQ ID NO: 3523001 - RNA, 15 nt, Human
cgggaggggcccgcu

SEQ ID NO: 3523002 - RNA, 16 nt, Human
cgggaugguucuggcu

SEQ ID NO: 3523003 - RNA, 17 nt, Human
cgggcaaaugccagggc

SEQ ID NO: 3523004 - RNA, 18 nt, Human
cgggcaaaugccagggcc

SEQ ID NO: 3523005 - RNA, 20 nt, Human
cgggcaaaugccagggcccg

SEQ ID NO: 3523006 - RNA, 15 nt, Human
cgggcacaauaaauc

SEQ ID NO: 3523007 - RNA, 14 nt, Human
cgggcacagcugug

SEQ ID NO: 3523008 - RNA, 14 nt, Human
cgggcacucagaag

SEQ ID NO: 3523009 - RNA, 14 nt, Human
cgggcagagggcug

SEQ ID NO: 3523010 - RNA, 15 nt, Human
cgggcagagggcugg

SEQ ID NO: 3523011 - RNA, 19 nt, Human
cgggcagagggcuggaggc

SEQ ID NO: 3523012 - RNA, 22 nt, Human
cgggcagagggcuggaggccca

SEQ ID NO: 3523013 - RNA, 14 nt, Human
cgggcagcacagca

SEQ ID NO: 3523014 - RNA, 23 nt, Human
cgggcagccuggcucccaggaca

SEQ ID NO: 3523015 - RNA, 16 nt, Human
cgggcagggcucccac

SEQ ID NO: 3523016 - RNA, 15 nt, Human
cgggcaucauucucu

SEQ ID NO: 3523017 - RNA, 14 nt, Human
cgggcaucuuuggg

SEQ ID NO: 3523018 - RNA, 12 nt, Human
ccaccagugccu

SEQ ID NO: 3523019 - RNA, 19 nt, Human
ccaccagugccucucccug

SEQ ID NO: 3523020 - RNA, 17 nt, Human
ccaccauaugaauugua

SEQ ID NO: 3523021 - RNA, 20 nt, Human
ccaccauaugaauuguacag

SEQ ID NO: 3523022 - RNA, 20 nt, Human
ccaccaucaagccaccaaca

SEQ ID NO: 3523023 - RNA, 14 nt, Human
ccaccauccugcag

SEQ ID NO: 3523024 - RNA, 17 nt, Human
ccaccaugcccagucga

SEQ ID NO: 3523025 - RNA, 16 nt, Human
ccaccaugccucacua

SEQ ID NO: 3523026 - RNA, 22 nt, Human
ccaccauggcuaaggcaccagc

SEQ ID NO: 3523027 - RNA, 16 nt, Human
ccaccauuccuggaaa

SEQ ID NO: 3523028 - RNA, 21 nt, Human
ccaccauuccuggaaaccaca

SEQ ID NO: 3523029 - RNA, 17 nt, Human
ccaccauuuggcauccc

SEQ ID NO: 3523030 - RNA, 21 nt, Human
ccaccauuuggcaucccuggg

SEQ ID NO: 3523031 - RNA, 21 nt, Human
ccacccaaccccaagccagcc

SEQ ID NO: 3523032 - RNA, 13 nt, Human
ccacccaacccua

SEQ ID NO: 3523033 - RNA, 19 nt, Human
ccacccaacccuaucuccu

SEQ ID NO: 3523034 - RNA, 16 nt, Human
ccacccaagggccugg

SEQ ID NO: 3523035 - RNA, 19 nt, Human
ccacccaagggccuggccu

SEQ ID NO: 3523036 - RNA, 14 nt, Human
ccacccaccucagc

SEQ ID NO: 3523037 - RNA, 15 nt, Human
ccacccaccucagcc

SEQ ID NO: 3523038 - RNA, 13 nt, Human
ccacccagcccau

SEQ ID NO: 3523039 - RNA, 12 nt, Human
ccacccaggagg

SEQ ID NO: 3523040 - RNA, 18 nt, Human
ccacccaggagggagggg

SEQ ID NO: 3523041 - RNA, 23 nt, Human
ccacccaggggaaugaucucuga

SEQ ID NO: 3523042 - RNA, 17 nt, Human
ccacccaucgcugugug

SEQ ID NO: 3523043 - RNA, 16 nt, Human
ccaccccaaccugcuc

SEQ ID NO: 3523044 - RNA, 15 nt, Human
ccaccccaagagaac

SEQ ID NO: 3523045 - RNA, 15 nt, Human
ccaccccacccacuu

SEQ ID NO: 3523046 - RNA, 13 nt, Human
ccaccccaggacg

SEQ ID NO: 3523047 - RNA, 19 nt, Human
ccaccccagugcacccacu

SEQ ID NO: 3523048 - RNA, 18 nt, Human
ccaccccauccaguucau

SEQ ID NO: 3523049 - RNA, 23 nt, Human
ccaccccaugucaccggauccug

SEQ ID NO: 3523050 - RNA, 13 nt, Human
ccacccccacacc

SEQ ID NO: 3523051 - RNA, 14 nt, Human
ccacccccacaccu

SEQ ID NO: 3523052 - RNA, 15 nt, Human
ccacccccagccccg

SEQ ID NO: 3523053 - RNA, 16 nt, Human
ccacccccagcucaau

SEQ ID NO: 3523054 - RNA, 18 nt, Human
ccacccccugcccugcac

SEQ ID NO: 3523055 - RNA, 22 nt, Human
ccacccccuucagugcccacca

SEQ ID NO: 3523056 - RNA, 13 nt, Human
ccacccccuucuc

SEQ ID NO: 3523057 - RNA, 23 nt, Human
ccaccccgagggcugagccuggu

SEQ ID NO: 3523058 - RNA, 16 nt, Human
ccaccccgccugcccu

SEQ ID NO: 3523059 - RNA, 18 nt, Human
ccaccccgggcucucugc

SEQ ID NO: 3523060 - RNA, 20 nt, Human
ccaccccguagauucccauc

SEQ ID NO: 3523061 - RNA, 16 nt, Human
ccaccccuaccccugg

SEQ ID NO: 3523062 - RNA, 19 nt, Human
ccaccccucaacaccucug

SEQ ID NO: 3523063 - RNA, 15 nt, Human
ccaccccuccuuccu

SEQ ID NO: 3523064 - RNA, 14 nt, Human
ccaccccugccucc

SEQ ID NO: 3523065 - RNA, 12 nt, Human
ccaccccugugc

SEQ ID NO: 3523066 - RNA, 13 nt, Human
ccaccccugugcu

SEQ ID NO: 3523067 - RNA, 13 nt, Human
ccaccccuuccug

SEQ ID NO: 3523068 - RNA, 13 nt, Human
ccaccccuugcuc

SEQ ID NO: 3523069 - RNA, 23 nt, Human
ccaccccuuucuagaccaauaaa

SEQ ID NO: 3523070 - RNA, 13 nt, Human
ccacccgaugcug

SEQ ID NO: 3523071 - RNA, 14 nt, Human
ccacccgaugcugc

SEQ ID NO: 3523072 - RNA, 17 nt, Human
ccacccgguucaguguu

SEQ ID NO: 3523073 - RNA, 20 nt, Human
ccacccgguucaguguuucu

SEQ ID NO: 3523074 - RNA, 14 nt, Human
ccacccucacuggc

SEQ ID NO: 3523075 - RNA, 13 nt, Human
ccacccucagcac

SEQ ID NO: 3523076 - RNA, 17 nt, Human
ccacccuccaccuucca

SEQ ID NO: 3523077 - RNA, 17 nt, Human
ccacccucccuggagug

SEQ ID NO: 3523078 - RNA, 13 nt, Human
ccacccuccuggc

SEQ ID NO: 3523079 - RNA, 17 nt, Human
ccacccuccuggccuca

SEQ ID NO: 3523080 - RNA, 23 nt, Human
ccacccuccuggccucagacugc

SEQ ID NO: 3523081 - RNA, 12 nt, Human
ccacccuccugu

SEQ ID NO: 3523082 - RNA, 17 nt, Human
ccacccuccugucuucc

SEQ ID NO: 3523083 - RNA, 22 nt, Human
ccacccucggggauguguccug

SEQ ID NO: 3523084 - RNA, 22 nt, Human
ccacccucguggacaccugccc

SEQ ID NO: 3523085 - RNA, 21 nt, Human
ccacccugagccggccccagg

SEQ ID NO: 3523086 - RNA, 13 nt, Human
ccacccugccugc

SEQ ID NO: 3523087 - RNA, 16 nt, Human
ccacccugcugccuuc

SEQ ID NO: 3523088 - RNA, 18 nt, Human
ccacccugcugcuggugc

SEQ ID NO: 3523089 - RNA, 20 nt, Human
ccacccugcuuggcccaggg

SEQ ID NO: 3523090 - RNA, 12 nt, Human
ccacccugggcc

SEQ ID NO: 3523091 - RNA, 15 nt, Human
ccacccugggcccug

SEQ ID NO: 3523092 - RNA, 12 nt, Human
ccacccugggcu

SEQ ID NO: 3523093 - RNA, 16 nt, Human
ccacccugggcucugg

SEQ ID NO: 3523094 - RNA, 17 nt, Human
ccacccugggcucugug

SEQ ID NO: 3523095 - RNA, 20 nt, Human
ccacccugggcucugugggc

SEQ ID NO: 3523096 - RNA, 14 nt, Human
ccacccuguccccc

SEQ ID NO: 3523097 - RNA, 16 nt, Human
ccacccugucccccag

SEQ ID NO: 3523098 - RNA, 19 nt, Human
ccacccuguuccugcugcu

SEQ ID NO: 3523099 - RNA, 12 nt, Human
ccacccuugccc

SEQ ID NO: 3523100 - RNA, 13 nt, Human
ccacccuugccca

SEQ ID NO: 3523101 - RNA, 17 nt, Human
ccacccuuggccugucu

SEQ ID NO: 3523102 - RNA, 19 nt, Human
ccacccuuggccugucuca

SEQ ID NO: 3523103 - RNA, 15 nt, Human
ccacccuuugggggg

SEQ ID NO: 3523104 - RNA, 13 nt, Human
ccaccgcccagag

SEQ ID NO: 3523105 - RNA, 17 nt, Human
ccaccgcccagagaccc

SEQ ID NO: 3523106 - RNA, 13 nt, Human
ccaccgccuccua

SEQ ID NO: 3523107 - RNA, 13 nt, Human
cguucucccuggg

SEQ ID NO: 3523108 - RNA, 18 nt, Human
cguucugcuggccuggau

SEQ ID NO: 3523109 - RNA, 13 nt, Human
cguucuuguaauu

SEQ ID NO: 3523110 - RNA, 15 nt, Human
cguucuuguaauuuu

SEQ ID NO: 3523111 - RNA, 18 nt, Human
cguugaagaggaagggca

SEQ ID NO: 3523112 - RNA, 23 nt, Human
cguugcaaccacugcaauaucuu

SEQ ID NO: 3523113 - RNA, 12 nt, Human
cguugcaugucg

SEQ ID NO: 3523114 - RNA, 21 nt, Human
cguugcccccauuucugaggu

SEQ ID NO: 3523115 - RNA, 14 nt, Human
cguugcugugggaa

SEQ ID NO: 3523116 - RNA, 15 nt, Human
cguugcugugggaac

SEQ ID NO: 3523117 - RNA, 14 nt, Human
cguugcuuucacuc

SEQ ID NO: 3523118 - RNA, 17 nt, Human
cguuggaauuaaaacaa

SEQ ID NO: 3523119 - RNA, 14 nt, Human
cguuguaaaauaua

SEQ ID NO: 3523120 - RNA, 20 nt, Human
cguuguugcauguuugaaau

SEQ ID NO: 3523121 - RNA, 20 nt, Human
cguuguuuacuuaaagauuu

SEQ ID NO: 3523122 - RNA, 19 nt, Human
cguuuaaaguucuguguau

SEQ ID NO: 3523123 - RNA, 23 nt, Human
cguuuacaagcccccccuuccac

SEQ ID NO: 3523124 - RNA, 15 nt, Human
cguuuaccuagaaga

SEQ ID NO: 3523125 - RNA, 14 nt, Human
cguuuacuaugccu

SEQ ID NO: 3523126 - RNA, 15 nt, Human
cguuuagaccaagga

SEQ ID NO: 3523127 - RNA, 17 nt, Human
cguuucaguaauaaaac

SEQ ID NO: 3523128 - RNA, 18 nt, Human
cguuucaguaauaaaaca

SEQ ID NO: 3523129 - RNA, 23 nt, Human
cguuucagugucaaauaaacacu

SEQ ID NO: 3523130 - RNA, 22 nt, Human
cguuucauuuagucaugugacc

SEQ ID NO: 3523131 - RNA, 20 nt, Human
cguuuccagguguuuauagu

SEQ ID NO: 3523132 - RNA, 11 nt, Human
cguuuccauca

SEQ ID NO: 3523133 - RNA, 19 nt, Human
cguuucuaaaggcuaccuu

SEQ ID NO: 3523134 - RNA, 21 nt, Human
cguuucuaaaggcuaccuuug

SEQ ID NO: 3523135 - RNA, 22 nt, Human
cguuucuccaccuagacuguaa

SEQ ID NO: 3523136 - RNA, 15 nt, Human
cguuucuucacuuuu

SEQ ID NO: 3523137 - RNA, 19 nt, Human
cguuugauuugucacugcu

SEQ ID NO: 3523138 - RNA, 14 nt, Human
cguuuguaugugug

SEQ ID NO: 3523139 - RNA, 19 nt, Human
cguuuguguucuguuuugu

SEQ ID NO: 3523140 - RNA, 9 nt, Human
cguuuguuu

SEQ ID NO: 3523141 - RNA, 19 nt, Human
cguuuguuuguuuguuuaa

SEQ ID NO: 3523142 - RNA, 16 nt, Human
cguuuguuuguuuugu

SEQ ID NO: 3523143 - RNA, 16 nt, Human
cguuuuauaagcauca

SEQ ID NO: 3523144 - RNA, 18 nt, Human
cguuuuauuguguuuuua

SEQ ID NO: 3523145 - RNA, 22 nt, Human
cguuuugcaagguaaaauuuua

SEQ ID NO: 3523146 - RNA, 17 nt, Human
cguuuuuuaaauguaua

SEQ ID NO: 3523147 - RNA, 15 nt, Human
cguuuuuuucauucc

SEQ ID NO: 3523148 - RNA, 16 nt, Human
cuaaaaaaaaaaaagu

SEQ ID NO: 3523149 - RNA, 17 nt, Human
cuaaaaaaaaaaaagua

SEQ ID NO: 3523150 - RNA, 14 nt, Human
cuaaaaaaaagaug

SEQ ID NO: 3523151 - RNA, 15 nt, Human
cuaaaaaaaagauga

SEQ ID NO: 3523152 - RNA, 11 nt, Human
cuaaaaaagau

SEQ ID NO: 3523153 - RNA, 13 nt, Human
cuaaaaaagauau

SEQ ID NO: 3523154 - RNA, 19 nt, Human
cuaaaaaagauauauuaaa

SEQ ID NO: 3523155 - RNA, 20 nt, Human
cuaaaaaagcugaaucagac

SEQ ID NO: 3523156 - RNA, 15 nt, Human
cuaaaaagauuagca

SEQ ID NO: 3523157 - RNA, 17 nt, Human
cuaaaaaguauaaaaua

SEQ ID NO: 3523158 - RNA, 17 nt, Human
cuaaaaauaacuguaau

SEQ ID NO: 3523159 - RNA, 11 nt, Human
cuaaaaauaua

SEQ ID NO: 3523160 - RNA, 23 nt, Human
cuaaaaauauacauguuuaugua

SEQ ID NO: 3523161 - RNA, 14 nt, Human
cuaaaaauauuguu

SEQ ID NO: 3523162 - RNA, 17 nt, Human
cuaaaacaauaaaauuu

SEQ ID NO: 3523163 - RNA, 11 nt, Human
cuaaaaccauu

SEQ ID NO: 3523164 - RNA, 14 nt, Human
cuaaaaccugaaau

SEQ ID NO: 3523165 - RNA, 19 nt, Human
cuaaaacuacaaaaauuaa

SEQ ID NO: 3523166 - RNA, 13 nt, Human
cuaaaacuguacu

SEQ ID NO: 3523167 - RNA, 16 nt, Human
cuaaaacuguacuuug

SEQ ID NO: 3523168 - RNA, 13 nt, Human
cuaaaagacaggc

SEQ ID NO: 3523169 - RNA, 20 nt, Human
cuaaaagauccuuuuuaaau

SEQ ID NO: 3523170 - RNA, 12 nt, Human
cuaaaagcaccu

SEQ ID NO: 3523171 - RNA, 15 nt, Human
cuaaaagccacccca

SEQ ID NO: 3523172 - RNA, 23 nt, Human
cuaaaagguaugcaaucaaaucu

SEQ ID NO: 3523173 - RNA, 15 nt, Human
cuaaaaguaaacauu

SEQ ID NO: 3523174 - RNA, 12 nt, Human
cuaaaaguucau

SEQ ID NO: 3523175 - RNA, 18 nt, Human
cuaaaaguucauaacagu

SEQ ID NO: 3523176 - RNA, 22 nt, Human
cuaaaaguucauaacagugcca

SEQ ID NO: 3523177 - RNA, 14 nt, Human
cuaaaauacauuua

SEQ ID NO: 3523178 - RNA, 18 nt, Human
cuaaaauauauaauuuau

SEQ ID NO: 3523179 - RNA, 22 nt, Human
cuaaaauaucuggguggcuuaa

SEQ ID NO: 3523180 - RNA, 20 nt, Human
cuaaaauauuuaugaagaaa

SEQ ID NO: 3523181 - RNA, 15 nt, Human
cuaaaauauuuauuu

SEQ ID NO: 3523182 - RNA, 12 nt, Human
cuaaaaucauga

SEQ ID NO: 3523183 - RNA, 22 nt, Human
cuaaaaucugcuuguauuccaa

SEQ ID NO: 3523184 - RNA, 23 nt, Human
cuaaaaugauuuuaucugugaau

SEQ ID NO: 3523185 - RNA, 22 nt, Human
cuaaaaugccucaguguauuug

SEQ ID NO: 3523186 - RNA, 12 nt, Human
cuaaaaugcuuc

SEQ ID NO: 3523187 - RNA, 13 nt, Human
cuaaaaugcuuca

SEQ ID NO: 3523188 - RNA, 22 nt, Human
cuaaaauggacuguggugacuu

SEQ ID NO: 3523189 - RNA, 18 nt, Human
cuaaaaugugauguucua

SEQ ID NO: 3523190 - RNA, 14 nt, Human
cuaaaauguuuuca

SEQ ID NO: 3523191 - RNA, 15 nt, Human
cuaaaauguuuucag

SEQ ID NO: 3523192 - RNA, 18 nt, Human
cuaaaauuccacugcguu

SEQ ID NO: 3523193 - RNA, 17 nt, Human
cuaaaauuuuuaaggac

SEQ ID NO: 3523194 - RNA, 19 nt, Human
cuaaacacugcgcuuuauu

SEQ ID NO: 3523195 - RNA, 17 nt, Human
cuaaacauaugauuuca

SEQ ID NO: 3523196 - RNA, 18 nt, Human
cuaaacauccaauauuuu

SEQ ID NO: 3523197 - RNA, 17 nt, Human
cuaaacauuuuguuauu

SEQ ID NO: 3523198 - RNA, 15 nt, Human
cuaaacccaauccaa

SEQ ID NO: 3523199 - RNA, 21 nt, Human
cuaaacgagucaauccccuca

SEQ ID NO: 3523200 - RNA, 17 nt, Human
cuaaacggauuccaaag

SEQ ID NO: 3523201 - RNA, 20 nt, Human
cuaaacgguucaguuucuuc

SEQ ID NO: 3523202 - RNA, 18 nt, Human
cuaaacguaagcacuguu

SEQ ID NO: 3523203 - RNA, 17 nt, Human
cuaaacguguauguuuu

SEQ ID NO: 3523204 - RNA, 21 nt, Human
cuaaacguguauguuuuucag

SEQ ID NO: 3523205 - RNA, 16 nt, Human
cuaaacuaguuuuucc

SEQ ID NO: 3523206 - RNA, 14 nt, Human
cuaaacuaucuuuu

SEQ ID NO: 3523207 - RNA, 14 nt, Human
cuaaacucauuuau

SEQ ID NO: 3523208 - RNA, 15 nt, Human
cuaaacucauuuaua

SEQ ID NO: 3523209 - RNA, 20 nt, Human
cuaaacuccaaacauccucu

SEQ ID NO: 3523210 - RNA, 17 nt, Human
cuaaacuccuuccuggc

SEQ ID NO: 3523211 - RNA, 22 nt, Human
cuaaacucucuuugggaauguu

SEQ ID NO: 3523212 - RNA, 20 nt, Human
cuaaacugagacaaugccuu

SEQ ID NO: 3523213 - RNA, 12 nt, Human
cuaaacugcccc

SEQ ID NO: 3523214 - RNA, 22 nt, Human
cuaaacugcccccucugcccug

SEQ ID NO: 3523215 - RNA, 12 nt, Human
cuaaacuggaga

SEQ ID NO: 3523216 - RNA, 13 nt, Human
cuaaacuggagac

SEQ ID NO: 3523217 - RNA, 16 nt, Human
cuaaacuuccccaucu

SEQ ID NO: 3523218 - RNA, 15 nt, Human
cuaaacuuuuuuucu

SEQ ID NO: 3523219 - RNA, 17 nt, Human
cuaaacuuuuuuucugu

SEQ ID NO: 3523220 - RNA, 19 nt, Human
cuaaagaaaaagucaucca

SEQ ID NO: 3523221 - RNA, 21 nt, Human
cuaaagaaaaauaucuuggcc

SEQ ID NO: 3523222 - RNA, 23 nt, Human
cuaaagaaaaauaucuuggccua

SEQ ID NO: 3523223 - RNA, 21 nt, Human
cuaaagaaagauuacuuagag

SEQ ID NO: 3523224 - RNA, 14 nt, Human
cuaaagaagaucug

SEQ ID NO: 3523225 - RNA, 14 nt, Human
cuagaaacccaagc

SEQ ID NO: 3523226 - RNA, 18 nt, Human
cuagaaacccaagcuccu

SEQ ID NO: 3523227 - RNA, 16 nt, Human
cuagaaacuuccaaau

SEQ ID NO: 3523228 - RNA, 21 nt, Human
cuagaaagcagagauuuucaa

SEQ ID NO: 3523229 - RNA, 23 nt, Human
cuagaaagugaauaaaaauuaag

SEQ ID NO: 3523230 - RNA, 13 nt, Human
cuagaaauaugau

SEQ ID NO: 3523231 - RNA, 15 nt, Human
cuagaaauaugauuu

SEQ ID NO: 3523232 - RNA, 23 nt, Human
cuagaaaugauccccagcuguuu

SEQ ID NO: 3523233 - RNA, 19 nt, Human
cuagaaaugugaaugagga

SEQ ID NO: 3523234 - RNA, 16 nt, Human
cuagaaauugacacaa

SEQ ID NO: 3523235 - RNA, 18 nt, Human
cuagaaauugccuauccu

SEQ ID NO: 3523236 - RNA, 12 nt, Human
cuagaaauuuuc

SEQ ID NO: 3523237 - RNA, 14 nt, Human
cuagaacacaggca

SEQ ID NO: 3523238 - RNA, 22 nt, Human
cuagaacacaggcaaaauccuu

SEQ ID NO: 3523239 - RNA, 19 nt, Human
cuagaacacuaacucacca

SEQ ID NO: 3523240 - RNA, 14 nt, Human
cuagaacccucugu

SEQ ID NO: 3523241 - RNA, 17 nt, Human
cuagaaccuagaagggc

SEQ ID NO: 3523242 - RNA, 14 nt, Human
cuagaaccuggaga

SEQ ID NO: 3523243 - RNA, 17 nt, Human
cuagaacucccuuucaa

SEQ ID NO: 3523244 - RNA, 15 nt, Human
cuagaacugaauuuu

SEQ ID NO: 3523245 - RNA, 10 nt, Human
cuagaacuuu

SEQ ID NO: 3523246 - RNA, 13 nt, Human
cuagaacuuuuuu

SEQ ID NO: 3523247 - RNA, 15 nt, Human
cuagaacuuuuuuaa

SEQ ID NO: 3523248 - RNA, 16 nt, Human
cuagaacuuuuuuaaa

SEQ ID NO: 3523249 - RNA, 14 nt, Human
cuagaagaaaugaa

SEQ ID NO: 3523250 - RNA, 17 nt, Human
cuagaagagucuauugu

SEQ ID NO: 3523251 - RNA, 16 nt, Human
cuagaagccaagggaa

SEQ ID NO: 3523252 - RNA, 20 nt, Human
cuagaagccaagggaaaggg

SEQ ID NO: 3523253 - RNA, 21 nt, Human
cuagcaugccaacaagaaugc

SEQ ID NO: 3523254 - RNA, 17 nt, Human
cuagcauggcugccaau

SEQ ID NO: 3523255 - RNA, 16 nt, Human
cuagccaaaccaggac

SEQ ID NO: 3523256 - RNA, 15 nt, Human
cuagccagacacucu

SEQ ID NO: 3523257 - RNA, 19 nt, Human
cuagccagacacucugcuc

SEQ ID NO: 3523258 - RNA, 19 nt, Human
cuagccagaggagagagga

SEQ ID NO: 3523259 - RNA, 19 nt, Human
cuagccagugcuccaggca

SEQ ID NO: 3523260 - RNA, 21 nt, Human
cuagccauacgcucagcucau

SEQ ID NO: 3523261 - RNA, 17 nt, Human
cuagcccacccugcugc

SEQ ID NO: 3523262 - RNA, 19 nt, Human
cuagcccacccugcugccu

SEQ ID NO: 3523263 - RNA, 20 nt, Human
cuagcccacccugcugccuu

SEQ ID NO: 3523264 - RNA, 14 nt, Human
cuagcccaggagag

SEQ ID NO: 3523265 - RNA, 22 nt, Human
cuagcccauggacuucacauaa

SEQ ID NO: 3523266 - RNA, 15 nt, Human
cuagccccuggggug

SEQ ID NO: 3523267 - RNA, 14 nt, Human
cuagccccugugga

SEQ ID NO: 3523268 - RNA, 14 nt, Human
cuagcccucucccu

SEQ ID NO: 3523269 - RNA, 13 nt, Human
cuagcccugcccg

SEQ ID NO: 3523270 - RNA, 14 nt, Human
cuagccgaccucag

SEQ ID NO: 3523271 - RNA, 18 nt, Human
cuagccggccacuuugga

SEQ ID NO: 3523272 - RNA, 16 nt, Human
cuagccgguuccuguc

SEQ ID NO: 3523273 - RNA, 22 nt, Human
cuagccucacgcuccuuucuga

SEQ ID NO: 3523274 - RNA, 23 nt, Human
cuagccucacgcuccuuucugau

SEQ ID NO: 3523275 - RNA, 20 nt, Human
cuagccugaugagauuuuua

SEQ ID NO: 3523276 - RNA, 21 nt, Human
cuagccugugccucugggacu

SEQ ID NO: 3523277 - RNA, 18 nt, Human
cuagccuuauccucugau

SEQ ID NO: 3523278 - RNA, 19 nt, Human
cuagccuugaggaguguga

SEQ ID NO: 3523279 - RNA, 16 nt, Human
cuagccuuuggcucug

SEQ ID NO: 3523280 - RNA, 17 nt, Human
cuagccuuuggcucugg

SEQ ID NO: 3523281 - RNA, 18 nt, Human
cuagccuuuggcucugga

SEQ ID NO: 3523282 - RNA, 21 nt, Human
cuagccuuuggcucuggagac

SEQ ID NO: 3523283 - RNA, 16 nt, Human
cuagcgaucucuccug

SEQ ID NO: 3523284 - RNA, 19 nt, Human
cuagcgaucucuccuggcc

SEQ ID NO: 3523285 - RNA, 20 nt, Human
cuagcgaucucuccuggccu

SEQ ID NO: 3523286 - RNA, 21 nt, Human
cuagcgcaguuuuuuuuuucu

SEQ ID NO: 3523287 - RNA, 12 nt, Human
cuagcgcugccg

SEQ ID NO: 3523288 - RNA, 22 nt, Human
cuagcgcugccgcaccccagag

SEQ ID NO: 3523289 - RNA, 16 nt, Human
cuagcgggauggggcu

SEQ ID NO: 3523290 - RNA, 19 nt, Human
cuagcguagugcagcaggg

SEQ ID NO: 3523291 - RNA, 22 nt, Human
cuagcuaauguaauaacuguga

SEQ ID NO: 3523292 - RNA, 14 nt, Human
cuagcuaauuauuu

SEQ ID NO: 3523293 - RNA, 16 nt, Human
cuagcuaauuauuuaa

SEQ ID NO: 3523294 - RNA, 15 nt, Human
cuagcuagaaauaug

SEQ ID NO: 3523295 - RNA, 21 nt, Human
cuagcuaugcuguaucugugc

SEQ ID NO: 3523296 - RNA, 10 nt, Human
cuagcucccc

SEQ ID NO: 3523297 - RNA, 14 nt, Human
cuagcuccccuccu

SEQ ID NO: 3523298 - RNA, 16 nt, Human
cuagcuccccuccucu

SEQ ID NO: 3523299 - RNA, 23 nt, Human
cuagcucuauguuuacaaaugga

SEQ ID NO: 3523300 - RNA, 16 nt, Human
cuagcucucuaggccu

SEQ ID NO: 3523301 - RNA, 14 nt, Human
cuagcucugagcca

SEQ ID NO: 3523302 - RNA, 20 nt, Human
cuagcugcacagggcagcug

SEQ ID NO: 3523303 - RNA, 18 nt, Human
cuagcuggagaggagccc

SEQ ID NO: 3523304 - RNA, 22 nt, Human
cuagcuggagaggagcccugcc

SEQ ID NO: 3523305 - RNA, 23 nt, Human
cuagcuggagaggagcccugccu

SEQ ID NO: 3523306 - RNA, 19 nt, Human
cuagcugggggugggccag

SEQ ID NO: 3523307 - RNA, 20 nt, Human
cuagcugggggugggccagg

SEQ ID NO: 3523308 - RNA, 22 nt, Human
cuagcugggggugggccaggcu

SEQ ID NO: 3523309 - RNA, 15 nt, Human
cuagcuggugguuuc

SEQ ID NO: 3523310 - RNA, 17 nt, Human
cuagcuguccuuuuucc

SEQ ID NO: 3523311 - RNA, 14 nt, Human
cuagcugugggggu

SEQ ID NO: 3523312 - RNA, 23 nt, Human
cuagcugugugaauaccugcuca

SEQ ID NO: 3523313 - RNA, 20 nt, Human
cuagcuuacaugagaacaga

SEQ ID NO: 3523314 - RNA, 22 nt, Human
cuagcuuagagccucccucaau

SEQ ID NO: 3523315 - RNA, 21 nt, Human
cuagcuucugcuuuucugccc

SEQ ID NO: 3523316 - RNA, 20 nt, Human
cuagcuugggaggcuucccc

SEQ ID NO: 3523317 - RNA, 14 nt, Human
cuagcuuuuuaauu

SEQ ID NO: 3523318 - RNA, 14 nt, Human
cuaggaaaagaaau

SEQ ID NO: 3523319 - RNA, 14 nt, Human
cuaggaaaauaaaa

SEQ ID NO: 3523320 - RNA, 15 nt, Human
cuaggaaaauuauuc

SEQ ID NO: 3523321 - RNA, 19 nt, Human
cuaggaaauauuuauuuua

SEQ ID NO: 3523322 - RNA, 20 nt, Human
cuaggaaauauuuauuuuaa

SEQ ID NO: 3523323 - RNA, 16 nt, Human
cuaggaacaaaucuuc

SEQ ID NO: 3523324 - RNA, 19 nt, Human
cuaggaagaauuuuaaaaa

SEQ ID NO: 3523325 - RNA, 23 nt, Human
cuaggaagaauuuuaaaaaugaa

SEQ ID NO: 3523326 - RNA, 15 nt, Human
cuaggaagacuuugg

SEQ ID NO: 3523327 - RNA, 21 nt, Human
cuaggaagacuuuggaaagag

SEQ ID NO: 3523328 - RNA, 15 nt, Human
cuaggaagaggagug

SEQ ID NO: 3523329 - RNA, 16 nt, Human
cuaggaagaggagugg

SEQ ID NO: 3523330 - RNA, 14 nt, Human
cuaggaagccucag

SEQ ID NO: 3523331 - RNA, 22 nt, Human
cuaggaaggcacuucugccuga

SEQ ID NO: 3523332 - RNA, 16 nt, Human
cuaggaaugaaauccu

SEQ ID NO: 3523333 - RNA, 15 nt, Human
cuaggaauucccagc

SEQ ID NO: 3523334 - RNA, 19 nt, Human
cuaggacacaguuccuggg

SEQ ID NO: 3523335 - RNA, 16 nt, Human
cuaggacauguucccu

SEQ ID NO: 3523336 - RNA, 19 nt, Human
cuaggaccacucagccccu

SEQ ID NO: 3523337 - RNA, 20 nt, Human
cuaggaccacucagccccua

SEQ ID NO: 3523338 - RNA, 20 nt, Human
cuaggacccgucuccagcug

SEQ ID NO: 3523339 - RNA, 21 nt, Human
cuaggacccgucuccagcugc

SEQ ID NO: 3523340 - RNA, 12 nt, Human
cuaggacuccuu

SEQ ID NO: 3523341 - RNA, 12 nt, Human
cuaggacucuga

SEQ ID NO: 3523342 - RNA, 16 nt, Human
cuaggacucugaggcu

SEQ ID NO: 3523343 - RNA, 22 nt, Human
cuaggacucugaggcucuuucu

SEQ ID NO: 3523344 - RNA, 21 nt, Human
cuaggagaaccaaaucuggaa

SEQ ID NO: 3523345 - RNA, 23 nt, Human
cuaggagaaccaaaucuggaagc

SEQ ID NO: 3523346 - RNA, 23 nt, Human
cuaggagaaggaggggaaccaga

SEQ ID NO: 3523347 - RNA, 19 nt, Human
cuaggagaggagaaccaga

SEQ ID NO: 3523348 - RNA, 13 nt, Human
cuaggagcacugu

SEQ ID NO: 3523349 - RNA, 21 nt, Human
cuaggagcuuugacucaggag

SEQ ID NO: 3523350 - RNA, 18 nt, Human
cuaggagggagacacugg

SEQ ID NO: 3523351 - RNA, 22 nt, Human
cuaggagggagacacuggcccc

SEQ ID NO: 3523352 - RNA, 18 nt, Human
cuaggaugcggaaauccc

SEQ ID NO: 3523353 - RNA, 20 nt, Human
cuaggauucacaccccaccu

SEQ ID NO: 3523354 - RNA, 21 nt, Human
cuaggauucacaccccaccug

SEQ ID NO: 3523355 - RNA, 13 nt, Human
cuaggauucuaaa

SEQ ID NO: 3523356 - RNA, 13 nt, Human
cuaggauuucaug

SEQ ID NO: 3523357 - RNA, 17 nt, Human
cuaggauuugaacacuu

SEQ ID NO: 3523358 - RNA, 15 nt, Human
cuaggcaggaccugu

SEQ ID NO: 3523359 - RNA, 17 nt, Human
cuaggcagggugucugc

SEQ ID NO: 3523360 - RNA, 19 nt, Human
cuaggcagggugucugccc

SEQ ID NO: 3523361 - RNA, 15 nt, Human
cuaggcaucccaggg

SEQ ID NO: 3523362 - RNA, 17 nt, Human
cuaggcaucucuguacu

SEQ ID NO: 3523363 - RNA, 14 nt, Human
cuaggcauucugga

SEQ ID NO: 3523364 - RNA, 16 nt, Human
cuaggcauuuguaaau

SEQ ID NO: 3523365 - RNA, 14 nt, Human
cuaggccacuccuc

SEQ ID NO: 3523366 - RNA, 14 nt, Human
cuaggccaggugca

SEQ ID NO: 3523367 - RNA, 19 nt, Human
cuaggcccccacuugccuc

SEQ ID NO: 3523368 - RNA, 23 nt, Human
cuaggcccccacuugccucuucc

SEQ ID NO: 3523369 - RNA, 20 nt, Human
cuaggccucaacuccuccca

SEQ ID NO: 3523370 - RNA, 17 nt, Human
cuaggccucagccagag

SEQ ID NO: 3523371 - RNA, 19 nt, Human
cuaggccucagccagagaa

SEQ ID NO: 3523372 - RNA, 20 nt, Human
cuaggccuggcauggcaccu

SEQ ID NO: 3523373 - RNA, 15 nt, Human
cuaggccugggcagu

SEQ ID NO: 3523374 - RNA, 16 nt, Human
cuaggccugggcagug

SEQ ID NO: 3523375 - RNA, 12 nt, Human
cuaggccugggg

SEQ ID NO: 3523376 - RNA, 13 nt, Human
cuaggccugggga

SEQ ID NO: 3523377 - RNA, 12 nt, Human
cuaggcucagag

SEQ ID NO: 3523378 - RNA, 13 nt, Human
cuaggcucagaga

SEQ ID NO: 3523379 - RNA, 13 nt, Human
cuaggcucugccu

SEQ ID NO: 3523380 - RNA, 21 nt, Human
cuaggcugacaccuaacucuu

SEQ ID NO: 3523381 - RNA, 13 nt, Human
cuaggcuggaagg

SEQ ID NO: 3523382 - RNA, 13 nt, Human
cuaggcuggggaa

SEQ ID NO: 3523383 - RNA, 22 nt, Human
cuaggcuggggaaguccucugg

SEQ ID NO: 3523384 - RNA, 21 nt, Human
ccagagcugggugagugggga

SEQ ID NO: 3523385 - RNA, 14 nt, Human
ccagagcuggugga

SEQ ID NO: 3523386 - RNA, 19 nt, Human
ccagagcuguuuauggccu

SEQ ID NO: 3523387 - RNA, 24 nt, Human
ccagagcuguuuauggccucagcu

SEQ ID NO: 3523388 - RNA, 20 nt, Human
ccagaggaacuguccagaga

SEQ ID NO: 3523389 - RNA, 21 nt, Human
ccagaggaacuguccagagag

SEQ ID NO: 3523390 - RNA, 20 nt, Human
ccagaggaauccuggcagcc

SEQ ID NO: 3523391 - RNA, 23 nt, Human
ccagaggaauccuggcagcccag

SEQ ID NO: 3523392 - RNA, 20 nt, Human
ccagaggacucccaacccug

SEQ ID NO: 3523393 - RNA, 19 nt, Human
ccagaggagccaccaguuc

SEQ ID NO: 3523394 - RNA, 12 nt, Human
ccagaggagggc

SEQ ID NO: 3523395 - RNA, 21 nt, Human
ccagaggauugcugccccauc

SEQ ID NO: 3523396 - RNA, 13 nt, Human
ccagaggcacagc

SEQ ID NO: 3523397 - RNA, 20 nt, Human
ccaggaagccgugcccugcc

SEQ ID NO: 3523398 - RNA, 15 nt, Human
ccaggaagcuuuggu

SEQ ID NO: 3523399 - RNA, 16 nt, Human
ccaggaaggggcugga

SEQ ID NO: 3523400 - RNA, 21 nt, Human
ccaggaaggggguccacccag

SEQ ID NO: 3523401 - RNA, 22 nt, Human
ccaggaaggggguccacccagc

SEQ ID NO: 3523402 - RNA, 16 nt, Human
ccaggaaguagcacag

SEQ ID NO: 3523403 - RNA, 19 nt, Human
ccaggaaguagcacaggcu

SEQ ID NO: 3523404 - RNA, 21 nt, Human
ccaggaaguagcacaggcuga

SEQ ID NO: 3523405 - RNA, 15 nt, Human
ccaggaaugaagaua

SEQ ID NO: 3523406 - RNA, 23 nt, Human
ccaggaauuucccaggacccuga

SEQ ID NO: 3523407 - RNA, 19 nt, Human
ccaggaauuugggacccug

SEQ ID NO: 3523408 - RNA, 15 nt, Human
ccaggacaagcaugg

SEQ ID NO: 3523409 - RNA, 17 nt, Human
ccaggacaccacaccca

SEQ ID NO: 3523410 - RNA, 22 nt, Human
ccaggacaccacacccagccuc

SEQ ID NO: 3523411 - RNA, 15 nt, Human
ccaggacaggcccgg

SEQ ID NO: 3523412 - RNA, 17 nt, Human
ccaggacaggcccggcg

SEQ ID NO: 3523413 - RNA, 13 nt, Human
ccaggacagucag

SEQ ID NO: 3523414 - RNA, 12 nt, Human
ccaggaccacag

SEQ ID NO: 3523415 - RNA, 21 nt, Human
ccaggaccacaggcucaggca

SEQ ID NO: 3523416 - RNA, 17 nt, Human
ccaggaccagcucagga

SEQ ID NO: 3523417 - RNA, 20 nt, Human
ccaggaccagcucaggacag

SEQ ID NO: 3523418 - RNA, 15 nt, Human
ccaggaccaucaucc

SEQ ID NO: 3523419 - RNA, 23 nt, Human
ccaggacccugaaggggccauga

SEQ ID NO: 3523420 - RNA, 13 nt, Human
ccaggacccugcc

SEQ ID NO: 3523421 - RNA, 21 nt, Human
ccaggacccugccaggcacag

SEQ ID NO: 3523422 - RNA, 22 nt, Human
ccaggacccugccaggcacagg

SEQ ID NO: 3523423 - RNA, 18 nt, Human
ccaggacccuggacccag

SEQ ID NO: 3523424 - RNA, 15 nt, Human
ccaggaccuggcugc

SEQ ID NO: 3523425 - RNA, 20 nt, Human
ccaggacgccacucauuuca

SEQ ID NO: 3523426 - RNA, 16 nt, Human
ccaggacggggccggc

SEQ ID NO: 3523427 - RNA, 20 nt, Human
ccaggacggggccggccagg

SEQ ID NO: 3523428 - RNA, 20 nt, Human
ccaggacuauagcccagguc

SEQ ID NO: 3523429 - RNA, 17 nt, Human
ccaggacuccccaggcc

SEQ ID NO: 3523430 - RNA, 22 nt, Human
ccaggacucccuccucaccucu

SEQ ID NO: 3523431 - RNA, 23 nt, Human
ccaggacucccuccucaccucug

SEQ ID NO: 3523432 - RNA, 17 nt, Human
ccaggacuccuccccac

SEQ ID NO: 3523433 - RNA, 18 nt, Human
ccaggacucugaccccag

SEQ ID NO: 3523434 - RNA, 21 nt, Human
ccaggacucugcagccucaga

SEQ ID NO: 3523435 - RNA, 16 nt, Human
ccaggacugagccccg

SEQ ID NO: 3523436 - RNA, 12 nt, Human
ccaggacugggc

SEQ ID NO: 3523437 - RNA, 13 nt, Human
ccaggacugggcc

SEQ ID NO: 3523438 - RNA, 14 nt, Human
ccaggacugggcca

SEQ ID NO: 3523439 - RNA, 14 nt, Human
cuauugcauuuaua

SEQ ID NO: 3523440 - RNA, 12 nt, Human
cuauugcccagg

SEQ ID NO: 3523441 - RNA, 11 nt, Human
cuauugccucu

SEQ ID NO: 3523442 - RNA, 13 nt, Human
cuauugccucuga

SEQ ID NO: 3523443 - RNA, 12 nt, Human
cuauugccuucu

SEQ ID NO: 3523444 - RNA, 17 nt, Human
cuauugcuagagcuccu

SEQ ID NO: 3523445 - RNA, 21 nt, Human
cuauugcuagagcuccucccu

SEQ ID NO: 3523446 - RNA, 14 nt, Human
cuauugcuucacca

SEQ ID NO: 3523447 - RNA, 21 nt, Human
cuauugcuucaccauggccuu

SEQ ID NO: 3523448 - RNA, 19 nt, Human
cuauuggggaacucauugu

SEQ ID NO: 3523449 - RNA, 23 nt, Human
cuauuggguucauuauuggaauu

SEQ ID NO: 3523450 - RNA, 12 nt, Human
cuauuguaauau

SEQ ID NO: 3523451 - RNA, 19 nt, Human
cuauuguaauauagaaaaa

SEQ ID NO: 3523452 - RNA, 14 nt, Human
cuauuguagagcca

SEQ ID NO: 3523453 - RNA, 19 nt, Human
cuauugucaccagggcugg

SEQ ID NO: 3523454 - RNA, 15 nt, Human
cuauugucauuaaag

SEQ ID NO: 3523455 - RNA, 19 nt, Human
cuauugugauuugacuguu

SEQ ID NO: 3523456 - RNA, 21 nt, Human
cuauugugggacuuauuacaa

SEQ ID NO: 3523457 - RNA, 18 nt, Human
cuauuguuagucucuuga

SEQ ID NO: 3523458 - RNA, 14 nt, Human
cuauuguuuauucu

SEQ ID NO: 3523459 - RNA, 17 nt, Human
cuauuuaaaacuuguaa

SEQ ID NO: 3523460 - RNA, 21 nt, Human
cuauuuaaagaaauauguauu

SEQ ID NO: 3523461 - RNA, 13 nt, Human
cuauuuaaauucu

SEQ ID NO: 3523462 - RNA, 13 nt, Human
cuauuuaacugac

SEQ ID NO: 3523463 - RNA, 14 nt, Human
cuauuuaacugacu

SEQ ID NO: 3523464 - RNA, 15 nt, Human
cuauuuaacugacua

SEQ ID NO: 3523465 - RNA, 22 nt, Human
cuauuuaacuggcuucagccuc

SEQ ID NO: 3523466 - RNA, 14 nt, Human
cuauuuaacuugag

SEQ ID NO: 3523467 - RNA, 15 nt, Human
cuauuuaagauguga

SEQ ID NO: 3523468 - RNA, 14 nt, Human
cuauuuaauauuua

SEQ ID NO: 3523469 - RNA, 12 nt, Human
cuauuuaaugga

SEQ ID NO: 3523470 - RNA, 18 nt, Human
cuauuuaauuaggaaaaa

SEQ ID NO: 3523471 - RNA, 23 nt, Human
cuauuuaccugcaggcugagcca

SEQ ID NO: 3523472 - RNA, 15 nt, Human
cuauuuagaugcaua

SEQ ID NO: 3523473 - RNA, 17 nt, Human
cuauuuauauguacaug

SEQ ID NO: 3523474 - RNA, 17 nt, Human
cuauuuauuaauauuua

SEQ ID NO: 3523475 - RNA, 19 nt, Human
cuauuuauuuauuuauuca

SEQ ID NO: 3523476 - RNA, 13 nt, Human
cuauuuauuuucc

SEQ ID NO: 3523477 - RNA, 18 nt, Human
cuauuuauuuuccuaaag

SEQ ID NO: 3523478 - RNA, 19 nt, Human
cuauuucaaaaauuuggaa

SEQ ID NO: 3523479 - RNA, 11 nt, Human
cuauuucagaa

SEQ ID NO: 3523480 - RNA, 13 nt, Human
cuauuucauuuuu

SEQ ID NO: 3523481 - RNA, 21 nt, Human
cuauuuccccaggggaaaaug

SEQ ID NO: 3523482 - RNA, 19 nt, Human
cuauuucccccuuucuucc

SEQ ID NO: 3523483 - RNA, 22 nt, Human
cuauuucuacacagugggaacu

SEQ ID NO: 3523484 - RNA, 20 nt, Human
cuauuucuagggcugggaaa

SEQ ID NO: 3523485 - RNA, 19 nt, Human
cuauuucuauauuuucauu

SEQ ID NO: 3523486 - RNA, 20 nt, Human
cuauuucugcugaauuuuca

SEQ ID NO: 3523487 - RNA, 21 nt, Human
cuauuucugcugaauuuucac

SEQ ID NO: 3523488 - RNA, 14 nt, Human
cuauuugaacaagu

SEQ ID NO: 3523489 - RNA, 18 nt, Human
cuauuugcaauuccugcu

SEQ ID NO: 3523490 - RNA, 18 nt, Human
cuauuuguaaaucugcca

SEQ ID NO: 3523491 - RNA, 22 nt, Human
cuauuuguucuucaagaacuuu

SEQ ID NO: 3523492 - RNA, 16 nt, Human
cuauuuguuuucaugg

SEQ ID NO: 3523493 - RNA, 18 nt, Human
cuauuuuacugucuuaau

SEQ ID NO: 3523494 - RNA, 23 nt, Human
cuauuuuacugucuuaauuaagu

SEQ ID NO: 3523495 - RNA, 15 nt, Human
cuauuuuagaauaaa

SEQ ID NO: 3523496 - RNA, 22 nt, Human
cuauuuucagaaucugaaugua

SEQ ID NO: 3523497 - RNA, 23 nt, Human
cuauuuucagaaucugaauguaa

SEQ ID NO: 3523498 - RNA, 18 nt, Human
cuauuuucagaugugaac

SEQ ID NO: 3523499 - RNA, 18 nt, Human
cuauuuucauuguaaaac

SEQ ID NO: 3523500 - RNA, 23 nt, Human
cuauuuuccaggcuucugcuggg

SEQ ID NO: 3523501 - RNA, 11 nt, Human
cuauuuucuau

SEQ ID NO: 3523502 - RNA, 16 nt, Human
cuauuuucuauguacu

SEQ ID NO: 3523503 - RNA, 15 nt, Human
cuauuuucuuuuuua

SEQ ID NO: 3523504 - RNA, 19 nt, Human
cuauuuugacaguuauuuu

SEQ ID NO: 3523505 - RNA, 13 nt, Human
cuauuuugaugca

SEQ ID NO: 3523506 - RNA, 17 nt, Human
cuauuuugugaagccau

SEQ ID NO: 3523507 - RNA, 19 nt, Human
cuauuuuuaauguuuguac

SEQ ID NO: 3523508 - RNA, 18 nt, Human
cuauuuuuacuagaacac

SEQ ID NO: 3523509 - RNA, 21 nt, Human
cuauuuuuacuagaacacaga

SEQ ID NO: 3523510 - RNA, 15 nt, Human
cuauuuuuauuuaua

SEQ ID NO: 3523511 - RNA, 15 nt, Human
cuauuuuucuaacua

SEQ ID NO: 3523512 - RNA, 14 nt, Human
cuauuuuucucucc

SEQ ID NO: 3523513 - RNA, 16 nt, Human
cuauuuuucucuccug

SEQ ID NO: 3523514 - RNA, 18 nt, Human
cuauuuuuggcagucuga

SEQ ID NO: 3523515 - RNA, 12 nt, Human
cuauuuuuguac

SEQ ID NO: 3523516 - RNA, 14 nt, Human
cuauuuuuguagaa

SEQ ID NO: 3523517 - RNA, 15 nt, Human
cuauuuuuguagaag

SEQ ID NO: 3523518 - RNA, 21 nt, Human
cuauuuuuguuuuuauuaaaa

SEQ ID NO: 3523519 - RNA, 17 nt, Human
cuauuuuuuuaaaauca

SEQ ID NO: 3523520 - RNA, 23 nt, Human
cucaaaaaaaaaauuuuuuuccu

SEQ ID NO: 3523521 - RNA, 17 nt, Human
cucaaaaaaagaaaaag

SEQ ID NO: 3523522 - RNA, 14 nt, Human
cucaaaaagaaauc

SEQ ID NO: 3523523 - RNA, 14 nt, Human
cucaaaacaaaggc

SEQ ID NO: 3523524 - RNA, 20 nt, Human
cucaaaacuggacagucacu

SEQ ID NO: 3523525 - RNA, 20 nt, Human
cucaaaagcacccuugacgu

SEQ ID NO: 3523526 - RNA, 21 nt, Human
cucaaaagcauuuaucauucu

SEQ ID NO: 3523527 - RNA, 23 nt, Human
cucaaaauaccaugccauuuaaa

SEQ ID NO: 3523528 - RNA, 12 nt, Human
cucaaaaugugu

SEQ ID NO: 3523529 - RNA, 14 nt, Human
cucaaaauguguaa

SEQ ID NO: 3523530 - RNA, 22 nt, Human
cucaaaccaaaucacugaacuu

SEQ ID NO: 3523531 - RNA, 16 nt, Human
cucaaaccccugaccu

SEQ ID NO: 3523532 - RNA, 13 nt, Human
cucaaacuccuga

SEQ ID NO: 3523533 - RNA, 17 nt, Human
cucaaacugccuuggcu

SEQ ID NO: 3523534 - RNA, 16 nt, Human
cucaaagaaaguguau

SEQ ID NO: 3523535 - RNA, 17 nt, Human
cucaaagaaaguguauu

SEQ ID NO: 3523536 - RNA, 22 nt, Human
cucaaagaaauuuccacucagg

SEQ ID NO: 3523537 - RNA, 22 nt, Human
cucaaagacaauguuauuuucc

SEQ ID NO: 3523538 - RNA, 18 nt, Human
cucaaagagggagugcau

SEQ ID NO: 3523539 - RNA, 23 nt, Human
cucaaagcuuggauuaaauacau

SEQ ID NO: 3523540 - RNA, 11 nt, Human
cucaaaggcac

SEQ ID NO: 3523541 - RNA, 17 nt, Human
cucaaagguuuggaagg

SEQ ID NO: 3523542 - RNA, 21 nt, Human
cucacaaguggguacccccag

SEQ ID NO: 3523543 - RNA, 21 nt, Human
cucacaauaaaaauggcucag

SEQ ID NO: 3523544 - RNA, 22 nt, Human
cucacaauaaaaauggcucaga

SEQ ID NO: 3523545 - RNA, 17 nt, Human
cucacaauccuugccac

SEQ ID NO: 3523546 - RNA, 16 nt, Human
cucacacagccaggug

SEQ ID NO: 3523547 - RNA, 22 nt, Human
cucacacagccaggugccuugg

SEQ ID NO: 3523548 - RNA, 13 nt, Human
cucacacaggacc

SEQ ID NO: 3523549 - RNA, 22 nt, Human
cucacacaugagcaucaggcca

SEQ ID NO: 3523550 - RNA, 23 nt, Human
cucacaccaggcuugccugcagg

SEQ ID NO: 3523551 - RNA, 15 nt, Human
cucacacccaccguc

SEQ ID NO: 3523552 - RNA, 16 nt, Human
cucacaccucacucuu

SEQ ID NO: 3523553 - RNA, 20 nt, Human
cucacacugagaauguaaga

SEQ ID NO: 3523554 - RNA, 19 nt, Human
cucacacuggucugcuguc

SEQ ID NO: 3523555 - RNA, 23 nt, Human
cucacacugguucucaaugaaaa

SEQ ID NO: 3523556 - RNA, 21 nt, Human
cucacacuuacuguaagacau

SEQ ID NO: 3523557 - RNA, 22 nt, Human
cucacacuuacuguaagacauu

SEQ ID NO: 3523558 - RNA, 15 nt, Human
cucacagaagaugaa

SEQ ID NO: 3523559 - RNA, 22 nt, Human
cucacagacaggaccccugcag

SEQ ID NO: 3523560 - RNA, 23 nt, Human
cucacagaccuggagccccuggg

SEQ ID NO: 3523561 - RNA, 12 nt, Human
cucacagaguca

SEQ ID NO: 3523562 - RNA, 14 nt, Human
cucacagcacagag

SEQ ID NO: 3523563 - RNA, 21 nt, Human
cucacagcacaugcuggccag

SEQ ID NO: 3523564 - RNA, 22 nt, Human
cucacagcacaugcuggccagc

SEQ ID NO: 3523565 - RNA, 12 nt, Human
cucacagccagc

SEQ ID NO: 3523566 - RNA, 14 nt, Human
cucacagccucuga

SEQ ID NO: 3523567 - RNA, 19 nt, Human
cucacagccucugaccccu

SEQ ID NO: 3523568 - RNA, 22 nt, Human
cucacagccucugaccccuccu

SEQ ID NO: 3523569 - RNA, 22 nt, Human
cucacagcuaugcaaaaagcua

SEQ ID NO: 3523570 - RNA, 18 nt, Human
cucacagguuggaagaga

SEQ ID NO: 3523571 - RNA, 19 nt, Human
cucacagguuggaagagaa

SEQ ID NO: 3523572 - RNA, 22 nt, Human
cucacagguuggaagagaauca

SEQ ID NO: 3523573 - RNA, 20 nt, Human
cucacaguacagcaugugcc

SEQ ID NO: 3523574 - RNA, 22 nt, Human
cucacaguacagcaugugccuu

SEQ ID NO: 3523575 - RNA, 14 nt, Human
cucacagucccacu

SEQ ID NO: 3523576 - RNA, 15 nt, Human
cucacaguccuuacc

SEQ ID NO: 3523577 - RNA, 19 nt, Human
cucacagucucuuuaaucu

SEQ ID NO: 3523578 - RNA, 15 nt, Human
cucacagugcuuuua

SEQ ID NO: 3523579 - RNA, 13 nt, Human
cucacaguuauua

SEQ ID NO: 3523580 - RNA, 16 nt, Human
cucacaguuccucgcc

SEQ ID NO: 3523581 - RNA, 17 nt, Human
cucacaguuccucgccc

SEQ ID NO: 3523582 - RNA, 22 nt, Human
cucacaguuccucgcccugggu

SEQ ID NO: 3523583 - RNA, 20 nt, Human
cucacaucuuucacacuucc

SEQ ID NO: 3523584 - RNA, 23 nt, Human
cucacauggugcuacgccugcau

SEQ ID NO: 3523585 - RNA, 16 nt, Human
cucacauuagaucuag

SEQ ID NO: 3523586 - RNA, 15 nt, Human
cucacauuccuaggg

SEQ ID NO: 3523587 - RNA, 21 nt, Human
cucaccacugcccccugcugc

SEQ ID NO: 3523588 - RNA, 20 nt, Human
cucaccagccccacugccag

SEQ ID NO: 3523589 - RNA, 17 nt, Human
cucaccagccccagugc

SEQ ID NO: 3523590 - RNA, 20 nt, Human
cucaccagccccagugccca

SEQ ID NO: 3523591 - RNA, 17 nt, Human
cucaccagcugcaaagu

SEQ ID NO: 3523592 - RNA, 18 nt, Human
cucaccagcugcaaagug

SEQ ID NO: 3523593 - RNA, 20 nt, Human
cucaccagcugcaaaguguu

SEQ ID NO: 3523594 - RNA, 19 nt, Human
cucaccagcugcugcucug

SEQ ID NO: 3523595 - RNA, 13 nt, Human
cucaccagcugug

SEQ ID NO: 3523596 - RNA, 15 nt, Human
cucaccaggggcagg

SEQ ID NO: 3523597 - RNA, 22 nt, Human
cucaccaggggcaggcacagca

SEQ ID NO: 3523598 - RNA, 22 nt, Human
cucaccauuccaagucuccacc

SEQ ID NO: 3523599 - RNA, 18 nt, Human
cucaccauuuccccaggg

SEQ ID NO: 3523600 - RNA, 17 nt, Human
cucaccauuuggauccu

SEQ ID NO: 3523601 - RNA, 16 nt, Human
cucacccaacaauccc

SEQ ID NO: 3523602 - RNA, 23 nt, Human
cuagccuuuggcucuggagacag

SEQ ID NO: 3523603 - RNA, 14 nt, Human
cuagcgcaguuuuu

SEQ ID NO: 3523604 - RNA, 22 nt, Human
cuagcgcguugccugucgcuuu

SEQ ID NO: 3523605 - RNA, 17 nt, Human
cuagcgcuaucucccug

SEQ ID NO: 3523606 - RNA, 16 nt, Human
cuagcgcugccgcacc

SEQ ID NO: 3523607 - RNA, 22 nt, Human
cuagcuaauggaaaaugauuuu

SEQ ID NO: 3523608 - RNA, 15 nt, Human
cuagcuaauuauuua

SEQ ID NO: 3523609 - RNA, 19 nt, Human
cuagcuagaagugggccag

SEQ ID NO: 3523610 - RNA, 16 nt, Human
cuagcuaucaagaggc

SEQ ID NO: 3523611 - RNA, 13 nt, Human
cuagcuccccucc

SEQ ID NO: 3523612 - RNA, 15 nt, Human
cuagcuccccuccuc

SEQ ID NO: 3523613 - RNA, 15 nt, Human
cuagcuccuccccuu

SEQ ID NO: 3523614 - RNA, 19 nt, Human
cuagcucuauguuuacaaa

SEQ ID NO: 3523615 - RNA, 19 nt, Human
cuagcucugagccaguuca

SEQ ID NO: 3523616 - RNA, 17 nt, Human
cuagcugaauguuuuuc

SEQ ID NO: 3523617 - RNA, 16 nt, Human
cuagcugcacagggca

SEQ ID NO: 3523618 - RNA, 20 nt, Human
cuagcugccuagcaagcugg

SEQ ID NO: 3523619 - RNA, 14 nt, Human
cuagcugcuacaaa

SEQ ID NO: 3523620 - RNA, 21 nt, Human
cuagcugcuacaaagaagaca

SEQ ID NO: 3523621 - RNA, 23 nt, Human
cuagcugcuacaaagaagacaug

SEQ ID NO: 3523622 - RNA, 19 nt, Human
cuagcuggaauuuuuuauu

SEQ ID NO: 3523623 - RNA, 22 nt, Human
cuagcuggaauuuuuuauucuu

SEQ ID NO: 3523624 - RNA, 23 nt, Human
cuagcuggaauuuuuuauucuug

SEQ ID NO: 3523625 - RNA, 13 nt, Human
cuagcuggagagg

SEQ ID NO: 3523626 - RNA, 19 nt, Human
cuagcuggagaggagcccu

SEQ ID NO: 3523627 - RNA, 13 nt, Human
cuagcuggcucug

SEQ ID NO: 3523628 - RNA, 21 nt, Human
cuagcugggggugggccaggc

SEQ ID NO: 3523629 - RNA, 22 nt, Human
cuagcuggugguuucacggugc

SEQ ID NO: 3523630 - RNA, 14 nt, Human
cuagcuucugcuuu

SEQ ID NO: 3523631 - RNA, 18 nt, Human
cuagcuucugcuuuucug

SEQ ID NO: 3523632 - RNA, 19 nt, Human
cuagcuuuagacccugggu

SEQ ID NO: 3523633 - RNA, 19 nt, Human
cuagcuuuauauauggaca

SEQ ID NO: 3523634 - RNA, 21 nt, Human
cuagcuuuauauauggacaug

SEQ ID NO: 3523635 - RNA, 22 nt, Human
cuagcuuuauauauggacaugg

SEQ ID NO: 3523636 - RNA, 15 nt, Human
cuagcuuuuaggaaa

SEQ ID NO: 3523637 - RNA, 11 nt, Human
cuaggaaaaaa

SEQ ID NO: 3523638 - RNA, 15 nt, Human
cuaggaaaauauuuu

SEQ ID NO: 3523639 - RNA, 14 nt, Human
cuaggaaacucaca

SEQ ID NO: 3523640 - RNA, 22 nt, Human
cuaggaaauauuuauuuuaaua

SEQ ID NO: 3523641 - RNA, 14 nt, Human
cuaggaacaaaucu

SEQ ID NO: 3523642 - RNA, 14 nt, Human
cuaggaagaauuuu

SEQ ID NO: 3523643 - RNA, 23 nt, Human
cuaggaagagcaggacuccaggc

SEQ ID NO: 3523644 - RNA, 16 nt, Human
cuaggaagagucuacc

SEQ ID NO: 3523645 - RNA, 15 nt, Human
cuaggaagccucaga

SEQ ID NO: 3523646 - RNA, 16 nt, Human
cuaggaagccucagau

SEQ ID NO: 3523647 - RNA, 17 nt, Human
cuaggaauauagauuaa

SEQ ID NO: 3523648 - RNA, 17 nt, Human
cuaggaaugaaauccug

SEQ ID NO: 3523649 - RNA, 22 nt, Human
cuaggacauguucccuucuccu

SEQ ID NO: 3523650 - RNA, 18 nt, Human
cuaggaccacucagcccc

SEQ ID NO: 3523651 - RNA, 21 nt, Human
cuaggaccaugguuaagaguc

SEQ ID NO: 3523652 - RNA, 23 nt, Human
cuaggaccaugguuaagagucca

SEQ ID NO: 3523653 - RNA, 22 nt, Human
cuaggacccgucuccagcugcu

SEQ ID NO: 3523654 - RNA, 23 nt, Human
cuaggacccgucuccagcugcug

SEQ ID NO: 3523655 - RNA, 22 nt, Human
cuaggacgccacccagcaaaag

SEQ ID NO: 3523656 - RNA, 18 nt, Human
cuaggagaaccaaaucug

SEQ ID NO: 3523657 - RNA, 20 nt, Human
cuaggagaccaaggcgggag

SEQ ID NO: 3523658 - RNA, 23 nt, Human
cuaggagauaucugagggaggag

SEQ ID NO: 3523659 - RNA, 15 nt, Human
cuaggagcugggagg

SEQ ID NO: 3523660 - RNA, 16 nt, Human
cuaggagcugggagga

SEQ ID NO: 3523661 - RNA, 19 nt, Human
cuaggagcugggaggaaaa

SEQ ID NO: 3523662 - RNA, 17 nt, Human
cuaggagcuuugacuca

SEQ ID NO: 3523663 - RNA, 20 nt, Human
cuaggagcuuugacucagga

SEQ ID NO: 3523664 - RNA, 23 nt, Human
cuaggagcuuugacucaggagcc

SEQ ID NO: 3523665 - RNA, 20 nt, Human
cuaggaggguccucugagac

SEQ ID NO: 3523666 - RNA, 19 nt, Human
cuaggaguauauuuccgca

SEQ ID NO: 3523667 - RNA, 19 nt, Human
cuaggauaaaaagccaggg

SEQ ID NO: 3523668 - RNA, 22 nt, Human
cuaggauaaaaagccagggcug

SEQ ID NO: 3523669 - RNA, 17 nt, Human
cuaggauaucuucucca

SEQ ID NO: 3523670 - RNA, 22 nt, Human
cuaggaugugcauucuccagcc

SEQ ID NO: 3523671 - RNA, 22 nt, Human
cuaggauucacaccccaccugc

SEQ ID NO: 3523672 - RNA, 16 nt, Human
cuaggauuugaacacu

SEQ ID NO: 3523673 - RNA, 13 nt, Human
cuaggcaacauag

SEQ ID NO: 3523674 - RNA, 19 nt, Human
cuaggcacuguaguucuaa

SEQ ID NO: 3523675 - RNA, 21 nt, Human
cuaggcacuguaguucuaaga

SEQ ID NO: 3523676 - RNA, 23 nt, Human
cuaggcaguuagagaugccuccc

SEQ ID NO: 3523677 - RNA, 14 nt, Human
cuaggcaucccagg

SEQ ID NO: 3523678 - RNA, 18 nt, Human
cuaggcaucccaggggac

SEQ ID NO: 3523679 - RNA, 19 nt, Human
cuaggcaucccaggggacc

SEQ ID NO: 3523680 - RNA, 21 nt, Human
cuaggcauucuggaccucugg

SEQ ID NO: 3523681 - RNA, 21 nt, Human
cuaggcauuugcugaauacag

SEQ ID NO: 3523682 - RNA, 16 nt, Human
cuaggccacuccucca

SEQ ID NO: 3523683 - RNA, 19 nt, Human
cuaggccacuccuccaaag

SEQ ID NO: 3523684 - RNA, 16 nt, Human
cucagugugacuccuc

SEQ ID NO: 3523685 - RNA, 16 nt, Human
cucaguuaaaauguga

SEQ ID NO: 3523686 - RNA, 23 nt, Human
cucaguuauuacauguaauuuga

SEQ ID NO: 3523687 - RNA, 20 nt, Human
cucaguucauccauucuauu

SEQ ID NO: 3523688 - RNA, 22 nt, Human
cucaguuccgauuucccaggcu

SEQ ID NO: 3523689 - RNA, 20 nt, Human
cucaguucuagucucucugg

SEQ ID NO: 3523690 - RNA, 17 nt, Human
cucaguucucuucacuc

SEQ ID NO: 3523691 - RNA, 17 nt, Human
cucaguugcuaaacacu

SEQ ID NO: 3523692 - RNA, 18 nt, Human
cucaguugcuaaacacug

SEQ ID NO: 3523693 - RNA, 16 nt, Human
cucaguuguagaaugu

SEQ ID NO: 3523694 - RNA, 12 nt, Human
cucaguugugca

SEQ ID NO: 3523695 - RNA, 14 nt, Human
cucaguugugcagc

SEQ ID NO: 3523696 - RNA, 12 nt, Human
cucaguuucccu

SEQ ID NO: 3523697 - RNA, 16 nt, Human
cucaguuucccuaucu

SEQ ID NO: 3523698 - RNA, 22 nt, Human
cucaguuugugugucuuaauua

SEQ ID NO: 3523699 - RNA, 13 nt, Human
cucaguuuucaua

SEQ ID NO: 3523700 - RNA, 14 nt, Human
cucaguuuucauaa

SEQ ID NO: 3523701 - RNA, 14 nt, Human
cucaguuuuucuua

SEQ ID NO: 3523702 - RNA, 14 nt, Human
cucauaaaaagcaa

SEQ ID NO: 3523703 - RNA, 22 nt, Human
cucauaacucugugaucuugcu

SEQ ID NO: 3523704 - RNA, 20 nt, Human
cucauaacuugagaccuaau

SEQ ID NO: 3523705 - RNA, 15 nt, Human
cucauaaugugaagu

SEQ ID NO: 3523706 - RNA, 17 nt, Human
cucauaaugugaagugu

SEQ ID NO: 3523707 - RNA, 21 nt, Human
cucauacccacccccacccaa

SEQ ID NO: 3523708 - RNA, 16 nt, Human
cucauaccuuuaaagg

SEQ ID NO: 3523709 - RNA, 14 nt, Human
cucauagcauuaac

SEQ ID NO: 3523710 - RNA, 21 nt, Human
cucauaggaaaaguacauuua

SEQ ID NO: 3523711 - RNA, 19 nt, Human
cucauagggaagaccugcu

SEQ ID NO: 3523712 - RNA, 16 nt, Human
cucauagguugagcaa

SEQ ID NO: 3523713 - RNA, 23 nt, Human
cucauaguaugguggcuggguug

SEQ ID NO: 3523714 - RNA, 19 nt, Human
cucauauauaucuaucuua

SEQ ID NO: 3523715 - RNA, 15 nt, Human
cucauaucaguuugc

SEQ ID NO: 3523716 - RNA, 14 nt, Human
cucauauuuucaug

SEQ ID NO: 3523717 - RNA, 14 nt, Human
cucaucaacaaaga

SEQ ID NO: 3523718 - RNA, 13 nt, Human
cucaucaacugaa

SEQ ID NO: 3523719 - RNA, 15 nt, Human
cucaucacuccccuc

SEQ ID NO: 3523720 - RNA, 16 nt, Human
cucaucacuccccucc

SEQ ID NO: 3523721 - RNA, 17 nt, Human
cucaucacuccccucca

SEQ ID NO: 3523722 - RNA, 13 nt, Human
cucaucacugugg

SEQ ID NO: 3523723 - RNA, 16 nt, Human
cucaucaggaugaacc

SEQ ID NO: 3523724 - RNA, 12 nt, Human
cucaucaguagu

SEQ ID NO: 3523725 - RNA, 12 nt, Human
cucaucauaaaa

SEQ ID NO: 3523726 - RNA, 16 nt, Human
cucaucauaaaauaaa

SEQ ID NO: 3523727 - RNA, 13 nt, Human
cucaucauucucu

SEQ ID NO: 3523728 - RNA, 15 nt, Human
cucaucauucucugu

SEQ ID NO: 3523729 - RNA, 12 nt, Human
cucaucauuuuu

SEQ ID NO: 3523730 - RNA, 13 nt, Human
cucauccacccca

SEQ ID NO: 3523731 - RNA, 22 nt, Human
cucauccacucuacuaaugccu

SEQ ID NO: 3523732 - RNA, 22 nt, Human
cucaucccaugagacccuggug

SEQ ID NO: 3523733 - RNA, 19 nt, Human
cucauccccagucccaaug

SEQ ID NO: 3523734 - RNA, 16 nt, Human
cucauccccucacuug

SEQ ID NO: 3523735 - RNA, 22 nt, Human
cucaucccgagcaccuccacau

SEQ ID NO: 3523736 - RNA, 18 nt, Human
cucaucccuaaugcugca

SEQ ID NO: 3523737 - RNA, 21 nt, Human
cucaucccuaaugcugcagau

SEQ ID NO: 3523738 - RNA, 15 nt, Human
cucauccgaggcagg

SEQ ID NO: 3523739 - RNA, 17 nt, Human
cucauccgaggcagggu

SEQ ID NO: 3523740 - RNA, 22 nt, Human
cucauccucagaugcucaaagu

SEQ ID NO: 3523741 - RNA, 16 nt, Human
cucauccugaacagca

SEQ ID NO: 3523742 - RNA, 18 nt, Human
cucauccugaacagcaug

SEQ ID NO: 3523743 - RNA, 13 nt, Human
cucauccugcagg

SEQ ID NO: 3523744 - RNA, 17 nt, Human
cucauccuuuucuccua

SEQ ID NO: 3523745 - RNA, 12 nt, Human
cucaucucaggu

SEQ ID NO: 3523746 - RNA, 11 nt, Human
cucaucucagu

SEQ ID NO: 3523747 - RNA, 18 nt, Human
cucaucucuaacagcuca

SEQ ID NO: 3523748 - RNA, 24 nt, Human
cucaucucuaacagcucaggaucu

SEQ ID NO: 3523749 - RNA, 19 nt, Human
cucaucugaaauguuacaa

SEQ ID NO: 3523750 - RNA, 21 nt, Human
cucaucugaaauguuacaaaa

SEQ ID NO: 3523751 - RNA, 15 nt, Human
cucaucugcacccuu

SEQ ID NO: 3523752 - RNA, 19 nt, Human
cucaucugcacccuucuuu

SEQ ID NO: 3523753 - RNA, 21 nt, Human
cucaucugcacccuucuuuuc

SEQ ID NO: 3523754 - RNA, 16 nt, Human
cucaucugcugguccg

SEQ ID NO: 3523755 - RNA, 21 nt, Human
cucaucuggggagcaggcagc

SEQ ID NO: 3523756 - RNA, 18 nt, Human
cucaucugggggagugga

SEQ ID NO: 3523757 - RNA, 19 nt, Human
cucaucugggggaguggaa

SEQ ID NO: 3523758 - RNA, 23 nt, Human
cucaucugucuggaggggagcuc

SEQ ID NO: 3523759 - RNA, 13 nt, Human
cucaucuuacugu

SEQ ID NO: 3523760 - RNA, 20 nt, Human
cucaucuugaagggcccagg

SEQ ID NO: 3523761 - RNA, 22 nt, Human
cucaucuuucauuaaaggcuuc

SEQ ID NO: 3523762 - RNA, 17 nt, Human
cucaucuuucccuccuu

SEQ ID NO: 3523763 - RNA, 17 nt, Human
cucaugaggaggggccc

SEQ ID NO: 3523764 - RNA, 23 nt, Human
cucaugaggaggggccccccugc

SEQ ID NO: 3523765 - RNA, 20 nt, Human
cucaugaucuugugacauau

SEQ ID NO: 3523766 - RNA, 17 nt, Human
cucaugcaucuccaccu

SEQ ID NO: 3523767 - RNA, 20 nt, Human
cucaugcaucuccaccugcu

SEQ ID NO: 3523768 - RNA, 22 nt, Human
cucaugccaguaacaggcucaa

SEQ ID NO: 3523769 - RNA, 13 nt, Human
cucaugcccaccc

SEQ ID NO: 3523770 - RNA, 20 nt, Human
cucaugcccacccccugccc

SEQ ID NO: 3523771 - RNA, 14 nt, Human
cucaugccccuggc

SEQ ID NO: 3523772 - RNA, 16 nt, Human
cucaugccucagccuc

SEQ ID NO: 3523773 - RNA, 13 nt, Human
cucaugcugaaag

SEQ ID NO: 3523774 - RNA, 14 nt, Human
cucaugcugccccu

SEQ ID NO: 3523775 - RNA, 20 nt, Human
cucaugcugccccugccuug

SEQ ID NO: 3523776 - RNA, 12 nt, Human
cucaugggcccc

SEQ ID NO: 3523777 - RNA, 16 nt, Human
cucaugggccccucug

SEQ ID NO: 3523778 - RNA, 20 nt, Human
cucaugggccccucugacuc

SEQ ID NO: 3523779 - RNA, 20 nt, Human
cucaugguccccauggcaug

SEQ ID NO: 3523780 - RNA, 16 nt, Human
cucauguacauacccu

SEQ ID NO: 3523781 - RNA, 12 nt, Human
cucauguagcaa

SEQ ID NO: 3523782 - RNA, 14 nt, Human
cucaugugacucuu

SEQ ID NO: 3523783 - RNA, 12 nt, Human
cucaugugaucc

SEQ ID NO: 3523784 - RNA, 14 nt, Human
cucaugugauccuu

SEQ ID NO: 3523785 - RNA, 16 nt, Human
cucaugugauccuuuu

SEQ ID NO: 3523786 - RNA, 12 nt, Human
cucauguggcug

SEQ ID NO: 3523787 - RNA, 12 nt, Human
cucauguguaug

SEQ ID NO: 3523788 - RNA, 15 nt, Human
cucauguguuugcau

SEQ ID NO: 3523789 - RNA, 16 nt, Human
cucauguucugcuuuc

SEQ ID NO: 3523790 - RNA, 12 nt, Human
cucauguucuua

SEQ ID NO: 3523791 - RNA, 21 nt, Human
cucauguuuaugaaaauaaau

SEQ ID NO: 3523792 - RNA, 17 nt, Human
cucauguuuucaacugc

SEQ ID NO: 3523793 - RNA, 20 nt, Human
cucauguuuucaacugccaa

SEQ ID NO: 3523794 - RNA, 21 nt, Human
cucauguuuuccauuguuuga

SEQ ID NO: 3523795 - RNA, 23 nt, Human
cucauuaaccgaugcuuuaccaa

SEQ ID NO: 3523796 - RNA, 15 nt, Human
cucauuaaugacacu

SEQ ID NO: 3523797 - RNA, 17 nt, Human
cucauuacggcuccucu

SEQ ID NO: 3523798 - RNA, 15 nt, Human
cucauuacugggccu

SEQ ID NO: 3523799 - RNA, 16 nt, Human
cucauuacugggccuu

SEQ ID NO: 3523800 - RNA, 23 nt, Human
cucauuacuuuaccacccccaca

SEQ ID NO: 3523801 - RNA, 17 nt, Human
cucauuacuuuugaagu

SEQ ID NO: 3523802 - RNA, 22 nt, Human
cucauuauuuauguccaggugu

SEQ ID NO: 3523803 - RNA, 15 nt, Human
cucauucaaaaguug

SEQ ID NO: 3523804 - RNA, 14 nt, Human
cucauucagcaucu

SEQ ID NO: 3523805 - RNA, 15 nt, Human
cucauucagcaucug

SEQ ID NO: 3523806 - RNA, 16 nt, Human
cucauucagcaucuga

SEQ ID NO: 3523807 - RNA, 19 nt, Human
cucaagagaucccaaguag

SEQ ID NO: 3523808 - RNA, 16 nt, Human
cucaagaggcugaggc

SEQ ID NO: 3523809 - RNA, 22 nt, Human
cucaagauacugcuacuguaau

SEQ ID NO: 3523810 - RNA, 20 nt, Human
cucaagaugggggcagggcu

SEQ ID NO: 3523811 - RNA, 17 nt, Human
cucaagauucccaggag

SEQ ID NO: 3523812 - RNA, 21 nt, Human
cucaagauucccaggaguucu

SEQ ID NO: 3523813 - RNA, 20 nt, Human
cucaagcaauccuccugagu

SEQ ID NO: 3523814 - RNA, 12 nt, Human
cucaagcacuga

SEQ ID NO: 3523815 - RNA, 14 nt, Human
cucaagcacugaua

SEQ ID NO: 3523816 - RNA, 14 nt, Human
cucaagcagucuac

SEQ ID NO: 3523817 - RNA, 16 nt, Human
cucaagccaagcagcc

SEQ ID NO: 3523818 - RNA, 19 nt, Human
cucaagccagacucugcca

SEQ ID NO: 3523819 - RNA, 15 nt, Human
cucaagcccaggagg

SEQ ID NO: 3523820 - RNA, 17 nt, Human
cucaagcccgcggggac

SEQ ID NO: 3523821 - RNA, 12 nt, Human
cucaagcccugc

SEQ ID NO: 3523822 - RNA, 13 nt, Human
cucaagcccugca

SEQ ID NO: 3523823 - RNA, 18 nt, Human
cucaagcggguggcucug

SEQ ID NO: 3523824 - RNA, 17 nt, Human
cucaagcugcaucuaga

SEQ ID NO: 3523825 - RNA, 13 nt, Human
cucaaggaaucuu

SEQ ID NO: 3523826 - RNA, 21 nt, Human
cucaaggaaucuuuaagcaga

SEQ ID NO: 3523827 - RNA, 10 nt, Human
cucaaggacu

SEQ ID NO: 3523828 - RNA, 16 nt, Human
cucaaggacuuugcag

SEQ ID NO: 3523829 - RNA, 22 nt, Human
cucaaggacuuugcagccggca

SEQ ID NO: 3523830 - RNA, 20 nt, Human
ccauggcuaaggcaccagcc

SEQ ID NO: 3523831 - RNA, 16 nt, Human
ccauggcucagggugg

SEQ ID NO: 3523832 - RNA, 17 nt, Human
ccauggcugcacaguug

SEQ ID NO: 3523833 - RNA, 15 nt, Human
cuccacucagcuguc

SEQ ID NO: 3523834 - RNA, 19 nt, Human
cuccacucugacuggcaca

SEQ ID NO: 3523835 - RNA, 12 nt, Human
cuccacucugcu

SEQ ID NO: 3523836 - RNA, 14 nt, Human
cuccacucugcuuc

SEQ ID NO: 3523837 - RNA, 16 nt, Human
cuccacucugcuucuc

SEQ ID NO: 3523838 - RNA, 20 nt, Human
cuccacucugcuucucugac

SEQ ID NO: 3523839 - RNA, 14 nt, Human
cuccacucuuucuu

SEQ ID NO: 3523840 - RNA, 13 nt, Human
cuccacugcccuc

SEQ ID NO: 3523841 - RNA, 14 nt, Human
cuccacugcccucu

SEQ ID NO: 3523842 - RNA, 14 nt, Human
cuccacugccuucg

SEQ ID NO: 3523843 - RNA, 16 nt, Human
cuccacugccuucgau

SEQ ID NO: 3523844 - RNA, 14 nt, Human
cuccacuggaugga

SEQ ID NO: 3523845 - RNA, 15 nt, Human
cuccacuuggucugu

SEQ ID NO: 3523846 - RNA, 16 nt, Human
cuccacuuggucugug

SEQ ID NO: 3523847 - RNA, 16 nt, Human
cuccacuuucagcugu

SEQ ID NO: 3523848 - RNA, 19 nt, Human
cuccacuuucagcugucuu

SEQ ID NO: 3523849 - RNA, 20 nt, Human
cuccacuuucuagccagagg

SEQ ID NO: 3523850 - RNA, 15 nt, Human
cuccagaaacggcca

SEQ ID NO: 3523851 - RNA, 19 nt, Human
cuccagaaccgcagaagcc

SEQ ID NO: 3523852 - RNA, 20 nt, Human
cuccagaaccgcagaagccu

SEQ ID NO: 3523853 - RNA, 16 nt, Human
cuccagaacucuuccu

SEQ ID NO: 3523854 - RNA, 16 nt, Human
cuccagaagcacuggg

SEQ ID NO: 3523855 - RNA, 17 nt, Human
cuccagaagccucuggc

SEQ ID NO: 3523856 - RNA, 19 nt, Human
cuccagaagccucuggcua

SEQ ID NO: 3523857 - RNA, 20 nt, Human
cuccagaauuuggaaauccu

SEQ ID NO: 3523858 - RNA, 11 nt, Human
cuccagacaca

SEQ ID NO: 3523859 - RNA, 17 nt, Human
cuccagacacaugucca

SEQ ID NO: 3523860 - RNA, 12 nt, Human
cuccagaccccc

SEQ ID NO: 3523861 - RNA, 14 nt, Human
cuccagaccccugg

SEQ ID NO: 3523862 - RNA, 20 nt, Human
cuccagaccccuggcuuuuc

SEQ ID NO: 3523863 - RNA, 14 nt, Human
cuccagaccugauc

SEQ ID NO: 3523864 - RNA, 13 nt, Human
cuccagacucucu

SEQ ID NO: 3523865 - RNA, 15 nt, Human
cuccagacucucugu

SEQ ID NO: 3523866 - RNA, 21 nt, Human
cuccagagaguaucugaggca

SEQ ID NO: 3523867 - RNA, 19 nt, Human
cuccagagcaacgaccagg

SEQ ID NO: 3523868 - RNA, 13 nt, Human
cuccagaucugca

SEQ ID NO: 3523869 - RNA, 18 nt, Human
cuccagaugcagggcagu

SEQ ID NO: 3523870 - RNA, 19 nt, Human
cuccagauguuuccagacu

SEQ ID NO: 3523871 - RNA, 17 nt, Human
cuccagcaacacagccu

SEQ ID NO: 3523872 - RNA, 18 nt, Human
cuccagcacaaacacaag

SEQ ID NO: 3523873 - RNA, 14 nt, Human
cuccagcaggccca

SEQ ID NO: 3523874 - RNA, 17 nt, Human
cuccagccaaccccugu

SEQ ID NO: 3523875 - RNA, 19 nt, Human
cuccagccaaccccugugg

SEQ ID NO: 3523876 - RNA, 20 nt, Human
cuccagccaaccccugugga

SEQ ID NO: 3523877 - RNA, 16 nt, Human
cuccagccagcaauga

SEQ ID NO: 3523878 - RNA, 23 nt, Human
cuccagccagcaaugauguccag

SEQ ID NO: 3523879 - RNA, 13 nt, Human
cuccagccagcgc

SEQ ID NO: 3523880 - RNA, 15 nt, Human
cuccagccagcgccu

SEQ ID NO: 3523881 - RNA, 23 nt, Human
cuccagccagcgccucccuccac

SEQ ID NO: 3523882 - RNA, 20 nt, Human
cuccagccaucaagagacug

SEQ ID NO: 3523883 - RNA, 18 nt, Human
cuccagccccucuuggag

SEQ ID NO: 3523884 - RNA, 17 nt, Human
cuccagccccuggaugc

SEQ ID NO: 3523885 - RNA, 13 nt, Human
cuccagccccugu

SEQ ID NO: 3523886 - RNA, 19 nt, Human
cuccagccccuucucagaa

SEQ ID NO: 3523887 - RNA, 14 nt, Human
cuccagcccgggag

SEQ ID NO: 3523888 - RNA, 19 nt, Human
cuccagcccgggagccuag

SEQ ID NO: 3523889 - RNA, 20 nt, Human
cuccagcccgggagccuagg

SEQ ID NO: 3523890 - RNA, 21 nt, Human
cuccagcccgggagccuagga

SEQ ID NO: 3523891 - RNA, 22 nt, Human
cuccagcccgggagccuaggac

SEQ ID NO: 3523892 - RNA, 18 nt, Human
cuccagccucagcccccu

SEQ ID NO: 3523893 - RNA, 17 nt, Human
cuccagccucagccucc

SEQ ID NO: 3523894 - RNA, 20 nt, Human
cuccagccugaacagaagcu

SEQ ID NO: 3523895 - RNA, 13 nt, Human
cuccagccugaca

SEQ ID NO: 3523896 - RNA, 17 nt, Human
cuccagccugccuggca

SEQ ID NO: 3523897 - RNA, 23 nt, Human
cuccagccuggaaaccugucuga

SEQ ID NO: 3523898 - RNA, 20 nt, Human
cuccagccuggacccccagc

SEQ ID NO: 3523899 - RNA, 12 nt, Human
cuccagccuggg

SEQ ID NO: 3523900 - RNA, 14 nt, Human
cuccagcucaccag

SEQ ID NO: 3523901 - RNA, 15 nt, Human
cuccagcucaccagc

SEQ ID NO: 3523902 - RNA, 19 nt, Human
cuccagcucaccagcccca

SEQ ID NO: 3523903 - RNA, 16 nt, Human
cuccagcucagaaccc

SEQ ID NO: 3523904 - RNA, 19 nt, Human
cuccagcucagaacccagg

SEQ ID NO: 3523905 - RNA, 21 nt, Human
cuccagcucagaacccagggc

SEQ ID NO: 3523906 - RNA, 24 nt, Human
cuccagcucagaacccagggcucu

SEQ ID NO: 3523907 - RNA, 13 nt, Human
cuccagcuccaag

SEQ ID NO: 3523908 - RNA, 21 nt, Human
cuccagcuccaagaccuguug

SEQ ID NO: 3523909 - RNA, 13 nt, Human
cuccagcucccug

SEQ ID NO: 3523910 - RNA, 22 nt, Human
cuccagcucuggcauggcuagg

SEQ ID NO: 3523911 - RNA, 11 nt, Human
cuccagcugcc

SEQ ID NO: 3523912 - RNA, 14 nt, Human
cuccagcugccccg

SEQ ID NO: 3523913 - RNA, 20 nt, Human
cuccagcugcugagauccug

SEQ ID NO: 3523914 - RNA, 21 nt, Human
cuccagcugcugagauccugg

SEQ ID NO: 3523915 - RNA, 23 nt, Human
cuccagcuggccgggagccugau

SEQ ID NO: 3523916 - RNA, 18 nt, Human
cuccagcuguucagcugg

SEQ ID NO: 3523917 - RNA, 13 nt, Human
cuccagcuuuccu

SEQ ID NO: 3523918 - RNA, 20 nt, Human
cuccaggaaggggcuggacu

SEQ ID NO: 3523919 - RNA, 11 nt, Human
cuccaggacca

SEQ ID NO: 3523920 - RNA, 22 nt, Human
cuccaggagaggagcgggaccu

SEQ ID NO: 3523921 - RNA, 13 nt, Human
cuccaggagcagc

SEQ ID NO: 3523922 - RNA, 15 nt, Human
cuccaggagcagcca

SEQ ID NO: 3523923 - RNA, 17 nt, Human
cuccaggagcagccaca

SEQ ID NO: 3523924 - RNA, 16 nt, Human
cuccaggcaccaucuc

SEQ ID NO: 3523925 - RNA, 16 nt, Human
cuccaggcacccuucu

SEQ ID NO: 3523926 - RNA, 21 nt, Human
cuccaggcacccuucuuuccu

SEQ ID NO: 3523927 - RNA, 11 nt, Human
cuccaggcagc

SEQ ID NO: 3523928 - RNA, 19 nt, Human
cuccaggcagcagacacau

SEQ ID NO: 3523929 - RNA, 20 nt, Human
cuccaggcauuuagcccuca

SEQ ID NO: 3523930 - RNA, 17 nt, Human
cuccaggcccgucuguc

SEQ ID NO: 3523931 - RNA, 13 nt, Human
cuccaggcccucc

SEQ ID NO: 3523932 - RNA, 17 nt, Human
cuccaggccugcagcag

SEQ ID NO: 3523933 - RNA, 15 nt, Human
cuccaggccugccuc

SEQ ID NO: 3523934 - RNA, 17 nt, Human
cuccaggccugccuccc

SEQ ID NO: 3523935 - RNA, 18 nt, Human
cuccaggccugccuccca

SEQ ID NO: 3523936 - RNA, 13 nt, Human
cuccaggccuguu

SEQ ID NO: 3523937 - RNA, 20 nt, Human
cuccaggccuguugcuauag

SEQ ID NO: 3523938 - RNA, 11 nt, Human
cuccaggcucc

SEQ ID NO: 3523939 - RNA, 14 nt, Human
cuccagggacacac

SEQ ID NO: 3523940 - RNA, 19 nt, Human
cuccagggacacacagccu

SEQ ID NO: 3523941 - RNA, 17 nt, Human
cuccagggaguccccuc

SEQ ID NO: 3523942 - RNA, 22 nt, Human
cuccagggaugauucaagccau

SEQ ID NO: 3523943 - RNA, 19 nt, Human
cuccagggccacgugccag

SEQ ID NO: 3523944 - RNA, 18 nt, Human
cuccaggggcugcuuccu

SEQ ID NO: 3523945 - RNA, 22 nt, Human
cuccagggguccuaggccucaa

SEQ ID NO: 3523946 - RNA, 20 nt, Human
cuccagggucagaaacagga

SEQ ID NO: 3523947 - RNA, 21 nt, Human
cuccagggucagaaacaggac

SEQ ID NO: 3523948 - RNA, 15 nt, Human
cuccagggugauuuu

SEQ ID NO: 3523949 - RNA, 17 nt, Human
cuccagguaccuugacc

SEQ ID NO: 3523950 - RNA, 23 nt, Human
cuccagguauucguuaucuaaua

SEQ ID NO: 3523951 - RNA, 22 nt, Human
cuccagguccucuacuuaauga

SEQ ID NO: 3523952 - RNA, 11 nt, Human
cuccaggugca

SEQ ID NO: 3523953 - RNA, 14 nt, Human
cuccaggugcagag

SEQ ID NO: 3523954 - RNA, 15 nt, Human
cuccaggugcagagg

SEQ ID NO: 3523955 - RNA, 18 nt, Human
cuccagguuuuucaauua

SEQ ID NO: 3523956 - RNA, 19 nt, Human
cuccagguuuuucaauuaa

SEQ ID NO: 3523957 - RNA, 16 nt, Human
cuccaguaccuugcuu

SEQ ID NO: 3523958 - RNA, 16 nt, Human
cuccaguacuggagcu

SEQ ID NO: 3523959 - RNA, 21 nt, Human
cuccaguacuggagcuucucu

SEQ ID NO: 3523960 - RNA, 14 nt, Human
cuccaguccccaga

SEQ ID NO: 3523961 - RNA, 16 nt, Human
cuccaguccccagaac

SEQ ID NO: 3523962 - RNA, 21 nt, Human
cuccagucccccuauccuugg

SEQ ID NO: 3523963 - RNA, 15 nt, Human
cuccaguccugcucu

SEQ ID NO: 3523964 - RNA, 16 nt, Human
cuccaguccugcucuc

SEQ ID NO: 3523965 - RNA, 12 nt, Human
cuccagucugcu

SEQ ID NO: 3523966 - RNA, 19 nt, Human
cuccagucuuccaccugga

SEQ ID NO: 3523967 - RNA, 20 nt, Human
cuccaguguccugagcucag

SEQ ID NO: 3523968 - RNA, 14 nt, Human
cuccauaaccccac

SEQ ID NO: 3523969 - RNA, 17 nt, Human
cuccauacacacgcugc

SEQ ID NO: 3523970 - RNA, 20 nt, Human
cuccauacacacgcugccuu

SEQ ID NO: 3523971 - RNA, 19 nt, Human
cuccauagaccuuuucauu

SEQ ID NO: 3523972 - RNA, 20 nt, Human
cuccauaguuuggcauuugc

SEQ ID NO: 3523973 - RNA, 15 nt, Human
cuccaucagcuguaa

SEQ ID NO: 3523974 - RNA, 13 nt, Human
cuccauccaaggc

SEQ ID NO: 3523975 - RNA, 18 nt, Human
cccaccaugucugcccca

SEQ ID NO: 3523976 - RNA, 18 nt, Human
cccaccauuuggcauccc

SEQ ID NO: 3523977 - RNA, 23 nt, Human
cccaccauuuggcaucccugggc

SEQ ID NO: 3523978 - RNA, 15 nt, Human
cccacccaagcuugg

SEQ ID NO: 3523979 - RNA, 21 nt, Human
cccacccaagggccuggccug

SEQ ID NO: 3523980 - RNA, 23 nt, Human
cccacccagaugccccuuucugg

SEQ ID NO: 3523981 - RNA, 13 nt, Human
cccacccagccug

SEQ ID NO: 3523982 - RNA, 13 nt, Human
cccacccaggagg

SEQ ID NO: 3523983 - RNA, 14 nt, Human
cccaccccacacuu

SEQ ID NO: 3523984 - RNA, 15 nt, Human
cccaccccaccugca

SEQ ID NO: 3523985 - RNA, 14 nt, Human
cccaccccagccua

SEQ ID NO: 3523986 - RNA, 13 nt, Human
cccaccccauucc

SEQ ID NO: 3523987 - RNA, 13 nt, Human
cccacccccaagg

SEQ ID NO: 3523988 - RNA, 12 nt, Human
cccacccccacc

SEQ ID NO: 3523989 - RNA, 13 nt, Human
cccacccccagcc

SEQ ID NO: 3523990 - RNA, 18 nt, Human
cccacccccagccccgac

SEQ ID NO: 3523991 - RNA, 13 nt, Human
cccacccccagcu

SEQ ID NO: 3523992 - RNA, 14 nt, Human
cccaccccccucau

SEQ ID NO: 3523993 - RNA, 17 nt, Human
cccacccccuccccagg

SEQ ID NO: 3523994 - RNA, 14 nt, Human
cccacccccugccc

SEQ ID NO: 3523995 - RNA, 15 nt, Human
cccacccccugcccu

SEQ ID NO: 3523996 - RNA, 17 nt, Human
cccacccccugcccugc

SEQ ID NO: 3523997 - RNA, 16 nt, Human
cccacccccuucucug

SEQ ID NO: 3523998 - RNA, 15 nt, Human
cccaccccgcucugc

SEQ ID NO: 3523999 - RNA, 16 nt, Human
cccaccccgcucugca

SEQ ID NO: 3524000 - RNA, 13 nt, Human
cccaccccuagga

SEQ ID NO: 3524001 - RNA, 13 nt, Human
cccaccccugugc

SEQ ID NO: 3524002 - RNA, 16 nt, Human
cccaccccugugcucc

SEQ ID NO: 3524003 - RNA, 13 nt, Human
cccaccccuuccc

SEQ ID NO: 3524004 - RNA, 22 nt, Human
cccaccccuuccccacugccug

SEQ ID NO: 3524005 - RNA, 14 nt, Human
cccaccccuugcuc

SEQ ID NO: 3524006 - RNA, 12 nt, Human
cccacccucagc

SEQ ID NO: 3524007 - RNA, 14 nt, Human
cccacccucagcac

SEQ ID NO: 3524008 - RNA, 18 nt, Human
cccacccucagcaccccu

SEQ ID NO: 3524009 - RNA, 21 nt, Human
cccacccucagcaccccuucc

SEQ ID NO: 3524010 - RNA, 13 nt, Human
cccacccuccacu

SEQ ID NO: 3524011 - RNA, 14 nt, Human
cccacccuccacuc

SEQ ID NO: 3524012 - RNA, 15 nt, Human
cccacccuccccuuc

SEQ ID NO: 3524013 - RNA, 13 nt, Human
cccacccuccugu

SEQ ID NO: 3524014 - RNA, 15 nt, Human
cccacccuccugucu

SEQ ID NO: 3524015 - RNA, 20 nt, Human
cccacccucguggacaccug

SEQ ID NO: 3524016 - RNA, 22 nt, Human
cccacccucguggacaccugcc

SEQ ID NO: 3524017 - RNA, 23 nt, Human
cccacccucguggacaccugccc

SEQ ID NO: 3524018 - RNA, 18 nt, Human
cccacccugaaagcccug

SEQ ID NO: 3524019 - RNA, 11 nt, Human
cccacccugcu

SEQ ID NO: 3524020 - RNA, 16 nt, Human
cccacccugcugccuu

SEQ ID NO: 3524021 - RNA, 21 nt, Human
cccacccugcuuggcccaggg

SEQ ID NO: 3524022 - RNA, 20 nt, Human
cccacccuggccuagaccag

SEQ ID NO: 3524023 - RNA, 12 nt, Human
cccacccuggga

SEQ ID NO: 3524024 - RNA, 13 nt, Human
cccacccugggcc

SEQ ID NO: 3524025 - RNA, 17 nt, Human
cccacccuguuccugcu

SEQ ID NO: 3524026 - RNA, 17 nt, Human
cccacccuguuuggauu

SEQ ID NO: 3524027 - RNA, 15 nt, Human
cccaccgcagacagg

SEQ ID NO: 3524028 - RNA, 18 nt, Human
cccaccgcaugcccccuc

SEQ ID NO: 3524029 - RNA, 19 nt, Human
cccaccgggccacuccuuc

SEQ ID NO: 3524030 - RNA, 22 nt, Human
cccaccgggccacuccuuccug

SEQ ID NO: 3524031 - RNA, 16 nt, Human
cccaccgguccagcug

SEQ ID NO: 3524032 - RNA, 17 nt, Human
cccaccgguugcuucug

SEQ ID NO: 3524033 - RNA, 19 nt, Human
cccaccgguugcuucuggg

SEQ ID NO: 3524034 - RNA, 22 nt, Human
cccaccguaaagugagcaugcu

SEQ ID NO: 3524035 - RNA, 15 nt, Human
cccaccgugggcagg

SEQ ID NO: 3524036 - RNA, 21 nt, Human
cccaccucagccucccaaagu

SEQ ID NO: 3524037 - RNA, 13 nt, Human
cccaccuccccac

SEQ ID NO: 3524038 - RNA, 15 nt, Human
cccaccuccccacgc

SEQ ID NO: 3524039 - RNA, 16 nt, Human
cccaccuccccacgcc

SEQ ID NO: 3524040 - RNA, 13 nt, Human
cucauguuuucca

SEQ ID NO: 3524041 - RNA, 18 nt, Human
cucauguuuuccauuguu

SEQ ID NO: 3524042 - RNA, 11 nt, Human
cucauuaaauu

SEQ ID NO: 3524043 - RNA, 19 nt, Human
cucauuaaccgaugcuuua

SEQ ID NO: 3524044 - RNA, 16 nt, Human
cucauuaaugacacuu

SEQ ID NO: 3524045 - RNA, 19 nt, Human
cucauuacuuguugccuau

SEQ ID NO: 3524046 - RNA, 21 nt, Human
cucauuaucgccuuuugacag

SEQ ID NO: 3524047 - RNA, 17 nt, Human
cucauucaguauuaaag

SEQ ID NO: 3524048 - RNA, 13 nt, Human
cucauucauuuua

SEQ ID NO: 3524049 - RNA, 22 nt, Human
cucauucauuuuauauugaaaa

SEQ ID NO: 3524050 - RNA, 17 nt, Human
cucauuccaacagugag

SEQ ID NO: 3524051 - RNA, 12 nt, Human
cucauuccccag

SEQ ID NO: 3524052 - RNA, 14 nt, Human
cucauuccccaggu

SEQ ID NO: 3524053 - RNA, 18 nt, Human
cucauuccuccaccugcc

SEQ ID NO: 3524054 - RNA, 12 nt, Human
cucauuccugua

SEQ ID NO: 3524055 - RNA, 21 nt, Human
cucauucuaaugauggcccau

SEQ ID NO: 3524056 - RNA, 12 nt, Human
cucauucuucug

SEQ ID NO: 3524057 - RNA, 23 nt, Human
cucauucuucuguacgucugaca

SEQ ID NO: 3524058 - RNA, 10 nt, Human
cucauugaaa

SEQ ID NO: 3524059 - RNA, 11 nt, Human
cucauugaaau

SEQ ID NO: 3524060 - RNA, 13 nt, Human
cucauugaaaugu

SEQ ID NO: 3524061 - RNA, 15 nt, Human
cucauugaaauguca

SEQ ID NO: 3524062 - RNA, 18 nt, Human
cucauugacaagaacuga

SEQ ID NO: 3524063 - RNA, 13 nt, Human
cucauugaccuga

SEQ ID NO: 3524064 - RNA, 12 nt, Human
cucauugacuuu

SEQ ID NO: 3524065 - RNA, 22 nt, Human
cucauugacuuuuauaaagcau

SEQ ID NO: 3524066 - RNA, 16 nt, Human
cucauugcugagccuc

SEQ ID NO: 3524067 - RNA, 18 nt, Human
cucauuggaaauuuagca

SEQ ID NO: 3524068 - RNA, 20 nt, Human
cucauuggaaauuuagcauu

SEQ ID NO: 3524069 - RNA, 13 nt, Human
cucauuucaucuc

SEQ ID NO: 3524070 - RNA, 17 nt, Human
cucauuuccaagcaagu

SEQ ID NO: 3524071 - RNA, 14 nt, Human
cucauuucuagcag

SEQ ID NO: 3524072 - RNA, 20 nt, Human
cucauuugggguagcuagag

SEQ ID NO: 3524073 - RNA, 17 nt, Human
cucauuugucacacacu

SEQ ID NO: 3524074 - RNA, 20 nt, Human
cucauuuuaaugauuguuua

SEQ ID NO: 3524075 - RNA, 16 nt, Human
cucauuuuaguugccu

SEQ ID NO: 3524076 - RNA, 20 nt, Human
cucauuuucuauaacagaua

SEQ ID NO: 3524077 - RNA, 13 nt, Human
cucauuuugcuug

SEQ ID NO: 3524078 - RNA, 19 nt, Human
cucauuuuuuuccuugcaa

SEQ ID NO: 3524079 - RNA, 22 nt, Human
cucauuuuuuuuuuuguuucug

SEQ ID NO: 3524080 - RNA, 23 nt, Human
cuccaaaaaaaaaaaaaauacaa

SEQ ID NO: 3524081 - RNA, 17 nt, Human
cuccaaaaaucugccug

SEQ ID NO: 3524082 - RNA, 18 nt, Human
cuccaaaaaucugccugg

SEQ ID NO: 3524083 - RNA, 16 nt, Human
cuccaaaacuccugcc

SEQ ID NO: 3524084 - RNA, 19 nt, Human
cuccaaaacuucguuuaau

SEQ ID NO: 3524085 - RNA, 15 nt, Human
cuccaaaaugugccu

SEQ ID NO: 3524086 - RNA, 14 nt, Human
cuccaaaccuucac

SEQ ID NO: 3524087 - RNA, 23 nt, Human
cuccaaacugaagcagccucucc

SEQ ID NO: 3524088 - RNA, 14 nt, Human
cuccaaaggccccc

SEQ ID NO: 3524089 - RNA, 15 nt, Human
cuccaaaggcccccu

SEQ ID NO: 3524090 - RNA, 16 nt, Human
cuccaaagucucugga

SEQ ID NO: 3524091 - RNA, 15 nt, Human
cuccaaaugagaucu

SEQ ID NO: 3524092 - RNA, 20 nt, Human
cuccaaauggagaagcugca

SEQ ID NO: 3524093 - RNA, 14 nt, Human
cuccaaauuuuucu

SEQ ID NO: 3524094 - RNA, 14 nt, Human
cuccaacauccacu

SEQ ID NO: 3524095 - RNA, 20 nt, Human
cuccaacccaaccucauccu

SEQ ID NO: 3524096 - RNA, 18 nt, Human
cuccaaccccccagcacu

SEQ ID NO: 3524097 - RNA, 20 nt, Human
cuccaaccccccagcacuga

SEQ ID NO: 3524098 - RNA, 21 nt, Human
cuccaaccccccagcacugag

SEQ ID NO: 3524099 - RNA, 23 nt, Human
cuccaaccccccagcacugagga

SEQ ID NO: 3524100 - RNA, 18 nt, Human
cuccaaccccucgcccag

SEQ ID NO: 3524101 - RNA, 13 nt, Human
cuccaacccugcc

SEQ ID NO: 3524102 - RNA, 23 nt, Human
cuccaacccugccgucaccacca

SEQ ID NO: 3524103 - RNA, 22 nt, Human
cuccaaccgggaugggagccgg

SEQ ID NO: 3524104 - RNA, 14 nt, Human
cuccaaccuaaccu

SEQ ID NO: 3524105 - RNA, 15 nt, Human
cuccaaccuaaccug

SEQ ID NO: 3524106 - RNA, 13 nt, Human
cuccaaccugcaa

SEQ ID NO: 3524107 - RNA, 14 nt, Human
cuccaagaaugcug

SEQ ID NO: 3524108 - RNA, 13 nt, Human
cuccaagaauuuc

SEQ ID NO: 3524109 - RNA, 14 nt, Human
cuccaagaccuagg

SEQ ID NO: 3524110 - RNA, 16 nt, Human
cuccaagaccuaggcu

SEQ ID NO: 3524111 - RNA, 17 nt, Human
cuccaagaccuucuccu

SEQ ID NO: 3524112 - RNA, 22 nt, Human
cuccaagaccuucuccuucacc

SEQ ID NO: 3524113 - RNA, 14 nt, Human
cuccaagauucuag

SEQ ID NO: 3524114 - RNA, 18 nt, Human
cuccaagauucuagauga

SEQ ID NO: 3524115 - RNA, 14 nt, Human
cuccaagcaggaca

SEQ ID NO: 3524116 - RNA, 15 nt, Human
cuccaagccagcaag

SEQ ID NO: 3524117 - RNA, 16 nt, Human
cuccaagccagcaagc

SEQ ID NO: 3524118 - RNA, 22 nt, Human
cuccaagcccagcccauggaga

SEQ ID NO: 3524119 - RNA, 18 nt, Human
cuccaagccccaucuucu

SEQ ID NO: 3524120 - RNA, 14 nt, Human
cuccaagcucccag

SEQ ID NO: 3524121 - RNA, 17 nt, Human
cuccaaggacagaaggc

SEQ ID NO: 3524122 - RNA, 20 nt, Human
cuccagcucaccagccccag

SEQ ID NO: 3524123 - RNA, 17 nt, Human
cuccagcucagaaccca

SEQ ID NO: 3524124 - RNA, 20 nt, Human
cuccagcucagaacccaggg

SEQ ID NO: 3524125 - RNA, 23 nt, Human
cuccagcucagaacccagggcuc

SEQ ID NO: 3524126 - RNA, 21 nt, Human
cuccagcucccugugccccca

SEQ ID NO: 3524127 - RNA, 17 nt, Human
cuccagcuccuuugggc

SEQ ID NO: 3524128 - RNA, 16 nt, Human
cuccagcucuggcaug

SEQ ID NO: 3524129 - RNA, 20 nt, Human
cuccagcugacuaaacuuuu

SEQ ID NO: 3524130 - RNA, 17 nt, Human
cuccagcugcaccagag

SEQ ID NO: 3524131 - RNA, 16 nt, Human
cuccagcugccccggc

SEQ ID NO: 3524132 - RNA, 20 nt, Human
cuccagcugcucugucuucu

SEQ ID NO: 3524133 - RNA, 23 nt, Human
cuccagcugcugagauccuggac

SEQ ID NO: 3524134 - RNA, 19 nt, Human
cuccagcugggcucugcaa

SEQ ID NO: 3524135 - RNA, 13 nt, Human
cuccagcuguuca

SEQ ID NO: 3524136 - RNA, 12 nt, Human
cuccagcuuccc

SEQ ID NO: 3524137 - RNA, 11 nt, Human
cuccagcuucu

SEQ ID NO: 3524138 - RNA, 13 nt, Human
cuccagcuucugg

SEQ ID NO: 3524139 - RNA, 20 nt, Human
cuccagcuucugguacucuc

SEQ ID NO: 3524140 - RNA, 22 nt, Human
cuccagcuucugguacucuccu

SEQ ID NO: 3524141 - RNA, 18 nt, Human
cuccagcuuguggagccc

SEQ ID NO: 3524142 - RNA, 19 nt, Human
cuccaggaagccuuccccu

SEQ ID NO: 3524143 - RNA, 16 nt, Human
cuccaggaaggggcug

SEQ ID NO: 3524144 - RNA, 18 nt, Human
cuccaggaaggggcugga

SEQ ID NO: 3524145 - RNA, 20 nt, Human
cuccaggaaugccuccuccc

SEQ ID NO: 3524146 - RNA, 14 nt, Human
cuccaggagcagcc

SEQ ID NO: 3524147 - RNA, 18 nt, Human
cuccaggagcagccacau

SEQ ID NO: 3524148 - RNA, 20 nt, Human
cuccaggcacccuucuuucc

SEQ ID NO: 3524149 - RNA, 12 nt, Human
cuccaggcagca

SEQ ID NO: 3524150 - RNA, 15 nt, Human
cuccaggcaggcuaa

SEQ ID NO: 3524151 - RNA, 12 nt, Human
cuccaggcccaa

SEQ ID NO: 3524152 - RNA, 23 nt, Human
cuccaggcccgucuguccaucug

SEQ ID NO: 3524153 - RNA, 18 nt, Human
cuccaggcccuccucucc

SEQ ID NO: 3524154 - RNA, 20 nt, Human
cuccaggcccuccucuccca

SEQ ID NO: 3524155 - RNA, 15 nt, Human
cuccaggccugcagc

SEQ ID NO: 3524156 - RNA, 22 nt, Human
cuccaggccugcagcaggagug

SEQ ID NO: 3524157 - RNA, 14 nt, Human
cuccaggccugccu

SEQ ID NO: 3524158 - RNA, 16 nt, Human
cuccaggccugccucc

SEQ ID NO: 3524159 - RNA, 15 nt, Human
cuccaggcuccuuua

SEQ ID NO: 3524160 - RNA, 21 nt, Human
cuccaggcugggugacagagc

SEQ ID NO: 3524161 - RNA, 20 nt, Human
cuccaggcuguaucccauga

SEQ ID NO: 3524162 - RNA, 19 nt, Human
cuccagggaauccaagccu

SEQ ID NO: 3524163 - RNA, 22 nt, Human
cuccagggacacacagccuagc

SEQ ID NO: 3524164 - RNA, 22 nt, Human
cuccagggagccuagaagcugg

SEQ ID NO: 3524165 - RNA, 23 nt, Human
cuccagggccacgugccaggccc

SEQ ID NO: 3524166 - RNA, 21 nt, Human
cuccagggcucaacacuguga

SEQ ID NO: 3524167 - RNA, 20 nt, Human
cuccagggcuggacugaggc

SEQ ID NO: 3524168 - RNA, 21 nt, Human
cuccagggcuggacugaggcc

SEQ ID NO: 3524169 - RNA, 14 nt, Human
cuccaggggcugcu

SEQ ID NO: 3524170 - RNA, 15 nt, Human
cuccaggggcugcuu

SEQ ID NO: 3524171 - RNA, 23 nt, Human
cuccaggggcugcuuccuccugg

SEQ ID NO: 3524172 - RNA, 19 nt, Human
cuccaggggggacaauaug

SEQ ID NO: 3524173 - RNA, 20 nt, Human
cuccagggguccuaggccuc

SEQ ID NO: 3524174 - RNA, 22 nt, Human
cuccaggugcacaagcuccaag

SEQ ID NO: 3524175 - RNA, 14 nt, Human
cuccagguggcucu

SEQ ID NO: 3524176 - RNA, 14 nt, Human
cuccaggugugcac

SEQ ID NO: 3524177 - RNA, 14 nt, Human
cuccagguuuuuca

SEQ ID NO: 3524178 - RNA, 15 nt, Human
cuccagguuuuucaa

SEQ ID NO: 3524179 - RNA, 16 nt, Human
cuccagguuuuucaau

SEQ ID NO: 3524180 - RNA, 20 nt, Human
cuccagguuuuucaauuaaa

SEQ ID NO: 3524181 - RNA, 14 nt, Human
cuccaguauucuug

SEQ ID NO: 3524182 - RNA, 16 nt, Human
cuccaguccaaggaaa

SEQ ID NO: 3524183 - RNA, 23 nt, Human
cuccaguccccagaacucugccu

SEQ ID NO: 3524184 - RNA, 23 nt, Human
cuccagucccccuauccuuggca

SEQ ID NO: 3524185 - RNA, 14 nt, Human
cuccaguccugcuc

SEQ ID NO: 3524186 - RNA, 22 nt, Human
cuccaguccugcucucuaccca

SEQ ID NO: 3524187 - RNA, 21 nt, Human
cuccagucugcugcccuccau

SEQ ID NO: 3524188 - RNA, 16 nt, Human
cuccagucuuccaccu

SEQ ID NO: 3524189 - RNA, 20 nt, Human
cuccagucuuccaccuggaa

SEQ ID NO: 3524190 - RNA, 14 nt, Human
cuccagugccaaca

SEQ ID NO: 3524191 - RNA, 22 nt, Human
cuccagugcuguccaugcuucu

SEQ ID NO: 3524192 - RNA, 15 nt, Human
cuccagugguugcug

SEQ ID NO: 3524193 - RNA, 19 nt, Human
cuccagugguugcuguuga

SEQ ID NO: 3524194 - RNA, 14 nt, Human
cuccaguguacaua

SEQ ID NO: 3524195 - RNA, 16 nt, Human
cuccaguguccugagc

SEQ ID NO: 3524196 - RNA, 18 nt, Human
cuccaguguccugagcuc

SEQ ID NO: 3524197 - RNA, 22 nt, Human
cuccagugugggcuugaccagg

SEQ ID NO: 3524198 - RNA, 17 nt, Human
cuccaguuugcaccugu

SEQ ID NO: 3524199 - RNA, 20 nt, Human
cuccaguuugcaccuguccc

SEQ ID NO: 3524200 - RNA, 22 nt, Human
cuccauaaacaugaaaacacuu

SEQ ID NO: 3524201 - RNA, 15 nt, Human
cuccauaaccccacc

SEQ ID NO: 3524202 - RNA, 22 nt, Human
cuccauaaccccacccuugccc

SEQ ID NO: 3524203 - RNA, 19 nt, Human
cuccauacacacgcugccu

SEQ ID NO: 3524204 - RNA, 21 nt, Human
cuccauaguuuggcauuugca

SEQ ID NO: 3524205 - RNA, 19 nt, Human
cccagauuuugcuguauau

SEQ ID NO: 3524206 - RNA, 17 nt, Human
cccagcaaagcccccag

SEQ ID NO: 3524207 - RNA, 13 nt, Human
cccagcaacccuc

SEQ ID NO: 3524208 - RNA, 19 nt, Human
cccagcaacccuccuauca

SEQ ID NO: 3524209 - RNA, 20 nt, Human
cccagcaagugagagcuggg

SEQ ID NO: 3524210 - RNA, 18 nt, Human
cccagcaauuaugaaaau

SEQ ID NO: 3524211 - RNA, 20 nt, Human
cccagcacaaagcagauccu

SEQ ID NO: 3524212 - RNA, 18 nt, Human
cccagcacagcuugaccu

SEQ ID NO: 3524213 - RNA, 17 nt, Human
cccagcaccaccagguc

SEQ ID NO: 3524214 - RNA, 17 nt, Human
cccagcacuaaagcagu

SEQ ID NO: 3524215 - RNA, 14 nt, Human
cccagcacugagga

SEQ ID NO: 3524216 - RNA, 22 nt, Human
cccagcacuuugggaggccaag

SEQ ID NO: 3524217 - RNA, 21 nt, Human
cccagcacuuugggaggccua

SEQ ID NO: 3524218 - RNA, 21 nt, Human
cccagcacuuugggaggcuga

SEQ ID NO: 3524219 - RNA, 15 nt, Human
cccagcagcugccag

SEQ ID NO: 3524220 - RNA, 13 nt, Human
cccagcagggccu

SEQ ID NO: 3524221 - RNA, 15 nt, Human
cccagcaggugggga

SEQ ID NO: 3524222 - RNA, 17 nt, Human
cccagcauaugggggcc

SEQ ID NO: 3524223 - RNA, 21 nt, Human
cccagcauccuuuucugcaga

SEQ ID NO: 3524224 - RNA, 21 nt, Human
cccagcaucgcacucuggcag

SEQ ID NO: 3524225 - RNA, 23 nt, Human
cccagcaugacauaacagugcag

SEQ ID NO: 3524226 - RNA, 23 nt, Human
cccagcaugcaccacgggcccgg

SEQ ID NO: 3524227 - RNA, 19 nt, Human
cccagcauuccagccccuc

SEQ ID NO: 3524228 - RNA, 13 nt, Human
cccagcauucuca

SEQ ID NO: 3524229 - RNA, 17 nt, Human
cccagccaaacccuguc

SEQ ID NO: 3524230 - RNA, 22 nt, Human
cccagccagaguuccugcggag

SEQ ID NO: 3524231 - RNA, 24 nt, Human
cccagccagcaguucagagcugcc

SEQ ID NO: 3524232 - RNA, 14 nt, Human
cccagccaggccca

SEQ ID NO: 3524233 - RNA, 17 nt, Human
cccagccaggcccagcc

SEQ ID NO: 3524234 - RNA, 22 nt, Human
cccagccagggcucaaucucug

SEQ ID NO: 3524235 - RNA, 13 nt, Human
cccagccauccag

SEQ ID NO: 3524236 - RNA, 17 nt, Human
cccagccaucugcccag

SEQ ID NO: 3524237 - RNA, 22 nt, Human
cccagccaucugcccaggggug

SEQ ID NO: 3524238 - RNA, 15 nt, Human
cccagccaugccagc

SEQ ID NO: 3524239 - RNA, 19 nt, Human
cccagccauuaccauggag

SEQ ID NO: 3524240 - RNA, 16 nt, Human
cccagcccaaagcugu

SEQ ID NO: 3524241 - RNA, 19 nt, Human
cccagcccaaaggggacag

SEQ ID NO: 3524242 - RNA, 14 nt, Human
cccagcccaagucc

SEQ ID NO: 3524243 - RNA, 12 nt, Human
cccagcccaauc

SEQ ID NO: 3524244 - RNA, 12 nt, Human
cccagcccaccc

SEQ ID NO: 3524245 - RNA, 14 nt, Human
cccagcccacccuc

SEQ ID NO: 3524246 - RNA, 15 nt, Human
cccagcccagcugcu

SEQ ID NO: 3524247 - RNA, 20 nt, Human
cccagcccagcugcucugcc

SEQ ID NO: 3524248 - RNA, 11 nt, Human
cccagcccagg

SEQ ID NO: 3524249 - RNA, 18 nt, Human
cccagcccagggcuccug

SEQ ID NO: 3524250 - RNA, 16 nt, Human
cccagcccaucuugcc

SEQ ID NO: 3524251 - RNA, 15 nt, Human
cccagcccauggaga

SEQ ID NO: 3524252 - RNA, 21 nt, Human
cccagcccauucucucuccug

SEQ ID NO: 3524253 - RNA, 21 nt, Human
cccagccccaaaacucuccuc

SEQ ID NO: 3524254 - RNA, 22 nt, Human
cccagccccacuccucugcuga

SEQ ID NO: 3524255 - RNA, 13 nt, Human
cccagccccacuu

SEQ ID NO: 3524256 - RNA, 15 nt, Human
cccagccccagccag

SEQ ID NO: 3524257 - RNA, 12 nt, Human
cccagccccauc

SEQ ID NO: 3524258 - RNA, 14 nt, Human
cccagccccauccc

SEQ ID NO: 3524259 - RNA, 18 nt, Human
cccagcccccuaagagag

SEQ ID NO: 3524260 - RNA, 21 nt, Human
cccagcccccuaagagagcac

SEQ ID NO: 3524261 - RNA, 22 nt, Human
cccagcccccuuugggcccagg

SEQ ID NO: 3524262 - RNA, 23 nt, Human
cccagccccgacuccagccagcg

SEQ ID NO: 3524263 - RNA, 22 nt, Human
cccagccccgguggcugggcag

SEQ ID NO: 3524264 - RNA, 15 nt, Human
cccagccccuacugc

SEQ ID NO: 3524265 - RNA, 18 nt, Human
cccaugcuggagccugug

SEQ ID NO: 3524266 - RNA, 18 nt, Human
cccaugcugggcucccgu

SEQ ID NO: 3524267 - RNA, 22 nt, Human
cccaugcuuaacauacccgccu

SEQ ID NO: 3524268 - RNA, 20 nt, Human
cccaugcuuacgugauccuc

SEQ ID NO: 3524269 - RNA, 17 nt, Human
cccauggaaaaaugcca

SEQ ID NO: 3524270 - RNA, 13 nt, Human
cccauggaauauu

SEQ ID NO: 3524271 - RNA, 17 nt, Human
cccauggaauauuucca

SEQ ID NO: 3524272 - RNA, 22 nt, Human
cccauggacacuccagugccag

SEQ ID NO: 3524273 - RNA, 20 nt, Human
cccauggacaggcuggcucc

SEQ ID NO: 3524274 - RNA, 14 nt, Human
cccauggaccaugc

SEQ ID NO: 3524275 - RNA, 19 nt, Human
cccauggagccagcucccu

SEQ ID NO: 3524276 - RNA, 13 nt, Human
cccauggagcccc

SEQ ID NO: 3524277 - RNA, 15 nt, Human
cccauggagccccag

SEQ ID NO: 3524278 - RNA, 21 nt, Human
cccauggagccccagcccccu

SEQ ID NO: 3524279 - RNA, 22 nt, Human
cccauggcagugggaaaaaugu

SEQ ID NO: 3524280 - RNA, 20 nt, Human
cccauggcaugggggccuca

SEQ ID NO: 3524281 - RNA, 15 nt, Human
cccauggcccugugc

SEQ ID NO: 3524282 - RNA, 21 nt, Human
cccaugggaagacgaggcccu

SEQ ID NO: 3524283 - RNA, 16 nt, Human
cccaugggaggcugga

SEQ ID NO: 3524284 - RNA, 23 nt, Human
cccaugggagggagcugagaaga

SEQ ID NO: 3524285 - RNA, 17 nt, Human
cccaugggcacugcugg

SEQ ID NO: 3524286 - RNA, 20 nt, Human
cccaugggcacugcugggug

SEQ ID NO: 3524287 - RNA, 14 nt, Human
cccaugggcucuga

SEQ ID NO: 3524288 - RNA, 21 nt, Human
cccauguagcccccuggccuc

SEQ ID NO: 3524289 - RNA, 18 nt, Human
cccaugucgcgcucagca

SEQ ID NO: 3524290 - RNA, 19 nt, Human
cccauguggagucagccuc

SEQ ID NO: 3524291 - RNA, 20 nt, Human
cccaugugugagugugugca

SEQ ID NO: 3524292 - RNA, 21 nt, Human
cccauguucugcccccagccc

SEQ ID NO: 3524293 - RNA, 15 nt, Human
cccauguucuguccc

SEQ ID NO: 3524294 - RNA, 16 nt, Human
cccauuagcaaaaauu

SEQ ID NO: 3524295 - RNA, 12 nt, Human
cccauuauucaa

SEQ ID NO: 3524296 - RNA, 23 nt, Human
cccauuauucaaaguugccuaaa

SEQ ID NO: 3524297 - RNA, 22 nt, Human
cccauucauuccauucuggaag

SEQ ID NO: 3524298 - RNA, 17 nt, Human
cccauucccugggaucu

SEQ ID NO: 3524299 - RNA, 13 nt, Human
cccauuccugaag

SEQ ID NO: 3524300 - RNA, 18 nt, Human
cccauuccugaagaacca

SEQ ID NO: 3524301 - RNA, 17 nt, Human
cccauucgcgcucugcu

SEQ ID NO: 3524302 - RNA, 20 nt, Human
cccauucgcgcucugcucag

SEQ ID NO: 3524303 - RNA, 21 nt, Human
cccauucgguguggugcagug

SEQ ID NO: 3524304 - RNA, 18 nt, Human
cccauucuacacagagca

SEQ ID NO: 3524305 - RNA, 13 nt, Human
cccauucuacuug

SEQ ID NO: 3524306 - RNA, 14 nt, Human
cccauucuacuugc

SEQ ID NO: 3524307 - RNA, 15 nt, Human
cccauucuacuugcu

SEQ ID NO: 3524308 - RNA, 17 nt, Human
cccauucuacuugcucu

SEQ ID NO: 3524309 - RNA, 21 nt, Human
cccauucuacuugcucuggac

SEQ ID NO: 3524310 - RNA, 18 nt, Human
cccauucucucuccuguc

SEQ ID NO: 3524311 - RNA, 19 nt, Human
cccauucucucuccugucc

SEQ ID NO: 3524312 - RNA, 20 nt, Human
cccauucucucuccugucca

SEQ ID NO: 3524313 - RNA, 15 nt, Human
cccauucugccugcc

SEQ ID NO: 3524314 - RNA, 19 nt, Human
cccauucugccugcccagg

SEQ ID NO: 3524315 - RNA, 23 nt, Human
cccauucugccugcccaggcccc

SEQ ID NO: 3524316 - RNA, 20 nt, Human
cccauucuuccuaguuuucu

SEQ ID NO: 3524317 - RNA, 21 nt, Human
cccauucuuccuaguuuucuc

SEQ ID NO: 3524318 - RNA, 14 nt, Human
cccauucuuggccc

SEQ ID NO: 3524319 - RNA, 21 nt, Human
cccauucuuugcuugaacaca

SEQ ID NO: 3524320 - RNA, 20 nt, Human
cccauucuuuuguaauuuaa

SEQ ID NO: 3524321 - RNA, 21 nt, Human
cccauucuuuuguaauuuaaa

SEQ ID NO: 3524322 - RNA, 14 nt, Human
cccauugccuccuc

SEQ ID NO: 3524323 - RNA, 21 nt, Human
cccauugguguugucauugua

SEQ ID NO: 3524324 - RNA, 12 nt, Human
cccauugucuuc

SEQ ID NO: 3524325 - RNA, 16 nt, Human
cccauuuacacuuuug

SEQ ID NO: 3524326 - RNA, 19 nt, Human
cccauuuauagauggggga

SEQ ID NO: 3524327 - RNA, 19 nt, Human
cccauuuauccaccuccau

SEQ ID NO: 3524328 - RNA, 14 nt, Human
cccauuucaaugug

SEQ ID NO: 3524329 - RNA, 13 nt, Human
cccauuucagcug

SEQ ID NO: 3524330 - RNA, 14 nt, Human
cccauuucccaucu

SEQ ID NO: 3524331 - RNA, 16 nt, Human
cccauuucccaucugc

SEQ ID NO: 3524332 - RNA, 19 nt, Human
cccauuucccaucugcacc

SEQ ID NO: 3524333 - RNA, 22 nt, Human
cccauuucuacucuuaaguuuc

SEQ ID NO: 3524334 - RNA, 13 nt, Human
cccauuucugagg

SEQ ID NO: 3524335 - RNA, 19 nt, Human
cccauuuggagggccuggg

SEQ ID NO: 3524336 - RNA, 14 nt, Human
cccauuuuagucac

SEQ ID NO: 3524337 - RNA, 22 nt, Human
cccauuuugcaaaauuuccagu

SEQ ID NO: 3524338 - RNA, 15 nt, Human
ccccaaaaccacagc

SEQ ID NO: 3524339 - RNA, 20 nt, Human
ccccaaaaccacagcccugu

SEQ ID NO: 3524340 - RNA, 23 nt, Human
ccccaaaacucuccucugcugcu

SEQ ID NO: 3524341 - RNA, 22 nt, Human
ccccaaacaccuuccagcuccu

SEQ ID NO: 3524342 - RNA, 15 nt, Human
ccccaaagaagaagu

SEQ ID NO: 3524343 - RNA, 22 nt, Human
ccccaaagauagacagguccug

SEQ ID NO: 3524344 - RNA, 19 nt, Human
ccccaaagcuuuccugccc

SEQ ID NO: 3524345 - RNA, 21 nt, Human
ccccaaagcuuuccugcccca

SEQ ID NO: 3524346 - RNA, 23 nt, Human
ccccaaauccgaaccuccucugu

SEQ ID NO: 3524347 - RNA, 21 nt, Human
ccccaaauggaaaugggcaga

SEQ ID NO: 3524348 - RNA, 22 nt, Human
ccccaaauggaaaugggcagag

SEQ ID NO: 3524349 - RNA, 19 nt, Human
ccccaacacugugcccugg

SEQ ID NO: 3524350 - RNA, 20 nt, Human
ccccaacacugugcccuggu

SEQ ID NO: 3524351 - RNA, 22 nt, Human
ccccaacacugugcccuggugg

SEQ ID NO: 3524352 - RNA, 20 nt, Human
ccccaacagcgacauagccc

SEQ ID NO: 3524353 - RNA, 22 nt, Human
ccccaacagcgacauagcccau

SEQ ID NO: 3524354 - RNA, 14 nt, Human
ccccaacagcgccc

SEQ ID NO: 3524355 - RNA, 17 nt, Human
ccccaacagcgcccaaa

SEQ ID NO: 3524356 - RNA, 18 nt, Human
ccccaacauauaaaauaa

SEQ ID NO: 3524357 - RNA, 19 nt, Human
ccccaacaucucccuccca

SEQ ID NO: 3524358 - RNA, 18 nt, Human
ccccaacccaaaccugga

SEQ ID NO: 3524359 - RNA, 14 nt, Human
ccccaaccccagcc

SEQ ID NO: 3524360 - RNA, 16 nt, Human
ccccaaccccugagga

SEQ ID NO: 3524361 - RNA, 23 nt, Human
ccccaacccguggaggcugcucg

SEQ ID NO: 3524362 - RNA, 17 nt, Human
ccccaacccugccccug

SEQ ID NO: 3524363 - RNA, 18 nt, Human
ccccaacccugccccugc

SEQ ID NO: 3524364 - RNA, 22 nt, Human
ccccaaccucagggcucccagg

SEQ ID NO: 3524365 - RNA, 16 nt, Human
ccccaacgaaaagcac

SEQ ID NO: 3524366 - RNA, 20 nt, Human
ccccaacgaaaagcacaucc

SEQ ID NO: 3524367 - RNA, 14 nt, Human
ccccaacuccugga

SEQ ID NO: 3524368 - RNA, 20 nt, Human
ccccaacucgggcucccggg

SEQ ID NO: 3524369 - RNA, 16 nt, Human
ccccaagaaggcuggg

SEQ ID NO: 3524370 - RNA, 22 nt, Human
ccccaagauugagcucucugcc

SEQ ID NO: 3524371 - RNA, 13 nt, Human
ccccaagccuggc

SEQ ID NO: 3524372 - RNA, 17 nt, Human
ccccaagcgcccuggcc

SEQ ID NO: 3524373 - RNA, 14 nt, Human
ccccaagcuguuuu

SEQ ID NO: 3524374 - RNA, 14 nt, Human
ccccaaggggcagu

SEQ ID NO: 3524375 - RNA, 16 nt, Human
ccccaaggggcagucu

SEQ ID NO: 3524376 - RNA, 18 nt, Human
ccccaaggggcagucugg

SEQ ID NO: 3524377 - RNA, 22 nt, Human
ccccaaggggcagucuggaggg

SEQ ID NO: 3524378 - RNA, 21 nt, Human
ccccaaguugggggucagugc

SEQ ID NO: 3524379 - RNA, 19 nt, Human
ccccaauaccccauggacc

SEQ ID NO: 3524380 - RNA, 14 nt, Human
ccccaauccuccca

SEQ ID NO: 3524381 - RNA, 15 nt, Human
ccccaauuccuugua

SEQ ID NO: 3524382 - RNA, 11 nt, Human
ccccacacaca

SEQ ID NO: 3524383 - RNA, 20 nt, Human
ccccacaccagggccagccu

SEQ ID NO: 3524384 - RNA, 14 nt, Human
ccccacaccucagu

SEQ ID NO: 3524385 - RNA, 16 nt, Human
ccccacaccuggcccu

SEQ ID NO: 3524386 - RNA, 17 nt, Human
ccccacaccuggcccug

SEQ ID NO: 3524387 - RNA, 13 nt, Human
ccccacacugggg

SEQ ID NO: 3524388 - RNA, 16 nt, Human
ccccacacuucccugg

SEQ ID NO: 3524389 - RNA, 18 nt, Human
ccccacacuucccuggcg

SEQ ID NO: 3524390 - RNA, 22 nt, Human
ccccacacuuguuccagcucuu

SEQ ID NO: 3524391 - RNA, 23 nt, Human
ccccacacuuguuccagcucuuu

SEQ ID NO: 3524392 - RNA, 15 nt, Human
ccccacagcccacgu

SEQ ID NO: 3524393 - RNA, 13 nt, Human
ccccacaguugcu

SEQ ID NO: 3524394 - RNA, 19 nt, Human
ccccaccaagggcgcaaga

SEQ ID NO: 3524395 - RNA, 21 nt, Human
ccccaccaagggcgcaagagu

SEQ ID NO: 3524396 - RNA, 13 nt, Human
ccccaccagugcc

SEQ ID NO: 3524397 - RNA, 14 nt, Human
ccccaccagugccu

SEQ ID NO: 3524398 - RNA, 19 nt, Human
ccccaccauaugaauugua

SEQ ID NO: 3524399 - RNA, 13 nt, Human
ccccaccaucugc

SEQ ID NO: 3524400 - RNA, 14 nt, Human
ccccaccaucugcu

SEQ ID NO: 3524401 - RNA, 19 nt, Human
ccccacccaagcuuggcag

SEQ ID NO: 3524402 - RNA, 14 nt, Human
ccccacccaagggc

SEQ ID NO: 3524403 - RNA, 14 nt, Human
ccccaccccagggc

SEQ ID NO: 3524404 - RNA, 19 nt, Human
ccccaccccggggacccug

SEQ ID NO: 3524405 - RNA, 22 nt, Human
ccccaccccggggacccuguga

SEQ ID NO: 3524406 - RNA, 23 nt, Human
ccccaccccggggacccugugac

SEQ ID NO: 3524407 - RNA, 14 nt, Human
ccccaccccugccc

SEQ ID NO: 3524408 - RNA, 17 nt, Human
cuccuuaacacugagcu

SEQ ID NO: 3524409 - RNA, 13 nt, Human
cuccuuagaaaaa

SEQ ID NO: 3524410 - RNA, 13 nt, Human
cuccuuagaagug

SEQ ID NO: 3524411 - RNA, 22 nt, Human
cuccuuagcugccaagccccau

SEQ ID NO: 3524412 - RNA, 22 nt, Human
cuccuucaacaaggcuugcugc

SEQ ID NO: 3524413 - RNA, 12 nt, Human
cuccuucagaca

SEQ ID NO: 3524414 - RNA, 13 nt, Human
cuccuucagacac

SEQ ID NO: 3524415 - RNA, 14 nt, Human
cuccuucagcccuc

SEQ ID NO: 3524416 - RNA, 19 nt, Human
cuccuucaugacagccucc

SEQ ID NO: 3524417 - RNA, 15 nt, Human
cuccuuccaccuccc

SEQ ID NO: 3524418 - RNA, 10 nt, Human
cuccuuccca

SEQ ID NO: 3524419 - RNA, 13 nt, Human
cuccuucccaagu

SEQ ID NO: 3524420 - RNA, 14 nt, Human
cuccuucccaagug

SEQ ID NO: 3524421 - RNA, 19 nt, Human
cuccuucccagcugccccu

SEQ ID NO: 3524422 - RNA, 22 nt, Human
cuccuucccagcugccccuccc

SEQ ID NO: 3524423 - RNA, 16 nt, Human
cuccuucccaucgcug

SEQ ID NO: 3524424 - RNA, 12 nt, Human
ccccaccccugg

SEQ ID NO: 3524425 - RNA, 13 nt, Human
ccccaccccuucc

SEQ ID NO: 3524426 - RNA, 17 nt, Human
ccccaccccuuccccac

SEQ ID NO: 3524427 - RNA, 13 nt, Human
ccccacccucagc

SEQ ID NO: 3524428 - RNA, 15 nt, Human
ccccacccucccugg

SEQ ID NO: 3524429 - RNA, 12 nt, Human
ccccacccuggg

SEQ ID NO: 3524430 - RNA, 15 nt, Human
ccccaccgcagacag

SEQ ID NO: 3524431 - RNA, 18 nt, Human
ccccaccgguccagcugg

SEQ ID NO: 3524432 - RNA, 19 nt, Human
ccccaccgguccagcuggc

SEQ ID NO: 3524433 - RNA, 21 nt, Human
ccccaccgguccagcuggccu

SEQ ID NO: 3524434 - RNA, 12 nt, Human
ccccaccuccac

SEQ ID NO: 3524435 - RNA, 11 nt, Human
ccccaccugcc

SEQ ID NO: 3524436 - RNA, 13 nt, Human
ccccaccugccac

SEQ ID NO: 3524437 - RNA, 17 nt, Human
ccccaccugccacuagg

SEQ ID NO: 3524438 - RNA, 14 nt, Human
ccccaccugcgcuu

SEQ ID NO: 3524439 - RNA, 20 nt, Human
ccccaccuggcccucucuga

SEQ ID NO: 3524440 - RNA, 21 nt, Human
ccccaccuucaauuccugggc

SEQ ID NO: 3524441 - RNA, 13 nt, Human
ccccacgagggcu

SEQ ID NO: 3524442 - RNA, 17 nt, Human
ccccacgagggcuggcu

SEQ ID NO: 3524443 - RNA, 18 nt, Human
ccccacgagggcuggcug

SEQ ID NO: 3524444 - RNA, 21 nt, Human
ccccacgagggcuggcuggcc

SEQ ID NO: 3524445 - RNA, 17 nt, Human
ccccacgagggucagga

SEQ ID NO: 3524446 - RNA, 14 nt, Human
ccccacgcccucau

SEQ ID NO: 3524447 - RNA, 14 nt, Human
ccccacgcccuccc

SEQ ID NO: 3524448 - RNA, 19 nt, Human
ccccacggccgcuccaggg

SEQ ID NO: 3524449 - RNA, 13 nt, Human
ccccacuccagcu

SEQ ID NO: 3524450 - RNA, 14 nt, Human
ccccacucccacau

SEQ ID NO: 3524451 - RNA, 13 nt, Human
ccccacucccuca

SEQ ID NO: 3524452 - RNA, 15 nt, Human
ccccacucccucaca

SEQ ID NO: 3524453 - RNA, 21 nt, Human
ccccacucccuugcuggcccc

SEQ ID NO: 3524454 - RNA, 16 nt, Human
ccccacuccggcccuc

SEQ ID NO: 3524455 - RNA, 20 nt, Human
ccccacuccggcccuccaga

SEQ ID NO: 3524456 - RNA, 13 nt, Human
ccccacucucaga

SEQ ID NO: 3524457 - RNA, 17 nt, Human
ccccacucucagaggcc

SEQ ID NO: 3524458 - RNA, 20 nt, Human
ccccacucucauuccccagg

SEQ ID NO: 3524459 - RNA, 18 nt, Human
ccccacucuccccacacu

SEQ ID NO: 3524460 - RNA, 16 nt, Human
ccccacucugcucuga

SEQ ID NO: 3524461 - RNA, 12 nt, Human
ccccacucugug

SEQ ID NO: 3524462 - RNA, 13 nt, Human
ccccacucugugc

SEQ ID NO: 3524463 - RNA, 19 nt, Human
ccccacugaugcuguucuc

SEQ ID NO: 3524464 - RNA, 12 nt, Human
ccccacugcagg

SEQ ID NO: 3524465 - RNA, 18 nt, Human
ccccacugcaggccccgc

SEQ ID NO: 3524466 - RNA, 19 nt, Human
ccccacugccagcagcagc

SEQ ID NO: 3524467 - RNA, 22 nt, Human
ccccacugccagcagcagcagg

SEQ ID NO: 3524468 - RNA, 19 nt, Human
ccccacugccuacugcauc

SEQ ID NO: 3524469 - RNA, 12 nt, Human
ccccacuggacu

SEQ ID NO: 3524470 - RNA, 19 nt, Human
ccccacuggacugaccugg

SEQ ID NO: 3524471 - RNA, 24 nt, Human
ccccacuggagcagaaggggagau

SEQ ID NO: 3524472 - RNA, 22 nt, Human
ccccacuggggaaauaacagcu

SEQ ID NO: 3524473 - RNA, 13 nt, Human
ccccacuggugac

SEQ ID NO: 3524474 - RNA, 14 nt, Human
ccccacuggugaca

SEQ ID NO: 3524475 - RNA, 14 nt, Human
ccccacuguaucua

SEQ ID NO: 3524476 - RNA, 18 nt, Human
ccccacuuaccgcguaau

SEQ ID NO: 3524477 - RNA, 15 nt, Human
ccccacuuucuuucu

SEQ ID NO: 3524478 - RNA, 15 nt, Human
ccccagaaccugucc

SEQ ID NO: 3524479 - RNA, 21 nt, Human
ccccagaaccuguccuugcac

SEQ ID NO: 3524480 - RNA, 21 nt, Human
ccccagagacucagagggagg

SEQ ID NO: 3524481 - RNA, 13 nt, Human
ccccagagcacug

SEQ ID NO: 3524482 - RNA, 13 nt, Human
ccccagagccaca

SEQ ID NO: 3524483 - RNA, 15 nt, Human
ccccagagccacagu

SEQ ID NO: 3524484 - RNA, 11 nt, Human
ccccagagcug

SEQ ID NO: 3524485 - RNA, 22 nt, Human
ccccagagcuguuuauggccuc

SEQ ID NO: 3524486 - RNA, 23 nt, Human
ccccagagcuguuuauggccuca

SEQ ID NO: 3524487 - RNA, 13 nt, Human
ccccagaggcugg

SEQ ID NO: 3524488 - RNA, 18 nt, Human
ccccagaucaccagcccg

SEQ ID NO: 3524489 - RNA, 21 nt, Human
ccccagauugcaacaggcugg

SEQ ID NO: 3524490 - RNA, 24 nt, Human
ccccagcaaagcccccagagccca

SEQ ID NO: 3524491 - RNA, 20 nt, Human
ccccagcaagugagagcugg

SEQ ID NO: 3524492 - RNA, 22 nt, Human
ccccagcaagugagagcugggu

SEQ ID NO: 3524493 - RNA, 15 nt, Human
ccccagcacccgggc

SEQ ID NO: 3524494 - RNA, 11 nt, Human
ccccagcacua

SEQ ID NO: 3524495 - RNA, 18 nt, Human
ccccagcaggugcugacu

SEQ ID NO: 3524496 - RNA, 23 nt, Human
ccccagcaguugaaugacaacag

SEQ ID NO: 3524497 - RNA, 19 nt, Human
ccccagcauuccagccccu

SEQ ID NO: 3524498 - RNA, 20 nt, Human
ccccagcauucucaggcacc

SEQ ID NO: 3524499 - RNA, 22 nt, Human
ccccagcauucucaggcaccag

SEQ ID NO: 3524500 - RNA, 14 nt, Human
ccccagccacuccc

SEQ ID NO: 3524501 - RNA, 21 nt, Human
ccccagccacuccccagccag

SEQ ID NO: 3524502 - RNA, 18 nt, Human
ccccagccagccuggcug

SEQ ID NO: 3524503 - RNA, 16 nt, Human
ccccagccagggcuca

SEQ ID NO: 3524504 - RNA, 22 nt, Human
ccccagcccaaaggggacaggc

SEQ ID NO: 3524505 - RNA, 15 nt, Human
ccccagcccaagucc

SEQ ID NO: 3524506 - RNA, 11 nt, Human
ccccagcccac

SEQ ID NO: 3524507 - RNA, 12 nt, Human
ccccagcccacc

SEQ ID NO: 3524508 - RNA, 16 nt, Human
ccccagcccacccucc

SEQ ID NO: 3524509 - RNA, 20 nt, Human
ccccagcccacccuccuguc

SEQ ID NO: 3524510 - RNA, 18 nt, Human
ccccagcccacuggauca

SEQ ID NO: 3524511 - RNA, 15 nt, Human
ccccagcccagagac

SEQ ID NO: 3524512 - RNA, 12 nt, Human
ccccagcccagc

SEQ ID NO: 3524513 - RNA, 21 nt, Human
ccccagcccaggguuccccca

SEQ ID NO: 3524514 - RNA, 10 nt, Human
ccccagcccc

SEQ ID NO: 3524515 - RNA, 14 nt, Human
ccccagccccaucc

SEQ ID NO: 3524516 - RNA, 15 nt, Human
ccccagccccauccu

SEQ ID NO: 3524517 - RNA, 18 nt, Human
ccccagccccgacuccag

SEQ ID NO: 3524518 - RNA, 23 nt, Human
ccccagccccgacuccagccagc

SEQ ID NO: 3524519 - RNA, 18 nt, Human
ccccagccccucccccau

SEQ ID NO: 3524520 - RNA, 19 nt, Human
ccccagcccuggcucugca

SEQ ID NO: 3524521 - RNA, 19 nt, Human
ccccagccuaagaugaaga

SEQ ID NO: 3524522 - RNA, 16 nt, Human
ccccagccucucuucc

SEQ ID NO: 3524523 - RNA, 15 nt, Human
ccccagccucuggca

SEQ ID NO: 3524524 - RNA, 10 nt, Human
ccccagccug

SEQ ID NO: 3524525 - RNA, 11 nt, Human
ccccagccugc

SEQ ID NO: 3524526 - RNA, 12 nt, Human
ccccagccugcg

SEQ ID NO: 3524527 - RNA, 12 nt, Human
ccccagccugcu

SEQ ID NO: 3524528 - RNA, 12 nt, Human
ccccagccuggc

SEQ ID NO: 3524529 - RNA, 23 nt, Human
ccccagccuggccacgcagccag

SEQ ID NO: 3524530 - RNA, 18 nt, Human
ccccagccuggcccagcu

SEQ ID NO: 3524531 - RNA, 19 nt, Human
ccccagccuggcccagcuc

SEQ ID NO: 3524532 - RNA, 21 nt, Human
ccccagccuggcccagcuccc

SEQ ID NO: 3524533 - RNA, 15 nt, Human
ccccagccugggccc

SEQ ID NO: 3524534 - RNA, 15 nt, Human
ccccagccugggccu

SEQ ID NO: 3524535 - RNA, 16 nt, Human
ccccagccugggccua

SEQ ID NO: 3524536 - RNA, 12 nt, Human
ccccagccuucu

SEQ ID NO: 3524537 - RNA, 19 nt, Human
ccccagcuaagaaccugga

SEQ ID NO: 3524538 - RNA, 14 nt, Human
ccccagcucagggg

SEQ ID NO: 3524539 - RNA, 14 nt, Human
ccccagcucccagg

SEQ ID NO: 3524540 - RNA, 13 nt, Human
ccccagcuccggc

SEQ ID NO: 3524541 - RNA, 16 nt, Human
ccccagcucugcuugc

SEQ ID NO: 3524542 - RNA, 11 nt, Human
ccccagcuggg

SEQ ID NO: 3524543 - RNA, 23 nt, Human
ccccagcuggggccaggcugggu

SEQ ID NO: 3524544 - RNA, 14 nt, Human
ccccagcugugagc

SEQ ID NO: 3524545 - RNA, 16 nt, Human
ccccagcugugagccu

SEQ ID NO: 3524546 - RNA, 19 nt, Human
ccccagcugugagccuugg

SEQ ID NO: 3524547 - RNA, 14 nt, Human
ccccagcuuugccc

SEQ ID NO: 3524548 - RNA, 24 nt, Human
ccccagcuuugcccaacaccagcc

SEQ ID NO: 3524549 - RNA, 23 nt, Human
ccccaggaagccgugcccugccc

SEQ ID NO: 3524550 - RNA, 14 nt, Human
ccccaggacaggcu

SEQ ID NO: 3524551 - RNA, 15 nt, Human
ccccaggacaggcug

SEQ ID NO: 3524552 - RNA, 14 nt, Human
ccccaggaccagaa

SEQ ID NO: 3524553 - RNA, 17 nt, Human
ccccaggaccuggcugc

SEQ ID NO: 3524554 - RNA, 14 nt, Human
ccccaggacugggc

SEQ ID NO: 3524555 - RNA, 13 nt, Human
cugaaaugucagu

SEQ ID NO: 3524556 - RNA, 20 nt, Human
cugaaaugucaguucugaua

SEQ ID NO: 3524557 - RNA, 11 nt, Human
cugaaaugugu

SEQ ID NO: 3524558 - RNA, 18 nt, Human
cugaaaugugugugaugu

SEQ ID NO: 3524559 - RNA, 22 nt, Human
cugaaaugugugugaugugaca

SEQ ID NO: 3524560 - RNA, 14 nt, Human
cugaaauuccaaag

SEQ ID NO: 3524561 - RNA, 15 nt, Human
cugaaauuccaaagu

SEQ ID NO: 3524562 - RNA, 16 nt, Human
cugaaauuccaaaguc

SEQ ID NO: 3524563 - RNA, 20 nt, Human
cugaaauuccaaagucucua

SEQ ID NO: 3524564 - RNA, 13 nt, Human
cugaaauuucaga

SEQ ID NO: 3524565 - RNA, 13 nt, Human
cugaaauuuccug

SEQ ID NO: 3524566 - RNA, 16 nt, Human
cugaaauuuccuggga

SEQ ID NO: 3524567 - RNA, 13 nt, Human
cugaaauuuuaua

SEQ ID NO: 3524568 - RNA, 22 nt, Human
cugaaauuuuauaugcuuacug

SEQ ID NO: 3524569 - RNA, 11 nt, Human
cugaacaaaaa

SEQ ID NO: 3524570 - RNA, 16 nt, Human
cugaacaauucucucu

SEQ ID NO: 3524571 - RNA, 13 nt, Human
cugaacacaggca

SEQ ID NO: 3524572 - RNA, 15 nt, Human
cugaacacaggcagc

SEQ ID NO: 3524573 - RNA, 22 nt, Human
cugaacacaggcagcuuucuag

SEQ ID NO: 3524574 - RNA, 20 nt, Human
cugaacaccauugaaggcuu

SEQ ID NO: 3524575 - RNA, 14 nt, Human
cugaacauuggaga

SEQ ID NO: 3524576 - RNA, 14 nt, Human
cugaaccacuugua

SEQ ID NO: 3524577 - RNA, 22 nt, Human
cugaaccacuuguagauuugau

SEQ ID NO: 3524578 - RNA, 16 nt, Human
cugaaccaucccugau

SEQ ID NO: 3524579 - RNA, 15 nt, Human
cugaaccccagggcu

SEQ ID NO: 3524580 - RNA, 18 nt, Human
cugaacccugugcuggug

SEQ ID NO: 3524581 - RNA, 15 nt, Human
cugaaccgcacagcu

SEQ ID NO: 3524582 - RNA, 21 nt, Human
cugaaccgcacagcucaggag

SEQ ID NO: 3524583 - RNA, 23 nt, Human
cugaaccgcacagcucaggaggc

SEQ ID NO: 3524584 - RNA, 17 nt, Human
cugaaccggcuuuacca

SEQ ID NO: 3524585 - RNA, 14 nt, Human
cugaaccugaugcu

SEQ ID NO: 3524586 - RNA, 16 nt, Human
cugaaccugucuuuug

SEQ ID NO: 3524587 - RNA, 15 nt, Human
cugaacuaaagugcu

SEQ ID NO: 3524588 - RNA, 19 nt, Human
cugaacuaaagugcugcac

SEQ ID NO: 3524589 - RNA, 15 nt, Human
cugaacucaaacuga

SEQ ID NO: 3524590 - RNA, 22 nt, Human
cugaacuucaggauaauaaagu

SEQ ID NO: 3524591 - RNA, 17 nt, Human
cugaacuugcauuguga

SEQ ID NO: 3524592 - RNA, 15 nt, Human
cugaacuuggcgcug

SEQ ID NO: 3524593 - RNA, 16 nt, Human
cugaacuuggcgcugc

SEQ ID NO: 3524594 - RNA, 13 nt, Human
cugaacuuugcug

SEQ ID NO: 3524595 - RNA, 16 nt, Human
cugaacuuugggaagc

SEQ ID NO: 3524596 - RNA, 13 nt, Human
cugaagaacagua

SEQ ID NO: 3524597 - RNA, 14 nt, Human
cugaagaaccaguc

SEQ ID NO: 3524598 - RNA, 22 nt, Human
cugaagaaccaguccccccacc

SEQ ID NO: 3524599 - RNA, 20 nt, Human
cugaagaauuaagauacaaa

SEQ ID NO: 3524600 - RNA, 19 nt, Human
cugaagaauugaaaaacca

SEQ ID NO: 3524601 - RNA, 18 nt, Human
cugaagaauugaaaaguu

SEQ ID NO: 3524602 - RNA, 23 nt, Human
cugaagacaccguucauucaggc

SEQ ID NO: 3524603 - RNA, 21 nt, Human
cugaagacucauucuucugua

SEQ ID NO: 3524604 - RNA, 15 nt, Human
cugaagacugaggac

SEQ ID NO: 3524605 - RNA, 14 nt, Human
cugaagacuugccc

SEQ ID NO: 3524606 - RNA, 21 nt, Human
cugaagagaagggcagggcug

SEQ ID NO: 3524607 - RNA, 22 nt, Human
cugaagagacaguuauuuauag

SEQ ID NO: 3524608 - RNA, 12 nt, Human
cugaagagcauu

SEQ ID NO: 3524609 - RNA, 19 nt, Human
cugaagaggaacugggccu

SEQ ID NO: 3524610 - RNA, 20 nt, Human
cugaagaggcgggccagcca

SEQ ID NO: 3524611 - RNA, 21 nt, Human
cugaagaggcgggccagccag

SEQ ID NO: 3524612 - RNA, 15 nt, Human
cugaagaguccucug

SEQ ID NO: 3524613 - RNA, 16 nt, Human
cugaagaguccucuga

SEQ ID NO: 3524614 - RNA, 18 nt, Human
cugaagaguccucugaau

SEQ ID NO: 3524615 - RNA, 20 nt, Human
cugaagaguggguuucacaa

SEQ ID NO: 3524616 - RNA, 21 nt, Human
cugaagauacaugucuuucuc

SEQ ID NO: 3524617 - RNA, 17 nt, Human
cugaagauagaagaaaa

SEQ ID NO: 3524618 - RNA, 22 nt, Human
cugaagauagaagaaaaaagaa

SEQ ID NO: 3524619 - RNA, 17 nt, Human
cugaagaugaucauuug

SEQ ID NO: 3524620 - RNA, 15 nt, Human
cugaagaugcagcuc

SEQ ID NO: 3524621 - RNA, 20 nt, Human
cugaagauggcauccuguga

SEQ ID NO: 3524622 - RNA, 23 nt, Human
cugaagauggcauccugugaagu

SEQ ID NO: 3524623 - RNA, 17 nt, Human
cugaagaugggagccuu

SEQ ID NO: 3524624 - RNA, 22 nt, Human
cugaagauuguuuaucuagaug

SEQ ID NO: 3524625 - RNA, 16 nt, Human
cugaagcaacauuuua

SEQ ID NO: 3524626 - RNA, 13 nt, Human
cugaagcauguuu

SEQ ID NO: 3524627 - RNA, 18 nt, Human
cugaagcauguuucaugu

SEQ ID NO: 3524628 - RNA, 20 nt, Human
cugaagcauguuucauguuu

SEQ ID NO: 3524629 - RNA, 14 nt, Human
cugaagccagccuu

SEQ ID NO: 3524630 - RNA, 18 nt, Human
cugaagcccauuucuccg

SEQ ID NO: 3524631 - RNA, 15 nt, Human
cugaagcccucccag

SEQ ID NO: 3524632 - RNA, 12 nt, Human
cugaagccgcca

SEQ ID NO: 3524633 - RNA, 15 nt, Human
cccgaguacagucug

SEQ ID NO: 3524634 - RNA, 13 nt, Human
cccgaguagcugg

SEQ ID NO: 3524635 - RNA, 18 nt, Human
cccgaguagcugggacua

SEQ ID NO: 3524636 - RNA, 21 nt, Human
cccgagucauucguucugugg

SEQ ID NO: 3524637 - RNA, 16 nt, Human
cccgaugcugcuuucc

SEQ ID NO: 3524638 - RNA, 20 nt, Human
cccgaugcugcuuuccccug

SEQ ID NO: 3524639 - RNA, 23 nt, Human
cccgaugcugcuuuccccugugg

SEQ ID NO: 3524640 - RNA, 21 nt, Human
cccgcacacccucacucugcc

SEQ ID NO: 3524641 - RNA, 12 nt, Human
cccgcacagcag

SEQ ID NO: 3524642 - RNA, 13 nt, Human
cccgcacagcagc

SEQ ID NO: 3524643 - RNA, 13 nt, Human
cccgcacccccac

SEQ ID NO: 3524644 - RNA, 17 nt, Human
cccgcacccccacccuu

SEQ ID NO: 3524645 - RNA, 14 nt, Human
cccgcaccugucug

SEQ ID NO: 3524646 - RNA, 16 nt, Human
cccgcagacaccuugg

SEQ ID NO: 3524647 - RNA, 12 nt, Human
cccgcagaccuc

SEQ ID NO: 3524648 - RNA, 14 nt, Human
cccgcagaccuccc

SEQ ID NO: 3524649 - RNA, 19 nt, Human
cccgcagugugcacuaagg

SEQ ID NO: 3524650 - RNA, 22 nt, Human
cccgcaugcagcagcuugcugc

SEQ ID NO: 3524651 - RNA, 19 nt, Human
cccgcccacuguccugggc

SEQ ID NO: 3524652 - RNA, 20 nt, Human
cccgcccacuguccugggcg

SEQ ID NO: 3524653 - RNA, 12 nt, Human
cccgcccaggcu

SEQ ID NO: 3524654 - RNA, 14 nt, Human
cccgcccaggcugg

SEQ ID NO: 3524655 - RNA, 20 nt, Human
cccgcccaggcuuagucacu

SEQ ID NO: 3524656 - RNA, 15 nt, Human
cccgccccacauucc

SEQ ID NO: 3524657 - RNA, 14 nt, Human
cccgccccugcagc

SEQ ID NO: 3524658 - RNA, 17 nt, Human
cccgccgcccagcccac

SEQ ID NO: 3524659 - RNA, 19 nt, Human
cccgccgcuuuucuccucu

SEQ ID NO: 3524660 - RNA, 16 nt, Human
cccgccuagcugcugu

SEQ ID NO: 3524661 - RNA, 18 nt, Human
cccgccucccuccccugc

SEQ ID NO: 3524662 - RNA, 13 nt, Human
cccgccucucccg

SEQ ID NO: 3524663 - RNA, 14 nt, Human
cccgccugccaguc

SEQ ID NO: 3524664 - RNA, 17 nt, Human
cccgccuggcagaacug

SEQ ID NO: 3524665 - RNA, 14 nt, Human
cccgccuggccagg

SEQ ID NO: 3524666 - RNA, 15 nt, Human
cccgccuggccagga

SEQ ID NO: 3524667 - RNA, 21 nt, Human
cccgccuggccaggagcaggc

SEQ ID NO: 3524668 - RNA, 13 nt, Human
cccgccuguuccc

SEQ ID NO: 3524669 - RNA, 13 nt, Human
cccgccuuggccu

SEQ ID NO: 3524670 - RNA, 17 nt, Human
cccgcgauguggaacug

SEQ ID NO: 3524671 - RNA, 22 nt, Human
cccgcgauguggaacugcugcc

SEQ ID NO: 3524672 - RNA, 23 nt, Human
cccgcgauguggaacugcugcca

SEQ ID NO: 3524673 - RNA, 17 nt, Human
cccgcgcccgcgcccuc

SEQ ID NO: 3524674 - RNA, 22 nt, Human
cccgcggggcugucggcgcugc

SEQ ID NO: 3524675 - RNA, 21 nt, Human
cccgcguguccccggggccca

SEQ ID NO: 3524676 - RNA, 12 nt, Human
cccgcucagccc

SEQ ID NO: 3524677 - RNA, 13 nt, Human
cccgcucaggcug

SEQ ID NO: 3524678 - RNA, 13 nt, Human
cccgcucccagug

SEQ ID NO: 3524679 - RNA, 14 nt, Human
cccgcucccagugu

SEQ ID NO: 3524680 - RNA, 11 nt, Human
cccgcucugga

SEQ ID NO: 3524681 - RNA, 14 nt, Human
cccgcucuggacca

SEQ ID NO: 3524682 - RNA, 17 nt, Human
cccgcugaguggacugg

SEQ ID NO: 3524683 - RNA, 16 nt, Human
cccgcugcugcugcug

SEQ ID NO: 3524684 - RNA, 12 nt, Human
cccgcugcugug

SEQ ID NO: 3524685 - RNA, 22 nt, Human
cccgcuggaggaugugggcagc

SEQ ID NO: 3524686 - RNA, 22 nt, Human
cccgcuggcugggggccucacu

SEQ ID NO: 3524687 - RNA, 17 nt, Human
cccgcuugccucggcuc

SEQ ID NO: 3524688 - RNA, 20 nt, Human
cccgcuugccucggcuccug

SEQ ID NO: 3524689 - RNA, 23 nt, Human
cccgcuugccucggcuccugcug

SEQ ID NO: 3524690 - RNA, 14 nt, Human
cccgcuuggcuucu

SEQ ID NO: 3524691 - RNA, 14 nt, Human
cccgcuuguccagc

SEQ ID NO: 3524692 - RNA, 18 nt, Human
cccgcuuguccagcgccu

SEQ ID NO: 3524693 - RNA, 20 nt, Human
cccggacgcccaggacccca

SEQ ID NO: 3524694 - RNA, 21 nt, Human
cccggagcuaacacuggcccc

SEQ ID NO: 3524695 - RNA, 20 nt, Human
cccggaggaaaucugcagag

SEQ ID NO: 3524696 - RNA, 21 nt, Human
cccggaggccgaggccaugug

SEQ ID NO: 3524697 - RNA, 18 nt, Human
cccggaggggccuggcag

SEQ ID NO: 3524698 - RNA, 16 nt, Human
cccggaucagagcagg

SEQ ID NO: 3524699 - RNA, 17 nt, Human
cccggaucagagcagga

SEQ ID NO: 3524700 - RNA, 15 nt, Human
cccggaugcugcuuc

SEQ ID NO: 3524701 - RNA, 22 nt, Human
aaaucuuaaugaaugagucugu

SEQ ID NO: 3524702 - RNA, 16 nt, Human
aaaucuuauuaaaguu

SEQ ID NO: 3524703 - RNA, 12 nt, Human
aaaucuuccaau

SEQ ID NO: 3524704 - RNA, 14 nt, Human
aaaucuucuccaga

SEQ ID NO: 3524705 - RNA, 14 nt, Human
aaaucuugaucagu

SEQ ID NO: 3524706 - RNA, 16 nt, Human
aaaucuuggcaauauu

SEQ ID NO: 3524707 - RNA, 17 nt, Human
aaaucuuggcacagaaa

SEQ ID NO: 3524708 - RNA, 14 nt, Human
aaaucuugucaugu

SEQ ID NO: 3524709 - RNA, 16 nt, Human
aaaucuugucaugugu

SEQ ID NO: 3524710 - RNA, 20 nt, Human
aaaucuugucauguguauaa

SEQ ID NO: 3524711 - RNA, 18 nt, Human
aaaucuuuccauauccau

SEQ ID NO: 3524712 - RNA, 18 nt, Human
aaaucuuucuuucuuaga

SEQ ID NO: 3524713 - RNA, 20 nt, Human
aaaucuuucuuucuuagaaa

SEQ ID NO: 3524714 - RNA, 22 nt, Human
aaaucuuucuuucuuagaaauu

SEQ ID NO: 3524715 - RNA, 18 nt, Human
aaaucuuuuagucauuau

SEQ ID NO: 3524716 - RNA, 23 nt, Human
aaaucuuuuccaggaaaaagaac

SEQ ID NO: 3524717 - RNA, 15 nt, Human
aaaucuuuugaagca

SEQ ID NO: 3524718 - RNA, 18 nt, Human
aaaugaaaacauguaaua

SEQ ID NO: 3524719 - RNA, 20 nt, Human
aaaugaaagaugauuugcaa

SEQ ID NO: 3524720 - RNA, 15 nt, Human
aaaugaaagcaugug

SEQ ID NO: 3524721 - RNA, 14 nt, Human
aaaugaaagugaga

SEQ ID NO: 3524722 - RNA, 14 nt, Human
aaaugaaaugcaua

SEQ ID NO: 3524723 - RNA, 15 nt, Human
aaaugaaaugcauau

SEQ ID NO: 3524724 - RNA, 12 nt, Human
aaaugaaauugu

SEQ ID NO: 3524725 - RNA, 14 nt, Human
aaaugaaauuguaa

SEQ ID NO: 3524726 - RNA, 19 nt, Human
aaaugaaauuuaaacauua

SEQ ID NO: 3524727 - RNA, 13 nt, Human
aaaugaaauuuua

SEQ ID NO: 3524728 - RNA, 15 nt, Human
aaaugaaauuuuacc

SEQ ID NO: 3524729 - RNA, 17 nt, Human
aaaugaaauuuuaccaa

SEQ ID NO: 3524730 - RNA, 20 nt, Human
aaaugaaauuuuaccaaguu

SEQ ID NO: 3524731 - RNA, 13 nt, Human
aaaugaacacaaa

SEQ ID NO: 3524732 - RNA, 22 nt, Human
aaaugaacgauauguagcagaa

SEQ ID NO: 3524733 - RNA, 14 nt, Human
aaaugaacugaagu

SEQ ID NO: 3524734 - RNA, 13 nt, Human
aaaugaagaauuu

SEQ ID NO: 3524735 - RNA, 15 nt, Human
aaaugaagaauuuaa

SEQ ID NO: 3524736 - RNA, 17 nt, Human
aaaugaaguuuauacag

SEQ ID NO: 3524737 - RNA, 18 nt, Human
aaaugaauaauuucccaa

SEQ ID NO: 3524738 - RNA, 18 nt, Human
aaaugaauaucuauuaau

SEQ ID NO: 3524739 - RNA, 15 nt, Human
aaaugaauauuuuga

SEQ ID NO: 3524740 - RNA, 16 nt, Human
aaaugaauauuuugau

SEQ ID NO: 3524741 - RNA, 11 nt, Human
aaaugaaugag

SEQ ID NO: 3524742 - RNA, 19 nt, Human
aaaugaaugucacuucugg

SEQ ID NO: 3524743 - RNA, 21 nt, Human
aaaugaaugucacuucuggau

SEQ ID NO: 3524744 - RNA, 12 nt, Human
aaaugaaugugu

SEQ ID NO: 3524745 - RNA, 19 nt, Human
aaaugaaugugugugguuu

SEQ ID NO: 3524746 - RNA, 15 nt, Human
aaaugaauguugucu

SEQ ID NO: 3524747 - RNA, 16 nt, Human
aaaugacaaucaugug

SEQ ID NO: 3524748 - RNA, 17 nt, Human
aaaugacaaucaugugu

SEQ ID NO: 3524749 - RNA, 15 nt, Human
aaaugacaaugauga

SEQ ID NO: 3524750 - RNA, 22 nt, Human
aaaugacaccaucuuuuauucu

SEQ ID NO: 3524751 - RNA, 17 nt, Human
aaaugacaucuuuuuaa

SEQ ID NO: 3524752 - RNA, 20 nt, Human
aaaugacaucuuuuuaaagc

SEQ ID NO: 3524753 - RNA, 21 nt, Human
aaaugacaucuuuuuaaagcu

SEQ ID NO: 3524754 - RNA, 22 nt, Human
aaaugacaucuuuuuaaagcuu

SEQ ID NO: 3524755 - RNA, 16 nt, Human
aaaugacccaaagacc

SEQ ID NO: 3524756 - RNA, 20 nt, Human
aaaugaccucuguccucccu

SEQ ID NO: 3524757 - RNA, 22 nt, Human
aaaugacuaaaaaacaaagaag

SEQ ID NO: 3524758 - RNA, 17 nt, Human
aaaugacuaaaaauauu

SEQ ID NO: 3524759 - RNA, 14 nt, Human
aaaugacuuuauua

SEQ ID NO: 3524760 - RNA, 15 nt, Human
aaaugacuuuauuau

SEQ ID NO: 3524761 - RNA, 18 nt, Human
aaaugacuuuauuauuua

SEQ ID NO: 3524762 - RNA, 21 nt, Human
aaaugacuuuauuauuuauuu

SEQ ID NO: 3524763 - RNA, 14 nt, Human
aaaugagaaaucua

SEQ ID NO: 3524764 - RNA, 22 nt, Human
aaaugagaucaggcucugccuc

SEQ ID NO: 3524765 - RNA, 13 nt, Human
aaaugagccuggc

SEQ ID NO: 3524766 - RNA, 15 nt, Human
aaaugagcucugaaa

SEQ ID NO: 3524767 - RNA, 19 nt, Human
aaaugagcuugauuaaauc

SEQ ID NO: 3524768 - RNA, 13 nt, Human
aaaugaggaaacu

SEQ ID NO: 3524769 - RNA, 14 nt, Human
aaaugaggacaugu

SEQ ID NO: 3524770 - RNA, 18 nt, Human
aaaugaguaacauuugcu

SEQ ID NO: 3524771 - RNA, 22 nt, Human
aaaugaguccaaacuggaauga

SEQ ID NO: 3524772 - RNA, 15 nt, Human
aaaugaguugugaaa

SEQ ID NO: 3524773 - RNA, 19 nt, Human
aaaugaguugugaaaguuu

SEQ ID NO: 3524774 - RNA, 23 nt, Human
aaaugaguugugaaaguuuugag

SEQ ID NO: 3524775 - RNA, 19 nt, Human
aaaugauagauuugaccuc

SEQ ID NO: 3524776 - RNA, 11 nt, Human
aaaugauauua

SEQ ID NO: 3524777 - RNA, 15 nt, Human
aaaugaucaguuuuu

SEQ ID NO: 3524778 - RNA, 13 nt, Human
aaaugaucuaaac

SEQ ID NO: 3524779 - RNA, 16 nt, Human
aaaugaugugcaaaac

SEQ ID NO: 3524780 - RNA, 18 nt, Human
aaaugauguguacccaaa

SEQ ID NO: 3524781 - RNA, 17 nt, Human
aaaugauugcuuuuaaa

SEQ ID NO: 3524782 - RNA, 21 nt, Human
aaaugauuuccucuguaaucu

SEQ ID NO: 3524783 - RNA, 18 nt, Human
aaaugcaaaaaaaauuag

SEQ ID NO: 3524784 - RNA, 19 nt, Human
aaaugcaaaaacucuuuga

SEQ ID NO: 3524785 - RNA, 15 nt, Human
aaaugcaaaaaucuc

SEQ ID NO: 3524786 - RNA, 14 nt, Human
aaaugcaaauaaca

SEQ ID NO: 3524787 - RNA, 14 nt, Human
aaaugcaaauccua

SEQ ID NO: 3524788 - RNA, 14 nt, Human
aaaugcacaaacaa

SEQ ID NO: 3524789 - RNA, 18 nt, Human
aaaugcacaaugucuugg

SEQ ID NO: 3524790 - RNA, 18 nt, Human
aaaugcaccuggaauaua

SEQ ID NO: 3524791 - RNA, 22 nt, Human
aaaugcaccuggaauauauaac

SEQ ID NO: 3524792 - RNA, 21 nt, Human
aaaugcagcgaaccaauauuu

SEQ ID NO: 3524793 - RNA, 15 nt, Human
aaaugcauaaaugca

SEQ ID NO: 3524794 - RNA, 15 nt, Human
aaaugcauauuguau

SEQ ID NO: 3524795 - RNA, 17 nt, Human
aaaugcaucaauccugu

SEQ ID NO: 3524796 - RNA, 18 nt, Human
aaaugcaucaauccugug

SEQ ID NO: 3524797 - RNA, 14 nt, Human
aaaugcaucuuuga

SEQ ID NO: 3524798 - RNA, 18 nt, Human
aaaugcaucuuugaugug

SEQ ID NO: 3524799 - RNA, 20 nt, Human
aaaugcaucuuugauguguu

SEQ ID NO: 3524800 - RNA, 23 nt, Human
cucugcccuaaugcgcaggcugg

SEQ ID NO: 3524801 - RNA, 15 nt, Human
cucugcccugcccua

SEQ ID NO: 3524802 - RNA, 19 nt, Human
cucugcccugcccuagcuc

SEQ ID NO: 3524803 - RNA, 20 nt, Human
cucugcccugcccuagcucc

SEQ ID NO: 3524804 - RNA, 12 nt, Human
cucugcccuugg

SEQ ID NO: 3524805 - RNA, 20 nt, Human
cucugccgcaauacaggaac

SEQ ID NO: 3524806 - RNA, 21 nt, Human
cucugccgcaauacaggaacc

SEQ ID NO: 3524807 - RNA, 14 nt, Human
cucugccgcuaccu

SEQ ID NO: 3524808 - RNA, 18 nt, Human
cucugccggcucuuuccu

SEQ ID NO: 3524809 - RNA, 20 nt, Human
cucugccggcucuuuccuug

SEQ ID NO: 3524810 - RNA, 23 nt, Human
cucugccggcucuuuccuugcuc

SEQ ID NO: 3524811 - RNA, 17 nt, Human
cucugccgucucuggag

SEQ ID NO: 3524812 - RNA, 19 nt, Human
cucugccucaccgcuuccc

SEQ ID NO: 3524813 - RNA, 13 nt, Human
cucugccucccau

SEQ ID NO: 3524814 - RNA, 14 nt, Human
cucugccuccucuu

SEQ ID NO: 3524815 - RNA, 14 nt, Human
cucugccucugaca

SEQ ID NO: 3524816 - RNA, 16 nt, Human
cucugccucugacaca

SEQ ID NO: 3524817 - RNA, 14 nt, Human
cucugccugucccu

SEQ ID NO: 3524818 - RNA, 19 nt, Human
cucugccugucccucucag

SEQ ID NO: 3524819 - RNA, 20 nt, Human
cucugccugucccucucagg

SEQ ID NO: 3524820 - RNA, 21 nt, Human
cucugccugucccucucaggc

SEQ ID NO: 3524821 - RNA, 15 nt, Human
cucugccuuugcucu

SEQ ID NO: 3524822 - RNA, 14 nt, Human
cucugcggacccca

SEQ ID NO: 3524823 - RNA, 16 nt, Human
cucugcggaccccagc

SEQ ID NO: 3524824 - RNA, 20 nt, Human
cucugcggaccccagcugug

SEQ ID NO: 3524825 - RNA, 17 nt, Human
cucugcggagcacacug

SEQ ID NO: 3524826 - RNA, 19 nt, Human
cucugcggagcacacuggc

SEQ ID NO: 3524827 - RNA, 23 nt, Human
cucugcggagcacacuggcucac

SEQ ID NO: 3524828 - RNA, 19 nt, Human
cucugcgucgguccuggug

SEQ ID NO: 3524829 - RNA, 20 nt, Human
cucugcgucgguccuggugc

SEQ ID NO: 3524830 - RNA, 23 nt, Human
cucugcgugcagggacaaagagg

SEQ ID NO: 3524831 - RNA, 13 nt, Human
cucugcuaaauug

SEQ ID NO: 3524832 - RNA, 17 nt, Human
cucugcuaaauugaugu

SEQ ID NO: 3524833 - RNA, 22 nt, Human
cucugcucaccgcccaucaggg

SEQ ID NO: 3524834 - RNA, 22 nt, Human
cucugcuccaaccgggauggga

SEQ ID NO: 3524835 - RNA, 13 nt, Human
cucugcuccaccu

SEQ ID NO: 3524836 - RNA, 19 nt, Human
cucugcuccaccuuucagc

SEQ ID NO: 3524837 - RNA, 13 nt, Human
cucugcucccccu

SEQ ID NO: 3524838 - RNA, 13 nt, Human
cucugcuccucuc

SEQ ID NO: 3524839 - RNA, 21 nt, Human
cucugcuccucuccccagcaa

SEQ ID NO: 3524840 - RNA, 21 nt, Human
cucugcucgcccuccuuucug

SEQ ID NO: 3524841 - RNA, 15 nt, Human
cucugcucgccuuag

SEQ ID NO: 3524842 - RNA, 13 nt, Human
cucugcucugcgu

SEQ ID NO: 3524843 - RNA, 20 nt, Human
cucugcugacagacacaggc

SEQ ID NO: 3524844 - RNA, 23 nt, Human
cucugcugacagacacaggcccg

SEQ ID NO: 3524845 - RNA, 13 nt, Human
cucugcugaccug

SEQ ID NO: 3524846 - RNA, 11 nt, Human
cugaucugccc

SEQ ID NO: 3524847 - RNA, 12 nt, Human
cugaucugccca

SEQ ID NO: 3524848 - RNA, 13 nt, Human
cugaucugcccau

SEQ ID NO: 3524849 - RNA, 16 nt, Human
cugaucugcccaucgu

SEQ ID NO: 3524850 - RNA, 17 nt, Human
cugaucugcccaucgug

SEQ ID NO: 3524851 - RNA, 12 nt, Human
cugaucugcgga

SEQ ID NO: 3524852 - RNA, 20 nt, Human
cugaucugugcuuuccagcu

SEQ ID NO: 3524853 - RNA, 18 nt, Human
cugaugaaaauaaagaau

SEQ ID NO: 3524854 - RNA, 20 nt, Human
cugaugaaaauaaagaaugg

SEQ ID NO: 3524855 - RNA, 21 nt, Human
cugaugaaacucacaaaugau

SEQ ID NO: 3524856 - RNA, 21 nt, Human
cugaugaacucuuaaucaaau

SEQ ID NO: 3524857 - RNA, 20 nt, Human
cugacacugcuggagaggcc

SEQ ID NO: 3524858 - RNA, 21 nt, Human
cugacacugcuggagaggccc

SEQ ID NO: 3524859 - RNA, 14 nt, Human
cugacagaaggacu

SEQ ID NO: 3524860 - RNA, 16 nt, Human
cugacagacacaggcc

SEQ ID NO: 3524861 - RNA, 18 nt, Human
cugacagacacaggcccg

SEQ ID NO: 3524862 - RNA, 21 nt, Human
cugacagacacaggcccggcu

SEQ ID NO: 3524863 - RNA, 17 nt, Human
cugacagacagcccucc

SEQ ID NO: 3524864 - RNA, 11 nt, Human
cugacagcagc

SEQ ID NO: 3524865 - RNA, 14 nt, Human
cugacagccagaac

SEQ ID NO: 3524866 - RNA, 15 nt, Human
cugacagccgcugcu

SEQ ID NO: 3524867 - RNA, 12 nt, Human
cugacagccucc

SEQ ID NO: 3524868 - RNA, 13 nt, Human
cugacagccuccc

SEQ ID NO: 3524869 - RNA, 16 nt, Human
cugacagcugcuccua

SEQ ID NO: 3524870 - RNA, 19 nt, Human
cugacagcugucccugccc

SEQ ID NO: 3524871 - RNA, 19 nt, Human
cugacaggcaaugcuggcu

SEQ ID NO: 3524872 - RNA, 15 nt, Human
cugacaggcagccug

SEQ ID NO: 3524873 - RNA, 20 nt, Human
cugacaggcagccuggacau

SEQ ID NO: 3524874 - RNA, 17 nt, Human
cugacaucaaaaaaggc

SEQ ID NO: 3524875 - RNA, 17 nt, Human
cugacaucacagcagcc

SEQ ID NO: 3524876 - RNA, 21 nt, Human
cugacaucuuaguauuugcau

SEQ ID NO: 3524877 - RNA, 13 nt, Human
cugacaucuugaa

SEQ ID NO: 3524878 - RNA, 22 nt, Human
cugacaucuugaauccuuccau

SEQ ID NO: 3524879 - RNA, 15 nt, Human
cugacaugauuccuu

SEQ ID NO: 3524880 - RNA, 15 nt, Human
cugacaugcccuccc

SEQ ID NO: 3524881 - RNA, 17 nt, Human
cugacaugcccucccuu

SEQ ID NO: 3524882 - RNA, 19 nt, Human
cugacaugcccucccuucu

SEQ ID NO: 3524883 - RNA, 14 nt, Human
cugacauuaacagu

SEQ ID NO: 3524884 - RNA, 15 nt, Human
cugacauuaacaguu

SEQ ID NO: 3524885 - RNA, 20 nt, Human
cugacauuaacaguuuucca

SEQ ID NO: 3524886 - RNA, 23 nt, Human
cugacauuaacaguuuuccauga

SEQ ID NO: 3524887 - RNA, 19 nt, Human
cugacauucucaggaagcc

SEQ ID NO: 3524888 - RNA, 21 nt, Human
cugacauugccaaaaaggaua

SEQ ID NO: 3524889 - RNA, 20 nt, Human
cugacauuguggcacauucu

SEQ ID NO: 3524890 - RNA, 18 nt, Human
cugacauuucuucuagug

SEQ ID NO: 3524891 - RNA, 12 nt, Human
cugaccaacagg

SEQ ID NO: 3524892 - RNA, 13 nt, Human
cugaccaacaggc

SEQ ID NO: 3524893 - RNA, 15 nt, Human
cugaccaacaggcug

SEQ ID NO: 3524894 - RNA, 18 nt, Human
cugaccaacaggcuguuc

SEQ ID NO: 3524895 - RNA, 18 nt, Human
cugaccaauauuguacag

SEQ ID NO: 3524896 - RNA, 14 nt, Human
cugaccaauugugc

SEQ ID NO: 3524897 - RNA, 21 nt, Human
cugaccaauugugcugccauu

SEQ ID NO: 3524898 - RNA, 22 nt, Human
cugaccaauugugcugccauuu

SEQ ID NO: 3524899 - RNA, 14 nt, Human
cugaccacagcaca

SEQ ID NO: 3524900 - RNA, 17 nt, Human
cugaccacccuccccuc

SEQ ID NO: 3524901 - RNA, 23 nt, Human
cugaccacggacguuuccaucag

SEQ ID NO: 3524902 - RNA, 14 nt, Human
cugaccacucagag

SEQ ID NO: 3524903 - RNA, 22 nt, Human
cugaccacucagagacaugcag

SEQ ID NO: 3524904 - RNA, 17 nt, Human
cugaccacuugaggccu

SEQ ID NO: 3524905 - RNA, 12 nt, Human
cugaccagcagc

SEQ ID NO: 3524906 - RNA, 13 nt, Human
cugaccagcuccc

SEQ ID NO: 3524907 - RNA, 14 nt, Human
cugaccagcucccc

SEQ ID NO: 3524908 - RNA, 21 nt, Human
cugaccagcucccccucccuc

SEQ ID NO: 3524909 - RNA, 16 nt, Human
cugaccauccacucua

SEQ ID NO: 3524910 - RNA, 19 nt, Human
cugaccauccacucuaccc

SEQ ID NO: 3524911 - RNA, 15 nt, Human
cugaccaugcauuuu

SEQ ID NO: 3524912 - RNA, 22 nt, Human
cugaccaugcucaucugcuggu

SEQ ID NO: 3524913 - RNA, 18 nt, Human
cugaccauuucagggguc

SEQ ID NO: 3524914 - RNA, 13 nt, Human
cugacccaggccg

SEQ ID NO: 3524915 - RNA, 15 nt, Human
cugacccaggccgca

SEQ ID NO: 3524916 - RNA, 18 nt, Human
cugacccaggccgcagcu

SEQ ID NO: 3524917 - RNA, 10 nt, Human
cugacccagu

SEQ ID NO: 3524918 - RNA, 17 nt, Human
cugacccagucccuggg

SEQ ID NO: 3524919 - RNA, 18 nt, Human
cugacccagugcccccac

SEQ ID NO: 3524920 - RNA, 21 nt, Human
cugacccagugcccccacuga

SEQ ID NO: 3524921 - RNA, 22 nt, Human
cugaccccaaacaccuuccagc

SEQ ID NO: 3524922 - RNA, 14 nt, Human
cugaccccccucag

SEQ ID NO: 3524923 - RNA, 15 nt, Human
cugaccccccucagg

SEQ ID NO: 3524924 - RNA, 23 nt, Human
cugaccccccucaggacccucgc

SEQ ID NO: 3524925 - RNA, 17 nt, Human
cugaccccucauagccc

SEQ ID NO: 3524926 - RNA, 14 nt, Human
cugaccccugcuca

SEQ ID NO: 3524927 - RNA, 18 nt, Human
cugacccuacucccuugc

SEQ ID NO: 3524928 - RNA, 18 nt, Human
cugacccucaucuuucuu

SEQ ID NO: 3524929 - RNA, 15 nt, Human
cugacccuccccaaa

SEQ ID NO: 3524930 - RNA, 17 nt, Human
cugacccuccuguugca

SEQ ID NO: 3524931 - RNA, 23 nt, Human
cugacccugcuucaaauauuucc

SEQ ID NO: 3524932 - RNA, 14 nt, Human
cugacccuggggcu

SEQ ID NO: 3524933 - RNA, 19 nt, Human
cugacccuggggcuggcuu

SEQ ID NO: 3524934 - RNA, 15 nt, Human
cugacccuguauaua

SEQ ID NO: 3524935 - RNA, 18 nt, Human
cugacccuguauauagcc

SEQ ID NO: 3524936 - RNA, 22 nt, Human
cugacccuuacagccucugacu

SEQ ID NO: 3524937 - RNA, 14 nt, Human
cugacccuuccaga

SEQ ID NO: 3524938 - RNA, 18 nt, Human
cugacccuuccagacaua

SEQ ID NO: 3524939 - RNA, 22 nt, Human
cugaccgugggcggggccuugc

SEQ ID NO: 3524940 - RNA, 17 nt, Human
cugaccuaucacuucca

SEQ ID NO: 3524941 - RNA, 17 nt, Human
cugaccucaagugaucu

SEQ ID NO: 3524942 - RNA, 16 nt, Human
cugaccuccacagcuu

SEQ ID NO: 3524943 - RNA, 16 nt, Human
cugaccuccgccaucc

SEQ ID NO: 3524944 - RNA, 18 nt, Human
cugaccucuugcugucuc

SEQ ID NO: 3524945 - RNA, 23 nt, Human
cugaccucuugcugucucugcuc

SEQ ID NO: 3524946 - RNA, 14 nt, Human
cugaccugcacugg

SEQ ID NO: 3524947 - RNA, 13 nt, Human
cugaccugcaggc

SEQ ID NO: 3524948 - RNA, 19 nt, Human
cugaccugcugaccugugc

SEQ ID NO: 3524949 - RNA, 23 nt, Human
cugaccuggcaucuaauucugau

SEQ ID NO: 3524950 - RNA, 12 nt, Human
cugaccuggccc

SEQ ID NO: 3524951 - RNA, 13 nt, Human
cugaccuggcccc

SEQ ID NO: 3524952 - RNA, 14 nt, Human
cugaccuggccccc

SEQ ID NO: 3524953 - RNA, 16 nt, Human
cugaccugguccacag

SEQ ID NO: 3524954 - RNA, 17 nt, Human
cugaccugguccacagg

SEQ ID NO: 3524955 - RNA, 18 nt, Human
cugaccugguccacaggg

SEQ ID NO: 3524956 - RNA, 20 nt, Human
cugaccugguccacagggca

SEQ ID NO: 3524957 - RNA, 23 nt, Human
cugaccugucaugccccccucaa

SEQ ID NO: 3524958 - RNA, 15 nt, Human
cugaccuuaaaugca

SEQ ID NO: 3524959 - RNA, 17 nt, Human
cugaccuuccucgcaga

SEQ ID NO: 3524960 - RNA, 22 nt, Human
cugaccuuccucgcagagaggc

SEQ ID NO: 3524961 - RNA, 13 nt, Human
cugaccuuccuuc

SEQ ID NO: 3524962 - RNA, 20 nt, Human
cugaccuuggagagacacag

SEQ ID NO: 3524963 - RNA, 21 nt, Human
cugaccuuugucaucuuucuu

SEQ ID NO: 3524964 - RNA, 17 nt, Human
cugacgaaacuggcccc

SEQ ID NO: 3524965 - RNA, 20 nt, Human
cugacgaaacuggccccgga

SEQ ID NO: 3524966 - RNA, 13 nt, Human
cugacgaggcugg

SEQ ID NO: 3524967 - RNA, 14 nt, Human
cugacgaggcuggg

SEQ ID NO: 3524968 - RNA, 16 nt, Human
cugacgaggcugggcc

SEQ ID NO: 3524969 - RNA, 21 nt, Human
cugacgaggcugggccaagcc

SEQ ID NO: 3524970 - RNA, 18 nt, Human
cugacgcaaugaaaaguc

SEQ ID NO: 3524971 - RNA, 16 nt, Human
cugacggaagccaacu

SEQ ID NO: 3524972 - RNA, 23 nt, Human
cugacggaagccaacuuggcuuu

SEQ ID NO: 3524973 - RNA, 19 nt, Human
cugacggccagggagaagc

SEQ ID NO: 3524974 - RNA, 17 nt, Human
cugacggcccugcaaug

SEQ ID NO: 3524975 - RNA, 22 nt, Human
cugacggcgcccccagugugca

SEQ ID NO: 3524976 - RNA, 21 nt, Human
cugacggggaggaaccacugc

SEQ ID NO: 3524977 - RNA, 18 nt, Human
cugacggugcagucuggg

SEQ ID NO: 3524978 - RNA, 22 nt, Human
cugacguagcugcaaaggacag

SEQ ID NO: 3524979 - RNA, 23 nt, Human
cugacgucugaagcuugacuccc

SEQ ID NO: 3524980 - RNA, 15 nt, Human
cugacguuccgggca

SEQ ID NO: 3524981 - RNA, 17 nt, Human
cugacuacuggcucuca

SEQ ID NO: 3524982 - RNA, 16 nt, Human
cugacuacugggcaaa

SEQ ID NO: 3524983 - RNA, 22 nt, Human
cugacuagaagggccaguccug

SEQ ID NO: 3524984 - RNA, 23 nt, Human
cugacuauucuugauguaaaauc

SEQ ID NO: 3524985 - RNA, 14 nt, Human
cugacucacaagaa

SEQ ID NO: 3524986 - RNA, 23 nt, Human
cugacucccaaagagcugccuaa

SEQ ID NO: 3524987 - RNA, 22 nt, Human
cugacuccuaccugcccuggaa

SEQ ID NO: 3524988 - RNA, 19 nt, Human
cugacuccucuaagccacu

SEQ ID NO: 3524989 - RNA, 21 nt, Human
cugacucuaggugcccuugga

SEQ ID NO: 3524990 - RNA, 19 nt, Human
cugccacugacugcaggga

SEQ ID NO: 3524991 - RNA, 13 nt, Human
cugccacuuccca

SEQ ID NO: 3524992 - RNA, 16 nt, Human
cugccacuucccaggu

SEQ ID NO: 3524993 - RNA, 16 nt, Human
cugccacuugaacaaa

SEQ ID NO: 3524994 - RNA, 17 nt, Human
cugccacuuugcacauu

SEQ ID NO: 3524995 - RNA, 19 nt, Human
cugccacuuugguacaugg

SEQ ID NO: 3524996 - RNA, 22 nt, Human
cugccagaagauccccucagga

SEQ ID NO: 3524997 - RNA, 15 nt, Human
cugccagacuuaaaa

SEQ ID NO: 3524998 - RNA, 17 nt, Human
cugccagaugcugaugu

SEQ ID NO: 3524999 - RNA, 18 nt, Human
cugccagaugcugauguu

SEQ ID NO: 3525000 - RNA, 22 nt, Human
cugccagaugcugauguucagu

SEQ ID NO: 3525001 - RNA, 23 nt, Human
cugccagaugcugauguucagug

SEQ ID NO: 3525002 - RNA, 16 nt, Human
cugccagcacccccac

SEQ ID NO: 3525003 - RNA, 11 nt, Human
cugccagcagc

SEQ ID NO: 3525004 - RNA, 12 nt, Human
cugccagccaca

SEQ ID NO: 3525005 - RNA, 13 nt, Human
cugccagccagca

SEQ ID NO: 3525006 - RNA, 18 nt, Human
cugccagccagcagccag

SEQ ID NO: 3525007 - RNA, 23 nt, Human
cugccagccagcagccagcucuc

SEQ ID NO: 3525008 - RNA, 13 nt, Human
cugccagccccac

SEQ ID NO: 3525009 - RNA, 18 nt, Human
cugccagccccacacagc

SEQ ID NO: 3525010 - RNA, 16 nt, Human
cugccagccccugcca

SEQ ID NO: 3525011 - RNA, 12 nt, Human
cugccagccugg

SEQ ID NO: 3525012 - RNA, 15 nt, Human
cugccagccuggcuu

SEQ ID NO: 3525013 - RNA, 16 nt, Human
cugccagccuggcuuc

SEQ ID NO: 3525014 - RNA, 20 nt, Human
cugccagccuggcuucugga

SEQ ID NO: 3525015 - RNA, 15 nt, Human
cugccagccuugagc

SEQ ID NO: 3525016 - RNA, 17 nt, Human
cugccagcucuguauca

SEQ ID NO: 3525017 - RNA, 14 nt, Human
cugccagcucuucc

SEQ ID NO: 3525018 - RNA, 19 nt, Human
cugccagcucuuccuagcu

SEQ ID NO: 3525019 - RNA, 11 nt, Human
cugccagcugc

SEQ ID NO: 3525020 - RNA, 12 nt, Human
cugccagcugca

SEQ ID NO: 3525021 - RNA, 17 nt, Human
cugccagcugcacugau

SEQ ID NO: 3525022 - RNA, 18 nt, Human
cugccaggaagccagcag

SEQ ID NO: 3525023 - RNA, 20 nt, Human
cugccaggaagccagcaggc

SEQ ID NO: 3525024 - RNA, 22 nt, Human
cugccaggaagccagcaggcuc

SEQ ID NO: 3525025 - RNA, 11 nt, Human
cugccaggagg

SEQ ID NO: 3525026 - RNA, 23 nt, Human
cugccaggaggacccagggcucu

SEQ ID NO: 3525027 - RNA, 22 nt, Human
cugccaggagggacaaaggagc

SEQ ID NO: 3525028 - RNA, 23 nt, Human
cugccaggagggacaaaggagcc

SEQ ID NO: 3525029 - RNA, 20 nt, Human
cugccaggcacaggcagggc

SEQ ID NO: 3525030 - RNA, 22 nt, Human
cugccaggcacaggcagggcag

SEQ ID NO: 3525031 - RNA, 20 nt, Human
cugccaggcagggguggggg

SEQ ID NO: 3525032 - RNA, 13 nt, Human
cugccaggcaugg

SEQ ID NO: 3525033 - RNA, 13 nt, Human
cugccaggccagc

SEQ ID NO: 3525034 - RNA, 16 nt, Human
cugccaggccagccuc

SEQ ID NO: 3525035 - RNA, 18 nt, Human
cugccaggccagccuccg

SEQ ID NO: 3525036 - RNA, 19 nt, Human
cugccaggccagccuccga

SEQ ID NO: 3525037 - RNA, 18 nt, Human
cugccaggcccccaagcc

SEQ ID NO: 3525038 - RNA, 21 nt, Human
cugccaggcccccaagccugc

SEQ ID NO: 3525039 - RNA, 19 nt, Human
cugccaggcccccaccaca

SEQ ID NO: 3525040 - RNA, 20 nt, Human
cugccaggcccccaccacac

SEQ ID NO: 3525041 - RNA, 21 nt, Human
cugccaggcccccaccacaca

SEQ ID NO: 3525042 - RNA, 22 nt, Human
cugccaggcccccaccacacau

SEQ ID NO: 3525043 - RNA, 23 nt, Human
cugccagggacagaggggguggc

SEQ ID NO: 3525044 - RNA, 17 nt, Human
cugccagggagacagag

SEQ ID NO: 3525045 - RNA, 12 nt, Human
cugccagggagc

SEQ ID NO: 3525046 - RNA, 11 nt, Human
cugccagggca

SEQ ID NO: 3525047 - RNA, 16 nt, Human
cugccagggcagugcu

SEQ ID NO: 3525048 - RNA, 11 nt, Human
cugccagggcc

SEQ ID NO: 3525049 - RNA, 16 nt, Human
cugccagggccccucu

SEQ ID NO: 3525050 - RNA, 17 nt, Human
cugccagggccccucuc

SEQ ID NO: 3525051 - RNA, 18 nt, Human
cugccagggccccucucc

SEQ ID NO: 3525052 - RNA, 23 nt, Human
cugccagggccccucuccccagg

SEQ ID NO: 3525053 - RNA, 20 nt, Human
cugccagucccccugcccca

SEQ ID NO: 3525054 - RNA, 21 nt, Human
cugccagucccccugccccag

SEQ ID NO: 3525055 - RNA, 17 nt, Human
cugccaguccuagcugc

SEQ ID NO: 3525056 - RNA, 18 nt, Human
cugccaguccuagcugca

SEQ ID NO: 3525057 - RNA, 21 nt, Human
cugccagugacagacaggcuc

SEQ ID NO: 3525058 - RNA, 16 nt, Human
cugccagugccugggu

SEQ ID NO: 3525059 - RNA, 17 nt, Human
cugccagugccugggug

SEQ ID NO: 3525060 - RNA, 13 nt, Human
cugccagugccuu

SEQ ID NO: 3525061 - RNA, 17 nt, Human
cugccaguguccugagc

SEQ ID NO: 3525062 - RNA, 13 nt, Human
cugccauaaaaca

SEQ ID NO: 3525063 - RNA, 20 nt, Human
cugccauaaaacauuaagaa

SEQ ID NO: 3525064 - RNA, 18 nt, Human
cugccauaugauuuacau

SEQ ID NO: 3525065 - RNA, 16 nt, Human
cugccauauucuguug

SEQ ID NO: 3525066 - RNA, 22 nt, Human
cugccaucauguuuacagagga

SEQ ID NO: 3525067 - RNA, 12 nt, Human
cugccauccagg

SEQ ID NO: 3525068 - RNA, 13 nt, Human
cugccauccuggc

SEQ ID NO: 3525069 - RNA, 17 nt, Human
cugccauccuggcccag

SEQ ID NO: 3525070 - RNA, 17 nt, Human
cugaugcuguucucuuc

SEQ ID NO: 3525071 - RNA, 19 nt, Human
cugaugcuucuucagagac

SEQ ID NO: 3525072 - RNA, 17 nt, Human
cugaugcuuugcuucaa

SEQ ID NO: 3525073 - RNA, 14 nt, Human
cugauggaaacaaa

SEQ ID NO: 3525074 - RNA, 20 nt, Human
cugauggaaguaaagccuca

SEQ ID NO: 3525075 - RNA, 13 nt, Human
cugauggagaagg

SEQ ID NO: 3525076 - RNA, 14 nt, Human
cugauggagaagga

SEQ ID NO: 3525077 - RNA, 15 nt, Human
cugauggagaaggaa

SEQ ID NO: 3525078 - RNA, 22 nt, Human
cugauggaucccgaagaaugga

SEQ ID NO: 3525079 - RNA, 22 nt, Human
cugauggcaggauggccuggcc

SEQ ID NO: 3525080 - RNA, 18 nt, Human
cugauggcuucuccaggg

SEQ ID NO: 3525081 - RNA, 22 nt, Human
cugaugggcaacccccagccug

SEQ ID NO: 3525082 - RNA, 24 nt, Human
cugaugggcaacccccagccugcu

SEQ ID NO: 3525083 - RNA, 16 nt, Human
cugauggucagcuccc

SEQ ID NO: 3525084 - RNA, 19 nt, Human
cugauggucagcucccuuc

SEQ ID NO: 3525085 - RNA, 17 nt, Human
cugauguaaaugaagua

SEQ ID NO: 3525086 - RNA, 18 nt, Human
cugaugucaauuucugug

SEQ ID NO: 3525087 - RNA, 20 nt, Human
cugaugucaauuucuguguu

SEQ ID NO: 3525088 - RNA, 13 nt, Human
cugauguguacau

SEQ ID NO: 3525089 - RNA, 16 nt, Human
cugauguguugccacu

SEQ ID NO: 3525090 - RNA, 15 nt, Human
cugauguuaggcugg

SEQ ID NO: 3525091 - RNA, 16 nt, Human
cugauguuaggcuggg

SEQ ID NO: 3525092 - RNA, 23 nt, Human
cugauguuaggcugggcccagag

SEQ ID NO: 3525093 - RNA, 14 nt, Human
cugauguucagugu

SEQ ID NO: 3525094 - RNA, 19 nt, Human
cugauguucaguguaauuu

SEQ ID NO: 3525095 - RNA, 21 nt, Human
cugauguucaguguaauuucu

SEQ ID NO: 3525096 - RNA, 16 nt, Human
cugauguucccuccgg

SEQ ID NO: 3525097 - RNA, 13 nt, Human
cugauguuugugc

SEQ ID NO: 3525098 - RNA, 15 nt, Human
cugauuaaaugacac

SEQ ID NO: 3525099 - RNA, 16 nt, Human
cugauuacacaaaaca

SEQ ID NO: 3525100 - RNA, 13 nt, Human
cugauuacuguca

SEQ ID NO: 3525101 - RNA, 23 nt, Human
cugauuagaaaugaccaauauua

SEQ ID NO: 3525102 - RNA, 18 nt, Human
cugauuagcuuuguguuu

SEQ ID NO: 3525103 - RNA, 16 nt, Human
cugauuauaggauuuu

SEQ ID NO: 3525104 - RNA, 17 nt, Human
cugauucacaucucauu

SEQ ID NO: 3525105 - RNA, 21 nt, Human
cugauucacaucucauuuuuc

SEQ ID NO: 3525106 - RNA, 15 nt, Human
cugauucacugcaug

SEQ ID NO: 3525107 - RNA, 15 nt, Human
cugauucccaagcuc

SEQ ID NO: 3525108 - RNA, 19 nt, Human
cugauucccaagcucugcu

SEQ ID NO: 3525109 - RNA, 20 nt, Human
cugauucccaagcucugcuc

SEQ ID NO: 3525110 - RNA, 17 nt, Human
cugauucggcugucuca

SEQ ID NO: 3525111 - RNA, 14 nt, Human
cugauucucagggu

SEQ ID NO: 3525112 - RNA, 17 nt, Human
cugauucucagggucuc

SEQ ID NO: 3525113 - RNA, 20 nt, Human
cugauucucagggucucugc

SEQ ID NO: 3525114 - RNA, 14 nt, Human
cugauucuggcuuu

SEQ ID NO: 3525115 - RNA, 15 nt, Human
cugauucuggcuuua

SEQ ID NO: 3525116 - RNA, 18 nt, Human
cugauucuggcuuuaagc

SEQ ID NO: 3525117 - RNA, 23 nt, Human
cugauugaccguguuggucugua

SEQ ID NO: 3525118 - RNA, 17 nt, Human
cugauugaccugcuccg

SEQ ID NO: 3525119 - RNA, 20 nt, Human
cugauugaccugcuccgcug

SEQ ID NO: 3525120 - RNA, 20 nt, Human
cugauuggcuuguagaauug

SEQ ID NO: 3525121 - RNA, 23 nt, Human
cugauuggcuuguagaauuguua

SEQ ID NO: 3525122 - RNA, 19 nt, Human
cugauugguuucucuucuc

SEQ ID NO: 3525123 - RNA, 21 nt, Human
cugauugguuucucuucuccc

SEQ ID NO: 3525124 - RNA, 12 nt, Human
cugauuguaaac

SEQ ID NO: 3525125 - RNA, 18 nt, Human
cugauuguaacguugcug

SEQ ID NO: 3525126 - RNA, 22 nt, Human
cugauuuaaacacauuaaaggu

SEQ ID NO: 3525127 - RNA, 21 nt, Human
cugauuuaggagaagccagga

SEQ ID NO: 3525128 - RNA, 19 nt, Human
cugauuuccccuuuugcau

SEQ ID NO: 3525129 - RNA, 13 nt, Human
cugauuucuugcu

SEQ ID NO: 3525130 - RNA, 14 nt, Human
cugauuucuugcuu

SEQ ID NO: 3525131 - RNA, 20 nt, Human
cugauuugggcugaauguau

SEQ ID NO: 3525132 - RNA, 18 nt, Human
cugauuuguaacccacug

SEQ ID NO: 3525133 - RNA, 16 nt, Human
cugauuuguuccuucu

SEQ ID NO: 3525134 - RNA, 19 nt, Human
ccgccucgcccaccgcaug

SEQ ID NO: 3525135 - RNA, 21 nt, Human
ccgccucgcccaccgcaugcc

SEQ ID NO: 3525136 - RNA, 20 nt, Human
ccgccucucccgucagggcc

SEQ ID NO: 3525137 - RNA, 16 nt, Human
ccgccugaaucauucu

SEQ ID NO: 3525138 - RNA, 21 nt, Human
ccgccugcccaccugccuggc

SEQ ID NO: 3525139 - RNA, 14 nt, Human
ccgccuggccagga

SEQ ID NO: 3525140 - RNA, 16 nt, Human
ccgccuggccaggagc

SEQ ID NO: 3525141 - RNA, 17 nt, Human
ccgccuggccaggagca

SEQ ID NO: 3525142 - RNA, 23 nt, Human
ccgccuggccaggagcaggcacg

SEQ ID NO: 3525143 - RNA, 14 nt, Human
ccgccuggccuggc

SEQ ID NO: 3525144 - RNA, 23 nt, Human
ccgccugucucuuuaagggcaug

SEQ ID NO: 3525145 - RNA, 20 nt, Human
ccgccuguucccccgccgcu

SEQ ID NO: 3525146 - RNA, 16 nt, Human
ccgccuuaagcugauc

SEQ ID NO: 3525147 - RNA, 13 nt, Human
ccgccuuaccagg

SEQ ID NO: 3525148 - RNA, 23 nt, Human
ccgccuucacuccggugugccug

SEQ ID NO: 3525149 - RNA, 16 nt, Human
ccgccuugcccagccu

SEQ ID NO: 3525150 - RNA, 17 nt, Human
ccgccuugcccagccug

SEQ ID NO: 3525151 - RNA, 17 nt, Human
ccgccuuggccuguguu

SEQ ID NO: 3525152 - RNA, 15 nt, Human
ccgcgaccauguggc

SEQ ID NO: 3525153 - RNA, 22 nt, Human
ccgcgauguggaacugcugcca

SEQ ID NO: 3525154 - RNA, 15 nt, Human
ccgcgccacaggacc

SEQ ID NO: 3525155 - RNA, 16 nt, Human
ccgcgccacaggaccc

SEQ ID NO: 3525156 - RNA, 17 nt, Human
ccgcgcgcgccccgaaa

SEQ ID NO: 3525157 - RNA, 17 nt, Human
ccgcgcguccagcugcc

SEQ ID NO: 3525158 - RNA, 19 nt, Human
ccgcggcgggcccugccca

SEQ ID NO: 3525159 - RNA, 20 nt, Human
ccgcggggacauugggaagg

SEQ ID NO: 3525160 - RNA, 17 nt, Human
ccgcgucgcccucccag

SEQ ID NO: 3525161 - RNA, 13 nt, Human
ccgcgucuacccu

SEQ ID NO: 3525162 - RNA, 15 nt, Human
ccgcgucuacccugg

SEQ ID NO: 3525163 - RNA, 16 nt, Human
ccgcgucuacccuggg

SEQ ID NO: 3525164 - RNA, 14 nt, Human
ccgcgugugccugu

SEQ ID NO: 3525165 - RNA, 19 nt, Human
ccgcguuuagaccaaggaa

SEQ ID NO: 3525166 - RNA, 14 nt, Human
ccgcuaaaagaaac

SEQ ID NO: 3525167 - RNA, 21 nt, Human
ccgcuaagagggagggagggc

SEQ ID NO: 3525168 - RNA, 16 nt, Human
ccgcuacaccacucug

SEQ ID NO: 3525169 - RNA, 20 nt, Human
ccgcuaggcucgccuucccu

SEQ ID NO: 3525170 - RNA, 22 nt, Human
ccgcuaggcucgccuucccucc

SEQ ID NO: 3525171 - RNA, 17 nt, Human
ccgcucaccuagagcca

SEQ ID NO: 3525172 - RNA, 18 nt, Human
ccgcucaccuagagccag

SEQ ID NO: 3525173 - RNA, 19 nt, Human
ccgcucaccuagagccaga

SEQ ID NO: 3525174 - RNA, 15 nt, Human
ccgcucccagugucu

SEQ ID NO: 3525175 - RNA, 20 nt, Human
ccgcucccagugucuuccug

SEQ ID NO: 3525176 - RNA, 14 nt, Human
ccgcuccccagccc

SEQ ID NO: 3525177 - RNA, 15 nt, Human
ccgcuccugucugcc

SEQ ID NO: 3525178 - RNA, 18 nt, Human
ccgcucggaggccccaaa

SEQ ID NO: 3525179 - RNA, 20 nt, Human
ccgcucggaggccccaaagg

SEQ ID NO: 3525180 - RNA, 21 nt, Human
ccgcucggaggccccaaagga

SEQ ID NO: 3525181 - RNA, 23 nt, Human
ccgcucggaggccccaaaggaaa

SEQ ID NO: 3525182 - RNA, 15 nt, Human
ccgcucuccugccac

SEQ ID NO: 3525183 - RNA, 11 nt, Human
ccgcugccacc

SEQ ID NO: 3525184 - RNA, 16 nt, Human
ccgcugccacccaccu

SEQ ID NO: 3525185 - RNA, 23 nt, Human
ccgcugccacccaccucccugcc

SEQ ID NO: 3525186 - RNA, 20 nt, Human
ccgcugccacguuggagaag

SEQ ID NO: 3525187 - RNA, 19 nt, Human
ccgcugcccggcgcccucu

SEQ ID NO: 3525188 - RNA, 19 nt, Human
ccgcugccuaaguggcugc

SEQ ID NO: 3525189 - RNA, 20 nt, Human
ccgcugccuaaguggcugcu

SEQ ID NO: 3525190 - RNA, 15 nt, Human
ccgcugcuccacgcg

SEQ ID NO: 3525191 - RNA, 11 nt, Human
ccgcugcugcu

SEQ ID NO: 3525192 - RNA, 14 nt, Human
ccgcugcugcugcu

SEQ ID NO: 3525193 - RNA, 11 nt, Human
ccgcuggagga

SEQ ID NO: 3525194 - RNA, 21 nt, Human
ccgcuggaggaugugggcagc

SEQ ID NO: 3525195 - RNA, 11 nt, Human
ccgcuggaggu

SEQ ID NO: 3525196 - RNA, 19 nt, Human
ccgcuggagguggggccug

SEQ ID NO: 3525197 - RNA, 11 nt, Human
ccgcuggggcc

SEQ ID NO: 3525198 - RNA, 18 nt, Human
ccgcuguaagcuccuuug

SEQ ID NO: 3525199 - RNA, 20 nt, Human
ccgcuguaagcuccuuugug

SEQ ID NO: 3525200 - RNA, 15 nt, Human
ccgcugugagccccu

SEQ ID NO: 3525201 - RNA, 16 nt, Human
ccgcuguucacccaca

SEQ ID NO: 3525202 - RNA, 19 nt, Human
ccgcuugaaaagcuagugu

SEQ ID NO: 3525203 - RNA, 15 nt, Human
ccgcuuggagcagag

SEQ ID NO: 3525204 - RNA, 13 nt, Human
ccgcuuuggccug

SEQ ID NO: 3525205 - RNA, 19 nt, Human
ccgcuuuuguucucgcaaa

SEQ ID NO: 3525206 - RNA, 16 nt, Human
ccggaaugccacccac

SEQ ID NO: 3525207 - RNA, 20 nt, Human
ccggaaugccacccacaucu

SEQ ID NO: 3525208 - RNA, 16 nt, Human
ccggacacuccuagag

SEQ ID NO: 3525209 - RNA, 14 nt, Human
ccggaccagccugg

SEQ ID NO: 3525210 - RNA, 20 nt, Human
ccggacucaagccccggacu

SEQ ID NO: 3525211 - RNA, 17 nt, Human
ccggacuggugcccucc

SEQ ID NO: 3525212 - RNA, 15 nt, Human
ccggacuuuucugca

SEQ ID NO: 3525213 - RNA, 20 nt, Human
ccggagaggaagagacacuc

SEQ ID NO: 3525214 - RNA, 16 nt, Human
ccggagagugggggug

SEQ ID NO: 3525215 - RNA, 18 nt, Human
ccggagauguagcaaaac

SEQ ID NO: 3525216 - RNA, 20 nt, Human
ccggagauuggacggccuga

SEQ ID NO: 3525217 - RNA, 19 nt, Human
ccggagcaaacucugcugu

SEQ ID NO: 3525218 - RNA, 14 nt, Human
ccggagccuccagc

SEQ ID NO: 3525219 - RNA, 20 nt, Human
ccggagcuaacacuggcccc

SEQ ID NO: 3525220 - RNA, 18 nt, Human
ccggagcugccccucucu

SEQ ID NO: 3525221 - RNA, 23 nt, Human
ccggagcugccccucucugggcc

SEQ ID NO: 3525222 - RNA, 15 nt, Human
ccggagcuuucaaag

SEQ ID NO: 3525223 - RNA, 14 nt, Human
ccggaggaaaucug

SEQ ID NO: 3525224 - RNA, 15 nt, Human
ccggagugagaagcu

SEQ ID NO: 3525225 - RNA, 17 nt, Human
ccggaucagagcaggac

SEQ ID NO: 3525226 - RNA, 20 nt, Human
ccggaucagagcaggaccuc

SEQ ID NO: 3525227 - RNA, 21 nt, Human
ccggaucagagcaggaccucc

SEQ ID NO: 3525228 - RNA, 15 nt, Human
ccggauccugggugg

SEQ ID NO: 3525229 - RNA, 20 nt, Human
ccggcaauaaaagcccagga

SEQ ID NO: 3525230 - RNA, 13 nt, Human
ccggcagaaggga

SEQ ID NO: 3525231 - RNA, 19 nt, Human
ccggcagccccagccugcu

SEQ ID NO: 3525232 - RNA, 21 nt, Human
ccggcagccccagccugcuag

SEQ ID NO: 3525233 - RNA, 19 nt, Human
ccggcagcuucugcccccu

SEQ ID NO: 3525234 - RNA, 22 nt, Human
ccggcagcuucugcccccugca

SEQ ID NO: 3525235 - RNA, 17 nt, Human
cugcacagggcagcugg

SEQ ID NO: 3525236 - RNA, 21 nt, Human
cugcacagggcagcugggccc

SEQ ID NO: 3525237 - RNA, 14 nt, Human
cugcacagugacuu

SEQ ID NO: 3525238 - RNA, 19 nt, Human
cugcacagugacuucugag

SEQ ID NO: 3525239 - RNA, 15 nt, Human
cugcacaguugaagg

SEQ ID NO: 3525240 - RNA, 13 nt, Human
cugcacaugaaga

SEQ ID NO: 3525241 - RNA, 14 nt, Human
cugcacaugaagaa

SEQ ID NO: 3525242 - RNA, 23 nt, Human
cugcacaugaaucccacccacau

SEQ ID NO: 3525243 - RNA, 17 nt, Human
cugcacaugauuucaca

SEQ ID NO: 3525244 - RNA, 18 nt, Human
cugcacaugauuucacaa

SEQ ID NO: 3525245 - RNA, 14 nt, Human
cugcacaugucuug

SEQ ID NO: 3525246 - RNA, 16 nt, Human
cugcacaugucuugua

SEQ ID NO: 3525247 - RNA, 16 nt, Human
cugcaccaacccagcc

SEQ ID NO: 3525248 - RNA, 22 nt, Human
cugcaccagguagaacgccagg

SEQ ID NO: 3525249 - RNA, 17 nt, Human
cugcaccaguugcugcu

SEQ ID NO: 3525250 - RNA, 19 nt, Human
cugcaccaugcugcugggg

SEQ ID NO: 3525251 - RNA, 21 nt, Human
cugcaccaugcugcuggggaa

SEQ ID NO: 3525252 - RNA, 14 nt, Human
cugcaccauugcug

SEQ ID NO: 3525253 - RNA, 16 nt, Human
cugcaccauugcugcu

SEQ ID NO: 3525254 - RNA, 13 nt, Human
cugcacccaggag

SEQ ID NO: 3525255 - RNA, 12 nt, Human
cugcacccaggg

SEQ ID NO: 3525256 - RNA, 13 nt, Human
cugcacccagggg

SEQ ID NO: 3525257 - RNA, 13 nt, Human
cugcacccccucc

SEQ ID NO: 3525258 - RNA, 14 nt, Human
cugcacccccuccu

SEQ ID NO: 3525259 - RNA, 15 nt, Human
cugcaccccuuccug

SEQ ID NO: 3525260 - RNA, 20 nt, Human
cugcaccccuuccugggcac

SEQ ID NO: 3525261 - RNA, 21 nt, Human
cugcaccccuuccugggcaca

SEQ ID NO: 3525262 - RNA, 13 nt, Human
cugcacccucagg

SEQ ID NO: 3525263 - RNA, 16 nt, Human
cugcacccucaggcag

SEQ ID NO: 3525264 - RNA, 17 nt, Human
cugcacccucaggcagg

SEQ ID NO: 3525265 - RNA, 14 nt, Human
cugcacccuccacc

SEQ ID NO: 3525266 - RNA, 20 nt, Human
cugcacccuccacccugucc

SEQ ID NO: 3525267 - RNA, 20 nt, Human
cugcacccuggauuugcaua

SEQ ID NO: 3525268 - RNA, 21 nt, Human
cugcacccuggggccuggacc

SEQ ID NO: 3525269 - RNA, 18 nt, Human
cugcacccuucuuuucuc

SEQ ID NO: 3525270 - RNA, 19 nt, Human
cugcacccuucuuuucuca

SEQ ID NO: 3525271 - RNA, 22 nt, Human
cugcacccuucuuuucucaugu

SEQ ID NO: 3525272 - RNA, 16 nt, Human
cugcaccggcuggccu

SEQ ID NO: 3525273 - RNA, 17 nt, Human
cugcaccggcuggccug

SEQ ID NO: 3525274 - RNA, 20 nt, Human
cugcaccggcuggccuggcc

SEQ ID NO: 3525275 - RNA, 20 nt, Human
cugcaccgggccacagagaa

SEQ ID NO: 3525276 - RNA, 16 nt, Human
cugcaccggggccugg

SEQ ID NO: 3525277 - RNA, 19 nt, Human
cugcaccggggccugggca

SEQ ID NO: 3525278 - RNA, 14 nt, Human
cugcaccucccccc

SEQ ID NO: 3525279 - RNA, 18 nt, Human
ccuagcccaggagagaga

SEQ ID NO: 3525280 - RNA, 15 nt, Human
ccuagccgaccucag

SEQ ID NO: 3525281 - RNA, 17 nt, Human
ccuagccgguuccuguc

SEQ ID NO: 3525282 - RNA, 23 nt, Human
ccuagccgguuccugucccugcg

SEQ ID NO: 3525283 - RNA, 23 nt, Human
ccuagccugugccucugggacug

SEQ ID NO: 3525284 - RNA, 22 nt, Human
ccuagccuuagaagucacacag

SEQ ID NO: 3525285 - RNA, 19 nt, Human
ccuagccuuauccucugau

SEQ ID NO: 3525286 - RNA, 22 nt, Human
ccuagccuuauccucugaucuc

SEQ ID NO: 3525287 - RNA, 20 nt, Human
ccuagcugaauguuuuucua

SEQ ID NO: 3525288 - RNA, 18 nt, Human
ccuagcugcuacaaagaa

SEQ ID NO: 3525289 - RNA, 15 nt, Human
cugcucugcccagag

SEQ ID NO: 3525290 - RNA, 22 nt, Human
cugcucugcccuuguucccuag

SEQ ID NO: 3525291 - RNA, 11 nt, Human
cugcucugcuc

SEQ ID NO: 3525292 - RNA, 12 nt, Human
cugcucugcucg

SEQ ID NO: 3525293 - RNA, 13 nt, Human
cugcucuggaaaa

SEQ ID NO: 3525294 - RNA, 17 nt, Human
cugcucugguuguuucu

SEQ ID NO: 3525295 - RNA, 21 nt, Human
cugcucugguuguuucuguuc

SEQ ID NO: 3525296 - RNA, 18 nt, Human
cugcucuugaacuccuga

SEQ ID NO: 3525297 - RNA, 15 nt, Human
cugcucuuggcugga

SEQ ID NO: 3525298 - RNA, 14 nt, Human
cugcucuuguuucu

SEQ ID NO: 3525299 - RNA, 18 nt, Human
cugcucuuucucugccag

SEQ ID NO: 3525300 - RNA, 21 nt, Human
cugcugaaaaccaucuggccu

SEQ ID NO: 3525301 - RNA, 18 nt, Human
cugcugaagacuugcccc

SEQ ID NO: 3525302 - RNA, 15 nt, Human
cugcugaagcugccu

SEQ ID NO: 3525303 - RNA, 16 nt, Human
cugcugaauaauaaac

SEQ ID NO: 3525304 - RNA, 17 nt, Human
cugcugaauuuucacau

SEQ ID NO: 3525305 - RNA, 15 nt, Human
cugcugacagacaca

SEQ ID NO: 3525306 - RNA, 12 nt, Human
cugcugacagug

SEQ ID NO: 3525307 - RNA, 9 nt, Human
cugcugacc

SEQ ID NO: 3525308 - RNA, 21 nt, Human
cugcugaccaauugugcugcc

SEQ ID NO: 3525309 - RNA, 15 nt, Human
cugcugaccugcuga

SEQ ID NO: 3525310 - RNA, 21 nt, Human
cugcugaccugcugaccugug

SEQ ID NO: 3525311 - RNA, 21 nt, Human
cugcugacuguuuucucuuga

SEQ ID NO: 3525312 - RNA, 12 nt, Human
cugcugagaacc

SEQ ID NO: 3525313 - RNA, 15 nt, Human
cugcugagaaccugg

SEQ ID NO: 3525314 - RNA, 15 nt, Human
cugcugagagaccca

SEQ ID NO: 3525315 - RNA, 21 nt, Human
cugcugagagacccaaggagg

SEQ ID NO: 3525316 - RNA, 22 nt, Human
cugcugagagacccaaggagga

SEQ ID NO: 3525317 - RNA, 18 nt, Human
cugcugagauccuggacu

SEQ ID NO: 3525318 - RNA, 19 nt, Human
cugcugagauccuggacug

SEQ ID NO: 3525319 - RNA, 14 nt, Human
cugcugagccgcag

SEQ ID NO: 3525320 - RNA, 22 nt, Human
cugcugagccucacagcaguga

SEQ ID NO: 3525321 - RNA, 14 nt, Human
cugcugagcucuga

SEQ ID NO: 3525322 - RNA, 17 nt, Human
cugcugagcucugagag

SEQ ID NO: 3525323 - RNA, 18 nt, Human
cugcugagcucugagagg

SEQ ID NO: 3525324 - RNA, 19 nt, Human
cugcugagcucugagaggc

SEQ ID NO: 3525325 - RNA, 18 nt, Human
cugcugagggaccagcca

SEQ ID NO: 3525326 - RNA, 11 nt, Human
cugcugagggu

SEQ ID NO: 3525327 - RNA, 12 nt, Human
cugcugaggguc

SEQ ID NO: 3525328 - RNA, 22 nt, Human
cugcugagucccaggcugagcc

SEQ ID NO: 3525329 - RNA, 22 nt, Human
cugcugaguccgaccuggccug

SEQ ID NO: 3525330 - RNA, 22 nt, Human
cugcugagucuguucugguaau

SEQ ID NO: 3525331 - RNA, 17 nt, Human
cugcugauauuuucucu

SEQ ID NO: 3525332 - RNA, 18 nt, Human
cugcugauauuuucucua

SEQ ID NO: 3525333 - RNA, 16 nt, Human
cugcugaucgccuucc

SEQ ID NO: 3525334 - RNA, 22 nt, Human
cugcugaugacccccccagcuu

SEQ ID NO: 3525335 - RNA, 18 nt, Human
cugcugauguggcaacug

SEQ ID NO: 3525336 - RNA, 21 nt, Human
cugcugcaaggccuuucugug

SEQ ID NO: 3525337 - RNA, 23 nt, Human
cugcugcaaggccuuucugugug

SEQ ID NO: 3525338 - RNA, 15 nt, Human
cugcugcaccaaccc

SEQ ID NO: 3525339 - RNA, 17 nt, Human
cugcugcaccaacccag

SEQ ID NO: 3525340 - RNA, 20 nt, Human
cugcugcaccaacccagccg

SEQ ID NO: 3525341 - RNA, 14 nt, Human
cugcugcagagcag

SEQ ID NO: 3525342 - RNA, 15 nt, Human
cugcugcagagcagu

SEQ ID NO: 3525343 - RNA, 17 nt, Human
cugcugcagaggggcag

SEQ ID NO: 3525344 - RNA, 21 nt, Human
cugcugcagaggggcaggccc

SEQ ID NO: 3525345 - RNA, 16 nt, Human
cugcugcaggggcucu

SEQ ID NO: 3525346 - RNA, 19 nt, Human
cugcugcaggggcucugga

SEQ ID NO: 3525347 - RNA, 21 nt, Human
cugcugcaggggcucuggaga

SEQ ID NO: 3525348 - RNA, 10 nt, Human
cugcugcagu

SEQ ID NO: 3525349 - RNA, 15 nt, Human
cugcugcaguugcca

SEQ ID NO: 3525350 - RNA, 17 nt, Human
cugcugcaugcccucuc

SEQ ID NO: 3525351 - RNA, 12 nt, Human
cugcugccacug

SEQ ID NO: 3525352 - RNA, 14 nt, Human
cugcugccacugag

SEQ ID NO: 3525353 - RNA, 15 nt, Human
cugcugccacugagg

SEQ ID NO: 3525354 - RNA, 11 nt, Human
cugcugccagu

SEQ ID NO: 3525355 - RNA, 22 nt, Human
cugcugcccagccuccaagcuc

SEQ ID NO: 3525356 - RNA, 17 nt, Human
cugcugcccauguuuca

SEQ ID NO: 3525357 - RNA, 15 nt, Human
cugcugcccccaccc

SEQ ID NO: 3525358 - RNA, 21 nt, Human
cugcugcccccaccccgggga

SEQ ID NO: 3525359 - RNA, 16 nt, Human
cugcugccccugcaca

SEQ ID NO: 3525360 - RNA, 23 nt, Human
cugcugccccugcacagcaggcu

SEQ ID NO: 3525361 - RNA, 23 nt, Human
cugcugcccuaguuuucuuuccu

SEQ ID NO: 3525362 - RNA, 14 nt, Human
cugcugcccuccau

SEQ ID NO: 3525363 - RNA, 23 nt, Human
cugcugcccuuaggccacauggg

SEQ ID NO: 3525364 - RNA, 16 nt, Human
cugcugccucaggaau

SEQ ID NO: 3525365 - RNA, 19 nt, Human
cugcugccuccccaacccu

SEQ ID NO: 3525366 - RNA, 13 nt, Human
cugcugccucuuu

SEQ ID NO: 3525367 - RNA, 20 nt, Human
cugcugccucuuucccuagg

SEQ ID NO: 3525368 - RNA, 22 nt, Human
cugcugccugcccgcacagcag

SEQ ID NO: 3525369 - RNA, 13 nt, Human
cugcugccugccu

SEQ ID NO: 3525370 - RNA, 23 nt, Human
cugcugccugcuuuuuauggccu

SEQ ID NO: 3525371 - RNA, 16 nt, Human
cugcugcgcccugggc

SEQ ID NO: 3525372 - RNA, 17 nt, Human
cugcugcgcccugggcu

SEQ ID NO: 3525373 - RNA, 17 nt, Human
cugcugcgcccuuaccu

SEQ ID NO: 3525374 - RNA, 20 nt, Human
cugcugcgcccuuaccuucc

SEQ ID NO: 3525375 - RNA, 14 nt, Human
cugcugcucccuca

SEQ ID NO: 3525376 - RNA, 16 nt, Human
cugcugcucccucaga

SEQ ID NO: 3525377 - RNA, 23 nt, Human
cugcugcucccucagacuggggc

SEQ ID NO: 3525378 - RNA, 15 nt, Human
cugcugcucuuggcu

SEQ ID NO: 3525379 - RNA, 21 nt, Human
cugcugcucuuggcuggaccc

SEQ ID NO: 3525380 - RNA, 15 nt, Human
cugcugcugcgcccu

SEQ ID NO: 3525381 - RNA, 12 nt, Human
cugcugcuggcu

SEQ ID NO: 3525382 - RNA, 17 nt, Human
cugcugcugggcucagu

SEQ ID NO: 3525383 - RNA, 17 nt, Human
cugcugcugucugggug

SEQ ID NO: 3525384 - RNA, 14 nt, Human
cugcugcuguggcg

SEQ ID NO: 3525385 - RNA, 16 nt, Human
cugcugcuucuccaaa

SEQ ID NO: 3525386 - RNA, 20 nt, Human
cugcugcuuuuugagguggc

SEQ ID NO: 3525387 - RNA, 14 nt, Human
cugcuggaagccca

SEQ ID NO: 3525388 - RNA, 22 nt, Human
cugcuggacaguaucacugucu

SEQ ID NO: 3525389 - RNA, 11 nt, Human
cugcuggagga

SEQ ID NO: 3525390 - RNA, 16 nt, Human
cugcuggaggccucag

SEQ ID NO: 3525391 - RNA, 21 nt, Human
cugcuggaucacagcugcuuu

SEQ ID NO: 3525392 - RNA, 16 nt, Human
cugcuggcacccaccg

SEQ ID NO: 3525393 - RNA, 15 nt, Human
cugcuggcccagcca

SEQ ID NO: 3525394 - RNA, 14 nt, Human
cugcuggccccuca

SEQ ID NO: 3525395 - RNA, 15 nt, Human
cugcuggccccucac

SEQ ID NO: 3525396 - RNA, 21 nt, Human
cugcuggccgggcacagcugu

SEQ ID NO: 3525397 - RNA, 15 nt, Human
cugcuggccucugcg

SEQ ID NO: 3525398 - RNA, 20 nt, Human
cugcuggccuggccggcaac

SEQ ID NO: 3525399 - RNA, 20 nt, Human
cugcuggcgccucugcaagg

SEQ ID NO: 3525400 - RNA, 19 nt, Human
cugcuggcucuucugccca

SEQ ID NO: 3525401 - RNA, 12 nt, Human
cugcuggcugcc

SEQ ID NO: 3525402 - RNA, 16 nt, Human
cugcuggcuugcagug

SEQ ID NO: 3525403 - RNA, 17 nt, Human
cugcugggacuggccag

SEQ ID NO: 3525404 - RNA, 19 nt, Human
cugcugggauggugggcuu

SEQ ID NO: 3525405 - RNA, 16 nt, Human
cugcugggcucuccac

SEQ ID NO: 3525406 - RNA, 14 nt, Human
cugcuggggaagac

SEQ ID NO: 3525407 - RNA, 20 nt, Human
cugcuggggaagacaguggc

SEQ ID NO: 3525408 - RNA, 13 nt, Human
cugcuggggaucc

SEQ ID NO: 3525409 - RNA, 14 nt, Human
cugcuggggauccc

SEQ ID NO: 3525410 - RNA, 17 nt, Human
cugcuggggauccccgc

SEQ ID NO: 3525411 - RNA, 23 nt, Human
cugcuggggccucagacgagacc

SEQ ID NO: 3525412 - RNA, 15 nt, Human
cugcuggggccuggg

SEQ ID NO: 3525413 - RNA, 14 nt, Human
cugcuggguggccc

SEQ ID NO: 3525414 - RNA, 16 nt, Human
cugcuggguggcccau

SEQ ID NO: 3525415 - RNA, 15 nt, Human
cugcuggguguggcg

SEQ ID NO: 3525416 - RNA, 18 nt, Human
cugcuggucacagccucc

SEQ ID NO: 3525417 - RNA, 19 nt, Human
cugcuggucacuucuucug

SEQ ID NO: 3525418 - RNA, 21 nt, Human
cugcugguuaacuuguuuggc

SEQ ID NO: 3525419 - RNA, 15 nt, Human
cugcuguaagaaauc

SEQ ID NO: 3525420 - RNA, 14 nt, Human
cugcuguacugaag

SEQ ID NO: 3525421 - RNA, 15 nt, Human
cugcuguacugaagu

SEQ ID NO: 3525422 - RNA, 18 nt, Human
cugcugucaccucuccca

SEQ ID NO: 3525423 - RNA, 21 nt, Human
cugcugucaccucucccacgg

SEQ ID NO: 3525424 - RNA, 20 nt, Human
cuggaacacuagacaagcca

SEQ ID NO: 3525425 - RNA, 21 nt, Human
cuggaacagauucacacuguc

SEQ ID NO: 3525426 - RNA, 18 nt, Human
cuggaacauccuuugcag

SEQ ID NO: 3525427 - RNA, 23 nt, Human
cuggaacauccuuugcagggcag

SEQ ID NO: 3525428 - RNA, 17 nt, Human
cuggaaccacauugaag

SEQ ID NO: 3525429 - RNA, 20 nt, Human
cuggaaccacauugaagaau

SEQ ID NO: 3525430 - RNA, 16 nt, Human
cuggaaccaucagaaa

SEQ ID NO: 3525431 - RNA, 18 nt, Human
cuggaacccagacucaga

SEQ ID NO: 3525432 - RNA, 19 nt, Human
cuggaacccagacucagac

SEQ ID NO: 3525433 - RNA, 20 nt, Human
cuggaaccucagccuggcca

SEQ ID NO: 3525434 - RNA, 21 nt, Human
cuggaaccugcaaaaaauacu

SEQ ID NO: 3525435 - RNA, 15 nt, Human
cuggaaccuugcugu

SEQ ID NO: 3525436 - RNA, 19 nt, Human
cuggaacuccuaaaccuuu

SEQ ID NO: 3525437 - RNA, 22 nt, Human
cuggaacucuaucugggccugg

SEQ ID NO: 3525438 - RNA, 14 nt, Human
cuggaacuugggga

SEQ ID NO: 3525439 - RNA, 18 nt, Human
cuggaagaaaaaaaccac

SEQ ID NO: 3525440 - RNA, 18 nt, Human
cuggaagaacaggccucu

SEQ ID NO: 3525441 - RNA, 21 nt, Human
cuggaagacagagaccuccug

SEQ ID NO: 3525442 - RNA, 22 nt, Human
cuggaagagcccagucuguuga

SEQ ID NO: 3525443 - RNA, 17 nt, Human
cuggaagagcuaggcag

SEQ ID NO: 3525444 - RNA, 19 nt, Human
cuggaagauagcugugacu

SEQ ID NO: 3525445 - RNA, 14 nt, Human
cuggaagaugggga

SEQ ID NO: 3525446 - RNA, 23 nt, Human
cuggaagauggggaccagcagcc

SEQ ID NO: 3525447 - RNA, 14 nt, Human
cuggaagcacagcu

SEQ ID NO: 3525448 - RNA, 18 nt, Human
cuggaagcagugcccagg

SEQ ID NO: 3525449 - RNA, 23 nt, Human
cuggaagcauguaggagaaucca

SEQ ID NO: 3525450 - RNA, 16 nt, Human
cuggaagccagcuuuc

SEQ ID NO: 3525451 - RNA, 17 nt, Human
cuggaagcccagccccu

SEQ ID NO: 3525452 - RNA, 20 nt, Human
cuggaagccccugggcccag

SEQ ID NO: 3525453 - RNA, 17 nt, Human
cuggaagcuaauuugca

SEQ ID NO: 3525454 - RNA, 13 nt, Human
ccucaaccucauc

SEQ ID NO: 3525455 - RNA, 14 nt, Human
ccucaaccucaucc

SEQ ID NO: 3525456 - RNA, 16 nt, Human
ccucaaccuccugggc

SEQ ID NO: 3525457 - RNA, 20 nt, Human
ccucaaccuccuguggaacc

SEQ ID NO: 3525458 - RNA, 12 nt, Human
ccucaaccucuu

SEQ ID NO: 3525459 - RNA, 17 nt, Human
ccucaaccucuucuggc

SEQ ID NO: 3525460 - RNA, 14 nt, Human
ccucaaccuguaaa

SEQ ID NO: 3525461 - RNA, 14 nt, Human
ccucaaccugugau

SEQ ID NO: 3525462 - RNA, 17 nt, Human
ccucaacuccucccaua

SEQ ID NO: 3525463 - RNA, 15 nt, Human
ccucaacucuccucc

SEQ ID NO: 3525464 - RNA, 19 nt, Human
ccucaacucuccuccagag

SEQ ID NO: 3525465 - RNA, 14 nt, Human
ccucaacugccuac

SEQ ID NO: 3525466 - RNA, 15 nt, Human
ccucaacugccuacu

SEQ ID NO: 3525467 - RNA, 16 nt, Human
ccucaagaucauucag

SEQ ID NO: 3525468 - RNA, 20 nt, Human
ccucaagccaauccccuccu

SEQ ID NO: 3525469 - RNA, 15 nt, Human
ccucaagcugcaucu

SEQ ID NO: 3525470 - RNA, 17 nt, Human
ccucaaggccucccaca

SEQ ID NO: 3525471 - RNA, 19 nt, Human
ccucaagggggacugucuu

SEQ ID NO: 3525472 - RNA, 14 nt, Human
ccucaagucuuucu

SEQ ID NO: 3525473 - RNA, 15 nt, Human
ccucaagucuuucuc

SEQ ID NO: 3525474 - RNA, 19 nt, Human
ccucaagucuuucucuuuc

SEQ ID NO: 3525475 - RNA, 21 nt, Human
ccucaagucuuucucuuuccc

SEQ ID NO: 3525476 - RNA, 15 nt, Human
ccucaauaagccuug

SEQ ID NO: 3525477 - RNA, 18 nt, Human
ccucaauccagcuauguu

SEQ ID NO: 3525478 - RNA, 20 nt, Human
ccucaaugugaaucagaccc

SEQ ID NO: 3525479 - RNA, 21 nt, Human
ccucaaugugaaucagacccu

SEQ ID NO: 3525480 - RNA, 16 nt, Human
ccucaaugugaccagg

SEQ ID NO: 3525481 - RNA, 14 nt, Human
ccucaauugugaaa

SEQ ID NO: 3525482 - RNA, 16 nt, Human
ccucaauuucugaaca

SEQ ID NO: 3525483 - RNA, 16 nt, Human
ccucaauuuucacugu

SEQ ID NO: 3525484 - RNA, 19 nt, Human
ccucaauuuuugucucaga

SEQ ID NO: 3525485 - RNA, 21 nt, Human
ccucaauuuuugucucagaag

SEQ ID NO: 3525486 - RNA, 17 nt, Human
ccucacacacccugagg

SEQ ID NO: 3525487 - RNA, 14 nt, Human
ccucacagccucug

SEQ ID NO: 3525488 - RNA, 19 nt, Human
ccucacagccucugacccc

SEQ ID NO: 3525489 - RNA, 20 nt, Human
ccucacagccucugaccccu

SEQ ID NO: 3525490 - RNA, 23 nt, Human
ccucacagucccacugugcaggu

SEQ ID NO: 3525491 - RNA, 17 nt, Human
ccucacaguccuuacca

SEQ ID NO: 3525492 - RNA, 22 nt, Human
ccucaccaggggcaggcacagc

SEQ ID NO: 3525493 - RNA, 23 nt, Human
ccucaccaggggcaggcacagca

SEQ ID NO: 3525494 - RNA, 12 nt, Human
ccucaccauucc

SEQ ID NO: 3525495 - RNA, 18 nt, Human
ccucaccccugcccuggg

SEQ ID NO: 3525496 - RNA, 15 nt, Human
ccucaccccugguuc

SEQ ID NO: 3525497 - RNA, 23 nt, Human
ccucaccccugguucucaucuuu

SEQ ID NO: 3525498 - RNA, 20 nt, Human
ccucaccccuguccucacug

SEQ ID NO: 3525499 - RNA, 19 nt, Human
ccucacccgaggcugccca

SEQ ID NO: 3525500 - RNA, 23 nt, Human
ccucacccggugaccucuagccc

SEQ ID NO: 3525501 - RNA, 18 nt, Human
ccucacccugagccccuu

SEQ ID NO: 3525502 - RNA, 14 nt, Human
ccucacccugccuu

SEQ ID NO: 3525503 - RNA, 14 nt, Human
ccucaccgcuuccc

SEQ ID NO: 3525504 - RNA, 12 nt, Human
ccucaccucaug

SEQ ID NO: 3525505 - RNA, 17 nt, Human
ccucaccucaugcccac

SEQ ID NO: 3525506 - RNA, 13 nt, Human
ccucaccucugga

SEQ ID NO: 3525507 - RNA, 20 nt, Human
ccucaccucuggacuggcua

SEQ ID NO: 3525508 - RNA, 14 nt, Human
ccucaccugggcac

SEQ ID NO: 3525509 - RNA, 19 nt, Human
ccucaccugggcaccuggg

SEQ ID NO: 3525510 - RNA, 15 nt, Human
ccucaccuucugagu

SEQ ID NO: 3525511 - RNA, 17 nt, Human
ccucacgcaccucccau

SEQ ID NO: 3525512 - RNA, 13 nt, Human
ccucacgcugggu

SEQ ID NO: 3525513 - RNA, 20 nt, Human
ccucacucccuucccauaag

SEQ ID NO: 3525514 - RNA, 20 nt, Human
ccucacucccuucuaccugc

SEQ ID NO: 3525515 - RNA, 22 nt, Human
ccucacucccuucuaccugcca

SEQ ID NO: 3525516 - RNA, 13 nt, Human
ccucacuccuguu

SEQ ID NO: 3525517 - RNA, 13 nt, Human
ccucacucugcca

SEQ ID NO: 3525518 - RNA, 14 nt, Human
ccucacucugccag

SEQ ID NO: 3525519 - RNA, 16 nt, Human
ccucacucugccaggg

SEQ ID NO: 3525520 - RNA, 22 nt, Human
ccucacucugccagggcagugc

SEQ ID NO: 3525521 - RNA, 20 nt, Human
ccucacucugcuaccuugcc

SEQ ID NO: 3525522 - RNA, 22 nt, Human
ccucacucugcuaccuugcccc

SEQ ID NO: 3525523 - RNA, 17 nt, Human
ccucacucuugccaacc

SEQ ID NO: 3525524 - RNA, 23 nt, Human
ccucacucuuuauagugcacaaa

SEQ ID NO: 3525525 - RNA, 20 nt, Human
ccucacugaaaacaucugga

SEQ ID NO: 3525526 - RNA, 16 nt, Human
ccucacugcccgcaca

SEQ ID NO: 3525527 - RNA, 20 nt, Human
ccucacugcccgcacacccu

SEQ ID NO: 3525528 - RNA, 21 nt, Human
ccucacugcccgcacacccuc

SEQ ID NO: 3525529 - RNA, 16 nt, Human
ccucacugcucccuga

SEQ ID NO: 3525530 - RNA, 18 nt, Human
ccucacuggccaucccuc

SEQ ID NO: 3525531 - RNA, 16 nt, Human
ccucacuggcucuccu

SEQ ID NO: 3525532 - RNA, 19 nt, Human
ccucacuggcucuccuggc

SEQ ID NO: 3525533 - RNA, 19 nt, Human
ccucacugggguccugggg

SEQ ID NO: 3525534 - RNA, 23 nt, Human
ccucacugggguccuggggccuc

SEQ ID NO: 3525535 - RNA, 13 nt, Human
ccucacugggugg

SEQ ID NO: 3525536 - RNA, 22 nt, Human
ccucacugugguaaaugccaca

SEQ ID NO: 3525537 - RNA, 21 nt, Human
ccucacuuccauacagcucua

SEQ ID NO: 3525538 - RNA, 19 nt, Human
ccucacuuggucugccagg

SEQ ID NO: 3525539 - RNA, 20 nt, Human
ccucagaaaacaaggaugaa

SEQ ID NO: 3525540 - RNA, 16 nt, Human
ccucagaaaaugagua

SEQ ID NO: 3525541 - RNA, 21 nt, Human
ccucagaaacacuggggcugg

SEQ ID NO: 3525542 - RNA, 21 nt, Human
ccucagaacaaagugagacag

SEQ ID NO: 3525543 - RNA, 23 nt, Human
ccucagacgagacccaagggcag

SEQ ID NO: 3525544 - RNA, 16 nt, Human
ccucagacugcaccca

SEQ ID NO: 3525545 - RNA, 17 nt, Human
ccucagacugcacccag

SEQ ID NO: 3525546 - RNA, 21 nt, Human
ccucagacugcacccaggagg

SEQ ID NO: 3525547 - RNA, 16 nt, Human
ccucagagccaccccu

SEQ ID NO: 3525548 - RNA, 19 nt, Human
ccucagaguccaggcccca

SEQ ID NO: 3525549 - RNA, 21 nt, Human
ccucagagugcaagccccugc

SEQ ID NO: 3525550 - RNA, 17 nt, Human
ccucagauggcagcuuu

SEQ ID NO: 3525551 - RNA, 17 nt, Human
ccucagaugucccuuga

SEQ ID NO: 3525552 - RNA, 23 nt, Human
ccucagaugucccuugaugcaca

SEQ ID NO: 3525553 - RNA, 22 nt, Human
ccucagcaaccuguaagacuga

SEQ ID NO: 3525554 - RNA, 14 nt, Human
ccucagcaagcccu

SEQ ID NO: 3525555 - RNA, 19 nt, Human
ccucagcaccccugucucu

SEQ ID NO: 3525556 - RNA, 16 nt, Human
ccucagcaccccuucc

SEQ ID NO: 3525557 - RNA, 17 nt, Human
ccucagcaccccuucca

SEQ ID NO: 3525558 - RNA, 20 nt, Human
ccucagcaccccuuccaugu

SEQ ID NO: 3525559 - RNA, 16 nt, Human
ccucagcauccuggca

SEQ ID NO: 3525560 - RNA, 17 nt, Human
ccucagcauccuggcac

SEQ ID NO: 3525561 - RNA, 11 nt, Human
ccucagccaga

SEQ ID NO: 3525562 - RNA, 16 nt, Human
ccucagccagagaagc

SEQ ID NO: 3525563 - RNA, 12 nt, Human
ccucagccagcc

SEQ ID NO: 3525564 - RNA, 21 nt, Human
ccucagccaugaggaguugcu

SEQ ID NO: 3525565 - RNA, 16 nt, Human
ccucagccauucacug

SEQ ID NO: 3525566 - RNA, 19 nt, Human
ccucagccccucuugcccc

SEQ ID NO: 3525567 - RNA, 22 nt, Human
cuggccucacccaccccugcac

SEQ ID NO: 3525568 - RNA, 13 nt, Human
cuggccucagacu

SEQ ID NO: 3525569 - RNA, 21 nt, Human
cuggccucagacucauacaga

SEQ ID NO: 3525570 - RNA, 13 nt, Human
cuggccucccaca

SEQ ID NO: 3525571 - RNA, 17 nt, Human
cuggccucccacagacu

SEQ ID NO: 3525572 - RNA, 15 nt, Human
cuggccucccacccg

SEQ ID NO: 3525573 - RNA, 23 nt, Human
cuggccucccacccgaugcugcu

SEQ ID NO: 3525574 - RNA, 14 nt, Human
cuggccucccccac

SEQ ID NO: 3525575 - RNA, 17 nt, Human
cuggccucccccacuuu

SEQ ID NO: 3525576 - RNA, 21 nt, Human
cuggccuccggcgucagccuc

SEQ ID NO: 3525577 - RNA, 12 nt, Human
cuggccucgccu

SEQ ID NO: 3525578 - RNA, 19 nt, Human
cuggccucgccuggccuga

SEQ ID NO: 3525579 - RNA, 13 nt, Human
cuggccucucacu

SEQ ID NO: 3525580 - RNA, 20 nt, Human
cuggccucucacugccuccc

SEQ ID NO: 3525581 - RNA, 16 nt, Human
cuggccucucuagcac

SEQ ID NO: 3525582 - RNA, 17 nt, Human
cuggccucucuagcaca

SEQ ID NO: 3525583 - RNA, 12 nt, Human
cuggccucugca

SEQ ID NO: 3525584 - RNA, 14 nt, Human
cuggccucugcacu

SEQ ID NO: 3525585 - RNA, 21 nt, Human
cuggccucugcacuccccugc

SEQ ID NO: 3525586 - RNA, 14 nt, Human
cuggccucugucau

SEQ ID NO: 3525587 - RNA, 15 nt, Human
cuggccucugugccu

SEQ ID NO: 3525588 - RNA, 21 nt, Human
cuggccugaaccacaggagag

SEQ ID NO: 3525589 - RNA, 23 nt, Human
cuggccugagagucagcucucug

SEQ ID NO: 3525590 - RNA, 16 nt, Human
cuggccugagcuggga

SEQ ID NO: 3525591 - RNA, 16 nt, Human
cuggccugaggagcag

SEQ ID NO: 3525592 - RNA, 20 nt, Human
cuggccugaggucucgcuga

SEQ ID NO: 3525593 - RNA, 24 nt, Human
cuggccugaggucucgcugaugcu

SEQ ID NO: 3525594 - RNA, 20 nt, Human
cuggccugcugggcucucca

SEQ ID NO: 3525595 - RNA, 22 nt, Human
cuggccuggacuguuuucucuc

SEQ ID NO: 3525596 - RNA, 12 nt, Human
cuggccuggauc

SEQ ID NO: 3525597 - RNA, 14 nt, Human
cuggccuggaucuc

SEQ ID NO: 3525598 - RNA, 13 nt, Human
cuggccuggcaca

SEQ ID NO: 3525599 - RNA, 14 nt, Human
cuggccuggcacac

SEQ ID NO: 3525600 - RNA, 18 nt, Human
cuggccuggcacacauca

SEQ ID NO: 3525601 - RNA, 16 nt, Human
cuggccuggccccuca

SEQ ID NO: 3525602 - RNA, 13 nt, Human
cuggccuggcccu

SEQ ID NO: 3525603 - RNA, 14 nt, Human
cuggccuggccugg

SEQ ID NO: 3525604 - RNA, 16 nt, Human
cuggccuggccuggcc

SEQ ID NO: 3525605 - RNA, 13 nt, Human
cuggccuggcuuc

SEQ ID NO: 3525606 - RNA, 13 nt, Human
cuggccugucugu

SEQ ID NO: 3525607 - RNA, 12 nt, Human
cuggccuguucu

SEQ ID NO: 3525608 - RNA, 16 nt, Human
cuggccuucggccucc

SEQ ID NO: 3525609 - RNA, 21 nt, Human
cuggccuucggccuccauccu

SEQ ID NO: 3525610 - RNA, 22 nt, Human
cuggccuucggccuccauccug

SEQ ID NO: 3525611 - RNA, 23 nt, Human
cuggccuucggccuccauccuga

SEQ ID NO: 3525612 - RNA, 19 nt, Human
cuggccuugaaaccaccuu

SEQ ID NO: 3525613 - RNA, 18 nt, Human
cuggccuugccacacucu

SEQ ID NO: 3525614 - RNA, 20 nt, Human
cuggccuugggauccaggcc

SEQ ID NO: 3525615 - RNA, 19 nt, Human
cuggccuuguccucagcca

SEQ ID NO: 3525616 - RNA, 21 nt, Human
cuggccuuguccucagccagu

SEQ ID NO: 3525617 - RNA, 14 nt, Human
cuggccuuucauau

SEQ ID NO: 3525618 - RNA, 14 nt, Human
cuggccuuuguaag

SEQ ID NO: 3525619 - RNA, 13 nt, Human
cuggccuuuuccu

SEQ ID NO: 3525620 - RNA, 19 nt, Human
cuggccuuuuucauuuauc

SEQ ID NO: 3525621 - RNA, 19 nt, Human
cuggcgacaguuuuccuuc

SEQ ID NO: 3525622 - RNA, 23 nt, Human
cuggcgagagucuggcccuagac

SEQ ID NO: 3525623 - RNA, 23 nt, Human
cuggcgcagaacgaaccuuggcc

SEQ ID NO: 3525624 - RNA, 16 nt, Human
cuggcgcagccaaggc

SEQ ID NO: 3525625 - RNA, 12 nt, Human
cuggcgccucug

SEQ ID NO: 3525626 - RNA, 13 nt, Human
cuggcgccucugc

SEQ ID NO: 3525627 - RNA, 12 nt, Human
cuggcggcccca

SEQ ID NO: 3525628 - RNA, 16 nt, Human
cuggcggcuacucagc

SEQ ID NO: 3525629 - RNA, 20 nt, Human
cuggcggcuacucagcagcc

SEQ ID NO: 3525630 - RNA, 19 nt, Human
cuggcggcuggggucccag

SEQ ID NO: 3525631 - RNA, 16 nt, Human
cuggcgggaugggcca

SEQ ID NO: 3525632 - RNA, 21 nt, Human
cuggcguagaaguuuuuguac

SEQ ID NO: 3525633 - RNA, 13 nt, Human
cuggcgugugggu

SEQ ID NO: 3525634 - RNA, 13 nt, Human
cuggcuaaagcuc

SEQ ID NO: 3525635 - RNA, 20 nt, Human
cuggcuagaguccucacucc

SEQ ID NO: 3525636 - RNA, 16 nt, Human
cuggcuaugcauuuga

SEQ ID NO: 3525637 - RNA, 22 nt, Human
cuggcuaugcauuugaaaauuu

SEQ ID NO: 3525638 - RNA, 17 nt, Human
cuggcucacccaguccu

SEQ ID NO: 3525639 - RNA, 21 nt, Human
cuggcucauauuccugcagcc

SEQ ID NO: 3525640 - RNA, 13 nt, Human
cuggcucaucucu

SEQ ID NO: 3525641 - RNA, 18 nt, Human
cuggcuccagcuggccgg

SEQ ID NO: 3525642 - RNA, 20 nt, Human
cuggcucccacaggcagcuu

SEQ ID NO: 3525643 - RNA, 22 nt, Human
cuggcucccacaggcccuuccu

SEQ ID NO: 3525644 - RNA, 14 nt, Human
cuggcucccaggac

SEQ ID NO: 3525645 - RNA, 15 nt, Human
cuggcucccaggaca

SEQ ID NO: 3525646 - RNA, 15 nt, Human
cuggcuccccugcag

SEQ ID NO: 3525647 - RNA, 21 nt, Human
cuggcuccccugcagcccugg

SEQ ID NO: 3525648 - RNA, 16 nt, Human
cuggcuccccuggggu

SEQ ID NO: 3525649 - RNA, 12 nt, Human
cuggcuccucaa

SEQ ID NO: 3525650 - RNA, 24 nt, Human
cuggcuccucuguggugucugccu

SEQ ID NO: 3525651 - RNA, 13 nt, Human
cuggcuccugauc

SEQ ID NO: 3525652 - RNA, 22 nt, Human
cuggcucuaauucacagugcuc

SEQ ID NO: 3525653 - RNA, 14 nt, Human
cuggcucuacacau

SEQ ID NO: 3525654 - RNA, 17 nt, Human
cuggcucucaugggguc

SEQ ID NO: 3525655 - RNA, 12 nt, Human
cuggcucuccaa

SEQ ID NO: 3525656 - RNA, 17 nt, Human
cuggcucuccaagugcc

SEQ ID NO: 3525657 - RNA, 20 nt, Human
cuggcucuccaagugccaga

SEQ ID NO: 3525658 - RNA, 22 nt, Human
cuggcucuccaagugccagagg

SEQ ID NO: 3525659 - RNA, 15 nt, Human
cuggcucuccuggcc

SEQ ID NO: 3525660 - RNA, 14 nt, Human
cuggacaggcaugu

SEQ ID NO: 3525661 - RNA, 23 nt, Human
cuggacaggcauguucucugagg

SEQ ID NO: 3525662 - RNA, 19 nt, Human
cuggacaggcucugcuucu

SEQ ID NO: 3525663 - RNA, 19 nt, Human
cuggacaguaucacugucu

SEQ ID NO: 3525664 - RNA, 16 nt, Human
cuggacaguaucccac

SEQ ID NO: 3525665 - RNA, 17 nt, Human
cuggacauuuuuucagu

SEQ ID NO: 3525666 - RNA, 22 nt, Human
cuggaccaacccuguuuccuga

SEQ ID NO: 3525667 - RNA, 14 nt, Human
cuggaccacugggc

SEQ ID NO: 3525668 - RNA, 12 nt, Human
cuggaccagccu

SEQ ID NO: 3525669 - RNA, 14 nt, Human
cuggaccagccucu

SEQ ID NO: 3525670 - RNA, 18 nt, Human
cuggaccagccucuccac

SEQ ID NO: 3525671 - RNA, 12 nt, Human
cuggacccagcc

SEQ ID NO: 3525672 - RNA, 14 nt, Human
cuggacccagccag

SEQ ID NO: 3525673 - RNA, 18 nt, Human
cuggacccagccaggccc

SEQ ID NO: 3525674 - RNA, 21 nt, Human
cuggacccagccaggcccagc

SEQ ID NO: 3525675 - RNA, 22 nt, Human
cuggacccagccaggcccagcc

SEQ ID NO: 3525676 - RNA, 14 nt, Human
cuggaccccagccu

SEQ ID NO: 3525677 - RNA, 15 nt, Human
cuggaccccagccuc

SEQ ID NO: 3525678 - RNA, 16 nt, Human
cuggaccccagccuca

SEQ ID NO: 3525679 - RNA, 17 nt, Human
cuggaccccagccucaa

SEQ ID NO: 3525680 - RNA, 20 nt, Human
cuggaccccaucugugaaua

SEQ ID NO: 3525681 - RNA, 22 nt, Human
cuggaccccaucugugaauaag

SEQ ID NO: 3525682 - RNA, 19 nt, Human
cuggaccccccuuucacag

SEQ ID NO: 3525683 - RNA, 15 nt, Human
cuggaccccugcauu

SEQ ID NO: 3525684 - RNA, 16 nt, Human
cuggacccuguugcua

SEQ ID NO: 3525685 - RNA, 18 nt, Human
cuggacccuguugcuaag

SEQ ID NO: 3525686 - RNA, 17 nt, Human
cuggacccuuauaaaau

SEQ ID NO: 3525687 - RNA, 15 nt, Human
cuggaccuauguccu

SEQ ID NO: 3525688 - RNA, 20 nt, Human
cuggaccuauguccuaagga

SEQ ID NO: 3525689 - RNA, 13 nt, Human
cuggaccucugac

SEQ ID NO: 3525690 - RNA, 15 nt, Human
cuggaccucugacag

SEQ ID NO: 3525691 - RNA, 17 nt, Human
cuggaccugcccccgca

SEQ ID NO: 3525692 - RNA, 15 nt, Human
cuggaccugccuccu

SEQ ID NO: 3525693 - RNA, 17 nt, Human
cuggaccugccuccugc

SEQ ID NO: 3525694 - RNA, 15 nt, Human
cuggaccugguggcu

SEQ ID NO: 3525695 - RNA, 20 nt, Human
cuggacggcaggcucacugc

SEQ ID NO: 3525696 - RNA, 20 nt, Human
cuggacggcauuccugcuua

SEQ ID NO: 3525697 - RNA, 13 nt, Human
cuggacucaggau

SEQ ID NO: 3525698 - RNA, 22 nt, Human
cuggacucaggaugcccagggc

SEQ ID NO: 3525699 - RNA, 15 nt, Human
cuggacuccagaucu

SEQ ID NO: 3525700 - RNA, 16 nt, Human
cuggacuccagaucug

SEQ ID NO: 3525701 - RNA, 15 nt, Human
cuggacucccucaag

SEQ ID NO: 3525702 - RNA, 15 nt, Human
cuggacuccggcccu

SEQ ID NO: 3525703 - RNA, 17 nt, Human
cuggacuccucugucca

SEQ ID NO: 3525704 - RNA, 18 nt, Human
cuggacuccucuguccag

SEQ ID NO: 3525705 - RNA, 22 nt, Human
cuggacuccucuguccaggcac

SEQ ID NO: 3525706 - RNA, 17 nt, Human
cuggacucucagucucu

SEQ ID NO: 3525707 - RNA, 21 nt, Human
cuggacucucagucucugagc

SEQ ID NO: 3525708 - RNA, 18 nt, Human
cuggacucugcaucccag

SEQ ID NO: 3525709 - RNA, 24 nt, Human
cuggacucugcaucccagcaccug

SEQ ID NO: 3525710 - RNA, 16 nt, Human
cuggacucuggacuuu

SEQ ID NO: 3525711 - RNA, 14 nt, Human
cuggacucuucaaa

SEQ ID NO: 3525712 - RNA, 16 nt, Human
cuggcuucuggagccc

SEQ ID NO: 3525713 - RNA, 20 nt, Human
cuggcuucuggagcccuugg

SEQ ID NO: 3525714 - RNA, 13 nt, Human
cuggcuucuggcc

SEQ ID NO: 3525715 - RNA, 19 nt, Human
cuggcuucuggccaggaag

SEQ ID NO: 3525716 - RNA, 14 nt, Human
cuggcuucuguggg

SEQ ID NO: 3525717 - RNA, 13 nt, Human
cuggcuuggccua

SEQ ID NO: 3525718 - RNA, 16 nt, Human
cuggcuugggcagcau

SEQ ID NO: 3525719 - RNA, 20 nt, Human
cuggcuuguaacuccaccaa

SEQ ID NO: 3525720 - RNA, 15 nt, Human
cuggcuuucagagua

SEQ ID NO: 3525721 - RNA, 22 nt, Human
cuggcuuucauuuucucucagg

SEQ ID NO: 3525722 - RNA, 23 nt, Human
cuggcuuucauuuucucucaggu

SEQ ID NO: 3525723 - RNA, 15 nt, Human
cuggcuuucuccgac

SEQ ID NO: 3525724 - RNA, 22 nt, Human
cuggcuuucuccgacugcuagg

SEQ ID NO: 3525725 - RNA, 14 nt, Human
cuggcuuugcccaa

SEQ ID NO: 3525726 - RNA, 15 nt, Human
cuggcuuugcccaac

SEQ ID NO: 3525727 - RNA, 22 nt, Human
cuggcuuugcccaaccucagca

SEQ ID NO: 3525728 - RNA, 15 nt, Human
cuggcuuugucccac

SEQ ID NO: 3525729 - RNA, 20 nt, Human
cuggcuuugucccacagcuu

SEQ ID NO: 3525730 - RNA, 21 nt, Human
cuggcuuugucccacagcuug

SEQ ID NO: 3525731 - RNA, 14 nt, Human
cuggcuuuuauuaa

SEQ ID NO: 3525732 - RNA, 15 nt, Human
cuggcuuuucacugc

SEQ ID NO: 3525733 - RNA, 16 nt, Human
cuggcuuuucacugcu

SEQ ID NO: 3525734 - RNA, 17 nt, Human
cuggcuuuucacugcug

SEQ ID NO: 3525735 - RNA, 12 nt, Human
cuggcuuuucug

SEQ ID NO: 3525736 - RNA, 15 nt, Human
cuggcuuuugagcac

SEQ ID NO: 3525737 - RNA, 14 nt, Human
cuggcuuuuggaag

SEQ ID NO: 3525738 - RNA, 19 nt, Human
cuggcuuuuuauuguauuu

SEQ ID NO: 3525739 - RNA, 14 nt, Human
cugggaaaauaccc

SEQ ID NO: 3525740 - RNA, 17 nt, Human
cugggaaaauaccccau

SEQ ID NO: 3525741 - RNA, 19 nt, Human
cugggaaacacuccuugca

SEQ ID NO: 3525742 - RNA, 21 nt, Human
cugggaaacacuccuugcauc

SEQ ID NO: 3525743 - RNA, 15 nt, Human
cugggaaacagaggc

SEQ ID NO: 3525744 - RNA, 23 nt, Human
cugggaaaccccuucucugugac

SEQ ID NO: 3525745 - RNA, 16 nt, Human
cugggaaauauucccu

SEQ ID NO: 3525746 - RNA, 20 nt, Human
cugggaaaugagaaggcagc

SEQ ID NO: 3525747 - RNA, 17 nt, Human
cugggaaccccuuuccc

SEQ ID NO: 3525748 - RNA, 18 nt, Human
cugggaaccccuuuccca

SEQ ID NO: 3525749 - RNA, 19 nt, Human
cugggaaccuuccugucuu

SEQ ID NO: 3525750 - RNA, 20 nt, Human
cugggaacucaccuggggcu

SEQ ID NO: 3525751 - RNA, 24 nt, Human
cugggaagauaggcucugcacaga

SEQ ID NO: 3525752 - RNA, 19 nt, Human
cugggaaggcuacucaccu

SEQ ID NO: 3525753 - RNA, 16 nt, Human
cugggaaggcuacuuc

SEQ ID NO: 3525754 - RNA, 23 nt, Human
cugggaagucguccuuacuccug

SEQ ID NO: 3525755 - RNA, 23 nt, Human
cugggaauggaggggcagagcca

SEQ ID NO: 3525756 - RNA, 19 nt, Human
cugggaauguauaguauuu

SEQ ID NO: 3525757 - RNA, 23 nt, Human
cugggaauguauaguauuugaaa

SEQ ID NO: 3525758 - RNA, 16 nt, Human
cugggacacaaaacuc

SEQ ID NO: 3525759 - RNA, 21 nt, Human
cugggacacaaaacuccgccc

SEQ ID NO: 3525760 - RNA, 12 nt, Human
cugggacacagu

SEQ ID NO: 3525761 - RNA, 12 nt, Human
cugggacauggg

SEQ ID NO: 3525762 - RNA, 18 nt, Human
cugggacaugggaaaggg

SEQ ID NO: 3525763 - RNA, 20 nt, Human
cugggacccuuuccuuccuu

SEQ ID NO: 3525764 - RNA, 16 nt, Human
cugggaccgcuacacc

SEQ ID NO: 3525765 - RNA, 20 nt, Human
cugggaccuccccugaggcu

SEQ ID NO: 3525766 - RNA, 17 nt, Human
cugggaccugccaggca

SEQ ID NO: 3525767 - RNA, 13 nt, Human
cugggaccuuuag

SEQ ID NO: 3525768 - RNA, 15 nt, Human
cugggacgcucugcu

SEQ ID NO: 3525769 - RNA, 17 nt, Human
cugggacguggcucagc

SEQ ID NO: 3525770 - RNA, 18 nt, Human
cugggacguggcucagcc

SEQ ID NO: 3525771 - RNA, 14 nt, Human
cugggacucagccu

SEQ ID NO: 3525772 - RNA, 13 nt, Human
cugggacugagcc

SEQ ID NO: 3525773 - RNA, 14 nt, Human
cugggacugagcca

SEQ ID NO: 3525774 - RNA, 15 nt, Human
cugggacugagccag

SEQ ID NO: 3525775 - RNA, 16 nt, Human
cugggacugagccagu

SEQ ID NO: 3525776 - RNA, 20 nt, Human
cugggacugagccaguccca

SEQ ID NO: 3525777 - RNA, 13 nt, Human
cugggacuggcca

SEQ ID NO: 3525778 - RNA, 16 nt, Human
cugggacuuccuugcu

SEQ ID NO: 3525779 - RNA, 16 nt, Human
cugggagaaaaucauc

SEQ ID NO: 3525780 - RNA, 13 nt, Human
cugggagaaaucu

SEQ ID NO: 3525781 - RNA, 18 nt, Human
cugggagaaaucuggcuu

SEQ ID NO: 3525782 - RNA, 16 nt, Human
cugggagaaaugaaaa

SEQ ID NO: 3525783 - RNA, 17 nt, Human
cugggagaaaugaaaaa

SEQ ID NO: 3525784 - RNA, 12 nt, Human
cugggagaaccu

SEQ ID NO: 3525785 - RNA, 14 nt, Human
cugggagaaccuca

SEQ ID NO: 3525786 - RNA, 14 nt, Human
cugggagacagacc

SEQ ID NO: 3525787 - RNA, 17 nt, Human
cugggagagccuuccag

SEQ ID NO: 3525788 - RNA, 13 nt, Human
cugggagaggcag

SEQ ID NO: 3525789 - RNA, 18 nt, Human
cugggagaggcagcccag

SEQ ID NO: 3525790 - RNA, 19 nt, Human
cugggagaggugccagcaa

SEQ ID NO: 3525791 - RNA, 15 nt, Human
cugggagauucaagg

SEQ ID NO: 3525792 - RNA, 16 nt, Human
cugggagcccccagcc

SEQ ID NO: 3525793 - RNA, 19 nt, Human
cugggagcccccagccugu

SEQ ID NO: 3525794 - RNA, 21 nt, Human
cugggagcccccagccuguca

SEQ ID NO: 3525795 - RNA, 23 nt, Human
cugggagcccccagccugucaga

SEQ ID NO: 3525796 - RNA, 16 nt, Human
cugggagccuacccac

SEQ ID NO: 3525797 - RNA, 22 nt, Human
cugggagccuacccacccccag

SEQ ID NO: 3525798 - RNA, 16 nt, Human
cugggagcuccacucu

SEQ ID NO: 3525799 - RNA, 17 nt, Human
cugggagcuccacucug

SEQ ID NO: 3525800 - RNA, 16 nt, Human
cugggagcuuuuguag

SEQ ID NO: 3525801 - RNA, 13 nt, Human
cugggaggaaaag

SEQ ID NO: 3525802 - RNA, 18 nt, Human
cugggaggaaccgagggg

SEQ ID NO: 3525803 - RNA, 17 nt, Human
cugggaggaauggacag

SEQ ID NO: 3525804 - RNA, 22 nt, Human
cugggaggaauggacagacaga

SEQ ID NO: 3525805 - RNA, 16 nt, Human
cugggaggagggagag

SEQ ID NO: 3525806 - RNA, 20 nt, Human
cugggaggagggagagggag

SEQ ID NO: 3525807 - RNA, 23 nt, Human
cugggaggcagagguugcaguga

SEQ ID NO: 3525808 - RNA, 18 nt, Human
cugggaggcucuggagcc

SEQ ID NO: 3525809 - RNA, 19 nt, Human
cugggagggcagcagggcu

SEQ ID NO: 3525810 - RNA, 22 nt, Human
cugggagggguuuucgaagcuc

SEQ ID NO: 3525811 - RNA, 18 nt, Human
cugggaggucaaggcugc

SEQ ID NO: 3525812 - RNA, 19 nt, Human
cugggaggucaaggcugca

SEQ ID NO: 3525813 - RNA, 20 nt, Human
cugggagguuaaaaagaaaa

SEQ ID NO: 3525814 - RNA, 21 nt, Human
cugggagguugguuuaaugca

SEQ ID NO: 3525815 - RNA, 22 nt, Human
cugggagucacacaguguugga

SEQ ID NO: 3525816 - RNA, 12 nt, Human
cugggagugagc

SEQ ID NO: 3525817 - RNA, 23 nt, Human
cugggaguugaucgccuuuccca

SEQ ID NO: 3525818 - RNA, 17 nt, Human
cugggauaggggcagag

SEQ ID NO: 3525819 - RNA, 17 nt, Human
cugggauccuaagggcu

SEQ ID NO: 3525820 - RNA, 17 nt, Human
cugggaugagccgcugu

SEQ ID NO: 3525821 - RNA, 16 nt, Human
cugggaugggccugcu

SEQ ID NO: 3525822 - RNA, 22 nt, Human
cugggaugggccugcuuccugu

SEQ ID NO: 3525823 - RNA, 18 nt, Human
cugggauuacaggcguga

SEQ ID NO: 3525824 - RNA, 13 nt, Human
ccucucccuggcc

SEQ ID NO: 3525825 - RNA, 14 nt, Human
ccucucccuucccu

SEQ ID NO: 3525826 - RNA, 16 nt, Human
ccucucccuucccucc

SEQ ID NO: 3525827 - RNA, 20 nt, Human
ccucucccuugggcucugau

SEQ ID NO: 3525828 - RNA, 19 nt, Human
ccucuccgccccugagccc

SEQ ID NO: 3525829 - RNA, 22 nt, Human
ccucuccgccccugagcccacu

SEQ ID NO: 3525830 - RNA, 14 nt, Human
ccucuccguuuauu

SEQ ID NO: 3525831 - RNA, 15 nt, Human
ccucuccuacucacu

SEQ ID NO: 3525832 - RNA, 13 nt, Human
ccucuccugccua

SEQ ID NO: 3525833 - RNA, 11 nt, Human
ccucuccugga

SEQ ID NO: 3525834 - RNA, 19 nt, Human
ccucuccugggcagcugcc

SEQ ID NO: 3525835 - RNA, 20 nt, Human
ccucuccugggcagcugccu

SEQ ID NO: 3525836 - RNA, 22 nt, Human
ccucuccugggcagcugccucc

SEQ ID NO: 3525837 - RNA, 15 nt, Human
ccucuccuuccuugu

SEQ ID NO: 3525838 - RNA, 21 nt, Human
ccucuccuucguaucccgagu

SEQ ID NO: 3525839 - RNA, 21 nt, Human
ccucuccuuguggccugggcc

SEQ ID NO: 3525840 - RNA, 15 nt, Human
ccucuccuuuguaua

SEQ ID NO: 3525841 - RNA, 18 nt, Human
ccucuccuuuguauauua

SEQ ID NO: 3525842 - RNA, 22 nt, Human
ccucuccuuuguauauuauuuc

SEQ ID NO: 3525843 - RNA, 17 nt, Human
ccucucggaaggcuggc

SEQ ID NO: 3525844 - RNA, 19 nt, Human
ccucucgguggccagcagg

SEQ ID NO: 3525845 - RNA, 19 nt, Human
ccucucuauccucucuucc

SEQ ID NO: 3525846 - RNA, 12 nt, Human
ccucucucaggc

SEQ ID NO: 3525847 - RNA, 14 nt, Human
ccucucucaggcca

SEQ ID NO: 3525848 - RNA, 14 nt, Human
ccucucuccuuugc

SEQ ID NO: 3525849 - RNA, 11 nt, Human
ccucucucuga

SEQ ID NO: 3525850 - RNA, 12 nt, Human
ccucucucugac

SEQ ID NO: 3525851 - RNA, 16 nt, Human
ccucucucuucugcuc

SEQ ID NO: 3525852 - RNA, 18 nt, Human
ccucucugaaggaggcca

SEQ ID NO: 3525853 - RNA, 20 nt, Human
ccucucugaaggaggccacc

SEQ ID NO: 3525854 - RNA, 23 nt, Human
ccucucugaaggaggccaccucc

SEQ ID NO: 3525855 - RNA, 17 nt, Human
ccucucugcagacuucc

SEQ ID NO: 3525856 - RNA, 21 nt, Human
ccucucugcagacuucccagc

SEQ ID NO: 3525857 - RNA, 20 nt, Human
ccugcacagugucccccagg

SEQ ID NO: 3525858 - RNA, 14 nt, Human
ccugcacccuccua

SEQ ID NO: 3525859 - RNA, 17 nt, Human
ccugcaccuccccccac

SEQ ID NO: 3525860 - RNA, 22 nt, Human
ccugcaccuccccccacugcag

SEQ ID NO: 3525861 - RNA, 14 nt, Human
ccugcaccugugca

SEQ ID NO: 3525862 - RNA, 15 nt, Human
ccugcaccugugcag

SEQ ID NO: 3525863 - RNA, 20 nt, Human
ccugcacggugaauggcuuu

SEQ ID NO: 3525864 - RNA, 18 nt, Human
ccugcacgucaugggagg

SEQ ID NO: 3525865 - RNA, 19 nt, Human
ccugcacgucaugggaggg

SEQ ID NO: 3525866 - RNA, 23 nt, Human
ccugcacgucaugggagggggcu

SEQ ID NO: 3525867 - RNA, 19 nt, Human
ccugcacuaaagccagccu

SEQ ID NO: 3525868 - RNA, 20 nt, Human
ccugcacuaaagccagccug

SEQ ID NO: 3525869 - RNA, 21 nt, Human
ccugcacuaauuugauguuua

SEQ ID NO: 3525870 - RNA, 12 nt, Human
ccugcacuccuc

SEQ ID NO: 3525871 - RNA, 18 nt, Human
ccugcacugacucuggaa

SEQ ID NO: 3525872 - RNA, 11 nt, Human
ccugcacugua

SEQ ID NO: 3525873 - RNA, 14 nt, Human
ccugcacuguaaaa

SEQ ID NO: 3525874 - RNA, 14 nt, Human
ccugcacuguccug

SEQ ID NO: 3525875 - RNA, 14 nt, Human
ccugcacuuacuug

SEQ ID NO: 3525876 - RNA, 17 nt, Human
ccugcacuugcagacuc

SEQ ID NO: 3525877 - RNA, 22 nt, Human
ccugcacuugggggcucagcaa

SEQ ID NO: 3525878 - RNA, 21 nt, Human
ccugcagaaccggagagccag

SEQ ID NO: 3525879 - RNA, 16 nt, Human
ccugcagaauuugggu

SEQ ID NO: 3525880 - RNA, 17 nt, Human
cuggggccuguacugcc

SEQ ID NO: 3525881 - RNA, 19 nt, Human
cuggggccuguacugccug

SEQ ID NO: 3525882 - RNA, 21 nt, Human
cuggggccuguacugccugcu

SEQ ID NO: 3525883 - RNA, 15 nt, Human
cuggggcgggccccu

SEQ ID NO: 3525884 - RNA, 19 nt, Human
cuggggcuaggcuggagcc

SEQ ID NO: 3525885 - RNA, 12 nt, Human
cuggggcucaga

SEQ ID NO: 3525886 - RNA, 23 nt, Human
cuggggcuccuuucuccagccag

SEQ ID NO: 3525887 - RNA, 21 nt, Human
cuggggcucuaacgccugagc

SEQ ID NO: 3525888 - RNA, 14 nt, Human
cuggggcucuggga

SEQ ID NO: 3525889 - RNA, 15 nt, Human
cuggggcucugggau

SEQ ID NO: 3525890 - RNA, 14 nt, Human
cuggggcugaccuu

SEQ ID NO: 3525891 - RNA, 16 nt, Human
cuggggcugaucucag

SEQ ID NO: 3525892 - RNA, 12 nt, Human
cuggggcugcug

SEQ ID NO: 3525893 - RNA, 14 nt, Human
cuggggcugcuggc

SEQ ID NO: 3525894 - RNA, 18 nt, Human
cuggggcuggccucccaa

SEQ ID NO: 3525895 - RNA, 14 nt, Human
cuggggcugggccc

SEQ ID NO: 3525896 - RNA, 16 nt, Human
cuggggcuguguuuug

SEQ ID NO: 3525897 - RNA, 19 nt, Human
cuggggcuguugaagucac

SEQ ID NO: 3525898 - RNA, 15 nt, Human
cuggggcuucuccug

SEQ ID NO: 3525899 - RNA, 20 nt, Human
cuggggcuucuccugaccca

SEQ ID NO: 3525900 - RNA, 16 nt, Human
cugggggaugggccug

SEQ ID NO: 3525901 - RNA, 20 nt, Human
cugggggcacaagacugacg

SEQ ID NO: 3525902 - RNA, 19 nt, Human
cugggggcacaggaggcag

SEQ ID NO: 3525903 - RNA, 12 nt, Human
cugggggcagga

SEQ ID NO: 3525904 - RNA, 19 nt, Human
cugggggcaggagggcccu

SEQ ID NO: 3525905 - RNA, 17 nt, Human
cugggggccaugagcuc

SEQ ID NO: 3525906 - RNA, 18 nt, Human
cugggggccaugagcucc

SEQ ID NO: 3525907 - RNA, 20 nt, Human
cugggggccaugagcuccag

SEQ ID NO: 3525908 - RNA, 14 nt, Human
cugggggccucacu

SEQ ID NO: 3525909 - RNA, 13 nt, Human
cugggggccucag

SEQ ID NO: 3525910 - RNA, 16 nt, Human
cugggggccugaccuc

SEQ ID NO: 3525911 - RNA, 22 nt, Human
cugggggccugaccucccccuc

SEQ ID NO: 3525912 - RNA, 12 nt, Human
cugggggccugg

SEQ ID NO: 3525913 - RNA, 14 nt, Human
cugggggcugcagu

SEQ ID NO: 3525914 - RNA, 18 nt, Human
cugggggcugcaguucga

SEQ ID NO: 3525915 - RNA, 20 nt, Human
cuggggggacccagugcaga

SEQ ID NO: 3525916 - RNA, 16 nt, Human
cugggggugggccagg

SEQ ID NO: 3525917 - RNA, 16 nt, Human
cugggguaccaagaga

SEQ ID NO: 3525918 - RNA, 21 nt, Human
cugggguaccaagagacuccu

SEQ ID NO: 3525919 - RNA, 20 nt, Human
cugggguauaaaacuuuccu

SEQ ID NO: 3525920 - RNA, 13 nt, Human
cuggggucccagc

SEQ ID NO: 3525921 - RNA, 20 nt, Human
cuggggucccagcagcugcc

SEQ ID NO: 3525922 - RNA, 22 nt, Human
cuggggucccagcagcugccag

SEQ ID NO: 3525923 - RNA, 13 nt, Human
cugggguccccag

SEQ ID NO: 3525924 - RNA, 14 nt, Human
cugggguccccagg

SEQ ID NO: 3525925 - RNA, 15 nt, Human
cugggguccuggggc

SEQ ID NO: 3525926 - RNA, 20 nt, Human
cuggggugcagggauguggg

SEQ ID NO: 3525927 - RNA, 21 nt, Human
cuggggugcccuccacugccc

SEQ ID NO: 3525928 - RNA, 17 nt, Human
cuggggugccgccugcc

SEQ ID NO: 3525929 - RNA, 19 nt, Human
cuggggugccgccugcccg

SEQ ID NO: 3525930 - RNA, 18 nt, Human
cuggggugggcaguuuuu

SEQ ID NO: 3525931 - RNA, 19 nt, Human
cugggguggggaccucagg

SEQ ID NO: 3525932 - RNA, 15 nt, Human
cugggguucagcccc

SEQ ID NO: 3525933 - RNA, 16 nt, Human
cuggguaaaugcagcg

SEQ ID NO: 3525934 - RNA, 17 nt, Human
cuggguacugaaagccu

SEQ ID NO: 3525935 - RNA, 16 nt, Human
cuggguacuuguggac

SEQ ID NO: 3525936 - RNA, 18 nt, Human
cuggguacuuguggacac

SEQ ID NO: 3525937 - RNA, 13 nt, Human
cuggguagcugua

SEQ ID NO: 3525938 - RNA, 19 nt, Human
cuggguaggaaagaggaag

SEQ ID NO: 3525939 - RNA, 13 nt, Human
cuggguaugugua

SEQ ID NO: 3525940 - RNA, 13 nt, Human
cugggucagucug

SEQ ID NO: 3525941 - RNA, 17 nt, Human
cugggucagucuggugg

SEQ ID NO: 3525942 - RNA, 18 nt, Human
cugggucagucugguggg

SEQ ID NO: 3525943 - RNA, 19 nt, Human
cuggguccaaauaaaaacu

SEQ ID NO: 3525944 - RNA, 21 nt, Human
cuggguccaaauaaaaacuaa

SEQ ID NO: 3525945 - RNA, 13 nt, Human
cuggguccagaag

SEQ ID NO: 3525946 - RNA, 20 nt, Human
cuggguccauaucacacaca

SEQ ID NO: 3525947 - RNA, 16 nt, Human
cuggguccccagcccu

SEQ ID NO: 3525948 - RNA, 21 nt, Human
cuggguccuaauuaccagucu

SEQ ID NO: 3525949 - RNA, 15 nt, Human
cuggguccuuccuga

SEQ ID NO: 3525950 - RNA, 19 nt, Human
cuggguccuuccugaaacu

SEQ ID NO: 3525951 - RNA, 16 nt, Human
cugggucgcccuggac

SEQ ID NO: 3525952 - RNA, 23 nt, Human
cugggucucaccggcucucaccu

SEQ ID NO: 3525953 - RNA, 22 nt, Human
cugggucucgcuuuguugccca

SEQ ID NO: 3525954 - RNA, 19 nt, Human
cugggugacagagcaagac

SEQ ID NO: 3525955 - RNA, 20 nt, Human
cugggugcccaagcucagaa

SEQ ID NO: 3525956 - RNA, 21 nt, Human
cugggugcccaagcucagaag

SEQ ID NO: 3525957 - RNA, 12 nt, Human
cugggugcccac

SEQ ID NO: 3525958 - RNA, 14 nt, Human
cugggugcccacag

SEQ ID NO: 3525959 - RNA, 15 nt, Human
cugggugcccacagc

SEQ ID NO: 3525960 - RNA, 16 nt, Human
cugggugcccacagcc

SEQ ID NO: 3525961 - RNA, 22 nt, Human
cugggugcgaccccaucugccc

SEQ ID NO: 3525962 - RNA, 17 nt, Human
cugggugcuacugggga

SEQ ID NO: 3525963 - RNA, 21 nt, Human
cugggugcuacuggggaaacu

SEQ ID NO: 3525964 - RNA, 15 nt, Human
cugggugcucccuac

SEQ ID NO: 3525965 - RNA, 20 nt, Human
cugggugcugauccuugcac

SEQ ID NO: 3525966 - RNA, 15 nt, Human
cugggugcuggcugc

SEQ ID NO: 3525967 - RNA, 16 nt, Human
cuggguggcacugcca

SEQ ID NO: 3525968 - RNA, 16 nt, Human
cuggguggcccauccc

SEQ ID NO: 3525969 - RNA, 13 nt, Human
cuggguggccucg

SEQ ID NO: 3525970 - RNA, 16 nt, Human
cuggguggccucggga

SEQ ID NO: 3525971 - RNA, 19 nt, Human
cuggguggcuacucugugc

SEQ ID NO: 3525972 - RNA, 22 nt, Human
cuggguggcuacucugugccag

SEQ ID NO: 3525973 - RNA, 14 nt, Human
cugggugggcucug

SEQ ID NO: 3525974 - RNA, 20 nt, Human
cuggguggggcugcuccucc

SEQ ID NO: 3525975 - RNA, 16 nt, Human
cuggguggggugagga

SEQ ID NO: 3525976 - RNA, 12 nt, Human
cugggugggugg

SEQ ID NO: 3525977 - RNA, 20 nt, Human
cugggugggugguggggagg

SEQ ID NO: 3525978 - RNA, 16 nt, Human
cugggugguacccucu

SEQ ID NO: 3525979 - RNA, 15 nt, Human
cuggguguaaacaca

SEQ ID NO: 3525980 - RNA, 19 nt, Human
cuggguguauuaggacugg

SEQ ID NO: 3525981 - RNA, 17 nt, Human
cuggguguggcgcagca

SEQ ID NO: 3525982 - RNA, 19 nt, Human
cuggguuagacugccagcu

SEQ ID NO: 3525983 - RNA, 20 nt, Human
cuggguuagacugccagcuc

SEQ ID NO: 3525984 - RNA, 15 nt, Human
cuggguucacugcaa

SEQ ID NO: 3525985 - RNA, 18 nt, Human
cuggguucagaaaugcug

SEQ ID NO: 3525986 - RNA, 17 nt, Human
cuggguuccaauccugg

SEQ ID NO: 3525987 - RNA, 22 nt, Human
cuggguuccagcaauucuccug

SEQ ID NO: 3525988 - RNA, 14 nt, Human
cuggguucccuuuc

SEQ ID NO: 3525989 - RNA, 16 nt, Human
cuggguucccuuuccu

SEQ ID NO: 3525990 - RNA, 16 nt, Human
cuggguucuacccagg

SEQ ID NO: 3525991 - RNA, 19 nt, Human
cuggguucuacccaggugc

SEQ ID NO: 3525992 - RNA, 20 nt, Human
cuggguuggcgcacccuccc

SEQ ID NO: 3525993 - RNA, 23 nt, Human
cuggguuggcgcacccuccccuc

SEQ ID NO: 3525994 - RNA, 14 nt, Human
cuggguugggauca

SEQ ID NO: 3525995 - RNA, 18 nt, Human
cuggguuuaaggggagag

SEQ ID NO: 3525996 - RNA, 23 nt, Human
cuggguuuauuacauggcagugu

SEQ ID NO: 3525997 - RNA, 22 nt, Human
cuggguuuggaccccagcuggg

SEQ ID NO: 3525998 - RNA, 20 nt, Human
cuggguuuuguauucucuga

SEQ ID NO: 3525999 - RNA, 22 nt, Human
cuggguuuuguauucucugagc

SEQ ID NO: 3526000 - RNA, 15 nt, Human
cugguaaaaugaaga

SEQ ID NO: 3526001 - RNA, 19 nt, Human
cugguaaacuauuugucuu

SEQ ID NO: 3526002 - RNA, 16 nt, Human
aaauuugaagaaugaa

SEQ ID NO: 3526003 - RNA, 16 nt, Human
aaauuugacuaauuuu

SEQ ID NO: 3526004 - RNA, 20 nt, Human
aaauuugacuaauuuuacau

SEQ ID NO: 3526005 - RNA, 16 nt, Human
aaauuugacuuuucug

SEQ ID NO: 3526006 - RNA, 13 nt, Human
aaauuugauacuu

SEQ ID NO: 3526007 - RNA, 20 nt, Human
aaauuuggaauucuguucau

SEQ ID NO: 3526008 - RNA, 14 nt, Human
aaauuuguaaguuu

SEQ ID NO: 3526009 - RNA, 22 nt, Human
aaauuuguaaguuucaggugac

SEQ ID NO: 3526010 - RNA, 13 nt, Human
aaauuuguacuau

SEQ ID NO: 3526011 - RNA, 17 nt, Human
aaauuuguacuauuuaa

SEQ ID NO: 3526012 - RNA, 19 nt, Human
aaauuuguacuauuuaacu

SEQ ID NO: 3526013 - RNA, 19 nt, Human
aaauuuguuauuuugcaac

SEQ ID NO: 3526014 - RNA, 19 nt, Human
aaauuuguuuaaaguauac

SEQ ID NO: 3526015 - RNA, 10 nt, Human
aaauuuuaaa

SEQ ID NO: 3526016 - RNA, 13 nt, Human
aaauuuuaaaaaa

SEQ ID NO: 3526017 - RNA, 14 nt, Human
aaauuuuaaaaaag

SEQ ID NO: 3526018 - RNA, 15 nt, Human
aaauuuuaaaaaucu

SEQ ID NO: 3526019 - RNA, 15 nt, Human
aaauuuuaacuaaau

SEQ ID NO: 3526020 - RNA, 21 nt, Human
aaauuuuacaagggcauaaag

SEQ ID NO: 3526021 - RNA, 14 nt, Human
aaauuuuaccaagu

SEQ ID NO: 3526022 - RNA, 22 nt, Human
aaauuuuaccaaguuauauaaa

SEQ ID NO: 3526023 - RNA, 18 nt, Human
aaauuuuauuuccuggac

SEQ ID NO: 3526024 - RNA, 13 nt, Human
aaauuuucacaua

SEQ ID NO: 3526025 - RNA, 13 nt, Human
aaauuuucagcau

SEQ ID NO: 3526026 - RNA, 22 nt, Human
aaauuuuccuguccucuuucag

SEQ ID NO: 3526027 - RNA, 17 nt, Human
aaauuuucuucaguugg

SEQ ID NO: 3526028 - RNA, 13 nt, Human
aaauuuugaaaag

SEQ ID NO: 3526029 - RNA, 21 nt, Human
aaauuuugaaaaguaauauuu

SEQ ID NO: 3526030 - RNA, 23 nt, Human
aaauuuugauguuuuaaggaugc

SEQ ID NO: 3526031 - RNA, 12 nt, Human
aaauuuugcaaa

SEQ ID NO: 3526032 - RNA, 15 nt, Human
aaauuuugcaaauau

SEQ ID NO: 3526033 - RNA, 20 nt, Human
aaauuuugcaaauauaaaca

SEQ ID NO: 3526034 - RNA, 12 nt, Human
aaauuuuggcca

SEQ ID NO: 3526035 - RNA, 12 nt, Human
aaauuuuguaag

SEQ ID NO: 3526036 - RNA, 14 nt, Human
aaauuuuguaauuu

SEQ ID NO: 3526037 - RNA, 15 nt, Human
aaauuuuguaauuuu

SEQ ID NO: 3526038 - RNA, 18 nt, Human
aaauuuuuaggaaacuca

SEQ ID NO: 3526039 - RNA, 20 nt, Human
aaauuuuucagaugcuucug

SEQ ID NO: 3526040 - RNA, 13 nt, Human
aaauuuuucauau

SEQ ID NO: 3526041 - RNA, 13 nt, Human
ccugcagacccug

SEQ ID NO: 3526042 - RNA, 13 nt, Human
ccugcagagcugc

SEQ ID NO: 3526043 - RNA, 18 nt, Human
ccugcagaggucugugcu

SEQ ID NO: 3526044 - RNA, 21 nt, Human
ccugcagaggucugugcugag

SEQ ID NO: 3526045 - RNA, 16 nt, Human
ccugcagaguuuggau

SEQ ID NO: 3526046 - RNA, 13 nt, Human
ccugcagaugcca

SEQ ID NO: 3526047 - RNA, 21 nt, Human
ccugcagcacggacaauaaac

SEQ ID NO: 3526048 - RNA, 23 nt, Human
ccugcagcacggacaauaaaccu

SEQ ID NO: 3526049 - RNA, 16 nt, Human
ccugcagccucccucc

SEQ ID NO: 3526050 - RNA, 22 nt, Human
ccugcagccuccuccaccucac

SEQ ID NO: 3526051 - RNA, 18 nt, Human
ccugcagccuccuccuga

SEQ ID NO: 3526052 - RNA, 13 nt, Human
ccugcagccugga

SEQ ID NO: 3526053 - RNA, 15 nt, Human
ccugcagccuggagg

SEQ ID NO: 3526054 - RNA, 16 nt, Human
ccugcagcuaguccua

SEQ ID NO: 3526055 - RNA, 12 nt, Human
ccugcagcuccc

SEQ ID NO: 3526056 - RNA, 12 nt, Human
ccugcagcuugu

SEQ ID NO: 3526057 - RNA, 16 nt, Human
ccugcagcuuguagcc

SEQ ID NO: 3526058 - RNA, 14 nt, Human
ccugcaggaaggag

SEQ ID NO: 3526059 - RNA, 20 nt, Human
ccugcaggaccugccuguag

SEQ ID NO: 3526060 - RNA, 23 nt, Human
ccugcaggaucucaccaggcagc

SEQ ID NO: 3526061 - RNA, 20 nt, Human
ccugcaggcagccaggccac

SEQ ID NO: 3526062 - RNA, 22 nt, Human
ccugcaggccaagagcagaggc

SEQ ID NO: 3526063 - RNA, 15 nt, Human
ccugcaggccaggcc

SEQ ID NO: 3526064 - RNA, 16 nt, Human
ccugcaggcugagcca

SEQ ID NO: 3526065 - RNA, 23 nt, Human
ccugcaggguggugcugggacug

SEQ ID NO: 3526066 - RNA, 21 nt, Human
ccugcagguugggccauacug

SEQ ID NO: 3526067 - RNA, 15 nt, Human
ccugcagucaucuug

SEQ ID NO: 3526068 - RNA, 12 nt, Human
ccugcaguguuc

SEQ ID NO: 3526069 - RNA, 22 nt, Human
ccugcaguuccccuggaagcag

SEQ ID NO: 3526070 - RNA, 18 nt, Human
ccugcauccccuuggcug

SEQ ID NO: 3526071 - RNA, 24 nt, Human
ccugcauccccuuggcugugaggc

SEQ ID NO: 3526072 - RNA, 22 nt, Human
ccugcauccguaguucccugaa

SEQ ID NO: 3526073 - RNA, 16 nt, Human
ccugcaucuaagccca

SEQ ID NO: 3526074 - RNA, 18 nt, Human
ccugcaucuuuagugcuu

SEQ ID NO: 3526075 - RNA, 12 nt, Human
ccugcaugcaga

SEQ ID NO: 3526076 - RNA, 16 nt, Human
ccugcauucuuucugu

SEQ ID NO: 3526077 - RNA, 16 nt, Human
ccugcauuggaacugg

SEQ ID NO: 3526078 - RNA, 19 nt, Human
ccugccaccaggccaccuc

SEQ ID NO: 3526079 - RNA, 19 nt, Human
ccugccaccagucacuguc

SEQ ID NO: 3526080 - RNA, 12 nt, Human
ccugccacccug

SEQ ID NO: 3526081 - RNA, 13 nt, Human
ccugccaccugga

SEQ ID NO: 3526082 - RNA, 16 nt, Human
ccugccaccuggaccc

SEQ ID NO: 3526083 - RNA, 16 nt, Human
ccugccaccuggggca

SEQ ID NO: 3526084 - RNA, 17 nt, Human
ccugccacuaggcuggg

SEQ ID NO: 3526085 - RNA, 19 nt, Human
ccugccacuaggcugggug

SEQ ID NO: 3526086 - RNA, 20 nt, Human
ccugccacuaggcugggugc

SEQ ID NO: 3526087 - RNA, 13 nt, Human
ccugccacucaca

SEQ ID NO: 3526088 - RNA, 14 nt, Human
ccugccacucacac

SEQ ID NO: 3526089 - RNA, 22 nt, Human
ccugccacucacacagccaggu

SEQ ID NO: 3526090 - RNA, 23 nt, Human
ccugccacucacacagccaggug

SEQ ID NO: 3526091 - RNA, 22 nt, Human
ccugccacucaggcccaaagcc

SEQ ID NO: 3526092 - RNA, 15 nt, Human
ccugccagccccaca

SEQ ID NO: 3526093 - RNA, 13 nt, Human
ccugccagccccu

SEQ ID NO: 3526094 - RNA, 17 nt, Human
ccugccagccuggcuuc

SEQ ID NO: 3526095 - RNA, 12 nt, Human
ccugccagcugc

SEQ ID NO: 3526096 - RNA, 17 nt, Human
ccugccagcugcacuga

SEQ ID NO: 3526097 - RNA, 15 nt, Human
ccugccaggaagcca

SEQ ID NO: 3526098 - RNA, 17 nt, Human
ccugccaggaagccagc

SEQ ID NO: 3526099 - RNA, 21 nt, Human
ccugccaggaagccagcaggc

SEQ ID NO: 3526100 - RNA, 11 nt, Human
ccugccaggag

SEQ ID NO: 3526101 - RNA, 21 nt, Human
ccugccaggagcuuuggaccu

SEQ ID NO: 3526102 - RNA, 12 nt, Human
ccugccaggagg

SEQ ID NO: 3526103 - RNA, 22 nt, Human
ccugccaggcacaggcagggca

SEQ ID NO: 3526104 - RNA, 23 nt, Human
ccugccaggcacaggcagggcag

SEQ ID NO: 3526105 - RNA, 14 nt, Human
ccugccaggcaggg

SEQ ID NO: 3526106 - RNA, 19 nt, Human
ccugccaggcagggguggg

SEQ ID NO: 3526107 - RNA, 15 nt, Human
ccugccaggcauggu

SEQ ID NO: 3526108 - RNA, 17 nt, Human
ccugccagggagacaga

SEQ ID NO: 3526109 - RNA, 22 nt, Human
ccugccaguccuagcugcacag

SEQ ID NO: 3526110 - RNA, 18 nt, Human
ccugccagugccuuaccu

SEQ ID NO: 3526111 - RNA, 20 nt, Human
ccugccagugccuuaccucc

SEQ ID NO: 3526112 - RNA, 21 nt, Human
ccugccagugccuuaccuccu

SEQ ID NO: 3526113 - RNA, 22 nt, Human
ccugccagugccuuaccuccug

SEQ ID NO: 3526114 - RNA, 18 nt, Human
ccugccaucauguuuaca

SEQ ID NO: 3526115 - RNA, 19 nt, Human
ccugccaugccaggaaccu

SEQ ID NO: 3526116 - RNA, 20 nt, Human
ccugccauggaacuguuucc

SEQ ID NO: 3526117 - RNA, 22 nt, Human
ccugccauggaacuguuuccuu

SEQ ID NO: 3526118 - RNA, 19 nt, Human
ccugccauguaccuccccu

SEQ ID NO: 3526119 - RNA, 18 nt, Human
ccugccauuuaaaaaguu

SEQ ID NO: 3526120 - RNA, 17 nt, Human
ccugcccaagcccaggc

SEQ ID NO: 3526121 - RNA, 23 nt, Human
ccugcccaaugagacucuagggu

SEQ ID NO: 3526122 - RNA, 17 nt, Human
ccugcccacaccuccug

SEQ ID NO: 3526123 - RNA, 13 nt, Human
ccugcccacccgu

SEQ ID NO: 3526124 - RNA, 22 nt, Human
ccugcccacccguggagauggg

SEQ ID NO: 3526125 - RNA, 12 nt, Human
ccugcccaccug

SEQ ID NO: 3526126 - RNA, 13 nt, Human
ccugcccaccugg

SEQ ID NO: 3526127 - RNA, 15 nt, Human
ccugcccaccuggcc

SEQ ID NO: 3526128 - RNA, 13 nt, Human
ccugcccaccugu

SEQ ID NO: 3526129 - RNA, 14 nt, Human
ccugcccaccuguc

SEQ ID NO: 3526130 - RNA, 13 nt, Human
ccugcccagacaa

SEQ ID NO: 3526131 - RNA, 14 nt, Human
ccugcccagaucag

SEQ ID NO: 3526132 - RNA, 13 nt, Human
ccugcccaggccc

SEQ ID NO: 3526133 - RNA, 16 nt, Human
ccugcccaggccggcc

SEQ ID NO: 3526134 - RNA, 22 nt, Human
ccugcccagucccccaacccca

SEQ ID NO: 3526135 - RNA, 23 nt, Human
ccugcccagucccccaaccccag

SEQ ID NO: 3526136 - RNA, 11 nt, Human
ccugcccagug

SEQ ID NO: 3526137 - RNA, 12 nt, Human
ccugcccagugu

SEQ ID NO: 3526138 - RNA, 13 nt, Human
ccugcccaguguu

SEQ ID NO: 3526139 - RNA, 14 nt, Human
ccugccccaacucc

SEQ ID NO: 3526140 - RNA, 17 nt, Human
ccugccccaacuccuuc

SEQ ID NO: 3526141 - RNA, 19 nt, Human
ccugccccacaccuccucu

SEQ ID NO: 3526142 - RNA, 14 nt, Human
ccugccccagccca

SEQ ID NO: 3526143 - RNA, 16 nt, Human
ccugcccccacaccug

SEQ ID NO: 3526144 - RNA, 20 nt, Human
ccugcccccacaccuggccc

SEQ ID NO: 3526145 - RNA, 23 nt, Human
ccugcccccaccacggccacugg

SEQ ID NO: 3526146 - RNA, 18 nt, Human
ccugcccccaccccauuc

SEQ ID NO: 3526147 - RNA, 15 nt, Human
ccugcccccacuucc

SEQ ID NO: 3526148 - RNA, 23 nt, Human
cugguggagaaagcacugaccug

SEQ ID NO: 3526149 - RNA, 20 nt, Human
cugguggagaacucuggcuu

SEQ ID NO: 3526150 - RNA, 15 nt, Human
cugguggcacaggag

SEQ ID NO: 3526151 - RNA, 12 nt, Human
cugguggcagcu

SEQ ID NO: 3526152 - RNA, 18 nt, Human
cugguggcagugggagcu

SEQ ID NO: 3526153 - RNA, 20 nt, Human
cugguggcccgacagccugg

SEQ ID NO: 3526154 - RNA, 23 nt, Human
cugguggcccgacagccuggcac

SEQ ID NO: 3526155 - RNA, 17 nt, Human
cugguggcucuuugggc

SEQ ID NO: 3526156 - RNA, 21 nt, Human
cuggugggcaccaagagccaa

SEQ ID NO: 3526157 - RNA, 17 nt, Human
cuggugggccuccucug

SEQ ID NO: 3526158 - RNA, 21 nt, Human
cugguggggauaggccagccg

SEQ ID NO: 3526159 - RNA, 17 nt, Human
cugguggguccaggggc

SEQ ID NO: 3526160 - RNA, 17 nt, Human
cuggugggugaaagaaa

SEQ ID NO: 3526161 - RNA, 19 nt, Human
cuggugggugaaagaaauc

SEQ ID NO: 3526162 - RNA, 15 nt, Human
cuggugguauuuuca

SEQ ID NO: 3526163 - RNA, 12 nt, Human
cugguggucagc

SEQ ID NO: 3526164 - RNA, 15 nt, Human
cugguggucagcccu

SEQ ID NO: 3526165 - RNA, 16 nt, Human
cugguggucagcccua

SEQ ID NO: 3526166 - RNA, 20 nt, Human
cugguggucuguuggcaggc

SEQ ID NO: 3526167 - RNA, 22 nt, Human
cugguggucuguuggcaggcug

SEQ ID NO: 3526168 - RNA, 23 nt, Human
cugguggucuguuggcaggcugg

SEQ ID NO: 3526169 - RNA, 12 nt, Human
cugguguagcua

SEQ ID NO: 3526170 - RNA, 20 nt, Human
cugguguagcuacagagaaa

SEQ ID NO: 3526171 - RNA, 23 nt, Human
cugguguagcuacagagaaacca

SEQ ID NO: 3526172 - RNA, 15 nt, Human
cugguguauguguga

SEQ ID NO: 3526173 - RNA, 16 nt, Human
cuggugucaccccaga

SEQ ID NO: 3526174 - RNA, 23 nt, Human
cuggugucaccccagagccacac

SEQ ID NO: 3526175 - RNA, 14 nt, Human
cugguguccagcug

SEQ ID NO: 3526176 - RNA, 15 nt, Human
cugguguccugacca

SEQ ID NO: 3526177 - RNA, 20 nt, Human
cugguguccugaccacccuc

SEQ ID NO: 3526178 - RNA, 22 nt, Human
cugguguccugaccacccuccc

SEQ ID NO: 3526179 - RNA, 17 nt, Human
cuggugucugcuuucuc

SEQ ID NO: 3526180 - RNA, 17 nt, Human
cuggugugaccugaggg

SEQ ID NO: 3526181 - RNA, 18 nt, Human
cuggugugaccugagggc

SEQ ID NO: 3526182 - RNA, 18 nt, Human
cuggugugguacagagaa

SEQ ID NO: 3526183 - RNA, 23 nt, Human
cuggugugguacagagaagccag

SEQ ID NO: 3526184 - RNA, 14 nt, Human
cugguguuaacaga

SEQ ID NO: 3526185 - RNA, 22 nt, Human
cugguguuaacagaagggaggg

SEQ ID NO: 3526186 - RNA, 20 nt, Human
cugguguuggacaagcuucu

SEQ ID NO: 3526187 - RNA, 22 nt, Human
cugguguuggacaagcuucuga

SEQ ID NO: 3526188 - RNA, 20 nt, Human
cugguuaacagcaguccuuu

SEQ ID NO: 3526189 - RNA, 13 nt, Human
cugguuagcagag

SEQ ID NO: 3526190 - RNA, 15 nt, Human
cugguuagcucagcc

SEQ ID NO: 3526191 - RNA, 23 nt, Human
cugguuagcucagccccagccca

SEQ ID NO: 3526192 - RNA, 19 nt, Human
cugguuaggauggcaggac

SEQ ID NO: 3526193 - RNA, 19 nt, Human
cugguucaagcgauucucu

SEQ ID NO: 3526194 - RNA, 13 nt, Human
cugguuccagggu

SEQ ID NO: 3526195 - RNA, 16 nt, Human
cugguuccauggccuc

SEQ ID NO: 3526196 - RNA, 18 nt, Human
cugguucccguuucucca

SEQ ID NO: 3526197 - RNA, 21 nt, Human
cugguucccguuucuccaccu

SEQ ID NO: 3526198 - RNA, 23 nt, Human
cugguuccuaggggaaugagggg

SEQ ID NO: 3526199 - RNA, 12 nt, Human
cugguuccuccc

SEQ ID NO: 3526200 - RNA, 22 nt, Human
cugucaagaguaguuauauaau

SEQ ID NO: 3526201 - RNA, 13 nt, Human
cugucaaggcuca

SEQ ID NO: 3526202 - RNA, 22 nt, Human
cugucaaugagagcauaauuua

SEQ ID NO: 3526203 - RNA, 15 nt, Human
cugucaaugggaccu

SEQ ID NO: 3526204 - RNA, 17 nt, Human
cugucaauuucccugac

SEQ ID NO: 3526205 - RNA, 18 nt, Human
cugucaauuucccugacu

SEQ ID NO: 3526206 - RNA, 15 nt, Human
cugucacaaccaaga

SEQ ID NO: 3526207 - RNA, 15 nt, Human
cugucacaccagcca

SEQ ID NO: 3526208 - RNA, 19 nt, Human
cugucacaguaaaaauaaa

SEQ ID NO: 3526209 - RNA, 18 nt, Human
cugucacauugcauucua

SEQ ID NO: 3526210 - RNA, 14 nt, Human
cugucaccaagcuc

SEQ ID NO: 3526211 - RNA, 15 nt, Human
cugucaccaaggaaa

SEQ ID NO: 3526212 - RNA, 16 nt, Human
cugucaccaaggaaac

SEQ ID NO: 3526213 - RNA, 13 nt, Human
cugucacccaggc

SEQ ID NO: 3526214 - RNA, 14 nt, Human
cugucacccuccac

SEQ ID NO: 3526215 - RNA, 16 nt, Human
cugucacccuccaccu

SEQ ID NO: 3526216 - RNA, 17 nt, Human
cugucaccucucccacg

SEQ ID NO: 3526217 - RNA, 15 nt, Human
cugucaccucuuccg

SEQ ID NO: 3526218 - RNA, 14 nt, Human
cugucacggaggga

SEQ ID NO: 3526219 - RNA, 17 nt, Human
cugucacucaggcugga

SEQ ID NO: 3526220 - RNA, 14 nt, Human
cugucacucauugc

SEQ ID NO: 3526221 - RNA, 23 nt, Human
cugucacucauugcugagccucu

SEQ ID NO: 3526222 - RNA, 12 nt, Human
cugucacuuugc

SEQ ID NO: 3526223 - RNA, 17 nt, Human
cugucacuuugcucugg

SEQ ID NO: 3526224 - RNA, 18 nt, Human
cugucacuuugcucuggg

SEQ ID NO: 3526225 - RNA, 12 nt, Human
cugucagaaugc

SEQ ID NO: 3526226 - RNA, 21 nt, Human
cugucagauccaggagcucca

SEQ ID NO: 3526227 - RNA, 23 nt, Human
cugucagauccaggagcuccagu

SEQ ID NO: 3526228 - RNA, 16 nt, Human
cugucagaugagaaca

SEQ ID NO: 3526229 - RNA, 14 nt, Human
cugucagcaugaau

SEQ ID NO: 3526230 - RNA, 16 nt, Human
cugucagccgggcccu

SEQ ID NO: 3526231 - RNA, 18 nt, Human
cugucagccgggcccuga

SEQ ID NO: 3526232 - RNA, 22 nt, Human
cugucagccgggcccugaguaa

SEQ ID NO: 3526233 - RNA, 17 nt, Human
cugucagcgcagguuua

SEQ ID NO: 3526234 - RNA, 12 nt, Human
cugucagcugca

SEQ ID NO: 3526235 - RNA, 15 nt, Human
cugucaggaggcaga

SEQ ID NO: 3526236 - RNA, 16 nt, Human
cugucaggccuucagg

SEQ ID NO: 3526237 - RNA, 14 nt, Human
cugucauagaaauu

SEQ ID NO: 3526238 - RNA, 22 nt, Human
cugucauaugcucugauuuauc

SEQ ID NO: 3526239 - RNA, 15 nt, Human
cugucaucaauugaa

SEQ ID NO: 3526240 - RNA, 16 nt, Human
cugucaucaucauggc

SEQ ID NO: 3526241 - RNA, 17 nt, Human
cugucaucaucauggcc

SEQ ID NO: 3526242 - RNA, 19 nt, Human
cugucaucaucauggccag

SEQ ID NO: 3526243 - RNA, 21 nt, Human
cugucauccucaaagaaagug

SEQ ID NO: 3526244 - RNA, 14 nt, Human
cugucaucugaauu

SEQ ID NO: 3526245 - RNA, 22 nt, Human
cugucaucugagaaugaacaaa

SEQ ID NO: 3526246 - RNA, 14 nt, Human
cugucaucugugca

SEQ ID NO: 3526247 - RNA, 15 nt, Human
cugucaucugugcac

SEQ ID NO: 3526248 - RNA, 20 nt, Human
cugucaugaacauguuccug

SEQ ID NO: 3526249 - RNA, 13 nt, Human
cugucaugccccc

SEQ ID NO: 3526250 - RNA, 17 nt, Human
cugucaugccccccuca

SEQ ID NO: 3526251 - RNA, 19 nt, Human
cugucauucaaauggguga

SEQ ID NO: 3526252 - RNA, 16 nt, Human
cugucauucagaaaaa

SEQ ID NO: 3526253 - RNA, 15 nt, Human
cugucauugcacaua

SEQ ID NO: 3526254 - RNA, 14 nt, Human
cugucauuugagca

SEQ ID NO: 3526255 - RNA, 18 nt, Human
cugucauuugagcagggc

SEQ ID NO: 3526256 - RNA, 21 nt, Human
cugucauuugagcagggcuca

SEQ ID NO: 3526257 - RNA, 23 nt, Human
cugucauuugagcagggcucagc

SEQ ID NO: 3526258 - RNA, 20 nt, Human
cuguccaaacugccuaagcc

SEQ ID NO: 3526259 - RNA, 17 nt, Human
cuguccaaaggaggcug

SEQ ID NO: 3526260 - RNA, 18 nt, Human
cuguccaaaggaggcugg

SEQ ID NO: 3526261 - RNA, 15 nt, Human
cuguccaagcagauu

SEQ ID NO: 3526262 - RNA, 15 nt, Human
cuguccacacccagc

SEQ ID NO: 3526263 - RNA, 12 nt, Human
cuguccagacag

SEQ ID NO: 3526264 - RNA, 13 nt, Human
cuguccagacagc

SEQ ID NO: 3526265 - RNA, 16 nt, Human
cuguccagacagccug

SEQ ID NO: 3526266 - RNA, 13 nt, Human
cuguccagccugg

SEQ ID NO: 3526267 - RNA, 23 nt, Human
cuguccaggcacugcugcccagc

SEQ ID NO: 3526268 - RNA, 12 nt, Human
cuguccaucugc

SEQ ID NO: 3526269 - RNA, 22 nt, Human
cuguccaucugcccgccugccc

SEQ ID NO: 3526270 - RNA, 14 nt, Human
cuguccaugcuucu

SEQ ID NO: 3526271 - RNA, 22 nt, Human
cugucccagugccgagaaggaa

SEQ ID NO: 3526272 - RNA, 15 nt, Human
cugucccaugcaggc

SEQ ID NO: 3526273 - RNA, 18 nt, Human
cugucccaugcaggcccu

SEQ ID NO: 3526274 - RNA, 19 nt, Human
cugucccauggacacucca

SEQ ID NO: 3526275 - RNA, 15 nt, Human
cugucccauucccug

SEQ ID NO: 3526276 - RNA, 17 nt, Human
cugucccauucccuggg

SEQ ID NO: 3526277 - RNA, 18 nt, Human
cugucccauucccuggga

SEQ ID NO: 3526278 - RNA, 19 nt, Human
cuguccccacccuccacuc

SEQ ID NO: 3526279 - RNA, 15 nt, Human
cuguccccagccugg

SEQ ID NO: 3526280 - RNA, 16 nt, Human
cuguccccagccuggg

SEQ ID NO: 3526281 - RNA, 14 nt, Human
cugucccccagcuc

SEQ ID NO: 3526282 - RNA, 16 nt, Human
cugucccccagcucug

SEQ ID NO: 3526283 - RNA, 22 nt, Human
cugucccccugagaucagaguc

SEQ ID NO: 3526284 - RNA, 18 nt, Human
cuguccccgcacugggcu

SEQ ID NO: 3526285 - RNA, 22 nt, Human
cuguccccgcacugggcuuggg

SEQ ID NO: 3526286 - RNA, 15 nt, Human
cuguccccgcagccc

SEQ ID NO: 3526287 - RNA, 17 nt, Human
cuguccccgcagcccug

SEQ ID NO: 3526288 - RNA, 18 nt, Human
cuguccccguguugcaug

SEQ ID NO: 3526289 - RNA, 16 nt, Human
cuguccccucagcucc

SEQ ID NO: 3526290 - RNA, 17 nt, Human
cuguccccucagcucca

SEQ ID NO: 3526291 - RNA, 12 nt, Human
cuguccccucuu

SEQ ID NO: 3526292 - RNA, 19 nt, Human
cugucccuaguaaaaauac

SEQ ID NO: 3526293 - RNA, 16 nt, Human
cugucucuccaucugu

SEQ ID NO: 3526294 - RNA, 16 nt, Human
cugucucugccucccu

SEQ ID NO: 3526295 - RNA, 13 nt, Human
cugucucugcucg

SEQ ID NO: 3526296 - RNA, 21 nt, Human
cugucucugcucgcccuccuu

SEQ ID NO: 3526297 - RNA, 13 nt, Human
cugucucuggccu

SEQ ID NO: 3526298 - RNA, 14 nt, Human
cugucucugucaug

SEQ ID NO: 3526299 - RNA, 23 nt, Human
cugucucuuuaagggcaugccuu

SEQ ID NO: 3526300 - RNA, 14 nt, Human
cugucugauuggcu

SEQ ID NO: 3526301 - RNA, 15 nt, Human
cugucugcagccuug

SEQ ID NO: 3526302 - RNA, 11 nt, Human
cugucugcccc

SEQ ID NO: 3526303 - RNA, 14 nt, Human
cugucugcuccagc

SEQ ID NO: 3526304 - RNA, 17 nt, Human
cugucuggaagaugggg

SEQ ID NO: 3526305 - RNA, 18 nt, Human
cugucuggaagaugggga

SEQ ID NO: 3526306 - RNA, 20 nt, Human
cugucuggaggggagcucug

SEQ ID NO: 3526307 - RNA, 13 nt, Human
cugucuggcacag

SEQ ID NO: 3526308 - RNA, 15 nt, Human
cugucuggcacagcc

SEQ ID NO: 3526309 - RNA, 18 nt, Human
cugucuggcacagccugc

SEQ ID NO: 3526310 - RNA, 15 nt, Human
cugucuggccccccu

SEQ ID NO: 3526311 - RNA, 20 nt, Human
cugucuggcugaggauuuca

SEQ ID NO: 3526312 - RNA, 13 nt, Human
cugucugguggcc

SEQ ID NO: 3526313 - RNA, 18 nt, Human
cugucugguuuuaacaau

SEQ ID NO: 3526314 - RNA, 14 nt, Human
cugucuguaccuaa

SEQ ID NO: 3526315 - RNA, 12 nt, Human
cugucuguggcu

SEQ ID NO: 3526316 - RNA, 15 nt, Human
cugucuguuacacug

SEQ ID NO: 3526317 - RNA, 21 nt, Human
cugucuuaaacuaaaugugca

SEQ ID NO: 3526318 - RNA, 17 nt, Human
cugucuucaccugauuc

SEQ ID NO: 3526319 - RNA, 19 nt, Human
cugucuucauagcagauuu

SEQ ID NO: 3526320 - RNA, 13 nt, Human
cugucuucccagg

SEQ ID NO: 3526321 - RNA, 14 nt, Human
cugucuucccaggg

SEQ ID NO: 3526322 - RNA, 16 nt, Human
cugucuucccagggua

SEQ ID NO: 3526323 - RNA, 20 nt, Human
cugucuuccucaaaauaaag

SEQ ID NO: 3526324 - RNA, 16 nt, Human
cugucuuccugcauuc

SEQ ID NO: 3526325 - RNA, 11 nt, Human
cugucuuccuu

SEQ ID NO: 3526326 - RNA, 18 nt, Human
cugucuucugcuuuguug

SEQ ID NO: 3526327 - RNA, 13 nt, Human
cugucuucuggac

SEQ ID NO: 3526328 - RNA, 18 nt, Human
cugucuuguaauauuuug

SEQ ID NO: 3526329 - RNA, 19 nt, Human
cugucuuguaauauuuugu

SEQ ID NO: 3526330 - RNA, 16 nt, Human
cugucuuucagauaca

SEQ ID NO: 3526331 - RNA, 20 nt, Human
cugucuuucagauacauggu

SEQ ID NO: 3526332 - RNA, 11 nt, Human
cugucuuucca

SEQ ID NO: 3526333 - RNA, 13 nt, Human
cugucuuuccacu

SEQ ID NO: 3526334 - RNA, 19 nt, Human
cugucuuuccacucuggau

SEQ ID NO: 3526335 - RNA, 20 nt, Human
cugucuuuggaaaaauguuu

SEQ ID NO: 3526336 - RNA, 17 nt, Human
cugucuuuucuuugcca

SEQ ID NO: 3526337 - RNA, 21 nt, Human
cugucuuuucuuugccaucuc

SEQ ID NO: 3526338 - RNA, 19 nt, Human
cugugaaaccugugaagcu

SEQ ID NO: 3526339 - RNA, 15 nt, Human
cugugaaacuggcac

SEQ ID NO: 3526340 - RNA, 15 nt, Human
cugugaaaggaaaga

SEQ ID NO: 3526341 - RNA, 16 nt, Human
cugugaaaggaaagag

SEQ ID NO: 3526342 - RNA, 18 nt, Human
cugugaaaguacauuugg

SEQ ID NO: 3526343 - RNA, 14 nt, Human
cugugaaauaucau

SEQ ID NO: 3526344 - RNA, 14 nt, Human
cugugaaauuccca

SEQ ID NO: 3526345 - RNA, 19 nt, Human
cugugaacagagagacccu

SEQ ID NO: 3526346 - RNA, 21 nt, Human
cugugaacaggcugggcugcu

SEQ ID NO: 3526347 - RNA, 16 nt, Human
cugugaacgauuuaga

SEQ ID NO: 3526348 - RNA, 15 nt, Human
cugugaacugaaauu

SEQ ID NO: 3526349 - RNA, 15 nt, Human
cugugaacuugaaau

SEQ ID NO: 3526350 - RNA, 14 nt, Human
cugugaacuugggg

SEQ ID NO: 3526351 - RNA, 21 nt, Human
cugugaagaucucacucugcc

SEQ ID NO: 3526352 - RNA, 13 nt, Human
cugugaaguguua

SEQ ID NO: 3526353 - RNA, 21 nt, Human
cugugaauugagcugcagaaa

SEQ ID NO: 3526354 - RNA, 13 nt, Human
cugugacacacua

SEQ ID NO: 3526355 - RNA, 21 nt, Human
cugugacacacuacaccacac

SEQ ID NO: 3526356 - RNA, 18 nt, Human
cugugacaggcagcagag

SEQ ID NO: 3526357 - RNA, 21 nt, Human
cugugacaucucuauucccca

SEQ ID NO: 3526358 - RNA, 18 nt, Human
cugugacauggugccuga

SEQ ID NO: 3526359 - RNA, 20 nt, Human
cugugacauggugccugaga

SEQ ID NO: 3526360 - RNA, 14 nt, Human
cugugaccacaaca

SEQ ID NO: 3526361 - RNA, 17 nt, Human
cugugaccacaacauga

SEQ ID NO: 3526362 - RNA, 23 nt, Human
cugugaccaggaaggaagucagc

SEQ ID NO: 3526363 - RNA, 21 nt, Human
cugugacccacuucucaucac

SEQ ID NO: 3526364 - RNA, 23 nt, Human
cugugacccacuucucaucacac

SEQ ID NO: 3526365 - RNA, 15 nt, Human
cugugacccccagcu

SEQ ID NO: 3526366 - RNA, 17 nt, Human
cugugacccccagcucc

SEQ ID NO: 3526367 - RNA, 22 nt, Human
cugugaccucaggcacuagccu

SEQ ID NO: 3526368 - RNA, 14 nt, Human
cugugaccugcuga

SEQ ID NO: 3526369 - RNA, 21 nt, Human
cugugaccugcugagcucuga

SEQ ID NO: 3526370 - RNA, 16 nt, Human
cugugaccugugggga

SEQ ID NO: 3526371 - RNA, 21 nt, Human
cugugacugauguuaggcugg

SEQ ID NO: 3526372 - RNA, 18 nt, Human
cugugacuuaagaagccu

SEQ ID NO: 3526373 - RNA, 22 nt, Human
cugugacuucagcucuguuuua

SEQ ID NO: 3526374 - RNA, 23 nt, Human
cugugagaacccaguuucccguc

SEQ ID NO: 3526375 - RNA, 16 nt, Human
cugugagacccccaca

SEQ ID NO: 3526376 - RNA, 17 nt, Human
cugugagacccccacac

SEQ ID NO: 3526377 - RNA, 18 nt, Human
cugugagacucgagaacu

SEQ ID NO: 3526378 - RNA, 20 nt, Human
cugugagacucgagaacuuu

SEQ ID NO: 3526379 - RNA, 16 nt, Human
cugugagaugcuagaa

SEQ ID NO: 3526380 - RNA, 23 nt, Human
cugugagcaaggagcacaagcca

SEQ ID NO: 3526381 - RNA, 16 nt, Human
cugugagcaucacagu

SEQ ID NO: 3526382 - RNA, 14 nt, Human
cugugagcccagcu

SEQ ID NO: 3526383 - RNA, 17 nt, Human
cugugagcccagcuggg

SEQ ID NO: 3526384 - RNA, 21 nt, Human
cugugagccccugguccugag

SEQ ID NO: 3526385 - RNA, 12 nt, Human
cugugagccuug

SEQ ID NO: 3526386 - RNA, 17 nt, Human
cugugagccuuggcugu

SEQ ID NO: 3526387 - RNA, 20 nt, Human
cugugaggaaagcacacagu

SEQ ID NO: 3526388 - RNA, 17 nt, Human
cugugaggccccuggac

SEQ ID NO: 3526389 - RNA, 16 nt, Human
cugugaggcuguccug

SEQ ID NO: 3526390 - RNA, 22 nt, Human
cugugagggaggggaaaagcau

SEQ ID NO: 3526391 - RNA, 19 nt, Human
cugugaggggcucucucau

SEQ ID NO: 3526392 - RNA, 22 nt, Human
cugugaggugcagagugcccag

SEQ ID NO: 3526393 - RNA, 16 nt, Human
cugugagguuucccaa

SEQ ID NO: 3526394 - RNA, 22 nt, Human
cugugagguuucccaauggugu

SEQ ID NO: 3526395 - RNA, 18 nt, Human
cugugaguaaauauugag

SEQ ID NO: 3526396 - RNA, 21 nt, Human
cugugaguacuacaguccucc

SEQ ID NO: 3526397 - RNA, 22 nt, Human
cugugagucuuugguucuaagg

SEQ ID NO: 3526398 - RNA, 14 nt, Human
cugugaguguaagu

SEQ ID NO: 3526399 - RNA, 15 nt, Human
cugugaguucucccu

SEQ ID NO: 3526400 - RNA, 17 nt, Human
cugugaguucucccugu

SEQ ID NO: 3526401 - RNA, 17 nt, Human
cugugaguuuaaagcaa

SEQ ID NO: 3526402 - RNA, 15 nt, Human
cugugaucauuuauu

SEQ ID NO: 3526403 - RNA, 14 nt, Human
cugugaucuuauuu

SEQ ID NO: 3526404 - RNA, 17 nt, Human
cugugaucuuauuuuuc

SEQ ID NO: 3526405 - RNA, 18 nt, Human
cugugaucuuauuuuucu

SEQ ID NO: 3526406 - RNA, 19 nt, Human
cugugaugacauucccugc

SEQ ID NO: 3526407 - RNA, 15 nt, Human
cugugaugagcugau

SEQ ID NO: 3526408 - RNA, 18 nt, Human
cuguguugguguggccca

SEQ ID NO: 3526409 - RNA, 15 nt, Human
cuguguuguacagcu

SEQ ID NO: 3526410 - RNA, 21 nt, Human
cuguguuguauuaacaaaagu

SEQ ID NO: 3526411 - RNA, 19 nt, Human
cuguguugucucuagagca

SEQ ID NO: 3526412 - RNA, 14 nt, Human
cuguguuuaauuug

SEQ ID NO: 3526413 - RNA, 16 nt, Human
cuguguuuaauuugac

SEQ ID NO: 3526414 - RNA, 16 nt, Human
cuguguuuauaaaaua

SEQ ID NO: 3526415 - RNA, 17 nt, Human
cuguguuuauaaaauau

SEQ ID NO: 3526416 - RNA, 12 nt, Human
cuguguuuauuc

SEQ ID NO: 3526417 - RNA, 23 nt, Human
cuguguuuccaucucaaagaagg

SEQ ID NO: 3526418 - RNA, 15 nt, Human
cuguguuucuugccu

SEQ ID NO: 3526419 - RNA, 18 nt, Human
cuguguuucuugccucau

SEQ ID NO: 3526420 - RNA, 20 nt, Human
cuguguuugagcucugcagc

SEQ ID NO: 3526421 - RNA, 19 nt, Human
cuguguuugcuccccuucc

SEQ ID NO: 3526422 - RNA, 18 nt, Human
cuguguuuggcuuucagg

SEQ ID NO: 3526423 - RNA, 15 nt, Human
cuguguuuguuccua

SEQ ID NO: 3526424 - RNA, 22 nt, Human
cuguguuuugaaugguguugua

SEQ ID NO: 3526425 - RNA, 15 nt, Human
cuguuaaaagaugaa

SEQ ID NO: 3526426 - RNA, 19 nt, Human
cuguuaaaaucuauucugu

SEQ ID NO: 3526427 - RNA, 14 nt, Human
cuguuaaaaugcau

SEQ ID NO: 3526428 - RNA, 19 nt, Human
cuguuaaacuguuagcacu

SEQ ID NO: 3526429 - RNA, 17 nt, Human
cuguuaaauacaggaaa

SEQ ID NO: 3526430 - RNA, 16 nt, Human
cuguuaaauugcugug

SEQ ID NO: 3526431 - RNA, 12 nt, Human
cuguuaacugaa

SEQ ID NO: 3526432 - RNA, 19 nt, Human
cuguuaacugaauaccacu

SEQ ID NO: 3526433 - RNA, 15 nt, Human
cuguuaacuuauuca

SEQ ID NO: 3526434 - RNA, 14 nt, Human
cuguuaagagagga

SEQ ID NO: 3526435 - RNA, 19 nt, Human
cuguuaauguauuuguuca

SEQ ID NO: 3526436 - RNA, 14 nt, Human
cuguuacaguaaug

SEQ ID NO: 3526437 - RNA, 18 nt, Human
cuguuaccaugucacugu

SEQ ID NO: 3526438 - RNA, 17 nt, Human
aaauuuuuuuucauguu

SEQ ID NO: 3526439 - RNA, 17 nt, Human
aaauuuuuuuuguuuca

SEQ ID NO: 3526440 - RNA, 17 nt, Human
aaauuuuuuuuuuaaua

SEQ ID NO: 3526441 - RNA, 12 nt, Human
aacaaaaaccaa

SEQ ID NO: 3526442 - RNA, 12 nt, Human
aacaaaaagaac

SEQ ID NO: 3526443 - RNA, 13 nt, Human
aacaaaaagaaca

SEQ ID NO: 3526444 - RNA, 14 nt, Human
aacaaaaauuaggu

SEQ ID NO: 3526445 - RNA, 13 nt, Human
aacaaaaauuguc

SEQ ID NO: 3526446 - RNA, 9 nt, Human
aacaaaaca

SEQ ID NO: 3526447 - RNA, 12 nt, Human
aacaaaacaaaa

SEQ ID NO: 3526448 - RNA, 14 nt, Human
aacaaaacuauacu

SEQ ID NO: 3526449 - RNA, 17 nt, Human
aacaaaacugcauuuca

SEQ ID NO: 3526450 - RNA, 22 nt, Human
aacaaaagaagcccggcuccug

SEQ ID NO: 3526451 - RNA, 13 nt, Human
aacaaaauacauu

SEQ ID NO: 3526452 - RNA, 22 nt, Human
aacaaaauuuaguuuuuguucu

SEQ ID NO: 3526453 - RNA, 20 nt, Human
aacaaaauuugacuaauuuu

SEQ ID NO: 3526454 - RNA, 14 nt, Human
aacaaacagaugcu

SEQ ID NO: 3526455 - RNA, 18 nt, Human
aacaaacauugaugcuga

SEQ ID NO: 3526456 - RNA, 20 nt, Human
aacaaacauuguguugacau

SEQ ID NO: 3526457 - RNA, 18 nt, Human
aacaaacauuugcugaau

SEQ ID NO: 3526458 - RNA, 22 nt, Human
aacaaaccuguuucugcagcca

SEQ ID NO: 3526459 - RNA, 24 nt, Human
aacaaacugcacaugauuucacaa

SEQ ID NO: 3526460 - RNA, 12 nt, Human
aacaaagaaaua

SEQ ID NO: 3526461 - RNA, 17 nt, Human
aacaaagaguucaagaa

SEQ ID NO: 3526462 - RNA, 19 nt, Human
aacaaagauaucuuuucuu

SEQ ID NO: 3526463 - RNA, 22 nt, Human
aacaaagauaucuuuucuuuag

SEQ ID NO: 3526464 - RNA, 19 nt, Human
aacaaagcaauucuuucaa

SEQ ID NO: 3526465 - RNA, 15 nt, Human
aacaaagcacagugu

SEQ ID NO: 3526466 - RNA, 14 nt, Human
aacaaagcagccac

SEQ ID NO: 3526467 - RNA, 11 nt, Human
aacaaagccag

SEQ ID NO: 3526468 - RNA, 14 nt, Human
aacaaagccagaag

SEQ ID NO: 3526469 - RNA, 17 nt, Human
aacaaagccagaagcug

SEQ ID NO: 3526470 - RNA, 15 nt, Human
aacaaagcuguuaaa

SEQ ID NO: 3526471 - RNA, 17 nt, Human
aacaaagcuguuaaacu

SEQ ID NO: 3526472 - RNA, 19 nt, Human
aacaaagcuguuaaacugu

SEQ ID NO: 3526473 - RNA, 22 nt, Human
aacaaaggauuaauugcugcaa

SEQ ID NO: 3526474 - RNA, 19 nt, Human
aacaaaggcaaguuaagag

SEQ ID NO: 3526475 - RNA, 21 nt, Human
aacaaaggcaaguuaagagaa

SEQ ID NO: 3526476 - RNA, 17 nt, Human
aacaaaguggaaggaaa

SEQ ID NO: 3526477 - RNA, 18 nt, Human
aacaaaguggaaggaaag

SEQ ID NO: 3526478 - RNA, 13 nt, Human
aacaaaguuacua

SEQ ID NO: 3526479 - RNA, 23 nt, Human
aacaaaguuacuagguaacuuca

SEQ ID NO: 3526480 - RNA, 16 nt, Human
aacaaauaauuuuuaa

SEQ ID NO: 3526481 - RNA, 19 nt, Human
aacaaaucuaggaaaauau

SEQ ID NO: 3526482 - RNA, 20 nt, Human
aacaaaucuaggaaaauauu

SEQ ID NO: 3526483 - RNA, 23 nt, Human
aacaaaucuaggaaaauauuuug

SEQ ID NO: 3526484 - RNA, 14 nt, Human
aacaaaucuuccug

SEQ ID NO: 3526485 - RNA, 19 nt, Human
aacaaaugccaaauuaaaa

SEQ ID NO: 3526486 - RNA, 14 nt, Human
aacaaaugugaagg

SEQ ID NO: 3526487 - RNA, 21 nt, Human
aacaaauuagguuuuguacaa

SEQ ID NO: 3526488 - RNA, 23 nt, Human
aacaaauucugaauauuuuuuga

SEQ ID NO: 3526489 - RNA, 13 nt, Human
aacaacaaaaaau

SEQ ID NO: 3526490 - RNA, 21 nt, Human
aacaacaaauaauuuuuuagu

SEQ ID NO: 3526491 - RNA, 14 nt, Human
aacaacauauacaa

SEQ ID NO: 3526492 - RNA, 17 nt, Human
aacaacauuuauaugua

SEQ ID NO: 3526493 - RNA, 13 nt, Human
aacaaccuggaga

SEQ ID NO: 3526494 - RNA, 22 nt, Human
aacaaccuggccgcguuuagac

SEQ ID NO: 3526495 - RNA, 22 nt, Human
aacaacgcuugugaauguauuu

SEQ ID NO: 3526496 - RNA, 21 nt, Human
aacaacuccuagggccacuga

SEQ ID NO: 3526497 - RNA, 22 nt, Human
aacaacuuaauguucugaauaa

SEQ ID NO: 3526498 - RNA, 12 nt, Human
aacaagaaaaca

SEQ ID NO: 3526499 - RNA, 14 nt, Human
aacaagaaaacaua

SEQ ID NO: 3526500 - RNA, 12 nt, Human
aacaagaaagga

SEQ ID NO: 3526501 - RNA, 16 nt, Human
aacaagaaaggagagu

SEQ ID NO: 3526502 - RNA, 17 nt, Human
aacaagaaaggagaguc

SEQ ID NO: 3526503 - RNA, 16 nt, Human
aacaagaaaguuuccc

SEQ ID NO: 3526504 - RNA, 22 nt, Human
aacaagaaauaauagaaauguc

SEQ ID NO: 3526505 - RNA, 14 nt, Human
aacaagaagaugaa

SEQ ID NO: 3526506 - RNA, 21 nt, Human
aacaagaagccacagaccuag

SEQ ID NO: 3526507 - RNA, 11 nt, Human
aacaagaaugc

SEQ ID NO: 3526508 - RNA, 20 nt, Human
aacaagaccacguuucuaaa

SEQ ID NO: 3526509 - RNA, 23 nt, Human
aacaagaccucagugccuuccug

SEQ ID NO: 3526510 - RNA, 13 nt, Human
aacaagagugauu

SEQ ID NO: 3526511 - RNA, 17 nt, Human
aacaagaucuuucagga

SEQ ID NO: 3526512 - RNA, 17 nt, Human
aacaagaugaaauucca

SEQ ID NO: 3526513 - RNA, 20 nt, Human
aacaagauuuuaaagacaug

SEQ ID NO: 3526514 - RNA, 17 nt, Human
aacaagcauauaaaaug

SEQ ID NO: 3526515 - RNA, 22 nt, Human
aacaagccugacccuguaaaau

SEQ ID NO: 3526516 - RNA, 23 nt, Human
aacaagcuaauugggaguccagg

SEQ ID NO: 3526517 - RNA, 19 nt, Human
aacaagcuaggugcuaauu

SEQ ID NO: 3526518 - RNA, 15 nt, Human
aacaaggaugaauua

SEQ ID NO: 3526519 - RNA, 18 nt, Human
aacaaggcaaggcuguca

SEQ ID NO: 3526520 - RNA, 16 nt, Human
aacaaggcgaaauccu

SEQ ID NO: 3526521 - RNA, 16 nt, Human
aacaaggcuugcugca

SEQ ID NO: 3526522 - RNA, 13 nt, Human
aacaaguaccaaa

SEQ ID NO: 3526523 - RNA, 12 nt, Human
aacaaguauuug

SEQ ID NO: 3526524 - RNA, 20 nt, Human
aacaaguauuuguuaauuua

SEQ ID NO: 3526525 - RNA, 20 nt, Human
aacaaguuuuaauguauagu

SEQ ID NO: 3526526 - RNA, 17 nt, Human
aacaaguuuuucuguca

SEQ ID NO: 3526527 - RNA, 15 nt, Human
aacaauaaaacauua

SEQ ID NO: 3526528 - RNA, 12 nt, Human
aacaauaaaaga

SEQ ID NO: 3526529 - RNA, 19 nt, Human
aacaauaaaaguguccauu

SEQ ID NO: 3526530 - RNA, 14 nt, Human
aacaauaaaauuuu

SEQ ID NO: 3526531 - RNA, 15 nt, Human
aacaauaaagcaaua

SEQ ID NO: 3526532 - RNA, 21 nt, Human
aacaauaacuacuguguuccu

SEQ ID NO: 3526533 - RNA, 20 nt, Human
aacaauaagagcguuugccc

SEQ ID NO: 3526534 - RNA, 12 nt, Human
aacaauaccuga

SEQ ID NO: 3526535 - RNA, 20 nt, Human
aacaauaccugaaugcucug

SEQ ID NO: 3526536 - RNA, 22 nt, Human
aacaauccuagugcuuuccuuu

SEQ ID NO: 3526537 - RNA, 20 nt, Human
aacaaucuggaagaaaaaaa

SEQ ID NO: 3526538 - RNA, 16 nt, Human
aacaaucuguauauaa

SEQ ID NO: 3526539 - RNA, 18 nt, Human
aacaaugaaaacucuuug

SEQ ID NO: 3526540 - RNA, 12 nt, Human
aacaaugaaguu

SEQ ID NO: 3526541 - RNA, 21 nt, Human
aacaaugacuaauucuugcau

SEQ ID NO: 3526542 - RNA, 15 nt, Human
aacaaugauauaugg

SEQ ID NO: 3526543 - RNA, 17 nt, Human
aacaaugccuauuguaa

SEQ ID NO: 3526544 - RNA, 17 nt, Human
aacaaugcuguauuuua

SEQ ID NO: 3526545 - RNA, 22 nt, Human
aacaaugcuguauuuuaaaaga

SEQ ID NO: 3526546 - RNA, 17 nt, Human
aacaauggaaacugaau

SEQ ID NO: 3526547 - RNA, 17 nt, Human
aacaauggaguauucuc

SEQ ID NO: 3526548 - RNA, 13 nt, Human
aacaaugguaaca

SEQ ID NO: 3526549 - RNA, 21 nt, Human
aacaaugucaaggugcuguug

SEQ ID NO: 3526550 - RNA, 22 nt, Human
aacaaugucaaggugcuguugu

SEQ ID NO: 3526551 - RNA, 13 nt, Human
aacaauguuaagg

SEQ ID NO: 3526552 - RNA, 20 nt, Human
aacaauguuguuuuaagacu

SEQ ID NO: 3526553 - RNA, 14 nt, Human
aacaauucuaaaau

SEQ ID NO: 3526554 - RNA, 19 nt, Human
aacaauucuaaaaugauug

SEQ ID NO: 3526555 - RNA, 17 nt, Human
aacaauugaaguaaacu

SEQ ID NO: 3526556 - RNA, 23 nt, Human
aacaauuguguagccuuuuugua

SEQ ID NO: 3526557 - RNA, 13 nt, Human
aacaauuuaugaa

SEQ ID NO: 3526558 - RNA, 13 nt, Human
aacaauuuuaaug

SEQ ID NO: 3526559 - RNA, 21 nt, Human
aacaauuuucagauuugcaca

SEQ ID NO: 3526560 - RNA, 14 nt, Human
aacaauuuucugca

SEQ ID NO: 3526561 - RNA, 20 nt, Human
aacacaaagagaaaaagaaa

SEQ ID NO: 3526562 - RNA, 20 nt, Human
aacacaaagcuuuugcauau

SEQ ID NO: 3526563 - RNA, 21 nt, Human
aacacaaauuaugcuaagaau

SEQ ID NO: 3526564 - RNA, 18 nt, Human
aacacaagauugguguuu

SEQ ID NO: 3526565 - RNA, 19 nt, Human
aacacaagauugguguuuu

SEQ ID NO: 3526566 - RNA, 13 nt, Human
aacacaagcaaaa

SEQ ID NO: 3526567 - RNA, 16 nt, Human
aacacaagcaaaaaaa

SEQ ID NO: 3526568 - RNA, 21 nt, Human
aacacaaggucauggccacac

SEQ ID NO: 3526569 - RNA, 21 nt, Human
aacacacacacacacaacaaa

SEQ ID NO: 3526570 - RNA, 21 nt, Human
aacacacaggugcaacagacu

SEQ ID NO: 3526571 - RNA, 14 nt, Human
aacacacauaaagg

SEQ ID NO: 3526572 - RNA, 15 nt, Human
aacacacauaaagga

SEQ ID NO: 3526573 - RNA, 12 nt, Human
aacacaccuggu

SEQ ID NO: 3526574 - RNA, 13 nt, Human
cuguugcacccag

SEQ ID NO: 3526575 - RNA, 18 nt, Human
cuguugcacccagcccug

SEQ ID NO: 3526576 - RNA, 21 nt, Human
cuguugcacccagcccugguc

SEQ ID NO: 3526577 - RNA, 23 nt, Human
cuguugcacccagcccuggucuc

SEQ ID NO: 3526578 - RNA, 15 nt, Human
cuguugcacgugugu

SEQ ID NO: 3526579 - RNA, 12 nt, Human
cuguugcaguga

SEQ ID NO: 3526580 - RNA, 12 nt, Human
cuguugcauggg

SEQ ID NO: 3526581 - RNA, 21 nt, Human
cuguugccaggcuggagugca

SEQ ID NO: 3526582 - RNA, 18 nt, Human
cuguugccauggugaugg

SEQ ID NO: 3526583 - RNA, 18 nt, Human
cuuaauacuaccuugaaa

SEQ ID NO: 3526584 - RNA, 12 nt, Human
cuuaauauaaau

SEQ ID NO: 3526585 - RNA, 23 nt, Human
cuuaauauauuucuaaauguuug

SEQ ID NO: 3526586 - RNA, 15 nt, Human
cuuaauauuucuuca

SEQ ID NO: 3526587 - RNA, 15 nt, Human
cuuaauauuuuuaca

SEQ ID NO: 3526588 - RNA, 16 nt, Human
cuuaauauuuuuacau

SEQ ID NO: 3526589 - RNA, 18 nt, Human
cuuaaucaauuaauuuuu

SEQ ID NO: 3526590 - RNA, 21 nt, Human
cuuaaucagauagauauuccu

SEQ ID NO: 3526591 - RNA, 22 nt, Human
cuuaaucagguccucagagaau

SEQ ID NO: 3526592 - RNA, 18 nt, Human
cuuaauccagcugaugag

SEQ ID NO: 3526593 - RNA, 14 nt, Human
cuuaaucuaaaugg

SEQ ID NO: 3526594 - RNA, 14 nt, Human
cuuaaucuuugaaa

SEQ ID NO: 3526595 - RNA, 18 nt, Human
cuuaaucuuuucacaaau

SEQ ID NO: 3526596 - RNA, 20 nt, Human
cuuaaucuuuucacaaauaa

SEQ ID NO: 3526597 - RNA, 20 nt, Human
cuuaaugaaguuugaauguu

SEQ ID NO: 3526598 - RNA, 19 nt, Human
cuuaaugagacuuuaaaag

SEQ ID NO: 3526599 - RNA, 21 nt, Human
cuuaaugauccguuccauugc

SEQ ID NO: 3526600 - RNA, 18 nt, Human
cuuaaugccacuaaauug

SEQ ID NO: 3526601 - RNA, 16 nt, Human
cuuaauggcugauaau

SEQ ID NO: 3526602 - RNA, 20 nt, Human
cuuaauggcugauaauuuua

SEQ ID NO: 3526603 - RNA, 21 nt, Human
cuuaauguauguuaccaaaaa

SEQ ID NO: 3526604 - RNA, 22 nt, Human
cuuaaugugauuacugcucuau

SEQ ID NO: 3526605 - RNA, 13 nt, Human
cuuaauguucuua

SEQ ID NO: 3526606 - RNA, 20 nt, Human
cuuaauuaaaagaauauuuu

SEQ ID NO: 3526607 - RNA, 13 nt, Human
cuuaauuaaguaa

SEQ ID NO: 3526608 - RNA, 14 nt, Human
cuuaauuaauuuga

SEQ ID NO: 3526609 - RNA, 18 nt, Human
cuuaauuaauuugauuaa

SEQ ID NO: 3526610 - RNA, 17 nt, Human
cuuaauuacuuaaaaaa

SEQ ID NO: 3526611 - RNA, 20 nt, Human
cuuaauuauuauaaaaauau

SEQ ID NO: 3526612 - RNA, 18 nt, Human
cuuaauuauuauuugugu

SEQ ID NO: 3526613 - RNA, 19 nt, Human
cuuaauuauuauuuguguu

SEQ ID NO: 3526614 - RNA, 20 nt, Human
cuuaauugccaccucuaaca

SEQ ID NO: 3526615 - RNA, 16 nt, Human
cuuaauuuauuauuaa

SEQ ID NO: 3526616 - RNA, 13 nt, Human
cuuaauuuccuuu

SEQ ID NO: 3526617 - RNA, 17 nt, Human
cuuaauuuccuuuuuga

SEQ ID NO: 3526618 - RNA, 20 nt, Human
cuuaauuuccuuuuugacac

SEQ ID NO: 3526619 - RNA, 12 nt, Human
cuuaauuuggaa

SEQ ID NO: 3526620 - RNA, 18 nt, Human
cuuaauuuggaaacuaau

SEQ ID NO: 3526621 - RNA, 20 nt, Human
cuuaauuuggaaacuaauaa

SEQ ID NO: 3526622 - RNA, 22 nt, Human
cuuaauuuggaaacuaauaaaa

SEQ ID NO: 3526623 - RNA, 14 nt, Human
cuuacaaaaacacu

SEQ ID NO: 3526624 - RNA, 20 nt, Human
cuuacaaaugauugcuuuua

SEQ ID NO: 3526625 - RNA, 22 nt, Human
cuuacaaaugauugcuuuuaaa

SEQ ID NO: 3526626 - RNA, 16 nt, Human
cuuacaauucccugcu

SEQ ID NO: 3526627 - RNA, 19 nt, Human
cuuacaauucccugcuguc

SEQ ID NO: 3526628 - RNA, 16 nt, Human
cuuauuccauauuaga

SEQ ID NO: 3526629 - RNA, 22 nt, Human
cuuauuccauauuagaaaacuu

SEQ ID NO: 3526630 - RNA, 14 nt, Human
cuuauuccaugacu

SEQ ID NO: 3526631 - RNA, 17 nt, Human
cuuauuccaugacugcu

SEQ ID NO: 3526632 - RNA, 18 nt, Human
cuuauuccaugacugcuu

SEQ ID NO: 3526633 - RNA, 22 nt, Human
cuuauugacaaccgagaagguu

SEQ ID NO: 3526634 - RNA, 14 nt, Human
cuuauugaccauuu

SEQ ID NO: 3526635 - RNA, 16 nt, Human
cuuauugaccauuuuu

SEQ ID NO: 3526636 - RNA, 13 nt, Human
cuuauugcccacg

SEQ ID NO: 3526637 - RNA, 14 nt, Human
cuuauugccucacu

SEQ ID NO: 3526638 - RNA, 19 nt, Human
cuuauugccucacuucagg

SEQ ID NO: 3526639 - RNA, 16 nt, Human
cuuauugcgcugcuac

SEQ ID NO: 3526640 - RNA, 14 nt, Human
cuuauugcugauuu

SEQ ID NO: 3526641 - RNA, 20 nt, Human
cuuauugcuuugaaacuaga

SEQ ID NO: 3526642 - RNA, 15 nt, Human
cuuauuggaacucug

SEQ ID NO: 3526643 - RNA, 18 nt, Human
cuuauuggaacucugcuu

SEQ ID NO: 3526644 - RNA, 13 nt, Human
cuuauuguaccuc

SEQ ID NO: 3526645 - RNA, 18 nt, Human
cuuauuguaccucucuua

SEQ ID NO: 3526646 - RNA, 23 nt, Human
cuuauuguagcauccuggaauau

SEQ ID NO: 3526647 - RNA, 17 nt, Human
cuuauuguuccaagaca

SEQ ID NO: 3526648 - RNA, 20 nt, Human
cuuauuguuccaagacauug

SEQ ID NO: 3526649 - RNA, 21 nt, Human
cuuauuguuccaagacauugu

SEQ ID NO: 3526650 - RNA, 14 nt, Human
cuuauuuaaauaga

SEQ ID NO: 3526651 - RNA, 21 nt, Human
cuuauuuauucauauuuucuu

SEQ ID NO: 3526652 - RNA, 14 nt, Human
cuuauuuauuguau

SEQ ID NO: 3526653 - RNA, 15 nt, Human
cuuauuucaucauuc

SEQ ID NO: 3526654 - RNA, 18 nt, Human
cuuauuucaucauucacu

SEQ ID NO: 3526655 - RNA, 14 nt, Human
cuuauuucauuucu

SEQ ID NO: 3526656 - RNA, 23 nt, Human
cuuauuugcugccacaccugagc

SEQ ID NO: 3526657 - RNA, 15 nt, Human
cuuauuugcuucauu

SEQ ID NO: 3526658 - RNA, 18 nt, Human
cuuauuuggcgugacccg

SEQ ID NO: 3526659 - RNA, 12 nt, Human
cuuauuuuaaug

SEQ ID NO: 3526660 - RNA, 14 nt, Human
cuuauuuucaagaa

SEQ ID NO: 3526661 - RNA, 15 nt, Human
cuuauuuuuucccaa

SEQ ID NO: 3526662 - RNA, 19 nt, Human
cuuauuuuuucccaaagcc

SEQ ID NO: 3526663 - RNA, 20 nt, Human
cuucaaaaguaaugccucug

SEQ ID NO: 3526664 - RNA, 16 nt, Human
cuucaaaaguauuuuc

SEQ ID NO: 3526665 - RNA, 22 nt, Human
cuucaaaauauugagcagaauu

SEQ ID NO: 3526666 - RNA, 15 nt, Human
cuucaaaauguauau

SEQ ID NO: 3526667 - RNA, 20 nt, Human
cuucaaaauguuaucuucuc

SEQ ID NO: 3526668 - RNA, 14 nt, Human
cuucaaacuacuuu

SEQ ID NO: 3526669 - RNA, 13 nt, Human
cuucaaagucuca

SEQ ID NO: 3526670 - RNA, 20 nt, Human
cuucaaagucucaaugaaau

SEQ ID NO: 3526671 - RNA, 13 nt, Human
cuucaaauuagaa

SEQ ID NO: 3526672 - RNA, 23 nt, Human
cuucaacagacccccucuagaaa

SEQ ID NO: 3526673 - RNA, 23 nt, Human
cuucaacauaacccacuugucac

SEQ ID NO: 3526674 - RNA, 19 nt, Human
cuucaacaucaauguucau

SEQ ID NO: 3526675 - RNA, 22 nt, Human
cuucaacaucaauguucauugu

SEQ ID NO: 3526676 - RNA, 17 nt, Human
cuucaacauccugccag

SEQ ID NO: 3526677 - RNA, 15 nt, Human
cuucaacauuuacau

SEQ ID NO: 3526678 - RNA, 20 nt, Human
cuucaaccauuccccauggg

SEQ ID NO: 3526679 - RNA, 22 nt, Human
cuucaacuccucgacaucacug

SEQ ID NO: 3526680 - RNA, 23 nt, Human
cuucaacugaccagccuccaugc

SEQ ID NO: 3526681 - RNA, 18 nt, Human
cuucaacuugugccuggg

SEQ ID NO: 3526682 - RNA, 18 nt, Human
cuucaagaaaacaggcac

SEQ ID NO: 3526683 - RNA, 18 nt, Human
cuucaagcaccagggaag

SEQ ID NO: 3526684 - RNA, 13 nt, Human
cuucaagcucuga

SEQ ID NO: 3526685 - RNA, 14 nt, Human
cuucaagcucugag

SEQ ID NO: 3526686 - RNA, 18 nt, Human
cuucaagcucugagggaa

SEQ ID NO: 3526687 - RNA, 18 nt, Human
cuucaagcugcuuuuugu

SEQ ID NO: 3526688 - RNA, 10 nt, Human
cuucaaggau

SEQ ID NO: 3526689 - RNA, 22 nt, Human
cuucaaggauccugagccagau

SEQ ID NO: 3526690 - RNA, 14 nt, Human
cuucaaggcuucag

SEQ ID NO: 3526691 - RNA, 17 nt, Human
cuucaaggcuucagucu

SEQ ID NO: 3526692 - RNA, 19 nt, Human
cuucaaggcuucagucuca

SEQ ID NO: 3526693 - RNA, 14 nt, Human
cuucaagucugugc

SEQ ID NO: 3526694 - RNA, 15 nt, Human
cuucaagucugugcc

SEQ ID NO: 3526695 - RNA, 16 nt, Human
cuucaaguuagcucag

SEQ ID NO: 3526696 - RNA, 16 nt, Human
cuucaauaauugucca

SEQ ID NO: 3526697 - RNA, 23 nt, Human
cuucaaucaauaacagccgcucc

SEQ ID NO: 3526698 - RNA, 18 nt, Human
cuucaauuuauugcacaa

SEQ ID NO: 3526699 - RNA, 19 nt, Human
cuucaauuuguauaaaaug

SEQ ID NO: 3526700 - RNA, 12 nt, Human
cuucacaacaga

SEQ ID NO: 3526701 - RNA, 14 nt, Human
cuucacacagacac

SEQ ID NO: 3526702 - RNA, 13 nt, Human
cuucacacugcaa

SEQ ID NO: 3526703 - RNA, 23 nt, Human
cuucacagaugggugcuuggagg

SEQ ID NO: 3526704 - RNA, 16 nt, Human
cuucacagcucugugu

SEQ ID NO: 3526705 - RNA, 14 nt, Human
cuucacauaguuuu

SEQ ID NO: 3526706 - RNA, 23 nt, Human
cuucacauauugauuuccguuaa

SEQ ID NO: 3526707 - RNA, 21 nt, Human
cuucacauccuguguuucuag

SEQ ID NO: 3526708 - RNA, 23 nt, Human
cuucaccaauaaguauucugugu

SEQ ID NO: 3526709 - RNA, 17 nt, Human
cuucaccauuuggcaau

SEQ ID NO: 3526710 - RNA, 22 nt, Human
cuucacccagcuaaucuguagg

SEQ ID NO: 3526711 - RNA, 14 nt, Human
cuucacccaggccu

SEQ ID NO: 3526712 - RNA, 17 nt, Human
cuucacccaggccuaug

SEQ ID NO: 3526713 - RNA, 14 nt, Human
cuucaccccagugg

SEQ ID NO: 3526714 - RNA, 17 nt, Human
cuucaccccggcaggcc

SEQ ID NO: 3526715 - RNA, 20 nt, Human
cuucaccccggcaggcccug

SEQ ID NO: 3526716 - RNA, 19 nt, Human
cuucaccuaagucucugug

SEQ ID NO: 3526717 - RNA, 15 nt, Human
cuucaccucacugaa

SEQ ID NO: 3526718 - RNA, 17 nt, Human
cuucaccuucaccuuca

SEQ ID NO: 3526719 - RNA, 15 nt, Human
cuucacgcccuuggc

SEQ ID NO: 3526720 - RNA, 15 nt, Human
cuucacggaagagcc

SEQ ID NO: 3526721 - RNA, 19 nt, Human
cuucacggaagagccuugc

SEQ ID NO: 3526722 - RNA, 21 nt, Human
cuucacguagaacauugguau

SEQ ID NO: 3526723 - RNA, 12 nt, Human
cuucacuacuuu

SEQ ID NO: 3526724 - RNA, 15 nt, Human
cuucacucacuguca

SEQ ID NO: 3526725 - RNA, 14 nt, Human
cuucacuccggugu

SEQ ID NO: 3526726 - RNA, 14 nt, Human
cuucacuccugcug

SEQ ID NO: 3526727 - RNA, 17 nt, Human
cuucacucgcccccggg

SEQ ID NO: 3526728 - RNA, 20 nt, Human
ccuugacuuugcuccucaca

SEQ ID NO: 3526729 - RNA, 13 nt, Human
ccuugacuuuuua

SEQ ID NO: 3526730 - RNA, 18 nt, Human
ccuugagaagauucuucc

SEQ ID NO: 3526731 - RNA, 11 nt, Human
ccuugagacca

SEQ ID NO: 3526732 - RNA, 16 nt, Human
ccuugagaccucagcc

SEQ ID NO: 3526733 - RNA, 16 nt, Human
ccuugagagaccaggc

SEQ ID NO: 3526734 - RNA, 21 nt, Human
ccuugagagaccaggcaaagc

SEQ ID NO: 3526735 - RNA, 13 nt, Human
ccuugagcccugg

SEQ ID NO: 3526736 - RNA, 14 nt, Human
ccuugagcccuggc

SEQ ID NO: 3526737 - RNA, 17 nt, Human
ccuugagcccuggcugu

SEQ ID NO: 3526738 - RNA, 12 nt, Human
ccuugagcugag

SEQ ID NO: 3526739 - RNA, 16 nt, Human
ccuugaggggagccag

SEQ ID NO: 3526740 - RNA, 18 nt, Human
ccuugaggggagccagga

SEQ ID NO: 3526741 - RNA, 21 nt, Human
ccuugagggugcuuguucccu

SEQ ID NO: 3526742 - RNA, 17 nt, Human
ccuugaggucucagccc

SEQ ID NO: 3526743 - RNA, 20 nt, Human
ccuugaguugauucagcucu

SEQ ID NO: 3526744 - RNA, 15 nt, Human
ccuugauauuuguau

SEQ ID NO: 3526745 - RNA, 11 nt, Human
ccuugaucauu

SEQ ID NO: 3526746 - RNA, 14 nt, Human
ccuugaucuguaua

SEQ ID NO: 3526747 - RNA, 15 nt, Human
ccuugaugcacagag

SEQ ID NO: 3526748 - RNA, 19 nt, Human
ccuugauggagauauuuac

SEQ ID NO: 3526749 - RNA, 19 nt, Human
ccuugauucccuuguuauu

SEQ ID NO: 3526750 - RNA, 14 nt, Human
ccuugauugggacu

SEQ ID NO: 3526751 - RNA, 21 nt, Human
ccuugauuuaucacacaaagc

SEQ ID NO: 3526752 - RNA, 23 nt, Human
ccuugcaaagaccauaaagucca

SEQ ID NO: 3526753 - RNA, 17 nt, Human
ccuugcaacacacagac

SEQ ID NO: 3526754 - RNA, 17 nt, Human
ccuugcaacuucauguc

SEQ ID NO: 3526755 - RNA, 17 nt, Human
ccuugcaccccucacuc

SEQ ID NO: 3526756 - RNA, 16 nt, Human
ccuugcaccugcaucc

SEQ ID NO: 3526757 - RNA, 17 nt, Human
ccuugcagaacugccau

SEQ ID NO: 3526758 - RNA, 17 nt, Human
ccuugcaguucagcacc

SEQ ID NO: 3526759 - RNA, 22 nt, Human
ccuugcaguucagcaccacccu

SEQ ID NO: 3526760 - RNA, 24 nt, Human
ccuugccaccccacccucccugga

SEQ ID NO: 3526761 - RNA, 19 nt, Human
ccuugccacuuugcacgac

SEQ ID NO: 3526762 - RNA, 20 nt, Human
ccuugccagcugcugagccg

SEQ ID NO: 3526763 - RNA, 23 nt, Human
ccuugccagcugcugagccgcag

SEQ ID NO: 3526764 - RNA, 18 nt, Human
ccuugcccacuccugcuc

SEQ ID NO: 3526765 - RNA, 21 nt, Human
ccuugcccacuccugcucugc

SEQ ID NO: 3526766 - RNA, 13 nt, Human
ccuugcccagggc

SEQ ID NO: 3526767 - RNA, 21 nt, Human
ccuugcccagggcucagccug

SEQ ID NO: 3526768 - RNA, 18 nt, Human
ccuugcccggauucuggg

SEQ ID NO: 3526769 - RNA, 19 nt, Human
ccuugcccggauucuggga

SEQ ID NO: 3526770 - RNA, 16 nt, Human
ccuugcccugaccucc

SEQ ID NO: 3526771 - RNA, 15 nt, Human
ccuugcccuugcccu

SEQ ID NO: 3526772 - RNA, 16 nt, Human
ccuugcccuugcccug

SEQ ID NO: 3526773 - RNA, 23 nt, Human
ccuugccuaaauuuaaugcugcc

SEQ ID NO: 3526774 - RNA, 16 nt, Human
ccuugccuccugugua

SEQ ID NO: 3526775 - RNA, 11 nt, Human
ccuugccuggu

SEQ ID NO: 3526776 - RNA, 14 nt, Human
ccuugccugugcca

SEQ ID NO: 3526777 - RNA, 15 nt, Human
ccuugcggcuccuca

SEQ ID NO: 3526778 - RNA, 16 nt, Human
ccuugcggcuccucag

SEQ ID NO: 3526779 - RNA, 14 nt, Human
ccuugcuaauuuuc

SEQ ID NO: 3526780 - RNA, 18 nt, Human
ccuugcuaccacggccuc

SEQ ID NO: 3526781 - RNA, 11 nt, Human
ccuugcuaccu

SEQ ID NO: 3526782 - RNA, 17 nt, Human
ccuugcuaccucaaggg

SEQ ID NO: 3526783 - RNA, 21 nt, Human
ccuugcuccuccuucugcugc

SEQ ID NO: 3526784 - RNA, 21 nt, Human
ccuugcuccuggccuugcuga

SEQ ID NO: 3526785 - RNA, 20 nt, Human
ccuugcucuccccugcccug

SEQ ID NO: 3526786 - RNA, 14 nt, Human
ccuugcucucccuc

SEQ ID NO: 3526787 - RNA, 15 nt, Human
ccuugcucucccucu

SEQ ID NO: 3526788 - RNA, 13 nt, Human
cuuagcugggaga

SEQ ID NO: 3526789 - RNA, 15 nt, Human
cuuagcuuagaccuc

SEQ ID NO: 3526790 - RNA, 17 nt, Human
cuuagcuuagaccucag

SEQ ID NO: 3526791 - RNA, 18 nt, Human
cuuagcuuagaccucagc

SEQ ID NO: 3526792 - RNA, 21 nt, Human
cuuagcuuagaccucagccug

SEQ ID NO: 3526793 - RNA, 16 nt, Human
cuuagcuuaucaauuu

SEQ ID NO: 3526794 - RNA, 11 nt, Human
cuuagcuucag

SEQ ID NO: 3526795 - RNA, 23 nt, Human
cuuagcuucuauuauagccacau

SEQ ID NO: 3526796 - RNA, 18 nt, Human
cuuagcuuugcucugcca

SEQ ID NO: 3526797 - RNA, 22 nt, Human
cuuaggaagagaaaccagggag

SEQ ID NO: 3526798 - RNA, 18 nt, Human
cuuaggagcagagcucug

SEQ ID NO: 3526799 - RNA, 17 nt, Human
cuuaggcaugcacagcu

SEQ ID NO: 3526800 - RNA, 22 nt, Human
cuuaggcauguaggacccugca

SEQ ID NO: 3526801 - RNA, 21 nt, Human
cuuaggcccggagcugccccu

SEQ ID NO: 3526802 - RNA, 20 nt, Human
cuuagggaagcuggccugag

SEQ ID NO: 3526803 - RNA, 23 nt, Human
cuuagggacaggaccccagcucu

SEQ ID NO: 3526804 - RNA, 23 nt, Human
cuuagggacuacccauagacaug

SEQ ID NO: 3526805 - RNA, 15 nt, Human
cuuagggcaccaggg

SEQ ID NO: 3526806 - RNA, 15 nt, Human
cuuagggcccuggag

SEQ ID NO: 3526807 - RNA, 17 nt, Human
cuuagggucucagggug

SEQ ID NO: 3526808 - RNA, 16 nt, Human
cuuaggguuuggagcu

SEQ ID NO: 3526809 - RNA, 18 nt, Human
cuuagguacuuauuccag

SEQ ID NO: 3526810 - RNA, 20 nt, Human
cuuaggugauccacucgccu

SEQ ID NO: 3526811 - RNA, 21 nt, Human
cuuagguggcaagcugugacu

SEQ ID NO: 3526812 - RNA, 17 nt, Human
cuuagguuggcaaaaag

SEQ ID NO: 3526813 - RNA, 21 nt, Human
cuuagguuggcaaaaaggcag

SEQ ID NO: 3526814 - RNA, 23 nt, Human
cuuagguuggcaaaaaggcagga

SEQ ID NO: 3526815 - RNA, 19 nt, Human
cuuaguaaaauuuauuuca

SEQ ID NO: 3526816 - RNA, 22 nt, Human
cuuaguaucucaucaacaaaga

SEQ ID NO: 3526817 - RNA, 16 nt, Human
cuuagucacugagaca

SEQ ID NO: 3526818 - RNA, 18 nt, Human
cuuagucacugagacagc

SEQ ID NO: 3526819 - RNA, 23 nt, Human
cuuagucccccaacucugagccc

SEQ ID NO: 3526820 - RNA, 17 nt, Human
cuuagugaaauuacuuc

SEQ ID NO: 3526821 - RNA, 15 nt, Human
cuuagugauguaauu

SEQ ID NO: 3526822 - RNA, 19 nt, Human
cuuagugcggacaaguuuu

SEQ ID NO: 3526823 - RNA, 13 nt, Human
cuuagugggccag

SEQ ID NO: 3526824 - RNA, 17 nt, Human
cuuagugguuccccacc

SEQ ID NO: 3526825 - RNA, 18 nt, Human
cuuaguguuucugugcau

SEQ ID NO: 3526826 - RNA, 16 nt, Human
cuuaguuaucagcuuu

SEQ ID NO: 3526827 - RNA, 23 nt, Human
cuuaguucaaguccugccucuua

SEQ ID NO: 3526828 - RNA, 21 nt, Human
cuuauaaaacagaguaaucuu

SEQ ID NO: 3526829 - RNA, 24 nt, Human
cuuauaaaguggaaguauguauau

SEQ ID NO: 3526830 - RNA, 13 nt, Human
cuuauaaauauga

SEQ ID NO: 3526831 - RNA, 17 nt, Human
cuuauaaauaugaagcu

SEQ ID NO: 3526832 - RNA, 21 nt, Human
cuuauaaaucauauugaugaa

SEQ ID NO: 3526833 - RNA, 23 nt, Human
cuuauaagguguuuucuguguaa

SEQ ID NO: 3526834 - RNA, 14 nt, Human
cuuauaauaaagga

SEQ ID NO: 3526835 - RNA, 16 nt, Human
cuuauaauaaaggacu

SEQ ID NO: 3526836 - RNA, 17 nt, Human
cuuauaauaaaggacug

SEQ ID NO: 3526837 - RNA, 13 nt, Human
cuuauaauacucu

SEQ ID NO: 3526838 - RNA, 15 nt, Human
cuuauaaugggcucu

SEQ ID NO: 3526839 - RNA, 22 nt, Human
cuuauaauucuuucaauacaga

SEQ ID NO: 3526840 - RNA, 21 nt, Human
cuuauaauuguucucagaauc

SEQ ID NO: 3526841 - RNA, 18 nt, Human
cuuauacuguacaauaaa

SEQ ID NO: 3526842 - RNA, 19 nt, Human
cuuauacuguacaauaaaa

SEQ ID NO: 3526843 - RNA, 16 nt, Human
cuuauagaauauuuau

SEQ ID NO: 3526844 - RNA, 15 nt, Human
cuuauagcacuuuga

SEQ ID NO: 3526845 - RNA, 22 nt, Human
cuuauagcacuuugaaauaccu

SEQ ID NO: 3526846 - RNA, 13 nt, Human
cuuauagguggcc

SEQ ID NO: 3526847 - RNA, 13 nt, Human
cuuauaguacaug

SEQ ID NO: 3526848 - RNA, 15 nt, Human
cuuauaguuacugug

SEQ ID NO: 3526849 - RNA, 20 nt, Human
cuuauauaguuuacuauuuu

SEQ ID NO: 3526850 - RNA, 21 nt, Human
cuuauaucuggccucugcuuu

SEQ ID NO: 3526851 - RNA, 17 nt, Human
cuuauaugggaaaccau

SEQ ID NO: 3526852 - RNA, 18 nt, Human
cuuauauguguauugcua

SEQ ID NO: 3526853 - RNA, 19 nt, Human
cuuauauucaaccauggac

SEQ ID NO: 3526854 - RNA, 21 nt, Human
cuuauauucaaccauggacuu

SEQ ID NO: 3526855 - RNA, 16 nt, Human
cuuauauugaagacaa

SEQ ID NO: 3526856 - RNA, 14 nt, Human
cuuauauuguaaga

SEQ ID NO: 3526857 - RNA, 14 nt, Human
cuuauauuguucac

SEQ ID NO: 3526858 - RNA, 15 nt, Human
cuuauauuuucguau

SEQ ID NO: 3526859 - RNA, 22 nt, Human
cuuauauuuucguaugaaaaug

SEQ ID NO: 3526860 - RNA, 19 nt, Human
cuuauauuuuuaauaaaag

SEQ ID NO: 3526861 - RNA, 19 nt, Human
cuuaucaagaguugugaca

SEQ ID NO: 3526862 - RNA, 15 nt, Human
cuuaucaagugucuu

SEQ ID NO: 3526863 - RNA, 17 nt, Human
cuuaucaagugucuucc

SEQ ID NO: 3526864 - RNA, 16 nt, Human
cuuaucaauuugucau

SEQ ID NO: 3526865 - RNA, 22 nt, Human
cuuaucaccacaguaaguuccu

SEQ ID NO: 3526866 - RNA, 13 nt, Human
cuuaucaccagcu

SEQ ID NO: 3526867 - RNA, 12 nt, Human
cuuaucagagcu

SEQ ID NO: 3526868 - RNA, 17 nt, Human
cuuaucaguuugcuaau

SEQ ID NO: 3526869 - RNA, 15 nt, Human
cuuaucauccacauu

SEQ ID NO: 3526870 - RNA, 15 nt, Human
cuuaucauucauucu

SEQ ID NO: 3526871 - RNA, 20 nt, Human
cuuauccacgagagcgcagc

SEQ ID NO: 3526872 - RNA, 21 nt, Human
cuuccaugagaacagcagggu

SEQ ID NO: 3526873 - RNA, 14 nt, Human
cuuccaugauucua

SEQ ID NO: 3526874 - RNA, 13 nt, Human
cuuccaugccuua

SEQ ID NO: 3526875 - RNA, 19 nt, Human
cuuccaugucgccucugca

SEQ ID NO: 3526876 - RNA, 20 nt, Human
cuuccaugucgccucugcau

SEQ ID NO: 3526877 - RNA, 22 nt, Human
cuuccaugucggccucuaaccc

SEQ ID NO: 3526878 - RNA, 14 nt, Human
cuuccauguggaga

SEQ ID NO: 3526879 - RNA, 18 nt, Human
cuuccauguggagaaagg

SEQ ID NO: 3526880 - RNA, 12 nt, Human
cuuccauuccac

SEQ ID NO: 3526881 - RNA, 17 nt, Human
cuuccauuccacacaga

SEQ ID NO: 3526882 - RNA, 12 nt, Human
cuuccauuuaua

SEQ ID NO: 3526883 - RNA, 16 nt, Human
cuuccauuugugugug

SEQ ID NO: 3526884 - RNA, 16 nt, Human
cuuccauuuuaauuuu

SEQ ID NO: 3526885 - RNA, 19 nt, Human
cuuccauuuucccccacua

SEQ ID NO: 3526886 - RNA, 18 nt, Human
cuucccaaaggacuccac

SEQ ID NO: 3526887 - RNA, 15 nt, Human
cuucccaacugcaag

SEQ ID NO: 3526888 - RNA, 16 nt, Human
cuucccaacugcaagu

SEQ ID NO: 3526889 - RNA, 17 nt, Human
cuucccaaguaagaggc

SEQ ID NO: 3526890 - RNA, 17 nt, Human
cuucccaaucagcacug

SEQ ID NO: 3526891 - RNA, 18 nt, Human
cuucccaaucagcacuga

SEQ ID NO: 3526892 - RNA, 19 nt, Human
cuucccaaucagcacugaa

SEQ ID NO: 3526893 - RNA, 11 nt, Human
cuucccaccuc

SEQ ID NO: 3526894 - RNA, 19 nt, Human
cuucccacucuagggcagu

SEQ ID NO: 3526895 - RNA, 13 nt, Human
cuucccacucugu

SEQ ID NO: 3526896 - RNA, 14 nt, Human
cuucccacucuucu

SEQ ID NO: 3526897 - RNA, 16 nt, Human
cuucccacucuucuca

SEQ ID NO: 3526898 - RNA, 21 nt, Human
cuucccagcagggccacuccc

SEQ ID NO: 3526899 - RNA, 18 nt, Human
cuucccagcucucccucu

SEQ ID NO: 3526900 - RNA, 21 nt, Human
cuucccagcucucccucuggc

SEQ ID NO: 3526901 - RNA, 12 nt, Human
cuucccagcugc

SEQ ID NO: 3526902 - RNA, 11 nt, Human
cuucccagggu

SEQ ID NO: 3526903 - RNA, 19 nt, Human
cuucccaggguagcccgcc

SEQ ID NO: 3526904 - RNA, 21 nt, Human
cuucccaggguagcccgccug

SEQ ID NO: 3526905 - RNA, 18 nt, Human
cuucccagguucaagcga

SEQ ID NO: 3526906 - RNA, 17 nt, Human
cuucccaguggcugcug

SEQ ID NO: 3526907 - RNA, 19 nt, Human
cuucccaguggcugcugcc

SEQ ID NO: 3526908 - RNA, 16 nt, Human
cuucccaucacuggag

SEQ ID NO: 3526909 - RNA, 17 nt, Human
cuucccaugacccaggc

SEQ ID NO: 3526910 - RNA, 19 nt, Human
cuucccaugacccaggcug

SEQ ID NO: 3526911 - RNA, 17 nt, Human
cuucccaugucuuucuc

SEQ ID NO: 3526912 - RNA, 20 nt, Human
cuuccccacccaccaacccu

SEQ ID NO: 3526913 - RNA, 23 nt, Human
cuuccccacccaccaacccucag

SEQ ID NO: 3526914 - RNA, 19 nt, Human
cuuccccagaaaggagacu

SEQ ID NO: 3526915 - RNA, 21 nt, Human
cuuccccauggcccugagcga

SEQ ID NO: 3526916 - RNA, 12 nt, Human
cuuccccauggg

SEQ ID NO: 3526917 - RNA, 13 nt, Human
cuuccccauggga

SEQ ID NO: 3526918 - RNA, 14 nt, Human
cuuccccaugggaa

SEQ ID NO: 3526919 - RNA, 16 nt, Human
cuucccccagcccauc

SEQ ID NO: 3526920 - RNA, 20 nt, Human
cuuccccccaaaacccggga

SEQ ID NO: 3526921 - RNA, 20 nt, Human
cuucccccgcaaugugcccc

SEQ ID NO: 3526922 - RNA, 16 nt, Human
cuucccccucucccag

SEQ ID NO: 3526923 - RNA, 23 nt, Human
cuuccccgagggaugaugccaca

SEQ ID NO: 3526924 - RNA, 18 nt, Human
cuuccccgcauuccaggc

SEQ ID NO: 3526925 - RNA, 16 nt, Human
cuuccccucccuggcu

SEQ ID NO: 3526926 - RNA, 17 nt, Human
cuuccccuggcacuggc

SEQ ID NO: 3526927 - RNA, 12 nt, Human
cuuccccuugcc

SEQ ID NO: 3526928 - RNA, 22 nt, Human
cuuccccuugcccuugcccuga

SEQ ID NO: 3526929 - RNA, 23 nt, Human
cuucccgccgcccagcccacccc

SEQ ID NO: 3526930 - RNA, 16 nt, Human
cuucccgcucagcccu

SEQ ID NO: 3526931 - RNA, 18 nt, Human
cuucccgcucagcccucc

SEQ ID NO: 3526932 - RNA, 19 nt, Human
cuucccgcucagcccuccc

SEQ ID NO: 3526933 - RNA, 14 nt, Human
cuucccgucccaua

SEQ ID NO: 3526934 - RNA, 15 nt, Human
cuucccgucccauau

SEQ ID NO: 3526935 - RNA, 16 nt, Human
cuucccuaaaaucagg

SEQ ID NO: 3526936 - RNA, 13 nt, Human
cuucccuaccuca

SEQ ID NO: 3526937 - RNA, 15 nt, Human
cuucccuaccucagg

SEQ ID NO: 3526938 - RNA, 16 nt, Human
cuucccuaccucaggc

SEQ ID NO: 3526939 - RNA, 20 nt, Human
cuucccuaccucaggcagga

SEQ ID NO: 3526940 - RNA, 17 nt, Human
cuucccuagggcugggu

SEQ ID NO: 3526941 - RNA, 17 nt, Human
cuucccuaucuuugcca

SEQ ID NO: 3526942 - RNA, 23 nt, Human
cuucccucaaagcuuccauucca

SEQ ID NO: 3526943 - RNA, 24 nt, Human
cuucccucaaagcuuccauuccac

SEQ ID NO: 3526944 - RNA, 16 nt, Human
cuucccucaucucucc

SEQ ID NO: 3526945 - RNA, 17 nt, Human
cuucccucaucucuccu

SEQ ID NO: 3526946 - RNA, 11 nt, Human
cuucccuccuc

SEQ ID NO: 3526947 - RNA, 12 nt, Human
cuucccuccucc

SEQ ID NO: 3526948 - RNA, 16 nt, Human
cuucccuccugcuuug

SEQ ID NO: 3526949 - RNA, 15 nt, Human
cuucccucugccugu

SEQ ID NO: 3526950 - RNA, 16 nt, Human
cuucccucugccuguc

SEQ ID NO: 3526951 - RNA, 16 nt, Human
cuucccucuguuucuc

SEQ ID NO: 3526952 - RNA, 15 nt, Human
cuucccucuucccuc

SEQ ID NO: 3526953 - RNA, 17 nt, Human
cuucccugaagcuccca

SEQ ID NO: 3526954 - RNA, 20 nt, Human
cuucccugacucauucugaa

SEQ ID NO: 3526955 - RNA, 14 nt, Human
cuucccugcugccu

SEQ ID NO: 3526956 - RNA, 19 nt, Human
cuucccugcugugaaagaa

SEQ ID NO: 3526957 - RNA, 22 nt, Human
cuucccuggaaaccuuccaccc

SEQ ID NO: 3526958 - RNA, 10 nt, Human
cuucccuggc

SEQ ID NO: 3526959 - RNA, 12 nt, Human
cuucccuggcuu

SEQ ID NO: 3526960 - RNA, 18 nt, Human
cuucccugggcugugcua

SEQ ID NO: 3526961 - RNA, 23 nt, Human
cuucccuggguuagacugccagc

SEQ ID NO: 3526962 - RNA, 20 nt, Human
cuucccugguucaagcgauu

SEQ ID NO: 3526963 - RNA, 12 nt, Human
cuucccuguccc

SEQ ID NO: 3526964 - RNA, 20 nt, Human
cuucccuuccacugccucug

SEQ ID NO: 3526965 - RNA, 15 nt, Human
cuucccuugagcccu

SEQ ID NO: 3526966 - RNA, 20 nt, Human
cuucccuuuccugaguccca

SEQ ID NO: 3526967 - RNA, 22 nt, Human
cuuccgaaaaauccucuuccuc

SEQ ID NO: 3526968 - RNA, 18 nt, Human
cuuccgacccucugggaa

SEQ ID NO: 3526969 - RNA, 23 nt, Human
cuuccgacccucugggaaccucc

SEQ ID NO: 3526970 - RNA, 14 nt, Human
cuuccgcagugugg

SEQ ID NO: 3526971 - RNA, 15 nt, Human
cuuccgcauccuagu

SEQ ID NO: 3526972 - RNA, 18 nt, Human
cuuccgcauccuagucuc

SEQ ID NO: 3526973 - RNA, 17 nt, Human
cuuccgccacuggggcu

SEQ ID NO: 3526974 - RNA, 18 nt, Human
cuuccgccccugccugcc

SEQ ID NO: 3526975 - RNA, 22 nt, Human
cuuccgccccugccugccaugu

SEQ ID NO: 3526976 - RNA, 15 nt, Human
cuuccgccccuuccc

SEQ ID NO: 3526977 - RNA, 15 nt, Human
cuuccggcuccugug

SEQ ID NO: 3526978 - RNA, 18 nt, Human
cuuccggcuccugugcuu

SEQ ID NO: 3526979 - RNA, 22 nt, Human
cuuccggggaaggauuuugcag

SEQ ID NO: 3526980 - RNA, 19 nt, Human
cuuccgguagggaggcagc

SEQ ID NO: 3526981 - RNA, 22 nt, Human
cuuccuaaauauuaugagaugc

SEQ ID NO: 3526982 - RNA, 19 nt, Human
cuuccuaaauuuuccuguc

SEQ ID NO: 3526983 - RNA, 21 nt, Human
cuuccuaaauuuuccuguccu

SEQ ID NO: 3526984 - RNA, 20 nt, Human
cuuccuaagccuguggcugu

SEQ ID NO: 3526985 - RNA, 18 nt, Human
cuuccuaauuccacagcu

SEQ ID NO: 3526986 - RNA, 18 nt, Human
cuuccuacaagagcagcc

SEQ ID NO: 3526987 - RNA, 19 nt, Human
cuuccuacccacaccucug

SEQ ID NO: 3526988 - RNA, 19 nt, Human
cuucugaugaaucuugcgu

SEQ ID NO: 3526989 - RNA, 22 nt, Human
cuucugcacauaaacucuuuua

SEQ ID NO: 3526990 - RNA, 12 nt, Human
cuucugcacccu

SEQ ID NO: 3526991 - RNA, 21 nt, Human
cuucugcacccuccacccugu

SEQ ID NO: 3526992 - RNA, 15 nt, Human
cuucugccauauucu

SEQ ID NO: 3526993 - RNA, 15 nt, Human
cuucugccugcaccc

SEQ ID NO: 3526994 - RNA, 15 nt, Human
cuucugccuggagac

SEQ ID NO: 3526995 - RNA, 18 nt, Human
cuucugccuguggaacug

SEQ ID NO: 3526996 - RNA, 14 nt, Human
cuucugccuguuau

SEQ ID NO: 3526997 - RNA, 21 nt, Human
cuucugccuuagucucaguuu

SEQ ID NO: 3526998 - RNA, 11 nt, Human
cuucugcuacu

SEQ ID NO: 3526999 - RNA, 13 nt, Human
cuucugcuacugg

SEQ ID NO: 3527000 - RNA, 18 nt, Human
cuucugcucagcucuggg

SEQ ID NO: 3527001 - RNA, 19 nt, Human
cuucugcuggauaaaauga

SEQ ID NO: 3527002 - RNA, 14 nt, Human
cuucugcugggcug

SEQ ID NO: 3527003 - RNA, 15 nt, Human
cuucugcugggcugg

SEQ ID NO: 3527004 - RNA, 16 nt, Human
cuucugcugggcuggg

SEQ ID NO: 3527005 - RNA, 19 nt, Human
cuucugcuggggccuggga

SEQ ID NO: 3527006 - RNA, 17 nt, Human
cuucugcuucagccucc

SEQ ID NO: 3527007 - RNA, 17 nt, Human
cuucugcuuuucugccc

SEQ ID NO: 3527008 - RNA, 18 nt, Human
cuucuggaaacugugaag

SEQ ID NO: 3527009 - RNA, 15 nt, Human
cuucuggacugguuu

SEQ ID NO: 3527010 - RNA, 16 nt, Human
cuucuggagucuccag

SEQ ID NO: 3527011 - RNA, 15 nt, Human
cuucuggauucuugg

SEQ ID NO: 3527012 - RNA, 16 nt, Human
cuucuggauucuuggc

SEQ ID NO: 3527013 - RNA, 17 nt, Human
cuucuggauucuuggcc

SEQ ID NO: 3527014 - RNA, 19 nt, Human
cuucuggcacuuggagacu

SEQ ID NO: 3527015 - RNA, 16 nt, Human
cuucuggccucccaca

SEQ ID NO: 3527016 - RNA, 22 nt, Human
cuucuggcucccucuucuuuca

SEQ ID NO: 3527017 - RNA, 18 nt, Human
cgcaggcccccaggugcc

SEQ ID NO: 3527018 - RNA, 16 nt, Human
cgcaggccucccugcc

SEQ ID NO: 3527019 - RNA, 14 nt, Human
cgcaggcuggcccu

SEQ ID NO: 3527020 - RNA, 15 nt, Human
cgcaggcuggcccug

SEQ ID NO: 3527021 - RNA, 21 nt, Human
cgcaggcuggcccugcccugg

SEQ ID NO: 3527022 - RNA, 13 nt, Human
cgcaggggaaacg

SEQ ID NO: 3527023 - RNA, 14 nt, Human
cgcaggugggcugg

SEQ ID NO: 3527024 - RNA, 18 nt, Human
cgcaggugggcuggacuu

SEQ ID NO: 3527025 - RNA, 20 nt, Human
cgcaguccacuucugacagc

SEQ ID NO: 3527026 - RNA, 15 nt, Human
cgcagucgucgcaca

SEQ ID NO: 3527027 - RNA, 21 nt, Human
cgcagucgucgcacagucucu

SEQ ID NO: 3527028 - RNA, 22 nt, Human
cgcagugggagcaaacugcaug

SEQ ID NO: 3527029 - RNA, 23 nt, Human
cgcagugugcacuaaggggcccg

SEQ ID NO: 3527030 - RNA, 19 nt, Human
cgcaucaaaagacaauucu

SEQ ID NO: 3527031 - RNA, 16 nt, Human
cgcaucagcugcucag

SEQ ID NO: 3527032 - RNA, 12 nt, Human
cgcaucauaugc

SEQ ID NO: 3527033 - RNA, 12 nt, Human
cgcauccagcaa

SEQ ID NO: 3527034 - RNA, 13 nt, Human
cgcauccccugcc

SEQ ID NO: 3527035 - RNA, 15 nt, Human
cgcauccccugccuc

SEQ ID NO: 3527036 - RNA, 18 nt, Human
cgcauccccugccuccau

SEQ ID NO: 3527037 - RNA, 13 nt, Human
cgcaucucacagc

SEQ ID NO: 3527038 - RNA, 13 nt, Human
cgcaugcagcagc

SEQ ID NO: 3527039 - RNA, 14 nt, Human
cgcaugcccccucg

SEQ ID NO: 3527040 - RNA, 16 nt, Human
cgcaugcccccucgug

SEQ ID NO: 3527041 - RNA, 18 nt, Human
cgcaugcccccucgugcc

SEQ ID NO: 3527042 - RNA, 21 nt, Human
cgcaugcccccucgugccagu

SEQ ID NO: 3527043 - RNA, 22 nt, Human
cgcaugcccccucgugccaguc

SEQ ID NO: 3527044 - RNA, 12 nt, Human
cgcauucccuga

SEQ ID NO: 3527045 - RNA, 19 nt, Human
cgcauucuaaccuggaggu

SEQ ID NO: 3527046 - RNA, 14 nt, Human
cgcauucucaugga

SEQ ID NO: 3527047 - RNA, 17 nt, Human
cgccaaauaaugucucu

SEQ ID NO: 3527048 - RNA, 12 nt, Human
cgccaaggcugg

SEQ ID NO: 3527049 - RNA, 16 nt, Human
cgccaaggcuggggga

SEQ ID NO: 3527050 - RNA, 22 nt, Human
cgccaagguagccaucccauga

SEQ ID NO: 3527051 - RNA, 16 nt, Human
cgccaagugcgugccg

SEQ ID NO: 3527052 - RNA, 21 nt, Human
cgccacacagaccaccaucca

SEQ ID NO: 3527053 - RNA, 14 nt, Human
cgccacagcccagc

SEQ ID NO: 3527054 - RNA, 14 nt, Human
cgccacagcccuuu

SEQ ID NO: 3527055 - RNA, 19 nt, Human
cgccacagcccuuuugucu

SEQ ID NO: 3527056 - RNA, 12 nt, Human
cgccacaggacc

SEQ ID NO: 3527057 - RNA, 16 nt, Human
cgccacauggcuuccu

SEQ ID NO: 3527058 - RNA, 22 nt, Human
cgccacauggcuuccuccugcg

SEQ ID NO: 3527059 - RNA, 16 nt, Human
cgccaccauuccugga

SEQ ID NO: 3527060 - RNA, 23 nt, Human
cgccaccgcgggugugggaaagc

SEQ ID NO: 3527061 - RNA, 21 nt, Human
cgccacuacacuccagccuga

SEQ ID NO: 3527062 - RNA, 12 nt, Human
cgccacucauuu

SEQ ID NO: 3527063 - RNA, 16 nt, Human
cgccacucauuucauc

SEQ ID NO: 3527064 - RNA, 21 nt, Human
cgccacucauuucaucucauu

SEQ ID NO: 3527065 - RNA, 15 nt, Human
cgccacucgcuuccc

SEQ ID NO: 3527066 - RNA, 22 nt, Human
cgccacugcacuccagccuggg

SEQ ID NO: 3527067 - RNA, 13 nt, Human
cgccacuggggcu

SEQ ID NO: 3527068 - RNA, 18 nt, Human
cgccacuggggcucagag

SEQ ID NO: 3527069 - RNA, 17 nt, Human
cgccagaggugcuucac

SEQ ID NO: 3527070 - RNA, 17 nt, Human
cgccagauucuuuccug

SEQ ID NO: 3527071 - RNA, 20 nt, Human
cgccagauucuuuccugagg

SEQ ID NO: 3527072 - RNA, 13 nt, Human
cgccagccuccuc

SEQ ID NO: 3527073 - RNA, 14 nt, Human
cgccagccuccucu

SEQ ID NO: 3527074 - RNA, 21 nt, Human
cgccagccuccucuggacggc

SEQ ID NO: 3527075 - RNA, 23 nt, Human
cgccagccuccucuggacggcag

SEQ ID NO: 3527076 - RNA, 15 nt, Human
cgccagcgaacuuga

SEQ ID NO: 3527077 - RNA, 14 nt, Human
cgccagcucuguuc

SEQ ID NO: 3527078 - RNA, 16 nt, Human
cgccagcugaugacuc

SEQ ID NO: 3527079 - RNA, 20 nt, Human
cgccaggaccgccaaagaau

SEQ ID NO: 3527080 - RNA, 16 nt, Human
cgccaggauggcgcag

SEQ ID NO: 3527081 - RNA, 19 nt, Human
cgccaggauggcgcaggaa

SEQ ID NO: 3527082 - RNA, 17 nt, Human
cgccagggaccccagaa

SEQ ID NO: 3527083 - RNA, 16 nt, Human
cgccagggagaccugg

SEQ ID NO: 3527084 - RNA, 22 nt, Human
cgccaggggaaaaucagccugc

SEQ ID NO: 3527085 - RNA, 14 nt, Human
cgccaucagcccaa

SEQ ID NO: 3527086 - RNA, 15 nt, Human
cgccaugcuccuggc

SEQ ID NO: 3527087 - RNA, 17 nt, Human
cgccaugcuccuggccc

SEQ ID NO: 3527088 - RNA, 18 nt, Human
cgccauucucaagcccug

SEQ ID NO: 3527089 - RNA, 15 nt, Human
cgccauugcacucca

SEQ ID NO: 3527090 - RNA, 19 nt, Human
cgccauugcacuccagccu

SEQ ID NO: 3527091 - RNA, 17 nt, Human
cgccauugccaccagga

SEQ ID NO: 3527092 - RNA, 13 nt, Human
cgccauuuaaaag

SEQ ID NO: 3527093 - RNA, 13 nt, Human
cgcccaccgcaug

SEQ ID NO: 3527094 - RNA, 14 nt, Human
cgcccaccucccca

SEQ ID NO: 3527095 - RNA, 18 nt, Human
cgcccacuguccugggcg

SEQ ID NO: 3527096 - RNA, 21 nt, Human
cgcccagauuaugagacacag

SEQ ID NO: 3527097 - RNA, 15 nt, Human
cgcccagcuccugac

SEQ ID NO: 3527098 - RNA, 18 nt, Human
cgcccagcugcaccugcc

SEQ ID NO: 3527099 - RNA, 23 nt, Human
cgcccagcugcaccugccagccu

SEQ ID NO: 3527100 - RNA, 11 nt, Human
cgcccaggaga

SEQ ID NO: 3527101 - RNA, 15 nt, Human
cgcccaguccuucca

SEQ ID NO: 3527102 - RNA, 19 nt, Human
cgcccagucuggaaugcag

SEQ ID NO: 3527103 - RNA, 21 nt, Human
cgccccaacccguggaggcug

SEQ ID NO: 3527104 - RNA, 21 nt, Human
cgccccagaucaccagcccgg

SEQ ID NO: 3527105 - RNA, 12 nt, Human
cgcccccaccuc

SEQ ID NO: 3527106 - RNA, 14 nt, Human
cgcccccaccucca

SEQ ID NO: 3527107 - RNA, 11 nt, Human
cgcccccagcc

SEQ ID NO: 3527108 - RNA, 13 nt, Human
cgcccccagccua

SEQ ID NO: 3527109 - RNA, 12 nt, Human
cgcccccagugu

SEQ ID NO: 3527110 - RNA, 18 nt, Human
cgccccccacacuucccu

SEQ ID NO: 3527111 - RNA, 19 nt, Human
cgcccccugcccuccccuc

SEQ ID NO: 3527112 - RNA, 13 nt, Human
cgcccccugucuc

SEQ ID NO: 3527113 - RNA, 13 nt, Human
cgcccccuuggcu

SEQ ID NO: 3527114 - RNA, 18 nt, Human
cgccccgaaaggucaccu

SEQ ID NO: 3527115 - RNA, 13 nt, Human
cgccccugagccc

SEQ ID NO: 3527116 - RNA, 14 nt, Human
cgccccugagccca

SEQ ID NO: 3527117 - RNA, 15 nt, Human
cgccccugagcccac

SEQ ID NO: 3527118 - RNA, 18 nt, Human
cgccccugagcccacugu

SEQ ID NO: 3527119 - RNA, 12 nt, Human
cgccccugcagc

SEQ ID NO: 3527120 - RNA, 13 nt, Human
cgccccugccugc

SEQ ID NO: 3527121 - RNA, 13 nt, Human
cgccccuuccccc

SEQ ID NO: 3527122 - RNA, 17 nt, Human
cgcccgagguggcugcc

SEQ ID NO: 3527123 - RNA, 21 nt, Human
cgcccgcccacuguccugggc

SEQ ID NO: 3527124 - RNA, 17 nt, Human
cgcccgccccugcagca

SEQ ID NO: 3527125 - RNA, 16 nt, Human
cgcccgcugggcugag

SEQ ID NO: 3527126 - RNA, 23 nt, Human
cgcccgcugggcugagccccuac

SEQ ID NO: 3527127 - RNA, 16 nt, Human
cgcccgggcccagagg

SEQ ID NO: 3527128 - RNA, 15 nt, Human
cgcccuaggccuggc

SEQ ID NO: 3527129 - RNA, 16 nt, Human
cgcccuaggccuggca

SEQ ID NO: 3527130 - RNA, 20 nt, Human
cgcccucauuacggcuccuc

SEQ ID NO: 3527131 - RNA, 22 nt, Human
cgcccucauuacggcuccucuc

SEQ ID NO: 3527132 - RNA, 12 nt, Human
cgcccucccagg

SEQ ID NO: 3527133 - RNA, 18 nt, Human
cgcccuccccuccccugc

SEQ ID NO: 3527134 - RNA, 22 nt, Human
cgcccuccccuccccugcugca

SEQ ID NO: 3527135 - RNA, 11 nt, Human
cgcccucuccu

SEQ ID NO: 3527136 - RNA, 16 nt, Human
cgcccucuguccugac

SEQ ID NO: 3527137 - RNA, 19 nt, Human
cgcccucuuccccucuaau

SEQ ID NO: 3527138 - RNA, 13 nt, Human
cgcccucuuccug

SEQ ID NO: 3527139 - RNA, 13 nt, Human
cgcccuggaagcc

SEQ ID NO: 3527140 - RNA, 22 nt, Human
cgcccuggaagccggcggccca

SEQ ID NO: 3527141 - RNA, 15 nt, Human
cgcccuggcccccac

SEQ ID NO: 3527142 - RNA, 12 nt, Human
cgcccugggcuc

SEQ ID NO: 3527143 - RNA, 17 nt, Human
cgcccuuuccuccucag

SEQ ID NO: 3527144 - RNA, 19 nt, Human
cgcccuuuccuccucaggc

SEQ ID NO: 3527145 - RNA, 19 nt, Human
cgccgagucugucucuguc

SEQ ID NO: 3527146 - RNA, 20 nt, Human
cgccgauagagggacggcca

SEQ ID NO: 3527147 - RNA, 15 nt, Human
cgccgcccagcccac

SEQ ID NO: 3527148 - RNA, 12 nt, Human
cgccgccucuuu

SEQ ID NO: 3527149 - RNA, 18 nt, Human
cgccggaguccacuccca

SEQ ID NO: 3527150 - RNA, 23 nt, Human
cgccggaguccacucccagugcu

SEQ ID NO: 3527151 - RNA, 22 nt, Human
cgccggcaauaaaagcccagga

SEQ ID NO: 3527152 - RNA, 16 nt, Human
cgccggggacagaggc

SEQ ID NO: 3527153 - RNA, 22 nt, Human
cgccggggacagaggccugccc

SEQ ID NO: 3527154 - RNA, 18 nt, Human
cgccgugaguucucaggg

SEQ ID NO: 3527155 - RNA, 21 nt, Human
cgccgugaguucucagggcuc

SEQ ID NO: 3527156 - RNA, 22 nt, Human
cgccgugaguucucagggcucc

SEQ ID NO: 3527157 - RNA, 23 nt, Human
cgccgugaguucucagggcuccu

SEQ ID NO: 3527158 - RNA, 19 nt, Human
cgccgugcugggcagcccg

SEQ ID NO: 3527159 - RNA, 15 nt, Human
cgccuagcugcuguc

SEQ ID NO: 3527160 - RNA, 21 nt, Human
cgccuaguggggucucccucu

SEQ ID NO: 3527161 - RNA, 17 nt, Human
cgccucaaugugguugc

SEQ ID NO: 3527162 - RNA, 21 nt, Human
cgccucacugcaaccuucacc

SEQ ID NO: 3527163 - RNA, 19 nt, Human
cuuggccuaaaccucaguu

SEQ ID NO: 3527164 - RNA, 18 nt, Human
cuuggccuagcccacccu

SEQ ID NO: 3527165 - RNA, 21 nt, Human
cuuggccuagcccacccugcu

SEQ ID NO: 3527166 - RNA, 20 nt, Human
cuuggccucacccucuggcu

SEQ ID NO: 3527167 - RNA, 17 nt, Human
cuuggccugaucagacc

SEQ ID NO: 3527168 - RNA, 15 nt, Human
cuuggccugcuguga

SEQ ID NO: 3527169 - RNA, 14 nt, Human
cuuggccugggccg

SEQ ID NO: 3527170 - RNA, 22 nt, Human
cuuggccugucucauccccagg

SEQ ID NO: 3527171 - RNA, 14 nt, Human
cuuggccuugggcu

SEQ ID NO: 3527172 - RNA, 15 nt, Human
cuuggcgaugccagc

SEQ ID NO: 3527173 - RNA, 17 nt, Human
cuuggcgaugccagcca

SEQ ID NO: 3527174 - RNA, 14 nt, Human
cuuggcgcugcccc

SEQ ID NO: 3527175 - RNA, 22 nt, Human
cuuggcgcugccccuggcagcc

SEQ ID NO: 3527176 - RNA, 18 nt, Human
cuuggcggcagcagccau

SEQ ID NO: 3527177 - RNA, 21 nt, Human
cuuggcucaauccucuaagcu

SEQ ID NO: 3527178 - RNA, 23 nt, Human
cuuggcucacacucgacaugaaa

SEQ ID NO: 3527179 - RNA, 12 nt, Human
cuuggcucagac

SEQ ID NO: 3527180 - RNA, 16 nt, Human
cuuggcuccaugcucc

SEQ ID NO: 3527181 - RNA, 16 nt, Human
cuuggcugcagggagu

SEQ ID NO: 3527182 - RNA, 17 nt, Human
cuuggcugcagggaguc

SEQ ID NO: 3527183 - RNA, 17 nt, Human
cuuggcugcuuggccuu

SEQ ID NO: 3527184 - RNA, 15 nt, Human
cuuggcuggacccag

SEQ ID NO: 3527185 - RNA, 16 nt, Human
cuuggcuggacccagc

SEQ ID NO: 3527186 - RNA, 17 nt, Human
cuuggcuggacccagcc

SEQ ID NO: 3527187 - RNA, 18 nt, Human
cuuggcuggacccagcca

SEQ ID NO: 3527188 - RNA, 12 nt, Human
cuuggcuggugu

SEQ ID NO: 3527189 - RNA, 21 nt, Human
cuuggcuggugugguacagag

SEQ ID NO: 3527190 - RNA, 23 nt, Human
cuuggcuggugugguacagagaa

SEQ ID NO: 3527191 - RNA, 21 nt, Human
cuuggcugugaggccccugga

SEQ ID NO: 3527192 - RNA, 14 nt, Human
cuuggcuuaaucau

SEQ ID NO: 3527193 - RNA, 15 nt, Human
cuuggcuuaccugac

SEQ ID NO: 3527194 - RNA, 17 nt, Human
cuuggcuuaccugaccu

SEQ ID NO: 3527195 - RNA, 19 nt, Human
cuuggcuuaccugaccucu

SEQ ID NO: 3527196 - RNA, 16 nt, Human
cuuggcuucucauacg

SEQ ID NO: 3527197 - RNA, 13 nt, Human
cuuggcuucugug

SEQ ID NO: 3527198 - RNA, 14 nt, Human
cuuggcuugcccac

SEQ ID NO: 3527199 - RNA, 14 nt, Human
cuuggcuuucaugu

SEQ ID NO: 3527200 - RNA, 13 nt, Human
cuuggcuuuguuu

SEQ ID NO: 3527201 - RNA, 16 nt, Human
cuuggcuuuucuagcc

SEQ ID NO: 3527202 - RNA, 15 nt, Human
cuugggacauccugu

SEQ ID NO: 3527203 - RNA, 23 nt, Human
cuugggaccgccagauggggccu

SEQ ID NO: 3527204 - RNA, 15 nt, Human
cuugggacuggguuu

SEQ ID NO: 3527205 - RNA, 17 nt, Human
cuugggacuggguuugg

SEQ ID NO: 3527206 - RNA, 14 nt, Human
cuugggaggcugag

SEQ ID NO: 3527207 - RNA, 23 nt, Human
cuugggaggcugaggcaggagaa

SEQ ID NO: 3527208 - RNA, 13 nt, Human
cuugggcaauauu

SEQ ID NO: 3527209 - RNA, 21 nt, Human
cuugggcaauauucucuguac

SEQ ID NO: 3527210 - RNA, 20 nt, Human
cuugggcacccccagccugg

SEQ ID NO: 3527211 - RNA, 22 nt, Human
cuugggcacccccagccugggc

SEQ ID NO: 3527212 - RNA, 22 nt, Human
cuugggcacuuuuuaauucacc

SEQ ID NO: 3527213 - RNA, 18 nt, Human
cuugggcagagcuggcuc

SEQ ID NO: 3527214 - RNA, 22 nt, Human
cuugggcagagcuggcucugag

SEQ ID NO: 3527215 - RNA, 19 nt, Human
cuugggcagaucucccaca

SEQ ID NO: 3527216 - RNA, 23 nt, Human
cuugggcagaucucccacaugcc

SEQ ID NO: 3527217 - RNA, 17 nt, Human
cuugggccaccccuccu

SEQ ID NO: 3527218 - RNA, 15 nt, Human
cuugggccagaagua

SEQ ID NO: 3527219 - RNA, 17 nt, Human
cuugggccauagcuccu

SEQ ID NO: 3527220 - RNA, 16 nt, Human
cuugggcccacaccuc

SEQ ID NO: 3527221 - RNA, 18 nt, Human
cuugggcccacaccuccu

SEQ ID NO: 3527222 - RNA, 13 nt, Human
cggcagcagccau

SEQ ID NO: 3527223 - RNA, 15 nt, Human
cggcagccccagccu

SEQ ID NO: 3527224 - RNA, 17 nt, Human
cggcagcuucugccccc

SEQ ID NO: 3527225 - RNA, 11 nt, Human
cggcaggcccu

SEQ ID NO: 3527226 - RNA, 15 nt, Human
cggcaggcccugcag

SEQ ID NO: 3527227 - RNA, 16 nt, Human
cggcaggcccugcagu

SEQ ID NO: 3527228 - RNA, 18 nt, Human
cggcaggcucacugccag

SEQ ID NO: 3527229 - RNA, 22 nt, Human
cggcagggcgggcagagggcug

SEQ ID NO: 3527230 - RNA, 14 nt, Human
cggcaggggccugg

SEQ ID NO: 3527231 - RNA, 18 nt, Human
cggcaugagacucagugc

SEQ ID NO: 3527232 - RNA, 20 nt, Human
cggcaugagacucagugcag

SEQ ID NO: 3527233 - RNA, 21 nt, Human
cggcaugagacucagugcaga

SEQ ID NO: 3527234 - RNA, 15 nt, Human
cggcauuaaagccau

SEQ ID NO: 3527235 - RNA, 14 nt, Human
cggcauuucaaaug

SEQ ID NO: 3527236 - RNA, 14 nt, Human
cggccaagaaugua

SEQ ID NO: 3527237 - RNA, 18 nt, Human
cggccaagauaggaccuu

SEQ ID NO: 3527238 - RNA, 23 nt, Human
cggccaagauaggaccuugggcc

SEQ ID NO: 3527239 - RNA, 12 nt, Human
cggccaauggaa

SEQ ID NO: 3527240 - RNA, 11 nt, Human
cggccaccucu

SEQ ID NO: 3527241 - RNA, 12 nt, Human
cggccaccucug

SEQ ID NO: 3527242 - RNA, 15 nt, Human
cggccaccugcggug

SEQ ID NO: 3527243 - RNA, 17 nt, Human
cggccaccugcggugcu

SEQ ID NO: 3527244 - RNA, 14 nt, Human
cggccagccagcca

SEQ ID NO: 3527245 - RNA, 15 nt, Human
cggccagccaugucu

SEQ ID NO: 3527246 - RNA, 20 nt, Human
cggccagccccggcccuggg

SEQ ID NO: 3527247 - RNA, 16 nt, Human
cggccagggagaagcu

SEQ ID NO: 3527248 - RNA, 16 nt, Human
cggccaggugccuccu

SEQ ID NO: 3527249 - RNA, 17 nt, Human
cggccaggugccuccug

SEQ ID NO: 3527250 - RNA, 18 nt, Human
cggccaggugccuccuga

SEQ ID NO: 3527251 - RNA, 22 nt, Human
cggccaguggccuuccccagca

SEQ ID NO: 3527252 - RNA, 15 nt, Human
cggcccaauccaagg

SEQ ID NO: 3527253 - RNA, 19 nt, Human
cggcccacagcucccaccc

SEQ ID NO: 3527254 - RNA, 15 nt, Human
cggccccaccagugc

SEQ ID NO: 3527255 - RNA, 16 nt, Human
cggccccaccagugcc

SEQ ID NO: 3527256 - RNA, 17 nt, Human
cggcccccuccaucggg

SEQ ID NO: 3527257 - RNA, 12 nt, Human
cggcccccugcc

SEQ ID NO: 3527258 - RNA, 14 nt, Human
cggccccggcccca

SEQ ID NO: 3527259 - RNA, 19 nt, Human
cggccccggccccagccag

SEQ ID NO: 3527260 - RNA, 17 nt, Human
cggccccgucuguggcu

SEQ ID NO: 3527261 - RNA, 18 nt, Human
cggccccugcugguucag

SEQ ID NO: 3527262 - RNA, 16 nt, Human
cggcccgcgccacagg

SEQ ID NO: 3527263 - RNA, 21 nt, Human
cggcccucaguagucccugca

SEQ ID NO: 3527264 - RNA, 12 nt, Human
cggcccugcaau

SEQ ID NO: 3527265 - RNA, 13 nt, Human
cggcccugggcuc

SEQ ID NO: 3527266 - RNA, 16 nt, Human
cggccgcauucccuga

SEQ ID NO: 3527267 - RNA, 20 nt, Human
cggccgccccuccucgugaa

SEQ ID NO: 3527268 - RNA, 12 nt, Human
cggccgcuccag

SEQ ID NO: 3527269 - RNA, 17 nt, Human
cggccuaugacuugggc

SEQ ID NO: 3527270 - RNA, 22 nt, Human
cggccuccguccaggagccugg

SEQ ID NO: 3527271 - RNA, 20 nt, Human
cggccuccuaaagugcuggg

SEQ ID NO: 3527272 - RNA, 21 nt, Human
cggccucuaaccccaggcccc

SEQ ID NO: 3527273 - RNA, 22 nt, Human
cggccucuaaccccaggccccg

SEQ ID NO: 3527274 - RNA, 13 nt, Human
cggccucucuggc

SEQ ID NO: 3527275 - RNA, 18 nt, Human
cggccucucuggccuccc

SEQ ID NO: 3527276 - RNA, 19 nt, Human
cggccugaugcucccuccc

SEQ ID NO: 3527277 - RNA, 23 nt, Human
cggccugaugcucccuccccugc

SEQ ID NO: 3527278 - RNA, 13 nt, Human
cggccugcuccca

SEQ ID NO: 3527279 - RNA, 14 nt, Human
cggccugcucccag

SEQ ID NO: 3527280 - RNA, 18 nt, Human
cggccuggcgcuccgacu

SEQ ID NO: 3527281 - RNA, 15 nt, Human
cggccuguccuccaa

SEQ ID NO: 3527282 - RNA, 19 nt, Human
cggccuucaacugaaaaga

SEQ ID NO: 3527283 - RNA, 15 nt, Human
cggccuuucuagccu

SEQ ID NO: 3527284 - RNA, 15 nt, Human
cggccuuuggcuuca

SEQ ID NO: 3527285 - RNA, 15 nt, Human
cggcgccaccauccu

SEQ ID NO: 3527286 - RNA, 17 nt, Human
cggcgccaccauccugc

SEQ ID NO: 3527287 - RNA, 18 nt, Human
cggcgccccugccaccuc

SEQ ID NO: 3527288 - RNA, 18 nt, Human
cggcgcccucuguccuga

SEQ ID NO: 3527289 - RNA, 18 nt, Human
cggcgccuggccuccagg

SEQ ID NO: 3527290 - RNA, 20 nt, Human
cggcgcuugccacuagggcu

SEQ ID NO: 3527291 - RNA, 17 nt, Human
cggcggccccuagcgcu

SEQ ID NO: 3527292 - RNA, 16 nt, Human
cggcggucccagcucc

SEQ ID NO: 3527293 - RNA, 14 nt, Human
cggcgucagccucc

SEQ ID NO: 3527294 - RNA, 18 nt, Human
cggcgucagccuccagcc

SEQ ID NO: 3527295 - RNA, 16 nt, Human
cggcguggcccaaggc

SEQ ID NO: 3527296 - RNA, 17 nt, Human
cggcguggcccaaggcu

SEQ ID NO: 3527297 - RNA, 13 nt, Human
cggcuaagcaggc

SEQ ID NO: 3527298 - RNA, 19 nt, Human
cggcuaauuuuuauauuuu

SEQ ID NO: 3527299 - RNA, 18 nt, Human
cggcuaauuuuuguauuu

SEQ ID NO: 3527300 - RNA, 18 nt, Human
cggcuacucagcagcccu

SEQ ID NO: 3527301 - RNA, 16 nt, Human
cggcucaagcccagga

SEQ ID NO: 3527302 - RNA, 17 nt, Human
cggcucaagcccaggag

SEQ ID NO: 3527303 - RNA, 17 nt, Human
cggcucacugcauccuc

SEQ ID NO: 3527304 - RNA, 20 nt, Human
cggcucagugcaaccucugc

SEQ ID NO: 3527305 - RNA, 21 nt, Human
cggcucagugcaaccucugcu

SEQ ID NO: 3527306 - RNA, 20 nt, Human
cggcuccaguccccagaacu

SEQ ID NO: 3527307 - RNA, 14 nt, Human
cggcucccagccuc

SEQ ID NO: 3527308 - RNA, 17 nt, Human
cuuuuaggacccuuccc

SEQ ID NO: 3527309 - RNA, 16 nt, Human
cuuuuaggccaaaaaa

SEQ ID NO: 3527310 - RNA, 21 nt, Human
cuuuuaguuguaucucuuuug

SEQ ID NO: 3527311 - RNA, 13 nt, Human
cuuuuauaaaaaa

SEQ ID NO: 3527312 - RNA, 22 nt, Human
cuuuuauaaaccucuaauuuau

SEQ ID NO: 3527313 - RNA, 13 nt, Human
cuuuuauaaacuu

SEQ ID NO: 3527314 - RNA, 16 nt, Human
cuuuuauaaacuuuac

SEQ ID NO: 3527315 - RNA, 13 nt, Human
cuuuuauaaagca

SEQ ID NO: 3527316 - RNA, 14 nt, Human
cuuuuauaaagcau

SEQ ID NO: 3527317 - RNA, 13 nt, Human
cuuuuauaaauua

SEQ ID NO: 3527318 - RNA, 20 nt, Human
cuuuuauaaauuaaauauau

SEQ ID NO: 3527319 - RNA, 22 nt, Human
cuuuuauaacuaguccuuuacu

SEQ ID NO: 3527320 - RNA, 21 nt, Human
cuuuuauaauaaaaggaaaag

SEQ ID NO: 3527321 - RNA, 12 nt, Human
cuuuuauaauuc

SEQ ID NO: 3527322 - RNA, 12 nt, Human
cuuuuauagcua

SEQ ID NO: 3527323 - RNA, 14 nt, Human
cuuuuauagcuauu

SEQ ID NO: 3527324 - RNA, 18 nt, Human
cuuuuauagcuauuacug

SEQ ID NO: 3527325 - RNA, 21 nt, Human
cuuuuauaggauuuauuuaaa

SEQ ID NO: 3527326 - RNA, 19 nt, Human
cuuuuauaggugagaaaaa

SEQ ID NO: 3527327 - RNA, 20 nt, Human
cuuuuauaggugagaaaaaa

SEQ ID NO: 3527328 - RNA, 15 nt, Human
cuuuuauaucuguau

SEQ ID NO: 3527329 - RNA, 15 nt, Human
cuuuuauauuuguau

SEQ ID NO: 3527330 - RNA, 13 nt, Human
cuuuuaucaaaca

SEQ ID NO: 3527331 - RNA, 17 nt, Human
cuuuuauccacuuaccu

SEQ ID NO: 3527332 - RNA, 22 nt, Human
cuuuuaucccaaaguuguugua

SEQ ID NO: 3527333 - RNA, 22 nt, Human
cuuuuaugagcucauguagcaa

SEQ ID NO: 3527334 - RNA, 23 nt, Human
cuuuuauguaguaauugacaugu

SEQ ID NO: 3527335 - RNA, 18 nt, Human
cuuuuaugugaaacaugu

SEQ ID NO: 3527336 - RNA, 14 nt, Human
cuuuuauguuugaa

SEQ ID NO: 3527337 - RNA, 17 nt, Human
cuuuuauguuugaauau

SEQ ID NO: 3527338 - RNA, 23 nt, Human
cuuuuauguuugaauauggacaa

SEQ ID NO: 3527339 - RNA, 14 nt, Human
cuuuuauuaaugca

SEQ ID NO: 3527340 - RNA, 16 nt, Human
cuuuuauuaaugcacu

SEQ ID NO: 3527341 - RNA, 17 nt, Human
cuuuuauucauuugagu

SEQ ID NO: 3527342 - RNA, 13 nt, Human
cuuuuauuguaua

SEQ ID NO: 3527343 - RNA, 17 nt, Human
cuuuuauuucuuaaaca

SEQ ID NO: 3527344 - RNA, 12 nt, Human
cuuuucaaaauc

SEQ ID NO: 3527345 - RNA, 12 nt, Human
cuuuucacaaau

SEQ ID NO: 3527346 - RNA, 15 nt, Human
cuuuucacaaauaaa

SEQ ID NO: 3527347 - RNA, 18 nt, Human
cuuuucacccuucuacuc

SEQ ID NO: 3527348 - RNA, 19 nt, Human
cuuuucacucccuccauca

SEQ ID NO: 3527349 - RNA, 20 nt, Human
cuuuucacugcugcaaggcc

SEQ ID NO: 3527350 - RNA, 16 nt, Human
cuuuucagcuucugcu

SEQ ID NO: 3527351 - RNA, 18 nt, Human
cuuuucagcuucugcugg

SEQ ID NO: 3527352 - RNA, 18 nt, Human
cuuuucauacauuuucua

SEQ ID NO: 3527353 - RNA, 18 nt, Human
cuuuucauaggucugaaa

SEQ ID NO: 3527354 - RNA, 20 nt, Human
cuuuucauaggucugaaauu

SEQ ID NO: 3527355 - RNA, 15 nt, Human
cuuuucaugcaaacu

SEQ ID NO: 3527356 - RNA, 17 nt, Human
cuuuucaugcaaacucu

SEQ ID NO: 3527357 - RNA, 18 nt, Human
cuuuucaugcgugugugu

SEQ ID NO: 3527358 - RNA, 17 nt, Human
cuuuuccaauaugugau

SEQ ID NO: 3527359 - RNA, 19 nt, Human
cuuuuccaauaugugauuu

SEQ ID NO: 3527360 - RNA, 14 nt, Human
cuuuuccaguauuu

SEQ ID NO: 3527361 - RNA, 22 nt, Human
cuuuucccacuccaagcccagc

SEQ ID NO: 3527362 - RNA, 19 nt, Human
cuuuucccccaaagugguu

SEQ ID NO: 3527363 - RNA, 14 nt, Human
cuuuuccccggucc

SEQ ID NO: 3527364 - RNA, 14 nt, Human
cuuuuccccugucc

SEQ ID NO: 3527365 - RNA, 18 nt, Human
cuuuuccccuuuccuguc

SEQ ID NO: 3527366 - RNA, 19 nt, Human
cuuuucccucuuuucuuac

SEQ ID NO: 3527367 - RNA, 14 nt, Human
cuuuucccugcuuc

SEQ ID NO: 3527368 - RNA, 14 nt, Human
cuuuucccuucuuu

SEQ ID NO: 3527369 - RNA, 13 nt, Human
cuuuuccucccuu

SEQ ID NO: 3527370 - RNA, 15 nt, Human
cuuuuccucccuugg

SEQ ID NO: 3527371 - RNA, 18 nt, Human
cuuuuccucgcuucuuuc

SEQ ID NO: 3527372 - RNA, 22 nt, Human
cuuuuccugauaaagcacagcu

SEQ ID NO: 3527373 - RNA, 13 nt, Human
cuuuuccuucccu

SEQ ID NO: 3527374 - RNA, 20 nt, Human
cuuuuccuuggggcaggcag

SEQ ID NO: 3527375 - RNA, 15 nt, Human
cuuuucguuaacauu

SEQ ID NO: 3527376 - RNA, 20 nt, Human
cuuuucuaaccaagaggcug

SEQ ID NO: 3527377 - RNA, 18 nt, Human
cuuuucuacagcaaauuu

SEQ ID NO: 3527378 - RNA, 23 nt, Human
cuuuucuacagcaaauuuauaau

SEQ ID NO: 3527379 - RNA, 17 nt, Human
cuuuucuacccuagcca

SEQ ID NO: 3527380 - RNA, 18 nt, Human
cuuuucuaggcuacaauu

SEQ ID NO: 3527381 - RNA, 12 nt, Human
cuuuucuaguuu

SEQ ID NO: 3527382 - RNA, 20 nt, Human
cuuuucucaacuggguccag

SEQ ID NO: 3527383 - RNA, 17 nt, Human
cuuuucucaguguuggu

SEQ ID NO: 3527384 - RNA, 14 nt, Human
cuuuucucccauau

SEQ ID NO: 3527385 - RNA, 18 nt, Human
cuuuucuccuaucuucau

SEQ ID NO: 3527386 - RNA, 13 nt, Human
cuuuucucuuucu

SEQ ID NO: 3527387 - RNA, 15 nt, Human
cuuuucugauccagu

SEQ ID NO: 3527388 - RNA, 14 nt, Human
cuuuucugcccugg

SEQ ID NO: 3527389 - RNA, 17 nt, Human
cuuuucugcccuggcug

SEQ ID NO: 3527390 - RNA, 19 nt, Human
cuuuucugcccuggcugcu

SEQ ID NO: 3527391 - RNA, 11 nt, Human
cuuuucugcug

SEQ ID NO: 3527392 - RNA, 19 nt, Human
cuuuucuggaauguaauca

SEQ ID NO: 3527393 - RNA, 13 nt, Human
cuuuucuguaauu

SEQ ID NO: 3527394 - RNA, 14 nt, Human
cuuuucuguaauuc

SEQ ID NO: 3527395 - RNA, 13 nt, Human
cuuuucuguacuu

SEQ ID NO: 3527396 - RNA, 21 nt, Human
cuuuucugucucugccucccu

SEQ ID NO: 3527397 - RNA, 16 nt, Human
cuuuucuuaaaccuuc

SEQ ID NO: 3527398 - RNA, 18 nt, Human
cuuuucuuacuccuccuc

SEQ ID NO: 3527399 - RNA, 23 nt, Human
cuuuucuucuauugccucugaga

SEQ ID NO: 3527400 - RNA, 11 nt, Human
cuuuucuugga

SEQ ID NO: 3527401 - RNA, 14 nt, Human
cuuuucuuuaaaga

SEQ ID NO: 3527402 - RNA, 17 nt, Human
cuuuucuuuaaagaagu

SEQ ID NO: 3527403 - RNA, 21 nt, Human
cuuuucuuuagagaacugaaa

SEQ ID NO: 3527404 - RNA, 16 nt, Human
cuuuucuuucuaccaa

SEQ ID NO: 3527405 - RNA, 21 nt, Human
cuuuucuuugccaucucugcu

SEQ ID NO: 3527406 - RNA, 12 nt, Human
cuuuucuuugua

SEQ ID NO: 3527407 - RNA, 14 nt, Human
cuuuucuuuguauc

SEQ ID NO: 3527408 - RNA, 20 nt, Human
cuuuucuuuucuacccuagc

SEQ ID NO: 3527409 - RNA, 17 nt, Human
cuuuucuuuuguuacug

SEQ ID NO: 3527410 - RNA, 22 nt, Human
cuuuucuuuuguuacuguucuu

SEQ ID NO: 3527411 - RNA, 16 nt, Human
cuuuugaaacaauacu

SEQ ID NO: 3527412 - RNA, 14 nt, Human
cuuuugaaaucugu

SEQ ID NO: 3527413 - RNA, 22 nt, Human
cuuuugaaguaguuuguauaac

SEQ ID NO: 3527414 - RNA, 21 nt, Human
cuuuugaauaaaaacuuugcu

SEQ ID NO: 3527415 - RNA, 19 nt, Human
cuuuugaauccaugcuugg

SEQ ID NO: 3527416 - RNA, 20 nt, Human
cuuuugaauccaugcuuggg

SEQ ID NO: 3527417 - RNA, 14 nt, Human
cuuuugaauuguuu

SEQ ID NO: 3527418 - RNA, 17 nt, Human
cuuuugacaaaggcaag

SEQ ID NO: 3527419 - RNA, 14 nt, Human
cuuuugacaacaaa

SEQ ID NO: 3527420 - RNA, 18 nt, Human
cuuuugacacugcucuaa

SEQ ID NO: 3527421 - RNA, 13 nt, Human
cuuuugacaugug

SEQ ID NO: 3527422 - RNA, 16 nt, Human
cuuuugagcauuuaga

SEQ ID NO: 3527423 - RNA, 17 nt, Human
cuuuugaggcuucuguu

SEQ ID NO: 3527424 - RNA, 21 nt, Human
cuuuugagugccuuacacaau

SEQ ID NO: 3527425 - RNA, 16 nt, Human
cuuuugauauuaaauu

SEQ ID NO: 3527426 - RNA, 15 nt, Human
cuuuugauguggugu

SEQ ID NO: 3527427 - RNA, 14 nt, Human
cuuuugcaaacuuu

SEQ ID NO: 3527428 - RNA, 21 nt, Human
cuuuugcaaagaaagaaaaaa

SEQ ID NO: 3527429 - RNA, 15 nt, Human
cuuuugcaaccagga

SEQ ID NO: 3527430 - RNA, 17 nt, Human
cuuuugcaaccaggaac

SEQ ID NO: 3527431 - RNA, 19 nt, Human
cuuuugcaagguuccacag

SEQ ID NO: 3527432 - RNA, 12 nt, Human
cuuuugcacccc

SEQ ID NO: 3527433 - RNA, 14 nt, Human
cuuuugcagaagag

SEQ ID NO: 3527434 - RNA, 23 nt, Human
cuuuugcagaagaggguguguuu

SEQ ID NO: 3527435 - RNA, 15 nt, Human
cuuuugcauauugca

SEQ ID NO: 3527436 - RNA, 23 nt, Human
cuuuugcauauugcauacuauua

SEQ ID NO: 3527437 - RNA, 13 nt, Human
cuuuugcauucuc

SEQ ID NO: 3527438 - RNA, 14 nt, Human
cuuuugcauucucc

SEQ ID NO: 3527439 - RNA, 16 nt, Human
cuuuugcccauuuuga

SEQ ID NO: 3527440 - RNA, 16 nt, Human
cuuuugccguuauuaa

SEQ ID NO: 3527441 - RNA, 18 nt, Human
cuuuugccguuauuaaaa

SEQ ID NO: 3527442 - RNA, 12 nt, Human
cguucucugccu

SEQ ID NO: 3527443 - RNA, 20 nt, Human
cguucuguacuguuacuggg

SEQ ID NO: 3527444 - RNA, 23 nt, Human
cguucuguacuguuacugggccc

SEQ ID NO: 3527445 - RNA, 20 nt, Human
cguucuguuuacaucaguuu

SEQ ID NO: 3527446 - RNA, 14 nt, Human
cguucuuguaauuu

SEQ ID NO: 3527447 - RNA, 13 nt, Human
cguugaaauugua

SEQ ID NO: 3527448 - RNA, 18 nt, Human
cguugaaauuguaauuau

SEQ ID NO: 3527449 - RNA, 17 nt, Human
cguugauguuggcuggg

SEQ ID NO: 3527450 - RNA, 12 nt, Human
cguugcccccau

SEQ ID NO: 3527451 - RNA, 16 nt, Human
cguugcccccauuucu

SEQ ID NO: 3527452 - RNA, 23 nt, Human
cguugcugugggaacgagagggg

SEQ ID NO: 3527453 - RNA, 20 nt, Human
cguuggaauuaaaacaaugu

SEQ ID NO: 3527454 - RNA, 19 nt, Human
cuaagaugugauauucuaa

SEQ ID NO: 3527455 - RNA, 22 nt, Human
cuaagaugugauauucuaagac

SEQ ID NO: 3527456 - RNA, 22 nt, Human
cuaagaugugcagcauuucacu

SEQ ID NO: 3527457 - RNA, 20 nt, Human
cuaagauguguucuuauuuu

SEQ ID NO: 3527458 - RNA, 19 nt, Human
cuaagauuacaaaucagaa

SEQ ID NO: 3527459 - RNA, 11 nt, Human
cuaagauucua

SEQ ID NO: 3527460 - RNA, 12 nt, Human
cuaagauucuaa

SEQ ID NO: 3527461 - RNA, 12 nt, Human
cuaagauucuga

SEQ ID NO: 3527462 - RNA, 21 nt, Human
cuuuuuuuuuuuugagacaga

SEQ ID NO: 3527463 - RNA, 22 nt, Human
gaaaaaaaaaaaagaggaaaac

SEQ ID NO: 3527464 - RNA, 17 nt, Human
gaaaaaaaaaaagaaag

SEQ ID NO: 3527465 - RNA, 20 nt, Human
gaaaaaaaaaaugcugaaca

SEQ ID NO: 3527466 - RNA, 15 nt, Human
gaaaaaaaaacagcu

SEQ ID NO: 3527467 - RNA, 12 nt, Human
gaaaaaaaaaga

SEQ ID NO: 3527468 - RNA, 15 nt, Human
gaaaaaaaaagaaaa

SEQ ID NO: 3527469 - RNA, 16 nt, Human
gaaaaaaaaagaaaaa

SEQ ID NO: 3527470 - RNA, 14 nt, Human
gaaaaaaaaaugcc

SEQ ID NO: 3527471 - RNA, 19 nt, Human
gaaaaaaaaguuucagaga

SEQ ID NO: 3527472 - RNA, 20 nt, Human
gaaaaaaaauaacacagaga

SEQ ID NO: 3527473 - RNA, 13 nt, Human
gaaaaaaaauuau

SEQ ID NO: 3527474 - RNA, 17 nt, Human
gaaaaaaacuuuuauaa

SEQ ID NO: 3527475 - RNA, 12 nt, Human
gaaaaaaagacu

SEQ ID NO: 3527476 - RNA, 20 nt, Human
gaaaaaaaguuugccagaag

SEQ ID NO: 3527477 - RNA, 15 nt, Human
gaaaaaaaucaucua

SEQ ID NO: 3527478 - RNA, 22 nt, Human
gaaaaaaaucuucuccagauuu

SEQ ID NO: 3527479 - RNA, 13 nt, Human
gaaaaaaauguau

SEQ ID NO: 3527480 - RNA, 19 nt, Human
gaaaaaaauguauuuuaug

SEQ ID NO: 3527481 - RNA, 15 nt, Human
gaaaaaaauugaaau

SEQ ID NO: 3527482 - RNA, 18 nt, Human
gaaaaaaauugaaaugua

SEQ ID NO: 3527483 - RNA, 10 nt, Human
gaaaaaagag

SEQ ID NO: 3527484 - RNA, 17 nt, Human
gaaaaaagagaaaagaa

SEQ ID NO: 3527485 - RNA, 18 nt, Human
gaaaaaagagaaaagaaa

SEQ ID NO: 3527486 - RNA, 10 nt, Human
gaaaaaauac

SEQ ID NO: 3527487 - RNA, 17 nt, Human
gaaaaaauacauuuuau

SEQ ID NO: 3527488 - RNA, 21 nt, Human
gaaaaaauguuggauuuauaa

SEQ ID NO: 3527489 - RNA, 14 nt, Human
gaaaaaauuuaaaa

SEQ ID NO: 3527490 - RNA, 23 nt, Human
gaaaaacaaacucguuuuuuaca

SEQ ID NO: 3527491 - RNA, 19 nt, Human
gaaaaacaaauucaucaaa

SEQ ID NO: 3527492 - RNA, 15 nt, Human
gaaaaacacaagcaa

SEQ ID NO: 3527493 - RNA, 23 nt, Human
gaaaaacacauggggaaaaaaau

SEQ ID NO: 3527494 - RNA, 23 nt, Human
gaaaaacaccgcuucugccuuuu

SEQ ID NO: 3527495 - RNA, 18 nt, Human
gaaaaacguguugccuug

SEQ ID NO: 3527496 - RNA, 20 nt, Human
gaaaaacucaaccaaauggu

SEQ ID NO: 3527497 - RNA, 16 nt, Human
gaaaaagaaaaaauau

SEQ ID NO: 3527498 - RNA, 22 nt, Human
gaaaaagaaaugcaaaaaucuc

SEQ ID NO: 3527499 - RNA, 12 nt, Human
gaaaaagaagca

SEQ ID NO: 3527500 - RNA, 16 nt, Human
gaaaaagcaaaaggca

SEQ ID NO: 3527501 - RNA, 15 nt, Human
gaaaaagcauguaca

SEQ ID NO: 3527502 - RNA, 17 nt, Human
gaaaaagcauguacagu

SEQ ID NO: 3527503 - RNA, 20 nt, Human
gaaaaagcauguacaguguu

SEQ ID NO: 3527504 - RNA, 11 nt, Human
gaaaaagcucc

SEQ ID NO: 3527505 - RNA, 21 nt, Human
gaaaaagcuccuguccuccca

SEQ ID NO: 3527506 - RNA, 18 nt, Human
gaaaaaggagcuuaccuc

SEQ ID NO: 3527507 - RNA, 15 nt, Human
gaaaaaggaggaaga

SEQ ID NO: 3527508 - RNA, 19 nt, Human
gaaaaagucauccaaucua

SEQ ID NO: 3527509 - RNA, 12 nt, Human
gaaaaagugaug

SEQ ID NO: 3527510 - RNA, 20 nt, Human
gaaaaaguuaaugcuuaaga

SEQ ID NO: 3527511 - RNA, 18 nt, Human
gaaaaaguucugcagaua

SEQ ID NO: 3527512 - RNA, 19 nt, Human
gaaaaauaacuucaagcaa

SEQ ID NO: 3527513 - RNA, 12 nt, Human
gaaaaauauaaa

SEQ ID NO: 3527514 - RNA, 16 nt, Human
gaaaaauaucuuggcc

SEQ ID NO: 3527515 - RNA, 10 nt, Human
gaaaaauaug

SEQ ID NO: 3527516 - RNA, 12 nt, Human
gaaaaauaugug

SEQ ID NO: 3527517 - RNA, 13 nt, Human
gaaaaauauguga

SEQ ID NO: 3527518 - RNA, 14 nt, Human
gaaaaauaugugaa

SEQ ID NO: 3527519 - RNA, 21 nt, Human
gaaaaaucaaguauuauaaac

SEQ ID NO: 3527520 - RNA, 15 nt, Human
gaaaaaucacuugau

SEQ ID NO: 3527521 - RNA, 17 nt, Human
gaaaaauccagaaagaa

SEQ ID NO: 3527522 - RNA, 18 nt, Human
gaaaaauccagaaagaaa

SEQ ID NO: 3527523 - RNA, 20 nt, Human
gaaaaauccucuuccucuga

SEQ ID NO: 3527524 - RNA, 20 nt, Human
gaaaaaucuaagugauauaa

SEQ ID NO: 3527525 - RNA, 21 nt, Human
gaaaaaucuugugcuagaaua

SEQ ID NO: 3527526 - RNA, 19 nt, Human
gaaaaaugaaagaugauuu

SEQ ID NO: 3527527 - RNA, 11 nt, Human
gaaaaauggag

SEQ ID NO: 3527528 - RNA, 12 nt, Human
gaaaaauguagg

SEQ ID NO: 3527529 - RNA, 14 nt, Human
gaaaaauguuuguc

SEQ ID NO: 3527530 - RNA, 11 nt, Human
gaaaaauuccu

SEQ ID NO: 3527531 - RNA, 15 nt, Human
gaaaaauuccuauug

SEQ ID NO: 3527532 - RNA, 21 nt, Human
gaaaaauugcugacuguagcu

SEQ ID NO: 3527533 - RNA, 18 nt, Human
gaaaaauuuaagcauugu

SEQ ID NO: 3527534 - RNA, 18 nt, Human
gaaaaauuugaaaaugau

SEQ ID NO: 3527535 - RNA, 13 nt, Human
gaaaacaaaacug

SEQ ID NO: 3527536 - RNA, 14 nt, Human
gaaaacaaggaagu

SEQ ID NO: 3527537 - RNA, 15 nt, Human
gaaaacaagugcugg

SEQ ID NO: 3527538 - RNA, 20 nt, Human
gaaaacaauggaguauucuc

SEQ ID NO: 3527539 - RNA, 14 nt, Human
gaaaacagaaaaaa

SEQ ID NO: 3527540 - RNA, 13 nt, Human
gaaaacagaaauu

SEQ ID NO: 3527541 - RNA, 15 nt, Human
gaaaacagaaauugg

SEQ ID NO: 3527542 - RNA, 20 nt, Human
gaaaacagaaauugguaccu

SEQ ID NO: 3527543 - RNA, 13 nt, Human
gaaaacagaccua

SEQ ID NO: 3527544 - RNA, 21 nt, Human
gaaaacagaccuaaugcuccu

SEQ ID NO: 3527545 - RNA, 23 nt, Human
gaaaacaggaaaaaaacuuuuau

SEQ ID NO: 3527546 - RNA, 20 nt, Human
gaaaacaggacuuaaaauga

SEQ ID NO: 3527547 - RNA, 12 nt, Human
gaaaacaggcac

SEQ ID NO: 3527548 - RNA, 22 nt, Human
gaaaacauaaaaaguuaaaaaa

SEQ ID NO: 3527549 - RNA, 14 nt, Human
gaaaacaucuccuu

SEQ ID NO: 3527550 - RNA, 15 nt, Human
gaaaacaucuccuua

SEQ ID NO: 3527551 - RNA, 12 nt, Human
gaaaacaugcua

SEQ ID NO: 3527552 - RNA, 15 nt, Human
gaaaacaugcuacac

SEQ ID NO: 3527553 - RNA, 15 nt, Human
gaaaacauguaauaa

SEQ ID NO: 3527554 - RNA, 11 nt, Human
gaaaaccaaaa

SEQ ID NO: 3527555 - RNA, 19 nt, Human
gaaaaccaagccguggcuu

SEQ ID NO: 3527556 - RNA, 18 nt, Human
gaaaaccaccccuuagau

SEQ ID NO: 3527557 - RNA, 16 nt, Human
gaaaaccaucuggccu

SEQ ID NO: 3527558 - RNA, 11 nt, Human
gaaaacccacc

SEQ ID NO: 3527559 - RNA, 12 nt, Human
gaaaacccagag

SEQ ID NO: 3527560 - RNA, 22 nt, Human
gaaaacccagagaggaaucaga

SEQ ID NO: 3527561 - RNA, 15 nt, Human
gaaaaccccuuccca

SEQ ID NO: 3527562 - RNA, 20 nt, Human
gaaaacccuugggccagaag

SEQ ID NO: 3527563 - RNA, 21 nt, Human
gaaaacccuugggccagaagu

SEQ ID NO: 3527564 - RNA, 21 nt, Human
gaaaaccuaaguccuuuaugu

SEQ ID NO: 3527565 - RNA, 14 nt, Human
gaaaacggagcuga

SEQ ID NO: 3527566 - RNA, 20 nt, Human
gaaaacguggcugcuucaag

SEQ ID NO: 3527567 - RNA, 16 nt, Human
gaaaacuacauuuuaa

SEQ ID NO: 3527568 - RNA, 17 nt, Human
gaaaacuacauuuuaac

SEQ ID NO: 3527569 - RNA, 18 nt, Human
gaaaacuacauuuuaaca

SEQ ID NO: 3527570 - RNA, 19 nt, Human
gaaaacuacauuuuaacau

SEQ ID NO: 3527571 - RNA, 21 nt, Human
gaaaacuacauuuuaacaugg

SEQ ID NO: 3527572 - RNA, 18 nt, Human
gaaaacuccaccuuccca

SEQ ID NO: 3527573 - RNA, 18 nt, Human
gaaaacucccauuuacgu

SEQ ID NO: 3527574 - RNA, 16 nt, Human
gaaaacugacagagga

SEQ ID NO: 3527575 - RNA, 17 nt, Human
gaaaacuggaauaagaa

SEQ ID NO: 3527576 - RNA, 11 nt, Human
gaaaacuguua

SEQ ID NO: 3527577 - RNA, 13 nt, Human
gaaaacuuaguuu

SEQ ID NO: 3527578 - RNA, 14 nt, Human
gaaaacuuauuuga

SEQ ID NO: 3527579 - RNA, 16 nt, Human
gaaaacuucagaagca

SEQ ID NO: 3527580 - RNA, 19 nt, Human
gaaaacuuguauuaugugu

SEQ ID NO: 3527581 - RNA, 22 nt, Human
gaaaacuuguauuauguguguu

SEQ ID NO: 3527582 - RNA, 16 nt, Human
gaaaacuuuaaagcgu

SEQ ID NO: 3527583 - RNA, 16 nt, Human
gaaaacuuuucucaga

SEQ ID NO: 3527584 - RNA, 18 nt, Human
gaaaagaaaaaaaaaaga

SEQ ID NO: 3527585 - RNA, 22 nt, Human
gaaaagaaaaaaaaaagaagaa

SEQ ID NO: 3527586 - RNA, 17 nt, Human
gaaaagaaaaaaaaaga

SEQ ID NO: 3527587 - RNA, 12 nt, Human
gaaaagaaaaag

SEQ ID NO: 3527588 - RNA, 23 nt, Human
gaaaagaaaaaugagccuggcaa

SEQ ID NO: 3527589 - RNA, 21 nt, Human
gaaaagaaaauuuuuguagua

SEQ ID NO: 3527590 - RNA, 22 nt, Human
gaaaagaaacucuauggucuua

SEQ ID NO: 3527591 - RNA, 21 nt, Human
gaaaagaaagaaguuauuuuc

SEQ ID NO: 3527592 - RNA, 11 nt, Human
gaaaagaaaua

SEQ ID NO: 3527593 - RNA, 22 nt, Human
gaaaagaaaucuauagaaagug

SEQ ID NO: 3527594 - RNA, 22 nt, Human
gaaaagaaaucuaugauuccag

SEQ ID NO: 3527595 - RNA, 16 nt, Human
gaaaagaauacagaaa

SEQ ID NO: 3527596 - RNA, 14 nt, Human
gaaaagaauagaag

SEQ ID NO: 3527597 - RNA, 22 nt, Human
gaaaagaauuguuggggguuuu

SEQ ID NO: 3527598 - RNA, 11 nt, Human
gaaaagaauuu

SEQ ID NO: 3527599 - RNA, 16 nt, Human
gaaaagacaagaaaau

SEQ ID NO: 3527600 - RNA, 13 nt, Human
cuacccuggacuu

SEQ ID NO: 3527601 - RNA, 14 nt, Human
cuacccuguguaua

SEQ ID NO: 3527602 - RNA, 19 nt, Human
cuacccuuaauuacuuaaa

SEQ ID NO: 3527603 - RNA, 17 nt, Human
cuaccgaaugugucuuu

SEQ ID NO: 3527604 - RNA, 19 nt, Human
cuaccgagucucuucucca

SEQ ID NO: 3527605 - RNA, 23 nt, Human
cuaccgccccaaaguaaaagaaa

SEQ ID NO: 3527606 - RNA, 16 nt, Human
cuaccgucuuuuccug

SEQ ID NO: 3527607 - RNA, 18 nt, Human
cuaccucaaccuguaaau

SEQ ID NO: 3527608 - RNA, 21 nt, Human
cuaccucaaccuguaaauuau

SEQ ID NO: 3527609 - RNA, 20 nt, Human
cuaccucaggcaggaagggc

SEQ ID NO: 3527610 - RNA, 15 nt, Human
cuaccucagguugcu

SEQ ID NO: 3527611 - RNA, 22 nt, Human
cuaccucagguugcugguugcu

SEQ ID NO: 3527612 - RNA, 12 nt, Human
cuaccucccucc

SEQ ID NO: 3527613 - RNA, 16 nt, Human
cuaccucccuugccuu

SEQ ID NO: 3527614 - RNA, 16 nt, Human
cuaccuccucuccuga

SEQ ID NO: 3527615 - RNA, 17 nt, Human
cuaccugaacacuuauu

SEQ ID NO: 3527616 - RNA, 22 nt, Human
cuaccugaacacuuauugcuuu

SEQ ID NO: 3527617 - RNA, 23 nt, Human
cuaccugaacacuuauugcuuug

SEQ ID NO: 3527618 - RNA, 11 nt, Human
cuaccugaggg

SEQ ID NO: 3527619 - RNA, 14 nt, Human
cuaccugaggggcc

SEQ ID NO: 3527620 - RNA, 15 nt, Human
cuaccugaggggccu

SEQ ID NO: 3527621 - RNA, 16 nt, Human
cuaccugccacucaca

SEQ ID NO: 3527622 - RNA, 22 nt, Human
cuaccugccacucacacagcca

SEQ ID NO: 3527623 - RNA, 16 nt, Human
cuaccugcccucaagg

SEQ ID NO: 3527624 - RNA, 17 nt, Human
cuaccugcccuggaaca

SEQ ID NO: 3527625 - RNA, 23 nt, Human
cuaccuggagggaagaguggagg

SEQ ID NO: 3527626 - RNA, 23 nt, Human
cuaccuguauuuaaaaauagaaa

SEQ ID NO: 3527627 - RNA, 17 nt, Human
cuaccuguguggacagg

SEQ ID NO: 3527628 - RNA, 16 nt, Human
cuaccuguucaguguc

SEQ ID NO: 3527629 - RNA, 22 nt, Human
cuaccuguugagcaucacagaa

SEQ ID NO: 3527630 - RNA, 22 nt, Human
cuaccuuaucacugcauuauuc

SEQ ID NO: 3527631 - RNA, 16 nt, Human
cuaccuucaaagcuga

SEQ ID NO: 3527632 - RNA, 18 nt, Human
cuaccuucauuucaggag

SEQ ID NO: 3527633 - RNA, 16 nt, Human
cuaccuucuccccagc

SEQ ID NO: 3527634 - RNA, 14 nt, Human
cuaccuugaaaaua

SEQ ID NO: 3527635 - RNA, 21 nt, Human
cuaccuugccccaacccuucu

SEQ ID NO: 3527636 - RNA, 13 nt, Human
cuaccuugcuuuu

SEQ ID NO: 3527637 - RNA, 21 nt, Human
cuaccuugguucccccacuga

SEQ ID NO: 3527638 - RNA, 16 nt, Human
cuaccuuucaaagcuu

SEQ ID NO: 3527639 - RNA, 17 nt, Human
cuaccuuuguauucucu

SEQ ID NO: 3527640 - RNA, 13 nt, Human
cuacgaaucuucc

SEQ ID NO: 3527641 - RNA, 22 nt, Human
cuacgcugaagauggcauccug

SEQ ID NO: 3527642 - RNA, 16 nt, Human
cuacgcuguccagaaa

SEQ ID NO: 3527643 - RNA, 12 nt, Human
cuacguuucuuu

SEQ ID NO: 3527644 - RNA, 14 nt, Human
cuacguuucuuuaa

SEQ ID NO: 3527645 - RNA, 15 nt, Human
cuacuaaaaauacaa

SEQ ID NO: 3527646 - RNA, 15 nt, Human
cuacuaaaaaugcaa

SEQ ID NO: 3527647 - RNA, 20 nt, Human
cuacuaaaaaugcaaaaaaa

SEQ ID NO: 3527648 - RNA, 16 nt, Human
cuacuaagaaaauaga

SEQ ID NO: 3527649 - RNA, 12 nt, Human
cuacuaauucca

SEQ ID NO: 3527650 - RNA, 17 nt, Human
cuacuaauuccacaccu

SEQ ID NO: 3527651 - RNA, 21 nt, Human
cuacuacaucgcccuccacau

SEQ ID NO: 3527652 - RNA, 22 nt, Human
cuacuagagucugaacagcugu

SEQ ID NO: 3527653 - RNA, 15 nt, Human
cuacuagaugucuuu

SEQ ID NO: 3527654 - RNA, 19 nt, Human
cuacuagcaaaauaaaaca

SEQ ID NO: 3527655 - RNA, 20 nt, Human
cuacuagggaaaugccuuug

SEQ ID NO: 3527656 - RNA, 18 nt, Human
cuacuagggaccugggga

SEQ ID NO: 3527657 - RNA, 20 nt, Human
cuacuagggaccuggggaag

SEQ ID NO: 3527658 - RNA, 21 nt, Human
cuacuagggaccuggggaagc

SEQ ID NO: 3527659 - RNA, 17 nt, Human
cuacuauaaagagaaga

SEQ ID NO: 3527660 - RNA, 14 nt, Human
cuacuauauaugug

SEQ ID NO: 3527661 - RNA, 18 nt, Human
cuacuauggcugaguucu

SEQ ID NO: 3527662 - RNA, 13 nt, Human
cuacucaaagcau

SEQ ID NO: 3527663 - RNA, 16 nt, Human
cuacucaagaggcuga

SEQ ID NO: 3527664 - RNA, 17 nt, Human
cuacucaagcggguggc

SEQ ID NO: 3527665 - RNA, 20 nt, Human
cuacucaagcggguggcucu

SEQ ID NO: 3527666 - RNA, 17 nt, Human
cuacucaaguagcauuu

SEQ ID NO: 3527667 - RNA, 15 nt, Human
cuacucacagucucu

SEQ ID NO: 3527668 - RNA, 15 nt, Human
cuacucacucaaguu

SEQ ID NO: 3527669 - RNA, 17 nt, Human
gaaaagguaaggugaag

SEQ ID NO: 3527670 - RNA, 23 nt, Human
gaaaagguagaggagucacguua

SEQ ID NO: 3527671 - RNA, 23 nt, Human
gaaaagguagcuuaccugacaca

SEQ ID NO: 3527672 - RNA, 20 nt, Human
gaaaagguucuuacugcuug

SEQ ID NO: 3527673 - RNA, 23 nt, Human
gaaaagguucuucaucccuuucc

SEQ ID NO: 3527674 - RNA, 13 nt, Human
gaaaagguugaau

SEQ ID NO: 3527675 - RNA, 23 nt, Human
gaaaagguuuaugaaaaagaaga

SEQ ID NO: 3527676 - RNA, 21 nt, Human
gaaaaguaaggugcaguuccc

SEQ ID NO: 3527677 - RNA, 14 nt, Human
gaaaaguaauauuu

SEQ ID NO: 3527678 - RNA, 17 nt, Human
gaaaaguaauauuuauu

SEQ ID NO: 3527679 - RNA, 20 nt, Human
gaaaaguaauauuuauuaaa

SEQ ID NO: 3527680 - RNA, 13 nt, Human
gaaaaguauguuc

SEQ ID NO: 3527681 - RNA, 19 nt, Human
gaaaaguauuuugaaguuu

SEQ ID NO: 3527682 - RNA, 12 nt, Human
gaaaaguucaua

SEQ ID NO: 3527683 - RNA, 23 nt, Human
gaaaaguuuagccccugaaagcc

SEQ ID NO: 3527684 - RNA, 17 nt, Human
gaaaauaaaaaaaagaa

SEQ ID NO: 3527685 - RNA, 16 nt, Human
gaaaauaaaaaguuaa

SEQ ID NO: 3527686 - RNA, 17 nt, Human
gaaaauaaaauuaagaa

SEQ ID NO: 3527687 - RNA, 20 nt, Human
gaaaauaaaauuaagaaugu

SEQ ID NO: 3527688 - RNA, 13 nt, Human
gaaaauaaagcua

SEQ ID NO: 3527689 - RNA, 18 nt, Human
gaaaauaacugaauuugg

SEQ ID NO: 3527690 - RNA, 17 nt, Human
gaaaauaagagcucagg

SEQ ID NO: 3527691 - RNA, 18 nt, Human
gaaaauaaucauucuuau

SEQ ID NO: 3527692 - RNA, 11 nt, Human
gaaaauaauug

SEQ ID NO: 3527693 - RNA, 20 nt, Human
gaaaauaauugacaggcgaa

SEQ ID NO: 3527694 - RNA, 19 nt, Human
gaaaauacaacuuaaauaa

SEQ ID NO: 3527695 - RNA, 17 nt, Human
gaaaauacuuaaauguu

SEQ ID NO: 3527696 - RNA, 18 nt, Human
gaaaauagagaugagcuu

SEQ ID NO: 3527697 - RNA, 19 nt, Human
gaaaauagcucuuucaggg

SEQ ID NO: 3527698 - RNA, 20 nt, Human
gaaaauaguaaaugcuuugu

SEQ ID NO: 3527699 - RNA, 16 nt, Human
gaaaauaguuauucag

SEQ ID NO: 3527700 - RNA, 14 nt, Human
gaaaauaguuuauu

SEQ ID NO: 3527701 - RNA, 15 nt, Human
gaaaauaguuuauuu

SEQ ID NO: 3527702 - RNA, 16 nt, Human
gaaaauauaugauggc

SEQ ID NO: 3527703 - RNA, 17 nt, Human
gaaaauaugucccagaa

SEQ ID NO: 3527704 - RNA, 17 nt, Human
gaaaauauuauguguuu

SEQ ID NO: 3527705 - RNA, 21 nt, Human
gaaaauauuauguguuuccau

SEQ ID NO: 3527706 - RNA, 20 nt, Human
gaaaauauucucuauuugaa

SEQ ID NO: 3527707 - RNA, 18 nt, Human
gaaaauauuuguaucaca

SEQ ID NO: 3527708 - RNA, 17 nt, Human
gaaaauauuuugaucuu

SEQ ID NO: 3527709 - RNA, 19 nt, Human
gaaaauauuuugucuaaaa

SEQ ID NO: 3527710 - RNA, 14 nt, Human
gaaaaucagccugc

SEQ ID NO: 3527711 - RNA, 16 nt, Human
gaaaaucagccugcuc

SEQ ID NO: 3527712 - RNA, 20 nt, Human
gaaaaucagccugcuccagc

SEQ ID NO: 3527713 - RNA, 11 nt, Human
gaaaaucauau

SEQ ID NO: 3527714 - RNA, 23 nt, Human
gaaaaucaucaagaagggcugca

SEQ ID NO: 3527715 - RNA, 22 nt, Human
gaaaaucuacacuccagugaga

SEQ ID NO: 3527716 - RNA, 18 nt, Human
gaaaaucugaauuggaau

SEQ ID NO: 3527717 - RNA, 15 nt, Human
gaaaaugaaccauuc

SEQ ID NO: 3527718 - RNA, 12 nt, Human
gaaaaugaauaa

SEQ ID NO: 3527719 - RNA, 13 nt, Human
gaaaaugaauaau

SEQ ID NO: 3527720 - RNA, 17 nt, Human
gaaaaugauacagcaga

SEQ ID NO: 3527721 - RNA, 20 nt, Human
gaaaaugauacgcaacauaa

SEQ ID NO: 3527722 - RNA, 14 nt, Human
gaaaaugaucugag

SEQ ID NO: 3527723 - RNA, 18 nt, Human
gaaaaugcaacaacaugu

SEQ ID NO: 3527724 - RNA, 20 nt, Human
gaaaaugcaacaacauguau

SEQ ID NO: 3527725 - RNA, 14 nt, Human
gaaaaugcagcagg

SEQ ID NO: 3527726 - RNA, 23 nt, Human
gaaaaugcagcagggaugcccug

SEQ ID NO: 3527727 - RNA, 23 nt, Human
gaaaaugcuguauuagucacaga

SEQ ID NO: 3527728 - RNA, 21 nt, Human
gaaaauggaagacagcucuua

SEQ ID NO: 3527729 - RNA, 19 nt, Human
gaaaauggacguguuauga

SEQ ID NO: 3527730 - RNA, 14 nt, Human
gaaaaugguauuuu

SEQ ID NO: 3527731 - RNA, 22 nt, Human
gaaaaugguccaauuaguuucc

SEQ ID NO: 3527732 - RNA, 18 nt, Human
gaaaaugguccaggagaa

SEQ ID NO: 3527733 - RNA, 20 nt, Human
gaaaaugguuuauuuuguau

SEQ ID NO: 3527734 - RNA, 23 nt, Human
gaaaaugguuuauuuuguauugu

SEQ ID NO: 3527735 - RNA, 16 nt, Human
gaaaauguaaguaaau

SEQ ID NO: 3527736 - RNA, 23 nt, Human
gaaaaugucagaaaccaguuaug

SEQ ID NO: 3527737 - RNA, 23 nt, Human
gaaaaugucuauucaaaauauca

SEQ ID NO: 3527738 - RNA, 21 nt, Human
gaaaaugucuuuauuaaaugu

SEQ ID NO: 3527739 - RNA, 14 nt, Human
gaaaauguguguuu

SEQ ID NO: 3527740 - RNA, 21 nt, Human
gaaaauguucuguuugcugug

SEQ ID NO: 3527741 - RNA, 21 nt, Human
gaaaauguugagaaucccaaa

SEQ ID NO: 3527742 - RNA, 14 nt, Human
gaaaauuaacauga

SEQ ID NO: 3527743 - RNA, 14 nt, Human
gaaaauuacaaaaa

SEQ ID NO: 3527744 - RNA, 21 nt, Human
gaacccuuggcuugcccacgu

SEQ ID NO: 3527745 - RNA, 18 nt, Human
gaacccuuuuggcccccg

SEQ ID NO: 3527746 - RNA, 23 nt, Human
gaacccuuuuggcccccgagcug

SEQ ID NO: 3527747 - RNA, 15 nt, Human
gaaccgaggcaggga

SEQ ID NO: 3527748 - RNA, 20 nt, Human
gaaccgagggggcugcuccc

SEQ ID NO: 3527749 - RNA, 21 nt, Human
gaaccgagggggcugcuccca

SEQ ID NO: 3527750 - RNA, 13 nt, Human
gaaccgcacagcu

SEQ ID NO: 3527751 - RNA, 14 nt, Human
gaaccgcacagcuc

SEQ ID NO: 3527752 - RNA, 16 nt, Human
gaaccgcacagcucag

SEQ ID NO: 3527753 - RNA, 17 nt, Human
gaaccgcacagcucagg

SEQ ID NO: 3527754 - RNA, 20 nt, Human
gaaccgcucaccuagagcca

SEQ ID NO: 3527755 - RNA, 12 nt, Human
gaaccguugcca

SEQ ID NO: 3527756 - RNA, 17 nt, Human
gaaccuaacuguaucuu

SEQ ID NO: 3527757 - RNA, 17 nt, Human
gaaccuagaagggcuag

SEQ ID NO: 3527758 - RNA, 21 nt, Human
gaaccuauuucucuuucuuua

SEQ ID NO: 3527759 - RNA, 22 nt, Human
gaaccucaccccgaggcccugc

SEQ ID NO: 3527760 - RNA, 23 nt, Human
gaaccucaccccgaggcccugca

SEQ ID NO: 3527761 - RNA, 19 nt, Human
gaaccucacgcaccuccca

SEQ ID NO: 3527762 - RNA, 13 nt, Human
gaaccucagccug

SEQ ID NO: 3527763 - RNA, 17 nt, Human
gaaccucagccuggcca

SEQ ID NO: 3527764 - RNA, 15 nt, Human
gaaccucauccagcu

SEQ ID NO: 3527765 - RNA, 21 nt, Human
gaaccucccagagguccagcc

SEQ ID NO: 3527766 - RNA, 22 nt, Human
gaaccuccccagccugcgccug

SEQ ID NO: 3527767 - RNA, 13 nt, Human
gaaccuccucugu

SEQ ID NO: 3527768 - RNA, 16 nt, Human
gaaccuccucugugaa

SEQ ID NO: 3527769 - RNA, 20 nt, Human
gaaccucgaguacugugggc

SEQ ID NO: 3527770 - RNA, 14 nt, Human
gaaccucugucuca

SEQ ID NO: 3527771 - RNA, 22 nt, Human
gaaccucugucucauccuccug

SEQ ID NO: 3527772 - RNA, 16 nt, Human
gaaccugcaaaaaaua

SEQ ID NO: 3527773 - RNA, 12 nt, Human
gaaccuggacca

SEQ ID NO: 3527774 - RNA, 16 nt, Human
gaaccuggaccaaagc

SEQ ID NO: 3527775 - RNA, 12 nt, Human
gaaccuggagag

SEQ ID NO: 3527776 - RNA, 21 nt, Human
gaaccuggagggcuggaaucu

SEQ ID NO: 3527777 - RNA, 17 nt, Human
gaaccuggaggggcuag

SEQ ID NO: 3527778 - RNA, 16 nt, Human
gaaccuggccuucagu

SEQ ID NO: 3527779 - RNA, 22 nt, Human
gaaccugggaaagagauuuaaa

SEQ ID NO: 3527780 - RNA, 21 nt, Human
gaaccuggguugcagacagga

SEQ ID NO: 3527781 - RNA, 16 nt, Human
gaaccuguccuaagga

SEQ ID NO: 3527782 - RNA, 20 nt, Human
gaaccuguccuugcacacuc

SEQ ID NO: 3527783 - RNA, 17 nt, Human
gaaccugugagcugcac

SEQ ID NO: 3527784 - RNA, 15 nt, Human
gaaccuugcuguccu

SEQ ID NO: 3527785 - RNA, 16 nt, Human
gaaccuugcuguccug

SEQ ID NO: 3527786 - RNA, 16 nt, Human
gaaccuuggccugggc

SEQ ID NO: 3527787 - RNA, 19 nt, Human
gaaccuugugccuggcuca

SEQ ID NO: 3527788 - RNA, 17 nt, Human
gaaccuuugugcccuau

SEQ ID NO: 3527789 - RNA, 22 nt, Human
gaaccuuuugagugccuuacac

SEQ ID NO: 3527790 - RNA, 14 nt, Human
gaacgagaggggaa

SEQ ID NO: 3527791 - RNA, 21 nt, Human
gaacgauauguagcagaaagg

SEQ ID NO: 3527792 - RNA, 20 nt, Human
gaacgcagcccuagagccug

SEQ ID NO: 3527793 - RNA, 21 nt, Human
gaacgcagcccuagagccugc

SEQ ID NO: 3527794 - RNA, 23 nt, Human
gaacgcagcccuagagccugccu

SEQ ID NO: 3527795 - RNA, 15 nt, Human
gaacgcguugaaauu

SEQ ID NO: 3527796 - RNA, 22 nt, Human
gaacggggcucuucucauuuca

SEQ ID NO: 3527797 - RNA, 16 nt, Human
gaacgggguccuucaa

SEQ ID NO: 3527798 - RNA, 18 nt, Human
gaacggugaaggugacag

SEQ ID NO: 3527799 - RNA, 13 nt, Human
gaacguaaagaac

SEQ ID NO: 3527800 - RNA, 15 nt, Human
gaacgucuuaucuaa

SEQ ID NO: 3527801 - RNA, 22 nt, Human
gaacgugacugccccaacuccu

SEQ ID NO: 3527802 - RNA, 20 nt, Human
gaacguuuagcugacaaaau

SEQ ID NO: 3527803 - RNA, 18 nt, Human
gaacguuugguucaaaug

SEQ ID NO: 3527804 - RNA, 14 nt, Human
gaacguuuucuaau

SEQ ID NO: 3527805 - RNA, 12 nt, Human
gaacguuuuucc

SEQ ID NO: 3527806 - RNA, 23 nt, Human
gaacuaaacuaguuuuuccuauc

SEQ ID NO: 3527807 - RNA, 17 nt, Human
gaacuaaacucauuuau

SEQ ID NO: 3527808 - RNA, 14 nt, Human
gaacuaaacuuuca

SEQ ID NO: 3527809 - RNA, 16 nt, Human
gaacuaaacuuucaca

SEQ ID NO: 3527810 - RNA, 14 nt, Human
gaacuaaauguucu

SEQ ID NO: 3527811 - RNA, 16 nt, Human
gaacuaaauguucuau

SEQ ID NO: 3527812 - RNA, 19 nt, Human
gaacuaccuugguuccccc

SEQ ID NO: 3527813 - RNA, 19 nt, Human
gaacuagaauuugauuauu

SEQ ID NO: 3527814 - RNA, 19 nt, Human
gaacuagacugccuggguu

SEQ ID NO: 3527815 - RNA, 22 nt, Human
gaacuagaguuuagcuggaaaa

SEQ ID NO: 3527816 - RNA, 22 nt, Human
gaacuagccaccaacucuugca

SEQ ID NO: 3527817 - RNA, 19 nt, Human
gaacuauauuaguauguau

SEQ ID NO: 3527818 - RNA, 13 nt, Human
gaacuaucuucau

SEQ ID NO: 3527819 - RNA, 14 nt, Human
gaacuaucuucauc

SEQ ID NO: 3527820 - RNA, 21 nt, Human
gaacuauggacggugcuccag

SEQ ID NO: 3527821 - RNA, 18 nt, Human
gaacuauuccccagcagg

SEQ ID NO: 3527822 - RNA, 20 nt, Human
gaacuauugugcucagagac

SEQ ID NO: 3527823 - RNA, 16 nt, Human
gaacucaaauggggcc

SEQ ID NO: 3527824 - RNA, 13 nt, Human
gaacucacucugg

SEQ ID NO: 3527825 - RNA, 16 nt, Human
gaacucacucugggcu

SEQ ID NO: 3527826 - RNA, 16 nt, Human
gaacucacuggggccu

SEQ ID NO: 3527827 - RNA, 18 nt, Human
gaacucagccaagcacag

SEQ ID NO: 3527828 - RNA, 20 nt, Human
gaacucagccaagcacagug

SEQ ID NO: 3527829 - RNA, 24 nt, Human
gaacucagccaagcacaguggugg

SEQ ID NO: 3527830 - RNA, 20 nt, Human
gaacucagcugucuguggcu

SEQ ID NO: 3527831 - RNA, 14 nt, Human
gaacucaucacugu

SEQ ID NO: 3527832 - RNA, 18 nt, Human
gaacucaucccuaaugcu

SEQ ID NO: 3527833 - RNA, 22 nt, Human
gaacucaucccuaaugcugcag

SEQ ID NO: 3527834 - RNA, 16 nt, Human
gaacucaugugauuua

SEQ ID NO: 3527835 - RNA, 14 nt, Human
gaacucauuccugc

SEQ ID NO: 3527836 - RNA, 17 nt, Human
gaaagcgccuccaaccc

SEQ ID NO: 3527837 - RNA, 18 nt, Human
gaaagcuccuagcagaga

SEQ ID NO: 3527838 - RNA, 20 nt, Human
gaaagcuccuagcagagaga

SEQ ID NO: 3527839 - RNA, 12 nt, Human
gaaagcugauua

SEQ ID NO: 3527840 - RNA, 21 nt, Human
gaaagcugguaaacuauuugu

SEQ ID NO: 3527841 - RNA, 18 nt, Human
gaaagcuucagugcugcc

SEQ ID NO: 3527842 - RNA, 20 nt, Human
gaaaggaaaaccugaagacu

SEQ ID NO: 3527843 - RNA, 13 nt, Human
gaaaggaaaccuu

SEQ ID NO: 3527844 - RNA, 16 nt, Human
gaaaggaagcugugcg

SEQ ID NO: 3527845 - RNA, 23 nt, Human
gaaaggacucugggguuuuuacu

SEQ ID NO: 3527846 - RNA, 15 nt, Human
gaaaggagaguacuu

SEQ ID NO: 3527847 - RNA, 19 nt, Human
gaaaggaggcaugccucug

SEQ ID NO: 3527848 - RNA, 21 nt, Human
gaaaggaggcaugccucugau

SEQ ID NO: 3527849 - RNA, 22 nt, Human
gaaaggaguuucuuuagcugac

SEQ ID NO: 3527850 - RNA, 17 nt, Human
gaaaggauauuuaagaa

SEQ ID NO: 3527851 - RNA, 21 nt, Human
gaaaggauauuuaagaaaaua

SEQ ID NO: 3527852 - RNA, 22 nt, Human
gaaaggauauuuaagaaaauac

SEQ ID NO: 3527853 - RNA, 14 nt, Human
gaaaggauucaugu

SEQ ID NO: 3527854 - RNA, 20 nt, Human
gaaaggcaggccuauuucau

SEQ ID NO: 3527855 - RNA, 16 nt, Human
gaaaggcauucucuga

SEQ ID NO: 3527856 - RNA, 21 nt, Human
gaaaggccagcuggcagcaga

SEQ ID NO: 3527857 - RNA, 22 nt, Human
gaaaggccagcuggcagcagag

SEQ ID NO: 3527858 - RNA, 15 nt, Human
gaaaggccugcacac

SEQ ID NO: 3527859 - RNA, 16 nt, Human
gaaaggccugcacaca

SEQ ID NO: 3527860 - RNA, 14 nt, Human
gaaaggccuuuaaa

SEQ ID NO: 3527861 - RNA, 18 nt, Human
gaaaggccuuuaaaauuu

SEQ ID NO: 3527862 - RNA, 18 nt, Human
gaaaggcucagucucagg

SEQ ID NO: 3527863 - RNA, 19 nt, Human
gaaaggcucagucucagga

SEQ ID NO: 3527864 - RNA, 21 nt, Human
gaaaggcucagucucaggagc

SEQ ID NO: 3527865 - RNA, 22 nt, Human
gaaaggcucagucucaggagca

SEQ ID NO: 3527866 - RNA, 14 nt, Human
gaaaggcuccagga

SEQ ID NO: 3527867 - RNA, 20 nt, Human
gaaaggcuccaggagcagcc

SEQ ID NO: 3527868 - RNA, 22 nt, Human
gaaaggcuccaggagcagccac

SEQ ID NO: 3527869 - RNA, 17 nt, Human
gaaaggcucugaaagcc

SEQ ID NO: 3527870 - RNA, 19 nt, Human
gaaaggcugcuguacugaa

SEQ ID NO: 3527871 - RNA, 16 nt, Human
gaaagggacaaugaua

SEQ ID NO: 3527872 - RNA, 22 nt, Human
gaaagggacuuggaagcuccgc

SEQ ID NO: 3527873 - RNA, 14 nt, Human
gaaagggaucauca

SEQ ID NO: 3527874 - RNA, 21 nt, Human
gaaagggcccugggccugccu

SEQ ID NO: 3527875 - RNA, 15 nt, Human
gaaaggggagagccu

SEQ ID NO: 3527876 - RNA, 21 nt, Human
gaaaggggagagccugcuggc

SEQ ID NO: 3527877 - RNA, 15 nt, Human
gaaaggggagcccac

SEQ ID NO: 3527878 - RNA, 17 nt, Human
gaaaggggauuacaguu

SEQ ID NO: 3527879 - RNA, 20 nt, Human
gaaaggggcaguuuaaagca

SEQ ID NO: 3527880 - RNA, 18 nt, Human
gaaagggggucccagugg

SEQ ID NO: 3527881 - RNA, 23 nt, Human
gaaagggggucccagugggaggg

SEQ ID NO: 3527882 - RNA, 17 nt, Human
gaaaggggucggcugac

SEQ ID NO: 3527883 - RNA, 14 nt, Human
gaaagggguugggg

SEQ ID NO: 3527884 - RNA, 16 nt, Human
gaaagggugcugcuuc

SEQ ID NO: 3527885 - RNA, 23 nt, Human
gaaaggguguuuuucuguuuuau

SEQ ID NO: 3527886 - RNA, 21 nt, Human
gaaagguacuauauuugcuag

SEQ ID NO: 3527887 - RNA, 18 nt, Human
cuauauuuuaaccugcau

SEQ ID NO: 3527888 - RNA, 17 nt, Human
cuauauuuuacauaaau

SEQ ID NO: 3527889 - RNA, 19 nt, Human
cuauauuuucauucuccua

SEQ ID NO: 3527890 - RNA, 13 nt, Human
cuauauuuuccug

SEQ ID NO: 3527891 - RNA, 16 nt, Human
cuauauuuugucauau

SEQ ID NO: 3527892 - RNA, 17 nt, Human
gaaggcaggcagggcuc

SEQ ID NO: 3527893 - RNA, 22 nt, Human
gaaggcaggcagggcucuccug

SEQ ID NO: 3527894 - RNA, 13 nt, Human
gaaggcagggagg

SEQ ID NO: 3527895 - RNA, 23 nt, Human
gaaggcagggagggccugggccc

SEQ ID NO: 3527896 - RNA, 14 nt, Human
gaaggccacagcaa

SEQ ID NO: 3527897 - RNA, 17 nt, Human
gaaggccaccugcaggu

SEQ ID NO: 3527898 - RNA, 23 nt, Human
gaaggcccagcaccacccuccuu

SEQ ID NO: 3527899 - RNA, 14 nt, Human
gaaggccccgccca

SEQ ID NO: 3527900 - RNA, 16 nt, Human
gaaggccccgcccagg

SEQ ID NO: 3527901 - RNA, 17 nt, Human
gaaggccccgcccaggc

SEQ ID NO: 3527902 - RNA, 17 nt, Human
gaaggccgagaagcaag

SEQ ID NO: 3527903 - RNA, 22 nt, Human
gaaggccgagaagcaagaaaga

SEQ ID NO: 3527904 - RNA, 14 nt, Human
gaaggccucgcagg

SEQ ID NO: 3527905 - RNA, 20 nt, Human
gaaggccugacuucugcugg

SEQ ID NO: 3527906 - RNA, 19 nt, Human
gaaggcuacuucggggcug

SEQ ID NO: 3527907 - RNA, 15 nt, Human
gaaggcuauggggau

SEQ ID NO: 3527908 - RNA, 16 nt, Human
gaaggcucgagcaugc

SEQ ID NO: 3527909 - RNA, 21 nt, Human
gaaggcucuucuccccagagu

SEQ ID NO: 3527910 - RNA, 23 nt, Human
gaaggcucuucuccccagaguuc

SEQ ID NO: 3527911 - RNA, 13 nt, Human
gaaggcugccaac

SEQ ID NO: 3527912 - RNA, 16 nt, Human
gaaggcuggcugggca

SEQ ID NO: 3527913 - RNA, 18 nt, Human
gaaggcuggggcuauuua

SEQ ID NO: 3527914 - RNA, 19 nt, Human
gaaggcuggguucugaucc

SEQ ID NO: 3527915 - RNA, 12 nt, Human
gaaggcuguacg

SEQ ID NO: 3527916 - RNA, 16 nt, Human
gaaggcuugggauuug

SEQ ID NO: 3527917 - RNA, 17 nt, Human
gaaggcuuucagggccu

SEQ ID NO: 3527918 - RNA, 19 nt, Human
gaaggcuuuuggucucccu

SEQ ID NO: 3527919 - RNA, 14 nt, Human
gaagggaaaguuuu

SEQ ID NO: 3527920 - RNA, 20 nt, Human
gaagggaauccuccuccagg

SEQ ID NO: 3527921 - RNA, 21 nt, Human
gaagggaccaaggcaaggcag

SEQ ID NO: 3527922 - RNA, 12 nt, Human
gaagggagaagg

SEQ ID NO: 3527923 - RNA, 16 nt, Human
gaagggagagccagcu

SEQ ID NO: 3527924 - RNA, 16 nt, Human
gaagggagcagcacac

SEQ ID NO: 3527925 - RNA, 12 nt, Human
gaagggagccaa

SEQ ID NO: 3527926 - RNA, 13 nt, Human
gaagggagccaag

SEQ ID NO: 3527927 - RNA, 13 nt, Human
gaagggaggcugg

SEQ ID NO: 3527928 - RNA, 14 nt, Human
gaagggaggugggg

SEQ ID NO: 3527929 - RNA, 18 nt, Human
gaagggauaugugaaaca

SEQ ID NO: 3527930 - RNA, 20 nt, Human
gaagggauuuuagucacacg

SEQ ID NO: 3527931 - RNA, 21 nt, Human
gaagggcauaaaacagcuuug

SEQ ID NO: 3527932 - RNA, 16 nt, Human
gaagggcauucuuucc

SEQ ID NO: 3527933 - RNA, 14 nt, Human
gaagggccagagcc

SEQ ID NO: 3527934 - RNA, 17 nt, Human
gaagggccagagccagg

SEQ ID NO: 3527935 - RNA, 18 nt, Human
gaagggccaguccugccu

SEQ ID NO: 3527936 - RNA, 14 nt, Human
gaagggccagucug

SEQ ID NO: 3527937 - RNA, 22 nt, Human
gaagggccugcccaguugcacu

SEQ ID NO: 3527938 - RNA, 20 nt, Human
gaagggcuagaaccuggagg

SEQ ID NO: 3527939 - RNA, 15 nt, Human
gaaggggacccuccg

SEQ ID NO: 3527940 - RNA, 15 nt, Human
gaaggggacugccac

SEQ ID NO: 3527941 - RNA, 15 nt, Human
gaaggggaggagggc

SEQ ID NO: 3527942 - RNA, 20 nt, Human
gaaggggcuggacuggcugu

SEQ ID NO: 3527943 - RNA, 13 nt, Human
gaagggggauaug

SEQ ID NO: 3527944 - RNA, 13 nt, Human
gaagggggcuggg

SEQ ID NO: 3527945 - RNA, 19 nt, Human
gaagggggcugggacaugg

SEQ ID NO: 3527946 - RNA, 20 nt, Human
gaagggggucaaagcaagga

SEQ ID NO: 3527947 - RNA, 19 nt, Human
gaaggggguggugucucca

SEQ ID NO: 3527948 - RNA, 14 nt, Human
gaaggguaaacaau

SEQ ID NO: 3527949 - RNA, 13 nt, Human
gaaggguaaagaa

SEQ ID NO: 3527950 - RNA, 13 nt, Human
gaaggguuucucu

SEQ ID NO: 3527951 - RNA, 15 nt, Human
gaaggguuuguggcu

SEQ ID NO: 3527952 - RNA, 13 nt, Human
gaagguaaaaagu

SEQ ID NO: 3527953 - RNA, 18 nt, Human
gaagguauuaagauuaua

SEQ ID NO: 3527954 - RNA, 21 nt, Human
gaaggucacucuuccugcaag

SEQ ID NO: 3527955 - RNA, 23 nt, Human
gaaggucacucuuccugcaagga

SEQ ID NO: 3527956 - RNA, 15 nt, Human
gaaggucauuuccau

SEQ ID NO: 3527957 - RNA, 20 nt, Human
gaaggugaaacauuuucucc

SEQ ID NO: 3527958 - RNA, 12 nt, Human
gaaggugaauag

SEQ ID NO: 3527959 - RNA, 22 nt, Human
gaaggugaauagccauauuugu

SEQ ID NO: 3527960 - RNA, 15 nt, Human
gaaggugacagcagu

SEQ ID NO: 3527961 - RNA, 23 nt, Human
gaaggugauaagggaaaagauaa

SEQ ID NO: 3527962 - RNA, 21 nt, Human
gaaggugauuuaagggcccag

SEQ ID NO: 3527963 - RNA, 23 nt, Human
gaaggugccucuggaugcuguga

SEQ ID NO: 3527964 - RNA, 19 nt, Human
gaaggugcugacggccagg

SEQ ID NO: 3527965 - RNA, 14 nt, Human
gaaggugcuggagg

SEQ ID NO: 3527966 - RNA, 16 nt, Human
gaaggugcuggaggug

SEQ ID NO: 3527967 - RNA, 18 nt, Human
gaaggugcuggagguggg

SEQ ID NO: 3527968 - RNA, 23 nt, Human
gaaggugcuggaggugggagcag

SEQ ID NO: 3527969 - RNA, 18 nt, Human
gaagguggccucugugga

SEQ ID NO: 3527970 - RNA, 22 nt, Human
gaagguggccuuccugcuguua

SEQ ID NO: 3527971 - RNA, 23 nt, Human
gaagguggugggggugcagauga

SEQ ID NO: 3527972 - RNA, 19 nt, Human
gaagguucauguagagaaa

SEQ ID NO: 3527973 - RNA, 12 nt, Human
gaagguuguaag

SEQ ID NO: 3527974 - RNA, 15 nt, Human
gaagguugugaugaa

SEQ ID NO: 3527975 - RNA, 14 nt, Human
gaagguuuauuguu

SEQ ID NO: 3527976 - RNA, 22 nt, Human
gaagguuuauuguuaauacaag

SEQ ID NO: 3527977 - RNA, 15 nt, Human
gaagguuuguauauu

SEQ ID NO: 3527978 - RNA, 16 nt, Human
gaagguuuguguuuuu

SEQ ID NO: 3527979 - RNA, 16 nt, Human
gaaguaaacuuuuugu

SEQ ID NO: 3527980 - RNA, 20 nt, Human
gaaguaaacuuuuuguucug

SEQ ID NO: 3527981 - RNA, 12 nt, Human
gaaguaaagccu

SEQ ID NO: 3527982 - RNA, 20 nt, Human
gaaguaacuugucuuaaaua

SEQ ID NO: 3527983 - RNA, 17 nt, Human
gaaguaagugggguugc

SEQ ID NO: 3527984 - RNA, 21 nt, Human
gaaguaauaugcacacauuuu

SEQ ID NO: 3527985 - RNA, 13 nt, Human
gaaguaaugaauu

SEQ ID NO: 3527986 - RNA, 15 nt, Human
gaaguaaugaauuuu

SEQ ID NO: 3527987 - RNA, 14 nt, Human
gaaguaccagacua

SEQ ID NO: 3527988 - RNA, 23 nt, Human
gaaguacuugccagaaguugugg

SEQ ID NO: 3527989 - RNA, 13 nt, Human
gaaguagcacagg

SEQ ID NO: 3527990 - RNA, 15 nt, Human
gaaguagcacaggcu

SEQ ID NO: 3527991 - RNA, 23 nt, Human
gaaguaguggagccccugcucug

SEQ ID NO: 3527992 - RNA, 14 nt, Human
gaaguaguuaucau

SEQ ID NO: 3527993 - RNA, 15 nt, Human
gaaguaguuaucaug

SEQ ID NO: 3527994 - RNA, 17 nt, Human
gaaguaguuaucauguu

SEQ ID NO: 3527995 - RNA, 21 nt, Human
gaaguaguuaucauguuagua

SEQ ID NO: 3527996 - RNA, 16 nt, Human
gaaguauccuucagcc

SEQ ID NO: 3527997 - RNA, 16 nt, Human
gaaguaugagggaaaa

SEQ ID NO: 3527998 - RNA, 15 nt, Human
gaaguauuauaaauu

SEQ ID NO: 3527999 - RNA, 16 nt, Human
gaaguauuauaaauua

SEQ ID NO: 3528000 - RNA, 19 nt, Human
gaaguauuauaaauuaugu

SEQ ID NO: 3528001 - RNA, 15 nt, Human
gaagucaaagcaagg

SEQ ID NO: 3528002 - RNA, 16 nt, Human
gaagucaauaugugga

SEQ ID NO: 3528003 - RNA, 19 nt, Human
gaagucaauuacucuauaa

SEQ ID NO: 3528004 - RNA, 16 nt, Human
gaagucacauuccuga

SEQ ID NO: 3528005 - RNA, 20 nt, Human
gaagucacauuccugaacag

SEQ ID NO: 3528006 - RNA, 14 nt, Human
gaagucagaucugc

SEQ ID NO: 3528007 - RNA, 15 nt, Human
gaagucauuaaacug

SEQ ID NO: 3528008 - RNA, 12 nt, Human
gaaguccaagca

SEQ ID NO: 3528009 - RNA, 16 nt, Human
gaaguccccaggcccc

SEQ ID NO: 3528010 - RNA, 22 nt, Human
gaaguccccuuccaucccagag

SEQ ID NO: 3528011 - RNA, 18 nt, Human
gaagucccuugccauccu

SEQ ID NO: 3528012 - RNA, 15 nt, Human
gaaguccggccccag

SEQ ID NO: 3528013 - RNA, 22 nt, Human
gaaguccuauggaaacccgagg

SEQ ID NO: 3528014 - RNA, 14 nt, Human
gaaguccuuauguu

SEQ ID NO: 3528015 - RNA, 15 nt, Human
gaagucuaggagcug

SEQ ID NO: 3528016 - RNA, 16 nt, Human
gaagucuaggagcugg

SEQ ID NO: 3528017 - RNA, 22 nt, Human
gaagucuaggagcugggaggaa

SEQ ID NO: 3528018 - RNA, 19 nt, Human
gaagucuuacuacagaaau

SEQ ID NO: 3528019 - RNA, 15 nt, Human
gaagucuuagaugua

SEQ ID NO: 3528020 - RNA, 18 nt, Human
gaagucuuagauguauau

SEQ ID NO: 3528021 - RNA, 18 nt, Human
gaagucuucaugaaaugc

SEQ ID NO: 3528022 - RNA, 9 nt, Human
gaagucuug

SEQ ID NO: 3528023 - RNA, 14 nt, Human
gaagucuuguauaa

SEQ ID NO: 3528024 - RNA, 18 nt, Human
gaagucuuucaagaauga

SEQ ID NO: 3528025 - RNA, 14 nt, Human
gaagucuuuguaca

SEQ ID NO: 3528026 - RNA, 18 nt, Human
gaagucuuuguacagaca

SEQ ID NO: 3528027 - RNA, 15 nt, Human
gaagugaagaaugca

SEQ ID NO: 3528028 - RNA, 17 nt, Human
gaagugaaugcugggac

SEQ ID NO: 3528029 - RNA, 13 nt, Human
gaagugacaggga

SEQ ID NO: 3528030 - RNA, 16 nt, Human
gaagugacgguuccua

SEQ ID NO: 3528031 - RNA, 16 nt, Human
gaagugagaaaaugaa

SEQ ID NO: 3528032 - RNA, 18 nt, Human
gaagugagcuuugcugcu

SEQ ID NO: 3528033 - RNA, 23 nt, Human
cuaugggacucaaugcacugaca

SEQ ID NO: 3528034 - RNA, 22 nt, Human
cuaugggagagugucaaccaga

SEQ ID NO: 3528035 - RNA, 13 nt, Human
cuaugggagcccc

SEQ ID NO: 3528036 - RNA, 13 nt, Human
cuaugggccugcc

SEQ ID NO: 3528037 - RNA, 19 nt, Human
cuaugggccugccgggcug

SEQ ID NO: 3528038 - RNA, 22 nt, Human
cuauggggagaggaacuccuug

SEQ ID NO: 3528039 - RNA, 21 nt, Human
cuauggguuuaguuacuuuag

SEQ ID NO: 3528040 - RNA, 16 nt, Human
cuaugguaaagauauu

SEQ ID NO: 3528041 - RNA, 16 nt, Human
cuauggucaucuuuuu

SEQ ID NO: 3528042 - RNA, 21 nt, Human
cuauggucgggagacagcauc

SEQ ID NO: 3528043 - RNA, 17 nt, Human
cuauggugcucugucua

SEQ ID NO: 3528044 - RNA, 22 nt, Human
cuaugguguaaucaugaaggag

SEQ ID NO: 3528045 - RNA, 15 nt, Human
cuaugguuaugaaag

SEQ ID NO: 3528046 - RNA, 16 nt, Human
cuaugguuaugaaaga

SEQ ID NO: 3528047 - RNA, 22 nt, Human
cuauguaacauguaggaaguag

SEQ ID NO: 3528048 - RNA, 21 nt, Human
cuauguaagaauucagaagac

SEQ ID NO: 3528049 - RNA, 21 nt, Human
cuauguacaauauuuuaagca

SEQ ID NO: 3528050 - RNA, 13 nt, Human
cuauguauaaaau

SEQ ID NO: 3528051 - RNA, 14 nt, Human
cuauguauauacau

SEQ ID NO: 3528052 - RNA, 16 nt, Human
cuauguaucaaugagu

SEQ ID NO: 3528053 - RNA, 16 nt, Human
cuaugucauuucaugu

SEQ ID NO: 3528054 - RNA, 14 nt, Human
cuauguccuaagga

SEQ ID NO: 3528055 - RNA, 20 nt, Human
cuauguccuaaggacacacu

SEQ ID NO: 3528056 - RNA, 11 nt, Human
cuaugugauuu

SEQ ID NO: 3528057 - RNA, 17 nt, Human
gaagccuucaagcucug

SEQ ID NO: 3528058 - RNA, 16 nt, Human
gaagccuucagcucca

SEQ ID NO: 3528059 - RNA, 22 nt, Human
gaagccuugccuaaauuuaaug

SEQ ID NO: 3528060 - RNA, 13 nt, Human
gaagccuuuggga

SEQ ID NO: 3528061 - RNA, 13 nt, Human
gaagcguauguuu

SEQ ID NO: 3528062 - RNA, 16 nt, Human
gaagcuaacagggaag

SEQ ID NO: 3528063 - RNA, 19 nt, Human
gaagcuaacagggaaggca

SEQ ID NO: 3528064 - RNA, 22 nt, Human
gaagcuaacagggaaggcaggc

SEQ ID NO: 3528065 - RNA, 13 nt, Human
gaagcuaauuauu

SEQ ID NO: 3528066 - RNA, 18 nt, Human
gaagcuaauuauuuuaau

SEQ ID NO: 3528067 - RNA, 16 nt, Human
gaagcuaauuugcauu

SEQ ID NO: 3528068 - RNA, 21 nt, Human
gaagcuacagguuacaacaga

SEQ ID NO: 3528069 - RNA, 15 nt, Human
gaagcuagcuccccu

SEQ ID NO: 3528070 - RNA, 20 nt, Human
gaagcucaccuguugcuuac

SEQ ID NO: 3528071 - RNA, 15 nt, Human
gaagcucagcccacc

SEQ ID NO: 3528072 - RNA, 17 nt, Human
gaagcucagcccacccc

SEQ ID NO: 3528073 - RNA, 14 nt, Human
gaagcucagggccu

SEQ ID NO: 3528074 - RNA, 15 nt, Human
gaagcucagggccug

SEQ ID NO: 3528075 - RNA, 14 nt, Human
gaagcuccacuguc

SEQ ID NO: 3528076 - RNA, 11 nt, Human
gaagcuccagu

SEQ ID NO: 3528077 - RNA, 20 nt, Human
gaagcucccccagcaaagcc

SEQ ID NO: 3528078 - RNA, 21 nt, Human
gaagcucccccagcaaagccc

SEQ ID NO: 3528079 - RNA, 22 nt, Human
gaagcuccgcuuucuacccagc

SEQ ID NO: 3528080 - RNA, 22 nt, Human
gaagcuccucuccccagcccag

SEQ ID NO: 3528081 - RNA, 19 nt, Human
gaagcugacgaacuuccau

SEQ ID NO: 3528082 - RNA, 14 nt, Human
gaagcugagcacca

SEQ ID NO: 3528083 - RNA, 22 nt, Human
gaagcugaggcaggugaauugu

SEQ ID NO: 3528084 - RNA, 18 nt, Human
gaagcugaggcgggagaa

SEQ ID NO: 3528085 - RNA, 21 nt, Human
gaagcugaugcuuugcuucaa

SEQ ID NO: 3528086 - RNA, 18 nt, Human
gaagcugcagcuugggag

SEQ ID NO: 3528087 - RNA, 15 nt, Human
gaagcugcaggcuuu

SEQ ID NO: 3528088 - RNA, 20 nt, Human
gaagcugcucaacuugcaaa

SEQ ID NO: 3528089 - RNA, 18 nt, Human
gaagcugcuccaggccug

SEQ ID NO: 3528090 - RNA, 13 nt, Human
gaagcugcugacc

SEQ ID NO: 3528091 - RNA, 14 nt, Human
gaagcuggccugag

SEQ ID NO: 3528092 - RNA, 22 nt, Human
gaagcuggccugagaggggaag

SEQ ID NO: 3528093 - RNA, 17 nt, Human
gaagcugggguucauga

SEQ ID NO: 3528094 - RNA, 22 nt, Human
gaagcuguguccuugcaccugc

SEQ ID NO: 3528095 - RNA, 16 nt, Human
gaagcuguuguacauu

SEQ ID NO: 3528096 - RNA, 22 nt, Human
gaagcuguuguacauuuaugau

SEQ ID NO: 3528097 - RNA, 23 nt, Human
gaagcuuauuaaugcuaagggca

SEQ ID NO: 3528098 - RNA, 11 nt, Human
gaagcuucuaa

SEQ ID NO: 3528099 - RNA, 19 nt, Human
gaagcuucuaauaaauuau

SEQ ID NO: 3528100 - RNA, 15 nt, Human
gaagcuucugucucc

SEQ ID NO: 3528101 - RNA, 18 nt, Human
gaagcuuggggaagaccc

SEQ ID NO: 3528102 - RNA, 19 nt, Human
gaagcuuggggaagaccca

SEQ ID NO: 3528103 - RNA, 15 nt, Human
gaagcuuugaaggcc

SEQ ID NO: 3528104 - RNA, 14 nt, Human
gaagcuuuggugag

SEQ ID NO: 3528105 - RNA, 20 nt, Human
gaagcuuuguccccugcuuc

SEQ ID NO: 3528106 - RNA, 15 nt, Human
gaaggaaaaaugugu

SEQ ID NO: 3528107 - RNA, 15 nt, Human
gaaggaaaaauucaa

SEQ ID NO: 3528108 - RNA, 18 nt, Human
gaaggaaacccagcucug

SEQ ID NO: 3528109 - RNA, 19 nt, Human
gaaggaaacccagcucugg

SEQ ID NO: 3528110 - RNA, 22 nt, Human
gaaggaaacccagcucuggucc

SEQ ID NO: 3528111 - RNA, 23 nt, Human
gaaggaaauaaaaaagucucuau

SEQ ID NO: 3528112 - RNA, 15 nt, Human
gaaggaacucuggcu

SEQ ID NO: 3528113 - RNA, 23 nt, Human
gaaggaacuugucucuucaucua

SEQ ID NO: 3528114 - RNA, 22 nt, Human
gaaggaagccaaauuuaucaaa

SEQ ID NO: 3528115 - RNA, 19 nt, Human
gaaggaaggcagggaggag

SEQ ID NO: 3528116 - RNA, 16 nt, Human
gaaggaagugaagagg

SEQ ID NO: 3528117 - RNA, 22 nt, Human
gaaggaauaaauugcuccuuga

SEQ ID NO: 3528118 - RNA, 17 nt, Human
gaaggacacuuccugcc

SEQ ID NO: 3528119 - RNA, 14 nt, Human
gaaggacaggagga

SEQ ID NO: 3528120 - RNA, 13 nt, Human
gaaggacauagag

SEQ ID NO: 3528121 - RNA, 19 nt, Human
gaaggacauugcggacagc

SEQ ID NO: 3528122 - RNA, 15 nt, Human
gaaggaccuccugag

SEQ ID NO: 3528123 - RNA, 24 nt, Human
gaaggaccuucacucuaagauguu

SEQ ID NO: 3528124 - RNA, 21 nt, Human
gaaggacuaugaaaagcuaga

SEQ ID NO: 3528125 - RNA, 17 nt, Human
gaaggagaaggaaggag

SEQ ID NO: 3528126 - RNA, 15 nt, Human
gaaggagacagagcu

SEQ ID NO: 3528127 - RNA, 18 nt, Human
gaaggagacaggcagagc

SEQ ID NO: 3528128 - RNA, 15 nt, Human
gaaggagacucaccu

SEQ ID NO: 3528129 - RNA, 20 nt, Human
gaaggagacucaccucugcc

SEQ ID NO: 3528130 - RNA, 15 nt, Human
gaaggagagaagggg

SEQ ID NO: 3528131 - RNA, 15 nt, Human
gaaggagagccugcu

SEQ ID NO: 3528132 - RNA, 23 nt, Human
gaaggagauaauuacugccuuga

SEQ ID NO: 3528133 - RNA, 21 nt, Human
gaaggagccccauuccuggga

SEQ ID NO: 3528134 - RNA, 22 nt, Human
gaaggagccccauuccugggaa

SEQ ID NO: 3528135 - RNA, 14 nt, Human
gaaggagcugccug

SEQ ID NO: 3528136 - RNA, 19 nt, Human
gaaggagcugccuggaccc

SEQ ID NO: 3528137 - RNA, 15 nt, Human
gaaggaggacccagg

SEQ ID NO: 3528138 - RNA, 17 nt, Human
gaaggaggacccaggac

SEQ ID NO: 3528139 - RNA, 18 nt, Human
gaaggaggacccaggaca

SEQ ID NO: 3528140 - RNA, 19 nt, Human
gaaggaggacccaggacag

SEQ ID NO: 3528141 - RNA, 15 nt, Human
gaaggaggagccugu

SEQ ID NO: 3528142 - RNA, 22 nt, Human
gaaggaggagccuguccugccu

SEQ ID NO: 3528143 - RNA, 15 nt, Human
gaaggaggaggagga

SEQ ID NO: 3528144 - RNA, 18 nt, Human
gaaggaggaggaggaggu

SEQ ID NO: 3528145 - RNA, 15 nt, Human
gaaggaggccaccuc

SEQ ID NO: 3528146 - RNA, 16 nt, Human
gaaggaggccaccucc

SEQ ID NO: 3528147 - RNA, 14 nt, Human
gaaggaggcuggcu

SEQ ID NO: 3528148 - RNA, 18 nt, Human
gaaggaggggaagcugca

SEQ ID NO: 3528149 - RNA, 23 nt, Human
gaaggagggggugaccuccggcc

SEQ ID NO: 3528150 - RNA, 19 nt, Human
gaaggaggguuagggaggg

SEQ ID NO: 3528151 - RNA, 22 nt, Human
gaaggaucuguuuuuaaaaauc

SEQ ID NO: 3528152 - RNA, 16 nt, Human
gaaggaugagcauuua

SEQ ID NO: 3528153 - RNA, 16 nt, Human
gaaggaugccaagaag

SEQ ID NO: 3528154 - RNA, 16 nt, Human
gaaggauguacauuuc

SEQ ID NO: 3528155 - RNA, 17 nt, Human
gaaggauuauggaaaaa

SEQ ID NO: 3528156 - RNA, 15 nt, Human
gaaggcaaagcacga

SEQ ID NO: 3528157 - RNA, 15 nt, Human
gaaggcaaaugacuu

SEQ ID NO: 3528158 - RNA, 16 nt, Human
gaaggcaagccaggcu

SEQ ID NO: 3528159 - RNA, 13 nt, Human
gaaggcaaugcca

SEQ ID NO: 3528160 - RNA, 15 nt, Human
gaaggcagagaaagg

SEQ ID NO: 3528161 - RNA, 19 nt, Human
gaaggcaggcagggcucuc

SEQ ID NO: 3528162 - RNA, 23 nt, Human
gaaggcaggcagggcucuccugg

SEQ ID NO: 3528163 - RNA, 14 nt, Human
gaaggcagggaggg

SEQ ID NO: 3528164 - RNA, 21 nt, Human
gaaggcagggggaaggugggg

SEQ ID NO: 3528165 - RNA, 21 nt, Human
gaaggcauaucagucucugag

SEQ ID NO: 3528166 - RNA, 17 nt, Human
gaaggcaucagucccua

SEQ ID NO: 3528167 - RNA, 18 nt, Human
gaaggcaugccuggacaa

SEQ ID NO: 3528168 - RNA, 20 nt, Human
gaaggcauggacuucuggau

SEQ ID NO: 3528169 - RNA, 13 nt, Human
gaaggccaccugc

SEQ ID NO: 3528170 - RNA, 14 nt, Human
gaaggccaccugca

SEQ ID NO: 3528171 - RNA, 14 nt, Human
gaaggcccagcacc

SEQ ID NO: 3528172 - RNA, 18 nt, Human
gaaggccgagaagcaaga

SEQ ID NO: 3528173 - RNA, 20 nt, Human
gaaggccucccuagccagca

SEQ ID NO: 3528174 - RNA, 18 nt, Human
gaaggccucgcaggaaga

SEQ ID NO: 3528175 - RNA, 16 nt, Human
gaaggcuaaaaagcaa

SEQ ID NO: 3528176 - RNA, 19 nt, Human
gaaggcucgagcaugccug

SEQ ID NO: 3528177 - RNA, 20 nt, Human
aacagggccacauagaugcu

SEQ ID NO: 3528178 - RNA, 15 nt, Human
aacaggggcuggugg

SEQ ID NO: 3528179 - RNA, 22 nt, Human
aacaggguguugucagcaucuu

SEQ ID NO: 3528180 - RNA, 18 nt, Human
aacagguaauauaaaaag

SEQ ID NO: 3528181 - RNA, 18 nt, Human
aacagguauauacuuuga

SEQ ID NO: 3528182 - RNA, 21 nt, Human
aacagguauuuuguuucuuuu

SEQ ID NO: 3528183 - RNA, 18 nt, Human
aacagguguuggugacaa

SEQ ID NO: 3528184 - RNA, 16 nt, Human
aacagguuauuuuagu

SEQ ID NO: 3528185 - RNA, 17 nt, Human
aacaguaaaccacugaa

SEQ ID NO: 3528186 - RNA, 18 nt, Human
aacaguaaaccacugaaa

SEQ ID NO: 3528187 - RNA, 23 nt, Human
aacaguaaaccacugaaaaaaua

SEQ ID NO: 3528188 - RNA, 21 nt, Human
aacaguaugugggauauugaa

SEQ ID NO: 3528189 - RNA, 19 nt, Human
aacaguauuuauuuuguaa

SEQ ID NO: 3528190 - RNA, 13 nt, Human
aacagucauuuaa

SEQ ID NO: 3528191 - RNA, 12 nt, Human
aacagucugauc

SEQ ID NO: 3528192 - RNA, 23 nt, Human
aacagucugaucgugacgcugaa

SEQ ID NO: 3528193 - RNA, 18 nt, Human
aacagucuuacugcaggc

SEQ ID NO: 3528194 - RNA, 16 nt, Human
aacagugaagacagaa

SEQ ID NO: 3528195 - RNA, 17 nt, Human
aacagugaagacagaag

SEQ ID NO: 3528196 - RNA, 21 nt, Human
aacagugaaguuuuacugucu

SEQ ID NO: 3528197 - RNA, 15 nt, Human
aacagugauuaccag

SEQ ID NO: 3528198 - RNA, 15 nt, Human
aacagugcauauucc

SEQ ID NO: 3528199 - RNA, 22 nt, Human
aacagugcauauuccuuucuau

SEQ ID NO: 3528200 - RNA, 16 nt, Human
aacagugcuaaaaaug

SEQ ID NO: 3528201 - RNA, 12 nt, Human
aacaguggggaa

SEQ ID NO: 3528202 - RNA, 22 nt, Human
aacagugugaaguuagaauucc

SEQ ID NO: 3528203 - RNA, 16 nt, Human
aacagugugcaaggca

SEQ ID NO: 3528204 - RNA, 20 nt, Human
aacaguguggccucuucuga

SEQ ID NO: 3528205 - RNA, 22 nt, Human
aacagugugguaguuaauaaaa

SEQ ID NO: 3528206 - RNA, 21 nt, Human
aacaguguguaaacaaaauga

SEQ ID NO: 3528207 - RNA, 23 nt, Human
aacaguguuaggccuggcacagu

SEQ ID NO: 3528208 - RNA, 23 nt, Human
aacaguguuucccauaauuuucu

SEQ ID NO: 3528209 - RNA, 18 nt, Human
aacaguuaacuuucagaa

SEQ ID NO: 3528210 - RNA, 19 nt, Human
aacaguuaagcagccgcca

SEQ ID NO: 3528211 - RNA, 23 nt, Human
aacaguucauguuugcuucauaa

SEQ ID NO: 3528212 - RNA, 15 nt, Human
aacaguugcacagca

SEQ ID NO: 3528213 - RNA, 20 nt, Human
aacaguugcauguaguaaca

SEQ ID NO: 3528214 - RNA, 21 nt, Human
aacaguugcauguaguaacac

SEQ ID NO: 3528215 - RNA, 17 nt, Human
aacaguuggcaugcauc

SEQ ID NO: 3528216 - RNA, 22 nt, Human
aacaguugugaaccaagaucua

SEQ ID NO: 3528217 - RNA, 18 nt, Human
aacaguuuaaugaagauc

SEQ ID NO: 3528218 - RNA, 21 nt, Human
aacaguuuaaugaagaucuaa

SEQ ID NO: 3528219 - RNA, 23 nt, Human
aacaguuuaugcagugcugcuuu

SEQ ID NO: 3528220 - RNA, 16 nt, Human
aacaguuuggaaaagu

SEQ ID NO: 3528221 - RNA, 14 nt, Human
aacaguuuuccaug

SEQ ID NO: 3528222 - RNA, 12 nt, Human
aacaguuuuccu

SEQ ID NO: 3528223 - RNA, 18 nt, Human
aacaguuuuccuaugcuu

SEQ ID NO: 3528224 - RNA, 15 nt, Human
aacauaaaaaggaca

SEQ ID NO: 3528225 - RNA, 12 nt, Human
aacauaaaacaa

SEQ ID NO: 3528226 - RNA, 21 nt, Human
aacauaaauuuuuugaagucu

SEQ ID NO: 3528227 - RNA, 21 nt, Human
aacauaacccacuugucacug

SEQ ID NO: 3528228 - RNA, 20 nt, Human
aacauaagcuauuuuucuaa

SEQ ID NO: 3528229 - RNA, 14 nt, Human
aacauaaucuaguu

SEQ ID NO: 3528230 - RNA, 17 nt, Human
aacauaauucuuguaua

SEQ ID NO: 3528231 - RNA, 22 nt, Human
aacauacaaaugcaucuuugau

SEQ ID NO: 3528232 - RNA, 15 nt, Human
aacauacucccaucu

SEQ ID NO: 3528233 - RNA, 19 nt, Human
aacauagacagaagaaaca

SEQ ID NO: 3528234 - RNA, 20 nt, Human
aacauagacuagagaaaccg

SEQ ID NO: 3528235 - RNA, 12 nt, Human
aacauagauaaa

SEQ ID NO: 3528236 - RNA, 21 nt, Human
aacauagcagaucuguuuugu

SEQ ID NO: 3528237 - RNA, 20 nt, Human
aacauaguaaguucagcacu

SEQ ID NO: 3528238 - RNA, 21 nt, Human
aacauaguaaguucagcacuu

SEQ ID NO: 3528239 - RNA, 21 nt, Human
aacauagugagaccccugucu

SEQ ID NO: 3528240 - RNA, 17 nt, Human
aacauauaauauauguu

SEQ ID NO: 3528241 - RNA, 16 nt, Human
aacauauauaacaaug

SEQ ID NO: 3528242 - RNA, 14 nt, Human
aacauauccaaguu

SEQ ID NO: 3528243 - RNA, 19 nt, Human
aacauauccaaguuugaau

SEQ ID NO: 3528244 - RNA, 20 nt, Human
aacauauccaaguuugaauu

SEQ ID NO: 3528245 - RNA, 12 nt, Human
aacauaugauuu

SEQ ID NO: 3528246 - RNA, 17 nt, Human
aacauaugcaaacauaa

SEQ ID NO: 3528247 - RNA, 19 nt, Human
aacauauucuguaugaacu

SEQ ID NO: 3528248 - RNA, 20 nt, Human
aacauauuuguuaaauauuu

SEQ ID NO: 3528249 - RNA, 14 nt, Human
aacaucaacaucuu

SEQ ID NO: 3528250 - RNA, 12 nt, Human
aacaucaauguu

SEQ ID NO: 3528251 - RNA, 16 nt, Human
aacaucacaccugccc

SEQ ID NO: 3528252 - RNA, 21 nt, Human
aacaucauagaaacugucuag

SEQ ID NO: 3528253 - RNA, 19 nt, Human
aacaucauuacuauaagaa

SEQ ID NO: 3528254 - RNA, 15 nt, Human
aacaucauuagaaca

SEQ ID NO: 3528255 - RNA, 13 nt, Human
aacaucauuccuu

SEQ ID NO: 3528256 - RNA, 17 nt, Human
aacaucauuccuuuuua

SEQ ID NO: 3528257 - RNA, 20 nt, Human
aacaucauuccuuuuuauuu

SEQ ID NO: 3528258 - RNA, 22 nt, Human
aacaucauuccuuuuuauuuau

SEQ ID NO: 3528259 - RNA, 16 nt, Human
aacauccaaccuuccc

SEQ ID NO: 3528260 - RNA, 22 nt, Human
aacauccaaggagaaacagaga

SEQ ID NO: 3528261 - RNA, 17 nt, Human
aacauccaaguggccuc

SEQ ID NO: 3528262 - RNA, 16 nt, Human
gaauguuacugccuua

SEQ ID NO: 3528263 - RNA, 22 nt, Human
gaauguuccugccuccuugaua

SEQ ID NO: 3528264 - RNA, 14 nt, Human
gaauguucucagau

SEQ ID NO: 3528265 - RNA, 11 nt, Human
gaauguucuga

SEQ ID NO: 3528266 - RNA, 16 nt, Human
gaauguucugacauua

SEQ ID NO: 3528267 - RNA, 20 nt, Human
gaauguugauuacagugcag

SEQ ID NO: 3528268 - RNA, 15 nt, Human
gaauguuucuuaacu

SEQ ID NO: 3528269 - RNA, 16 nt, Human
gaauguuugccucugc

SEQ ID NO: 3528270 - RNA, 18 nt, Human
gaauguuugccucugccu

SEQ ID NO: 3528271 - RNA, 19 nt, Human
gaauguuugccucugccuc

SEQ ID NO: 3528272 - RNA, 15 nt, Human
gaauguuuuaaauuc

SEQ ID NO: 3528273 - RNA, 21 nt, Human
gaauuaaaaggauaguauuuu

SEQ ID NO: 3528274 - RNA, 13 nt, Human
gaauuaaacuuuu

SEQ ID NO: 3528275 - RNA, 20 nt, Human
gaauuaaacuuuuaauucau

SEQ ID NO: 3528276 - RNA, 18 nt, Human
gaauuaaccuggugcugg

SEQ ID NO: 3528277 - RNA, 15 nt, Human
gaauuaaguuaucuu

SEQ ID NO: 3528278 - RNA, 20 nt, Human
gaauuaaguuaucuuuaaaa

SEQ ID NO: 3528279 - RNA, 21 nt, Human
gaauuaaucaucuauaaagaa

SEQ ID NO: 3528280 - RNA, 18 nt, Human
gaauuaauuaauuuggag

SEQ ID NO: 3528281 - RNA, 13 nt, Human
gaauuacauuugu

SEQ ID NO: 3528282 - RNA, 20 nt, Human
gaauuacauuuguauaaaau

SEQ ID NO: 3528283 - RNA, 19 nt, Human
gaauuaccaagaauauccu

SEQ ID NO: 3528284 - RNA, 18 nt, Human
gaauuaccauuuguuaau

SEQ ID NO: 3528285 - RNA, 15 nt, Human
gaauuacuaacuucu

SEQ ID NO: 3528286 - RNA, 23 nt, Human
gaauuacuaacuucuaaaacugu

SEQ ID NO: 3528287 - RNA, 16 nt, Human
gaauuaggcuguaacu

SEQ ID NO: 3528288 - RNA, 16 nt, Human
gaauuaguccuugcuu

SEQ ID NO: 3528289 - RNA, 18 nt, Human
gaauuaguccuugcuugg

SEQ ID NO: 3528290 - RNA, 17 nt, Human
gaauuaguuuuaaaaug

SEQ ID NO: 3528291 - RNA, 19 nt, Human
gaauuauaacuggaaagaa

SEQ ID NO: 3528292 - RNA, 20 nt, Human
gaauuauaacuggaaagaag

SEQ ID NO: 3528293 - RNA, 14 nt, Human
gaauuauaacugua

SEQ ID NO: 3528294 - RNA, 18 nt, Human
gaauuaucagcaaagaaa

SEQ ID NO: 3528295 - RNA, 20 nt, Human
gaauuaucagcaaagaaaaa

SEQ ID NO: 3528296 - RNA, 22 nt, Human
gaauuauccuauuucaguacuu

SEQ ID NO: 3528297 - RNA, 22 nt, Human
gaauuaucuauacauaucuuua

SEQ ID NO: 3528298 - RNA, 20 nt, Human
gaauuauucaauuuauuuga

SEQ ID NO: 3528299 - RNA, 16 nt, Human
gaauuauuuuaaaaga

SEQ ID NO: 3528300 - RNA, 15 nt, Human
gaauuauuuuucacu

SEQ ID NO: 3528301 - RNA, 16 nt, Human
gaauucaaauuuuauc

SEQ ID NO: 3528302 - RNA, 18 nt, Human
gaauucaccacagacuuu

SEQ ID NO: 3528303 - RNA, 12 nt, Human
gaauucauucau

SEQ ID NO: 3528304 - RNA, 22 nt, Human
gaauucauucuggucucucuau

SEQ ID NO: 3528305 - RNA, 14 nt, Human
gaauucauuucacu

SEQ ID NO: 3528306 - RNA, 13 nt, Human
gaauucccucacu

SEQ ID NO: 3528307 - RNA, 16 nt, Human
gaauuccuaaaauuau

SEQ ID NO: 3528308 - RNA, 20 nt, Human
gaauuccuaaaauuauggaa

SEQ ID NO: 3528309 - RNA, 17 nt, Human
gaauuccuagaauuaaa

SEQ ID NO: 3528310 - RNA, 16 nt, Human
gaauuccuucagggug

SEQ ID NO: 3528311 - RNA, 17 nt, Human
gaauucucagaaucuca

SEQ ID NO: 3528312 - RNA, 18 nt, Human
gaauucucagugccaacu

SEQ ID NO: 3528313 - RNA, 18 nt, Human
gaauucugcuaccucacu

SEQ ID NO: 3528314 - RNA, 11 nt, Human
gaauucuguau

SEQ ID NO: 3528315 - RNA, 13 nt, Human
gaauucuguauag

SEQ ID NO: 3528316 - RNA, 14 nt, Human
gaauucuuuugcca

SEQ ID NO: 3528317 - RNA, 16 nt, Human
gaauucuuuuggggaa

SEQ ID NO: 3528318 - RNA, 18 nt, Human
gaauugaacccaggaggu

SEQ ID NO: 3528319 - RNA, 16 nt, Human
gaauugacauugaaau

SEQ ID NO: 3528320 - RNA, 17 nt, Human
gaauugaccaucugcuu

SEQ ID NO: 3528321 - RNA, 13 nt, Human
gacagucucacuu

SEQ ID NO: 3528322 - RNA, 12 nt, Human
gacagucugcuc

SEQ ID NO: 3528323 - RNA, 15 nt, Human
gacagucuugugcuu

SEQ ID NO: 3528324 - RNA, 15 nt, Human
gacagugaauuuggg

SEQ ID NO: 3528325 - RNA, 21 nt, Human
gacagugagacucugucucag

SEQ ID NO: 3528326 - RNA, 15 nt, Human
gacagugagguccug

SEQ ID NO: 3528327 - RNA, 20 nt, Human
gacagugagguccugggggc

SEQ ID NO: 3528328 - RNA, 15 nt, Human
gacagugaucuccau

SEQ ID NO: 3528329 - RNA, 13 nt, Human
gacagugcacaug

SEQ ID NO: 3528330 - RNA, 16 nt, Human
gacagugcuucagccu

SEQ ID NO: 3528331 - RNA, 17 nt, Human
gacagugcuucagccug

SEQ ID NO: 3528332 - RNA, 18 nt, Human
gacaguggcaggacagga

SEQ ID NO: 3528333 - RNA, 20 nt, Human
gacaguguauguagaagcau

SEQ ID NO: 3528334 - RNA, 14 nt, Human
gacaguucaagaaa

SEQ ID NO: 3528335 - RNA, 18 nt, Human
gacaguucacacccugca

SEQ ID NO: 3528336 - RNA, 14 nt, Human
gacaguucugaaga

SEQ ID NO: 3528337 - RNA, 18 nt, Human
gacaguuuaucaugaagc

SEQ ID NO: 3528338 - RNA, 23 nt, Human
gacaguuucuuagcuuuuuaauu

SEQ ID NO: 3528339 - RNA, 15 nt, Human
gacaguuuguaaaug

SEQ ID NO: 3528340 - RNA, 17 nt, Human
gacaguuuguaaauguu

SEQ ID NO: 3528341 - RNA, 18 nt, Human
gacaguuuguaaauguua

SEQ ID NO: 3528342 - RNA, 22 nt, Human
gacaguuuuccuucucaucugu

SEQ ID NO: 3528343 - RNA, 18 nt, Human
gacauaaagccauguuuc

SEQ ID NO: 3528344 - RNA, 15 nt, Human
gacauaaaggaaaag

SEQ ID NO: 3528345 - RNA, 19 nt, Human
gacauaaaguugauaaaga

SEQ ID NO: 3528346 - RNA, 16 nt, Human
gacauaacguuuuucc

SEQ ID NO: 3528347 - RNA, 21 nt, Human
gacauaacguuuuuccuuuaa

SEQ ID NO: 3528348 - RNA, 22 nt, Human
gacauaacguuuuuccuuuaaa

SEQ ID NO: 3528349 - RNA, 22 nt, Human
gacauaaugggguccuggccau

SEQ ID NO: 3528350 - RNA, 16 nt, Human
gacauaauuucacuga

SEQ ID NO: 3528351 - RNA, 21 nt, Human
gacauacgcuuuuaaugaaaa

SEQ ID NO: 3528352 - RNA, 16 nt, Human
gacauacuaaccagca

SEQ ID NO: 3528353 - RNA, 22 nt, Human
gacauacuccuuccaucaaaua

SEQ ID NO: 3528354 - RNA, 23 nt, Human
gacauacuugaagggccagagcc

SEQ ID NO: 3528355 - RNA, 21 nt, Human
gacauagagagggagaagaag

SEQ ID NO: 3528356 - RNA, 21 nt, Human
gacauagcaucuuguggcuuu

SEQ ID NO: 3528357 - RNA, 16 nt, Human
gacauagucuggcugu

SEQ ID NO: 3528358 - RNA, 15 nt, Human
gacauauuuaacugg

SEQ ID NO: 3528359 - RNA, 17 nt, Human
gacauauuuaauguuuu

SEQ ID NO: 3528360 - RNA, 18 nt, Human
gacauauuuaauguuuua

SEQ ID NO: 3528361 - RNA, 22 nt, Human
gacauauuuaauguuuuaaaug

SEQ ID NO: 3528362 - RNA, 23 nt, Human
gacauauuuaauguuuuaaaugu

SEQ ID NO: 3528363 - RNA, 14 nt, Human
gacaucacagcagc

SEQ ID NO: 3528364 - RNA, 15 nt, Human
gacaucacagggugg

SEQ ID NO: 3528365 - RNA, 15 nt, Human
gacaucacuuguaca

SEQ ID NO: 3528366 - RNA, 20 nt, Human
gacaucagagguucuuugag

SEQ ID NO: 3528367 - RNA, 14 nt, Human
gacaucagcaaaca

SEQ ID NO: 3528368 - RNA, 14 nt, Human
gacaucagccagcu

SEQ ID NO: 3528369 - RNA, 16 nt, Human
gacaucagccagcugc

SEQ ID NO: 3528370 - RNA, 17 nt, Human
gacaucagccagcugcc

SEQ ID NO: 3528371 - RNA, 16 nt, Human
gacaucagguuuuucc

SEQ ID NO: 3528372 - RNA, 13 nt, Human
gacaucaguggca

SEQ ID NO: 3528373 - RNA, 20 nt, Human
gacaucaguggcauggcucc

SEQ ID NO: 3528374 - RNA, 21 nt, Human
gacaucaguuccuuugugugu

SEQ ID NO: 3528375 - RNA, 18 nt, Human
gacaucaugaauuuuaca

SEQ ID NO: 3528376 - RNA, 22 nt, Human
gacauccagcagauuuccagcc

SEQ ID NO: 3528377 - RNA, 20 nt, Human
gacauccauaaagaagcaau

SEQ ID NO: 3528378 - RNA, 23 nt, Human
gacauccauguuuguaaaacuac

SEQ ID NO: 3528379 - RNA, 16 nt, Human
gacauccguugugcuu

SEQ ID NO: 3528380 - RNA, 16 nt, Human
gacauccucuucugcu

SEQ ID NO: 3528381 - RNA, 19 nt, Human
gacauccuguauaagcacu

SEQ ID NO: 3528382 - RNA, 23 nt, Human
gacauccugucaucugagaauga

SEQ ID NO: 3528383 - RNA, 16 nt, Human
gacaucucaggggcca

SEQ ID NO: 3528384 - RNA, 22 nt, Human
gacaucucaggggccagaggaa

SEQ ID NO: 3528385 - RNA, 15 nt, Human
gacaucucugcaccc

SEQ ID NO: 3528386 - RNA, 16 nt, Human
gacaucucuuugaugu

SEQ ID NO: 3528387 - RNA, 20 nt, Human
gacaucuggaaucuggagac

SEQ ID NO: 3528388 - RNA, 22 nt, Human
gacaucuggaaucuggagacca

SEQ ID NO: 3528389 - RNA, 21 nt, Human
gacaucuguuucuaaauguuu

SEQ ID NO: 3528390 - RNA, 15 nt, Human
gacaucuugaauccu

SEQ ID NO: 3528391 - RNA, 17 nt, Human
gacaucuugucauuuuu

SEQ ID NO: 3528392 - RNA, 20 nt, Human
gacaugaagauucuuuccca

SEQ ID NO: 3528393 - RNA, 17 nt, Human
gacaugauuuccuugaa

SEQ ID NO: 3528394 - RNA, 24 nt, Human
gacaugauuuccuugaauguggcu

SEQ ID NO: 3528395 - RNA, 20 nt, Human
gacaugcaauaaaauuuaaa

SEQ ID NO: 3528396 - RNA, 14 nt, Human
gacaugcacucagc

SEQ ID NO: 3528397 - RNA, 13 nt, Human
gacaugcacugac

SEQ ID NO: 3528398 - RNA, 14 nt, Human
gacaugcacugacc

SEQ ID NO: 3528399 - RNA, 20 nt, Human
gacaugcgggcugggcagcu

SEQ ID NO: 3528400 - RNA, 22 nt, Human
gacaugcgggcugggcagcugu

SEQ ID NO: 3528401 - RNA, 16 nt, Human
gacaugcgguagccag

SEQ ID NO: 3528402 - RNA, 14 nt, Human
gacaugcugacuuu

SEQ ID NO: 3528403 - RNA, 14 nt, Human
gacauggaaaugaa

SEQ ID NO: 3528404 - RNA, 17 nt, Human
gacauggacccggagcu

SEQ ID NO: 3528405 - RNA, 16 nt, Human
gacaugggacauuugc

SEQ ID NO: 3528406 - RNA, 21 nt, Human
gacauggugccugagaggcag

SEQ ID NO: 3528407 - RNA, 22 nt, Human
gacauggugccugagaggcagg

SEQ ID NO: 3528408 - RNA, 11 nt, Human
gacauguacag

SEQ ID NO: 3528409 - RNA, 17 nt, Human
gacaugucuuuucuugc

SEQ ID NO: 3528410 - RNA, 23 nt, Human
gacaugugaaaccuuuuuuaaga

SEQ ID NO: 3528411 - RNA, 18 nt, Human
gacauguggaaagugaau

SEQ ID NO: 3528412 - RNA, 23 nt, Human
gacauguggaaagugaauuugaa

SEQ ID NO: 3528413 - RNA, 17 nt, Human
gacauguggggccaggu

SEQ ID NO: 3528414 - RNA, 14 nt, Human
gacaugugguggga

SEQ ID NO: 3528415 - RNA, 22 nt, Human
gacauguggugggacagggacc

SEQ ID NO: 3528416 - RNA, 23 nt, Human
gacauguuuuagacaaauacuca

SEQ ID NO: 3528417 - RNA, 18 nt, Human
gacauuaacaguuuucca

SEQ ID NO: 3528418 - RNA, 22 nt, Human
gacauuaacaguuuuccaugaa

SEQ ID NO: 3528419 - RNA, 19 nt, Human
gacauuaagaauguugguu

SEQ ID NO: 3528420 - RNA, 22 nt, Human
gacauuaagcaucacaaaugau

SEQ ID NO: 3528421 - RNA, 17 nt, Human
gacauuaugugguuuua

SEQ ID NO: 3528422 - RNA, 14 nt, Human
gacauucaccugcc

SEQ ID NO: 3528423 - RNA, 16 nt, Human
gacauucaccugcccc

SEQ ID NO: 3528424 - RNA, 13 nt, Human
gacauucaugccu

SEQ ID NO: 3528425 - RNA, 16 nt, Human
gacaaaaaguuuccau

SEQ ID NO: 3528426 - RNA, 21 nt, Human
gacaaaaauucaacucagacu

SEQ ID NO: 3528427 - RNA, 17 nt, Human
gacaaaaccuaacuugc

SEQ ID NO: 3528428 - RNA, 13 nt, Human
gacaaaacuucuu

SEQ ID NO: 3528429 - RNA, 19 nt, Human
gacaaaacuucuugucaga

SEQ ID NO: 3528430 - RNA, 22 nt, Human
gacaaaacuucuugucagacau

SEQ ID NO: 3528431 - RNA, 22 nt, Human
gacaaaauacuugucuguuuua

SEQ ID NO: 3528432 - RNA, 13 nt, Human
gacaaaauguuau

SEQ ID NO: 3528433 - RNA, 17 nt, Human
gacaaacaccucccagg

SEQ ID NO: 3528434 - RNA, 22 nt, Human
gacaaacaccucccaggagaca

SEQ ID NO: 3528435 - RNA, 12 nt, Human
gacaaacccuuc

SEQ ID NO: 3528436 - RNA, 17 nt, Human
gacaaacugccaguuuu

SEQ ID NO: 3528437 - RNA, 14 nt, Human
gacaaacuguaaaa

SEQ ID NO: 3528438 - RNA, 15 nt, Human
gacaaacuuugcauc

SEQ ID NO: 3528439 - RNA, 23 nt, Human
gacaaagaugauuuaaaagggaa

SEQ ID NO: 3528440 - RNA, 17 nt, Human
gacaaagauggcucaga

SEQ ID NO: 3528441 - RNA, 16 nt, Human
gacaaagcugcuaaau

SEQ ID NO: 3528442 - RNA, 19 nt, Human
gacaaagcugcuaaaucuc

SEQ ID NO: 3528443 - RNA, 13 nt, Human
gacaaaggagccu

SEQ ID NO: 3528444 - RNA, 17 nt, Human
gacaaaggagccuguga

SEQ ID NO: 3528445 - RNA, 18 nt, Human
gacaaagguuuuccucuu

SEQ ID NO: 3528446 - RNA, 15 nt, Human
gacaaagucaagcca

SEQ ID NO: 3528447 - RNA, 17 nt, Human
gacaaauagaaaauggu

SEQ ID NO: 3528448 - RNA, 11 nt, Human
gacaaauauuc

SEQ ID NO: 3528449 - RNA, 13 nt, Human
gacaaaucaacag

SEQ ID NO: 3528450 - RNA, 17 nt, Human
gacaaaucaacagaagc

SEQ ID NO: 3528451 - RNA, 18 nt, Human
gacaaaucaacagaagca

SEQ ID NO: 3528452 - RNA, 13 nt, Human
gacaaaucaaguu

SEQ ID NO: 3528453 - RNA, 14 nt, Human
gacaaaucaaguuu

SEQ ID NO: 3528454 - RNA, 15 nt, Human
gacaaaucaaguuuc

SEQ ID NO: 3528455 - RNA, 18 nt, Human
gacaaaucaaguuuccaa

SEQ ID NO: 3528456 - RNA, 19 nt, Human
gacaaaucaaguuuccaag

SEQ ID NO: 3528457 - RNA, 23 nt, Human
gacaaaucaaguuuccaagcaaa

SEQ ID NO: 3528458 - RNA, 20 nt, Human
gacaaaucuguguauauuau

SEQ ID NO: 3528459 - RNA, 16 nt, Human
gacaaauucuguuucu

SEQ ID NO: 3528460 - RNA, 19 nt, Human
gacaaauugagacagugca

SEQ ID NO: 3528461 - RNA, 23 nt, Human
gacaacaaauuagguuuuguaca

SEQ ID NO: 3528462 - RNA, 16 nt, Human
gacaacacccauuuuu

SEQ ID NO: 3528463 - RNA, 12 nt, Human
gacaacagaagu

SEQ ID NO: 3528464 - RNA, 14 nt, Human
gacaacagaaguca

SEQ ID NO: 3528465 - RNA, 17 nt, Human
cuccaagaaugcugaaa

SEQ ID NO: 3528466 - RNA, 20 nt, Human
cuccaagaaugcugaaacca

SEQ ID NO: 3528467 - RNA, 12 nt, Human
cuccaagauucu

SEQ ID NO: 3528468 - RNA, 16 nt, Human
cuccaagcagcuuaga

SEQ ID NO: 3528469 - RNA, 22 nt, Human
cuccaagcaggacauggacaag

SEQ ID NO: 3528470 - RNA, 13 nt, Human
cuccaagccagca

SEQ ID NO: 3528471 - RNA, 17 nt, Human
cuccaagcccagcccau

SEQ ID NO: 3528472 - RNA, 15 nt, Human
cuccaagccccaucu

SEQ ID NO: 3528473 - RNA, 17 nt, Human
cuccaagccccaucuuc

SEQ ID NO: 3528474 - RNA, 14 nt, Human
cuccaagcuccauc

SEQ ID NO: 3528475 - RNA, 14 nt, Human
cuccaaggaccagg

SEQ ID NO: 3528476 - RNA, 22 nt, Human
cuccaaggaggggcuguaaaau

SEQ ID NO: 3528477 - RNA, 20 nt, Human
gacccaaaaggcagaagcaa

SEQ ID NO: 3528478 - RNA, 11 nt, Human
gacccaaagac

SEQ ID NO: 3528479 - RNA, 12 nt, Human
gacccaaagacc

SEQ ID NO: 3528480 - RNA, 19 nt, Human
gacccaauguaggagcugc

SEQ ID NO: 3528481 - RNA, 16 nt, Human
gacccaccccaccugc

SEQ ID NO: 3528482 - RNA, 17 nt, Human
gacccaccccaccugca

SEQ ID NO: 3528483 - RNA, 18 nt, Human
gacccaccccaccugcag

SEQ ID NO: 3528484 - RNA, 16 nt, Human
gacccaccccugugcu

SEQ ID NO: 3528485 - RNA, 17 nt, Human
gacccaccccugugcuc

SEQ ID NO: 3528486 - RNA, 22 nt, Human
gacccaccugguggccucugcc

SEQ ID NO: 3528487 - RNA, 22 nt, Human
gacccacgaaacugcccuggcu

SEQ ID NO: 3528488 - RNA, 18 nt, Human
gacccacguggcugcgug

SEQ ID NO: 3528489 - RNA, 18 nt, Human
gacccacuggacucaccu

SEQ ID NO: 3528490 - RNA, 20 nt, Human
gacccacugguuccuucuuc

SEQ ID NO: 3528491 - RNA, 10 nt, Human
gacccagacc

SEQ ID NO: 3528492 - RNA, 16 nt, Human
gacccagauccucaca

SEQ ID NO: 3528493 - RNA, 13 nt, Human
gacccagcacugc

SEQ ID NO: 3528494 - RNA, 20 nt, Human
gacccagcauggguuagugc

SEQ ID NO: 3528495 - RNA, 23 nt, Human
gacccagccccuugagaaaccuu

SEQ ID NO: 3528496 - RNA, 16 nt, Human
gacccagcccucaucc

SEQ ID NO: 3528497 - RNA, 15 nt, Human
gacccaggaaaggca

SEQ ID NO: 3528498 - RNA, 21 nt, Human
gacccaggaaaggcaggauug

SEQ ID NO: 3528499 - RNA, 20 nt, Human
gacccaggacuccuccccac

SEQ ID NO: 3528500 - RNA, 16 nt, Human
gacccaggcaccugca

SEQ ID NO: 3528501 - RNA, 16 nt, Human
gacccaggcugccuga

SEQ ID NO: 3528502 - RNA, 22 nt, Human
gacccagggaacagccacuccc

SEQ ID NO: 3528503 - RNA, 15 nt, Human
gacccagucccuggg

SEQ ID NO: 3528504 - RNA, 12 nt, Human
gacccagugaga

SEQ ID NO: 3528505 - RNA, 23 nt, Human
gacccagugagauuacagaggaa

SEQ ID NO: 3528506 - RNA, 16 nt, Human
gacccagugcccccac

SEQ ID NO: 3528507 - RNA, 20 nt, Human
gacccagugcccccacugac

SEQ ID NO: 3528508 - RNA, 17 nt, Human
gacccaguggcagggca

SEQ ID NO: 3528509 - RNA, 19 nt, Human
gacccaguggcagggcaca

SEQ ID NO: 3528510 - RNA, 14 nt, Human
gacccaguggggag

SEQ ID NO: 3528511 - RNA, 18 nt, Human
gacccauagaucuucuga

SEQ ID NO: 3528512 - RNA, 17 nt, Human
gacccaucacgccugug

SEQ ID NO: 3528513 - RNA, 17 nt, Human
gacccaugcugcccugu

SEQ ID NO: 3528514 - RNA, 20 nt, Human
gacccaugcugcccugugag

SEQ ID NO: 3528515 - RNA, 17 nt, Human
gacccaugggcaggaga

SEQ ID NO: 3528516 - RNA, 14 nt, Human
gacccauugcuguu

SEQ ID NO: 3528517 - RNA, 15 nt, Human
gacccauugcuguug

SEQ ID NO: 3528518 - RNA, 23 nt, Human
gaccccaaagagccuggagaagc

SEQ ID NO: 3528519 - RNA, 12 nt, Human
gaccccacccaa

SEQ ID NO: 3528520 - RNA, 14 nt, Human
gaccccacccaagc

SEQ ID NO: 3528521 - RNA, 22 nt, Human
gaccccacccaagcuuggcagc

SEQ ID NO: 3528522 - RNA, 15 nt, Human
gaccccacuccggcc

SEQ ID NO: 3528523 - RNA, 17 nt, Human
gaccccacuccggcccu

SEQ ID NO: 3528524 - RNA, 19 nt, Human
gaccccagcaagugguccu

SEQ ID NO: 3528525 - RNA, 14 nt, Human
gaccccagccucaa

SEQ ID NO: 3528526 - RNA, 18 nt, Human
gaccccagcggcugaguc

SEQ ID NO: 3528527 - RNA, 14 nt, Human
gaccccagcucugc

SEQ ID NO: 3528528 - RNA, 21 nt, Human
gaccccagcugggaggcaaga

SEQ ID NO: 3528529 - RNA, 21 nt, Human
gaccccagcugugagccuugg

SEQ ID NO: 3528530 - RNA, 22 nt, Human
gaccccagcugugagccuuggc

SEQ ID NO: 3528531 - RNA, 13 nt, Human
gaccccaggccca

SEQ ID NO: 3528532 - RNA, 17 nt, Human
gaccccagggcacagga

SEQ ID NO: 3528533 - RNA, 18 nt, Human
gaccccagggcacaggag

SEQ ID NO: 3528534 - RNA, 16 nt, Human
gaccccaucugcccag

SEQ ID NO: 3528535 - RNA, 17 nt, Human
gaccccaucugcccagg

SEQ ID NO: 3528536 - RNA, 21 nt, Human
gacccccaaccaaguggcucc

SEQ ID NO: 3528537 - RNA, 15 nt, Human
gacccccacaccuca

SEQ ID NO: 3528538 - RNA, 12 nt, Human
gacccccacccc

SEQ ID NO: 3528539 - RNA, 17 nt, Human
gacccccaccccuuccc

SEQ ID NO: 3528540 - RNA, 23 nt, Human
gacccccacucucauuccccagg

SEQ ID NO: 3528541 - RNA, 13 nt, Human
gacccccagcucc

SEQ ID NO: 3528542 - RNA, 13 nt, Human
gacccccaggaca

SEQ ID NO: 3528543 - RNA, 16 nt, Human
gaccccccucaggacc

SEQ ID NO: 3528544 - RNA, 22 nt, Human
gaccccccuuucacaggcagcc

SEQ ID NO: 3528545 - RNA, 16 nt, Human
gacccccgcccccugc

SEQ ID NO: 3528546 - RNA, 18 nt, Human
gacccccgcccccugccc

SEQ ID NO: 3528547 - RNA, 15 nt, Human
gacccccguggggca

SEQ ID NO: 3528548 - RNA, 18 nt, Human
gaccccgacgccacagcc

SEQ ID NO: 3528549 - RNA, 21 nt, Human
gaccccgacgccacagcccag

SEQ ID NO: 3528550 - RNA, 19 nt, Human
gaccccggcuuccuuuccc

SEQ ID NO: 3528551 - RNA, 17 nt, Human
gaccccuaguucccucu

SEQ ID NO: 3528552 - RNA, 22 nt, Human
gaccccuaguucccucugcuca

SEQ ID NO: 3528553 - RNA, 12 nt, Human
gaccccucaccu

SEQ ID NO: 3528554 - RNA, 22 nt, Human
gaccccucauagcccucacccu

SEQ ID NO: 3528555 - RNA, 23 nt, Human
gaccccucauagcccucacccug

SEQ ID NO: 3528556 - RNA, 13 nt, Human
gaccccuccaugu

SEQ ID NO: 3528557 - RNA, 19 nt, Human
gaccccuccccuaaugccu

SEQ ID NO: 3528558 - RNA, 13 nt, Human
gaccccuccucac

SEQ ID NO: 3528559 - RNA, 14 nt, Human
gaccccuccucacu

SEQ ID NO: 3528560 - RNA, 12 nt, Human
gaccccuccucc

SEQ ID NO: 3528561 - RNA, 11 nt, Human
gaccccuccug

SEQ ID NO: 3528562 - RNA, 16 nt, Human
gaccccuccuggggcc

SEQ ID NO: 3528563 - RNA, 23 nt, Human
gaccccuccuggggccaggccgg

SEQ ID NO: 3528564 - RNA, 16 nt, Human
gaccccucuggccagg

SEQ ID NO: 3528565 - RNA, 18 nt, Human
gaccccucuggccaggau

SEQ ID NO: 3528566 - RNA, 20 nt, Human
gaccccucuggccaggaugg

SEQ ID NO: 3528567 - RNA, 12 nt, Human
gaccccugccca

SEQ ID NO: 3528568 - RNA, 13 nt, Human
gaccccuggccuc

SEQ ID NO: 3528569 - RNA, 14 nt, Human
gaccccuggccucc

SEQ ID NO: 3528570 - RNA, 16 nt, Human
gaccccuggccuccgg

SEQ ID NO: 3528571 - RNA, 17 nt, Human
gaccccuuuucagcuuc

SEQ ID NO: 3528572 - RNA, 15 nt, Human
gacccgaccuggccg

SEQ ID NO: 3528573 - RNA, 16 nt, Human
gacccgaccuggccgc

SEQ ID NO: 3528574 - RNA, 23 nt, Human
gacccggagcuaacacuggcccc

SEQ ID NO: 3528575 - RNA, 20 nt, Human
gacccggaggggccuggcag

SEQ ID NO: 3528576 - RNA, 17 nt, Human
gacccggcacccccugc

SEQ ID NO: 3528577 - RNA, 12 nt, Human
gacccggcugcg

SEQ ID NO: 3528578 - RNA, 22 nt, Human
gacccguucaacuuuuccuuug

SEQ ID NO: 3528579 - RNA, 15 nt, Human
gacccuacaggagag

SEQ ID NO: 3528580 - RNA, 11 nt, Human
gacccuacccc

SEQ ID NO: 3528581 - RNA, 16 nt, Human
gacccuaccccaccac

SEQ ID NO: 3528582 - RNA, 18 nt, Human
gacccuaugggucuagga

SEQ ID NO: 3528583 - RNA, 19 nt, Human
gacccucaucuuucuucca

SEQ ID NO: 3528584 - RNA, 20 nt, Human
gacccucaucuuucuuccaa

SEQ ID NO: 3528585 - RNA, 16 nt, Human
gacccucaugcugcca

SEQ ID NO: 3528586 - RNA, 21 nt, Human
gacccucaugcugccaauauc

SEQ ID NO: 3528587 - RNA, 11 nt, Human
gacccuccaag

SEQ ID NO: 3528588 - RNA, 19 nt, Human
gacccuccaccgcagaagg

SEQ ID NO: 3528589 - RNA, 18 nt, Human
gacccuccccaaaggcuu

SEQ ID NO: 3528590 - RNA, 15 nt, Human
gacccuccccgcacc

SEQ ID NO: 3528591 - RNA, 17 nt, Human
gacccuccccgcacccc

SEQ ID NO: 3528592 - RNA, 11 nt, Human
gacccucccuu

SEQ ID NO: 3528593 - RNA, 22 nt, Human
gacccuccuccucccccagagg

SEQ ID NO: 3528594 - RNA, 14 nt, Human
gacccucgcuggcc

SEQ ID NO: 3528595 - RNA, 16 nt, Human
gacccucgcuggcccc

SEQ ID NO: 3528596 - RNA, 18 nt, Human
gacccucgcuggccccca

SEQ ID NO: 3528597 - RNA, 19 nt, Human
gacccucgcuggcccccac

SEQ ID NO: 3528598 - RNA, 21 nt, Human
gacccucgcuggcccccacug

SEQ ID NO: 3528599 - RNA, 15 nt, Human
gacccucuccacccc

SEQ ID NO: 3528600 - RNA, 17 nt, Human
gacccucuccaccccau

SEQ ID NO: 3528601 - RNA, 15 nt, Human
gacccucugaauggu

SEQ ID NO: 3528602 - RNA, 20 nt, Human
gacccucugggaaccuccca

SEQ ID NO: 3528603 - RNA, 22 nt, Human
gacccucugggaaccucccaga

SEQ ID NO: 3528604 - RNA, 13 nt, Human
gacccucuugccc

SEQ ID NO: 3528605 - RNA, 14 nt, Human
gacccucuugccca

SEQ ID NO: 3528606 - RNA, 20 nt, Human
gacccucuugcccauccuga

SEQ ID NO: 3528607 - RNA, 21 nt, Human
gacccugaaaagaaggacggg

SEQ ID NO: 3528608 - RNA, 15 nt, Human
gacccugaaaugugu

SEQ ID NO: 3528609 - RNA, 16 nt, Human
gacccugaaaugugug

SEQ ID NO: 3528610 - RNA, 16 nt, Human
gacccugagcugacca

SEQ ID NO: 3528611 - RNA, 20 nt, Human
cuccagccagccagcucauu

SEQ ID NO: 3528612 - RNA, 17 nt, Human
cuccagccagcgccucc

SEQ ID NO: 3528613 - RNA, 19 nt, Human
cuccagccagcgccucccu

SEQ ID NO: 3528614 - RNA, 22 nt, Human
cuccagccagcgccucccucca

SEQ ID NO: 3528615 - RNA, 16 nt, Human
cuccagccccgcgacc

SEQ ID NO: 3528616 - RNA, 22 nt, Human
cuccagccccucuuggagaagu

SEQ ID NO: 3528617 - RNA, 20 nt, Human
cuccagccccuggaugcagc

SEQ ID NO: 3528618 - RNA, 14 nt, Human
cuccagccccuguc

SEQ ID NO: 3528619 - RNA, 19 nt, Human
cuccagccccuuuccaaaa

SEQ ID NO: 3528620 - RNA, 16 nt, Human
cuccagcccgggagcc

SEQ ID NO: 3528621 - RNA, 23 nt, Human
cuccagcccgggagccuaggacc

SEQ ID NO: 3528622 - RNA, 16 nt, Human
cuccagccucagcccc

SEQ ID NO: 3528623 - RNA, 15 nt, Human
cuccagccucagccu

SEQ ID NO: 3528624 - RNA, 13 nt, Human
cuccagccucugu

SEQ ID NO: 3528625 - RNA, 20 nt, Human
cuccagccugacaucaaaaa

SEQ ID NO: 3528626 - RNA, 19 nt, Human
cuccagccuggacccccag

SEQ ID NO: 3528627 - RNA, 14 nt, Human
cuccagccuggcuc

SEQ ID NO: 3528628 - RNA, 20 nt, Human
cuccagccugggaggcacag

SEQ ID NO: 3528629 - RNA, 13 nt, Human
cuccagccugggg

SEQ ID NO: 3528630 - RNA, 16 nt, Human
cuccagccugggggac

SEQ ID NO: 3528631 - RNA, 19 nt, Human
cuccagcggcccugucauc

SEQ ID NO: 3528632 - RNA, 22 nt, Human
cuccagcggcccugucauccag

SEQ ID NO: 3528633 - RNA, 14 nt, Human
cuccagcuccaaga

SEQ ID NO: 3528634 - RNA, 17 nt, Human
cuccagcucccugugcc

SEQ ID NO: 3528635 - RNA, 16 nt, Human
cuccagcuccuuuggg

SEQ ID NO: 3528636 - RNA, 15 nt, Human
cuccagcucuuuccu

SEQ ID NO: 3528637 - RNA, 14 nt, Human
cuccagcugcugag

SEQ ID NO: 3528638 - RNA, 15 nt, Human
cuccagcugggcucu

SEQ ID NO: 3528639 - RNA, 19 nt, Human
cuccagcuguucagcuggu

SEQ ID NO: 3528640 - RNA, 19 nt, Human
cuccagcuuguggagcccc

SEQ ID NO: 3528641 - RNA, 20 nt, Human
cuccagcuuguggagcccca

SEQ ID NO: 3528642 - RNA, 16 nt, Human
gacuccaggcagcaga

SEQ ID NO: 3528643 - RNA, 20 nt, Human
gacuccaggcagcagacaca

SEQ ID NO: 3528644 - RNA, 12 nt, Human
gacuccaggccc

SEQ ID NO: 3528645 - RNA, 23 nt, Human
gacuccaugagaagccgugggug

SEQ ID NO: 3528646 - RNA, 16 nt, Human
gacucccaaagagcug

SEQ ID NO: 3528647 - RNA, 17 nt, Human
gacucccaaguuuccau

SEQ ID NO: 3528648 - RNA, 14 nt, Human
gacucccaugaagc

SEQ ID NO: 3528649 - RNA, 16 nt, Human
gacucccaugaagccu

SEQ ID NO: 3528650 - RNA, 18 nt, Human
gacucccaugaagccuuu

SEQ ID NO: 3528651 - RNA, 22 nt, Human
gacucccauuccugaagaacca

SEQ ID NO: 3528652 - RNA, 15 nt, Human
gacuccccaggccag

SEQ ID NO: 3528653 - RNA, 15 nt, Human
gacuccggcccuccu

SEQ ID NO: 3528654 - RNA, 17 nt, Human
gacuccguuggccacuc

SEQ ID NO: 3528655 - RNA, 18 nt, Human
gacuccuaccugcccugg

SEQ ID NO: 3528656 - RNA, 19 nt, Human
gacuccuaccugcccugga

SEQ ID NO: 3528657 - RNA, 19 nt, Human
gacuccuagcuguccuuuu

SEQ ID NO: 3528658 - RNA, 15 nt, Human
gacuccuaugaucuc

SEQ ID NO: 3528659 - RNA, 19 nt, Human
gacuccuccccacccuccu

SEQ ID NO: 3528660 - RNA, 16 nt, Human
gacuccuccuuucucc

SEQ ID NO: 3528661 - RNA, 16 nt, Human
gacuccuccuuuuucc

SEQ ID NO: 3528662 - RNA, 15 nt, Human
gacuccucggccugg

SEQ ID NO: 3528663 - RNA, 18 nt, Human
gacuccucggccuggcuc

SEQ ID NO: 3528664 - RNA, 11 nt, Human
gacuccugcag

SEQ ID NO: 3528665 - RNA, 16 nt, Human
gacuccugcaggcagc

SEQ ID NO: 3528666 - RNA, 17 nt, Human
gacuccugcaggcagcc

SEQ ID NO: 3528667 - RNA, 20 nt, Human
gacuccugcaggcagccagg

SEQ ID NO: 3528668 - RNA, 14 nt, Human
gacuccugcccugu

SEQ ID NO: 3528669 - RNA, 14 nt, Human
gacuccuguggaga

SEQ ID NO: 3528670 - RNA, 17 nt, Human
gacucgacucugugccu

SEQ ID NO: 3528671 - RNA, 18 nt, Human
gacucgcgacaaugcaaa

SEQ ID NO: 3528672 - RNA, 14 nt, Human
gacucgcuuguaaa

SEQ ID NO: 3528673 - RNA, 15 nt, Human
gacucgcuuguaaau

SEQ ID NO: 3528674 - RNA, 19 nt, Human
gacucgcuuguaaauacca

SEQ ID NO: 3528675 - RNA, 15 nt, Human
gacucgggcuccugu

SEQ ID NO: 3528676 - RNA, 16 nt, Human
gacucgggcuccugug

SEQ ID NO: 3528677 - RNA, 18 nt, Human
gacucgggcuccugugcc

SEQ ID NO: 3528678 - RNA, 18 nt, Human
gacucggggugcuuccuu

SEQ ID NO: 3528679 - RNA, 20 nt, Human
gacucgucugacugugugug

SEQ ID NO: 3528680 - RNA, 19 nt, Human
gacucuaaagaccaaacuu

SEQ ID NO: 3528681 - RNA, 16 nt, Human
gacucuaagaaagaac

SEQ ID NO: 3528682 - RNA, 15 nt, Human
gacucuacagaggcc

SEQ ID NO: 3528683 - RNA, 14 nt, Human
gacucuaccagacu

SEQ ID NO: 3528684 - RNA, 19 nt, Human
gacucuaccucauaucagu

SEQ ID NO: 3528685 - RNA, 17 nt, Human
gacucuaggugcccuug

SEQ ID NO: 3528686 - RNA, 15 nt, Human
gacucuauucuuuaa

SEQ ID NO: 3528687 - RNA, 15 nt, Human
gacucucagcccaga

SEQ ID NO: 3528688 - RNA, 17 nt, Human
gacucucagcccagaag

SEQ ID NO: 3528689 - RNA, 16 nt, Human
gacucucagucucuga

SEQ ID NO: 3528690 - RNA, 22 nt, Human
gacucuccccucuuauguaccu

SEQ ID NO: 3528691 - RNA, 19 nt, Human
gacucugaagccucuggga

SEQ ID NO: 3528692 - RNA, 17 nt, Human
gacucugaccucuuggc

SEQ ID NO: 3528693 - RNA, 21 nt, Human
gacucugagcgggaggcagag

SEQ ID NO: 3528694 - RNA, 15 nt, Human
gacucugcacauguc

SEQ ID NO: 3528695 - RNA, 20 nt, Human
gacucugcaucccagcaccu

SEQ ID NO: 3528696 - RNA, 10 nt, Human
gacucugccc

SEQ ID NO: 3528697 - RNA, 14 nt, Human
gacucugcccccug

SEQ ID NO: 3528698 - RNA, 17 nt, Human
gacucugcccccugcug

SEQ ID NO: 3528699 - RNA, 16 nt, Human
gacucuggcccuggcc

SEQ ID NO: 3528700 - RNA, 13 nt, Human
gacucuggccucc

SEQ ID NO: 3528701 - RNA, 18 nt, Human
gacucugggcuauggaca

SEQ ID NO: 3528702 - RNA, 19 nt, Human
gacucugggcuauggacac

SEQ ID NO: 3528703 - RNA, 18 nt, Human
gacucuggguccuuccug

SEQ ID NO: 3528704 - RNA, 16 nt, Human
gacucugucucaaaaa

SEQ ID NO: 3528705 - RNA, 16 nt, Human
gacucugugcuggcca

SEQ ID NO: 3528706 - RNA, 21 nt, Human
gacucugugcuggccagcgag

SEQ ID NO: 3528707 - RNA, 16 nt, Human
gacucuuaagaagacu

SEQ ID NO: 3528708 - RNA, 21 nt, Human
gacucuuaagaagacugcauu

SEQ ID NO: 3528709 - RNA, 17 nt, Human
gacucuucaaaaacugu

SEQ ID NO: 3528710 - RNA, 13 nt, Human
gacucuucccuca

SEQ ID NO: 3528711 - RNA, 11 nt, Human
gacucuugccu

SEQ ID NO: 3528712 - RNA, 21 nt, Human
gacucuugccuguuucccagg

SEQ ID NO: 3528713 - RNA, 15 nt, Human
gacucuugcucuuuc

SEQ ID NO: 3528714 - RNA, 19 nt, Human
gacucuuguuuucaguuuc

SEQ ID NO: 3528715 - RNA, 21 nt, Human
gacucuuuauugucuguaaau

SEQ ID NO: 3528716 - RNA, 23 nt, Human
gacucuuuauugucuguaaaucu

SEQ ID NO: 3528717 - RNA, 19 nt, Human
gacucuuucugagugccuu

SEQ ID NO: 3528718 - RNA, 21 nt, Human
gacucuuucugagugccuucu

SEQ ID NO: 3528719 - RNA, 17 nt, Human
gacucuuuugccauuaa

SEQ ID NO: 3528720 - RNA, 22 nt, Human
gacucuuuuuagggccaggcag

SEQ ID NO: 3528721 - RNA, 17 nt, Human
gacugaaaaccucuccu

SEQ ID NO: 3528722 - RNA, 15 nt, Human
gacugaaaauauugu

SEQ ID NO: 3528723 - RNA, 19 nt, Human
gacugaaauuacggguacc

SEQ ID NO: 3528724 - RNA, 21 nt, Human
gacugaaugggaucaugaaag

SEQ ID NO: 3528725 - RNA, 14 nt, Human
gacugaauuaugaa

SEQ ID NO: 3528726 - RNA, 13 nt, Human
gacugaauuccaa

SEQ ID NO: 3528727 - RNA, 14 nt, Human
gacugacagcaugu

SEQ ID NO: 3528728 - RNA, 21 nt, Human
gacugaccaauauuguacagu

SEQ ID NO: 3528729 - RNA, 15 nt, Human
gacugacugaggcag

SEQ ID NO: 3528730 - RNA, 16 nt, Human
gacugacugaggcagu

SEQ ID NO: 3528731 - RNA, 18 nt, Human
gacugagcaagacccugu

SEQ ID NO: 3528732 - RNA, 17 nt, Human
gacugagcacccucugg

SEQ ID NO: 3528733 - RNA, 14 nt, Human
gacugagcaccugc

SEQ ID NO: 3528734 - RNA, 16 nt, Human
gacugagcaccugcuu

SEQ ID NO: 3528735 - RNA, 14 nt, Human
gacugagcagacug

SEQ ID NO: 3528736 - RNA, 15 nt, Human
gacugagcagacugg

SEQ ID NO: 3528737 - RNA, 15 nt, Human
gacugaggacaaagu

SEQ ID NO: 3528738 - RNA, 17 nt, Human
gacugagggggccugga

SEQ ID NO: 3528739 - RNA, 22 nt, Human
gacugaguacguugugcauuug

SEQ ID NO: 3528740 - RNA, 14 nt, Human
gacugagugggaag

SEQ ID NO: 3528741 - RNA, 16 nt, Human
gacugagugggaagcc

SEQ ID NO: 3528742 - RNA, 15 nt, Human
gacugaucaggaccu

SEQ ID NO: 3528743 - RNA, 14 nt, Human
gacugaugcuuuca

SEQ ID NO: 3528744 - RNA, 17 nt, Human
gacugaugucuccuaag

SEQ ID NO: 3528745 - RNA, 22 nt, Human
gacugaugucuccuaagcaccu

SEQ ID NO: 3528746 - RNA, 20 nt, Human
gacugauguuaggcugggcc

SEQ ID NO: 3528747 - RNA, 21 nt, Human
gacugauguugagggaacaga

SEQ ID NO: 3528748 - RNA, 16 nt, Human
gacugauucugggaug

SEQ ID NO: 3528749 - RNA, 16 nt, Human
gacugauucuucagca

SEQ ID NO: 3528750 - RNA, 18 nt, Human
gacugcaagaggcuccug

SEQ ID NO: 3528751 - RNA, 21 nt, Human
gacugcaagugagcaaaccug

SEQ ID NO: 3528752 - RNA, 15 nt, Human
gacugcacagcggcc

SEQ ID NO: 3528753 - RNA, 21 nt, Human
gacugcacagcguccugucca

SEQ ID NO: 3528754 - RNA, 15 nt, Human
gacugcacccaggag

SEQ ID NO: 3528755 - RNA, 22 nt, Human
gacugcagggacacgggcagcc

SEQ ID NO: 3528756 - RNA, 13 nt, Human
gagacagugaauu

SEQ ID NO: 3528757 - RNA, 16 nt, Human
gagacagugggaaaua

SEQ ID NO: 3528758 - RNA, 17 nt, Human
gagacaguuauuuauag

SEQ ID NO: 3528759 - RNA, 18 nt, Human
gagacaguucaagaaagc

SEQ ID NO: 3528760 - RNA, 23 nt, Human
gagacaguugggugagaacaacc

SEQ ID NO: 3528761 - RNA, 16 nt, Human
gagacaguuucuuagc

SEQ ID NO: 3528762 - RNA, 22 nt, Human
gagacaguuucuuagcuuuuua

SEQ ID NO: 3528763 - RNA, 13 nt, Human
gagacaucagccc

SEQ ID NO: 3528764 - RNA, 11 nt, Human
gagacauccag

SEQ ID NO: 3528765 - RNA, 20 nt, Human
gagacauggcuuucagaaaa

SEQ ID NO: 3528766 - RNA, 21 nt, Human
gagacauggcuuucagaaaac

SEQ ID NO: 3528767 - RNA, 14 nt, Human
gagacaugugacau

SEQ ID NO: 3528768 - RNA, 14 nt, Human
gagaccaaccugac

SEQ ID NO: 3528769 - RNA, 17 nt, Human
gagaccaaccugaccaa

SEQ ID NO: 3528770 - RNA, 12 nt, Human
gagaccaccagg

SEQ ID NO: 3528771 - RNA, 12 nt, Human
gagaccaccucu

SEQ ID NO: 3528772 - RNA, 13 nt, Human
gagaccagccugg

SEQ ID NO: 3528773 - RNA, 18 nt, Human
gagaccaggcaaagcaag

SEQ ID NO: 3528774 - RNA, 14 nt, Human
gagaccaggcccug

SEQ ID NO: 3528775 - RNA, 17 nt, Human
gagaccaggcugugucc

SEQ ID NO: 3528776 - RNA, 22 nt, Human
gagaccaguugggagcacugga

SEQ ID NO: 3528777 - RNA, 21 nt, Human
gagaccaucccugaaggcccc

SEQ ID NO: 3528778 - RNA, 18 nt, Human
gagaccaugcagagcgcc

SEQ ID NO: 3528779 - RNA, 17 nt, Human
gagacccaccccaccug

SEQ ID NO: 3528780 - RNA, 18 nt, Human
gagacccagcggacacac

SEQ ID NO: 3528781 - RNA, 12 nt, Human
gagacccaggac

SEQ ID NO: 3528782 - RNA, 18 nt, Human
gagaccccaccagccuca

SEQ ID NO: 3528783 - RNA, 15 nt, Human
gagacccccacaccu

SEQ ID NO: 3528784 - RNA, 20 nt, Human
gagaccccgggagccgggga

SEQ ID NO: 3528785 - RNA, 13 nt, Human
gagaccccuggcc

SEQ ID NO: 3528786 - RNA, 17 nt, Human
gagaccccuggccuccg

SEQ ID NO: 3528787 - RNA, 13 nt, Human
gagaccccugucu

SEQ ID NO: 3528788 - RNA, 17 nt, Human
gagacccuacaggagag

SEQ ID NO: 3528789 - RNA, 21 nt, Human
gagacccucugccaccagaga

SEQ ID NO: 3528790 - RNA, 15 nt, Human
gagaccggccugcca

SEQ ID NO: 3528791 - RNA, 18 nt, Human
gagaccggccugccagga

SEQ ID NO: 3528792 - RNA, 20 nt, Human
gagaccggccugccaggagg

SEQ ID NO: 3528793 - RNA, 18 nt, Human
gagaccgggcccuggguu

SEQ ID NO: 3528794 - RNA, 20 nt, Human
gagaccgggcccuggguucc

SEQ ID NO: 3528795 - RNA, 15 nt, Human
gagaccguccucacc

SEQ ID NO: 3528796 - RNA, 16 nt, Human
gagaccguccucaccc

SEQ ID NO: 3528797 - RNA, 20 nt, Human
gagaccgucgggggcugagg

SEQ ID NO: 3528798 - RNA, 18 nt, Human
gagaccucagaaguaaag

SEQ ID NO: 3528799 - RNA, 20 nt, Human
gagaccucaucaggaugaac

SEQ ID NO: 3528800 - RNA, 21 nt, Human
gagaccucaucaggaugaacc

SEQ ID NO: 3528801 - RNA, 15 nt, Human
gagaccugaagugug

SEQ ID NO: 3528802 - RNA, 19 nt, Human
gagaccugacaagcacugc

SEQ ID NO: 3528803 - RNA, 13 nt, Human
gagaccugccccu

SEQ ID NO: 3528804 - RNA, 13 nt, Human
gagaccuuacccc

SEQ ID NO: 3528805 - RNA, 18 nt, Human
gagaccuuaccccuggcu

SEQ ID NO: 3528806 - RNA, 22 nt, Human
gagaccuuaccccuggcuguuu

SEQ ID NO: 3528807 - RNA, 16 nt, Human
gagacgggaccgggcc

SEQ ID NO: 3528808 - RNA, 18 nt, Human
gagacgggugggcggcug

SEQ ID NO: 3528809 - RNA, 23 nt, Human
gagacgguuuccagggaggggcc

SEQ ID NO: 3528810 - RNA, 18 nt, Human
gagacguggaaccucugu

SEQ ID NO: 3528811 - RNA, 22 nt, Human
gagacguggaaccucugucuca

SEQ ID NO: 3528812 - RNA, 20 nt, Human
gagacguuuauaaacagaaa

SEQ ID NO: 3528813 - RNA, 23 nt, Human
gagacguuuauaaacagaaaugg

SEQ ID NO: 3528814 - RNA, 22 nt, Human
gagacuaagcccugucgagaca

SEQ ID NO: 3528815 - RNA, 20 nt, Human
gagacucaccucugccucaa

SEQ ID NO: 3528816 - RNA, 13 nt, Human
gagacucagacag

SEQ ID NO: 3528817 - RNA, 15 nt, Human
gagacucagagggag

SEQ ID NO: 3528818 - RNA, 12 nt, Human
gagacucagccu

SEQ ID NO: 3528819 - RNA, 15 nt, Human
gagacucagccugca

SEQ ID NO: 3528820 - RNA, 17 nt, Human
gagacucagccugcagu

SEQ ID NO: 3528821 - RNA, 21 nt, Human
gagacucagggccccagcacu

SEQ ID NO: 3528822 - RNA, 16 nt, Human
gagacucagugcagau

SEQ ID NO: 3528823 - RNA, 23 nt, Human
gagacucagugcagauggagaga

SEQ ID NO: 3528824 - RNA, 16 nt, Human
gagacuccaugagaag

SEQ ID NO: 3528825 - RNA, 20 nt, Human
gagacuccucaguucuugcc

SEQ ID NO: 3528826 - RNA, 18 nt, Human
gagacuccugcaggcagc

SEQ ID NO: 3528827 - RNA, 18 nt, Human
gagacucgacucugugcc

SEQ ID NO: 3528828 - RNA, 20 nt, Human
gagacucgagaacuuucauu

SEQ ID NO: 3528829 - RNA, 14 nt, Human
gagacucuggccuc

SEQ ID NO: 3528830 - RNA, 12 nt, Human
gagacucugugg

SEQ ID NO: 3528831 - RNA, 23 nt, Human
gagacucuguggggccuugguuc

SEQ ID NO: 3528832 - RNA, 23 nt, Human
gagacugcgggaugguccugggg

SEQ ID NO: 3528833 - RNA, 17 nt, Human
gagacugcuucccaucc

SEQ ID NO: 3528834 - RNA, 22 nt, Human
gagacugcuucccauccuaccc

SEQ ID NO: 3528835 - RNA, 12 nt, Human
gagacuggagca

SEQ ID NO: 3528836 - RNA, 20 nt, Human
gagacuggagcaucugacuc

SEQ ID NO: 3528837 - RNA, 22 nt, Human
gagacuggcgugaacccaggag

SEQ ID NO: 3528838 - RNA, 13 nt, Human
gagacugggcuga

SEQ ID NO: 3528839 - RNA, 21 nt, Human
gagacugggcugagggagccu

SEQ ID NO: 3528840 - RNA, 20 nt, Human
gagaagggaauccuccucca

SEQ ID NO: 3528841 - RNA, 15 nt, Human
gagaagggauggagg

SEQ ID NO: 3528842 - RNA, 17 nt, Human
gagaagggcauaaaaca

SEQ ID NO: 3528843 - RNA, 23 nt, Human
gagaaggggcgggaauauuguuu

SEQ ID NO: 3528844 - RNA, 22 nt, Human
gagaagggggucaaagcaagga

SEQ ID NO: 3528845 - RNA, 23 nt, Human
gagaagguggguuuucaucaaga

SEQ ID NO: 3528846 - RNA, 15 nt, Human
gagaagguuuauugu

SEQ ID NO: 3528847 - RNA, 16 nt, Human
gagaaguauacauaag

SEQ ID NO: 3528848 - RNA, 18 nt, Human
gagaagucacagggcagu

SEQ ID NO: 3528849 - RNA, 23 nt, Human
gagaagucuuagacuugaaauac

SEQ ID NO: 3528850 - RNA, 20 nt, Human
gagaagucuucuauuuauuu

SEQ ID NO: 3528851 - RNA, 17 nt, Human
gagaagugaaugcuggg

SEQ ID NO: 3528852 - RNA, 17 nt, Human
gagaagugacagggaag

SEQ ID NO: 3528853 - RNA, 21 nt, Human
gagaagugacagggaagcuac

SEQ ID NO: 3528854 - RNA, 23 nt, Human
gagaagugacagggaagcuacag

SEQ ID NO: 3528855 - RNA, 24 nt, Human
gagaagugacagggaagcuacagg

SEQ ID NO: 3528856 - RNA, 17 nt, Human
gagaagugccccugcug

SEQ ID NO: 3528857 - RNA, 22 nt, Human
gagaagugccccugcugccucc

SEQ ID NO: 3528858 - RNA, 23 nt, Human
gagaagugccccugcugccuccc

SEQ ID NO: 3528859 - RNA, 17 nt, Human
gagaaguuucuggcccu

SEQ ID NO: 3528860 - RNA, 19 nt, Human
gagaaguuuuguacagaga

SEQ ID NO: 3528861 - RNA, 20 nt, Human
gagaauaaauugauuuuuau

SEQ ID NO: 3528862 - RNA, 22 nt, Human
gagaauaagagaaagaaaauga

SEQ ID NO: 3528863 - RNA, 16 nt, Human
gagaauaauucuuuga

SEQ ID NO: 3528864 - RNA, 14 nt, Human
gagaauagaaggaa

SEQ ID NO: 3528865 - RNA, 23 nt, Human
gagaauauuagcuuuacuguuug

SEQ ID NO: 3528866 - RNA, 14 nt, Human
gagaaucagacuga

SEQ ID NO: 3528867 - RNA, 20 nt, Human
gagaaucagaucauuucaaa

SEQ ID NO: 3528868 - RNA, 16 nt, Human
gagaaucauguuucuu

SEQ ID NO: 3528869 - RNA, 20 nt, Human
gagaaucccacuuucuauag

SEQ ID NO: 3528870 - RNA, 13 nt, Human
gagaaucuuuauu

SEQ ID NO: 3528871 - RNA, 19 nt, Human
gagaaugaaagggcccaga

SEQ ID NO: 3528872 - RNA, 11 nt, Human
gagaaugaaca

SEQ ID NO: 3528873 - RNA, 17 nt, Human
gagaaugagagacacac

SEQ ID NO: 3528874 - RNA, 13 nt, Human
gagaaugagccuc

SEQ ID NO: 3528875 - RNA, 12 nt, Human
gagaaugcacag

SEQ ID NO: 3528876 - RNA, 17 nt, Human
gagaaugcacagauaua

SEQ ID NO: 3528877 - RNA, 15 nt, Human
gagaauggaaaacag

SEQ ID NO: 3528878 - RNA, 18 nt, Human
gagaauugcuugaaccca

SEQ ID NO: 3528879 - RNA, 13 nt, Human
gagaauuggcuca

SEQ ID NO: 3528880 - RNA, 12 nt, Human
gagaauuucuaa

SEQ ID NO: 3528881 - RNA, 21 nt, Human
gagaauuucuaccauuucaga

SEQ ID NO: 3528882 - RNA, 16 nt, Human
gagaauuuuaaauuau

SEQ ID NO: 3528883 - RNA, 15 nt, Human
gagacaaaaauuauc

SEQ ID NO: 3528884 - RNA, 16 nt, Human
gagacaaaauuuuagu

SEQ ID NO: 3528885 - RNA, 20 nt, Human
gagacaaacaccucccagga

SEQ ID NO: 3528886 - RNA, 18 nt, Human
gagacacaggaugaagca

SEQ ID NO: 3528887 - RNA, 17 nt, Human
gagacaccugcaccucc

SEQ ID NO: 3528888 - RNA, 17 nt, Human
gagacacuggccccuca

SEQ ID NO: 3528889 - RNA, 17 nt, Human
gagacacugguggggau

SEQ ID NO: 3528890 - RNA, 20 nt, Human
gagacacugugcuauaaauc

SEQ ID NO: 3528891 - RNA, 20 nt, Human
gagacacuguugauaaaaac

SEQ ID NO: 3528892 - RNA, 20 nt, Human
gagacagacagagaaggcag

SEQ ID NO: 3528893 - RNA, 19 nt, Human
gagacagaguuuucacucu

SEQ ID NO: 3528894 - RNA, 16 nt, Human
gagacagccaacuaug

SEQ ID NO: 3528895 - RNA, 13 nt, Human
gagacagcccagg

SEQ ID NO: 3528896 - RNA, 12 nt, Human
gagacagcccgg

SEQ ID NO: 3528897 - RNA, 18 nt, Human
gagacagcccgggcucug

SEQ ID NO: 3528898 - RNA, 19 nt, Human
gagacagcccgggcucugc

SEQ ID NO: 3528899 - RNA, 21 nt, Human
gagacagcccgggcucugccu

SEQ ID NO: 3528900 - RNA, 15 nt, Human
cuccucccuuccuuu

SEQ ID NO: 3528901 - RNA, 21 nt, Human
cuccucccuuccuuuucccug

SEQ ID NO: 3528902 - RNA, 22 nt, Human
cuccucccuuccuuuucccugc

SEQ ID NO: 3528903 - RNA, 20 nt, Human
cuccuccgugcuuccucagu

SEQ ID NO: 3528904 - RNA, 12 nt, Human
cuccuccuagcc

SEQ ID NO: 3528905 - RNA, 14 nt, Human
cuccuccuccccca

SEQ ID NO: 3528906 - RNA, 15 nt, Human
cuccuccucccccag

SEQ ID NO: 3528907 - RNA, 14 nt, Human
cuccuccucccugc

SEQ ID NO: 3528908 - RNA, 12 nt, Human
cuccuccucuuu

SEQ ID NO: 3528909 - RNA, 14 nt, Human
cuccuccucuuucu

SEQ ID NO: 3528910 - RNA, 15 nt, Human
cuccuccucuuucuc

SEQ ID NO: 3528911 - RNA, 19 nt, Human
cuccuccucuuucucuccc

SEQ ID NO: 3528912 - RNA, 19 nt, Human
cuccuccuggacuccugca

SEQ ID NO: 3528913 - RNA, 12 nt, Human
cuccuccuuccc

SEQ ID NO: 3528914 - RNA, 15 nt, Human
cuccuccuuccuagu

SEQ ID NO: 3528915 - RNA, 15 nt, Human
cuccuccuuuuuccu

SEQ ID NO: 3528916 - RNA, 16 nt, Human
cuccucgacaucacug

SEQ ID NO: 3528917 - RNA, 17 nt, Human
cuccucgagggcaggga

SEQ ID NO: 3528918 - RNA, 22 nt, Human
cuccucggaaccgcucaccuag

SEQ ID NO: 3528919 - RNA, 17 nt, Human
cuccucgguucaagguc

SEQ ID NO: 3528920 - RNA, 13 nt, Human
cuccucguuccuu

SEQ ID NO: 3528921 - RNA, 21 nt, Human
cuccucuaacaggggcuggug

SEQ ID NO: 3528922 - RNA, 17 nt, Human
cuccucuagcugugggg

SEQ ID NO: 3528923 - RNA, 19 nt, Human
cuccucuagcugugggggu

SEQ ID NO: 3528924 - RNA, 18 nt, Human
cuccucucacuccccagc

SEQ ID NO: 3528925 - RNA, 13 nt, Human
cuccucucaguac

SEQ ID NO: 3528926 - RNA, 13 nt, Human
cuccucucccauc

SEQ ID NO: 3528927 - RNA, 21 nt, Human
cuccucucccaucccccugcc

SEQ ID NO: 3528928 - RNA, 14 nt, Human
cuccucuccccagc

SEQ ID NO: 3528929 - RNA, 17 nt, Human
cuccucuccccagccca

SEQ ID NO: 3528930 - RNA, 18 nt, Human
cuccucuccccagcccag

SEQ ID NO: 3528931 - RNA, 20 nt, Human
cuccucuccccagcccagag

SEQ ID NO: 3528932 - RNA, 12 nt, Human
cuccucuccccu

SEQ ID NO: 3528933 - RNA, 14 nt, Human
cuccucuccccuac

SEQ ID NO: 3528934 - RNA, 17 nt, Human
cuccucuccccuaccac

SEQ ID NO: 3528935 - RNA, 14 nt, Human
cuccucuccuggag

SEQ ID NO: 3528936 - RNA, 12 nt, Human
cuccucucugcc

SEQ ID NO: 3528937 - RNA, 14 nt, Human
cuccucucugcccu

SEQ ID NO: 3528938 - RNA, 15 nt, Human
cuccucucugcccua

SEQ ID NO: 3528939 - RNA, 19 nt, Human
cuccucugaaacagcugcc

SEQ ID NO: 3528940 - RNA, 21 nt, Human
cuccucugaaacagcugccuu

SEQ ID NO: 3528941 - RNA, 23 nt, Human
cuccucugaaacagcugccuuag

SEQ ID NO: 3528942 - RNA, 19 nt, Human
cuccucugacucagggcuc

SEQ ID NO: 3528943 - RNA, 20 nt, Human
cuccucugacucagggcucc

SEQ ID NO: 3528944 - RNA, 13 nt, Human
cuccucugcacuc

SEQ ID NO: 3528945 - RNA, 18 nt, Human
cuccucugcagugccuug

SEQ ID NO: 3528946 - RNA, 16 nt, Human
cuccucugcugcuggc

SEQ ID NO: 3528947 - RNA, 18 nt, Human
cuccucugcugcuggcug

SEQ ID NO: 3528948 - RNA, 15 nt, Human
cuccucugggcagga

SEQ ID NO: 3528949 - RNA, 12 nt, Human
cuccucugucca

SEQ ID NO: 3528950 - RNA, 15 nt, Human
cuccucuguccaggg

SEQ ID NO: 3528951 - RNA, 17 nt, Human
cuccucuguccagggcc

SEQ ID NO: 3528952 - RNA, 16 nt, Human
cuccucuguccugcuu

SEQ ID NO: 3528953 - RNA, 12 nt, Human
cuccucugugaa

SEQ ID NO: 3528954 - RNA, 18 nt, Human
cuccucugugaagcauuc

SEQ ID NO: 3528955 - RNA, 22 nt, Human
cuccucugugaccaaugucuug

SEQ ID NO: 3528956 - RNA, 23 nt, Human
cuccucuuaaaaaauaaaaacug

SEQ ID NO: 3528957 - RNA, 18 nt, Human
cuccucuucaacugacca

SEQ ID NO: 3528958 - RNA, 21 nt, Human
cuccucuucaacugaccagcc

SEQ ID NO: 3528959 - RNA, 19 nt, Human
cuccucuucaccccggcag

SEQ ID NO: 3528960 - RNA, 11 nt, Human
cuccucuucca

SEQ ID NO: 3528961 - RNA, 20 nt, Human
cuccucuuccaugcugugcg

SEQ ID NO: 3528962 - RNA, 14 nt, Human
cuccucuuccccag

SEQ ID NO: 3528963 - RNA, 23 nt, Human
cuccucuucuacucacuuuuccc

SEQ ID NO: 3528964 - RNA, 15 nt, Human
cuccucuugccacug

SEQ ID NO: 3528965 - RNA, 18 nt, Human
cuccucuugccacugccu

SEQ ID NO: 3528966 - RNA, 12 nt, Human
cuccucuuguaa

SEQ ID NO: 3528967 - RNA, 13 nt, Human
cuccucuuguaaa

SEQ ID NO: 3528968 - RNA, 15 nt, Human
cuccucuuuaaaaca

SEQ ID NO: 3528969 - RNA, 16 nt, Human
cuccucuuuaaaacaa

SEQ ID NO: 3528970 - RNA, 17 nt, Human
cuccucuuuccucucuu

SEQ ID NO: 3528971 - RNA, 22 nt, Human
cuccucuuuccucucuuuguuc

SEQ ID NO: 3528972 - RNA, 23 nt, Human
cuccugaaaaaaaaccugagauu

SEQ ID NO: 3528973 - RNA, 19 nt, Human
cuccugaaccgcacagcuc

SEQ ID NO: 3528974 - RNA, 21 nt, Human
cuccugaaccgcacagcucag

SEQ ID NO: 3528975 - RNA, 20 nt, Human
cuccugacacaccugcagcc

SEQ ID NO: 3528976 - RNA, 17 nt, Human
cuccugacacugcugga

SEQ ID NO: 3528977 - RNA, 18 nt, Human
cuccugacacugcuggag

SEQ ID NO: 3528978 - RNA, 14 nt, Human
cuccugacagaagg

SEQ ID NO: 3528979 - RNA, 16 nt, Human
cuccugacagaaggug

SEQ ID NO: 3528980 - RNA, 15 nt, Human
cuccugaccucaagu

SEQ ID NO: 3528981 - RNA, 15 nt, Human
cuccugaccucaggc

SEQ ID NO: 3528982 - RNA, 16 nt, Human
cuccugaccugaggcu

SEQ ID NO: 3528983 - RNA, 20 nt, Human
cuccugacgucugaagcuug

SEQ ID NO: 3528984 - RNA, 16 nt, Human
cuccugacuggugcug

SEQ ID NO: 3528985 - RNA, 15 nt, Human
cuccugagaccccug

SEQ ID NO: 3528986 - RNA, 17 nt, Human
cuccugagaccccuggc

SEQ ID NO: 3528987 - RNA, 20 nt, Human
cuccugagaccccuggccuc

SEQ ID NO: 3528988 - RNA, 20 nt, Human
cuccugagcccccagcuucc

SEQ ID NO: 3528989 - RNA, 21 nt, Human
cuccugagcccccagcuucca

SEQ ID NO: 3528990 - RNA, 22 nt, Human
cuccugagcccccagcuuccag

SEQ ID NO: 3528991 - RNA, 14 nt, Human
cuccugaggacagc

SEQ ID NO: 3528992 - RNA, 16 nt, Human
cuccugaggacagcug

SEQ ID NO: 3528993 - RNA, 21 nt, Human
cuccugaggacagcuguccuc

SEQ ID NO: 3528994 - RNA, 19 nt, Human
cuccugaggaucagaaagu

SEQ ID NO: 3528995 - RNA, 16 nt, Human
cuccugaggggcaucu

SEQ ID NO: 3528996 - RNA, 19 nt, Human
cuccugagugcuugcuuuu

SEQ ID NO: 3528997 - RNA, 22 nt, Human
cuccugaguugaagucaugcuc

SEQ ID NO: 3528998 - RNA, 23 nt, Human
cuccugauaaaacaacagcucga

SEQ ID NO: 3528999 - RNA, 13 nt, Human
cuccugauauaga

SEQ ID NO: 3529000 - RNA, 14 nt, Human
cuccugcacuguuu

SEQ ID NO: 3529001 - RNA, 15 nt, Human
cuccugcacuuacuu

SEQ ID NO: 3529002 - RNA, 22 nt, Human
cuccugcacuuacuugcuuauu

SEQ ID NO: 3529003 - RNA, 14 nt, Human
cuccugcagcaugg

SEQ ID NO: 3529004 - RNA, 13 nt, Human
cuccugcaggcag

SEQ ID NO: 3529005 - RNA, 20 nt, Human
cuccugcaggcagccaggcc

SEQ ID NO: 3529006 - RNA, 22 nt, Human
cuccugcaggcagccaggccac

SEQ ID NO: 3529007 - RNA, 12 nt, Human
cuccugcaugca

SEQ ID NO: 3529008 - RNA, 21 nt, Human
cuccugccacauuagaacuuc

SEQ ID NO: 3529009 - RNA, 17 nt, Human
cuccugcccacggaguc

SEQ ID NO: 3529010 - RNA, 20 nt, Human
cuccugcccaggagagccag

SEQ ID NO: 3529011 - RNA, 14 nt, Human
cuccugcccagucc

SEQ ID NO: 3529012 - RNA, 15 nt, Human
gagauacugguggaa

SEQ ID NO: 3529013 - RNA, 12 nt, Human
gagauagcauug

SEQ ID NO: 3529014 - RNA, 16 nt, Human
gagauagccaaggcca

SEQ ID NO: 3529015 - RNA, 16 nt, Human
gagauagccuguggcc

SEQ ID NO: 3529016 - RNA, 20 nt, Human
gagauagccuguggcccugu

SEQ ID NO: 3529017 - RNA, 21 nt, Human
gagauaggaaggucauuucca

SEQ ID NO: 3529018 - RNA, 16 nt, Human
gagauaguuuucaucc

SEQ ID NO: 3529019 - RNA, 18 nt, Human
gagauauaucugaaaacu

SEQ ID NO: 3529020 - RNA, 12 nt, Human
gagauauauuuu

SEQ ID NO: 3529021 - RNA, 18 nt, Human
gagauaucugagggagga

SEQ ID NO: 3529022 - RNA, 16 nt, Human
gagauaugcagaagga

SEQ ID NO: 3529023 - RNA, 19 nt, Human
gagauauuaaugcccagac

SEQ ID NO: 3529024 - RNA, 11 nt, Human
gagauauuuac

SEQ ID NO: 3529025 - RNA, 17 nt, Human
gagauauuuuguaaaau

SEQ ID NO: 3529026 - RNA, 14 nt, Human
gagaucaaagauga

SEQ ID NO: 3529027 - RNA, 17 nt, Human
gagaucaaauggaaagg

SEQ ID NO: 3529028 - RNA, 23 nt, Human
gagaucaaauggaaaggagagga

SEQ ID NO: 3529029 - RNA, 20 nt, Human
gagaucaaccccuucgcucc

SEQ ID NO: 3529030 - RNA, 23 nt, Human
gagaucaaccccuucgcuccugu

SEQ ID NO: 3529031 - RNA, 19 nt, Human
gagaucacgccacugcacu

SEQ ID NO: 3529032 - RNA, 21 nt, Human
gagaucacgccacugcacucc

SEQ ID NO: 3529033 - RNA, 13 nt, Human
gagaucagccugg

SEQ ID NO: 3529034 - RNA, 14 nt, Human
gagaucagccuggg

SEQ ID NO: 3529035 - RNA, 12 nt, Human
gagaucaugaga

SEQ ID NO: 3529036 - RNA, 19 nt, Human
gagaucccaacacugccag

SEQ ID NO: 3529037 - RNA, 19 nt, Human
gagaucccauccccuuguc

SEQ ID NO: 3529038 - RNA, 12 nt, Human
gagauccuccug

SEQ ID NO: 3529039 - RNA, 13 nt, Human
gagauccuggacu

SEQ ID NO: 3529040 - RNA, 16 nt, Human
gagaucggggccagag

SEQ ID NO: 3529041 - RNA, 18 nt, Human
gagaucggggccagaggc

SEQ ID NO: 3529042 - RNA, 18 nt, Human
gagaucgugccauugcac

SEQ ID NO: 3529043 - RNA, 22 nt, Human
gagaucgugccguuacucucca

SEQ ID NO: 3529044 - RNA, 21 nt, Human
gagaucuaagccuuuccauaa

SEQ ID NO: 3529045 - RNA, 16 nt, Human
gagaucugguuuugcu

SEQ ID NO: 3529046 - RNA, 22 nt, Human
cucuauauuguucagcaugcaa

SEQ ID NO: 3529047 - RNA, 11 nt, Human
cucuauauuua

SEQ ID NO: 3529048 - RNA, 22 nt, Human
cucuauauuuagauuguuaaaa

SEQ ID NO: 3529049 - RNA, 13 nt, Human
cucuaucauuaaa

SEQ ID NO: 3529050 - RNA, 23 nt, Human
cucuaucauuuaauaauauacuu

SEQ ID NO: 3529051 - RNA, 15 nt, Human
cucuauccugggcuu

SEQ ID NO: 3529052 - RNA, 14 nt, Human
cucuaucucucaaa

SEQ ID NO: 3529053 - RNA, 16 nt, Human
cucuaucugggccugg

SEQ ID NO: 3529054 - RNA, 17 nt, Human
cucuaugagucuagaug

SEQ ID NO: 3529055 - RNA, 21 nt, Human
cucuaugccagcucaguccca

SEQ ID NO: 3529056 - RNA, 22 nt, Human
cucuaugggcagaucuaccccu

SEQ ID NO: 3529057 - RNA, 20 nt, Human
cucuauggguaucaaacagc

SEQ ID NO: 3529058 - RNA, 19 nt, Human
cucuaugguaaagauauua

SEQ ID NO: 3529059 - RNA, 20 nt, Human
cucuaugguaaagauauuau

SEQ ID NO: 3529060 - RNA, 22 nt, Human
cucuauggucuuauauuuacaa

SEQ ID NO: 3529061 - RNA, 15 nt, Human
cucuauguuuacaaa

SEQ ID NO: 3529062 - RNA, 22 nt, Human
cucuauuaccacugaagauaga

SEQ ID NO: 3529063 - RNA, 23 nt, Human
cucuauuagacuuuagaaauaaa

SEQ ID NO: 3529064 - RNA, 21 nt, Human
gagcuccuccuugucuuggca

SEQ ID NO: 3529065 - RNA, 15 nt, Human
gagcuccucuccugg

SEQ ID NO: 3529066 - RNA, 17 nt, Human
gagcuccucuccuggag

SEQ ID NO: 3529067 - RNA, 22 nt, Human
gagcuccucuguccugcuucug

SEQ ID NO: 3529068 - RNA, 19 nt, Human
gagcuccucuuccaugcug

SEQ ID NO: 3529069 - RNA, 23 nt, Human
gagcucgcggcgaggacgacuuc

SEQ ID NO: 3529070 - RNA, 20 nt, Human
gagcucuacccagggccugc

SEQ ID NO: 3529071 - RNA, 19 nt, Human
gagcucuauuaugaaugug

SEQ ID NO: 3529072 - RNA, 13 nt, Human
gagcucuccagcu

SEQ ID NO: 3529073 - RNA, 14 nt, Human
gagcucugagaggc

SEQ ID NO: 3529074 - RNA, 18 nt, Human
gagcucugagaggcccug

SEQ ID NO: 3529075 - RNA, 21 nt, Human
gagcucugagaggcccuggau

SEQ ID NO: 3529076 - RNA, 20 nt, Human
gagcucuggagccaccuguc

SEQ ID NO: 3529077 - RNA, 16 nt, Human
gagcucuucaggccuc

SEQ ID NO: 3529078 - RNA, 22 nt, Human
gagcucuucaggccucccucuc

SEQ ID NO: 3529079 - RNA, 17 nt, Human
gagcugaaaugcugcau

SEQ ID NO: 3529080 - RNA, 19 nt, Human
gagcugaacccauuuugag

SEQ ID NO: 3529081 - RNA, 23 nt, Human
gagcugaacccauuuugagugac

SEQ ID NO: 3529082 - RNA, 16 nt, Human
gagcugacaaaauuuu

SEQ ID NO: 3529083 - RNA, 18 nt, Human
gagcugacacaaaccugc

SEQ ID NO: 3529084 - RNA, 23 nt, Human
gagcugacacaaaccugccuggg

SEQ ID NO: 3529085 - RNA, 14 nt, Human
gagcugaccagccg

SEQ ID NO: 3529086 - RNA, 19 nt, Human
gagcugagaauagaaggaa

SEQ ID NO: 3529087 - RNA, 20 nt, Human
gagcugagaucgcgccacug

SEQ ID NO: 3529088 - RNA, 13 nt, Human
gagcugagaucgu

SEQ ID NO: 3529089 - RNA, 22 nt, Human
gagcugagaucgugccacugca

SEQ ID NO: 3529090 - RNA, 16 nt, Human
gagcugagcagggaga

SEQ ID NO: 3529091 - RNA, 12 nt, Human
gagcugagccag

SEQ ID NO: 3529092 - RNA, 15 nt, Human
gagcugagccaggcu

SEQ ID NO: 3529093 - RNA, 17 nt, Human
gagcugagccucucacc

SEQ ID NO: 3529094 - RNA, 16 nt, Human
gagcugauauaaauuc

SEQ ID NO: 3529095 - RNA, 17 nt, Human
gagcugauauaaauucu

SEQ ID NO: 3529096 - RNA, 13 nt, Human
gagcugauccaga

SEQ ID NO: 3529097 - RNA, 16 nt, Human
gagcugauccagagca

SEQ ID NO: 3529098 - RNA, 20 nt, Human
gagcugauccagagcacaga

SEQ ID NO: 3529099 - RNA, 21 nt, Human
gagcugaugaaacucacaaau

SEQ ID NO: 3529100 - RNA, 15 nt, Human
gagcugauggagaag

SEQ ID NO: 3529101 - RNA, 21 nt, Human
gagcugccaguggggccugag

SEQ ID NO: 3529102 - RNA, 18 nt, Human
gagcugccccucucuggg

SEQ ID NO: 3529103 - RNA, 11 nt, Human
gagcugcccuc

SEQ ID NO: 3529104 - RNA, 15 nt, Human
gagcugcccuccuug

SEQ ID NO: 3529105 - RNA, 21 nt, Human
gagcugcccuccuuguccacc

SEQ ID NO: 3529106 - RNA, 14 nt, Human
gagcugcccucucc

SEQ ID NO: 3529107 - RNA, 16 nt, Human
gagcugcccucuccug

SEQ ID NO: 3529108 - RNA, 17 nt, Human
gagcugccuaagaggca

SEQ ID NO: 3529109 - RNA, 12 nt, Human
gagcugccugga

SEQ ID NO: 3529110 - RNA, 16 nt, Human
gagcugccuggacccg

SEQ ID NO: 3529111 - RNA, 15 nt, Human
gagcugccuguucag

SEQ ID NO: 3529112 - RNA, 19 nt, Human
gagcugccuguucagcucc

SEQ ID NO: 3529113 - RNA, 20 nt, Human
gagcugccuguucagcucca

SEQ ID NO: 3529114 - RNA, 23 nt, Human
gagcugccuucccuagcuuuaga

SEQ ID NO: 3529115 - RNA, 18 nt, Human
gagcugccuuggcucaga

SEQ ID NO: 3529116 - RNA, 21 nt, Human
gagcugccuuggcucagacau

SEQ ID NO: 3529117 - RNA, 20 nt, Human
gagcugcuauagccuggggu

SEQ ID NO: 3529118 - RNA, 24 nt, Human
gagcugcucugaauuaguccuugc

SEQ ID NO: 3529119 - RNA, 12 nt, Human
gagcugcuggcu

SEQ ID NO: 3529120 - RNA, 21 nt, Human
gagcugcuggcuugcagugcg

SEQ ID NO: 3529121 - RNA, 15 nt, Human
gagcuggaccagugg

SEQ ID NO: 3529122 - RNA, 16 nt, Human
gagcuggacucccuca

SEQ ID NO: 3529123 - RNA, 14 nt, Human
gagcuggagccugg

SEQ ID NO: 3529124 - RNA, 20 nt, Human
gagcuggagccuggugcccu

SEQ ID NO: 3529125 - RNA, 14 nt, Human
gagcuggccccgcc

SEQ ID NO: 3529126 - RNA, 16 nt, Human
gagcuggccccgccgc

SEQ ID NO: 3529127 - RNA, 22 nt, Human
gagcuggcccucuccuggggau

SEQ ID NO: 3529128 - RNA, 16 nt, Human
gagcuggccucucuag

SEQ ID NO: 3529129 - RNA, 13 nt, Human
gagcuggcucuga

SEQ ID NO: 3529130 - RNA, 17 nt, Human
gagcuggcucugagcgc

SEQ ID NO: 3529131 - RNA, 22 nt, Human
gagcugggagccgggccgcaga

SEQ ID NO: 3529132 - RNA, 14 nt, Human
gagcugggaggaaa

SEQ ID NO: 3529133 - RNA, 16 nt, Human
gagcugggaggaaaag

SEQ ID NO: 3529134 - RNA, 16 nt, Human
gagcugggauccuaag

SEQ ID NO: 3529135 - RNA, 19 nt, Human
gagcugggcagaaggccaa

SEQ ID NO: 3529136 - RNA, 16 nt, Human
gagcugggcccgacau

SEQ ID NO: 3529137 - RNA, 23 nt, Human
gagcugggcccgacauggcuccg

SEQ ID NO: 3529138 - RNA, 12 nt, Human
gagcugggccug

SEQ ID NO: 3529139 - RNA, 17 nt, Human
gagcugggccuggucuc

SEQ ID NO: 3529140 - RNA, 19 nt, Human
gagcuggggaccugguacc

SEQ ID NO: 3529141 - RNA, 21 nt, Human
gagcugguaguuaguagcaug

SEQ ID NO: 3529142 - RNA, 11 nt, Human
gagcuggugca

SEQ ID NO: 3529143 - RNA, 16 nt, Human
gagcuggugcauuaca

SEQ ID NO: 3529144 - RNA, 17 nt, Human
gagcuggugcauuacag

SEQ ID NO: 3529145 - RNA, 16 nt, Human
gagcugguggacccag

SEQ ID NO: 3529146 - RNA, 23 nt, Human
gagcugguggacccagggaacag

SEQ ID NO: 3529147 - RNA, 14 nt, Human
gagcuggugucuga

SEQ ID NO: 3529148 - RNA, 20 nt, Human
gagcugugaguucucccugu

SEQ ID NO: 3529149 - RNA, 18 nt, Human
gagcugugcaggugggga

SEQ ID NO: 3529150 - RNA, 20 nt, Human
gagcugugcaucagcuagaa

SEQ ID NO: 3529151 - RNA, 19 nt, Human
gagcuguggaggauugcua

SEQ ID NO: 3529152 - RNA, 22 nt, Human
gagcuguggaggauugcuaucu

SEQ ID NO: 3529153 - RNA, 15 nt, Human
gagcuuaaaauacaa

SEQ ID NO: 3529154 - RNA, 17 nt, Human
gagcuuagggucucagg

SEQ ID NO: 3529155 - RNA, 20 nt, Human
gagcuuccaauuuuccuuca

SEQ ID NO: 3529156 - RNA, 19 nt, Human
gagcuuccuguccucccag

SEQ ID NO: 3529157 - RNA, 21 nt, Human
gagcuucucuuuaacucagga

SEQ ID NO: 3529158 - RNA, 23 nt, Human
gagcuucugggguccccagggcu

SEQ ID NO: 3529159 - RNA, 21 nt, Human
gagcuucuguugcugccucau

SEQ ID NO: 3529160 - RNA, 20 nt, Human
gagcuugcucauuaauuuug

SEQ ID NO: 3529161 - RNA, 13 nt, Human
gagcuugcuuuga

SEQ ID NO: 3529162 - RNA, 13 nt, Human
gagcuugggaaug

SEQ ID NO: 3529163 - RNA, 16 nt, Human
gagcuuuacaaaaaga

SEQ ID NO: 3529164 - RNA, 23 nt, Human
gagcuuuaugguccuaaaagcaa

SEQ ID NO: 3529165 - RNA, 19 nt, Human
gagcuuuccauguugcugc

SEQ ID NO: 3529166 - RNA, 17 nt, Human
gagcuuucugaacagcu

SEQ ID NO: 3529167 - RNA, 22 nt, Human
gagcuuucugcuaucaaagagg

SEQ ID NO: 3529168 - RNA, 21 nt, Human
gagcuuucuguccuuuuggca

SEQ ID NO: 3529169 - RNA, 15 nt, Human
gagcuuugacucagg

SEQ ID NO: 3529170 - RNA, 18 nt, Human
gagcuuugacucaggagc

SEQ ID NO: 3529171 - RNA, 12 nt, Human
gagcuuugcugc

SEQ ID NO: 3529172 - RNA, 14 nt, Human
gagcuuuggacaca

SEQ ID NO: 3529173 - RNA, 21 nt, Human
gagcuuuggacacacacagcu

SEQ ID NO: 3529174 - RNA, 22 nt, Human
gaggaaaaaaaucguccaggga

SEQ ID NO: 3529175 - RNA, 13 nt, Human
gaggaaaaauaug

SEQ ID NO: 3529176 - RNA, 20 nt, Human
gaggaaaaccaagccguggc

SEQ ID NO: 3529177 - RNA, 21 nt, Human
gaggaaaaccaagccguggcu

SEQ ID NO: 3529178 - RNA, 21 nt, Human
gaggaaaauaauguaauugua

SEQ ID NO: 3529179 - RNA, 22 nt, Human
gaggaaacuacugccuuuagaa

SEQ ID NO: 3529180 - RNA, 23 nt, Human
gaggaaacucaccugcuggcccc

SEQ ID NO: 3529181 - RNA, 14 nt, Human
gaggaaacucagag

SEQ ID NO: 3529182 - RNA, 22 nt, Human
gaggaaagacaacacaaccaac

SEQ ID NO: 3529183 - RNA, 16 nt, Human
gaggaaagagagcagg

SEQ ID NO: 3529184 - RNA, 19 nt, Human
gaggaaaggccagcuggca

SEQ ID NO: 3529185 - RNA, 19 nt, Human
gaggaaagguuugagaagc

SEQ ID NO: 3529186 - RNA, 21 nt, Human
gaggaaauaaaguuaaguuug

SEQ ID NO: 3529187 - RNA, 20 nt, Human
gaggaaaucccuucauacuu

SEQ ID NO: 3529188 - RNA, 16 nt, Human
gaggaaauccuaccuu

SEQ ID NO: 3529189 - RNA, 13 nt, Human
gaggccuggacuu

SEQ ID NO: 3529190 - RNA, 19 nt, Human
gaggccuggacuuuccugc

SEQ ID NO: 3529191 - RNA, 20 nt, Human
gaggccuggacuuuccugca

SEQ ID NO: 3529192 - RNA, 13 nt, Human
gaggccuggccag

SEQ ID NO: 3529193 - RNA, 15 nt, Human
gaggccuggccaggc

SEQ ID NO: 3529194 - RNA, 15 nt, Human
gaggccugucuguga

SEQ ID NO: 3529195 - RNA, 20 nt, Human
gaggccuuccagcugcuguc

SEQ ID NO: 3529196 - RNA, 16 nt, Human
gaggccuucucugaag

SEQ ID NO: 3529197 - RNA, 18 nt, Human
gaggccuucucugaagga

SEQ ID NO: 3529198 - RNA, 20 nt, Human
gaggccuugggcucugcuga

SEQ ID NO: 3529199 - RNA, 19 nt, Human
gaggccuuucccuaagcca

SEQ ID NO: 3529200 - RNA, 22 nt, Human
gaggccuuucccuaagccagcu

SEQ ID NO: 3529201 - RNA, 21 nt, Human
gaggcgcaugaauuugugaag

SEQ ID NO: 3529202 - RNA, 14 nt, Human
gaggcgcgggggcc

SEQ ID NO: 3529203 - RNA, 19 nt, Human
gaggcggacguuccagccg

SEQ ID NO: 3529204 - RNA, 20 nt, Human
gaggcggagcuugcagugag

SEQ ID NO: 3529205 - RNA, 19 nt, Human
gaggcggaucuuuggacag

SEQ ID NO: 3529206 - RNA, 14 nt, Human
gaggcgggccagcc

SEQ ID NO: 3529207 - RNA, 20 nt, Human
gaggcgggccagccaggcgg

SEQ ID NO: 3529208 - RNA, 15 nt, Human
gaggcucaacaauaa

SEQ ID NO: 3529209 - RNA, 17 nt, Human
gaggcuccacuuggucu

SEQ ID NO: 3529210 - RNA, 12 nt, Human
gaggcucugccc

SEQ ID NO: 3529211 - RNA, 13 nt, Human
gaggcucugcccu

SEQ ID NO: 3529212 - RNA, 17 nt, Human
gaggcucugcccuuggu

SEQ ID NO: 3529213 - RNA, 14 nt, Human
gaggcucuggagcc

SEQ ID NO: 3529214 - RNA, 17 nt, Human
gaggcucuggagcccac

SEQ ID NO: 3529215 - RNA, 16 nt, Human
gaggcucuuucugggc

SEQ ID NO: 3529216 - RNA, 19 nt, Human
gaggcugacgugugaggga

SEQ ID NO: 3529217 - RNA, 16 nt, Human
gaggcugacuccuggu

SEQ ID NO: 3529218 - RNA, 22 nt, Human
gaggcugagccuacagaugaac

SEQ ID NO: 3529219 - RNA, 20 nt, Human
gaggcugaggcuggcacagg

SEQ ID NO: 3529220 - RNA, 14 nt, Human
gaggcugcagucag

SEQ ID NO: 3529221 - RNA, 21 nt, Human
gaggcugcccccggcccccug

SEQ ID NO: 3529222 - RNA, 18 nt, Human
gaggcugcucggggugca

SEQ ID NO: 3529223 - RNA, 23 nt, Human
gaggcuggacuccagaucugcac

SEQ ID NO: 3529224 - RNA, 12 nt, Human
gaggcuggcugg

SEQ ID NO: 3529225 - RNA, 13 nt, Human
gaggcuggcuggg

SEQ ID NO: 3529226 - RNA, 19 nt, Human
gaggcugggacgcucugcu

SEQ ID NO: 3529227 - RNA, 20 nt, Human
gaggcugggacgcucugcug

SEQ ID NO: 3529228 - RNA, 14 nt, Human
gaggcugggcuccc

SEQ ID NO: 3529229 - RNA, 15 nt, Human
gaggcugggcucccu

SEQ ID NO: 3529230 - RNA, 16 nt, Human
gaggcugggcucccuu

SEQ ID NO: 3529231 - RNA, 20 nt, Human
gaggcuggugcuguggccag

SEQ ID NO: 3529232 - RNA, 18 nt, Human
gaggcuguggcuggugag

SEQ ID NO: 3529233 - RNA, 13 nt, Human
gaggcauggcccu

SEQ ID NO: 3529234 - RNA, 14 nt, Human
gaggcauggcccug

SEQ ID NO: 3529235 - RNA, 18 nt, Human
gaggcauggcccuggggu

SEQ ID NO: 3529236 - RNA, 17 nt, Human
gaggccaaacaggcccu

SEQ ID NO: 3529237 - RNA, 19 nt, Human
gaggccaaaggcugguggc

SEQ ID NO: 3529238 - RNA, 21 nt, Human
gaggccaagaguggccccacc

SEQ ID NO: 3529239 - RNA, 17 nt, Human
gaggccaagugcaggcu

SEQ ID NO: 3529240 - RNA, 18 nt, Human
gaggccacacucagcaca

SEQ ID NO: 3529241 - RNA, 23 nt, Human
gaggccacaugagucccaguggg

SEQ ID NO: 3529242 - RNA, 10 nt, Human
gaggccaccu

SEQ ID NO: 3529243 - RNA, 15 nt, Human
gaggccaccucucca

SEQ ID NO: 3529244 - RNA, 21 nt, Human
gaggccagaggcccccagccc

SEQ ID NO: 3529245 - RNA, 21 nt, Human
gaggccagccccacccaggag

SEQ ID NO: 3529246 - RNA, 15 nt, Human
gaggccagccuggcc

SEQ ID NO: 3529247 - RNA, 17 nt, Human
gaggccagccuggccuc

SEQ ID NO: 3529248 - RNA, 17 nt, Human
gaggccaguaccuuucc

SEQ ID NO: 3529249 - RNA, 15 nt, Human
gaggccagugagcca

SEQ ID NO: 3529250 - RNA, 16 nt, Human
gaggccauaaaauaag

SEQ ID NO: 3529251 - RNA, 19 nt, Human
gaggccauggacucugucc

SEQ ID NO: 3529252 - RNA, 14 nt, Human
gaggccaugggccu

SEQ ID NO: 3529253 - RNA, 17 nt, Human
gaggccaugggccuccu

SEQ ID NO: 3529254 - RNA, 18 nt, Human
gaggccaugggccuccug

SEQ ID NO: 3529255 - RNA, 21 nt, Human
gaggccaugugcauaguuucu

SEQ ID NO: 3529256 - RNA, 20 nt, Human
gaggcccacauuggaagagc

SEQ ID NO: 3529257 - RNA, 16 nt, Human
gaggcccaggcugccg

SEQ ID NO: 3529258 - RNA, 17 nt, Human
gaggcccaggcugccgu

SEQ ID NO: 3529259 - RNA, 15 nt, Human
gaggcccaggcuggg

SEQ ID NO: 3529260 - RNA, 16 nt, Human
gaggcccaggcuggga

SEQ ID NO: 3529261 - RNA, 13 nt, Human
gaggccccaaagg

SEQ ID NO: 3529262 - RNA, 18 nt, Human
gaggccccacugaugcug

SEQ ID NO: 3529263 - RNA, 19 nt, Human
gaggccccagccucccuga

SEQ ID NO: 3529264 - RNA, 23 nt, Human
gaggccccagccucccugaagcc

SEQ ID NO: 3529265 - RNA, 14 nt, Human
gaggccccaggggg

SEQ ID NO: 3529266 - RNA, 14 nt, Human
gaggcccccagccc

SEQ ID NO: 3529267 - RNA, 20 nt, Human
gaggcccccagcccagggcu

SEQ ID NO: 3529268 - RNA, 19 nt, Human
gaggcccccaucuccuuaa

SEQ ID NO: 3529269 - RNA, 17 nt, Human
gaggccccuggagccag

SEQ ID NO: 3529270 - RNA, 18 nt, Human
gaggccccuggagccaga

SEQ ID NO: 3529271 - RNA, 20 nt, Human
gaggccccugucucagggug

SEQ ID NO: 3529272 - RNA, 19 nt, Human
gaggccccuucuagguggc

SEQ ID NO: 3529273 - RNA, 20 nt, Human
gaggcccguggggccggggc

SEQ ID NO: 3529274 - RNA, 18 nt, Human
gaggcccuccacaccugc

SEQ ID NO: 3529275 - RNA, 14 nt, Human
gaggcccuccugug

SEQ ID NO: 3529276 - RNA, 16 nt, Human
gaggcccuccugugcu

SEQ ID NO: 3529277 - RNA, 21 nt, Human
gaggcccuccugugcuggggg

SEQ ID NO: 3529278 - RNA, 12 nt, Human
gaggcccugcau

SEQ ID NO: 3529279 - RNA, 21 nt, Human
gaggccguggcugcuguggga

SEQ ID NO: 3529280 - RNA, 21 nt, Human
gaggccguugcugacuuagaa

SEQ ID NO: 3529281 - RNA, 19 nt, Human
gaggccuaaaaguaaacau

SEQ ID NO: 3529282 - RNA, 18 nt, Human
gaggccuacucuuccauc

SEQ ID NO: 3529283 - RNA, 12 nt, Human
gaggccucaggu

SEQ ID NO: 3529284 - RNA, 16 nt, Human
gaggccucaguggacu

SEQ ID NO: 3529285 - RNA, 18 nt, Human
gaggccucuggaaagcaa

SEQ ID NO: 3529286 - RNA, 18 nt, Human
gaggccucuuggaccucu

SEQ ID NO: 3529287 - RNA, 22 nt, Human
gaggccucuuggaccucugcuc

SEQ ID NO: 3529288 - RNA, 18 nt, Human
gaggccugaaauccuggu

SEQ ID NO: 3529289 - RNA, 20 nt, Human
gaggccugaagccagcugcc

SEQ ID NO: 3529290 - RNA, 14 nt, Human
gaggccugagaccc

SEQ ID NO: 3529291 - RNA, 13 nt, Human
gaggccugaggau

SEQ ID NO: 3529292 - RNA, 13 nt, Human
gaggccugcccgg

SEQ ID NO: 3529293 - RNA, 16 nt, Human
gaggccuggccaggca

SEQ ID NO: 3529294 - RNA, 17 nt, Human
gaggccuggccaggcac

SEQ ID NO: 3529295 - RNA, 22 nt, Human
gaggccugggccgcugccacgu

SEQ ID NO: 3529296 - RNA, 12 nt, Human
gaggccugucug

SEQ ID NO: 3529297 - RNA, 19 nt, Human
gaggccuguuuggccucuc

SEQ ID NO: 3529298 - RNA, 11 nt, Human
gaggccuucca

SEQ ID NO: 3529299 - RNA, 14 nt, Human
gaggccuuccagcu

SEQ ID NO: 3529300 - RNA, 15 nt, Human
gaggccuuccagcug

SEQ ID NO: 3529301 - RNA, 17 nt, Human
gaggccuuccagcugcu

SEQ ID NO: 3529302 - RNA, 19 nt, Human
gaggccuuccagcugcugu

SEQ ID NO: 3529303 - RNA, 14 nt, Human
gaggccuucucuga

SEQ ID NO: 3529304 - RNA, 15 nt, Human
gaggccuugagaggc

SEQ ID NO: 3529305 - RNA, 20 nt, Human
gaggcgaagcguuguccuca

SEQ ID NO: 3529306 - RNA, 20 nt, Human
gaggcgccccaacccgugga

SEQ ID NO: 3529307 - RNA, 18 nt, Human
gaggcggacguuccagcc

SEQ ID NO: 3529308 - RNA, 20 nt, Human
gaggcgggagaaucauguga

SEQ ID NO: 3529309 - RNA, 15 nt, Human
gaggcgggccagcca

SEQ ID NO: 3529310 - RNA, 19 nt, Human
gaggcgggccagccaggcg

SEQ ID NO: 3529311 - RNA, 19 nt, Human
gaggcggguggaucacuug

SEQ ID NO: 3529312 - RNA, 20 nt, Human
gaggcguauguggcaaaaug

SEQ ID NO: 3529313 - RNA, 13 nt, Human
gaggcuaaaaugu

SEQ ID NO: 3529314 - RNA, 18 nt, Human
gaggcuaaaauguuuuca

SEQ ID NO: 3529315 - RNA, 21 nt, Human
gaggcuagaaccaagaagggc

SEQ ID NO: 3529316 - RNA, 22 nt, Human
gaggcuagguggguugaaagcc

SEQ ID NO: 3529317 - RNA, 16 nt, Human
gaggcucaaauuuuga

SEQ ID NO: 3529318 - RNA, 18 nt, Human
gaggcuccacuuggucug

SEQ ID NO: 3529319 - RNA, 19 nt, Human
gaggcuccacuuggucugu

SEQ ID NO: 3529320 - RNA, 14 nt, Human
gaggcuccagaggg

SEQ ID NO: 3529321 - RNA, 17 nt, Human
gaggcuccagagggcac

SEQ ID NO: 3529322 - RNA, 13 nt, Human
gaggcuccaggca

SEQ ID NO: 3529323 - RNA, 15 nt, Human
gaggcuccaggcagc

SEQ ID NO: 3529324 - RNA, 21 nt, Human
gaggcuccuguuagcuccuca

SEQ ID NO: 3529325 - RNA, 20 nt, Human
gaggcucuaaccacacagcc

SEQ ID NO: 3529326 - RNA, 15 nt, Human
gaggcucugcccuug

SEQ ID NO: 3529327 - RNA, 12 nt, Human
gaggcugaggca

SEQ ID NO: 3529328 - RNA, 13 nt, Human
gaggcugaggcag

SEQ ID NO: 3529329 - RNA, 14 nt, Human
gaggcugaggcaga

SEQ ID NO: 3529330 - RNA, 18 nt, Human
gaggcugaggcagaagaa

SEQ ID NO: 3529331 - RNA, 19 nt, Human
gaggcugaggccuggacuu

SEQ ID NO: 3529332 - RNA, 16 nt, Human
gaggcugaggcuggca

SEQ ID NO: 3529333 - RNA, 19 nt, Human
gaggcugcagccaggccac

SEQ ID NO: 3529334 - RNA, 14 nt, Human
cucuguucauuucc

SEQ ID NO: 3529335 - RNA, 16 nt, Human
cucuguuccuucacau

SEQ ID NO: 3529336 - RNA, 22 nt, Human
cucuguuccuucccugugccuc

SEQ ID NO: 3529337 - RNA, 18 nt, Human
cucuguucuuccucagcc

SEQ ID NO: 3529338 - RNA, 17 nt, Human
cucuguugacuggcugu

SEQ ID NO: 3529339 - RNA, 14 nt, Human
cucuguuguaagaa

SEQ ID NO: 3529340 - RNA, 17 nt, Human
cucuguuguccuccccu

SEQ ID NO: 3529341 - RNA, 21 nt, Human
cucuguuguccuccccuuggg

SEQ ID NO: 3529342 - RNA, 13 nt, Human
cucuuaaaaccca

SEQ ID NO: 3529343 - RNA, 17 nt, Human
cucuuaaacuugugaau

SEQ ID NO: 3529344 - RNA, 18 nt, Human
cucuuaaguuucucagcu

SEQ ID NO: 3529345 - RNA, 19 nt, Human
cucuuaaguuucucagcuc

SEQ ID NO: 3529346 - RNA, 23 nt, Human
cucuuaauugccaccucuaacag

SEQ ID NO: 3529347 - RNA, 15 nt, Human
cucuuacccuucugu

SEQ ID NO: 3529348 - RNA, 16 nt, Human
cucuuacccuucugug

SEQ ID NO: 3529349 - RNA, 20 nt, Human
cucuuacccuucugugccca

SEQ ID NO: 3529350 - RNA, 22 nt, Human
cucuuacgcccaacccuucccc

SEQ ID NO: 3529351 - RNA, 14 nt, Human
cucuuacucuuucc

SEQ ID NO: 3529352 - RNA, 14 nt, Human
cucuuacugcaaau

SEQ ID NO: 3529353 - RNA, 19 nt, Human
cucuuacugcaaaugucau

SEQ ID NO: 3529354 - RNA, 23 nt, Human
cucuuagaggaaggagauaggga

SEQ ID NO: 3529355 - RNA, 15 nt, Human
cucuuagaugcaguu

SEQ ID NO: 3529356 - RNA, 18 nt, Human
cucuuagcagcuuccaga

SEQ ID NO: 3529357 - RNA, 16 nt, Human
cucuuagcccaugcug

SEQ ID NO: 3529358 - RNA, 15 nt, Human
cucuuagcuccccuc

SEQ ID NO: 3529359 - RNA, 19 nt, Human
cucuuagcuccccuccaac

SEQ ID NO: 3529360 - RNA, 12 nt, Human
cucuuagcugag

SEQ ID NO: 3529361 - RNA, 13 nt, Human
cucuuagcugucu

SEQ ID NO: 3529362 - RNA, 19 nt, Human
cucuuaggaagagaaacca

SEQ ID NO: 3529363 - RNA, 22 nt, Human
cucuuagggacagucaaaacca

SEQ ID NO: 3529364 - RNA, 20 nt, Human
cucuuauagaauauuuauua

SEQ ID NO: 3529365 - RNA, 18 nt, Human
cucuuauaucuauauuuu

SEQ ID NO: 3529366 - RNA, 21 nt, Human
cucuuaucucagucaugcaua

SEQ ID NO: 3529367 - RNA, 23 nt, Human
cucuuaucucagucaugcauaaa

SEQ ID NO: 3529368 - RNA, 19 nt, Human
cucuuauggauguccccag

SEQ ID NO: 3529369 - RNA, 19 nt, Human
cucuuauguaccucuuuua

SEQ ID NO: 3529370 - RNA, 20 nt, Human
cucuuauguaccucuuuuag

SEQ ID NO: 3529371 - RNA, 14 nt, Human
cucuuauugcccac

SEQ ID NO: 3529372 - RNA, 15 nt, Human
cucuuauugcccacg

SEQ ID NO: 3529373 - RNA, 13 nt, Human
cucuuauuucauc

SEQ ID NO: 3529374 - RNA, 16 nt, Human
cucuucaaaaacuguu

SEQ ID NO: 3529375 - RNA, 14 nt, Human
cucuucaaucucuu

SEQ ID NO: 3529376 - RNA, 17 nt, Human
cucuucaccccccacuc

SEQ ID NO: 3529377 - RNA, 15 nt, Human
cucuucagacucuca

SEQ ID NO: 3529378 - RNA, 20 nt, Human
cucuucagacucucagccca

SEQ ID NO: 3529379 - RNA, 23 nt, Human
cucuucaggaagaaaggagucug

SEQ ID NO: 3529380 - RNA, 13 nt, Human
cucuucaggccuc

SEQ ID NO: 3529381 - RNA, 20 nt, Human
cucuucaggccucccucucu

SEQ ID NO: 3529382 - RNA, 14 nt, Human
cucuucagguucuu

SEQ ID NO: 3529383 - RNA, 15 nt, Human
cucuucagguucuua

SEQ ID NO: 3529384 - RNA, 19 nt, Human
cucuucagguuguaaaaaa

SEQ ID NO: 3529385 - RNA, 18 nt, Human
cucuuccagaaucccaag

SEQ ID NO: 3529386 - RNA, 13 nt, Human
cucuuccaggcag

SEQ ID NO: 3529387 - RNA, 14 nt, Human
cucuuccaggcugg

SEQ ID NO: 3529388 - RNA, 15 nt, Human
cucuuccaggcuggg

SEQ ID NO: 3529389 - RNA, 21 nt, Human
cucuuccaggcugggagagcc

SEQ ID NO: 3529390 - RNA, 21 nt, Human
cucuuccccagaaaggagacu

SEQ ID NO: 3529391 - RNA, 21 nt, Human
cucuuccccagacgccuggcu

SEQ ID NO: 3529392 - RNA, 22 nt, Human
cucuuccccagacgccuggcug

SEQ ID NO: 3529393 - RNA, 13 nt, Human
cucuuccccccaa

SEQ ID NO: 3529394 - RNA, 14 nt, Human
cucuuccccccaaa

SEQ ID NO: 3529395 - RNA, 15 nt, Human
cucuucccccucucc

SEQ ID NO: 3529396 - RNA, 16 nt, Human
cucuucccccucuccc

SEQ ID NO: 3529397 - RNA, 20 nt, Human
cucuucccccucucccaguu

SEQ ID NO: 3529398 - RNA, 15 nt, Human
cucuucccccuucca

SEQ ID NO: 3529399 - RNA, 24 nt, Human
cucuuccccucuaaugcucacgcu

SEQ ID NO: 3529400 - RNA, 14 nt, Human
cucuuccccucuca

SEQ ID NO: 3529401 - RNA, 16 nt, Human
cucuuccccucucaga

SEQ ID NO: 3529402 - RNA, 16 nt, Human
cucuuccccuugcccu

SEQ ID NO: 3529403 - RNA, 18 nt, Human
cucuuccccuugcccuug

SEQ ID NO: 3529404 - RNA, 23 nt, Human
cucuuccccuugcccuugcccug

SEQ ID NO: 3529405 - RNA, 21 nt, Human
cucuucccgccgcccagccca

SEQ ID NO: 3529406 - RNA, 17 nt, Human
cucuucccucaguccca

SEQ ID NO: 3529407 - RNA, 20 nt, Human
cucuuccgaaaaauccucuu

SEQ ID NO: 3529408 - RNA, 22 nt, Human
cucuuccggagauguagcaaaa

SEQ ID NO: 3529409 - RNA, 15 nt, Human
cucuuccuacccaac

SEQ ID NO: 3529410 - RNA, 18 nt, Human
cucuuccuacccugccuc

SEQ ID NO: 3529411 - RNA, 14 nt, Human
cucuuccuagcugg

SEQ ID NO: 3529412 - RNA, 16 nt, Human
cucuuccuaucccauc

SEQ ID NO: 3529413 - RNA, 18 nt, Human
cucuuccuaucccauccc

SEQ ID NO: 3529414 - RNA, 11 nt, Human
cucuuccucca

SEQ ID NO: 3529415 - RNA, 14 nt, Human
cucuuccuccugac

SEQ ID NO: 3529416 - RNA, 16 nt, Human
cucuuccucugaggcu

SEQ ID NO: 3529417 - RNA, 16 nt, Human
cucuuccucuugaccc

SEQ ID NO: 3529418 - RNA, 17 nt, Human
cucuuccugccccucuu

SEQ ID NO: 3529419 - RNA, 22 nt, Human
cucuuccugccccucuuucucu

SEQ ID NO: 3529420 - RNA, 22 nt, Human
cucuucuacucacuuuucccac

SEQ ID NO: 3529421 - RNA, 19 nt, Human
cucuucuauuuuguaaacu

SEQ ID NO: 3529422 - RNA, 14 nt, Human
cucuucucaagugc

SEQ ID NO: 3529423 - RNA, 14 nt, Human
cucuucucagccac

SEQ ID NO: 3529424 - RNA, 11 nt, Human
cucuucucauu

SEQ ID NO: 3529425 - RNA, 15 nt, Human
cucuucucauuucac

SEQ ID NO: 3529426 - RNA, 12 nt, Human
cucuucuccacu

SEQ ID NO: 3529427 - RNA, 13 nt, Human
cucuucuccacug

SEQ ID NO: 3529428 - RNA, 15 nt, Human
cucuucuccacugga

SEQ ID NO: 3529429 - RNA, 17 nt, Human
cucuucuccacuggaug

SEQ ID NO: 3529430 - RNA, 15 nt, Human
cucuucuccaggcug

SEQ ID NO: 3529431 - RNA, 16 nt, Human
cucuucuccaggcugu

SEQ ID NO: 3529432 - RNA, 13 nt, Human
cucuucucccaga

SEQ ID NO: 3529433 - RNA, 15 nt, Human
cucuucuccuuucac

SEQ ID NO: 3529434 - RNA, 23 nt, Human
cucuucucucagaccgucuuccu

SEQ ID NO: 3529435 - RNA, 15 nt, Human
cucuucucuccagcu

SEQ ID NO: 3529436 - RNA, 14 nt, Human
cucuucucuuccug

SEQ ID NO: 3529437 - RNA, 19 nt, Human
cucuucugaauaaagcaau

SEQ ID NO: 3529438 - RNA, 20 nt, Human
cucuucugacgugccuuuug

SEQ ID NO: 3529439 - RNA, 12 nt, Human
cucuucugagcu

SEQ ID NO: 3529440 - RNA, 12 nt, Human
gaguuagacugu

SEQ ID NO: 3529441 - RNA, 14 nt, Human
gaguuagaggccag

SEQ ID NO: 3529442 - RNA, 17 nt, Human
gaguuaggcuauucaca

SEQ ID NO: 3529443 - RNA, 21 nt, Human
gaguuagggacugaccagcag

SEQ ID NO: 3529444 - RNA, 18 nt, Human
gaguuaggggccuuaggg

SEQ ID NO: 3529445 - RNA, 18 nt, Human
gaguuauugaagcagagu

SEQ ID NO: 3529446 - RNA, 19 nt, Human
gaguuauugaagcagagug

SEQ ID NO: 3529447 - RNA, 23 nt, Human
gaguuauuuuaauuaucuuuucu

SEQ ID NO: 3529448 - RNA, 20 nt, Human
gaguucaagaccagccuggc

SEQ ID NO: 3529449 - RNA, 11 nt, Human
gaguucaauga

SEQ ID NO: 3529450 - RNA, 12 nt, Human
gaguucaaugau

SEQ ID NO: 3529451 - RNA, 14 nt, Human
gaguucaaugaucu

SEQ ID NO: 3529452 - RNA, 15 nt, Human
gaguucaaugaucua

SEQ ID NO: 3529453 - RNA, 21 nt, Human
gaguucagaguccuuaaaaug

SEQ ID NO: 3529454 - RNA, 22 nt, Human
gaguucagguagcugccccugg

SEQ ID NO: 3529455 - RNA, 15 nt, Human
gaguucauucauauu

SEQ ID NO: 3529456 - RNA, 15 nt, Human
gaguuccagaaagua

SEQ ID NO: 3529457 - RNA, 12 nt, Human
gaguuccaguca

SEQ ID NO: 3529458 - RNA, 19 nt, Human
gaguuccaguuccucuuug

SEQ ID NO: 3529459 - RNA, 17 nt, Human
gaguuccaugaagacca

SEQ ID NO: 3529460 - RNA, 15 nt, Human
gaguucccaagaaag

SEQ ID NO: 3529461 - RNA, 17 nt, Human
gaguuccuaccauggag

SEQ ID NO: 3529462 - RNA, 13 nt, Human
gaguuccuagcca

SEQ ID NO: 3529463 - RNA, 12 nt, Human
gaguuccugcau

SEQ ID NO: 3529464 - RNA, 11 nt, Human
gaguucuacau

SEQ ID NO: 3529465 - RNA, 20 nt, Human
gaguucucagggcuccugcc

SEQ ID NO: 3529466 - RNA, 21 nt, Human
gaguucucagggcuccugccu

SEQ ID NO: 3529467 - RNA, 13 nt, Human
gaguucuggaaaa

SEQ ID NO: 3529468 - RNA, 15 nt, Human
gaguugaagacagag

SEQ ID NO: 3529469 - RNA, 21 nt, Human
gaguugaagacagagcuacac

SEQ ID NO: 3529470 - RNA, 16 nt, Human
gaguugaggaacugua

SEQ ID NO: 3529471 - RNA, 22 nt, Human
gaguugauacuacaguuuguua

SEQ ID NO: 3529472 - RNA, 16 nt, Human
gaguugaucuggaacc

SEQ ID NO: 3529473 - RNA, 18 nt, Human
gaguugauucagcucugc

SEQ ID NO: 3529474 - RNA, 16 nt, Human
gaguugccaagacaaa

SEQ ID NO: 3529475 - RNA, 20 nt, Human
gaguugccaagacaaaucaa

SEQ ID NO: 3529476 - RNA, 15 nt, Human
gaguuggaaucacug

SEQ ID NO: 3529477 - RNA, 11 nt, Human
gaguugggggu

SEQ ID NO: 3529478 - RNA, 14 nt, Human
gaguuguaaauaua

SEQ ID NO: 3529479 - RNA, 15 nt, Human
gaguuguaaauauau

SEQ ID NO: 3529480 - RNA, 20 nt, Human
gauacccauagcuuccauga

SEQ ID NO: 3529481 - RNA, 21 nt, Human
gauaccuaaaacauaagauca

SEQ ID NO: 3529482 - RNA, 20 nt, Human
gauaccuccaacccugccgu

SEQ ID NO: 3529483 - RNA, 19 nt, Human
gauaccuuaaaauuugaaa

SEQ ID NO: 3529484 - RNA, 18 nt, Human
gauaccuucuuauuuaau

SEQ ID NO: 3529485 - RNA, 17 nt, Human
gauacgacaacuugcac

SEQ ID NO: 3529486 - RNA, 13 nt, Human
gauacuaaggacg

SEQ ID NO: 3529487 - RNA, 16 nt, Human
gauacuacugaccaga

SEQ ID NO: 3529488 - RNA, 20 nt, Human
gauacucuuucuaaugcuga

SEQ ID NO: 3529489 - RNA, 20 nt, Human
gauacugcgacuuucugccu

SEQ ID NO: 3529490 - RNA, 21 nt, Human
gauacugcgacuuucugccug

SEQ ID NO: 3529491 - RNA, 23 nt, Human
gauacugcgacuuucugccugga

SEQ ID NO: 3529492 - RNA, 20 nt, Human
gauacuggaaguuuugcauu

SEQ ID NO: 3529493 - RNA, 20 nt, Human
gauacuggauuguacuuugu

SEQ ID NO: 3529494 - RNA, 17 nt, Human
gauacugucucuuucau

SEQ ID NO: 3529495 - RNA, 13 nt, Human
gauacuguugcac

SEQ ID NO: 3529496 - RNA, 16 nt, Human
gauacuguugcacgug

SEQ ID NO: 3529497 - RNA, 20 nt, Human
gauacuucgacacuguucuu

SEQ ID NO: 3529498 - RNA, 17 nt, Human
gauacuugaaaauuaac

SEQ ID NO: 3529499 - RNA, 13 nt, Human
gauacuuggauuu

SEQ ID NO: 3529500 - RNA, 20 nt, Human
gauacuuggauuuaguuuca

SEQ ID NO: 3529501 - RNA, 19 nt, Human
gauacuuuguauuguccua

SEQ ID NO: 3529502 - RNA, 23 nt, Human
gauacuuuguauuguccuauuag

SEQ ID NO: 3529503 - RNA, 20 nt, Human
gauacuuuuucuuuuguaag

SEQ ID NO: 3529504 - RNA, 21 nt, Human
gauacuuuuucuuuuguaagu

SEQ ID NO: 3529505 - RNA, 13 nt, Human
gauagaaaugcca

SEQ ID NO: 3529506 - RNA, 14 nt, Human
gauagaagaacugc

SEQ ID NO: 3529507 - RNA, 16 nt, Human
gauagaagauguuugc

SEQ ID NO: 3529508 - RNA, 14 nt, Human
gauagaaugacagu

SEQ ID NO: 3529509 - RNA, 14 nt, Human
gauagacugcuaca

SEQ ID NO: 3529510 - RNA, 23 nt, Human
gauagagacuggaacacuagaca

SEQ ID NO: 3529511 - RNA, 21 nt, Human
gauagaggaagccugauuaaa

SEQ ID NO: 3529512 - RNA, 15 nt, Human
gauagaguaaaaaga

SEQ ID NO: 3529513 - RNA, 17 nt, Human
gauagauaacucuuugg

SEQ ID NO: 3529514 - RNA, 21 nt, Human
gauagaugcuggcccagggcc

SEQ ID NO: 3529515 - RNA, 13 nt, Human
gauagaugugugg

SEQ ID NO: 3529516 - RNA, 14 nt, Human
gauagaugugugga

SEQ ID NO: 3529517 - RNA, 22 nt, Human
gauagauguguggacacauugg

SEQ ID NO: 3529518 - RNA, 16 nt, Human
gauagauuuggaauag

SEQ ID NO: 3529519 - RNA, 22 nt, Human
gauagauuuucugcuacuuugc

SEQ ID NO: 3529520 - RNA, 16 nt, Human
gauagcacagacccug

SEQ ID NO: 3529521 - RNA, 15 nt, Human
gauagcagccuggcu

SEQ ID NO: 3529522 - RNA, 14 nt, Human
gauagcaugucuuu

SEQ ID NO: 3529523 - RNA, 17 nt, Human
gauagcauugugaacug

SEQ ID NO: 3529524 - RNA, 12 nt, Human
gauagccaaggc

SEQ ID NO: 3529525 - RNA, 22 nt, Human
gauagccaaggccaaaggaagc

SEQ ID NO: 3529526 - RNA, 16 nt, Human
gauagcccuguccugg

SEQ ID NO: 3529527 - RNA, 16 nt, Human
gauagccuguggcccu

SEQ ID NO: 3529528 - RNA, 16 nt, Human
gauagcuaacauuuua

SEQ ID NO: 3529529 - RNA, 16 nt, Human
gauagcuaacuguaaa

SEQ ID NO: 3529530 - RNA, 23 nt, Human
gauaggaaggucauuuccaugua

SEQ ID NO: 3529531 - RNA, 18 nt, Human
gauaggaccuugggccaa

SEQ ID NO: 3529532 - RNA, 13 nt, Human
gauaggccagccg

SEQ ID NO: 3529533 - RNA, 17 nt, Human
gauaggcucugcacaga

SEQ ID NO: 3529534 - RNA, 21 nt, Human
gauagggauacaugcucuuag

SEQ ID NO: 3529535 - RNA, 21 nt, Human
gauagggcugggcaaggaaaa

SEQ ID NO: 3529536 - RNA, 14 nt, Human
gauaguaagcauag

SEQ ID NO: 3529537 - RNA, 16 nt, Human
gauagucaccuuuuaa

SEQ ID NO: 3529538 - RNA, 22 nt, Human
gauagucuuucaguuaaggaga

SEQ ID NO: 3529539 - RNA, 23 nt, Human
gauagucuuuugcuuuuggcaaa

SEQ ID NO: 3529540 - RNA, 14 nt, Human
gauaguuacuguug

SEQ ID NO: 3529541 - RNA, 20 nt, Human
gauaguuacuguugugaccu

SEQ ID NO: 3529542 - RNA, 15 nt, Human
gauaguucacccccu

SEQ ID NO: 3529543 - RNA, 21 nt, Human
gauaguugaauguugcaaugu

SEQ ID NO: 3529544 - RNA, 15 nt, Human
gauauaaaaugugca

SEQ ID NO: 3529545 - RNA, 13 nt, Human
gauauaaauaaaa

SEQ ID NO: 3529546 - RNA, 13 nt, Human
gauauaaauauau

SEQ ID NO: 3529547 - RNA, 17 nt, Human
gauauaaauauauauaa

SEQ ID NO: 3529548 - RNA, 14 nt, Human
gauauaaauuuuua

SEQ ID NO: 3529549 - RNA, 19 nt, Human
gauauaacuauugcccagg

SEQ ID NO: 3529550 - RNA, 16 nt, Human
gauauaagugcuguau

SEQ ID NO: 3529551 - RNA, 22 nt, Human
gauauaagugcuguauaaaauc

SEQ ID NO: 3529552 - RNA, 14 nt, Human
gauauaaugaacaa

SEQ ID NO: 3529553 - RNA, 18 nt, Human
gauauaaugaacaaaauu

SEQ ID NO: 3529554 - RNA, 14 nt, Human
gauauacagaugaa

SEQ ID NO: 3529555 - RNA, 16 nt, Human
gauauacagaugaaaa

SEQ ID NO: 3529556 - RNA, 17 nt, Human
gauauacaugaaaauuu

SEQ ID NO: 3529557 - RNA, 17 nt, Human
gauauacucuagaugaa

SEQ ID NO: 3529558 - RNA, 15 nt, Human
gauauacugugugcu

SEQ ID NO: 3529559 - RNA, 13 nt, Human
gauauacuuguuu

SEQ ID NO: 3529560 - RNA, 17 nt, Human
gauauacuuguuuuugu

SEQ ID NO: 3529561 - RNA, 20 nt, Human
gauauagacaguccuuaaaa

SEQ ID NO: 3529562 - RNA, 18 nt, Human
gauauagaucacauaaca

SEQ ID NO: 3529563 - RNA, 13 nt, Human
gauauauaucaua

SEQ ID NO: 3529564 - RNA, 23 nt, Human
gauauauauuauaaauauauaua

SEQ ID NO: 3529565 - RNA, 21 nt, Human
gauauaucaugagugaauaaa

SEQ ID NO: 3529566 - RNA, 12 nt, Human
gauauaucugaa

SEQ ID NO: 3529567 - RNA, 16 nt, Human
gauauaucugaaaacu

SEQ ID NO: 3529568 - RNA, 18 nt, Human
gauauaucugaaaacugg

SEQ ID NO: 3529569 - RNA, 22 nt, Human
gauauauguauuaauaaauaga

SEQ ID NO: 3529570 - RNA, 20 nt, Human
gauauauguguuuuucacau

SEQ ID NO: 3529571 - RNA, 17 nt, Human
gauauauuaaaaauaua

SEQ ID NO: 3529572 - RNA, 22 nt, Human
gauauauuaaaaauauaaaacu

SEQ ID NO: 3529573 - RNA, 15 nt, Human
gauauauuuaaaaau

SEQ ID NO: 3529574 - RNA, 18 nt, Human
gauaucacagucuaauuu

SEQ ID NO: 3529575 - RNA, 16 nt, Human
gauaucaugcaaauuu

SEQ ID NO: 3529576 - RNA, 15 nt, Human
gauauccauucuuuc

SEQ ID NO: 3529577 - RNA, 16 nt, Human
gauauccauucuuucu

SEQ ID NO: 3529578 - RNA, 17 nt, Human
gauaucccuaugcugcc

SEQ ID NO: 3529579 - RNA, 21 nt, Human
gauaucuagcuaguaauauau

SEQ ID NO: 3529580 - RNA, 15 nt, Human
gauaucugagggagg

SEQ ID NO: 3529581 - RNA, 17 nt, Human
gauaucuugaaaugaaa

SEQ ID NO: 3529582 - RNA, 15 nt, Human
gauaugaaagcugau

SEQ ID NO: 3529583 - RNA, 23 nt, Human
gauaugaauauauggcauuugca

SEQ ID NO: 3529584 - RNA, 23 nt, Human
gauaugauuguuucucaaaucuu

SEQ ID NO: 3529585 - RNA, 14 nt, Human
gauaugcaaaagcu

SEQ ID NO: 3529586 - RNA, 15 nt, Human
gauaugcaaaagcug

SEQ ID NO: 3529587 - RNA, 18 nt, Human
gauaugccugcucuuugg

SEQ ID NO: 3529588 - RNA, 14 nt, Human
gauaugcguauuau

SEQ ID NO: 3529589 - RNA, 12 nt, Human
gauaugcuugua

SEQ ID NO: 3529590 - RNA, 21 nt, Human
gauauggagcccuguaauuuu

SEQ ID NO: 3529591 - RNA, 18 nt, Human
gauauggguaguauuuuu

SEQ ID NO: 3529592 - RNA, 18 nt, Human
gauauguaaaacauuuau

SEQ ID NO: 3529593 - RNA, 19 nt, Human
gauauguaaaacauuuauu

SEQ ID NO: 3529594 - RNA, 14 nt, Human
gauaugugaacagu

SEQ ID NO: 3529595 - RNA, 16 nt, Human
gauauuaaaggaguua

SEQ ID NO: 3529596 - RNA, 19 nt, Human
gauauuaaauuuuuuaaaa

SEQ ID NO: 3529597 - RNA, 13 nt, Human
gauauuaauguau

SEQ ID NO: 3529598 - RNA, 15 nt, Human
gauauuauucuugua

SEQ ID NO: 3529599 - RNA, 17 nt, Human
gauauucagauguaugu

SEQ ID NO: 3529600 - RNA, 21 nt, Human
gauauuccauaguauauuaaa

SEQ ID NO: 3529601 - RNA, 16 nt, Human
gauauuccaugaaugu

SEQ ID NO: 3529602 - RNA, 18 nt, Human
gauauuccaugaauguau

SEQ ID NO: 3529603 - RNA, 21 nt, Human
gauauuccaugaauguaucag

SEQ ID NO: 3529604 - RNA, 20 nt, Human
gauauuccccccacuuaaga

SEQ ID NO: 3529605 - RNA, 23 nt, Human
gauauucuaagaaauaucuguga

SEQ ID NO: 3529606 - RNA, 21 nt, Human
gauauauuaaaaauauaaaac

SEQ ID NO: 3529607 - RNA, 14 nt, Human
gauauauuuuacaa

SEQ ID NO: 3529608 - RNA, 16 nt, Human
gauauauuuucuuucu

SEQ ID NO: 3529609 - RNA, 16 nt, Human
gauauauuuuuaagau

SEQ ID NO: 3529610 - RNA, 17 nt, Human
gauauauuuuucacagu

SEQ ID NO: 3529611 - RNA, 18 nt, Human
gauauccuuaucagagcu

SEQ ID NO: 3529612 - RNA, 20 nt, Human
gauaucuagcuaguaauaua

SEQ ID NO: 3529613 - RNA, 15 nt, Human
gauaucuauaaaaua

SEQ ID NO: 3529614 - RNA, 17 nt, Human
gauaucuauaaaauaga

SEQ ID NO: 3529615 - RNA, 20 nt, Human
gauaucugagggaggaggcc

SEQ ID NO: 3529616 - RNA, 21 nt, Human
gauaucugagggaggaggcca

SEQ ID NO: 3529617 - RNA, 23 nt, Human
gauaucugagggaggaggccacc

SEQ ID NO: 3529618 - RNA, 21 nt, Human
gauaucuggccuaaaaucuug

SEQ ID NO: 3529619 - RNA, 20 nt, Human
gauaucuuggacaaaucaca

SEQ ID NO: 3529620 - RNA, 14 nt, Human
gauaucuuuucuuu

SEQ ID NO: 3529621 - RNA, 22 nt, Human
gauaucuuuuuauugaugugca

SEQ ID NO: 3529622 - RNA, 15 nt, Human
gauaugaaaaauaug

SEQ ID NO: 3529623 - RNA, 21 nt, Human
gauaugaagagcaacugggac

SEQ ID NO: 3529624 - RNA, 18 nt, Human
cugagcacugccaggagg

SEQ ID NO: 3529625 - RNA, 20 nt, Human
cugagcacuguuuauacacu

SEQ ID NO: 3529626 - RNA, 23 nt, Human
cugagcacuguuuucuaguguau

SEQ ID NO: 3529627 - RNA, 17 nt, Human
cugagcagcgagccugc

SEQ ID NO: 3529628 - RNA, 12 nt, Human
cugagcaggcca

SEQ ID NO: 3529629 - RNA, 23 nt, Human
cugagcaggccacacuucaaacu

SEQ ID NO: 3529630 - RNA, 12 nt, Human
cugagcagggcc

SEQ ID NO: 3529631 - RNA, 18 nt, Human
cugagcaguccuuggccu

SEQ ID NO: 3529632 - RNA, 17 nt, Human
cugagcagugauauucu

SEQ ID NO: 3529633 - RNA, 22 nt, Human
cugagcagugauauucuuuguu

SEQ ID NO: 3529634 - RNA, 22 nt, Human
cugagccaagcuagaauucccu

SEQ ID NO: 3529635 - RNA, 14 nt, Human
cugagccacagcag

SEQ ID NO: 3529636 - RNA, 14 nt, Human
cugagccaccugcc

SEQ ID NO: 3529637 - RNA, 17 nt, Human
cugagccaccugcccuu

SEQ ID NO: 3529638 - RNA, 17 nt, Human
cugagccagauuucacu

SEQ ID NO: 3529639 - RNA, 18 nt, Human
cugagccagggucuccag

SEQ ID NO: 3529640 - RNA, 16 nt, Human
cugagccagugucagg

SEQ ID NO: 3529641 - RNA, 23 nt, Human
cugagccaguucaguaccuggag

SEQ ID NO: 3529642 - RNA, 13 nt, Human
cugagcccaggga

SEQ ID NO: 3529643 - RNA, 23 nt, Human
cugagcccauguucugcccccag

SEQ ID NO: 3529644 - RNA, 12 nt, Human
cugagccccagg

SEQ ID NO: 3529645 - RNA, 15 nt, Human
cugagccccagggag

SEQ ID NO: 3529646 - RNA, 18 nt, Human
cugagccccagggagagg

SEQ ID NO: 3529647 - RNA, 22 nt, Human
cugagccccagggugcccagaa

SEQ ID NO: 3529648 - RNA, 18 nt, Human
cugagcccccagcuucca

SEQ ID NO: 3529649 - RNA, 23 nt, Human
cugagcccccagcuuccagcagg

SEQ ID NO: 3529650 - RNA, 17 nt, Human
cugagccccgcagaccu

SEQ ID NO: 3529651 - RNA, 15 nt, Human
cugagccccuacccc

SEQ ID NO: 3529652 - RNA, 17 nt, Human
cugagccccuaccccac

SEQ ID NO: 3529653 - RNA, 22 nt, Human
cugagccccugggacugcugcu

SEQ ID NO: 3529654 - RNA, 12 nt, Human
cugagccccugu

SEQ ID NO: 3529655 - RNA, 13 nt, Human
cugagccccuguc

SEQ ID NO: 3529656 - RNA, 16 nt, Human
cugagccccugucuag

SEQ ID NO: 3529657 - RNA, 16 nt, Human
cugagccccuuccuug

SEQ ID NO: 3529658 - RNA, 20 nt, Human
cugagccccuuccuugcucu

SEQ ID NO: 3529659 - RNA, 14 nt, Human
cugagcccgggcug

SEQ ID NO: 3529660 - RNA, 15 nt, Human
cugagcccgggcugc

SEQ ID NO: 3529661 - RNA, 17 nt, Human
cugagcccgggcugccu

SEQ ID NO: 3529662 - RNA, 19 nt, Human
cugagcccgggcugccugg

SEQ ID NO: 3529663 - RNA, 21 nt, Human
cugagcccgggcugccugggc

SEQ ID NO: 3529664 - RNA, 20 nt, Human
cugagcccuacucccugcag

SEQ ID NO: 3529665 - RNA, 23 nt, Human
cugagcccuacucccugcagaug

SEQ ID NO: 3529666 - RNA, 18 nt, Human
cugagccuacagaugaac

SEQ ID NO: 3529667 - RNA, 17 nt, Human
cugagccucacagcagu

SEQ ID NO: 3529668 - RNA, 13 nt, Human
cugagccucucac

SEQ ID NO: 3529669 - RNA, 22 nt, Human
cugagccucucaccuguacucu

SEQ ID NO: 3529670 - RNA, 12 nt, Human
cugagccucugc

SEQ ID NO: 3529671 - RNA, 14 nt, Human
cugagccucugcuc

SEQ ID NO: 3529672 - RNA, 14 nt, Human
gauuauucauuuaa

SEQ ID NO: 3529673 - RNA, 19 nt, Human
gauuauucauuuaaaauga

SEQ ID NO: 3529674 - RNA, 20 nt, Human
gauuauucauuuaaaaugau

SEQ ID NO: 3529675 - RNA, 12 nt, Human
gauuauuggaaa

SEQ ID NO: 3529676 - RNA, 13 nt, Human
gauuauuuacaag

SEQ ID NO: 3529677 - RNA, 18 nt, Human
gauuauuuacaagaagaa

SEQ ID NO: 3529678 - RNA, 13 nt, Human
gauuauuugcaug

SEQ ID NO: 3529679 - RNA, 17 nt, Human
gauuauuugcauguuau

SEQ ID NO: 3529680 - RNA, 21 nt, Human
gauuauuugggagggaaaagg

SEQ ID NO: 3529681 - RNA, 14 nt, Human
gauuauuuucauua

SEQ ID NO: 3529682 - RNA, 14 nt, Human
gauuauuuuuucag

SEQ ID NO: 3529683 - RNA, 15 nt, Human
gauuauuuuuucaga

SEQ ID NO: 3529684 - RNA, 21 nt, Human
gauuauuuuuucagaccgaaa

SEQ ID NO: 3529685 - RNA, 23 nt, Human
gauucaaaauauuuaaaaauguc

SEQ ID NO: 3529686 - RNA, 21 nt, Human
gauucaaaauugacauugcuu

SEQ ID NO: 3529687 - RNA, 13 nt, Human
gauucaaagguuc

SEQ ID NO: 3529688 - RNA, 19 nt, Human
gauucaaagguucuagguu

SEQ ID NO: 3529689 - RNA, 18 nt, Human
gauucaaucgacuggguu

SEQ ID NO: 3529690 - RNA, 21 nt, Human
gauucaaucuguaaacugugu

SEQ ID NO: 3529691 - RNA, 22 nt, Human
gauucaaucuguaaacugugua

SEQ ID NO: 3529692 - RNA, 20 nt, Human
gauucaaugccccugaauuu

SEQ ID NO: 3529693 - RNA, 17 nt, Human
gauucacaccccaccug

SEQ ID NO: 3529694 - RNA, 15 nt, Human
gauucacaucucauu

SEQ ID NO: 3529695 - RNA, 16 nt, Human
gauucacauguuuuca

SEQ ID NO: 3529696 - RNA, 17 nt, Human
gauucacauguuuucaa

SEQ ID NO: 3529697 - RNA, 19 nt, Human
gauucacauguuuucaaau

SEQ ID NO: 3529698 - RNA, 21 nt, Human
gauucacccuguccaaacugc

SEQ ID NO: 3529699 - RNA, 14 nt, Human
gauucaccuguaaa

SEQ ID NO: 3529700 - RNA, 16 nt, Human
gauucacuucacgcuu

SEQ ID NO: 3529701 - RNA, 21 nt, Human
gauucagaaaauguucuguuu

SEQ ID NO: 3529702 - RNA, 18 nt, Human
gauucagaaaugaggcca

SEQ ID NO: 3529703 - RNA, 21 nt, Human
gauucagagaaaggcaaggga

SEQ ID NO: 3529704 - RNA, 18 nt, Human
gauucagauuguuaucua

SEQ ID NO: 3529705 - RNA, 19 nt, Human
gauucaggaaaaggccugg

SEQ ID NO: 3529706 - RNA, 20 nt, Human
gauucaggcauuuucccccu

SEQ ID NO: 3529707 - RNA, 16 nt, Human
gauucaggcugcuugg

SEQ ID NO: 3529708 - RNA, 17 nt, Human
gauucagguauguugcc

SEQ ID NO: 3529709 - RNA, 15 nt, Human
gauucagucuugccu

SEQ ID NO: 3529710 - RNA, 18 nt, Human
gauucagucuugccuuac

SEQ ID NO: 3529711 - RNA, 19 nt, Human
gauucaguuucuaaaauug

SEQ ID NO: 3529712 - RNA, 22 nt, Human
gauucaguuuucauuugguuca

SEQ ID NO: 3529713 - RNA, 19 nt, Human
gauucauauuuacuucuua

SEQ ID NO: 3529714 - RNA, 23 nt, Human
gauucaucucucagaagggaggc

SEQ ID NO: 3529715 - RNA, 21 nt, Human
gauucaugccaauuagcaauu

SEQ ID NO: 3529716 - RNA, 15 nt, Human
gauucauucucauaa

SEQ ID NO: 3529717 - RNA, 17 nt, Human
gauucauuuauaagaag

SEQ ID NO: 3529718 - RNA, 19 nt, Human
gauucauuuuuaaucauga

SEQ ID NO: 3529719 - RNA, 18 nt, Human
gauucauuuuugaaacug

SEQ ID NO: 3529720 - RNA, 18 nt, Human
gauuccaaagaguagaau

SEQ ID NO: 3529721 - RNA, 19 nt, Human
gauuccaaagaguagaauu

SEQ ID NO: 3529722 - RNA, 17 nt, Human
gauuccacuacaccugg

SEQ ID NO: 3529723 - RNA, 20 nt, Human
gauuccacuacaccuggcug

SEQ ID NO: 3529724 - RNA, 19 nt, Human
gauuccagagaguggcucc

SEQ ID NO: 3529725 - RNA, 20 nt, Human
gauuccagagaguggcuccu

SEQ ID NO: 3529726 - RNA, 15 nt, Human
gauuccagcacaacc

SEQ ID NO: 3529727 - RNA, 14 nt, Human
gauuccaugcuaag

SEQ ID NO: 3529728 - RNA, 18 nt, Human
gauuccauugguccaaga

SEQ ID NO: 3529729 - RNA, 16 nt, Human
gauucccaagcucugc

SEQ ID NO: 3529730 - RNA, 16 nt, Human
gauucccacauuuguc

SEQ ID NO: 3529731 - RNA, 14 nt, Human
gauucccagagaca

SEQ ID NO: 3529732 - RNA, 19 nt, Human
gauucccagagacaggaaa

SEQ ID NO: 3529733 - RNA, 19 nt, Human
gauucccaggaguucugcu

SEQ ID NO: 3529734 - RNA, 17 nt, Human
gauuccccaucucaggc

SEQ ID NO: 3529735 - RNA, 20 nt, Human
gauuccccaucucaggccag

SEQ ID NO: 3529736 - RNA, 17 nt, Human
gauuccccauugccucc

SEQ ID NO: 3529737 - RNA, 15 nt, Human
gauuccccuguguca

SEQ ID NO: 3529738 - RNA, 15 nt, Human
gauucccugauuuaa

SEQ ID NO: 3529739 - RNA, 13 nt, Human
gauucccuuguua

SEQ ID NO: 3529740 - RNA, 16 nt, Human
gauucccuuguuauuc

SEQ ID NO: 3529741 - RNA, 19 nt, Human
gauucccuuguuauucaac

SEQ ID NO: 3529742 - RNA, 23 nt, Human
gauuccucuguauugugcugauu

SEQ ID NO: 3529743 - RNA, 18 nt, Human
gauuccugacccaggccg

SEQ ID NO: 3529744 - RNA, 15 nt, Human
gauuccugagccagu

SEQ ID NO: 3529745 - RNA, 15 nt, Human
gauuccuucucugaa

SEQ ID NO: 3529746 - RNA, 13 nt, Human
gauuccuuucccu

SEQ ID NO: 3529747 - RNA, 23 nt, Human
gauucguggucuuuuccucgcuu

SEQ ID NO: 3529748 - RNA, 22 nt, Human
gauucuaaaaugugauguucua

SEQ ID NO: 3529749 - RNA, 11 nt, Human
gauucuaaaga

SEQ ID NO: 3529750 - RNA, 17 nt, Human
gauucuaaagauucuau

SEQ ID NO: 3529751 - RNA, 15 nt, Human
gauucuaaugaugau

SEQ ID NO: 3529752 - RNA, 14 nt, Human
gauucuacuuuaag

SEQ ID NO: 3529753 - RNA, 18 nt, Human
gauucuacuuuaagcacu

SEQ ID NO: 3529754 - RNA, 20 nt, Human
gauucuauguuaauauuuua

SEQ ID NO: 3529755 - RNA, 20 nt, Human
gauucuauuuauauguacau

SEQ ID NO: 3529756 - RNA, 19 nt, Human
gauucucagggucucugcu

SEQ ID NO: 3529757 - RNA, 21 nt, Human
gauucucagggucucugcugc

SEQ ID NO: 3529758 - RNA, 13 nt, Human
gauucucauaacu

SEQ ID NO: 3529759 - RNA, 17 nt, Human
gauucuccugccucagc

SEQ ID NO: 3529760 - RNA, 18 nt, Human
gauucucugugucuaaga

SEQ ID NO: 3529761 - RNA, 20 nt, Human
gauucugaccuuaaaugcaa

SEQ ID NO: 3529762 - RNA, 19 nt, Human
gauucugcaguaaaucuuu

SEQ ID NO: 3529763 - RNA, 15 nt, Human
gauucugccuuugcc

SEQ ID NO: 3529764 - RNA, 17 nt, Human
gauucugcuggccucug

SEQ ID NO: 3529765 - RNA, 22 nt, Human
gauucugcuggccucugcgagu

SEQ ID NO: 3529766 - RNA, 21 nt, Human
gauucuggacagucagcucuu

SEQ ID NO: 3529767 - RNA, 17 nt, Human
gauucuggauaaagcca

SEQ ID NO: 3529768 - RNA, 11 nt, Human
gauuuuuucca

SEQ ID NO: 3529769 - RNA, 21 nt, Human
gauuuuuuucccaauugagaa

SEQ ID NO: 3529770 - RNA, 18 nt, Human
gauuuuuuuguuguuugu

SEQ ID NO: 3529771 - RNA, 21 nt, Human
gauuuuuuuuuagaacagaaa

SEQ ID NO: 3529772 - RNA, 16 nt, Human
gauuuuuuuuuccuuc

SEQ ID NO: 3529773 - RNA, 21 nt, Human
gauuuuuuuuuuuucucucaa

SEQ ID NO: 3529774 - RNA, 20 nt, Human
gauuuuuuuuuuuuuuuccu

SEQ ID NO: 3529775 - RNA, 18 nt, Human
gcaaaaaaaaaaaaaagc

SEQ ID NO: 3529776 - RNA, 12 nt, Human
gcaaaaaaaguu

SEQ ID NO: 3529777 - RNA, 21 nt, Human
gcaaaaaaauuaaaauggaug

SEQ ID NO: 3529778 - RNA, 20 nt, Human
gcaaaaaacucgaggacugu

SEQ ID NO: 3529779 - RNA, 16 nt, Human
gcaaaaaaguccaauu

SEQ ID NO: 3529780 - RNA, 18 nt, Human
gcaaaaaauacuuuuucu

SEQ ID NO: 3529781 - RNA, 20 nt, Human
gcaaaaaauacuuuuucuaa

SEQ ID NO: 3529782 - RNA, 15 nt, Human
gcaaaaacaaaaaga

SEQ ID NO: 3529783 - RNA, 11 nt, Human
gcaaaaauaua

SEQ ID NO: 3529784 - RNA, 16 nt, Human
gcaaaaauauaaaaua

SEQ ID NO: 3529785 - RNA, 23 nt, Human
gcaaaaauauuuauaaaacuucu

SEQ ID NO: 3529786 - RNA, 17 nt, Human
gcaaaaauauuuuauga

SEQ ID NO: 3529787 - RNA, 23 nt, Human
gcaaaaauauuuuaugauccagc

SEQ ID NO: 3529788 - RNA, 14 nt, Human
gcaaaaaugcuaau

SEQ ID NO: 3529789 - RNA, 19 nt, Human
gcaaaacacaaaacaaauc

SEQ ID NO: 3529790 - RNA, 15 nt, Human
gcaaaaccauugcuu

SEQ ID NO: 3529791 - RNA, 16 nt, Human
gcaaaacccacagaag

SEQ ID NO: 3529792 - RNA, 15 nt, Human
gcaaaaccuuuuacu

SEQ ID NO: 3529793 - RNA, 16 nt, Human
gcaaaaccuuuuacug

SEQ ID NO: 3529794 - RNA, 12 nt, Human
gcaaaagaaaaa

SEQ ID NO: 3529795 - RNA, 14 nt, Human
gcaaaagaaguaac

SEQ ID NO: 3529796 - RNA, 12 nt, Human
gcaaaagagugu

SEQ ID NO: 3529797 - RNA, 16 nt, Human
gcaaaagaugcuucuc

SEQ ID NO: 3529798 - RNA, 20 nt, Human
gcaaaaggaucuuuguggcc

SEQ ID NO: 3529799 - RNA, 21 nt, Human
gcaaaaggcaguggggcuggg

SEQ ID NO: 3529800 - RNA, 13 nt, Human
gcaaaaggccucu

SEQ ID NO: 3529801 - RNA, 16 nt, Human
gcaaaaggccucuugu

SEQ ID NO: 3529802 - RNA, 17 nt, Human
gcaaaagggugucugag

SEQ ID NO: 3529803 - RNA, 20 nt, Human
gcaaaagguucacuaaagca

SEQ ID NO: 3529804 - RNA, 23 nt, Human
gcaaaagugcugcagggcuuuaa

SEQ ID NO: 3529805 - RNA, 19 nt, Human
gcaaaaguucugacuugac

SEQ ID NO: 3529806 - RNA, 13 nt, Human
gcaaaauaaaaca

SEQ ID NO: 3529807 - RNA, 15 nt, Human
gcaaaauaaaacaua

SEQ ID NO: 3529808 - RNA, 17 nt, Human
gcaaaauacaugaagcu

SEQ ID NO: 3529809 - RNA, 21 nt, Human
gcaaaauacaugaugauuuca

SEQ ID NO: 3529810 - RNA, 13 nt, Human
gcaaaauauguuu

SEQ ID NO: 3529811 - RNA, 20 nt, Human
gcaaaauauucacugggcca

SEQ ID NO: 3529812 - RNA, 13 nt, Human
gcaaaaucaugga

SEQ ID NO: 3529813 - RNA, 23 nt, Human
gcaaaauuauagaaguuuagauu

SEQ ID NO: 3529814 - RNA, 17 nt, Human
gcaaacacuccacccuc

SEQ ID NO: 3529815 - RNA, 15 nt, Human
gcaaacagaacaggg

SEQ ID NO: 3529816 - RNA, 16 nt, Human
gcaaacagaacagggu

SEQ ID NO: 3529817 - RNA, 21 nt, Human
gcaaacauuuucucuuagaaa

SEQ ID NO: 3529818 - RNA, 22 nt, Human
gcaaaccaagagauugcuaauu

SEQ ID NO: 3529819 - RNA, 15 nt, Human
gcaaaccacacugga

SEQ ID NO: 3529820 - RNA, 20 nt, Human
gcaaaccacacuggacuccg

SEQ ID NO: 3529821 - RNA, 15 nt, Human
gcaaaccaucauuga

SEQ ID NO: 3529822 - RNA, 16 nt, Human
gcaaacccauuaaggg

SEQ ID NO: 3529823 - RNA, 19 nt, Human
gcaaacccugucaaacauu

SEQ ID NO: 3529824 - RNA, 19 nt, Human
gcaaaccugaccccugcuc

SEQ ID NO: 3529825 - RNA, 21 nt, Human
gcaaaccugaccccugcucag

SEQ ID NO: 3529826 - RNA, 13 nt, Human
gcaaaccugcccc

SEQ ID NO: 3529827 - RNA, 22 nt, Human
gcaaaccuuucuauaauuuuac

SEQ ID NO: 3529828 - RNA, 17 nt, Human
gcaaacgcugccugccg

SEQ ID NO: 3529829 - RNA, 19 nt, Human
gcaaacuaagcccccgcug

SEQ ID NO: 3529830 - RNA, 13 nt, Human
gcaaacucugcug

SEQ ID NO: 3529831 - RNA, 20 nt, Human
gcaaacucuuuggucguuuu

SEQ ID NO: 3529832 - RNA, 23 nt, Human
gcaaacucuuuggucguuuuuuu

SEQ ID NO: 3529833 - RNA, 14 nt, Human
gcaaacugcaugcc

SEQ ID NO: 3529834 - RNA, 18 nt, Human
gcaaacuuaauguucuua

SEQ ID NO: 3529835 - RNA, 23 nt, Human
gcaaacuuggaauuuguaaccuc

SEQ ID NO: 3529836 - RNA, 14 nt, Human
gcaaagaacucuua

SEQ ID NO: 3529837 - RNA, 15 nt, Human
gcaaagacagaagcc

SEQ ID NO: 3529838 - RNA, 16 nt, Human
gcaaagacagaagccu

SEQ ID NO: 3529839 - RNA, 23 nt, Human
gcaaagaggacucgcuuguaaau

SEQ ID NO: 3529840 - RNA, 12 nt, Human
gcaaagaucaaa

SEQ ID NO: 3529841 - RNA, 14 nt, Human
gcaaagaucaaaau

SEQ ID NO: 3529842 - RNA, 15 nt, Human
gcaaagaucaaaaua

SEQ ID NO: 3529843 - RNA, 16 nt, Human
gcaaagauuuaaucug

SEQ ID NO: 3529844 - RNA, 14 nt, Human
gcaaagcacagaga

SEQ ID NO: 3529845 - RNA, 23 nt, Human
gcaaagcaccagcuucuccaggc

SEQ ID NO: 3529846 - RNA, 21 nt, Human
gcaaagcacccauuucaaugu

SEQ ID NO: 3529847 - RNA, 21 nt, Human
gcaaagcaugccaauuucucu

SEQ ID NO: 3529848 - RNA, 21 nt, Human
gcaaagccccaugcuggagcc

SEQ ID NO: 3529849 - RNA, 22 nt, Human
gcaaagccccaugcuggagccu

SEQ ID NO: 3529850 - RNA, 13 nt, Human
gcaaagcccccag

SEQ ID NO: 3529851 - RNA, 15 nt, Human
gcaaagcccccagag

SEQ ID NO: 3529852 - RNA, 11 nt, Human
gcaaagccugu

SEQ ID NO: 3529853 - RNA, 16 nt, Human
gcaaagcucuguggcc

SEQ ID NO: 3529854 - RNA, 20 nt, Human
gcaaaggacuguuuuuuccu

SEQ ID NO: 3529855 - RNA, 14 nt, Human
gcaaagggcugaaa

SEQ ID NO: 3529856 - RNA, 22 nt, Human
gcaaagggcugaaagccauuug

SEQ ID NO: 3529857 - RNA, 20 nt, Human
gcaaaggggcugaaagaaca

SEQ ID NO: 3529858 - RNA, 23 nt, Human
gcaaagggggaggagaagaaaau

SEQ ID NO: 3529859 - RNA, 23 nt, Human
gcaaaggggucccauagagguga

SEQ ID NO: 3529860 - RNA, 18 nt, Human
gcaaagguggcucuccag

SEQ ID NO: 3529861 - RNA, 19 nt, Human
gcaaaguacagguacuuug

SEQ ID NO: 3529862 - RNA, 11 nt, Human
gcaaaguacug

SEQ ID NO: 3529863 - RNA, 14 nt, Human
gcaaaguaguacuu

SEQ ID NO: 3529864 - RNA, 16 nt, Human
gcaaaguaucccuacu

SEQ ID NO: 3529865 - RNA, 17 nt, Human
gcaaaguauuguaaauu

SEQ ID NO: 3529866 - RNA, 18 nt, Human
gcaaaguauuguaaauua

SEQ ID NO: 3529867 - RNA, 16 nt, Human
gcaaagucaugcaaag

SEQ ID NO: 3529868 - RNA, 22 nt, Human
gcaaagucaugcaaaggcuggg

SEQ ID NO: 3529869 - RNA, 23 nt, Human
gcaaagucaugcaaaggcuggga

SEQ ID NO: 3529870 - RNA, 21 nt, Human
gcaaagucuaaaguuuacagu

SEQ ID NO: 3529871 - RNA, 20 nt, Human
gcaaagugaagacacuggcu

SEQ ID NO: 3529872 - RNA, 22 nt, Human
gcaaagugaaguugcuucuucu

SEQ ID NO: 3529873 - RNA, 23 nt, Human
gcaaaguucccuacuuccuguga

SEQ ID NO: 3529874 - RNA, 12 nt, Human
gcaaauaaaagu

SEQ ID NO: 3529875 - RNA, 17 nt, Human
gcaaauaacaaaugcca

SEQ ID NO: 3529876 - RNA, 22 nt, Human
gcacagccaacacgcaccugcc

SEQ ID NO: 3529877 - RNA, 21 nt, Human
gcacagccauacggcacugaa

SEQ ID NO: 3529878 - RNA, 12 nt, Human
gcacagcccucc

SEQ ID NO: 3529879 - RNA, 11 nt, Human
gcacagcccuu

SEQ ID NO: 3529880 - RNA, 14 nt, Human
gcacagccuucucc

SEQ ID NO: 3529881 - RNA, 15 nt, Human
gcacagcuaauucua

SEQ ID NO: 3529882 - RNA, 19 nt, Human
gcacagcugaaaguucuug

SEQ ID NO: 3529883 - RNA, 15 nt, Human
gcacagcuuagauuu

SEQ ID NO: 3529884 - RNA, 21 nt, Human
gcacagcuucauuuccugugu

SEQ ID NO: 3529885 - RNA, 20 nt, Human
gcacagcuugaccugaggcu

SEQ ID NO: 3529886 - RNA, 16 nt, Human
gcacaggacugauucu

SEQ ID NO: 3529887 - RNA, 16 nt, Human
gcacaggagcuaccug

SEQ ID NO: 3529888 - RNA, 16 nt, Human
gcacaggaggcaggca

SEQ ID NO: 3529889 - RNA, 20 nt, Human
gcacaggaggcaggcauggc

SEQ ID NO: 3529890 - RNA, 21 nt, Human
gcacaggaggcaggcauggcc

SEQ ID NO: 3529891 - RNA, 22 nt, Human
gcacaggaggcaggcauggccc

SEQ ID NO: 3529892 - RNA, 12 nt, Human
gcacaggagggg

SEQ ID NO: 3529893 - RNA, 21 nt, Human
gcacaggagggggucguggag

SEQ ID NO: 3529894 - RNA, 11 nt, Human
gcacaggcaga

SEQ ID NO: 3529895 - RNA, 16 nt, Human
gcacaggcagggcagg

SEQ ID NO: 3529896 - RNA, 15 nt, Human
gcacaggcuaauuuu

SEQ ID NO: 3529897 - RNA, 18 nt, Human
gcacaggcugagugcagg

SEQ ID NO: 3529898 - RNA, 17 nt, Human
gcacagggagugcacau

SEQ ID NO: 3529899 - RNA, 15 nt, Human
gcacagggcagcugg

SEQ ID NO: 3529900 - RNA, 20 nt, Human
gcacagggcagcugggccca

SEQ ID NO: 3529901 - RNA, 11 nt, Human
gcacagggccu

SEQ ID NO: 3529902 - RNA, 17 nt, Human
gcacagggccuggccca

SEQ ID NO: 3529903 - RNA, 18 nt, Human
gcacagggccuggcccau

SEQ ID NO: 3529904 - RNA, 23 nt, Human
gcacagggucugcucuuucucug

SEQ ID NO: 3529905 - RNA, 13 nt, Human
gcacaggucaggc

SEQ ID NO: 3529906 - RNA, 14 nt, Human
gcacaggucccacc

SEQ ID NO: 3529907 - RNA, 22 nt, Human
gcacaggucccaccuccagccc

SEQ ID NO: 3529908 - RNA, 16 nt, Human
gcacagucacugcucu

SEQ ID NO: 3529909 - RNA, 13 nt, Human
gcacagugcaucu

SEQ ID NO: 3529910 - RNA, 18 nt, Human
gcacagugcaucucagcc

SEQ ID NO: 3529911 - RNA, 19 nt, Human
gcacagugcaucucagccc

SEQ ID NO: 3529912 - RNA, 15 nt, Human
cugcagcuuccuguc

SEQ ID NO: 3529913 - RNA, 13 nt, Human
cugcagcuuggga

SEQ ID NO: 3529914 - RNA, 17 nt, Human
cugcagcuuguagccag

SEQ ID NO: 3529915 - RNA, 18 nt, Human
cugcagcuuguagccagc

SEQ ID NO: 3529916 - RNA, 21 nt, Human
cugcagcuuuacaugcaauuu

SEQ ID NO: 3529917 - RNA, 17 nt, Human
cugcaggaaauggcugu

SEQ ID NO: 3529918 - RNA, 13 nt, Human
cugcaggaaggag

SEQ ID NO: 3529919 - RNA, 18 nt, Human
cugcaggaaggagcugcc

SEQ ID NO: 3529920 - RNA, 20 nt, Human
cugcaggaaggagcugccug

SEQ ID NO: 3529921 - RNA, 22 nt, Human
cugcaggaaggagcugccugga

SEQ ID NO: 3529922 - RNA, 15 nt, Human
cugcaggaccugccu

SEQ ID NO: 3529923 - RNA, 22 nt, Human
cugcaggaccugccuguagccc

SEQ ID NO: 3529924 - RNA, 21 nt, Human
cugcaggaucucaccaggcag

SEQ ID NO: 3529925 - RNA, 19 nt, Human
cugcaggaugauuguacag

SEQ ID NO: 3529926 - RNA, 13 nt, Human
cugcaggcagaca

SEQ ID NO: 3529927 - RNA, 14 nt, Human
cugcaggcagccag

SEQ ID NO: 3529928 - RNA, 14 nt, Human
cugcaggcaggaac

SEQ ID NO: 3529929 - RNA, 17 nt, Human
cugcaggcaucacagcu

SEQ ID NO: 3529930 - RNA, 19 nt, Human
cugcaggccaagagcagag

SEQ ID NO: 3529931 - RNA, 23 nt, Human
cugcaggccaagagcagaggcag

SEQ ID NO: 3529932 - RNA, 17 nt, Human
cugcaggccaggccagc

SEQ ID NO: 3529933 - RNA, 18 nt, Human
cugcaggccaggccagcu

SEQ ID NO: 3529934 - RNA, 20 nt, Human
cugcaggccccgcuugucca

SEQ ID NO: 3529935 - RNA, 16 nt, Human
cugcaggcugagugca

SEQ ID NO: 3529936 - RNA, 15 nt, Human
cugcaggcuuaauaa

SEQ ID NO: 3529937 - RNA, 17 nt, Human
cugcagggacagagcau

SEQ ID NO: 3529938 - RNA, 17 nt, Human
cugcagggacugccagu

SEQ ID NO: 3529939 - RNA, 21 nt, Human
cugcagggccaggacugagcc

SEQ ID NO: 3529940 - RNA, 22 nt, Human
cugcagggcccucccuuuuccc

SEQ ID NO: 3529941 - RNA, 19 nt, Human
cugcagggcuuuaaaauuc

SEQ ID NO: 3529942 - RNA, 16 nt, Human
cugcaggggcauggga

SEQ ID NO: 3529943 - RNA, 11 nt, Human
cugcaggggcu

SEQ ID NO: 3529944 - RNA, 17 nt, Human
cugcaggggcucuggag

SEQ ID NO: 3529945 - RNA, 19 nt, Human
cugcaggggcucuggagag

SEQ ID NO: 3529946 - RNA, 20 nt, Human
cugcaggggguggacaaacu

SEQ ID NO: 3529947 - RNA, 18 nt, Human
cugcaggguggugcuggg

SEQ ID NO: 3529948 - RNA, 19 nt, Human
cugcaggguggugcuggga

SEQ ID NO: 3529949 - RNA, 19 nt, Human
cugcaggucccuaauaaag

SEQ ID NO: 3529950 - RNA, 21 nt, Human
cugcaggucccuaauaaagcu

SEQ ID NO: 3529951 - RNA, 14 nt, Human
cugcaggugcugcu

SEQ ID NO: 3529952 - RNA, 17 nt, Human
cugcaggugcugcugcg

SEQ ID NO: 3529953 - RNA, 23 nt, Human
cugcagguucucucucacugcca

SEQ ID NO: 3529954 - RNA, 20 nt, Human
cugcagguugggccauacug

SEQ ID NO: 3529955 - RNA, 15 nt, Human
cugcaguagucucug

SEQ ID NO: 3529956 - RNA, 16 nt, Human
cugcaguagucucugu

SEQ ID NO: 3529957 - RNA, 23 nt, Human
cugcaguagucucugugcuuuga

SEQ ID NO: 3529958 - RNA, 17 nt, Human
cugcagucucuauacca

SEQ ID NO: 3529959 - RNA, 21 nt, Human
cugcagucucuauaccaauaa

SEQ ID NO: 3529960 - RNA, 9 nt, Human
cugcaguga

SEQ ID NO: 3529961 - RNA, 22 nt, Human
cugcagugaaagacaagcugca

SEQ ID NO: 3529962 - RNA, 15 nt, Human
cugcagugugccccc

SEQ ID NO: 3529963 - RNA, 17 nt, Human
cugcaguguucgcuugg

SEQ ID NO: 3529964 - RNA, 18 nt, Human
cugcaguguucgcuuggc

SEQ ID NO: 3529965 - RNA, 23 nt, Human
cugcaguucuacucaggcuggug

SEQ ID NO: 3529966 - RNA, 13 nt, Human
cugcaguugccag

SEQ ID NO: 3529967 - RNA, 19 nt, Human
cugcaguuugagacaggag

SEQ ID NO: 3529968 - RNA, 15 nt, Human
cugcaguuuuucagg

SEQ ID NO: 3529969 - RNA, 24 nt, Human
cugcaguuuuucaggagcgcaaga

SEQ ID NO: 3529970 - RNA, 22 nt, Human
cugcaguuuuuuuccuucaaga

SEQ ID NO: 3529971 - RNA, 14 nt, Human
cugcauacaaucug

SEQ ID NO: 3529972 - RNA, 14 nt, Human
cugcauacuuuuua

SEQ ID NO: 3529973 - RNA, 14 nt, Human
cugcauagaaggag

SEQ ID NO: 3529974 - RNA, 15 nt, Human
cugcauaugaaagga

SEQ ID NO: 3529975 - RNA, 12 nt, Human
cugcaucaguuc

SEQ ID NO: 3529976 - RNA, 23 nt, Human
cugcaucccagcaccugccuccu

SEQ ID NO: 3529977 - RNA, 22 nt, Human
cugcaucccaggaugcugggug

SEQ ID NO: 3529978 - RNA, 23 nt, Human
cugcaucccaggaugcugggugg

SEQ ID NO: 3529979 - RNA, 17 nt, Human
cugcauccuccaagaau

SEQ ID NO: 3529980 - RNA, 23 nt, Human
cugcauccuccaagaaucuaucu

SEQ ID NO: 3529981 - RNA, 19 nt, Human
cugcauccuccgccucccg

SEQ ID NO: 3529982 - RNA, 15 nt, Human
cugcauccucuggag

SEQ ID NO: 3529983 - RNA, 22 nt, Human
cugcauccucuggagccagccg

SEQ ID NO: 3529984 - RNA, 18 nt, Human
cugcaucuaagcccaugg

SEQ ID NO: 3529985 - RNA, 16 nt, Human
cugcaucugaccagca

SEQ ID NO: 3529986 - RNA, 17 nt, Human
cugcaucugaccagcag

SEQ ID NO: 3529987 - RNA, 21 nt, Human
cugcaucugaccagcagcgcc

SEQ ID NO: 3529988 - RNA, 21 nt, Human
cugcaucuuauagcacuuuga

SEQ ID NO: 3529989 - RNA, 22 nt, Human
cugcaucuuauagcacuuugaa

SEQ ID NO: 3529990 - RNA, 16 nt, Human
cugcaucuuggggaca

SEQ ID NO: 3529991 - RNA, 21 nt, Human
cugcaucuuggggacaucucu

SEQ ID NO: 3529992 - RNA, 18 nt, Human
cugcaucuuuagugcuuu

SEQ ID NO: 3529993 - RNA, 15 nt, Human
cugcaugaauaucau

SEQ ID NO: 3529994 - RNA, 16 nt, Human
cugcaugaauaucaua

SEQ ID NO: 3529995 - RNA, 20 nt, Human
cugcaugauguuugcccaaa

SEQ ID NO: 3529996 - RNA, 15 nt, Human
cugcaugcagaaagg

SEQ ID NO: 3529997 - RNA, 14 nt, Human
cugcaugcccagag

SEQ ID NO: 3529998 - RNA, 19 nt, Human
cugcaugcccagagaccca

SEQ ID NO: 3529999 - RNA, 20 nt, Human
cugcaugcccagagacccag

SEQ ID NO: 3530000 - RNA, 22 nt, Human
cugcaugcccagagacccagcg

SEQ ID NO: 3530001 - RNA, 20 nt, Human
cugcaugccuggucuuuccu

SEQ ID NO: 3530002 - RNA, 22 nt, Human
cugcaugccuggucuuuccucu

SEQ ID NO: 3530003 - RNA, 23 nt, Human
cugcaugccuggucuuuccucug

SEQ ID NO: 3530004 - RNA, 14 nt, Human
cugcaugcggccca

SEQ ID NO: 3530005 - RNA, 20 nt, Human
cugcaugcggcccagcccgg

SEQ ID NO: 3530006 - RNA, 12 nt, Human
cugcaugcugcu

SEQ ID NO: 3530007 - RNA, 13 nt, Human
cugcaugcugcug

SEQ ID NO: 3530008 - RNA, 16 nt, Human
cugcauggaccuaaca

SEQ ID NO: 3530009 - RNA, 17 nt, Human
cugcauggaccuaacau

SEQ ID NO: 3530010 - RNA, 18 nt, Human
cugcauggagacgcauuu

SEQ ID NO: 3530011 - RNA, 17 nt, Human
cugcauggcagggggcu

SEQ ID NO: 3530012 - RNA, 20 nt, Human
cugcauggcagggggcugcu

SEQ ID NO: 3530013 - RNA, 18 nt, Human
cugcauggcauccuccag

SEQ ID NO: 3530014 - RNA, 19 nt, Human
cugcauggcauccuccagc

SEQ ID NO: 3530015 - RNA, 15 nt, Human
cugcaugguaauuua

SEQ ID NO: 3530016 - RNA, 20 nt, Human
cugcaugguaauuuauaguu

SEQ ID NO: 3530017 - RNA, 21 nt, Human
cugcauguggcuuuuuuaaaa

SEQ ID NO: 3530018 - RNA, 20 nt, Human
cugcauuaccgcguuguaaa

SEQ ID NO: 3530019 - RNA, 23 nt, Human
cugcauuaccgcguuguaaaaua

SEQ ID NO: 3530020 - RNA, 13 nt, Human
cugcauuagaaaa

SEQ ID NO: 3530021 - RNA, 15 nt, Human
cugcauuagaaaaag

SEQ ID NO: 3530022 - RNA, 17 nt, Human
cugcauuauuugagaag

SEQ ID NO: 3530023 - RNA, 20 nt, Human
cugcauucaggaucaaaccc

SEQ ID NO: 3530024 - RNA, 23 nt, Human
cugcauucauuuuuauagcaaca

SEQ ID NO: 3530025 - RNA, 12 nt, Human
cugcauuccgca

SEQ ID NO: 3530026 - RNA, 13 nt, Human
cugcauuccgcag

SEQ ID NO: 3530027 - RNA, 21 nt, Human
cugcauucugccucucuagga

SEQ ID NO: 3530028 - RNA, 17 nt, Human
cugcauugaaaagagcu

SEQ ID NO: 3530029 - RNA, 18 nt, Human
cugcauugaaaagagcug

SEQ ID NO: 3530030 - RNA, 19 nt, Human
cugcauugaaaagagcuga

SEQ ID NO: 3530031 - RNA, 17 nt, Human
cugcauugcccagucuu

SEQ ID NO: 3530032 - RNA, 21 nt, Human
cugcauugcuagauaaaagcu

SEQ ID NO: 3530033 - RNA, 13 nt, Human
cugcauuggcuuu

SEQ ID NO: 3530034 - RNA, 18 nt, Human
cugcauugggugaucauu

SEQ ID NO: 3530035 - RNA, 15 nt, Human
cugcauuuaaaaaaa

SEQ ID NO: 3530036 - RNA, 17 nt, Human
cugcauuuaaaagauac

SEQ ID NO: 3530037 - RNA, 14 nt, Human
cugcauuuagcaca

SEQ ID NO: 3530038 - RNA, 23 nt, Human
cugcauuuagcacaaaaaaaauu

SEQ ID NO: 3530039 - RNA, 13 nt, Human
cugcauuuaggga

SEQ ID NO: 3530040 - RNA, 16 nt, Human
cugcauuuguauauuu

SEQ ID NO: 3530041 - RNA, 14 nt, Human
cugcauuugugaaa

SEQ ID NO: 3530042 - RNA, 15 nt, Human
cugcauuugugaaau

SEQ ID NO: 3530043 - RNA, 22 nt, Human
cugcauuugugaaaugauggug

SEQ ID NO: 3530044 - RNA, 20 nt, Human
cugcauuuuauucuggaugg

SEQ ID NO: 3530045 - RNA, 18 nt, Human
cugcauuuucaccccacc

SEQ ID NO: 3530046 - RNA, 17 nt, Human
cugcauuuucuggguuc

SEQ ID NO: 3530047 - RNA, 15 nt, Human
gcaaggcccugcugc

SEQ ID NO: 3530048 - RNA, 21 nt, Human
gcaaggccgcuguucacccac

SEQ ID NO: 3530049 - RNA, 15 nt, Human
gcaaggcuaugugau

SEQ ID NO: 3530050 - RNA, 14 nt, Human
gcaagggaggccca

SEQ ID NO: 3530051 - RNA, 17 nt, Human
gcaagggaggcccagcg

SEQ ID NO: 3530052 - RNA, 22 nt, Human
gcaagggcacaaguccuggaug

SEQ ID NO: 3530053 - RNA, 15 nt, Human
gcaagggccaugcug

SEQ ID NO: 3530054 - RNA, 15 nt, Human
gcaaggggaaaaucu

SEQ ID NO: 3530055 - RNA, 16 nt, Human
gcaaggggaaaaucuc

SEQ ID NO: 3530056 - RNA, 21 nt, Human
gcagccucgccccuggcagag

SEQ ID NO: 3530057 - RNA, 12 nt, Human
gcagccucuccc

SEQ ID NO: 3530058 - RNA, 13 nt, Human
gcagccucugggc

SEQ ID NO: 3530059 - RNA, 14 nt, Human
gcagccucuggggg

SEQ ID NO: 3530060 - RNA, 22 nt, Human
gcagccucugggggguggccag

SEQ ID NO: 3530061 - RNA, 16 nt, Human
gcagccugccuggagu

SEQ ID NO: 3530062 - RNA, 15 nt, Human
gcagccugcguggcu

SEQ ID NO: 3530063 - RNA, 15 nt, Human
gcagccuggagcccu

SEQ ID NO: 3530064 - RNA, 12 nt, Human
gcagccuggagg

SEQ ID NO: 3530065 - RNA, 20 nt, Human
gcagccuggcucccaggaca

SEQ ID NO: 3530066 - RNA, 21 nt, Human
gcagccuggcucccaggacac

SEQ ID NO: 3530067 - RNA, 15 nt, Human
gcagccuggcucccc

SEQ ID NO: 3530068 - RNA, 20 nt, Human
gcagccuggcuccccugggg

SEQ ID NO: 3530069 - RNA, 10 nt, Human
gcagccuggg

SEQ ID NO: 3530070 - RNA, 20 nt, Human
gcagccuugaacucugggcu

SEQ ID NO: 3530071 - RNA, 15 nt, Human
gcagccuuggcaaac

SEQ ID NO: 3530072 - RNA, 12 nt, Human
gcagccuuguga

SEQ ID NO: 3530073 - RNA, 15 nt, Human
gcagccuuuaaugca

SEQ ID NO: 3530074 - RNA, 14 nt, Human
gcagcgaccgcccc

SEQ ID NO: 3530075 - RNA, 12 nt, Human
gcagcgagccug

SEQ ID NO: 3530076 - RNA, 20 nt, Human
gcagcgccaagcaaccuggg

SEQ ID NO: 3530077 - RNA, 15 nt, Human
gcagcgccuuuccca

SEQ ID NO: 3530078 - RNA, 20 nt, Human
gcagcuaguccuagugaacc

SEQ ID NO: 3530079 - RNA, 23 nt, Human
gcagcucaagcagcgaccgcccc

SEQ ID NO: 3530080 - RNA, 20 nt, Human
gcagcucagaaccacagcaa

SEQ ID NO: 3530081 - RNA, 14 nt, Human
gcagcucagagagg

SEQ ID NO: 3530082 - RNA, 21 nt, Human
gcagcucaucucugucccacu

SEQ ID NO: 3530083 - RNA, 13 nt, Human
gcagcucccuggc

SEQ ID NO: 3530084 - RNA, 13 nt, Human
gcagcuccucugu

SEQ ID NO: 3530085 - RNA, 16 nt, Human
gcagcuccucugucuc

SEQ ID NO: 3530086 - RNA, 13 nt, Human
gcagcucuuccug

SEQ ID NO: 3530087 - RNA, 13 nt, Human
gcagcucuugcua

SEQ ID NO: 3530088 - RNA, 23 nt, Human
gcagcucuugcuaaucagugucu

SEQ ID NO: 3530089 - RNA, 16 nt, Human
gcagcugagcagggcc

SEQ ID NO: 3530090 - RNA, 17 nt, Human
gcagcugagcagggccg

SEQ ID NO: 3530091 - RNA, 20 nt, Human
gcagcugagcagggccgggg

SEQ ID NO: 3530092 - RNA, 21 nt, Human
gcagcugagcagggccgggga

SEQ ID NO: 3530093 - RNA, 16 nt, Human
gcagcugauacaaauu

SEQ ID NO: 3530094 - RNA, 15 nt, Human
gcagcugauuuuaac

SEQ ID NO: 3530095 - RNA, 17 nt, Human
gcagcugccaggagcac

SEQ ID NO: 3530096 - RNA, 11 nt, Human
gcagcugccuc

SEQ ID NO: 3530097 - RNA, 15 nt, Human
gcagcugccuccccu

SEQ ID NO: 3530098 - RNA, 13 nt, Human
gcagcugcuuuug

SEQ ID NO: 3530099 - RNA, 20 nt, Human
gcagcugcuuuugucuaugg

SEQ ID NO: 3530100 - RNA, 23 nt, Human
gcagcuggaaaagggucuuggga

SEQ ID NO: 3530101 - RNA, 16 nt, Human
gcagcuggacuaccca

SEQ ID NO: 3530102 - RNA, 22 nt, Human
gcagcuggacucugcaucccag

SEQ ID NO: 3530103 - RNA, 16 nt, Human
gcagcugggcccaacc

SEQ ID NO: 3530104 - RNA, 18 nt, Human
gcagaaaagcaccugccg

SEQ ID NO: 3530105 - RNA, 18 nt, Human
gcagaaaauaaaggaagc

SEQ ID NO: 3530106 - RNA, 22 nt, Human
gcagaaaaucuuuuacuagugu

SEQ ID NO: 3530107 - RNA, 17 nt, Human
gcagaaaauucugugcc

SEQ ID NO: 3530108 - RNA, 18 nt, Human
gcagaaacccugagcaga

SEQ ID NO: 3530109 - RNA, 20 nt, Human
gcagaaagcaucccucaccc

SEQ ID NO: 3530110 - RNA, 13 nt, Human
gcagaaagugccu

SEQ ID NO: 3530111 - RNA, 16 nt, Human
gcagaaauacagucuu

SEQ ID NO: 3530112 - RNA, 16 nt, Human
gcagaaauagacaaaa

SEQ ID NO: 3530113 - RNA, 14 nt, Human
gcagaaaucuagaa

SEQ ID NO: 3530114 - RNA, 12 nt, Human
gcagaaauucug

SEQ ID NO: 3530115 - RNA, 17 nt, Human
gcagaaauucuguuuuu

SEQ ID NO: 3530116 - RNA, 18 nt, Human
gcagaacacauuucaaau

SEQ ID NO: 3530117 - RNA, 17 nt, Human
gcagaacacuaaccuga

SEQ ID NO: 3530118 - RNA, 21 nt, Human
gcagaacagccgcuccugucu

SEQ ID NO: 3530119 - RNA, 13 nt, Human
gcagaacagugau

SEQ ID NO: 3530120 - RNA, 19 nt, Human
gcagaaccggagagccagc

SEQ ID NO: 3530121 - RNA, 20 nt, Human
gcagaaccggagagccagcu

SEQ ID NO: 3530122 - RNA, 21 nt, Human
gcagaacgaaccuuggccugg

SEQ ID NO: 3530123 - RNA, 21 nt, Human
gcagaacguauugguccagcu

SEQ ID NO: 3530124 - RNA, 21 nt, Human
gcagaacuaaacucauuuaua

SEQ ID NO: 3530125 - RNA, 18 nt, Human
gcagaacugagcuccucu

SEQ ID NO: 3530126 - RNA, 19 nt, Human
gcagaacugccauuauuuu

SEQ ID NO: 3530127 - RNA, 19 nt, Human
gcagaacuugaagccugcu

SEQ ID NO: 3530128 - RNA, 13 nt, Human
gcagaagaaagga

SEQ ID NO: 3530129 - RNA, 23 nt, Human
gcagaagaauugaacccaggagg

SEQ ID NO: 3530130 - RNA, 14 nt, Human
gcagaagacaguau

SEQ ID NO: 3530131 - RNA, 16 nt, Human
gcagaagcagcaacuu

SEQ ID NO: 3530132 - RNA, 12 nt, Human
gcagaaggaaga

SEQ ID NO: 3530133 - RNA, 14 nt, Human
gcagaaggaagacu

SEQ ID NO: 3530134 - RNA, 16 nt, Human
gcagaaggaaggcagg

SEQ ID NO: 3530135 - RNA, 19 nt, Human
gcagaaggauuuuuuaaag

SEQ ID NO: 3530136 - RNA, 14 nt, Human
gcagaaggccaaga

SEQ ID NO: 3530137 - RNA, 15 nt, Human
gcagaagggagaagg

SEQ ID NO: 3530138 - RNA, 22 nt, Human
gcagaagggagcuggcuccagc

SEQ ID NO: 3530139 - RNA, 22 nt, Human
gcagaaggggguggugucucca

SEQ ID NO: 3530140 - RNA, 17 nt, Human
gcagaaguaagccucau

SEQ ID NO: 3530141 - RNA, 16 nt, Human
gcagaaguguuuuuua

SEQ ID NO: 3530142 - RNA, 17 nt, Human
gcagaauaaagcaauuu

SEQ ID NO: 3530143 - RNA, 19 nt, Human
gcagaauaaagcaauuuuc

SEQ ID NO: 3530144 - RNA, 17 nt, Human
gcagaauacuuuucucu

SEQ ID NO: 3530145 - RNA, 21 nt, Human
gcagaauucauucauacuuaa

SEQ ID NO: 3530146 - RNA, 13 nt, Human
gcagaauuggaaa

SEQ ID NO: 3530147 - RNA, 21 nt, Human
gcagaauuguuuagauuuugu

SEQ ID NO: 3530148 - RNA, 23 nt, Human
gcagaauuguuuagauuuugugu

SEQ ID NO: 3530149 - RNA, 14 nt, Human
gcagacaauaaacc

SEQ ID NO: 3530150 - RNA, 17 nt, Human
gcagacaauaaacccuc

SEQ ID NO: 3530151 - RNA, 18 nt, Human
gcagacacagggacuuga

SEQ ID NO: 3530152 - RNA, 21 nt, Human
gcagacacagggacuugaagu

SEQ ID NO: 3530153 - RNA, 22 nt, Human
gcagacacagggacuugaaguu

SEQ ID NO: 3530154 - RNA, 20 nt, Human
gcagacagaagucuccucaa

SEQ ID NO: 3530155 - RNA, 15 nt, Human
gcagacagagccagg

SEQ ID NO: 3530156 - RNA, 16 nt, Human
gcagacagagccagga

SEQ ID NO: 3530157 - RNA, 18 nt, Human
gcagacagagccaggaga

SEQ ID NO: 3530158 - RNA, 23 nt, Human
gcagacagagccaggagaagcuc

SEQ ID NO: 3530159 - RNA, 18 nt, Human
gcagacagcagcucaggc

SEQ ID NO: 3530160 - RNA, 15 nt, Human
gcagacagcuccacc

SEQ ID NO: 3530161 - RNA, 23 nt, Human
gcagacaggcaagcaccuccugc

SEQ ID NO: 3530162 - RNA, 20 nt, Human
gcagacagggggccagaaca

SEQ ID NO: 3530163 - RNA, 12 nt, Human
gcagacauuguc

SEQ ID NO: 3530164 - RNA, 20 nt, Human
gcagaccacgcccguccugc

SEQ ID NO: 3530165 - RNA, 20 nt, Human
gcagaccauuggggcuccca

SEQ ID NO: 3530166 - RNA, 23 nt, Human
gcagaccauuggggcucccagcc

SEQ ID NO: 3530167 - RNA, 15 nt, Human
gcagaccuccccagc

SEQ ID NO: 3530168 - RNA, 17 nt, Human
gcagaccuccccagccc

SEQ ID NO: 3530169 - RNA, 19 nt, Human
gcagaccuccccagccccu

SEQ ID NO: 3530170 - RNA, 12 nt, Human
gcagaccucugg

SEQ ID NO: 3530171 - RNA, 20 nt, Human
gcagaccuguccuccuggug

SEQ ID NO: 3530172 - RNA, 14 nt, Human
gcagacgccgggga

SEQ ID NO: 3530173 - RNA, 15 nt, Human
gcagacuaugcaaac

SEQ ID NO: 3530174 - RNA, 18 nt, Human
gcagacucaguuugucag

SEQ ID NO: 3530175 - RNA, 15 nt, Human
gcagacucuacagag

SEQ ID NO: 3530176 - RNA, 19 nt, Human
gcagacucuacagaggcca

SEQ ID NO: 3530177 - RNA, 20 nt, Human
gcagacucuuuaugcuugca

SEQ ID NO: 3530178 - RNA, 18 nt, Human
gcagacugaucaggaccu

SEQ ID NO: 3530179 - RNA, 15 nt, Human
gcagacuggagggga

SEQ ID NO: 3530180 - RNA, 15 nt, Human
gcagacuucccagcu

SEQ ID NO: 3530181 - RNA, 23 nt, Human
gcagagaaagaagagacaggagg

SEQ ID NO: 3530182 - RNA, 21 nt, Human
gcagagaccaucccugaaggc

SEQ ID NO: 3530183 - RNA, 22 nt, Human
gcagagaccaucccugaaggcc

SEQ ID NO: 3530184 - RNA, 13 nt, Human
gcagagagaagcc

SEQ ID NO: 3530185 - RNA, 16 nt, Human
gcagagagaagccugu

SEQ ID NO: 3530186 - RNA, 10 nt, Human
gcagagagag

SEQ ID NO: 3530187 - RNA, 15 nt, Human
gcagagaggccaggu

SEQ ID NO: 3530188 - RNA, 22 nt, Human
gcagagagguuugcagucccaa

SEQ ID NO: 3530189 - RNA, 17 nt, Human
gcagagaugccucccug

SEQ ID NO: 3530190 - RNA, 23 nt, Human
gcagagauuggaaugggcagcuc

SEQ ID NO: 3530191 - RNA, 23 nt, Human
gcagagauuucucauugacuuuu

SEQ ID NO: 3530192 - RNA, 19 nt, Human
gcagagauuuucaacauuu

SEQ ID NO: 3530193 - RNA, 16 nt, Human
gcagagcaagucugca

SEQ ID NO: 3530194 - RNA, 19 nt, Human
gcagagcaccuuagacagu

SEQ ID NO: 3530195 - RNA, 21 nt, Human
gcagagcaccuuugcacagga

SEQ ID NO: 3530196 - RNA, 15 nt, Human
gcagagcagagacca

SEQ ID NO: 3530197 - RNA, 21 nt, Human
gcagagcagugggccuggcca

SEQ ID NO: 3530198 - RNA, 15 nt, Human
gcagagcccccagga

SEQ ID NO: 3530199 - RNA, 11 nt, Human
gcagagcccug

SEQ ID NO: 3530200 - RNA, 22 nt, Human
gcagagcgccgugaguucucag

SEQ ID NO: 3530201 - RNA, 16 nt, Human
gcagccacccugagga

SEQ ID NO: 3530202 - RNA, 17 nt, Human
gcagccacccugaggag

SEQ ID NO: 3530203 - RNA, 14 nt, Human
gcagccacuauugu

SEQ ID NO: 3530204 - RNA, 14 nt, Human
gcagccagaggcac

SEQ ID NO: 3530205 - RNA, 17 nt, Human
gcagccagcaucugggc

SEQ ID NO: 3530206 - RNA, 19 nt, Human
gcagccagcaucugggccu

SEQ ID NO: 3530207 - RNA, 13 nt, Human
gcagccagcccag

SEQ ID NO: 3530208 - RNA, 13 nt, Human
gcagccagcccug

SEQ ID NO: 3530209 - RNA, 17 nt, Human
gcagccagcccugccug

SEQ ID NO: 3530210 - RNA, 18 nt, Human
gcagccagcccugccugg

SEQ ID NO: 3530211 - RNA, 19 nt, Human
gcagccagcccugccugga

SEQ ID NO: 3530212 - RNA, 16 nt, Human
gcagccagcucucagc

SEQ ID NO: 3530213 - RNA, 19 nt, Human
gcagccaggacaccgggca

SEQ ID NO: 3530214 - RNA, 20 nt, Human
gcagccaggccacuggcccc

SEQ ID NO: 3530215 - RNA, 12 nt, Human
gcagccagggag

SEQ ID NO: 3530216 - RNA, 20 nt, Human
gcagccagggagagcccagg

SEQ ID NO: 3530217 - RNA, 18 nt, Human
gcagccagugcccugagc

SEQ ID NO: 3530218 - RNA, 15 nt, Human
gcagcccaagcuucc

SEQ ID NO: 3530219 - RNA, 21 nt, Human
gcagcccaagcuucccuccau

SEQ ID NO: 3530220 - RNA, 18 nt, Human
gcagcccaccccucaaca

SEQ ID NO: 3530221 - RNA, 14 nt, Human
gcagcccagagacu

SEQ ID NO: 3530222 - RNA, 12 nt, Human
gcagcccagcca

SEQ ID NO: 3530223 - RNA, 16 nt, Human
gcagcccaggaagucu

SEQ ID NO: 3530224 - RNA, 18 nt, Human
gcagcccauuucuccaga

SEQ ID NO: 3530225 - RNA, 22 nt, Human
gcagcccauuucuccagaaccc

SEQ ID NO: 3530226 - RNA, 17 nt, Human
gcagccccagccugcua

SEQ ID NO: 3530227 - RNA, 12 nt, Human
gcagccccaggc

SEQ ID NO: 3530228 - RNA, 19 nt, Human
gcagccccauucugccugc

SEQ ID NO: 3530229 - RNA, 14 nt, Human
gcagcccccagcuc

SEQ ID NO: 3530230 - RNA, 23 nt, Human
gcagcccccagcucccaccuccc

SEQ ID NO: 3530231 - RNA, 23 nt, Human
gcagccccgggagggcggcacag

SEQ ID NO: 3530232 - RNA, 22 nt, Human
gcagcccgcaucagcugcucag

SEQ ID NO: 3530233 - RNA, 23 nt, Human
gcagcccuaaggaucucucagga

SEQ ID NO: 3530234 - RNA, 19 nt, Human
gcagcccuagagccugccu

SEQ ID NO: 3530235 - RNA, 15 nt, Human
gcagcccuccucacc

SEQ ID NO: 3530236 - RNA, 18 nt, Human
gcagcccuccucaccccg

SEQ ID NO: 3530237 - RNA, 20 nt, Human
gcagcccugcugcugccugc

SEQ ID NO: 3530238 - RNA, 13 nt, Human
gcagcccugcuuu

SEQ ID NO: 3530239 - RNA, 18 nt, Human
gcagcccuggcccaucau

SEQ ID NO: 3530240 - RNA, 14 nt, Human
gcagcccuuccaaa

SEQ ID NO: 3530241 - RNA, 14 nt, Human
gcagccgagcucgu

SEQ ID NO: 3530242 - RNA, 14 nt, Human
gcagccgccuucac

SEQ ID NO: 3530243 - RNA, 18 nt, Human
gcagccgccuuccuugac

SEQ ID NO: 3530244 - RNA, 19 nt, Human
gcagccggcacagggucug

SEQ ID NO: 3530245 - RNA, 18 nt, Human
gcagccgugccuucagcu

SEQ ID NO: 3530246 - RNA, 18 nt, Human
gcagccguuugagaagaa

SEQ ID NO: 3530247 - RNA, 16 nt, Human
gcagccuacuagggac

SEQ ID NO: 3530248 - RNA, 23 nt, Human
gcagccuacuagggaccugggga

SEQ ID NO: 3530249 - RNA, 20 nt, Human
gcagccucaaccuccugggc

SEQ ID NO: 3530250 - RNA, 17 nt, Human
gcagccuccaacacaag

SEQ ID NO: 3530251 - RNA, 20 nt, Human
gcagccucccauccagggcc

SEQ ID NO: 3530252 - RNA, 14 nt, Human
gcagccucccuccg

SEQ ID NO: 3530253 - RNA, 17 nt, Human
gcagccuccgcuucccu

SEQ ID NO: 3530254 - RNA, 18 nt, Human
gcagccucgaacuccugg

SEQ ID NO: 3530255 - RNA, 20 nt, Human
gcagccucucagugcccucc

SEQ ID NO: 3530256 - RNA, 23 nt, Human
gcagccucugggggguggccagg

SEQ ID NO: 3530257 - RNA, 13 nt, Human
gcagccugagucc

SEQ ID NO: 3530258 - RNA, 13 nt, Human
gcagccugcagga

SEQ ID NO: 3530259 - RNA, 13 nt, Human
gcagccugccugg

SEQ ID NO: 3530260 - RNA, 21 nt, Human
gcagccugcucuagugggaca

SEQ ID NO: 3530261 - RNA, 12 nt, Human
gcagccuggagc

SEQ ID NO: 3530262 - RNA, 13 nt, Human
gcagccuggagcc

SEQ ID NO: 3530263 - RNA, 13 nt, Human
gcagccuggaggc

SEQ ID NO: 3530264 - RNA, 14 nt, Human
gcagccuggggcug

SEQ ID NO: 3530265 - RNA, 19 nt, Human
gcagccuugaacucugggc

SEQ ID NO: 3530266 - RNA, 15 nt, Human
gcagcgaccaccccu

SEQ ID NO: 3530267 - RNA, 16 nt, Human
gcagcgaccaccccug

SEQ ID NO: 3530268 - RNA, 16 nt, Human
gcagcgaccgcccccu

SEQ ID NO: 3530269 - RNA, 13 nt, Human
gcagggccauggc

SEQ ID NO: 3530270 - RNA, 18 nt, Human
gcagggccauggcucagg

SEQ ID NO: 3530271 - RNA, 23 nt, Human
gcagggccgccagggagaccugg

SEQ ID NO: 3530272 - RNA, 13 nt, Human
gcagggccgggga

SEQ ID NO: 3530273 - RNA, 20 nt, Human
gcagggccggggaacuggcc

SEQ ID NO: 3530274 - RNA, 22 nt, Human
gcagggccggggaacuggccaa

SEQ ID NO: 3530275 - RNA, 17 nt, Human
gcagggccuagcugcua

SEQ ID NO: 3530276 - RNA, 21 nt, Human
gcagggccuagcugcuacaaa

SEQ ID NO: 3530277 - RNA, 17 nt, Human
gcagggcgggcagaggg

SEQ ID NO: 3530278 - RNA, 18 nt, Human
gcagggcgggcagagggc

SEQ ID NO: 3530279 - RNA, 22 nt, Human
gcagggcgggcagagggcugga

SEQ ID NO: 3530280 - RNA, 12 nt, Human
gcagggcucagc

SEQ ID NO: 3530281 - RNA, 21 nt, Human
gcagggcucagcggggacagc

SEQ ID NO: 3530282 - RNA, 22 nt, Human
gcagggcucagcggggacagcu

SEQ ID NO: 3530283 - RNA, 17 nt, Human
gcagggcucccacagag

SEQ ID NO: 3530284 - RNA, 14 nt, Human
gcagggcucuccug

SEQ ID NO: 3530285 - RNA, 16 nt, Human
gcagggcucuccuggc

SEQ ID NO: 3530286 - RNA, 19 nt, Human
gcagggcucugccccagag

SEQ ID NO: 3530287 - RNA, 21 nt, Human
gcagggcuggccccagggcac

SEQ ID NO: 3530288 - RNA, 17 nt, Human
gcaggggaggccaucug

SEQ ID NO: 3530289 - RNA, 18 nt, Human
gcaggggaggccaucugg

SEQ ID NO: 3530290 - RNA, 12 nt, Human
gcaggggagggg

SEQ ID NO: 3530291 - RNA, 22 nt, Human
gcaggggaggguagagcggaga

SEQ ID NO: 3530292 - RNA, 24 nt, Human
gcaggggauggcguggucaagcac

SEQ ID NO: 3530293 - RNA, 20 nt, Human
gcaggggcccugcagcucuc

SEQ ID NO: 3530294 - RNA, 19 nt, Human
gcaggggcuacaagaggga

SEQ ID NO: 3530295 - RNA, 14 nt, Human
gcaggggcucugga

SEQ ID NO: 3530296 - RNA, 18 nt, Human
gcaggggcucuggagaga

SEQ ID NO: 3530297 - RNA, 14 nt, Human
gcaggggcuuccug

SEQ ID NO: 3530298 - RNA, 20 nt, Human
gcaggggcuuguugcaggcu

SEQ ID NO: 3530299 - RNA, 16 nt, Human
gcagggggacugcuug

SEQ ID NO: 3530300 - RNA, 14 nt, Human
gcagggggcugcug

SEQ ID NO: 3530301 - RNA, 21 nt, Human
gcaggggguggacaaacugga

SEQ ID NO: 3530302 - RNA, 23 nt, Human
gcagggguggaggagagccuggu

SEQ ID NO: 3530303 - RNA, 19 nt, Human
gcaggguccuagaaauucc

SEQ ID NO: 3530304 - RNA, 21 nt, Human
gcaggguccucuucugggccu

SEQ ID NO: 3530305 - RNA, 17 nt, Human
gcagggucugggcagga

SEQ ID NO: 3530306 - RNA, 16 nt, Human
gcagggucuuuucauc

SEQ ID NO: 3530307 - RNA, 21 nt, Human
gcagggucuuuucaucuggga

SEQ ID NO: 3530308 - RNA, 14 nt, Human
gcaggguguuggga

SEQ ID NO: 3530309 - RNA, 14 nt, Human
gcaggguuucuuuu

SEQ ID NO: 3530310 - RNA, 16 nt, Human
gcagguaaacuccugu

SEQ ID NO: 3530311 - RNA, 19 nt, Human
gcagguagaccugucuccu

SEQ ID NO: 3530312 - RNA, 21 nt, Human
gcagguagccagggggacuag

SEQ ID NO: 3530313 - RNA, 13 nt, Human
gcagguccccaga

SEQ ID NO: 3530314 - RNA, 23 nt, Human
gcagguccccagacuccaccaag

SEQ ID NO: 3530315 - RNA, 10 nt, Human
gcaggucccu

SEQ ID NO: 3530316 - RNA, 14 nt, Human
gcaggucccuaaua

SEQ ID NO: 3530317 - RNA, 17 nt, Human
gcaggucccuaauaaag

SEQ ID NO: 3530318 - RNA, 15 nt, Human
gcaggugaauuguuu

SEQ ID NO: 3530319 - RNA, 17 nt, Human
gcaggugaccuucuggg

SEQ ID NO: 3530320 - RNA, 23 nt, Human
gcaggugaucugcugcagagcag

SEQ ID NO: 3530321 - RNA, 22 nt, Human
gcaggugauuggaccaggccau

SEQ ID NO: 3530322 - RNA, 14 nt, Human
gcaggugccuccag

SEQ ID NO: 3530323 - RNA, 21 nt, Human
gcaggugccuccaggugugca

SEQ ID NO: 3530324 - RNA, 13 nt, Human
gcagguggaucua

SEQ ID NO: 3530325 - RNA, 21 nt, Human
gcagguggaucuauuucaugu

SEQ ID NO: 3530326 - RNA, 17 nt, Human
gcagguggcaucucuaa

SEQ ID NO: 3530327 - RNA, 13 nt, Human
gcagguggggagg

SEQ ID NO: 3530328 - RNA, 21 nt, Human
gcaggugguccugagaccuga

SEQ ID NO: 3530329 - RNA, 14 nt, Human
gcagguuaaauguu

SEQ ID NO: 3530330 - RNA, 23 nt, Human
gcagguuaaauguuuuguaaacu

SEQ ID NO: 3530331 - RNA, 13 nt, Human
gcagguucaguuu

SEQ ID NO: 3530332 - RNA, 15 nt, Human
gcagguucccaagcu

SEQ ID NO: 3530333 - RNA, 19 nt, Human
gcagguucccaagcucaga

SEQ ID NO: 3530334 - RNA, 17 nt, Human
gcagguucuuguuggug

SEQ ID NO: 3530335 - RNA, 22 nt, Human
gcagguucuuguuggugcacag

SEQ ID NO: 3530336 - RNA, 17 nt, Human
gcagguugauaaaucau

SEQ ID NO: 3530337 - RNA, 14 nt, Human
gcagguuggacccc

SEQ ID NO: 3530338 - RNA, 19 nt, Human
gcagguuggaccccagaga

SEQ ID NO: 3530339 - RNA, 23 nt, Human
gcagguugggaaugaggcuugcu

SEQ ID NO: 3530340 - RNA, 23 nt, Human
gcagguugggccauacuggccuc

SEQ ID NO: 3530341 - RNA, 14 nt, Human
gcaguaaaaacugu

SEQ ID NO: 3530342 - RNA, 16 nt, Human
gcaguacaauaaaagu

SEQ ID NO: 3530343 - RNA, 17 nt, Human
gcaguacaauaaaagua

SEQ ID NO: 3530344 - RNA, 15 nt, Human
gcaguaccugagggu

SEQ ID NO: 3530345 - RNA, 19 nt, Human
gcaguaccugggcaagcug

SEQ ID NO: 3530346 - RNA, 15 nt, Human
cugcugccuccccaa

SEQ ID NO: 3530347 - RNA, 11 nt, Human
cugcugccugg

SEQ ID NO: 3530348 - RNA, 14 nt, Human
cugcugccuggcca

SEQ ID NO: 3530349 - RNA, 16 nt, Human
cugcugccuggccacu

SEQ ID NO: 3530350 - RNA, 19 nt, Human
cugcugccuggccacugcu

SEQ ID NO: 3530351 - RNA, 21 nt, Human
cugcugccuggccacugcucc

SEQ ID NO: 3530352 - RNA, 18 nt, Human
cugcugcgcccugggcuc

SEQ ID NO: 3530353 - RNA, 15 nt, Human
cugcugcuccuagga

SEQ ID NO: 3530354 - RNA, 18 nt, Human
cugcugcuccuaggaccc

SEQ ID NO: 3530355 - RNA, 23 nt, Human
cugcugcucuuggcuggacccag

SEQ ID NO: 3530356 - RNA, 11 nt, Human
cugcugcugag

SEQ ID NO: 3530357 - RNA, 14 nt, Human
cugcugcugagaac

SEQ ID NO: 3530358 - RNA, 17 nt, Human
cugcugcugagaaccug

SEQ ID NO: 3530359 - RNA, 21 nt, Human
cugcugcugagaaccuggccu

SEQ ID NO: 3530360 - RNA, 23 nt, Human
cugcugcugagaaccuggccuuc

SEQ ID NO: 3530361 - RNA, 14 nt, Human
cugcugcugccugc

SEQ ID NO: 3530362 - RNA, 15 nt, Human
cugcugcugccuggc

SEQ ID NO: 3530363 - RNA, 20 nt, Human
cugcugcugcgcccuuaccu

SEQ ID NO: 3530364 - RNA, 16 nt, Human
cugcugcugcugcgcc

SEQ ID NO: 3530365 - RNA, 15 nt, Human
cugcugcuggaucac

SEQ ID NO: 3530366 - RNA, 14 nt, Human
cugcugcugggcuc

SEQ ID NO: 3530367 - RNA, 15 nt, Human
cugcugcugggcuca

SEQ ID NO: 3530368 - RNA, 13 nt, Human
cugcugcuguguu

SEQ ID NO: 3530369 - RNA, 22 nt, Human
cugcugcuuuuugagguggcac

SEQ ID NO: 3530370 - RNA, 15 nt, Human
cugcuggaagcccag

SEQ ID NO: 3530371 - RNA, 16 nt, Human
cugcuggaagcccagc

SEQ ID NO: 3530372 - RNA, 15 nt, Human
cugcuggagaggccc

SEQ ID NO: 3530373 - RNA, 21 nt, Human
cugcuggagaggccccagccg

SEQ ID NO: 3530374 - RNA, 18 nt, Human
cugcuggaggccucaggu

SEQ ID NO: 3530375 - RNA, 20 nt, Human
cugcuggaguuucauguaca

SEQ ID NO: 3530376 - RNA, 14 nt, Human
cugcuggcacccac

SEQ ID NO: 3530377 - RNA, 17 nt, Human
cugcuggcacccaccgu

SEQ ID NO: 3530378 - RNA, 20 nt, Human
cugcuggccaaauagcaaag

SEQ ID NO: 3530379 - RNA, 16 nt, Human
cugcuggcccagccaa

SEQ ID NO: 3530380 - RNA, 23 nt, Human
cugcuggccccucaccugggcac

SEQ ID NO: 3530381 - RNA, 15 nt, Human
cugcuggccgccuca

SEQ ID NO: 3530382 - RNA, 16 nt, Human
cugcuggccgggcaca

SEQ ID NO: 3530383 - RNA, 17 nt, Human
cugcuggccgggcacag

SEQ ID NO: 3530384 - RNA, 19 nt, Human
cugcuggccgggcacagcu

SEQ ID NO: 3530385 - RNA, 15 nt, Human
cugcuggccuggauc

SEQ ID NO: 3530386 - RNA, 14 nt, Human
cugcuggcgccucu

SEQ ID NO: 3530387 - RNA, 17 nt, Human
cugcuggcgccucugca

SEQ ID NO: 3530388 - RNA, 14 nt, Human
cugcuggcugccuu

SEQ ID NO: 3530389 - RNA, 14 nt, Human
cugcuggcuugcag

SEQ ID NO: 3530390 - RNA, 14 nt, Human
cugcugggcucagu

SEQ ID NO: 3530391 - RNA, 14 nt, Human
cugcugggcucucc

SEQ ID NO: 3530392 - RNA, 22 nt, Human
cugcugggcucuccaccucagc

SEQ ID NO: 3530393 - RNA, 23 nt, Human
cugcugggcucuccaccucagcc

SEQ ID NO: 3530394 - RNA, 13 nt, Human
cugcugggcuggg

SEQ ID NO: 3530395 - RNA, 17 nt, Human
cugcugggcuggggccu

SEQ ID NO: 3530396 - RNA, 18 nt, Human
cugcugggcuggggccug

SEQ ID NO: 3530397 - RNA, 11 nt, Human
cugcugggcuu

SEQ ID NO: 3530398 - RNA, 18 nt, Human
cugcuggggaagacagug

SEQ ID NO: 3530399 - RNA, 19 nt, Human
cugcuggggaagacagugg

SEQ ID NO: 3530400 - RNA, 21 nt, Human
cugcuggggaagacaguggcc

SEQ ID NO: 3530401 - RNA, 22 nt, Human
cugcuggggauccccgccuggc

SEQ ID NO: 3530402 - RNA, 17 nt, Human
cugcuggggccucagac

SEQ ID NO: 3530403 - RNA, 13 nt, Human
cugcuggggccug

SEQ ID NO: 3530404 - RNA, 17 nt, Human
cugcuggggccugggac

SEQ ID NO: 3530405 - RNA, 11 nt, Human
cugcugggugg

SEQ ID NO: 3530406 - RNA, 16 nt, Human
cugcugguccguggga

SEQ ID NO: 3530407 - RNA, 17 nt, Human
cugcuggucuucaauua

SEQ ID NO: 3530408 - RNA, 18 nt, Human
cugcuggugcagagcuga

SEQ ID NO: 3530409 - RNA, 22 nt, Human
cugcuggugcagagcugaagau

SEQ ID NO: 3530410 - RNA, 23 nt, Human
cugcugguucaggguuggccccu

SEQ ID NO: 3530411 - RNA, 19 nt, Human
cugcuguaaauuuggcuuc

SEQ ID NO: 3530412 - RNA, 13 nt, Human
cugcuguacugaa

SEQ ID NO: 3530413 - RNA, 15 nt, Human
cugcugucaccucuc

SEQ ID NO: 3530414 - RNA, 19 nt, Human
cugcugucaccucucccac

SEQ ID NO: 3530415 - RNA, 18 nt, Human
cugcugucauugcuucuu

SEQ ID NO: 3530416 - RNA, 11 nt, Human
cugcuguccag

SEQ ID NO: 3530417 - RNA, 14 nt, Human
cugcuguccagaca

SEQ ID NO: 3530418 - RNA, 15 nt, Human
cugcuguccagacag

SEQ ID NO: 3530419 - RNA, 17 nt, Human
cugcuguccagacagcc

SEQ ID NO: 3530420 - RNA, 13 nt, Human
cugcuguccccuc

SEQ ID NO: 3530421 - RNA, 19 nt, Human
cugcuguccccucuugccc

SEQ ID NO: 3530422 - RNA, 22 nt, Human
cugcuguccccucuugccccaa

SEQ ID NO: 3530423 - RNA, 18 nt, Human
cugcuguccccuuggcag

SEQ ID NO: 3530424 - RNA, 17 nt, Human
cugcugucccucccccu

SEQ ID NO: 3530425 - RNA, 20 nt, Human
cugcugucccucccccuugu

SEQ ID NO: 3530426 - RNA, 18 nt, Human
cugcugucgcucucaguu

SEQ ID NO: 3530427 - RNA, 13 nt, Human
cugcugucugggu

SEQ ID NO: 3530428 - RNA, 21 nt, Human
cugcugugauacgaugcuuca

SEQ ID NO: 3530429 - RNA, 14 nt, Human
cugcugugcaacgg

SEQ ID NO: 3530430 - RNA, 14 nt, Human
cugcuguggccagg

SEQ ID NO: 3530431 - RNA, 16 nt, Human
cugcuguggccaggag

SEQ ID NO: 3530432 - RNA, 19 nt, Human
cugcugugggcacagguca

SEQ ID NO: 3530433 - RNA, 14 nt, Human
cugcugugugccuu

SEQ ID NO: 3530434 - RNA, 22 nt, Human
cugcugugugcuuuuuuugugu

SEQ ID NO: 3530435 - RNA, 15 nt, Human
cugcuguuccagugg

SEQ ID NO: 3530436 - RNA, 21 nt, Human
cugcuguuugacaccucuuuu

SEQ ID NO: 3530437 - RNA, 17 nt, Human
cugcuuaacuucacaua

SEQ ID NO: 3530438 - RNA, 18 nt, Human
cugcuuacaauucccugc

SEQ ID NO: 3530439 - RNA, 14 nt, Human
cugcuucaaggauc

SEQ ID NO: 3530440 - RNA, 19 nt, Human
cugcuucaaggauccugag

SEQ ID NO: 3530441 - RNA, 22 nt, Human
cugcuucaaggauccugagcca

SEQ ID NO: 3530442 - RNA, 20 nt, Human
cugcuucagauguggagcca

SEQ ID NO: 3530443 - RNA, 14 nt, Human
cugcuucagccucc

SEQ ID NO: 3530444 - RNA, 16 nt, Human
cugcuucagccuccca

SEQ ID NO: 3530445 - RNA, 21 nt, Human
cugcuucaguguauggaaaua

SEQ ID NO: 3530446 - RNA, 24 nt, Human
cugcuuccaauuuucuggaauaca

SEQ ID NO: 3530447 - RNA, 16 nt, Human
cugcuuccaccucacc

SEQ ID NO: 3530448 - RNA, 17 nt, Human
cugcuuccaccucaccc

SEQ ID NO: 3530449 - RNA, 19 nt, Human
cugcuuccaccucacccca

SEQ ID NO: 3530450 - RNA, 20 nt, Human
cugcuuccaccucaccccac

SEQ ID NO: 3530451 - RNA, 14 nt, Human
cugcuuccagugag

SEQ ID NO: 3530452 - RNA, 19 nt, Human
cugcuuccagugaggcucu

SEQ ID NO: 3530453 - RNA, 12 nt, Human
cugcuucccagg

SEQ ID NO: 3530454 - RNA, 18 nt, Human
cugcuucccucugccugu

SEQ ID NO: 3530455 - RNA, 20 nt, Human
cugcuucccucugccugucc

SEQ ID NO: 3530456 - RNA, 22 nt, Human
cugcuucccucugccugucccu

SEQ ID NO: 3530457 - RNA, 15 nt, Human
cugcuucccugaagc

SEQ ID NO: 3530458 - RNA, 16 nt, Human
cugcuuccuauaauuu

SEQ ID NO: 3530459 - RNA, 20 nt, Human
cugcuuccuauaauuuugau

SEQ ID NO: 3530460 - RNA, 13 nt, Human
cugcuuccuccug

SEQ ID NO: 3530461 - RNA, 15 nt, Human
cugcuuccuccugga

SEQ ID NO: 3530462 - RNA, 16 nt, Human
cugcuuccuccuggaa

SEQ ID NO: 3530463 - RNA, 12 nt, Human
cugcuuccugcu

SEQ ID NO: 3530464 - RNA, 19 nt, Human
cugcuuccugucuuuggga

SEQ ID NO: 3530465 - RNA, 17 nt, Human
cugcuuccuuucuugau

SEQ ID NO: 3530466 - RNA, 18 nt, Human
cugcuucuaccaacugga

SEQ ID NO: 3530467 - RNA, 20 nt, Human
cugcuucuaccaacuggaag

SEQ ID NO: 3530468 - RNA, 13 nt, Human
cugcuucuccaag

SEQ ID NO: 3530469 - RNA, 21 nt, Human
cugcuucucccacuuggccaa

SEQ ID NO: 3530470 - RNA, 17 nt, Human
cugcuucucccaggcaa

SEQ ID NO: 3530471 - RNA, 18 nt, Human
cugcuucucccaggcaag

SEQ ID NO: 3530472 - RNA, 19 nt, Human
cugcuucucccaggcaagg

SEQ ID NO: 3530473 - RNA, 22 nt, Human
cugcuucucccaggcaaggcug

SEQ ID NO: 3530474 - RNA, 18 nt, Human
gcaugauugcagaauugu

SEQ ID NO: 3530475 - RNA, 18 nt, Human
gcaugcaaaugagcucug

SEQ ID NO: 3530476 - RNA, 14 nt, Human
gcaugcaccugcaa

SEQ ID NO: 3530477 - RNA, 22 nt, Human
gcaugcacuguucccccugugc

SEQ ID NO: 3530478 - RNA, 14 nt, Human
gcaugcagcuuugc

SEQ ID NO: 3530479 - RNA, 21 nt, Human
gcaugcauuuugcagcaguga

SEQ ID NO: 3530480 - RNA, 23 nt, Human
gcaugccaacaagaaugcauuga

SEQ ID NO: 3530481 - RNA, 18 nt, Human
gcaugcccagagacccag

SEQ ID NO: 3530482 - RNA, 18 nt, Human
gcaugcccccucgugcca

SEQ ID NO: 3530483 - RNA, 16 nt, Human
gcaugccccggccacc

SEQ ID NO: 3530484 - RNA, 18 nt, Human
gcaugccccggccaccuc

SEQ ID NO: 3530485 - RNA, 19 nt, Human
gcaugccccggccaccucu

SEQ ID NO: 3530486 - RNA, 21 nt, Human
gcaugccccggccaccucugc

SEQ ID NO: 3530487 - RNA, 15 nt, Human
gcaugcccucucagg

SEQ ID NO: 3530488 - RNA, 16 nt, Human
gcaugcccucucaggc

SEQ ID NO: 3530489 - RNA, 14 nt, Human
gcaugccuggacaa

SEQ ID NO: 3530490 - RNA, 14 nt, Human
gcaugccuggaugg

SEQ ID NO: 3530491 - RNA, 14 nt, Human
cugcuugaggaaaa

SEQ ID NO: 3530492 - RNA, 13 nt, Human
cugcuugaggcaa

SEQ ID NO: 3530493 - RNA, 20 nt, Human
cugcuugaggcaacucaucu

SEQ ID NO: 3530494 - RNA, 20 nt, Human
cugcuugaguucccagaugg

SEQ ID NO: 3530495 - RNA, 23 nt, Human
cugcuugaugggauucuggacag

SEQ ID NO: 3530496 - RNA, 16 nt, Human
cugcuugccaucccuc

SEQ ID NO: 3530497 - RNA, 19 nt, Human
cugcuugcccuaagcagaa

SEQ ID NO: 3530498 - RNA, 18 nt, Human
cugcuugccgaaacugga

SEQ ID NO: 3530499 - RNA, 19 nt, Human
cugcuugccgaaacuggaa

SEQ ID NO: 3530500 - RNA, 22 nt, Human
cugcuuggaccucgugcuuuaa

SEQ ID NO: 3530501 - RNA, 17 nt, Human
cugcuuggagcugagca

SEQ ID NO: 3530502 - RNA, 15 nt, Human
cugcuuggcccaggg

SEQ ID NO: 3530503 - RNA, 16 nt, Human
cugcuuggcccagggg

SEQ ID NO: 3530504 - RNA, 21 nt, Human
cugcuuggggggugaugaggg

SEQ ID NO: 3530505 - RNA, 20 nt, Human
cugcuuggguggagaagcca

SEQ ID NO: 3530506 - RNA, 23 nt, Human
cugcuuuaaaaaaaauccuucua

SEQ ID NO: 3530507 - RNA, 19 nt, Human
cugcuuuaaaaaugucuua

SEQ ID NO: 3530508 - RNA, 17 nt, Human
cugcuuuaaccacccca

SEQ ID NO: 3530509 - RNA, 21 nt, Human
cugcuuuaauugugaauugau

SEQ ID NO: 3530510 - RNA, 20 nt, Human
cugcuuuagacuugaaaaga

SEQ ID NO: 3530511 - RNA, 15 nt, Human
cugcuuucagauacu

SEQ ID NO: 3530512 - RNA, 15 nt, Human
cugcuuuccaaagcc

SEQ ID NO: 3530513 - RNA, 18 nt, Human
cugcuuuccccugugggg

SEQ ID NO: 3530514 - RNA, 20 nt, Human
cugcuuuccccuguggggau

SEQ ID NO: 3530515 - RNA, 21 nt, Human
cugcuuuccccuguggggauc

SEQ ID NO: 3530516 - RNA, 16 nt, Human
cugcuuucuccauugu

SEQ ID NO: 3530517 - RNA, 22 nt, Human
cugcuuucuccauuguaaacca

SEQ ID NO: 3530518 - RNA, 14 nt, Human
cugcuuucuccuuu

SEQ ID NO: 3530519 - RNA, 13 nt, Human
cugcuuucuguuc

SEQ ID NO: 3530520 - RNA, 15 nt, Human
cugcuuucuguucca

SEQ ID NO: 3530521 - RNA, 17 nt, Human
cugcuuucuguuccaaa

SEQ ID NO: 3530522 - RNA, 18 nt, Human
cugcuuucuguuccaaau

SEQ ID NO: 3530523 - RNA, 13 nt, Human
cugcuuugaauaa

SEQ ID NO: 3530524 - RNA, 21 nt, Human
cugcuuugacugagcagacug

SEQ ID NO: 3530525 - RNA, 23 nt, Human
cugcuuugacugagcagacuggu

SEQ ID NO: 3530526 - RNA, 16 nt, Human
cugcuuuggcagugcc

SEQ ID NO: 3530527 - RNA, 16 nt, Human
cugcuuugggcugccc

SEQ ID NO: 3530528 - RNA, 19 nt, Human
cugcuuugggcugcccugg

SEQ ID NO: 3530529 - RNA, 13 nt, Human
cugcuuuguuacc

SEQ ID NO: 3530530 - RNA, 14 nt, Human
cugcuuuuaccaug

SEQ ID NO: 3530531 - RNA, 17 nt, Human
cugcuuuuaccaugccc

SEQ ID NO: 3530532 - RNA, 13 nt, Human
cugcuuuuauauc

SEQ ID NO: 3530533 - RNA, 22 nt, Human
cugcuuuuauuaaauuuguuga

SEQ ID NO: 3530534 - RNA, 15 nt, Human
cugcuuuucaaugug

SEQ ID NO: 3530535 - RNA, 18 nt, Human
cugcuuuucacugcugca

SEQ ID NO: 3530536 - RNA, 19 nt, Human
cugcuuuucccuuugugag

SEQ ID NO: 3530537 - RNA, 14 nt, Human
cugcuuuuggccug

SEQ ID NO: 3530538 - RNA, 19 nt, Human
cugcuuuuuaaagaaugcu

SEQ ID NO: 3530539 - RNA, 16 nt, Human
cugcuuuuuggaaagu

SEQ ID NO: 3530540 - RNA, 20 nt, Human
cugcuuuuuggaaagucaga

SEQ ID NO: 3530541 - RNA, 18 nt, Human
cugcuuuuuuuuuuccag

SEQ ID NO: 3530542 - RNA, 19 nt, Human
cugcuuuuuuuuuuccagc

SEQ ID NO: 3530543 - RNA, 22 nt, Human
cugcuuuuuuuuuuccagcaag

SEQ ID NO: 3530544 - RNA, 23 nt, Human
cugcuuuuuuuuuuccagcaagu

SEQ ID NO: 3530545 - RNA, 16 nt, Human
cuggaaaacagaacac

SEQ ID NO: 3530546 - RNA, 17 nt, Human
cuggaaaacagaacacu

SEQ ID NO: 3530547 - RNA, 18 nt, Human
cuggaaaacagaacacuu

SEQ ID NO: 3530548 - RNA, 22 nt, Human
cuggaaaagggucuugggaaau

SEQ ID NO: 3530549 - RNA, 23 nt, Human
cuggaaaaguauguuagugcaaa

SEQ ID NO: 3530550 - RNA, 19 nt, Human
cuggaaaauaaaaggucua

SEQ ID NO: 3530551 - RNA, 23 nt, Human
cuggaaaauaauacugcugagau

SEQ ID NO: 3530552 - RNA, 20 nt, Human
cuggaaaauuccuauugauu

SEQ ID NO: 3530553 - RNA, 16 nt, Human
cuggaaaccugucuga

SEQ ID NO: 3530554 - RNA, 19 nt, Human
cuggaaagcccccccuuau

SEQ ID NO: 3530555 - RNA, 13 nt, Human
cuggaaaggcuca

SEQ ID NO: 3530556 - RNA, 20 nt, Human
cuggaaaggcucagucucag

SEQ ID NO: 3530557 - RNA, 21 nt, Human
cuggaaaggggagagccugcu

SEQ ID NO: 3530558 - RNA, 23 nt, Human
cuggaaauaucaguuacucagcc

SEQ ID NO: 3530559 - RNA, 14 nt, Human
cuggaacccagacu

SEQ ID NO: 3530560 - RNA, 20 nt, Human
cuggaacccuuuuaaaguug

SEQ ID NO: 3530561 - RNA, 15 nt, Human
cuggaaccucagccu

SEQ ID NO: 3530562 - RNA, 16 nt, Human
cuggaaccucagccug

SEQ ID NO: 3530563 - RNA, 18 nt, Human
cuggaaccucagccuggc

SEQ ID NO: 3530564 - RNA, 20 nt, Human
cuggaaccuugcuguccuga

SEQ ID NO: 3530565 - RNA, 22 nt, Human
cuggaacggugaaggugacagc

SEQ ID NO: 3530566 - RNA, 21 nt, Human
cuggaacucagugugacuccu

SEQ ID NO: 3530567 - RNA, 17 nt, Human
cuggaacucuugacagc

SEQ ID NO: 3530568 - RNA, 18 nt, Human
cuggaacugucucucaug

SEQ ID NO: 3530569 - RNA, 19 nt, Human
cuggaacugucucucauga

SEQ ID NO: 3530570 - RNA, 19 nt, Human
cuggaacuugaacugauuc

SEQ ID NO: 3530571 - RNA, 20 nt, Human
cuggaacuugaacugauuca

SEQ ID NO: 3530572 - RNA, 15 nt, Human
cuggaagaacaggcc

SEQ ID NO: 3530573 - RNA, 21 nt, Human
cuggaagaacaggccucucca

SEQ ID NO: 3530574 - RNA, 21 nt, Human
cuggaagacgcaagggccuga

SEQ ID NO: 3530575 - RNA, 19 nt, Human
cuggaagagcuaggcaggg

SEQ ID NO: 3530576 - RNA, 13 nt, Human
cuggaagaugggg

SEQ ID NO: 3530577 - RNA, 18 nt, Human
cuggaagcacagcuucau

SEQ ID NO: 3530578 - RNA, 20 nt, Human
cuggaagcagugcccaggug

SEQ ID NO: 3530579 - RNA, 22 nt, Human
cuggaagccaaaauguaggcuu

SEQ ID NO: 3530580 - RNA, 14 nt, Human
cuggaagcccagcc

SEQ ID NO: 3530581 - RNA, 21 nt, Human
cuggaagcccagccccuacug

SEQ ID NO: 3530582 - RNA, 17 nt, Human
cuggaagccccugggcc

SEQ ID NO: 3530583 - RNA, 16 nt, Human
cuggaagcccuggaga

SEQ ID NO: 3530584 - RNA, 18 nt, Human
cuggaagccggcggccca

SEQ ID NO: 3530585 - RNA, 22 nt, Human
cuggaagccggcggcccaagcc

SEQ ID NO: 3530586 - RNA, 18 nt, Human
cuggaagcuaauuugcau

SEQ ID NO: 3530587 - RNA, 19 nt, Human
cuggaagcuaauuugcauu

SEQ ID NO: 3530588 - RNA, 15 nt, Human
cuggaagcugggagg

SEQ ID NO: 3530589 - RNA, 16 nt, Human
cuggaagcuguguccu

SEQ ID NO: 3530590 - RNA, 22 nt, Human
cuggaagcuguguccuugcacc

SEQ ID NO: 3530591 - RNA, 18 nt, Human
cuggaagcuuuguccccu

SEQ ID NO: 3530592 - RNA, 20 nt, Human
cuggaagcuuuguccccugc

SEQ ID NO: 3530593 - RNA, 13 nt, Human
cuggaaggaggaa

SEQ ID NO: 3530594 - RNA, 14 nt, Human
cuggaaggaggaag

SEQ ID NO: 3530595 - RNA, 17 nt, Human
cuggaaggagugagagg

SEQ ID NO: 3530596 - RNA, 15 nt, Human
cuggaagggaggugg

SEQ ID NO: 3530597 - RNA, 15 nt, Human
cuggaagggcuagaa

SEQ ID NO: 3530598 - RNA, 22 nt, Human
cuggaagggcuagaaccuguag

SEQ ID NO: 3530599 - RNA, 21 nt, Human
cuggaagugcuaauuuugaaa

SEQ ID NO: 3530600 - RNA, 18 nt, Human
cuggaaguuaaagugagg

SEQ ID NO: 3530601 - RNA, 19 nt, Human
cuggaaguuaaagugaggc

SEQ ID NO: 3530602 - RNA, 19 nt, Human
cuggaauaagaagcaaaua

SEQ ID NO: 3530603 - RNA, 24 nt, Human
cuggaaucuggagaccagggagcc

SEQ ID NO: 3530604 - RNA, 14 nt, Human
cuggaaugcagugg

SEQ ID NO: 3530605 - RNA, 15 nt, Human
cuggaaugcaguggu

SEQ ID NO: 3530606 - RNA, 22 nt, Human
cuggaaugguacaugucuucca

SEQ ID NO: 3530607 - RNA, 20 nt, Human
cuggaauguaaucaauguuu

SEQ ID NO: 3530608 - RNA, 21 nt, Human
cuggaauguaaucaauguuuc

SEQ ID NO: 3530609 - RNA, 20 nt, Human
cuggaauuagcuuggggcca

SEQ ID NO: 3530610 - RNA, 15 nt, Human
cuggaauuguggcua

SEQ ID NO: 3530611 - RNA, 22 nt, Human
cuggaauuguggcuauccugau

SEQ ID NO: 3530612 - RNA, 13 nt, Human
cuggaauuugaaa

SEQ ID NO: 3530613 - RNA, 14 nt, Human
cuggacaaagaauu

SEQ ID NO: 3530614 - RNA, 18 nt, Human
cuggacaagcagaggugg

SEQ ID NO: 3530615 - RNA, 21 nt, Human
cuggacaauugcuucaagcau

SEQ ID NO: 3530616 - RNA, 13 nt, Human
cuggacacaggcc

SEQ ID NO: 3530617 - RNA, 16 nt, Human
cuggacacucagaccu

SEQ ID NO: 3530618 - RNA, 17 nt, Human
cuggacacucagaccug

SEQ ID NO: 3530619 - RNA, 18 nt, Human
cuggacacucagaccuga

SEQ ID NO: 3530620 - RNA, 20 nt, Human
cuggacagaggggacucugg

SEQ ID NO: 3530621 - RNA, 15 nt, Human
cuggacagccccacc

SEQ ID NO: 3530622 - RNA, 14 nt, Human
cuggacagcuugug

SEQ ID NO: 3530623 - RNA, 20 nt, Human
cuggacaggcucugcuucuc

SEQ ID NO: 3530624 - RNA, 15 nt, Human
cuggacaggucuggg

SEQ ID NO: 3530625 - RNA, 20 nt, Human
cuggacaguaucccacaucc

SEQ ID NO: 3530626 - RNA, 16 nt, Human
cuggacagucagcucu

SEQ ID NO: 3530627 - RNA, 17 nt, Human
cuggacauagagaggga

SEQ ID NO: 3530628 - RNA, 18 nt, Human
cuggacauagagagggag

SEQ ID NO: 3530629 - RNA, 23 nt, Human
cuggacauagagagggagaagaa

SEQ ID NO: 3530630 - RNA, 14 nt, Human
cuggaccaaagcug

SEQ ID NO: 3530631 - RNA, 22 nt, Human
cuggaccaaagcugacgaggcu

SEQ ID NO: 3530632 - RNA, 13 nt, Human
gcauucuaguacu

SEQ ID NO: 3530633 - RNA, 15 nt, Human
gcauucuauugccuu

SEQ ID NO: 3530634 - RNA, 16 nt, Human
gccagcaacugaauaa

SEQ ID NO: 3530635 - RNA, 13 nt, Human
gccagcaaugaca

SEQ ID NO: 3530636 - RNA, 20 nt, Human
gccagcaaugacaucucagg

SEQ ID NO: 3530637 - RNA, 21 nt, Human
gccagcaaugauguccagaag

SEQ ID NO: 3530638 - RNA, 22 nt, Human
gccagcaaugauguccagaaga

SEQ ID NO: 3530639 - RNA, 13 nt, Human
gccagcacacagg

SEQ ID NO: 3530640 - RNA, 16 nt, Human
gccagcacacagggca

SEQ ID NO: 3530641 - RNA, 20 nt, Human
gccagcacuuguccagcuga

SEQ ID NO: 3530642 - RNA, 21 nt, Human
cuggaccaacccuguuuccug

SEQ ID NO: 3530643 - RNA, 14 nt, Human
cuggaccagaugcu

SEQ ID NO: 3530644 - RNA, 21 nt, Human
cuggaccaguggucucacaug

SEQ ID NO: 3530645 - RNA, 11 nt, Human
cuggacccagc

SEQ ID NO: 3530646 - RNA, 13 nt, Human
cuggacccagcca

SEQ ID NO: 3530647 - RNA, 13 nt, Human
cuggaccccagcc

SEQ ID NO: 3530648 - RNA, 23 nt, Human
cuggaccccugcauuggaacugg

SEQ ID NO: 3530649 - RNA, 20 nt, Human
cuggacccguucauggggga

SEQ ID NO: 3530650 - RNA, 13 nt, Human
cuggacccugacc

SEQ ID NO: 3530651 - RNA, 20 nt, Human
cuggacccugaccagcuccc

SEQ ID NO: 3530652 - RNA, 21 nt, Human
cuggacccugaccagcucccc

SEQ ID NO: 3530653 - RNA, 16 nt, Human
cuggacccuuauaaaa

SEQ ID NO: 3530654 - RNA, 18 nt, Human
cuggacccuuauaaaauc

SEQ ID NO: 3530655 - RNA, 18 nt, Human
cuggaccucugacagcag

SEQ ID NO: 3530656 - RNA, 14 nt, Human
cuggaccucugggu

SEQ ID NO: 3530657 - RNA, 21 nt, Human
cuggaccugccuccugccugc

SEQ ID NO: 3530658 - RNA, 15 nt, Human
cuggaccuguauauu

SEQ ID NO: 3530659 - RNA, 16 nt, Human
cuggaccuugaacugg

SEQ ID NO: 3530660 - RNA, 14 nt, Human
cuggacggaagugg

SEQ ID NO: 3530661 - RNA, 14 nt, Human
cuggacggcaggcu

SEQ ID NO: 3530662 - RNA, 21 nt, Human
cuggacggcaggcucacugcc

SEQ ID NO: 3530663 - RNA, 22 nt, Human
cuggacggcaggcucacugcca

SEQ ID NO: 3530664 - RNA, 18 nt, Human
cuggacggggacugggga

SEQ ID NO: 3530665 - RNA, 23 nt, Human
cuggacggggacuggggaugugg

SEQ ID NO: 3530666 - RNA, 20 nt, Human
cuggacuagagggaccucuc

SEQ ID NO: 3530667 - RNA, 16 nt, Human
cuggacucaccucccc

SEQ ID NO: 3530668 - RNA, 19 nt, Human
cuggacuccagaucugcac

SEQ ID NO: 3530669 - RNA, 14 nt, Human
cuggacuccucugu

SEQ ID NO: 3530670 - RNA, 20 nt, Human
cuggacuccucuguccaggc

SEQ ID NO: 3530671 - RNA, 18 nt, Human
cuggacucucagucucug

SEQ ID NO: 3530672 - RNA, 15 nt, Human
cuggacucugcaucc

SEQ ID NO: 3530673 - RNA, 23 nt, Human
cuggacucugcaucccagcaccu

SEQ ID NO: 3530674 - RNA, 14 nt, Human
cuggacucuggacu

SEQ ID NO: 3530675 - RNA, 23 nt, Human
cuggacucuucaaaaacuguuuu

SEQ ID NO: 3530676 - RNA, 23 nt, Human
cuggacugaagccugcaggaguu

SEQ ID NO: 3530677 - RNA, 13 nt, Human
cuggacugacagc

SEQ ID NO: 3530678 - RNA, 15 nt, Human
cuggacugacagcau

SEQ ID NO: 3530679 - RNA, 18 nt, Human
cuggacugaggccugagc

SEQ ID NO: 3530680 - RNA, 22 nt, Human
cuggacugagggggccuggaug

SEQ ID NO: 3530681 - RNA, 20 nt, Human
cuggacugccuugaauaucc

SEQ ID NO: 3530682 - RNA, 15 nt, Human
cuggacuggcuagag

SEQ ID NO: 3530683 - RNA, 13 nt, Human
cuggacuggcugu

SEQ ID NO: 3530684 - RNA, 17 nt, Human
cuggacugggagguaga

SEQ ID NO: 3530685 - RNA, 20 nt, Human
cuggacugucauagaaauua

SEQ ID NO: 3530686 - RNA, 16 nt, Human
cuggacugugugcuca

SEQ ID NO: 3530687 - RNA, 22 nt, Human
cuggacuuaagcaucuggcucu

SEQ ID NO: 3530688 - RNA, 15 nt, Human
cuggacuucuaccug

SEQ ID NO: 3530689 - RNA, 15 nt, Human
cuggacuugagcuug

SEQ ID NO: 3530690 - RNA, 17 nt, Human
cuggacuuggccccugc

SEQ ID NO: 3530691 - RNA, 14 nt, Human
cuggacuuuccugc

SEQ ID NO: 3530692 - RNA, 15 nt, Human
cuggacuuuccugca

SEQ ID NO: 3530693 - RNA, 18 nt, Human
cuggacuuuccugcaacu

SEQ ID NO: 3530694 - RNA, 14 nt, Human
cuggagaaaaauau

SEQ ID NO: 3530695 - RNA, 19 nt, Human
cuggagaacuagaaccugg

SEQ ID NO: 3530696 - RNA, 22 nt, Human
cuggagaacuagaaccuggagg

SEQ ID NO: 3530697 - RNA, 18 nt, Human
cuggagaagagaggagag

SEQ ID NO: 3530698 - RNA, 19 nt, Human
cuggagaagagaggagagg

SEQ ID NO: 3530699 - RNA, 21 nt, Human
cuggagaagcagugagccgca

SEQ ID NO: 3530700 - RNA, 19 nt, Human
cuggagaagcucacccaau

SEQ ID NO: 3530701 - RNA, 15 nt, Human
cuggagaagcuccca

SEQ ID NO: 3530702 - RNA, 19 nt, Human
cuggagaagcucccaggaa

SEQ ID NO: 3530703 - RNA, 17 nt, Human
cuggagaagcugaugcu

SEQ ID NO: 3530704 - RNA, 20 nt, Human
cuggagacaaugcagaugcc

SEQ ID NO: 3530705 - RNA, 14 nt, Human
cuggagacagcccc

SEQ ID NO: 3530706 - RNA, 15 nt, Human
cuggagaccaccagg

SEQ ID NO: 3530707 - RNA, 17 nt, Human
cuggagacccaccccac

SEQ ID NO: 3530708 - RNA, 19 nt, Human
cuggagacccaccccaccu

SEQ ID NO: 3530709 - RNA, 20 nt, Human
cuggagaccccaccagccuc

SEQ ID NO: 3530710 - RNA, 21 nt, Human
cuggagaccccaccagccuca

SEQ ID NO: 3530711 - RNA, 17 nt, Human
cuggagacuaaccccac

SEQ ID NO: 3530712 - RNA, 16 nt, Human
cuggagagaacagguu

SEQ ID NO: 3530713 - RNA, 12 nt, Human
cuggagagaagu

SEQ ID NO: 3530714 - RNA, 17 nt, Human
cuggagagaaguuucug

SEQ ID NO: 3530715 - RNA, 22 nt, Human
cuggagagccagaaccuggagg

SEQ ID NO: 3530716 - RNA, 23 nt, Human
cuggagagccagaaccuggaggg

SEQ ID NO: 3530717 - RNA, 22 nt, Human
cuggagagcuagaaccuggaga

SEQ ID NO: 3530718 - RNA, 16 nt, Human
cuggagauccuccugc

SEQ ID NO: 3530719 - RNA, 16 nt, Human
cuggagaugaggccag

SEQ ID NO: 3530720 - RNA, 17 nt, Human
cuggagaugaggccaga

SEQ ID NO: 3530721 - RNA, 18 nt, Human
cuggagaugaggccagac

SEQ ID NO: 3530722 - RNA, 18 nt, Human
cuggagauggggagaaac

SEQ ID NO: 3530723 - RNA, 18 nt, Human
cuggagauguuuuagagu

SEQ ID NO: 3530724 - RNA, 16 nt, Human
cuggagcagaagcagc

SEQ ID NO: 3530725 - RNA, 17 nt, Human
cuggagcagaagcagca

SEQ ID NO: 3530726 - RNA, 21 nt, Human
cuggagcaggccuugcgcugu

SEQ ID NO: 3530727 - RNA, 17 nt, Human
cuggagccaacugcugc

SEQ ID NO: 3530728 - RNA, 18 nt, Human
cuggagccaacugcugcu

SEQ ID NO: 3530729 - RNA, 20 nt, Human
cuggagccaacugcugcuuu

SEQ ID NO: 3530730 - RNA, 16 nt, Human
cuggagccaaguccag

SEQ ID NO: 3530731 - RNA, 13 nt, Human
cuggagccaccug

SEQ ID NO: 3530732 - RNA, 18 nt, Human
cuggagccaccuguccca

SEQ ID NO: 3530733 - RNA, 18 nt, Human
cuggagccacuaacuaga

SEQ ID NO: 3530734 - RNA, 16 nt, Human
cuggagccagacucug

SEQ ID NO: 3530735 - RNA, 12 nt, Human
cuggagccagcc

SEQ ID NO: 3530736 - RNA, 15 nt, Human
cuggagcccacugua

SEQ ID NO: 3530737 - RNA, 23 nt, Human
cuggagcccagaggagggcagca

SEQ ID NO: 3530738 - RNA, 15 nt, Human
cuggagcccaggagu

SEQ ID NO: 3530739 - RNA, 13 nt, Human
cuggagccccauc

SEQ ID NO: 3530740 - RNA, 18 nt, Human
cuggagccugagucaggg

SEQ ID NO: 3530741 - RNA, 16 nt, Human
cuggagccuggugccc

SEQ ID NO: 3530742 - RNA, 15 nt, Human
cuggagccuguguaa

SEQ ID NO: 3530743 - RNA, 17 nt, Human
cuggagccuguguaaca

SEQ ID NO: 3530744 - RNA, 18 nt, Human
cuggagccuguguaacag

SEQ ID NO: 3530745 - RNA, 17 nt, Human
cuggagcuagaauuuga

SEQ ID NO: 3530746 - RNA, 20 nt, Human
cuggagcucaucugcaaaag

SEQ ID NO: 3530747 - RNA, 16 nt, Human
cuggagcuccugggaa

SEQ ID NO: 3530748 - RNA, 12 nt, Human
cuggagcucugc

SEQ ID NO: 3530749 - RNA, 11 nt, Human
cuggagcuggc

SEQ ID NO: 3530750 - RNA, 18 nt, Human
cuggaggaacacuugaug

SEQ ID NO: 3530751 - RNA, 14 nt, Human
cuggaggaccugag

SEQ ID NO: 3530752 - RNA, 19 nt, Human
cuggaggaccugagccugc

SEQ ID NO: 3530753 - RNA, 20 nt, Human
cuggaggaccugcccggugg

SEQ ID NO: 3530754 - RNA, 19 nt, Human
cuggaggacuagaaccugg

SEQ ID NO: 3530755 - RNA, 12 nt, Human
cuggaggagccc

SEQ ID NO: 3530756 - RNA, 13 nt, Human
cuggaggagccca

SEQ ID NO: 3530757 - RNA, 18 nt, Human
cuggaggaugugggcagc

SEQ ID NO: 3530758 - RNA, 19 nt, Human
cuggaggaugugggcagcu

SEQ ID NO: 3530759 - RNA, 15 nt, Human
cuggaggcagggaac

SEQ ID NO: 3530760 - RNA, 14 nt, Human
cuggaggcagggcc

SEQ ID NO: 3530761 - RNA, 21 nt, Human
cuggaggcaggggcuuccugg

SEQ ID NO: 3530762 - RNA, 12 nt, Human
cuggaggcccag

SEQ ID NO: 3530763 - RNA, 13 nt, Human
cuggaggcccagg

SEQ ID NO: 3530764 - RNA, 15 nt, Human
cuggaggcccaggcu

SEQ ID NO: 3530765 - RNA, 21 nt, Human
cuggaggcccaguucacccug

SEQ ID NO: 3530766 - RNA, 14 nt, Human
cuggaggccccaac

SEQ ID NO: 3530767 - RNA, 13 nt, Human
cuggaggccccug

SEQ ID NO: 3530768 - RNA, 19 nt, Human
cuggaggccccuggagcca

SEQ ID NO: 3530769 - RNA, 21 nt, Human
cuggaggccgggugcucaggg

SEQ ID NO: 3530770 - RNA, 15 nt, Human
cuggaggccucaggu

SEQ ID NO: 3530771 - RNA, 12 nt, Human
cuggaggccucu

SEQ ID NO: 3530772 - RNA, 14 nt, Human
cuggaggccucugg

SEQ ID NO: 3530773 - RNA, 18 nt, Human
cuggaggccuuccagcug

SEQ ID NO: 3530774 - RNA, 20 nt, Human
cuggaggccuuccagcugcu

SEQ ID NO: 3530775 - RNA, 16 nt, Human
cuggaggcggugcggc

SEQ ID NO: 3530776 - RNA, 17 nt, Human
cuggaggcggugcggca

SEQ ID NO: 3530777 - RNA, 21 nt, Human
cuggaggcugccucccaacag

SEQ ID NO: 3530778 - RNA, 23 nt, Human
cuggagggaaugaaccuggaggg

SEQ ID NO: 3530779 - RNA, 22 nt, Human
cuggcuagaggccagccccacc

SEQ ID NO: 3530780 - RNA, 23 nt, Human
cuggcuagaggccagccccaccc

SEQ ID NO: 3530781 - RNA, 18 nt, Human
cuggcuagaguccucacu

SEQ ID NO: 3530782 - RNA, 22 nt, Human
cuggcuagaguccucacuccca

SEQ ID NO: 3530783 - RNA, 19 nt, Human
cuggcuauagaugucuuuu

SEQ ID NO: 3530784 - RNA, 13 nt, Human
cuggcuaugcauu

SEQ ID NO: 3530785 - RNA, 15 nt, Human
cuggcuaugcauuug

SEQ ID NO: 3530786 - RNA, 18 nt, Human
cuggcucacagacuggag

SEQ ID NO: 3530787 - RNA, 15 nt, Human
cuggcucacaguaca

SEQ ID NO: 3530788 - RNA, 17 nt, Human
cuggcucacaguacagc

SEQ ID NO: 3530789 - RNA, 24 nt, Human
cuggcucacaguacagcaugugcc

SEQ ID NO: 3530790 - RNA, 20 nt, Human
cuggcuccaaacccucgagg

SEQ ID NO: 3530791 - RNA, 14 nt, Human
cuggcuccagaugc

SEQ ID NO: 3530792 - RNA, 20 nt, Human
cuggcuccagaugcagggca

SEQ ID NO: 3530793 - RNA, 14 nt, Human
cuggcuccagccug

SEQ ID NO: 3530794 - RNA, 15 nt, Human
cuggcuccagccugg

SEQ ID NO: 3530795 - RNA, 16 nt, Human
cuggcuccagccugga

SEQ ID NO: 3530796 - RNA, 16 nt, Human
cuggcuccaggccagg

SEQ ID NO: 3530797 - RNA, 17 nt, Human
cuggcucccacaggcag

SEQ ID NO: 3530798 - RNA, 18 nt, Human
cuggcucccacaggcccu

SEQ ID NO: 3530799 - RNA, 15 nt, Human
cuggcuccccaaagg

SEQ ID NO: 3530800 - RNA, 16 nt, Human
cuggcuccccugcagc

SEQ ID NO: 3530801 - RNA, 13 nt, Human
cuggcuccccugg

SEQ ID NO: 3530802 - RNA, 14 nt, Human
cuggcuccccuggg

SEQ ID NO: 3530803 - RNA, 13 nt, Human
cuggcucccucac

SEQ ID NO: 3530804 - RNA, 14 nt, Human
cuggcucccucacu

SEQ ID NO: 3530805 - RNA, 17 nt, Human
cuggcucccuccuccag

SEQ ID NO: 3530806 - RNA, 22 nt, Human
cuggcucccuccuccaggccug

SEQ ID NO: 3530807 - RNA, 20 nt, Human
cuggcuccguccaggagccu

SEQ ID NO: 3530808 - RNA, 18 nt, Human
cuggcuccuugugccaga

SEQ ID NO: 3530809 - RNA, 21 nt, Human
cuggcuccuugugccagagaa

SEQ ID NO: 3530810 - RNA, 15 nt, Human
cuggcuccuuuacaa

SEQ ID NO: 3530811 - RNA, 19 nt, Human
cuggcucuaauucacagug

SEQ ID NO: 3530812 - RNA, 20 nt, Human
cuggcucuaauucacagugc

SEQ ID NO: 3530813 - RNA, 23 nt, Human
cuggcucuaauucacagugcucu

SEQ ID NO: 3530814 - RNA, 13 nt, Human
cuggcucucaccu

SEQ ID NO: 3530815 - RNA, 16 nt, Human
cuggcucucaccucua

SEQ ID NO: 3530816 - RNA, 22 nt, Human
cuggcucucaccucuagguccc

SEQ ID NO: 3530817 - RNA, 19 nt, Human
cuggcucuccaagugccag

SEQ ID NO: 3530818 - RNA, 20 nt, Human
cuggcucucccauuuccuga

SEQ ID NO: 3530819 - RNA, 13 nt, Human
cuggcucucucca

SEQ ID NO: 3530820 - RNA, 14 nt, Human
cuggcucucuccag

SEQ ID NO: 3530821 - RNA, 21 nt, Human
cuggcucugagcgccuccauc

SEQ ID NO: 3530822 - RNA, 14 nt, Human
cuggcucugcuguc

SEQ ID NO: 3530823 - RNA, 15 nt, Human
cuggcucugcugucc

SEQ ID NO: 3530824 - RNA, 12 nt, Human
cuggcucugugg

SEQ ID NO: 3530825 - RNA, 13 nt, Human
cuggcucuuccag

SEQ ID NO: 3530826 - RNA, 15 nt, Human
cuggcucuuccaggc

SEQ ID NO: 3530827 - RNA, 17 nt, Human
cuggcucuuccaggcug

SEQ ID NO: 3530828 - RNA, 18 nt, Human
cuggcucuuccaggcugg

SEQ ID NO: 3530829 - RNA, 19 nt, Human
cuggcucuuccaggcuggg

SEQ ID NO: 3530830 - RNA, 24 nt, Human
cuggcucuuccaggcugggagagc

SEQ ID NO: 3530831 - RNA, 17 nt, Human
cuggcucuugugcugga

SEQ ID NO: 3530832 - RNA, 22 nt, Human
cuggcucuuuggagaucaagga

SEQ ID NO: 3530833 - RNA, 19 nt, Human
cuggcugaacccugugcug

SEQ ID NO: 3530834 - RNA, 23 nt, Human
cuggcugaacccugugcuggugu

SEQ ID NO: 3530835 - RNA, 22 nt, Human
cuggcugaccccaaagagccug

SEQ ID NO: 3530836 - RNA, 22 nt, Human
cuggcugaggauuucaagccug

SEQ ID NO: 3530837 - RNA, 12 nt, Human
cuggcugagggc

SEQ ID NO: 3530838 - RNA, 20 nt, Human
cuggcugagguuccucugcc

SEQ ID NO: 3530839 - RNA, 21 nt, Human
cuggcugagguuccucugccu

SEQ ID NO: 3530840 - RNA, 14 nt, Human
cuggcugcccuggc

SEQ ID NO: 3530841 - RNA, 15 nt, Human
cuggcugcccuggcc

SEQ ID NO: 3530842 - RNA, 16 nt, Human
cuggcugcccuggccc

SEQ ID NO: 3530843 - RNA, 16 nt, Human
cuggcugccuccacuc

SEQ ID NO: 3530844 - RNA, 14 nt, Human
cuggcugccuuaga

SEQ ID NO: 3530845 - RNA, 12 nt, Human
cuggcugcgggg

SEQ ID NO: 3530846 - RNA, 12 nt, Human
cuggcugcugcc

SEQ ID NO: 3530847 - RNA, 13 nt, Human
cuggcugcugccc

SEQ ID NO: 3530848 - RNA, 14 nt, Human
cuggcugcugcccc

SEQ ID NO: 3530849 - RNA, 16 nt, Human
gcccaguccuggccug

SEQ ID NO: 3530850 - RNA, 17 nt, Human
gcccaguccuggccugg

SEQ ID NO: 3530851 - RNA, 21 nt, Human
gcccaguccuggccuggcuuc

SEQ ID NO: 3530852 - RNA, 14 nt, Human
gcccaguccuucca

SEQ ID NO: 3530853 - RNA, 15 nt, Human
gcccaguccuuccac

SEQ ID NO: 3530854 - RNA, 19 nt, Human
gcccaguccuuccaccucg

SEQ ID NO: 3530855 - RNA, 14 nt, Human
gcccagucuguuga

SEQ ID NO: 3530856 - RNA, 15 nt, Human
gcccagucuguugag

SEQ ID NO: 3530857 - RNA, 19 nt, Human
gcccagugcacuugcugga

SEQ ID NO: 3530858 - RNA, 21 nt, Human
gcccagugcaugguggccaga

SEQ ID NO: 3530859 - RNA, 17 nt, Human
gcccaguguuguuugua

SEQ ID NO: 3530860 - RNA, 23 nt, Human
gcccaguguuguuuguaaauaag

SEQ ID NO: 3530861 - RNA, 21 nt, Human
gcccaguuggagacugucugg

SEQ ID NO: 3530862 - RNA, 17 nt, Human
gcccaguuucugccucu

SEQ ID NO: 3530863 - RNA, 20 nt, Human
gcccauacucagccugcugc

SEQ ID NO: 3530864 - RNA, 16 nt, Human
gcccauacugguuggc

SEQ ID NO: 3530865 - RNA, 21 nt, Human
gcccauagaaacaugacacug

SEQ ID NO: 3530866 - RNA, 20 nt, Human
gcccauauuuuacuuggaaa

SEQ ID NO: 3530867 - RNA, 13 nt, Human
gcccaucacaggg

SEQ ID NO: 3530868 - RNA, 21 nt, Human
gcccaucacaggguugggccc

SEQ ID NO: 3530869 - RNA, 12 nt, Human
gcccaucagggu

SEQ ID NO: 3530870 - RNA, 20 nt, Human
gcccaucaguguacccccgc

SEQ ID NO: 3530871 - RNA, 20 nt, Human
gcccauccauaguaacugac

SEQ ID NO: 3530872 - RNA, 18 nt, Human
gcccauccccaggcaccu

SEQ ID NO: 3530873 - RNA, 19 nt, Human
gcccaucccugccugguca

SEQ ID NO: 3530874 - RNA, 18 nt, Human
gcccauccugaccagcug

SEQ ID NO: 3530875 - RNA, 20 nt, Human
gcccaucgugaagaagccug

SEQ ID NO: 3530876 - RNA, 14 nt, Human
gcccaucucaggac

SEQ ID NO: 3530877 - RNA, 13 nt, Human
gcccaucucggag

SEQ ID NO: 3530878 - RNA, 18 nt, Human
gcccaucucggagcaucc

SEQ ID NO: 3530879 - RNA, 18 nt, Human
gcccaucugggaaaauac

SEQ ID NO: 3530880 - RNA, 20 nt, Human
gcccaucuugccuccauggu

SEQ ID NO: 3530881 - RNA, 17 nt, Human
gcccaugagagcgcagc

SEQ ID NO: 3530882 - RNA, 15 nt, Human
gcccaugcccaccug

SEQ ID NO: 3530883 - RNA, 21 nt, Human
gcccauggacaggcuggcucc

SEQ ID NO: 3530884 - RNA, 14 nt, Human
gcccauggcccugu

SEQ ID NO: 3530885 - RNA, 16 nt, Human
gcccaugggagggagc

SEQ ID NO: 3530886 - RNA, 15 nt, Human
gcccaugggcacugc

SEQ ID NO: 3530887 - RNA, 18 nt, Human
gcccaugggcacugcugg

SEQ ID NO: 3530888 - RNA, 23 nt, Human
gcccaugggcacugcuggguggc

SEQ ID NO: 3530889 - RNA, 16 nt, Human
gcccauguauggccag

SEQ ID NO: 3530890 - RNA, 18 nt, Human
gcccauguauggccagga

SEQ ID NO: 3530891 - RNA, 13 nt, Human
gcccaugugugag

SEQ ID NO: 3530892 - RNA, 14 nt, Human
gcccaugugugagu

SEQ ID NO: 3530893 - RNA, 20 nt, Human
gcccaugugugagugugugc

SEQ ID NO: 3530894 - RNA, 20 nt, Human
gcccauguucugcccccagc

SEQ ID NO: 3530895 - RNA, 22 nt, Human
gcccauguucugcccccagccc

SEQ ID NO: 3530896 - RNA, 16 nt, Human
gcccauucauuccauu

SEQ ID NO: 3530897 - RNA, 13 nt, Human
gcccauucuacuu

SEQ ID NO: 3530898 - RNA, 14 nt, Human
gcccauucucucuc

SEQ ID NO: 3530899 - RNA, 19 nt, Human
gcccauuucaauucucaaa

SEQ ID NO: 3530900 - RNA, 22 nt, Human
gcccauuucacaccugaaaaug

SEQ ID NO: 3530901 - RNA, 18 nt, Human
gcccauuucauauucuuu

SEQ ID NO: 3530902 - RNA, 14 nt, Human
gcccauuucuccag

SEQ ID NO: 3530903 - RNA, 16 nt, Human
gcccauuucuccagaa

SEQ ID NO: 3530904 - RNA, 16 nt, Human
gcccauuuggagggcc

SEQ ID NO: 3530905 - RNA, 18 nt, Human
gcccauuugggcagagag

SEQ ID NO: 3530906 - RNA, 20 nt, Human
gcccauuugggcagagaggc

SEQ ID NO: 3530907 - RNA, 16 nt, Human
gccccaaaaccacagc

SEQ ID NO: 3530908 - RNA, 20 nt, Human
gccccaaaaccacagcccug

SEQ ID NO: 3530909 - RNA, 20 nt, Human
gccccaaaacucuccucugc

SEQ ID NO: 3530910 - RNA, 19 nt, Human
gccccaaacaaauaugcaa

SEQ ID NO: 3530911 - RNA, 20 nt, Human
gccccaaacgggcugcccug

SEQ ID NO: 3530912 - RNA, 22 nt, Human
gccccaaauaacuucaguccug

SEQ ID NO: 3530913 - RNA, 22 nt, Human
gccccaaauugucaccugcuuc

SEQ ID NO: 3530914 - RNA, 19 nt, Human
gccccaacccaaaccugga

SEQ ID NO: 3530915 - RNA, 20 nt, Human
gccccaacccaaaccuggag

SEQ ID NO: 3530916 - RNA, 15 nt, Human
gccccaacccgugga

SEQ ID NO: 3530917 - RNA, 19 nt, Human
gccccaacccguggaggcu

SEQ ID NO: 3530918 - RNA, 23 nt, Human
gccccaacccguggaggcugcuc

SEQ ID NO: 3530919 - RNA, 17 nt, Human
gccccaacuccuuccag

SEQ ID NO: 3530920 - RNA, 18 nt, Human
gccccaacuccuuccagc

SEQ ID NO: 3530921 - RNA, 20 nt, Human
gccccaacucgggcucccgg

SEQ ID NO: 3530922 - RNA, 21 nt, Human
gccccaaguccugaagaggcg

SEQ ID NO: 3530923 - RNA, 17 nt, Human
cugggaacucaucuggu

SEQ ID NO: 3530924 - RNA, 20 nt, Human
cugggaagauaggcucugca

SEQ ID NO: 3530925 - RNA, 20 nt, Human
cugggaagcugagggcaaau

SEQ ID NO: 3530926 - RNA, 22 nt, Human
cugggaaggcuacucaccuuga

SEQ ID NO: 3530927 - RNA, 23 nt, Human
cugggaaggcuacuucggggcug

SEQ ID NO: 3530928 - RNA, 18 nt, Human
cugggaauaagugccagg

SEQ ID NO: 3530929 - RNA, 13 nt, Human
cugggaauggagg

SEQ ID NO: 3530930 - RNA, 14 nt, Human
cugggaauguauag

SEQ ID NO: 3530931 - RNA, 20 nt, Human
cugggaauguauaguauuug

SEQ ID NO: 3530932 - RNA, 18 nt, Human
cugggaauguauuauucu

SEQ ID NO: 3530933 - RNA, 23 nt, Human
cugggaauguauuauucugcagc

SEQ ID NO: 3530934 - RNA, 11 nt, Human
cugggacacag

SEQ ID NO: 3530935 - RNA, 13 nt, Human
cugggacacaguu

SEQ ID NO: 3530936 - RNA, 22 nt, Human
cugggacaccauuaccaaaaua

SEQ ID NO: 3530937 - RNA, 19 nt, Human
cugggacacuuaacagaug

SEQ ID NO: 3530938 - RNA, 19 nt, Human
cugggacccuuuccuuccu

SEQ ID NO: 3530939 - RNA, 20 nt, Human
cugggaccgcuacaccacuc

SEQ ID NO: 3530940 - RNA, 15 nt, Human
cugggaccuccccug

SEQ ID NO: 3530941 - RNA, 16 nt, Human
cugggacgcucugcug

SEQ ID NO: 3530942 - RNA, 15 nt, Human
cugggacguggcuca

SEQ ID NO: 3530943 - RNA, 16 nt, Human
cugggacguggcucag

SEQ ID NO: 3530944 - RNA, 20 nt, Human
cugggacguggcucagccag

SEQ ID NO: 3530945 - RNA, 16 nt, Human
cugggacuacaggcac

SEQ ID NO: 3530946 - RNA, 23 nt, Human
cugggacuauaggcaugcgccac

SEQ ID NO: 3530947 - RNA, 13 nt, Human
cugggacucagcc

SEQ ID NO: 3530948 - RNA, 21 nt, Human
cugggacucagccuucagaca

SEQ ID NO: 3530949 - RNA, 13 nt, Human
cugggacugggaa

SEQ ID NO: 3530950 - RNA, 17 nt, Human
cugggacuuccaugccu

SEQ ID NO: 3530951 - RNA, 17 nt, Human
cugggacuuccuugcuc

SEQ ID NO: 3530952 - RNA, 17 nt, Human
cugggagaaaaucauca

SEQ ID NO: 3530953 - RNA, 21 nt, Human
cugggagaaaaucaucaagaa

SEQ ID NO: 3530954 - RNA, 21 nt, Human
cugggagaaaucuggcuucug

SEQ ID NO: 3530955 - RNA, 22 nt, Human
cugggagaaccaaaaagaggcu

SEQ ID NO: 3530956 - RNA, 17 nt, Human
cugggagaaccucaggc

SEQ ID NO: 3530957 - RNA, 12 nt, Human
cugggagacaga

SEQ ID NO: 3530958 - RNA, 19 nt, Human
cugggagagccuuccaggg

SEQ ID NO: 3530959 - RNA, 14 nt, Human
cugggagaggcagc

SEQ ID NO: 3530960 - RNA, 15 nt, Human
cugggagaggcagcc

SEQ ID NO: 3530961 - RNA, 19 nt, Human
cugggagaggcagcccagg

SEQ ID NO: 3530962 - RNA, 18 nt, Human
cugggagaggugccagca

SEQ ID NO: 3530963 - RNA, 20 nt, Human
cugggagaggugccagcaac

SEQ ID NO: 3530964 - RNA, 23 nt, Human
cugggagcuccacucugcuucuc

SEQ ID NO: 3530965 - RNA, 13 nt, Human
cugggaggaagca

SEQ ID NO: 3530966 - RNA, 15 nt, Human
cugggaggaagcagg

SEQ ID NO: 3530967 - RNA, 21 nt, Human
cugggaggaagcagguugagg

SEQ ID NO: 3530968 - RNA, 22 nt, Human
cugggaggaaggacuucccugu

SEQ ID NO: 3530969 - RNA, 19 nt, Human
cugggaggaauggacagac

SEQ ID NO: 3530970 - RNA, 19 nt, Human
cugggaggagggagaggga

SEQ ID NO: 3530971 - RNA, 15 nt, Human
cugggaggcagaggu

SEQ ID NO: 3530972 - RNA, 14 nt, Human
cugggaggcaguga

SEQ ID NO: 3530973 - RNA, 19 nt, Human
cugggaggcauggcccugg

SEQ ID NO: 3530974 - RNA, 16 nt, Human
cugggaggcuccccuu

SEQ ID NO: 3530975 - RNA, 17 nt, Human
cugggaggcuccccuuc

SEQ ID NO: 3530976 - RNA, 17 nt, Human
cugggaggcucuggagc

SEQ ID NO: 3530977 - RNA, 21 nt, Human
cugggaggcucuggagcccac

SEQ ID NO: 3530978 - RNA, 22 nt, Human
cugggaggcucuggagcccacu

SEQ ID NO: 3530979 - RNA, 22 nt, Human
cugggagggacaugcuuagcag

SEQ ID NO: 3530980 - RNA, 23 nt, Human
cugggagggauagaggggggcug

SEQ ID NO: 3530981 - RNA, 11 nt, Human
cugggagggca

SEQ ID NO: 3530982 - RNA, 17 nt, Human
cugggagggcagcaggg

SEQ ID NO: 3530983 - RNA, 23 nt, Human
cugggaguaguugucuuuccugg

SEQ ID NO: 3530984 - RNA, 14 nt, Human
cugggagucacaca

SEQ ID NO: 3530985 - RNA, 17 nt, Human
cugggagucacacagug

SEQ ID NO: 3530986 - RNA, 14 nt, Human
cugggaguccccuu

SEQ ID NO: 3530987 - RNA, 16 nt, Human
cugggagugagcuggu

SEQ ID NO: 3530988 - RNA, 19 nt, Human
cugggaguggguggaggca

SEQ ID NO: 3530989 - RNA, 15 nt, Human
cugggaucacaggug

SEQ ID NO: 3530990 - RNA, 22 nt, Human
cugggaucacaggugucagcca

SEQ ID NO: 3530991 - RNA, 20 nt, Human
cugggaucacauguggacuu

SEQ ID NO: 3530992 - RNA, 13 nt, Human
cugggauccuaag

SEQ ID NO: 3530993 - RNA, 16 nt, Human
cugggaucuggugguc

SEQ ID NO: 3530994 - RNA, 21 nt, Human
cugggaugagccgcugugagc

SEQ ID NO: 3530995 - RNA, 18 nt, Human
cugggaugauuggagggg

SEQ ID NO: 3530996 - RNA, 20 nt, Human
cugggaugggaggagaggac

SEQ ID NO: 3530997 - RNA, 15 nt, Human
cugggaugggccugc

SEQ ID NO: 3530998 - RNA, 17 nt, Human
cugggauggugggcuuc

SEQ ID NO: 3530999 - RNA, 19 nt, Human
cugggauggugggcuucag

SEQ ID NO: 3531000 - RNA, 22 nt, Human
cugggauggugggcuucagggc

SEQ ID NO: 3531001 - RNA, 22 nt, Human
cugggauuacaggcaugugcca

SEQ ID NO: 3531002 - RNA, 21 nt, Human
cugggauuacaggcuccugcc

SEQ ID NO: 3531003 - RNA, 20 nt, Human
cugggauuacaggugugaac

SEQ ID NO: 3531004 - RNA, 23 nt, Human
cugggauuacaggugugagccac

SEQ ID NO: 3531005 - RNA, 23 nt, Human
cugggauucaggaaaaggccugg

SEQ ID NO: 3531006 - RNA, 20 nt, Human
cugggauucccaccaagguc

SEQ ID NO: 3531007 - RNA, 14 nt, Human
cugggauuggcugu

SEQ ID NO: 3531008 - RNA, 17 nt, Human
cugggauuuacacuuga

SEQ ID NO: 3531009 - RNA, 15 nt, Human
cugggcaaagccuag

SEQ ID NO: 3531010 - RNA, 19 nt, Human
cugggcaacagagcaagac

SEQ ID NO: 3531011 - RNA, 19 nt, Human
cugggcaaggaaaaagaaa

SEQ ID NO: 3531012 - RNA, 15 nt, Human
gccauuugcuuuuuc

SEQ ID NO: 3531013 - RNA, 13 nt, Human
gccauuuguccca

SEQ ID NO: 3531014 - RNA, 18 nt, Human
gccauuugucccaagugc

SEQ ID NO: 3531015 - RNA, 16 nt, Human
gccauuuguguuuaua

SEQ ID NO: 3531016 - RNA, 19 nt, Human
gccauuuugugaauggauu

SEQ ID NO: 3531017 - RNA, 13 nt, Human
gcccaaaauuuau

SEQ ID NO: 3531018 - RNA, 23 nt, Human
gcccaaaauuuauuuuauaagaa

SEQ ID NO: 3531019 - RNA, 16 nt, Human
gcccaaaccuuucccc

SEQ ID NO: 3531020 - RNA, 19 nt, Human
gcccaaaccuuucccccau

SEQ ID NO: 3531021 - RNA, 21 nt, Human
gcccaaagagcacaaacauuu

SEQ ID NO: 3531022 - RNA, 16 nt, Human
gcccaaagaugcagcc

SEQ ID NO: 3531023 - RNA, 21 nt, Human
gcccaaaggacgcacugagca

SEQ ID NO: 3531024 - RNA, 19 nt, Human
gcccaaaggggacaggccu

SEQ ID NO: 3531025 - RNA, 14 nt, Human
gcccaaaucugccu

SEQ ID NO: 3531026 - RNA, 17 nt, Human
gcccaaauuaucaagcu

SEQ ID NO: 3531027 - RNA, 21 nt, Human
gcccaaauuaucaagcuaaua

SEQ ID NO: 3531028 - RNA, 10 nt, Human
gcccaaccuc

SEQ ID NO: 3531029 - RNA, 14 nt, Human
gcccaaccuccuga

SEQ ID NO: 3531030 - RNA, 19 nt, Human
gcccaagacagaugcccca

SEQ ID NO: 3531031 - RNA, 15 nt, Human
gcccaagccagaggc

SEQ ID NO: 3531032 - RNA, 18 nt, Human
gcccaagccagaggcugg

SEQ ID NO: 3531033 - RNA, 21 nt, Human
gcccaagccagaggcuggguu

SEQ ID NO: 3531034 - RNA, 23 nt, Human
gcccaagccagaggcuggguuca

SEQ ID NO: 3531035 - RNA, 14 nt, Human
gcccaagcccaggc

SEQ ID NO: 3531036 - RNA, 12 nt, Human
gcccaagcucuu

SEQ ID NO: 3531037 - RNA, 15 nt, Human
gcccaagcuucccuc

SEQ ID NO: 3531038 - RNA, 16 nt, Human
gcccaaggccuucccc

SEQ ID NO: 3531039 - RNA, 15 nt, Human
gcccaaggcggcccc

SEQ ID NO: 3531040 - RNA, 23 nt, Human
gcccaagggaaagaaaaggaagg

SEQ ID NO: 3531041 - RNA, 19 nt, Human
gcccaagggaucugguccu

SEQ ID NO: 3531042 - RNA, 20 nt, Human
gcccaagguuaaaaaguuca

SEQ ID NO: 3531043 - RNA, 15 nt, Human
gcccaaguccaaaug

SEQ ID NO: 3531044 - RNA, 19 nt, Human
gcccaaguucaugcagcug

SEQ ID NO: 3531045 - RNA, 18 nt, Human
gcccaaguuguggugcug

SEQ ID NO: 3531046 - RNA, 21 nt, Human
gcccaaguuguggugcugaca

SEQ ID NO: 3531047 - RNA, 19 nt, Human
gcccaauaugcaguucugc

SEQ ID NO: 3531048 - RNA, 22 nt, Human
gcccaauccagguacgcacaga

SEQ ID NO: 3531049 - RNA, 14 nt, Human
gcccaaugaauaau

SEQ ID NO: 3531050 - RNA, 14 nt, Human
gcccaaugaauuau

SEQ ID NO: 3531051 - RNA, 22 nt, Human
gcccaauucuuacaaacaugug

SEQ ID NO: 3531052 - RNA, 14 nt, Human
gcccaauuggagga

SEQ ID NO: 3531053 - RNA, 15 nt, Human
gcccaauuggaggaa

SEQ ID NO: 3531054 - RNA, 12 nt, Human
gcccacacacag

SEQ ID NO: 3531055 - RNA, 15 nt, Human
gcccacaccuccugg

SEQ ID NO: 3531056 - RNA, 22 nt, Human
gcccacagcacagcucccugcc

SEQ ID NO: 3531057 - RNA, 16 nt, Human
gcccacagcaggugcu

SEQ ID NO: 3531058 - RNA, 22 nt, Human
gcccacagcccgcaugcagcag

SEQ ID NO: 3531059 - RNA, 13 nt, Human
gcccacagcuccc

SEQ ID NO: 3531060 - RNA, 17 nt, Human
gcccacagcucccaccc

SEQ ID NO: 3531061 - RNA, 22 nt, Human
gcccacaggaggcaagcaagcu

SEQ ID NO: 3531062 - RNA, 19 nt, Human
gcccacagggaacccugcu

SEQ ID NO: 3531063 - RNA, 16 nt, Human
gcccacagugucaggc

SEQ ID NO: 3531064 - RNA, 15 nt, Human
gcccacaucccaggc

SEQ ID NO: 3531065 - RNA, 21 nt, Human
gcccacauccggggccagcuc

SEQ ID NO: 3531066 - RNA, 14 nt, Human
gcccccagcuggcc

SEQ ID NO: 3531067 - RNA, 12 nt, Human
gcccccaggacu

SEQ ID NO: 3531068 - RNA, 15 nt, Human
gcccccaggacuggg

SEQ ID NO: 3531069 - RNA, 17 nt, Human
gcccccaggacugggcc

SEQ ID NO: 3531070 - RNA, 18 nt, Human
gcccccaggacugggcca

SEQ ID NO: 3531071 - RNA, 17 nt, Human
gcccccaggcugcugga

SEQ ID NO: 3531072 - RNA, 22 nt, Human
gcccccagggcacuucacagag

SEQ ID NO: 3531073 - RNA, 19 nt, Human
gcccccaggguccugggag

SEQ ID NO: 3531074 - RNA, 15 nt, Human
gcccccaguccccac

SEQ ID NO: 3531075 - RNA, 17 nt, Human
gcccccaguccccaccc

SEQ ID NO: 3531076 - RNA, 17 nt, Human
gcccccaucauccucug

SEQ ID NO: 3531077 - RNA, 18 nt, Human
gcccccaucauccucugg

SEQ ID NO: 3531078 - RNA, 13 nt, Human
gcccccaucucau

SEQ ID NO: 3531079 - RNA, 18 nt, Human
gccccccacacuucccug

SEQ ID NO: 3531080 - RNA, 19 nt, Human
gccccccagccccgguggc

SEQ ID NO: 3531081 - RNA, 16 nt, Human
gccccccagccucugg

SEQ ID NO: 3531082 - RNA, 13 nt, Human
gccccccagcuca

SEQ ID NO: 3531083 - RNA, 18 nt, Human
gccccccauccuggccca

SEQ ID NO: 3531084 - RNA, 20 nt, Human
gccccccauccuggcccauc

SEQ ID NO: 3531085 - RNA, 19 nt, Human
gcccccccaacacugugcc

SEQ ID NO: 3531086 - RNA, 16 nt, Human
gcccccccccaccccu

SEQ ID NO: 3531087 - RNA, 17 nt, Human
gcccccccccaccccug

SEQ ID NO: 3531088 - RNA, 17 nt, Human
gccccccccuccccaug

SEQ ID NO: 3531089 - RNA, 11 nt, Human
gccccccucaa

SEQ ID NO: 3531090 - RNA, 16 nt, Human
gccccccucaaaccuc

SEQ ID NO: 3531091 - RNA, 13 nt, Human
gccccccucccag

SEQ ID NO: 3531092 - RNA, 20 nt, Human
gccccccuccuugcucugca

SEQ ID NO: 3531093 - RNA, 15 nt, Human
gccccccugcccugu

SEQ ID NO: 3531094 - RNA, 12 nt, Human
gccccccuggcc

SEQ ID NO: 3531095 - RNA, 18 nt, Human
gccccccugguccccucc

SEQ ID NO: 3531096 - RNA, 13 nt, Human
gcccccgagcugg

SEQ ID NO: 3531097 - RNA, 22 nt, Human
gcccccgagcugggggccauga

SEQ ID NO: 3531098 - RNA, 11 nt, Human
gcccccgcccc

SEQ ID NO: 3531099 - RNA, 17 nt, Human
gcccccgccuuggccug

SEQ ID NO: 3531100 - RNA, 13 nt, Human
gcccccggcggcg

SEQ ID NO: 3531101 - RNA, 15 nt, Human
gcccccggcggcgcc

SEQ ID NO: 3531102 - RNA, 18 nt, Human
gcccccgggccgacggag

SEQ ID NO: 3531103 - RNA, 19 nt, Human
gcccccgucacgugcgcug

SEQ ID NO: 3531104 - RNA, 23 nt, Human
gcccccucacaguauugcucacc

SEQ ID NO: 3531105 - RNA, 14 nt, Human
gcccccucccugga

SEQ ID NO: 3531106 - RNA, 15 nt, Human
gcccccucccuggau

SEQ ID NO: 3531107 - RNA, 16 nt, Human
gcccccuccucuagcu

SEQ ID NO: 3531108 - RNA, 15 nt, Human
gcccccuccucuccc

SEQ ID NO: 3531109 - RNA, 19 nt, Human
gcccccuccucucccaucc

SEQ ID NO: 3531110 - RNA, 15 nt, Human
gcccccuccugaacc

SEQ ID NO: 3531111 - RNA, 17 nt, Human
gcccccucgugccaguc

SEQ ID NO: 3531112 - RNA, 16 nt, Human
gcccccucugcccugc

SEQ ID NO: 3531113 - RNA, 17 nt, Human
gcccccugaccacucag

SEQ ID NO: 3531114 - RNA, 19 nt, Human
gcccccugaccacucagag

SEQ ID NO: 3531115 - RNA, 11 nt, Human
gcccccugcag

SEQ ID NO: 3531116 - RNA, 15 nt, Human
gcccccugcaggaag

SEQ ID NO: 3531117 - RNA, 18 nt, Human
gcccccugccccccagcc

SEQ ID NO: 3531118 - RNA, 12 nt, Human
gcccccugcccu

SEQ ID NO: 3531119 - RNA, 19 nt, Human
gcccccugcccuccccucu

SEQ ID NO: 3531120 - RNA, 16 nt, Human
gcccccugccugcccu

SEQ ID NO: 3531121 - RNA, 15 nt, Human
gcccccugcugccau

SEQ ID NO: 3531122 - RNA, 15 nt, Human
gcccccuggccucug

SEQ ID NO: 3531123 - RNA, 16 nt, Human
gcccccuggccucugu

SEQ ID NO: 3531124 - RNA, 17 nt, Human
gcccccuggucucuggu

SEQ ID NO: 3531125 - RNA, 23 nt, Human
gcccccugguggacaguccuggg

SEQ ID NO: 3531126 - RNA, 17 nt, Human
gcccccugucucucagg

SEQ ID NO: 3531127 - RNA, 13 nt, Human
gcccccuguggau

SEQ ID NO: 3531128 - RNA, 15 nt, Human
gcccccuucucccac

SEQ ID NO: 3531129 - RNA, 18 nt, Human
gcccccuuucagaugucu

SEQ ID NO: 3531130 - RNA, 23 nt, Human
gcccccuuucagaugucuucugc

SEQ ID NO: 3531131 - RNA, 16 nt, Human
gcccccuuucccgggc

SEQ ID NO: 3531132 - RNA, 20 nt, Human
gcccccuuucccgggcuguc

SEQ ID NO: 3531133 - RNA, 22 nt, Human
gccccgaaaggucaccucacuc

SEQ ID NO: 3531134 - RNA, 17 nt, Human
gccccgacuccagccag

SEQ ID NO: 3531135 - RNA, 20 nt, Human
gccccgacuccagccagcgc

SEQ ID NO: 3531136 - RNA, 22 nt, Human
gccccgaggacccagacccagu

SEQ ID NO: 3531137 - RNA, 20 nt, Human
gccccgcaaaacccacugac

SEQ ID NO: 3531138 - RNA, 15 nt, Human
gccccgcaccuguac

SEQ ID NO: 3531139 - RNA, 22 nt, Human
gccccgcccucuuccugacgaa

SEQ ID NO: 3531140 - RNA, 13 nt, Human
gccccgccgccug

SEQ ID NO: 3531141 - RNA, 18 nt, Human
gccccgcuuggcuucuuc

SEQ ID NO: 3531142 - RNA, 18 nt, Human
gccccggaucagagcagg

SEQ ID NO: 3531143 - RNA, 13 nt, Human
gccccggccaccu

SEQ ID NO: 3531144 - RNA, 15 nt, Human
gccccggccaccucu

SEQ ID NO: 3531145 - RNA, 16 nt, Human
gccccggccaccucug

SEQ ID NO: 3531146 - RNA, 15 nt, Human
gccccggcccugggc

SEQ ID NO: 3531147 - RNA, 17 nt, Human
gccccgggacuuggagg

SEQ ID NO: 3531148 - RNA, 17 nt, Human
gccccgguggcugggca

SEQ ID NO: 3531149 - RNA, 19 nt, Human
gccccgguggcugggcaga

SEQ ID NO: 3531150 - RNA, 17 nt, Human
gccccgucaccaucuca

SEQ ID NO: 3531151 - RNA, 21 nt, Human
gccccgucaccaucucaggcc

SEQ ID NO: 3531152 - RNA, 21 nt, Human
gccccgucccccucuggcucc

SEQ ID NO: 3531153 - RNA, 18 nt, Human
gccccgucuacagcuccc

SEQ ID NO: 3531154 - RNA, 17 nt, Human
gccccgugggguuccuc

SEQ ID NO: 3531155 - RNA, 17 nt, Human
gccccuaaucucuguag

SEQ ID NO: 3531156 - RNA, 15 nt, Human
gccccuacugcugug

SEQ ID NO: 3531157 - RNA, 21 nt, Human
gccccuagaaacccaagcucc

SEQ ID NO: 3531158 - RNA, 17 nt, Human
gccccuagaagggaagg

SEQ ID NO: 3531159 - RNA, 17 nt, Human
gccccuagaaucagccu

SEQ ID NO: 3531160 - RNA, 20 nt, Human
gccccuagaaucagccuagg

SEQ ID NO: 3531161 - RNA, 14 nt, Human
gccccuagcccagg

SEQ ID NO: 3531162 - RNA, 18 nt, Human
gccccuagccgguuccug

SEQ ID NO: 3531163 - RNA, 15 nt, Human
gccccucagagacug

SEQ ID NO: 3531164 - RNA, 16 nt, Human
gccccucagggucccu

SEQ ID NO: 3531165 - RNA, 21 nt, Human
gccccucaucugcucagcagc

SEQ ID NO: 3531166 - RNA, 18 nt, Human
gccccuccagcuugugga

SEQ ID NO: 3531167 - RNA, 18 nt, Human
gccccucccaagcuggcu

SEQ ID NO: 3531168 - RNA, 19 nt, Human
gccccucccaagcuggcug

SEQ ID NO: 3531169 - RNA, 15 nt, Human
gccccucccaccaca

SEQ ID NO: 3531170 - RNA, 21 nt, Human
gccccucccccaacccccacc

SEQ ID NO: 3531171 - RNA, 13 nt, Human
gccccucccccag

SEQ ID NO: 3531172 - RNA, 14 nt, Human
gccccucccccauc

SEQ ID NO: 3531173 - RNA, 16 nt, Human
gccccucccccaucuc

SEQ ID NO: 3531174 - RNA, 13 nt, Human
gccccucccgccc

SEQ ID NO: 3531175 - RNA, 18 nt, Human
gccccucccucccagagc

SEQ ID NO: 3531176 - RNA, 15 nt, Human
gccccucccucucca

SEQ ID NO: 3531177 - RNA, 14 nt, Human
gccccucccuucaa

SEQ ID NO: 3531178 - RNA, 15 nt, Human
gccccuccuccagcc

SEQ ID NO: 3531179 - RNA, 21 nt, Human
gccccuccuccagccccuguc

SEQ ID NO: 3531180 - RNA, 19 nt, Human
gccccuccucucugcccua

SEQ ID NO: 3531181 - RNA, 18 nt, Human
gccccuccucugccaccu

SEQ ID NO: 3531182 - RNA, 13 nt, Human
gccccucucagcc

SEQ ID NO: 3531183 - RNA, 14 nt, Human
gccccucucagccc

SEQ ID NO: 3531184 - RNA, 20 nt, Human
gccccucucagcccucacac

SEQ ID NO: 3531185 - RNA, 21 nt, Human
gccccucucccgccagacugu

SEQ ID NO: 3531186 - RNA, 14 nt, Human
gccccucucuccau

SEQ ID NO: 3531187 - RNA, 12 nt, Human
gccccucucugg

SEQ ID NO: 3531188 - RNA, 15 nt, Human
gccccucugcccagc

SEQ ID NO: 3531189 - RNA, 18 nt, Human
gccccucugcccagcuug

SEQ ID NO: 3531190 - RNA, 21 nt, Human
gccccucugcccagcuugggc

SEQ ID NO: 3531191 - RNA, 14 nt, Human
gccccucuggucgc

SEQ ID NO: 3531192 - RNA, 13 nt, Human
gccccucuugccc

SEQ ID NO: 3531193 - RNA, 16 nt, Human
gccccucuugcccccc

SEQ ID NO: 3531194 - RNA, 15 nt, Human
gccccucuuucucuu

SEQ ID NO: 3531195 - RNA, 17 nt, Human
gccccucuuucucuuuc

SEQ ID NO: 3531196 - RNA, 22 nt, Human
gccccugagcaaugucugugcu

SEQ ID NO: 3531197 - RNA, 23 nt, Human
gccccugagcaaugucugugcua

SEQ ID NO: 3531198 - RNA, 11 nt, Human
gccccugagcc

SEQ ID NO: 3531199 - RNA, 14 nt, Human
gccccugagcccac

SEQ ID NO: 3531200 - RNA, 14 nt, Human
gccccugcacagca

SEQ ID NO: 3531201 - RNA, 17 nt, Human
gccccugcacagcaggc

SEQ ID NO: 3531202 - RNA, 23 nt, Human
gccccugcacagcaggcugccag

SEQ ID NO: 3531203 - RNA, 15 nt, Human
gccccugcacuccag

SEQ ID NO: 3531204 - RNA, 19 nt, Human
gccccugcacuccagccug

SEQ ID NO: 3531205 - RNA, 16 nt, Human
gccccugccacccugg

SEQ ID NO: 3531206 - RNA, 18 nt, Human
gccccugccaccucccug

SEQ ID NO: 3531207 - RNA, 16 nt, Human
gccccugccagacccc

SEQ ID NO: 3531208 - RNA, 14 nt, Human
gccccugccccguc

SEQ ID NO: 3531209 - RNA, 15 nt, Human
gccccugccccguca

SEQ ID NO: 3531210 - RNA, 23 nt, Human
cugguaggaauagcaugucacua

SEQ ID NO: 3531211 - RNA, 15 nt, Human
cugguaggaccaagc

SEQ ID NO: 3531212 - RNA, 17 nt, Human
gcccuacucccugcaga

SEQ ID NO: 3531213 - RNA, 20 nt, Human
gcccuacucccugcagaugc

SEQ ID NO: 3531214 - RNA, 21 nt, Human
gcccuacuucuuugcuuugcc

SEQ ID NO: 3531215 - RNA, 13 nt, Human
gcccuagagccug

SEQ ID NO: 3531216 - RNA, 17 nt, Human
gcccuagagccugccug

SEQ ID NO: 3531217 - RNA, 21 nt, Human
gcccuagcccagcgcucugcc

SEQ ID NO: 3531218 - RNA, 13 nt, Human
gcccuagcuccac

SEQ ID NO: 3531219 - RNA, 11 nt, Human
gcccuaucugu

SEQ ID NO: 3531220 - RNA, 13 nt, Human
gcccuauggaugu

SEQ ID NO: 3531221 - RNA, 15 nt, Human
gcccuaugggccugc

SEQ ID NO: 3531222 - RNA, 16 nt, Human
gcccuaugggccugcc

SEQ ID NO: 3531223 - RNA, 19 nt, Human
gcccuaugggccugccggg

SEQ ID NO: 3531224 - RNA, 21 nt, Human
gcccuauuuagaugauaaaga

SEQ ID NO: 3531225 - RNA, 20 nt, Human
cugguucaggguuggccccu

SEQ ID NO: 3531226 - RNA, 16 nt, Human
cugguuccaggguccc

SEQ ID NO: 3531227 - RNA, 16 nt, Human
cugguuccuaggggaa

SEQ ID NO: 3531228 - RNA, 20 nt, Human
cugguuccuaggggaaugag

SEQ ID NO: 3531229 - RNA, 21 nt, Human
cugguucggauuuggggugga

SEQ ID NO: 3531230 - RNA, 16 nt, Human
cugguucuauuuaaug

SEQ ID NO: 3531231 - RNA, 15 nt, Human
cugguucucaaugaa

SEQ ID NO: 3531232 - RNA, 16 nt, Human
cugguucucaaugaaa

SEQ ID NO: 3531233 - RNA, 14 nt, Human
cugguucucaucuu

SEQ ID NO: 3531234 - RNA, 16 nt, Human
cugguucucaucuuuc

SEQ ID NO: 3531235 - RNA, 19 nt, Human
cugguugaagaagaugauc

SEQ ID NO: 3531236 - RNA, 17 nt, Human
cugguugaugccuguga

SEQ ID NO: 3531237 - RNA, 12 nt, Human
cugguugcaugg

SEQ ID NO: 3531238 - RNA, 13 nt, Human
cugguugcugugu

SEQ ID NO: 3531239 - RNA, 13 nt, Human
cugguugguuuug

SEQ ID NO: 3531240 - RNA, 16 nt, Human
cugguuguuaugugau

SEQ ID NO: 3531241 - RNA, 16 nt, Human
cugguuuacaggcccu

SEQ ID NO: 3531242 - RNA, 13 nt, Human
cugguuuccugcc

SEQ ID NO: 3531243 - RNA, 14 nt, Human
cugguuuccugccc

SEQ ID NO: 3531244 - RNA, 15 nt, Human
cugguuucucauucu

SEQ ID NO: 3531245 - RNA, 17 nt, Human
cugguuuggaaugcuuc

SEQ ID NO: 3531246 - RNA, 22 nt, Human
cugguuuuaaauauuuugacuu

SEQ ID NO: 3531247 - RNA, 17 nt, Human
cugguuuucacauuaga

SEQ ID NO: 3531248 - RNA, 13 nt, Human
cugguuuuguaag

SEQ ID NO: 3531249 - RNA, 19 nt, Human
cugguuuuguaagaugcug

SEQ ID NO: 3531250 - RNA, 20 nt, Human
cugguuuuguaagaugcugg

SEQ ID NO: 3531251 - RNA, 21 nt, Human
cugguuuuguaagaugcuggg

SEQ ID NO: 3531252 - RNA, 15 nt, Human
cugguuuuucaguuu

SEQ ID NO: 3531253 - RNA, 15 nt, Human
cugguuuuuguagcc

SEQ ID NO: 3531254 - RNA, 15 nt, Human
cuguaaaaacugugg

SEQ ID NO: 3531255 - RNA, 21 nt, Human
cuguaaaaagagagaaaacuu

SEQ ID NO: 3531256 - RNA, 15 nt, Human
cuguaaaacagguua

SEQ ID NO: 3531257 - RNA, 14 nt, Human
cuguaaaagaaaaa

SEQ ID NO: 3531258 - RNA, 19 nt, Human
cuguaaaagagccuaguuu

SEQ ID NO: 3531259 - RNA, 23 nt, Human
cuguaaaauauacuuaaauggaa

SEQ ID NO: 3531260 - RNA, 18 nt, Human
cuguaaaaugcaaaaaau

SEQ ID NO: 3531261 - RNA, 15 nt, Human
cuguaaacacucagc

SEQ ID NO: 3531262 - RNA, 19 nt, Human
cuguaaacacucagcuguu

SEQ ID NO: 3531263 - RNA, 22 nt, Human
cuguaaacucaaaacuuaacau

SEQ ID NO: 3531264 - RNA, 13 nt, Human
cuguaaagaaaga

SEQ ID NO: 3531265 - RNA, 14 nt, Human
cuguaaagaaagag

SEQ ID NO: 3531266 - RNA, 22 nt, Human
cuguaaagagaccuaccucagg

SEQ ID NO: 3531267 - RNA, 16 nt, Human
cuguaaagauguuuau

SEQ ID NO: 3531268 - RNA, 18 nt, Human
cuguaaagcuaaaauaaa

SEQ ID NO: 3531269 - RNA, 11 nt, Human
cuguaaaucau

SEQ ID NO: 3531270 - RNA, 14 nt, Human
cuguaaaucuacac

SEQ ID NO: 3531271 - RNA, 17 nt, Human
cuguaaauuauuuuaaa

SEQ ID NO: 3531272 - RNA, 17 nt, Human
cuguaaauuuggcuucu

SEQ ID NO: 3531273 - RNA, 16 nt, Human
cuguaacaagccagau

SEQ ID NO: 3531274 - RNA, 18 nt, Human
cuguaacacaagccacag

SEQ ID NO: 3531275 - RNA, 15 nt, Human
cuguaacacagcuga

SEQ ID NO: 3531276 - RNA, 21 nt, Human
cuguaacacagcugagagacu

SEQ ID NO: 3531277 - RNA, 14 nt, Human
cuguaacaguucuu

SEQ ID NO: 3531278 - RNA, 22 nt, Human
cuguaacaucacuauccaugca

SEQ ID NO: 3531279 - RNA, 15 nt, Human
cuguaacauucagga

SEQ ID NO: 3531280 - RNA, 19 nt, Human
cuguaacuuccaaauaaau

SEQ ID NO: 3531281 - RNA, 23 nt, Human
cuguaacuugauccauuucuaau

SEQ ID NO: 3531282 - RNA, 19 nt, Human
cuguaagaauaauuuauag

SEQ ID NO: 3531283 - RNA, 20 nt, Human
cuguaagaauaauuuauagu

SEQ ID NO: 3531284 - RNA, 15 nt, Human
cuguaagaugucugu

SEQ ID NO: 3531285 - RNA, 14 nt, Human
cuguaagccaaaga

SEQ ID NO: 3531286 - RNA, 21 nt, Human
cuguaagccaaagaaaugaac

SEQ ID NO: 3531287 - RNA, 16 nt, Human
cuguaagccugcaagc

SEQ ID NO: 3531288 - RNA, 13 nt, Human
cuguaaggcucua

SEQ ID NO: 3531289 - RNA, 14 nt, Human
cuguaaggcucuag

SEQ ID NO: 3531290 - RNA, 22 nt, Human
cuguaauaaacucauuucuagc

SEQ ID NO: 3531291 - RNA, 12 nt, Human
cuguaauaaaua

SEQ ID NO: 3531292 - RNA, 15 nt, Human
cuguaauaaauauga

SEQ ID NO: 3531293 - RNA, 17 nt, Human
cuguaauaaauaugagu

SEQ ID NO: 3531294 - RNA, 21 nt, Human
cuguaauaacuagaacaaaua

SEQ ID NO: 3531295 - RNA, 15 nt, Human
cuguaauauuuacaa

SEQ ID NO: 3531296 - RNA, 21 nt, Human
cuguaauauuuacaauguauu

SEQ ID NO: 3531297 - RNA, 22 nt, Human
cuguaauauuuacaauguauua

SEQ ID NO: 3531298 - RNA, 19 nt, Human
cuguaaucauauaauaaau

SEQ ID NO: 3531299 - RNA, 18 nt, Human
cuguaaucccagcaauuu

SEQ ID NO: 3531300 - RNA, 16 nt, Human
cuguaaucccagcacu

SEQ ID NO: 3531301 - RNA, 15 nt, Human
cuguaaucccagcag

SEQ ID NO: 3531302 - RNA, 23 nt, Human
cuguaaucccagcuauuugggag

SEQ ID NO: 3531303 - RNA, 14 nt, Human
cuguaaucuaugaa

SEQ ID NO: 3531304 - RNA, 21 nt, Human
cuguaaugaaccgcugaauau

SEQ ID NO: 3531305 - RNA, 19 nt, Human
cuguaauguuaauauugau

SEQ ID NO: 3531306 - RNA, 16 nt, Human
cuguaauuccuaccuc

SEQ ID NO: 3531307 - RNA, 14 nt, Human
cuguaauugcaaaa

SEQ ID NO: 3531308 - RNA, 16 nt, Human
cuguaauuguguguga

SEQ ID NO: 3531309 - RNA, 18 nt, Human
cuguaauuugugauacaa

SEQ ID NO: 3531310 - RNA, 22 nt, Human
cuguaauuugugauacaaugcu

SEQ ID NO: 3531311 - RNA, 23 nt, Human
cuguacaaaaaaaucuuccaauu

SEQ ID NO: 3531312 - RNA, 11 nt, Human
cuguacaauaa

SEQ ID NO: 3531313 - RNA, 14 nt, Human
cuguacaauauuua

SEQ ID NO: 3531314 - RNA, 17 nt, Human
cuguacaauauuuaaaa

SEQ ID NO: 3531315 - RNA, 15 nt, Human
cuguacaaugacuuu

SEQ ID NO: 3531316 - RNA, 16 nt, Human
cuguacacguguccug

SEQ ID NO: 3531317 - RNA, 17 nt, Human
cuguacacguguccugu

SEQ ID NO: 3531318 - RNA, 17 nt, Human
cuguacacugacuugag

SEQ ID NO: 3531319 - RNA, 21 nt, Human
cuguacacugacuugagacca

SEQ ID NO: 3531320 - RNA, 18 nt, Human
cuguacagagcccacgcc

SEQ ID NO: 3531321 - RNA, 18 nt, Human
cuguacagcuggcucuac

SEQ ID NO: 3531322 - RNA, 14 nt, Human
cuguacagucuguc

SEQ ID NO: 3531323 - RNA, 15 nt, Human
cuguacagucugucu

SEQ ID NO: 3531324 - RNA, 17 nt, Human
cuguacagucugucuuc

SEQ ID NO: 3531325 - RNA, 23 nt, Human
cuguacagucugucuucuguaua

SEQ ID NO: 3531326 - RNA, 14 nt, Human
cuguacagugucuu

SEQ ID NO: 3531327 - RNA, 15 nt, Human
cuguacauauguaaa

SEQ ID NO: 3531328 - RNA, 20 nt, Human
cuguacauauuugagacuag

SEQ ID NO: 3531329 - RNA, 14 nt, Human
cuguacaucuauuu

SEQ ID NO: 3531330 - RNA, 20 nt, Human
cuguacaugaaaacacauuu

SEQ ID NO: 3531331 - RNA, 21 nt, Human
cuguacaugaaaacacauuuu

SEQ ID NO: 3531332 - RNA, 16 nt, Human
cuguaccaguuaauuu

SEQ ID NO: 3531333 - RNA, 17 nt, Human
cuguaccaguuaauuuu

SEQ ID NO: 3531334 - RNA, 23 nt, Human
cuguaccaugugcuacaggggcc

SEQ ID NO: 3531335 - RNA, 15 nt, Human
cuguaccucauccca

SEQ ID NO: 3531336 - RNA, 22 nt, Human
cuguaccucuugagccuugaac

SEQ ID NO: 3531337 - RNA, 14 nt, Human
cuguaccugagagg

SEQ ID NO: 3531338 - RNA, 20 nt, Human
cuguaccuuuugaggagccc

SEQ ID NO: 3531339 - RNA, 16 nt, Human
cuguacgucugacagg

SEQ ID NO: 3531340 - RNA, 18 nt, Human
cuguacgucugacaggca

SEQ ID NO: 3531341 - RNA, 17 nt, Human
cuguacuaauucuuaca

SEQ ID NO: 3531342 - RNA, 13 nt, Human
cuguacuagagau

SEQ ID NO: 3531343 - RNA, 22 nt, Human
cuguacuagucugugugggacu

SEQ ID NO: 3531344 - RNA, 15 nt, Human
cuguacucuuagaug

SEQ ID NO: 3531345 - RNA, 19 nt, Human
cuguacugaaguaaaacaa

SEQ ID NO: 3531346 - RNA, 12 nt, Human
cuguacugccug

SEQ ID NO: 3531347 - RNA, 18 nt, Human
cuguacugccugcuuggg

SEQ ID NO: 3531348 - RNA, 16 nt, Human
cuguacugcucaggcu

SEQ ID NO: 3531349 - RNA, 21 nt, Human
cuguacugcucaggcugcagc

SEQ ID NO: 3531350 - RNA, 16 nt, Human
cuguacugggccaugu

SEQ ID NO: 3531351 - RNA, 17 nt, Human
cuguacuguucuguguc

SEQ ID NO: 3531352 - RNA, 15 nt, Human
cuguacuucaaguua

SEQ ID NO: 3531353 - RNA, 22 nt, Human
cuguacuugaagucuaaaagca

SEQ ID NO: 3531354 - RNA, 17 nt, Human
cuguacuugaugacaga

SEQ ID NO: 3531355 - RNA, 16 nt, Human
cuguacuugcucuuga

SEQ ID NO: 3531356 - RNA, 14 nt, Human
cuguacuuggucca

SEQ ID NO: 3531357 - RNA, 11 nt, Human
gccuguacagu

SEQ ID NO: 3531358 - RNA, 15 nt, Human
gccuguacagucugu

SEQ ID NO: 3531359 - RNA, 20 nt, Human
gccuguacagucugucuucu

SEQ ID NO: 3531360 - RNA, 19 nt, Human
gccuguacucgcuugugca

SEQ ID NO: 3531361 - RNA, 20 nt, Human
gccuguacucgcuugugcag

SEQ ID NO: 3531362 - RNA, 13 nt, Human
gccuguacugccu

SEQ ID NO: 3531363 - RNA, 15 nt, Human
gccuguacugccugc

SEQ ID NO: 3531364 - RNA, 19 nt, Human
gccuguacugccugcuugg

SEQ ID NO: 3531365 - RNA, 20 nt, Human
gccuguacugccugcuuggg

SEQ ID NO: 3531366 - RNA, 13 nt, Human
gccuguagaguug

SEQ ID NO: 3531367 - RNA, 16 nt, Human
gccuguagaguugcug

SEQ ID NO: 3531368 - RNA, 19 nt, Human
gccuguagaguugcugaga

SEQ ID NO: 3531369 - RNA, 19 nt, Human
gccuguagcccacucugcu

SEQ ID NO: 3531370 - RNA, 22 nt, Human
gccuguagcccacucugcucgc

SEQ ID NO: 3531371 - RNA, 18 nt, Human
gccuguaguuaggaaaua

SEQ ID NO: 3531372 - RNA, 19 nt, Human
gccuguaguuaggaaauaa

SEQ ID NO: 3531373 - RNA, 23 nt, Human
gccuguaguuaggaaauaaaacc

SEQ ID NO: 3531374 - RNA, 19 nt, Human
gccugucagauccaggagc

SEQ ID NO: 3531375 - RNA, 22 nt, Human
gccugucagauccaggagcucc

SEQ ID NO: 3531376 - RNA, 20 nt, Human
gccuguccacaggcuucuga

SEQ ID NO: 3531377 - RNA, 18 nt, Human
gccugucccucucaggca

SEQ ID NO: 3531378 - RNA, 20 nt, Human
gccuguccugaccugucuca

SEQ ID NO: 3531379 - RNA, 15 nt, Human
gccuguccugccugu

SEQ ID NO: 3531380 - RNA, 12 nt, Human
gccugucucaag

SEQ ID NO: 3531381 - RNA, 22 nt, Human
gccugucucauccccagggguc

SEQ ID NO: 3531382 - RNA, 21 nt, Human
gccugucuccuuugcaggcuc

SEQ ID NO: 3531383 - RNA, 20 nt, Human
gccugucucggaaccuguga

SEQ ID NO: 3531384 - RNA, 14 nt, Human
gccugucucuucca

SEQ ID NO: 3531385 - RNA, 15 nt, Human
gccugucugagacuc

SEQ ID NO: 3531386 - RNA, 13 nt, Human
gccugucugcccc

SEQ ID NO: 3531387 - RNA, 15 nt, Human
gccugucugugaccu

SEQ ID NO: 3531388 - RNA, 15 nt, Human
gccugugagccaguc

SEQ ID NO: 3531389 - RNA, 18 nt, Human
gccugugaggcaggggcg

SEQ ID NO: 3531390 - RNA, 17 nt, Human
gccugugaggugcagag

SEQ ID NO: 3531391 - RNA, 23 nt, Human
gccugugcacacacacacacaug

SEQ ID NO: 3531392 - RNA, 17 nt, Human
gccuguggagcucagcc

SEQ ID NO: 3531393 - RNA, 19 nt, Human
gccuguggagcucagcccc

SEQ ID NO: 3531394 - RNA, 15 nt, Human
gccuguggcccuguc

SEQ ID NO: 3531395 - RNA, 18 nt, Human
gccuguggccuguguccc

SEQ ID NO: 3531396 - RNA, 21 nt, Human
gccuguggcgccgucuccagg

SEQ ID NO: 3531397 - RNA, 18 nt, Human
gccuguggcggugccugg

SEQ ID NO: 3531398 - RNA, 12 nt, Human
gccuguggcugc

SEQ ID NO: 3531399 - RNA, 15 nt, Human
gccuguggcugucgg

SEQ ID NO: 3531400 - RNA, 17 nt, Human
gccuguggcuguggaga

SEQ ID NO: 3531401 - RNA, 12 nt, Human
gccugugguucu

SEQ ID NO: 3531402 - RNA, 14 nt, Human
gccuguguaacagc

SEQ ID NO: 3531403 - RNA, 18 nt, Human
gccuguguaacagcuccu

SEQ ID NO: 3531404 - RNA, 23 nt, Human
gccuguguaacagcuccuuggga

SEQ ID NO: 3531405 - RNA, 21 nt, Human
gccuguguccaugcgcucagg

SEQ ID NO: 3531406 - RNA, 23 nt, Human
gccuguguccaugcgcucagggc

SEQ ID NO: 3531407 - RNA, 15 nt, Human
gccugugucccauga

SEQ ID NO: 3531408 - RNA, 20 nt, Human
gccugugucccaugacccac

SEQ ID NO: 3531409 - RNA, 21 nt, Human
gccugugugacaucaguggca

SEQ ID NO: 3531410 - RNA, 19 nt, Human
gccuguuauaacucugcac

SEQ ID NO: 3531411 - RNA, 15 nt, Human
gccuguucagcucca

SEQ ID NO: 3531412 - RNA, 16 nt, Human
gccuguucagcuccag

SEQ ID NO: 3531413 - RNA, 20 nt, Human
gccuguucagcuccagcuca

SEQ ID NO: 3531414 - RNA, 13 nt, Human
gccuguucaguua

SEQ ID NO: 3531415 - RNA, 20 nt, Human
gccuguucaguuacagaaag

SEQ ID NO: 3531416 - RNA, 21 nt, Human
gccuguucaguuacagaaagu

SEQ ID NO: 3531417 - RNA, 16 nt, Human
gccuguucauggcaga

SEQ ID NO: 3531418 - RNA, 22 nt, Human
gccuguuccccucacuggauga

SEQ ID NO: 3531419 - RNA, 19 nt, Human
gccuguuggacccgcucug

SEQ ID NO: 3531420 - RNA, 14 nt, Human
gccuguugggccag

SEQ ID NO: 3531421 - RNA, 14 nt, Human
gccuguuuggccuc

SEQ ID NO: 3531422 - RNA, 16 nt, Human
gccuguuuggccucuc

SEQ ID NO: 3531423 - RNA, 16 nt, Human
gccuuaaaacaucauu

SEQ ID NO: 3531424 - RNA, 19 nt, Human
gccuuaaaacaucauuccu

SEQ ID NO: 3531425 - RNA, 19 nt, Human
gccuuaaaagccaucaugu

SEQ ID NO: 3531426 - RNA, 16 nt, Human
gccuuaaagaaagucg

SEQ ID NO: 3531427 - RNA, 14 nt, Human
gccuuaagcugcag

SEQ ID NO: 3531428 - RNA, 20 nt, Human
gccuuaagugaggaaaucaa

SEQ ID NO: 3531429 - RNA, 15 nt, Human
gccuuaauacuuuuu

SEQ ID NO: 3531430 - RNA, 15 nt, Human
gccuuacacaauggu

SEQ ID NO: 3531431 - RNA, 22 nt, Human
gccuagcauacguacacauuuu

SEQ ID NO: 3531432 - RNA, 18 nt, Human
gccuagcccacccugcug

SEQ ID NO: 3531433 - RNA, 15 nt, Human
gccuagccgaccuca

SEQ ID NO: 3531434 - RNA, 20 nt, Human
gccuagccgaccucagccuu

SEQ ID NO: 3531435 - RNA, 17 nt, Human
gccuagcgaucucuccu

SEQ ID NO: 3531436 - RNA, 21 nt, Human
gccuagcgaucucuccuggcc

SEQ ID NO: 3531437 - RNA, 22 nt, Human
gccuagcgaucucuccuggccu

SEQ ID NO: 3531438 - RNA, 18 nt, Human
gccuaggaccacucagcc

SEQ ID NO: 3531439 - RNA, 19 nt, Human
gccuaggaccacucagccc

SEQ ID NO: 3531440 - RNA, 20 nt, Human
gccuaggaccacucagcccc

SEQ ID NO: 3531441 - RNA, 21 nt, Human
gccuaggaccacucagccccu

SEQ ID NO: 3531442 - RNA, 20 nt, Human
gccuaggagauaucugaggg

SEQ ID NO: 3531443 - RNA, 15 nt, Human
gccuaggaggguccu

SEQ ID NO: 3531444 - RNA, 13 nt, Human
gccuaggauucua

SEQ ID NO: 3531445 - RNA, 16 nt, Human
gccuaggccaggugca

SEQ ID NO: 3531446 - RNA, 17 nt, Human
gccuaggccucagccag

SEQ ID NO: 3531447 - RNA, 19 nt, Human
gccuaggccugggcagugg

SEQ ID NO: 3531448 - RNA, 12 nt, Human
gccuaggcugca

SEQ ID NO: 3531449 - RNA, 16 nt, Human
gccuaguauugacaaa

SEQ ID NO: 3531450 - RNA, 23 nt, Human
gccuagugaaggcuucucucugu

SEQ ID NO: 3531451 - RNA, 18 nt, Human
gccuaguggggucucccu

SEQ ID NO: 3531452 - RNA, 15 nt, Human
gccuaguuuuuagua

SEQ ID NO: 3531453 - RNA, 19 nt, Human
gccuauaagccaaaauuaa

SEQ ID NO: 3531454 - RNA, 22 nt, Human
gccuauauuuuuuguuaaauga

SEQ ID NO: 3531455 - RNA, 18 nt, Human
gccuaucagugugccccc

SEQ ID NO: 3531456 - RNA, 16 nt, Human
gccuauccuaagagcu

SEQ ID NO: 3531457 - RNA, 21 nt, Human
gccuaugagcauccugagccc

SEQ ID NO: 3531458 - RNA, 15 nt, Human
gccuaugaucccagc

SEQ ID NO: 3531459 - RNA, 14 nt, Human
gccuaugcacauau

SEQ ID NO: 3531460 - RNA, 23 nt, Human
gccuaugcacauauggacucugc

SEQ ID NO: 3531461 - RNA, 14 nt, Human
gccuauggagagcc

SEQ ID NO: 3531462 - RNA, 20 nt, Human
gccuauggagagcccuggga

SEQ ID NO: 3531463 - RNA, 16 nt, Human
gccuauggcagaaaaa

SEQ ID NO: 3531464 - RNA, 18 nt, Human
gccuauguggucuaaggu

SEQ ID NO: 3531465 - RNA, 15 nt, Human
gccuauucccacacc

SEQ ID NO: 3531466 - RNA, 18 nt, Human
gccuauugcuagagcucc

SEQ ID NO: 3531467 - RNA, 19 nt, Human
gccuauugcuagagcuccu

SEQ ID NO: 3531468 - RNA, 13 nt, Human
gccuauuguaaua

SEQ ID NO: 3531469 - RNA, 17 nt, Human
gccuauuuaccugcagg

SEQ ID NO: 3531470 - RNA, 20 nt, Human
gccuauuuaccugcaggcug

SEQ ID NO: 3531471 - RNA, 12 nt, Human
gccucaaaaugu

SEQ ID NO: 3531472 - RNA, 14 nt, Human
gccucaaaaugugu

SEQ ID NO: 3531473 - RNA, 22 nt, Human
gccucaaagcaagcauucagaa

SEQ ID NO: 3531474 - RNA, 15 nt, Human
gccucaaauccagga

SEQ ID NO: 3531475 - RNA, 16 nt, Human
gccucaaauccaggac

SEQ ID NO: 3531476 - RNA, 22 nt, Human
gccucaaauccaggacccugcc

SEQ ID NO: 3531477 - RNA, 13 nt, Human
gccucaaaugcag

SEQ ID NO: 3531478 - RNA, 14 nt, Human
gccucaacccuccc

SEQ ID NO: 3531479 - RNA, 18 nt, Human
gccucaacccucccucag

SEQ ID NO: 3531480 - RNA, 16 nt, Human
gccucaaccuccuggg

SEQ ID NO: 3531481 - RNA, 20 nt, Human
gccucaagguuuuagguucu

SEQ ID NO: 3531482 - RNA, 16 nt, Human
gccucaagucacuccc

SEQ ID NO: 3531483 - RNA, 19 nt, Human
gccucaagugauucuccug

SEQ ID NO: 3531484 - RNA, 20 nt, Human
gccucaagugauucuccugc

SEQ ID NO: 3531485 - RNA, 21 nt, Human
gccucaaugugguugcaaggc

SEQ ID NO: 3531486 - RNA, 22 nt, Human
gccucaauuucugaacaccaua

SEQ ID NO: 3531487 - RNA, 19 nt, Human
gccucacagcagugagacu

SEQ ID NO: 3531488 - RNA, 18 nt, Human
gccucacaguccuuacca

SEQ ID NO: 3531489 - RNA, 19 nt, Human
gccucacauuuuuuucuac

SEQ ID NO: 3531490 - RNA, 21 nt, Human
gccucaccaugugagcucuuc

SEQ ID NO: 3531491 - RNA, 17 nt, Human
gccucacccaccccugc

SEQ ID NO: 3531492 - RNA, 18 nt, Human
gccucacccaccccugca

SEQ ID NO: 3531493 - RNA, 20 nt, Human
gccucacccaccccugcaca

SEQ ID NO: 3531494 - RNA, 16 nt, Human
gccucacccccucggg

SEQ ID NO: 3531495 - RNA, 22 nt, Human
gccucacccccucgggucuccu

SEQ ID NO: 3531496 - RNA, 14 nt, Human
gccucacccuugcg

SEQ ID NO: 3531497 - RNA, 22 nt, Human
gccucaccuuggggcuugacuu

SEQ ID NO: 3531498 - RNA, 19 nt, Human
gccucacuaauuuuuguau

SEQ ID NO: 3531499 - RNA, 20 nt, Human
gccucacugaaacauggcug

SEQ ID NO: 3531500 - RNA, 13 nt, Human
gccucacuggggc

SEQ ID NO: 3531501 - RNA, 19 nt, Human
cuguggagacaaugucugc

SEQ ID NO: 3531502 - RNA, 23 nt, Human
cuguggagacugcuccugagccc

SEQ ID NO: 3531503 - RNA, 14 nt, Human
cuguggagacuggg

SEQ ID NO: 3531504 - RNA, 15 nt, Human
cuguggagcccgcac

SEQ ID NO: 3531505 - RNA, 23 nt, Human
cuguggagcccgcacccccaccc

SEQ ID NO: 3531506 - RNA, 16 nt, Human
cuguggagcucagccc

SEQ ID NO: 3531507 - RNA, 14 nt, Human
cuguggaggaagga

SEQ ID NO: 3531508 - RNA, 22 nt, Human
cuguggaggaaggauuguaaaa

SEQ ID NO: 3531509 - RNA, 22 nt, Human
cuguggagguacacucuuauag

SEQ ID NO: 3531510 - RNA, 16 nt, Human
cuguggaugccagggc

SEQ ID NO: 3531511 - RNA, 21 nt, Human
cuguggaugcugcugccccug

SEQ ID NO: 3531512 - RNA, 22 nt, Human
cuguggaugcugcugccccugc

SEQ ID NO: 3531513 - RNA, 20 nt, Human
cuguggcacuugccuggguc

SEQ ID NO: 3531514 - RNA, 21 nt, Human
cuguggcacuugccuggguca

SEQ ID NO: 3531515 - RNA, 18 nt, Human
cuguggcagaguuacagu

SEQ ID NO: 3531516 - RNA, 21 nt, Human
cuguggcaggcagcgccaagc

SEQ ID NO: 3531517 - RNA, 19 nt, Human
cuguggcaggccagcugug

SEQ ID NO: 3531518 - RNA, 21 nt, Human
cuguggcaguaaagagaaacu

SEQ ID NO: 3531519 - RNA, 17 nt, Human
cuguggcaucuuugccu

SEQ ID NO: 3531520 - RNA, 18 nt, Human
cuguggcaugggugaaga

SEQ ID NO: 3531521 - RNA, 23 nt, Human
cuguggccagcuuguuauuuaua

SEQ ID NO: 3531522 - RNA, 12 nt, Human
cuguggccagga

SEQ ID NO: 3531523 - RNA, 13 nt, Human
cuguggccaggag

SEQ ID NO: 3531524 - RNA, 20 nt, Human
cuguggccaugacccugccu

SEQ ID NO: 3531525 - RNA, 23 nt, Human
cuguggccaugguccccaagacc

SEQ ID NO: 3531526 - RNA, 16 nt, Human
cuguggcccuggcucu

SEQ ID NO: 3531527 - RNA, 13 nt, Human
cuguggcccuguc

SEQ ID NO: 3531528 - RNA, 11 nt, Human
cuguggccugg

SEQ ID NO: 3531529 - RNA, 14 nt, Human
cuguggccugggca

SEQ ID NO: 3531530 - RNA, 16 nt, Human
cuguggccugggcaag

SEQ ID NO: 3531531 - RNA, 14 nt, Human
cuguggccuguguc

SEQ ID NO: 3531532 - RNA, 17 nt, Human
cuguggcgccgucucca

SEQ ID NO: 3531533 - RNA, 24 nt, Human
cuguggcgccgucuccaggggcug

SEQ ID NO: 3531534 - RNA, 18 nt, Human
cuguggcuccaggccaaa

SEQ ID NO: 3531535 - RNA, 22 nt, Human
cuguggcuucuuaaucuuuuca

SEQ ID NO: 3531536 - RNA, 24 nt, Human
cugugggaaaugguacuguacagc

SEQ ID NO: 3531537 - RNA, 23 nt, Human
cugugggaacgagaggggaagag

SEQ ID NO: 3531538 - RNA, 15 nt, Human
cugugggaaggccag

SEQ ID NO: 3531539 - RNA, 18 nt, Human
cugugggaaggccagcug

SEQ ID NO: 3531540 - RNA, 14 nt, Human
cugugggaccccag

SEQ ID NO: 3531541 - RNA, 19 nt, Human
cugugggaccccaggccca

SEQ ID NO: 3531542 - RNA, 13 nt, Human
cugugggagccuc

SEQ ID NO: 3531543 - RNA, 16 nt, Human
cugugggagccucgca

SEQ ID NO: 3531544 - RNA, 20 nt, Human
cugugggcaggugggagcuu

SEQ ID NO: 3531545 - RNA, 14 nt, Human
cugugggcccccaa

SEQ ID NO: 3531546 - RNA, 14 nt, Human
cugugggccucaag

SEQ ID NO: 3531547 - RNA, 20 nt, Human
cugugggccucaaggacuug

SEQ ID NO: 3531548 - RNA, 16 nt, Human
cugugggcgggcccag

SEQ ID NO: 3531549 - RNA, 18 nt, Human
cugugggcgggcccagca

SEQ ID NO: 3531550 - RNA, 13 nt, Human
cuguggggacucc

SEQ ID NO: 3531551 - RNA, 19 nt, Human
cuguggggacuccggcugu

SEQ ID NO: 3531552 - RNA, 16 nt, Human
cuguggggaucucagg

SEQ ID NO: 3531553 - RNA, 18 nt, Human
cuguggggauuucuccca

SEQ ID NO: 3531554 - RNA, 16 nt, Human
cuguggggcccccaca

SEQ ID NO: 3531555 - RNA, 14 nt, Human
cuguggggcuggua

SEQ ID NO: 3531556 - RNA, 21 nt, Human
cuguggggcugguagcucagg

SEQ ID NO: 3531557 - RNA, 23 nt, Human
cugugggggaagagcacagcccu

SEQ ID NO: 3531558 - RNA, 24 nt, Human
cugugggggugagggucccaugug

SEQ ID NO: 3531559 - RNA, 20 nt, Human
cugugggggugugcccccuu

SEQ ID NO: 3531560 - RNA, 22 nt, Human
cuguggggucaacccuucugga

SEQ ID NO: 3531561 - RNA, 19 nt, Human
cuguggguccgauaauauc

SEQ ID NO: 3531562 - RNA, 22 nt, Human
cugugggugaagacagagggaa

SEQ ID NO: 3531563 - RNA, 16 nt, Human
cugugggugaugggga

SEQ ID NO: 3531564 - RNA, 21 nt, Human
cuguggguuucuaaagcugcc

SEQ ID NO: 3531565 - RNA, 22 nt, Human
cuguggguuuguggggggaggc

SEQ ID NO: 3531566 - RNA, 17 nt, Human
cugugguaaaugccaca

SEQ ID NO: 3531567 - RNA, 16 nt, Human
cuguggucacagcgga

SEQ ID NO: 3531568 - RNA, 22 nt, Human
cuguggucuucaaauugucuuu

SEQ ID NO: 3531569 - RNA, 14 nt, Human
cuguggugacuuug

SEQ ID NO: 3531570 - RNA, 18 nt, Human
cuguggugacuuuggaua

SEQ ID NO: 3531571 - RNA, 23 nt, Human
cuguggugcaaaagcagaaaaua

SEQ ID NO: 3531572 - RNA, 13 nt, Human
cuguggugucugc

SEQ ID NO: 3531573 - RNA, 14 nt, Human
cugugguguguccc

SEQ ID NO: 3531574 - RNA, 21 nt, Human
cugugguuguuuuagcuccuu

SEQ ID NO: 3531575 - RNA, 16 nt, Human
cugugguuucauguua

SEQ ID NO: 3531576 - RNA, 17 nt, Human
cugugguuucauguuag

SEQ ID NO: 3531577 - RNA, 16 nt, Human
cugugguuuuccccuc

SEQ ID NO: 3531578 - RNA, 19 nt, Human
cugugguuuuccccucccu

SEQ ID NO: 3531579 - RNA, 22 nt, Human
cugugguuuucuuuugccauga

SEQ ID NO: 3531580 - RNA, 19 nt, Human
cuguguaaaauguaaugca

SEQ ID NO: 3531581 - RNA, 12 nt, Human
cuguguaaaguu

SEQ ID NO: 3531582 - RNA, 15 nt, Human
cuguguaaaguuagu

SEQ ID NO: 3531583 - RNA, 15 nt, Human
cuguguaacacuguu

SEQ ID NO: 3531584 - RNA, 15 nt, Human
cuguguaacagcucc

SEQ ID NO: 3531585 - RNA, 16 nt, Human
cuguguaaccauuuua

SEQ ID NO: 3531586 - RNA, 11 nt, Human
cuguguaacug

SEQ ID NO: 3531587 - RNA, 18 nt, Human
cuguguaagauuuguuuu

SEQ ID NO: 3531588 - RNA, 15 nt, Human
cuguguacaaagaaa

SEQ ID NO: 3531589 - RNA, 20 nt, Human
gccuuacacaaugguuuucu

SEQ ID NO: 3531590 - RNA, 14 nt, Human
gccuuaccccugcc

SEQ ID NO: 3531591 - RNA, 18 nt, Human
gccuuacccucauguucu

SEQ ID NO: 3531592 - RNA, 19 nt, Human
gccuuacccucauguucuu

SEQ ID NO: 3531593 - RNA, 16 nt, Human
gccuuaccuccugccc

SEQ ID NO: 3531594 - RNA, 17 nt, Human
gccuuaccuccugccca

SEQ ID NO: 3531595 - RNA, 18 nt, Human
gccuuaccuccugcccag

SEQ ID NO: 3531596 - RNA, 20 nt, Human
gccuuacuuuguaugauauu

SEQ ID NO: 3531597 - RNA, 20 nt, Human
gccuuagaaauguaaacugc

SEQ ID NO: 3531598 - RNA, 23 nt, Human
gccuuagaaauguaaacugccau

SEQ ID NO: 3531599 - RNA, 18 nt, Human
gccuuagaagucacacag

SEQ ID NO: 3531600 - RNA, 17 nt, Human
gccuuagagccaggcac

SEQ ID NO: 3531601 - RNA, 14 nt, Human
gccuuagcauguuu

SEQ ID NO: 3531602 - RNA, 18 nt, Human
gccuuagcauguuugcug

SEQ ID NO: 3531603 - RNA, 20 nt, Human
gccuuagcauguuugcugaa

SEQ ID NO: 3531604 - RNA, 21 nt, Human
gccuuagccgcccaugcacug

SEQ ID NO: 3531605 - RNA, 12 nt, Human
gccuuagcuuca

SEQ ID NO: 3531606 - RNA, 15 nt, Human
gccuuaggccuaccu

SEQ ID NO: 3531607 - RNA, 15 nt, Human
gccuuagucucaguu

SEQ ID NO: 3531608 - RNA, 19 nt, Human
gccuuagugggccagggcu

SEQ ID NO: 3531609 - RNA, 19 nt, Human
gccuuaucaagugucuucc

SEQ ID NO: 3531610 - RNA, 10 nt, Human
gccuuaugga

SEQ ID NO: 3531611 - RNA, 22 nt, Human
gccuuauggaacacucugagac

SEQ ID NO: 3531612 - RNA, 16 nt, Human
gccuuauguugaaaaa

SEQ ID NO: 3531613 - RNA, 17 nt, Human
gccuuauguugaaaaaa

SEQ ID NO: 3531614 - RNA, 16 nt, Human
gccuuauucagggaag

SEQ ID NO: 3531615 - RNA, 22 nt, Human
gccuuauuggaaagcagucccc

SEQ ID NO: 3531616 - RNA, 13 nt, Human
gccuucaaaucaa

SEQ ID NO: 3531617 - RNA, 14 nt, Human
gccuucaagcucug

SEQ ID NO: 3531618 - RNA, 16 nt, Human
gccuucaagcucugag

SEQ ID NO: 3531619 - RNA, 19 nt, Human
gccuucaagcucugaggga

SEQ ID NO: 3531620 - RNA, 20 nt, Human
gccuucacuccggugugccu

SEQ ID NO: 3531621 - RNA, 23 nt, Human
gccuucagacagagaggacugua

SEQ ID NO: 3531622 - RNA, 16 nt, Human
gccuucagcucuacag

SEQ ID NO: 3531623 - RNA, 13 nt, Human
gccuucagggagu

SEQ ID NO: 3531624 - RNA, 12 nt, Human
gccuuccaccca

SEQ ID NO: 3531625 - RNA, 23 nt, Human
gccuuccacgcugucuccagacc

SEQ ID NO: 3531626 - RNA, 12 nt, Human
gccuuccagauc

SEQ ID NO: 3531627 - RNA, 16 nt, Human
gccuuccagauccucu

SEQ ID NO: 3531628 - RNA, 20 nt, Human
gccuuccagauccucucugg

SEQ ID NO: 3531629 - RNA, 18 nt, Human
gccuuccagcugcugucu

SEQ ID NO: 3531630 - RNA, 17 nt, Human
gccuuccaugucggccu

SEQ ID NO: 3531631 - RNA, 19 nt, Human
gccuuccaugucggccucu

SEQ ID NO: 3531632 - RNA, 20 nt, Human
gccuuccaugucggccucua

SEQ ID NO: 3531633 - RNA, 18 nt, Human
gccuuccauuuccccucu

SEQ ID NO: 3531634 - RNA, 15 nt, Human
gccuuccccagccuc

SEQ ID NO: 3531635 - RNA, 18 nt, Human
gccuucccccucccaggg

SEQ ID NO: 3531636 - RNA, 23 nt, Human
gccuucccccucccagggccagg

SEQ ID NO: 3531637 - RNA, 18 nt, Human
gccuuccccucagccaca

SEQ ID NO: 3531638 - RNA, 20 nt, Human
gccuuccccuggcacuggca

SEQ ID NO: 3531639 - RNA, 24 nt, Human
gccuucccuagcuuuagacccugg

SEQ ID NO: 3531640 - RNA, 20 nt, Human
gccuuccgccccuucccuuc

SEQ ID NO: 3531641 - RNA, 20 nt, Human
gccuuccguaacccaacucu

SEQ ID NO: 3531642 - RNA, 17 nt, Human
gccuuccuaagccugug

SEQ ID NO: 3531643 - RNA, 18 nt, Human
gccuuccuaagccugugg

SEQ ID NO: 3531644 - RNA, 12 nt, Human
cuuaagcuuccg

SEQ ID NO: 3531645 - RNA, 23 nt, Human
cuuaagcuuuggacccaaggaaa

SEQ ID NO: 3531646 - RNA, 16 nt, Human
cuuaagggaguuuaau

SEQ ID NO: 3531647 - RNA, 12 nt, Human
cuuaaggggcag

SEQ ID NO: 3531648 - RNA, 20 nt, Human
gcuaucaaagaauaagaaaa

SEQ ID NO: 3531649 - RNA, 13 nt, Human
gcuaucaagaggc

SEQ ID NO: 3531650 - RNA, 12 nt, Human
gcuauccaccaa

SEQ ID NO: 3531651 - RNA, 17 nt, Human
gcuauccauuucucaug

SEQ ID NO: 3531652 - RNA, 22 nt, Human
gcuauccccaucucccugccug

SEQ ID NO: 3531653 - RNA, 12 nt, Human
gcuauccugauu

SEQ ID NO: 3531654 - RNA, 19 nt, Human
gcuaucggggaagccagac

SEQ ID NO: 3531655 - RNA, 15 nt, Human
gcuaucguaaaauua

SEQ ID NO: 3531656 - RNA, 13 nt, Human
gcuaucuccccca

SEQ ID NO: 3531657 - RNA, 20 nt, Human
gcuaucucccccagccccau

SEQ ID NO: 3531658 - RNA, 12 nt, Human
gcuaucucccug

SEQ ID NO: 3531659 - RNA, 17 nt, Human
gcuaucuggucaaccuc

SEQ ID NO: 3531660 - RNA, 14 nt, Human
gcuaucuuaauuuu

SEQ ID NO: 3531661 - RNA, 13 nt, Human
gcuaucuucaugu

SEQ ID NO: 3531662 - RNA, 15 nt, Human
gcuaucuucauguaa

SEQ ID NO: 3531663 - RNA, 21 nt, Human
gcuaugaagagcuagagaaau

SEQ ID NO: 3531664 - RNA, 14 nt, Human
gcuaugagggccuu

SEQ ID NO: 3531665 - RNA, 18 nt, Human
gcuaugauguuaguuuuc

SEQ ID NO: 3531666 - RNA, 12 nt, Human
gcuaugcauuug

SEQ ID NO: 3531667 - RNA, 13 nt, Human
gcuaugcauuuga

SEQ ID NO: 3531668 - RNA, 13 nt, Human
gcuauggacacag

SEQ ID NO: 3531669 - RNA, 18 nt, Human
gcuauggacacaggguga

SEQ ID NO: 3531670 - RNA, 14 nt, Human
gcuaugggagcccc

SEQ ID NO: 3531671 - RNA, 19 nt, Human
gcuaugggagccccagggu

SEQ ID NO: 3531672 - RNA, 14 nt, Human
gcuauggugagaug

SEQ ID NO: 3531673 - RNA, 18 nt, Human
gcuauggugcucugucua

SEQ ID NO: 3531674 - RNA, 13 nt, Human
gcuaugguuuucu

SEQ ID NO: 3531675 - RNA, 15 nt, Human
gcuauguauaaaaua

SEQ ID NO: 3531676 - RNA, 16 nt, Human
gcuaugucauuucaug

SEQ ID NO: 3531677 - RNA, 16 nt, Human
gcuauguuacuauuuu

SEQ ID NO: 3531678 - RNA, 15 nt, Human
gcuauuaaaacucag

SEQ ID NO: 3531679 - RNA, 19 nt, Human
gcuauuaacaauuaauugu

SEQ ID NO: 3531680 - RNA, 12 nt, Human
gcuauuaauauu

SEQ ID NO: 3531681 - RNA, 15 nt, Human
gcuauuacugucugg

SEQ ID NO: 3531682 - RNA, 19 nt, Human
gcuauuagccaggaucaug

SEQ ID NO: 3531683 - RNA, 21 nt, Human
gcuauuagccaggaucauggu

SEQ ID NO: 3531684 - RNA, 21 nt, Human
gcuauuauuuucacuguagaa

SEQ ID NO: 3531685 - RNA, 18 nt, Human
gcuauucaguaauaacuc

SEQ ID NO: 3531686 - RNA, 20 nt, Human
gcuauucaguaauaacucua

SEQ ID NO: 3531687 - RNA, 17 nt, Human
gcuauuccuuucccuuc

SEQ ID NO: 3531688 - RNA, 15 nt, Human
gcuauugacaauaaa

SEQ ID NO: 3531689 - RNA, 13 nt, Human
gcuauuguaaaua

SEQ ID NO: 3531690 - RNA, 16 nt, Human
gcuauuuaugggcccc

SEQ ID NO: 3531691 - RNA, 18 nt, Human
gcuauuuaugggccccug

SEQ ID NO: 3531692 - RNA, 22 nt, Human
gcuauuuauuuuccuaaagaga

SEQ ID NO: 3531693 - RNA, 15 nt, Human
gcuauuucaucuauu

SEQ ID NO: 3531694 - RNA, 18 nt, Human
gcuauuuccauuccagaa

SEQ ID NO: 3531695 - RNA, 13 nt, Human
gcuauuucuauau

SEQ ID NO: 3531696 - RNA, 20 nt, Human
gcuauuucuauauuuucauu

SEQ ID NO: 3531697 - RNA, 17 nt, Human
gcuauuugauguaauac

SEQ ID NO: 3531698 - RNA, 19 nt, Human
gcuauuugcaauuccugcu

SEQ ID NO: 3531699 - RNA, 19 nt, Human
gcuauuuguaaaucugcca

SEQ ID NO: 3531700 - RNA, 21 nt, Human
gcuauuuuaaaccaauugcag

SEQ ID NO: 3531701 - RNA, 24 nt, Human
gcuauuuuccaggcuucugcuggg

SEQ ID NO: 3531702 - RNA, 13 nt, Human
gcuauuuuuguaa

SEQ ID NO: 3531703 - RNA, 15 nt, Human
gcuauuuuuguaaag

SEQ ID NO: 3531704 - RNA, 15 nt, Human
gcucaaaaaaugagc

SEQ ID NO: 3531705 - RNA, 15 nt, Human
gcucaaaaucuuucc

SEQ ID NO: 3531706 - RNA, 20 nt, Human
gcucaaacaaugacaaagca

SEQ ID NO: 3531707 - RNA, 21 nt, Human
gcucaaacaaugacaaagcag

SEQ ID NO: 3531708 - RNA, 14 nt, Human
gcucaaagaaaucu

SEQ ID NO: 3531709 - RNA, 12 nt, Human
gcucaaaggcac

SEQ ID NO: 3531710 - RNA, 16 nt, Human
gcucaaaggcacagug

SEQ ID NO: 3531711 - RNA, 20 nt, Human
gcucaaaucuauucagacaa

SEQ ID NO: 3531712 - RNA, 23 nt, Human
gcucaacucucuuauugccucac

SEQ ID NO: 3531713 - RNA, 15 nt, Human
gcucaacuugcaaaa

SEQ ID NO: 3531714 - RNA, 21 nt, Human
gcucaagcaauccucucaccu

SEQ ID NO: 3531715 - RNA, 17 nt, Human
gcucaagcccaggaggg

SEQ ID NO: 3531716 - RNA, 17 nt, Human
gcucaaggaaaggccug

SEQ ID NO: 3531717 - RNA, 17 nt, Human
gcucaaggcgugaggau

SEQ ID NO: 3531718 - RNA, 19 nt, Human
gcucaagggacaaggacac

SEQ ID NO: 3531719 - RNA, 18 nt, Human
gcucaaguccucuuuucu

SEQ ID NO: 3531720 - RNA, 21 nt, Human
gcucaaguguucacaaccugg

SEQ ID NO: 3531721 - RNA, 15 nt, Human
gcucaauaggaccag

SEQ ID NO: 3531722 - RNA, 20 nt, Human
gcucaauccauguucuauuu

SEQ ID NO: 3531723 - RNA, 20 nt, Human
gcucaaucccugaggacuga

SEQ ID NO: 3531724 - RNA, 13 nt, Human
gcucaaugagcau

SEQ ID NO: 3531725 - RNA, 15 nt, Human
gcucacaaggcagca

SEQ ID NO: 3531726 - RNA, 14 nt, Human
gcucacacaugaga

SEQ ID NO: 3531727 - RNA, 14 nt, Human
gcucacaccccauu

SEQ ID NO: 3531728 - RNA, 12 nt, Human
gcucacagacug

SEQ ID NO: 3531729 - RNA, 22 nt, Human
gcucacaguacagcaugugccu

SEQ ID NO: 3531730 - RNA, 19 nt, Human
gcucacaguuccucgcccu

SEQ ID NO: 3531731 - RNA, 21 nt, Human
gcucacaguuccucgcccugg

SEQ ID NO: 3531732 - RNA, 23 nt, Human
gcucacaguuccucgcccugggu

SEQ ID NO: 3531733 - RNA, 15 nt, Human
gcucacccaguccug

SEQ ID NO: 3531734 - RNA, 20 nt, Human
gcucaccccccacacucacu

SEQ ID NO: 3531735 - RNA, 14 nt, Human
gcucaccuagagcc

SEQ ID NO: 3531736 - RNA, 22 nt, Human
gcucaccuguugcuuacaauuu

SEQ ID NO: 3531737 - RNA, 18 nt, Human
gcucaccuugugcugggg

SEQ ID NO: 3531738 - RNA, 18 nt, Human
gcucacuaccuccucagg

SEQ ID NO: 3531739 - RNA, 21 nt, Human
gcucacuaccuccucagggau

SEQ ID NO: 3531740 - RNA, 16 nt, Human
gcucacuaugaaucua

SEQ ID NO: 3531741 - RNA, 17 nt, Human
gcucacuaugaaucuau

SEQ ID NO: 3531742 - RNA, 19 nt, Human
gcucacugaccugccugua

SEQ ID NO: 3531743 - RNA, 20 nt, Human
gcucacugcaaccucugccu

SEQ ID NO: 3531744 - RNA, 15 nt, Human
gcucacugcagccuc

SEQ ID NO: 3531745 - RNA, 14 nt, Human
gcucacugccaggc

SEQ ID NO: 3531746 - RNA, 15 nt, Human
gcucacugccaggcc

SEQ ID NO: 3531747 - RNA, 17 nt, Human
gcucacugccaggccag

SEQ ID NO: 3531748 - RNA, 19 nt, Human
gcucacugccaggccagcc

SEQ ID NO: 3531749 - RNA, 20 nt, Human
gcucacugccaggccagccu

SEQ ID NO: 3531750 - RNA, 21 nt, Human
gcucacugcuaagaauauuug

SEQ ID NO: 3531751 - RNA, 17 nt, Human
gcucacuguggugucug

SEQ ID NO: 3531752 - RNA, 19 nt, Human
gcucacuguggugucugug

SEQ ID NO: 3531753 - RNA, 15 nt, Human
gcucagaacccaggg

SEQ ID NO: 3531754 - RNA, 18 nt, Human
gcucagaacccagggcuc

SEQ ID NO: 3531755 - RNA, 20 nt, Human
gcucagaauaaggcaggcau

SEQ ID NO: 3531756 - RNA, 18 nt, Human
gcucagaauccaagugaa

SEQ ID NO: 3531757 - RNA, 21 nt, Human
gcucagacauguuuuccguga

SEQ ID NO: 3531758 - RNA, 13 nt, Human
gcucagagagggc

SEQ ID NO: 3531759 - RNA, 18 nt, Human
gcucagagagggcaggca

SEQ ID NO: 3531760 - RNA, 19 nt, Human
gcucagagagggcaggcau

SEQ ID NO: 3531761 - RNA, 19 nt, Human
gcucagaggcgcacuguga

SEQ ID NO: 3531762 - RNA, 21 nt, Human
gcucagaucccacuuuugcca

SEQ ID NO: 3531763 - RNA, 20 nt, Human
gcucagcaaaagaugcuucu

SEQ ID NO: 3531764 - RNA, 22 nt, Human
gcucagcaaaagaugcuucuca

SEQ ID NO: 3531765 - RNA, 16 nt, Human
gcucagcaaggccacc

SEQ ID NO: 3531766 - RNA, 17 nt, Human
gcucagcaaggccaccu

SEQ ID NO: 3531767 - RNA, 19 nt, Human
gcucagcaaggggcucugc

SEQ ID NO: 3531768 - RNA, 19 nt, Human
gcucagcacugccugcucc

SEQ ID NO: 3531769 - RNA, 20 nt, Human
gcucagcacugccugcuccc

SEQ ID NO: 3531770 - RNA, 13 nt, Human
gcucagccagcac

SEQ ID NO: 3531771 - RNA, 21 nt, Human
gcucagccaucccgucuucuc

SEQ ID NO: 3531772 - RNA, 15 nt, Human
gcucagcccaccccc

SEQ ID NO: 3531773 - RNA, 12 nt, Human
gcucagccccag

SEQ ID NO: 3531774 - RNA, 19 nt, Human
gcucagccccgagcugucc

SEQ ID NO: 3531775 - RNA, 17 nt, Human
gcucagcccucccugcc

SEQ ID NO: 3531776 - RNA, 21 nt, Human
gcucagcccucccugccccuc

SEQ ID NO: 3531777 - RNA, 16 nt, Human
gcucagcccugacugg

SEQ ID NO: 3531778 - RNA, 20 nt, Human
gcucagcccugacuggugcu

SEQ ID NO: 3531779 - RNA, 16 nt, Human
gcucagcccugcacca

SEQ ID NO: 3531780 - RNA, 12 nt, Human
gcucagcccugg

SEQ ID NO: 3531781 - RNA, 14 nt, Human
gcucagcccuggag

SEQ ID NO: 3531782 - RNA, 11 nt, Human
gcucagccugg

SEQ ID NO: 3531783 - RNA, 14 nt, Human
gcucagccuggugg

SEQ ID NO: 3531784 - RNA, 20 nt, Human
gcucagccuggugggccucc

SEQ ID NO: 3531785 - RNA, 16 nt, Human
gcucagcggggacagc

SEQ ID NO: 3531786 - RNA, 18 nt, Human
gcucagcucauccaugcc

SEQ ID NO: 3531787 - RNA, 12 nt, Human
gcucagcucugg

SEQ ID NO: 3531788 - RNA, 13 nt, Human
gcucagcucuggc

SEQ ID NO: 3531789 - RNA, 14 nt, Human
gcucagcucuggcu

SEQ ID NO: 3531790 - RNA, 19 nt, Human
gcucccgccuccaaccccu

SEQ ID NO: 3531791 - RNA, 16 nt, Human
gcucccgcuccugcgg

SEQ ID NO: 3531792 - RNA, 20 nt, Human
gcucccgggacucacuggca

SEQ ID NO: 3531793 - RNA, 24 nt, Human
gcucccgggacucacuggcagccc

SEQ ID NO: 3531794 - RNA, 17 nt, Human
gcucccggggcagggca

SEQ ID NO: 3531795 - RNA, 14 nt, Human
gcucccguggccug

SEQ ID NO: 3531796 - RNA, 15 nt, Human
gcucccguggccugu

SEQ ID NO: 3531797 - RNA, 23 nt, Human
gcucccuaagccagccuggucca

SEQ ID NO: 3531798 - RNA, 15 nt, Human
gcucccuaccaccuc

SEQ ID NO: 3531799 - RNA, 20 nt, Human
gcucccuaccaccuccccag

SEQ ID NO: 3531800 - RNA, 19 nt, Human
gcucccucaaagaggcagu

SEQ ID NO: 3531801 - RNA, 16 nt, Human
gcucccucacucucag

SEQ ID NO: 3531802 - RNA, 17 nt, Human
gcucccucacucucagg

SEQ ID NO: 3531803 - RNA, 13 nt, Human
gcucccucccccu

SEQ ID NO: 3531804 - RNA, 22 nt, Human
gcucccucccccugccccuucu

SEQ ID NO: 3531805 - RNA, 19 nt, Human
gcucccuccccugcccugg

SEQ ID NO: 3531806 - RNA, 18 nt, Human
gcucccuccgcccccagg

SEQ ID NO: 3531807 - RNA, 19 nt, Human
gcucccuccuccaggccug

SEQ ID NO: 3531808 - RNA, 22 nt, Human
gcucccuccuccaggccugccu

SEQ ID NO: 3531809 - RNA, 18 nt, Human
cuuaaggugaggccuguc

SEQ ID NO: 3531810 - RNA, 20 nt, Human
cuuaaggugaggccugucug

SEQ ID NO: 3531811 - RNA, 22 nt, Human
cuuaaguaagcaacagcauaac

SEQ ID NO: 3531812 - RNA, 15 nt, Human
cuuaaguaucagaaa

SEQ ID NO: 3531813 - RNA, 19 nt, Human
cuuaaguuaguuccacuga

SEQ ID NO: 3531814 - RNA, 16 nt, Human
cuuaaguuucucagcu

SEQ ID NO: 3531815 - RNA, 18 nt, Human
cuuaauaaaaaugacaga

SEQ ID NO: 3531816 - RNA, 13 nt, Human
cuuaauaaucaag

SEQ ID NO: 3531817 - RNA, 13 nt, Human
cuuaauacuaagg

SEQ ID NO: 3531818 - RNA, 22 nt, Human
cuuaauacucaaaugaguaaca

SEQ ID NO: 3531819 - RNA, 17 nt, Human
cuuaauacuguuauucu

SEQ ID NO: 3531820 - RNA, 21 nt, Human
cuuaauacuguuauucuuugc

SEQ ID NO: 3531821 - RNA, 20 nt, Human
cuuaauagaaacauugaaga

SEQ ID NO: 3531822 - RNA, 21 nt, Human
cuuaauaugcugcaacaaaau

SEQ ID NO: 3531823 - RNA, 11 nt, Human
cuuaauauuuc

SEQ ID NO: 3531824 - RNA, 20 nt, Human
cuuaauauuucuucaaauau

SEQ ID NO: 3531825 - RNA, 20 nt, Human
cuuaaucagguccucagaga

SEQ ID NO: 3531826 - RNA, 18 nt, Human
cuuaaucauuuuuuauau

SEQ ID NO: 3531827 - RNA, 22 nt, Human
cuuaaucauuuuuuauauauau

SEQ ID NO: 3531828 - RNA, 23 nt, Human
cuuaaucauuuuuuauauauaug

SEQ ID NO: 3531829 - RNA, 23 nt, Human
cuuaauccguaguuauuuugcac

SEQ ID NO: 3531830 - RNA, 21 nt, Human
cuuaaucuguuuauuuacaag

SEQ ID NO: 3531831 - RNA, 21 nt, Human
cuuaaucuuuucacaaauaaa

SEQ ID NO: 3531832 - RNA, 15 nt, Human
cuuaaugaaaacaau

SEQ ID NO: 3531833 - RNA, 12 nt, Human
cuuaaugaaaua

SEQ ID NO: 3531834 - RNA, 14 nt, Human
cuuaaugaaguuug

SEQ ID NO: 3531835 - RNA, 15 nt, Human
cuuaaugaaguuuga

SEQ ID NO: 3531836 - RNA, 18 nt, Human
cuuaaugaaguuugaaug

SEQ ID NO: 3531837 - RNA, 19 nt, Human
cuuaaugaaguuugaaugu

SEQ ID NO: 3531838 - RNA, 12 nt, Human
cuuaaugagaua

SEQ ID NO: 3531839 - RNA, 17 nt, Human
cuuaauggaguucuugu

SEQ ID NO: 3531840 - RNA, 18 nt, Human
cuuaauggaguucuugug

SEQ ID NO: 3531841 - RNA, 14 nt, Human
cuuaauggaugaaa

SEQ ID NO: 3531842 - RNA, 13 nt, Human
cuuaauguacaua

SEQ ID NO: 3531843 - RNA, 15 nt, Human
cuuaauguacauagu

SEQ ID NO: 3531844 - RNA, 14 nt, Human
cuuaauguaucaaa

SEQ ID NO: 3531845 - RNA, 23 nt, Human
cuuaauguaucaaacuguauaac

SEQ ID NO: 3531846 - RNA, 14 nt, Human
cuuaauguauguua

SEQ ID NO: 3531847 - RNA, 17 nt, Human
cuuaauguauguuacca

SEQ ID NO: 3531848 - RNA, 14 nt, Human
cuuaauguuuauuc

SEQ ID NO: 3531849 - RNA, 23 nt, Human
cuuaauguuuauuccugauaaua

SEQ ID NO: 3531850 - RNA, 17 nt, Human
cuuaauuaaaagaauau

SEQ ID NO: 3531851 - RNA, 19 nt, Human
cuuaauuaaaagaauauuu

SEQ ID NO: 3531852 - RNA, 15 nt, Human
cuuaauuaaguaaac

SEQ ID NO: 3531853 - RNA, 13 nt, Human
cuuaauuaauuug

SEQ ID NO: 3531854 - RNA, 15 nt, Human
cuuaauuaauuugau

SEQ ID NO: 3531855 - RNA, 16 nt, Human
cuuaauuacuuaaaaa

SEQ ID NO: 3531856 - RNA, 21 nt, Human
cuuaauuauuauaaaaauauu

SEQ ID NO: 3531857 - RNA, 15 nt, Human
cuuaauuauuauuug

SEQ ID NO: 3531858 - RNA, 17 nt, Human
cuuaauuccuuucucau

SEQ ID NO: 3531859 - RNA, 19 nt, Human
cuuaauuccuuucucaucc

SEQ ID NO: 3531860 - RNA, 20 nt, Human
cuuaauucuuagcucauucu

SEQ ID NO: 3531861 - RNA, 15 nt, Human
cuuaauugcacucua

SEQ ID NO: 3531862 - RNA, 19 nt, Human
cuuaauuguucauuuugag

SEQ ID NO: 3531863 - RNA, 15 nt, Human
cuuaauuuauuauua

SEQ ID NO: 3531864 - RNA, 23 nt, Human
cuuaauuuccuuuuugacacuga

SEQ ID NO: 3531865 - RNA, 12 nt, Human
cuuaauuucuaa

SEQ ID NO: 3531866 - RNA, 15 nt, Human
cuuaauuuggaaacu

SEQ ID NO: 3531867 - RNA, 16 nt, Human
cuuaauuuggaaacua

SEQ ID NO: 3531868 - RNA, 11 nt, Human
cuuaauuuugg

SEQ ID NO: 3531869 - RNA, 19 nt, Human
cuuaauuuuuuuuucauag

SEQ ID NO: 3531870 - RNA, 15 nt, Human
cuuacaaaaacacuu

SEQ ID NO: 3531871 - RNA, 18 nt, Human
cuuacaaaugauugcuuu

SEQ ID NO: 3531872 - RNA, 16 nt, Human
cuuacaagccagcugg

SEQ ID NO: 3531873 - RNA, 20 nt, Human
cuuacaauauugauugggaa

SEQ ID NO: 3531874 - RNA, 21 nt, Human
cuuacaaucgcaaaucaaaac

SEQ ID NO: 3531875 - RNA, 20 nt, Human
cuuacaauucccugcugucg

SEQ ID NO: 3531876 - RNA, 23 nt, Human
cuuacaauuuuuuuaauuuugua

SEQ ID NO: 3531877 - RNA, 16 nt, Human
cuuacacaaaggggau

SEQ ID NO: 3531878 - RNA, 13 nt, Human
cuuacacauacag

SEQ ID NO: 3531879 - RNA, 20 nt, Human
cuuacacauacaguuuuaug

SEQ ID NO: 3531880 - RNA, 11 nt, Human
cuuacacccac

SEQ ID NO: 3531881 - RNA, 20 nt, Human
cuuacacccacaguggaaag

SEQ ID NO: 3531882 - RNA, 23 nt, Human
cuuacaccucguuagggaagaga

SEQ ID NO: 3531883 - RNA, 12 nt, Human
cuuacacugccu

SEQ ID NO: 3531884 - RNA, 19 nt, Human
cuuacacugccuguauacu

SEQ ID NO: 3531885 - RNA, 12 nt, Human
cuuacagcaggc

SEQ ID NO: 3531886 - RNA, 13 nt, Human
cuuacagcaggca

SEQ ID NO: 3531887 - RNA, 16 nt, Human
cuuacagccucugacu

SEQ ID NO: 3531888 - RNA, 14 nt, Human
cuuacaggugauua

SEQ ID NO: 3531889 - RNA, 18 nt, Human
cuuacaguuuuaaauucu

SEQ ID NO: 3531890 - RNA, 19 nt, Human
cuuacauaaacaucagguu

SEQ ID NO: 3531891 - RNA, 17 nt, Human
cuuacaugagaacagac

SEQ ID NO: 3531892 - RNA, 14 nt, Human
cuuacauguuuucu

SEQ ID NO: 3531893 - RNA, 21 nt, Human
cuuacauguuuucuuugcuuu

SEQ ID NO: 3531894 - RNA, 16 nt, Human
cuuacauucucuaaua

SEQ ID NO: 3531895 - RNA, 22 nt, Human
cuuacauucucuaauaagaaaa

SEQ ID NO: 3531896 - RNA, 15 nt, Human
cuuacauugugaaac

SEQ ID NO: 3531897 - RNA, 20 nt, Human
cuuacauuguucaauuagaa

SEQ ID NO: 3531898 - RNA, 18 nt, Human
cuuacauuugugagauuc

SEQ ID NO: 3531899 - RNA, 20 nt, Human
cuuacauuuuacuuuuuccu

SEQ ID NO: 3531900 - RNA, 22 nt, Human
cuuacauuuuuacaauaaauaa

SEQ ID NO: 3531901 - RNA, 14 nt, Human
cuuaccaacuuucu

SEQ ID NO: 3531902 - RNA, 21 nt, Human
cuuacccaggugggucccggc

SEQ ID NO: 3531903 - RNA, 13 nt, Human
cuuaccccugccu

SEQ ID NO: 3531904 - RNA, 20 nt, Human
cuuacccuucugugcccagc

SEQ ID NO: 3531905 - RNA, 22 nt, Human
cuuaccgcguaaugcgccaaua

SEQ ID NO: 3531906 - RNA, 15 nt, Human
cuuaccuaacaucug

SEQ ID NO: 3531907 - RNA, 21 nt, Human
cuuaccuaagugacauuugua

SEQ ID NO: 3531908 - RNA, 18 nt, Human
cuuaccuaccacaugcca

SEQ ID NO: 3531909 - RNA, 18 nt, Human
cuuaccuacuuucuucag

SEQ ID NO: 3531910 - RNA, 21 nt, Human
cuuaccuagugaaacuuuucu

SEQ ID NO: 3531911 - RNA, 13 nt, Human
cuuaccuccugcc

SEQ ID NO: 3531912 - RNA, 20 nt, Human
cuuaccuccugcccaggaga

SEQ ID NO: 3531913 - RNA, 15 nt, Human
cuuaccucuuccgga

SEQ ID NO: 3531914 - RNA, 11 nt, Human
cuuaccugaca

SEQ ID NO: 3531915 - RNA, 19 nt, Human
cuuaccugacacaagagga

SEQ ID NO: 3531916 - RNA, 19 nt, Human
cuuaccugaccucuugcug

SEQ ID NO: 3531917 - RNA, 17 nt, Human
cuuaccugaguugaaga

SEQ ID NO: 3531918 - RNA, 12 nt, Human
cuuaccuggccc

SEQ ID NO: 3531919 - RNA, 16 nt, Human
cuuaccuuuaccccau

SEQ ID NO: 3531920 - RNA, 13 nt, Human
cuuaccuuuuuau

SEQ ID NO: 3531921 - RNA, 22 nt, Human
cuuacgaaaaaaugguagcauu

SEQ ID NO: 3531922 - RNA, 20 nt, Human
cuuacgaauauuuucaguaa

SEQ ID NO: 3531923 - RNA, 15 nt, Human
cuuacgaucaggcac

SEQ ID NO: 3531924 - RNA, 17 nt, Human
cuuacgaucaggcacag

SEQ ID NO: 3531925 - RNA, 21 nt, Human
cuuacgaucaggcacagguca

SEQ ID NO: 3531926 - RNA, 18 nt, Human
cuuacgauggcacccagu

SEQ ID NO: 3531927 - RNA, 17 nt, Human
cuuacuaaaaaguauaa

SEQ ID NO: 3531928 - RNA, 18 nt, Human
cuuacuaaaaaguauaaa

SEQ ID NO: 3531929 - RNA, 14 nt, Human
cuuacuaaaauaua

SEQ ID NO: 3531930 - RNA, 22 nt, Human
cuuacuaaaauauauauagaaa

SEQ ID NO: 3531931 - RNA, 18 nt, Human
cuuacuacaugugggagc

SEQ ID NO: 3531932 - RNA, 12 nt, Human
cuuacuaggaag

SEQ ID NO: 3531933 - RNA, 19 nt, Human
cuuacuauuaagcaguaaa

SEQ ID NO: 3531934 - RNA, 21 nt, Human
gcgugacacucuccuugcagu

SEQ ID NO: 3531935 - RNA, 14 nt, Human
gcgugacucaccca

SEQ ID NO: 3531936 - RNA, 16 nt, Human
gcgugagaccugcccc

SEQ ID NO: 3531937 - RNA, 23 nt, Human
gcgugagcuuaaaauacaagacu

SEQ ID NO: 3531938 - RNA, 12 nt, Human
gcgugaucucag

SEQ ID NO: 3531939 - RNA, 17 nt, Human
gcgugccgugugagugu

SEQ ID NO: 3531940 - RNA, 19 nt, Human
gcgugcuccagccuggcuc

SEQ ID NO: 3531941 - RNA, 21 nt, Human
gcguggaacucgugucuggca

SEQ ID NO: 3531942 - RNA, 14 nt, Human
gcguggacaggugu

SEQ ID NO: 3531943 - RNA, 14 nt, Human
gcguggagggaggc

SEQ ID NO: 3531944 - RNA, 17 nt, Human
gcguggagggaggcccc

SEQ ID NO: 3531945 - RNA, 21 nt, Human
gcguggagggaggccccaggg

SEQ ID NO: 3531946 - RNA, 19 nt, Human
gcguggagggcguggaggg

SEQ ID NO: 3531947 - RNA, 14 nt, Human
gcguggauuaaacu

SEQ ID NO: 3531948 - RNA, 17 nt, Human
gcguggcaaauauaaaa

SEQ ID NO: 3531949 - RNA, 14 nt, Human
gcguggcccaaggc

SEQ ID NO: 3531950 - RNA, 13 nt, Human
gcgugguggacau

SEQ ID NO: 3531951 - RNA, 20 nt, Human
gcgugguggacaugcacagc

SEQ ID NO: 3531952 - RNA, 18 nt, Human
gcgugguggucccugggu

SEQ ID NO: 3531953 - RNA, 17 nt, Human
gcguguccccggggccc

SEQ ID NO: 3531954 - RNA, 17 nt, Human
gcgugugccugugugcg

SEQ ID NO: 3531955 - RNA, 11 nt, Human
gcguguggcuc

SEQ ID NO: 3531956 - RNA, 13 nt, Human
gcguguggcucac

SEQ ID NO: 3531957 - RNA, 18 nt, Human
gcguguguacacgggacu

SEQ ID NO: 3531958 - RNA, 12 nt, Human
gcguguguagag

SEQ ID NO: 3531959 - RNA, 21 nt, Human
gcguguguagaguuaagaagc

SEQ ID NO: 3531960 - RNA, 17 nt, Human
gcguguguccaugugug

SEQ ID NO: 3531961 - RNA, 21 nt, Human
gcguuaacaguuccuuucaaa

SEQ ID NO: 3531962 - RNA, 16 nt, Human
gcguuacuaauuggcc

SEQ ID NO: 3531963 - RNA, 17 nt, Human
gcguucaccagugaccu

SEQ ID NO: 3531964 - RNA, 14 nt, Human
gcguucuuguaauu

SEQ ID NO: 3531965 - RNA, 12 nt, Human
gcguugaaauug

SEQ ID NO: 3531966 - RNA, 16 nt, Human
gcguugccugucgcuu

SEQ ID NO: 3531967 - RNA, 19 nt, Human
gcguuggaauuaaaacaau

SEQ ID NO: 3531968 - RNA, 20 nt, Human
gcguuguaaaauauagcugu

SEQ ID NO: 3531969 - RNA, 23 nt, Human
gcguuguugcauguuugaaauga

SEQ ID NO: 3531970 - RNA, 19 nt, Human
gcguuuaagacuguaauga

SEQ ID NO: 3531971 - RNA, 14 nt, Human
gcuaaaaagcaaca

SEQ ID NO: 3531972 - RNA, 11 nt, Human
gcuaaaaaugg

SEQ ID NO: 3531973 - RNA, 20 nt, Human
gcuaaaaaugggacuucuuu

SEQ ID NO: 3531974 - RNA, 19 nt, Human
gcuaaaaccaucauaguac

SEQ ID NO: 3531975 - RNA, 12 nt, Human
gcuaaaagaaac

SEQ ID NO: 3531976 - RNA, 22 nt, Human
cuuagaaaaggugauaaaauca

SEQ ID NO: 3531977 - RNA, 23 nt, Human
cuuagaaaaggugauaaaaucau

SEQ ID NO: 3531978 - RNA, 13 nt, Human
cuuagaaaaugug

SEQ ID NO: 3531979 - RNA, 14 nt, Human
cuuagaaagcaggg

SEQ ID NO: 3531980 - RNA, 16 nt, Human
cuuagaaagcaggggc

SEQ ID NO: 3531981 - RNA, 17 nt, Human
cuuagaaagcaggggcu

SEQ ID NO: 3531982 - RNA, 21 nt, Human
cuuagaaauaacagaagaaaa

SEQ ID NO: 3531983 - RNA, 23 nt, Human
cuuagaaauaacagaagaaaaua

SEQ ID NO: 3531984 - RNA, 21 nt, Human
cuuagaaauguaaacugccau

SEQ ID NO: 3531985 - RNA, 17 nt, Human
cuuagaaauugcauuuc

SEQ ID NO: 3531986 - RNA, 15 nt, Human
cuuagaacauuuuaa

SEQ ID NO: 3531987 - RNA, 15 nt, Human
cuuagaagucacaca

SEQ ID NO: 3531988 - RNA, 17 nt, Human
cuuagaagucacacagu

SEQ ID NO: 3531989 - RNA, 22 nt, Human
cuuagaaguggaccaggacagg

SEQ ID NO: 3531990 - RNA, 16 nt, Human
cuuagaauaaaauugu

SEQ ID NO: 3531991 - RNA, 19 nt, Human
cuuagacagaggcccucaa

SEQ ID NO: 3531992 - RNA, 15 nt, Human
cuuagaccaccaagc

SEQ ID NO: 3531993 - RNA, 19 nt, Human
cuuagaccaccaagccuug

SEQ ID NO: 3531994 - RNA, 14 nt, Human
cuuagaccucagcc

SEQ ID NO: 3531995 - RNA, 15 nt, Human
cuuagaccucagccu

SEQ ID NO: 3531996 - RNA, 16 nt, Human
cuuagaccucagccug

SEQ ID NO: 3531997 - RNA, 16 nt, Human
cuuagacuucugcuuu

SEQ ID NO: 3531998 - RNA, 17 nt, Human
cuuagacuugaaauacu

SEQ ID NO: 3531999 - RNA, 19 nt, Human
cuuagagcaguuucugucc

SEQ ID NO: 3532000 - RNA, 14 nt, Human
cuuagagccaggca

SEQ ID NO: 3532001 - RNA, 23 nt, Human
cuuagagccucccucaauucccc

SEQ ID NO: 3532002 - RNA, 21 nt, Human
cuuagagggauuucuuugcug

SEQ ID NO: 3532003 - RNA, 17 nt, Human
cuuagaguuggccauau

SEQ ID NO: 3532004 - RNA, 14 nt, Human
cuuagaguuucugu

SEQ ID NO: 3532005 - RNA, 15 nt, Human
cuuagaucuggcaug

SEQ ID NO: 3532006 - RNA, 19 nt, Human
cuuagauguauauauuucc

SEQ ID NO: 3532007 - RNA, 18 nt, Human
cuuagauguucuaagucu

SEQ ID NO: 3532008 - RNA, 16 nt, Human
cuuagauguuucacac

SEQ ID NO: 3532009 - RNA, 17 nt, Human
cuuagauuagcucugga

SEQ ID NO: 3532010 - RNA, 18 nt, Human
cuuagauuagcucuggac

SEQ ID NO: 3532011 - RNA, 20 nt, Human
cuuagauuagcucuggacca

SEQ ID NO: 3532012 - RNA, 24 nt, Human
cuuagauucucugugucuaagauu

SEQ ID NO: 3532013 - RNA, 21 nt, Human
cuuagauuucauaguucagaa

SEQ ID NO: 3532014 - RNA, 21 nt, Human
cuuagcacuaccacuccugcc

SEQ ID NO: 3532015 - RNA, 18 nt, Human
cuuagcauccuaagaaau

SEQ ID NO: 3532016 - RNA, 19 nt, Human
cuuagcauccuaagaaaua

SEQ ID NO: 3532017 - RNA, 22 nt, Human
cuuagcauccuaagaaauaugu

SEQ ID NO: 3532018 - RNA, 14 nt, Human
cuuagcaugcacaa

SEQ ID NO: 3532019 - RNA, 18 nt, Human
cuuagcauguuugcugaa

SEQ ID NO: 3532020 - RNA, 20 nt, Human
cuuagcccccacccacuucc

SEQ ID NO: 3532021 - RNA, 14 nt, Human
cuuagccucccuga

SEQ ID NO: 3532022 - RNA, 18 nt, Human
cuuagccuggaccucuga

SEQ ID NO: 3532023 - RNA, 14 nt, Human
cuuagccuggagca

SEQ ID NO: 3532024 - RNA, 22 nt, Human
cuuagccuggagcaccuuuccu

SEQ ID NO: 3532025 - RNA, 14 nt, Human
cuuagcuaucagaa

SEQ ID NO: 3532026 - RNA, 20 nt, Human
cuuagcucaaugagcauguu

SEQ ID NO: 3532027 - RNA, 22 nt, Human
cuuagcucauucuccuuguguu

SEQ ID NO: 3532028 - RNA, 11 nt, Human
cuuagcucccu

SEQ ID NO: 3532029 - RNA, 17 nt, Human
cuuagcucccucccgca

SEQ ID NO: 3532030 - RNA, 19 nt, Human
cuuagcucucccaacucuu

SEQ ID NO: 3532031 - RNA, 14 nt, Human
cuuagcugucugcu

SEQ ID NO: 3532032 - RNA, 13 nt, Human
cuuagcuucagga

SEQ ID NO: 3532033 - RNA, 15 nt, Human
cuuagcuucaggaac

SEQ ID NO: 3532034 - RNA, 17 nt, Human
cuuagcuuuuuaauugu

SEQ ID NO: 3532035 - RNA, 15 nt, Human
cuuaggaagaauuuu

SEQ ID NO: 3532036 - RNA, 20 nt, Human
cuuaggaagagccuuccacc

SEQ ID NO: 3532037 - RNA, 23 nt, Human
cuuaggaagagccuuccacccag

SEQ ID NO: 3532038 - RNA, 20 nt, Human
cuuaggacagggucccugcu

SEQ ID NO: 3532039 - RNA, 22 nt, Human
cuuaggaugugugcaugugugu

SEQ ID NO: 3532040 - RNA, 14 nt, Human
cuuaggcagggaag

SEQ ID NO: 3532041 - RNA, 19 nt, Human
cuuaggcaugacuguagaa

SEQ ID NO: 3532042 - RNA, 15 nt, Human
cuuaggccuuccucu

SEQ ID NO: 3532043 - RNA, 17 nt, Human
cuuaggccuuccucucu

SEQ ID NO: 3532044 - RNA, 13 nt, Human
cuuagggaagcug

SEQ ID NO: 3532045 - RNA, 17 nt, Human
cuuagggaagcuggccu

SEQ ID NO: 3532046 - RNA, 19 nt, Human
cuuagggaaggauacaaaa

SEQ ID NO: 3532047 - RNA, 18 nt, Human
cuuagggacaggacccca

SEQ ID NO: 3532048 - RNA, 21 nt, Human
cuuagggacaggaccccagcu

SEQ ID NO: 3532049 - RNA, 22 nt, Human
cuuagggacaggaccccagcuc

SEQ ID NO: 3532050 - RNA, 18 nt, Human
cuuagggcacugggcugu

SEQ ID NO: 3532051 - RNA, 14 nt, Human
cuuagggcccugga

SEQ ID NO: 3532052 - RNA, 16 nt, Human
cuuagggcccuggagg

SEQ ID NO: 3532053 - RNA, 18 nt, Human
cuuagggcccuggaggcg

SEQ ID NO: 3532054 - RNA, 11 nt, Human
cuuagggucuc

SEQ ID NO: 3532055 - RNA, 13 nt, Human
cuuagggucucag

SEQ ID NO: 3532056 - RNA, 16 nt, Human
cuuagggucucagggu

SEQ ID NO: 3532057 - RNA, 22 nt, Human
cuuagggugaaccacuucauuc

SEQ ID NO: 3532058 - RNA, 22 nt, Human
cuuaggugugauuauaaaauca

SEQ ID NO: 3532059 - RNA, 15 nt, Human
cuuaguaaaauuuau

SEQ ID NO: 3532060 - RNA, 20 nt, Human
cuuaguaaugcuacguguga

SEQ ID NO: 3532061 - RNA, 16 nt, Human
cuuaguagauuaaaaa

SEQ ID NO: 3532062 - RNA, 13 nt, Human
cuuaguaucucau

SEQ ID NO: 3532063 - RNA, 19 nt, Human
cuuaguaucucaucaacaa

SEQ ID NO: 3532064 - RNA, 14 nt, Human
cuuagucacugaga

SEQ ID NO: 3532065 - RNA, 20 nt, Human
cuuagucacugagacagccc

SEQ ID NO: 3532066 - RNA, 22 nt, Human
cuuagucacugagacagcccgg

SEQ ID NO: 3532067 - RNA, 23 nt, Human
cuuagucacugccugcagagguc

SEQ ID NO: 3532068 - RNA, 12 nt, Human
cuuaguccccca

SEQ ID NO: 3532069 - RNA, 15 nt, Human
cuuagucuagguccu

SEQ ID NO: 3532070 - RNA, 21 nt, Human
cuuagucuagguccuuguugu

SEQ ID NO: 3532071 - RNA, 20 nt, Human
cuuagucuucucauagcauu

SEQ ID NO: 3532072 - RNA, 19 nt, Human
cuuagugcaguuauuugcu

SEQ ID NO: 3532073 - RNA, 22 nt, Human
cuuagugcggacaaguuuuaau

SEQ ID NO: 3532074 - RNA, 12 nt, Human
cuuaguggacag

SEQ ID NO: 3532075 - RNA, 18 nt, Human
cuuagugggguuuuauau

SEQ ID NO: 3532076 - RNA, 15 nt, Human
cuuaguguaugauua

SEQ ID NO: 3532077 - RNA, 17 nt, Human
cuuaguguuucugugca

SEQ ID NO: 3532078 - RNA, 14 nt, Human
cuuaguucucacug

SEQ ID NO: 3532079 - RNA, 15 nt, Human
gcuggacccagccag

SEQ ID NO: 3532080 - RNA, 21 nt, Human
gcuggacccugaccagcuccc

SEQ ID NO: 3532081 - RNA, 22 nt, Human
gcuggacccugaccagcucccc

SEQ ID NO: 3532082 - RNA, 15 nt, Human
gcuggaccuugaacu

SEQ ID NO: 3532083 - RNA, 16 nt, Human
gcuggaccuugaacug

SEQ ID NO: 3532084 - RNA, 21 nt, Human
gcuggaccuugaacuggguac

SEQ ID NO: 3532085 - RNA, 22 nt, Human
gcuggaccuugaacuggguacu

SEQ ID NO: 3532086 - RNA, 19 nt, Human
gcuggacggguuagacagc

SEQ ID NO: 3532087 - RNA, 16 nt, Human
gcuggacgucuuucuu

SEQ ID NO: 3532088 - RNA, 20 nt, Human
gcuggacgucuuucuuuuuu

SEQ ID NO: 3532089 - RNA, 20 nt, Human
gcuggacuccagaucugcac

SEQ ID NO: 3532090 - RNA, 23 nt, Human
gcuggacuccagaucugcaccgc

SEQ ID NO: 3532091 - RNA, 16 nt, Human
gcuggacucccucaag

SEQ ID NO: 3532092 - RNA, 21 nt, Human
gcuggacucucagucucugag

SEQ ID NO: 3532093 - RNA, 18 nt, Human
gcuggacugaggccugag

SEQ ID NO: 3532094 - RNA, 20 nt, Human
gcuggacuggaggccccugg

SEQ ID NO: 3532095 - RNA, 13 nt, Human
gcuggacuggcug

SEQ ID NO: 3532096 - RNA, 20 nt, Human
gcuggacuucuaccugcccu

SEQ ID NO: 3532097 - RNA, 22 nt, Human
gcuggacuucuaccugcccuca

SEQ ID NO: 3532098 - RNA, 23 nt, Human
gcuggacuucuaccugcccucaa

SEQ ID NO: 3532099 - RNA, 13 nt, Human
gcuggacuuggag

SEQ ID NO: 3532100 - RNA, 14 nt, Human
gcuggagaagagag

SEQ ID NO: 3532101 - RNA, 18 nt, Human
gcuggagaagagaggaga

SEQ ID NO: 3532102 - RNA, 18 nt, Human
gcuggagacuccuaggca

SEQ ID NO: 3532103 - RNA, 20 nt, Human
gcuggagagcauagggucug

SEQ ID NO: 3532104 - RNA, 15 nt, Human
gcuggagaggagccc

SEQ ID NO: 3532105 - RNA, 20 nt, Human
gcuggagaugaggccagacc

SEQ ID NO: 3532106 - RNA, 16 nt, Human
gcuggagccacuaacu

SEQ ID NO: 3532107 - RNA, 22 nt, Human
gcuggagcccagggagcggaaa

SEQ ID NO: 3532108 - RNA, 10 nt, Human
gcuggagccu

SEQ ID NO: 3532109 - RNA, 23 nt, Human
gcuggagccuguguaacagcucc

SEQ ID NO: 3532110 - RNA, 12 nt, Human
gcuggagcggcu

SEQ ID NO: 3532111 - RNA, 17 nt, Human
gcuggagcucugcccau

SEQ ID NO: 3532112 - RNA, 14 nt, Human
gcuggaggagccca

SEQ ID NO: 3532113 - RNA, 20 nt, Human
gcuggaggagcccaggccag

SEQ ID NO: 3532114 - RNA, 13 nt, Human
gcuggaggcccag

SEQ ID NO: 3532115 - RNA, 16 nt, Human
gcuggagguggggcga

SEQ ID NO: 3532116 - RNA, 22 nt, Human
gcuggagguggggcgaggcagg

SEQ ID NO: 3532117 - RNA, 22 nt, Human
gcuggagugcagugagccgaga

SEQ ID NO: 3532118 - RNA, 19 nt, Human
gcuggagugcaguggugcg

SEQ ID NO: 3532119 - RNA, 21 nt, Human
gcuggagugugaggguccugc

SEQ ID NO: 3532120 - RNA, 21 nt, Human
gcuggaguuagggacugacca

SEQ ID NO: 3532121 - RNA, 20 nt, Human
gcuggaguucagugguguga

SEQ ID NO: 3532122 - RNA, 17 nt, Human
gcuggaguuggggcaga

SEQ ID NO: 3532123 - RNA, 20 nt, Human
gcuggaguuggggcagagga

SEQ ID NO: 3532124 - RNA, 14 nt, Human
gcuggauaaaauga

SEQ ID NO: 3532125 - RNA, 15 nt, Human
gcuggauaaaaugag

SEQ ID NO: 3532126 - RNA, 23 nt, Human
gcuggaucacagcugcuuucugu

SEQ ID NO: 3532127 - RNA, 13 nt, Human
gcuggaugagcuc

SEQ ID NO: 3532128 - RNA, 16 nt, Human
gcuggauggagcccag

SEQ ID NO: 3532129 - RNA, 20 nt, Human
gcuggcacccaccguggagg

SEQ ID NO: 3532130 - RNA, 13 nt, Human
gcuggcagcagag

SEQ ID NO: 3532131 - RNA, 15 nt, Human
gcuggcagcagagug

SEQ ID NO: 3532132 - RNA, 17 nt, Human
gcuggcaguccuggaag

SEQ ID NO: 3532133 - RNA, 16 nt, Human
gcuggcauuugcaccu

SEQ ID NO: 3532134 - RNA, 19 nt, Human
gcuggccaaauagcaaaga

SEQ ID NO: 3532135 - RNA, 13 nt, Human
gcuggccacugca

SEQ ID NO: 3532136 - RNA, 19 nt, Human
gcuggccacugcacagagc

SEQ ID NO: 3532137 - RNA, 21 nt, Human
gcuggccacugcacagagcuc

SEQ ID NO: 3532138 - RNA, 13 nt, Human
gcuggccagcccc

SEQ ID NO: 3532139 - RNA, 16 nt, Human
gcuggccagccccaca

SEQ ID NO: 3532140 - RNA, 13 nt, Human
gcuggccagccgc

SEQ ID NO: 3532141 - RNA, 13 nt, Human
gcuggccagccug

SEQ ID NO: 3532142 - RNA, 15 nt, Human
gcuggccagccuggg

SEQ ID NO: 3532143 - RNA, 15 nt, Human
gcuggccauggagaa

SEQ ID NO: 3532144 - RNA, 19 nt, Human
gcuggccauggagaaagcu

SEQ ID NO: 3532145 - RNA, 12 nt, Human
gcuggcccagcc

SEQ ID NO: 3532146 - RNA, 13 nt, Human
gcuggcccagccc

SEQ ID NO: 3532147 - RNA, 15 nt, Human
gcuggcccagcccug

SEQ ID NO: 3532148 - RNA, 17 nt, Human
gcuggcccagcccugcu

SEQ ID NO: 3532149 - RNA, 20 nt, Human
gcuggcccagggcccagagc

SEQ ID NO: 3532150 - RNA, 12 nt, Human
gcuggccccagc

SEQ ID NO: 3532151 - RNA, 17 nt, Human
gcuggccccagcccugc

SEQ ID NO: 3532152 - RNA, 21 nt, Human
gcuggccccagcccugcuggg

SEQ ID NO: 3532153 - RNA, 16 nt, Human
gcuggccccagggcac

SEQ ID NO: 3532154 - RNA, 12 nt, Human
gcuggcccccac

SEQ ID NO: 3532155 - RNA, 14 nt, Human
gcuggcccccacug

SEQ ID NO: 3532156 - RNA, 19 nt, Human
gcuggcccccacuggcugu

SEQ ID NO: 3532157 - RNA, 21 nt, Human
gcuggcccccacuggcugugg

SEQ ID NO: 3532158 - RNA, 22 nt, Human
gcuggcccccacuggcuguggg

SEQ ID NO: 3532159 - RNA, 12 nt, Human
gcuggccccuca

SEQ ID NO: 3532160 - RNA, 21 nt, Human
gcuggccccuuugggcccugc

SEQ ID NO: 3532161 - RNA, 23 nt, Human
gcuggccccuuugggcccugcau

SEQ ID NO: 3532162 - RNA, 17 nt, Human
gcuggcccgugacagac

SEQ ID NO: 3532163 - RNA, 16 nt, Human
gcuggcccugcccugg

SEQ ID NO: 3532164 - RNA, 19 nt, Human
gcuggccgaggguccuggc

SEQ ID NO: 3532165 - RNA, 18 nt, Human
gcuggccgcccccagccc

SEQ ID NO: 3532166 - RNA, 15 nt, Human
gcuggccgggcacag

SEQ ID NO: 3532167 - RNA, 18 nt, Human
gcuggccgggcacagcug

SEQ ID NO: 3532168 - RNA, 21 nt, Human
gcuggccucacccaccccugc

SEQ ID NO: 3532169 - RNA, 12 nt, Human
gcuggccucaga

SEQ ID NO: 3532170 - RNA, 19 nt, Human
gcuggccucucuagcacaa

SEQ ID NO: 3532171 - RNA, 12 nt, Human
gcuggccucugc

SEQ ID NO: 3532172 - RNA, 15 nt, Human
gcuggccuggaucuc

SEQ ID NO: 3532173 - RNA, 15 nt, Human
gcuggccuggccccu

SEQ ID NO: 3532174 - RNA, 18 nt, Human
gcuggccuggccccucag

SEQ ID NO: 3532175 - RNA, 20 nt, Human
gcuggccuggccccucaggg

SEQ ID NO: 3532176 - RNA, 21 nt, Human
gcuggccuugugguccaaaua

SEQ ID NO: 3532177 - RNA, 21 nt, Human
gcuggccuuuguaagugcagg

SEQ ID NO: 3532178 - RNA, 17 nt, Human
gcuggcgagagucuggc

SEQ ID NO: 3532179 - RNA, 12 nt, Human
gcuggcgccucu

SEQ ID NO: 3532180 - RNA, 13 nt, Human
gcuggcgccucug

SEQ ID NO: 3532181 - RNA, 14 nt, Human
gcuggcgccucugc

SEQ ID NO: 3532182 - RNA, 16 nt, Human
gcuggcggcuacucag

SEQ ID NO: 3532183 - RNA, 16 nt, Human
gcuggcucacaguaca

SEQ ID NO: 3532184 - RNA, 17 nt, Human
gcuggcucccagggcca

SEQ ID NO: 3532185 - RNA, 13 nt, Human
gcuggcuccccaa

SEQ ID NO: 3532186 - RNA, 21 nt, Human
gcuggcuccccaaagggugug

SEQ ID NO: 3532187 - RNA, 14 nt, Human
gcuggcuccccugc

SEQ ID NO: 3532188 - RNA, 20 nt, Human
gcuggcuccccugcagcccu

SEQ ID NO: 3532189 - RNA, 22 nt, Human
gcuggcuccccugcagcccugg

SEQ ID NO: 3532190 - RNA, 13 nt, Human
gcuggcucuucug

SEQ ID NO: 3532191 - RNA, 14 nt, Human
gcuggcugccuuag

SEQ ID NO: 3532192 - RNA, 11 nt, Human
gcuggcugggg

SEQ ID NO: 3532193 - RNA, 14 nt, Human
gcuggcuggggccu

SEQ ID NO: 3532194 - RNA, 15 nt, Human
gcuggcuguuggcug

SEQ ID NO: 3532195 - RNA, 23 nt, Human
gcuggcuguuggcugggggccuc

SEQ ID NO: 3532196 - RNA, 18 nt, Human
gcuggcuuuucuguuucc

SEQ ID NO: 3532197 - RNA, 14 nt, Human
gcugggaaagcaua

SEQ ID NO: 3532198 - RNA, 22 nt, Human
gcugggaacagugugcaaggca

SEQ ID NO: 3532199 - RNA, 16 nt, Human
gcugggaacucaccug

SEQ ID NO: 3532200 - RNA, 17 nt, Human
gcugggacgcucugcug

SEQ ID NO: 3532201 - RNA, 19 nt, Human
gcugggacguggcucagcc

SEQ ID NO: 3532202 - RNA, 13 nt, Human
gcugggacuacag

SEQ ID NO: 3532203 - RNA, 19 nt, Human
gcugggacuacaggcaccc

SEQ ID NO: 3532204 - RNA, 19 nt, Human
gcugggacuacagguguga

SEQ ID NO: 3532205 - RNA, 19 nt, Human
gcugggacucagccuucag

SEQ ID NO: 3532206 - RNA, 15 nt, Human
gcugggacuggccag

SEQ ID NO: 3532207 - RNA, 13 nt, Human
gcugggagagccu

SEQ ID NO: 3532208 - RNA, 19 nt, Human
gcugggagagccuuccagg

SEQ ID NO: 3532209 - RNA, 14 nt, Human
gcugggagaggcag

SEQ ID NO: 3532210 - RNA, 15 nt, Human
gcugggagaggcagc

SEQ ID NO: 3532211 - RNA, 14 nt, Human
gcugggagcuccac

SEQ ID NO: 3532212 - RNA, 21 nt, Human
gcugggagcuccacucugcuu

SEQ ID NO: 3532213 - RNA, 22 nt, Human
gcugggaggaaggacuucccug

SEQ ID NO: 3532214 - RNA, 17 nt, Human
gcugggaggagggagag

SEQ ID NO: 3532215 - RNA, 17 nt, Human
gcugggaggagggcagg

SEQ ID NO: 3532216 - RNA, 19 nt, Human
gcugggaggagggcaggca

SEQ ID NO: 3532217 - RNA, 21 nt, Human
gcugggaggagggcaggcauc

SEQ ID NO: 3532218 - RNA, 12 nt, Human
gcugggaggcaa

SEQ ID NO: 3532219 - RNA, 21 nt, Human
gcugggaggcaagaggggugg

SEQ ID NO: 3532220 - RNA, 15 nt, Human
gcugggaggcauggc

SEQ ID NO: 3532221 - RNA, 20 nt, Human
gcugggaggcauggcccugg

SEQ ID NO: 3532222 - RNA, 21 nt, Human
gcugggaugauuggagggggg

SEQ ID NO: 3532223 - RNA, 16 nt, Human
gcugggauuacaggug

SEQ ID NO: 3532224 - RNA, 20 nt, Human
gcuguaaaaugcaugauuuu

SEQ ID NO: 3532225 - RNA, 17 nt, Human
gcuguaaauuuggcuuc

SEQ ID NO: 3532226 - RNA, 18 nt, Human
gcuguaacguggcacugg

SEQ ID NO: 3532227 - RNA, 15 nt, Human
gcuguaacugccagg

SEQ ID NO: 3532228 - RNA, 14 nt, Human
gcuguaagcuccuu

SEQ ID NO: 3532229 - RNA, 23 nt, Human
gcuguaaggauccggaaagaaga

SEQ ID NO: 3532230 - RNA, 22 nt, Human
gcuguaaucuaugaauucuaag

SEQ ID NO: 3532231 - RNA, 21 nt, Human
gcuguacaaauauaagaauaa

SEQ ID NO: 3532232 - RNA, 16 nt, Human
gcuguacaucuauuuu

SEQ ID NO: 3532233 - RNA, 20 nt, Human
gcuguacaucuauuuuggau

SEQ ID NO: 3532234 - RNA, 23 nt, Human
gcuguacaucuauuuuggauugu

SEQ ID NO: 3532235 - RNA, 16 nt, Human
gcuguacccaguuucu

SEQ ID NO: 3532236 - RNA, 19 nt, Human
gcuguacugaaguaaaaca

SEQ ID NO: 3532237 - RNA, 17 nt, Human
gcuguacuucuugaaua

SEQ ID NO: 3532238 - RNA, 13 nt, Human
gcuguagaaaaaa

SEQ ID NO: 3532239 - RNA, 20 nt, Human
gcuguaggacucgcagucag

SEQ ID NO: 3532240 - RNA, 13 nt, Human
gcuguaggugugc

SEQ ID NO: 3532241 - RNA, 22 nt, Human
gcuguauaaaaucagccaauua

SEQ ID NO: 3532242 - RNA, 14 nt, Human
gcuguauaaguuau

SEQ ID NO: 3532243 - RNA, 14 nt, Human
gcuguaucugugcu

SEQ ID NO: 3532244 - RNA, 16 nt, Human
gcuguaucuuguuuuu

SEQ ID NO: 3532245 - RNA, 18 nt, Human
gcuguaucuuguuuuucc

SEQ ID NO: 3532246 - RNA, 14 nt, Human
gcuguauugucuga

SEQ ID NO: 3532247 - RNA, 15 nt, Human
gcuguauugucugaa

SEQ ID NO: 3532248 - RNA, 13 nt, Human
gcuguauuuuaaa

SEQ ID NO: 3532249 - RNA, 22 nt, Human
gcuguauuuuaaaagaaugauu

SEQ ID NO: 3532250 - RNA, 19 nt, Human
gcugucaauuacaggaagu

SEQ ID NO: 3532251 - RNA, 17 nt, Human
gcugucacaaccaagaa

SEQ ID NO: 3532252 - RNA, 15 nt, Human
gcugucaccucuccc

SEQ ID NO: 3532253 - RNA, 23 nt, Human
gcugucaggauugcgagagaugu

SEQ ID NO: 3532254 - RNA, 24 nt, Human
gcugucaggauugcgagagaugug

SEQ ID NO: 3532255 - RNA, 18 nt, Human
gcugucauaagaaugaau

SEQ ID NO: 3532256 - RNA, 11 nt, Human
gcugucaucug

SEQ ID NO: 3532257 - RNA, 16 nt, Human
gcugucaucugugcac

SEQ ID NO: 3532258 - RNA, 18 nt, Human
gcugucauugcuucuucu

SEQ ID NO: 3532259 - RNA, 14 nt, Human
gcuguccacccgcc

SEQ ID NO: 3532260 - RNA, 12 nt, Human
gcuguccagaca

SEQ ID NO: 3532261 - RNA, 16 nt, Human
gcuguccagacagccu

SEQ ID NO: 3532262 - RNA, 16 nt, Human
gcuguccagagaaaag

SEQ ID NO: 3532263 - RNA, 12 nt, Human
gcuguccagugc

SEQ ID NO: 3532264 - RNA, 23 nt, Human
gcugucccauagucccugccacg

SEQ ID NO: 3532265 - RNA, 22 nt, Human
gcugucccaucuccacuguuau

SEQ ID NO: 3532266 - RNA, 21 nt, Human
gcuguccccccacucccucac

SEQ ID NO: 3532267 - RNA, 23 nt, Human
gcuguccccucuugccccaaccc

SEQ ID NO: 3532268 - RNA, 13 nt, Human
gcugucccucacu

SEQ ID NO: 3532269 - RNA, 15 nt, Human
gcugucccucccccu

SEQ ID NO: 3532270 - RNA, 16 nt, Human
gcugucccucccccuu

SEQ ID NO: 3532271 - RNA, 14 nt, Human
gcugucccugucac

SEQ ID NO: 3532272 - RNA, 22 nt, Human
gcugucccuuacgugaguccug

SEQ ID NO: 3532273 - RNA, 22 nt, Human
gcugucccuugcuugccugcag

SEQ ID NO: 3532274 - RNA, 16 nt, Human
gcuguccuaggccaca

SEQ ID NO: 3532275 - RNA, 17 nt, Human
gcuguccuuacccaucu

SEQ ID NO: 3532276 - RNA, 22 nt, Human
gcuguccuuacccaucugcacc

SEQ ID NO: 3532277 - RNA, 14 nt, Human
gcuguccuuucuag

SEQ ID NO: 3532278 - RNA, 13 nt, Human
gcugucuccagac

SEQ ID NO: 3532279 - RNA, 17 nt, Human
gcugucuccauguuuga

SEQ ID NO: 3532280 - RNA, 17 nt, Human
gcugucugaucugugcu

SEQ ID NO: 3532281 - RNA, 18 nt, Human
gcugucugaucugugcuu

SEQ ID NO: 3532282 - RNA, 19 nt, Human
gcugucugaucugugcuuu

SEQ ID NO: 3532283 - RNA, 22 nt, Human
gcugucugaucugugcuuucca

SEQ ID NO: 3532284 - RNA, 15 nt, Human
gcugucugcagccuu

SEQ ID NO: 3532285 - RNA, 19 nt, Human
gcugucuggcacagccugc

SEQ ID NO: 3532286 - RNA, 23 nt, Human
gcugucugggugcuacuggggaa

SEQ ID NO: 3532287 - RNA, 14 nt, Human
gcugucuguggcuu

SEQ ID NO: 3532288 - RNA, 15 nt, Human
gcugucuguggcuuc

SEQ ID NO: 3532289 - RNA, 24 nt, Human
gcugucuucuggacaggcucugcu

SEQ ID NO: 3532290 - RNA, 19 nt, Human
gcugucuuucuugcucccu

SEQ ID NO: 3532291 - RNA, 18 nt, Human
gcugucuuuucuuugcca

SEQ ID NO: 3532292 - RNA, 18 nt, Human
gcugugaacauggacucu

SEQ ID NO: 3532293 - RNA, 13 nt, Human
gcugugaacccug

SEQ ID NO: 3532294 - RNA, 13 nt, Human
gcugugaccugcu

SEQ ID NO: 3532295 - RNA, 14 nt, Human
gcugugaccugcug

SEQ ID NO: 3532296 - RNA, 18 nt, Human
gcugugaccugcugagcu

SEQ ID NO: 3532297 - RNA, 23 nt, Human
gcugugaccugcugagcucugag

SEQ ID NO: 3532298 - RNA, 20 nt, Human
gcugugagccccugguccug

SEQ ID NO: 3532299 - RNA, 17 nt, Human
gcugugagccuuggcug

SEQ ID NO: 3532300 - RNA, 12 nt, Human
gcugugaggcug

SEQ ID NO: 3532301 - RNA, 14 nt, Human
gcugugaggcuguc

SEQ ID NO: 3532302 - RNA, 23 nt, Human
gcugugagggaggggaaaagcau

SEQ ID NO: 3532303 - RNA, 22 nt, Human
gcugugaguguaagugugagua

SEQ ID NO: 3532304 - RNA, 13 nt, Human
gcugugcaacgcc

SEQ ID NO: 3532305 - RNA, 14 nt, Human
gcugugccacccug

SEQ ID NO: 3532306 - RNA, 19 nt, Human
gcugugccacccugggcuc

SEQ ID NO: 3532307 - RNA, 15 nt, Human
gcugugccucgcucc

SEQ ID NO: 3532308 - RNA, 18 nt, Human
gcugugccucgcucccca

SEQ ID NO: 3532309 - RNA, 15 nt, Human
gcugugcuaugaauu

SEQ ID NO: 3532310 - RNA, 16 nt, Human
gcugugcuauggugcu

SEQ ID NO: 3532311 - RNA, 17 nt, Human
gcugugcuauggugcuc

SEQ ID NO: 3532312 - RNA, 12 nt, Human
gcugugcucaga

SEQ ID NO: 3532313 - RNA, 19 nt, Human
gcugugcucucaccagcug

SEQ ID NO: 3532314 - RNA, 21 nt, Human
gcugugcucuggacaggcaug

SEQ ID NO: 3532315 - RNA, 19 nt, Human
gcugugcugcccugaagaa

SEQ ID NO: 3532316 - RNA, 17 nt, Human
gcugugcugcccugccc

SEQ ID NO: 3532317 - RNA, 17 nt, Human
gcugugcuuaugguacc

SEQ ID NO: 3532318 - RNA, 20 nt, Human
gcugugcuugaaggcccugc

SEQ ID NO: 3532319 - RNA, 23 nt, Human
gcugugcuugaaggcccugcuga

SEQ ID NO: 3532320 - RNA, 15 nt, Human
gcuguggaagcaaca

SEQ ID NO: 3532321 - RNA, 14 nt, Human
gcuguggcaggcca

SEQ ID NO: 3532322 - RNA, 12 nt, Human
gcuguggccagg

SEQ ID NO: 3532323 - RNA, 13 nt, Human
gcuguggccagga

SEQ ID NO: 3532324 - RNA, 16 nt, Human
gcuguggccaggaggu

SEQ ID NO: 3532325 - RNA, 16 nt, Human
gcuguggccaggguga

SEQ ID NO: 3532326 - RNA, 14 nt, Human
gcuguggccugggc

SEQ ID NO: 3532327 - RNA, 15 nt, Human
gcugugggcucccuu

SEQ ID NO: 3532328 - RNA, 15 nt, Human
gcugugguuccuggg

SEQ ID NO: 3532329 - RNA, 13 nt, Human
gcugugguuuucu

SEQ ID NO: 3532330 - RNA, 15 nt, Human
gcugugguuuucuuu

SEQ ID NO: 3532331 - RNA, 13 nt, Human
gcuguguaaaguu

SEQ ID NO: 3532332 - RNA, 15 nt, Human
gcuguguaaaguuag

SEQ ID NO: 3532333 - RNA, 17 nt, Human
gcuguguaaaguuaguc

SEQ ID NO: 3532334 - RNA, 18 nt, Human
gcuguguaaaguuagucu

SEQ ID NO: 3532335 - RNA, 16 nt, Human
gcuguguaagauuugu

SEQ ID NO: 3532336 - RNA, 22 nt, Human
gcuguguacacugacaccuuug

SEQ ID NO: 3532337 - RNA, 21 nt, Human
gcuguguauaugguauauaua

SEQ ID NO: 3532338 - RNA, 22 nt, Human
gcuguguccaaaaccgccagcu

SEQ ID NO: 3532339 - RNA, 21 nt, Human
gcugugucugcccaaugaaua

SEQ ID NO: 3532340 - RNA, 20 nt, Human
gcugugugaauaccugcuca

SEQ ID NO: 3532341 - RNA, 15 nt, Human
gcugugugccugggg

SEQ ID NO: 3532342 - RNA, 13 nt, Human
gcugugugguuug

SEQ ID NO: 3532343 - RNA, 22 nt, Human
gcugugugguuugguguguucc

SEQ ID NO: 3532344 - RNA, 14 nt, Human
gcugugugucccag

SEQ ID NO: 3532345 - RNA, 22 nt, Human
gcuguguuguugcuucuuguga

SEQ ID NO: 3532346 - RNA, 16 nt, Human
gcuguguuuaauuuga

SEQ ID NO: 3532347 - RNA, 23 nt, Human
gcuguuaaauacaggaaacaguu

SEQ ID NO: 3532348 - RNA, 23 nt, Human
gcuguuagggguuauugguguaa

SEQ ID NO: 3532349 - RNA, 18 nt, Human
gcuguucaacaucacuga

SEQ ID NO: 3532350 - RNA, 15 nt, Human
gcuguucacagccag

SEQ ID NO: 3532351 - RNA, 20 nt, Human
gcuguucacccacagggcua

SEQ ID NO: 3532352 - RNA, 19 nt, Human
gcuguucagauuggacaua

SEQ ID NO: 3532353 - RNA, 13 nt, Human
gcuguucagcugg

SEQ ID NO: 3532354 - RNA, 21 nt, Human
gcuguucaugaaagauucaau

SEQ ID NO: 3532355 - RNA, 16 nt, Human
gcuguucugcacugaa

SEQ ID NO: 3532356 - RNA, 17 nt, Human
gcuguucugcacugaaa

SEQ ID NO: 3532357 - RNA, 12 nt, Human
gcuguucugugg

SEQ ID NO: 3532358 - RNA, 12 nt, Human
gcuguucuuccu

SEQ ID NO: 3532359 - RNA, 20 nt, Human
gcuguucuucuguucugcag

SEQ ID NO: 3532360 - RNA, 14 nt, Human
gcuguugacauauu

SEQ ID NO: 3532361 - RNA, 13 nt, Human
gcuguugaccagg

SEQ ID NO: 3532362 - RNA, 12 nt, Human
gcuguugagcug

SEQ ID NO: 3532363 - RNA, 21 nt, Human
gcuguugaugaggccucuugg

SEQ ID NO: 3532364 - RNA, 18 nt, Human
gcuguugauuucuuucca

SEQ ID NO: 3532365 - RNA, 13 nt, Human
gcuguugccucau

SEQ ID NO: 3532366 - RNA, 21 nt, Human
gcuguugcguaacuggcugug

SEQ ID NO: 3532367 - RNA, 23 nt, Human
gcuguugcguaacuggcuguguu

SEQ ID NO: 3532368 - RNA, 16 nt, Human
gcuguugcugaauagg

SEQ ID NO: 3532369 - RNA, 18 nt, Human
ggaacaaggagucagaca

SEQ ID NO: 3532370 - RNA, 15 nt, Human
ggaacaaggcaaggc

SEQ ID NO: 3532371 - RNA, 17 nt, Human
ggaacaaggcaaggcug

SEQ ID NO: 3532372 - RNA, 13 nt, Human
ggaacaaucuaaa

SEQ ID NO: 3532373 - RNA, 20 nt, Human
ggaacacuagacaagccaga

SEQ ID NO: 3532374 - RNA, 15 nt, Human
ggaacacuccuucac

SEQ ID NO: 3532375 - RNA, 19 nt, Human
ggaacacuccuucacagau

SEQ ID NO: 3532376 - RNA, 14 nt, Human
ggaacacucugaga

SEQ ID NO: 3532377 - RNA, 13 nt, Human
ggaacagaaauug

SEQ ID NO: 3532378 - RNA, 23 nt, Human
ggaacagaagaggaaagagagac

SEQ ID NO: 3532379 - RNA, 19 nt, Human
ggaacagaauguuuuacug

SEQ ID NO: 3532380 - RNA, 15 nt, Human
ggaacagacaggaga

SEQ ID NO: 3532381 - RNA, 17 nt, Human
ggaacagacuggaagca

SEQ ID NO: 3532382 - RNA, 17 nt, Human
ggaacagcacuggggag

SEQ ID NO: 3532383 - RNA, 21 nt, Human
ggaacagcacuggggagucuu

SEQ ID NO: 3532384 - RNA, 20 nt, Human
ggaacagcuaugggagcccc

SEQ ID NO: 3532385 - RNA, 18 nt, Human
ggaacagugugcaaggca

SEQ ID NO: 3532386 - RNA, 18 nt, Human
ggaacauaaaaaggacau

SEQ ID NO: 3532387 - RNA, 15 nt, Human
ggaacaucaucaagg

SEQ ID NO: 3532388 - RNA, 23 nt, Human
ggaacauccuuugcagggcagcc

SEQ ID NO: 3532389 - RNA, 14 nt, Human
ggaacaugcccccu

SEQ ID NO: 3532390 - RNA, 13 nt, Human
ggaacauggggag

SEQ ID NO: 3532391 - RNA, 14 nt, Human
ggaacauggggagg

SEQ ID NO: 3532392 - RNA, 17 nt, Human
ggaacauggggaggagg

SEQ ID NO: 3532393 - RNA, 21 nt, Human
ggaacauuuauuuuaugagaa

SEQ ID NO: 3532394 - RNA, 23 nt, Human
ggaacauuuauuuuaugagaaau

SEQ ID NO: 3532395 - RNA, 21 nt, Human
ggaacauuucuguaaauacca

SEQ ID NO: 3532396 - RNA, 12 nt, Human
ggaaccagacuc

SEQ ID NO: 3532397 - RNA, 13 nt, Human
ggaaccagggaga

SEQ ID NO: 3532398 - RNA, 11 nt, Human
ggaacccagac

SEQ ID NO: 3532399 - RNA, 13 nt, Human
ggaacccagacuc

SEQ ID NO: 3532400 - RNA, 17 nt, Human
ggaaccccccucccacc

SEQ ID NO: 3532401 - RNA, 23 nt, Human
ggaacccugcccacucccaggac

SEQ ID NO: 3532402 - RNA, 15 nt, Human
ggaaccgaggcaggg

SEQ ID NO: 3532403 - RNA, 16 nt, Human
ggaaccgaggcaggga

SEQ ID NO: 3532404 - RNA, 18 nt, Human
ggaaccguugccaaccga

SEQ ID NO: 3532405 - RNA, 17 nt, Human
cuugaacguuuucuaau

SEQ ID NO: 3532406 - RNA, 16 nt, Human
cuugaacuccugaccu

SEQ ID NO: 3532407 - RNA, 18 nt, Human
cuugaacucugggcucaa

SEQ ID NO: 3532408 - RNA, 19 nt, Human
cuugaacugagcuuggaag

SEQ ID NO: 3532409 - RNA, 14 nt, Human
cuugaacugauuca

SEQ ID NO: 3532410 - RNA, 24 nt, Human
cuugaacuucaccugcaaagcucu

SEQ ID NO: 3532411 - RNA, 18 nt, Human
cuugaacuugccucuuuu

SEQ ID NO: 3532412 - RNA, 21 nt, Human
cuugaacuuugaccucugcag

SEQ ID NO: 3532413 - RNA, 12 nt, Human
cuugaagaacug

SEQ ID NO: 3532414 - RNA, 20 nt, Human
cuugaagaacugcaggcccu

SEQ ID NO: 3532415 - RNA, 16 nt, Human
cuugaagacuuuucuu

SEQ ID NO: 3532416 - RNA, 12 nt, Human
cuugaagcagua

SEQ ID NO: 3532417 - RNA, 12 nt, Human
cuugaagccaaa

SEQ ID NO: 3532418 - RNA, 16 nt, Human
cuugaagccaaagaaa

SEQ ID NO: 3532419 - RNA, 13 nt, Human
cuugaagccaagu

SEQ ID NO: 3532420 - RNA, 13 nt, Human
cuugaagccacug

SEQ ID NO: 3532421 - RNA, 16 nt, Human
cuugaagccugcuccu

SEQ ID NO: 3532422 - RNA, 11 nt, Human
cuugaagcugu

SEQ ID NO: 3532423 - RNA, 14 nt, Human
cuugaaggaaaaau

SEQ ID NO: 3532424 - RNA, 18 nt, Human
cuugaaggaaaaauucaa

SEQ ID NO: 3532425 - RNA, 13 nt, Human
cuugaaggagaau

SEQ ID NO: 3532426 - RNA, 15 nt, Human
cuugaaggcccugcu

SEQ ID NO: 3532427 - RNA, 18 nt, Human
cuugaaggcccugcugag

SEQ ID NO: 3532428 - RNA, 13 nt, Human
cuugaagggccag

SEQ ID NO: 3532429 - RNA, 14 nt, Human
cuugaagggccaga

SEQ ID NO: 3532430 - RNA, 15 nt, Human
cuugaagggccagag

SEQ ID NO: 3532431 - RNA, 21 nt, Human
cuugaagggccagagccaggg

SEQ ID NO: 3532432 - RNA, 16 nt, Human
cuugaagggcccagga

SEQ ID NO: 3532433 - RNA, 16 nt, Human
cuugaaggguaaagaa

SEQ ID NO: 3532434 - RNA, 23 nt, Human
cuugaagguauaucuagguuuau

SEQ ID NO: 3532435 - RNA, 17 nt, Human
cuugaagucacccggcc

SEQ ID NO: 3532436 - RNA, 18 nt, Human
cuugaaguccuggcuuca

SEQ ID NO: 3532437 - RNA, 19 nt, Human
cuugaagucuaaaagcaga

SEQ ID NO: 3532438 - RNA, 20 nt, Human
cuugaagucuaaaagcagaa

SEQ ID NO: 3532439 - RNA, 20 nt, Human
cuugaauauaaaaaaucaug

SEQ ID NO: 3532440 - RNA, 22 nt, Human
cuugaauauccccucccaguca

SEQ ID NO: 3532441 - RNA, 15 nt, Human
cuugaauccuuccau

SEQ ID NO: 3532442 - RNA, 13 nt, Human
cuugaaugcugcc

SEQ ID NO: 3532443 - RNA, 16 nt, Human
cuugaauguagcagcc

SEQ ID NO: 3532444 - RNA, 19 nt, Human
cuugaauguggucucagga

SEQ ID NO: 3532445 - RNA, 15 nt, Human
cuugaauuaagaaga

SEQ ID NO: 3532446 - RNA, 14 nt, Human
cuugaauucauaga

SEQ ID NO: 3532447 - RNA, 19 nt, Human
cuugaauuguaaggaauga

SEQ ID NO: 3532448 - RNA, 19 nt, Human
cuugacaaaaccuaacuug

SEQ ID NO: 3532449 - RNA, 19 nt, Human
cuugacaaacuucuuucac

SEQ ID NO: 3532450 - RNA, 14 nt, Human
cuugacaacaucug

SEQ ID NO: 3532451 - RNA, 22 nt, Human
cuugacaaguugcgacggagag

SEQ ID NO: 3532452 - RNA, 20 nt, Human
cuugacacauaguuuuucag

SEQ ID NO: 3532453 - RNA, 16 nt, Human
cuugacagagccugcc

SEQ ID NO: 3532454 - RNA, 19 nt, Human
cuugacagagccugcccca

SEQ ID NO: 3532455 - RNA, 12 nt, Human
cuugacagggca

SEQ ID NO: 3532456 - RNA, 19 nt, Human
cuugaccaagcaggaagcu

SEQ ID NO: 3532457 - RNA, 20 nt, Human
cuugaccaagcaggaagcuc

SEQ ID NO: 3532458 - RNA, 11 nt, Human
cuugaccagca

SEQ ID NO: 3532459 - RNA, 20 nt, Human
cuugaccauucuccaccugc

SEQ ID NO: 3532460 - RNA, 13 nt, Human
cuugacccugagc

SEQ ID NO: 3532461 - RNA, 14 nt, Human
cuugacccugagcu

SEQ ID NO: 3532462 - RNA, 18 nt, Human
cuugacccugcacccucc

SEQ ID NO: 3532463 - RNA, 18 nt, Human
cuugaccucacucagaag

SEQ ID NO: 3532464 - RNA, 23 nt, Human
cuugaccugaggcuguggucaca

SEQ ID NO: 3532465 - RNA, 18 nt, Human
cuugaccugcauuguaaa

SEQ ID NO: 3532466 - RNA, 16 nt, Human
cuugaccuuuguacag

SEQ ID NO: 3532467 - RNA, 21 nt, Human
cuugaccuuuguacagcccag

SEQ ID NO: 3532468 - RNA, 19 nt, Human
cuugacguauuauuguccu

SEQ ID NO: 3532469 - RNA, 20 nt, Human
cuugacuaaaaaaaaaagaa

SEQ ID NO: 3532470 - RNA, 21 nt, Human
cuugacucccaaguuuccaua

SEQ ID NO: 3532471 - RNA, 20 nt, Human
cuugacucuuguuuucaguu

SEQ ID NO: 3532472 - RNA, 11 nt, Human
cuugagaaacc

SEQ ID NO: 3532473 - RNA, 12 nt, Human
cuugagaaaccu

SEQ ID NO: 3532474 - RNA, 23 nt, Human
cuugagaagaccucaccuagaaa

SEQ ID NO: 3532475 - RNA, 22 nt, Human
cuugagacacggagcccagccc

SEQ ID NO: 3532476 - RNA, 16 nt, Human
cuugagaccucagcca

SEQ ID NO: 3532477 - RNA, 18 nt, Human
cuugagaccucagccaug

SEQ ID NO: 3532478 - RNA, 19 nt, Human
cuugagcaaguuccuucug

SEQ ID NO: 3532479 - RNA, 20 nt, Human
cuugagcaaguuccuucugg

SEQ ID NO: 3532480 - RNA, 16 nt, Human
cuugagcaguggcugg

SEQ ID NO: 3532481 - RNA, 21 nt, Human
cuugagcaguggcugguccag

SEQ ID NO: 3532482 - RNA, 18 nt, Human
cuugagccaggaggccug

SEQ ID NO: 3532483 - RNA, 13 nt, Human
cuugagcccagga

SEQ ID NO: 3532484 - RNA, 15 nt, Human
cuugagcccaggagu

SEQ ID NO: 3532485 - RNA, 17 nt, Human
cuugagccgggccccug

SEQ ID NO: 3532486 - RNA, 17 nt, Human
cuugagccuugaacuuu

SEQ ID NO: 3532487 - RNA, 14 nt, Human
cuugagcucuauua

SEQ ID NO: 3532488 - RNA, 15 nt, Human
cuugagcucuauuau

SEQ ID NO: 3532489 - RNA, 16 nt, Human
cuugagcucuauuaug

SEQ ID NO: 3532490 - RNA, 18 nt, Human
cuugagcucuauuaugaa

SEQ ID NO: 3532491 - RNA, 12 nt, Human
cuugagcuggcc

SEQ ID NO: 3532492 - RNA, 14 nt, Human
cuugagcuggccuc

SEQ ID NO: 3532493 - RNA, 23 nt, Human
cuugagcuggccucucuagcaca

SEQ ID NO: 3532494 - RNA, 20 nt, Human
cuugagcuuggcagcugaac

SEQ ID NO: 3532495 - RNA, 21 nt, Human
cuugagcuuggcagcugaacu

SEQ ID NO: 3532496 - RNA, 13 nt, Human
cuugaggaaacaa

SEQ ID NO: 3532497 - RNA, 20 nt, Human
cuugaggaaacaacagcuuu

SEQ ID NO: 3532498 - RNA, 15 nt, Human
cuugaggacacaugu

SEQ ID NO: 3532499 - RNA, 17 nt, Human
cuugaggacacaugucc

SEQ ID NO: 3532500 - RNA, 14 nt, Human
cuugaggccaggag

SEQ ID NO: 3532501 - RNA, 14 nt, Human
cuugagggcccaga

SEQ ID NO: 3532502 - RNA, 16 nt, Human
cuugagggcccagagc

SEQ ID NO: 3532503 - RNA, 12 nt, Human
cuugagggcugc

SEQ ID NO: 3532504 - RNA, 13 nt, Human
cuugagggcugca

SEQ ID NO: 3532505 - RNA, 21 nt, Human
cuugaggggaagcuagucuuu

SEQ ID NO: 3532506 - RNA, 15 nt, Human
cuugaggggaccagg

SEQ ID NO: 3532507 - RNA, 17 nt, Human
cuugaggggaccaggag

SEQ ID NO: 3532508 - RNA, 18 nt, Human
cuugaggggaccaggagu

SEQ ID NO: 3532509 - RNA, 15 nt, Human
cuugaggguugggcu

SEQ ID NO: 3532510 - RNA, 19 nt, Human
cuugaggguugggcuggug

SEQ ID NO: 3532511 - RNA, 21 nt, Human
cuugaggguugggcugguguc

SEQ ID NO: 3532512 - RNA, 14 nt, Human
cuugaggucucagc

SEQ ID NO: 3532513 - RNA, 17 nt, Human
cuugaggucuuuugaca

SEQ ID NO: 3532514 - RNA, 18 nt, Human
cuugaggucuuuugacau

SEQ ID NO: 3532515 - RNA, 14 nt, Human
gcugcuccuccagg

SEQ ID NO: 3532516 - RNA, 18 nt, Human
gcugcucggggugcacag

SEQ ID NO: 3532517 - RNA, 23 nt, Human
gcugcucuauuguagcauuucuu

SEQ ID NO: 3532518 - RNA, 20 nt, Human
gcugcucucaaaccccugac

SEQ ID NO: 3532519 - RNA, 14 nt, Human
gcugcucugcccag

SEQ ID NO: 3532520 - RNA, 15 nt, Human
gcugcucugcccaga

SEQ ID NO: 3532521 - RNA, 17 nt, Human
gcugcucugcccagagc

SEQ ID NO: 3532522 - RNA, 20 nt, Human
gcugcucugcccagagcugg

SEQ ID NO: 3532523 - RNA, 12 nt, Human
gcugcucuggaa

SEQ ID NO: 3532524 - RNA, 18 nt, Human
gcugcucuggaauuugca

SEQ ID NO: 3532525 - RNA, 20 nt, Human
gcugcucugugaccagggac

SEQ ID NO: 3532526 - RNA, 22 nt, Human
gcugcucuuaugccauuuguuu

SEQ ID NO: 3532527 - RNA, 10 nt, Human
gcugcucuuc

SEQ ID NO: 3532528 - RNA, 21 nt, Human
gcugcucuuggcuggacccag

SEQ ID NO: 3532529 - RNA, 18 nt, Human
gcugcugaaacaacaaau

SEQ ID NO: 3532530 - RNA, 14 nt, Human
gcugcugaaggcuc

SEQ ID NO: 3532531 - RNA, 23 nt, Human
gcugcugaccaauugugcugcca

SEQ ID NO: 3532532 - RNA, 18 nt, Human
gcugcugagauccuggac

SEQ ID NO: 3532533 - RNA, 20 nt, Human
gcugcugagccgcagagaag

SEQ ID NO: 3532534 - RNA, 15 nt, Human
gcugcugcccaggcc

SEQ ID NO: 3532535 - RNA, 17 nt, Human
gcugcugcccccacccc

SEQ ID NO: 3532536 - RNA, 13 nt, Human
gcugcugccucuu

SEQ ID NO: 3532537 - RNA, 16 nt, Human
gcugcugccugccugg

SEQ ID NO: 3532538 - RNA, 13 nt, Human
gcugcugccuggc

SEQ ID NO: 3532539 - RNA, 21 nt, Human
gcugcugcguggcauagccca

SEQ ID NO: 3532540 - RNA, 22 nt, Human
gcugcugcucuuggcuggaccc

SEQ ID NO: 3532541 - RNA, 15 nt, Human
gcugcugcugggcuc

SEQ ID NO: 3532542 - RNA, 16 nt, Human
gcugcugcugggcuca

SEQ ID NO: 3532543 - RNA, 21 nt, Human
gcugcuggacaguaucacugu

SEQ ID NO: 3532544 - RNA, 22 nt, Human
gcugcuggccaaauagcaaaga

SEQ ID NO: 3532545 - RNA, 20 nt, Human
gcugcugggauggugggcuu

SEQ ID NO: 3532546 - RNA, 13 nt, Human
gcugcugggcuca

SEQ ID NO: 3532547 - RNA, 16 nt, Human
gcugcugggcucagug

SEQ ID NO: 3532548 - RNA, 19 nt, Human
gcugcugggcucagugaag

SEQ ID NO: 3532549 - RNA, 20 nt, Human
gcugcuggggccucagacga

SEQ ID NO: 3532550 - RNA, 17 nt, Human
gcugcuggugcacagcc

SEQ ID NO: 3532551 - RNA, 16 nt, Human
gcugcugucaccucuc

SEQ ID NO: 3532552 - RNA, 18 nt, Human
gcugcugucccucccccu

SEQ ID NO: 3532553 - RNA, 22 nt, Human
gcugcugucugggugcuacugg

SEQ ID NO: 3532554 - RNA, 20 nt, Human
gcugcuguguguggcuucug

SEQ ID NO: 3532555 - RNA, 20 nt, Human
gcugcuguuacuguuaacca

SEQ ID NO: 3532556 - RNA, 21 nt, Human
gcugcuucaaggauccugagc

SEQ ID NO: 3532557 - RNA, 13 nt, Human
gcugcuuccagug

SEQ ID NO: 3532558 - RNA, 15 nt, Human
gcugcuucccucugc

SEQ ID NO: 3532559 - RNA, 21 nt, Human
gcugcuucccucugccugucc

SEQ ID NO: 3532560 - RNA, 13 nt, Human
gcugcuuccuccu

SEQ ID NO: 3532561 - RNA, 15 nt, Human
gcugcuuccuccugg

SEQ ID NO: 3532562 - RNA, 21 nt, Human
gcugcuucucccacuuggcca

SEQ ID NO: 3532563 - RNA, 22 nt, Human
gcugcuucucccaggcaaggcu

SEQ ID NO: 3532564 - RNA, 12 nt, Human
gcugcuugcccc

SEQ ID NO: 3532565 - RNA, 13 nt, Human
gcugcuuggccuu

SEQ ID NO: 3532566 - RNA, 17 nt, Human
gcugcuuuccccugugg

SEQ ID NO: 3532567 - RNA, 20 nt, Human
gcugcuuuccccugugggga

SEQ ID NO: 3532568 - RNA, 21 nt, Human
gcugcuuuccccuguggggau

SEQ ID NO: 3532569 - RNA, 19 nt, Human
gcugcuuucuguugucauu

SEQ ID NO: 3532570 - RNA, 17 nt, Human
cuugauucccuuguuau

SEQ ID NO: 3532571 - RNA, 17 nt, Human
cuugauucugcaguaaa

SEQ ID NO: 3532572 - RNA, 20 nt, Human
cuugauucugcaguaaaucu

SEQ ID NO: 3532573 - RNA, 23 nt, Human
cuugauuggggaauuaaaaguca

SEQ ID NO: 3532574 - RNA, 19 nt, Human
cuugauugguguugccagu

SEQ ID NO: 3532575 - RNA, 23 nt, Human
cuugauuuuccaucuaaaaauau

SEQ ID NO: 3532576 - RNA, 16 nt, Human
cuugcaaaaaggguca

SEQ ID NO: 3532577 - RNA, 15 nt, Human
cuugcaaaaucaguu

SEQ ID NO: 3532578 - RNA, 12 nt, Human
cuugcaaaguau

SEQ ID NO: 3532579 - RNA, 22 nt, Human
cuugcaaaguaucccuacugua

SEQ ID NO: 3532580 - RNA, 14 nt, Human
cuugcaacacacag

SEQ ID NO: 3532581 - RNA, 17 nt, Human
cuugcaagcaugcuugu

SEQ ID NO: 3532582 - RNA, 22 nt, Human
cuugcaagggcggccuuuccca

SEQ ID NO: 3532583 - RNA, 18 nt, Human
cuugcaauggcagccuug

SEQ ID NO: 3532584 - RNA, 20 nt, Human
cuugcacacaucaucuguaa

SEQ ID NO: 3532585 - RNA, 18 nt, Human
cuugcaccccucacucug

SEQ ID NO: 3532586 - RNA, 20 nt, Human
cuugcaccccucacucuggc

SEQ ID NO: 3532587 - RNA, 15 nt, Human
cuugcacccgccucu

SEQ ID NO: 3532588 - RNA, 13 nt, Human
cuugcaccugcau

SEQ ID NO: 3532589 - RNA, 14 nt, Human
cuugcaccugcauc

SEQ ID NO: 3532590 - RNA, 21 nt, Human
cuugcacgcgcccuuucuacc

SEQ ID NO: 3532591 - RNA, 15 nt, Human
cuugcagaacugcca

SEQ ID NO: 3532592 - RNA, 12 nt, Human
cuugcagaacuu

SEQ ID NO: 3532593 - RNA, 18 nt, Human
cuugcagagaagccuugg

SEQ ID NO: 3532594 - RNA, 13 nt, Human
cuugcagagcuug

SEQ ID NO: 3532595 - RNA, 13 nt, Human
cuugcagcaggau

SEQ ID NO: 3532596 - RNA, 23 nt, Human
cuugcagcaggaucuagaggggg

SEQ ID NO: 3532597 - RNA, 18 nt, Human
cuugcaguaucggcacug

SEQ ID NO: 3532598 - RNA, 20 nt, Human
cuugcaguaucggcacugua

SEQ ID NO: 3532599 - RNA, 20 nt, Human
cuugcaguggaagauacuug

SEQ ID NO: 3532600 - RNA, 18 nt, Human
cuugcaguucagcaccac

SEQ ID NO: 3532601 - RNA, 20 nt, Human
cuugcauaauaagcuaaaga

SEQ ID NO: 3532602 - RNA, 15 nt, Human
cuugcauacaaacaa

SEQ ID NO: 3532603 - RNA, 13 nt, Human
cuugcaucaaggg

SEQ ID NO: 3532604 - RNA, 14 nt, Human
cuugcaucaagggg

SEQ ID NO: 3532605 - RNA, 17 nt, Human
cuugcaucaagggguca

SEQ ID NO: 3532606 - RNA, 14 nt, Human
cuugcauccuuccu

SEQ ID NO: 3532607 - RNA, 17 nt, Human
cuugcaucguggagaca

SEQ ID NO: 3532608 - RNA, 20 nt, Human
cuugcaugaagagaagcaau

SEQ ID NO: 3532609 - RNA, 20 nt, Human
cuugcaugguuuggagcuga

SEQ ID NO: 3532610 - RNA, 14 nt, Human
cuugcauucccagu

SEQ ID NO: 3532611 - RNA, 13 nt, Human
cuugcauuuuugc

SEQ ID NO: 3532612 - RNA, 20 nt, Human
cuugcauuuuugcaggagca

SEQ ID NO: 3532613 - RNA, 21 nt, Human
cuugccaaaguacagaauuug

SEQ ID NO: 3532614 - RNA, 17 nt, Human
cuugccaaggcagaggc

SEQ ID NO: 3532615 - RNA, 20 nt, Human
cuugccaaggcagaggccug

SEQ ID NO: 3532616 - RNA, 23 nt, Human
cuugccaaugaggucugaaaugg

SEQ ID NO: 3532617 - RNA, 23 nt, Human
cuugccacaccccccaccccuag

SEQ ID NO: 3532618 - RNA, 14 nt, Human
cuugccacagcucu

SEQ ID NO: 3532619 - RNA, 20 nt, Human
cuugccaccccacccucccu

SEQ ID NO: 3532620 - RNA, 21 nt, Human
cuugccaccccacccucccug

SEQ ID NO: 3532621 - RNA, 14 nt, Human
cuugccacugccuc

SEQ ID NO: 3532622 - RNA, 16 nt, Human
cuugccagcugcugag

SEQ ID NO: 3532623 - RNA, 18 nt, Human
cuugccagcugcugagcc

SEQ ID NO: 3532624 - RNA, 23 nt, Human
cuugccaggguuucgagaagcug

SEQ ID NO: 3532625 - RNA, 17 nt, Human
cuugccaucagugaaaa

SEQ ID NO: 3532626 - RNA, 14 nt, Human
cuugccaucccucc

SEQ ID NO: 3532627 - RNA, 15 nt, Human
cuugccaucccuccc

SEQ ID NO: 3532628 - RNA, 22 nt, Human
cuugccaucccucccuccaccu

SEQ ID NO: 3532629 - RNA, 17 nt, Human
cuugccauuccaaaaua

SEQ ID NO: 3532630 - RNA, 14 nt, Human
cuugcccaccccac

SEQ ID NO: 3532631 - RNA, 15 nt, Human
cuugcccaccccacc

SEQ ID NO: 3532632 - RNA, 16 nt, Human
cuugcccacuccugcu

SEQ ID NO: 3532633 - RNA, 16 nt, Human
cuugcccagccuggau

SEQ ID NO: 3532634 - RNA, 15 nt, Human
cuugcccagggcuca

SEQ ID NO: 3532635 - RNA, 19 nt, Human
cuugcccagggcucagccu

SEQ ID NO: 3532636 - RNA, 21 nt, Human
cuugcccagggcucagccugg

SEQ ID NO: 3532637 - RNA, 12 nt, Human
cuugcccauccu

SEQ ID NO: 3532638 - RNA, 16 nt, Human
cuugcccauccugacu

SEQ ID NO: 3532639 - RNA, 14 nt, Human
cuugccccaacccc

SEQ ID NO: 3532640 - RNA, 17 nt, Human
cuugccccaacccuucu

SEQ ID NO: 3532641 - RNA, 17 nt, Human
cuugcccggauucuggg

SEQ ID NO: 3532642 - RNA, 15 nt, Human
cuugcccuaagcaga

SEQ ID NO: 3532643 - RNA, 18 nt, Human
cuugcccuaagcagaaag

SEQ ID NO: 3532644 - RNA, 19 nt, Human
cuugcccuagauaguuuau

SEQ ID NO: 3532645 - RNA, 14 nt, Human
cuugcccugaccuc

SEQ ID NO: 3532646 - RNA, 18 nt, Human
cuugcccugaccucccag

SEQ ID NO: 3532647 - RNA, 13 nt, Human
cuugcccugcucc

SEQ ID NO: 3532648 - RNA, 19 nt, Human
cuugcccuucccugucccu

SEQ ID NO: 3532649 - RNA, 16 nt, Human
cuugcccuugcccuga

SEQ ID NO: 3532650 - RNA, 15 nt, Human
cuugccgaaacugga

SEQ ID NO: 3532651 - RNA, 13 nt, Human
cuugccgaggagc

SEQ ID NO: 3532652 - RNA, 19 nt, Human
cuugccgucuaccugaggg

SEQ ID NO: 3532653 - RNA, 20 nt, Human
cuugccgucuaccugagggg

SEQ ID NO: 3532654 - RNA, 14 nt, Human
cuugccuagggccu

SEQ ID NO: 3532655 - RNA, 16 nt, Human
cuugccuagggccugg

SEQ ID NO: 3532656 - RNA, 18 nt, Human
cuugccuagggccugguc

SEQ ID NO: 3532657 - RNA, 17 nt, Human
cuugccucaaccuccca

SEQ ID NO: 3532658 - RNA, 18 nt, Human
cuugccucaaccucccaa

SEQ ID NO: 3532659 - RNA, 17 nt, Human
cuugccucaaugccagu

SEQ ID NO: 3532660 - RNA, 22 nt, Human
gcuuccauuuuccuacaggcag

SEQ ID NO: 3532661 - RNA, 22 nt, Human
gcuucccaccucccugcccagg

SEQ ID NO: 3532662 - RNA, 18 nt, Human
gcuucccaguggcugcug

SEQ ID NO: 3532663 - RNA, 19 nt, Human
gcuucccaguggcugcugc

SEQ ID NO: 3532664 - RNA, 20 nt, Human
gcuucccaguggcugcugcc

SEQ ID NO: 3532665 - RNA, 18 nt, Human
gcuucccauccccagcga

SEQ ID NO: 3532666 - RNA, 16 nt, Human
gcuuccccucucuccu

SEQ ID NO: 3532667 - RNA, 18 nt, Human
gcuucccgcucagcccuc

SEQ ID NO: 3532668 - RNA, 13 nt, Human
gcuucccucugcc

SEQ ID NO: 3532669 - RNA, 19 nt, Human
gcuucccucugccuguccc

SEQ ID NO: 3532670 - RNA, 20 nt, Human
gcuucccucugccugucccu

SEQ ID NO: 3532671 - RNA, 17 nt, Human
gcuucccugaaagacug

SEQ ID NO: 3532672 - RNA, 15 nt, Human
gcuucccugaagcuc

SEQ ID NO: 3532673 - RNA, 15 nt, Human
gcuucccuuacuuug

SEQ ID NO: 3532674 - RNA, 23 nt, Human
gcuuccuacccacaccucugcca

SEQ ID NO: 3532675 - RNA, 18 nt, Human
gcuuccuagaaguuacug

SEQ ID NO: 3532676 - RNA, 23 nt, Human
gcuuccuagaaguuacugaaugc

SEQ ID NO: 3532677 - RNA, 21 nt, Human
gcuuccuccuccccaacugug

SEQ ID NO: 3532678 - RNA, 12 nt, Human
gcuuccuccugg

SEQ ID NO: 3532679 - RNA, 13 nt, Human
gcuuccuccugga

SEQ ID NO: 3532680 - RNA, 16 nt, Human
gcuuccuccuggaaau

SEQ ID NO: 3532681 - RNA, 17 nt, Human
gcuuccucuagaagcca

SEQ ID NO: 3532682 - RNA, 23 nt, Human
gcuuccucuagaagccaagggaa

SEQ ID NO: 3532683 - RNA, 23 nt, Human
gcuuccugaggggagacagagca

SEQ ID NO: 3532684 - RNA, 21 nt, Human
gcuuccugcuugccaaggcag

SEQ ID NO: 3532685 - RNA, 12 nt, Human
gcuuccuggagc

SEQ ID NO: 3532686 - RNA, 22 nt, Human
gcuuccuggagcagaagcagca

SEQ ID NO: 3532687 - RNA, 20 nt, Human
gcuuccuguccccaucuguc

SEQ ID NO: 3532688 - RNA, 13 nt, Human
gcuuccuucagag

SEQ ID NO: 3532689 - RNA, 16 nt, Human
gcuuccuucagagagc

SEQ ID NO: 3532690 - RNA, 17 nt, Human
gcuuccuucagagagca

SEQ ID NO: 3532691 - RNA, 19 nt, Human
gcuuccuucagagagcagu

SEQ ID NO: 3532692 - RNA, 13 nt, Human
gcuuccuucauuu

SEQ ID NO: 3532693 - RNA, 14 nt, Human
gcuuccuugccuga

SEQ ID NO: 3532694 - RNA, 22 nt, Human
gcuuccuuggcaucacagggca

SEQ ID NO: 3532695 - RNA, 23 nt, Human
gcuuccuuuguuuuuuuuuccug

SEQ ID NO: 3532696 - RNA, 16 nt, Human
gcuucgacuuuucuua

SEQ ID NO: 3532697 - RNA, 16 nt, Human
gcuucuaaguaaauac

SEQ ID NO: 3532698 - RNA, 22 nt, Human
gcuucuaaguaaauacaauuuu

SEQ ID NO: 3532699 - RNA, 21 nt, Human
gcuucuaauauuuauugcuuu

SEQ ID NO: 3532700 - RNA, 16 nt, Human
gcuucuagcugacuug

SEQ ID NO: 3532701 - RNA, 15 nt, Human
gcuucuagggaccag

SEQ ID NO: 3532702 - RNA, 17 nt, Human
gcuucucacugccaugc

SEQ ID NO: 3532703 - RNA, 22 nt, Human
gcuucucagauuucugaggaaa

SEQ ID NO: 3532704 - RNA, 17 nt, Human
gcuucucauccugcagg

SEQ ID NO: 3532705 - RNA, 18 nt, Human
gcuucucauccugcaggc

SEQ ID NO: 3532706 - RNA, 16 nt, Human
gcuucucaucuuguga

SEQ ID NO: 3532707 - RNA, 20 nt, Human
gcuucuccaaaaaucugccu

SEQ ID NO: 3532708 - RNA, 17 nt, Human
gcuucucccaggcaagg

SEQ ID NO: 3532709 - RNA, 15 nt, Human
gcuucuccccagaau

SEQ ID NO: 3532710 - RNA, 22 nt, Human
gcuucucccccacccccuaggg

SEQ ID NO: 3532711 - RNA, 17 nt, Human
gcuucuccgccagccuc

SEQ ID NO: 3532712 - RNA, 20 nt, Human
gcuucuccgccagccuccuc

SEQ ID NO: 3532713 - RNA, 13 nt, Human
gcuucuccucucc

SEQ ID NO: 3532714 - RNA, 18 nt, Human
gcuucucuagcucucuag

SEQ ID NO: 3532715 - RNA, 19 nt, Human
gcuucucuagcucucuagg

SEQ ID NO: 3532716 - RNA, 21 nt, Human
gcuucucuagcucucuaggcc

SEQ ID NO: 3532717 - RNA, 22 nt, Human
gcuucucuagcucucuaggccu

SEQ ID NO: 3532718 - RNA, 13 nt, Human
gcuucucucucac

SEQ ID NO: 3532719 - RNA, 16 nt, Human
gcuucucucucaccag

SEQ ID NO: 3532720 - RNA, 14 nt, Human
gcuucucugacuuc

SEQ ID NO: 3532721 - RNA, 22 nt, Human
gcuucucugacuucugccugga

SEQ ID NO: 3532722 - RNA, 17 nt, Human
gcuucucuuuaacucag

SEQ ID NO: 3532723 - RNA, 19 nt, Human
gcuucucuuuaacucagga

SEQ ID NO: 3532724 - RNA, 21 nt, Human
gcuucucuuuaacucaggacu

SEQ ID NO: 3532725 - RNA, 23 nt, Human
gcuucucuuuaacucaggacucc

SEQ ID NO: 3532726 - RNA, 19 nt, Human
gcuucugaaugcugcuacu

SEQ ID NO: 3532727 - RNA, 15 nt, Human
gcuucugaccucagc

SEQ ID NO: 3532728 - RNA, 17 nt, Human
gcuucugaugaaucuug

SEQ ID NO: 3532729 - RNA, 14 nt, Human
gcuucugcacccuc

SEQ ID NO: 3532730 - RNA, 14 nt, Human
gcuucugcaccuua

SEQ ID NO: 3532731 - RNA, 19 nt, Human
gcuucugcccccugcagaa

SEQ ID NO: 3532732 - RNA, 13 nt, Human
gcuucugccugca

SEQ ID NO: 3532733 - RNA, 15 nt, Human
gcuucugcuggggcc

SEQ ID NO: 3532734 - RNA, 18 nt, Human
gcuucugcuggggccugg

SEQ ID NO: 3532735 - RNA, 13 nt, Human
gcuucugcuuuuc

SEQ ID NO: 3532736 - RNA, 19 nt, Human
gcuucugcuuuucugcccu

SEQ ID NO: 3532737 - RNA, 12 nt, Human
gcuucuggagcc

SEQ ID NO: 3532738 - RNA, 16 nt, Human
gcuucuggccaggaag

SEQ ID NO: 3532739 - RNA, 18 nt, Human
gcuucuggccaggaagcu

SEQ ID NO: 3532740 - RNA, 12 nt, Human
gcuucugggaag

SEQ ID NO: 3532741 - RNA, 18 nt, Human
gcuucugggguccccagg

SEQ ID NO: 3532742 - RNA, 19 nt, Human
gcuucugggguccccaggg

SEQ ID NO: 3532743 - RNA, 20 nt, Human
gcuucugggguccccagggc

SEQ ID NO: 3532744 - RNA, 15 nt, Human
gcuucugguacucuc

SEQ ID NO: 3532745 - RNA, 15 nt, Human
gcuucugucuccagc

SEQ ID NO: 3532746 - RNA, 20 nt, Human
gcuucugugaugagcugauc

SEQ ID NO: 3532747 - RNA, 15 nt, Human
gcuucugugcccaga

SEQ ID NO: 3532748 - RNA, 16 nt, Human
gcuucuguugcugccu

SEQ ID NO: 3532749 - RNA, 17 nt, Human
gcuucuguugcugccuc

SEQ ID NO: 3532750 - RNA, 19 nt, Human
gcuucuguuuuauaauuuu

SEQ ID NO: 3532751 - RNA, 19 nt, Human
gcuucuuaauauaacugcc

SEQ ID NO: 3532752 - RNA, 22 nt, Human
gcuucuuaauauaacugccuua

SEQ ID NO: 3532753 - RNA, 23 nt, Human
gcuucuuaaucuuuucacaaaua

SEQ ID NO: 3532754 - RNA, 20 nt, Human
gcuucuuacuauuaagcagu

SEQ ID NO: 3532755 - RNA, 16 nt, Human
gcuucuucagagacuc

SEQ ID NO: 3532756 - RNA, 23 nt, Human
gcuucuucagagacuccugcagg

SEQ ID NO: 3532757 - RNA, 19 nt, Human
gcuucuucagaucagugcu

SEQ ID NO: 3532758 - RNA, 19 nt, Human
gcuucuucuccuaugugua

SEQ ID NO: 3532759 - RNA, 13 nt, Human
gcuucuugccucu

SEQ ID NO: 3532760 - RNA, 20 nt, Human
gcuucuugccucugugcugu

SEQ ID NO: 3532761 - RNA, 12 nt, Human
gcuucuugugaa

SEQ ID NO: 3532762 - RNA, 23 nt, Human
gcuucuuucaagggcuuuccugu

SEQ ID NO: 3532763 - RNA, 23 nt, Human
gcuucuuucuuugggaauauuug

SEQ ID NO: 3532764 - RNA, 13 nt, Human
gcuucuuugccaa

SEQ ID NO: 3532765 - RNA, 17 nt, Human
gcuucuuuucuuuguau

SEQ ID NO: 3532766 - RNA, 17 nt, Human
gcuugaaaaaugugcaa

SEQ ID NO: 3532767 - RNA, 13 nt, Human
gcuugaaagaaaa

SEQ ID NO: 3532768 - RNA, 18 nt, Human
gcuugaaggcccugcuga

SEQ ID NO: 3532769 - RNA, 17 nt, Human
gcuugaccgugaggcca

SEQ ID NO: 3532770 - RNA, 19 nt, Human
gcuugaccgugaggccaga

SEQ ID NO: 3532771 - RNA, 23 nt, Human
gcuugaccgugaggccagagaca

SEQ ID NO: 3532772 - RNA, 22 nt, Human
gcuugaccuuuaagagaaauga

SEQ ID NO: 3532773 - RNA, 16 nt, Human
gcuugacucaggauuu

SEQ ID NO: 3532774 - RNA, 15 nt, Human
gcuugacuuuuguau

SEQ ID NO: 3532775 - RNA, 23 nt, Human
ggacugugugcucaggagcccug

SEQ ID NO: 3532776 - RNA, 23 nt, Human
ggacuguuuuuuccugagcuugg

SEQ ID NO: 3532777 - RNA, 17 nt, Human
ggacuuaacggcuccag

SEQ ID NO: 3532778 - RNA, 19 nt, Human
ggacuuaacggcuccagga

SEQ ID NO: 3532779 - RNA, 17 nt, Human
ggacuuagaaagcaggg

SEQ ID NO: 3532780 - RNA, 20 nt, Human
ggacuuagaaagcaggggcu

SEQ ID NO: 3532781 - RNA, 19 nt, Human
ggacuuccccggagggcug

SEQ ID NO: 3532782 - RNA, 20 nt, Human
ggacuuccccggagggcugc

SEQ ID NO: 3532783 - RNA, 19 nt, Human
ggacuuccuguccagcucc

SEQ ID NO: 3532784 - RNA, 23 nt, Human
ggacuucuaccugcccucaaggg

SEQ ID NO: 3532785 - RNA, 13 nt, Human
ggacuugaaguug

SEQ ID NO: 3532786 - RNA, 16 nt, Human
ggacuuggagguagcu

SEQ ID NO: 3532787 - RNA, 15 nt, Human
ggacuuggcgcgccc

SEQ ID NO: 3532788 - RNA, 11 nt, Human
ggacuugggug

SEQ ID NO: 3532789 - RNA, 12 nt, Human
ggacuuguuaga

SEQ ID NO: 3532790 - RNA, 16 nt, Human
ggacuuuccacccccu

SEQ ID NO: 3532791 - RNA, 22 nt, Human
ggacuuucucuaauaauaaaua

SEQ ID NO: 3532792 - RNA, 21 nt, Human
ggacuuucuuuucgccguggc

SEQ ID NO: 3532793 - RNA, 23 nt, Human
ggacuuugcacacuuuggcccag

SEQ ID NO: 3532794 - RNA, 17 nt, Human
ggacuuugcagccggca

SEQ ID NO: 3532795 - RNA, 13 nt, Human
ggacuuuguuaca

SEQ ID NO: 3532796 - RNA, 15 nt, Human
ggacuuuuauuuugg

SEQ ID NO: 3532797 - RNA, 18 nt, Human
ggacuuuucguuaacauu

SEQ ID NO: 3532798 - RNA, 16 nt, Human
ggagaaacagagacag

SEQ ID NO: 3532799 - RNA, 13 nt, Human
ggagaaacuggaa

SEQ ID NO: 3532800 - RNA, 17 nt, Human
ggagaaagcacugaccu

SEQ ID NO: 3532801 - RNA, 14 nt, Human
ggagaaagcugacu

SEQ ID NO: 3532802 - RNA, 22 nt, Human
ggagaaagcugacuuggcuggu

SEQ ID NO: 3532803 - RNA, 13 nt, Human
ggagaaaggaccc

SEQ ID NO: 3532804 - RNA, 16 nt, Human
cuuuaauauaaaugca

SEQ ID NO: 3532805 - RNA, 19 nt, Human
cuuuaauauaaaugcaaau

SEQ ID NO: 3532806 - RNA, 21 nt, Human
cuuuaauaucaucaguauuga

SEQ ID NO: 3532807 - RNA, 14 nt, Human
cuuuaauaugaaau

SEQ ID NO: 3532808 - RNA, 15 nt, Human
cuuuaauauguauuu

SEQ ID NO: 3532809 - RNA, 21 nt, Human
cuuuaaugauaugcuuguaac

SEQ ID NO: 3532810 - RNA, 14 nt, Human
cuuuaaugcaucua

SEQ ID NO: 3532811 - RNA, 12 nt, Human
cuuuaaugcuuu

SEQ ID NO: 3532812 - RNA, 19 nt, Human
cuuuaauggacuuauuucu

SEQ ID NO: 3532813 - RNA, 17 nt, Human
cuuuaaugucacaggca

SEQ ID NO: 3532814 - RNA, 22 nt, Human
cuuuaauuaaaaccugggauua

SEQ ID NO: 3532815 - RNA, 16 nt, Human
cuuuaauuccaugaau

SEQ ID NO: 3532816 - RNA, 19 nt, Human
cuuuaauucucuuucaaag

SEQ ID NO: 3532817 - RNA, 15 nt, Human
cuuuaauuuauguaa

SEQ ID NO: 3532818 - RNA, 23 nt, Human
cuuuacaaaacaaacucauucau

SEQ ID NO: 3532819 - RNA, 13 nt, Human
cuuuacaaauauu

SEQ ID NO: 3532820 - RNA, 22 nt, Human
cuuuacaagauggguccaggau

SEQ ID NO: 3532821 - RNA, 15 nt, Human
cuuuacacucaggcu

SEQ ID NO: 3532822 - RNA, 21 nt, Human
cuuuacagguauuuauaauau

SEQ ID NO: 3532823 - RNA, 17 nt, Human
cuuuacauaugcuuuaa

SEQ ID NO: 3532824 - RNA, 14 nt, Human
cuuuaccaaacagc

SEQ ID NO: 3532825 - RNA, 20 nt, Human
cuuuaccaaacagcaaacca

SEQ ID NO: 3532826 - RNA, 23 nt, Human
cuuuaccaaacagcaaaccaaga

SEQ ID NO: 3532827 - RNA, 14 nt, Human
cuuuaccaccccca

SEQ ID NO: 3532828 - RNA, 16 nt, Human
cuuuaccacccccaca

SEQ ID NO: 3532829 - RNA, 18 nt, Human
cuuuacccaccuagaaca

SEQ ID NO: 3532830 - RNA, 20 nt, Human
cuuuacccucaucugucugg

SEQ ID NO: 3532831 - RNA, 14 nt, Human
cuuuacccucuuug

SEQ ID NO: 3532832 - RNA, 16 nt, Human
cuuuacccuugagccc

SEQ ID NO: 3532833 - RNA, 14 nt, Human
cuuuaccuguauac

SEQ ID NO: 3532834 - RNA, 17 nt, Human
cuuuaccuuuucagggc

SEQ ID NO: 3532835 - RNA, 20 nt, Human
cuuuaccuuuucagggcugg

SEQ ID NO: 3532836 - RNA, 16 nt, Human
cuuuaccuuuuuucuu

SEQ ID NO: 3532837 - RNA, 22 nt, Human
cuuuacgcccaucucaggacac

SEQ ID NO: 3532838 - RNA, 22 nt, Human
cuuuacguguuuaaaaaaaagc

SEQ ID NO: 3532839 - RNA, 18 nt, Human
cuuuacuaagaugacauu

SEQ ID NO: 3532840 - RNA, 13 nt, Human
cuuuacucccaag

SEQ ID NO: 3532841 - RNA, 17 nt, Human
cuuuacuccucacacuu

SEQ ID NO: 3532842 - RNA, 15 nt, Human
cuuuacuguuuguua

SEQ ID NO: 3532843 - RNA, 20 nt, Human
cuuuacuugucuuucugggg

SEQ ID NO: 3532844 - RNA, 22 nt, Human
cuuuacuuucccuugcuuuucc

SEQ ID NO: 3532845 - RNA, 23 nt, Human
cuuuacuuucccuugcuuuuccc

SEQ ID NO: 3532846 - RNA, 14 nt, Human
cuuuacuuuuaaac

SEQ ID NO: 3532847 - RNA, 18 nt, Human
cuuuagaaucccagcccc

SEQ ID NO: 3532848 - RNA, 22 nt, Human
cuuuagaaugagagugugaaau

SEQ ID NO: 3532849 - RNA, 16 nt, Human
cuuuagacccugggug

SEQ ID NO: 3532850 - RNA, 15 nt, Human
cuuuagagaacugaa

SEQ ID NO: 3532851 - RNA, 16 nt, Human
cuuuagagaacugaaa

SEQ ID NO: 3532852 - RNA, 17 nt, Human
cuuuagagaacugaaaa

SEQ ID NO: 3532853 - RNA, 20 nt, Human
cuuuagagaacugaaaagag

SEQ ID NO: 3532854 - RNA, 19 nt, Human
cuuuagagaaguauacaua

SEQ ID NO: 3532855 - RNA, 14 nt, Human
cuuuagaguuagac

SEQ ID NO: 3532856 - RNA, 17 nt, Human
cuuuagaguuagacugu

SEQ ID NO: 3532857 - RNA, 20 nt, Human
cuuuagaguuagacuguugg

SEQ ID NO: 3532858 - RNA, 19 nt, Human
cuuuagauagcccuguccu

SEQ ID NO: 3532859 - RNA, 20 nt, Human
cuuuagauagcccuguccug

SEQ ID NO: 3532860 - RNA, 15 nt, Human
cuuuagaucucugaa

SEQ ID NO: 3532861 - RNA, 14 nt, Human
cuuuagaugcugau

SEQ ID NO: 3532862 - RNA, 13 nt, Human
cuuuagcacguuu

SEQ ID NO: 3532863 - RNA, 17 nt, Human
cuuuagcacguuuaaag

SEQ ID NO: 3532864 - RNA, 20 nt, Human
cuuuagcacguuuaaaguuc

SEQ ID NO: 3532865 - RNA, 21 nt, Human
cuuuagcacguuuaaaguucu

SEQ ID NO: 3532866 - RNA, 18 nt, Human
cuuuagcuuauuuuuaca

SEQ ID NO: 3532867 - RNA, 15 nt, Human
cuuuaggagcagugg

SEQ ID NO: 3532868 - RNA, 21 nt, Human
cuuuaggcauaugcuucuuua

SEQ ID NO: 3532869 - RNA, 18 nt, Human
cuuuagggcagcuugccc

SEQ ID NO: 3532870 - RNA, 16 nt, Human
cuuuaggguucugccu

SEQ ID NO: 3532871 - RNA, 18 nt, Human
cuuuaggguucugccucu

SEQ ID NO: 3532872 - RNA, 17 nt, Human
cuuuaggucuuuguaag

SEQ ID NO: 3532873 - RNA, 15 nt, Human
cuuuagucgcugagg

SEQ ID NO: 3532874 - RNA, 20 nt, Human
cuuuagugaacguggacucc

SEQ ID NO: 3532875 - RNA, 20 nt, Human
cuuuagugaucacagcagcu

SEQ ID NO: 3532876 - RNA, 19 nt, Human
cuuuaguuauaaaggaauc

SEQ ID NO: 3532877 - RNA, 23 nt, Human
cuuuaguuuuugguugggaauga

SEQ ID NO: 3532878 - RNA, 13 nt, Human
cuuuauaaaugua

SEQ ID NO: 3532879 - RNA, 13 nt, Human
cuuuauaagaaag

SEQ ID NO: 3532880 - RNA, 13 nt, Human
cuuuauacaacag

SEQ ID NO: 3532881 - RNA, 15 nt, Human
cuuuauacaacagug

SEQ ID NO: 3532882 - RNA, 18 nt, Human
cuuuauacaacagugcua

SEQ ID NO: 3532883 - RNA, 23 nt, Human
cuuuauacagcuguauugucuga

SEQ ID NO: 3532884 - RNA, 12 nt, Human
cuuuauacauua

SEQ ID NO: 3532885 - RNA, 14 nt, Human
cuuuauacauuagu

SEQ ID NO: 3532886 - RNA, 23 nt, Human
cuuuauacauuaguaaaugucuu

SEQ ID NO: 3532887 - RNA, 18 nt, Human
cuuuauacguguagcuau

SEQ ID NO: 3532888 - RNA, 19 nt, Human
cuuuauacguguagcuaua

SEQ ID NO: 3532889 - RNA, 20 nt, Human
cuuuauagugcacaaaauga

SEQ ID NO: 3532890 - RNA, 19 nt, Human
cuuuauauacaauaaugga

SEQ ID NO: 3532891 - RNA, 16 nt, Human
cuuuauauauggacau

SEQ ID NO: 3532892 - RNA, 13 nt, Human
cuuuauaugaaga

SEQ ID NO: 3532893 - RNA, 22 nt, Human
cuuuauaugaagaaaaucacuu

SEQ ID NO: 3532894 - RNA, 20 nt, Human
cuuuauauggccucaagauc

SEQ ID NO: 3532895 - RNA, 15 nt, Human
cuuuauauuuaucca

SEQ ID NO: 3532896 - RNA, 18 nt, Human
cuuuauauuuauccacua

SEQ ID NO: 3532897 - RNA, 21 nt, Human
cuuuaucaaagggugaaaauu

SEQ ID NO: 3532898 - RNA, 23 nt, Human
cuuuaucacaaccaccguuacaa

SEQ ID NO: 3532899 - RNA, 19 nt, Human
cuuuaucaccuggcuuguu

SEQ ID NO: 3532900 - RNA, 20 nt, Human
cuuuaucaccuggcuuguuu

SEQ ID NO: 3532901 - RNA, 22 nt, Human
cuuuaucaccuggcuuguuuau

SEQ ID NO: 3532902 - RNA, 13 nt, Human
cuuuaucacuuuu

SEQ ID NO: 3532903 - RNA, 22 nt, Human
cuuuaucacuuuuugaacuaag

SEQ ID NO: 3532904 - RNA, 22 nt, Human
cuuuaucagggaaacuaagauu

SEQ ID NO: 3532905 - RNA, 19 nt, Human
cuuuaucuaccaacuuuca

SEQ ID NO: 3532906 - RNA, 20 nt, Human
cuuuaucuaccaacuuucaa

SEQ ID NO: 3532907 - RNA, 21 nt, Human
cuuuaucuugaauaauguaag

SEQ ID NO: 3532908 - RNA, 23 nt, Human
cuuuaucuugaauaauguaagac

SEQ ID NO: 3532909 - RNA, 22 nt, Human
cuuuaugaaugaaaaaacaguc

SEQ ID NO: 3532910 - RNA, 16 nt, Human
cuuuaugauuuucaua

SEQ ID NO: 3532911 - RNA, 18 nt, Human
cuuuaugauuuucauaac

SEQ ID NO: 3532912 - RNA, 13 nt, Human
cuuuaugcuugca

SEQ ID NO: 3532913 - RNA, 21 nt, Human
cuuuauguacaggaugcuuug

SEQ ID NO: 3532914 - RNA, 21 nt, Human
cuuuaugucuguggauuuuuu

SEQ ID NO: 3532915 - RNA, 17 nt, Human
cuuuaugugaauuuuua

SEQ ID NO: 3532916 - RNA, 14 nt, Human
cuuuauguguaaau

SEQ ID NO: 3532917 - RNA, 20 nt, Human
cuuuauguucauuuguuugu

SEQ ID NO: 3532918 - RNA, 13 nt, Human
cuuuauuaaaauc

SEQ ID NO: 3532919 - RNA, 15 nt, Human
cuuuauuaaucacua

SEQ ID NO: 3532920 - RNA, 19 nt, Human
cuuuauuaauguuuucaaa

SEQ ID NO: 3532921 - RNA, 14 nt, Human
cuuuauuacccccu

SEQ ID NO: 3532922 - RNA, 12 nt, Human
cuuuauuauuau

SEQ ID NO: 3532923 - RNA, 13 nt, Human
cuuuauuauuuau

SEQ ID NO: 3532924 - RNA, 20 nt, Human
cuuuauuccagaaugcugua

SEQ ID NO: 3532925 - RNA, 16 nt, Human
cuuuauuggcugagau

SEQ ID NO: 3532926 - RNA, 22 nt, Human
cuuuauuuguuaauaguuccug

SEQ ID NO: 3532927 - RNA, 16 nt, Human
cuuuauuuguuuuuuu

SEQ ID NO: 3532928 - RNA, 21 nt, Human
cuuuauuuuccccuaucauuu

SEQ ID NO: 3532929 - RNA, 11 nt, Human
cuuuauuuucu

SEQ ID NO: 3532930 - RNA, 11 nt, Human
cuuuauuuuga

SEQ ID NO: 3532931 - RNA, 16 nt, Human
cuuuauuuuguguaaa

SEQ ID NO: 3532932 - RNA, 17 nt, Human
cuuuauuuuuuugaacu

SEQ ID NO: 3532933 - RNA, 19 nt, Human
cuuucaaaaccuuuugaaa

SEQ ID NO: 3532934 - RNA, 19 nt, Human
cuuucaaaauuaaaucugu

SEQ ID NO: 3532935 - RNA, 19 nt, Human
cuuucaaauuuagaaacua

SEQ ID NO: 3532936 - RNA, 23 nt, Human
cuuucaagugccuuucugcaguu

SEQ ID NO: 3532937 - RNA, 22 nt, Human
cuuucaauaaacuaaagaaaaa

SEQ ID NO: 3532938 - RNA, 17 nt, Human
cuuucaauacagauaua

SEQ ID NO: 3532939 - RNA, 16 nt, Human
ggagcugccuggaccc

SEQ ID NO: 3532940 - RNA, 21 nt, Human
ggagcugccuguucagcucca

SEQ ID NO: 3532941 - RNA, 23 nt, Human
ggagcugcuggcuugcagugcgc

SEQ ID NO: 3532942 - RNA, 21 nt, Human
ggagcuggccgugggccuggg

SEQ ID NO: 3532943 - RNA, 14 nt, Human
ggagcugggaggaa

SEQ ID NO: 3532944 - RNA, 15 nt, Human
ggagcugggaggaaa

SEQ ID NO: 3532945 - RNA, 19 nt, Human
ggagcugggcagaaggcca

SEQ ID NO: 3532946 - RNA, 18 nt, Human
ggagcugguuagaaaugc

SEQ ID NO: 3532947 - RNA, 14 nt, Human
cuuuggaggccccu

SEQ ID NO: 3532948 - RNA, 16 nt, Human
cuuuggaguccccuca

SEQ ID NO: 3532949 - RNA, 17 nt, Human
cuuuggauuugacauug

SEQ ID NO: 3532950 - RNA, 18 nt, Human
cuuuggcacuggggcacu

SEQ ID NO: 3532951 - RNA, 11 nt, Human
cuuuggcagug

SEQ ID NO: 3532952 - RNA, 17 nt, Human
cuuuggccauuccaaca

SEQ ID NO: 3532953 - RNA, 16 nt, Human
cuuuggcccagggugg

SEQ ID NO: 3532954 - RNA, 14 nt, Human
cuuuggccugaguu

SEQ ID NO: 3532955 - RNA, 14 nt, Human
cuuuggcucuggag

SEQ ID NO: 3532956 - RNA, 14 nt, Human
cuuuggcugcaugc

SEQ ID NO: 3532957 - RNA, 18 nt, Human
cuuuggcuuauaauucuu

SEQ ID NO: 3532958 - RNA, 15 nt, Human
cuuugggaaaggaga

SEQ ID NO: 3532959 - RNA, 22 nt, Human
cuuugggaaaggagaaguuaag

SEQ ID NO: 3532960 - RNA, 17 nt, Human
cuuugggaauauuugaa

SEQ ID NO: 3532961 - RNA, 20 nt, Human
cuuugggaauauuugaaucu

SEQ ID NO: 3532962 - RNA, 14 nt, Human
cuuugggaggcuga

SEQ ID NO: 3532963 - RNA, 13 nt, Human
cuuugggccagac

SEQ ID NO: 3532964 - RNA, 16 nt, Human
cuuugggcccagggac

SEQ ID NO: 3532965 - RNA, 15 nt, Human
cuuugggcccugcau

SEQ ID NO: 3532966 - RNA, 17 nt, Human
cuuugggcccugcaugu

SEQ ID NO: 3532967 - RNA, 23 nt, Human
cuuugggggaggagaacaugagu

SEQ ID NO: 3532968 - RNA, 17 nt, Human
cuuuggggucagccagg

SEQ ID NO: 3532969 - RNA, 22 nt, Human
cuuuggguaccuauuuucauug

SEQ ID NO: 3532970 - RNA, 17 nt, Human
cuuuggguuaagcauua

SEQ ID NO: 3532971 - RNA, 14 nt, Human
cuuugguccuucaa

SEQ ID NO: 3532972 - RNA, 13 nt, Human
cuuuggugccuuu

SEQ ID NO: 3532973 - RNA, 14 nt, Human
cuuuggugccuuuc

SEQ ID NO: 3532974 - RNA, 17 nt, Human
cuuugguggcuuugcau

SEQ ID NO: 3532975 - RNA, 22 nt, Human
cuuuggugguuuaaaaauggua

SEQ ID NO: 3532976 - RNA, 13 nt, Human
cuuugguuauuuu

SEQ ID NO: 3532977 - RNA, 14 nt, Human
cuuugguucuaagg

SEQ ID NO: 3532978 - RNA, 15 nt, Human
cuuugguucuaagga

SEQ ID NO: 3532979 - RNA, 18 nt, Human
cuuuguaaccacaacuuu

SEQ ID NO: 3532980 - RNA, 15 nt, Human
cuuuguaagaacuaa

SEQ ID NO: 3532981 - RNA, 17 nt, Human
cuuuguaagaguguaga

SEQ ID NO: 3532982 - RNA, 20 nt, Human
cuuuguaagaguguagaagc

SEQ ID NO: 3532983 - RNA, 23 nt, Human
cuuuguaagaguguagaagcauu

SEQ ID NO: 3532984 - RNA, 21 nt, Human
cuuuguaagugaaaaacauga

SEQ ID NO: 3532985 - RNA, 20 nt, Human
cuuuguacacccaugaaaga

SEQ ID NO: 3532986 - RNA, 15 nt, Human
cuuuguacagagugc

SEQ ID NO: 3532987 - RNA, 16 nt, Human
cuuuguacagcccaga

SEQ ID NO: 3532988 - RNA, 19 nt, Human
cuuuguaccccccaacccc

SEQ ID NO: 3532989 - RNA, 21 nt, Human
cuuuguaccccccaaccccug

SEQ ID NO: 3532990 - RNA, 16 nt, Human
cuuuguauacaaguac

SEQ ID NO: 3532991 - RNA, 16 nt, Human
cuuuguauacuuuaaa

SEQ ID NO: 3532992 - RNA, 20 nt, Human
ggcacugggaugagccgcug

SEQ ID NO: 3532993 - RNA, 14 nt, Human
ggcacuuaaagcuu

SEQ ID NO: 3532994 - RNA, 15 nt, Human
ggcacuuaagcacaa

SEQ ID NO: 3532995 - RNA, 22 nt, Human
ggcacuuauuguaaauuuuaga

SEQ ID NO: 3532996 - RNA, 11 nt, Human
ggcacuucaca

SEQ ID NO: 3532997 - RNA, 14 nt, Human
ggcacuucccugcu

SEQ ID NO: 3532998 - RNA, 14 nt, Human
ggcacuugccuggg

SEQ ID NO: 3532999 - RNA, 18 nt, Human
ggcacuuuaaaacacucu

SEQ ID NO: 3533000 - RNA, 17 nt, Human
ggcagaaaauugcacaa

SEQ ID NO: 3533001 - RNA, 22 nt, Human
ggcagaaagcaaaugugaccug

SEQ ID NO: 3533002 - RNA, 14 nt, Human
ggcagaaaggaaaa

SEQ ID NO: 3533003 - RNA, 14 nt, Human
ggcagaaaguggcc

SEQ ID NO: 3533004 - RNA, 21 nt, Human
ggcagaacacuaaccugaccg

SEQ ID NO: 3533005 - RNA, 18 nt, Human
ggcagaacagccgcuccu

SEQ ID NO: 3533006 - RNA, 15 nt, Human
ggcagaacccuggug

SEQ ID NO: 3533007 - RNA, 14 nt, Human
ggcagaacugagcu

SEQ ID NO: 3533008 - RNA, 22 nt, Human
ggcagaagaauugaacccagga

SEQ ID NO: 3533009 - RNA, 23 nt, Human
ggcagaagaauugaacccaggag

SEQ ID NO: 3533010 - RNA, 17 nt, Human
ggcagaagacaccagag

SEQ ID NO: 3533011 - RNA, 18 nt, Human
ggcagaagacaccagagc

SEQ ID NO: 3533012 - RNA, 15 nt, Human
ggcagaagggagaag

SEQ ID NO: 3533013 - RNA, 20 nt, Human
ggcagaaugcuagcucugag

SEQ ID NO: 3533014 - RNA, 19 nt, Human
ggcagacacggaucugaga

SEQ ID NO: 3533015 - RNA, 17 nt, Human
ggcagacagcagcucag

SEQ ID NO: 3533016 - RNA, 21 nt, Human
ggcagacaugguggggucucc

SEQ ID NO: 3533017 - RNA, 15 nt, Human
ggcagacuacacagg

SEQ ID NO: 3533018 - RNA, 17 nt, Human
ggcagacuacacaggau

SEQ ID NO: 3533019 - RNA, 14 nt, Human
ggcagacuggguuu

SEQ ID NO: 3533020 - RNA, 14 nt, Human
ggcagagaaucaua

SEQ ID NO: 3533021 - RNA, 9 nt, Human
ggcagagag

SEQ ID NO: 3533022 - RNA, 11 nt, Human
ggcagagagag

SEQ ID NO: 3533023 - RNA, 12 nt, Human
ggcagagagaga

SEQ ID NO: 3533024 - RNA, 22 nt, Human
ggcagagcagagaccaucccug

SEQ ID NO: 3533025 - RNA, 12 nt, Human
ggcagagcauuu

SEQ ID NO: 3533026 - RNA, 12 nt, Human
ggcagagccagg

SEQ ID NO: 3533027 - RNA, 14 nt, Human
ggcagagcccugcu

SEQ ID NO: 3533028 - RNA, 16 nt, Human
ggcagagccgggaagc

SEQ ID NO: 3533029 - RNA, 22 nt, Human
ggcagagccuuuggaugaccag

SEQ ID NO: 3533030 - RNA, 16 nt, Human
ggcagagcuggcucug

SEQ ID NO: 3533031 - RNA, 20 nt, Human
ggcagaggaccaggcuguag

SEQ ID NO: 3533032 - RNA, 21 nt, Human
ggcagaggagaacuugcugcc

SEQ ID NO: 3533033 - RNA, 22 nt, Human
ggcagaggagaacuugcugccu

SEQ ID NO: 3533034 - RNA, 17 nt, Human
ggcagaggcccaggcug

SEQ ID NO: 3533035 - RNA, 14 nt, Human
ggcagaggccuggg

SEQ ID NO: 3533036 - RNA, 12 nt, Human
ggcagaggcugg

SEQ ID NO: 3533037 - RNA, 19 nt, Human
ggcagagggcagaggcugg

SEQ ID NO: 3533038 - RNA, 12 nt, Human
ggcagagggcug

SEQ ID NO: 3533039 - RNA, 14 nt, Human
ggcagagggcugga

SEQ ID NO: 3533040 - RNA, 18 nt, Human
ggcagagguucauuucaa

SEQ ID NO: 3533041 - RNA, 21 nt, Human
ggcagagguugcagugagccg

SEQ ID NO: 3533042 - RNA, 20 nt, Human
ggcagagguugcagugagcu

SEQ ID NO: 3533043 - RNA, 15 nt, Human
ggcagagguuguagu

SEQ ID NO: 3533044 - RNA, 20 nt, Human
ggcagagguuguagugagcc

SEQ ID NO: 3533045 - RNA, 18 nt, Human
ggcagagguuguggugag

SEQ ID NO: 3533046 - RNA, 14 nt, Human
ggcagaguuacuug

SEQ ID NO: 3533047 - RNA, 19 nt, Human
ggcagauaaucagccucuu

SEQ ID NO: 3533048 - RNA, 16 nt, Human
ggcagaugacaagaug

SEQ ID NO: 3533049 - RNA, 15 nt, Human
ggcagaugcagcucu

SEQ ID NO: 3533050 - RNA, 17 nt, Human
ggcagauggccuggagg

SEQ ID NO: 3533051 - RNA, 16 nt, Human
ggcagcaaggcccgag

SEQ ID NO: 3533052 - RNA, 22 nt, Human
ggcagcaaggcccgagcagcug

SEQ ID NO: 3533053 - RNA, 14 nt, Human
ggcagcacagagac

SEQ ID NO: 3533054 - RNA, 21 nt, Human
ggcagcaccugucuccuuuca

SEQ ID NO: 3533055 - RNA, 14 nt, Human
ggcagcagaaaacu

SEQ ID NO: 3533056 - RNA, 16 nt, Human
ggcagcagcagcccug

SEQ ID NO: 3533057 - RNA, 11 nt, Human
ggcagcagcca

SEQ ID NO: 3533058 - RNA, 16 nt, Human
ggcagcagccagcccu

SEQ ID NO: 3533059 - RNA, 23 nt, Human
ggcagcagccagcccugccugga

SEQ ID NO: 3533060 - RNA, 13 nt, Human
ggcagcagccauc

SEQ ID NO: 3533061 - RNA, 13 nt, Human
ggcagcagggcua

SEQ ID NO: 3533062 - RNA, 15 nt, Human
ggcagcagggguugg

SEQ ID NO: 3533063 - RNA, 22 nt, Human
ggcagcagggguuggggaaaca

SEQ ID NO: 3533064 - RNA, 15 nt, Human
ggcagcaggugcugc

SEQ ID NO: 3533065 - RNA, 16 nt, Human
ggcagcaggugcugcu

SEQ ID NO: 3533066 - RNA, 19 nt, Human
ggcagcaggugcugcuacc

SEQ ID NO: 3533067 - RNA, 21 nt, Human
ggcagcaggugcugcuacccu

SEQ ID NO: 3533068 - RNA, 14 nt, Human
ggcagcagugugag

SEQ ID NO: 3533069 - RNA, 17 nt, Human
ggcagcauccccuugaa

SEQ ID NO: 3533070 - RNA, 18 nt, Human
ggcagccaaacccaugag

SEQ ID NO: 3533071 - RNA, 23 nt, Human
ggcagccacuucggccaggucac

SEQ ID NO: 3533072 - RNA, 13 nt, Human
ggcagccagacca

SEQ ID NO: 3533073 - RNA, 14 nt, Human
ggcagccaggccac

SEQ ID NO: 3533074 - RNA, 12 nt, Human
ggcagccaggcu

SEQ ID NO: 3533075 - RNA, 13 nt, Human
ggcagccaggcug

SEQ ID NO: 3533076 - RNA, 12 nt, Human
ggcagccaggga

SEQ ID NO: 3533077 - RNA, 13 nt, Human
ggcagccagggag

SEQ ID NO: 3533078 - RNA, 18 nt, Human
ggcagccagggagagccc

SEQ ID NO: 3533079 - RNA, 13 nt, Human
ggcagccagggcu

SEQ ID NO: 3533080 - RNA, 14 nt, Human
ggcagccagugaga

SEQ ID NO: 3533081 - RNA, 17 nt, Human
ggcagccagugcccuga

SEQ ID NO: 3533082 - RNA, 20 nt, Human
ggcagccagugcccugagcc

SEQ ID NO: 3533083 - RNA, 22 nt, Human
ggcagcccagagacuuuguaga

SEQ ID NO: 3533084 - RNA, 16 nt, Human
ggcagccccagccugc

SEQ ID NO: 3533085 - RNA, 17 nt, Human
ggcagccccagccugcu

SEQ ID NO: 3533086 - RNA, 16 nt, Human
ggcagccccauucugc

SEQ ID NO: 3533087 - RNA, 20 nt, Human
ggcagccccauucugccugc

SEQ ID NO: 3533088 - RNA, 22 nt, Human
ggcagccccauucugccugccc

SEQ ID NO: 3533089 - RNA, 23 nt, Human
ggcagccccauucugccugccca

SEQ ID NO: 3533090 - RNA, 11 nt, Human
ggcagccccug

SEQ ID NO: 3533091 - RNA, 17 nt, Human
ggcagcccgcuaggcuc

SEQ ID NO: 3533092 - RNA, 18 nt, Human
ggcagccgugccuucagc

SEQ ID NO: 3533093 - RNA, 23 nt, Human
cuuuuaaagaaaaaaauugaaau

SEQ ID NO: 3533094 - RNA, 15 nt, Human
cuuuuaaagaauuuc

SEQ ID NO: 3533095 - RNA, 12 nt, Human
cuuuuaaagacc

SEQ ID NO: 3533096 - RNA, 23 nt, Human
cuuuuaaaggggcagaaaaacuc

SEQ ID NO: 3533097 - RNA, 19 nt, Human
cuuuuaaaguguuucagcu

SEQ ID NO: 3533098 - RNA, 17 nt, Human
cuuuuaaauccuguuga

SEQ ID NO: 3533099 - RNA, 17 nt, Human
cuuuuaaauuagaaaau

SEQ ID NO: 3533100 - RNA, 19 nt, Human
cuuuuaaauuagaaaauau

SEQ ID NO: 3533101 - RNA, 20 nt, Human
cuuuuaacaccugaugugua

SEQ ID NO: 3533102 - RNA, 13 nt, Human
cuuuuaacauuuu

SEQ ID NO: 3533103 - RNA, 21 nt, Human
cuuuuaaccucuuuaaguauu

SEQ ID NO: 3533104 - RNA, 14 nt, Human
cuuuuaacugugca

SEQ ID NO: 3533105 - RNA, 15 nt, Human
cuuuuaacuucuuuc

SEQ ID NO: 3533106 - RNA, 17 nt, Human
cuuuuaacuucuuucua

SEQ ID NO: 3533107 - RNA, 20 nt, Human
cuuuuaacuuuauaaaucca

SEQ ID NO: 3533108 - RNA, 17 nt, Human
cuuuuaagacuuugguu

SEQ ID NO: 3533109 - RNA, 20 nt, Human
cuuuuaagaugugucuucaa

SEQ ID NO: 3533110 - RNA, 16 nt, Human
cuuuuaauacagggua

SEQ ID NO: 3533111 - RNA, 15 nt, Human
cuuuuaauccuggcu

SEQ ID NO: 3533112 - RNA, 16 nt, Human
cuuuuaaugaaaagga

SEQ ID NO: 3533113 - RNA, 15 nt, Human
cuuuuaaugaacaaa

SEQ ID NO: 3533114 - RNA, 23 nt, Human
cuuuuaaugcuucauucaauauu

SEQ ID NO: 3533115 - RNA, 14 nt, Human
cuuuuaauuaaaug

SEQ ID NO: 3533116 - RNA, 16 nt, Human
cuuuuaauuaaugaaa

SEQ ID NO: 3533117 - RNA, 23 nt, Human
cuuuuaauuaaugaaauaucugu

SEQ ID NO: 3533118 - RNA, 14 nt, Human
cuuuuaauuuuccu

SEQ ID NO: 3533119 - RNA, 23 nt, Human
cuuuuacaaguaacaaaaauaaa

SEQ ID NO: 3533120 - RNA, 13 nt, Human
cuuuuacauacug

SEQ ID NO: 3533121 - RNA, 15 nt, Human
cuuuuaccagcuuuu

SEQ ID NO: 3533122 - RNA, 19 nt, Human
cuuuuacccuggccccucu

SEQ ID NO: 3533123 - RNA, 15 nt, Human
cuuuuacccuuuuuc

SEQ ID NO: 3533124 - RNA, 14 nt, Human
cuuuuaccugcugc

SEQ ID NO: 3533125 - RNA, 15 nt, Human
cuuuuaccugcugcu

SEQ ID NO: 3533126 - RNA, 20 nt, Human
cuuuuaccuuuuuuuuuucu

SEQ ID NO: 3533127 - RNA, 21 nt, Human
cuuuuaccuuuuuuuuuucuu

SEQ ID NO: 3533128 - RNA, 15 nt, Human
cuuuuacgagugcua

SEQ ID NO: 3533129 - RNA, 18 nt, Human
cuuuuacuacagcuauga

SEQ ID NO: 3533130 - RNA, 14 nt, Human
cuuuuacucugccu

SEQ ID NO: 3533131 - RNA, 22 nt, Human
cuuuuacugguugcauggaaau

SEQ ID NO: 3533132 - RNA, 13 nt, Human
cuuuuagccuagu

SEQ ID NO: 3533133 - RNA, 20 nt, Human
cuuuuaggaaaaucacuuug

SEQ ID NO: 3533134 - RNA, 20 nt, Human
cuuuuagggagagucauauu

SEQ ID NO: 3533135 - RNA, 15 nt, Human
cuuuuaguacccacc

SEQ ID NO: 3533136 - RNA, 16 nt, Human
cuuuuaguacccaccu

SEQ ID NO: 3533137 - RNA, 17 nt, Human
cuuuuaguacccaccug

SEQ ID NO: 3533138 - RNA, 21 nt, Human
cuuuuaguacccaccugagcu

SEQ ID NO: 3533139 - RNA, 21 nt, Human
cuuuuaguuccugugcacagc

SEQ ID NO: 3533140 - RNA, 22 nt, Human
cuuuuaguuccugugcacagcc

SEQ ID NO: 3533141 - RNA, 21 nt, Human
cuuuuaguuuuaguugcagaa

SEQ ID NO: 3533142 - RNA, 18 nt, Human
cuuuuaguuuuucugucc

SEQ ID NO: 3533143 - RNA, 20 nt, Human
cuuuuaguuuuucugucccu

SEQ ID NO: 3533144 - RNA, 20 nt, Human
cuuuuauaaaaaaaaugaaa

SEQ ID NO: 3533145 - RNA, 21 nt, Human
cuuuuauaaaaaaaaugaaau

SEQ ID NO: 3533146 - RNA, 14 nt, Human
cuuuuauaaaccuc

SEQ ID NO: 3533147 - RNA, 15 nt, Human
cuuuuauaaacuuua

SEQ ID NO: 3533148 - RNA, 18 nt, Human
cuuuuauaaauuaaauau

SEQ ID NO: 3533149 - RNA, 24 nt, Human
cuuuuauaaauuaaauauauguau

SEQ ID NO: 3533150 - RNA, 21 nt, Human
cuuuuauaauucucauuaaaa

SEQ ID NO: 3533151 - RNA, 12 nt, Human
cuuuuauacucu

SEQ ID NO: 3533152 - RNA, 17 nt, Human
cuuuuauacucuuucug

SEQ ID NO: 3533153 - RNA, 22 nt, Human
cuuuuauaggugagaaaaaaac

SEQ ID NO: 3533154 - RNA, 15 nt, Human
cuuuuauaguggaaa

SEQ ID NO: 3533155 - RNA, 16 nt, Human
cuuuuauauuuguauc

SEQ ID NO: 3533156 - RNA, 17 nt, Human
cuuuuauauuuguaucg

SEQ ID NO: 3533157 - RNA, 16 nt, Human
ggaccccuccucccuu

SEQ ID NO: 3533158 - RNA, 11 nt, Human
ggaccccugca

SEQ ID NO: 3533159 - RNA, 23 nt, Human
ggacccgaccccccgugggcucc

SEQ ID NO: 3533160 - RNA, 14 nt, Human
ggacccgcucugga

SEQ ID NO: 3533161 - RNA, 20 nt, Human
ggacccggaggggccuggca

SEQ ID NO: 3533162 - RNA, 17 nt, Human
ggacccguucauggggg

SEQ ID NO: 3533163 - RNA, 15 nt, Human
ggacccucgcuggcc

SEQ ID NO: 3533164 - RNA, 16 nt, Human
ggacccugaaaugugu

SEQ ID NO: 3533165 - RNA, 13 nt, Human
ggacccugaaggg

SEQ ID NO: 3533166 - RNA, 11 nt, Human
ggacccugacc

SEQ ID NO: 3533167 - RNA, 19 nt, Human
ggacccugaggcccagagg

SEQ ID NO: 3533168 - RNA, 18 nt, Human
ggacccugccaggcacag

SEQ ID NO: 3533169 - RNA, 20 nt, Human
ggacccugccaggcacaggc

SEQ ID NO: 3533170 - RNA, 15 nt, Human
ggacccugugagccg

SEQ ID NO: 3533171 - RNA, 17 nt, Human
ggacccuguugcuaagc

SEQ ID NO: 3533172 - RNA, 16 nt, Human
ggacccuuauaaaauc

SEQ ID NO: 3533173 - RNA, 16 nt, Human
ggacccuuuccuuccu

SEQ ID NO: 3533174 - RNA, 22 nt, Human
ggaccgccagauggggccucug

SEQ ID NO: 3533175 - RNA, 23 nt, Human
ggaccgccagauggggccucugu

SEQ ID NO: 3533176 - RNA, 18 nt, Human
ggaccgcccuuuuccccu

SEQ ID NO: 3533177 - RNA, 21 nt, Human
ggaccgcuacaccacucuggc

SEQ ID NO: 3533178 - RNA, 22 nt, Human
ggaccgcuacaccacucuggca

SEQ ID NO: 3533179 - RNA, 17 nt, Human
ggaccggagaguggggg

SEQ ID NO: 3533180 - RNA, 20 nt, Human
ggaccggguggaagggaugg

SEQ ID NO: 3533181 - RNA, 17 nt, Human
ggaccgguacagaaagg

SEQ ID NO: 3533182 - RNA, 20 nt, Human
ggaccuaggauaucuucucc

SEQ ID NO: 3533183 - RNA, 17 nt, Human
ggaccuauguccuaagg

SEQ ID NO: 3533184 - RNA, 21 nt, Human
ggaccucagaguccaggcccc

SEQ ID NO: 3533185 - RNA, 23 nt, Human
ggaccucaggugagaagcagagg

SEQ ID NO: 3533186 - RNA, 11 nt, Human
ggaccucaucc

SEQ ID NO: 3533187 - RNA, 13 nt, Human
ggaccucccuucc

SEQ ID NO: 3533188 - RNA, 16 nt, Human
ggaccucgugcuuuaa

SEQ ID NO: 3533189 - RNA, 12 nt, Human
ggaccucugaca

SEQ ID NO: 3533190 - RNA, 16 nt, Human
ggaccucugacagcag

SEQ ID NO: 3533191 - RNA, 13 nt, Human
ggaccucugcucu

SEQ ID NO: 3533192 - RNA, 16 nt, Human
ggaccucugcucugag

SEQ ID NO: 3533193 - RNA, 12 nt, Human
ggaccugagccu

SEQ ID NO: 3533194 - RNA, 15 nt, Human
ggaccugagccugcc

SEQ ID NO: 3533195 - RNA, 16 nt, Human
ggaccugagccugccg

SEQ ID NO: 3533196 - RNA, 17 nt, Human
ggaccugagccugccga

SEQ ID NO: 3533197 - RNA, 17 nt, Human
ggaccugagucugcuau

SEQ ID NO: 3533198 - RNA, 16 nt, Human
ggaccugccaggcagg

SEQ ID NO: 3533199 - RNA, 22 nt, Human
ggaccugcccccgcauccccug

SEQ ID NO: 3533200 - RNA, 22 nt, Human
ggaccugccuccugccugcccc

SEQ ID NO: 3533201 - RNA, 14 nt, Human
ggaccugccuguag

SEQ ID NO: 3533202 - RNA, 15 nt, Human
ggaccugccuguagc

SEQ ID NO: 3533203 - RNA, 14 nt, Human
ggaccuggaaggga

SEQ ID NO: 3533204 - RNA, 17 nt, Human
ggaccugguacccuccu

SEQ ID NO: 3533205 - RNA, 20 nt, Human
ggaccuguauuuaagcaaau

SEQ ID NO: 3533206 - RNA, 12 nt, Human
ggaccuguggcu

SEQ ID NO: 3533207 - RNA, 21 nt, Human
ggaccuuaggccuuccucucu

SEQ ID NO: 3533208 - RNA, 17 nt, Human
ggaccuucgggcugugc

SEQ ID NO: 3533209 - RNA, 17 nt, Human
ggaccuuucagcuguga

SEQ ID NO: 3533210 - RNA, 20 nt, Human
ggacgaagaagagccacagu

SEQ ID NO: 3533211 - RNA, 22 nt, Human
ggacgcagcaggaggccaggcc

SEQ ID NO: 3533212 - RNA, 23 nt, Human
ggacgcagcaggaggccaggccg

SEQ ID NO: 3533213 - RNA, 19 nt, Human
ggacgcuacccgggaaggg

SEQ ID NO: 3533214 - RNA, 17 nt, Human
ggacgcucccugcucca

SEQ ID NO: 3533215 - RNA, 19 nt, Human
ggacgcuccgcugccgugc

SEQ ID NO: 3533216 - RNA, 14 nt, Human
ggacgcucucuggc

SEQ ID NO: 3533217 - RNA, 16 nt, Human
ggacgcucucuggccu

SEQ ID NO: 3533218 - RNA, 18 nt, Human
ggacgcucucuggccuuc

SEQ ID NO: 3533219 - RNA, 19 nt, Human
ggacgcucucuggccuucg

SEQ ID NO: 3533220 - RNA, 13 nt, Human
ggacgcuggcucc

SEQ ID NO: 3533221 - RNA, 17 nt, Human
ggacggcauuccugcuu

SEQ ID NO: 3533222 - RNA, 18 nt, Human
ggacggcauuccugcuua

SEQ ID NO: 3533223 - RNA, 21 nt, Human
ggacggccugaugcucccucc

SEQ ID NO: 3533224 - RNA, 13 nt, Human
ggacggggccggc

SEQ ID NO: 3533225 - RNA, 16 nt, Human
ggacggguuagacagc

SEQ ID NO: 3533226 - RNA, 21 nt, Human
ggacggugcccaagccagagg

SEQ ID NO: 3533227 - RNA, 19 nt, Human
ggacguggcucagccagca

SEQ ID NO: 3533228 - RNA, 16 nt, Human
ggacguuccagccggc

SEQ ID NO: 3533229 - RNA, 21 nt, Human
ggacguuccagccggcauggc

SEQ ID NO: 3533230 - RNA, 14 nt, Human
ggacguuguuuugg

SEQ ID NO: 3533231 - RNA, 12 nt, Human
ggacguuucuca

SEQ ID NO: 3533232 - RNA, 18 nt, Human
ggacuaacacucagaagc

SEQ ID NO: 3533233 - RNA, 20 nt, Human
ggacuaacacucagaagccu

SEQ ID NO: 3533234 - RNA, 22 nt, Human
ggacuaacacucagaagccugg

SEQ ID NO: 3533235 - RNA, 24 nt, Human
ggacuaacuugucuuuggacccug

SEQ ID NO: 3533236 - RNA, 16 nt, Human
ggacuaagccuaccug

SEQ ID NO: 3533237 - RNA, 23 nt, Human
ggagugaguugauagcacagacc

SEQ ID NO: 3533238 - RNA, 20 nt, Human
ggagugcaaugacacagucu

SEQ ID NO: 3533239 - RNA, 22 nt, Human
ggagugcuggcucacaguacag

SEQ ID NO: 3533240 - RNA, 21 nt, Human
ggagugcuguuuuguuauaua

SEQ ID NO: 3533241 - RNA, 22 nt, Human
ggagugcuuaucccuucuuuuu

SEQ ID NO: 3533242 - RNA, 20 nt, Human
ggaguggaauaguauccucc

SEQ ID NO: 3533243 - RNA, 16 nt, Human
ggaguggccacagaaa

SEQ ID NO: 3533244 - RNA, 18 nt, Human
ggaguggcucgccaggcc

SEQ ID NO: 3533245 - RNA, 12 nt, Human
ggagugggacag

SEQ ID NO: 3533246 - RNA, 17 nt, Human
ggagugggacagagucu

SEQ ID NO: 3533247 - RNA, 22 nt, Human
ggaguggggaagugaucuuuug

SEQ ID NO: 3533248 - RNA, 15 nt, Human
ggaguggggcaguag

SEQ ID NO: 3533249 - RNA, 16 nt, Human
ggaguggggcaguaga

SEQ ID NO: 3533250 - RNA, 17 nt, Human
ggaguggguggaggcag

SEQ ID NO: 3533251 - RNA, 14 nt, Human
ggagugggugggga

SEQ ID NO: 3533252 - RNA, 15 nt, Human
ggaguggguggggag

SEQ ID NO: 3533253 - RNA, 18 nt, Human
ggaguggugauuugaaaa

SEQ ID NO: 3533254 - RNA, 16 nt, Human
ggaguggugcagacag

SEQ ID NO: 3533255 - RNA, 20 nt, Human
ggaguguaugacugcacaug

SEQ ID NO: 3533256 - RNA, 19 nt, Human
ggagugugagccaccuaag

SEQ ID NO: 3533257 - RNA, 20 nt, Human
ggagugugaggguccugcag

SEQ ID NO: 3533258 - RNA, 13 nt, Human
ggagugugugucu

SEQ ID NO: 3533259 - RNA, 18 nt, Human
ggaguuaagaccuggcag

SEQ ID NO: 3533260 - RNA, 19 nt, Human
ggaguuagaggccagccug

SEQ ID NO: 3533261 - RNA, 21 nt, Human
ggaguuagaggccagccuggc

SEQ ID NO: 3533262 - RNA, 13 nt, Human
ggaguuagggacu

SEQ ID NO: 3533263 - RNA, 12 nt, Human
ggaguuaucuaa

SEQ ID NO: 3533264 - RNA, 19 nt, Human
ggaguuauugaagcagagu

SEQ ID NO: 3533265 - RNA, 21 nt, Human
ggaguucaagaccagccuggc

SEQ ID NO: 3533266 - RNA, 15 nt, Human
ggaguucaaugaucu

SEQ ID NO: 3533267 - RNA, 20 nt, Human
ggaguucaaugaucuagguu

SEQ ID NO: 3533268 - RNA, 20 nt, Human
ggaguucaguggugugaucu

SEQ ID NO: 3533269 - RNA, 19 nt, Human
ggaguucauucauauuaca

SEQ ID NO: 3533270 - RNA, 20 nt, Human
ggaguucauucauauuacaa

SEQ ID NO: 3533271 - RNA, 17 nt, Human
ggaguuccagcaaacaa

SEQ ID NO: 3533272 - RNA, 19 nt, Human
ggaguuccaugaagaccac

SEQ ID NO: 3533273 - RNA, 14 nt, Human
ggaguucugcucau

SEQ ID NO: 3533274 - RNA, 15 nt, Human
ggaguucugguuccu

SEQ ID NO: 3533275 - RNA, 22 nt, Human
ggaguugaucuggaacccagac

SEQ ID NO: 3533276 - RNA, 21 nt, Human
ggaguuggaagugugugaucu

SEQ ID NO: 3533277 - RNA, 22 nt, Human
ggaguugucaagucucugcugg

SEQ ID NO: 3533278 - RNA, 19 nt, Human
ggaguuuaagaccagccug

SEQ ID NO: 3533279 - RNA, 20 nt, Human
ggaguuuaagaccagccugg

SEQ ID NO: 3533280 - RNA, 19 nt, Human
ggaguuuccuaaaaguuca

SEQ ID NO: 3533281 - RNA, 12 nt, Human
ggaguuucuaag

SEQ ID NO: 3533282 - RNA, 14 nt, Human
ggaguuucuaaggu

SEQ ID NO: 3533283 - RNA, 16 nt, Human
ggaguuucuuuccugc

SEQ ID NO: 3533284 - RNA, 14 nt, Human
ggaguuuggccaga

SEQ ID NO: 3533285 - RNA, 15 nt, Human
ggauaaaaagauguu

SEQ ID NO: 3533286 - RNA, 20 nt, Human
ggauaaaaagccagggcugg

SEQ ID NO: 3533287 - RNA, 19 nt, Human
ggauaaaauaaugcugcaa

SEQ ID NO: 3533288 - RNA, 22 nt, Human
ggauaaagaauacuauuuccaa

SEQ ID NO: 3533289 - RNA, 18 nt, Human
ggauaaaucauaaaguca

SEQ ID NO: 3533290 - RNA, 12 nt, Human
ggauaaaugcca

SEQ ID NO: 3533291 - RNA, 20 nt, Human
ggauaagccacucugucccu

SEQ ID NO: 3533292 - RNA, 15 nt, Human
ggauaagccagcugc

SEQ ID NO: 3533293 - RNA, 23 nt, Human
ggauaagcuauccguguugcagg

SEQ ID NO: 3533294 - RNA, 20 nt, Human
ggauaaugcuguugccucau

SEQ ID NO: 3533295 - RNA, 14 nt, Human
ggauaauuagcauc

SEQ ID NO: 3533296 - RNA, 18 nt, Human
ggauacaaaagcauguga

SEQ ID NO: 3533297 - RNA, 18 nt, Human
ggauacaaccucccucuu

SEQ ID NO: 3533298 - RNA, 20 nt, Human
ggauacagcaguagacauuu

SEQ ID NO: 3533299 - RNA, 17 nt, Human
ggauaccuucuuauuua

SEQ ID NO: 3533300 - RNA, 18 nt, Human
ggauacuuauauggaaau

SEQ ID NO: 3533301 - RNA, 21 nt, Human
ggauagaugcuggcccagggc

SEQ ID NO: 3533302 - RNA, 18 nt, Human
ggauagcuaacuguaaau

SEQ ID NO: 3533303 - RNA, 18 nt, Human
ggauaggaaaaaugagua

SEQ ID NO: 3533304 - RNA, 18 nt, Human
ggauagucaccuuuuaaa

SEQ ID NO: 3533305 - RNA, 16 nt, Human
ggauaguugcuauuuu

SEQ ID NO: 3533306 - RNA, 15 nt, Human
ggauauaggagagga

SEQ ID NO: 3533307 - RNA, 19 nt, Human
ggauauauaggcuauuuuc

SEQ ID NO: 3533308 - RNA, 14 nt, Human
ggauaugaguagcc

SEQ ID NO: 3533309 - RNA, 16 nt, Human
ggauauguaaaacauu

SEQ ID NO: 3533310 - RNA, 19 nt, Human
ggauauuuguacuguuuaa

SEQ ID NO: 3533311 - RNA, 23 nt, Human
ggaucaaaguucugcuuucuccc

SEQ ID NO: 3533312 - RNA, 14 nt, Human
ggaucacagagaca

SEQ ID NO: 3533313 - RNA, 17 nt, Human
ggaucacagggccccag

SEQ ID NO: 3533314 - RNA, 18 nt, Human
ggaucacaggugucagcc

SEQ ID NO: 3533315 - RNA, 17 nt, Human
ggaucacuggagcccag

SEQ ID NO: 3533316 - RNA, 16 nt, Human
ggaucagaacagcaga

SEQ ID NO: 3533317 - RNA, 16 nt, Human
ggaucagaacaggagc

SEQ ID NO: 3533318 - RNA, 19 nt, Human
ggaucagagcgcacaggga

SEQ ID NO: 3533319 - RNA, 13 nt, Human
ggaucagcguggc

SEQ ID NO: 3533320 - RNA, 18 nt, Human
ggaucagcguggccuugu

SEQ ID NO: 3533321 - RNA, 21 nt, Human
ggaucagucugauucccaagc

SEQ ID NO: 3533322 - RNA, 18 nt, Human
ggaucaucaugcagcuca

SEQ ID NO: 3533323 - RNA, 21 nt, Human
ggaucaucuaauucucugugg

SEQ ID NO: 3533324 - RNA, 12 nt, Human
ggaucaugaaag

SEQ ID NO: 3533325 - RNA, 16 nt, Human
ggaucaugguguaaua

SEQ ID NO: 3533326 - RNA, 15 nt, Human
ggauccacaccuggu

SEQ ID NO: 3533327 - RNA, 18 nt, Human
ggauccaggccccucccu

SEQ ID NO: 3533328 - RNA, 19 nt, Human
ggauccaggccccucccuc

SEQ ID NO: 3533329 - RNA, 16 nt, Human
ggaucccaagccuccu

SEQ ID NO: 3533330 - RNA, 23 nt, Human
ggaucccaccccauuuucugugg

SEQ ID NO: 3533331 - RNA, 21 nt, Human
ggauccccgccuggccaggag

SEQ ID NO: 3533332 - RNA, 22 nt, Human
ggauccccucugucuacaaaua

SEQ ID NO: 3533333 - RNA, 12 nt, Human
ggauccccuucc

SEQ ID NO: 3533334 - RNA, 14 nt, Human
ggauccccuuccua

SEQ ID NO: 3533335 - RNA, 17 nt, Human
ggaucccucauccucau

SEQ ID NO: 3533336 - RNA, 17 nt, Human
ggaucccucccccccau

SEQ ID NO: 3533337 - RNA, 17 nt, Human
ggauccgacugcuuugg

SEQ ID NO: 3533338 - RNA, 20 nt, Human
ggauccuauucucaccagga

SEQ ID NO: 3533339 - RNA, 23 nt, Human
ggauccuauucucaccaggaagg

SEQ ID NO: 3533340 - RNA, 15 nt, Human
ggauccuccaggugc

SEQ ID NO: 3533341 - RNA, 15 nt, Human
ggauccugagccaga

SEQ ID NO: 3533342 - RNA, 23 nt, Human
ggauccugagccagauuucacuc

SEQ ID NO: 3533343 - RNA, 19 nt, Human
ggaucggaggcuugucaga

SEQ ID NO: 3533344 - RNA, 14 nt, Human
ggaucuauuucaug

SEQ ID NO: 3533345 - RNA, 16 nt, Human
ggaucucucaggagca

SEQ ID NO: 3533346 - RNA, 18 nt, Human
ggaucucuugagccuggg

SEQ ID NO: 3533347 - RNA, 11 nt, Human
ggaucucuuuu

SEQ ID NO: 3533348 - RNA, 15 nt, Human
ggaucugagaaucuu

SEQ ID NO: 3533349 - RNA, 23 nt, Human
ggaucugggacccuuuccuuccu

SEQ ID NO: 3533350 - RNA, 18 nt, Human
ggaucuggggcucuggga

SEQ ID NO: 3533351 - RNA, 15 nt, Human
ggaucuguccaagga

SEQ ID NO: 3533352 - RNA, 16 nt, Human
ggaucuugcauuccca

SEQ ID NO: 3533353 - RNA, 22 nt, Human
ggaucuuucacccacagaaaga

SEQ ID NO: 3533354 - RNA, 21 nt, Human
ggaucuuuggacagaagcagc

SEQ ID NO: 3533355 - RNA, 22 nt, Human
ggaucuuuggacagaagcagcu

SEQ ID NO: 3533356 - RNA, 16 nt, Human
ggaucuuuguggccaa

SEQ ID NO: 3533357 - RNA, 17 nt, Human
ggaucuuuguggccaag

SEQ ID NO: 3533358 - RNA, 18 nt, Human
ggaugaaauaacuccuuc

SEQ ID NO: 3533359 - RNA, 22 nt, Human
ggaugaagggcccgagaacaug

SEQ ID NO: 3533360 - RNA, 13 nt, Human
ggaugaaucuccc

SEQ ID NO: 3533361 - RNA, 14 nt, Human
ggaugaaugagguc

SEQ ID NO: 3533362 - RNA, 16 nt, Human
ggccuggcagcucagc

SEQ ID NO: 3533363 - RNA, 21 nt, Human
ggccuggcagggaggucaggc

SEQ ID NO: 3533364 - RNA, 19 nt, Human
ggccuggcauucuuguaca

SEQ ID NO: 3533365 - RNA, 17 nt, Human
ggccuggccaccucucu

SEQ ID NO: 3533366 - RNA, 17 nt, Human
ggccuggccaggagcuc

SEQ ID NO: 3533367 - RNA, 13 nt, Human
ggccuggccaggc

SEQ ID NO: 3533368 - RNA, 14 nt, Human
ggccuggccaggca

SEQ ID NO: 3533369 - RNA, 16 nt, Human
ggccuggccagugccc

SEQ ID NO: 3533370 - RNA, 19 nt, Human
ggccuggccagugcccuga

SEQ ID NO: 3533371 - RNA, 20 nt, Human
ggccuggccagugcccugau

SEQ ID NO: 3533372 - RNA, 15 nt, Human
ggccuggcccaugua

SEQ ID NO: 3533373 - RNA, 18 nt, Human
ggccuggccccucagggu

SEQ ID NO: 3533374 - RNA, 12 nt, Human
ggccuggcccug

SEQ ID NO: 3533375 - RNA, 10 nt, Human
ggccuggccu

SEQ ID NO: 3533376 - RNA, 19 nt, Human
ggccuggccugagcuggga

SEQ ID NO: 3533377 - RNA, 14 nt, Human
ggccuggccuggcc

SEQ ID NO: 3533378 - RNA, 18 nt, Human
ggccuggccuggcccugc

SEQ ID NO: 3533379 - RNA, 12 nt, Human
ggccuggcuccg

SEQ ID NO: 3533380 - RNA, 13 nt, Human
ggccuggcuccgc

SEQ ID NO: 3533381 - RNA, 23 nt, Human
ggcgugaucucagcucacugcaa

SEQ ID NO: 3533382 - RNA, 19 nt, Human
ggcgugcaguggugcgauc

SEQ ID NO: 3533383 - RNA, 19 nt, Human
ggcguggagccagggagcg

SEQ ID NO: 3533384 - RNA, 12 nt, Human
ggcguggagcug

SEQ ID NO: 3533385 - RNA, 17 nt, Human
ggcguggucacugcugu

SEQ ID NO: 3533386 - RNA, 19 nt, Human
ggcguggucacugcuguca

SEQ ID NO: 3533387 - RNA, 11 nt, Human
ggcguuucuuu

SEQ ID NO: 3533388 - RNA, 21 nt, Human
ggcuaaaaaagcugaaucaga

SEQ ID NO: 3533389 - RNA, 18 nt, Human
ggcuaaaauguuuucagc

SEQ ID NO: 3533390 - RNA, 19 nt, Human
ggcuaagagcuagcgcugc

SEQ ID NO: 3533391 - RNA, 16 nt, Human
ggcuaauguacugcau

SEQ ID NO: 3533392 - RNA, 15 nt, Human
ggcuaauuaaauaaa

SEQ ID NO: 3533393 - RNA, 21 nt, Human
ggcuaauuagcauggccacau

SEQ ID NO: 3533394 - RNA, 12 nt, Human
ggcuaauuuaac

SEQ ID NO: 3533395 - RNA, 23 nt, Human
ggcuacaauuuucucccaggaag

SEQ ID NO: 3533396 - RNA, 23 nt, Human
ggcuacaccuuagccugcccucc

SEQ ID NO: 3533397 - RNA, 12 nt, Human
ggcuacagagaa

SEQ ID NO: 3533398 - RNA, 14 nt, Human
ggcuaccaggaaag

SEQ ID NO: 3533399 - RNA, 13 nt, Human
ggcuaccuuugua

SEQ ID NO: 3533400 - RNA, 14 nt, Human
ggcuaccuuuguau

SEQ ID NO: 3533401 - RNA, 19 nt, Human
ggcuacucuccucggcccc

SEQ ID NO: 3533402 - RNA, 20 nt, Human
ggcuacucugugccagagcc

SEQ ID NO: 3533403 - RNA, 21 nt, Human
ggcuacucugugccagagccu

SEQ ID NO: 3533404 - RNA, 15 nt, Human
ggcuacugcagcuuu

SEQ ID NO: 3533405 - RNA, 16 nt, Human
ggcuagaaccuggagg

SEQ ID NO: 3533406 - RNA, 18 nt, Human
ggcuagaaccuggagggc

SEQ ID NO: 3533407 - RNA, 13 nt, Human
ggcuagaaucugg

SEQ ID NO: 3533408 - RNA, 22 nt, Human
ggcuagaaucuggagagcuaga

SEQ ID NO: 3533409 - RNA, 18 nt, Human
ggcuagaggccagcccca

SEQ ID NO: 3533410 - RNA, 20 nt, Human
ggcuagaggccagccccacc

SEQ ID NO: 3533411 - RNA, 14 nt, Human
ggcuagaguccuca

SEQ ID NO: 3533412 - RNA, 20 nt, Human
ggcuagagugcaguggcaug

SEQ ID NO: 3533413 - RNA, 15 nt, Human
ggcuagaucaugaag

SEQ ID NO: 3533414 - RNA, 15 nt, Human
ggcuagguagaaaaa

SEQ ID NO: 3533415 - RNA, 20 nt, Human
ggcuagguagaaaaaggguc

SEQ ID NO: 3533416 - RNA, 19 nt, Human
ggcuagucaagcuccuccu

SEQ ID NO: 3533417 - RNA, 22 nt, Human
ggcuagucaagcuccuccuccc

SEQ ID NO: 3533418 - RNA, 18 nt, Human
ggcuagucagagagagug

SEQ ID NO: 3533419 - RNA, 20 nt, Human
ggcuagugacuuguguccca

SEQ ID NO: 3533420 - RNA, 17 nt, Human
ggcuauagaugucuuuu

SEQ ID NO: 3533421 - RNA, 19 nt, Human
ggcuauagaugucuuuucc

SEQ ID NO: 3533422 - RNA, 23 nt, Human
ggcuauaggugcuacaaaaacac

SEQ ID NO: 3533423 - RNA, 15 nt, Human
ggcuaugcauuugaa

SEQ ID NO: 3533424 - RNA, 19 nt, Human
ggcuaugggggcacugagg

SEQ ID NO: 3533425 - RNA, 21 nt, Human
ggcuauuuuguuugcuucaug

SEQ ID NO: 3533426 - RNA, 18 nt, Human
ggcucacacugagaaugu

SEQ ID NO: 3533427 - RNA, 23 nt, Human
ggcucacgccuaugaucccagca

SEQ ID NO: 3533428 - RNA, 18 nt, Human
ggcucacgccuguaaucc

SEQ ID NO: 3533429 - RNA, 22 nt, Human
ggcucacgccuguaaucccagc

SEQ ID NO: 3533430 - RNA, 18 nt, Human
ggcucacuauggugccaa

SEQ ID NO: 3533431 - RNA, 19 nt, Human
ggcucacuauggugccaau

SEQ ID NO: 3533432 - RNA, 13 nt, Human
ggcucacugcagc

SEQ ID NO: 3533433 - RNA, 15 nt, Human
ggcucacugcagccu

SEQ ID NO: 3533434 - RNA, 14 nt, Human
ggcucacugccagg

SEQ ID NO: 3533435 - RNA, 15 nt, Human
ggcucacugccaggc

SEQ ID NO: 3533436 - RNA, 18 nt, Human
ggcucacugccaggccag

SEQ ID NO: 3533437 - RNA, 12 nt, Human
ggcucagagggg

SEQ ID NO: 3533438 - RNA, 19 nt, Human
ggcucagcaaaagaugcuu

SEQ ID NO: 3533439 - RNA, 18 nt, Human
ggcucagcaaggccaccu

SEQ ID NO: 3533440 - RNA, 20 nt, Human
ggcucagcaaggccaccucu

SEQ ID NO: 3533441 - RNA, 22 nt, Human
ggcucagccccaccccagggca

SEQ ID NO: 3533442 - RNA, 23 nt, Human
ggcucagccccaccccagggcag

SEQ ID NO: 3533443 - RNA, 18 nt, Human
ggcucagcucuggcucac

SEQ ID NO: 3533444 - RNA, 21 nt, Human
ggcucagcucuggcucacaga

SEQ ID NO: 3533445 - RNA, 16 nt, Human
ggcucagggaccacag

SEQ ID NO: 3533446 - RNA, 17 nt, Human
ggcucagggaccacagc

SEQ ID NO: 3533447 - RNA, 22 nt, Human
ggcucagggagguuaagugacu

SEQ ID NO: 3533448 - RNA, 12 nt, Human
ggcucagggugg

SEQ ID NO: 3533449 - RNA, 17 nt, Human
ggcucagucucaggagc

SEQ ID NO: 3533450 - RNA, 20 nt, Human
ggcucagugaaguugcugcu

SEQ ID NO: 3533451 - RNA, 20 nt, Human
ggcucauauuccugcagccu

SEQ ID NO: 3533452 - RNA, 18 nt, Human
ggcuccaagaccuaggcu

SEQ ID NO: 3533453 - RNA, 14 nt, Human
ggcuccacuugguc

SEQ ID NO: 3533454 - RNA, 9 nt, Human
ggcuccaga

SEQ ID NO: 3533455 - RNA, 14 nt, Human
ggcuccagaaaugu

SEQ ID NO: 3533456 - RNA, 10 nt, Human
ggcuccagac

SEQ ID NO: 3533457 - RNA, 16 nt, Human
ggcuccagaugcaggg

SEQ ID NO: 3533458 - RNA, 15 nt, Human
ggcuccagccaucuc

SEQ ID NO: 3533459 - RNA, 21 nt, Human
ggcuccagccccucuuggaga

SEQ ID NO: 3533460 - RNA, 23 nt, Human
ggcuccagccccucuuggagaag

SEQ ID NO: 3533461 - RNA, 14 nt, Human
ggcuccaggagcag

SEQ ID NO: 3533462 - RNA, 16 nt, Human
ggcuccaggagcagcc

SEQ ID NO: 3533463 - RNA, 19 nt, Human
ggcuccaggagcagccaca

SEQ ID NO: 3533464 - RNA, 13 nt, Human
ggcuccaggcagc

SEQ ID NO: 3533465 - RNA, 11 nt, Human
ggcuccaggcu

SEQ ID NO: 3533466 - RNA, 13 nt, Human
ggcuccaggcucc

SEQ ID NO: 3533467 - RNA, 16 nt, Human
ggcucccacaggcagc

SEQ ID NO: 3533468 - RNA, 17 nt, Human
ggcucccacaggcagcu

SEQ ID NO: 3533469 - RNA, 20 nt, Human
ggcucccacaggcccuuccu

SEQ ID NO: 3533470 - RNA, 14 nt, Human
ggcucccagccagg

SEQ ID NO: 3533471 - RNA, 13 nt, Human
ggcucccagccuc

SEQ ID NO: 3533472 - RNA, 15 nt, Human
ggcucccagccucag

SEQ ID NO: 3533473 - RNA, 14 nt, Human
ggcucccaggacac

SEQ ID NO: 3533474 - RNA, 20 nt, Human
ggcucccaggagccugccca

SEQ ID NO: 3533475 - RNA, 22 nt, Human
ggcucccaggggcucccuccgc

SEQ ID NO: 3533476 - RNA, 22 nt, Human
ggcucccaggggucucccuggc

SEQ ID NO: 3533477 - RNA, 23 nt, Human
ggcucccaggggucucccuggcu

SEQ ID NO: 3533478 - RNA, 17 nt, Human
ggcuccccauguguccu

SEQ ID NO: 3533479 - RNA, 21 nt, Human
ggcuccccauguguccugguu

SEQ ID NO: 3533480 - RNA, 12 nt, Human
ggcuccccucuu

SEQ ID NO: 3533481 - RNA, 12 nt, Human
ggcuccccugag

SEQ ID NO: 3533482 - RNA, 13 nt, Human
ggcuccccugagg

SEQ ID NO: 3533483 - RNA, 15 nt, Human
ggcuccccugcagcc

SEQ ID NO: 3533484 - RNA, 18 nt, Human
ggcuccccugcagcccug

SEQ ID NO: 3533485 - RNA, 12 nt, Human
ggcuccccuggg

SEQ ID NO: 3533486 - RNA, 21 nt, Human
ggcucccgccuccaaccccuc

SEQ ID NO: 3533487 - RNA, 19 nt, Human
ggcucccggggcagggcag

SEQ ID NO: 3533488 - RNA, 15 nt, Human
ggcucccucacucuc

SEQ ID NO: 3533489 - RNA, 18 nt, Human
ggcucccucacucucagg

SEQ ID NO: 3533490 - RNA, 19 nt, Human
ggcucccucacucucagga

SEQ ID NO: 3533491 - RNA, 15 nt, Human
ggcucccuccuccag

SEQ ID NO: 3533492 - RNA, 16 nt, Human
ggcucccucuucuuuc

SEQ ID NO: 3533493 - RNA, 18 nt, Human
ggcucccugacugggagu

SEQ ID NO: 3533494 - RNA, 20 nt, Human
ggcucccuguaaccucuuca

SEQ ID NO: 3533495 - RNA, 21 nt, Human
ggcucccuguaaccucuucag

SEQ ID NO: 3533496 - RNA, 18 nt, Human
ggcucccuucccaccucu

SEQ ID NO: 3533497 - RNA, 20 nt, Human
ggcucccuucccaccucucu

SEQ ID NO: 3533498 - RNA, 22 nt, Human
ggcucccuucccaccucucuca

SEQ ID NO: 3533499 - RNA, 15 nt, Human
ggcuccgaacacccu

SEQ ID NO: 3533500 - RNA, 21 nt, Human
ggcuccgcccuuaguccccca

SEQ ID NO: 3533501 - RNA, 24 nt, Human
ggcuccgucaguaucaggccugcc

SEQ ID NO: 3533502 - RNA, 15 nt, Human
ggcuccgugugggag

SEQ ID NO: 3533503 - RNA, 17 nt, Human
ggcuccuauucaacaca

SEQ ID NO: 3533504 - RNA, 12 nt, Human
ggcuccucccag

SEQ ID NO: 3533505 - RNA, 21 nt, Human
ggcuccucuguggugucugcc

SEQ ID NO: 3533506 - RNA, 18 nt, Human
ggcuccugccuucugucc

SEQ ID NO: 3533507 - RNA, 19 nt, Human
ggcuccugccuucuguccu

SEQ ID NO: 3533508 - RNA, 23 nt, Human
ggcuccugcugcaccaacccagc

SEQ ID NO: 3533509 - RNA, 13 nt, Human
ggcuccuggaaag

SEQ ID NO: 3533510 - RNA, 10 nt, Human
ggcuccuggu

SEQ ID NO: 3533511 - RNA, 12 nt, Human
ggcuccugugcu

SEQ ID NO: 3533512 - RNA, 20 nt, Human
ggcuccugugcuacuuugcc

SEQ ID NO: 3533513 - RNA, 23 nt, Human
ggcuccugugcuacuuugccuuu

SEQ ID NO: 3533514 - RNA, 14 nt, Human
ggcuccuguuuugc

SEQ ID NO: 3533515 - RNA, 22 nt, Human
ggcuccuuaggguuuucucucu

SEQ ID NO: 3533516 - RNA, 17 nt, Human
ggcuccuugguucuuga

SEQ ID NO: 3533517 - RNA, 16 nt, Human
ggcuccuugugccaga

SEQ ID NO: 3533518 - RNA, 15 nt, Human
ggcucgaaucucugu

SEQ ID NO: 3533519 - RNA, 20 nt, Human
ggcucgauuuuguaucugca

SEQ ID NO: 3533520 - RNA, 22 nt, Human
ggcucgauuuuguaucugcagg

SEQ ID NO: 3533521 - RNA, 23 nt, Human
ggcucgccucaggaaugggcugu

SEQ ID NO: 3533522 - RNA, 17 nt, Human
ggcucggaggcugcccc

SEQ ID NO: 3533523 - RNA, 22 nt, Human
ggcucgucggggggacagcucc

SEQ ID NO: 3533524 - RNA, 22 nt, Human
ggcucuaacgccugagcccagg

SEQ ID NO: 3533525 - RNA, 15 nt, Human
ggccagaccugcaga

SEQ ID NO: 3533526 - RNA, 11 nt, Human
ggccagacucg

SEQ ID NO: 3533527 - RNA, 18 nt, Human
ggccagagagccuggugc

SEQ ID NO: 3533528 - RNA, 21 nt, Human
ggccagagagccuggugcugc

SEQ ID NO: 3533529 - RNA, 13 nt, Human
ggccagagcccac

SEQ ID NO: 3533530 - RNA, 15 nt, Human
ggccagagcccacuc

SEQ ID NO: 3533531 - RNA, 21 nt, Human
ggccagaggaacuguccagag

SEQ ID NO: 3533532 - RNA, 22 nt, Human
ggccagaggaacuguccagaga

SEQ ID NO: 3533533 - RNA, 17 nt, Human
ggccagaggcagaaccc

SEQ ID NO: 3533534 - RNA, 18 nt, Human
ggccagaggcccccagcc

SEQ ID NO: 3533535 - RNA, 22 nt, Human
ggccagaggcccccagcccagg

SEQ ID NO: 3533536 - RNA, 11 nt, Human
ggccagaggcu

SEQ ID NO: 3533537 - RNA, 14 nt, Human
ggccagaguggccu

SEQ ID NO: 3533538 - RNA, 19 nt, Human
ggccagaguggccuggcca

SEQ ID NO: 3533539 - RNA, 20 nt, Human
ggccagaguggccuggccag

SEQ ID NO: 3533540 - RNA, 20 nt, Human
ggccagaugcacaucccugg

SEQ ID NO: 3533541 - RNA, 23 nt, Human
ggccagaugcacaucccuggaag

SEQ ID NO: 3533542 - RNA, 17 nt, Human
ggccagcaacgcuugua

SEQ ID NO: 3533543 - RNA, 18 nt, Human
ggccagcaagguggagug

SEQ ID NO: 3533544 - RNA, 18 nt, Human
ggccagcaccaucucuuu

SEQ ID NO: 3533545 - RNA, 12 nt, Human
ggccagcagcuu

SEQ ID NO: 3533546 - RNA, 14 nt, Human
ggccagccaggcgg

SEQ ID NO: 3533547 - RNA, 16 nt, Human
ggccagccaggcgggc

SEQ ID NO: 3533548 - RNA, 15 nt, Human
ggccagccaugucug

SEQ ID NO: 3533549 - RNA, 13 nt, Human
ggccagccccaca

SEQ ID NO: 3533550 - RNA, 20 nt, Human
ggccagccccacccaggagg

SEQ ID NO: 3533551 - RNA, 11 nt, Human
ggccagccccg

SEQ ID NO: 3533552 - RNA, 15 nt, Human
ggccagccccggccc

SEQ ID NO: 3533553 - RNA, 19 nt, Human
ggccagccccggcccuggg

SEQ ID NO: 3533554 - RNA, 20 nt, Human
ggccagccccggcccugggc

SEQ ID NO: 3533555 - RNA, 17 nt, Human
ggccagccccuccaucu

SEQ ID NO: 3533556 - RNA, 20 nt, Human
ggccagccccuuagacagag

SEQ ID NO: 3533557 - RNA, 21 nt, Human
ggccagccccuuagacagagg

SEQ ID NO: 3533558 - RNA, 23 nt, Human
ggccagccccuuagacagaggcc

SEQ ID NO: 3533559 - RNA, 22 nt, Human
ggccagccgcgcaucagacugu

SEQ ID NO: 3533560 - RNA, 15 nt, Human
ggccagccgcucucc

SEQ ID NO: 3533561 - RNA, 18 nt, Human
ggccagccucacccuugc

SEQ ID NO: 3533562 - RNA, 11 nt, Human
ggccagccucu

SEQ ID NO: 3533563 - RNA, 11 nt, Human
ggccagccugg

SEQ ID NO: 3533564 - RNA, 17 nt, Human
ggccagccuggccuccu

SEQ ID NO: 3533565 - RNA, 20 nt, Human
ggccagccuugaccauucuc

SEQ ID NO: 3533566 - RNA, 13 nt, Human
ggccagcguggcu

SEQ ID NO: 3533567 - RNA, 23 nt, Human
ggccagcugcuugggcuucaucc

SEQ ID NO: 3533568 - RNA, 13 nt, Human
ggccagcuggagg

SEQ ID NO: 3533569 - RNA, 18 nt, Human
ggccagcuggaggcaggg

SEQ ID NO: 3533570 - RNA, 23 nt, Human
ggccagcugggaucugacugcac

SEQ ID NO: 3533571 - RNA, 18 nt, Human
ggccaggacucugcagcc

SEQ ID NO: 3533572 - RNA, 14 nt, Human
ggccaggagaugga

SEQ ID NO: 3533573 - RNA, 11 nt, Human
ggccaggagcc

SEQ ID NO: 3533574 - RNA, 16 nt, Human
ggccaggagccuccug

SEQ ID NO: 3533575 - RNA, 13 nt, Human
ggccaggagcucu

SEQ ID NO: 3533576 - RNA, 16 nt, Human
ggccaggauggagggg

SEQ ID NO: 3533577 - RNA, 15 nt, Human
ggccaggcagaucug

SEQ ID NO: 3533578 - RNA, 22 nt, Human
ggccaggcagaucugugcccca

SEQ ID NO: 3533579 - RNA, 11 nt, Human
ggccaggcagg

SEQ ID NO: 3533580 - RNA, 12 nt, Human
ggccaggcaggu

SEQ ID NO: 3533581 - RNA, 16 nt, Human
ggccaggccagaggga

SEQ ID NO: 3533582 - RNA, 13 nt, Human
ggccaggcccucu

SEQ ID NO: 3533583 - RNA, 18 nt, Human
ggccaggcccucugccca

SEQ ID NO: 3533584 - RNA, 23 nt, Human
gggaggaagcagaauaaagcaau

SEQ ID NO: 3533585 - RNA, 16 nt, Human
gggaggacaaaacuuc

SEQ ID NO: 3533586 - RNA, 20 nt, Human
gggaggaccugacccuacuc

SEQ ID NO: 3533587 - RNA, 12 nt, Human
gggaggaccugg

SEQ ID NO: 3533588 - RNA, 17 nt, Human
gggaggaccuggggcac

SEQ ID NO: 3533589 - RNA, 12 nt, Human
gggaggagaaga

SEQ ID NO: 3533590 - RNA, 17 nt, Human
gggaggaucacuggagc

SEQ ID NO: 3533591 - RNA, 19 nt, Human
gggaggaucacuggagccc

SEQ ID NO: 3533592 - RNA, 23 nt, Human
gggaggauugcuugagcucagga

SEQ ID NO: 3533593 - RNA, 11 nt, Human
gggaggcagag

SEQ ID NO: 3533594 - RNA, 16 nt, Human
gggaggcauggcccug

SEQ ID NO: 3533595 - RNA, 22 nt, Human
gggaggccaagaguggccccac

SEQ ID NO: 3533596 - RNA, 17 nt, Human
gggaggccagugagcca

SEQ ID NO: 3533597 - RNA, 11 nt, Human
gggaggcccca

SEQ ID NO: 3533598 - RNA, 14 nt, Human
gggaggccccaggg

SEQ ID NO: 3533599 - RNA, 15 nt, Human
gggaggccgaggcgg

SEQ ID NO: 3533600 - RNA, 20 nt, Human
gggaggcggacguuccagcc

SEQ ID NO: 3533601 - RNA, 18 nt, Human
gggaggcugaggcaggag

SEQ ID NO: 3533602 - RNA, 20 nt, Human
gggaggcuggaagcugggag

SEQ ID NO: 3533603 - RNA, 16 nt, Human
gggagggagggcucca

SEQ ID NO: 3533604 - RNA, 11 nt, Human
gggagggcaga

SEQ ID NO: 3533605 - RNA, 15 nt, Human
gggagggcagagcug

SEQ ID NO: 3533606 - RNA, 20 nt, Human
gggagggcagagcuggugcg

SEQ ID NO: 3533607 - RNA, 13 nt, Human
gggagggcagcag

SEQ ID NO: 3533608 - RNA, 17 nt, Human
gggagggcuccagacac

SEQ ID NO: 3533609 - RNA, 18 nt, Human
gggagggcucugaggcgc

SEQ ID NO: 3533610 - RNA, 19 nt, Human
gggagggcucugaggcgcc

SEQ ID NO: 3533611 - RNA, 16 nt, Human
gggaggggaaaagcau

SEQ ID NO: 3533612 - RNA, 16 nt, Human
gggaggggagacuuug

SEQ ID NO: 3533613 - RNA, 12 nt, Human
gggaggggcagg

SEQ ID NO: 3533614 - RNA, 14 nt, Human
gggaggggccuagg

SEQ ID NO: 3533615 - RNA, 16 nt, Human
gggaggggcgcuggcc

SEQ ID NO: 3533616 - RNA, 23 nt, Human
gggaggggcggcaggagggaggu

SEQ ID NO: 3533617 - RNA, 14 nt, Human
gggagggggagagg

SEQ ID NO: 3533618 - RNA, 13 nt, Human
gggagggggaggg

SEQ ID NO: 3533619 - RNA, 22 nt, Human
gggagggguaaaauuccuuagc

SEQ ID NO: 3533620 - RNA, 16 nt, Human
gggaggucaggcccug

SEQ ID NO: 3533621 - RNA, 22 nt, Human
gggaggucaggcccuggaacuc

SEQ ID NO: 3533622 - RNA, 14 nt, Human
gggaggucauuuug

SEQ ID NO: 3533623 - RNA, 18 nt, Human
gggaggucgaggcaggag

SEQ ID NO: 3533624 - RNA, 19 nt, Human
gggaggucgaggcaggagg

SEQ ID NO: 3533625 - RNA, 14 nt, Human
gggagguggcuggg

SEQ ID NO: 3533626 - RNA, 13 nt, Human
gggagguguucac

SEQ ID NO: 3533627 - RNA, 18 nt, Human
gggagguugaucagaucu

SEQ ID NO: 3533628 - RNA, 21 nt, Human
gggagucaucucaaccauccc

SEQ ID NO: 3533629 - RNA, 19 nt, Human
gggaguccaggcacaggau

SEQ ID NO: 3533630 - RNA, 23 nt, Human
gggagucugaagcagaugcaaag

SEQ ID NO: 3533631 - RNA, 19 nt, Human
gggagugcuggcucacagu

SEQ ID NO: 3533632 - RNA, 21 nt, Human
gggaguggaauaguauccucc

SEQ ID NO: 3533633 - RNA, 21 nt, Human
gggagugggacagagucuggg

SEQ ID NO: 3533634 - RNA, 15 nt, Human
gggaguuaagaccug

SEQ ID NO: 3533635 - RNA, 20 nt, Human
gggaguucgagaccaaccug

SEQ ID NO: 3533636 - RNA, 16 nt, Human
gggaguuuaggguggg

SEQ ID NO: 3533637 - RNA, 22 nt, Human
gggauacaaccucccucuuguu

SEQ ID NO: 3533638 - RNA, 15 nt, Human
gggauacaugcucuu

SEQ ID NO: 3533639 - RNA, 15 nt, Human
gggauaggccagccg

SEQ ID NO: 3533640 - RNA, 15 nt, Human
gggauauuuuuuucu

SEQ ID NO: 3533641 - RNA, 22 nt, Human
gggauccccgccuggccaggag

SEQ ID NO: 3533642 - RNA, 19 nt, Human
gggaucccugucuuuccua

SEQ ID NO: 3533643 - RNA, 15 nt, Human
gggauccuccaggug

SEQ ID NO: 3533644 - RNA, 23 nt, Human
gggauccuggaguucugguuccu

SEQ ID NO: 3533645 - RNA, 20 nt, Human
gggaugaaacuaaagcaaua

SEQ ID NO: 3533646 - RNA, 15 nt, Human
gggaugaaagagaag

SEQ ID NO: 3533647 - RNA, 19 nt, Human
gggaugacuaaaauauuua

SEQ ID NO: 3533648 - RNA, 23 nt, Human
gggaugacuagaggcagggaggg

SEQ ID NO: 3533649 - RNA, 13 nt, Human
gggaugagaaagg

SEQ ID NO: 3533650 - RNA, 20 nt, Human
gggaugagcauggagcuggc

SEQ ID NO: 3533651 - RNA, 20 nt, Human
gggaugagcucaagcaggaa

SEQ ID NO: 3533652 - RNA, 22 nt, Human
gggaugaugccacaccaagcug

SEQ ID NO: 3533653 - RNA, 20 nt, Human
gggaugccacuccucccucc

SEQ ID NO: 3533654 - RNA, 15 nt, Human
gggauggaggagaag

SEQ ID NO: 3533655 - RNA, 12 nt, Human
gggaugggaggu

SEQ ID NO: 3533656 - RNA, 15 nt, Human
gggaugggccaccgc

SEQ ID NO: 3533657 - RNA, 17 nt, Human
gggauggggccacagcc

SEQ ID NO: 3533658 - RNA, 14 nt, Human
gggaugguaguuuu

SEQ ID NO: 3533659 - RNA, 18 nt, Human
gggaugguggagggccac

SEQ ID NO: 3533660 - RNA, 16 nt, Human
gggaugguguucaaaa

SEQ ID NO: 3533661 - RNA, 23 nt, Human
gggauguauccaugggggcaggg

SEQ ID NO: 3533662 - RNA, 11 nt, Human
gggaugucuua

SEQ ID NO: 3533663 - RNA, 20 nt, Human
gggauguggcugcagcagcg

SEQ ID NO: 3533664 - RNA, 14 nt, Human
gggaugugggaggg

SEQ ID NO: 3533665 - RNA, 22 nt, Human
gggaugugugugugcagagcug

SEQ ID NO: 3533666 - RNA, 12 nt, Human
gggauuacaggu

SEQ ID NO: 3533667 - RNA, 15 nt, Human
gggauuacaggugug

SEQ ID NO: 3533668 - RNA, 17 nt, Human
gggauuaugggucacag

SEQ ID NO: 3533669 - RNA, 22 nt, Human
gggauucaggaaaaggccuggg

SEQ ID NO: 3533670 - RNA, 13 nt, Human
gggccaaaaggaa

SEQ ID NO: 3533671 - RNA, 15 nt, Human
gggccaaaaggaaaa

SEQ ID NO: 3533672 - RNA, 18 nt, Human
gggccaaacgcugagcca

SEQ ID NO: 3533673 - RNA, 15 nt, Human
gggccaacaccaggg

SEQ ID NO: 3533674 - RNA, 16 nt, Human
gggccaacaccaggga

SEQ ID NO: 3533675 - RNA, 13 nt, Human
gggccaagcccag

SEQ ID NO: 3533676 - RNA, 13 nt, Human
gggccaaggaccu

SEQ ID NO: 3533677 - RNA, 14 nt, Human
gggccaaggaccug

SEQ ID NO: 3533678 - RNA, 15 nt, Human
gggccaaggaccuga

SEQ ID NO: 3533679 - RNA, 15 nt, Human
gggccacacagaaac

SEQ ID NO: 3533680 - RNA, 16 nt, Human
gggccacagagaaagu

SEQ ID NO: 3533681 - RNA, 23 nt, Human
gggccacagagaaaguacuucuc

SEQ ID NO: 3533682 - RNA, 14 nt, Human
gggccacagccaga

SEQ ID NO: 3533683 - RNA, 16 nt, Human
gggccaccaaagcugc

SEQ ID NO: 3533684 - RNA, 17 nt, Human
gggccaccaaagcugcc

SEQ ID NO: 3533685 - RNA, 14 nt, Human
gggccaccccuccu

SEQ ID NO: 3533686 - RNA, 19 nt, Human
gggccaccuccccaggccg

SEQ ID NO: 3533687 - RNA, 22 nt, Human
gggccaccuccccaggccgugg

SEQ ID NO: 3533688 - RNA, 14 nt, Human
gggccacgugccag

SEQ ID NO: 3533689 - RNA, 18 nt, Human
gggccacgugccaggccc

SEQ ID NO: 3533690 - RNA, 16 nt, Human
gggccacuccuuccug

SEQ ID NO: 3533691 - RNA, 20 nt, Human
gggccacuccuuccugcccc

SEQ ID NO: 3533692 - RNA, 17 nt, Human
gggccacucugccucug

SEQ ID NO: 3533693 - RNA, 22 nt, Human
gggccacuucuggguggggcag

SEQ ID NO: 3533694 - RNA, 11 nt, Human
gggccagagcc

SEQ ID NO: 3533695 - RNA, 12 nt, Human
gggccagagcca

SEQ ID NO: 3533696 - RNA, 22 nt, Human
gggccagaggaacuguccagag

SEQ ID NO: 3533697 - RNA, 14 nt, Human
gggccagauccagc

SEQ ID NO: 3533698 - RNA, 16 nt, Human
gggccagauccagccu

SEQ ID NO: 3533699 - RNA, 18 nt, Human
gggccagauccagccugg

SEQ ID NO: 3533700 - RNA, 14 nt, Human
gggccagccaggcg

SEQ ID NO: 3533701 - RNA, 16 nt, Human
gggccagccaggcggg

SEQ ID NO: 3533702 - RNA, 11 nt, Human
gggccagccuc

SEQ ID NO: 3533703 - RNA, 11 nt, Human
gggccaggagc

SEQ ID NO: 3533704 - RNA, 14 nt, Human
gggccaggagccuc

SEQ ID NO: 3533705 - RNA, 12 nt, Human
gggccaggcagg

SEQ ID NO: 3533706 - RNA, 13 nt, Human
gggccaggcaggu

SEQ ID NO: 3533707 - RNA, 20 nt, Human
gggccaggcaggugccugga

SEQ ID NO: 3533708 - RNA, 14 nt, Human
gggccaggccgggc

SEQ ID NO: 3533709 - RNA, 22 nt, Human
gggccaggccgggccuguacag

SEQ ID NO: 3533710 - RNA, 13 nt, Human
gggccaggcuggg

SEQ ID NO: 3533711 - RNA, 22 nt, Human
gggccaggcugggucgcccugg

SEQ ID NO: 3533712 - RNA, 12 nt, Human
gggccagggcug

SEQ ID NO: 3533713 - RNA, 23 nt, Human
gggccaggggucucccuggagug

SEQ ID NO: 3533714 - RNA, 19 nt, Human
gggccaguccugccuggcc

SEQ ID NO: 3533715 - RNA, 20 nt, Human
gggccaguccugccuggcca

SEQ ID NO: 3533716 - RNA, 21 nt, Human
gggccaguccugccuggccag

SEQ ID NO: 3533717 - RNA, 18 nt, Human
gggccaguggggccugug

SEQ ID NO: 3533718 - RNA, 19 nt, Human
gggccaguggggccugugg

SEQ ID NO: 3533719 - RNA, 22 nt, Human
gggccaguuggucccccuucca

SEQ ID NO: 3533720 - RNA, 14 nt, Human
gggccauacuggcc

SEQ ID NO: 3533721 - RNA, 17 nt, Human
gggccauacuggccucg

SEQ ID NO: 3533722 - RNA, 22 nt, Human
gggccauacuggccucgccugg

SEQ ID NO: 3533723 - RNA, 18 nt, Human
gggccaugaacuuugucc

SEQ ID NO: 3533724 - RNA, 23 nt, Human
gggccaugccuccucaggagccg

SEQ ID NO: 3533725 - RNA, 14 nt, Human
gggccaugcugaag

SEQ ID NO: 3533726 - RNA, 15 nt, Human
gggccaugcugaagg

SEQ ID NO: 3533727 - RNA, 14 nt, Human
gggccaugcugagg

SEQ ID NO: 3533728 - RNA, 15 nt, Human
gggccaugcugaggc

SEQ ID NO: 3533729 - RNA, 17 nt, Human
gggccaugcugaggccu

SEQ ID NO: 3533730 - RNA, 17 nt, Human
gggccaugucagacaca

SEQ ID NO: 3533731 - RNA, 18 nt, Human
gggccauucuccacagca

SEQ ID NO: 3533732 - RNA, 19 nt, Human
gggccauugaacucugaga

SEQ ID NO: 3533733 - RNA, 14 nt, Human
gggcccaacccugu

SEQ ID NO: 3533734 - RNA, 16 nt, Human
gggcccaacccugucu

SEQ ID NO: 3533735 - RNA, 20 nt, Human
gggcccaagucccuguuuuc

SEQ ID NO: 3533736 - RNA, 16 nt, Human
gggcccaccuggccac

SEQ ID NO: 3533737 - RNA, 19 nt, Human
gggcccaccuggccaccug

SEQ ID NO: 3533738 - RNA, 19 nt, Human
gggcccacgugguuggggc

SEQ ID NO: 3533739 - RNA, 14 nt, Human
gggcccagagcagg

SEQ ID NO: 3533740 - RNA, 12 nt, Human
gggcccagagcc

SEQ ID NO: 3533741 - RNA, 19 nt, Human
gggcccagagcccagcucc

SEQ ID NO: 3533742 - RNA, 14 nt, Human
gggcccagaggcug

SEQ ID NO: 3533743 - RNA, 14 nt, Human
gggcccagauucua

SEQ ID NO: 3533744 - RNA, 12 nt, Human
gggcccagcccc

SEQ ID NO: 3533745 - RNA, 12 nt, Human
gggcccagcugg

SEQ ID NO: 3533746 - RNA, 15 nt, Human
gggcccagcugggcu

SEQ ID NO: 3533747 - RNA, 16 nt, Human
gggcccaggaccagcu

SEQ ID NO: 3533748 - RNA, 17 nt, Human
gggcccaggaccagcug

SEQ ID NO: 3533749 - RNA, 13 nt, Human
gggcccaggcagg

SEQ ID NO: 3533750 - RNA, 21 nt, Human
gaaauaucugaaaauguaugu

SEQ ID NO: 3533751 - RNA, 14 nt, Human
gaaauaugaaugcc

SEQ ID NO: 3533752 - RNA, 18 nt, Human
gaaauaugcucuuuuguu

SEQ ID NO: 3533753 - RNA, 13 nt, Human
gaaauauguauaa

SEQ ID NO: 3533754 - RNA, 13 nt, Human
gaaauaugugaga

SEQ ID NO: 3533755 - RNA, 13 nt, Human
gaaauauuauguu

SEQ ID NO: 3533756 - RNA, 15 nt, Human
gaaauauucccuaga

SEQ ID NO: 3533757 - RNA, 19 nt, Human
gaaauauuuagcaaauaau

SEQ ID NO: 3533758 - RNA, 18 nt, Human
gaaauauuuauuuuaaua

SEQ ID NO: 3533759 - RNA, 22 nt, Human
gaaauauuuauuuuaauaaugu

SEQ ID NO: 3533760 - RNA, 13 nt, Human
gaaauauuuugau

SEQ ID NO: 3533761 - RNA, 19 nt, Human
gaaauauuuugauaauaaa

SEQ ID NO: 3533762 - RNA, 21 nt, Human
gaaauauuuugauaauaaauu

SEQ ID NO: 3533763 - RNA, 23 nt, Human
gaaauauuuugauaauaaauuga

SEQ ID NO: 3533764 - RNA, 16 nt, Human
gaaaucaaauaugcaa

SEQ ID NO: 3533765 - RNA, 17 nt, Human
gaaaucaaauaugcaaa

SEQ ID NO: 3533766 - RNA, 18 nt, Human
gaaaucaaauaugcaaag

SEQ ID NO: 3533767 - RNA, 20 nt, Human
gaaaucaaauaugcaaagca

SEQ ID NO: 3533768 - RNA, 17 nt, Human
gaaaucaaauguaaagu

SEQ ID NO: 3533769 - RNA, 16 nt, Human
gaaaucacagaaucau

SEQ ID NO: 3533770 - RNA, 22 nt, Human
gaaaucauauuuggaauaaaaa

SEQ ID NO: 3533771 - RNA, 14 nt, Human
gaaaucauguuaug

SEQ ID NO: 3533772 - RNA, 19 nt, Human
gaaaucauguuaugauaaa

SEQ ID NO: 3533773 - RNA, 18 nt, Human
gaaauccagggugguggu

SEQ ID NO: 3533774 - RNA, 14 nt, Human
gaaauccauucaca

SEQ ID NO: 3533775 - RNA, 18 nt, Human
gaaaucccugcucacugc

SEQ ID NO: 3533776 - RNA, 18 nt, Human
gaaaucccuguuuaauau

SEQ ID NO: 3533777 - RNA, 19 nt, Human
gaaaucccuguuuaauauu

SEQ ID NO: 3533778 - RNA, 14 nt, Human
gaaaucccuucaua

SEQ ID NO: 3533779 - RNA, 19 nt, Human
gaaaucccuucauacuuga

SEQ ID NO: 3533780 - RNA, 21 nt, Human
gaaauccuaguuuccucuccu

SEQ ID NO: 3533781 - RNA, 22 nt, Human
gaaauccuaguuuccucuccuu

SEQ ID NO: 3533782 - RNA, 14 nt, Human
gaaauccugguucc

SEQ ID NO: 3533783 - RNA, 19 nt, Human
gaaauccuugacuggaccu

SEQ ID NO: 3533784 - RNA, 14 nt, Human
gaaaucuauagaaa

SEQ ID NO: 3533785 - RNA, 19 nt, Human
gaaaucuauagaaaguguu

SEQ ID NO: 3533786 - RNA, 23 nt, Human
gaaaucuauagaaaguguucugu

SEQ ID NO: 3533787 - RNA, 19 nt, Human
gaaaucucacuuuucucca

SEQ ID NO: 3533788 - RNA, 23 nt, Human
gaaaucuggcuucuggccaggaa

SEQ ID NO: 3533789 - RNA, 22 nt, Human
gaaaucuguaucuguagugaga

SEQ ID NO: 3533790 - RNA, 20 nt, Human
gaaaucugucaagaguaguu

SEQ ID NO: 3533791 - RNA, 14 nt, Human
gaaaucuuuuaaaa

SEQ ID NO: 3533792 - RNA, 13 nt, Human
gaaaugaaauuuu

SEQ ID NO: 3533793 - RNA, 19 nt, Human
gaaaugaaauuuuaccaag

SEQ ID NO: 3533794 - RNA, 14 nt, Human
gaaaugaacacaaa

SEQ ID NO: 3533795 - RNA, 13 nt, Human
gaaaugaacauuc

SEQ ID NO: 3533796 - RNA, 14 nt, Human
gaaaugaacauucc

SEQ ID NO: 3533797 - RNA, 18 nt, Human
gaaaugaagagcuguuga

SEQ ID NO: 3533798 - RNA, 18 nt, Human
gaaaugaauaauuuccca

SEQ ID NO: 3533799 - RNA, 12 nt, Human
gaaaugaauaua

SEQ ID NO: 3533800 - RNA, 13 nt, Human
gaaaugaaugugu

SEQ ID NO: 3533801 - RNA, 14 nt, Human
gaaaugaauuucuc

SEQ ID NO: 3533802 - RNA, 24 nt, Human
gaaaugaccuucauucugagacca

SEQ ID NO: 3533803 - RNA, 17 nt, Human
gaaaugagaaggcagcc

SEQ ID NO: 3533804 - RNA, 18 nt, Human
gaaaugagaaggcagcca

SEQ ID NO: 3533805 - RNA, 19 nt, Human
gaaaugagaaggcagccac

SEQ ID NO: 3533806 - RNA, 16 nt, Human
gaaaugagaucaggcu

SEQ ID NO: 3533807 - RNA, 15 nt, Human
gaaaugaggaggaug

SEQ ID NO: 3533808 - RNA, 22 nt, Human
gaaaugaggccauggacucugu

SEQ ID NO: 3533809 - RNA, 18 nt, Human
gaaaugaggucagagccu

SEQ ID NO: 3533810 - RNA, 13 nt, Human
gaaaugcacaaug

SEQ ID NO: 3533811 - RNA, 20 nt, Human
gaaaugccuuacuuuguaug

SEQ ID NO: 3533812 - RNA, 17 nt, Human
gaaaugcuaugucauuu

SEQ ID NO: 3533813 - RNA, 21 nt, Human
gaaaugcuaugucauuucaug

SEQ ID NO: 3533814 - RNA, 18 nt, Human
gaaaugcugauggauaac

SEQ ID NO: 3533815 - RNA, 17 nt, Human
gaaaugcugcauuuuaa

SEQ ID NO: 3533816 - RNA, 18 nt, Human
ggcucggccugcccccac

SEQ ID NO: 3533817 - RNA, 18 nt, Human
ggcucguugacuggcugu

SEQ ID NO: 3533818 - RNA, 14 nt, Human
ggcucuaacgccug

SEQ ID NO: 3533819 - RNA, 16 nt, Human
ggcucuaacgccugag

SEQ ID NO: 3533820 - RNA, 17 nt, Human
ggcucuaacgccugagc

SEQ ID NO: 3533821 - RNA, 23 nt, Human
ggcucuaacgccugagcccaggg

SEQ ID NO: 3533822 - RNA, 19 nt, Human
ggcucuaauucacagugcu

SEQ ID NO: 3533823 - RNA, 14 nt, Human
ggcucuacacauau

SEQ ID NO: 3533824 - RNA, 22 nt, Human
ggcucuagaucauaaggcuuca

SEQ ID NO: 3533825 - RNA, 18 nt, Human
ggcucuauaaggcagccu

SEQ ID NO: 3533826 - RNA, 12 nt, Human
ggcucucagcuc

SEQ ID NO: 3533827 - RNA, 14 nt, Human
ggcucucagcucag

SEQ ID NO: 3533828 - RNA, 19 nt, Human
ggcucucagcucagcgcca

SEQ ID NO: 3533829 - RNA, 13 nt, Human
ggcucucaggcca

SEQ ID NO: 3533830 - RNA, 19 nt, Human
ggcucucaggccagcugcu

SEQ ID NO: 3533831 - RNA, 12 nt, Human
ggcucuccaagu

SEQ ID NO: 3533832 - RNA, 14 nt, Human
ggcucuccaccuca

SEQ ID NO: 3533833 - RNA, 15 nt, Human
ggcucuccaccucag

SEQ ID NO: 3533834 - RNA, 13 nt, Human
ggcucuccaguua

SEQ ID NO: 3533835 - RNA, 14 nt, Human
ggcucucuccagga

SEQ ID NO: 3533836 - RNA, 23 nt, Human
ggcucucuuuccuucuugccuuc

SEQ ID NO: 3533837 - RNA, 19 nt, Human
ggcucugacaaagcuuccc

SEQ ID NO: 3533838 - RNA, 13 nt, Human
ggcucugagaagg

SEQ ID NO: 3533839 - RNA, 12 nt, Human
ggcucugaggcg

SEQ ID NO: 3533840 - RNA, 17 nt, Human
ggcucugaggugccugu

SEQ ID NO: 3533841 - RNA, 20 nt, Human
ggcucugcaaugggcacugg

SEQ ID NO: 3533842 - RNA, 20 nt, Human
ggcucugcaauuccccucug

SEQ ID NO: 3533843 - RNA, 14 nt, Human
ggcucugcaguccu

SEQ ID NO: 3533844 - RNA, 14 nt, Human
ggcucugccacccu

SEQ ID NO: 3533845 - RNA, 12 nt, Human
ggcucugccagu

SEQ ID NO: 3533846 - RNA, 12 nt, Human
ggcucugcccca

SEQ ID NO: 3533847 - RNA, 18 nt, Human
ggcucugccccagaggcc

SEQ ID NO: 3533848 - RNA, 21 nt, Human
ggcucugcccucccuccuucc

SEQ ID NO: 3533849 - RNA, 12 nt, Human
ggcucugcccuu

SEQ ID NO: 3533850 - RNA, 17 nt, Human
ggcucugccucccauca

SEQ ID NO: 3533851 - RNA, 17 nt, Human
ggcucuggagacagccc

SEQ ID NO: 3533852 - RNA, 14 nt, Human
ggcucuggagagaa

SEQ ID NO: 3533853 - RNA, 14 nt, Human
ggcucuggagccca

SEQ ID NO: 3533854 - RNA, 17 nt, Human
ggcucuggcucucccca

SEQ ID NO: 3533855 - RNA, 17 nt, Human
ggcucuguccccagccu

SEQ ID NO: 3533856 - RNA, 12 nt, Human
ggcucugugcug

SEQ ID NO: 3533857 - RNA, 20 nt, Human
ggcucugugcugacccuccu

SEQ ID NO: 3533858 - RNA, 12 nt, Human
ggcucuuccagg

SEQ ID NO: 3533859 - RNA, 18 nt, Human
ggcucuuccaggcuggga

SEQ ID NO: 3533860 - RNA, 24 nt, Human
ggcucuuccaggcugggagagccu

SEQ ID NO: 3533861 - RNA, 13 nt, Human
ggcucuucucauu

SEQ ID NO: 3533862 - RNA, 22 nt, Human
ggcucuucucauuucaccccuc

SEQ ID NO: 3533863 - RNA, 16 nt, Human
ggcucuucuccccaga

SEQ ID NO: 3533864 - RNA, 14 nt, Human
ggcucuucuccuuu

SEQ ID NO: 3533865 - RNA, 16 nt, Human
ggcucuucuccuuuca

SEQ ID NO: 3533866 - RNA, 18 nt, Human
ggcucuugaacugagcuu

SEQ ID NO: 3533867 - RNA, 19 nt, Human
ggcucuugauaccccccuc

SEQ ID NO: 3533868 - RNA, 13 nt, Human
ggcucuuuccuug

SEQ ID NO: 3533869 - RNA, 14 nt, Human
ggcugaaauucaga

SEQ ID NO: 3533870 - RNA, 18 nt, Human
ggcugaaauucuccugga

SEQ ID NO: 3533871 - RNA, 15 nt, Human
ggcugaacccugugc

SEQ ID NO: 3533872 - RNA, 17 nt, Human
ggcugaacccugugcug

SEQ ID NO: 3533873 - RNA, 20 nt, Human
ggcugaacccugugcuggug

SEQ ID NO: 3533874 - RNA, 16 nt, Human
ggcugaauguauguaa

SEQ ID NO: 3533875 - RNA, 19 nt, Human
ggcugaauguauguaaaua

SEQ ID NO: 3533876 - RNA, 24 nt, Human
ggcugacacguccaccccagugca

SEQ ID NO: 3533877 - RNA, 21 nt, Human
ggcugacacuucaaggugaca

SEQ ID NO: 3533878 - RNA, 22 nt, Human
ggcugacagacagcccuccauc

SEQ ID NO: 3533879 - RNA, 14 nt, Human
ggcugacaucugug

SEQ ID NO: 3533880 - RNA, 18 nt, Human
ggcugaccacagcacagc

SEQ ID NO: 3533881 - RNA, 19 nt, Human
ggcugaccacagcacagcc

SEQ ID NO: 3533882 - RNA, 15 nt, Human
ggcugaccaugcuca

SEQ ID NO: 3533883 - RNA, 19 nt, Human
ggcugaccccaaagagccu

SEQ ID NO: 3533884 - RNA, 20 nt, Human
ggcugaccccaaagagccug

SEQ ID NO: 3533885 - RNA, 17 nt, Human
ggcugaccccccucagg

SEQ ID NO: 3533886 - RNA, 23 nt, Human
ggcugaccugccucucacacaca

SEQ ID NO: 3533887 - RNA, 15 nt, Human
ggcugacgugugagg

SEQ ID NO: 3533888 - RNA, 14 nt, Human
ggcugacugggcca

SEQ ID NO: 3533889 - RNA, 15 nt, Human
ggcugagacaggaga

SEQ ID NO: 3533890 - RNA, 17 nt, Human
ggcugagacaggagaaa

SEQ ID NO: 3533891 - RNA, 12 nt, Human
ggcugagacugg

SEQ ID NO: 3533892 - RNA, 13 nt, Human
ggcugagacugga

SEQ ID NO: 3533893 - RNA, 20 nt, Human
ggcugagagccccagcugac

SEQ ID NO: 3533894 - RNA, 16 nt, Human
ggcugagccccuaccc

SEQ ID NO: 3533895 - RNA, 18 nt, Human
ggcugagccccuacccca

SEQ ID NO: 3533896 - RNA, 15 nt, Human
ggcugagcucucugu

SEQ ID NO: 3533897 - RNA, 14 nt, Human
ggcugagcugccca

SEQ ID NO: 3533898 - RNA, 20 nt, Human
ggcugagcugcccacagcag

SEQ ID NO: 3533899 - RNA, 17 nt, Human
ggcugaggaaaggccag

SEQ ID NO: 3533900 - RNA, 22 nt, Human
ggcugaggaaaggccagcuggc

SEQ ID NO: 3533901 - RNA, 16 nt, Human
ggcugaggaggccucc

SEQ ID NO: 3533902 - RNA, 21 nt, Human
ggcugaggauuucaagccugc

SEQ ID NO: 3533903 - RNA, 15 nt, Human
ggcugaggcaggaga

SEQ ID NO: 3533904 - RNA, 20 nt, Human
ggcugaggcaggagacuggc

SEQ ID NO: 3533905 - RNA, 14 nt, Human
ggcugaggccugga

SEQ ID NO: 3533906 - RNA, 18 nt, Human
ggcugaggcuggcacagg

SEQ ID NO: 3533907 - RNA, 23 nt, Human
ggcugaggcuggcacaggacaug

SEQ ID NO: 3533908 - RNA, 13 nt, Human
ggcugagggcagu

SEQ ID NO: 3533909 - RNA, 22 nt, Human
ggcugagggcaguucgcagcca

SEQ ID NO: 3533910 - RNA, 16 nt, Human
ggcugagggccugcug

SEQ ID NO: 3533911 - RNA, 13 nt, Human
ggcugagguggga

SEQ ID NO: 3533912 - RNA, 20 nt, Human
ggcugagguuccucugccug

SEQ ID NO: 3533913 - RNA, 23 nt, Human
ggcugagucaugaucucccugcc

SEQ ID NO: 3533914 - RNA, 15 nt, Human
ggcugagugcaggcc

SEQ ID NO: 3533915 - RNA, 22 nt, Human
ggcugagugcaggcccacccug

SEQ ID NO: 3533916 - RNA, 19 nt, Human
ggcugauaauuccaguggu

SEQ ID NO: 3533917 - RNA, 23 nt, Human
ggcugaugguguggccuguggcu

SEQ ID NO: 3533918 - RNA, 14 nt, Human
ggcugauuucuagg

SEQ ID NO: 3533919 - RNA, 22 nt, Human
ggcugcaaaggguaucaggugc

SEQ ID NO: 3533920 - RNA, 23 nt, Human
ggcugcaaaggguaucaggugcu

SEQ ID NO: 3533921 - RNA, 17 nt, Human
ggcugcacucugugccc

SEQ ID NO: 3533922 - RNA, 19 nt, Human
ggcugcagaggccagaggc

SEQ ID NO: 3533923 - RNA, 15 nt, Human
ggcugcagccucagg

SEQ ID NO: 3533924 - RNA, 16 nt, Human
ggcugcagccucagga

SEQ ID NO: 3533925 - RNA, 20 nt, Human
ggcugcagccucaggacugg

SEQ ID NO: 3533926 - RNA, 16 nt, Human
ggcugcagcuggacag

SEQ ID NO: 3533927 - RNA, 18 nt, Human
ggcugcagcuggacagag

SEQ ID NO: 3533928 - RNA, 24 nt, Human
ggcugcagcuggacagaggggacu

SEQ ID NO: 3533929 - RNA, 13 nt, Human
ggcugcaguccuc

SEQ ID NO: 3533930 - RNA, 22 nt, Human
ggcugcagugacgugcaccugu

SEQ ID NO: 3533931 - RNA, 19 nt, Human
ggcugcauagaaggaggag

SEQ ID NO: 3533932 - RNA, 16 nt, Human
ggcugcaugauguuug

SEQ ID NO: 3533933 - RNA, 20 nt, Human
ggcugcaugcgggcuuccuc

SEQ ID NO: 3533934 - RNA, 20 nt, Human
ggcugcauugaaaagagcug

SEQ ID NO: 3533935 - RNA, 21 nt, Human
ggcugcauugaaaagagcuga

SEQ ID NO: 3533936 - RNA, 15 nt, Human
ggcugccaaggccag

SEQ ID NO: 3533937 - RNA, 15 nt, Human
ggcugccagugccug

SEQ ID NO: 3533938 - RNA, 18 nt, Human
ggcugccagugccugggu

SEQ ID NO: 3533939 - RNA, 23 nt, Human
ggcugccaucucaccuccugcug

SEQ ID NO: 3533940 - RNA, 18 nt, Human
ggcugccaugugaagagg

SEQ ID NO: 3533941 - RNA, 18 nt, Human
ggcugcccacuaugguca

SEQ ID NO: 3533942 - RNA, 20 nt, Human
ggcugccccuaaucucugua

SEQ ID NO: 3533943 - RNA, 15 nt, Human
ggcugccccucucac

SEQ ID NO: 3533944 - RNA, 14 nt, Human
ggcugcccgcuccc

SEQ ID NO: 3533945 - RNA, 17 nt, Human
ggcugcccgcucccagu

SEQ ID NO: 3533946 - RNA, 22 nt, Human
ggcugcccuccugugcucagcc

SEQ ID NO: 3533947 - RNA, 18 nt, Human
ggcugcccugagaagcug

SEQ ID NO: 3533948 - RNA, 24 nt, Human
ggcugcccugagaagcugcuccag

SEQ ID NO: 3533949 - RNA, 11 nt, Human
ggcugcccugg

SEQ ID NO: 3533950 - RNA, 16 nt, Human
ggcugcccuggcccug

SEQ ID NO: 3533951 - RNA, 22 nt, Human
ggcugcccuggcccugaggugu

SEQ ID NO: 3533952 - RNA, 14 nt, Human
ggcugcccuggugc

SEQ ID NO: 3533953 - RNA, 16 nt, Human
ggcugcccuggugcug

SEQ ID NO: 3533954 - RNA, 18 nt, Human
ggcugcccuugggccacc

SEQ ID NO: 3533955 - RNA, 11 nt, Human
ggcugcccuuu

SEQ ID NO: 3533956 - RNA, 13 nt, Human
gggggccaccugc

SEQ ID NO: 3533957 - RNA, 17 nt, Human
gggggccccagucagcc

SEQ ID NO: 3533958 - RNA, 21 nt, Human
gggggccccagucagccucuc

SEQ ID NO: 3533959 - RNA, 17 nt, Human
gggggccucagggcagc

SEQ ID NO: 3533960 - RNA, 17 nt, Human
gggggccucagugccac

SEQ ID NO: 3533961 - RNA, 11 nt, Human
gaagccuuugu

SEQ ID NO: 3533962 - RNA, 16 nt, Human
gaagcggauuuccagg

SEQ ID NO: 3533963 - RNA, 18 nt, Human
gaagcggucguguuguga

SEQ ID NO: 3533964 - RNA, 15 nt, Human
gaagcgugagacgcc

SEQ ID NO: 3533965 - RNA, 19 nt, Human
gaagcguuguccucagccc

SEQ ID NO: 3533966 - RNA, 20 nt, Human
gaagcguuguccucagcccc

SEQ ID NO: 3533967 - RNA, 14 nt, Human
gaagcuaagcugca

SEQ ID NO: 3533968 - RNA, 17 nt, Human
gaagcuaauuauuuuaa

SEQ ID NO: 3533969 - RNA, 14 nt, Human
gaagcuaauuugca

SEQ ID NO: 3533970 - RNA, 23 nt, Human
gaagcuacagguuacaacagauu

SEQ ID NO: 3533971 - RNA, 15 nt, Human
ggcugccguccccua

SEQ ID NO: 3533972 - RNA, 12 nt, Human
ggcugccugagu

SEQ ID NO: 3533973 - RNA, 18 nt, Human
ggcugccuggagccccac

SEQ ID NO: 3533974 - RNA, 16 nt, Human
ggcugccuucuggccu

SEQ ID NO: 3533975 - RNA, 19 nt, Human
ggcugcgacgcuugcucug

SEQ ID NO: 3533976 - RNA, 14 nt, Human
ggcugcgcacugug

SEQ ID NO: 3533977 - RNA, 23 nt, Human
ggcugcgcuuccuauuucuaggg

SEQ ID NO: 3533978 - RNA, 19 nt, Human
ggcugcggcguacaggcug

SEQ ID NO: 3533979 - RNA, 22 nt, Human
ggcugcggcguacaggcuggcg

SEQ ID NO: 3533980 - RNA, 17 nt, Human
ggcugcggggcgggcac

SEQ ID NO: 3533981 - RNA, 20 nt, Human
ggcugcucauguuggggcuc

SEQ ID NO: 3533982 - RNA, 15 nt, Human
ggcugcucccaccug

SEQ ID NO: 3533983 - RNA, 13 nt, Human
ggcugcuccucca

SEQ ID NO: 3533984 - RNA, 15 nt, Human
ggcugcuccuccagg

SEQ ID NO: 3533985 - RNA, 18 nt, Human
ggcugcuccuccagggcc

SEQ ID NO: 3533986 - RNA, 21 nt, Human
ggcugcucggggugcacagga

SEQ ID NO: 3533987 - RNA, 19 nt, Human
ggcugcugaaaaccaucug

SEQ ID NO: 3533988 - RNA, 14 nt, Human
ggcugcugaaggcu

SEQ ID NO: 3533989 - RNA, 18 nt, Human
ggcugcugaaggcucgag

SEQ ID NO: 3533990 - RNA, 21 nt, Human
ggcugcugaccuccacagcuu

SEQ ID NO: 3533991 - RNA, 10 nt, Human
ggcugcugcc

SEQ ID NO: 3533992 - RNA, 12 nt, Human
ggcugcugccca

SEQ ID NO: 3533993 - RNA, 18 nt, Human
ggcugcugcccccacccc

SEQ ID NO: 3533994 - RNA, 15 nt, Human
ggcugcugcuacaau

SEQ ID NO: 3533995 - RNA, 11 nt, Human
ggcugcugcug

SEQ ID NO: 3533996 - RNA, 22 nt, Human
ggcugcugcugcucuuggcugg

SEQ ID NO: 3533997 - RNA, 14 nt, Human
ggcugcugcugggc

SEQ ID NO: 3533998 - RNA, 15 nt, Human
ggcugcuggaggaaa

SEQ ID NO: 3533999 - RNA, 19 nt, Human
ggcugcuggcgccucugca

SEQ ID NO: 3534000 - RNA, 15 nt, Human
ggcugcugugugccu

SEQ ID NO: 3534001 - RNA, 21 nt, Human
ggcugcuucaaggauccugag

SEQ ID NO: 3534002 - RNA, 23 nt, Human
ggcugcuucaaggauccugagcc

SEQ ID NO: 3534003 - RNA, 15 nt, Human
ggcugcuuccuccug

SEQ ID NO: 3534004 - RNA, 18 nt, Human
ggcuggaagauagcugug

SEQ ID NO: 3534005 - RNA, 15 nt, Human
ggcuggaagauccug

SEQ ID NO: 3534006 - RNA, 19 nt, Human
ggcuggaagauccugcggg

SEQ ID NO: 3534007 - RNA, 19 nt, Human
ggcuggaagggguccagcc

SEQ ID NO: 3534008 - RNA, 18 nt, Human
ggcuggaaucuggagagc

SEQ ID NO: 3534009 - RNA, 14 nt, Human
ggcuggacccagcc

SEQ ID NO: 3534010 - RNA, 16 nt, Human
ggcuggaccuaugucc

SEQ ID NO: 3534011 - RNA, 15 nt, Human
ggcuggacguggugg

SEQ ID NO: 3534012 - RNA, 19 nt, Human
ggcuggacuccagaucugc

SEQ ID NO: 3534013 - RNA, 20 nt, Human
ggcuggacuccagaucugca

SEQ ID NO: 3534014 - RNA, 14 nt, Human
ggcuggacugaggc

SEQ ID NO: 3534015 - RNA, 21 nt, Human
ggcuggacuucuaccugcccu

SEQ ID NO: 3534016 - RNA, 20 nt, Human
ggcuggagaauguggagaac

SEQ ID NO: 3534017 - RNA, 23 nt, Human
ggcuggagcccagggagcggaaa

SEQ ID NO: 3534018 - RNA, 13 nt, Human
ggcuggaggcagg

SEQ ID NO: 3534019 - RNA, 17 nt, Human
ggcuggaggcagggccu

SEQ ID NO: 3534020 - RNA, 15 nt, Human
ggcuggaggcccagg

SEQ ID NO: 3534021 - RNA, 20 nt, Human
ggcuggagugcaguggcgca

SEQ ID NO: 3534022 - RNA, 19 nt, Human
ggcuggagugcaguggcgu

SEQ ID NO: 3534023 - RNA, 23 nt, Human
ggcuggaguuagggacugaccag

SEQ ID NO: 3534024 - RNA, 15 nt, Human
ggcuggaguuauuga

SEQ ID NO: 3534025 - RNA, 17 nt, Human
ggcuggaucugugaggg

SEQ ID NO: 3534026 - RNA, 15 nt, Human
ggcuggaugaaauuu

SEQ ID NO: 3534027 - RNA, 15 nt, Human
ggcuggaugagcucc

SEQ ID NO: 3534028 - RNA, 16 nt, Human
ggcuggaugagcuccc

SEQ ID NO: 3534029 - RNA, 13 nt, Human
ggcuggcagggcu

SEQ ID NO: 3534030 - RNA, 13 nt, Human
ggcuggccacugc

SEQ ID NO: 3534031 - RNA, 14 nt, Human
ggcuggccacugca

SEQ ID NO: 3534032 - RNA, 23 nt, Human
ggcuggccacugcacagagcucu

SEQ ID NO: 3534033 - RNA, 11 nt, Human
ggcuggccagc

SEQ ID NO: 3534034 - RNA, 12 nt, Human
ggcuggccagcc

SEQ ID NO: 3534035 - RNA, 20 nt, Human
ggcuggccagccccacagcc

SEQ ID NO: 3534036 - RNA, 13 nt, Human
ggcuggccagccg

SEQ ID NO: 3534037 - RNA, 15 nt, Human
ggcuggccagccgcu

SEQ ID NO: 3534038 - RNA, 16 nt, Human
ggcuggccaguccagg

SEQ ID NO: 3534039 - RNA, 19 nt, Human
ggcuggccauggagaaagc

SEQ ID NO: 3534040 - RNA, 19 nt, Human
ggcuggcccagcccugcug

SEQ ID NO: 3534041 - RNA, 22 nt, Human
ggcuggcccagcccugcuggcc

SEQ ID NO: 3534042 - RNA, 13 nt, Human
ggcuggcccugcc

SEQ ID NO: 3534043 - RNA, 21 nt, Human
ggcuggccuaggagauaucug

SEQ ID NO: 3534044 - RNA, 23 nt, Human
ggcuggccucacccaccccugca

SEQ ID NO: 3534045 - RNA, 15 nt, Human
ggcuggccucagacu

SEQ ID NO: 3534046 - RNA, 19 nt, Human
ggcuggccucuggcucuca

SEQ ID NO: 3534047 - RNA, 17 nt, Human
ggcuggccuggccccuc

SEQ ID NO: 3534048 - RNA, 14 nt, Human
ggcuggcgcagcca

SEQ ID NO: 3534049 - RNA, 20 nt, Human
ggcuggcggcuacucagcag

SEQ ID NO: 3534050 - RNA, 21 nt, Human
ggcuggcuccccugcagcccu

SEQ ID NO: 3534051 - RNA, 16 nt, Human
ggcuggcucccucuug

SEQ ID NO: 3534052 - RNA, 15 nt, Human
ggcuggcugagggca

SEQ ID NO: 3534053 - RNA, 15 nt, Human
ggcuggcugcaguga

SEQ ID NO: 3534054 - RNA, 22 nt, Human
ggcugggaaacacuccuugcau

SEQ ID NO: 3534055 - RNA, 17 nt, Human
ggcugggaacagugugc

SEQ ID NO: 3534056 - RNA, 15 nt, Human
ggcugggagcucugc

SEQ ID NO: 3534057 - RNA, 13 nt, Human
ggcugggaggagg

SEQ ID NO: 3534058 - RNA, 14 nt, Human
ggcugggaguggug

SEQ ID NO: 3534059 - RNA, 19 nt, Human
ggcugggcacugcucucac

SEQ ID NO: 3534060 - RNA, 14 nt, Human
ggcugggcagagga

SEQ ID NO: 3534061 - RNA, 14 nt, Human
ggcugggcccagaa

SEQ ID NO: 3534062 - RNA, 15 nt, Human
ggcugggcccagagg

SEQ ID NO: 3534063 - RNA, 13 nt, Human
ggcugggcccccc

SEQ ID NO: 3534064 - RNA, 22 nt, Human
ggcugggccccccagcucaggg

SEQ ID NO: 3534065 - RNA, 18 nt, Human
ggcugggcucccuuccca

SEQ ID NO: 3534066 - RNA, 14 nt, Human
ggcugggcugggca

SEQ ID NO: 3534067 - RNA, 15 nt, Human
ggcugggcugggcac

SEQ ID NO: 3534068 - RNA, 12 nt, Human
ggcugggcuuca

SEQ ID NO: 3534069 - RNA, 17 nt, Human
ggcugggcuucaguggc

SEQ ID NO: 3534070 - RNA, 15 nt, Human
ggcuggggaggaccu

SEQ ID NO: 3534071 - RNA, 16 nt, Human
ggcuggggcaggaggg

SEQ ID NO: 3534072 - RNA, 22 nt, Human
ggcuggggccuaucagugugcc

SEQ ID NO: 3534073 - RNA, 16 nt, Human
ggcugggggagagccg

SEQ ID NO: 3534074 - RNA, 18 nt, Human
ggcugggggagagccgug

SEQ ID NO: 3534075 - RNA, 21 nt, Human
ggcuggggucccagcagcugc

SEQ ID NO: 3534076 - RNA, 15 nt, Human
ggcugggucgcccug

SEQ ID NO: 3534077 - RNA, 17 nt, Human
ggcugggucgcccugga

SEQ ID NO: 3534078 - RNA, 15 nt, Human
ggcugggugcccaca

SEQ ID NO: 3534079 - RNA, 21 nt, Human
ggcugggugcccacagcccgc

SEQ ID NO: 3534080 - RNA, 14 nt, Human
ggcugggugcgacc

SEQ ID NO: 3534081 - RNA, 14 nt, Human
ggcuggguuggagg

SEQ ID NO: 3534082 - RNA, 16 nt, Human
ggcuggguuggcgcac

SEQ ID NO: 3534083 - RNA, 19 nt, Human
ggcuggguuggcgcacccu

SEQ ID NO: 3534084 - RNA, 20 nt, Human
ggcuggguuggcgcacccuc

SEQ ID NO: 3534085 - RNA, 21 nt, Human
ggcugguagcucaggugggcg

SEQ ID NO: 3534086 - RNA, 18 nt, Human
ggcugguaucucagaaag

SEQ ID NO: 3534087 - RNA, 13 nt, Human
ggcugguccaggg

SEQ ID NO: 3534088 - RNA, 14 nt, Human
ggcuggugcagggc

SEQ ID NO: 3534089 - RNA, 15 nt, Human
ggcuggugggcacca

SEQ ID NO: 3534090 - RNA, 18 nt, Human
ggcuggugugguacagag

SEQ ID NO: 3534091 - RNA, 20 nt, Human
ggcuggugugguacagagaa

SEQ ID NO: 3534092 - RNA, 21 nt, Human
ggcuggugugguacagagaag

SEQ ID NO: 3534093 - RNA, 16 nt, Human
ggcugguguuaacaga

SEQ ID NO: 3534094 - RNA, 17 nt, Human
ggcugguguuaacagaa

SEQ ID NO: 3534095 - RNA, 23 nt, Human
ggcugguucggauuuggggugga

SEQ ID NO: 3534096 - RNA, 22 nt, Human
ggcugguuuuguaagaugcugg

SEQ ID NO: 3534097 - RNA, 23 nt, Human
ggcugguuuuguaagaugcuggg

SEQ ID NO: 3534098 - RNA, 16 nt, Human
ggcuguaaaaugcaug

SEQ ID NO: 3534099 - RNA, 15 nt, Human
ggcuguaacugccag

SEQ ID NO: 3534100 - RNA, 22 nt, Human
ggcuguaucccaugagccucag

SEQ ID NO: 3534101 - RNA, 23 nt, Human
ggcuguaucccaugagccucagc

SEQ ID NO: 3534102 - RNA, 15 nt, Human
ggcugucagcaggaa

SEQ ID NO: 3534103 - RNA, 18 nt, Human
ggcugucaguaugacauu

SEQ ID NO: 3534104 - RNA, 14 nt, Human
ggcugucaucugug

SEQ ID NO: 3534105 - RNA, 11 nt, Human
ggcuguccagu

SEQ ID NO: 3534106 - RNA, 16 nt, Human
ggcuguccagugccca

SEQ ID NO: 3534107 - RNA, 18 nt, Human
gguucuuucuuccucugc

SEQ ID NO: 3534108 - RNA, 17 nt, Human
gguucuuuggaaggagu

SEQ ID NO: 3534109 - RNA, 16 nt, Human
gguugaacucuggugg

SEQ ID NO: 3534110 - RNA, 16 nt, Human
gguugaccccagagga

SEQ ID NO: 3534111 - RNA, 16 nt, Human
gguugacuuucaggua

SEQ ID NO: 3534112 - RNA, 23 nt, Human
gguugagaauggaaaccacaacu

SEQ ID NO: 3534113 - RNA, 11 nt, Human
gguugaggaaa

SEQ ID NO: 3534114 - RNA, 23 nt, Human
gguugagguccagcccuggcuga

SEQ ID NO: 3534115 - RNA, 13 nt, Human
gguugagguuuca

SEQ ID NO: 3534116 - RNA, 17 nt, Human
gguugauaacuuugcuu

SEQ ID NO: 3534117 - RNA, 19 nt, Human
gguugauaacuuugcuugc

SEQ ID NO: 3534118 - RNA, 22 nt, Human
gguugauaguuuaccugaauaa

SEQ ID NO: 3534119 - RNA, 17 nt, Human
gguugcagugagcugag

SEQ ID NO: 3534120 - RNA, 14 nt, Human
gguugcaucagaaa

SEQ ID NO: 3534121 - RNA, 12 nt, Human
gguugccacagg

SEQ ID NO: 3534122 - RNA, 13 nt, Human
gguugccacaggc

SEQ ID NO: 3534123 - RNA, 16 nt, Human
gguugcggggggaggg

SEQ ID NO: 3534124 - RNA, 21 nt, Human
gguugcguccugacggcgccc

SEQ ID NO: 3534125 - RNA, 13 nt, Human
gguugcuggagcc

SEQ ID NO: 3534126 - RNA, 15 nt, Human
gguugcuggagccug

SEQ ID NO: 3534127 - RNA, 22 nt, Human
gguugcuguugaugaggccucu

SEQ ID NO: 3534128 - RNA, 19 nt, Human
gguugcuguuuuccucccu

SEQ ID NO: 3534129 - RNA, 15 nt, Human
gguugcuucugggaa

SEQ ID NO: 3534130 - RNA, 21 nt, Human
gguuggaagcuagcuccccuc

SEQ ID NO: 3534131 - RNA, 14 nt, Human
gguuggaccccaga

SEQ ID NO: 3534132 - RNA, 15 nt, Human
gguuggagagcuaga

SEQ ID NO: 3534133 - RNA, 14 nt, Human
gguuggauggaugg

SEQ ID NO: 3534134 - RNA, 21 nt, Human
gguuggccccugcccggcugc

SEQ ID NO: 3534135 - RNA, 15 nt, Human
gguuggcgcacccuc

SEQ ID NO: 3534136 - RNA, 18 nt, Human
gguuggcgcacccucccc

SEQ ID NO: 3534137 - RNA, 20 nt, Human
gguuggcgcacccuccccuc

SEQ ID NO: 3534138 - RNA, 13 nt, Human
gguuggcucccgc

SEQ ID NO: 3534139 - RNA, 11 nt, Human
gguuggcuggc

SEQ ID NO: 3534140 - RNA, 19 nt, Human
gguuggcugggcccagaag

SEQ ID NO: 3534141 - RNA, 21 nt, Human
gguugggacccaguggcaggg

SEQ ID NO: 3534142 - RNA, 22 nt, Human
gguugggacccaguggcagggc

SEQ ID NO: 3534143 - RNA, 23 nt, Human
gguugggacccaguggcagggca

SEQ ID NO: 3534144 - RNA, 23 nt, Human
gguugggauugggggcuggugcc

SEQ ID NO: 3534145 - RNA, 21 nt, Human
gguugggcagccagaccagca

SEQ ID NO: 3534146 - RNA, 14 nt, Human
gguugggcuggugu

SEQ ID NO: 3534147 - RNA, 15 nt, Human
gguuggggugacagu

SEQ ID NO: 3534148 - RNA, 19 nt, Human
gguugguccucuugccucc

SEQ ID NO: 3534149 - RNA, 15 nt, Human
gguuguauucuuuga

SEQ ID NO: 3534150 - RNA, 13 nt, Human
gguugucaauauu

SEQ ID NO: 3534151 - RNA, 13 nt, Human
gguugucagcucu

SEQ ID NO: 3534152 - RNA, 10 nt, Human
gguugugaau

SEQ ID NO: 3534153 - RNA, 13 nt, Human
gguuguuauguga

SEQ ID NO: 3534154 - RNA, 14 nt, Human
gguuguuucuguuc

SEQ ID NO: 3534155 - RNA, 16 nt, Human
gguuuaaaagaaaaaa

SEQ ID NO: 3534156 - RNA, 18 nt, Human
gguuuaaagaaaguguau

SEQ ID NO: 3534157 - RNA, 22 nt, Human
gguuuaaagagucuagauucaa

SEQ ID NO: 3534158 - RNA, 17 nt, Human
gguuuaaaugaacaaga

SEQ ID NO: 3534159 - RNA, 14 nt, Human
gguuuaacucagau

SEQ ID NO: 3534160 - RNA, 17 nt, Human
gguuuaagaaauagaau

SEQ ID NO: 3534161 - RNA, 19 nt, Human
gguuuaauccccaguaaaa

SEQ ID NO: 3534162 - RNA, 17 nt, Human
gguuuacaauuuacaaa

SEQ ID NO: 3534163 - RNA, 17 nt, Human
gguuuacagucuauuug

SEQ ID NO: 3534164 - RNA, 22 nt, Human
gguuuacauucaucucauucca

SEQ ID NO: 3534165 - RNA, 12 nt, Human
gguuuacauuua

SEQ ID NO: 3534166 - RNA, 15 nt, Human
gguuuacauuuaaag

SEQ ID NO: 3534167 - RNA, 20 nt, Human
gguuuaguguaaaaaugaga

SEQ ID NO: 3534168 - RNA, 14 nt, Human
gguuuauucacugu

SEQ ID NO: 3534169 - RNA, 18 nt, Human
gguuucaaagaugcugug

SEQ ID NO: 3534170 - RNA, 19 nt, Human
gguuucaccauguuggcca

SEQ ID NO: 3534171 - RNA, 22 nt, Human
gguuucacccuuaacccaagga

SEQ ID NO: 3534172 - RNA, 12 nt, Human
gguuucagaaau

SEQ ID NO: 3534173 - RNA, 19 nt, Human
gguuucagcacuagccaaa

SEQ ID NO: 3534174 - RNA, 17 nt, Human
gguuucauacucuagau

SEQ ID NO: 3534175 - RNA, 18 nt, Human
gguuuccaacaauucagc

SEQ ID NO: 3534176 - RNA, 19 nt, Human
gguuuccauggcuucccag

SEQ ID NO: 3534177 - RNA, 18 nt, Human
gguuucccaaugguguuu

SEQ ID NO: 3534178 - RNA, 12 nt, Human
gguuuccugccc

SEQ ID NO: 3534179 - RNA, 23 nt, Human
gggcacacgcugcucugccccag

SEQ ID NO: 3534180 - RNA, 14 nt, Human
gggcacagaaaaug

SEQ ID NO: 3534181 - RNA, 20 nt, Human
gggcacagaaaauggaagac

SEQ ID NO: 3534182 - RNA, 17 nt, Human
gggcacaggagcuaccu

SEQ ID NO: 3534183 - RNA, 18 nt, Human
gggcacagggccuggccc

SEQ ID NO: 3534184 - RNA, 16 nt, Human
gggcacaucauuucaa

SEQ ID NO: 3534185 - RNA, 18 nt, Human
gggcaccagggguuucuc

SEQ ID NO: 3534186 - RNA, 16 nt, Human
gggcacccccagccug

SEQ ID NO: 3534187 - RNA, 19 nt, Human
gggcacccccagccugggc

SEQ ID NO: 3534188 - RNA, 18 nt, Human
gggcaccuggggaguggg

SEQ ID NO: 3534189 - RNA, 18 nt, Human
gggcacgcugugggcagg

SEQ ID NO: 3534190 - RNA, 16 nt, Human
gggcacucagaagaca

SEQ ID NO: 3534191 - RNA, 20 nt, Human
gggcacucagaagacacuga

SEQ ID NO: 3534192 - RNA, 22 nt, Human
gggcacugcuggguggcccauc

SEQ ID NO: 3534193 - RNA, 15 nt, Human
gggcacuggcccagg

SEQ ID NO: 3534194 - RNA, 13 nt, Human
gggcacugguggc

SEQ ID NO: 3534195 - RNA, 14 nt, Human
gggcacuucacaga

SEQ ID NO: 3534196 - RNA, 14 nt, Human
gggcacuucccugc

SEQ ID NO: 3534197 - RNA, 18 nt, Human
gggcacuucccugcugcc

SEQ ID NO: 3534198 - RNA, 22 nt, Human
gggcacuuuuuaauucaccaaa

SEQ ID NO: 3534199 - RNA, 23 nt, Human
gggcacuuuuuaauucaccaaag

SEQ ID NO: 3534200 - RNA, 16 nt, Human
gggcagaagggagaag

SEQ ID NO: 3534201 - RNA, 18 nt, Human
gggcagagaggcuguggu

SEQ ID NO: 3534202 - RNA, 11 nt, Human
gggcagagcag

SEQ ID NO: 3534203 - RNA, 12 nt, Human
gggcagagccca

SEQ ID NO: 3534204 - RNA, 17 nt, Human
gggcagagccgggaagc

SEQ ID NO: 3534205 - RNA, 15 nt, Human
gggcagagcuggugc

SEQ ID NO: 3534206 - RNA, 16 nt, Human
gggcagagcuggugcg

SEQ ID NO: 3534207 - RNA, 14 nt, Human
gggcagaggaaagc

SEQ ID NO: 3534208 - RNA, 21 nt, Human
gggcagaggcaguaccugggc

SEQ ID NO: 3534209 - RNA, 15 nt, Human
gggcagagggcagag

SEQ ID NO: 3534210 - RNA, 20 nt, Human
gggcagagggcagaggcugg

SEQ ID NO: 3534211 - RNA, 12 nt, Human
gggcagagucac

SEQ ID NO: 3534212 - RNA, 16 nt, Human
gggcagaucucccaca

SEQ ID NO: 3534213 - RNA, 22 nt, Human
gggcagaucuuggacucaugag

SEQ ID NO: 3534214 - RNA, 13 nt, Human
gggcagccaggcu

SEQ ID NO: 3534215 - RNA, 14 nt, Human
gggcagccaggcug

SEQ ID NO: 3534216 - RNA, 14 nt, Human
gggcagccagggag

SEQ ID NO: 3534217 - RNA, 22 nt, Human
gggcagccagggagagcccagg

SEQ ID NO: 3534218 - RNA, 18 nt, Human
gggcagccucccccggcu

SEQ ID NO: 3534219 - RNA, 19 nt, Human
gggcagccugcguggcuga

SEQ ID NO: 3534220 - RNA, 20 nt, Human
gggcagccuggcucccagga

SEQ ID NO: 3534221 - RNA, 23 nt, Human
gggcagccuggcucccaggacac

SEQ ID NO: 3534222 - RNA, 13 nt, Human
gggcagcgccagg

SEQ ID NO: 3534223 - RNA, 21 nt, Human
gggcagcgggagccucccugc

SEQ ID NO: 3534224 - RNA, 12 nt, Human
gggcagcuccuc

SEQ ID NO: 3534225 - RNA, 21 nt, Human
gggcagcuccucugucucgag

SEQ ID NO: 3534226 - RNA, 12 nt, Human
gggcagcugccu

SEQ ID NO: 3534227 - RNA, 14 nt, Human
gggcagcugccucc

SEQ ID NO: 3534228 - RNA, 12 nt, Human
gggcagcugcua

SEQ ID NO: 3534229 - RNA, 13 nt, Human
gggcagcugggcc

SEQ ID NO: 3534230 - RNA, 19 nt, Human
gggcagcuguuagagucca

SEQ ID NO: 3534231 - RNA, 22 nt, Human
gggcaggacagguccucccugc

SEQ ID NO: 3534232 - RNA, 15 nt, Human
gggcaggaccagccc

SEQ ID NO: 3534233 - RNA, 20 nt, Human
gggcaggaguagcugagcuc

SEQ ID NO: 3534234 - RNA, 14 nt, Human
gggcaggcacagca

SEQ ID NO: 3534235 - RNA, 17 nt, Human
gggcaggcacagcacag

SEQ ID NO: 3534236 - RNA, 11 nt, Human
gggcaggcagu

SEQ ID NO: 3534237 - RNA, 17 nt, Human
gggcaggcccugcacug

SEQ ID NO: 3534238 - RNA, 19 nt, Human
gggcaggcccugcacuguc

SEQ ID NO: 3534239 - RNA, 22 nt, Human
gggcaggcccugcacuguccug

SEQ ID NO: 3534240 - RNA, 15 nt, Human
gggcaggcugggcca

SEQ ID NO: 3534241 - RNA, 20 nt, Human
gggcagggagcugggcccga

SEQ ID NO: 3534242 - RNA, 18 nt, Human
gggcagggcucccacaga

SEQ ID NO: 3534243 - RNA, 12 nt, Human
gggcagggcugu

SEQ ID NO: 3534244 - RNA, 19 nt, Human
gggcaggggaggccaucug

SEQ ID NO: 3534245 - RNA, 21 nt, Human
gggcagguucugccugcuuug

SEQ ID NO: 3534246 - RNA, 15 nt, Human
gggcaguaccugagg

SEQ ID NO: 3534247 - RNA, 20 nt, Human
gggcaguagaaggucggagg

SEQ ID NO: 3534248 - RNA, 21 nt, Human
gggcagucugagagaggccau

SEQ ID NO: 3534249 - RNA, 14 nt, Human
gggcagucuggagg

SEQ ID NO: 3534250 - RNA, 17 nt, Human
gggcagucuggaggggc

SEQ ID NO: 3534251 - RNA, 20 nt, Human
gggcagugcucacccacacc

SEQ ID NO: 3534252 - RNA, 17 nt, Human
gggcaguucgcagccac

SEQ ID NO: 3534253 - RNA, 16 nt, Human
gaaugaagaauucaga

SEQ ID NO: 3534254 - RNA, 18 nt, Human
gaaugaagauacugaaau

SEQ ID NO: 3534255 - RNA, 18 nt, Human
gaaugaagcuuguguauc

SEQ ID NO: 3534256 - RNA, 20 nt, Human
gaaugaauggcuaagcaaaa

SEQ ID NO: 3534257 - RNA, 18 nt, Human
gaaugaaugucaguguga

SEQ ID NO: 3534258 - RNA, 22 nt, Human
gaaugaaugucagugugacuga

SEQ ID NO: 3534259 - RNA, 16 nt, Human
gaaugaauuaaauaaa

SEQ ID NO: 3534260 - RNA, 15 nt, Human
gaaugaccuuguaau

SEQ ID NO: 3534261 - RNA, 18 nt, Human
gaaugaccuuguugcaug

SEQ ID NO: 3534262 - RNA, 12 nt, Human
gaaugacuccuu

SEQ ID NO: 3534263 - RNA, 19 nt, Human
gaaugagaaguagccacag

SEQ ID NO: 3534264 - RNA, 13 nt, Human
gaaugagacaucc

SEQ ID NO: 3534265 - RNA, 22 nt, Human
gaaugagagacacacugaagaa

SEQ ID NO: 3534266 - RNA, 13 nt, Human
gaaugagcccaga

SEQ ID NO: 3534267 - RNA, 20 nt, Human
gaaugagcccagagaacagc

SEQ ID NO: 3534268 - RNA, 16 nt, Human
gaaugaggaaaauucu

SEQ ID NO: 3534269 - RNA, 20 nt, Human
gaaugaggaggaaggagaga

SEQ ID NO: 3534270 - RNA, 15 nt, Human
gaaugaggcuugcug

SEQ ID NO: 3534271 - RNA, 17 nt, Human
gaaugaggcuugcugag

SEQ ID NO: 3534272 - RNA, 12 nt, Human
gaaugagggggc

SEQ ID NO: 3534273 - RNA, 15 nt, Human
gaaugagggggcuca

SEQ ID NO: 3534274 - RNA, 15 nt, Human
gaaugaggguuugag

SEQ ID NO: 3534275 - RNA, 15 nt, Human
gaaugaggucccagg

SEQ ID NO: 3534276 - RNA, 16 nt, Human
gaaugaggucccaggc

SEQ ID NO: 3534277 - RNA, 18 nt, Human
gaaugaggucugggcuag

SEQ ID NO: 3534278 - RNA, 14 nt, Human
gaaugaggugggag

SEQ ID NO: 3534279 - RNA, 14 nt, Human
gaaugaguuucuua

SEQ ID NO: 3534280 - RNA, 14 nt, Human
gaaugauuaauuaa

SEQ ID NO: 3534281 - RNA, 15 nt, Human
gaaugauucauguua

SEQ ID NO: 3534282 - RNA, 14 nt, Human
gaaugauuucaugc

SEQ ID NO: 3534283 - RNA, 14 nt, Human
gaaugauuugcaua

SEQ ID NO: 3534284 - RNA, 19 nt, Human
gaaugcacaagaauggauc

SEQ ID NO: 3534285 - RNA, 16 nt, Human
gaaugcacagauauac

SEQ ID NO: 3534286 - RNA, 22 nt, Human
gaaugcacagauauacuuugug

SEQ ID NO: 3534287 - RNA, 20 nt, Human
gaaugcacucagacuguaua

SEQ ID NO: 3534288 - RNA, 14 nt, Human
gaaugcauaaaaug

SEQ ID NO: 3534289 - RNA, 22 nt, Human
gaaugccacugccuucgcuucu

SEQ ID NO: 3534290 - RNA, 21 nt, Human
gaaugccauagucaaagagag

SEQ ID NO: 3534291 - RNA, 19 nt, Human
gaaugccaucuaucuaguu

SEQ ID NO: 3534292 - RNA, 19 nt, Human
gaaugccgcgaugggucag

SEQ ID NO: 3534293 - RNA, 20 nt, Human
gaaugccucaaugugaccag

SEQ ID NO: 3534294 - RNA, 18 nt, Human
gaaugccugagugccugg

SEQ ID NO: 3534295 - RNA, 23 nt, Human
gaaugcggcaagaaggaauugac

SEQ ID NO: 3534296 - RNA, 21 nt, Human
gaaugcuaacaguucacuugc

SEQ ID NO: 3534297 - RNA, 13 nt, Human
gaaugcuccccca

SEQ ID NO: 3534298 - RNA, 19 nt, Human
gaaugcucccccauccucc

SEQ ID NO: 3534299 - RNA, 22 nt, Human
gaaugcucccccauccuccccu

SEQ ID NO: 3534300 - RNA, 23 nt, Human
gaaugcucccccauccuccccuu

SEQ ID NO: 3534301 - RNA, 10 nt, Human
gaaugcugcc

SEQ ID NO: 3534302 - RNA, 12 nt, Human
gaaugcugccag

SEQ ID NO: 3534303 - RNA, 18 nt, Human
gaaugcuggacuggaggc

SEQ ID NO: 3534304 - RNA, 16 nt, Human
gaaugcugggacucag

SEQ ID NO: 3534305 - RNA, 18 nt, Human
gaaugcugggacucagcc

SEQ ID NO: 3534306 - RNA, 17 nt, Human
gaaugcugguuuuccua

SEQ ID NO: 3534307 - RNA, 22 nt, Human
gaaugcuuauagguggccucuc

SEQ ID NO: 3534308 - RNA, 16 nt, Human
gaaugcuuccuagaag

SEQ ID NO: 3534309 - RNA, 14 nt, Human
gaaugcuucuaagu

SEQ ID NO: 3534310 - RNA, 23 nt, Human
gaaugcuucuaaguaaauacaau

SEQ ID NO: 3534311 - RNA, 21 nt, Human
gaaugcuucugacuucauaga

SEQ ID NO: 3534312 - RNA, 15 nt, Human
gaaugcuucuucuca

SEQ ID NO: 3534313 - RNA, 13 nt, Human
gaaugcuuggaau

SEQ ID NO: 3534314 - RNA, 15 nt, Human
gaauggaaagcuuca

SEQ ID NO: 3534315 - RNA, 21 nt, Human
gaauggaaggguucuggcugc

SEQ ID NO: 3534316 - RNA, 16 nt, Human
gaauggacuuuggaag

SEQ ID NO: 3534317 - RNA, 21 nt, Human
gaauggagcaguacaugggaa

SEQ ID NO: 3534318 - RNA, 16 nt, Human
gaauggaggggcagag

SEQ ID NO: 3534319 - RNA, 22 nt, Human
gaauggaggggcagagccagga

SEQ ID NO: 3534320 - RNA, 22 nt, Human
gaauggauaaaauaaugcugca

SEQ ID NO: 3534321 - RNA, 14 nt, Human
gaauggaucacaag

SEQ ID NO: 3534322 - RNA, 17 nt, Human
gaauggaucacaagaug

SEQ ID NO: 3534323 - RNA, 19 nt, Human
gaauggaucacaagaugga

SEQ ID NO: 3534324 - RNA, 21 nt, Human
gaauggauuuuucuuuaacug

SEQ ID NO: 3534325 - RNA, 14 nt, Human
gaauggcguccgug

SEQ ID NO: 3534326 - RNA, 14 nt, Human
gaauggcuuuguau

SEQ ID NO: 3534327 - RNA, 21 nt, Human
gaaugggcaaaacugaauuau

SEQ ID NO: 3534328 - RNA, 16 nt, Human
gaaugggcaguuacau

SEQ ID NO: 3534329 - RNA, 18 nt, Human
gaaugguagucuaaccaa

SEQ ID NO: 3534330 - RNA, 19 nt, Human
gaaugguagucuaaccaaa

SEQ ID NO: 3534331 - RNA, 20 nt, Human
gaaugguagucuaaccaaau

SEQ ID NO: 3534332 - RNA, 23 nt, Human
gaaugguccgugcuaaggacuug

SEQ ID NO: 3534333 - RNA, 14 nt, Human
gaauggugauuuua

SEQ ID NO: 3534334 - RNA, 16 nt, Human
gaauggugauuuuaaa

SEQ ID NO: 3534335 - RNA, 13 nt, Human
gaaugguuauaaa

SEQ ID NO: 3534336 - RNA, 16 nt, Human
gaaugguuauaaaagu

SEQ ID NO: 3534337 - RNA, 20 nt, Human
gaauguaaagcuugucugau

SEQ ID NO: 3534338 - RNA, 17 nt, Human
gaauguaaauuuguacu

SEQ ID NO: 3534339 - RNA, 22 nt, Human
gaauguaagguauaucauucua

SEQ ID NO: 3534340 - RNA, 13 nt, Human
gggcccacaccuc

SEQ ID NO: 3534341 - RNA, 15 nt, Human
gggcccaccuggcca

SEQ ID NO: 3534342 - RNA, 22 nt, Human
gggcccaccuggccaccugagg

SEQ ID NO: 3534343 - RNA, 17 nt, Human
gggcccagagcccagcu

SEQ ID NO: 3534344 - RNA, 13 nt, Human
gggcccagaucug

SEQ ID NO: 3534345 - RNA, 18 nt, Human
gggcccagcccccacagu

SEQ ID NO: 3534346 - RNA, 16 nt, Human
gggcccagcugggcuc

SEQ ID NO: 3534347 - RNA, 21 nt, Human
gggcccagcugggcucugcca

SEQ ID NO: 3534348 - RNA, 9 nt, Human
gggcccagg

SEQ ID NO: 3534349 - RNA, 18 nt, Human
gggcccagggacaccagc

SEQ ID NO: 3534350 - RNA, 13 nt, Human
gggcccagugcau

SEQ ID NO: 3534351 - RNA, 15 nt, Human
gggcccaugggaggg

SEQ ID NO: 3534352 - RNA, 18 nt, Human
gggcccaugggagggagc

SEQ ID NO: 3534353 - RNA, 22 nt, Human
gggccccaccugcagcucccuc

SEQ ID NO: 3534354 - RNA, 17 nt, Human
gggccccagcccacccu

SEQ ID NO: 3534355 - RNA, 18 nt, Human
gggccccagcccacccuc

SEQ ID NO: 3534356 - RNA, 22 nt, Human
gggccccccagcucaggggcag

SEQ ID NO: 3534357 - RNA, 21 nt, Human
gggccccccuccuugcucugc

SEQ ID NO: 3534358 - RNA, 13 nt, Human
gggccccuccagc

SEQ ID NO: 3534359 - RNA, 18 nt, Human
gggccccucccuaccuca

SEQ ID NO: 3534360 - RNA, 13 nt, Human
gggccccucuccc

SEQ ID NO: 3534361 - RNA, 21 nt, Human
gggccccucuccccagggaag

SEQ ID NO: 3534362 - RNA, 16 nt, Human
gggccccucugcccag

SEQ ID NO: 3534363 - RNA, 22 nt, Human
gggccccucugcccagcuuggg

SEQ ID NO: 3534364 - RNA, 23 nt, Human
gggccccucugcccagcuugggc

SEQ ID NO: 3534365 - RNA, 19 nt, Human
gggccccugcuucuccagc

SEQ ID NO: 3534366 - RNA, 11 nt, Human
gggccccuggc

SEQ ID NO: 3534367 - RNA, 15 nt, Human
gggccccuggcacuc

SEQ ID NO: 3534368 - RNA, 21 nt, Human
gggccccugggcuuggccugc

SEQ ID NO: 3534369 - RNA, 18 nt, Human
gggccccuuuuuacuccc

SEQ ID NO: 3534370 - RNA, 18 nt, Human
gggcccgacauggcuccg

SEQ ID NO: 3534371 - RNA, 16 nt, Human
gggcccgccuggcaga

SEQ ID NO: 3534372 - RNA, 23 nt, Human
gggcccgccuggcagaacugagc

SEQ ID NO: 3534373 - RNA, 11 nt, Human
gggcccggacg

SEQ ID NO: 3534374 - RNA, 16 nt, Human
gggcccggccagccau

SEQ ID NO: 3534375 - RNA, 20 nt, Human
gggcccggccauguccuuag

SEQ ID NO: 3534376 - RNA, 16 nt, Human
gggcccguugucuccc

SEQ ID NO: 3534377 - RNA, 18 nt, Human
gggcccguugucucccug

SEQ ID NO: 3534378 - RNA, 23 nt, Human
gggcccguugucucccuggcccu

SEQ ID NO: 3534379 - RNA, 21 nt, Human
gggcccuccgaccacuuccag

SEQ ID NO: 3534380 - RNA, 13 nt, Human
gggcccugagcuc

SEQ ID NO: 3534381 - RNA, 18 nt, Human
gggcccugagcugagggc

SEQ ID NO: 3534382 - RNA, 14 nt, Human
gggcccugagucug

SEQ ID NO: 3534383 - RNA, 18 nt, Human
gggcccugcaccugugca

SEQ ID NO: 3534384 - RNA, 19 nt, Human
gggcccugcaccugugcag

SEQ ID NO: 3534385 - RNA, 15 nt, Human
gggcccugcagaggg

SEQ ID NO: 3534386 - RNA, 14 nt, Human
gggcccugcagcuc

SEQ ID NO: 3534387 - RNA, 11 nt, Human
gggcccugcau

SEQ ID NO: 3534388 - RNA, 18 nt, Human
gggcccugcauguagugu

SEQ ID NO: 3534389 - RNA, 12 nt, Human
gggcccugccca

SEQ ID NO: 3534390 - RNA, 13 nt, Human
gggcccuggaggc

SEQ ID NO: 3534391 - RNA, 19 nt, Human
gggcccugguccuuccagg

SEQ ID NO: 3534392 - RNA, 22 nt, Human
gggcccuggugguggcucggga

SEQ ID NO: 3534393 - RNA, 18 nt, Human
gggcccuucuugcugccc

SEQ ID NO: 3534394 - RNA, 22 nt, Human
gggcccuucuugcugcccugcc

SEQ ID NO: 3534395 - RNA, 17 nt, Human
gggcccuuggagcgugg

SEQ ID NO: 3534396 - RNA, 20 nt, Human
gggccgacauugucucccgc

SEQ ID NO: 3534397 - RNA, 12 nt, Human
gggccgaggagg

SEQ ID NO: 3534398 - RNA, 22 nt, Human
gguagacacacaugaaguccaa

SEQ ID NO: 3534399 - RNA, 18 nt, Human
gguagaccuuuauugggu

SEQ ID NO: 3534400 - RNA, 22 nt, Human
gguagagacuuugacucuccag

SEQ ID NO: 3534401 - RNA, 20 nt, Human
gguagagaggcgcggaguga

SEQ ID NO: 3534402 - RNA, 19 nt, Human
gguagagauucauuauuuu

SEQ ID NO: 3534403 - RNA, 17 nt, Human
gguagagccacaaaaga

SEQ ID NO: 3534404 - RNA, 17 nt, Human
gguagaggaugaggaaa

SEQ ID NO: 3534405 - RNA, 14 nt, Human
gguagauguucaga

SEQ ID NO: 3534406 - RNA, 13 nt, Human
gguagcagcugga

SEQ ID NO: 3534407 - RNA, 18 nt, Human
gguagcauuuguguugaa

SEQ ID NO: 3534408 - RNA, 13 nt, Human
gguagccagcaca

SEQ ID NO: 3534409 - RNA, 21 nt, Human
gguagccagcacacagggcag

SEQ ID NO: 3534410 - RNA, 16 nt, Human
gguagccaucauggau

SEQ ID NO: 3534411 - RNA, 19 nt, Human
gguagcccccucuucccug

SEQ ID NO: 3534412 - RNA, 13 nt, Human
gguagcucaggug

SEQ ID NO: 3534413 - RNA, 15 nt, Human
gguagcugccccugg

SEQ ID NO: 3534414 - RNA, 17 nt, Human
gguagcuuugaggugga

SEQ ID NO: 3534415 - RNA, 12 nt, Human
gguaggaaaugu

SEQ ID NO: 3534416 - RNA, 21 nt, Human
gguaggaauagcaugucacua

SEQ ID NO: 3534417 - RNA, 15 nt, Human
gguaggaggaugggc

SEQ ID NO: 3534418 - RNA, 19 nt, Human
gguaggagguuuggauggg

SEQ ID NO: 3534419 - RNA, 23 nt, Human
gguaggccaagguguccuacaga

SEQ ID NO: 3534420 - RNA, 24 nt, Human
gguaggccaagguguccuacagaa

SEQ ID NO: 3534421 - RNA, 14 nt, Human
gguaggggccccuc

SEQ ID NO: 3534422 - RNA, 13 nt, Human
gguagggguuggg

SEQ ID NO: 3534423 - RNA, 15 nt, Human
gguaggguaaaucag

SEQ ID NO: 3534424 - RNA, 13 nt, Human
gguagguggcaca

SEQ ID NO: 3534425 - RNA, 15 nt, Human
gguagguucagccaa

SEQ ID NO: 3534426 - RNA, 19 nt, Human
gguagguugggacaccagg

SEQ ID NO: 3534427 - RNA, 16 nt, Human
gguaguaaaacacaga

SEQ ID NO: 3534428 - RNA, 15 nt, Human
gguagucucacugcu

SEQ ID NO: 3534429 - RNA, 16 nt, Human
gguaguuaguagcaug

SEQ ID NO: 3534430 - RNA, 19 nt, Human
gguaguucaagaaaugaag

SEQ ID NO: 3534431 - RNA, 22 nt, Human
gguaguucaagaaaugaagagc

SEQ ID NO: 3534432 - RNA, 20 nt, Human
gguaguuuuuucaucuucag

SEQ ID NO: 3534433 - RNA, 19 nt, Human
gguauaucuagguuuauga

SEQ ID NO: 3534434 - RNA, 23 nt, Human
gguauaucugggcuggccaguug

SEQ ID NO: 3534435 - RNA, 13 nt, Human
gguauauucauuu

SEQ ID NO: 3534436 - RNA, 18 nt, Human
gguaucaaacagcucagg

SEQ ID NO: 3534437 - RNA, 15 nt, Human
gguauccugcccagu

SEQ ID NO: 3534438 - RNA, 15 nt, Human
gguaucucagaaagu

SEQ ID NO: 3534439 - RNA, 19 nt, Human
gguaucucagaaagugccu

SEQ ID NO: 3534440 - RNA, 14 nt, Human
gguaucuccaggau

SEQ ID NO: 3534441 - RNA, 16 nt, Human
gguaucuccaggauug

SEQ ID NO: 3534442 - RNA, 16 nt, Human
gguaugaacuugagga

SEQ ID NO: 3534443 - RNA, 23 nt, Human
gguaugaacuugaggacacaugu

SEQ ID NO: 3534444 - RNA, 13 nt, Human
gguaugaagagug

SEQ ID NO: 3534445 - RNA, 15 nt, Human
gguaugagcugaggg

SEQ ID NO: 3534446 - RNA, 22 nt, Human
gguaugaucacggcucacugca

SEQ ID NO: 3534447 - RNA, 14 nt, Human
gguaugcaaucaaa

SEQ ID NO: 3534448 - RNA, 21 nt, Human
gguauggaaggguuuguggcu

SEQ ID NO: 3534449 - RNA, 20 nt, Human
gguauggcguaaguacagag

SEQ ID NO: 3534450 - RNA, 12 nt, Human
gguaugucugcc

SEQ ID NO: 3534451 - RNA, 13 nt, Human
gguaugucugcca

SEQ ID NO: 3534452 - RNA, 19 nt, Human
gguauuaaaacuaaauuuc

SEQ ID NO: 3534453 - RNA, 19 nt, Human
gguauuccuuuuguguaca

SEQ ID NO: 3534454 - RNA, 19 nt, Human
gguauuguauuuauucaau

SEQ ID NO: 3534455 - RNA, 23 nt, Human
gguauuguauuuauucaauaaag

SEQ ID NO: 3534456 - RNA, 19 nt, Human
gguauuuaaaguauuuucu

SEQ ID NO: 3534457 - RNA, 19 nt, Human
gguauuuuucagagauuua

SEQ ID NO: 3534458 - RNA, 11 nt, Human
ggucaacagaa

SEQ ID NO: 3534459 - RNA, 17 nt, Human
ggucaacagaaugaaaa

SEQ ID NO: 3534460 - RNA, 14 nt, Human
ggucaacagagaag

SEQ ID NO: 3534461 - RNA, 19 nt, Human
ggucaacauggugaaaccc

SEQ ID NO: 3534462 - RNA, 23 nt, Human
ggucaacuugagcauguuacuga

SEQ ID NO: 3534463 - RNA, 20 nt, Human
ggucaagauuuugaaugcuu

SEQ ID NO: 3534464 - RNA, 18 nt, Human
ggucaaggccugucccug

SEQ ID NO: 3534465 - RNA, 16 nt, Human
ggucaaugcuauuuuu

SEQ ID NO: 3534466 - RNA, 14 nt, Human
ggucacacacugau

SEQ ID NO: 3534467 - RNA, 14 nt, Human
ggucacagccaggc

SEQ ID NO: 3534468 - RNA, 16 nt, Human
ggucacaggacucugc

SEQ ID NO: 3534469 - RNA, 18 nt, Human
ggucacaggacucugccu

SEQ ID NO: 3534470 - RNA, 23 nt, Human
ggucaccagacggggcuggagug

SEQ ID NO: 3534471 - RNA, 16 nt, Human
ggucaccagcuccucc

SEQ ID NO: 3534472 - RNA, 22 nt, Human
ggucaccucacucagcaccacu

SEQ ID NO: 3534473 - RNA, 12 nt, Human
ggucaccuuguu

SEQ ID NO: 3534474 - RNA, 13 nt, Human
ggucacuccuggg

SEQ ID NO: 3534475 - RNA, 17 nt, Human
ggucacucuggcagcuc

SEQ ID NO: 3534476 - RNA, 20 nt, Human
ggucacucuggcagcucaga

SEQ ID NO: 3534477 - RNA, 19 nt, Human
ggucacugaggccugagac

SEQ ID NO: 3534478 - RNA, 22 nt, Human
ggucacugaggccugagaccca

SEQ ID NO: 3534479 - RNA, 23 nt, Human
ggucacugaggccugagacccag

SEQ ID NO: 3534480 - RNA, 12 nt, Human
ggucacugcugu

SEQ ID NO: 3534481 - RNA, 14 nt, Human
ggucacugcuguca

SEQ ID NO: 3534482 - RNA, 15 nt, Human
ggucacuggaaaggg

SEQ ID NO: 3534483 - RNA, 13 nt, Human
ggucacuggcucu

SEQ ID NO: 3534484 - RNA, 15 nt, Human
ggucacuuaaaaugu

SEQ ID NO: 3534485 - RNA, 15 nt, Human
ggucagaaacaggac

SEQ ID NO: 3534486 - RNA, 18 nt, Human
ggucagaaacaggaccgg

SEQ ID NO: 3534487 - RNA, 19 nt, Human
ggucagaagaguugugcac

SEQ ID NO: 3534488 - RNA, 11 nt, Human
ggucagagccu

SEQ ID NO: 3534489 - RNA, 13 nt, Human
ggucagagccugc

SEQ ID NO: 3534490 - RNA, 15 nt, Human
ggucagagccugcag

SEQ ID NO: 3534491 - RNA, 19 nt, Human
ggucagaguaagcugcuuu

SEQ ID NO: 3534492 - RNA, 23 nt, Human
ggucagcccaaaccaccagaagc

SEQ ID NO: 3534493 - RNA, 22 nt, Human
ggucagcuugcugcccuaggcu

SEQ ID NO: 3534494 - RNA, 22 nt, Human
ggucaggagaggggcagaacag

SEQ ID NO: 3534495 - RNA, 17 nt, Human
ggucaggagaucgagac

SEQ ID NO: 3534496 - RNA, 19 nt, Human
ggucaggcagccagugaga

SEQ ID NO: 3534497 - RNA, 16 nt, Human
ggucaggccacggcag

SEQ ID NO: 3534498 - RNA, 16 nt, Human
ggucaggcccuggaac

SEQ ID NO: 3534499 - RNA, 17 nt, Human
ggucaggcccuggaacu

SEQ ID NO: 3534500 - RNA, 18 nt, Human
ggucaggcccuggaacuc

SEQ ID NO: 3534501 - RNA, 14 nt, Human
ggucaggcccuggu

SEQ ID NO: 3534502 - RNA, 17 nt, Human
ggucaggccgggcagag

SEQ ID NO: 3534503 - RNA, 11 nt, Human
ggucaggccuu

SEQ ID NO: 3534504 - RNA, 13 nt, Human
ggucaggccuuug

SEQ ID NO: 3534505 - RNA, 12 nt, Human
ggucaggcuggu

SEQ ID NO: 3534506 - RNA, 20 nt, Human
ggucagggagugcuggcuca

SEQ ID NO: 3534507 - RNA, 19 nt, Human
ggucagguguucaagacca

SEQ ID NO: 3534508 - RNA, 20 nt, Human
ggucagguuauacuccuccu

SEQ ID NO: 3534509 - RNA, 20 nt, Human
ggucaguacccaccugagcu

SEQ ID NO: 3534510 - RNA, 21 nt, Human
ggucaguacccaccugagcuu

SEQ ID NO: 3534511 - RNA, 16 nt, Human
ggucagucugguggga

SEQ ID NO: 3534512 - RNA, 15 nt, Human
ggucagugcugccug

SEQ ID NO: 3534513 - RNA, 21 nt, Human
ggucagugcugccugucccca

SEQ ID NO: 3534514 - RNA, 16 nt, Human
ggucauagcagugcuu

SEQ ID NO: 3534515 - RNA, 18 nt, Human
ggucaugaugcucuuucc

SEQ ID NO: 3534516 - RNA, 19 nt, Human
ggucaugaugcucuuuccc

SEQ ID NO: 3534517 - RNA, 13 nt, Human
ggucauggccaca

SEQ ID NO: 3534518 - RNA, 17 nt, Human
ggucauggccacacugu

SEQ ID NO: 3534519 - RNA, 18 nt, Human
ggucaugugggucuucca

SEQ ID NO: 3534520 - RNA, 14 nt, Human
ggucauguuugcag

SEQ ID NO: 3534521 - RNA, 21 nt, Human
ggucauuuccauguaugcaua

SEQ ID NO: 3534522 - RNA, 20 nt, Human
ggucauuucuucagucagaa

SEQ ID NO: 3534523 - RNA, 16 nt, Human
gguccaaugagcuuuc

SEQ ID NO: 3534524 - RNA, 18 nt, Human
gguccaaugagcuuucug

SEQ ID NO: 3534525 - RNA, 19 nt, Human
gguccaaugagcuuucuga

SEQ ID NO: 3534526 - RNA, 22 nt, Human
gguccaaugagcuuucugaaca

SEQ ID NO: 3534527 - RNA, 23 nt, Human
gguccacacccaauuccacucug

SEQ ID NO: 3534528 - RNA, 17 nt, Human
gguccacaucccgggac

SEQ ID NO: 3534529 - RNA, 16 nt, Human
gguccacccaggagcc

SEQ ID NO: 3534530 - RNA, 17 nt, Human
gguccacccaggagccc

SEQ ID NO: 3534531 - RNA, 22 nt, Human
gguccacccaggagccccgagg

SEQ ID NO: 3534532 - RNA, 21 nt, Human
gguccagaaggagacaggcag

SEQ ID NO: 3534533 - RNA, 19 nt, Human
gguccagcccuggcugaag

SEQ ID NO: 3534534 - RNA, 21 nt, Human
gguccagcccuggcugaagga

SEQ ID NO: 3534535 - RNA, 11 nt, Human
gguccagcucu

SEQ ID NO: 3534536 - RNA, 21 nt, Human
gguccagggaagcuggccgag

SEQ ID NO: 3534537 - RNA, 17 nt, Human
gguccaggggccccucc

SEQ ID NO: 3534538 - RNA, 22 nt, Human
gguccaggggccccuccagcuu

SEQ ID NO: 3534539 - RNA, 13 nt, Human
gguccaggguuga

SEQ ID NO: 3534540 - RNA, 23 nt, Human
ggucccaacaggaggacaauuca

SEQ ID NO: 3534541 - RNA, 19 nt, Human
ggucccaagcugggcccca

SEQ ID NO: 3534542 - RNA, 21 nt, Human
ggucugggggcacaagacuga

SEQ ID NO: 3534543 - RNA, 12 nt, Human
ggucuguaaaau

SEQ ID NO: 3534544 - RNA, 14 nt, Human
ggucuguaaaaucu

SEQ ID NO: 3534545 - RNA, 18 nt, Human
ggucuguacguuaccucu

SEQ ID NO: 3534546 - RNA, 14 nt, Human
ggucuguagggauu

SEQ ID NO: 3534547 - RNA, 19 nt, Human
ggucuguagguugcacacu

SEQ ID NO: 3534548 - RNA, 22 nt, Human
ggucugugccaaagaagaaucc

SEQ ID NO: 3534549 - RNA, 24 nt, Human
ggucugugugaaugugggcacugg

SEQ ID NO: 3534550 - RNA, 17 nt, Human
ggucuguguguguguau

SEQ ID NO: 3534551 - RNA, 21 nt, Human
ggucuguguguguguaugugg

SEQ ID NO: 3534552 - RNA, 13 nt, Human
ggucuguucuuga

SEQ ID NO: 3534553 - RNA, 12 nt, Human
ggucuguucuuu

SEQ ID NO: 3534554 - RNA, 20 nt, Human
ggucuguuggcaggcuggcc

SEQ ID NO: 3534555 - RNA, 15 nt, Human
ggucuguuuaaagug

SEQ ID NO: 3534556 - RNA, 14 nt, Human
ggucuuaagaaaug

SEQ ID NO: 3534557 - RNA, 15 nt, Human
ggucuuacagcaggc

SEQ ID NO: 3534558 - RNA, 17 nt, Human
ggucuucccuaccucag

SEQ ID NO: 3534559 - RNA, 10 nt, Human
ggucuuccua

SEQ ID NO: 3534560 - RNA, 17 nt, Human
ggucuuggaacuugccu

SEQ ID NO: 3534561 - RNA, 13 nt, Human
ggucuugggaaau

SEQ ID NO: 3534562 - RNA, 21 nt, Human
ggucuugguuccagccugcca

SEQ ID NO: 3534563 - RNA, 13 nt, Human
ggucuuguaagag

SEQ ID NO: 3534564 - RNA, 23 nt, Human
ggucuuuaaaucauuuuaggaaa

SEQ ID NO: 3534565 - RNA, 19 nt, Human
ggucuuuccuaaggcugca

SEQ ID NO: 3534566 - RNA, 19 nt, Human
ggucuuuccuaucauggag

SEQ ID NO: 3534567 - RNA, 14 nt, Human
ggucuuuguaagag

SEQ ID NO: 3534568 - RNA, 19 nt, Human
ggucuuuguaagaguguag

SEQ ID NO: 3534569 - RNA, 20 nt, Human
ggucuuuguaagaguguaga

SEQ ID NO: 3534570 - RNA, 16 nt, Human
ggucuuuuauaauucu

SEQ ID NO: 3534571 - RNA, 22 nt, Human
ggucuuuuccucgcuucuuuca

SEQ ID NO: 3534572 - RNA, 17 nt, Human
ggucuuuuuguaaguga

SEQ ID NO: 3534573 - RNA, 14 nt, Human
ggugaaaauuauuu

SEQ ID NO: 3534574 - RNA, 20 nt, Human
ggugaaacauuuucucccug

SEQ ID NO: 3534575 - RNA, 13 nt, Human
ggugaaaggaaau

SEQ ID NO: 3534576 - RNA, 18 nt, Human
ggugaacaaagcagccac

SEQ ID NO: 3534577 - RNA, 17 nt, Human
ggugaaccacuucauuc

SEQ ID NO: 3534578 - RNA, 23 nt, Human
ggugaaccaugucagcaaaaagc

SEQ ID NO: 3534579 - RNA, 19 nt, Human
ggugaagaugggaacgcag

SEQ ID NO: 3534580 - RNA, 18 nt, Human
ggugaagcuauuuaucug

SEQ ID NO: 3534581 - RNA, 13 nt, Human
ggugaaggcuggc

SEQ ID NO: 3534582 - RNA, 18 nt, Human
ggugaagggagagccagc

SEQ ID NO: 3534583 - RNA, 18 nt, Human
ggugaagugaagacaaug

SEQ ID NO: 3534584 - RNA, 18 nt, Human
ggugaauggccuuccuuc

SEQ ID NO: 3534585 - RNA, 20 nt, Human
ggugaauggcuuuguauaga

SEQ ID NO: 3534586 - RNA, 15 nt, Human
ggugacacagacuca

SEQ ID NO: 3534587 - RNA, 17 nt, Human
ggugacagcagucgguu

SEQ ID NO: 3534588 - RNA, 12 nt, Human
ggugacagucau

SEQ ID NO: 3534589 - RNA, 19 nt, Human
ggugacagucaucaucagg

SEQ ID NO: 3534590 - RNA, 20 nt, Human
ggugacagucaucaucaggg

SEQ ID NO: 3534591 - RNA, 22 nt, Human
ggugacagucaucaucagggcc

SEQ ID NO: 3534592 - RNA, 23 nt, Human
ggugacagugagguccugggggc

SEQ ID NO: 3534593 - RNA, 16 nt, Human
ggugacauauacauac

SEQ ID NO: 3534594 - RNA, 18 nt, Human
ggugacaucagguuuuuc

SEQ ID NO: 3534595 - RNA, 22 nt, Human
ggugaccagcaccaucucuccu

SEQ ID NO: 3534596 - RNA, 20 nt, Human
ggugaccccagggcacagga

SEQ ID NO: 3534597 - RNA, 22 nt, Human
ggugaccccagggcacaggagc

SEQ ID NO: 3534598 - RNA, 20 nt, Human
ggugacccggcacccccugc

SEQ ID NO: 3534599 - RNA, 20 nt, Human
ggugaccuccggccaggugc

SEQ ID NO: 3534600 - RNA, 21 nt, Human
ggugaccucugccugaaguca

SEQ ID NO: 3534601 - RNA, 19 nt, Human
ggugaccuuccaagagccu

SEQ ID NO: 3534602 - RNA, 23 nt, Human
ggugacugcgaucuucagagcag

SEQ ID NO: 3534603 - RNA, 19 nt, Human
ggugacugggcccugccuc

SEQ ID NO: 3534604 - RNA, 21 nt, Human
ggugacuuuggauaauaagga

SEQ ID NO: 3534605 - RNA, 23 nt, Human
ggugagaaaccuguaucuuucua

SEQ ID NO: 3534606 - RNA, 18 nt, Human
ggugagacccauggcugu

SEQ ID NO: 3534607 - RNA, 17 nt, Human
ggugagaugcuggagaa

SEQ ID NO: 3534608 - RNA, 23 nt, Human
ggugagcacggccaacaaagcug

SEQ ID NO: 3534609 - RNA, 19 nt, Human
ggugagcagaaguggagcu

SEQ ID NO: 3534610 - RNA, 18 nt, Human
ggugaggaccacuccugu

SEQ ID NO: 3534611 - RNA, 12 nt, Human
ggugaggccugu

SEQ ID NO: 3534612 - RNA, 15 nt, Human
ggugaggccuugcuc

SEQ ID NO: 3534613 - RNA, 18 nt, Human
ggugaguccauucuccca

SEQ ID NO: 3534614 - RNA, 17 nt, Human
ggugagucuuggcggca

SEQ ID NO: 3534615 - RNA, 23 nt, Human
ggugaguuggcuuaccuggccca

SEQ ID NO: 3534616 - RNA, 20 nt, Human
ggugaguuugagcugccuuc

SEQ ID NO: 3534617 - RNA, 21 nt, Human
ggugaguuugagcugccuucc

SEQ ID NO: 3534618 - RNA, 22 nt, Human
ggugauaauagaagaguggcag

SEQ ID NO: 3534619 - RNA, 15 nt, Human
ggugauauccauucu

SEQ ID NO: 3534620 - RNA, 24 nt, Human
ggugauccacccaccucagccucc

SEQ ID NO: 3534621 - RNA, 21 nt, Human
ggugauccacucgccuucauc

SEQ ID NO: 3534622 - RNA, 15 nt, Human
ggugaugagggcagc

SEQ ID NO: 3534623 - RNA, 16 nt, Human
ggugaugagggcagca

SEQ ID NO: 3534624 - RNA, 19 nt, Human
ggugaugagggcagcagcc

SEQ ID NO: 3534625 - RNA, 13 nt, Human
ggugaugccaggu

SEQ ID NO: 3534626 - RNA, 16 nt, Human
ggugaugcugggcugg

SEQ ID NO: 3534627 - RNA, 14 nt, Human
ggugauucaccaaa

SEQ ID NO: 3534628 - RNA, 22 nt, Human
ggugauuguaugaaguuugaau

SEQ ID NO: 3534629 - RNA, 15 nt, Human
ggugauuucagagag

SEQ ID NO: 3534630 - RNA, 15 nt, Human
ggugcaagagggagc

SEQ ID NO: 3534631 - RNA, 13 nt, Human
ggugcaaggaaaa

SEQ ID NO: 3534632 - RNA, 16 nt, Human
ggugcaaugaccuuuc

SEQ ID NO: 3534633 - RNA, 22 nt, Human
ggugcaauguguguauauggac

SEQ ID NO: 3534634 - RNA, 22 nt, Human
ggugcacagcacaaauuaguua

SEQ ID NO: 3534635 - RNA, 22 nt, Human
ggugcacgcuggggaagaauuu

SEQ ID NO: 3534636 - RNA, 14 nt, Human
ggugcacugggagg

SEQ ID NO: 3534637 - RNA, 16 nt, Human
ggugcacuuuguaaau

SEQ ID NO: 3534638 - RNA, 16 nt, Human
ggugcagagcugaaga

SEQ ID NO: 3534639 - RNA, 13 nt, Human
ggugcagaggaag

SEQ ID NO: 3534640 - RNA, 14 nt, Human
ggugcagaggcugu

SEQ ID NO: 3534641 - RNA, 19 nt, Human
ggugcagagugcccagaac

SEQ ID NO: 3534642 - RNA, 15 nt, Human
ggugcagcagugagg

SEQ ID NO: 3534643 - RNA, 13 nt, Human
ggugcaggcgccu

SEQ ID NO: 3534644 - RNA, 12 nt, Human
ggugcagguaga

SEQ ID NO: 3534645 - RNA, 20 nt, Human
ggugcaguugacagcaggug

SEQ ID NO: 3534646 - RNA, 23 nt, Human
ggugccaaacaaaaagguucuca

SEQ ID NO: 3534647 - RNA, 18 nt, Human
ggugccacaaauaaaaug

SEQ ID NO: 3534648 - RNA, 16 nt, Human
ggugccacuuuaccca

SEQ ID NO: 3534649 - RNA, 12 nt, Human
ggugccagcaaa

SEQ ID NO: 3534650 - RNA, 17 nt, Human
ggugccagcaaagcccc

SEQ ID NO: 3534651 - RNA, 14 nt, Human
ggugccagcaacug

SEQ ID NO: 3534652 - RNA, 15 nt, Human
ggugccagccuuccu

SEQ ID NO: 3534653 - RNA, 20 nt, Human
ggugccagccuuccucugca

SEQ ID NO: 3534654 - RNA, 23 nt, Human
ggugccagccuuccucugcagcu

SEQ ID NO: 3534655 - RNA, 17 nt, Human
ggugccagguuuucugg

SEQ ID NO: 3534656 - RNA, 21 nt, Human
ggugccagguuuucugggugu

SEQ ID NO: 3534657 - RNA, 15 nt, Human
ggugccaguuauggc

SEQ ID NO: 3534658 - RNA, 22 nt, Human
ggugccaugaagggacccuuug

SEQ ID NO: 3534659 - RNA, 23 nt, Human
ggugcccaagccagaggcugggu

SEQ ID NO: 3534660 - RNA, 21 nt, Human
ggugcccacaccggggacagg

SEQ ID NO: 3534661 - RNA, 14 nt, Human
ggugcccacaggcc

SEQ ID NO: 3534662 - RNA, 19 nt, Human
ggugcccagaacuucccug

SEQ ID NO: 3534663 - RNA, 21 nt, Human
ggugccccaggaccagcucag

SEQ ID NO: 3534664 - RNA, 22 nt, Human
ggugccccaggaccagcucagg

SEQ ID NO: 3534665 - RNA, 19 nt, Human
ggugcccugcuuucagaua

SEQ ID NO: 3534666 - RNA, 15 nt, Human
ggugcccuggaugcc

SEQ ID NO: 3534667 - RNA, 19 nt, Human
ggugcccuguucucuacca

SEQ ID NO: 3534668 - RNA, 17 nt, Human
ggugcccuuggaggcca

SEQ ID NO: 3534669 - RNA, 22 nt, Human
ggugcccuuggaggccagccag

SEQ ID NO: 3534670 - RNA, 21 nt, Human
ggugccuaggauugugccugu

SEQ ID NO: 3534671 - RNA, 19 nt, Human
ggugccuaguauugacaaa

SEQ ID NO: 3534672 - RNA, 16 nt, Human
ggugccuccaggugug

SEQ ID NO: 3534673 - RNA, 21 nt, Human
ggugccugauucggcugucuc

SEQ ID NO: 3534674 - RNA, 12 nt, Human
ggugccuuuccu

SEQ ID NO: 3534675 - RNA, 15 nt, Human
ggugcgaucuggguu

SEQ ID NO: 3534676 - RNA, 14 nt, Human
ggugcgucugggag

SEQ ID NO: 3534677 - RNA, 12 nt, Human
ggugcuaaaucu

SEQ ID NO: 3534678 - RNA, 23 nt, Human
ggugcuaaauggucgcccaggag

SEQ ID NO: 3534679 - RNA, 17 nt, Human
ggugcuaauuaauaaag

SEQ ID NO: 3534680 - RNA, 19 nt, Human
ggugcuacaaaaacacagc

SEQ ID NO: 3534681 - RNA, 21 nt, Human
ggugcuacaaaaacacagcaa

SEQ ID NO: 3534682 - RNA, 23 nt, Human
ggugcuacaaaaacacagcaagg

SEQ ID NO: 3534683 - RNA, 22 nt, Human
ggugcuacacccuuuuccagcu

SEQ ID NO: 3534684 - RNA, 14 nt, Human
ggugcuacugggga

SEQ ID NO: 3534685 - RNA, 21 nt, Human
gucaacaguuuuccuaugcuu

SEQ ID NO: 3534686 - RNA, 12 nt, Human
gucaaccagaca

SEQ ID NO: 3534687 - RNA, 16 nt, Human
gucaaccagacagagg

SEQ ID NO: 3534688 - RNA, 19 nt, Human
gucaacccuucuggaaacu

SEQ ID NO: 3534689 - RNA, 14 nt, Human
gucaaccugggcaa

SEQ ID NO: 3534690 - RNA, 12 nt, Human
gucaacuucugg

SEQ ID NO: 3534691 - RNA, 18 nt, Human
gucaagagggucugagga

SEQ ID NO: 3534692 - RNA, 20 nt, Human
gucaagagugaauucccuca

SEQ ID NO: 3534693 - RNA, 16 nt, Human
gucaagauucagcuag

SEQ ID NO: 3534694 - RNA, 14 nt, Human
gucaagcauguauu

SEQ ID NO: 3534695 - RNA, 19 nt, Human
gucaagcuccuccucccug

SEQ ID NO: 3534696 - RNA, 21 nt, Human
gucaagcuccuccucccugca

SEQ ID NO: 3534697 - RNA, 23 nt, Human
gucaagcugcucugagccacagu

SEQ ID NO: 3534698 - RNA, 11 nt, Human
gucaaggccag

SEQ ID NO: 3534699 - RNA, 13 nt, Human
gucaaggcuuaga

SEQ ID NO: 3534700 - RNA, 15 nt, Human
gucaaggugcuguug

SEQ ID NO: 3534701 - RNA, 15 nt, Human
gucaaguaagaagac

SEQ ID NO: 3534702 - RNA, 14 nt, Human
gucaagucucugcu

SEQ ID NO: 3534703 - RNA, 21 nt, Human
gucaagucucugcuggcccag

SEQ ID NO: 3534704 - RNA, 15 nt, Human
gucaagugaaaaagg

SEQ ID NO: 3534705 - RNA, 14 nt, Human
gucaaguggcaaag

SEQ ID NO: 3534706 - RNA, 20 nt, Human
gucaaguggcaaagcuguuc

SEQ ID NO: 3534707 - RNA, 18 nt, Human
gucaaguugucagguuau

SEQ ID NO: 3534708 - RNA, 21 nt, Human
gucaauaaaauccauacauuu

SEQ ID NO: 3534709 - RNA, 22 nt, Human
gucaauaaaauccauacauuug

SEQ ID NO: 3534710 - RNA, 13 nt, Human
gucaauaaacagc

SEQ ID NO: 3534711 - RNA, 21 nt, Human
gucaauacaguacaggcagca

SEQ ID NO: 3534712 - RNA, 18 nt, Human
gucaauauuaaauacaga

SEQ ID NO: 3534713 - RNA, 22 nt, Human
gucaauauuaaauacagacacu

SEQ ID NO: 3534714 - RNA, 12 nt, Human
gucaauauuuaa

SEQ ID NO: 3534715 - RNA, 14 nt, Human
gucaaucauuucuc

SEQ ID NO: 3534716 - RNA, 15 nt, Human
gucaaucauuucuca

SEQ ID NO: 3534717 - RNA, 22 nt, Human
gucaauccaagagucugaugau

SEQ ID NO: 3534718 - RNA, 22 nt, Human
gucaauccagauggugggaugu

SEQ ID NO: 3534719 - RNA, 20 nt, Human
gucaaucccaaaagucacca

SEQ ID NO: 3534720 - RNA, 16 nt, Human
gucaauccccucauuc

SEQ ID NO: 3534721 - RNA, 15 nt, Human
gucaauccugugggu

SEQ ID NO: 3534722 - RNA, 19 nt, Human
gucaauccugugggugaag

SEQ ID NO: 3534723 - RNA, 16 nt, Human
gucaaugacaugaauu

SEQ ID NO: 3534724 - RNA, 23 nt, Human
gucaaugacaugaauuuuagcuu

SEQ ID NO: 3534725 - RNA, 14 nt, Human
gucaaugcaguugu

SEQ ID NO: 3534726 - RNA, 22 nt, Human
gucaaugcaguugucucuguuu

SEQ ID NO: 3534727 - RNA, 17 nt, Human
gucaaugggaccugugg

SEQ ID NO: 3534728 - RNA, 15 nt, Human
gucaauguacuagga

SEQ ID NO: 3534729 - RNA, 14 nt, Human
gucaaugugugcac

SEQ ID NO: 3534730 - RNA, 15 nt, Human
gucaauguuuucagu

SEQ ID NO: 3534731 - RNA, 21 nt, Human
gucaauuaccagaaagauaac

SEQ ID NO: 3534732 - RNA, 14 nt, Human
gucacaaagaguuc

SEQ ID NO: 3534733 - RNA, 21 nt, Human
gucacaaauccuaaaagaagc

SEQ ID NO: 3534734 - RNA, 15 nt, Human
gucacaauguucuuu

SEQ ID NO: 3534735 - RNA, 13 nt, Human
gucacacacugau

SEQ ID NO: 3534736 - RNA, 22 nt, Human
gucacacaguauuacuucugcu

SEQ ID NO: 3534737 - RNA, 13 nt, Human
gucacacagugag

SEQ ID NO: 3534738 - RNA, 20 nt, Human
gucacacgcuuuugaauuau

SEQ ID NO: 3534739 - RNA, 14 nt, Human
gucacagccuccuc

SEQ ID NO: 3534740 - RNA, 16 nt, Human
gucacagccuccucug

SEQ ID NO: 3534741 - RNA, 15 nt, Human
gucacaggaaaaagu

SEQ ID NO: 3534742 - RNA, 15 nt, Human
gucacaggaaguaga

SEQ ID NO: 3534743 - RNA, 16 nt, Human
gucacaggagggaggg

SEQ ID NO: 3534744 - RNA, 23 nt, Human
gucacagggcaguaccugagggu

SEQ ID NO: 3534745 - RNA, 19 nt, Human
gucaccaaaagacacugca

SEQ ID NO: 3534746 - RNA, 22 nt, Human
gucaccaaaagacacugcagaa

SEQ ID NO: 3534747 - RNA, 22 nt, Human
gucaccaaauagugugaaauau

SEQ ID NO: 3534748 - RNA, 12 nt, Human
gucaccaagccc

SEQ ID NO: 3534749 - RNA, 23 nt, Human
gucaccaaggaaacgcuaccucu

SEQ ID NO: 3534750 - RNA, 19 nt, Human
gucaccaauguacccaccg

SEQ ID NO: 3534751 - RNA, 15 nt, Human
gucaccaccaccccu

SEQ ID NO: 3534752 - RNA, 14 nt, Human
gucaccaccuuccc

SEQ ID NO: 3534753 - RNA, 19 nt, Human
gucaccaccuucccagcuc

SEQ ID NO: 3534754 - RNA, 20 nt, Human
gucaccaccuucccagcucu

SEQ ID NO: 3534755 - RNA, 18 nt, Human
gucaccacuccauuccca

SEQ ID NO: 3534756 - RNA, 13 nt, Human
gucaccagagacu

SEQ ID NO: 3534757 - RNA, 18 nt, Human
gucaccaggaauguuaaa

SEQ ID NO: 3534758 - RNA, 15 nt, Human
gucaccaucucaggc

SEQ ID NO: 3534759 - RNA, 14 nt, Human
gucacccaugacag

SEQ ID NO: 3534760 - RNA, 23 nt, Human
gucaccccaaguagucugcucac

SEQ ID NO: 3534761 - RNA, 21 nt, Human
gucaccccagagccacacaug

SEQ ID NO: 3534762 - RNA, 15 nt, Human
gucacccggccccca

SEQ ID NO: 3534763 - RNA, 18 nt, Human
gucaccguggaccuuccu

SEQ ID NO: 3534764 - RNA, 20 nt, Human
gucaccguggaccuuccugc

SEQ ID NO: 3534765 - RNA, 18 nt, Human
guaagggaaacugccagc

SEQ ID NO: 3534766 - RNA, 13 nt, Human
guaaggugcaguu

SEQ ID NO: 3534767 - RNA, 15 nt, Human
guaaguaaaugucug

SEQ ID NO: 3534768 - RNA, 13 nt, Human
guaaguaauuauc

SEQ ID NO: 3534769 - RNA, 16 nt, Human
guaaguacagagaagc

SEQ ID NO: 3534770 - RNA, 18 nt, Human
guaaguaccacucaggcc

SEQ ID NO: 3534771 - RNA, 14 nt, Human
guaagucaguguug

SEQ ID NO: 3534772 - RNA, 17 nt, Human
guaagucucaacucugu

SEQ ID NO: 3534773 - RNA, 21 nt, Human
guaagucuugccuauauuuuc

SEQ ID NO: 3534774 - RNA, 16 nt, Human
guaagugagagagaca

SEQ ID NO: 3534775 - RNA, 20 nt, Human
guaagugagugugcugcugu

SEQ ID NO: 3534776 - RNA, 13 nt, Human
guaagugccuucc

SEQ ID NO: 3534777 - RNA, 16 nt, Human
guaaguuaucuuugaa

SEQ ID NO: 3534778 - RNA, 17 nt, Human
guaaguucagcacuugu

SEQ ID NO: 3534779 - RNA, 14 nt, Human
guaaguuccuacua

SEQ ID NO: 3534780 - RNA, 23 nt, Human
guaaguugggcuugcuauucugu

SEQ ID NO: 3534781 - RNA, 21 nt, Human
guaaguuuaaaggauguuggu

SEQ ID NO: 3534782 - RNA, 14 nt, Human
guaaguuucaggug

SEQ ID NO: 3534783 - RNA, 16 nt, Human
guaaguuucaggugac

SEQ ID NO: 3534784 - RNA, 21 nt, Human
guaauaaaauucaacaaacau

SEQ ID NO: 3534785 - RNA, 13 nt, Human
guaauaaacucau

SEQ ID NO: 3534786 - RNA, 16 nt, Human
guaauaaacuguguuu

SEQ ID NO: 3534787 - RNA, 20 nt, Human
guaauaaaguguuuucagag

SEQ ID NO: 3534788 - RNA, 17 nt, Human
guaauaacacccuuccu

SEQ ID NO: 3534789 - RNA, 22 nt, Human
guaauaacugugaaguuuacau

SEQ ID NO: 3534790 - RNA, 19 nt, Human
guaauaagacauaacguuu

SEQ ID NO: 3534791 - RNA, 23 nt, Human
guaauaagacauaacguuuuucc

SEQ ID NO: 3534792 - RNA, 20 nt, Human
guaauaagcacuguaaacuu

SEQ ID NO: 3534793 - RNA, 15 nt, Human
guaauaagguuuuaa

SEQ ID NO: 3534794 - RNA, 12 nt, Human
guaauaauaaag

SEQ ID NO: 3534795 - RNA, 15 nt, Human
guaauaauaccucaa

SEQ ID NO: 3534796 - RNA, 22 nt, Human
guaauacaaacuaauuuaguaa

SEQ ID NO: 3534797 - RNA, 17 nt, Human
guaauacuuccagaagu

SEQ ID NO: 3534798 - RNA, 17 nt, Human
guaauacuucuugugug

SEQ ID NO: 3534799 - RNA, 19 nt, Human
guaauagagcaaaauugau

SEQ ID NO: 3534800 - RNA, 20 nt, Human
guaauaggcguaacuaauuu

SEQ ID NO: 3534801 - RNA, 14 nt, Human
guaauauaaaagau

SEQ ID NO: 3534802 - RNA, 20 nt, Human
guaauauaauggaagagaaa

SEQ ID NO: 3534803 - RNA, 15 nt, Human
guaauauauugcugc

SEQ ID NO: 3534804 - RNA, 15 nt, Human
guaauauuuauuaaa

SEQ ID NO: 3534805 - RNA, 16 nt, Human
guaauauuuauuaaau

SEQ ID NO: 3534806 - RNA, 16 nt, Human
guaaucaauaaagaaa

SEQ ID NO: 3534807 - RNA, 18 nt, Human
guaaucaaugaauauuga

SEQ ID NO: 3534808 - RNA, 14 nt, Human
guaaucaauguuuc

SEQ ID NO: 3534809 - RNA, 15 nt, Human
guaaucauuuguuua

SEQ ID NO: 3534810 - RNA, 18 nt, Human
guaaucauuuguuuacau

SEQ ID NO: 3534811 - RNA, 19 nt, Human
guaauccaggcacagcuga

SEQ ID NO: 3534812 - RNA, 20 nt, Human
guaauccaggcacagcugag

SEQ ID NO: 3534813 - RNA, 14 nt, Human
guaaucccagcacu

SEQ ID NO: 3534814 - RNA, 15 nt, Human
guaaucccagcacuu

SEQ ID NO: 3534815 - RNA, 18 nt, Human
guaaucccagcacuuugg

SEQ ID NO: 3534816 - RNA, 21 nt, Human
guaaucccagcuacucaggag

SEQ ID NO: 3534817 - RNA, 20 nt, Human
guaauccccuaaaauaacag

SEQ ID NO: 3534818 - RNA, 13 nt, Human
guaaucccugcuu

SEQ ID NO: 3534819 - RNA, 18 nt, Human
guaaucccugcuuuuugu

SEQ ID NO: 3534820 - RNA, 13 nt, Human
guaauccuaaauu

SEQ ID NO: 3534821 - RNA, 23 nt, Human
guaauccuagcacuuugggaggc

SEQ ID NO: 3534822 - RNA, 15 nt, Human
guaaucgaccugccu

SEQ ID NO: 3534823 - RNA, 17 nt, Human
guaaucgcuuaaagaug

SEQ ID NO: 3534824 - RNA, 15 nt, Human
guaaucguguccccu

SEQ ID NO: 3534825 - RNA, 18 nt, Human
guaaucucguuucaaaaa

SEQ ID NO: 3534826 - RNA, 19 nt, Human
guaaucucucugcagcugc

SEQ ID NO: 3534827 - RNA, 20 nt, Human
guaaucucucugcagcugcc

SEQ ID NO: 3534828 - RNA, 22 nt, Human
guaaucucucugcagcugccgg

SEQ ID NO: 3534829 - RNA, 14 nt, Human
guaaucugagaaac

SEQ ID NO: 3534830 - RNA, 17 nt, Human
gaccuuguaauguaacu

SEQ ID NO: 3534831 - RNA, 13 nt, Human
gaccuugugaucu

SEQ ID NO: 3534832 - RNA, 22 nt, Human
gaccuuuaagagaaaugagcug

SEQ ID NO: 3534833 - RNA, 13 nt, Human
gaccuuuccacca

SEQ ID NO: 3534834 - RNA, 23 nt, Human
gaccuuuccaccacagccagcac

SEQ ID NO: 3534835 - RNA, 17 nt, Human
gaccuuuccugaggaag

SEQ ID NO: 3534836 - RNA, 13 nt, Human
gaccuuuuaaagu

SEQ ID NO: 3534837 - RNA, 14 nt, Human
gaccuuuuaaagug

SEQ ID NO: 3534838 - RNA, 22 nt, Human
gaccuuuucaacuuggcuuccu

SEQ ID NO: 3534839 - RNA, 14 nt, Human
gacgaacuuccaug

SEQ ID NO: 3534840 - RNA, 17 nt, Human
gacgauggugaggagau

SEQ ID NO: 3534841 - RNA, 14 nt, Human
gacgccaccauucc

SEQ ID NO: 3534842 - RNA, 14 nt, Human
gacgccacccagca

SEQ ID NO: 3534843 - RNA, 17 nt, Human
gacgccacucauuucau

SEQ ID NO: 3534844 - RNA, 14 nt, Human
gacgccaggguaug

SEQ ID NO: 3534845 - RNA, 13 nt, Human
gacgccaucccag

SEQ ID NO: 3534846 - RNA, 17 nt, Human
gacgccaucccagcccc

SEQ ID NO: 3534847 - RNA, 18 nt, Human
gacgccaucccagcccca

SEQ ID NO: 3534848 - RNA, 16 nt, Human
gacgccaugugaugga

SEQ ID NO: 3534849 - RNA, 22 nt, Human
gacgccaugugauggacacucc

SEQ ID NO: 3534850 - RNA, 15 nt, Human
gacgcccucucccca

SEQ ID NO: 3534851 - RNA, 23 nt, Human
gacgcccucuccccaccccuacc

SEQ ID NO: 3534852 - RNA, 14 nt, Human
gacgccugaggaac

SEQ ID NO: 3534853 - RNA, 18 nt, Human
gacgccugcccuccccag

SEQ ID NO: 3534854 - RNA, 23 nt, Human
gacgccugcccuccccagagcac

SEQ ID NO: 3534855 - RNA, 14 nt, Human
gacgccuggcugcu

SEQ ID NO: 3534856 - RNA, 15 nt, Human
gacgccuggcugcug

SEQ ID NO: 3534857 - RNA, 12 nt, Human
gacgccuggggg

SEQ ID NO: 3534858 - RNA, 17 nt, Human
gacgcucccugcuccac

SEQ ID NO: 3534859 - RNA, 17 nt, Human
gacgcucucuggccuuc

SEQ ID NO: 3534860 - RNA, 17 nt, Human
gacgcugaccguggagc

SEQ ID NO: 3534861 - RNA, 16 nt, Human
gacgcugugcugcccu

SEQ ID NO: 3534862 - RNA, 14 nt, Human
gacgcuucacagga

SEQ ID NO: 3534863 - RNA, 14 nt, Human
gacggagccgggaa

SEQ ID NO: 3534864 - RNA, 12 nt, Human
gacggaggggag

SEQ ID NO: 3534865 - RNA, 21 nt, Human
gacggaggggaguagagaagu

SEQ ID NO: 3534866 - RNA, 19 nt, Human
gacggagucucgcucuguc

SEQ ID NO: 3534867 - RNA, 20 nt, Human
gacggcaggcucacugccag

SEQ ID NO: 3534868 - RNA, 15 nt, Human
gacggccugaugcuc

SEQ ID NO: 3534869 - RNA, 20 nt, Human
gacggccugaugcucccucc

SEQ ID NO: 3534870 - RNA, 22 nt, Human
gacggcugggcacacgccuccc

SEQ ID NO: 3534871 - RNA, 23 nt, Human
gacgggacucaggcgggacagug

SEQ ID NO: 3534872 - RNA, 23 nt, Human
gacggggggccccagucagccuc

SEQ ID NO: 3534873 - RNA, 21 nt, Human
gacgguauuaugcuucuugga

SEQ ID NO: 3534874 - RNA, 16 nt, Human
gacggucccacacugg

SEQ ID NO: 3534875 - RNA, 24 nt, Human
gacggugacaaagauggcucagag

SEQ ID NO: 3534876 - RNA, 23 nt, Human
gacggugcccaagccagaggcug

SEQ ID NO: 3534877 - RNA, 13 nt, Human
gacggugucuugu

SEQ ID NO: 3534878 - RNA, 15 nt, Human
gacgguucaccagcc

SEQ ID NO: 3534879 - RNA, 16 nt, Human
gacgguuccuacacag

SEQ ID NO: 3534880 - RNA, 19 nt, Human
gacgguuccuacacaggac

SEQ ID NO: 3534881 - RNA, 21 nt, Human
gacgguuccuacacaggacag

SEQ ID NO: 3534882 - RNA, 14 nt, Human
gacgguuuuuuauu

SEQ ID NO: 3534883 - RNA, 19 nt, Human
gacgguuuuuuauuauugu

SEQ ID NO: 3534884 - RNA, 19 nt, Human
gacguacaaguaguucugu

SEQ ID NO: 3534885 - RNA, 22 nt, Human
gacguacaaguaguucuguauu

SEQ ID NO: 3534886 - RNA, 21 nt, Human
gacguagcugcaaaggacaga

SEQ ID NO: 3534887 - RNA, 20 nt, Human
gacguaggaacgguaaauuu

SEQ ID NO: 3534888 - RNA, 18 nt, Human
gacgucaagucuccuucc

SEQ ID NO: 3534889 - RNA, 22 nt, Human
gacgucccuccacguucacccc

SEQ ID NO: 3534890 - RNA, 21 nt, Human
gacguccugccaccuggggca

SEQ ID NO: 3534891 - RNA, 14 nt, Human
gacgucuuucuuuu

SEQ ID NO: 3534892 - RNA, 18 nt, Human
gacgugcaccuguacuca

SEQ ID NO: 3534893 - RNA, 18 nt, Human
gacguggaaccucugucu

SEQ ID NO: 3534894 - RNA, 20 nt, Human
gacguggagcgggguaugaa

SEQ ID NO: 3534895 - RNA, 16 nt, Human
gacguggcaccuccuc

SEQ ID NO: 3534896 - RNA, 14 nt, Human
gacguggcucagcc

SEQ ID NO: 3534897 - RNA, 15 nt, Human
gacguggcucagcca

SEQ ID NO: 3534898 - RNA, 20 nt, Human
gacgugggcugggcccacaa

SEQ ID NO: 3534899 - RNA, 20 nt, Human
gacguguuaugacuccagaa

SEQ ID NO: 3534900 - RNA, 22 nt, Human
gacguuuuauaagcaucauuau

SEQ ID NO: 3534901 - RNA, 12 nt, Human
gacuaaaagaua

SEQ ID NO: 3534902 - RNA, 19 nt, Human
gacuaaaagauauaagugc

SEQ ID NO: 3534903 - RNA, 20 nt, Human
gacuaaaagauauaagugcu

SEQ ID NO: 3534904 - RNA, 22 nt, Human
gacuaaaccauugugcauucua

SEQ ID NO: 3534905 - RNA, 19 nt, Human
gacuaaacuuuuuuucugu

SEQ ID NO: 3534906 - RNA, 18 nt, Human
gacuaaagagagaaugua

SEQ ID NO: 3534907 - RNA, 12 nt, Human
gacuaaaugaaa

SEQ ID NO: 3534908 - RNA, 20 nt, Human
gacuaaaugccuaguuuuua

SEQ ID NO: 3534909 - RNA, 14 nt, Human
gacuaaauucguga

SEQ ID NO: 3534910 - RNA, 14 nt, Human
gacuaacacucaga

SEQ ID NO: 3534911 - RNA, 22 nt, Human
gacuaacacucagaagccuggg

SEQ ID NO: 3534912 - RNA, 19 nt, Human
gacuaaccccaacgcacag

SEQ ID NO: 3534913 - RNA, 23 nt, Human
gacuaacuagacaccaaaguucu

SEQ ID NO: 3534914 - RNA, 16 nt, Human
gacuaacucaaauaca

SEQ ID NO: 3534915 - RNA, 23 nt, Human
gacuaagaucgguuaacaaauaa

SEQ ID NO: 3534916 - RNA, 15 nt, Human
gacuaagccuaccug

SEQ ID NO: 3534917 - RNA, 15 nt, Human
gacuaaucuuauuca

SEQ ID NO: 3534918 - RNA, 20 nt, Human
gacuaauggcaugagaaaua

SEQ ID NO: 3534919 - RNA, 13 nt, Human
gacuaauuguaua

SEQ ID NO: 3534920 - RNA, 19 nt, Human
gucaccuagcaagcugccg

SEQ ID NO: 3534921 - RNA, 16 nt, Human
gucaccucacucagca

SEQ ID NO: 3534922 - RNA, 23 nt, Human
gucaccucacucagcaccacuca

SEQ ID NO: 3534923 - RNA, 21 nt, Human
gucaccucagagacauacacc

SEQ ID NO: 3534924 - RNA, 22 nt, Human
gucaccucuuccgacucuuucu

SEQ ID NO: 3534925 - RNA, 20 nt, Human
gucaccugaagacucauucu

SEQ ID NO: 3534926 - RNA, 13 nt, Human
gucaccugcuucu

SEQ ID NO: 3534927 - RNA, 14 nt, Human
gucaccugcuucuc

SEQ ID NO: 3534928 - RNA, 17 nt, Human
gucaccuucccuugcca

SEQ ID NO: 3534929 - RNA, 19 nt, Human
gucaccuuuuaaauccugu

SEQ ID NO: 3534930 - RNA, 21 nt, Human
gucaccuuuuaaauccuguug

SEQ ID NO: 3534931 - RNA, 16 nt, Human
gucacgcagccaccag

SEQ ID NO: 3534932 - RNA, 20 nt, Human
gucacggcugcgcacugugu

SEQ ID NO: 3534933 - RNA, 19 nt, Human
gucacguuuggugcuucuc

SEQ ID NO: 3534934 - RNA, 19 nt, Human
gucacucauugcugagccu

SEQ ID NO: 3534935 - RNA, 23 nt, Human
gucacucauugcugagccucugc

SEQ ID NO: 3534936 - RNA, 11 nt, Human
gucacucccaa

SEQ ID NO: 3534937 - RNA, 14 nt, Human
gucacucccaagcc

SEQ ID NO: 3534938 - RNA, 19 nt, Human
gucacucuagucaaugaca

SEQ ID NO: 3534939 - RNA, 19 nt, Human
gucacucuuccugcaagga

SEQ ID NO: 3534940 - RNA, 20 nt, Human
gucacucuuccugcaaggac

SEQ ID NO: 3534941 - RNA, 18 nt, Human
gucacugaggccugagac

SEQ ID NO: 3534942 - RNA, 22 nt, Human
gucacugauguacaauuaaaaa

SEQ ID NO: 3534943 - RNA, 20 nt, Human
gucacugcacagugcaucuc

SEQ ID NO: 3534944 - RNA, 23 nt, Human
gucacugcacagugcaucucagc

SEQ ID NO: 3534945 - RNA, 14 nt, Human
gucacugcaggcac

SEQ ID NO: 3534946 - RNA, 20 nt, Human
gucacugccucucccuggcc

SEQ ID NO: 3534947 - RNA, 18 nt, Human
gucacugccugcagaggu

SEQ ID NO: 3534948 - RNA, 23 nt, Human
gucacugccugcagaggucugug

SEQ ID NO: 3534949 - RNA, 21 nt, Human
gucacugcuuaacuucacaua

SEQ ID NO: 3534950 - RNA, 17 nt, Human
gucacugcuuuuggccu

SEQ ID NO: 3534951 - RNA, 15 nt, Human
gucacuggaaagggg

SEQ ID NO: 3534952 - RNA, 23 nt, Human
gucacuggagguugaagccaagu

SEQ ID NO: 3534953 - RNA, 12 nt, Human
gucacuggcucu

SEQ ID NO: 3534954 - RNA, 16 nt, Human
gucacuggcucuccaa

SEQ ID NO: 3534955 - RNA, 14 nt, Human
gucacuggcugccu

SEQ ID NO: 3534956 - RNA, 16 nt, Human
gucacuggcugccucc

SEQ ID NO: 3534957 - RNA, 23 nt, Human
gucacuggcugccuccacuccca

SEQ ID NO: 3534958 - RNA, 17 nt, Human
gucacugucccucaaau

SEQ ID NO: 3534959 - RNA, 13 nt, Human
gucacuguuucuc

SEQ ID NO: 3534960 - RNA, 16 nt, Human
gucacuguuucucugc

SEQ ID NO: 3534961 - RNA, 18 nt, Human
gucacuuacuguuucugu

SEQ ID NO: 3534962 - RNA, 14 nt, Human
gucacuucuucugu

SEQ ID NO: 3534963 - RNA, 14 nt, Human
gucacuuuuuaugc

SEQ ID NO: 3534964 - RNA, 13 nt, Human
gucagaaagugua

SEQ ID NO: 3534965 - RNA, 19 nt, Human
gucagaacagcagacucag

SEQ ID NO: 3534966 - RNA, 23 nt, Human
gucagaaguuucugccgcagccc

SEQ ID NO: 3534967 - RNA, 20 nt, Human
gucagaauaauaagaggugc

SEQ ID NO: 3534968 - RNA, 15 nt, Human
gucagacacaaacaa

SEQ ID NO: 3534969 - RNA, 20 nt, Human
gucagacacaaacaaacaag

SEQ ID NO: 3534970 - RNA, 12 nt, Human
gucagacauaaa

SEQ ID NO: 3534971 - RNA, 14 nt, Human
gucagacauaaagc

SEQ ID NO: 3534972 - RNA, 15 nt, Human
gucagacauaaagcc

SEQ ID NO: 3534973 - RNA, 20 nt, Human
gucagacauaaagccauguu

SEQ ID NO: 3534974 - RNA, 15 nt, Human
guaucguauagcugu

SEQ ID NO: 3534975 - RNA, 16 nt, Human
guaucguauagcugua

SEQ ID NO: 3534976 - RNA, 20 nt, Human
guaucuagacccaucuucuu

SEQ ID NO: 3534977 - RNA, 18 nt, Human
guaucuaggcaacauagu

SEQ ID NO: 3534978 - RNA, 13 nt, Human
guaucuagugcag

SEQ ID NO: 3534979 - RNA, 11 nt, Human
guaucucagaa

SEQ ID NO: 3534980 - RNA, 21 nt, Human
guaucucagaaagugccugac

SEQ ID NO: 3534981 - RNA, 14 nt, Human
guaucuccaggauu

SEQ ID NO: 3534982 - RNA, 17 nt, Human
guaucucugaagcaugu

SEQ ID NO: 3534983 - RNA, 18 nt, Human
gucucacuauguugccca

SEQ ID NO: 3534984 - RNA, 20 nt, Human
gucucacuauguugcccagg

SEQ ID NO: 3534985 - RNA, 21 nt, Human
gucucacuauguugcccaggc

SEQ ID NO: 3534986 - RNA, 19 nt, Human
gucucacucugucgcccag

SEQ ID NO: 3534987 - RNA, 14 nt, Human
gucucacugcuuga

SEQ ID NO: 3534988 - RNA, 22 nt, Human
gucucacugugggaaggccagc

SEQ ID NO: 3534989 - RNA, 23 nt, Human
gucucacugugggaaggccagcu

SEQ ID NO: 3534990 - RNA, 16 nt, Human
gucucacuguugccca

SEQ ID NO: 3534991 - RNA, 20 nt, Human
gucucacuguugcccaggcu

SEQ ID NO: 3534992 - RNA, 23 nt, Human
gucucacuguugcccaggcuggc

SEQ ID NO: 3534993 - RNA, 24 nt, Human
gucucagacucuuuuuguaccugg

SEQ ID NO: 3534994 - RNA, 19 nt, Human
gucucagacuuuuguacau

SEQ ID NO: 3534995 - RNA, 21 nt, Human
gucucagcagcgaccaccccu

SEQ ID NO: 3534996 - RNA, 15 nt, Human
gucucaggaccuagg

SEQ ID NO: 3534997 - RNA, 16 nt, Human
gucucaggagcauggg

SEQ ID NO: 3534998 - RNA, 17 nt, Human
gucucaggagucucugg

SEQ ID NO: 3534999 - RNA, 14 nt, Human
gucucaggcugccu

SEQ ID NO: 3535000 - RNA, 13 nt, Human
gucucaggcuggu

SEQ ID NO: 3535001 - RNA, 16 nt, Human
gucucaggucccugca

SEQ ID NO: 3535002 - RNA, 18 nt, Human
gucucaguuugugugucu

SEQ ID NO: 3535003 - RNA, 18 nt, Human
gucucauagguuaaaaaa

SEQ ID NO: 3535004 - RNA, 19 nt, Human
gucucauagguugagcaau

SEQ ID NO: 3535005 - RNA, 15 nt, Human
gucucauccaucauc

SEQ ID NO: 3535006 - RNA, 15 nt, Human
gucucauccccaggg

SEQ ID NO: 3535007 - RNA, 13 nt, Human
gucucaucugggg

SEQ ID NO: 3535008 - RNA, 23 nt, Human
gucucaugccaguaacaggcuca

SEQ ID NO: 3535009 - RNA, 19 nt, Human
gucucaugcuccuuaaugg

SEQ ID NO: 3535010 - RNA, 19 nt, Human
gucucauuccguugucugu

SEQ ID NO: 3535011 - RNA, 22 nt, Human
gucuccaaaaaaaaaaaaaaua

SEQ ID NO: 3535012 - RNA, 17 nt, Human
gucuccaaccccccagc

SEQ ID NO: 3535013 - RNA, 21 nt, Human
gucuccaaccccccagcacug

SEQ ID NO: 3535014 - RNA, 22 nt, Human
gucuccaaccccccagcacuga

SEQ ID NO: 3535015 - RNA, 17 nt, Human
gucuccaccaggaaccu

SEQ ID NO: 3535016 - RNA, 19 nt, Human
gucuccaccaggaaccucu

SEQ ID NO: 3535017 - RNA, 13 nt, Human
gucuccagaaagc

SEQ ID NO: 3535018 - RNA, 20 nt, Human
gucuccagacccccaccccu

SEQ ID NO: 3535019 - RNA, 22 nt, Human
gucuccagccccuucucagaau

SEQ ID NO: 3535020 - RNA, 14 nt, Human
gucuccagcugcug

SEQ ID NO: 3535021 - RNA, 15 nt, Human
gucuccaggggcugc

SEQ ID NO: 3535022 - RNA, 19 nt, Human
gucuccagugguugcuguu

SEQ ID NO: 3535023 - RNA, 20 nt, Human
gucuccagugguugcuguug

SEQ ID NO: 3535024 - RNA, 13 nt, Human
gucuccauguuug

SEQ ID NO: 3535025 - RNA, 12 nt, Human
gucucccaaggc

SEQ ID NO: 3535026 - RNA, 19 nt, Human
gucucccagggccuuaaaa

SEQ ID NO: 3535027 - RNA, 18 nt, Human
gucuccccaugugccugc

SEQ ID NO: 3535028 - RNA, 20 nt, Human
gucucccccaacagcuggac

SEQ ID NO: 3535029 - RNA, 18 nt, Human
gucucccccacccuuguu

SEQ ID NO: 3535030 - RNA, 16 nt, Human
gucuccccucugcugg

SEQ ID NO: 3535031 - RNA, 17 nt, Human
gucuccccucugcuggc

SEQ ID NO: 3535032 - RNA, 18 nt, Human
gucuccccuguuccccuc

SEQ ID NO: 3535033 - RNA, 23 nt, Human
gucuccccuguuccccucucccu

SEQ ID NO: 3535034 - RNA, 19 nt, Human
gucucccgccccccacacu

SEQ ID NO: 3535035 - RNA, 12 nt, Human
gucucccuccuc

SEQ ID NO: 3535036 - RNA, 15 nt, Human
gucucccucuccugc

SEQ ID NO: 3535037 - RNA, 22 nt, Human
gucucccucuccugccuacuca

SEQ ID NO: 3535038 - RNA, 12 nt, Human
gucucccuggcc

SEQ ID NO: 3535039 - RNA, 15 nt, Human
gucucccuggcuccc

SEQ ID NO: 3535040 - RNA, 19 nt, Human
gucucccuucucccaugag

SEQ ID NO: 3535041 - RNA, 14 nt, Human
gucucccuucuguu

SEQ ID NO: 3535042 - RNA, 14 nt, Human
gucuccggccucuc

SEQ ID NO: 3535043 - RNA, 14 nt, Human
gucuccuacuccug

SEQ ID NO: 3535044 - RNA, 22 nt, Human
gucuccuauauauuucuauuau

SEQ ID NO: 3535045 - RNA, 23 nt, Human
gucuccucaauuuuugucucaga

SEQ ID NO: 3535046 - RNA, 17 nt, Human
gucuccucagccuccuc

SEQ ID NO: 3535047 - RNA, 14 nt, Human
gucuccucaggacc

SEQ ID NO: 3535048 - RNA, 20 nt, Human
gucuccucuauccugggcuu

SEQ ID NO: 3535049 - RNA, 23 nt, Human
gucuccucuuaaaaaauaaaaac

SEQ ID NO: 3535050 - RNA, 14 nt, Human
gucuccugcaugca

SEQ ID NO: 3535051 - RNA, 15 nt, Human
gucuccugcccccac

SEQ ID NO: 3535052 - RNA, 20 nt, Human
gucuccuuucaccccagggc

SEQ ID NO: 3535053 - RNA, 21 nt, Human
gucuccuuucucagccacaaa

SEQ ID NO: 3535054 - RNA, 22 nt, Human
gucuccuuugcacugagggcca

SEQ ID NO: 3535055 - RNA, 23 nt, Human
gucuccuuugcacugagggccac

SEQ ID NO: 3535056 - RNA, 18 nt, Human
gucuccuuugcaggcuca

SEQ ID NO: 3535057 - RNA, 15 nt, Human
gucucgagcgcccug

SEQ ID NO: 3535058 - RNA, 17 nt, Human
gucucgagcgcccugca

SEQ ID NO: 3535059 - RNA, 18 nt, Human
gucucgagcgcccugcag

SEQ ID NO: 3535060 - RNA, 20 nt, Human
gucucgagcgcccugcagac

SEQ ID NO: 3535061 - RNA, 23 nt, Human
gucucgagcgcccugcagacccu

SEQ ID NO: 3535062 - RNA, 17 nt, Human
gucucgcugaugcuggg

SEQ ID NO: 3535063 - RNA, 23 nt, Human
gucucggaaccugugagcugcac

SEQ ID NO: 3535064 - RNA, 23 nt, Human
gucucggguggcuagucagagag

SEQ ID NO: 3535065 - RNA, 16 nt, Human
gucucggugguaccag

SEQ ID NO: 3535066 - RNA, 13 nt, Human
gucucgugguagg

SEQ ID NO: 3535067 - RNA, 13 nt, Human
gucucuaggcugg

SEQ ID NO: 3535068 - RNA, 16 nt, Human
gucucuagugcuguga

SEQ ID NO: 3535069 - RNA, 18 nt, Human
gucucuauaccaauaaag

SEQ ID NO: 3535070 - RNA, 17 nt, Human
gucucuaucauuaaagu

SEQ ID NO: 3535071 - RNA, 17 nt, Human
gucucuaugccagcuca

SEQ ID NO: 3535072 - RNA, 13 nt, Human
gucucuauuuaaa

SEQ ID NO: 3535073 - RNA, 14 nt, Human
gucucucacagaca

SEQ ID NO: 3535074 - RNA, 19 nt, Human
gucucucacagacaggacc

SEQ ID NO: 3535075 - RNA, 12 nt, Human
gucucucagaau

SEQ ID NO: 3535076 - RNA, 17 nt, Human
gucucucagggccaggc

SEQ ID NO: 3535077 - RNA, 15 nt, Human
gucucucccucaggu

SEQ ID NO: 3535078 - RNA, 21 nt, Human
gucucuccuguaagccaaaga

SEQ ID NO: 3535079 - RNA, 19 nt, Human
gucucuccuuuucuuuugu

SEQ ID NO: 3535080 - RNA, 12 nt, Human
gucucucuccca

SEQ ID NO: 3535081 - RNA, 17 nt, Human
gucucucucccauggag

SEQ ID NO: 3535082 - RNA, 23 nt, Human
gucucucucccauggagccccag

SEQ ID NO: 3535083 - RNA, 21 nt, Human
gucucucuggggccacacaga

SEQ ID NO: 3535084 - RNA, 16 nt, Human
gucucucuuaaaguug

SEQ ID NO: 3535085 - RNA, 22 nt, Human
gucucucuucagacucucagcc

SEQ ID NO: 3535086 - RNA, 15 nt, Human
gucucucuucucucc

SEQ ID NO: 3535087 - RNA, 19 nt, Human
gucucucuucucuccagcu

SEQ ID NO: 3535088 - RNA, 20 nt, Human
gucucucuucucuccagcug

SEQ ID NO: 3535089 - RNA, 21 nt, Human
gucucucuuuggacucucccc

SEQ ID NO: 3535090 - RNA, 15 nt, Human
gucucugaagcguga

SEQ ID NO: 3535091 - RNA, 17 nt, Human
gucucugaaguacuaac

SEQ ID NO: 3535092 - RNA, 15 nt, Human
gucucugaagugaaa

SEQ ID NO: 3535093 - RNA, 13 nt, Human
gucucugagcauu

SEQ ID NO: 3535094 - RNA, 21 nt, Human
gucucugagggcuuccuuugg

SEQ ID NO: 3535095 - RNA, 11 nt, Human
gucucugccau

SEQ ID NO: 3535096 - RNA, 18 nt, Human
gucucugccggcucuuuc

SEQ ID NO: 3535097 - RNA, 12 nt, Human
gucucugccucc

SEQ ID NO: 3535098 - RNA, 13 nt, Human
gucucugcugccg

SEQ ID NO: 3535099 - RNA, 16 nt, Human
gucucugcuggcccag

SEQ ID NO: 3535100 - RNA, 17 nt, Human
gucucugcuggcccagc

SEQ ID NO: 3535101 - RNA, 15 nt, Human
gucucugugagacuc

SEQ ID NO: 3535102 - RNA, 21 nt, Human
gucucuuccaguuugcuuugc

SEQ ID NO: 3535103 - RNA, 15 nt, Human
gucucuucuccacug

SEQ ID NO: 3535104 - RNA, 22 nt, Human
gucucuucucccagaaucccag

SEQ ID NO: 3535105 - RNA, 19 nt, Human
gucucuucugaauaaagca

SEQ ID NO: 3535106 - RNA, 22 nt, Human
gucucuucuuggggcccagugc

SEQ ID NO: 3535107 - RNA, 23 nt, Human
gucucuucuuggggcccagugca

SEQ ID NO: 3535108 - RNA, 23 nt, Human
gucucuugagggagcuuagccaa

SEQ ID NO: 3535109 - RNA, 17 nt, Human
gucucuuuaaucuucag

SEQ ID NO: 3535110 - RNA, 20 nt, Human
gucucuuuaaugucacaggc

SEQ ID NO: 3535111 - RNA, 22 nt, Human
gucucuuucaugaguuuuuccc

SEQ ID NO: 3535112 - RNA, 21 nt, Human
gucucuuuuacccuggccccu

SEQ ID NO: 3535113 - RNA, 23 nt, Human
gucucuuuucuuuagagcauugc

SEQ ID NO: 3535114 - RNA, 11 nt, Human
gucucuuuugu

SEQ ID NO: 3535115 - RNA, 12 nt, Human
gucucuuuugua

SEQ ID NO: 3535116 - RNA, 19 nt, Human
gucucuuuuguaaauuaaa

SEQ ID NO: 3535117 - RNA, 18 nt, Human
gucucuuuuuuacaaagg

SEQ ID NO: 3535118 - RNA, 22 nt, Human
guauucgugcagcauaugagga

SEQ ID NO: 3535119 - RNA, 16 nt, Human
guauucguuaucuaau

SEQ ID NO: 3535120 - RNA, 19 nt, Human
guauucuagcuaauguaau

SEQ ID NO: 3535121 - RNA, 14 nt, Human
guauucucauucuu

SEQ ID NO: 3535122 - RNA, 14 nt, Human
guauucucuuuuca

SEQ ID NO: 3535123 - RNA, 11 nt, Human
guauucuguac

SEQ ID NO: 3535124 - RNA, 22 nt, Human
guauucuucucuuccuuuuauc

SEQ ID NO: 3535125 - RNA, 16 nt, Human
guauucuuugauguua

SEQ ID NO: 3535126 - RNA, 21 nt, Human
guauucuuugauguuaacaca

SEQ ID NO: 3535127 - RNA, 13 nt, Human
guauugaagcauu

SEQ ID NO: 3535128 - RNA, 14 nt, Human
guauugaauauugu

SEQ ID NO: 3535129 - RNA, 17 nt, Human
guauugaaucauguagu

SEQ ID NO: 3535130 - RNA, 16 nt, Human
guauugcacauuguaa

SEQ ID NO: 3535131 - RNA, 15 nt, Human
guauugcaucuguau

SEQ ID NO: 3535132 - RNA, 21 nt, Human
guauugccaaacauuaauguu

SEQ ID NO: 3535133 - RNA, 24 nt, Human
guauugccaaacauuaauguugau

SEQ ID NO: 3535134 - RNA, 12 nt, Human
guauuguaaauu

SEQ ID NO: 3535135 - RNA, 19 nt, Human
guauuguacaaaguauuaa

SEQ ID NO: 3535136 - RNA, 16 nt, Human
guauuguauuuauuca

SEQ ID NO: 3535137 - RNA, 13 nt, Human
guauuguccuauu

SEQ ID NO: 3535138 - RNA, 12 nt, Human
guauugugguau

SEQ ID NO: 3535139 - RNA, 17 nt, Human
guauuguuagauguuug

SEQ ID NO: 3535140 - RNA, 21 nt, Human
guauuguuguccuuuucauag

SEQ ID NO: 3535141 - RNA, 23 nt, Human
guauuguuugggauccuauugaa

SEQ ID NO: 3535142 - RNA, 20 nt, Human
guauuguuuugguuugcuac

SEQ ID NO: 3535143 - RNA, 16 nt, Human
guauuuaaaaauagaa

SEQ ID NO: 3535144 - RNA, 19 nt, Human
guauuuaaaaauagaaaca

SEQ ID NO: 3535145 - RNA, 22 nt, Human
guauuuaaacuaucuuguguga

SEQ ID NO: 3535146 - RNA, 17 nt, Human
guauuuaagcaaauacu

SEQ ID NO: 3535147 - RNA, 12 nt, Human
guauuuaauuag

SEQ ID NO: 3535148 - RNA, 20 nt, Human
guauuuaauuagugcuaagu

SEQ ID NO: 3535149 - RNA, 21 nt, Human
guauuuaauuagugcuaagug

SEQ ID NO: 3535150 - RNA, 16 nt, Human
guauuuaauucauguu

SEQ ID NO: 3535151 - RNA, 16 nt, Human
guauuuaauuguaaac

SEQ ID NO: 3535152 - RNA, 17 nt, Human
guauuuaauuguaaacu

SEQ ID NO: 3535153 - RNA, 13 nt, Human
guauuuaauuuug

SEQ ID NO: 3535154 - RNA, 15 nt, Human
guauuuaccaaaaau

SEQ ID NO: 3535155 - RNA, 16 nt, Human
guauuuacgcuuugau

SEQ ID NO: 3535156 - RNA, 17 nt, Human
guauuuacgcuuugauu

SEQ ID NO: 3535157 - RNA, 14 nt, Human
guauuuagaagcca

SEQ ID NO: 3535158 - RNA, 15 nt, Human
guauuuauauauuua

SEQ ID NO: 3535159 - RNA, 18 nt, Human
guauuuaucuauuguaag

SEQ ID NO: 3535160 - RNA, 13 nt, Human
guauuuaucuuua

SEQ ID NO: 3535161 - RNA, 19 nt, Human
guauuuauguaaugaagua

SEQ ID NO: 3535162 - RNA, 22 nt, Human
guauuuauuccauauucaugua

SEQ ID NO: 3535163 - RNA, 12 nt, Human
guauuuauucuu

SEQ ID NO: 3535164 - RNA, 23 nt, Human
guauuuauuuuccuccccagcag

SEQ ID NO: 3535165 - RNA, 12 nt, Human
guauuuauuuug

SEQ ID NO: 3535166 - RNA, 12 nt, Human
guauuucccagc

SEQ ID NO: 3535167 - RNA, 17 nt, Human
guauuucuaugaaauau

SEQ ID NO: 3535168 - RNA, 22 nt, Human
guauuucuaugaaauauuaugu

SEQ ID NO: 3535169 - RNA, 15 nt, Human
guauuugaaaacaga

SEQ ID NO: 3535170 - RNA, 16 nt, Human
guauuugaaaacagaa

SEQ ID NO: 3535171 - RNA, 15 nt, Human
guauuugaaucagcc

SEQ ID NO: 3535172 - RNA, 12 nt, Human
guauuugcuaau

SEQ ID NO: 3535173 - RNA, 12 nt, Human
guauuugcuuuu

SEQ ID NO: 3535174 - RNA, 19 nt, Human
guauuuggaaauaaaguca

SEQ ID NO: 3535175 - RNA, 15 nt, Human
guauuugggaaacuu

SEQ ID NO: 3535176 - RNA, 20 nt, Human
guauuugggaagugaagacu

SEQ ID NO: 3535177 - RNA, 14 nt, Human
guauuuguuaaugg

SEQ ID NO: 3535178 - RNA, 15 nt, Human
guauuuguucauguu

SEQ ID NO: 3535179 - RNA, 18 nt, Human
guauuuguucauguuugg

SEQ ID NO: 3535180 - RNA, 22 nt, Human
guauuuguucauguuuggugca

SEQ ID NO: 3535181 - RNA, 23 nt, Human
guauuuguuugcauaggugaucu

SEQ ID NO: 3535182 - RNA, 15 nt, Human
guauuuuaaaagcca

SEQ ID NO: 3535183 - RNA, 19 nt, Human
guauuuuagugaacuugaa

SEQ ID NO: 3535184 - RNA, 18 nt, Human
guauuuuauaaaauuaaa

SEQ ID NO: 3535185 - RNA, 13 nt, Human
guauuuuauguua

SEQ ID NO: 3535186 - RNA, 17 nt, Human
guauuuuauguuauaua

SEQ ID NO: 3535187 - RNA, 10 nt, Human
guauuuuauu

SEQ ID NO: 3535188 - RNA, 14 nt, Human
guauuuucauacaa

SEQ ID NO: 3535189 - RNA, 15 nt, Human
guauuuucaugaaaa

SEQ ID NO: 3535190 - RNA, 17 nt, Human
guauuuuccaagugugc

SEQ ID NO: 3535191 - RNA, 11 nt, Human
guauuuuccug

SEQ ID NO: 3535192 - RNA, 22 nt, Human
guauuuucuccaaauguucacu

SEQ ID NO: 3535193 - RNA, 15 nt, Human
guauuuucuucucug

SEQ ID NO: 3535194 - RNA, 13 nt, Human
guauuuucuuucu

SEQ ID NO: 3535195 - RNA, 13 nt, Human
guauuuugaaauu

SEQ ID NO: 3535196 - RNA, 13 nt, Human
guauuuugaaguu

SEQ ID NO: 3535197 - RNA, 19 nt, Human
guauuuugaaguuuacauu

SEQ ID NO: 3535198 - RNA, 20 nt, Human
guauuuugaaguuuacauuu

SEQ ID NO: 3535199 - RNA, 18 nt, Human
guauuuuguauuguuuca

SEQ ID NO: 3535200 - RNA, 21 nt, Human
guauuuugugaguuuguuucu

SEQ ID NO: 3535201 - RNA, 15 nt, Human
guauuuuguguccuc

SEQ ID NO: 3535202 - RNA, 21 nt, Human
guauuuuuagaauaagaauuu

SEQ ID NO: 3535203 - RNA, 14 nt, Human
guauuuuuauauaa

SEQ ID NO: 3535204 - RNA, 17 nt, Human
guauuuuucagagauuu

SEQ ID NO: 3535205 - RNA, 17 nt, Human
guauuuuucuguuagcu

SEQ ID NO: 3535206 - RNA, 15 nt, Human
guauuuuuucuugca

SEQ ID NO: 3535207 - RNA, 20 nt, Human
guauuuuuucuugcauugac

SEQ ID NO: 3535208 - RNA, 15 nt, Human
guauuuuuuuacuaa

SEQ ID NO: 3535209 - RNA, 21 nt, Human
guauuuuuuuacuaauagaca

SEQ ID NO: 3535210 - RNA, 14 nt, Human
guauuuuuuugcaa

SEQ ID NO: 3535211 - RNA, 16 nt, Human
guauuuuuuugcaagu

SEQ ID NO: 3535212 - RNA, 22 nt, Human
guauuuuuuuuucuaagagaag

SEQ ID NO: 3535213 - RNA, 14 nt, Human
gucaaaaauuaaac

SEQ ID NO: 3535214 - RNA, 12 nt, Human
gucaaaacacug

SEQ ID NO: 3535215 - RNA, 21 nt, Human
gucaaaacacuguggaacuaa

SEQ ID NO: 3535216 - RNA, 14 nt, Human
gucaaaacacuugu

SEQ ID NO: 3535217 - RNA, 13 nt, Human
gucaaaacagauu

SEQ ID NO: 3535218 - RNA, 14 nt, Human
gucaaaaggugccu

SEQ ID NO: 3535219 - RNA, 16 nt, Human
gucaaaaggugccugu

SEQ ID NO: 3535220 - RNA, 16 nt, Human
gucaaaaguagaacuu

SEQ ID NO: 3535221 - RNA, 19 nt, Human
gucaaaaguuggacuaaau

SEQ ID NO: 3535222 - RNA, 17 nt, Human
gucaaaauuguuuaaaa

SEQ ID NO: 3535223 - RNA, 15 nt, Human
gucaaacaaagccag

SEQ ID NO: 3535224 - RNA, 17 nt, Human
gucaaacgugaaaaugc

SEQ ID NO: 3535225 - RNA, 16 nt, Human
gucaaacuguagaaau

SEQ ID NO: 3535226 - RNA, 17 nt, Human
gucaaacuuggauacuu

SEQ ID NO: 3535227 - RNA, 15 nt, Human
gucaaaguugaaaau

SEQ ID NO: 3535228 - RNA, 12 nt, Human
gucaaauaaaca

SEQ ID NO: 3535229 - RNA, 17 nt, Human
gucaaaugaugugcaaa

SEQ ID NO: 3535230 - RNA, 16 nt, Human
gucaaauugugugaaa

SEQ ID NO: 3535231 - RNA, 12 nt, Human
gucaacaaaucu

SEQ ID NO: 3535232 - RNA, 14 nt, Human
gucaacagaaugaa

SEQ ID NO: 3535233 - RNA, 17 nt, Human
gucaacagaaugaaaaa

SEQ ID NO: 3535234 - RNA, 13 nt, Human
gucaacaguaaac

SEQ ID NO: 3535235 - RNA, 14 nt, Human
gucaacaguaaacc

SEQ ID NO: 3535236 - RNA, 14 nt, Human
gucaacaguuuucc

SEQ ID NO: 3535237 - RNA, 12 nt, Human
gucaacauugug

SEQ ID NO: 3535238 - RNA, 13 nt, Human
gucaacauuucuc

SEQ ID NO: 3535239 - RNA, 14 nt, Human
gucaaccagacaga

SEQ ID NO: 3535240 - RNA, 17 nt, Human
gucaacccucaggggaa

SEQ ID NO: 3535241 - RNA, 14 nt, Human
gucaaccuccugga

SEQ ID NO: 3535242 - RNA, 19 nt, Human
gucaacucauauuuucaug

SEQ ID NO: 3535243 - RNA, 17 nt, Human
gucaacuucaacauuua

SEQ ID NO: 3535244 - RNA, 13 nt, Human
gucaacuuuaugc

SEQ ID NO: 3535245 - RNA, 18 nt, Human
gucaagaaacagccagca

SEQ ID NO: 3535246 - RNA, 19 nt, Human
gucaagagggucugaggaa

SEQ ID NO: 3535247 - RNA, 17 nt, Human
gucaagaguaguuauau

SEQ ID NO: 3535248 - RNA, 15 nt, Human
gucaagauucagcua

SEQ ID NO: 3535249 - RNA, 11 nt, Human
gucaagcacuc

SEQ ID NO: 3535250 - RNA, 18 nt, Human
gucaagccauuuuuacau

SEQ ID NO: 3535251 - RNA, 13 nt, Human
gucaagcuccucc

SEQ ID NO: 3535252 - RNA, 15 nt, Human
gucaagcuccuccuc

SEQ ID NO: 3535253 - RNA, 22 nt, Human
gucaagcugaguauuaaaaugu

SEQ ID NO: 3535254 - RNA, 12 nt, Human
gucaagcugcuc

SEQ ID NO: 3535255 - RNA, 22 nt, Human
gucaagcugcucugagccacag

SEQ ID NO: 3535256 - RNA, 15 nt, Human
gucaaggaguggcuu

SEQ ID NO: 3535257 - RNA, 13 nt, Human
gucaaggccagca

SEQ ID NO: 3535258 - RNA, 15 nt, Human
gucaaggccugcucc

SEQ ID NO: 3535259 - RNA, 12 nt, Human
gucaaggccugu

SEQ ID NO: 3535260 - RNA, 14 nt, Human
gucaaggcuuagac

SEQ ID NO: 3535261 - RNA, 16 nt, Human
gucaaggcuuagaccc

SEQ ID NO: 3535262 - RNA, 18 nt, Human
gucaaggcuuagacccuc

SEQ ID NO: 3535263 - RNA, 14 nt, Human
gucaaguaagaaga

SEQ ID NO: 3535264 - RNA, 13 nt, Human
gucaagucaacca

SEQ ID NO: 3535265 - RNA, 17 nt, Human
gucaagucucugcuggc

SEQ ID NO: 3535266 - RNA, 22 nt, Human
guccuaaccucgggccugcugc

SEQ ID NO: 3535267 - RNA, 14 nt, Human
guccuaagaaagag

SEQ ID NO: 3535268 - RNA, 20 nt, Human
guccuaagugcuaagugcuu

SEQ ID NO: 3535269 - RNA, 13 nt, Human
guccuaaugguga

SEQ ID NO: 3535270 - RNA, 19 nt, Human
guccuaauucuucuguccu

SEQ ID NO: 3535271 - RNA, 15 nt, Human
guccuacagaaaaac

SEQ ID NO: 3535272 - RNA, 16 nt, Human
guccuacccacccucc

SEQ ID NO: 3535273 - RNA, 15 nt, Human
guccuacucuguguc

SEQ ID NO: 3535274 - RNA, 19 nt, Human
guccuagaggcccuuugcu

SEQ ID NO: 3535275 - RNA, 22 nt, Human
guccuagaggcccuuugcuguc

SEQ ID NO: 3535276 - RNA, 20 nt, Human
guccuagcugcacagggcag

SEQ ID NO: 3535277 - RNA, 19 nt, Human
guccuaggaguauccucau

SEQ ID NO: 3535278 - RNA, 17 nt, Human
guccuaggcuggaagga

SEQ ID NO: 3535279 - RNA, 15 nt, Human
guccuaucugggcuu

SEQ ID NO: 3535280 - RNA, 20 nt, Human
guccuaucugggcuuccugg

SEQ ID NO: 3535281 - RNA, 21 nt, Human
guccuaucugggcuuccugga

SEQ ID NO: 3535282 - RNA, 22 nt, Human
guccuaucugggcuuccuggag

SEQ ID NO: 3535283 - RNA, 20 nt, Human
guccuaugcaauaaaauuau

SEQ ID NO: 3535284 - RNA, 15 nt, Human
guccuauggccucau

SEQ ID NO: 3535285 - RNA, 22 nt, Human
guccuauuaguguuauaugaac

SEQ ID NO: 3535286 - RNA, 19 nt, Human
guccucaaggggccauccu

SEQ ID NO: 3535287 - RNA, 13 nt, Human
guccucaccacau

SEQ ID NO: 3535288 - RNA, 15 nt, Human
guccucaccccuguc

SEQ ID NO: 3535289 - RNA, 22 nt, Human
guccucaccccuguccucacug

SEQ ID NO: 3535290 - RNA, 18 nt, Human
guccucacugcucccuga

SEQ ID NO: 3535291 - RNA, 20 nt, Human
guccucacugcucccugaag

SEQ ID NO: 3535292 - RNA, 17 nt, Human
guccucagguggccaug

SEQ ID NO: 3535293 - RNA, 23 nt, Human
guccucagguggccaugccucag

SEQ ID NO: 3535294 - RNA, 15 nt, Human
guccucaguccauuu

SEQ ID NO: 3535295 - RNA, 16 nt, Human
guccucaguccauuua

SEQ ID NO: 3535296 - RNA, 15 nt, Human
guccucauuucucca

SEQ ID NO: 3535297 - RNA, 21 nt, Human
guccuccaacaccaagcacag

SEQ ID NO: 3535298 - RNA, 14 nt, Human
guccuccacaauaa

SEQ ID NO: 3535299 - RNA, 20 nt, Human
guccuccagaacucuuccuc

SEQ ID NO: 3535300 - RNA, 14 nt, Human
guccuccagaagcc

SEQ ID NO: 3535301 - RNA, 18 nt, Human
guccuccagaagccucug

SEQ ID NO: 3535302 - RNA, 21 nt, Human
guccuccagaagccucuggcu

SEQ ID NO: 3535303 - RNA, 22 nt, Human
guccuccagaagccucuggcua

SEQ ID NO: 3535304 - RNA, 15 nt, Human
guccuccaggagcuu

SEQ ID NO: 3535305 - RNA, 21 nt, Human
guccucccaauuucagacucc

SEQ ID NO: 3535306 - RNA, 17 nt, Human
guccucccauccccugg

SEQ ID NO: 3535307 - RNA, 17 nt, Human
guccucccccugccagu

SEQ ID NO: 3535308 - RNA, 22 nt, Human
guccucccccugccagugccuu

SEQ ID NO: 3535309 - RNA, 11 nt, Human
guccuccccuc

SEQ ID NO: 3535310 - RNA, 12 nt, Human
guccuccccuca

SEQ ID NO: 3535311 - RNA, 16 nt, Human
guccuccccucacagc

SEQ ID NO: 3535312 - RNA, 17 nt, Human
guccuccccucacagcc

SEQ ID NO: 3535313 - RNA, 18 nt, Human
guccuccccucacagccu

SEQ ID NO: 3535314 - RNA, 14 nt, Human
guccuccccucucu

SEQ ID NO: 3535315 - RNA, 13 nt, Human
guccuccccuugg

SEQ ID NO: 3535316 - RNA, 14 nt, Human
guccuccccuuggg

SEQ ID NO: 3535317 - RNA, 15 nt, Human
guccuccccuugggc

SEQ ID NO: 3535318 - RNA, 18 nt, Human
guccuccccuugggcggc

SEQ ID NO: 3535319 - RNA, 21 nt, Human
guccucccgggcccucccuug

SEQ ID NO: 3535320 - RNA, 22 nt, Human
guccucccgggcccucccuugg

SEQ ID NO: 3535321 - RNA, 12 nt, Human
guccucccugac

SEQ ID NO: 3535322 - RNA, 15 nt, Human
guccuccucaccuca

SEQ ID NO: 3535323 - RNA, 14 nt, Human
guccuccuccaggg

SEQ ID NO: 3535324 - RNA, 18 nt, Human
guccuccuccagggacag

SEQ ID NO: 3535325 - RNA, 21 nt, Human
guccuccucggaucaccgaga

SEQ ID NO: 3535326 - RNA, 13 nt, Human
guccuccucugug

SEQ ID NO: 3535327 - RNA, 15 nt, Human
guccuccugcugcca

SEQ ID NO: 3535328 - RNA, 16 nt, Human
guccuccugcugccag

SEQ ID NO: 3535329 - RNA, 22 nt, Human
guccucgaugggagggauggcc

SEQ ID NO: 3535330 - RNA, 14 nt, Human
guccucguuugugu

SEQ ID NO: 3535331 - RNA, 12 nt, Human
guccucuccacc

SEQ ID NO: 3535332 - RNA, 18 nt, Human
guccucuccccuccagcc

SEQ ID NO: 3535333 - RNA, 21 nt, Human
guccucuccccuccagccuuu

SEQ ID NO: 3535334 - RNA, 19 nt, Human
guccucugagacuccagac

SEQ ID NO: 3535335 - RNA, 13 nt, Human
guccucuggagcc

SEQ ID NO: 3535336 - RNA, 11 nt, Human
guccucuggau

SEQ ID NO: 3535337 - RNA, 14 nt, Human
guccucuugccucc

SEQ ID NO: 3535338 - RNA, 18 nt, Human
guccucuuucagcuccug

SEQ ID NO: 3535339 - RNA, 20 nt, Human
guccucuuucagcuccugac

SEQ ID NO: 3535340 - RNA, 14 nt, Human
guccucuuuucuga

SEQ ID NO: 3535341 - RNA, 16 nt, Human
guccugaagaggcggg

SEQ ID NO: 3535342 - RNA, 21 nt, Human
guccugaagaggcgggccagc

SEQ ID NO: 3535343 - RNA, 19 nt, Human
guccugaaggccugagguu

SEQ ID NO: 3535344 - RNA, 13 nt, Human
guccugaccaccc

SEQ ID NO: 3535345 - RNA, 13 nt, Human
guccugacucaac

SEQ ID NO: 3535346 - RNA, 23 nt, Human
guccugacuucaggggcugcccg

SEQ ID NO: 3535347 - RNA, 21 nt, Human
guccugagcacugccaggagg

SEQ ID NO: 3535348 - RNA, 14 nt, Human
guccugagcucagc

SEQ ID NO: 3535349 - RNA, 21 nt, Human
guccugaggguccccaccugg

SEQ ID NO: 3535350 - RNA, 19 nt, Human
guccugcaccggggccugg

SEQ ID NO: 3535351 - RNA, 21 nt, Human
guccugcagcaaacacuccac

SEQ ID NO: 3535352 - RNA, 14 nt, Human
guccugcagccugc

SEQ ID NO: 3535353 - RNA, 17 nt, Human
guccugccacccagccc

SEQ ID NO: 3535354 - RNA, 16 nt, Human
guccugccaccugggg

SEQ ID NO: 3535355 - RNA, 17 nt, Human
guccugccugcaauauu

SEQ ID NO: 3535356 - RNA, 15 nt, Human
guccugccuggccag

SEQ ID NO: 3535357 - RNA, 21 nt, Human
gagcaguuucuguccugcugg

SEQ ID NO: 3535358 - RNA, 22 nt, Human
gagcaguuucuguccugcuggu

SEQ ID NO: 3535359 - RNA, 21 nt, Human
gagcauaauaaauggaugagg

SEQ ID NO: 3535360 - RNA, 12 nt, Human
gagcauaauuua

SEQ ID NO: 3535361 - RNA, 17 nt, Human
gagcauaauuuaaaaau

SEQ ID NO: 3535362 - RNA, 22 nt, Human
gagcauaguccaaaaagcuccu

SEQ ID NO: 3535363 - RNA, 13 nt, Human
gagcaucaggcca

SEQ ID NO: 3535364 - RNA, 14 nt, Human
gagcaucaggccag

SEQ ID NO: 3535365 - RNA, 20 nt, Human
gagcaucaggccaggcccuc

SEQ ID NO: 3535366 - RNA, 21 nt, Human
gagcaucaugccucugaggcc

SEQ ID NO: 3535367 - RNA, 19 nt, Human
gagcaucccggaggaaauc

SEQ ID NO: 3535368 - RNA, 18 nt, Human
gagcaucucuugaggcca

SEQ ID NO: 3535369 - RNA, 20 nt, Human
gagcaucucuugaggccagg

SEQ ID NO: 3535370 - RNA, 23 nt, Human
gagcaucucuugaggccaggagu

SEQ ID NO: 3535371 - RNA, 17 nt, Human
gagcaugaaauuuuuaa

SEQ ID NO: 3535372 - RNA, 14 nt, Human
gagcaugagaggag

SEQ ID NO: 3535373 - RNA, 17 nt, Human
gagcaugagaggaggca

SEQ ID NO: 3535374 - RNA, 13 nt, Human
gagcaugccugga

SEQ ID NO: 3535375 - RNA, 21 nt, Human
gagcaugccuggauggggcug

SEQ ID NO: 3535376 - RNA, 22 nt, Human
gagcaugccuggauggggcugc

SEQ ID NO: 3535377 - RNA, 19 nt, Human
gagcauggaacacuucgag

SEQ ID NO: 3535378 - RNA, 19 nt, Human
gagcauggcugugaggaug

SEQ ID NO: 3535379 - RNA, 21 nt, Human
gagcauggcugugaggauggg

SEQ ID NO: 3535380 - RNA, 22 nt, Human
gagcauguuuagacuuuaacau

SEQ ID NO: 3535381 - RNA, 17 nt, Human
gagcauguuuuguauac

SEQ ID NO: 3535382 - RNA, 18 nt, Human
gagcauguuuuguauaca

SEQ ID NO: 3535383 - RNA, 17 nt, Human
gagcauuacgugagcca

SEQ ID NO: 3535384 - RNA, 20 nt, Human
gagcauuacgugagccaggu

SEQ ID NO: 3535385 - RNA, 21 nt, Human
gagcauuauaaucaccagggc

SEQ ID NO: 3535386 - RNA, 24 nt, Human
gagcauuccagucaggcucucugg

SEQ ID NO: 3535387 - RNA, 19 nt, Human
gagcauuguggcugucagc

SEQ ID NO: 3535388 - RNA, 23 nt, Human
gagcauuuccaacaccacagaca

SEQ ID NO: 3535389 - RNA, 14 nt, Human
gagccaacugcugc

SEQ ID NO: 3535390 - RNA, 16 nt, Human
gagccaagggauggac

SEQ ID NO: 3535391 - RNA, 17 nt, Human
gagccaagggauggaca

SEQ ID NO: 3535392 - RNA, 23 nt, Human
gagccaaggguucagagacucag

SEQ ID NO: 3535393 - RNA, 14 nt, Human
gagccaauggagac

SEQ ID NO: 3535394 - RNA, 20 nt, Human
gagccaauguuuuccaccca

SEQ ID NO: 3535395 - RNA, 13 nt, Human
gagccacaaaaga

SEQ ID NO: 3535396 - RNA, 19 nt, Human
gagccaccaugcccagcuc

SEQ ID NO: 3535397 - RNA, 14 nt, Human
gagccaccgugccu

SEQ ID NO: 3535398 - RNA, 20 nt, Human
gagccaccgugccuggccac

SEQ ID NO: 3535399 - RNA, 13 nt, Human
gagccaccugccc

SEQ ID NO: 3535400 - RNA, 14 nt, Human
gagccacuaacuag

SEQ ID NO: 3535401 - RNA, 15 nt, Human
gagccacuccggccc

SEQ ID NO: 3535402 - RNA, 13 nt, Human
gagccacugcacc

SEQ ID NO: 3535403 - RNA, 16 nt, Human
gagccagaaccuggag

SEQ ID NO: 3535404 - RNA, 21 nt, Human
gagccagaaccuggagggcua

SEQ ID NO: 3535405 - RNA, 15 nt, Human
gagccagagaaguga

SEQ ID NO: 3535406 - RNA, 19 nt, Human
gagccagagaagugacagg

SEQ ID NO: 3535407 - RNA, 15 nt, Human
gagccagauuucacu

SEQ ID NO: 3535408 - RNA, 18 nt, Human
gagccagauuucacucuc

SEQ ID NO: 3535409 - RNA, 23 nt, Human
gagccagauuucacucuccuugg

SEQ ID NO: 3535410 - RNA, 22 nt, Human
guccugucagugccgccgccuc

SEQ ID NO: 3535411 - RNA, 19 nt, Human
guccugucaucaucauggc

SEQ ID NO: 3535412 - RNA, 20 nt, Human
guccugucaucaucauggcc

SEQ ID NO: 3535413 - RNA, 21 nt, Human
guccugucaucaucauggcca

SEQ ID NO: 3535414 - RNA, 16 nt, Human
guccugucuccccucu

SEQ ID NO: 3535415 - RNA, 17 nt, Human
guccugucuccccucug

SEQ ID NO: 3535416 - RNA, 19 nt, Human
guccugugaaugccacugc

SEQ ID NO: 3535417 - RNA, 15 nt, Human
guccugugaucuuau

SEQ ID NO: 3535418 - RNA, 20 nt, Human
guccugugaucuuauuuuuc

SEQ ID NO: 3535419 - RNA, 22 nt, Human
guccugugaucuuauuuuucua

SEQ ID NO: 3535420 - RNA, 16 nt, Human
guccuguggcaggcag

SEQ ID NO: 3535421 - RNA, 17 nt, Human
guccugugucaguuuau

SEQ ID NO: 3535422 - RNA, 18 nt, Human
guccuuaccagcagagca

SEQ ID NO: 3535423 - RNA, 19 nt, Human
guccuuaccagcagagcac

SEQ ID NO: 3535424 - RNA, 13 nt, Human
guccuuacuccug

SEQ ID NO: 3535425 - RNA, 23 nt, Human
guccuuacuccugugggagccuc

SEQ ID NO: 3535426 - RNA, 15 nt, Human
guccuuagaacauuu

SEQ ID NO: 3535427 - RNA, 23 nt, Human
guccuuagccuggaccucugaca

SEQ ID NO: 3535428 - RNA, 16 nt, Human
guccuuaucuagcugc

SEQ ID NO: 3535429 - RNA, 15 nt, Human
guccuucaccucacu

SEQ ID NO: 3535430 - RNA, 22 nt, Human
guccuuccaggcccccaccacu

SEQ ID NO: 3535431 - RNA, 18 nt, Human
guccuucucucaccuccu

SEQ ID NO: 3535432 - RNA, 11 nt, Human
guccuugaaaa

SEQ ID NO: 3535433 - RNA, 19 nt, Human
guccuugcaccccucacuc

SEQ ID NO: 3535434 - RNA, 15 nt, Human
guccuugcaccugca

SEQ ID NO: 3535435 - RNA, 12 nt, Human
guccuugcccuu

SEQ ID NO: 3535436 - RNA, 14 nt, Human
guccuugcuuggcu

SEQ ID NO: 3535437 - RNA, 20 nt, Human
guccuuggcaggcugauuuc

SEQ ID NO: 3535438 - RNA, 23 nt, Human
guccuuggcccccuuucccgggc

SEQ ID NO: 3535439 - RNA, 18 nt, Human
guccuuggggacaucuca

SEQ ID NO: 3535440 - RNA, 18 nt, Human
guccuuuccaaggcuucu

SEQ ID NO: 3535441 - RNA, 22 nt, Human
guccuuuccaguggccuggcuc

SEQ ID NO: 3535442 - RNA, 15 nt, Human
guccuuuucagaagu

SEQ ID NO: 3535443 - RNA, 22 nt, Human
guccuuuucagaagugagcuuu

SEQ ID NO: 3535444 - RNA, 21 nt, Human
guccuuuucauaggucugaaa

SEQ ID NO: 3535445 - RNA, 13 nt, Human
guccuuuuguaaa

SEQ ID NO: 3535446 - RNA, 22 nt, Human
guccuuuuguaccaugguguga

SEQ ID NO: 3535447 - RNA, 16 nt, Human
gucgaauuuuuauuau

SEQ ID NO: 3535448 - RNA, 22 nt, Human
gucgagaaagaggcaccaggaa

SEQ ID NO: 3535449 - RNA, 15 nt, Human
gucgaggaguaacaa

SEQ ID NO: 3535450 - RNA, 12 nt, Human
gucgaggcagga

SEQ ID NO: 3535451 - RNA, 16 nt, Human
gucgaggggcucucag

SEQ ID NO: 3535452 - RNA, 15 nt, Human
gucgagucaaaaugu

SEQ ID NO: 3535453 - RNA, 20 nt, Human
gucgcaauuacuaagaagca

SEQ ID NO: 3535454 - RNA, 15 nt, Human
gucgcagcgcaggac

SEQ ID NO: 3535455 - RNA, 19 nt, Human
gucgccaccuggcauuccu

SEQ ID NO: 3535456 - RNA, 23 nt, Human
gucgcccagucuggaaugcagug

SEQ ID NO: 3535457 - RNA, 20 nt, Human
gucgcccaugcuggagugca

SEQ ID NO: 3535458 - RNA, 15 nt, Human
gucgcccucccaggc

SEQ ID NO: 3535459 - RNA, 12 nt, Human
gucgccucugca

SEQ ID NO: 3535460 - RNA, 17 nt, Human
gucgccuuagcauguuu

SEQ ID NO: 3535461 - RNA, 20 nt, Human
gucgccuuucagcaggcagc

SEQ ID NO: 3535462 - RNA, 16 nt, Human
gucgcugugccacagg

SEQ ID NO: 3535463 - RNA, 17 nt, Human
gucggaggcuugggacc

SEQ ID NO: 3535464 - RNA, 15 nt, Human
gucggccccaccagu

SEQ ID NO: 3535465 - RNA, 22 nt, Human
gucggccccaccagugccucuc

SEQ ID NO: 3535466 - RNA, 23 nt, Human
gucgggcccuucuugcugcccug

SEQ ID NO: 3535467 - RNA, 18 nt, Human
gucgggggcugaggggca

SEQ ID NO: 3535468 - RNA, 15 nt, Human
gucgguccuggugcc

SEQ ID NO: 3535469 - RNA, 17 nt, Human
gucguccuuacuccugu

SEQ ID NO: 3535470 - RNA, 21 nt, Human
gucgugccuccuuccaccucc

SEQ ID NO: 3535471 - RNA, 15 nt, Human
gucgugccugugucc

SEQ ID NO: 3535472 - RNA, 23 nt, Human
gucguggacacacacagacuauu

SEQ ID NO: 3535473 - RNA, 21 nt, Human
gucguggggugugcugggagc

SEQ ID NO: 3535474 - RNA, 14 nt, Human
gucgugggugugug

SEQ ID NO: 3535475 - RNA, 19 nt, Human
gucguugacuuuagggacu

SEQ ID NO: 3535476 - RNA, 14 nt, Human
gucuaaaacaauaa

SEQ ID NO: 3535477 - RNA, 22 nt, Human
gucuaaagauggaguuucuaag

SEQ ID NO: 3535478 - RNA, 11 nt, Human
gucuaaaguuu

SEQ ID NO: 3535479 - RNA, 16 nt, Human
gucuaaaguuuacagu

SEQ ID NO: 3535480 - RNA, 13 nt, Human
gucuaaauauuuc

SEQ ID NO: 3535481 - RNA, 16 nt, Human
gucuaaauauuuccuu

SEQ ID NO: 3535482 - RNA, 13 nt, Human
gucuaaauuugaa

SEQ ID NO: 3535483 - RNA, 16 nt, Human
gucuaaccaaaugcau

SEQ ID NO: 3535484 - RNA, 14 nt, Human
gucuaacuuuugug

SEQ ID NO: 3535485 - RNA, 15 nt, Human
gucuaagaaacauug

SEQ ID NO: 3535486 - RNA, 18 nt, Human
gucuaagaaacauuggaa

SEQ ID NO: 3535487 - RNA, 17 nt, Human
gucuacacuaagagaga

SEQ ID NO: 3535488 - RNA, 13 nt, Human
gucuacagcuccc

SEQ ID NO: 3535489 - RNA, 13 nt, Human
gucuacccagaga

SEQ ID NO: 3535490 - RNA, 14 nt, Human
gucuacccugggau

SEQ ID NO: 3535491 - RNA, 17 nt, Human
gucuagaaguuguuugu

SEQ ID NO: 3535492 - RNA, 16 nt, Human
gucuagacuaaaagau

SEQ ID NO: 3535493 - RNA, 16 nt, Human
gucuagauggcuccuc

SEQ ID NO: 3535494 - RNA, 22 nt, Human
gucuagauucaaagguucuagg

SEQ ID NO: 3535495 - RNA, 14 nt, Human
gucuaggacacagu

SEQ ID NO: 3535496 - RNA, 21 nt, Human
gucuaggagcugggaggaaaa

SEQ ID NO: 3535497 - RNA, 16 nt, Human
gucuagggagagaccc

SEQ ID NO: 3535498 - RNA, 18 nt, Human
gucuagucucuccuguaa

SEQ ID NO: 3535499 - RNA, 17 nt, Human
gucuauaaaagaaacac

SEQ ID NO: 3535500 - RNA, 20 nt, Human
gucuauaaagcauuuaaccc

SEQ ID NO: 3535501 - RNA, 21 nt, Human
gucuauaaucccagcacuuug

SEQ ID NO: 3535502 - RNA, 16 nt, Human
gucuauaccuuaagaa

SEQ ID NO: 3535503 - RNA, 22 nt, Human
gucuaucaaccccagacacugg

SEQ ID NO: 3535504 - RNA, 18 nt, Human
gucuaucaagucaaucau

SEQ ID NO: 3535505 - RNA, 14 nt, Human
gucuaugggacuca

SEQ ID NO: 3535506 - RNA, 22 nt, Human
gucuauguuccgaauugagcac

SEQ ID NO: 3535507 - RNA, 14 nt, Human
gucuauuccagcuc

SEQ ID NO: 3535508 - RNA, 15 nt, Human
gucuauuccagcuca

SEQ ID NO: 3535509 - RNA, 11 nt, Human
gucuauugucu

SEQ ID NO: 3535510 - RNA, 23 nt, Human
gucuauuuaaaaaaaaagucaga

SEQ ID NO: 3535511 - RNA, 17 nt, Human
gucuauuucaucagaac

SEQ ID NO: 3535512 - RNA, 15 nt, Human
gucuauuuuaaaaua

SEQ ID NO: 3535513 - RNA, 16 nt, Human
gucuauuuuaaaauaa

SEQ ID NO: 3535514 - RNA, 14 nt, Human
gucucaaaaaaaca

SEQ ID NO: 3535515 - RNA, 14 nt, Human
gagccgcuggcaga

SEQ ID NO: 3535516 - RNA, 20 nt, Human
gagccgcugugagccccugg

SEQ ID NO: 3535517 - RNA, 16 nt, Human
gagccggccccaggcu

SEQ ID NO: 3535518 - RNA, 13 nt, Human
gagccgggccugg

SEQ ID NO: 3535519 - RNA, 20 nt, Human
gagccgggccuggggcuccu

SEQ ID NO: 3535520 - RNA, 19 nt, Human
gagccgggccuugucgcag

SEQ ID NO: 3535521 - RNA, 18 nt, Human
gagccgguaacuguccug

SEQ ID NO: 3535522 - RNA, 19 nt, Human
gagccguggucccugagga

SEQ ID NO: 3535523 - RNA, 15 nt, Human
gagccuacccacccc

SEQ ID NO: 3535524 - RNA, 17 nt, Human
gagccuacccaccccca

SEQ ID NO: 3535525 - RNA, 15 nt, Human
gagccuaggaccacu

SEQ ID NO: 3535526 - RNA, 19 nt, Human
gagccuaggaccacucagc

SEQ ID NO: 3535527 - RNA, 17 nt, Human
gagccuaggccaggugc

SEQ ID NO: 3535528 - RNA, 21 nt, Human
gagccuaguuuuuaauagcua

SEQ ID NO: 3535529 - RNA, 23 nt, Human
gagccucacuggggcagacaaua

SEQ ID NO: 3535530 - RNA, 13 nt, Human
gagccucagcauc

SEQ ID NO: 3535531 - RNA, 14 nt, Human
gagccucagcaucc

SEQ ID NO: 3535532 - RNA, 19 nt, Human
gagccucagcauccuggca

SEQ ID NO: 3535533 - RNA, 21 nt, Human
gagccucagcauccuggcacc

SEQ ID NO: 3535534 - RNA, 21 nt, Human
gagccucccaaggagaacaaa

SEQ ID NO: 3535535 - RNA, 20 nt, Human
gagccucccucaauuccccc

SEQ ID NO: 3535536 - RNA, 15 nt, Human
gagccucccugccuc

SEQ ID NO: 3535537 - RNA, 22 nt, Human
gagccuccucucucaaacuggg

SEQ ID NO: 3535538 - RNA, 17 nt, Human
gagccuccugcccaguc

SEQ ID NO: 3535539 - RNA, 22 nt, Human
gagccuccugcccuuaccugcc

SEQ ID NO: 3535540 - RNA, 18 nt, Human
gagccuccuuucuggcuu

SEQ ID NO: 3535541 - RNA, 23 nt, Human
gagccucgcaacccgugccaagu

SEQ ID NO: 3535542 - RNA, 16 nt, Human
gagccucugcucccca

SEQ ID NO: 3535543 - RNA, 13 nt, Human
gagccucugucac

SEQ ID NO: 3535544 - RNA, 19 nt, Human
gagccugacagccagaacu

SEQ ID NO: 3535545 - RNA, 10 nt, Human
gagccugagg

SEQ ID NO: 3535546 - RNA, 15 nt, Human
gagccugagggaucu

SEQ ID NO: 3535547 - RNA, 21 nt, Human
gagccugagucagggcccaga

SEQ ID NO: 3535548 - RNA, 14 nt, Human
gagccugaucaccu

SEQ ID NO: 3535549 - RNA, 22 nt, Human
gagccugcacggugaauggcuu

SEQ ID NO: 3535550 - RNA, 23 nt, Human
gagccugcacggugaauggcuuu

SEQ ID NO: 3535551 - RNA, 12 nt, Human
gagccugcagag

SEQ ID NO: 3535552 - RNA, 16 nt, Human
gagccugcagggaagc

SEQ ID NO: 3535553 - RNA, 23 nt, Human
gagccugcaggguggugcuggga

SEQ ID NO: 3535554 - RNA, 18 nt, Human
gugucuguaaaagagccu

SEQ ID NO: 3535555 - RNA, 12 nt, Human
gugucuguacac

SEQ ID NO: 3535556 - RNA, 13 nt, Human
gugucuguacacg

SEQ ID NO: 3535557 - RNA, 17 nt, Human
gugucuguacacguguc

SEQ ID NO: 3535558 - RNA, 14 nt, Human
gugucuguauuuau

SEQ ID NO: 3535559 - RNA, 12 nt, Human
gugucuuccaua

SEQ ID NO: 3535560 - RNA, 13 nt, Human
gugucuuccauaa

SEQ ID NO: 3535561 - RNA, 17 nt, Human
gugucuugcaauggcag

SEQ ID NO: 3535562 - RNA, 19 nt, Human
gugucuugcaauggcagcc

SEQ ID NO: 3535563 - RNA, 21 nt, Human
gugucuugcaauggcagccuu

SEQ ID NO: 3535564 - RNA, 17 nt, Human
gugucuuuccacuccuc

SEQ ID NO: 3535565 - RNA, 21 nt, Human
gugucuuucuuuggugccuuu

SEQ ID NO: 3535566 - RNA, 21 nt, Human
gugucuuuucuguagagcaua

SEQ ID NO: 3535567 - RNA, 15 nt, Human
gugucuuuugcauga

SEQ ID NO: 3535568 - RNA, 16 nt, Human
gugucuuuugcaugau

SEQ ID NO: 3535569 - RNA, 13 nt, Human
gugugaaaauggg

SEQ ID NO: 3535570 - RNA, 14 nt, Human
gugugaaacauacu

SEQ ID NO: 3535571 - RNA, 20 nt, Human
gugugaaacuuucauuccuu

SEQ ID NO: 3535572 - RNA, 12 nt, Human
gaggccagccug

SEQ ID NO: 3535573 - RNA, 13 nt, Human
gaggccagccugg

SEQ ID NO: 3535574 - RNA, 20 nt, Human
gaggccagccuggccuccug

SEQ ID NO: 3535575 - RNA, 13 nt, Human
gaggccagggcag

SEQ ID NO: 3535576 - RNA, 12 nt, Human
gaggccaucugg

SEQ ID NO: 3535577 - RNA, 16 nt, Human
gaggccaucuggagag

SEQ ID NO: 3535578 - RNA, 19 nt, Human
gaggccaucuggagagccc

SEQ ID NO: 3535579 - RNA, 20 nt, Human
gaggccaugauucgcccaaa

SEQ ID NO: 3535580 - RNA, 20 nt, Human
gaggccauggacucuguccu

SEQ ID NO: 3535581 - RNA, 21 nt, Human
gaggccaugggccuccugugu

SEQ ID NO: 3535582 - RNA, 14 nt, Human
gaggccaugugcau

SEQ ID NO: 3535583 - RNA, 13 nt, Human
gaggcccagaggg

SEQ ID NO: 3535584 - RNA, 15 nt, Human
gaggcccagagggcc

SEQ ID NO: 3535585 - RNA, 13 nt, Human
gaggcccaggcug

SEQ ID NO: 3535586 - RNA, 14 nt, Human
gaggcccaggcugc

SEQ ID NO: 3535587 - RNA, 15 nt, Human
gaggcccaggcugcc

SEQ ID NO: 3535588 - RNA, 17 nt, Human
gaggcccaggcugggaa

SEQ ID NO: 3535589 - RNA, 13 nt, Human
gaggcccagggag

SEQ ID NO: 3535590 - RNA, 20 nt, Human
gaggcccaguucacccugau

SEQ ID NO: 3535591 - RNA, 13 nt, Human
gaggccccagccg

SEQ ID NO: 3535592 - RNA, 22 nt, Human
gaggccccagccucccugaagc

SEQ ID NO: 3535593 - RNA, 19 nt, Human
gaggcccccagcccagggc

SEQ ID NO: 3535594 - RNA, 20 nt, Human
gaggcccgcaugcggcccag

SEQ ID NO: 3535595 - RNA, 12 nt, Human
gaggcccuccac

SEQ ID NO: 3535596 - RNA, 19 nt, Human
gaggcccuccacaccugcg

SEQ ID NO: 3535597 - RNA, 19 nt, Human
gaggcccuccugugcuggg

SEQ ID NO: 3535598 - RNA, 11 nt, Human
gaggcccugca

SEQ ID NO: 3535599 - RNA, 13 nt, Human
gaggcccugcaug

SEQ ID NO: 3535600 - RNA, 18 nt, Human
gaggcccugcccaaugag

SEQ ID NO: 3535601 - RNA, 14 nt, Human
gaggcccuggauca

SEQ ID NO: 3535602 - RNA, 22 nt, Human
gaggcccugugccccuugacaa

SEQ ID NO: 3535603 - RNA, 14 nt, Human
gaggcccuucucuc

SEQ ID NO: 3535604 - RNA, 15 nt, Human
gaggcccuucucucc

SEQ ID NO: 3535605 - RNA, 22 nt, Human
gaggcccuucucuccagccccu

SEQ ID NO: 3535606 - RNA, 24 nt, Human
gaggcccuucucuccagccccugg

SEQ ID NO: 3535607 - RNA, 18 nt, Human
gaggccgaagcuaacagg

SEQ ID NO: 3535608 - RNA, 14 nt, Human
gaggccgaggcagg

SEQ ID NO: 3535609 - RNA, 14 nt, Human
gaggccgaggcggg

SEQ ID NO: 3535610 - RNA, 15 nt, Human
gaggccgcuagaggc

SEQ ID NO: 3535611 - RNA, 20 nt, Human
gaggccgcuagaggccugag

SEQ ID NO: 3535612 - RNA, 16 nt, Human
gaggccggggccgggu

SEQ ID NO: 3535613 - RNA, 14 nt, Human
gaggccguggcugc

SEQ ID NO: 3535614 - RNA, 18 nt, Human
gaggccuaccccgcagac

SEQ ID NO: 3535615 - RNA, 20 nt, Human
gaggccucaggugcugucca

SEQ ID NO: 3535616 - RNA, 22 nt, Human
gaggccucaggugcuguccaug

SEQ ID NO: 3535617 - RNA, 21 nt, Human
gaggccucaguggacuuucca

SEQ ID NO: 3535618 - RNA, 11 nt, Human
gaggccuccgg

SEQ ID NO: 3535619 - RNA, 24 nt, Human
gaggccucuuggaccucugcucug

SEQ ID NO: 3535620 - RNA, 17 nt, Human
gaggccugagacccagg

SEQ ID NO: 3535621 - RNA, 18 nt, Human
gaggccugagacccagga

SEQ ID NO: 3535622 - RNA, 20 nt, Human
gaggccugaggaugagcugg

SEQ ID NO: 3535623 - RNA, 20 nt, Human
gaggccugcccucagggauc

SEQ ID NO: 3535624 - RNA, 20 nt, Human
gaggccugccuccagggcug

SEQ ID NO: 3535625 - RNA, 22 nt, Human
gaggccugccuccagggcugga

SEQ ID NO: 3535626 - RNA, 16 nt, Human
gaggccugcgacccug

SEQ ID NO: 3535627 - RNA, 19 nt, Human
gaggccugcgacccugggg

SEQ ID NO: 3535628 - RNA, 20 nt, Human
gaggccugcgacccuggggg

SEQ ID NO: 3535629 - RNA, 18 nt, Human
gaggccuggacuuuccug

SEQ ID NO: 3535630 - RNA, 14 nt, Human
gaggccugggccgc

SEQ ID NO: 3535631 - RNA, 20 nt, Human
gaggccugggccgcugccac

SEQ ID NO: 3535632 - RNA, 17 nt, Human
gaggccugggcugggaa

SEQ ID NO: 3535633 - RNA, 21 nt, Human
gaggccuuacuuaaacccagc

SEQ ID NO: 3535634 - RNA, 18 nt, Human
gaggccuuaucauucauu

SEQ ID NO: 3535635 - RNA, 20 nt, Human
gaggccuuaucauucauucu

SEQ ID NO: 3535636 - RNA, 21 nt, Human
gaggccuuaugaggguccucu

SEQ ID NO: 3535637 - RNA, 16 nt, Human
gaggccuuccagcugc

SEQ ID NO: 3535638 - RNA, 18 nt, Human
gaggccuuccagcugcug

SEQ ID NO: 3535639 - RNA, 19 nt, Human
gaggccuugggcucugcug

SEQ ID NO: 3535640 - RNA, 21 nt, Human
gaggcgaagcguuguccucag

SEQ ID NO: 3535641 - RNA, 17 nt, Human
gaggcgccccaacccgu

SEQ ID NO: 3535642 - RNA, 21 nt, Human
gaggcgccccaacccguggag

SEQ ID NO: 3535643 - RNA, 22 nt, Human
gaggcgccccaacccguggagg

SEQ ID NO: 3535644 - RNA, 16 nt, Human
gaggcgggccagccag

SEQ ID NO: 3535645 - RNA, 17 nt, Human
gaggcgggccagccagg

SEQ ID NO: 3535646 - RNA, 12 nt, Human
gaggcgggugga

SEQ ID NO: 3535647 - RNA, 19 nt, Human
gaggcggguggaucaccug

SEQ ID NO: 3535648 - RNA, 14 nt, Human
gaggcuaaaauguu

SEQ ID NO: 3535649 - RNA, 16 nt, Human
gaggcuaaaauguuuu

SEQ ID NO: 3535650 - RNA, 23 nt, Human
gaggcuaaauuacucaggaagaa

SEQ ID NO: 3535651 - RNA, 15 nt, Human
gaggcuaaguuggga

SEQ ID NO: 3535652 - RNA, 16 nt, Human
gaggcuaugcucaggg

SEQ ID NO: 3535653 - RNA, 20 nt, Human
gaggcuauuauuuucacugu

SEQ ID NO: 3535654 - RNA, 14 nt, Human
gaggcucagauugu

SEQ ID NO: 3535655 - RNA, 12 nt, Human
gaggcuccacuu

SEQ ID NO: 3535656 - RNA, 23 nt, Human
gaggcuccacuuggucugugaga

SEQ ID NO: 3535657 - RNA, 14 nt, Human
gaggcuccaggcag

SEQ ID NO: 3535658 - RNA, 22 nt, Human
gaggcuccugugcuacuuugcc

SEQ ID NO: 3535659 - RNA, 22 nt, Human
gaggcucuaauugaauuuucaa

SEQ ID NO: 3535660 - RNA, 12 nt, Human
gaggcugacucc

SEQ ID NO: 3535661 - RNA, 19 nt, Human
gaggcugacuccugguccu

SEQ ID NO: 3535662 - RNA, 14 nt, Human
gaggcugagacagg

SEQ ID NO: 3535663 - RNA, 15 nt, Human
gaggcugaggcacaa

SEQ ID NO: 3535664 - RNA, 16 nt, Human
gaggcugaggcagaag

SEQ ID NO: 3535665 - RNA, 15 nt, Human
gaggcugaggcagga

SEQ ID NO: 3535666 - RNA, 16 nt, Human
gaggcugaggcaggag

SEQ ID NO: 3535667 - RNA, 17 nt, Human
gaggcugaggcaggagg

SEQ ID NO: 3535668 - RNA, 14 nt, Human
gaggcugaggccug

SEQ ID NO: 3535669 - RNA, 12 nt, Human
gaggcugaggcg

SEQ ID NO: 3535670 - RNA, 19 nt, Human
gaggcugaggcuggcacag

SEQ ID NO: 3535671 - RNA, 18 nt, Human
gaggcugaggugggcaga

SEQ ID NO: 3535672 - RNA, 18 nt, Human
gaggcugcagccaggcca

SEQ ID NO: 3535673 - RNA, 12 nt, Human
gaggcugccccc

SEQ ID NO: 3535674 - RNA, 19 nt, Human
gaggcugcccccggccccc

SEQ ID NO: 3535675 - RNA, 20 nt, Human
gaggcugcccccggcccccu

SEQ ID NO: 3535676 - RNA, 18 nt, Human
gaggcugccccucucacc

SEQ ID NO: 3535677 - RNA, 14 nt, Human
gaggcugcccuccu

SEQ ID NO: 3535678 - RNA, 23 nt, Human
gaggcugcccuccugugcucagc

SEQ ID NO: 3535679 - RNA, 14 nt, Human
gaggcugccucucc

SEQ ID NO: 3535680 - RNA, 24 nt, Human
gaggcugcucggggugcacaggag

SEQ ID NO: 3535681 - RNA, 21 nt, Human
gaggcuggacuccagaucugc

SEQ ID NO: 3535682 - RNA, 15 nt, Human
gaggcuggagcuggc

SEQ ID NO: 3535683 - RNA, 15 nt, Human
gaggcuggaggaagg

SEQ ID NO: 3535684 - RNA, 16 nt, Human
gaggcuggaggcaggg

SEQ ID NO: 3535685 - RNA, 18 nt, Human
gaggcuggaggcagggcc

SEQ ID NO: 3535686 - RNA, 19 nt, Human
gaggcuggaggcagggccu

SEQ ID NO: 3535687 - RNA, 23 nt, Human
gaggcuggauccuagccuuaucc

SEQ ID NO: 3535688 - RNA, 12 nt, Human
gaggcuggcagg

SEQ ID NO: 3535689 - RNA, 13 nt, Human
gaggcuggcaggu

SEQ ID NO: 3535690 - RNA, 22 nt, Human
gaggcugggaauggaggggcag

SEQ ID NO: 3535691 - RNA, 18 nt, Human
gaggcugggacgcucugc

SEQ ID NO: 3535692 - RNA, 15 nt, Human
gaggcugguccuaug

SEQ ID NO: 3535693 - RNA, 16 nt, Human
gaggcugguccuaugg

SEQ ID NO: 3535694 - RNA, 18 nt, Human
gaggcugguccuauggcc

SEQ ID NO: 3535695 - RNA, 22 nt, Human
gaggcuggugcuguggccaggg

SEQ ID NO: 3535696 - RNA, 12 nt, Human
gaggcuguagga

SEQ ID NO: 3535697 - RNA, 12 nt, Human
gaggcuguccug

SEQ ID NO: 3535698 - RNA, 21 nt, Human
gaggcugucuucucaggcucu

SEQ ID NO: 3535699 - RNA, 19 nt, Human
gugauauagaauuagcuuu

SEQ ID NO: 3535700 - RNA, 23 nt, Human
gugauauauaaguguacauaugu

SEQ ID NO: 3535701 - RNA, 15 nt, Human
gugauauauguauua

SEQ ID NO: 3535702 - RNA, 14 nt, Human
gugauaugcacaau

SEQ ID NO: 3535703 - RNA, 13 nt, Human
gugauauggagcc

SEQ ID NO: 3535704 - RNA, 13 nt, Human
gugauauucuaag

SEQ ID NO: 3535705 - RNA, 13 nt, Human
gugauauuucaga

SEQ ID NO: 3535706 - RNA, 15 nt, Human
gugauauuucucuag

SEQ ID NO: 3535707 - RNA, 16 nt, Human
gugauauuucucuagu

SEQ ID NO: 3535708 - RNA, 14 nt, Human
gugauauuuuucuu

SEQ ID NO: 3535709 - RNA, 17 nt, Human
gugaucaauaaaaugug

SEQ ID NO: 3535710 - RNA, 17 nt, Human
gugaucauguguggaag

SEQ ID NO: 3535711 - RNA, 18 nt, Human
gugaucauguguggaagu

SEQ ID NO: 3535712 - RNA, 24 nt, Human
gugauccacccaccucagccuccc

SEQ ID NO: 3535713 - RNA, 20 nt, Human
gugauccacccgccucagcc

SEQ ID NO: 3535714 - RNA, 18 nt, Human
gugaucccguuuucccca

SEQ ID NO: 3535715 - RNA, 23 nt, Human
gugauccucccaccucagccucc

SEQ ID NO: 3535716 - RNA, 15 nt, Human
gugaucucagaucag

SEQ ID NO: 3535717 - RNA, 15 nt, Human
gugaucugaacagaa

SEQ ID NO: 3535718 - RNA, 19 nt, Human
gugaucuuauuuuucuaaa

SEQ ID NO: 3535719 - RNA, 18 nt, Human
gugaucuugcucuaucuc

SEQ ID NO: 3535720 - RNA, 24 nt, Human
gugaucuugcucuaucucacagca

SEQ ID NO: 3535721 - RNA, 17 nt, Human
gugaugagggcagcagc

SEQ ID NO: 3535722 - RNA, 21 nt, Human
gugaugagggcagcagccagc

SEQ ID NO: 3535723 - RNA, 23 nt, Human
gugaugagggcagcagccagccc

SEQ ID NO: 3535724 - RNA, 22 nt, Human
gugaugaugaaaugaggucaga

SEQ ID NO: 3535725 - RNA, 15 nt, Human
gugaugccagguucu

SEQ ID NO: 3535726 - RNA, 18 nt, Human
gugaugccagguucuauu

SEQ ID NO: 3535727 - RNA, 13 nt, Human
gugaugcggcaga

SEQ ID NO: 3535728 - RNA, 16 nt, Human
gugaugcucaggcuug

SEQ ID NO: 3535729 - RNA, 18 nt, Human
gugauggggcccugccuc

SEQ ID NO: 3535730 - RNA, 14 nt, Human
gugaugguuccccu

SEQ ID NO: 3535731 - RNA, 20 nt, Human
gugaugucauacagagaagu

SEQ ID NO: 3535732 - RNA, 21 nt, Human
gugaugucauacagagaaguc

SEQ ID NO: 3535733 - RNA, 13 nt, Human
gugaugugacauu

SEQ ID NO: 3535734 - RNA, 15 nt, Human
gugaugugaguugca

SEQ ID NO: 3535735 - RNA, 10 nt, Human
gugauguguc

SEQ ID NO: 3535736 - RNA, 13 nt, Human
gugauguucuaag

SEQ ID NO: 3535737 - RNA, 16 nt, Human
gugauguucuaaggcu

SEQ ID NO: 3535738 - RNA, 12 nt, Human
gagggaccagcc

SEQ ID NO: 3535739 - RNA, 13 nt, Human
gagggaccucucc

SEQ ID NO: 3535740 - RNA, 15 nt, Human
gagggaccucuccca

SEQ ID NO: 3535741 - RNA, 14 nt, Human
gagggacgccuggg

SEQ ID NO: 3535742 - RNA, 15 nt, Human
gagggacgccugggg

SEQ ID NO: 3535743 - RNA, 20 nt, Human
gagggacggccaagaaugua

SEQ ID NO: 3535744 - RNA, 22 nt, Human
gagggacgucagacuuggcuca

SEQ ID NO: 3535745 - RNA, 18 nt, Human
gagggacugucgcugcuu

SEQ ID NO: 3535746 - RNA, 23 nt, Human
gagggacugucgcugcuucgugg

SEQ ID NO: 3535747 - RNA, 15 nt, Human
gagggagaaauaguc

SEQ ID NO: 3535748 - RNA, 14 nt, Human
gagggagaggugga

SEQ ID NO: 3535749 - RNA, 13 nt, Human
gagggaggaccug

SEQ ID NO: 3535750 - RNA, 16 nt, Human
gagggaggccccaggg

SEQ ID NO: 3535751 - RNA, 15 nt, Human
gagggagggcuccag

SEQ ID NO: 3535752 - RNA, 21 nt, Human
gagggaggggaaaagcauuuu

SEQ ID NO: 3535753 - RNA, 13 nt, Human
gagggagggggcu

SEQ ID NO: 3535754 - RNA, 15 nt, Human
gagggagguguuuaa

SEQ ID NO: 3535755 - RNA, 16 nt, Human
gagggagugacagagg

SEQ ID NO: 3535756 - RNA, 18 nt, Human
gagggagugacagaggca

SEQ ID NO: 3535757 - RNA, 22 nt, Human
gagggagugacagaggcagccc

SEQ ID NO: 3535758 - RNA, 18 nt, Human
gagggaugaggugcuggg

SEQ ID NO: 3535759 - RNA, 16 nt, Human
gagggaugaugaagag

SEQ ID NO: 3535760 - RNA, 15 nt, Human
gagggaugggccugg

SEQ ID NO: 3535761 - RNA, 15 nt, Human
gagggauguggagca

SEQ ID NO: 3535762 - RNA, 19 nt, Human
gagggauuggccgcuuggc

SEQ ID NO: 3535763 - RNA, 22 nt, Human
gagggcaagggccaugcugaag

SEQ ID NO: 3535764 - RNA, 15 nt, Human
gagggcacacacugu

SEQ ID NO: 3535765 - RNA, 14 nt, Human
gagggcacagaaaa

SEQ ID NO: 3535766 - RNA, 20 nt, Human
gagggcacauuccuugccug

SEQ ID NO: 3535767 - RNA, 18 nt, Human
gagggcacugguggcccg

SEQ ID NO: 3535768 - RNA, 20 nt, Human
gagggcagaaagguucugcc

SEQ ID NO: 3535769 - RNA, 14 nt, Human
gagggcagcagcca

SEQ ID NO: 3535770 - RNA, 20 nt, Human
gagggcagcagccagcccug

SEQ ID NO: 3535771 - RNA, 21 nt, Human
gagggcagcagccagcccugc

SEQ ID NO: 3535772 - RNA, 22 nt, Human
gagggcagcagccagcccugcc

SEQ ID NO: 3535773 - RNA, 23 nt, Human
gagggcagcagccagcccugccu

SEQ ID NO: 3535774 - RNA, 14 nt, Human
gagggcagcagggc

SEQ ID NO: 3535775 - RNA, 16 nt, Human
gagggcagcagggcua

SEQ ID NO: 3535776 - RNA, 22 nt, Human
gagggcaugcgcacaaggcuga

SEQ ID NO: 3535777 - RNA, 16 nt, Human
gagggcccagagcagg

SEQ ID NO: 3535778 - RNA, 11 nt, Human
gagggccccuc

SEQ ID NO: 3535779 - RNA, 12 nt, Human
gagggcccuggu

SEQ ID NO: 3535780 - RNA, 22 nt, Human
gagggcccugguguuucuagca

SEQ ID NO: 3535781 - RNA, 22 nt, Human
gagggccugaggucuggcugcu

SEQ ID NO: 3535782 - RNA, 17 nt, Human
gagggccugcaagggag

SEQ ID NO: 3535783 - RNA, 15 nt, Human
gagggcgcaggccgu

SEQ ID NO: 3535784 - RNA, 14 nt, Human
gagggcguggaggg

SEQ ID NO: 3535785 - RNA, 14 nt, Human
gagggcgugggagc

SEQ ID NO: 3535786 - RNA, 12 nt, Human
gagggcgugucu

SEQ ID NO: 3535787 - RNA, 16 nt, Human
gagggcuagaaccugg

SEQ ID NO: 3535788 - RNA, 19 nt, Human
gagggcuagaaccuggaga

SEQ ID NO: 3535789 - RNA, 21 nt, Human
gagggcuagaaccuggagagc

SEQ ID NO: 3535790 - RNA, 20 nt, Human
gagggcuagaaccuggcagg

SEQ ID NO: 3535791 - RNA, 19 nt, Human
gagggcuagaacuggagag

SEQ ID NO: 3535792 - RNA, 18 nt, Human
gagggcuagaaucuggag

SEQ ID NO: 3535793 - RNA, 21 nt, Human
gagggcuagaaucuggagagc

SEQ ID NO: 3535794 - RNA, 14 nt, Human
gagggcucacucag

SEQ ID NO: 3535795 - RNA, 15 nt, Human
gagggcuccagacac

SEQ ID NO: 3535796 - RNA, 21 nt, Human
gagggcucgaggggugggcug

SEQ ID NO: 3535797 - RNA, 11 nt, Human
gagggcucuga

SEQ ID NO: 3535798 - RNA, 12 nt, Human
gagggcucugag

SEQ ID NO: 3535799 - RNA, 20 nt, Human
gagggcugagccugguccca

SEQ ID NO: 3535800 - RNA, 12 nt, Human
gagggcugcagu

SEQ ID NO: 3535801 - RNA, 23 nt, Human
gagggcugcgacgcuugcucugu

SEQ ID NO: 3535802 - RNA, 18 nt, Human
gagggcuggaaucuggag

SEQ ID NO: 3535803 - RNA, 18 nt, Human
gagggcuggcuggccuca

SEQ ID NO: 3535804 - RNA, 15 nt, Human
gagggcuugugaaca

SEQ ID NO: 3535805 - RNA, 12 nt, Human
gaggggaagagg

SEQ ID NO: 3535806 - RNA, 19 nt, Human
gaggggaagaguguacugg

SEQ ID NO: 3535807 - RNA, 19 nt, Human
gaggggacaaaacccaccu

SEQ ID NO: 3535808 - RNA, 13 nt, Human
gaggggaccagga

SEQ ID NO: 3535809 - RNA, 13 nt, Human
gaggggacucugg

SEQ ID NO: 3535810 - RNA, 13 nt, Human
gaggggagcucug

SEQ ID NO: 3535811 - RNA, 11 nt, Human
gaggggagggg

SEQ ID NO: 3535812 - RNA, 12 nt, Human
gaggggagggua

SEQ ID NO: 3535813 - RNA, 21 nt, Human
gaggggaugugugugugcaga

SEQ ID NO: 3535814 - RNA, 13 nt, Human
gaggggcagcccu

SEQ ID NO: 3535815 - RNA, 13 nt, Human
gaggggcaggcug

SEQ ID NO: 3535816 - RNA, 14 nt, Human
gaggggccccugcu

SEQ ID NO: 3535817 - RNA, 22 nt, Human
gaggggccccugcuucuccagc

SEQ ID NO: 3535818 - RNA, 13 nt, Human
gaggggcccgagc

SEQ ID NO: 3535819 - RNA, 17 nt, Human
gaggggcccgcuugccu

SEQ ID NO: 3535820 - RNA, 21 nt, Human
gaggggcccguugucucccug

SEQ ID NO: 3535821 - RNA, 22 nt, Human
gaggggccggcccugugugcag

SEQ ID NO: 3535822 - RNA, 17 nt, Human
gaggggccuaggccuca

SEQ ID NO: 3535823 - RNA, 19 nt, Human
gaggggccuaggccucagc

SEQ ID NO: 3535824 - RNA, 14 nt, Human
gaggggccucaggu

SEQ ID NO: 3535825 - RNA, 22 nt, Human
gaggggccucuuaugggcuggg

SEQ ID NO: 3535826 - RNA, 15 nt, Human
gaggggccugccacc

SEQ ID NO: 3535827 - RNA, 19 nt, Human
gaggggccugccaccugga

SEQ ID NO: 3535828 - RNA, 13 nt, Human
gaggggccuggca

SEQ ID NO: 3535829 - RNA, 13 nt, Human
gaggggcuccugg

SEQ ID NO: 3535830 - RNA, 14 nt, Human
gaggggcuccugga

SEQ ID NO: 3535831 - RNA, 11 nt, Human
gaggggcucuc

SEQ ID NO: 3535832 - RNA, 16 nt, Human
gaggggcucucagcuc

SEQ ID NO: 3535833 - RNA, 23 nt, Human
gaggggcucucagcucagcgcca

SEQ ID NO: 3535834 - RNA, 23 nt, Human
gaggggcuggggacuugugucug

SEQ ID NO: 3535835 - RNA, 17 nt, Human
gaggggcuuucuggaga

SEQ ID NO: 3535836 - RNA, 17 nt, Human
gagggggaauggcagca

SEQ ID NO: 3535837 - RNA, 14 nt, Human
gagggggagaaaag

SEQ ID NO: 3535838 - RNA, 18 nt, Human
gagggggccaccucccca

SEQ ID NO: 3535839 - RNA, 22 nt, Human
gagggggccaccuccccaggcc

SEQ ID NO: 3535840 - RNA, 15 nt, Human
gagggggccuggaug

SEQ ID NO: 3535841 - RNA, 17 nt, Human
gagggggcuugaagcca

SEQ ID NO: 3535842 - RNA, 18 nt, Human
gagggggcuugaagccaa

SEQ ID NO: 3535843 - RNA, 15 nt, Human
gaggggggagguggg

SEQ ID NO: 3535844 - RNA, 15 nt, Human
gaggggggcacaugc

SEQ ID NO: 3535845 - RNA, 22 nt, Human
gugcaguccugggauguggcug

SEQ ID NO: 3535846 - RNA, 19 nt, Human
gugcaguggcccccacaga

SEQ ID NO: 3535847 - RNA, 23 nt, Human
gugcaguggugcgaucuggguuc

SEQ ID NO: 3535848 - RNA, 22 nt, Human
gugcaguucccccaaccucaga

SEQ ID NO: 3535849 - RNA, 21 nt, Human
gugcaguuugguguguccucc

SEQ ID NO: 3535850 - RNA, 19 nt, Human
gugcauaaguuaacuucca

SEQ ID NO: 3535851 - RNA, 21 nt, Human
gugcauaccacuuuuguucuu

SEQ ID NO: 3535852 - RNA, 22 nt, Human
gugcauaccacuuuuguucuug

SEQ ID NO: 3535853 - RNA, 22 nt, Human
gugcauaguuguagacaaagua

SEQ ID NO: 3535854 - RNA, 20 nt, Human
gugcauauuguacacuuuuu

SEQ ID NO: 3535855 - RNA, 11 nt, Human
gugcaucaggc

SEQ ID NO: 3535856 - RNA, 15 nt, Human
gugcaucucagccca

SEQ ID NO: 3535857 - RNA, 18 nt, Human
gugcaugcagcaucuaag

SEQ ID NO: 3535858 - RNA, 19 nt, Human
gugcaugcgccuacucgcu

SEQ ID NO: 3535859 - RNA, 18 nt, Human
gugcaugcucucugcagc

SEQ ID NO: 3535860 - RNA, 21 nt, Human
gugcauggaggcccuccugug

SEQ ID NO: 3535861 - RNA, 13 nt, Human
gugcaugggugaa

SEQ ID NO: 3535862 - RNA, 18 nt, Human
gugcaugggugaagggag

SEQ ID NO: 3535863 - RNA, 14 nt, Human
gugcaugugugugc

SEQ ID NO: 3535864 - RNA, 22 nt, Human
gugcauuagcacagauuuuaau

SEQ ID NO: 3535865 - RNA, 15 nt, Human
gugcauuaucuagau

SEQ ID NO: 3535866 - RNA, 12 nt, Human
gugcauucuccu

SEQ ID NO: 3535867 - RNA, 19 nt, Human
gugcauuguuucugugggc

SEQ ID NO: 3535868 - RNA, 21 nt, Human
gugcauuugaggucuguucuu

SEQ ID NO: 3535869 - RNA, 22 nt, Human
gugcauuugaggucuguucuuu

SEQ ID NO: 3535870 - RNA, 19 nt, Human
gugcauuuggagggaguga

SEQ ID NO: 3535871 - RNA, 15 nt, Human
gugcauuuuuguaaa

SEQ ID NO: 3535872 - RNA, 22 nt, Human
gugcauuuuugugaaaugaaaa

SEQ ID NO: 3535873 - RNA, 22 nt, Human
gugccaaacaaaaagguucuca

SEQ ID NO: 3535874 - RNA, 14 nt, Human
gugccaaagaaagu

SEQ ID NO: 3535875 - RNA, 22 nt, Human
gugccaacacucaagaagcagg

SEQ ID NO: 3535876 - RNA, 23 nt, Human
gugccaacacucaagaagcaggc

SEQ ID NO: 3535877 - RNA, 15 nt, Human
gugccaacuccucac

SEQ ID NO: 3535878 - RNA, 18 nt, Human
gugccaacuguggcuggu

SEQ ID NO: 3535879 - RNA, 18 nt, Human
gugccaagcacagugccu

SEQ ID NO: 3535880 - RNA, 19 nt, Human
gugccaagcacagugccug

SEQ ID NO: 3535881 - RNA, 20 nt, Human
gugccaaggaccuccucuuc

SEQ ID NO: 3535882 - RNA, 19 nt, Human
gugccaauauguauuguaa

SEQ ID NO: 3535883 - RNA, 21 nt, Human
gugccaauauguauuguaaac

SEQ ID NO: 3535884 - RNA, 21 nt, Human
gugccaauuucaaguuccaag

SEQ ID NO: 3535885 - RNA, 18 nt, Human
gugccacaacgccuggcu

SEQ ID NO: 3535886 - RNA, 15 nt, Human
gugccacauuuucuu

SEQ ID NO: 3535887 - RNA, 14 nt, Human
gugccacccugggc

SEQ ID NO: 3535888 - RNA, 20 nt, Human
gugccacccugggcucugug

SEQ ID NO: 3535889 - RNA, 22 nt, Human
gugccacucaccgaagccacuu

SEQ ID NO: 3535890 - RNA, 12 nt, Human
gugccagagccu

SEQ ID NO: 3535891 - RNA, 13 nt, Human
gugccagagccug

SEQ ID NO: 3535892 - RNA, 21 nt, Human
gugccagaggaauccuggcag

SEQ ID NO: 3535893 - RNA, 15 nt, Human
gugccagaggugggc

SEQ ID NO: 3535894 - RNA, 16 nt, Human
gugccagaggugggca

SEQ ID NO: 3535895 - RNA, 19 nt, Human
gugccagauuuaugcauau

SEQ ID NO: 3535896 - RNA, 15 nt, Human
gugccagcaaagccc

SEQ ID NO: 3535897 - RNA, 16 nt, Human
gugccagcaaagcccc

SEQ ID NO: 3535898 - RNA, 15 nt, Human
gaggucaacagagaa

SEQ ID NO: 3535899 - RNA, 23 nt, Human
gaggucaacagagaaggcaggaa

SEQ ID NO: 3535900 - RNA, 16 nt, Human
gaggucaagcccagga

SEQ ID NO: 3535901 - RNA, 24 nt, Human
gaggucaagcccaggaggacugcc

SEQ ID NO: 3535902 - RNA, 21 nt, Human
gaggucacauucaggaagaug

SEQ ID NO: 3535903 - RNA, 22 nt, Human
gaggucacauucaggaagauga

SEQ ID NO: 3535904 - RNA, 16 nt, Human
gaggucacuggaaagg

SEQ ID NO: 3535905 - RNA, 17 nt, Human
gaggucacuggaaaggg

SEQ ID NO: 3535906 - RNA, 18 nt, Human
gaggucacuggaaagggg

SEQ ID NO: 3535907 - RNA, 23 nt, Human
gaggucagcaugucuauucagcu

SEQ ID NO: 3535908 - RNA, 22 nt, Human
gaggucaggaguuagaggccag

SEQ ID NO: 3535909 - RNA, 11 nt, Human
gaggucaggga

SEQ ID NO: 3535910 - RNA, 12 nt, Human
gaggucccaggc

SEQ ID NO: 3535911 - RNA, 14 nt, Human
gaggucccaggcag

SEQ ID NO: 3535912 - RNA, 22 nt, Human
gagguccugagcacugccagga

SEQ ID NO: 3535913 - RNA, 16 nt, Human
gagguccugggggccu

SEQ ID NO: 3535914 - RNA, 23 nt, Human
gagguccugggggccugaccucc

SEQ ID NO: 3535915 - RNA, 19 nt, Human
gagguccuuaggccucuga

SEQ ID NO: 3535916 - RNA, 21 nt, Human
gagguccuuaggccucugaga

SEQ ID NO: 3535917 - RNA, 21 nt, Human
gaggucgguagguucagccaa

SEQ ID NO: 3535918 - RNA, 13 nt, Human
gaggucuaaucua

SEQ ID NO: 3535919 - RNA, 20 nt, Human
gaggucucgcugaugcuggg

SEQ ID NO: 3535920 - RNA, 14 nt, Human
gaggucucuugagg

SEQ ID NO: 3535921 - RNA, 17 nt, Human
gaggucuggcugcuugc

SEQ ID NO: 3535922 - RNA, 21 nt, Human
gaggucuguacguuaccucuu

SEQ ID NO: 3535923 - RNA, 18 nt, Human
gaggucuuuugacaugug

SEQ ID NO: 3535924 - RNA, 16 nt, Human
gaggugaaaaggccaa

SEQ ID NO: 3535925 - RNA, 15 nt, Human
gaggugaaagggagc

SEQ ID NO: 3535926 - RNA, 15 nt, Human
gaggugaccccaggg

SEQ ID NO: 3535927 - RNA, 19 nt, Human
gaggugaccccagggcaca

SEQ ID NO: 3535928 - RNA, 23 nt, Human
gaggugaccccagguuucuaugu

SEQ ID NO: 3535929 - RNA, 15 nt, Human
gaggugagaccaccu

SEQ ID NO: 3535930 - RNA, 16 nt, Human
gaggugcacugggagg

SEQ ID NO: 3535931 - RNA, 16 nt, Human
gaggugcaugccuaau

SEQ ID NO: 3535932 - RNA, 15 nt, Human
gaggugccuucuuca

SEQ ID NO: 3535933 - RNA, 23 nt, Human
gaggugcuacugacuuucucagc

SEQ ID NO: 3535934 - RNA, 20 nt, Human
gaggugcuuaagcagaagca

SEQ ID NO: 3535935 - RNA, 12 nt, Human
gaggugcuucac

SEQ ID NO: 3535936 - RNA, 16 nt, Human
gagguggaagaaggga

SEQ ID NO: 3535937 - RNA, 18 nt, Human
gagguggaagaagggaga

SEQ ID NO: 3535938 - RNA, 19 nt, Human
gagguggaagaagggagaa

SEQ ID NO: 3535939 - RNA, 20 nt, Human
gagguggaagcccuccuucc

SEQ ID NO: 3535940 - RNA, 21 nt, Human
gagguggagcaaagugagggc

SEQ ID NO: 3535941 - RNA, 15 nt, Human
gagguggcagcccug

SEQ ID NO: 3535942 - RNA, 20 nt, Human
gagguggcucuggaaugaca

SEQ ID NO: 3535943 - RNA, 13 nt, Human
gagguggcugccu

SEQ ID NO: 3535944 - RNA, 14 nt, Human
gagguggcuggguu

SEQ ID NO: 3535945 - RNA, 14 nt, Human
gaggugggagcagg

SEQ ID NO: 3535946 - RNA, 17 nt, Human
gaggugggagcaggaga

SEQ ID NO: 3535947 - RNA, 15 nt, Human
gaggugggaggugga

SEQ ID NO: 3535948 - RNA, 13 nt, Human
gaggugggauccu

SEQ ID NO: 3535949 - RNA, 11 nt, Human
gaggugggcag

SEQ ID NO: 3535950 - RNA, 12 nt, Human
gaggugggcagg

SEQ ID NO: 3535951 - RNA, 21 nt, Human
gaggugggccagucuguggau

SEQ ID NO: 3535952 - RNA, 19 nt, Human
gaggugggccguggcccuu

SEQ ID NO: 3535953 - RNA, 22 nt, Human
gaggugguaguaaaacacagag

SEQ ID NO: 3535954 - RNA, 23 nt, Human
gaggugguaguaaaacacagagg

SEQ ID NO: 3535955 - RNA, 19 nt, Human
gagguggucugaauguucu

SEQ ID NO: 3535956 - RNA, 20 nt, Human
gagguggucugaauguucug

SEQ ID NO: 3535957 - RNA, 20 nt, Human
gaggugguggaguggaguga

SEQ ID NO: 3535958 - RNA, 16 nt, Human
gagguguccaacuggc

SEQ ID NO: 3535959 - RNA, 14 nt, Human
gaggugucucaggc

SEQ ID NO: 3535960 - RNA, 15 nt, Human
gagguuaaggcugag

SEQ ID NO: 3535961 - RNA, 17 nt, Human
gagguucauuucaaaua

SEQ ID NO: 3535962 - RNA, 19 nt, Human
gagguuccucugccugccc

SEQ ID NO: 3535963 - RNA, 13 nt, Human
gagguugcaguga

SEQ ID NO: 3535964 - RNA, 19 nt, Human
gagguugcagugagcugag

SEQ ID NO: 3535965 - RNA, 22 nt, Human
gagguuuauagaaagauagaua

SEQ ID NO: 3535966 - RNA, 22 nt, Human
gagguuucaccaugauggccag

SEQ ID NO: 3535967 - RNA, 13 nt, Human
gagguuucaguga

SEQ ID NO: 3535968 - RNA, 19 nt, Human
gagguuugcagucccaagc

SEQ ID NO: 3535969 - RNA, 22 nt, Human
gagguuugcagucccaagcggu

SEQ ID NO: 3535970 - RNA, 22 nt, Human
gagguuuguuuagaagaagugu

SEQ ID NO: 3535971 - RNA, 19 nt, Human
gagguuuuaaaaaaauccc

SEQ ID NO: 3535972 - RNA, 22 nt, Human
gaguaaaauaaauauugucuuu

SEQ ID NO: 3535973 - RNA, 12 nt, Human
gaguaaaggaaa

SEQ ID NO: 3535974 - RNA, 15 nt, Human
gaguaaauauugagg

SEQ ID NO: 3535975 - RNA, 19 nt, Human
gaguaaauauugaggcuuu

SEQ ID NO: 3535976 - RNA, 19 nt, Human
gaguaacaauacaaaugga

SEQ ID NO: 3535977 - RNA, 21 nt, Human
gaguaacaauacaaauggauu

SEQ ID NO: 3535978 - RNA, 20 nt, Human
gaguaagaaauuucagguug

SEQ ID NO: 3535979 - RNA, 12 nt, Human
gaguaagagcug

SEQ ID NO: 3535980 - RNA, 16 nt, Human
gaguaauaugccugcu

SEQ ID NO: 3535981 - RNA, 22 nt, Human
gaguaauccaagcaaaugugaa

SEQ ID NO: 3535982 - RNA, 13 nt, Human
gaguacaaaugcc

SEQ ID NO: 3535983 - RNA, 22 nt, Human
gaguaccccugcuuugggcuug

SEQ ID NO: 3535984 - RNA, 16 nt, Human
gaguacguugugcauu

SEQ ID NO: 3535985 - RNA, 17 nt, Human
gaguacguugugcauuu

SEQ ID NO: 3535986 - RNA, 15 nt, Human
gaguacuacaguccu

SEQ ID NO: 3535987 - RNA, 18 nt, Human
gaguacuacaguccuccc

SEQ ID NO: 3535988 - RNA, 19 nt, Human
guggguggaaccaggaacc

SEQ ID NO: 3535989 - RNA, 21 nt, Human
guggguggauauaaauauaua

SEQ ID NO: 3535990 - RNA, 16 nt, Human
gugggugguggaucug

SEQ ID NO: 3535991 - RNA, 16 nt, Human
gugggugguggggagg

SEQ ID NO: 3535992 - RNA, 14 nt, Human
guggguguagccag

SEQ ID NO: 3535993 - RNA, 18 nt, Human
guggguguccugccuguc

SEQ ID NO: 3535994 - RNA, 22 nt, Human
guggguguccugccugucugcc

SEQ ID NO: 3535995 - RNA, 15 nt, Human
gugggugugugacuc

SEQ ID NO: 3535996 - RNA, 15 nt, Human
guggguuccacagac

SEQ ID NO: 3535997 - RNA, 23 nt, Human
guggguuucuaaagcugccagcc

SEQ ID NO: 3535998 - RNA, 21 nt, Human
guggguuuucaucaagacugg

SEQ ID NO: 3535999 - RNA, 17 nt, Human
guggguuuuuauuuccu

SEQ ID NO: 3536000 - RNA, 12 nt, Human
gugguaaaaagg

SEQ ID NO: 3536001 - RNA, 17 nt, Human
gugguaagagaauguua

SEQ ID NO: 3536002 - RNA, 19 nt, Human
gugguaagagaauguuaua

SEQ ID NO: 3536003 - RNA, 20 nt, Human
gugguacacacagauuacug

SEQ ID NO: 3536004 - RNA, 13 nt, Human
gugguacagagaa

SEQ ID NO: 3536005 - RNA, 14 nt, Human
gugguacagagaag

SEQ ID NO: 3536006 - RNA, 14 nt, Human
gugguacccucugg

SEQ ID NO: 3536007 - RNA, 12 nt, Human
gugguacucuga

SEQ ID NO: 3536008 - RNA, 14 nt, Human
gugguacuugauca

SEQ ID NO: 3536009 - RNA, 13 nt, Human
gugguagaaacaa

SEQ ID NO: 3536010 - RNA, 14 nt, Human
gugguauagaaaug

SEQ ID NO: 3536011 - RNA, 20 nt, Human
gugguauccugugacaugua

SEQ ID NO: 3536012 - RNA, 14 nt, Human
gugguaucuugcag

SEQ ID NO: 3536013 - RNA, 22 nt, Human
gugguaugacauuggauagaac

SEQ ID NO: 3536014 - RNA, 15 nt, Human
gugguaugucugcca

SEQ ID NO: 3536015 - RNA, 21 nt, Human
gugguauuuucaauagccacu

SEQ ID NO: 3536016 - RNA, 23 nt, Human
gugguauuuucaauagccacuaa

SEQ ID NO: 3536017 - RNA, 22 nt, Human
guggucaaaccgcacucaccca

SEQ ID NO: 3536018 - RNA, 16 nt, Human
guggucauuaagcauu

SEQ ID NO: 3536019 - RNA, 12 nt, Human
gugguccaaaua

SEQ ID NO: 3536020 - RNA, 15 nt, Human
guggucccaccccac

SEQ ID NO: 3536021 - RNA, 13 nt, Human
gugguccccaaca

SEQ ID NO: 3536022 - RNA, 20 nt, Human
guggucucuucuuggggccc

SEQ ID NO: 3536023 - RNA, 23 nt, Human
guggucucuucuuggggcccagu

SEQ ID NO: 3536024 - RNA, 13 nt, Human
guggucugaaugu

SEQ ID NO: 3536025 - RNA, 18 nt, Human
guggucugaauguucuga

SEQ ID NO: 3536026 - RNA, 20 nt, Human
guggucugaauguucugaca

SEQ ID NO: 3536027 - RNA, 16 nt, Human
guggucugcaggcagg

SEQ ID NO: 3536028 - RNA, 18 nt, Human
guggucugcucgggccca

SEQ ID NO: 3536029 - RNA, 19 nt, Human
guggucuguuggcaggcug

SEQ ID NO: 3536030 - RNA, 20 nt, Human
guggucuguuggcaggcugg

SEQ ID NO: 3536031 - RNA, 23 nt, Human
guggucuucaaauugucuuuugu

SEQ ID NO: 3536032 - RNA, 17 nt, Human
guggucuuucuggagag

SEQ ID NO: 3536033 - RNA, 23 nt, Human
guggugaaaagcagguugauaaa

SEQ ID NO: 3536034 - RNA, 15 nt, Human
guggugaagaaaacu

SEQ ID NO: 3536035 - RNA, 16 nt, Human
guggugaccccaggag

SEQ ID NO: 3536036 - RNA, 23 nt, Human
guggugagcagaaguggagcugg

SEQ ID NO: 3536037 - RNA, 16 nt, Human
guggugccauccccag

SEQ ID NO: 3536038 - RNA, 17 nt, Human
guggugccauccccagg

SEQ ID NO: 3536039 - RNA, 18 nt, Human
gugguggaagaggggaca

SEQ ID NO: 3536040 - RNA, 19 nt, Human
gugguggaagaggggacag

SEQ ID NO: 3536041 - RNA, 17 nt, Human
gugguggaguggaguga

SEQ ID NO: 3536042 - RNA, 20 nt, Human
gugguggaucuguccaagga

SEQ ID NO: 3536043 - RNA, 14 nt, Human
gugguggcucggga

SEQ ID NO: 3536044 - RNA, 21 nt, Human
guggugggcauucucucucca

SEQ ID NO: 3536045 - RNA, 20 nt, Human
gugguggggaggggcgcugg

SEQ ID NO: 3536046 - RNA, 18 nt, Human
guggugucacugucccuc

SEQ ID NO: 3536047 - RNA, 22 nt, Human
guggugucacugucccuccugg

SEQ ID NO: 3536048 - RNA, 23 nt, Human
guggugucacugucccuccuggu

SEQ ID NO: 3536049 - RNA, 15 nt, Human
guggugucagacccu

SEQ ID NO: 3536050 - RNA, 22 nt, Human
guggugucugccuguugcguga

SEQ ID NO: 3536051 - RNA, 16 nt, Human
gugguguuuccuggca

SEQ ID NO: 3536052 - RNA, 19 nt, Human
gugguuauuuuuauacagu

SEQ ID NO: 3536053 - RNA, 16 nt, Human
gugguuccucugcuca

SEQ ID NO: 3536054 - RNA, 14 nt, Human
gugguugaagagca

SEQ ID NO: 3536055 - RNA, 19 nt, Human
gugguuuaguguaaaaaug

SEQ ID NO: 3536056 - RNA, 23 nt, Human
gugguuucagcaauauuuaagga

SEQ ID NO: 3536057 - RNA, 14 nt, Human
gugguuucauguua

SEQ ID NO: 3536058 - RNA, 16 nt, Human
gugguuugguguguuc

SEQ ID NO: 3536059 - RNA, 14 nt, Human
gugguuuucuguuu

SEQ ID NO: 3536060 - RNA, 17 nt, Human
gugguuuucuguuucua

SEQ ID NO: 3536061 - RNA, 16 nt, Human
gugguuuuugagccau

SEQ ID NO: 3536062 - RNA, 23 nt, Human
guguaaaacgagaauccacccau

SEQ ID NO: 3536063 - RNA, 19 nt, Human
guguaaaauauuuugaauc

SEQ ID NO: 3536064 - RNA, 22 nt, Human
guguaaaccaaagcccuaaaau

SEQ ID NO: 3536065 - RNA, 12 nt, Human
guguaaagcauu

SEQ ID NO: 3536066 - RNA, 19 nt, Human
guguaaaguuagucuacuc

SEQ ID NO: 3536067 - RNA, 14 nt, Human
guguaaauguuagu

SEQ ID NO: 3536068 - RNA, 22 nt, Human
guguaaauuauguaaugcaaaa

SEQ ID NO: 3536069 - RNA, 17 nt, Human
guguaacaauuguguag

SEQ ID NO: 3536070 - RNA, 23 nt, Human
guguaacaauuguguagccuuuu

SEQ ID NO: 3536071 - RNA, 12 nt, Human
guguaacagcug

SEQ ID NO: 3536072 - RNA, 17 nt, Human
guguaacaggucuccuc

SEQ ID NO: 3536073 - RNA, 19 nt, Human
guguaacaggucuccucuu

SEQ ID NO: 3536074 - RNA, 15 nt, Human
guguaacauaugcaa

SEQ ID NO: 3536075 - RNA, 20 nt, Human
guguaacugcccaaagcagc

SEQ ID NO: 3536076 - RNA, 22 nt, Human
guguaauaagacuuagauugug

SEQ ID NO: 3536077 - RNA, 12 nt, Human
guguaauauuac

SEQ ID NO: 3536078 - RNA, 17 nt, Human
guguaaucaauaaacga

SEQ ID NO: 3536079 - RNA, 21 nt, Human
guguaaucauuucuugggccc

SEQ ID NO: 3536080 - RNA, 16 nt, Human
guguaaugaauaccuu

SEQ ID NO: 3536081 - RNA, 17 nt, Human
guguaauuuauaaaauu

SEQ ID NO: 3536082 - RNA, 14 nt, Human
guguaauuugaaga

SEQ ID NO: 3536083 - RNA, 20 nt, Human
guguacaauguacacacugg

SEQ ID NO: 3536084 - RNA, 22 nt, Human
guguacagucuuguauuaaguu

SEQ ID NO: 3536085 - RNA, 22 nt, Human
guguacaucccauguaacagaa

SEQ ID NO: 3536086 - RNA, 22 nt, Human
guguacauggaauaacauguaa

SEQ ID NO: 3536087 - RNA, 17 nt, Human
guguaccauuugccucc

SEQ ID NO: 3536088 - RNA, 16 nt, Human
guguacucuggccucu

SEQ ID NO: 3536089 - RNA, 14 nt, Human
guguacuguaaaga

SEQ ID NO: 3536090 - RNA, 14 nt, Human
guguagaacacuaa

SEQ ID NO: 3536091 - RNA, 19 nt, Human
guguagaacacuaauucau

SEQ ID NO: 3536092 - RNA, 14 nt, Human
guguagaagcauuc

SEQ ID NO: 3536093 - RNA, 19 nt, Human
guguagaagcauuccuucu

SEQ ID NO: 3536094 - RNA, 20 nt, Human
guguagauuuuauagugugu

SEQ ID NO: 3536095 - RNA, 16 nt, Human
guguagcaacuacagu

SEQ ID NO: 3536096 - RNA, 17 nt, Human
guguagccacaccagga

SEQ ID NO: 3536097 - RNA, 17 nt, Human
guguagccuugcccgga

SEQ ID NO: 3536098 - RNA, 20 nt, Human
guguagccuuuuuguauaaa

SEQ ID NO: 3536099 - RNA, 18 nt, Human
guguagcuacagagaaac

SEQ ID NO: 3536100 - RNA, 12 nt, Human
guguagcuguga

SEQ ID NO: 3536101 - RNA, 15 nt, Human
guguagcugugaccu

SEQ ID NO: 3536102 - RNA, 21 nt, Human
guguagcugugaccugcugag

SEQ ID NO: 3536103 - RNA, 13 nt, Human
guguaggcagaca

SEQ ID NO: 3536104 - RNA, 16 nt, Human
guguaggcuuuacuua

SEQ ID NO: 3536105 - RNA, 17 nt, Human
guguaguucauguaaau

SEQ ID NO: 3536106 - RNA, 18 nt, Human
guguauaaaaauaaaaaa

SEQ ID NO: 3536107 - RNA, 19 nt, Human
guguauaaacaagaaaaau

SEQ ID NO: 3536108 - RNA, 16 nt, Human
guguauauuauuuggc

SEQ ID NO: 3536109 - RNA, 14 nt, Human
guguaucaguguuu

SEQ ID NO: 3536110 - RNA, 20 nt, Human
guguauccauuaucaugugu

SEQ ID NO: 3536111 - RNA, 22 nt, Human
guguauccauuaucauguguaa

SEQ ID NO: 3536112 - RNA, 21 nt, Human
guguauccccccccuguauag

SEQ ID NO: 3536113 - RNA, 15 nt, Human
guguauccuggggcu

SEQ ID NO: 3536114 - RNA, 20 nt, Human
guugucauuguaaacaaacu

SEQ ID NO: 3536115 - RNA, 14 nt, Human
guuguccaacuauu

SEQ ID NO: 3536116 - RNA, 16 nt, Human
guuguccuccccuugg

SEQ ID NO: 3536117 - RNA, 15 nt, Human
guugucuaagaaauu

SEQ ID NO: 3536118 - RNA, 16 nt, Human
guugucucccuggccc

SEQ ID NO: 3536119 - RNA, 19 nt, Human
guugucucccuggcccuca

SEQ ID NO: 3536120 - RNA, 18 nt, Human
guugucucugaugcagcu

SEQ ID NO: 3536121 - RNA, 17 nt, Human
guugucucuucuccuua

SEQ ID NO: 3536122 - RNA, 22 nt, Human
guugucugaagucacugcacag

SEQ ID NO: 3536123 - RNA, 16 nt, Human
guugucuggcaaggac

SEQ ID NO: 3536124 - RNA, 13 nt, Human
guugugaauaauu

SEQ ID NO: 3536125 - RNA, 14 nt, Human
guugugaauaauua

SEQ ID NO: 3536126 - RNA, 23 nt, Human
guugugacaacuuccugagggau

SEQ ID NO: 3536127 - RNA, 18 nt, Human
guugugaccugaaguuca

SEQ ID NO: 3536128 - RNA, 22 nt, Human
guugugaggccuggccaggcac

SEQ ID NO: 3536129 - RNA, 21 nt, Human
guugugauagcuaacauuuua

SEQ ID NO: 3536130 - RNA, 18 nt, Human
guugugcagcuuuugguc

SEQ ID NO: 3536131 - RNA, 13 nt, Human
guugugcuugagc

SEQ ID NO: 3536132 - RNA, 13 nt, Human
gaugugucuguau

SEQ ID NO: 3536133 - RNA, 12 nt, Human
gauguguguuga

SEQ ID NO: 3536134 - RNA, 14 nt, Human
gauguguguugaua

SEQ ID NO: 3536135 - RNA, 17 nt, Human
gauguguguugauacug

SEQ ID NO: 3536136 - RNA, 12 nt, Human
gauguguuguga

SEQ ID NO: 3536137 - RNA, 20 nt, Human
gauguuaaaauaaaugguuu

SEQ ID NO: 3536138 - RNA, 23 nt, Human
gauguuacaucacaguguuugca

SEQ ID NO: 3536139 - RNA, 17 nt, Human
gauguuaguuuuccuua

SEQ ID NO: 3536140 - RNA, 13 nt, Human
gauguuauauuuu

SEQ ID NO: 3536141 - RNA, 17 nt, Human
gauguucagcacugucc

SEQ ID NO: 3536142 - RNA, 20 nt, Human
gauguucagcacugucccuu

SEQ ID NO: 3536143 - RNA, 22 nt, Human
gauguucagcacugucccuugc

SEQ ID NO: 3536144 - RNA, 20 nt, Human
gauguucaguguaauuucuu

SEQ ID NO: 3536145 - RNA, 23 nt, Human
gauguucaguguaauuucuuugc

SEQ ID NO: 3536146 - RNA, 23 nt, Human
gauguugaaugcccacaggcaaa

SEQ ID NO: 3536147 - RNA, 23 nt, Human
gauguugaugcaauccuuacaaa

SEQ ID NO: 3536148 - RNA, 15 nt, Human
gauguugccaugugu

SEQ ID NO: 3536149 - RNA, 15 nt, Human
gauguuggcugggaa

SEQ ID NO: 3536150 - RNA, 18 nt, Human
gauguuuaacuuaaucaa

SEQ ID NO: 3536151 - RNA, 19 nt, Human
gauguuucuuuuguaugua

SEQ ID NO: 3536152 - RNA, 23 nt, Human
gauguuucuuuuguauguaaaug

SEQ ID NO: 3536153 - RNA, 13 nt, Human
gauguuuguggcc

SEQ ID NO: 3536154 - RNA, 21 nt, Human
gauguuuuaaggaugcuugua

SEQ ID NO: 3536155 - RNA, 23 nt, Human
gauguuuuccaugaguccccugu

SEQ ID NO: 3536156 - RNA, 20 nt, Human
gauguuuuuaaaaguuucaa

SEQ ID NO: 3536157 - RNA, 21 nt, Human
gauguuuuuaaaaguuucaau

SEQ ID NO: 3536158 - RNA, 17 nt, Human
gauguuuuuaaaaucuu

SEQ ID NO: 3536159 - RNA, 16 nt, Human
gauguuuuucaugaaa

SEQ ID NO: 3536160 - RNA, 22 nt, Human
gauuaaaaauaucaaauuaauu

SEQ ID NO: 3536161 - RNA, 14 nt, Human
gauuaaaaauuaua

SEQ ID NO: 3536162 - RNA, 22 nt, Human
gauuaaaagguauacuuuagua

SEQ ID NO: 3536163 - RNA, 12 nt, Human
gauuaaacuuau

SEQ ID NO: 3536164 - RNA, 18 nt, Human
gauuaaacuuaugaaugu

SEQ ID NO: 3536165 - RNA, 19 nt, Human
gauuaaauauagauuagaa

SEQ ID NO: 3536166 - RNA, 21 nt, Human
gauuaacaaauaugcuaauuu

SEQ ID NO: 3536167 - RNA, 21 nt, Human
gauuaacagguaugaaccacc

SEQ ID NO: 3536168 - RNA, 19 nt, Human
gauuaaccacuucagcuga

SEQ ID NO: 3536169 - RNA, 20 nt, Human
gauuaacugaaauaaaaaau

SEQ ID NO: 3536170 - RNA, 12 nt, Human
gauuaacuugga

SEQ ID NO: 3536171 - RNA, 18 nt, Human
gauuaacuuggaugaguu

SEQ ID NO: 3536172 - RNA, 14 nt, Human
gauuaaguaaugau

SEQ ID NO: 3536173 - RNA, 21 nt, Human
guuauuaaacguaugcaugug

SEQ ID NO: 3536174 - RNA, 13 nt, Human
guuauuaaaugua

SEQ ID NO: 3536175 - RNA, 13 nt, Human
guuauuacauccu

SEQ ID NO: 3536176 - RNA, 15 nt, Human
guuauuacauccuug

SEQ ID NO: 3536177 - RNA, 21 nt, Human
guuauuacccagaguuuuuau

SEQ ID NO: 3536178 - RNA, 13 nt, Human
guuauuauaauug

SEQ ID NO: 3536179 - RNA, 23 nt, Human
guuauuauagagcagaaauucug

SEQ ID NO: 3536180 - RNA, 20 nt, Human
guuauuauauuuacaaaugg

SEQ ID NO: 3536181 - RNA, 17 nt, Human
guuauuaucugggcuua

SEQ ID NO: 3536182 - RNA, 13 nt, Human
guuauucuggagu

SEQ ID NO: 3536183 - RNA, 17 nt, Human
guuauugaagcagagug

SEQ ID NO: 3536184 - RNA, 18 nt, Human
guuauugaagcagagugg

SEQ ID NO: 3536185 - RNA, 14 nt, Human
guuauuguuuuguu

SEQ ID NO: 3536186 - RNA, 13 nt, Human
guuauuuaaagaa

SEQ ID NO: 3536187 - RNA, 11 nt, Human
guuauuuaaau

SEQ ID NO: 3536188 - RNA, 15 nt, Human
guuauuuaaaugagu

SEQ ID NO: 3536189 - RNA, 12 nt, Human
guuauuuagacu

SEQ ID NO: 3536190 - RNA, 14 nt, Human
guuauuuauaauca

SEQ ID NO: 3536191 - RNA, 19 nt, Human
guuauuuauagucauuuau

SEQ ID NO: 3536192 - RNA, 14 nt, Human
guuauuuauauauu

SEQ ID NO: 3536193 - RNA, 17 nt, Human
guuauuuauuuaaaugu

SEQ ID NO: 3536194 - RNA, 19 nt, Human
guuauuucuuacaggcaca

SEQ ID NO: 3536195 - RNA, 16 nt, Human
guuauuuguaauagau

SEQ ID NO: 3536196 - RNA, 19 nt, Human
guuauuuguuauuuucagu

SEQ ID NO: 3536197 - RNA, 16 nt, Human
guuauuuuacuuuuug

SEQ ID NO: 3536198 - RNA, 21 nt, Human
guuauuuuauugauuauuacu

SEQ ID NO: 3536199 - RNA, 15 nt, Human
guuauuuucagcaug

SEQ ID NO: 3536200 - RNA, 13 nt, Human
guuauuuuccagg

SEQ ID NO: 3536201 - RNA, 17 nt, Human
guuauuuucuacagugg

SEQ ID NO: 3536202 - RNA, 13 nt, Human
guuauuuucuccu

SEQ ID NO: 3536203 - RNA, 13 nt, Human
guuauuuugcaac

SEQ ID NO: 3536204 - RNA, 19 nt, Human
guuauuuuuacauucugaa

SEQ ID NO: 3536205 - RNA, 14 nt, Human
guuauuuuuauaca

SEQ ID NO: 3536206 - RNA, 17 nt, Human
guuauuuuuauacagua

SEQ ID NO: 3536207 - RNA, 16 nt, Human
guuauuuuuauaucag

SEQ ID NO: 3536208 - RNA, 14 nt, Human
guuauuuuuguaca

SEQ ID NO: 3536209 - RNA, 16 nt, Human
guuauuuuuuaauuau

SEQ ID NO: 3536210 - RNA, 21 nt, Human
guuauuuuuuaauuauuauuu

SEQ ID NO: 3536211 - RNA, 16 nt, Human
guucaaaccugugaag

SEQ ID NO: 3536212 - RNA, 23 nt, Human
guucaaagccacauuauuucuag

SEQ ID NO: 3536213 - RNA, 13 nt, Human
guucaaagccagc

SEQ ID NO: 3536214 - RNA, 22 nt, Human
guucaacaaagaaacaaagaug

SEQ ID NO: 3536215 - RNA, 16 nt, Human
guucaacccacagcua

SEQ ID NO: 3536216 - RNA, 15 nt, Human
guucaacuuccagaa

SEQ ID NO: 3536217 - RNA, 19 nt, Human
guucaacuuuuccuuugaa

SEQ ID NO: 3536218 - RNA, 20 nt, Human
guucaagaaaugaagagcug

SEQ ID NO: 3536219 - RNA, 17 nt, Human
guucaagaccagccugg

SEQ ID NO: 3536220 - RNA, 14 nt, Human
guucaagaucaaaa

SEQ ID NO: 3536221 - RNA, 18 nt, Human
guucaagcgauucucuug

SEQ ID NO: 3536222 - RNA, 18 nt, Human
guucaagcgauucuucug

SEQ ID NO: 3536223 - RNA, 20 nt, Human
guucaaguaauucugcuguc

SEQ ID NO: 3536224 - RNA, 17 nt, Human
guucaagugauucucuu

SEQ ID NO: 3536225 - RNA, 18 nt, Human
guucaauaauaaauauuu

SEQ ID NO: 3536226 - RNA, 23 nt, Human
guucaaucuggauucauauuuaa

SEQ ID NO: 3536227 - RNA, 12 nt, Human
guucaaugaucu

SEQ ID NO: 3536228 - RNA, 22 nt, Human
guucaaugaucuagguuuaacu

SEQ ID NO: 3536229 - RNA, 17 nt, Human
guucaauggcugcugaa

SEQ ID NO: 3536230 - RNA, 18 nt, Human
guucaauuauuuccccca

SEQ ID NO: 3536231 - RNA, 22 nt, Human
guucaauuuguuaguuccugua

SEQ ID NO: 3536232 - RNA, 16 nt, Human
guucacaccagagaac

SEQ ID NO: 3536233 - RNA, 19 nt, Human
guucacacccugcaaggcc

SEQ ID NO: 3536234 - RNA, 16 nt, Human
guucacauuagaauua

SEQ ID NO: 3536235 - RNA, 12 nt, Human
guucaccagccu

SEQ ID NO: 3536236 - RNA, 16 nt, Human
guucacccacagggcu

SEQ ID NO: 3536237 - RNA, 22 nt, Human
guucaccuauuucaaaaauuug

SEQ ID NO: 3536238 - RNA, 15 nt, Human
guucaccuuuguagc

SEQ ID NO: 3536239 - RNA, 16 nt, Human
guucacgcaacuugaa

SEQ ID NO: 3536240 - RNA, 16 nt, Human
guucacuaaacucuga

SEQ ID NO: 3536241 - RNA, 20 nt, Human
guucacugaaggugauucac

SEQ ID NO: 3536242 - RNA, 17 nt, Human
guucagaaaugcugccu

SEQ ID NO: 3536243 - RNA, 12 nt, Human
guucagaauuua

SEQ ID NO: 3536244 - RNA, 16 nt, Human
guucagagacucaggg

SEQ ID NO: 3536245 - RNA, 14 nt, Human
guucagagcugccc

SEQ ID NO: 3536246 - RNA, 16 nt, Human
guucagagcugcccuc

SEQ ID NO: 3536247 - RNA, 19 nt, Human
guucagagcugcccucucc

SEQ ID NO: 3536248 - RNA, 19 nt, Human
guucagaguccuuaaaaug

SEQ ID NO: 3536249 - RNA, 15 nt, Human
guucagauuggacau

SEQ ID NO: 3536250 - RNA, 17 nt, Human
guucagcaccacccuag

SEQ ID NO: 3536251 - RNA, 16 nt, Human
guucagcacugucccu

SEQ ID NO: 3536252 - RNA, 18 nt, Human
guucagcacugucccuug

SEQ ID NO: 3536253 - RNA, 13 nt, Human
guucagcacuugu

SEQ ID NO: 3536254 - RNA, 22 nt, Human
guucagcacuugucucauuuua

SEQ ID NO: 3536255 - RNA, 23 nt, Human
guucagcacuugucucauuuuaa

SEQ ID NO: 3536256 - RNA, 18 nt, Human
guucagcaguacagccga

SEQ ID NO: 3536257 - RNA, 16 nt, Human
guucagcauucuuagc

SEQ ID NO: 3536258 - RNA, 15 nt, Human
guucagccaagguuu

SEQ ID NO: 3536259 - RNA, 23 nt, Human
guucagccacccugaggccucug

SEQ ID NO: 3536260 - RNA, 14 nt, Human
guucagccccuccu

SEQ ID NO: 3536261 - RNA, 23 nt, Human
guucagccccuccucugccaccu

SEQ ID NO: 3536262 - RNA, 22 nt, Human
guucagcuaagcuaggaaugaa

SEQ ID NO: 3536263 - RNA, 15 nt, Human
guucagcuccagcuc

SEQ ID NO: 3536264 - RNA, 17 nt, Human
guucagcuccagcucac

SEQ ID NO: 3536265 - RNA, 15 nt, Human
guucagcuguccucc

SEQ ID NO: 3536266 - RNA, 23 nt, Human
guucagcuuguaaauagcucagg

SEQ ID NO: 3536267 - RNA, 21 nt, Human
guucaggagucccaaggaaag

SEQ ID NO: 3536268 - RNA, 23 nt, Human
guucagggaagauaaguuggaaa

SEQ ID NO: 3536269 - RNA, 21 nt, Human
guucaggguuggccccugccc

SEQ ID NO: 3536270 - RNA, 13 nt, Human
guucagguagcug

SEQ ID NO: 3536271 - RNA, 16 nt, Human
guucaguaccuggagg

SEQ ID NO: 3536272 - RNA, 18 nt, Human
guucaguauuauguaguu

SEQ ID NO: 3536273 - RNA, 23 nt, Human
guucagucugaaugcugccacaa

SEQ ID NO: 3536274 - RNA, 16 nt, Human
guucaguguaaauagu

SEQ ID NO: 3536275 - RNA, 12 nt, Human
guucaguguaau

SEQ ID NO: 3536276 - RNA, 19 nt, Human
guucaguguaauuucuuug

SEQ ID NO: 3536277 - RNA, 16 nt, Human
uaaaauaaaaugaaaa

SEQ ID NO: 3536278 - RNA, 22 nt, Human
uaaaauaaaaugaaaauuguau

SEQ ID NO: 3536279 - RNA, 14 nt, Human
uaaaauaaacaguu

SEQ ID NO: 3536280 - RNA, 16 nt, Human
uaaaauaaacaguugu

SEQ ID NO: 3536281 - RNA, 17 nt, Human
uaaaauaaacaguugug

SEQ ID NO: 3536282 - RNA, 13 nt, Human
uaaaauaaagaaa

SEQ ID NO: 3536283 - RNA, 13 nt, Human
uaaaauaaaguau

SEQ ID NO: 3536284 - RNA, 13 nt, Human
uaaaauaaauaua

SEQ ID NO: 3536285 - RNA, 14 nt, Human
uaaaauaaauauau

SEQ ID NO: 3536286 - RNA, 23 nt, Human
uaaaauaaauauauauaaaccua

SEQ ID NO: 3536287 - RNA, 17 nt, Human
uaaaauaaauauugucu

SEQ ID NO: 3536288 - RNA, 12 nt, Human
uaaaauaaaugg

SEQ ID NO: 3536289 - RNA, 14 nt, Human
uaaaauaaauuagu

SEQ ID NO: 3536290 - RNA, 20 nt, Human
uaaaauaaccccgggcaaga

SEQ ID NO: 3536291 - RNA, 16 nt, Human
uaaaauaacuaaaaug

SEQ ID NO: 3536292 - RNA, 18 nt, Human
uaaaauaacuaaaaugua

SEQ ID NO: 3536293 - RNA, 21 nt, Human
uaaaauaacuaaaauguaucu

SEQ ID NO: 3536294 - RNA, 22 nt, Human
uaaaauaagaauagaacaacau

SEQ ID NO: 3536295 - RNA, 21 nt, Human
uaaaauaagcagguggaucua

SEQ ID NO: 3536296 - RNA, 17 nt, Human
uaaaauaaggauuuuuc

SEQ ID NO: 3536297 - RNA, 18 nt, Human
uaaaauaagucugauuua

SEQ ID NO: 3536298 - RNA, 19 nt, Human
uaaaauaagucugauuuaa

SEQ ID NO: 3536299 - RNA, 17 nt, Human
uaaaauaauucuaaagg

SEQ ID NO: 3536300 - RNA, 13 nt, Human
uaaaauaauuuug

SEQ ID NO: 3536301 - RNA, 16 nt, Human
uaaaauaauuuuguaa

SEQ ID NO: 3536302 - RNA, 13 nt, Human
uaaaauacauuua

SEQ ID NO: 3536303 - RNA, 21 nt, Human
uaaaauaccagccaguaaaug

SEQ ID NO: 3536304 - RNA, 15 nt, Human
uaaaauacuauuuuu

SEQ ID NO: 3536305 - RNA, 12 nt, Human
uaaaauacugua

SEQ ID NO: 3536306 - RNA, 17 nt, Human
uaaaauacuguagauaa

SEQ ID NO: 3536307 - RNA, 21 nt, Human
uaaaauacuuuuacucugccu

SEQ ID NO: 3536308 - RNA, 17 nt, Human
uaaaauagaguguaguu

SEQ ID NO: 3536309 - RNA, 21 nt, Human
uaaaauagcaacacucuauau

SEQ ID NO: 3536310 - RNA, 21 nt, Human
uaaaauagccacuuaccuuca

SEQ ID NO: 3536311 - RNA, 18 nt, Human
uaaaauagucucuuuaaa

SEQ ID NO: 3536312 - RNA, 17 nt, Human
uaaaauaguuguccaua

SEQ ID NO: 3536313 - RNA, 22 nt, Human
uaaaauauaauuguuuuuuauc

SEQ ID NO: 3536314 - RNA, 19 nt, Human
uaaaauauauauguugauu

SEQ ID NO: 3536315 - RNA, 16 nt, Human
uaaaauaucauucagc

SEQ ID NO: 3536316 - RNA, 19 nt, Human
uaaaauaucauucagcaac

SEQ ID NO: 3536317 - RNA, 20 nt, Human
uaaaauaugaagacauaaac

SEQ ID NO: 3536318 - RNA, 19 nt, Human
uaaaauaugcacuaagucu

SEQ ID NO: 3536319 - RNA, 18 nt, Human
uaaaauauggcuauaaau

SEQ ID NO: 3536320 - RNA, 15 nt, Human
uaaaauauuuaugaa

SEQ ID NO: 3536321 - RNA, 16 nt, Human
uaaaauauuuaugaag

SEQ ID NO: 3536322 - RNA, 13 nt, Human
uaaaauauuuuca

SEQ ID NO: 3536323 - RNA, 13 nt, Human
uaaaauauuuucu

SEQ ID NO: 3536324 - RNA, 15 nt, Human
uaaaauauuuucugu

SEQ ID NO: 3536325 - RNA, 16 nt, Human
uaaaauauuuucugug

SEQ ID NO: 3536326 - RNA, 17 nt, Human
uaaaauauuuucugugu

SEQ ID NO: 3536327 - RNA, 20 nt, Human
uaaaauauuuucuguguguu

SEQ ID NO: 3536328 - RNA, 16 nt, Human
uaaaauauuuugaauc

SEQ ID NO: 3536329 - RNA, 18 nt, Human
uaaaaucaacuuaacaug

SEQ ID NO: 3536330 - RNA, 20 nt, Human
uaaaaucacuaacauuauau

SEQ ID NO: 3536331 - RNA, 18 nt, Human
uaaaaucacucucagugc

SEQ ID NO: 3536332 - RNA, 14 nt, Human
uaaaaucagccaau

SEQ ID NO: 3536333 - RNA, 17 nt, Human
uaaaaucagccaauuau

SEQ ID NO: 3536334 - RNA, 21 nt, Human
uaaaaucagccaauuauguua

SEQ ID NO: 3536335 - RNA, 18 nt, Human
uaaaaucaugaaacuugu

SEQ ID NO: 3536336 - RNA, 18 nt, Human
uaaaaucauguacauuuc

SEQ ID NO: 3536337 - RNA, 19 nt, Human
uaaaaucauguacauuucu

SEQ ID NO: 3536338 - RNA, 22 nt, Human
uaaaauccuaagacacaaaugc

SEQ ID NO: 3536339 - RNA, 22 nt, Human
gauuaaguaaugauaacuggaa

SEQ ID NO: 3536340 - RNA, 18 nt, Human
gauuaauauggggaugca

SEQ ID NO: 3536341 - RNA, 19 nt, Human
gauuaauccagaauaacua

SEQ ID NO: 3536342 - RNA, 14 nt, Human
gauuaauugcugca

SEQ ID NO: 3536343 - RNA, 22 nt, Human
gauuacaagcgugagccacugc

SEQ ID NO: 3536344 - RNA, 23 nt, Human
gauuacaagcgugagccacugca

SEQ ID NO: 3536345 - RNA, 10 nt, Human
gauuacaggc

SEQ ID NO: 3536346 - RNA, 18 nt, Human
gauuacaggcaugugcca

SEQ ID NO: 3536347 - RNA, 17 nt, Human
gauuacaggcuccugcc

SEQ ID NO: 3536348 - RNA, 13 nt, Human
gauuaccuccuga

SEQ ID NO: 3536349 - RNA, 22 nt, Human
gauuagaaauuaccuguggaua

SEQ ID NO: 3536350 - RNA, 17 nt, Human
gauuagaagcugaaaac

SEQ ID NO: 3536351 - RNA, 20 nt, Human
gauuagacuggacagcuugu

SEQ ID NO: 3536352 - RNA, 13 nt, Human
gauuagagggagg

SEQ ID NO: 3536353 - RNA, 14 nt, Human
gauuagagggaggu

SEQ ID NO: 3536354 - RNA, 20 nt, Human
gauuagagggagguguuuaa

SEQ ID NO: 3536355 - RNA, 13 nt, Human
gauuagcucugga

SEQ ID NO: 3536356 - RNA, 14 nt, Human
gauuagcucuggac

SEQ ID NO: 3536357 - RNA, 19 nt, Human
gauuagcuuugucacuguu

SEQ ID NO: 3536358 - RNA, 16 nt, Human
gauuagcuuuguguuu

SEQ ID NO: 3536359 - RNA, 17 nt, Human
gauuagggagagaagau

SEQ ID NO: 3536360 - RNA, 13 nt, Human
gauuaguuuagaa

SEQ ID NO: 3536361 - RNA, 14 nt, Human
gauuaguuuagaac

SEQ ID NO: 3536362 - RNA, 20 nt, Human
gauuauaggcaccuaccacc

SEQ ID NO: 3536363 - RNA, 13 nt, Human
gauuaucguuuuc

SEQ ID NO: 3536364 - RNA, 18 nt, Human
gauuauggaaaaauaaaa

SEQ ID NO: 3536365 - RNA, 18 nt, Human
gauuaugggucacaggaa

SEQ ID NO: 3536366 - RNA, 20 nt, Human
gauuauuagccagguaaugu

SEQ ID NO: 3536367 - RNA, 14 nt, Human
gauuauuaucuaaa

SEQ ID NO: 3536368 - RNA, 17 nt, Human
gauuauucugauuccac

SEQ ID NO: 3536369 - RNA, 19 nt, Human
gauuauucugauuccacuu

SEQ ID NO: 3536370 - RNA, 12 nt, Human
gauuauuuaaua

SEQ ID NO: 3536371 - RNA, 13 nt, Human
gauuauuuaauaa

SEQ ID NO: 3536372 - RNA, 16 nt, Human
gauuauuuaauaacau

SEQ ID NO: 3536373 - RNA, 22 nt, Human
gauuauuuaauaacauuaccuu

SEQ ID NO: 3536374 - RNA, 22 nt, Human
gauuauuucacuuuagaugcug

SEQ ID NO: 3536375 - RNA, 23 nt, Human
gauuauuucacuuuagaugcuga

SEQ ID NO: 3536376 - RNA, 19 nt, Human
gauuauuugcauguuaugu

SEQ ID NO: 3536377 - RNA, 22 nt, Human
gauuauuuguuauuuguacagu

SEQ ID NO: 3536378 - RNA, 21 nt, Human
gauuauuuucuacacauacau

SEQ ID NO: 3536379 - RNA, 23 nt, Human
gauuauuuuggaaaguuuuugua

SEQ ID NO: 3536380 - RNA, 17 nt, Human
gauuauuuuuuuuuucu

SEQ ID NO: 3536381 - RNA, 15 nt, Human
gauucaaaauauuua

SEQ ID NO: 3536382 - RNA, 16 nt, Human
gauucaaaauauuuaa

SEQ ID NO: 3536383 - RNA, 18 nt, Human
gauucaaaauauuuaaaa

SEQ ID NO: 3536384 - RNA, 22 nt, Human
gauucaaaauauuuaaaaaugu

SEQ ID NO: 3536385 - RNA, 14 nt, Human
gauucaaucuguaa

SEQ ID NO: 3536386 - RNA, 16 nt, Human
gauucaaucuguaaac

SEQ ID NO: 3536387 - RNA, 20 nt, Human
gauucaaucuguaaacugug

SEQ ID NO: 3536388 - RNA, 19 nt, Human
gauucaaugccccugaauu

SEQ ID NO: 3536389 - RNA, 21 nt, Human
gauucaaugccccugaauuua

SEQ ID NO: 3536390 - RNA, 16 nt, Human
gauucaauuugaugug

SEQ ID NO: 3536391 - RNA, 16 nt, Human
gauucacaucucauuu

SEQ ID NO: 3536392 - RNA, 18 nt, Human
gauucacauguuuucaaa

SEQ ID NO: 3536393 - RNA, 18 nt, Human
gauucaccuguaaaacuu

SEQ ID NO: 3536394 - RNA, 23 nt, Human
gauucagaaaauguucuguuugc

SEQ ID NO: 3536395 - RNA, 14 nt, Human
gauucagaagggga

SEQ ID NO: 3536396 - RNA, 18 nt, Human
gauucagacagcugccug

SEQ ID NO: 3536397 - RNA, 19 nt, Human
gauucagacagcugccugg

SEQ ID NO: 3536398 - RNA, 13 nt, Human
gauucagccuucu

SEQ ID NO: 3536399 - RNA, 23 nt, Human
gauucagccuucuuuuucuggac

SEQ ID NO: 3536400 - RNA, 13 nt, Human
gauucagcucugc

SEQ ID NO: 3536401 - RNA, 17 nt, Human
gauucaggaaaaggccu

SEQ ID NO: 3536402 - RNA, 17 nt, Human
gauucaggcauuuuccc

SEQ ID NO: 3536403 - RNA, 12 nt, Human
gauucaggcugc

SEQ ID NO: 3536404 - RNA, 15 nt, Human
gauucagggaaagug

SEQ ID NO: 3536405 - RNA, 18 nt, Human
gauucaggugcagaggaa

SEQ ID NO: 3536406 - RNA, 13 nt, Human
gauucagucacau

SEQ ID NO: 3536407 - RNA, 22 nt, Human
gauucagucacauggcaugguu

SEQ ID NO: 3536408 - RNA, 14 nt, Human
gauucagucuugcc

SEQ ID NO: 3536409 - RNA, 20 nt, Human
gauucaguguuaaaugugau

SEQ ID NO: 3536410 - RNA, 19 nt, Human
gauucauaguaacuucuua

SEQ ID NO: 3536411 - RNA, 18 nt, Human
gauucauauuuacuucuu

SEQ ID NO: 3536412 - RNA, 12 nt, Human
gauucaugauuu

SEQ ID NO: 3536413 - RNA, 11 nt, Human
gauucaugugg

SEQ ID NO: 3536414 - RNA, 13 nt, Human
gauucauuuccug

SEQ ID NO: 3536415 - RNA, 21 nt, Human
gauucauuuccugcccuuccu

SEQ ID NO: 3536416 - RNA, 18 nt, Human
gauuccaaaaagcacaua

SEQ ID NO: 3536417 - RNA, 23 nt, Human
gauuccaaagaguagaauugcau

SEQ ID NO: 3536418 - RNA, 17 nt, Human
gauuccaaccccaacuc

SEQ ID NO: 3536419 - RNA, 21 nt, Human
gauuccacuacaccuggcuga

SEQ ID NO: 3536420 - RNA, 19 nt, Human
gauuccagagcacugcucc

SEQ ID NO: 3536421 - RNA, 22 nt, Human
gauuccauuuggcagagcuucu

SEQ ID NO: 3536422 - RNA, 20 nt, Human
uaaauaaaguaucaugcauu

SEQ ID NO: 3536423 - RNA, 21 nt, Human
uaaauaaaguaucaugcauuc

SEQ ID NO: 3536424 - RNA, 12 nt, Human
uaaauaaaguuu

SEQ ID NO: 3536425 - RNA, 16 nt, Human
uaaauaaaucauuaau

SEQ ID NO: 3536426 - RNA, 15 nt, Human
uaaauaaauuguaua

SEQ ID NO: 3536427 - RNA, 18 nt, Human
uaaauaaauuguauauuc

SEQ ID NO: 3536428 - RNA, 19 nt, Human
uaaauaaauuguauauuca

SEQ ID NO: 3536429 - RNA, 20 nt, Human
uaaauaaauuguuugaccau

SEQ ID NO: 3536430 - RNA, 22 nt, Human
uaaauaacaggcauuuguucac

SEQ ID NO: 3536431 - RNA, 18 nt, Human
uaaauaaccccauucuuu

SEQ ID NO: 3536432 - RNA, 19 nt, Human
uaaauaaccccauucuuug

SEQ ID NO: 3536433 - RNA, 21 nt, Human
uaaauaaccccauucuuugcu

SEQ ID NO: 3536434 - RNA, 15 nt, Human
uaaauaacuggaaaa

SEQ ID NO: 3536435 - RNA, 13 nt, Human
uaaauaagaaacu

SEQ ID NO: 3536436 - RNA, 15 nt, Human
uaaauaagaaacuuu

SEQ ID NO: 3536437 - RNA, 11 nt, Human
uaaauaagaga

SEQ ID NO: 3536438 - RNA, 18 nt, Human
uaaauaaguuauaaagau

SEQ ID NO: 3536439 - RNA, 21 nt, Human
uaaauaaugugaaacuggauu

SEQ ID NO: 3536440 - RNA, 13 nt, Human
uaaauaauucuuu

SEQ ID NO: 3536441 - RNA, 16 nt, Human
uaaauaauuuaacuac

SEQ ID NO: 3536442 - RNA, 17 nt, Human
uaaauaauuuaacuacc

SEQ ID NO: 3536443 - RNA, 17 nt, Human
uaaauaauuuauuuaau

SEQ ID NO: 3536444 - RNA, 17 nt, Human
uaaauacaaaacuucca

SEQ ID NO: 3536445 - RNA, 19 nt, Human
uaaauacaaguucuauuua

SEQ ID NO: 3536446 - RNA, 13 nt, Human
uaaauacaauuuu

SEQ ID NO: 3536447 - RNA, 23 nt, Human
uaaauacaauuuuguuucuguac

SEQ ID NO: 3536448 - RNA, 19 nt, Human
uaaauacaauuuuuuuuau

SEQ ID NO: 3536449 - RNA, 18 nt, Human
uaaauacacaacacacac

SEQ ID NO: 3536450 - RNA, 19 nt, Human
uaaauacacauagcaugua

SEQ ID NO: 3536451 - RNA, 23 nt, Human
uaaauacaccaccucacuccugu

SEQ ID NO: 3536452 - RNA, 14 nt, Human
uaaauacagacacu

SEQ ID NO: 3536453 - RNA, 13 nt, Human
uaaauacaggaaa

SEQ ID NO: 3536454 - RNA, 17 nt, Human
uaaauacaggaaacagu

SEQ ID NO: 3536455 - RNA, 22 nt, Human
uaaauacagucuuccauuugca

SEQ ID NO: 3536456 - RNA, 23 nt, Human
uaaauacagucuuccauuugcaa

SEQ ID NO: 3536457 - RNA, 21 nt, Human
uaaauacauacggucagguuu

SEQ ID NO: 3536458 - RNA, 16 nt, Human
uaaauacaugcauaua

SEQ ID NO: 3536459 - RNA, 21 nt, Human
uaaauacaugcauauaaugaa

SEQ ID NO: 3536460 - RNA, 20 nt, Human
uaaauacaugccacaucaaa

SEQ ID NO: 3536461 - RNA, 17 nt, Human
uaaauaccagacacgua

SEQ ID NO: 3536462 - RNA, 14 nt, Human
uaaauaccaggauu

SEQ ID NO: 3536463 - RNA, 17 nt, Human
uaaauaccauugacaca

SEQ ID NO: 3536464 - RNA, 23 nt, Human
uaaauaccucuuagcugagugga

SEQ ID NO: 3536465 - RNA, 16 nt, Human
uaaauacugcaaauca

SEQ ID NO: 3536466 - RNA, 22 nt, Human
uaaauacugcaaaucaggcuuu

SEQ ID NO: 3536467 - RNA, 21 nt, Human
uaaauacuguguggaacuuuu

SEQ ID NO: 3536468 - RNA, 12 nt, Human
uaaauagagcaa

SEQ ID NO: 3536469 - RNA, 19 nt, Human
uaaauagagcaauuacaag

SEQ ID NO: 3536470 - RNA, 18 nt, Human
uaaauagaguauaugcac

SEQ ID NO: 3536471 - RNA, 21 nt, Human
uaaauagaugacauugacuau

SEQ ID NO: 3536472 - RNA, 18 nt, Human
uaaauagcauguauugug

SEQ ID NO: 3536473 - RNA, 21 nt, Human
uaaauagcauguauugugucu

SEQ ID NO: 3536474 - RNA, 14 nt, Human
uaaauagcuauauc

SEQ ID NO: 3536475 - RNA, 18 nt, Human
uaaauagcuauauccaug

SEQ ID NO: 3536476 - RNA, 17 nt, Human
uaaauagcuuuuguguc

SEQ ID NO: 3536477 - RNA, 16 nt, Human
uaaauaggagaggaug

SEQ ID NO: 3536478 - RNA, 12 nt, Human
uaaauaggauuu

SEQ ID NO: 3536479 - RNA, 21 nt, Human
uaaauaggcggggcuugccuu

SEQ ID NO: 3536480 - RNA, 15 nt, Human
uaaauaguuaauaua

SEQ ID NO: 3536481 - RNA, 14 nt, Human
uaaauauaagccuu

SEQ ID NO: 3536482 - RNA, 22 nt, Human
uaaauauaagccuuuuauacug

SEQ ID NO: 3536483 - RNA, 13 nt, Human
uaaauauaauucu

SEQ ID NO: 3536484 - RNA, 19 nt, Human
uaaauauaauucuguaaau

SEQ ID NO: 3536485 - RNA, 19 nt, Human
uaaauauaccacucuuuac

SEQ ID NO: 3536486 - RNA, 23 nt, Human
uaaauauaguuccuaagaagcuu

SEQ ID NO: 3536487 - RNA, 15 nt, Human
uaaauauauaaauau

SEQ ID NO: 3536488 - RNA, 13 nt, Human
uaaauauauauaa

SEQ ID NO: 3536489 - RNA, 14 nt, Human
uaaauauauauaaa

SEQ ID NO: 3536490 - RNA, 18 nt, Human
uaaauauauauaaaccua

SEQ ID NO: 3536491 - RNA, 20 nt, Human
uaaauauaucuaccccagac

SEQ ID NO: 3536492 - RNA, 13 nt, Human
uaaauauauguau

SEQ ID NO: 3536493 - RNA, 14 nt, Human
uaaauauauguaug

SEQ ID NO: 3536494 - RNA, 16 nt, Human
uaaauauauguaugua

SEQ ID NO: 3536495 - RNA, 14 nt, Human
uaaauauauuauua

SEQ ID NO: 3536496 - RNA, 23 nt, Human
uaaauauauuauuacuuguaaau

SEQ ID NO: 3536497 - RNA, 22 nt, Human
uaaauauauuuuaagacgaaac

SEQ ID NO: 3536498 - RNA, 15 nt, Human
uaaauauauuuucaa

SEQ ID NO: 3536499 - RNA, 22 nt, Human
uaaauaucaaucaagccaugua

SEQ ID NO: 3536500 - RNA, 14 nt, Human
uaaauaucaaucau

SEQ ID NO: 3536501 - RNA, 17 nt, Human
uaaauaucaaucauuuu

SEQ ID NO: 3536502 - RNA, 22 nt, Human
uaaauaucuguacuucuucgau

SEQ ID NO: 3536503 - RNA, 18 nt, Human
uaaauaucuucugauuug

SEQ ID NO: 3536504 - RNA, 21 nt, Human
uaaauaucuuuuauguuugaa

SEQ ID NO: 3536505 - RNA, 14 nt, Human
uaaauaugcaguga

SEQ ID NO: 3536506 - RNA, 16 nt, Human
uaaauaugcagugaua

SEQ ID NO: 3536507 - RNA, 17 nt, Human
uaaauauggacugcuca

SEQ ID NO: 3536508 - RNA, 19 nt, Human
uaaauauggacugcucagg

SEQ ID NO: 3536509 - RNA, 19 nt, Human
uaaauauguagauaaugga

SEQ ID NO: 3536510 - RNA, 21 nt, Human
uaaauauuaguuaauggauua

SEQ ID NO: 3536511 - RNA, 18 nt, Human
uaaauauucacacuugaa

SEQ ID NO: 3536512 - RNA, 19 nt, Human
uaaauauucuauuuucauu

SEQ ID NO: 3536513 - RNA, 18 nt, Human
uaaauauugaggcuuugu

SEQ ID NO: 3536514 - RNA, 20 nt, Human
uaaauauugaggcuuugugu

SEQ ID NO: 3536515 - RNA, 21 nt, Human
uaaauauugaggcuuuguguu

SEQ ID NO: 3536516 - RNA, 22 nt, Human
uaaauauugguugggaugacuu

SEQ ID NO: 3536517 - RNA, 20 nt, Human
uaaauauugucuuuuuguau

SEQ ID NO: 3536518 - RNA, 23 nt, Human
uaaauauugucuuuuuguauguc

SEQ ID NO: 3536519 - RNA, 16 nt, Human
uaaauauuuauguaga

SEQ ID NO: 3536520 - RNA, 13 nt, Human
uaaauauuuccuu

SEQ ID NO: 3536521 - RNA, 14 nt, Human
uaaauauuuccuua

SEQ ID NO: 3536522 - RNA, 18 nt, Human
uaaauauuuuaaagaauu

SEQ ID NO: 3536523 - RNA, 17 nt, Human
uaaauauuuucuauuuu

SEQ ID NO: 3536524 - RNA, 22 nt, Human
uaaauauuuuuucuuuucuauu

SEQ ID NO: 3536525 - RNA, 19 nt, Human
uaaaucaaguuggcuucua

SEQ ID NO: 3536526 - RNA, 14 nt, Human
uaaaucaaugucac

SEQ ID NO: 3536527 - RNA, 23 nt, Human
uaaaucaaugucacuuaaaggcu

SEQ ID NO: 3536528 - RNA, 14 nt, Human
uaaaucacauccuu

SEQ ID NO: 3536529 - RNA, 18 nt, Human
uaaaucacgcuuuuugaa

SEQ ID NO: 3536530 - RNA, 22 nt, Human
uaaaucacgcuuuuugaaaaag

SEQ ID NO: 3536531 - RNA, 22 nt, Human
uaaaucagauguuuuggucaag

SEQ ID NO: 3536532 - RNA, 17 nt, Human
uaaaucaguaagaggug

SEQ ID NO: 3536533 - RNA, 16 nt, Human
uaaaucauaaagucag

SEQ ID NO: 3536534 - RNA, 17 nt, Human
uaaaucauaaagucagu

SEQ ID NO: 3536535 - RNA, 21 nt, Human
uaaaucauguuaauccuagcu

SEQ ID NO: 3536536 - RNA, 13 nt, Human
uaaaucauuuuau

SEQ ID NO: 3536537 - RNA, 16 nt, Human
uaaauccauuuggaaa

SEQ ID NO: 3536538 - RNA, 22 nt, Human
uaaauccauuuggaaaucuuua

SEQ ID NO: 3536539 - RNA, 16 nt, Human
uaaaucccauuauuca

SEQ ID NO: 3536540 - RNA, 19 nt, Human
uaaaucccauuauucaaag

SEQ ID NO: 3536541 - RNA, 14 nt, Human
uaaauccugaagag

SEQ ID NO: 3536542 - RNA, 11 nt, Human
uaaauccuguu

SEQ ID NO: 3536543 - RNA, 16 nt, Human
uaaauccuguugaaaa

SEQ ID NO: 3536544 - RNA, 18 nt, Human
uaaauccuguugaaaagc

SEQ ID NO: 3536545 - RNA, 23 nt, Human
guuuccuuuucugucucucucuu

SEQ ID NO: 3536546 - RNA, 21 nt, Human
guuucgagaagcugcucugga

SEQ ID NO: 3536547 - RNA, 15 nt, Human
guuucguggggaggu

SEQ ID NO: 3536548 - RNA, 15 nt, Human
guuucguuucuguau

SEQ ID NO: 3536549 - RNA, 17 nt, Human
guuucuaaacuggagac

SEQ ID NO: 3536550 - RNA, 14 nt, Human
guuucuaaagcugc

SEQ ID NO: 3536551 - RNA, 23 nt, Human
guuucuaaaggcuaccuuuguau

SEQ ID NO: 3536552 - RNA, 17 nt, Human
guuucuaagauucuaaa

SEQ ID NO: 3536553 - RNA, 20 nt, Human
guuucuaagauucuaaaggu

SEQ ID NO: 3536554 - RNA, 21 nt, Human
guuucuaagguaacaagauga

SEQ ID NO: 3536555 - RNA, 22 nt, Human
guuucuaagguccgguguucua

SEQ ID NO: 3536556 - RNA, 16 nt, Human
guuucuaccucccaga

SEQ ID NO: 3536557 - RNA, 15 nt, Human
guuucuagggaaaug

SEQ ID NO: 3536558 - RNA, 23 nt, Human
guuucuagguaauuuuuacagaa

SEQ ID NO: 3536559 - RNA, 20 nt, Human
guuucuaugaguggaaaaag

SEQ ID NO: 3536560 - RNA, 14 nt, Human
guuucucaaagaaa

SEQ ID NO: 3536561 - RNA, 18 nt, Human
guuucucaaagaaauuuc

SEQ ID NO: 3536562 - RNA, 15 nt, Human
guuucucagcuccca

SEQ ID NO: 3536563 - RNA, 19 nt, Human
guuucucagcucccauuuc

SEQ ID NO: 3536564 - RNA, 17 nt, Human
guuucucccccauguuc

SEQ ID NO: 3536565 - RNA, 20 nt, Human
guuuugaagauucuauguua

SEQ ID NO: 3536566 - RNA, 12 nt, Human
uaaauuguuuga

SEQ ID NO: 3536567 - RNA, 20 nt, Human
uaaauuuaaagauauuguuc

SEQ ID NO: 3536568 - RNA, 21 nt, Human
uaaauuuaaagauauuguuca

SEQ ID NO: 3536569 - RNA, 15 nt, Human
uaaauuuaaauuuaa

SEQ ID NO: 3536570 - RNA, 18 nt, Human
uaaauuuaaauuuaaaga

SEQ ID NO: 3536571 - RNA, 22 nt, Human
uaaauuuaaguaaguuuuauaa

SEQ ID NO: 3536572 - RNA, 14 nt, Human
uaaauuuaguguuu

SEQ ID NO: 3536573 - RNA, 13 nt, Human
uaaauuuauguga

SEQ ID NO: 3536574 - RNA, 15 nt, Human
uaaauuuauuuacug

SEQ ID NO: 3536575 - RNA, 15 nt, Human
uaaauuuauuuucuu

SEQ ID NO: 3536576 - RNA, 22 nt, Human
uaaauuuccccaacagugugaa

SEQ ID NO: 3536577 - RNA, 23 nt, Human
uaaauuuccccaacagugugaag

SEQ ID NO: 3536578 - RNA, 15 nt, Human
uaaauuucuuaugug

SEQ ID NO: 3536579 - RNA, 16 nt, Human
uaaauuucuuauguga

SEQ ID NO: 3536580 - RNA, 15 nt, Human
uaaauuugauacuua

SEQ ID NO: 3536581 - RNA, 18 nt, Human
uaaauuugauacuuauau

SEQ ID NO: 3536582 - RNA, 22 nt, Human
uaaauuugauuuacauauauua

SEQ ID NO: 3536583 - RNA, 21 nt, Human
uaaauuuguacuauuuaacug

SEQ ID NO: 3536584 - RNA, 16 nt, Human
uaaauuuuaaagccau

SEQ ID NO: 3536585 - RNA, 23 nt, Human
uaaauuuuccuguccucuuucag

SEQ ID NO: 3536586 - RNA, 24 nt, Human
uaaauuuuccuguccucuuucagc

SEQ ID NO: 3536587 - RNA, 14 nt, Human
uaaauuuucuucag

SEQ ID NO: 3536588 - RNA, 19 nt, Human
uaaauuuugaguucuacau

SEQ ID NO: 3536589 - RNA, 14 nt, Human
uaaauuuuguaaug

SEQ ID NO: 3536590 - RNA, 13 nt, Human
uaaauuuuuaaga

SEQ ID NO: 3536591 - RNA, 20 nt, Human
uaaauuuuuuguugacauua

SEQ ID NO: 3536592 - RNA, 17 nt, Human
uaaauuuuuuuguauga

SEQ ID NO: 3536593 - RNA, 19 nt, Human
uaaauuuuuuuuguuucau

SEQ ID NO: 3536594 - RNA, 23 nt, Human
uaacaaaaaaauauauuuaauga

SEQ ID NO: 3536595 - RNA, 22 nt, Human
uaacaaaacacucggcauuuca

SEQ ID NO: 3536596 - RNA, 14 nt, Human
uaacaaaagaugaa

SEQ ID NO: 3536597 - RNA, 18 nt, Human
uaacaaaagaugaaagca

SEQ ID NO: 3536598 - RNA, 11 nt, Human
uaacaaaaugg

SEQ ID NO: 3536599 - RNA, 20 nt, Human
uaacaaaauguaugucuggu

SEQ ID NO: 3536600 - RNA, 22 nt, Human
uaacaaacaucacucugcugcu

SEQ ID NO: 3536601 - RNA, 13 nt, Human
uaacaaagacaaa

SEQ ID NO: 3536602 - RNA, 12 nt, Human
uaacaaauaaaa

SEQ ID NO: 3536603 - RNA, 18 nt, Human
uaacaaauaacaacuuuu

SEQ ID NO: 3536604 - RNA, 16 nt, Human
uaacaacagcuggugc

SEQ ID NO: 3536605 - RNA, 21 nt, Human
uaacaacauguuuccagcauu

SEQ ID NO: 3536606 - RNA, 18 nt, Human
uaacaagaaacucacccc

SEQ ID NO: 3536607 - RNA, 15 nt, Human
uaacaagaagaugaa

SEQ ID NO: 3536608 - RNA, 16 nt, Human
uaacaagaagaugaau

SEQ ID NO: 3536609 - RNA, 14 nt, Human
uaacaagagugauu

SEQ ID NO: 3536610 - RNA, 20 nt, Human
uaacaagagugauucuugcu

SEQ ID NO: 3536611 - RNA, 15 nt, Human
uaacaagccagauuu

SEQ ID NO: 3536612 - RNA, 15 nt, Human
uaacaagcucccagg

SEQ ID NO: 3536613 - RNA, 16 nt, Human
uaacaaguaccaaagu

SEQ ID NO: 3536614 - RNA, 16 nt, Human
uaacaauaacuacugu

SEQ ID NO: 3536615 - RNA, 14 nt, Human
uaacaauacaaaug

SEQ ID NO: 3536616 - RNA, 17 nt, Human
uaacaaugcgaauggua

SEQ ID NO: 3536617 - RNA, 17 nt, Human
uaacaaugcuguauuuu

SEQ ID NO: 3536618 - RNA, 19 nt, Human
uaacaaugcuguauuuuaa

SEQ ID NO: 3536619 - RNA, 14 nt, Human
uaacaauguauuuu

SEQ ID NO: 3536620 - RNA, 21 nt, Human
uaacaauguuaaggaaacucu

SEQ ID NO: 3536621 - RNA, 13 nt, Human
uaacaauuccucu

SEQ ID NO: 3536622 - RNA, 22 nt, Human
uaacaauuucuguccuucagau

SEQ ID NO: 3536623 - RNA, 13 nt, Human
uaacacacagcua

SEQ ID NO: 3536624 - RNA, 14 nt, Human
uaacacacagcucc

SEQ ID NO: 3536625 - RNA, 15 nt, Human
uaacacacagcuccc

SEQ ID NO: 3536626 - RNA, 20 nt, Human
uaacacacauaaaggauaaa

SEQ ID NO: 3536627 - RNA, 12 nt, Human
uaacacagagag

SEQ ID NO: 3536628 - RNA, 17 nt, Human
uaacacagcauguguau

SEQ ID NO: 3536629 - RNA, 18 nt, Human
uaacaccaugauuaacca

SEQ ID NO: 3536630 - RNA, 15 nt, Human
uaacacccuuccuuc

SEQ ID NO: 3536631 - RNA, 24 nt, Human
uaacacccuuccuucuguaaauac

SEQ ID NO: 3536632 - RNA, 18 nt, Human
uaacaccugauuaacuga

SEQ ID NO: 3536633 - RNA, 19 nt, Human
uaacaccugauuaacugag

SEQ ID NO: 3536634 - RNA, 23 nt, Human
uaacacuaauauauuuaaaaaua

SEQ ID NO: 3536635 - RNA, 14 nt, Human
uaacacuacucaaa

SEQ ID NO: 3536636 - RNA, 23 nt, Human
uaacacuagucugugugcugugg

SEQ ID NO: 3536637 - RNA, 16 nt, Human
uaacacuauaaagguu

SEQ ID NO: 3536638 - RNA, 14 nt, Human
uaacacuauuuuau

SEQ ID NO: 3536639 - RNA, 20 nt, Human
uaacacucagaagccugggg

SEQ ID NO: 3536640 - RNA, 21 nt, Human
uaacacucagaagccuggggg

SEQ ID NO: 3536641 - RNA, 13 nt, Human
uaacacuggcccc

SEQ ID NO: 3536642 - RNA, 16 nt, Human
uaacacugugaagagc

SEQ ID NO: 3536643 - RNA, 11 nt, Human
uaacagaaagg

SEQ ID NO: 3536644 - RNA, 23 nt, Human
uaacagaaagggcaacaauaaaa

SEQ ID NO: 3536645 - RNA, 11 nt, Human
uaacagaaaug

SEQ ID NO: 3536646 - RNA, 14 nt, Human
uaacagaaauguac

SEQ ID NO: 3536647 - RNA, 15 nt, Human
uaacagaaauuguau

SEQ ID NO: 3536648 - RNA, 17 nt, Human
uaacagaaauuguauau

SEQ ID NO: 3536649 - RNA, 12 nt, Human
uaacagaacagc

SEQ ID NO: 3536650 - RNA, 14 nt, Human
uaacagaacagcuu

SEQ ID NO: 3536651 - RNA, 16 nt, Human
uaacagaacagcuuca

SEQ ID NO: 3536652 - RNA, 14 nt, Human
uaacagaagaaaau

SEQ ID NO: 3536653 - RNA, 19 nt, Human
uaacagaagggagggcaga

SEQ ID NO: 3536654 - RNA, 14 nt, Human
uaacagacauuguu

SEQ ID NO: 3536655 - RNA, 12 nt, Human
uaacagaugcaa

SEQ ID NO: 3536656 - RNA, 18 nt, Human
uaacagcaacacaaagcu

SEQ ID NO: 3536657 - RNA, 15 nt, Human
uaacagcaccaaauc

SEQ ID NO: 3536658 - RNA, 23 nt, Human
uaacagcauccccaaaacaaagu

SEQ ID NO: 3536659 - RNA, 17 nt, Human
uaacagcccuccucugc

SEQ ID NO: 3536660 - RNA, 18 nt, Human
uaacagcccuccucugca

SEQ ID NO: 3536661 - RNA, 15 nt, Human
uaacagccgcuccag

SEQ ID NO: 3536662 - RNA, 16 nt, Human
uaacagccgcuccaga

SEQ ID NO: 3536663 - RNA, 18 nt, Human
uaacagcuaccaugacaa

SEQ ID NO: 3536664 - RNA, 11 nt, Human
uaacagcuccu

SEQ ID NO: 3536665 - RNA, 19 nt, Human
uaacagcugaauuaucuau

SEQ ID NO: 3536666 - RNA, 12 nt, Human
uaacagcugcaa

SEQ ID NO: 3536667 - RNA, 12 nt, Human
uaacagcugugg

SEQ ID NO: 3536668 - RNA, 13 nt, Human
uaacaggcaaaca

SEQ ID NO: 3536669 - RNA, 15 nt, Human
uaacaggccaaagag

SEQ ID NO: 3536670 - RNA, 19 nt, Human
uaacaggcucaaacaauga

SEQ ID NO: 3536671 - RNA, 14 nt, Human
uaacaggcuucugg

SEQ ID NO: 3536672 - RNA, 16 nt, Human
uaacagggaaggcagg

SEQ ID NO: 3536673 - RNA, 19 nt, Human
uaacagggaaggcaggcag

SEQ ID NO: 3536674 - RNA, 17 nt, Human
uaacagggauugauuuu

SEQ ID NO: 3536675 - RNA, 18 nt, Human
uaacaggguaaauuauuc

SEQ ID NO: 3536676 - RNA, 14 nt, Human
uaacagguauuuug

SEQ ID NO: 3536677 - RNA, 19 nt, Human
uaacagguauuuuguuucu

SEQ ID NO: 3536678 - RNA, 20 nt, Human
uaacagguauuuuguuucuu

SEQ ID NO: 3536679 - RNA, 13 nt, Human
uaacaggucuccu

SEQ ID NO: 3536680 - RNA, 14 nt, Human
uaacaggucuccuc

SEQ ID NO: 3536681 - RNA, 15 nt, Human
uaacaggucuccucu

SEQ ID NO: 3536682 - RNA, 21 nt, Human
uaacagguuauuuuaguuucu

SEQ ID NO: 3536683 - RNA, 22 nt, Human
uaacagguuauuuuaguuucug

SEQ ID NO: 3536684 - RNA, 15 nt, Human
uaacaguaucucaaa

SEQ ID NO: 3536685 - RNA, 18 nt, Human
uaacagucauuuaaaaaa

SEQ ID NO: 3536686 - RNA, 20 nt, Human
uaacagugccauugucuuua

SEQ ID NO: 3536687 - RNA, 23 nt, Human
uaacagugccauugucuuuauau

SEQ ID NO: 3536688 - RNA, 17 nt, Human
uaacaguggacaaaguu

SEQ ID NO: 3536689 - RNA, 14 nt, Human
uaacaguguuuaaa

SEQ ID NO: 3536690 - RNA, 21 nt, Human
uaacaguucacuugcagugga

SEQ ID NO: 3536691 - RNA, 18 nt, Human
uaacaguucauguuugcu

SEQ ID NO: 3536692 - RNA, 17 nt, Human
uaacaguuccuuucaaa

SEQ ID NO: 3536693 - RNA, 18 nt, Human
uaacaguuguauuuaaca

SEQ ID NO: 3536694 - RNA, 19 nt, Human
uaacaguuguauuuaacag

SEQ ID NO: 3536695 - RNA, 23 nt, Human
uaacaguuguauuuaacagaaau

SEQ ID NO: 3536696 - RNA, 14 nt, Human
uaacaguuuuccau

SEQ ID NO: 3536697 - RNA, 12 nt, Human
uaacauaaaucu

SEQ ID NO: 3536698 - RNA, 18 nt, Human
uaacauaaaucugugaac

SEQ ID NO: 3536699 - RNA, 20 nt, Human
uaacauaaaucugugaacuu

SEQ ID NO: 3536700 - RNA, 12 nt, Human
uaacauaaauuu

SEQ ID NO: 3536701 - RNA, 19 nt, Human
uaacauaagcuauuuuucu

SEQ ID NO: 3536702 - RNA, 19 nt, Human
uaacauaauuuguacauau

SEQ ID NO: 3536703 - RNA, 17 nt, Human
uaacauagaauugcaau

SEQ ID NO: 3536704 - RNA, 19 nt, Human
uaacauaguaaguucagca

SEQ ID NO: 3536705 - RNA, 21 nt, Human
uaacauaugcaguguucuaca

SEQ ID NO: 3536706 - RNA, 20 nt, Human
uaacauauguacauaaauug

SEQ ID NO: 3536707 - RNA, 13 nt, Human
uaacauauuuacu

SEQ ID NO: 3536708 - RNA, 22 nt, Human
uaacauauuuacuaagccacaa

SEQ ID NO: 3536709 - RNA, 23 nt, Human
uaacauccuuucuauugaaaaau

SEQ ID NO: 3536710 - RNA, 20 nt, Human
uaaaguguccauugacaugu

SEQ ID NO: 3536711 - RNA, 13 nt, Human
uaaagugugugau

SEQ ID NO: 3536712 - RNA, 20 nt, Human
uaaaguguucugccagaucu

SEQ ID NO: 3536713 - RNA, 12 nt, Human
uaaaguguuuca

SEQ ID NO: 3536714 - RNA, 21 nt, Human
uaaaguguuucagcuaaggga

SEQ ID NO: 3536715 - RNA, 13 nt, Human
uaaaguguuuuca

SEQ ID NO: 3536716 - RNA, 16 nt, Human
uaaaguuacuuuguca

SEQ ID NO: 3536717 - RNA, 14 nt, Human
uaaaguuagaaucu

SEQ ID NO: 3536718 - RNA, 19 nt, Human
uaaaguuagaaucuauuuu

SEQ ID NO: 3536719 - RNA, 15 nt, Human
uaaaguuagucuacu

SEQ ID NO: 3536720 - RNA, 16 nt, Human
uaaaguuauauuucag

SEQ ID NO: 3536721 - RNA, 19 nt, Human
uaaaguuauucuugaaguc

SEQ ID NO: 3536722 - RNA, 13 nt, Human
uaaaguucuaaga

SEQ ID NO: 3536723 - RNA, 22 nt, Human
uaaaguucuaagauucugauuu

SEQ ID NO: 3536724 - RNA, 17 nt, Human
uaaaguucugaguguuu

SEQ ID NO: 3536725 - RNA, 12 nt, Human
uaaaguucugug

SEQ ID NO: 3536726 - RNA, 23 nt, Human
uaaaguucuguguauuuaauugu

SEQ ID NO: 3536727 - RNA, 16 nt, Human
uaaaguugguaaaccu

SEQ ID NO: 3536728 - RNA, 17 nt, Human
uaaaguugguaaaccuu

SEQ ID NO: 3536729 - RNA, 20 nt, Human
uaaaguugguauuaauaaaa

SEQ ID NO: 3536730 - RNA, 18 nt, Human
uaaaguugguuggauaag

SEQ ID NO: 3536731 - RNA, 14 nt, Human
uaaaguuuacagua

SEQ ID NO: 3536732 - RNA, 19 nt, Human
uaaaguuucaaaaaucuga

SEQ ID NO: 3536733 - RNA, 13 nt, Human
uaaaguuucucag

SEQ ID NO: 3536734 - RNA, 12 nt, Human
uaaaguuugauc

SEQ ID NO: 3536735 - RNA, 14 nt, Human
uaaaguuugcuuag

SEQ ID NO: 3536736 - RNA, 18 nt, Human
uaaaguuugcuuguuucu

SEQ ID NO: 3536737 - RNA, 18 nt, Human
uaaaguuuuauauauuau

SEQ ID NO: 3536738 - RNA, 19 nt, Human
uaaaguuuuauauauuaua

SEQ ID NO: 3536739 - RNA, 17 nt, Human
uaaauaaaaauaauccu

SEQ ID NO: 3536740 - RNA, 14 nt, Human
uaaauaaaaaugga

SEQ ID NO: 3536741 - RNA, 15 nt, Human
uaaauaaaaaugucu

SEQ ID NO: 3536742 - RNA, 21 nt, Human
uaaauaaaacauuuucacaca

SEQ ID NO: 3536743 - RNA, 21 nt, Human
uaaauaaaagaaaaaauaucu

SEQ ID NO: 3536744 - RNA, 14 nt, Human
uaaauaaaagcagc

SEQ ID NO: 3536745 - RNA, 18 nt, Human
uaaauaaaaguuuuacaa

SEQ ID NO: 3536746 - RNA, 22 nt, Human
uaaauaaaaguuuuacaaaggg

SEQ ID NO: 3536747 - RNA, 16 nt, Human
uaaauaaaauauaauu

SEQ ID NO: 3536748 - RNA, 12 nt, Human
uaaauaaaauca

SEQ ID NO: 3536749 - RNA, 14 nt, Human
uaaauaaaauuugu

SEQ ID NO: 3536750 - RNA, 14 nt, Human
uaaauaaaccacug

SEQ ID NO: 3536751 - RNA, 22 nt, Human
uaaauaaaccucaaaaugucua

SEQ ID NO: 3536752 - RNA, 20 nt, Human
uaaauaaacuuuuuuucaau

SEQ ID NO: 3536753 - RNA, 22 nt, Human
uaaauaaacuuuuuuucaaugu

SEQ ID NO: 3536754 - RNA, 23 nt, Human
uaaauaaacuuuuuuucaaugug

SEQ ID NO: 3536755 - RNA, 15 nt, Human
uaaauaaaguaucau

SEQ ID NO: 3536756 - RNA, 17 nt, Human
uaaauaaauaaauagcu

SEQ ID NO: 3536757 - RNA, 14 nt, Human
uaaauaaauagcua

SEQ ID NO: 3536758 - RNA, 22 nt, Human
uaaauaaauguaucuuauucac

SEQ ID NO: 3536759 - RNA, 18 nt, Human
uaaauaaaugucauuaaa

SEQ ID NO: 3536760 - RNA, 12 nt, Human
uaaauaaauugu

SEQ ID NO: 3536761 - RNA, 14 nt, Human
uaaauaaauuguau

SEQ ID NO: 3536762 - RNA, 16 nt, Human
uaaauaaauuguauau

SEQ ID NO: 3536763 - RNA, 14 nt, Human
uaaauaaauuugac

SEQ ID NO: 3536764 - RNA, 13 nt, Human
uaaauaacuuuuu

SEQ ID NO: 3536765 - RNA, 11 nt, Human
uaaauaagaaa

SEQ ID NO: 3536766 - RNA, 16 nt, Human
uaaauaagaaacuuuu

SEQ ID NO: 3536767 - RNA, 13 nt, Human
uaaauaagagauu

SEQ ID NO: 3536768 - RNA, 18 nt, Human
uaaauaagauucuaacgg

SEQ ID NO: 3536769 - RNA, 14 nt, Human
uaaauaauacauua

SEQ ID NO: 3536770 - RNA, 16 nt, Human
uaaauaaucuuacucu

SEQ ID NO: 3536771 - RNA, 17 nt, Human
uaaauaaugcuucagau

SEQ ID NO: 3536772 - RNA, 14 nt, Human
uaaauaauuuauuu

SEQ ID NO: 3536773 - RNA, 22 nt, Human
uaaauaauuuccuacacaaaug

SEQ ID NO: 3536774 - RNA, 17 nt, Human
uaaauacagacacuaag

SEQ ID NO: 3536775 - RNA, 19 nt, Human
uaaauacagacacuaaguu

SEQ ID NO: 3536776 - RNA, 14 nt, Human
uaaauacaggaaac

SEQ ID NO: 3536777 - RNA, 13 nt, Human
uaaauacagucuu

SEQ ID NO: 3536778 - RNA, 20 nt, Human
uaaauacagucuuccauuug

SEQ ID NO: 3536779 - RNA, 20 nt, Human
uaaauacaugcauauaauga

SEQ ID NO: 3536780 - RNA, 19 nt, Human
uaagugcguguguagaguu

SEQ ID NO: 3536781 - RNA, 21 nt, Human
uaagugcguguguagaguuaa

SEQ ID NO: 3536782 - RNA, 23 nt, Human
uaagugcguguguagaguuaaga

SEQ ID NO: 3536783 - RNA, 15 nt, Human
uaagugcugcauuua

SEQ ID NO: 3536784 - RNA, 18 nt, Human
uaagugcugcauuuaaaa

SEQ ID NO: 3536785 - RNA, 22 nt, Human
uaagugcuguauaaaaucagcc

SEQ ID NO: 3536786 - RNA, 23 nt, Human
uaagugcuguauaaaaucagcca

SEQ ID NO: 3536787 - RNA, 16 nt, Human
uaagugguguguguau

SEQ ID NO: 3536788 - RNA, 23 nt, Human
uaaguguauuuuucaauaaagca

SEQ ID NO: 3536789 - RNA, 14 nt, Human
uaaguguuguaaau

SEQ ID NO: 3536790 - RNA, 14 nt, Human
uaaguuaauuuaaa

SEQ ID NO: 3536791 - RNA, 19 nt, Human
uaaguuacuauccuggcuu

SEQ ID NO: 3536792 - RNA, 19 nt, Human
uaaguuaguuccacugaga

SEQ ID NO: 3536793 - RNA, 14 nt, Human
uaaguuauaagacu

SEQ ID NO: 3536794 - RNA, 20 nt, Human
uaaguuauuaagagguaaga

SEQ ID NO: 3536795 - RNA, 22 nt, Human
uaaguuauuaagagguaagacu

SEQ ID NO: 3536796 - RNA, 15 nt, Human
uaaguuauuuuaccu

SEQ ID NO: 3536797 - RNA, 18 nt, Human
uaaguuauuuuaccuguu

SEQ ID NO: 3536798 - RNA, 20 nt, Human
uaaguuauuuuuacauucug

SEQ ID NO: 3536799 - RNA, 19 nt, Human
uaaguuauuuuuguacaug

SEQ ID NO: 3536800 - RNA, 17 nt, Human
uaaguucacauuagaau

SEQ ID NO: 3536801 - RNA, 14 nt, Human
uaaguucagcacuu

SEQ ID NO: 3536802 - RNA, 17 nt, Human
uaaguucuuagauaucu

SEQ ID NO: 3536803 - RNA, 19 nt, Human
uaaguucuuagauaucuuu

SEQ ID NO: 3536804 - RNA, 12 nt, Human
uaaguucuuaug

SEQ ID NO: 3536805 - RNA, 23 nt, Human
uaaguuggaaacacuaaauguua

SEQ ID NO: 3536806 - RNA, 16 nt, Human
uaaguugggcuugcua

SEQ ID NO: 3536807 - RNA, 18 nt, Human
uaaguugggcuugcuauu

SEQ ID NO: 3536808 - RNA, 19 nt, Human
uaaguugggcuugcuauuc

SEQ ID NO: 3536809 - RNA, 18 nt, Human
uaaguuuaugucuaaaga

SEQ ID NO: 3536810 - RNA, 23 nt, Human
uaaguuucaaacuuacuauuuug

SEQ ID NO: 3536811 - RNA, 16 nt, Human
uaaguuucaggugaca

SEQ ID NO: 3536812 - RNA, 17 nt, Human
uaaguuucaggugacau

SEQ ID NO: 3536813 - RNA, 20 nt, Human
uaaguuucaggugacaugug

SEQ ID NO: 3536814 - RNA, 19 nt, Human
uaaguuuccuuccagccca

SEQ ID NO: 3536815 - RNA, 16 nt, Human
uaaguuucuaagauuc

SEQ ID NO: 3536816 - RNA, 17 nt, Human
uaaguuucuaagauucu

SEQ ID NO: 3536817 - RNA, 21 nt, Human
uaaguuucuaagauucuaaag

SEQ ID NO: 3536818 - RNA, 19 nt, Human
uaaguuucucagcucccau

SEQ ID NO: 3536819 - RNA, 23 nt, Human
uaaguuucucagcucccauuucu

SEQ ID NO: 3536820 - RNA, 13 nt, Human
uaaguuugcacuc

SEQ ID NO: 3536821 - RNA, 21 nt, Human
uaaguuuggcaaacagaaugu

SEQ ID NO: 3536822 - RNA, 21 nt, Human
uaaguuuugacaagcuggcuu

SEQ ID NO: 3536823 - RNA, 16 nt, Human
uaauaaaaaaagaaag

SEQ ID NO: 3536824 - RNA, 19 nt, Human
uaauaaaaaaagaaagcau

SEQ ID NO: 3536825 - RNA, 15 nt, Human
uaauaaaaaauggaa

SEQ ID NO: 3536826 - RNA, 15 nt, Human
uaauaaaaaauuaug

SEQ ID NO: 3536827 - RNA, 16 nt, Human
uaauaaaaagauugaa

SEQ ID NO: 3536828 - RNA, 14 nt, Human
uaauaaaaaggcac

SEQ ID NO: 3536829 - RNA, 14 nt, Human
uaauaaaaagguga

SEQ ID NO: 3536830 - RNA, 11 nt, Human
uaauaaaacug

SEQ ID NO: 3536831 - RNA, 12 nt, Human
uaauaaaacuga

SEQ ID NO: 3536832 - RNA, 22 nt, Human
uaauaaaacuuaacuuccaaug

SEQ ID NO: 3536833 - RNA, 18 nt, Human
uaauaaaauaauucuaaa

SEQ ID NO: 3536834 - RNA, 15 nt, Human
uaauaaaauaucauu

SEQ ID NO: 3536835 - RNA, 18 nt, Human
uaauaaaauaucauucag

SEQ ID NO: 3536836 - RNA, 20 nt, Human
uaauaaaauaucauucagca

SEQ ID NO: 3536837 - RNA, 15 nt, Human
uaauaaaauauuuuc

SEQ ID NO: 3536838 - RNA, 19 nt, Human
uaauaaaauauuuucugug

SEQ ID NO: 3536839 - RNA, 18 nt, Human
uaauaaaauguguugaaa

SEQ ID NO: 3536840 - RNA, 22 nt, Human
uaauaaaauguguugaaacugc

SEQ ID NO: 3536841 - RNA, 12 nt, Human
uaauaaacacuc

SEQ ID NO: 3536842 - RNA, 15 nt, Human
uaauaaacauaauga

SEQ ID NO: 3536843 - RNA, 20 nt, Human
uaauaaacuaauaauugcag

SEQ ID NO: 3536844 - RNA, 17 nt, Human
uaauaaacuuuaauaua

SEQ ID NO: 3536845 - RNA, 21 nt, Human
uaauaaacuuuuuuuugagaa

SEQ ID NO: 3536846 - RNA, 20 nt, Human
uaauaaagaauuaacagaga

SEQ ID NO: 3536847 - RNA, 13 nt, Human
uaauaaagacagg

SEQ ID NO: 3536848 - RNA, 15 nt, Human
uaauaaagacucuac

SEQ ID NO: 3536849 - RNA, 17 nt, Human
uaauaaagaugcucuuu

SEQ ID NO: 3536850 - RNA, 15 nt, Human
uaauaaagcuacuga

SEQ ID NO: 3536851 - RNA, 16 nt, Human
uaauaaagcuacugau

SEQ ID NO: 3536852 - RNA, 12 nt, Human
uaauaaaggacu

SEQ ID NO: 3536853 - RNA, 13 nt, Human
uaauaaaggacug

SEQ ID NO: 3536854 - RNA, 20 nt, Human
uaauaaaggacuguaaucuu

SEQ ID NO: 3536855 - RNA, 20 nt, Human
gcagcaggccuguugcuuuu

SEQ ID NO: 3536856 - RNA, 18 nt, Human
gcagcagggagggcuucu

SEQ ID NO: 3536857 - RNA, 20 nt, Human
gcagcagggcuacccugagc

SEQ ID NO: 3536858 - RNA, 15 nt, Human
gcagcaggugcugcu

SEQ ID NO: 3536859 - RNA, 16 nt, Human
gcagcaggugcugcua

SEQ ID NO: 3536860 - RNA, 22 nt, Human
gcagcaggugcugcuacccucc

SEQ ID NO: 3536861 - RNA, 15 nt, Human
gcagcagugaaaaca

SEQ ID NO: 3536862 - RNA, 16 nt, Human
gcagcagugaaaacaa

SEQ ID NO: 3536863 - RNA, 19 nt, Human
gcagcagugugaggccagg

SEQ ID NO: 3536864 - RNA, 21 nt, Human
gcagcagugugaggccagggc

SEQ ID NO: 3536865 - RNA, 20 nt, Human
gcagcaucucuaccuucucc

SEQ ID NO: 3536866 - RNA, 20 nt, Human
gcagcauggucccugccuua

SEQ ID NO: 3536867 - RNA, 13 nt, Human
gcagccaagcucc

SEQ ID NO: 3536868 - RNA, 17 nt, Human
gcagccaagcuccuugg

SEQ ID NO: 3536869 - RNA, 17 nt, Human
gcagccaaguagccucu

SEQ ID NO: 3536870 - RNA, 20 nt, Human
gcagccacacuucucaggac

SEQ ID NO: 3536871 - RNA, 21 nt, Human
gcagccacacuucucaggaca

SEQ ID NO: 3536872 - RNA, 14 nt, Human
gcagccacccugag

SEQ ID NO: 3536873 - RNA, 15 nt, Human
gcagccacccugagg

SEQ ID NO: 3536874 - RNA, 21 nt, Human
gcagccacccugaggagucug

SEQ ID NO: 3536875 - RNA, 19 nt, Human
gcagccagaccagcaggcu

SEQ ID NO: 3536876 - RNA, 14 nt, Human
gcagccagcaucug

SEQ ID NO: 3536877 - RNA, 15 nt, Human
gcagccagcaucugg

SEQ ID NO: 3536878 - RNA, 11 nt, Human
gcagccagccc

SEQ ID NO: 3536879 - RNA, 15 nt, Human
gcagccagcccagcc

SEQ ID NO: 3536880 - RNA, 14 nt, Human
gcagccagcccugc

SEQ ID NO: 3536881 - RNA, 15 nt, Human
gcagccagcccugcc

SEQ ID NO: 3536882 - RNA, 21 nt, Human
gcagccagcccugccuggagg

SEQ ID NO: 3536883 - RNA, 23 nt, Human
gcagccagccgugagugcagacc

SEQ ID NO: 3536884 - RNA, 18 nt, Human
gcagccagcucucagcca

SEQ ID NO: 3536885 - RNA, 12 nt, Human
gcagccaggaca

SEQ ID NO: 3536886 - RNA, 13 nt, Human
gcagccaggacac

SEQ ID NO: 3536887 - RNA, 12 nt, Human
gcagccaggaga

SEQ ID NO: 3536888 - RNA, 21 nt, Human
gcagccaggagagcuuagggu

SEQ ID NO: 3536889 - RNA, 12 nt, Human
gcagccaggcca

SEQ ID NO: 3536890 - RNA, 14 nt, Human
gcagccaggccaca

SEQ ID NO: 3536891 - RNA, 13 nt, Human
gcagccaggcugc

SEQ ID NO: 3536892 - RNA, 14 nt, Human
gcagccaggcugcc

SEQ ID NO: 3536893 - RNA, 17 nt, Human
gcagccaggcugccaag

SEQ ID NO: 3536894 - RNA, 17 nt, Human
gcagccagggagagccc

SEQ ID NO: 3536895 - RNA, 18 nt, Human
gcagccagggagagccca

SEQ ID NO: 3536896 - RNA, 23 nt, Human
gcagccagggcuuaccuguacac

SEQ ID NO: 3536897 - RNA, 17 nt, Human
gcagccagugcccugag

SEQ ID NO: 3536898 - RNA, 19 nt, Human
gcagccagugcccugagcc

SEQ ID NO: 3536899 - RNA, 22 nt, Human
gcagcccagagacuuuguagau

SEQ ID NO: 3536900 - RNA, 20 nt, Human
gcagcccaugcccaccugcc

SEQ ID NO: 3536901 - RNA, 21 nt, Human
gcagcccauuucuccagaacc

SEQ ID NO: 3536902 - RNA, 14 nt, Human
gcagccccacccag

SEQ ID NO: 3536903 - RNA, 22 nt, Human
gcagccccagcaccaccagguc

SEQ ID NO: 3536904 - RNA, 23 nt, Human
gcagccccagcaccaccaggucu

SEQ ID NO: 3536905 - RNA, 14 nt, Human
gcagccccagccug

SEQ ID NO: 3536906 - RNA, 15 nt, Human
gcagccccagccugc

SEQ ID NO: 3536907 - RNA, 16 nt, Human
gcagccccagccugcu

SEQ ID NO: 3536908 - RNA, 17 nt, Human
gcagccccauucugccu

SEQ ID NO: 3536909 - RNA, 21 nt, Human
gcagccccauucugccugccc

SEQ ID NO: 3536910 - RNA, 24 nt, Human
gcagccccauucugccugcccagg

SEQ ID NO: 3536911 - RNA, 19 nt, Human
gcagcccccacccccaagg

SEQ ID NO: 3536912 - RNA, 23 nt, Human
gcagccccgcgccuccuuccuug

SEQ ID NO: 3536913 - RNA, 21 nt, Human
gcagccccuguucuggcagag

SEQ ID NO: 3536914 - RNA, 15 nt, Human
gcagcccguguggcc

SEQ ID NO: 3536915 - RNA, 17 nt, Human
gcagcccguguggcccc

SEQ ID NO: 3536916 - RNA, 21 nt, Human
gcagcccugagaaagcccugu

SEQ ID NO: 3536917 - RNA, 16 nt, Human
gcagcccugcagaggg

SEQ ID NO: 3536918 - RNA, 19 nt, Human
gcagcccugccccacaccu

SEQ ID NO: 3536919 - RNA, 21 nt, Human
gcagcccugcugcugccugcc

SEQ ID NO: 3536920 - RNA, 14 nt, Human
gcagcccuggaguc

SEQ ID NO: 3536921 - RNA, 18 nt, Human
gcagcccuggagucaugc

SEQ ID NO: 3536922 - RNA, 16 nt, Human
gcagcccuucccccag

SEQ ID NO: 3536923 - RNA, 15 nt, Human
gcagcccuuggccag

SEQ ID NO: 3536924 - RNA, 20 nt, Human
gcagccgccccaucugcccc

SEQ ID NO: 3536925 - RNA, 19 nt, Human
gcagccgccuucacagcag

SEQ ID NO: 3536926 - RNA, 15 nt, Human
gcagccgugaucaag

SEQ ID NO: 3536927 - RNA, 14 nt, Human
gcagccgugccuuc

SEQ ID NO: 3536928 - RNA, 17 nt, Human
gcagccgugccuucagc

SEQ ID NO: 3536929 - RNA, 21 nt, Human
gcagccucaaccuccugggcu

SEQ ID NO: 3536930 - RNA, 17 nt, Human
gcagccucacaguccuu

SEQ ID NO: 3536931 - RNA, 18 nt, Human
gcagccuccaacacaagg

SEQ ID NO: 3536932 - RNA, 22 nt, Human
gcagccucccucugaccugcag

SEQ ID NO: 3536933 - RNA, 23 nt, Human
gcagccucccucugaccugcagg

SEQ ID NO: 3536934 - RNA, 19 nt, Human
gcagccuccgcuucccugg

SEQ ID NO: 3536935 - RNA, 21 nt, Human
gcagccucgaacuccugggcu

SEQ ID NO: 3536936 - RNA, 20 nt, Human
gcagccucgccccuggcaga

SEQ ID NO: 3536937 - RNA, 22 nt, Human
gcagccucucagugcccuccag

SEQ ID NO: 3536938 - RNA, 16 nt, Human
gcagccucuccccagg

SEQ ID NO: 3536939 - RNA, 20 nt, Human
gcagccucuccccaggucca

SEQ ID NO: 3536940 - RNA, 22 nt, Human
gcagccucugaaguuggacagc

SEQ ID NO: 3536941 - RNA, 15 nt, Human
gcagccucugggggg

SEQ ID NO: 3536942 - RNA, 13 nt, Human
gcagccugcgugg

SEQ ID NO: 3536943 - RNA, 22 nt, Human
gcagccugcuucccaccucccu

SEQ ID NO: 3536944 - RNA, 14 nt, Human
gcagccuggacccu

SEQ ID NO: 3536945 - RNA, 19 nt, Human
gcagccuggagcccuggag

SEQ ID NO: 3536946 - RNA, 13 nt, Human
gcagccuggcucc

SEQ ID NO: 3536947 - RNA, 14 nt, Human
gcagccuggcuccc

SEQ ID NO: 3536948 - RNA, 17 nt, Human
gcagccuggcuccccug

SEQ ID NO: 3536949 - RNA, 21 nt, Human
gcagccuggcuccccuggggu

SEQ ID NO: 3536950 - RNA, 17 nt, Human
gcagccuggggcuggcc

SEQ ID NO: 3536951 - RNA, 18 nt, Human
gcagccuggguggcuaug

SEQ ID NO: 3536952 - RNA, 19 nt, Human
gcagccuguccugggcugg

SEQ ID NO: 3536953 - RNA, 23 nt, Human
gcagccuguccugggcugguggc

SEQ ID NO: 3536954 - RNA, 14 nt, Human
gcagccuguggcau

SEQ ID NO: 3536955 - RNA, 16 nt, Human
gcagccuguggcaucu

SEQ ID NO: 3536956 - RNA, 22 nt, Human
gcagccuguggcaucuuugccu

SEQ ID NO: 3536957 - RNA, 18 nt, Human
gcagccuuugccuccccg

SEQ ID NO: 3536958 - RNA, 13 nt, Human
gcagcgaccaccc

SEQ ID NO: 3536959 - RNA, 14 nt, Human
gcagcgaccacccc

SEQ ID NO: 3536960 - RNA, 22 nt, Human
gcagcgaccaccccugccucca

SEQ ID NO: 3536961 - RNA, 15 nt, Human
gcagcgccaagcaac

SEQ ID NO: 3536962 - RNA, 18 nt, Human
gcagcgccaagcaaccug

SEQ ID NO: 3536963 - RNA, 16 nt, Human
gcagcgcccuuccucu

SEQ ID NO: 3536964 - RNA, 13 nt, Human
gcagcgccuuucc

SEQ ID NO: 3536965 - RNA, 15 nt, Human
gcagcucaaaggcac

SEQ ID NO: 3536966 - RNA, 17 nt, Human
gcagcucaaaggcacag

SEQ ID NO: 3536967 - RNA, 16 nt, Human
gcagcucaagagaucc

SEQ ID NO: 3536968 - RNA, 15 nt, Human
gcagcucaccucucc

SEQ ID NO: 3536969 - RNA, 21 nt, Human
gcagcucaccucucccuugga

SEQ ID NO: 3536970 - RNA, 19 nt, Human
gcagcucagagaggguggg

SEQ ID NO: 3536971 - RNA, 19 nt, Human
gcagcucaucucuguccca

SEQ ID NO: 3536972 - RNA, 12 nt, Human
gcagcucccuca

SEQ ID NO: 3536973 - RNA, 17 nt, Human
gcagcucccuggcuucu

SEQ ID NO: 3536974 - RNA, 20 nt, Human
gcagcuccucugucucgagc

SEQ ID NO: 3536975 - RNA, 12 nt, Human
gcagcucuuccu

SEQ ID NO: 3536976 - RNA, 14 nt, Human
gcagcucuuccugg

SEQ ID NO: 3536977 - RNA, 15 nt, Human
gcagcucuugcccuu

SEQ ID NO: 3536978 - RNA, 17 nt, Human
gcagcucuugcccuucc

SEQ ID NO: 3536979 - RNA, 19 nt, Human
gcagcucuugcccuucccu

SEQ ID NO: 3536980 - RNA, 23 nt, Human
gcagcucuugcccuucccugucc

SEQ ID NO: 3536981 - RNA, 22 nt, Human
gcagcucuugcuaaucaguguc

SEQ ID NO: 3536982 - RNA, 22 nt, Human
gcagcugaaauaugcuggcugg

SEQ ID NO: 3536983 - RNA, 18 nt, Human
gcagcugaaauugaaaag

SEQ ID NO: 3536984 - RNA, 14 nt, Human
gcagcugaccucug

SEQ ID NO: 3536985 - RNA, 21 nt, Human
uacaaauuauaaaaagccacu

SEQ ID NO: 3536986 - RNA, 18 nt, Human
uacaaauuauaauguauu

SEQ ID NO: 3536987 - RNA, 22 nt, Human
uacaaauuauaauguauucaua

SEQ ID NO: 3536988 - RNA, 13 nt, Human
uacaaauucaagc

SEQ ID NO: 3536989 - RNA, 21 nt, Human
uacaaauugcuuacuuuggaa

SEQ ID NO: 3536990 - RNA, 17 nt, Human
uacaacacaaagagaaa

SEQ ID NO: 3536991 - RNA, 14 nt, Human
uacaacagauuugu

SEQ ID NO: 3536992 - RNA, 15 nt, Human
uacaacagauuugug

SEQ ID NO: 3536993 - RNA, 19 nt, Human
uacaacagauuugugaacu

SEQ ID NO: 3536994 - RNA, 21 nt, Human
uacaacagauuugugaacuca

SEQ ID NO: 3536995 - RNA, 13 nt, Human
uacaacagccuca

SEQ ID NO: 3536996 - RNA, 15 nt, Human
uacaacagccucacu

SEQ ID NO: 3536997 - RNA, 20 nt, Human
uacaacagugcuaaaaaugg

SEQ ID NO: 3536998 - RNA, 21 nt, Human
uacaacauaaucuaguuuaca

SEQ ID NO: 3536999 - RNA, 20 nt, Human
uacaguagugagaagaauau

SEQ ID NO: 3537000 - RNA, 23 nt, Human
uaagaccggaagcuccugguaug

SEQ ID NO: 3537001 - RNA, 16 nt, Human
uaagaccuacuguucu

SEQ ID NO: 3537002 - RNA, 17 nt, Human
uaagaccuacuguucua

SEQ ID NO: 3537003 - RNA, 19 nt, Human
uaagaccuacuguucuaaa

SEQ ID NO: 3537004 - RNA, 21 nt, Human
uaagaccuacuguucuaaagc

SEQ ID NO: 3537005 - RNA, 11 nt, Human
uaagaccuggc

SEQ ID NO: 3537006 - RNA, 17 nt, Human
uaagaccuggcagcucu

SEQ ID NO: 3537007 - RNA, 14 nt, Human
uaagacgacaagga

SEQ ID NO: 3537008 - RNA, 18 nt, Human
uaagacuaaaucuguaag

SEQ ID NO: 3537009 - RNA, 18 nt, Human
uaagacuauauauauaaa

SEQ ID NO: 3537010 - RNA, 18 nt, Human
uaagacucaaauguucua

SEQ ID NO: 3537011 - RNA, 22 nt, Human
uaagacucaaauguucuaaguu

SEQ ID NO: 3537012 - RNA, 16 nt, Human
uaagacucucacacuc

SEQ ID NO: 3537013 - RNA, 16 nt, Human
uaagacuguaaugaau

SEQ ID NO: 3537014 - RNA, 19 nt, Human
uaagacuguaaugaaucua

SEQ ID NO: 3537015 - RNA, 16 nt, Human
uaagacuuaaugagac

SEQ ID NO: 3537016 - RNA, 18 nt, Human
uaagacuuacucuaagau

SEQ ID NO: 3537017 - RNA, 15 nt, Human
uaagacuugugcaug

SEQ ID NO: 3537018 - RNA, 20 nt, Human
uaagacuuugggauaggaaa

SEQ ID NO: 3537019 - RNA, 17 nt, Human
uaagagaaaauguaaau

SEQ ID NO: 3537020 - RNA, 13 nt, Human
uaagagaaacuuu

SEQ ID NO: 3537021 - RNA, 16 nt, Human
uaagagaaacuuuaua

SEQ ID NO: 3537022 - RNA, 12 nt, Human
uaagagaaaugg

SEQ ID NO: 3537023 - RNA, 18 nt, Human
uaagagaaguagaaauca

SEQ ID NO: 3537024 - RNA, 15 nt, Human
uaagagaaguuguaa

SEQ ID NO: 3537025 - RNA, 23 nt, Human
uaagagaauguuauagugaauua

SEQ ID NO: 3537026 - RNA, 15 nt, Human
uaagagacucagccu

SEQ ID NO: 3537027 - RNA, 23 nt, Human
uaagagagaaugagagacacacu

SEQ ID NO: 3537028 - RNA, 17 nt, Human
uaagagagucuauuuac

SEQ ID NO: 3537029 - RNA, 15 nt, Human
uaagagcaccuuccu

SEQ ID NO: 3537030 - RNA, 19 nt, Human
uaagagcaccuuccucacu

SEQ ID NO: 3537031 - RNA, 22 nt, Human
uaagagccauauaaguuugaag

SEQ ID NO: 3537032 - RNA, 20 nt, Human
uaagagcuagcgcugccgca

SEQ ID NO: 3537033 - RNA, 12 nt, Human
uaagagcuauac

SEQ ID NO: 3537034 - RNA, 12 nt, Human
uaagagcucagg

SEQ ID NO: 3537035 - RNA, 15 nt, Human
uaagagcucaggaug

SEQ ID NO: 3537036 - RNA, 22 nt, Human
uaagagcucaggaugagggaaa

SEQ ID NO: 3537037 - RNA, 14 nt, Human
uaagagcugguguc

SEQ ID NO: 3537038 - RNA, 21 nt, Human
uaagagcuuccaauuuuccuu

SEQ ID NO: 3537039 - RNA, 19 nt, Human
uaagagcuuuacaaaaaga

SEQ ID NO: 3537040 - RNA, 20 nt, Human
uaagagcuuuacaaaaagac

SEQ ID NO: 3537041 - RNA, 20 nt, Human
uaagaggcagaaaauugcac

SEQ ID NO: 3537042 - RNA, 15 nt, Human
uaagaggcagggucu

SEQ ID NO: 3537043 - RNA, 15 nt, Human
uaagaggcugauaau

SEQ ID NO: 3537044 - RNA, 12 nt, Human
uaagagggaggg

SEQ ID NO: 3537045 - RNA, 19 nt, Human
uaagagguaagacuuagua

SEQ ID NO: 3537046 - RNA, 16 nt, Human
uaagagguugauuaua

SEQ ID NO: 3537047 - RNA, 18 nt, Human
uaagaguccaagaaucca

SEQ ID NO: 3537048 - RNA, 13 nt, Human
uaagaguguagaa

SEQ ID NO: 3537049 - RNA, 18 nt, Human
uaagaguguagaagcauu

SEQ ID NO: 3537050 - RNA, 19 nt, Human
uaagaguguagaagcauuc

SEQ ID NO: 3537051 - RNA, 13 nt, Human
uaagaguguuuaa

SEQ ID NO: 3537052 - RNA, 22 nt, Human
uaagauaauaauauauguuuac

SEQ ID NO: 3537053 - RNA, 14 nt, Human
uaagauacaaauua

SEQ ID NO: 3537054 - RNA, 15 nt, Human
uaagauauuuuucau

SEQ ID NO: 3537055 - RNA, 18 nt, Human
uaagaucacugccagaga

SEQ ID NO: 3537056 - RNA, 21 nt, Human
uaagaucacugccagagauaa

SEQ ID NO: 3537057 - RNA, 15 nt, Human
uaagaucacuguuua

SEQ ID NO: 3537058 - RNA, 20 nt, Human
uaagaucacuguuuagauuu

SEQ ID NO: 3537059 - RNA, 21 nt, Human
uaagaucacuguuuagauuug

SEQ ID NO: 3537060 - RNA, 17 nt, Human
uaagaucuauagccucu

SEQ ID NO: 3537061 - RNA, 19 nt, Human
uaagaucucagugguuaag

SEQ ID NO: 3537062 - RNA, 18 nt, Human
uaagaucuuuuauuuugc

SEQ ID NO: 3537063 - RNA, 15 nt, Human
uaagaugacauugcu

SEQ ID NO: 3537064 - RNA, 12 nt, Human
uaagaugcuggg

SEQ ID NO: 3537065 - RNA, 19 nt, Human
uaagauggcaggugauguc

SEQ ID NO: 3537066 - RNA, 13 nt, Human
uaagaugugaaaa

SEQ ID NO: 3537067 - RNA, 14 nt, Human
uaagaugugaaaau

SEQ ID NO: 3537068 - RNA, 23 nt, Human
uaagaugugauauucuaagacuu

SEQ ID NO: 3537069 - RNA, 16 nt, Human
uaagaugugucuucaa

SEQ ID NO: 3537070 - RNA, 20 nt, Human
uaagaugugucuucaauuug

SEQ ID NO: 3537071 - RNA, 14 nt, Human
uaagauuauaauug

SEQ ID NO: 3537072 - RNA, 22 nt, Human
uaagauuauagauucuaaagau

SEQ ID NO: 3537073 - RNA, 17 nt, Human
uaagauuccaaaaagca

SEQ ID NO: 3537074 - RNA, 21 nt, Human
uaagauuccagagaguggcuc

SEQ ID NO: 3537075 - RNA, 10 nt, Human
uaagauucua

SEQ ID NO: 3537076 - RNA, 12 nt, Human
uaagauucuaaa

SEQ ID NO: 3537077 - RNA, 13 nt, Human
uaagauucuaaag

SEQ ID NO: 3537078 - RNA, 16 nt, Human
uaagauucuaaagguc

SEQ ID NO: 3537079 - RNA, 13 nt, Human
uaagauucuaacg

SEQ ID NO: 3537080 - RNA, 12 nt, Human
uaagauucuaga

SEQ ID NO: 3537081 - RNA, 21 nt, Human
uaagauucuagaucagaugcu

SEQ ID NO: 3537082 - RNA, 14 nt, Human
uaagauucugauuu

SEQ ID NO: 3537083 - RNA, 18 nt, Human
uaagauuguuauuaaaug

SEQ ID NO: 3537084 - RNA, 14 nt, Human
uaagauuuaauuug

SEQ ID NO: 3537085 - RNA, 18 nt, Human
uaagauuuaauuugccaa

SEQ ID NO: 3537086 - RNA, 15 nt, Human
uaagauuuccuucuu

SEQ ID NO: 3537087 - RNA, 12 nt, Human
uaagauuuguuu

SEQ ID NO: 3537088 - RNA, 12 nt, Human
uaagauuuuaca

SEQ ID NO: 3537089 - RNA, 22 nt, Human
uaagauuuugaaaacuacauuu

SEQ ID NO: 3537090 - RNA, 15 nt, Human
uaagauuuuucucaa

SEQ ID NO: 3537091 - RNA, 15 nt, Human
uaagcaaaagaaaaa

SEQ ID NO: 3537092 - RNA, 15 nt, Human
uaagcaaaaugugau

SEQ ID NO: 3537093 - RNA, 21 nt, Human
uaagcaaaaugugauauguac

SEQ ID NO: 3537094 - RNA, 14 nt, Human
uaagcaaauacuua

SEQ ID NO: 3537095 - RNA, 16 nt, Human
uaagcaacaauuuuca

SEQ ID NO: 3537096 - RNA, 14 nt, Human
uaagcaacaucuuu

SEQ ID NO: 3537097 - RNA, 14 nt, Human
uaagcaacauggcu

SEQ ID NO: 3537098 - RNA, 16 nt, Human
uaagcaacauggcuuu

SEQ ID NO: 3537099 - RNA, 18 nt, Human
uaagcaagagagauguuu

SEQ ID NO: 3537100 - RNA, 21 nt, Human
uaagcaaguuaaguguccucc

SEQ ID NO: 3537101 - RNA, 16 nt, Human
uaagcacuacauaaac

SEQ ID NO: 3537102 - RNA, 13 nt, Human
uaagcacucuuaa

SEQ ID NO: 3537103 - RNA, 13 nt, Human
uaagcacugugcu

SEQ ID NO: 3537104 - RNA, 13 nt, Human
uaagcacuuuuua

SEQ ID NO: 3537105 - RNA, 16 nt, Human
uaagcagaaagugccu

SEQ ID NO: 3537106 - RNA, 19 nt, Human
uaagcagaaagugccuuuc

SEQ ID NO: 3537107 - RNA, 22 nt, Human
uaagcagaaagugccuuucagg

SEQ ID NO: 3537108 - RNA, 21 nt, Human
uaagcagaauuggaaaagacu

SEQ ID NO: 3537109 - RNA, 17 nt, Human
uaagcagaccacugaua

SEQ ID NO: 3537110 - RNA, 13 nt, Human
uaagcagagaagg

SEQ ID NO: 3537111 - RNA, 22 nt, Human
uaagcagcuaaauuuucugaaa

SEQ ID NO: 3537112 - RNA, 17 nt, Human
uaagcagcucuugcuaa

SEQ ID NO: 3537113 - RNA, 18 nt, Human
uaagcagcucuugcuaau

SEQ ID NO: 3537114 - RNA, 22 nt, Human
uaagcagguggaucuauuucau

SEQ ID NO: 3537115 - RNA, 21 nt, Human
uaagcauaagcuuaugcuuaa

SEQ ID NO: 3537116 - RNA, 19 nt, Human
uaagcauacuuuguaaaua

SEQ ID NO: 3537117 - RNA, 22 nt, Human
uaagcauauauuuuuauauuua

SEQ ID NO: 3537118 - RNA, 16 nt, Human
uaagcaucaaacucuu

SEQ ID NO: 3537119 - RNA, 22 nt, Human
uaagcaucauuauuuauguauu

SEQ ID NO: 3537120 - RNA, 23 nt, Human
uaagcaucauuauuuauguauug

SEQ ID NO: 3537121 - RNA, 14 nt, Human
uaagcaucuaaguu

SEQ ID NO: 3537122 - RNA, 22 nt, Human
uaagcaugacagaaaauaugua

SEQ ID NO: 3537123 - RNA, 21 nt, Human
uaagcauuaccacucaggcau

SEQ ID NO: 3537124 - RNA, 16 nt, Human
uaagcauuacucuugu

SEQ ID NO: 3537125 - RNA, 18 nt, Human
uaagcauuacucuuguaa

SEQ ID NO: 3537126 - RNA, 22 nt, Human
uaagcauuacucuuguaagauu

SEQ ID NO: 3537127 - RNA, 15 nt, Human
uaagcauugccuggc

SEQ ID NO: 3537128 - RNA, 18 nt, Human
uaagcauuggguggguaa

SEQ ID NO: 3537129 - RNA, 20 nt, Human
uaagcauuguuugcuuauug

SEQ ID NO: 3537130 - RNA, 21 nt, Human
uaagcauuguuugcuuauugu

SEQ ID NO: 3537131 - RNA, 23 nt, Human
uaagcauuguuugcuuauuguuc

SEQ ID NO: 3537132 - RNA, 17 nt, Human
uaagccaaaauuaaggu

SEQ ID NO: 3537133 - RNA, 19 nt, Human
uaagccaaaauuaaggugu

SEQ ID NO: 3537134 - RNA, 10 nt, Human
uaagccaagg

SEQ ID NO: 3537135 - RNA, 22 nt, Human
uaagccacaagaaauuugauuu

SEQ ID NO: 3537136 - RNA, 17 nt, Human
uaagccacuuaaaaugu

SEQ ID NO: 3537137 - RNA, 23 nt, Human
uaagccagcaccggaccagccug

SEQ ID NO: 3537138 - RNA, 18 nt, Human
uaagccaguguugccuaa

SEQ ID NO: 3537139 - RNA, 17 nt, Human
uaagccaucuugguaaa

SEQ ID NO: 3537140 - RNA, 14 nt, Human
uaagccaugagaau

SEQ ID NO: 3537141 - RNA, 15 nt, Human
uaagccaugggagac

SEQ ID NO: 3537142 - RNA, 20 nt, Human
uaagccauucugacucauau

SEQ ID NO: 3537143 - RNA, 18 nt, Human
uaagcccagugcacugaa

SEQ ID NO: 3537144 - RNA, 13 nt, Human
gcaucucagccca

SEQ ID NO: 3537145 - RNA, 14 nt, Human
gcaucucagcucau

SEQ ID NO: 3537146 - RNA, 17 nt, Human
gcaucucaguaugaauu

SEQ ID NO: 3537147 - RNA, 15 nt, Human
gcaucuccaccugcu

SEQ ID NO: 3537148 - RNA, 14 nt, Human
gcaucuccaggaag

SEQ ID NO: 3537149 - RNA, 20 nt, Human
gcaucucccucacugaaacc

SEQ ID NO: 3537150 - RNA, 22 nt, Human
gcaucuccugaggaucagaaag

SEQ ID NO: 3537151 - RNA, 13 nt, Human
gcaucucugggcu

SEQ ID NO: 3537152 - RNA, 14 nt, Human
gcaucucugggcug

SEQ ID NO: 3537153 - RNA, 20 nt, Human
gcaucucugucccauucccu

SEQ ID NO: 3537154 - RNA, 19 nt, Human
gcaucugacacaaaaaaag

SEQ ID NO: 3537155 - RNA, 14 nt, Human
gcaucugaccagca

SEQ ID NO: 3537156 - RNA, 18 nt, Human
gcaucugaccagcagcgc

SEQ ID NO: 3537157 - RNA, 15 nt, Human
gcaucugauuugcau

SEQ ID NO: 3537158 - RNA, 16 nt, Human
gcaucugauuugcaua

SEQ ID NO: 3537159 - RNA, 21 nt, Human
gcaucugauuugcauauucau

SEQ ID NO: 3537160 - RNA, 17 nt, Human
gcaucugccccuccccc

SEQ ID NO: 3537161 - RNA, 23 nt, Human
gcaucuggaagagcuaggcaggg

SEQ ID NO: 3537162 - RNA, 18 nt, Human
gcaucuggccuggccagu

SEQ ID NO: 3537163 - RNA, 19 nt, Human
gcaucuggccuggccagug

SEQ ID NO: 3537164 - RNA, 20 nt, Human
gcaucugggauucccaccaa

SEQ ID NO: 3537165 - RNA, 12 nt, Human
gcaucugggccu

SEQ ID NO: 3537166 - RNA, 22 nt, Human
gcaucugggccuuggccuggag

SEQ ID NO: 3537167 - RNA, 13 nt, Human
gcaucuguauaag

SEQ ID NO: 3537168 - RNA, 13 nt, Human
gcaucuguccuca

SEQ ID NO: 3537169 - RNA, 13 nt, Human
gcaucuguuuauu

SEQ ID NO: 3537170 - RNA, 15 nt, Human
gcaucuuacugaagg

SEQ ID NO: 3537171 - RNA, 23 nt, Human
gcaucuuacugaagguaaaauug

SEQ ID NO: 3537172 - RNA, 19 nt, Human
gcaucuucucacucccuuc

SEQ ID NO: 3537173 - RNA, 15 nt, Human
gcaucuugccuccag

SEQ ID NO: 3537174 - RNA, 18 nt, Human
gcaucuuugccuugggcu

SEQ ID NO: 3537175 - RNA, 14 nt, Human
gcaugaaaugugaa

SEQ ID NO: 3537176 - RNA, 20 nt, Human
gcaugaaaugugaauuuuua

SEQ ID NO: 3537177 - RNA, 21 nt, Human
gcaugaacagcuaauuguacc

SEQ ID NO: 3537178 - RNA, 18 nt, Human
gcaugaaggaaacugaac

SEQ ID NO: 3537179 - RNA, 22 nt, Human
gcaugaauuuguaaugucuuga

SEQ ID NO: 3537180 - RNA, 15 nt, Human
gcaugaauuugugaa

SEQ ID NO: 3537181 - RNA, 15 nt, Human
gcaugacaagcccca

SEQ ID NO: 3537182 - RNA, 14 nt, Human
gcaugacagccugc

SEQ ID NO: 3537183 - RNA, 16 nt, Human
gcaugacagccugcag

SEQ ID NO: 3537184 - RNA, 15 nt, Human
gcaugagaggaggca

SEQ ID NO: 3537185 - RNA, 17 nt, Human
gcaugagaggaggcagc

SEQ ID NO: 3537186 - RNA, 19 nt, Human
gcaugagggaucacagggc

SEQ ID NO: 3537187 - RNA, 19 nt, Human
gcaugagggguuccucccc

SEQ ID NO: 3537188 - RNA, 19 nt, Human
gcaugauccaagcaagacu

SEQ ID NO: 3537189 - RNA, 15 nt, Human
gcaugauuuuguaac

SEQ ID NO: 3537190 - RNA, 16 nt, Human
gcaugcacuguucccc

SEQ ID NO: 3537191 - RNA, 17 nt, Human
gcaugcacuguuccccc

SEQ ID NO: 3537192 - RNA, 21 nt, Human
gcaugcacuguucccccugug

SEQ ID NO: 3537193 - RNA, 14 nt, Human
gcaugcagaaaggg

SEQ ID NO: 3537194 - RNA, 12 nt, Human
gcaugcagcagc

SEQ ID NO: 3537195 - RNA, 17 nt, Human
gcaugcagcuuugcaaa

SEQ ID NO: 3537196 - RNA, 12 nt, Human
gcaugcccccuc

SEQ ID NO: 3537197 - RNA, 19 nt, Human
gcaugcccccucgugccag

SEQ ID NO: 3537198 - RNA, 19 nt, Human
gcaugccucugauauggga

SEQ ID NO: 3537199 - RNA, 13 nt, Human
gcaugccugagag

SEQ ID NO: 3537200 - RNA, 12 nt, Human
gcaugccuugug

SEQ ID NO: 3537201 - RNA, 14 nt, Human
gcaugcgcacaagg

SEQ ID NO: 3537202 - RNA, 21 nt, Human
gcaugcgcacaaggcugacca

SEQ ID NO: 3537203 - RNA, 17 nt, Human
gcaugcucucugcagcc

SEQ ID NO: 3537204 - RNA, 23 nt, Human
gcaugcucucugcagccagccca

SEQ ID NO: 3537205 - RNA, 14 nt, Human
gcaugcugcuuuaa

SEQ ID NO: 3537206 - RNA, 13 nt, Human
gcaugcuggggca

SEQ ID NO: 3537207 - RNA, 17 nt, Human
uaaucuuguugauaaaa

SEQ ID NO: 3537208 - RNA, 21 nt, Human
uaaucuuucaaaccagcuuca

SEQ ID NO: 3537209 - RNA, 13 nt, Human
uaaucuuucacag

SEQ ID NO: 3537210 - RNA, 18 nt, Human
uaaucuuucuuuaccuga

SEQ ID NO: 3537211 - RNA, 12 nt, Human
uaaucuuugggu

SEQ ID NO: 3537212 - RNA, 11 nt, Human
uaaucuuuuau

SEQ ID NO: 3537213 - RNA, 15 nt, Human
uaaucuuuucugaau

SEQ ID NO: 3537214 - RNA, 16 nt, Human
uaaugaaaacaaugca

SEQ ID NO: 3537215 - RNA, 13 nt, Human
uaaugaaacaaag

SEQ ID NO: 3537216 - RNA, 23 nt, Human
uaaugaaacaaagaguucaagaa

SEQ ID NO: 3537217 - RNA, 20 nt, Human
uaaugaaacaccuucucugg

SEQ ID NO: 3537218 - RNA, 15 nt, Human
uaaugaaacuuggau

SEQ ID NO: 3537219 - RNA, 14 nt, Human
uaaugaaagacugu

SEQ ID NO: 3537220 - RNA, 17 nt, Human
uaaugaaagacuguaca

SEQ ID NO: 3537221 - RNA, 14 nt, Human
uaaugaaauaucug

SEQ ID NO: 3537222 - RNA, 15 nt, Human
uaaugaaauggagga

SEQ ID NO: 3537223 - RNA, 18 nt, Human
uaaugaaccgcugaauau

SEQ ID NO: 3537224 - RNA, 17 nt, Human
uaaugaagaaaguggaa

SEQ ID NO: 3537225 - RNA, 23 nt, Human
uaaugaagaaaguggaaaacaag

SEQ ID NO: 3537226 - RNA, 13 nt, Human
uaaugaagaucua

SEQ ID NO: 3537227 - RNA, 14 nt, Human
uaaugaagaucuaa

SEQ ID NO: 3537228 - RNA, 15 nt, Human
uaaugaagaucuaaa

SEQ ID NO: 3537229 - RNA, 14 nt, Human
uaaugaagcuuuau

SEQ ID NO: 3537230 - RNA, 16 nt, Human
uaaugaaguaaagcca

SEQ ID NO: 3537231 - RNA, 14 nt, Human
uaaugaaguuugaa

SEQ ID NO: 3537232 - RNA, 21 nt, Human
uaaugaaguuugaauguuaaa

SEQ ID NO: 3537233 - RNA, 22 nt, Human
uaaugaaguuugaauguuaaau

SEQ ID NO: 3537234 - RNA, 20 nt, Human
uaaugaaucguaaugaaguu

SEQ ID NO: 3537235 - RNA, 18 nt, Human
uaaugaaugcuuaaagaa

SEQ ID NO: 3537236 - RNA, 20 nt, Human
uaaugaaugcuuaaagaauu

SEQ ID NO: 3537237 - RNA, 15 nt, Human
uaaugaauuuaguga

SEQ ID NO: 3537238 - RNA, 16 nt, Human
uaaugaauuuuuauga

SEQ ID NO: 3537239 - RNA, 21 nt, Human
uaaugaauuuuuaugauauuc

SEQ ID NO: 3537240 - RNA, 20 nt, Human
uaaugacaucaccacaguuu

SEQ ID NO: 3537241 - RNA, 17 nt, Human
uaaugacauucaauaaa

SEQ ID NO: 3537242 - RNA, 19 nt, Human
uaaugacauucaauaaagu

SEQ ID NO: 3537243 - RNA, 20 nt, Human
uaaugaccacaccugccucu

SEQ ID NO: 3537244 - RNA, 14 nt, Human
uaaugaccaugaaa

SEQ ID NO: 3537245 - RNA, 18 nt, Human
uaaugaccaugaaagacu

SEQ ID NO: 3537246 - RNA, 19 nt, Human
uaaugagacuuuaaaagca

SEQ ID NO: 3537247 - RNA, 18 nt, Human
uaaugagcaauaucugcu

SEQ ID NO: 3537248 - RNA, 18 nt, Human
uaaugagcuuaagaaauu

SEQ ID NO: 3537249 - RNA, 23 nt, Human
uaaugaggagagaaaauauaugu

SEQ ID NO: 3537250 - RNA, 15 nt, Human
uaaugagggacugga

SEQ ID NO: 3537251 - RNA, 13 nt, Human
uaaugaguuuaaa

SEQ ID NO: 3537252 - RNA, 16 nt, Human
uaaugauaacuggaaa

SEQ ID NO: 3537253 - RNA, 17 nt, Human
uaaugauaacuggaaac

SEQ ID NO: 3537254 - RNA, 15 nt, Human
uaaugauaugcuugu

SEQ ID NO: 3537255 - RNA, 18 nt, Human
uaaugaucgaaaaaauaa

SEQ ID NO: 3537256 - RNA, 20 nt, Human
uaaugaucgaaaaaauaauu

SEQ ID NO: 3537257 - RNA, 22 nt, Human
uaaugaugacaaaaaauguuuu

SEQ ID NO: 3537258 - RNA, 18 nt, Human
uaaugauggcccauucua

SEQ ID NO: 3537259 - RNA, 18 nt, Human
uaaugcaauagaagugcu

SEQ ID NO: 3537260 - RNA, 16 nt, Human
uaaugcaguaugguac

SEQ ID NO: 3537261 - RNA, 17 nt, Human
uaaugcaguugcuuacu

SEQ ID NO: 3537262 - RNA, 22 nt, Human
uaaugcaucuagauuauggagc

SEQ ID NO: 3537263 - RNA, 22 nt, Human
uaaugcauuaaaccugucucca

SEQ ID NO: 3537264 - RNA, 19 nt, Human
uaaugcauucuucucuguu

SEQ ID NO: 3537265 - RNA, 19 nt, Human
uaaugccacuaaauugaca

SEQ ID NO: 3537266 - RNA, 20 nt, Human
uaaugccauuuuaaggaaaa

SEQ ID NO: 3537267 - RNA, 18 nt, Human
uaaugccucuucauucuu

SEQ ID NO: 3537268 - RNA, 15 nt, Human
uaaugccugcuuuuu

SEQ ID NO: 3537269 - RNA, 21 nt, Human
uaaugccuuacucuucuugaa

SEQ ID NO: 3537270 - RNA, 22 nt, Human
uaaugccuuuaaaguaugaauc

SEQ ID NO: 3537271 - RNA, 17 nt, Human
uaaugcgauuuuauuac

SEQ ID NO: 3537272 - RNA, 23 nt, Human
uaaugcgcaggcuggcccugccc

SEQ ID NO: 3537273 - RNA, 14 nt, Human
uaaugcgugcauac

SEQ ID NO: 3537274 - RNA, 22 nt, Human
uaaugcgugcauaccacuuuug

SEQ ID NO: 3537275 - RNA, 20 nt, Human
uaaugcuaaagaaaaaguca

SEQ ID NO: 3537276 - RNA, 14 nt, Human
uaaugcuaaaugua

SEQ ID NO: 3537277 - RNA, 17 nt, Human
uaaugcuacgugugauu

SEQ ID NO: 3537278 - RNA, 22 nt, Human
uaaugcuacgugugauuuuucu

SEQ ID NO: 3537279 - RNA, 13 nt, Human
uaaugcuggagcg

SEQ ID NO: 3537280 - RNA, 16 nt, Human
uaaugcuuaagaggga

SEQ ID NO: 3537281 - RNA, 14 nt, Human
uaaugcuucagaua

SEQ ID NO: 3537282 - RNA, 14 nt, Human
uaaugcuucauuca

SEQ ID NO: 3537283 - RNA, 19 nt, Human
uaaugcuugcugcugauuu

SEQ ID NO: 3537284 - RNA, 17 nt, Human
uaaugcuuucacaacau

SEQ ID NO: 3537285 - RNA, 15 nt, Human
uaaugcuuugaaauu

SEQ ID NO: 3537286 - RNA, 22 nt, Human
uaauggaaaaaaaaaaaagagg

SEQ ID NO: 3537287 - RNA, 20 nt, Human
uaauggaaguguauuuauuu

SEQ ID NO: 3537288 - RNA, 22 nt, Human
uaauggauuauaaucagaaugg

SEQ ID NO: 3537289 - RNA, 20 nt, Human
gcauguguauuuccagugca

SEQ ID NO: 3537290 - RNA, 19 nt, Human
gcaugugugcgagugugug

SEQ ID NO: 3537291 - RNA, 14 nt, Human
gcaugugugugcuc

SEQ ID NO: 3537292 - RNA, 20 nt, Human
gcauguguuugguucugggg

SEQ ID NO: 3537293 - RNA, 13 nt, Human
gcauguuacauaa

SEQ ID NO: 3537294 - RNA, 14 nt, Human
gcauguuauguuua

SEQ ID NO: 3537295 - RNA, 21 nt, Human
gcauguucacccuuauagucu

SEQ ID NO: 3537296 - RNA, 16 nt, Human
gcauguuccacuaacc

SEQ ID NO: 3537297 - RNA, 15 nt, Human
gcauguucucugagg

SEQ ID NO: 3537298 - RNA, 15 nt, Human
gcauguuugaaauga

SEQ ID NO: 3537299 - RNA, 13 nt, Human
gcauguuuugcau

SEQ ID NO: 3537300 - RNA, 15 nt, Human
gcauguuuugcaugu

SEQ ID NO: 3537301 - RNA, 20 nt, Human
gcauguuuuguauacaaaua

SEQ ID NO: 3537302 - RNA, 18 nt, Human
gcauguuuugugcauuug

SEQ ID NO: 3537303 - RNA, 13 nt, Human
gcauuaaaacuua

SEQ ID NO: 3537304 - RNA, 13 nt, Human
gcauuaaaagaaa

SEQ ID NO: 3537305 - RNA, 15 nt, Human
gcauuaaaagaaaau

SEQ ID NO: 3537306 - RNA, 23 nt, Human
gcauuaaauuuuagcaaagauau

SEQ ID NO: 3537307 - RNA, 18 nt, Human
gcauuaacuaaucuauug

SEQ ID NO: 3537308 - RNA, 12 nt, Human
gcauuaauguuu

SEQ ID NO: 3537309 - RNA, 14 nt, Human
gcauuacagagagg

SEQ ID NO: 3537310 - RNA, 18 nt, Human
gcauuaccgcguuguaaa

SEQ ID NO: 3537311 - RNA, 16 nt, Human
gcauuaccucuuugga

SEQ ID NO: 3537312 - RNA, 18 nt, Human
gcauuacgugagccaggu

SEQ ID NO: 3537313 - RNA, 15 nt, Human
gcauuacucuuguaa

SEQ ID NO: 3537314 - RNA, 17 nt, Human
gcauuacucuuguaaga

SEQ ID NO: 3537315 - RNA, 21 nt, Human
gcauuacucuuguaagauuuu

SEQ ID NO: 3537316 - RNA, 17 nt, Human
gcauuacugcaugcacu

SEQ ID NO: 3537317 - RNA, 21 nt, Human
gcauuagaaauagacaguaua

SEQ ID NO: 3537318 - RNA, 13 nt, Human
gcauuagaaauua

SEQ ID NO: 3537319 - RNA, 20 nt, Human
gcauuagcacagauuuuaau

SEQ ID NO: 3537320 - RNA, 15 nt, Human
gcauuagcuaaaacc

SEQ ID NO: 3537321 - RNA, 17 nt, Human
gcauuagugggaaaaag

SEQ ID NO: 3537322 - RNA, 20 nt, Human
gcauuauaaucaccagggcc

SEQ ID NO: 3537323 - RNA, 17 nt, Human
gcauuaucuagauacug

SEQ ID NO: 3537324 - RNA, 19 nt, Human
gcauuaugcaauuuuuaua

SEQ ID NO: 3537325 - RNA, 22 nt, Human
gcauuauguccacuguguauag

SEQ ID NO: 3537326 - RNA, 11 nt, Human
gcauuauuuga

SEQ ID NO: 3537327 - RNA, 15 nt, Human
gcauuauuugagaag

SEQ ID NO: 3537328 - RNA, 13 nt, Human
gcauuauuuucca

SEQ ID NO: 3537329 - RNA, 20 nt, Human
gcauucacccagacagcucc

SEQ ID NO: 3537330 - RNA, 13 nt, Human
gcauucagagagc

SEQ ID NO: 3537331 - RNA, 15 nt, Human
gcauucauuuuuaua

SEQ ID NO: 3537332 - RNA, 15 nt, Human
gcauuccagccccuc

SEQ ID NO: 3537333 - RNA, 17 nt, Human
gcauuccagucaggcuc

SEQ ID NO: 3537334 - RNA, 13 nt, Human
gcauucccagugg

SEQ ID NO: 3537335 - RNA, 12 nt, Human
gcauuccccacu

SEQ ID NO: 3537336 - RNA, 12 nt, Human
gcauuccccagg

SEQ ID NO: 3537337 - RNA, 19 nt, Human
gcauuccccaggaggccag

SEQ ID NO: 3537338 - RNA, 13 nt, Human
gcauucccugagu

SEQ ID NO: 3537339 - RNA, 14 nt, Human
gcauucccugaguc

SEQ ID NO: 3537340 - RNA, 22 nt, Human
gcauuccugauaugauuuaaaa

SEQ ID NO: 3537341 - RNA, 16 nt, Human
gcauuccuuugucuuc

SEQ ID NO: 3537342 - RNA, 14 nt, Human
gcauucggagggag

SEQ ID NO: 3537343 - RNA, 22 nt, Human
gcauucguuguguuuuuuaaga

SEQ ID NO: 3537344 - RNA, 23 nt, Human
gcauucguuguguuuuuuaagau

SEQ ID NO: 3537345 - RNA, 14 nt, Human
gcauucuauugccu

SEQ ID NO: 3537346 - RNA, 22 nt, Human
gcauucuauugccuucuuugaa

SEQ ID NO: 3537347 - RNA, 15 nt, Human
gcauucucacuccua

SEQ ID NO: 3537348 - RNA, 21 nt, Human
gcauucuccccaguguauguc

SEQ ID NO: 3537349 - RNA, 16 nt, Human
gcauucuccuggaugc

SEQ ID NO: 3537350 - RNA, 20 nt, Human
gcauucugccucucuaggac

SEQ ID NO: 3537351 - RNA, 22 nt, Human
gcauucuuagccuguggcagua

SEQ ID NO: 3537352 - RNA, 14 nt, Human
gcauucuuauucau

SEQ ID NO: 3537353 - RNA, 14 nt, Human
gcauucuucugauc

SEQ ID NO: 3537354 - RNA, 17 nt, Human
gcauucuugguuggcug

SEQ ID NO: 3537355 - RNA, 11 nt, Human
gcauucuuucc

SEQ ID NO: 3537356 - RNA, 13 nt, Human
gcauucuuuccca

SEQ ID NO: 3537357 - RNA, 13 nt, Human
gcauucuuucugu

SEQ ID NO: 3537358 - RNA, 18 nt, Human
gcauucuuucuguauuga

SEQ ID NO: 3537359 - RNA, 20 nt, Human
gcauucuuuuaaaagacaag

SEQ ID NO: 3537360 - RNA, 11 nt, Human
gcauugaaauu

SEQ ID NO: 3537361 - RNA, 21 nt, Human
gcauugaacacaaacuguaaa

SEQ ID NO: 3537362 - RNA, 19 nt, Human
gcauugaauggcuauguuu

SEQ ID NO: 3537363 - RNA, 21 nt, Human
gcauugaauggcuauguuuuu

SEQ ID NO: 3537364 - RNA, 15 nt, Human
gcauugacaaaucug

SEQ ID NO: 3537365 - RNA, 19 nt, Human
gcauugacaaaucugugua

SEQ ID NO: 3537366 - RNA, 21 nt, Human
gcauugacuuucaguaaacau

SEQ ID NO: 3537367 - RNA, 17 nt, Human
gcauugacuuuccccac

SEQ ID NO: 3537368 - RNA, 15 nt, Human
gcauugagcugagau

SEQ ID NO: 3537369 - RNA, 15 nt, Human
gcauugauauuguga

SEQ ID NO: 3537370 - RNA, 16 nt, Human
gcauugccaagggcuu

SEQ ID NO: 3537371 - RNA, 14 nt, Human
gcauugccauuccc

SEQ ID NO: 3537372 - RNA, 17 nt, Human
gcauugcuagauaaaag

SEQ ID NO: 3537373 - RNA, 18 nt, Human
uacugguccaaaagauug

SEQ ID NO: 3537374 - RNA, 19 nt, Human
uacuggucucucuaugccu

SEQ ID NO: 3537375 - RNA, 18 nt, Human
uacuggucuuguggaauu

SEQ ID NO: 3537376 - RNA, 13 nt, Human
uacugguugcaug

SEQ ID NO: 3537377 - RNA, 20 nt, Human
uacuguaaaaugcaaaaaau

SEQ ID NO: 3537378 - RNA, 16 nt, Human
uacuguaacauucagg

SEQ ID NO: 3537379 - RNA, 14 nt, Human
uacuguaagaauaa

SEQ ID NO: 3537380 - RNA, 13 nt, Human
uacuguaagacau

SEQ ID NO: 3537381 - RNA, 23 nt, Human
uacuguaauuugugauacaaugc

SEQ ID NO: 3537382 - RNA, 14 nt, Human
uacuguacaauaaa

SEQ ID NO: 3537383 - RNA, 18 nt, Human
uacuguacaauaaaaaca

SEQ ID NO: 3537384 - RNA, 19 nt, Human
uacuguacagauugcugcu

SEQ ID NO: 3537385 - RNA, 19 nt, Human
uacuguacagcuggcucua

SEQ ID NO: 3537386 - RNA, 22 nt, Human
uacuguacaugaaaacacauuu

SEQ ID NO: 3537387 - RNA, 12 nt, Human
uacuguaguuuu

SEQ ID NO: 3537388 - RNA, 17 nt, Human
uacuguauagacaguuu

SEQ ID NO: 3537389 - RNA, 12 nt, Human
uacuguauuuga

SEQ ID NO: 3537390 - RNA, 18 nt, Human
uacugucaaaauaauuuu

SEQ ID NO: 3537391 - RNA, 14 nt, Human
uacugucucacuga

SEQ ID NO: 3537392 - RNA, 17 nt, Human
uacugucugauuggcuu

SEQ ID NO: 3537393 - RNA, 12 nt, Human
uacugucuuaau

SEQ ID NO: 3537394 - RNA, 13 nt, Human
uacugucuuaauu

SEQ ID NO: 3537395 - RNA, 15 nt, Human
uacugugaaacuggc

SEQ ID NO: 3537396 - RNA, 20 nt, Human
uacuguggaaaaauauuuaa

SEQ ID NO: 3537397 - RNA, 18 nt, Human
uacuguggaaaagaaaca

SEQ ID NO: 3537398 - RNA, 16 nt, Human
uacugugggcaauuua

SEQ ID NO: 3537399 - RNA, 16 nt, Human
uacuguguaaacucau

SEQ ID NO: 3537400 - RNA, 16 nt, Human
uacuguguaauauaaa

SEQ ID NO: 3537401 - RNA, 12 nt, Human
uacuguguacug

SEQ ID NO: 3537402 - RNA, 13 nt, Human
uacuguguacugu

SEQ ID NO: 3537403 - RNA, 23 nt, Human
uacugugucuuugguuugugcua

SEQ ID NO: 3537404 - RNA, 22 nt, Human
uacugugugugugaaugaacac

SEQ ID NO: 3537405 - RNA, 23 nt, Human
uacugugugugugaaugaacacu

SEQ ID NO: 3537406 - RNA, 16 nt, Human
uacuguguuccuggca

SEQ ID NO: 3537407 - RNA, 19 nt, Human
uacuguguuccuggcaaua

SEQ ID NO: 3537408 - RNA, 15 nt, Human
uacuguuaaaggaaa

SEQ ID NO: 3537409 - RNA, 18 nt, Human
uacuguuaaccauuuaag

SEQ ID NO: 3537410 - RNA, 13 nt, Human
uacuguuacuggg

SEQ ID NO: 3537411 - RNA, 16 nt, Human
uacuguuauucuuugc

SEQ ID NO: 3537412 - RNA, 20 nt, Human
uacuguuauucuuugcacuu

SEQ ID NO: 3537413 - RNA, 12 nt, Human
uacuguucuaaa

SEQ ID NO: 3537414 - RNA, 16 nt, Human
uacuguucugugucuu

SEQ ID NO: 3537415 - RNA, 17 nt, Human
uacuguucugugucuuu

SEQ ID NO: 3537416 - RNA, 14 nt, Human
uacuguucuugcug

SEQ ID NO: 3537417 - RNA, 15 nt, Human
uacuguucuugcugc

SEQ ID NO: 3537418 - RNA, 21 nt, Human
uacuguucuugcugcuagaac

SEQ ID NO: 3537419 - RNA, 23 nt, Human
uacuguucuugcugcuagaacuu

SEQ ID NO: 3537420 - RNA, 23 nt, Human
uacuguugcacaauuuugauaaa

SEQ ID NO: 3537421 - RNA, 13 nt, Human
uacuguugcacgu

SEQ ID NO: 3537422 - RNA, 15 nt, Human
uacuguugcacgugu

SEQ ID NO: 3537423 - RNA, 16 nt, Human
uacuguugcacgugug

SEQ ID NO: 3537424 - RNA, 16 nt, Human
uacuguuguaagaauu

SEQ ID NO: 3537425 - RNA, 14 nt, Human
uacuguugugaccu

SEQ ID NO: 3537426 - RNA, 19 nt, Human
uacuguuuaagugaauuga

SEQ ID NO: 3537427 - RNA, 15 nt, Human
uacuguuuauuacuu

SEQ ID NO: 3537428 - RNA, 13 nt, Human
uacuguuucuguc

SEQ ID NO: 3537429 - RNA, 19 nt, Human
uacuguuuuaucuggcccc

SEQ ID NO: 3537430 - RNA, 20 nt, Human
uacuuaaauggaaaaaauga

SEQ ID NO: 3537431 - RNA, 23 nt, Human
uacuuaaaugguaauaagcacug

SEQ ID NO: 3537432 - RNA, 24 nt, Human
uacuuaaaugguaauaagcacugu

SEQ ID NO: 3537433 - RNA, 13 nt, Human
uacuuaacuguuu

SEQ ID NO: 3537434 - RNA, 12 nt, Human
uacuuaagagaa

SEQ ID NO: 3537435 - RNA, 21 nt, Human
uagaaaaagggucaaugcuau

SEQ ID NO: 3537436 - RNA, 20 nt, Human
uagaaaaauucagcaaacca

SEQ ID NO: 3537437 - RNA, 15 nt, Human
uagaaaacaauggaa

SEQ ID NO: 3537438 - RNA, 15 nt, Human
uagaaaacugaaaau

SEQ ID NO: 3537439 - RNA, 16 nt, Human
uagaaaacugaaaauc

SEQ ID NO: 3537440 - RNA, 22 nt, Human
uagaaaacugaaaaucuaauau

SEQ ID NO: 3537441 - RNA, 16 nt, Human
uagaaaacuuuaaagc

SEQ ID NO: 3537442 - RNA, 14 nt, Human
uagaaaacuuuguu

SEQ ID NO: 3537443 - RNA, 18 nt, Human
uagaaaagaacuggaaac

SEQ ID NO: 3537444 - RNA, 21 nt, Human
uagaaaaggcuagguacacag

SEQ ID NO: 3537445 - RNA, 12 nt, Human
uagaaaagguga

SEQ ID NO: 3537446 - RNA, 21 nt, Human
uagaaaaggugauaaaaucau

SEQ ID NO: 3537447 - RNA, 16 nt, Human
uagaaaaguauguucu

SEQ ID NO: 3537448 - RNA, 18 nt, Human
uagaaaaguauguucuaa

SEQ ID NO: 3537449 - RNA, 14 nt, Human
uagaaaaguuauua

SEQ ID NO: 3537450 - RNA, 14 nt, Human
uagaaaauauaagu

SEQ ID NO: 3537451 - RNA, 22 nt, Human
uagaaaauauaaguaaagugau

SEQ ID NO: 3537452 - RNA, 12 nt, Human
uagaaaaugugu

SEQ ID NO: 3537453 - RNA, 22 nt, Human
uagaaaauuuaaaacauuacuc

SEQ ID NO: 3537454 - RNA, 13 nt, Human
uagaaacaaaaua

SEQ ID NO: 3537455 - RNA, 16 nt, Human
uagaaacaaaauacaa

SEQ ID NO: 3537456 - RNA, 15 nt, Human
uagaaacacaacuau

SEQ ID NO: 3537457 - RNA, 14 nt, Human
uagaaacauaaaua

SEQ ID NO: 3537458 - RNA, 15 nt, Human
uagaaacauugaaga

SEQ ID NO: 3537459 - RNA, 18 nt, Human
uagaaacccaagcuccuc

SEQ ID NO: 3537460 - RNA, 21 nt, Human
uagaaacccaagcuccuccuc

SEQ ID NO: 3537461 - RNA, 14 nt, Human
uagaaaccuuaaua

SEQ ID NO: 3537462 - RNA, 18 nt, Human
uagaaacuggaaauacua

SEQ ID NO: 3537463 - RNA, 22 nt, Human
uagaaacuuaucuuacaaagug

SEQ ID NO: 3537464 - RNA, 12 nt, Human
uagaaagaaagu

SEQ ID NO: 3537465 - RNA, 14 nt, Human
uagaaagaagccca

SEQ ID NO: 3537466 - RNA, 23 nt, Human
uagaaagaagcccaauauuauaa

SEQ ID NO: 3537467 - RNA, 15 nt, Human
uagaaagaccaggcc

SEQ ID NO: 3537468 - RNA, 17 nt, Human
uagaaagagauacagag

SEQ ID NO: 3537469 - RNA, 17 nt, Human
uagaaagcagagauuuu

SEQ ID NO: 3537470 - RNA, 14 nt, Human
uagaaagcauuuga

SEQ ID NO: 3537471 - RNA, 20 nt, Human
uagaaagcauuugaaugcau

SEQ ID NO: 3537472 - RNA, 21 nt, Human
uagaaagcauuugaaugcauu

SEQ ID NO: 3537473 - RNA, 22 nt, Human
uagaaagccaaaucaaaauaug

SEQ ID NO: 3537474 - RNA, 11 nt, Human
uagaaagcuau

SEQ ID NO: 3537475 - RNA, 18 nt, Human
uagaaagcugacauugcc

SEQ ID NO: 3537476 - RNA, 21 nt, Human
uagaaagcugacauugccaaa

SEQ ID NO: 3537477 - RNA, 22 nt, Human
uagaaagcuuuguugaaagaaa

SEQ ID NO: 3537478 - RNA, 14 nt, Human
uagaaaggccuuua

SEQ ID NO: 3537479 - RNA, 15 nt, Human
uagaaaggccuuuaa

SEQ ID NO: 3537480 - RNA, 15 nt, Human
uagaaaggggcccag

SEQ ID NO: 3537481 - RNA, 22 nt, Human
uagaaaguguucuguuacaaaa

SEQ ID NO: 3537482 - RNA, 21 nt, Human
uagaaauaaaagugaaugaaa

SEQ ID NO: 3537483 - RNA, 23 nt, Human
uagaaauaaaagugaaugaaaga

SEQ ID NO: 3537484 - RNA, 19 nt, Human
uagaaauaaaggaugugau

SEQ ID NO: 3537485 - RNA, 16 nt, Human
uagaaauaacagaaga

SEQ ID NO: 3537486 - RNA, 14 nt, Human
uagaaauaguuuga

SEQ ID NO: 3537487 - RNA, 15 nt, Human
uagaaauauuuuaaa

SEQ ID NO: 3537488 - RNA, 19 nt, Human
uagaaauauuuuaaaauca

SEQ ID NO: 3537489 - RNA, 20 nt, Human
uagaaauauuuuaaaaucag

SEQ ID NO: 3537490 - RNA, 18 nt, Human
uagaaaugaccaauauua

SEQ ID NO: 3537491 - RNA, 19 nt, Human
uagaaaugaugauguggaa

SEQ ID NO: 3537492 - RNA, 17 nt, Human
uagaaauggaaauuuug

SEQ ID NO: 3537493 - RNA, 19 nt, Human
uagaaaugguuguauuaga

SEQ ID NO: 3537494 - RNA, 20 nt, Human
uagaaaugguuguauuagau

SEQ ID NO: 3537495 - RNA, 15 nt, Human
uagaaauguaaacug

SEQ ID NO: 3537496 - RNA, 18 nt, Human
uagaaauuaccuguggau

SEQ ID NO: 3537497 - RNA, 23 nt, Human
uagaaauuuauuuccuaguucug

SEQ ID NO: 3537498 - RNA, 14 nt, Human
uagaaauuuuacaa

SEQ ID NO: 3537499 - RNA, 22 nt, Human
uagaaauuuuacaauaggugcu

SEQ ID NO: 3537500 - RNA, 16 nt, Human
uagaaauuuuguaaga

SEQ ID NO: 3537501 - RNA, 22 nt, Human
uagaaauuuuucagaugcuucu

SEQ ID NO: 3537502 - RNA, 17 nt, Human
uagaacaauuuucuugu

SEQ ID NO: 3537503 - RNA, 14 nt, Human
uagaacacagaaag

SEQ ID NO: 3537504 - RNA, 15 nt, Human
uagaacacagaaagc

SEQ ID NO: 3537505 - RNA, 19 nt, Human
uagaacacuaauucauaau

SEQ ID NO: 3537506 - RNA, 20 nt, Human
uagaacacuaauucauaauc

SEQ ID NO: 3537507 - RNA, 20 nt, Human
uagaacacuauuuucagaau

SEQ ID NO: 3537508 - RNA, 21 nt, Human
uagaacacuauuuucagaauc

SEQ ID NO: 3537509 - RNA, 22 nt, Human
uagaacacuauuuucagaaucu

SEQ ID NO: 3537510 - RNA, 15 nt, Human
uagaacagaaaacaa

SEQ ID NO: 3537511 - RNA, 16 nt, Human
uagaacagaaaacaac

SEQ ID NO: 3537512 - RNA, 22 nt, Human
uagaacagaaaacaacaaaaaa

SEQ ID NO: 3537513 - RNA, 23 nt, Human
uagaacagagaaagaggaagcuu

SEQ ID NO: 3537514 - RNA, 22 nt, Human
uagaacagggaaaauaggcagg

SEQ ID NO: 3537515 - RNA, 20 nt, Human
uagaacaguggaaacuaugu

SEQ ID NO: 3537516 - RNA, 18 nt, Human
uagaacauugauugcugu

SEQ ID NO: 3537517 - RNA, 16 nt, Human
uagaaccaagaagggc

SEQ ID NO: 3537518 - RNA, 20 nt, Human
uagaaccaccaacaagcaag

SEQ ID NO: 3537519 - RNA, 22 nt, Human
uagaaccaccaacaagcaagcu

SEQ ID NO: 3537520 - RNA, 15 nt, Human
uagaaccacuaugaa

SEQ ID NO: 3537521 - RNA, 16 nt, Human
uagaaccacuaugaag

SEQ ID NO: 3537522 - RNA, 21 nt, Human
uagaaccauguugguugcacu

SEQ ID NO: 3537523 - RNA, 23 nt, Human
uagaaccauguugguugcacuuu

SEQ ID NO: 3537524 - RNA, 15 nt, Human
uagaaccuaauucaa

SEQ ID NO: 3537525 - RNA, 23 nt, Human
uagaaccuaauucaauucaaagc

SEQ ID NO: 3537526 - RNA, 23 nt, Human
uagaaccuagagaagcuaaaacc

SEQ ID NO: 3537527 - RNA, 14 nt, Human
uaauuguguuuaca

SEQ ID NO: 3537528 - RNA, 16 nt, Human
uaauuguguuuacauu

SEQ ID NO: 3537529 - RNA, 17 nt, Human
uaauuguguuuacauuu

SEQ ID NO: 3537530 - RNA, 20 nt, Human
uaauuguguuuacauuuuau

SEQ ID NO: 3537531 - RNA, 12 nt, Human
uaauuguugaaa

SEQ ID NO: 3537532 - RNA, 20 nt, Human
uaauuguugaacagguguuu

SEQ ID NO: 3537533 - RNA, 14 nt, Human
uaauuguugcauag

SEQ ID NO: 3537534 - RNA, 14 nt, Human
uaauuguuguucug

SEQ ID NO: 3537535 - RNA, 16 nt, Human
uaauuguuguucuguu

SEQ ID NO: 3537536 - RNA, 21 nt, Human
uaauuguuguucuguuaacug

SEQ ID NO: 3537537 - RNA, 19 nt, Human
uaauuguuguuuguaugua

SEQ ID NO: 3537538 - RNA, 12 nt, Human
uaauuguuuaaa

SEQ ID NO: 3537539 - RNA, 18 nt, Human
uaauuguuuugcacuuuu

SEQ ID NO: 3537540 - RNA, 17 nt, Human
uaauuuaaacaggccca

SEQ ID NO: 3537541 - RNA, 13 nt, Human
uaauuuaaagaga

SEQ ID NO: 3537542 - RNA, 12 nt, Human
uaauuuaaauga

SEQ ID NO: 3537543 - RNA, 13 nt, Human
uaauuuaaaugaa

SEQ ID NO: 3537544 - RNA, 19 nt, Human
uaauuuaacuuucuggguu

SEQ ID NO: 3537545 - RNA, 21 nt, Human
uaauuuaaggucuguuugcug

SEQ ID NO: 3537546 - RNA, 23 nt, Human
uaauuuaaggucuguuugcuguu

SEQ ID NO: 3537547 - RNA, 15 nt, Human
uaauuuaaguuuuga

SEQ ID NO: 3537548 - RNA, 21 nt, Human
uaauuuaaugcauguuaggaa

SEQ ID NO: 3537549 - RNA, 17 nt, Human
uaauuuaccugaagucu

SEQ ID NO: 3537550 - RNA, 20 nt, Human
uaauuuacuggacaaagaau

SEQ ID NO: 3537551 - RNA, 16 nt, Human
uaauuuacuuguuuug

SEQ ID NO: 3537552 - RNA, 17 nt, Human
uaauuuagacuuggauu

SEQ ID NO: 3537553 - RNA, 20 nt, Human
uaauuuaggaguuuugagaa

SEQ ID NO: 3537554 - RNA, 19 nt, Human
uaauuuaggguacuaaauu

SEQ ID NO: 3537555 - RNA, 21 nt, Human
uaauuuaggguacuaaauuua

SEQ ID NO: 3537556 - RNA, 16 nt, Human
uaauuuaguaaaccaa

SEQ ID NO: 3537557 - RNA, 17 nt, Human
uaauuuaguaaauguua

SEQ ID NO: 3537558 - RNA, 16 nt, Human
uaauuuaguuguuucu

SEQ ID NO: 3537559 - RNA, 19 nt, Human
uaauuuaguuguuucuaga

SEQ ID NO: 3537560 - RNA, 16 nt, Human
uaauuuaguuucauau

SEQ ID NO: 3537561 - RNA, 13 nt, Human
uaauuuauaaaau

SEQ ID NO: 3537562 - RNA, 16 nt, Human
uaauuuauacagguca

SEQ ID NO: 3537563 - RNA, 18 nt, Human
uaauuuauaguuuauaca

SEQ ID NO: 3537564 - RNA, 18 nt, Human
uaauuuaucuaaauuaaa

SEQ ID NO: 3537565 - RNA, 14 nt, Human
uaauuuaugaguuu

SEQ ID NO: 3537566 - RNA, 19 nt, Human
uaauuuauuaauugcuuug

SEQ ID NO: 3537567 - RNA, 14 nt, Human
uaauuuauuauuaa

SEQ ID NO: 3537568 - RNA, 17 nt, Human
uaauuuauuauugaaau

SEQ ID NO: 3537569 - RNA, 20 nt, Human
uaauuuauuauugaaauugu

SEQ ID NO: 3537570 - RNA, 12 nt, Human
uaauuuauuuau

SEQ ID NO: 3537571 - RNA, 18 nt, Human
uaauuuauuuauuaagau

SEQ ID NO: 3537572 - RNA, 18 nt, Human
uaauuucaaaaauauaac

SEQ ID NO: 3537573 - RNA, 11 nt, Human
uaauuucagug

SEQ ID NO: 3537574 - RNA, 15 nt, Human
uaauuucaguguaaa

SEQ ID NO: 3537575 - RNA, 16 nt, Human
uaauuucaguguaaag

SEQ ID NO: 3537576 - RNA, 22 nt, Human
uaauuuccauuuacuuaagacu

SEQ ID NO: 3537577 - RNA, 17 nt, Human
uaauuuccuggugugaa

SEQ ID NO: 3537578 - RNA, 18 nt, Human
uaauuucugccauuucau

SEQ ID NO: 3537579 - RNA, 19 nt, Human
uaccauuucagagaggccu

SEQ ID NO: 3537580 - RNA, 13 nt, Human
uaccauuucagua

SEQ ID NO: 3537581 - RNA, 19 nt, Human
uaccauuuccguaauucuu

SEQ ID NO: 3537582 - RNA, 20 nt, Human
uagcauccuaagaaauaugu

SEQ ID NO: 3537583 - RNA, 18 nt, Human
uagcaucuggaagaucau

SEQ ID NO: 3537584 - RNA, 22 nt, Human
uagcaucuucuggagucuccag

SEQ ID NO: 3537585 - RNA, 16 nt, Human
uagcaugacaagcccc

SEQ ID NO: 3537586 - RNA, 18 nt, Human
uagcaugcacaaagugua

SEQ ID NO: 3537587 - RNA, 18 nt, Human
uagcaugcuuguugcaau

SEQ ID NO: 3537588 - RNA, 15 nt, Human
uagcauggcauauuu

SEQ ID NO: 3537589 - RNA, 21 nt, Human
uagcauggcauauuuuucaca

SEQ ID NO: 3537590 - RNA, 22 nt, Human
uagcauggcauauuuuucacau

SEQ ID NO: 3537591 - RNA, 19 nt, Human
uagcauggcugccaauggg

SEQ ID NO: 3537592 - RNA, 22 nt, Human
uagcauggcugccaaugggagc

SEQ ID NO: 3537593 - RNA, 23 nt, Human
uagcauguauugugucuuuugca

SEQ ID NO: 3537594 - RNA, 20 nt, Human
uagcauguugagccaggccu

SEQ ID NO: 3537595 - RNA, 17 nt, Human
uagcauguuugcugaac

SEQ ID NO: 3537596 - RNA, 15 nt, Human
uagcauuaugcaauu

SEQ ID NO: 3537597 - RNA, 20 nt, Human
uagcauucuuuggaguuaaa

SEQ ID NO: 3537598 - RNA, 18 nt, Human
uagcauuguaaaagcauu

SEQ ID NO: 3537599 - RNA, 21 nt, Human
uagcauuguagugcuuugaga

SEQ ID NO: 3537600 - RNA, 20 nt, Human
uagcauugugaacugacagg

SEQ ID NO: 3537601 - RNA, 15 nt, Human
uagcauuuaugguaa

SEQ ID NO: 3537602 - RNA, 13 nt, Human
uagcauuucauuc

SEQ ID NO: 3537603 - RNA, 14 nt, Human
uagcauuuuaaaca

SEQ ID NO: 3537604 - RNA, 17 nt, Human
uagcauuuucugcaucu

SEQ ID NO: 3537605 - RNA, 14 nt, Human
uagcauuuuugauu

SEQ ID NO: 3537606 - RNA, 20 nt, Human
uagccaaaaaugucuaaaag

SEQ ID NO: 3537607 - RNA, 18 nt, Human
uagccaacggccccagcu

SEQ ID NO: 3537608 - RNA, 12 nt, Human
uagccaaggcca

SEQ ID NO: 3537609 - RNA, 15 nt, Human
uagccaaggccaaag

SEQ ID NO: 3537610 - RNA, 23 nt, Human
uagccaaggugggcugagcccug

SEQ ID NO: 3537611 - RNA, 14 nt, Human
uagccaauguggga

SEQ ID NO: 3537612 - RNA, 20 nt, Human
uagccacaaaauugggaaag

SEQ ID NO: 3537613 - RNA, 19 nt, Human
uagccacaucccuuugaaa

SEQ ID NO: 3537614 - RNA, 16 nt, Human
uagccacauuuggaau

SEQ ID NO: 3537615 - RNA, 20 nt, Human
uagccacauuuggaauacuu

SEQ ID NO: 3537616 - RNA, 18 nt, Human
uagccacccaccacacug

SEQ ID NO: 3537617 - RNA, 19 nt, Human
uagccaccgccuccuacag

SEQ ID NO: 3537618 - RNA, 22 nt, Human
uagccacuaguaaguaauuaug

SEQ ID NO: 3537619 - RNA, 23 nt, Human
uagccacuuaccuucaauaaagu

SEQ ID NO: 3537620 - RNA, 15 nt, Human
uagccagacacucug

SEQ ID NO: 3537621 - RNA, 16 nt, Human
uagccagacacucugc

SEQ ID NO: 3537622 - RNA, 11 nt, Human
uagccagagga

SEQ ID NO: 3537623 - RNA, 18 nt, Human
uagccagauuugucuuuu

SEQ ID NO: 3537624 - RNA, 19 nt, Human
uagccagcacuuguauaua

SEQ ID NO: 3537625 - RNA, 15 nt, Human
uagccaggaucaugg

SEQ ID NO: 3537626 - RNA, 18 nt, Human
uagccaggaucauggugu

SEQ ID NO: 3537627 - RNA, 20 nt, Human
uagccaggaucaugguguaa

SEQ ID NO: 3537628 - RNA, 17 nt, Human
uagccaguaauccugua

SEQ ID NO: 3537629 - RNA, 18 nt, Human
uagccaguaauccuguag

SEQ ID NO: 3537630 - RNA, 23 nt, Human
uagccagugcuccaggcacccag

SEQ ID NO: 3537631 - RNA, 13 nt, Human
uagccaugaccuu

SEQ ID NO: 3537632 - RNA, 17 nt, Human
uagccauguuaacauga

SEQ ID NO: 3537633 - RNA, 19 nt, Human
uagccauuccugguaccca

SEQ ID NO: 3537634 - RNA, 20 nt, Human
uagccauuuuucaaagcaau

SEQ ID NO: 3537635 - RNA, 22 nt, Human
uagccauuuuucaaagcaauug

SEQ ID NO: 3537636 - RNA, 14 nt, Human
uagcccaaaaccaa

SEQ ID NO: 3537637 - RNA, 17 nt, Human
uagcccagcgcucugcc

SEQ ID NO: 3537638 - RNA, 13 nt, Human
uagcccaggagag

SEQ ID NO: 3537639 - RNA, 14 nt, Human
uagcccaggagaga

SEQ ID NO: 3537640 - RNA, 17 nt, Human
uagcccaggagagagaa

SEQ ID NO: 3537641 - RNA, 20 nt, Human
uagcccaggauauauuuuau

SEQ ID NO: 3537642 - RNA, 22 nt, Human
uagcccaggauauauuuuauuu

SEQ ID NO: 3537643 - RNA, 19 nt, Human
uagcccagguccucugaua

SEQ ID NO: 3537644 - RNA, 14 nt, Human
uagcccaucccugc

SEQ ID NO: 3537645 - RNA, 17 nt, Human
uagcccaucccugccug

SEQ ID NO: 3537646 - RNA, 18 nt, Human
uagcccaucccugccugg

SEQ ID NO: 3537647 - RNA, 21 nt, Human
uagcccaucccugccugguca

SEQ ID NO: 3537648 - RNA, 22 nt, Human
uagcccauggacuucacauaag

SEQ ID NO: 3537649 - RNA, 21 nt, Human
uagccccaacccaaaccugga

SEQ ID NO: 3537650 - RNA, 22 nt, Human
uagccccaacccaaaccuggag

SEQ ID NO: 3537651 - RNA, 19 nt, Human
uagccccaagaaggcuggg

SEQ ID NO: 3537652 - RNA, 16 nt, Human
uagccccacaggaggu

SEQ ID NO: 3537653 - RNA, 13 nt, Human
uagccccauaauu

SEQ ID NO: 3537654 - RNA, 15 nt, Human
uagcccccacccacu

SEQ ID NO: 3537655 - RNA, 18 nt, Human
uagcccccacccacuucc

SEQ ID NO: 3537656 - RNA, 18 nt, Human
uagcccccaggcugcugg

SEQ ID NO: 3537657 - RNA, 22 nt, Human
uagccccucccaagcuggcugg

SEQ ID NO: 3537658 - RNA, 16 nt, Human
uagccccucuccugga

SEQ ID NO: 3537659 - RNA, 15 nt, Human
uagcccgaauacaaa

SEQ ID NO: 3537660 - RNA, 16 nt, Human
uagcccgaauacaaac

SEQ ID NO: 3537661 - RNA, 16 nt, Human
uagcccucacauuaga

SEQ ID NO: 3537662 - RNA, 13 nt, Human
uagcccuuucugu

SEQ ID NO: 3537663 - RNA, 16 nt, Human
uagccgaccucagccu

SEQ ID NO: 3537664 - RNA, 17 nt, Human
uagccgaccucagccuu

SEQ ID NO: 3537665 - RNA, 17 nt, Human
uagccgagagccugcuc

SEQ ID NO: 3537666 - RNA, 21 nt, Human
uagccgauaucagaauuugug

SEQ ID NO: 3537667 - RNA, 19 nt, Human
uagccgcccaugcacuggg

SEQ ID NO: 3537668 - RNA, 16 nt, Human
uagccggccacuuugg

SEQ ID NO: 3537669 - RNA, 16 nt, Human
uagccgguuccugucc

SEQ ID NO: 3537670 - RNA, 20 nt, Human
uagccuaacacacuccaaga

SEQ ID NO: 3537671 - RNA, 18 nt, Human
uagccuaagauauacuug

SEQ ID NO: 3537672 - RNA, 18 nt, Human
uagccuagauaugaauau

SEQ ID NO: 3537673 - RNA, 17 nt, Human
uagccuauauuuacagu

SEQ ID NO: 3537674 - RNA, 12 nt, Human
uagccucagggg

SEQ ID NO: 3537675 - RNA, 13 nt, Human
uagccugaugaga

SEQ ID NO: 3537676 - RNA, 17 nt, Human
uagccugccucuucucu

SEQ ID NO: 3537677 - RNA, 14 nt, Human
uagccuggcuuggg

SEQ ID NO: 3537678 - RNA, 17 nt, Human
uagccugggccacaggg

SEQ ID NO: 3537679 - RNA, 15 nt, Human
uagccuggugguuuu

SEQ ID NO: 3537680 - RNA, 14 nt, Human
uagccuguccuguc

SEQ ID NO: 3537681 - RNA, 16 nt, Human
uagccuguccugucau

SEQ ID NO: 3537682 - RNA, 12 nt, Human
uagccuguggcc

SEQ ID NO: 3537683 - RNA, 13 nt, Human
uagccuguggccu

SEQ ID NO: 3537684 - RNA, 20 nt, Human
uagccuguuucuuccuguua

SEQ ID NO: 3537685 - RNA, 21 nt, Human
uagccuuagaagucacacagu

SEQ ID NO: 3537686 - RNA, 15 nt, Human
uagccuuauccucug

SEQ ID NO: 3537687 - RNA, 22 nt, Human
uagccuuccguaacccaacucu

SEQ ID NO: 3537688 - RNA, 15 nt, Human
uagccuucucuguuc

SEQ ID NO: 3537689 - RNA, 16 nt, Human
uagccuucucuguuca

SEQ ID NO: 3537690 - RNA, 14 nt, Human
uagccuugcuuguu

SEQ ID NO: 3537691 - RNA, 15 nt, Human
uagccuugcuuguua

SEQ ID NO: 3537692 - RNA, 22 nt, Human
uagccuuuaccugugaaguguu

SEQ ID NO: 3537693 - RNA, 16 nt, Human
uagccuuuggcucugg

SEQ ID NO: 3537694 - RNA, 22 nt, Human
uagccuuuuuguauaaaauaga

SEQ ID NO: 3537695 - RNA, 19 nt, Human
uagcgacaacagauuggau

SEQ ID NO: 3537696 - RNA, 16 nt, Human
uagcgaucucuccugg

SEQ ID NO: 3537697 - RNA, 20 nt, Human
uagcgaucucuccuggccua

SEQ ID NO: 3537698 - RNA, 14 nt, Human
uagcgcccaguugg

SEQ ID NO: 3537699 - RNA, 21 nt, Human
uagcgcuaucucccugccucc

SEQ ID NO: 3537700 - RNA, 22 nt, Human
uagcgcugccgcaccccagagu

SEQ ID NO: 3537701 - RNA, 14 nt, Human
uagcguguguagau

SEQ ID NO: 3537702 - RNA, 16 nt, Human
uagcguucuuguaauu

SEQ ID NO: 3537703 - RNA, 21 nt, Human
uagcguucuuguaauuuuaca

SEQ ID NO: 3537704 - RNA, 21 nt, Human
uagcguuggaauuaaaacaau

SEQ ID NO: 3537705 - RNA, 16 nt, Human
uagcguuuuuuaaaug

SEQ ID NO: 3537706 - RNA, 17 nt, Human
uagcguuuuuuaaaugu

SEQ ID NO: 3537707 - RNA, 18 nt, Human
uagcguuuuuuaaaugua

SEQ ID NO: 3537708 - RNA, 22 nt, Human
uagcguuuuuuaaauguauacu

SEQ ID NO: 3537709 - RNA, 19 nt, Human
uagcuaaacggauuccaaa

SEQ ID NO: 3537710 - RNA, 20 nt, Human
uagcuaagaaauaaaacugu

SEQ ID NO: 3537711 - RNA, 14 nt, Human
uagcuaaguacaca

SEQ ID NO: 3537712 - RNA, 12 nt, Human
uagcuacagaga

SEQ ID NO: 3537713 - RNA, 21 nt, Human
uagcuacagagaaaccagcuu

SEQ ID NO: 3537714 - RNA, 19 nt, Human
uagcuacccaaaagagaaa

SEQ ID NO: 3537715 - RNA, 21 nt, Human
uagcuagacuggugacugauu

SEQ ID NO: 3537716 - RNA, 14 nt, Human
uagcuagaggaacc

SEQ ID NO: 3537717 - RNA, 15 nt, Human
uagcuagaggaacca

SEQ ID NO: 3537718 - RNA, 19 nt, Human
uagcuauauccauguacug

SEQ ID NO: 3537719 - RNA, 16 nt, Human
uagcuauuuuuaugga

SEQ ID NO: 3537720 - RNA, 16 nt, Human
uagcucaaugagcaug

SEQ ID NO: 3537721 - RNA, 14 nt, Human
uagcucagccccag

SEQ ID NO: 3537722 - RNA, 20 nt, Human
uagcucagccccagcccagc

SEQ ID NO: 3537723 - RNA, 19 nt, Human
uaggacacaguuccuggga

SEQ ID NO: 3537724 - RNA, 23 nt, Human
uaggacauguucccuucuccuuc

SEQ ID NO: 3537725 - RNA, 14 nt, Human
uaggaccaagaaag

SEQ ID NO: 3537726 - RNA, 17 nt, Human
uaggaccaagcaucuug

SEQ ID NO: 3537727 - RNA, 18 nt, Human
uaggaccaagcaucuugg

SEQ ID NO: 3537728 - RNA, 22 nt, Human
uaggaccaagcaucuugggggg

SEQ ID NO: 3537729 - RNA, 19 nt, Human
uaggaccacucagccccua

SEQ ID NO: 3537730 - RNA, 13 nt, Human
uaggacccuuccc

SEQ ID NO: 3537731 - RNA, 21 nt, Human
uaggaccuuuccaccacagcc

SEQ ID NO: 3537732 - RNA, 14 nt, Human
uaggacucugaggc

SEQ ID NO: 3537733 - RNA, 14 nt, Human
uaggacuguagaaa

SEQ ID NO: 3537734 - RNA, 17 nt, Human
uaggacuuguuuuuguu

SEQ ID NO: 3537735 - RNA, 12 nt, Human
uaggagaagcca

SEQ ID NO: 3537736 - RNA, 20 nt, Human
uaggagaagucuucuauuua

SEQ ID NO: 3537737 - RNA, 20 nt, Human
uaggagacuugccagagccg

SEQ ID NO: 3537738 - RNA, 14 nt, Human
uaggagagaccgag

SEQ ID NO: 3537739 - RNA, 21 nt, Human
uaggagagagaucaugagaaa

SEQ ID NO: 3537740 - RNA, 17 nt, Human
uaggagaggagaaccag

SEQ ID NO: 3537741 - RNA, 14 nt, Human
uaggagaggaugag

SEQ ID NO: 3537742 - RNA, 22 nt, Human
uaggagaggaugagagcccaga

SEQ ID NO: 3537743 - RNA, 16 nt, Human
uaggagcaaagccugu

SEQ ID NO: 3537744 - RNA, 15 nt, Human
uaggagccugcuggu

SEQ ID NO: 3537745 - RNA, 16 nt, Human
uaggagcuaaggcucu

SEQ ID NO: 3537746 - RNA, 14 nt, Human
uaggagggacuguc

SEQ ID NO: 3537747 - RNA, 21 nt, Human
uaggagggaguuaucuaaaag

SEQ ID NO: 3537748 - RNA, 13 nt, Human
uaggaggguccuc

SEQ ID NO: 3537749 - RNA, 16 nt, Human
uaggagggugggaagg

SEQ ID NO: 3537750 - RNA, 21 nt, Human
uaggagugggugacaagagcc

SEQ ID NO: 3537751 - RNA, 19 nt, Human
uaggaguggugauuugaaa

SEQ ID NO: 3537752 - RNA, 21 nt, Human
uaggaguucgagaccagccug

SEQ ID NO: 3537753 - RNA, 23 nt, Human
uaggaguucgagaccagccuggc

SEQ ID NO: 3537754 - RNA, 21 nt, Human
uaggauaaaaagccagggcug

SEQ ID NO: 3537755 - RNA, 14 nt, Human
uaggauacugcugc

SEQ ID NO: 3537756 - RNA, 18 nt, Human
uaggauaugccugcucuu

SEQ ID NO: 3537757 - RNA, 21 nt, Human
uaggauaugccugcucuuugg

SEQ ID NO: 3537758 - RNA, 21 nt, Human
uaggauccagugauccuuaca

SEQ ID NO: 3537759 - RNA, 14 nt, Human
uaggauguaaaucu

SEQ ID NO: 3537760 - RNA, 22 nt, Human
uaggauuuaacagucauuuaaa

SEQ ID NO: 3537761 - RNA, 22 nt, Human
uaggauuuuggauguugagagg

SEQ ID NO: 3537762 - RNA, 12 nt, Human
uaggcaacauag

SEQ ID NO: 3537763 - RNA, 18 nt, Human
uaggcacucuuaaaugau

SEQ ID NO: 3537764 - RNA, 18 nt, Human
uaggcacuguaguucuaa

SEQ ID NO: 3537765 - RNA, 19 nt, Human
uaggcacuguaguucuaag

SEQ ID NO: 3537766 - RNA, 17 nt, Human
uaggcacuuuaaaacac

SEQ ID NO: 3537767 - RNA, 15 nt, Human
uaggcagacacaggg

SEQ ID NO: 3537768 - RNA, 13 nt, Human
uaggcagagccuu

SEQ ID NO: 3537769 - RNA, 20 nt, Human
uaggcagauugaaaaggaca

SEQ ID NO: 3537770 - RNA, 13 nt, Human
uaggcagcagcuu

SEQ ID NO: 3537771 - RNA, 12 nt, Human
uaggcaggacca

SEQ ID NO: 3537772 - RNA, 14 nt, Human
uaggcaggaccugu

SEQ ID NO: 3537773 - RNA, 24 nt, Human
uaggcaguuagagaugccucccug

SEQ ID NO: 3537774 - RNA, 16 nt, Human
uaggcauaugcuucuu

SEQ ID NO: 3537775 - RNA, 17 nt, Human
uaggcaucucuguacuu

SEQ ID NO: 3537776 - RNA, 23 nt, Human
uaggcaugaagagcaaaaauauc

SEQ ID NO: 3537777 - RNA, 14 nt, Human
uaggcauguaaaca

SEQ ID NO: 3537778 - RNA, 20 nt, Human
uaggcauuaacacaaaggag

SEQ ID NO: 3537779 - RNA, 20 nt, Human
uaggcauucuggaccucugg

SEQ ID NO: 3537780 - RNA, 18 nt, Human
uaggcauugugggaaggg

SEQ ID NO: 3537781 - RNA, 19 nt, Human
uaggccaaagacaaauagu

SEQ ID NO: 3537782 - RNA, 23 nt, Human
uaggccaagguguccuacagaaa

SEQ ID NO: 3537783 - RNA, 13 nt, Human
uaggccacuccuc

SEQ ID NO: 3537784 - RNA, 15 nt, Human
uaggccacuccucca

SEQ ID NO: 3537785 - RNA, 13 nt, Human
uaggccagcaagc

SEQ ID NO: 3537786 - RNA, 18 nt, Human
uaggccaugggacaggga

SEQ ID NO: 3537787 - RNA, 16 nt, Human
uaggcccacacacagg

SEQ ID NO: 3537788 - RNA, 19 nt, Human
uaggcccccacuugccucu

SEQ ID NO: 3537789 - RNA, 21 nt, Human
uaggcccccacuugccucuuc

SEQ ID NO: 3537790 - RNA, 19 nt, Human
uaggccggugugccugacu

SEQ ID NO: 3537791 - RNA, 17 nt, Human
uaggccguuccuucaaa

SEQ ID NO: 3537792 - RNA, 22 nt, Human
uaggccuacuggggaucagagu

SEQ ID NO: 3537793 - RNA, 18 nt, Human
uaggccucagccagagaa

SEQ ID NO: 3537794 - RNA, 22 nt, Human
uaggccucagccagagaagcua

SEQ ID NO: 3537795 - RNA, 14 nt, Human
uaggccuggcacag

SEQ ID NO: 3537796 - RNA, 17 nt, Human
uaggccuggcacagugu

SEQ ID NO: 3537797 - RNA, 13 nt, Human
uaggccuggccag

SEQ ID NO: 3537798 - RNA, 14 nt, Human
uaggccuucuugug

SEQ ID NO: 3537799 - RNA, 23 nt, Human
uaggccuugcggcuccucaggga

SEQ ID NO: 3537800 - RNA, 15 nt, Human
uaggcgaccaccgcc

SEQ ID NO: 3537801 - RNA, 13 nt, Human
uaggcgaucacaa

SEQ ID NO: 3537802 - RNA, 13 nt, Human
uaggcuaauguca

SEQ ID NO: 3537803 - RNA, 14 nt, Human
uaggcuaaugucaa

SEQ ID NO: 3537804 - RNA, 14 nt, Human
uaggcuacagagaa

SEQ ID NO: 3537805 - RNA, 16 nt, Human
uaggcuacagagaagc

SEQ ID NO: 3537806 - RNA, 20 nt, Human
uaggcuacagagaagccuuc

SEQ ID NO: 3537807 - RNA, 21 nt, Human
uaggcuacagagaagccuuca

SEQ ID NO: 3537808 - RNA, 14 nt, Human
uaggcuauucacaa

SEQ ID NO: 3537809 - RNA, 20 nt, Human
uaggcuauuuucuaaagacu

SEQ ID NO: 3537810 - RNA, 19 nt, Human
uaggcucagagaugugcac

SEQ ID NO: 3537811 - RNA, 22 nt, Human
uaggcuccgucaguaucaggcc

SEQ ID NO: 3537812 - RNA, 22 nt, Human
uaggcucgccuucccuccugcu

SEQ ID NO: 3537813 - RNA, 11 nt, Human
uaggcucugca

SEQ ID NO: 3537814 - RNA, 21 nt, Human
uaggcucugcacagauggauu

SEQ ID NO: 3537815 - RNA, 13 nt, Human
uaggcucugccuu

SEQ ID NO: 3537816 - RNA, 21 nt, Human
uaggcugacaccuaacucuuc

SEQ ID NO: 3537817 - RNA, 23 nt, Human
uaggcugacaccuaacucuucuu

SEQ ID NO: 3537818 - RNA, 12 nt, Human
uaggcuggaagg

SEQ ID NO: 3537819 - RNA, 15 nt, Human
uaggcuggagaagcu

SEQ ID NO: 3537820 - RNA, 19 nt, Human
uaggcuggagaagcucacc

SEQ ID NO: 3537821 - RNA, 21 nt, Human
uaggcuggagaagcucaccca

SEQ ID NO: 3537822 - RNA, 19 nt, Human
uaggcuggagcccagggag

SEQ ID NO: 3537823 - RNA, 12 nt, Human
uaggcugggugc

SEQ ID NO: 3537824 - RNA, 16 nt, Human
uaggcugguggcccag

SEQ ID NO: 3537825 - RNA, 19 nt, Human
uaggcuguaacuacuuuau

SEQ ID NO: 3537826 - RNA, 21 nt, Human
uaggcuguaacuacuuuauaa

SEQ ID NO: 3537827 - RNA, 14 nt, Human
uaggcuuucagcuu

SEQ ID NO: 3537828 - RNA, 21 nt, Human
uagggaaaaaccagcguguga

SEQ ID NO: 3537829 - RNA, 16 nt, Human
uagggaaaacauucca

SEQ ID NO: 3537830 - RNA, 20 nt, Human
uagggaagggugguggagcc

SEQ ID NO: 3537831 - RNA, 21 nt, Human
uagggaagggugguggagcca

SEQ ID NO: 3537832 - RNA, 22 nt, Human
uagggacaggaccccagcucug

SEQ ID NO: 3537833 - RNA, 15 nt, Human
uagggaccccuccuc

SEQ ID NO: 3537834 - RNA, 17 nt, Human
uagggacugaccagcag

SEQ ID NO: 3537835 - RNA, 14 nt, Human
uagggagagaagau

SEQ ID NO: 3537836 - RNA, 13 nt, Human
uagggagauauuu

SEQ ID NO: 3537837 - RNA, 12 nt, Human
uagggagccaug

SEQ ID NO: 3537838 - RNA, 17 nt, Human
uagggagccauuugaga

SEQ ID NO: 3537839 - RNA, 13 nt, Human
uagggaggaccac

SEQ ID NO: 3537840 - RNA, 13 nt, Human
uagggaggcagcc

SEQ ID NO: 3537841 - RNA, 16 nt, Human
uagggaggcagccucc

SEQ ID NO: 3537842 - RNA, 18 nt, Human
uagggagggcggcagggg

SEQ ID NO: 3537843 - RNA, 15 nt, Human
uagggaguauucuaa

SEQ ID NO: 3537844 - RNA, 21 nt, Human
uagggauagucaccuuuuaaa

SEQ ID NO: 3537845 - RNA, 23 nt, Human
uagggaucaaccagcuaagaaaa

SEQ ID NO: 3537846 - RNA, 16 nt, Human
uagggaugccuccuuu

SEQ ID NO: 3537847 - RNA, 15 nt, Human
uagggcaauuggaac

SEQ ID NO: 3537848 - RNA, 15 nt, Human
uagggcacugggcug

SEQ ID NO: 3537849 - RNA, 22 nt, Human
uagggcaggagugagaggucuc

SEQ ID NO: 3537850 - RNA, 16 nt, Human
uagggcauuguaucug

SEQ ID NO: 3537851 - RNA, 16 nt, Human
uagggccaagcccagc

SEQ ID NO: 3537852 - RNA, 11 nt, Human
uagggccaggc

SEQ ID NO: 3537853 - RNA, 23 nt, Human
uagggcuacaaaaccugauguua

SEQ ID NO: 3537854 - RNA, 14 nt, Human
uagggcuggaccua

SEQ ID NO: 3537855 - RNA, 20 nt, Human
uagggcugggcaaggaaaaa

SEQ ID NO: 3537856 - RNA, 21 nt, Human
uagggcugggcaaggaaaaag

SEQ ID NO: 3537857 - RNA, 23 nt, Human
uaggggacacuucccucuguuuc

SEQ ID NO: 3537858 - RNA, 11 nt, Human
uaggggcuggg

SEQ ID NO: 3537859 - RNA, 21 nt, Human
uaggggcuuauaauaaaggac

SEQ ID NO: 3537860 - RNA, 15 nt, Human
uagggggcuggagga

SEQ ID NO: 3537861 - RNA, 18 nt, Human
uagggggcuggaggagcc

SEQ ID NO: 3537862 - RNA, 15 nt, Human
uagggggcuuucugg

SEQ ID NO: 3537863 - RNA, 22 nt, Human
uaggggucugucuuuuaaacuc

SEQ ID NO: 3537864 - RNA, 13 nt, Human
uaggguaaaaauu

SEQ ID NO: 3537865 - RNA, 12 nt, Human
uaggguaaauca

SEQ ID NO: 3537866 - RNA, 13 nt, Human
uaggguaaaucag

SEQ ID NO: 3537867 - RNA, 22 nt, Human
uaggguaaaucaguaagaggug

SEQ ID NO: 3537868 - RNA, 15 nt, Human
uauacauacacuugu

SEQ ID NO: 3537869 - RNA, 20 nt, Human
uauacauacacuuguauaaa

SEQ ID NO: 3537870 - RNA, 16 nt, Human
uauacauagcaugaca

SEQ ID NO: 3537871 - RNA, 19 nt, Human
uauacauauauauauauaa

SEQ ID NO: 3537872 - RNA, 19 nt, Human
uauacauauguagacuaua

SEQ ID NO: 3537873 - RNA, 23 nt, Human
uauacauauguagacuauauaca

SEQ ID NO: 3537874 - RNA, 21 nt, Human
uauacauccuggguaaugaga

SEQ ID NO: 3537875 - RNA, 19 nt, Human
uauacaugaaaauuuuaaa

SEQ ID NO: 3537876 - RNA, 21 nt, Human
uauacaugaagaauagaaaca

SEQ ID NO: 3537877 - RNA, 17 nt, Human
uauacaugacacugaaa

SEQ ID NO: 3537878 - RNA, 15 nt, Human
uauacaugccaguga

SEQ ID NO: 3537879 - RNA, 15 nt, Human
uauacauguguguau

SEQ ID NO: 3537880 - RNA, 16 nt, Human
uauacauguguguaua

SEQ ID NO: 3537881 - RNA, 19 nt, Human
uauacauguguguauauau

SEQ ID NO: 3537882 - RNA, 23 nt, Human
uauacauuaguaaaugucuuugu

SEQ ID NO: 3537883 - RNA, 16 nt, Human
uauacauucuuuaucu

SEQ ID NO: 3537884 - RNA, 15 nt, Human
uauaccaauaaagug

SEQ ID NO: 3537885 - RNA, 19 nt, Human
uauaccaguauaauugagu

SEQ ID NO: 3537886 - RNA, 17 nt, Human
uauaccuauaaugugug

SEQ ID NO: 3537887 - RNA, 21 nt, Human
uauaccuauaauguguguaug

SEQ ID NO: 3537888 - RNA, 21 nt, Human
uauaccucaauuuucacugug

SEQ ID NO: 3537889 - RNA, 22 nt, Human
uauaccugggcauacuaauaaa

SEQ ID NO: 3537890 - RNA, 14 nt, Human
uauaccugugccuc

SEQ ID NO: 3537891 - RNA, 12 nt, Human
uauaccuguguu

SEQ ID NO: 3537892 - RNA, 19 nt, Human
uauaccuguuuaaauugcu

SEQ ID NO: 3537893 - RNA, 21 nt, Human
uauaccuguuuaaauugcuca

SEQ ID NO: 3537894 - RNA, 16 nt, Human
uauaccuuugccuugg

SEQ ID NO: 3537895 - RNA, 16 nt, Human
uauacgaaauaauugu

SEQ ID NO: 3537896 - RNA, 17 nt, Human
uauacgaacaaaacaca

SEQ ID NO: 3537897 - RNA, 15 nt, Human
uauacgcuuuucuuu

SEQ ID NO: 3537898 - RNA, 22 nt, Human
uauacgugaaaauuauuugaaa

SEQ ID NO: 3537899 - RNA, 13 nt, Human
uauacguguagcu

SEQ ID NO: 3537900 - RNA, 13 nt, Human
uauacguuucaaa

SEQ ID NO: 3537901 - RNA, 22 nt, Human
uauacuagggagccauuugaga

SEQ ID NO: 3537902 - RNA, 19 nt, Human
uauacuauuaaaaagguuu

SEQ ID NO: 3537903 - RNA, 16 nt, Human
uauacucauuagaauu

SEQ ID NO: 3537904 - RNA, 22 nt, Human
uauacucauuagaauuaccauu

SEQ ID NO: 3537905 - RNA, 22 nt, Human
uauacuccaguguacauagugu

SEQ ID NO: 3537906 - RNA, 12 nt, Human
uauacugaagga

SEQ ID NO: 3537907 - RNA, 20 nt, Human
uauacugauuaugucuuuua

SEQ ID NO: 3537908 - RNA, 23 nt, Human
uauacuggcaugcuaaagccuuc

SEQ ID NO: 3537909 - RNA, 14 nt, Human
uauacuguaaagaa

SEQ ID NO: 3537910 - RNA, 15 nt, Human
uauacuguaaagaaa

SEQ ID NO: 3537911 - RNA, 14 nt, Human
uauacuguaauuua

SEQ ID NO: 3537912 - RNA, 22 nt, Human
uauacuguaauuuaguuauuga

SEQ ID NO: 3537913 - RNA, 15 nt, Human
uauacuguacaauaa

SEQ ID NO: 3537914 - RNA, 17 nt, Human
uauacuguauuaagagu

SEQ ID NO: 3537915 - RNA, 23 nt, Human
uauacugugugugagugugaaua

SEQ ID NO: 3537916 - RNA, 13 nt, Human
uauacuugaacaa

SEQ ID NO: 3537917 - RNA, 17 nt, Human
uauacuugaacaaaagg

SEQ ID NO: 3537918 - RNA, 15 nt, Human
uauacuuguaauuau

SEQ ID NO: 3537919 - RNA, 16 nt, Human
uauacuuguaauuaug

SEQ ID NO: 3537920 - RNA, 18 nt, Human
uauacuugugguuuucaa

SEQ ID NO: 3537921 - RNA, 14 nt, Human
uauacuuuaaauaa

SEQ ID NO: 3537922 - RNA, 18 nt, Human
uauacuuuaaauaauggu

SEQ ID NO: 3537923 - RNA, 16 nt, Human
uauacuuucccuaccc

SEQ ID NO: 3537924 - RNA, 17 nt, Human
uauacuuuuuucuuauu

SEQ ID NO: 3537925 - RNA, 19 nt, Human
uauacuuuuuucuuauuua

SEQ ID NO: 3537926 - RNA, 22 nt, Human
uauagaaagcaagauguacuau

SEQ ID NO: 3537927 - RNA, 24 nt, Human
uauagaaagcuauauaagacaaga

SEQ ID NO: 3537928 - RNA, 12 nt, Human
uauagaaagugu

SEQ ID NO: 3537929 - RNA, 19 nt, Human
uauagaaauauauacgaac

SEQ ID NO: 3537930 - RNA, 17 nt, Human
uauagaacugaaugaga

SEQ ID NO: 3537931 - RNA, 22 nt, Human
uauagaacuucauggaucagau

SEQ ID NO: 3537932 - RNA, 13 nt, Human
uauagaagucuuc

SEQ ID NO: 3537933 - RNA, 22 nt, Human
uauagaagucuucaugaaaugc

SEQ ID NO: 3537934 - RNA, 13 nt, Human
uauagaaguuuag

SEQ ID NO: 3537935 - RNA, 16 nt, Human
uauagaaguuugucca

SEQ ID NO: 3537936 - RNA, 22 nt, Human
uauagaauaaugugggaagaaa

SEQ ID NO: 3537937 - RNA, 15 nt, Human
uauagaauauuuauu

SEQ ID NO: 3537938 - RNA, 21 nt, Human
uauagaauauuuauuaccucu

SEQ ID NO: 3537939 - RNA, 16 nt, Human
uauagaauuagcuuuu

SEQ ID NO: 3537940 - RNA, 18 nt, Human
uauagaauuuuuaauguu

SEQ ID NO: 3537941 - RNA, 14 nt, Human
uauagacagcuuug

SEQ ID NO: 3537942 - RNA, 21 nt, Human
uauagacaguuuguaaauguu

SEQ ID NO: 3537943 - RNA, 16 nt, Human
uauagacccgaggaaa

SEQ ID NO: 3537944 - RNA, 22 nt, Human
uauagagaaaggucuaugcaga

SEQ ID NO: 3537945 - RNA, 15 nt, Human
uauagagauaugcag

SEQ ID NO: 3537946 - RNA, 17 nt, Human
uauagagcagaaauucu

SEQ ID NO: 3537947 - RNA, 19 nt, Human
uauagagcagaaauucugu

SEQ ID NO: 3537948 - RNA, 21 nt, Human
uauagaggacccuaacacagu

SEQ ID NO: 3537949 - RNA, 16 nt, Human
uauagaguucauccca

SEQ ID NO: 3537950 - RNA, 20 nt, Human
uauagauauaaugaacaaaa

SEQ ID NO: 3537951 - RNA, 13 nt, Human
uauagaucagcca

SEQ ID NO: 3537952 - RNA, 18 nt, Human
gcccacuccaucugguag

SEQ ID NO: 3537953 - RNA, 18 nt, Human
gcccacugcccacccccu

SEQ ID NO: 3537954 - RNA, 23 nt, Human
gcccacugcccacccccucaagc

SEQ ID NO: 3537955 - RNA, 21 nt, Human
gcccacugcugcaguagggga

SEQ ID NO: 3537956 - RNA, 13 nt, Human
gcccacuggauca

SEQ ID NO: 3537957 - RNA, 15 nt, Human
gcccacuguccuggg

SEQ ID NO: 3537958 - RNA, 17 nt, Human
gcccacuguccugggcc

SEQ ID NO: 3537959 - RNA, 24 nt, Human
gcccacuguccugggccugcagaa

SEQ ID NO: 3537960 - RNA, 21 nt, Human
gcccacuguccugggcgcccu

SEQ ID NO: 3537961 - RNA, 16 nt, Human
gcccacugugccucag

SEQ ID NO: 3537962 - RNA, 22 nt, Human
gcccacugugccucagagacca

SEQ ID NO: 3537963 - RNA, 23 nt, Human
gcccacugugcguggggcucccg

SEQ ID NO: 3537964 - RNA, 19 nt, Human
gcccacuuacauuuacaaa

SEQ ID NO: 3537965 - RNA, 13 nt, Human
gcccacuucaggg

SEQ ID NO: 3537966 - RNA, 23 nt, Human
gcccacuucaggguucuccucuc

SEQ ID NO: 3537967 - RNA, 21 nt, Human
gcccagaagaaaauucuccug

SEQ ID NO: 3537968 - RNA, 20 nt, Human
gcccagaauaaguuauugca

SEQ ID NO: 3537969 - RNA, 21 nt, Human
gcccagaauucccagcugucu

SEQ ID NO: 3537970 - RNA, 23 nt, Human
gcccagaauucccagcugucugu

SEQ ID NO: 3537971 - RNA, 18 nt, Human
gcccagacccuggaggaa

SEQ ID NO: 3537972 - RNA, 21 nt, Human
gcccagagaggguggugaccu

SEQ ID NO: 3537973 - RNA, 13 nt, Human
gcccagagcccag

SEQ ID NO: 3537974 - RNA, 17 nt, Human
gcccagagcccagcucc

SEQ ID NO: 3537975 - RNA, 23 nt, Human
gcccagagccucgaggagguaau

SEQ ID NO: 3537976 - RNA, 13 nt, Human
gcccagagccugg

SEQ ID NO: 3537977 - RNA, 13 nt, Human
gcccagagcuggg

SEQ ID NO: 3537978 - RNA, 21 nt, Human
gcccagaggacucccaacccu

SEQ ID NO: 3537979 - RNA, 13 nt, Human
gcccagaggcuga

SEQ ID NO: 3537980 - RNA, 15 nt, Human
gcccagagggcccag

SEQ ID NO: 3537981 - RNA, 20 nt, Human
gcccagagggcccaggcagg

SEQ ID NO: 3537982 - RNA, 18 nt, Human
gcccagagggccugcaag

SEQ ID NO: 3537983 - RNA, 19 nt, Human
gcccagagggccugcaagg

SEQ ID NO: 3537984 - RNA, 20 nt, Human
gcccagagggccugcaaggg

SEQ ID NO: 3537985 - RNA, 14 nt, Human
gcccagagggucug

SEQ ID NO: 3537986 - RNA, 16 nt, Human
gcccagaucagcuccu

SEQ ID NO: 3537987 - RNA, 20 nt, Human
gcccagauuaugagacacag

SEQ ID NO: 3537988 - RNA, 21 nt, Human
gcccagauuccccugugucau

SEQ ID NO: 3537989 - RNA, 21 nt, Human
gcccagcaccacccuccuucc

SEQ ID NO: 3537990 - RNA, 14 nt, Human
gcccagcauugcug

SEQ ID NO: 3537991 - RNA, 12 nt, Human
gcccagccagcg

SEQ ID NO: 3537992 - RNA, 13 nt, Human
gcccagccagcgu

SEQ ID NO: 3537993 - RNA, 22 nt, Human
gcccagccauuaccauggagac

SEQ ID NO: 3537994 - RNA, 18 nt, Human
gcccagccccacuccucu

SEQ ID NO: 3537995 - RNA, 21 nt, Human
gcccagccccuacugcuguga

SEQ ID NO: 3537996 - RNA, 15 nt, Human
gcccagccccuagaa

SEQ ID NO: 3537997 - RNA, 12 nt, Human
gcccagccccuu

SEQ ID NO: 3537998 - RNA, 24 nt, Human
gcccagccccuucugacccaugcu

SEQ ID NO: 3537999 - RNA, 11 nt, Human
gcccagcccug

SEQ ID NO: 3538000 - RNA, 13 nt, Human
gcccagcccugcu

SEQ ID NO: 3538001 - RNA, 16 nt, Human
gcccagccggccucuc

SEQ ID NO: 3538002 - RNA, 18 nt, Human
gcccagccggccucucug

SEQ ID NO: 3538003 - RNA, 20 nt, Human
gcccagccggccucucuggc

SEQ ID NO: 3538004 - RNA, 24 nt, Human
gcccagccggccucucuggccucc

SEQ ID NO: 3538005 - RNA, 18 nt, Human
gcccagcggacaguggca

SEQ ID NO: 3538006 - RNA, 17 nt, Human
gcccagcggccccuccc

SEQ ID NO: 3538007 - RNA, 15 nt, Human
gcccagcuagcugca

SEQ ID NO: 3538008 - RNA, 18 nt, Human
gcccagcuauaccugugc

SEQ ID NO: 3538009 - RNA, 12 nt, Human
gcccagcuccaa

SEQ ID NO: 3538010 - RNA, 13 nt, Human
gcccagcuccccc

SEQ ID NO: 3538011 - RNA, 23 nt, Human
uagacuguugggguggguauaaa

SEQ ID NO: 3538012 - RNA, 23 nt, Human
uagacuucagggagucagcuguu

SEQ ID NO: 3538013 - RNA, 22 nt, Human
uagacuucgacucaggauccag

SEQ ID NO: 3538014 - RNA, 22 nt, Human
uagacuucugcuuuccacaccu

SEQ ID NO: 3538015 - RNA, 18 nt, Human
uagacuucuguuuucaau

SEQ ID NO: 3538016 - RNA, 19 nt, Human
uagacuugaaaagagacag

SEQ ID NO: 3538017 - RNA, 16 nt, Human
uagacuugaggaaacc

SEQ ID NO: 3538018 - RNA, 17 nt, Human
uagacuuuagaaauaaa

SEQ ID NO: 3538019 - RNA, 11 nt, Human
uagacuuucug

SEQ ID NO: 3538020 - RNA, 19 nt, Human
uagagaaaacaugcagaac

SEQ ID NO: 3538021 - RNA, 21 nt, Human
uagagaaaacuaaagaaauuu

SEQ ID NO: 3538022 - RNA, 22 nt, Human
uagagaaaccguccucuuuuuc

SEQ ID NO: 3538023 - RNA, 16 nt, Human
uagagaacgcagcccu

SEQ ID NO: 3538024 - RNA, 12 nt, Human
uagagaacugaa

SEQ ID NO: 3538025 - RNA, 13 nt, Human
uagagaacugaaa

SEQ ID NO: 3538026 - RNA, 21 nt, Human
uagagaacugaaaagagagca

SEQ ID NO: 3538027 - RNA, 13 nt, Human
uagagaagacagg

SEQ ID NO: 3538028 - RNA, 14 nt, Human
uagagaagauaauu

SEQ ID NO: 3538029 - RNA, 16 nt, Human
uagagaagcaaguaaa

SEQ ID NO: 3538030 - RNA, 12 nt, Human
uagagaauguuc

SEQ ID NO: 3538031 - RNA, 16 nt, Human
uagagaauguuccaga

SEQ ID NO: 3538032 - RNA, 22 nt, Human
uagagaauguuccagacauucu

SEQ ID NO: 3538033 - RNA, 21 nt, Human
uagagacagaagcaggcugga

SEQ ID NO: 3538034 - RNA, 18 nt, Human
uagagacuggaacacuag

SEQ ID NO: 3538035 - RNA, 16 nt, Human
uagagacugguuucuc

SEQ ID NO: 3538036 - RNA, 21 nt, Human
uagagacuuuuuucuaguaca

SEQ ID NO: 3538037 - RNA, 21 nt, Human
uagagaguuguuguguacaga

SEQ ID NO: 3538038 - RNA, 17 nt, Human
uagagauaguacauaaa

SEQ ID NO: 3538039 - RNA, 20 nt, Human
uagagauauauauacuugug

SEQ ID NO: 3538040 - RNA, 19 nt, Human
uagagaucauccuuuccag

SEQ ID NO: 3538041 - RNA, 18 nt, Human
uagagaucugguuuugcu

SEQ ID NO: 3538042 - RNA, 13 nt, Human
uagagaugagcuu

SEQ ID NO: 3538043 - RNA, 16 nt, Human
uagagaugagcuuucu

SEQ ID NO: 3538044 - RNA, 15 nt, Human
uagagaugagguuuc

SEQ ID NO: 3538045 - RNA, 14 nt, Human
uagagaugccuccc

SEQ ID NO: 3538046 - RNA, 16 nt, Human
uagagaugccucccug

SEQ ID NO: 3538047 - RNA, 19 nt, Human
uagagauggggaaagaauu

SEQ ID NO: 3538048 - RNA, 20 nt, Human
uagagauuugucuaauugca

SEQ ID NO: 3538049 - RNA, 11 nt, Human
uagagcacugc

SEQ ID NO: 3538050 - RNA, 14 nt, Human
uagagcagaaauuc

SEQ ID NO: 3538051 - RNA, 23 nt, Human
uagagcaggacugaugucuccua

SEQ ID NO: 3538052 - RNA, 11 nt, Human
uagagcaggcg

SEQ ID NO: 3538053 - RNA, 19 nt, Human
uagagcauugaauuggaga

SEQ ID NO: 3538054 - RNA, 19 nt, Human
uagagcauugccauucccu

SEQ ID NO: 3538055 - RNA, 13 nt, Human
uagagccagcuug

SEQ ID NO: 3538056 - RNA, 21 nt, Human
uagagccaggcacacacugug

SEQ ID NO: 3538057 - RNA, 18 nt, Human
uagagccgggugucccca

SEQ ID NO: 3538058 - RNA, 12 nt, Human
uagagccugccu

SEQ ID NO: 3538059 - RNA, 13 nt, Human
uagagccugccug

SEQ ID NO: 3538060 - RNA, 22 nt, Human
uagagccuucugaugucucuaa

SEQ ID NO: 3538061 - RNA, 22 nt, Human
uagagcggagaaaggaagggcu

SEQ ID NO: 3538062 - RNA, 10 nt, Human
uagagcuccu

SEQ ID NO: 3538063 - RNA, 12 nt, Human
uagagcuuucuu

SEQ ID NO: 3538064 - RNA, 23 nt, Human
uagagcuuucuuucacaaaaaag

SEQ ID NO: 3538065 - RNA, 21 nt, Human
uagaggaagccugauuaaaga

SEQ ID NO: 3538066 - RNA, 20 nt, Human
uagaggaucccucucuggau

SEQ ID NO: 3538067 - RNA, 22 nt, Human
uagaggauggucuuacagcagg

SEQ ID NO: 3538068 - RNA, 21 nt, Human
uagaggccugaaauccugguu

SEQ ID NO: 3538069 - RNA, 22 nt, Human
uagaggccugacugccaagcca

SEQ ID NO: 3538070 - RNA, 23 nt, Human
uagaggccugaggaugagcugga

SEQ ID NO: 3538071 - RNA, 13 nt, Human
uagaggcuagcuu

SEQ ID NO: 3538072 - RNA, 14 nt, Human
uagaggcuucuccg

SEQ ID NO: 3538073 - RNA, 18 nt, Human
uagaggcuucuccgccag

SEQ ID NO: 3538074 - RNA, 19 nt, Human
uagaggcuucuccgccagc

SEQ ID NO: 3538075 - RNA, 17 nt, Human
uagagggaacagggcgg

SEQ ID NO: 3538076 - RNA, 23 nt, Human
uagagggaggagaaugagccucg

SEQ ID NO: 3538077 - RNA, 14 nt, Human
uagagggcccuggu

SEQ ID NO: 3538078 - RNA, 14 nt, Human
uagaggguguguaa

SEQ ID NO: 3538079 - RNA, 23 nt, Human
uagagguaccagcaauauguaaa

SEQ ID NO: 3538080 - RNA, 15 nt, Human
uagagguacuagaau

SEQ ID NO: 3538081 - RNA, 18 nt, Human
uagagguacuagaaugcu

SEQ ID NO: 3538082 - RNA, 17 nt, Human
uagagguauauuggaag

SEQ ID NO: 3538083 - RNA, 17 nt, Human
uagagguccucuggagc

SEQ ID NO: 3538084 - RNA, 18 nt, Human
uagagguccucuggagcc

SEQ ID NO: 3538085 - RNA, 13 nt, Human
uagaggugcaugc

SEQ ID NO: 3538086 - RNA, 15 nt, Human
uagagguucaaagau

SEQ ID NO: 3538087 - RNA, 15 nt, Human
uagagguuuuaaagu

SEQ ID NO: 3538088 - RNA, 19 nt, Human
uagagguuuuaaagugauu

SEQ ID NO: 3538089 - RNA, 18 nt, Human
uagaguaaauacagguag

SEQ ID NO: 3538090 - RNA, 14 nt, Human
uagaguaagaaauu

SEQ ID NO: 3538091 - RNA, 15 nt, Human
uagaguaagaaauuu

SEQ ID NO: 3538092 - RNA, 21 nt, Human
uagaguaagaaauuucagguu

SEQ ID NO: 3538093 - RNA, 14 nt, Human
uagaguaaugaaau

SEQ ID NO: 3538094 - RNA, 15 nt, Human
uagaguaaugaaaug

SEQ ID NO: 3538095 - RNA, 13 nt, Human
uagaguacacugc

SEQ ID NO: 3538096 - RNA, 22 nt, Human
uagaguacacugccugccuuaa

SEQ ID NO: 3538097 - RNA, 21 nt, Human
uagaguagaagauuugaugcu

SEQ ID NO: 3538098 - RNA, 19 nt, Human
uagaguagagguauaauug

SEQ ID NO: 3538099 - RNA, 18 nt, Human
uagagucaacuacacaaa

SEQ ID NO: 3538100 - RNA, 21 nt, Human
uagagucaucuccaucagcug

SEQ ID NO: 3538101 - RNA, 19 nt, Human
uagagucauuguaauguug

SEQ ID NO: 3538102 - RNA, 22 nt, Human
uagaguccaacguggggcagca

SEQ ID NO: 3538103 - RNA, 22 nt, Human
uagagucccagguuggcucugc

SEQ ID NO: 3538104 - RNA, 20 nt, Human
uagaguccucacucccaguc

SEQ ID NO: 3538105 - RNA, 19 nt, Human
uauagaugggaaugaagcu

SEQ ID NO: 3538106 - RNA, 14 nt, Human
uauagaugucuuuu

SEQ ID NO: 3538107 - RNA, 10 nt, Human
uauagauguu

SEQ ID NO: 3538108 - RNA, 19 nt, Human
uauagauuagagaguguug

SEQ ID NO: 3538109 - RNA, 13 nt, Human
uauagauucuaaa

SEQ ID NO: 3538110 - RNA, 19 nt, Human
uauagauugaaauuuccua

SEQ ID NO: 3538111 - RNA, 17 nt, Human
uauagauuguccuuuug

SEQ ID NO: 3538112 - RNA, 21 nt, Human
uauagcaaaacuuuuaaacua

SEQ ID NO: 3538113 - RNA, 23 nt, Human
uauagcaaaacuuuuaaacuaca

SEQ ID NO: 3538114 - RNA, 13 nt, Human
uauagcacuuuga

SEQ ID NO: 3538115 - RNA, 20 nt, Human
uauagcacuuugaaauaccu

SEQ ID NO: 3538116 - RNA, 22 nt, Human
uauagcagcaaaaauauaaaau

SEQ ID NO: 3538117 - RNA, 16 nt, Human
uauagcaucacuuaaa

SEQ ID NO: 3538118 - RNA, 19 nt, Human
uauagccuauggcagaaaa

SEQ ID NO: 3538119 - RNA, 16 nt, Human
uauagcuacaggaagc

SEQ ID NO: 3538120 - RNA, 19 nt, Human
uauagcuaggugacauaua

SEQ ID NO: 3538121 - RNA, 14 nt, Human
uauagcucuaaugu

SEQ ID NO: 3538122 - RNA, 16 nt, Human
uauagcucuaauguuu

SEQ ID NO: 3538123 - RNA, 18 nt, Human
uauagcucuaauguuugc

SEQ ID NO: 3538124 - RNA, 20 nt, Human
uauagcucuaauguuugcau

SEQ ID NO: 3538125 - RNA, 21 nt, Human
uauagcugagacuacaagugu

SEQ ID NO: 3538126 - RNA, 18 nt, Human
uauagcuggcaagaaugg

SEQ ID NO: 3538127 - RNA, 18 nt, Human
uauagcuguacaaauaua

SEQ ID NO: 3538128 - RNA, 19 nt, Human
uauaggaacauaugaaaau

SEQ ID NO: 3538129 - RNA, 23 nt, Human
uauaggaacuuaaauaaugugaa

SEQ ID NO: 3538130 - RNA, 15 nt, Human
uauaggcaccuacca

SEQ ID NO: 3538131 - RNA, 21 nt, Human
uauaggcuauuuucuaaagac

SEQ ID NO: 3538132 - RNA, 17 nt, Human
uauaggucacuccuggg

SEQ ID NO: 3538133 - RNA, 16 nt, Human
uauaggugcuacaaaa

SEQ ID NO: 3538134 - RNA, 23 nt, Human
uauaggugcuacaaaaacacagc

SEQ ID NO: 3538135 - RNA, 15 nt, Human
uauagguugugcaaa

SEQ ID NO: 3538136 - RNA, 17 nt, Human
uauagguuuuguuugcu

SEQ ID NO: 3538137 - RNA, 20 nt, Human
uauagguuuuguuugcuauc

SEQ ID NO: 3538138 - RNA, 14 nt, Human
uauaguacaugaua

SEQ ID NO: 3538139 - RNA, 16 nt, Human
uauaguacaugauaaa

SEQ ID NO: 3538140 - RNA, 20 nt, Human
uauaguaccuuugcucuugc

SEQ ID NO: 3538141 - RNA, 18 nt, Human
uauaguauaucuggacaa

SEQ ID NO: 3538142 - RNA, 13 nt, Human
uauaguauuugaa

SEQ ID NO: 3538143 - RNA, 15 nt, Human
uauaguauuugaaaa

SEQ ID NO: 3538144 - RNA, 18 nt, Human
uauaguauuugaaaacag

SEQ ID NO: 3538145 - RNA, 22 nt, Human
uauaguauuugaaaacagaaau

SEQ ID NO: 3538146 - RNA, 18 nt, Human
uauaguauuugauucaaa

SEQ ID NO: 3538147 - RNA, 22 nt, Human
uauagucauuuauuuuaaaaaa

SEQ ID NO: 3538148 - RNA, 16 nt, Human
uauagucuaagacuau

SEQ ID NO: 3538149 - RNA, 19 nt, Human
uauagucuaagacuauaua

SEQ ID NO: 3538150 - RNA, 18 nt, Human
uauagugauguaaucuug

SEQ ID NO: 3538151 - RNA, 14 nt, Human
uauagugcaauaua

SEQ ID NO: 3538152 - RNA, 20 nt, Human
uauagugcuauauauauaaa

SEQ ID NO: 3538153 - RNA, 17 nt, Human
uauaguguagaaaagaa

SEQ ID NO: 3538154 - RNA, 14 nt, Human
uauaguguguugug

SEQ ID NO: 3538155 - RNA, 22 nt, Human
uaugcaggggcaaacaccugcu

SEQ ID NO: 3538156 - RNA, 19 nt, Human
uaugcagugauauggcaga

SEQ ID NO: 3538157 - RNA, 24 nt, Human
uaugcauaauaauccugcaaagua

SEQ ID NO: 3538158 - RNA, 19 nt, Human
uaugcauauauauaugugu

SEQ ID NO: 3538159 - RNA, 20 nt, Human
uaugcauauuauuuuauguu

SEQ ID NO: 3538160 - RNA, 14 nt, Human
uaggggucaaagaa

SEQ ID NO: 3538161 - RNA, 14 nt, Human
uaggguaaaaauug

SEQ ID NO: 3538162 - RNA, 16 nt, Human
uaggguaaaucaguaa

SEQ ID NO: 3538163 - RNA, 15 nt, Human
uaggguaaggugccu

SEQ ID NO: 3538164 - RNA, 13 nt, Human
uaggguacaugug

SEQ ID NO: 3538165 - RNA, 20 nt, Human
uaggguacuaaauuuaaauu

SEQ ID NO: 3538166 - RNA, 15 nt, Human
uaggguauauuuucc

SEQ ID NO: 3538167 - RNA, 14 nt, Human
uaggguccugggga

SEQ ID NO: 3538168 - RNA, 15 nt, Human
uagggucggaaccca

SEQ ID NO: 3538169 - RNA, 12 nt, Human
uaggguggcccu

SEQ ID NO: 3538170 - RNA, 15 nt, Human
uagggugggccuuca

SEQ ID NO: 3538171 - RNA, 14 nt, Human
uaggguucugccuc

SEQ ID NO: 3538172 - RNA, 19 nt, Human
uaggguugguuccuuucca

SEQ ID NO: 3538173 - RNA, 12 nt, Human
uaggguuuaauc

SEQ ID NO: 3538174 - RNA, 21 nt, Human
uagguaaaauguauuuuucua

SEQ ID NO: 3538175 - RNA, 13 nt, Human
uagguaacuucau

SEQ ID NO: 3538176 - RNA, 18 nt, Human
uagguacuuuuugugaag

SEQ ID NO: 3538177 - RNA, 14 nt, Human
uagguagauguuca

SEQ ID NO: 3538178 - RNA, 20 nt, Human
uagguauaaguggugugugu

SEQ ID NO: 3538179 - RNA, 14 nt, Human
uagguauacagugg

SEQ ID NO: 3538180 - RNA, 21 nt, Human
uaggucaaggccugucccugg

SEQ ID NO: 3538181 - RNA, 14 nt, Human
uaggucacuggcuc

SEQ ID NO: 3538182 - RNA, 19 nt, Human
uaggucacuggcucuccaa

SEQ ID NO: 3538183 - RNA, 15 nt, Human
uagguccuuuagaaa

SEQ ID NO: 3538184 - RNA, 19 nt, Human
uaggucguuuuaaaaacaa

SEQ ID NO: 3538185 - RNA, 21 nt, Human
uaggucuuaauacacacaguu

SEQ ID NO: 3538186 - RNA, 23 nt, Human
uaggugacagagugagacucugu

SEQ ID NO: 3538187 - RNA, 19 nt, Human
uaggugauccauguaacug

SEQ ID NO: 3538188 - RNA, 22 nt, Human
uaggugauccauguaacugccu

SEQ ID NO: 3538189 - RNA, 22 nt, Human
uaggugauguuugcucuuguuu

SEQ ID NO: 3538190 - RNA, 20 nt, Human
uaggugcuacaaaaacacag

SEQ ID NO: 3538191 - RNA, 22 nt, Human
uaggugcuacaaaaacacagca

SEQ ID NO: 3538192 - RNA, 19 nt, Human
uaggugggccagccccucc

SEQ ID NO: 3538193 - RNA, 20 nt, Human
uaggugggccagccccuccc

SEQ ID NO: 3538194 - RNA, 23 nt, Human
uaggugggccagccccucccacc

SEQ ID NO: 3538195 - RNA, 21 nt, Human
uaggugugacugaauuucuuu

SEQ ID NO: 3538196 - RNA, 23 nt, Human
uaggugugacugaauuucuuuug

SEQ ID NO: 3538197 - RNA, 21 nt, Human
uagguguuuuguucaccauua

SEQ ID NO: 3538198 - RNA, 23 nt, Human
uagguuaacuauguacaauauuu

SEQ ID NO: 3538199 - RNA, 14 nt, Human
uagguucaauuccc

SEQ ID NO: 3538200 - RNA, 15 nt, Human
uagguucagccaagg

SEQ ID NO: 3538201 - RNA, 15 nt, Human
uagguuccccuguca

SEQ ID NO: 3538202 - RNA, 21 nt, Human
uagguucccuguucuuccucc

SEQ ID NO: 3538203 - RNA, 15 nt, Human
uagguucuaaaguuc

SEQ ID NO: 3538204 - RNA, 16 nt, Human
uagguucuaaaguucu

SEQ ID NO: 3538205 - RNA, 17 nt, Human
uagguucuaaaguucua

SEQ ID NO: 3538206 - RNA, 16 nt, Human
uagguugcacacuuug

SEQ ID NO: 3538207 - RNA, 18 nt, Human
uagguugcacacuuuggu

SEQ ID NO: 3538208 - RNA, 19 nt, Human
uagguugcacacuuuggua

SEQ ID NO: 3538209 - RNA, 21 nt, Human
uagguuggcaaaaaggcagga

SEQ ID NO: 3538210 - RNA, 15 nt, Human
uagguuuaacucaga

SEQ ID NO: 3538211 - RNA, 14 nt, Human
uagguuuuacagau

SEQ ID NO: 3538212 - RNA, 21 nt, Human
uagguuuuguuugcuaucuua

SEQ ID NO: 3538213 - RNA, 20 nt, Human
uagguuuuuuuccuucugaa

SEQ ID NO: 3538214 - RNA, 22 nt, Human
uaguaaaauucuacuguaugga

SEQ ID NO: 3538215 - RNA, 14 nt, Human
uaguaaagaaauga

SEQ ID NO: 3538216 - RNA, 17 nt, Human
uaguaaauaaugcuuug

SEQ ID NO: 3538217 - RNA, 13 nt, Human
uaguaaaugucuu

SEQ ID NO: 3538218 - RNA, 14 nt, Human
uaguaaaugucuuu

SEQ ID NO: 3538219 - RNA, 19 nt, Human
uaguaaaugucuuuguaag

SEQ ID NO: 3538220 - RNA, 20 nt, Human
uaguaaaugucuuuguaagu

SEQ ID NO: 3538221 - RNA, 22 nt, Human
uaguaaaugucuuuguaaguca

SEQ ID NO: 3538222 - RNA, 11 nt, Human
uaguaaauguu

SEQ ID NO: 3538223 - RNA, 22 nt, Human
uaguaagaauaccacaucaaau

SEQ ID NO: 3538224 - RNA, 14 nt, Human
uaguaagaucucuu

SEQ ID NO: 3538225 - RNA, 16 nt, Human
uaguaagcauagaaac

SEQ ID NO: 3538226 - RNA, 13 nt, Human
uaguaaggcugug

SEQ ID NO: 3538227 - RNA, 22 nt, Human
uaguaagucuugccuauauuuu

SEQ ID NO: 3538228 - RNA, 16 nt, Human
uaguaaguuaauguau

SEQ ID NO: 3538229 - RNA, 18 nt, Human
uaguaaguucagcacuug

SEQ ID NO: 3538230 - RNA, 20 nt, Human
uaguaaguuuuucuucauga

SEQ ID NO: 3538231 - RNA, 14 nt, Human
uaguaauaaagacu

SEQ ID NO: 3538232 - RNA, 20 nt, Human
uaguaauagagcaaaauuga

SEQ ID NO: 3538233 - RNA, 21 nt, Human
uaguaauagguaggaaaauga

SEQ ID NO: 3538234 - RNA, 14 nt, Human
uaguaauauaauac

SEQ ID NO: 3538235 - RNA, 15 nt, Human
uaguaauauaauaca

SEQ ID NO: 3538236 - RNA, 21 nt, Human
uaguaauauaauacacaaaau

SEQ ID NO: 3538237 - RNA, 16 nt, Human
uaguaauauauuuaaa

SEQ ID NO: 3538238 - RNA, 23 nt, Human
uaguaauauauuuaaagggaaau

SEQ ID NO: 3538239 - RNA, 15 nt, Human
uaguaaucuguacau

SEQ ID NO: 3538240 - RNA, 16 nt, Human
uaguaaucuguacauu

SEQ ID NO: 3538241 - RNA, 13 nt, Human
uaguaaucuguau

SEQ ID NO: 3538242 - RNA, 14 nt, Human
uaguaaucuguaua

SEQ ID NO: 3538243 - RNA, 15 nt, Human
uaguaaugaguuuaa

SEQ ID NO: 3538244 - RNA, 20 nt, Human
uaguaaugcuacgugugauu

SEQ ID NO: 3538245 - RNA, 20 nt, Human
uaguaauuucuuuuuuuccu

SEQ ID NO: 3538246 - RNA, 14 nt, Human
uaguaauuuguaaa

SEQ ID NO: 3538247 - RNA, 12 nt, Human
uaguacaaaguu

SEQ ID NO: 3538248 - RNA, 17 nt, Human
uaguacaaaguuucaau

SEQ ID NO: 3538249 - RNA, 15 nt, Human
uaguacaaauuauaa

SEQ ID NO: 3538250 - RNA, 13 nt, Human
uaguacacuuuua

SEQ ID NO: 3538251 - RNA, 23 nt, Human
uaguacagguaaggugagggaau

SEQ ID NO: 3538252 - RNA, 14 nt, Human
uaguaccaaaauaa

SEQ ID NO: 3538253 - RNA, 20 nt, Human
uaguaccaaaugcuuuaaaa

SEQ ID NO: 3538254 - RNA, 18 nt, Human
uaguaccauuuauacaaa

SEQ ID NO: 3538255 - RNA, 13 nt, Human
uaguacccaccug

SEQ ID NO: 3538256 - RNA, 23 nt, Human
uaguaccccaagaagaaaauguu

SEQ ID NO: 3538257 - RNA, 20 nt, Human
uaguaccuuuuauaucccau

SEQ ID NO: 3538258 - RNA, 17 nt, Human
uaguacuauaucuguuu

SEQ ID NO: 3538259 - RNA, 17 nt, Human
uaguacuccugcaaaau

SEQ ID NO: 3538260 - RNA, 15 nt, Human
uaguacugcucuugu

SEQ ID NO: 3538261 - RNA, 14 nt, Human
uaguacuguguacu

SEQ ID NO: 3538262 - RNA, 18 nt, Human
uaguacuguguacuguau

SEQ ID NO: 3538263 - RNA, 17 nt, Human
uaguacuucuucuguaa

SEQ ID NO: 3538264 - RNA, 20 nt, Human
uaguagaaauuuuacaauag

SEQ ID NO: 3538265 - RNA, 13 nt, Human
uaguagagacagg

SEQ ID NO: 3538266 - RNA, 13 nt, Human
uaguagagacggg

SEQ ID NO: 3538267 - RNA, 17 nt, Human
uaguagagguacacuug

SEQ ID NO: 3538268 - RNA, 12 nt, Human
uaguagauuuua

SEQ ID NO: 3538269 - RNA, 20 nt, Human
uaguagcagugauugucuua

SEQ ID NO: 3538270 - RNA, 16 nt, Human
uaguagcccuuucugu

SEQ ID NO: 3538271 - RNA, 21 nt, Human
uaguaggauaugccugcucuu

SEQ ID NO: 3538272 - RNA, 20 nt, Human
uaguagggguaccacugaau

SEQ ID NO: 3538273 - RNA, 19 nt, Human
uaguauacauugucucuaa

SEQ ID NO: 3538274 - RNA, 19 nt, Human
uaguauaucuggacaagcc

SEQ ID NO: 3538275 - RNA, 16 nt, Human
uaguauauuaaaaaug

SEQ ID NO: 3538276 - RNA, 17 nt, Human
uaguauauuaaaaaugg

SEQ ID NO: 3538277 - RNA, 12 nt, Human
uaguauauuuau

SEQ ID NO: 3538278 - RNA, 14 nt, Human
uaguauccuccagg

SEQ ID NO: 3538279 - RNA, 16 nt, Human
uaguauccuccagguu

SEQ ID NO: 3538280 - RNA, 20 nt, Human
uaguauccuccagguuuuuc

SEQ ID NO: 3538281 - RNA, 21 nt, Human
uaguauccuccagguuuuuca

SEQ ID NO: 3538282 - RNA, 23 nt, Human
uaguauccuccagguuuuucaau

SEQ ID NO: 3538283 - RNA, 14 nt, Human
uaguaucuaacaug

SEQ ID NO: 3538284 - RNA, 13 nt, Human
uaguaugaaauua

SEQ ID NO: 3538285 - RNA, 19 nt, Human
uaguaugacgcugauacau

SEQ ID NO: 3538286 - RNA, 15 nt, Human
uaguaugaggcauuu

SEQ ID NO: 3538287 - RNA, 18 nt, Human
uaguaugaggcauuuguu

SEQ ID NO: 3538288 - RNA, 19 nt, Human
uaguauugacaaaauguua

SEQ ID NO: 3538289 - RNA, 17 nt, Human
uaguauuguccaggucu

SEQ ID NO: 3538290 - RNA, 21 nt, Human
uaguauuguuguccuuuucau

SEQ ID NO: 3538291 - RNA, 20 nt, Human
uaguauuuauggguggauuu

SEQ ID NO: 3538292 - RNA, 16 nt, Human
uaguauuucuaugaaa

SEQ ID NO: 3538293 - RNA, 17 nt, Human
uaguauuugaaaacaga

SEQ ID NO: 3538294 - RNA, 12 nt, Human
uaguauuugauu

SEQ ID NO: 3538295 - RNA, 17 nt, Human
uaguauuugauucaaaa

SEQ ID NO: 3538296 - RNA, 23 nt, Human
uaguauuugauucaaaauauuua

SEQ ID NO: 3538297 - RNA, 13 nt, Human
uaguauuuucuaa

SEQ ID NO: 3538298 - RNA, 23 nt, Human
uaguauuuuuuacauuuuacaca

SEQ ID NO: 3538299 - RNA, 17 nt, Human
uaguuacuguguaaacu

SEQ ID NO: 3538300 - RNA, 21 nt, Human
uaguuacuguguaaacucauc

SEQ ID NO: 3538301 - RNA, 18 nt, Human
uaguuacuguguaauuag

SEQ ID NO: 3538302 - RNA, 17 nt, Human
uaguuacuguugugacc

SEQ ID NO: 3538303 - RNA, 18 nt, Human
uaguuacuguugugaccu

SEQ ID NO: 3538304 - RNA, 18 nt, Human
uaguuaggaaauaaaacc

SEQ ID NO: 3538305 - RNA, 21 nt, Human
uaguuaggaaauaaaaccuuu

SEQ ID NO: 3538306 - RNA, 23 nt, Human
uaguuaggaaauaaaaccuuuca

SEQ ID NO: 3538307 - RNA, 15 nt, Human
uaguuaggauagcau

SEQ ID NO: 3538308 - RNA, 20 nt, Human
uaguuaggauagcauuuuug

SEQ ID NO: 3538309 - RNA, 15 nt, Human
uaguuaguagcaugu

SEQ ID NO: 3538310 - RNA, 11 nt, Human
uaguuaucaug

SEQ ID NO: 3538311 - RNA, 23 nt, Human
uaguuaucauguuaguaauaccu

SEQ ID NO: 3538312 - RNA, 14 nt, Human
uaguucaagaaaug

SEQ ID NO: 3538313 - RNA, 16 nt, Human
uaguucagaauuuagu

SEQ ID NO: 3538314 - RNA, 23 nt, Human
uaguucagaauuuaguguaucca

SEQ ID NO: 3538315 - RNA, 19 nt, Human
uaguucagacacuuuggaa

SEQ ID NO: 3538316 - RNA, 22 nt, Human
uaguucagcauccgcaggugcu

SEQ ID NO: 3538317 - RNA, 14 nt, Human
uaguucauccaauc

SEQ ID NO: 3538318 - RNA, 18 nt, Human
uaguucauccaauccuca

SEQ ID NO: 3538319 - RNA, 16 nt, Human
uaguucauguaaauaa

SEQ ID NO: 3538320 - RNA, 15 nt, Human
uaguuccacugagac

SEQ ID NO: 3538321 - RNA, 18 nt, Human
uaguuccacuuauagccu

SEQ ID NO: 3538322 - RNA, 15 nt, Human
uaguucccaggugau

SEQ ID NO: 3538323 - RNA, 16 nt, Human
uaguuccccuguuuau

SEQ ID NO: 3538324 - RNA, 19 nt, Human
uaguuccccuguuuauuca

SEQ ID NO: 3538325 - RNA, 12 nt, Human
uauguagaugug

SEQ ID NO: 3538326 - RNA, 16 nt, Human
uauguagaugugcauu

SEQ ID NO: 3538327 - RNA, 17 nt, Human
uauguagaugugcauuu

SEQ ID NO: 3538328 - RNA, 18 nt, Human
uauguauaacuuuaacuu

SEQ ID NO: 3538329 - RNA, 19 nt, Human
uauguauauuuaaaagaaa

SEQ ID NO: 3538330 - RNA, 19 nt, Human
uauguaucaaauguaacuu

SEQ ID NO: 3538331 - RNA, 16 nt, Human
uauguaucagaagaga

SEQ ID NO: 3538332 - RNA, 20 nt, Human
uauguauggaauacaguguu

SEQ ID NO: 3538333 - RNA, 22 nt, Human
uauguauggguaggguaaauca

SEQ ID NO: 3538334 - RNA, 16 nt, Human
uauguauguaaaaaug

SEQ ID NO: 3538335 - RNA, 15 nt, Human
uauguauguguuuag

SEQ ID NO: 3538336 - RNA, 20 nt, Human
uauguauguguuuagaauug

SEQ ID NO: 3538337 - RNA, 22 nt, Human
uauguauuaacacuacucaaag

SEQ ID NO: 3538338 - RNA, 18 nt, Human
uauguauuaauaaauaga

SEQ ID NO: 3538339 - RNA, 19 nt, Human
uauguauuaauauucauug

SEQ ID NO: 3538340 - RNA, 13 nt, Human
uauguauuauuua

SEQ ID NO: 3538341 - RNA, 21 nt, Human
uauguauuauuuacauuuaau

SEQ ID NO: 3538342 - RNA, 16 nt, Human
uauguauucuguaaaa

SEQ ID NO: 3538343 - RNA, 20 nt, Human
uauguauugugcaaugugua

SEQ ID NO: 3538344 - RNA, 22 nt, Human
uauguauuuaccaaaaauuuug

SEQ ID NO: 3538345 - RNA, 14 nt, Human
uauguauuuuaugu

SEQ ID NO: 3538346 - RNA, 17 nt, Human
uaugucaacuuuaugca

SEQ ID NO: 3538347 - RNA, 16 nt, Human
uaugucaagggcagcu

SEQ ID NO: 3538348 - RNA, 21 nt, Human
uaugucaauaaacaacagcug

SEQ ID NO: 3538349 - RNA, 15 nt, Human
uaugucaguacuauu

SEQ ID NO: 3538350 - RNA, 12 nt, Human
uaugucauuuca

SEQ ID NO: 3538351 - RNA, 15 nt, Human
uaugucccuucacau

SEQ ID NO: 3538352 - RNA, 18 nt, Human
uauguccugugagaugug

SEQ ID NO: 3538353 - RNA, 22 nt, Human
uauguccugugagauguguauc

SEQ ID NO: 3538354 - RNA, 20 nt, Human
uaugucgucgagcucccccc

SEQ ID NO: 3538355 - RNA, 12 nt, Human
uaugucuaaaga

SEQ ID NO: 3538356 - RNA, 16 nt, Human
uaugucuaaagagcuu

SEQ ID NO: 3538357 - RNA, 19 nt, Human
uaugucucgcuagugaugu

SEQ ID NO: 3538358 - RNA, 21 nt, Human
uaugucucgugguaggacugu

SEQ ID NO: 3538359 - RNA, 19 nt, Human
uaugucucuucugagcuau

SEQ ID NO: 3538360 - RNA, 21 nt, Human
uaugucugguucucaauucca

SEQ ID NO: 3538361 - RNA, 16 nt, Human
uaugucugucauugua

SEQ ID NO: 3538362 - RNA, 13 nt, Human
uaugucuguuuaa

SEQ ID NO: 3538363 - RNA, 20 nt, Human
uaugucuguuuaagaaaagu

SEQ ID NO: 3538364 - RNA, 15 nt, Human
uaugugaaacaaugu

SEQ ID NO: 3538365 - RNA, 17 nt, Human
uaugugaaacauguuuc

SEQ ID NO: 3538366 - RNA, 20 nt, Human
uaugugacaccaaagccacc

SEQ ID NO: 3538367 - RNA, 19 nt, Human
uaugugagauuuuuuauug

SEQ ID NO: 3538368 - RNA, 22 nt, Human
uaugugagauuuuuuauugcua

SEQ ID NO: 3538369 - RNA, 18 nt, Human
uaugugaguauucucauu

SEQ ID NO: 3538370 - RNA, 21 nt, Human
uaugugauuuuuuuucccauu

SEQ ID NO: 3538371 - RNA, 22 nt, Human
uaugugcacugucacuuugcuc

SEQ ID NO: 3538372 - RNA, 14 nt, Human
uaugugccagauuu

SEQ ID NO: 3538373 - RNA, 23 nt, Human
uaugugcuauuaauauuuguuua

SEQ ID NO: 3538374 - RNA, 15 nt, Human
uaugugcuguaauuu

SEQ ID NO: 3538375 - RNA, 18 nt, Human
uaugugcuuucaucacaa

SEQ ID NO: 3538376 - RNA, 16 nt, Human
uauguggaaguguggg

SEQ ID NO: 3538377 - RNA, 21 nt, Human
uaugugggauauugaauguua

SEQ ID NO: 3538378 - RNA, 23 nt, Human
uaugugggcagauuuucagcaaa

SEQ ID NO: 3538379 - RNA, 18 nt, Human
uaugugggggucugugug

SEQ ID NO: 3538380 - RNA, 17 nt, Human
uaugugguuuuguaauu

SEQ ID NO: 3538381 - RNA, 17 nt, Human
uauguguaaaaugugaa

SEQ ID NO: 3538382 - RNA, 16 nt, Human
uauguguaauaaauau

SEQ ID NO: 3538383 - RNA, 19 nt, Human
uaugugucaguucauuugu

SEQ ID NO: 3538384 - RNA, 12 nt, Human
uaugugugaagu

SEQ ID NO: 3538385 - RNA, 14 nt, Human
uaugugugaaguga

SEQ ID NO: 3538386 - RNA, 17 nt, Human
uaugugugcaugugugu

SEQ ID NO: 3538387 - RNA, 21 nt, Human
uaugugugcauguguguauaa

SEQ ID NO: 3538388 - RNA, 14 nt, Human
uauguguguagaca

SEQ ID NO: 3538389 - RNA, 11 nt, Human
uaugugugugu

SEQ ID NO: 3538390 - RNA, 19 nt, Human
uauguguguguaugcuacu

SEQ ID NO: 3538391 - RNA, 18 nt, Human
uauguguguuucuguccu

SEQ ID NO: 3538392 - RNA, 17 nt, Human
uauguguugaaaaccaa

SEQ ID NO: 3538393 - RNA, 19 nt, Human
uauguguugaaaaccaaaa

SEQ ID NO: 3538394 - RNA, 13 nt, Human
uauguguuuacuu

SEQ ID NO: 3538395 - RNA, 15 nt, Human
uauguguuugugugu

SEQ ID NO: 3538396 - RNA, 15 nt, Human
uauguguuuuucaca

SEQ ID NO: 3538397 - RNA, 14 nt, Human
uauguguuuuucuc

SEQ ID NO: 3538398 - RNA, 17 nt, Human
uauguguuuuucucaua

SEQ ID NO: 3538399 - RNA, 20 nt, Human
uauguuaaacuagcauaucu

SEQ ID NO: 3538400 - RNA, 13 nt, Human
uauguuaaagaga

SEQ ID NO: 3538401 - RNA, 14 nt, Human
uauguuaagcucuu

SEQ ID NO: 3538402 - RNA, 18 nt, Human
uauguuacuacaugcacu

SEQ ID NO: 3538403 - RNA, 15 nt, Human
uauguuacuauuuuc

SEQ ID NO: 3538404 - RNA, 22 nt, Human
uauguuauacaaccuucauuua

SEQ ID NO: 3538405 - RNA, 15 nt, Human
uauguuauauauaaa

SEQ ID NO: 3538406 - RNA, 14 nt, Human
uauguuauugaaaa

SEQ ID NO: 3538407 - RNA, 16 nt, Human
uauguucagaagaaau

SEQ ID NO: 3538408 - RNA, 13 nt, Human
uauguucauuugu

SEQ ID NO: 3538409 - RNA, 14 nt, Human
uauguuccauuaaa

SEQ ID NO: 3538410 - RNA, 20 nt, Human
uauguuccauuaaacgauuu

SEQ ID NO: 3538411 - RNA, 22 nt, Human
uauguucuuaguggauguucug

SEQ ID NO: 3538412 - RNA, 15 nt, Human
uauguugaauacuuu

SEQ ID NO: 3538413 - RNA, 18 nt, Human
uauguugaauacuuuuua

SEQ ID NO: 3538414 - RNA, 14 nt, Human
uauguugacauuug

SEQ ID NO: 3538415 - RNA, 23 nt, Human
uauguugagucgcgcaccgaaaa

SEQ ID NO: 3538416 - RNA, 14 nt, Human
uauguugauaaaag

SEQ ID NO: 3538417 - RNA, 12 nt, Human
uauguugcauag

SEQ ID NO: 3538418 - RNA, 21 nt, Human
uauguugcuauaauaaagaag

SEQ ID NO: 3538419 - RNA, 14 nt, Human
uauguugcucaguc

SEQ ID NO: 3538420 - RNA, 20 nt, Human
uauguugcucagucucccuu

SEQ ID NO: 3538421 - RNA, 16 nt, Human
uauguuguguucuaau

SEQ ID NO: 3538422 - RNA, 17 nt, Human
uauguuguuagagaaaa

SEQ ID NO: 3538423 - RNA, 19 nt, Human
uauguuguuagagaaaaau

SEQ ID NO: 3538424 - RNA, 13 nt, Human
uauguuuaaaaua

SEQ ID NO: 3538425 - RNA, 19 nt, Human
uauguuuaaucuguuaugu

SEQ ID NO: 3538426 - RNA, 14 nt, Human
uauguuuacauauc

SEQ ID NO: 3538427 - RNA, 13 nt, Human
uauguuucaaacu

SEQ ID NO: 3538428 - RNA, 16 nt, Human
uauguuucaaacuuug

SEQ ID NO: 3538429 - RNA, 22 nt, Human
uauguuuguauaaugaaugaga

SEQ ID NO: 3538430 - RNA, 22 nt, Human
uauguuuugacauuuuuaguuu

SEQ ID NO: 3538431 - RNA, 12 nt, Human
uauguuuuggua

SEQ ID NO: 3538432 - RNA, 20 nt, Human
uauguuuugguaucuguucu

SEQ ID NO: 3538433 - RNA, 18 nt, Human
uauguuuuguuucugaaa

SEQ ID NO: 3538434 - RNA, 15 nt, Human
uauguuuuucaguuc

SEQ ID NO: 3538435 - RNA, 18 nt, Human
uauguuuuucaguucaaa

SEQ ID NO: 3538436 - RNA, 19 nt, Human
uauguuuuucaguucaaag

SEQ ID NO: 3538437 - RNA, 14 nt, Human
uauguuuuugaagg

SEQ ID NO: 3538438 - RNA, 17 nt, Human
uauguuuuuuaaaauau

SEQ ID NO: 3538439 - RNA, 23 nt, Human
uauguuuuuuagaucaaauacuu

SEQ ID NO: 3538440 - RNA, 18 nt, Human
uauguuuuuuauuaugcu

SEQ ID NO: 3538441 - RNA, 15 nt, Human
uauguuuuuuuucug

SEQ ID NO: 3538442 - RNA, 22 nt, Human
uauuaaaaagucuuuuaaaaag

SEQ ID NO: 3538443 - RNA, 13 nt, Human
uauuaaaaauaua

SEQ ID NO: 3538444 - RNA, 15 nt, Human
uauaaaauuaagcaa

SEQ ID NO: 3538445 - RNA, 13 nt, Human
uauaaacaagaaa

SEQ ID NO: 3538446 - RNA, 22 nt, Human
uauaaacaagaaaaauaaagaa

SEQ ID NO: 3538447 - RNA, 21 nt, Human
uauaaacagaaauggaaagca

SEQ ID NO: 3538448 - RNA, 18 nt, Human
uauaaacagaagugacug

SEQ ID NO: 3538449 - RNA, 12 nt, Human
uauaaacagcuu

SEQ ID NO: 3538450 - RNA, 18 nt, Human
uauaaacaucacacacac

SEQ ID NO: 3538451 - RNA, 19 nt, Human
uauaaacauuaaaugucuu

SEQ ID NO: 3538452 - RNA, 22 nt, Human
uauaaaccucuaauuuauuuug

SEQ ID NO: 3538453 - RNA, 13 nt, Human
uauaaacuuuacc

SEQ ID NO: 3538454 - RNA, 14 nt, Human
uauaaacuuuaccu

SEQ ID NO: 3538455 - RNA, 22 nt, Human
uauaaacuuuagaguagcauga

SEQ ID NO: 3538456 - RNA, 12 nt, Human
uauaaacuuuua

SEQ ID NO: 3538457 - RNA, 22 nt, Human
uauaaagaacaagguaguuuuu

SEQ ID NO: 3538458 - RNA, 19 nt, Human
uauaaagaagaacuugcau

SEQ ID NO: 3538459 - RNA, 17 nt, Human
uauaaagaauaggacuu

SEQ ID NO: 3538460 - RNA, 21 nt, Human
uauaaagaauaggacuuguuu

SEQ ID NO: 3538461 - RNA, 15 nt, Human
uauaaagaauauaua

SEQ ID NO: 3538462 - RNA, 15 nt, Human
uauaaagagaaaauu

SEQ ID NO: 3538463 - RNA, 12 nt, Human
uauaaagcagua

SEQ ID NO: 3538464 - RNA, 16 nt, Human
uauaaagcaucuaaac

SEQ ID NO: 3538465 - RNA, 17 nt, Human
uauaaagcaucuaaacu

SEQ ID NO: 3538466 - RNA, 21 nt, Human
uauaaagcgauauacagauga

SEQ ID NO: 3538467 - RNA, 23 nt, Human
uauaaagcgauauacagaugaaa

SEQ ID NO: 3538468 - RNA, 16 nt, Human
uauaaaggauaaagaa

SEQ ID NO: 3538469 - RNA, 23 nt, Human
uauaaaguacccaucuaguacuu

SEQ ID NO: 3538470 - RNA, 14 nt, Human
uauaaaguagaaau

SEQ ID NO: 3538471 - RNA, 16 nt, Human
uauaaaguaguccugu

SEQ ID NO: 3538472 - RNA, 15 nt, Human
uauaaaguauagaga

SEQ ID NO: 3538473 - RNA, 20 nt, Human
uauaaaguauagagagaagu

SEQ ID NO: 3538474 - RNA, 14 nt, Human
uauaaaguauucuu

SEQ ID NO: 3538475 - RNA, 16 nt, Human
uauaaauaaauauaua

SEQ ID NO: 3538476 - RNA, 18 nt, Human
uauaaauacugcaaauca

SEQ ID NO: 3538477 - RNA, 14 nt, Human
uauaaauagaaugu

SEQ ID NO: 3538478 - RNA, 22 nt, Human
uauaaauagaauguaaaugucu

SEQ ID NO: 3538479 - RNA, 13 nt, Human
uauaaauaggaga

SEQ ID NO: 3538480 - RNA, 12 nt, Human
gcccucaucccg

SEQ ID NO: 3538481 - RNA, 20 nt, Human
gcccucauuacggcuccucu

SEQ ID NO: 3538482 - RNA, 15 nt, Human
gcccuccaaaagcac

SEQ ID NO: 3538483 - RNA, 16 nt, Human
gcccuccacaccugcg

SEQ ID NO: 3538484 - RNA, 19 nt, Human
gcccuccacaccugcggcc

SEQ ID NO: 3538485 - RNA, 23 nt, Human
gcccuccacugcccucuguucag

SEQ ID NO: 3538486 - RNA, 20 nt, Human
gcccuccagagccccacagc

SEQ ID NO: 3538487 - RNA, 21 nt, Human
gcccuccaucuaaacugcccc

SEQ ID NO: 3538488 - RNA, 21 nt, Human
gcccucccaggcucucaacag

SEQ ID NO: 3538489 - RNA, 18 nt, Human
gcccuccccauggagcca

SEQ ID NO: 3538490 - RNA, 14 nt, Human
gcccucccccuccu

SEQ ID NO: 3538491 - RNA, 16 nt, Human
gcccucccuguccucc

SEQ ID NO: 3538492 - RNA, 20 nt, Human
gcccucccuguuccccagag

SEQ ID NO: 3538493 - RNA, 17 nt, Human
gcccucccuucucccug

SEQ ID NO: 3538494 - RNA, 18 nt, Human
gcccucccuucucccugg

SEQ ID NO: 3538495 - RNA, 19 nt, Human
gcccucccuuggaaaccug

SEQ ID NO: 3538496 - RNA, 23 nt, Human
gcccucccuuggaaaccugcccu

SEQ ID NO: 3538497 - RNA, 18 nt, Human
gcccuccgacagcccccu

SEQ ID NO: 3538498 - RNA, 22 nt, Human
gcccuccgacagcccccucugc

SEQ ID NO: 3538499 - RNA, 23 nt, Human
gcccuccgccauucucaagcccu

SEQ ID NO: 3538500 - RNA, 15 nt, Human
gcccuccgccuucac

SEQ ID NO: 3538501 - RNA, 18 nt, Human
gcccuccgcgaaaauagu

SEQ ID NO: 3538502 - RNA, 24 nt, Human
gcccuccuacccugcgcccagucc

SEQ ID NO: 3538503 - RNA, 22 nt, Human
gcccuccucccucccagcucca

SEQ ID NO: 3538504 - RNA, 20 nt, Human
gcccuccucucccauugucc

SEQ ID NO: 3538505 - RNA, 16 nt, Human
gcccuccucugcacuc

SEQ ID NO: 3538506 - RNA, 18 nt, Human
gcccuccugugcucagcc

SEQ ID NO: 3538507 - RNA, 23 nt, Human
gcccuccugugcucagcccugag

SEQ ID NO: 3538508 - RNA, 16 nt, Human
gcccuccuuguccacc

SEQ ID NO: 3538509 - RNA, 23 nt, Human
gcccucgacacucaccaugaagc

SEQ ID NO: 3538510 - RNA, 17 nt, Human
gcccucgcugccagcuc

SEQ ID NO: 3538511 - RNA, 16 nt, Human
gcccucgcugcuucug

SEQ ID NO: 3538512 - RNA, 18 nt, Human
gcccucgggcccagcccc

SEQ ID NO: 3538513 - RNA, 22 nt, Human
gcccucgggcccagcccccaca

SEQ ID NO: 3538514 - RNA, 18 nt, Human
gcccucgggcgagucacu

SEQ ID NO: 3538515 - RNA, 14 nt, Human
gcccucguggccag

SEQ ID NO: 3538516 - RNA, 18 nt, Human
gcccucguggccagcccg

SEQ ID NO: 3538517 - RNA, 19 nt, Human
gcccucuaucauggugaaa

SEQ ID NO: 3538518 - RNA, 19 nt, Human
gcccucucaggccggcagc

SEQ ID NO: 3538519 - RNA, 16 nt, Human
gcccucucccacccuc

SEQ ID NO: 3538520 - RNA, 18 nt, Human
gcccucuccccugccccc

SEQ ID NO: 3538521 - RNA, 23 nt, Human
gcccucuccccugcccccugcag

SEQ ID NO: 3538522 - RNA, 21 nt, Human
gcccucucccucuaggcucug

SEQ ID NO: 3538523 - RNA, 14 nt, Human
gcccucuccgagcu

SEQ ID NO: 3538524 - RNA, 13 nt, Human
gcccucuccuggg

SEQ ID NO: 3538525 - RNA, 22 nt, Human
gcccucuccugggcagcugccu

SEQ ID NO: 3538526 - RNA, 23 nt, Human
gcccucuccugggcagcugccuc

SEQ ID NO: 3538527 - RNA, 22 nt, Human
gcccucuccuuuguucccggcu

SEQ ID NO: 3538528 - RNA, 16 nt, Human
gcccucucugcucugc

SEQ ID NO: 3538529 - RNA, 17 nt, Human
gcccucugcauccucug

SEQ ID NO: 3538530 - RNA, 18 nt, Human
gcccucugcauccucugg

SEQ ID NO: 3538531 - RNA, 20 nt, Human
gcccucugcauccucuggag

SEQ ID NO: 3538532 - RNA, 21 nt, Human
gcccucugcauccucuggagc

SEQ ID NO: 3538533 - RNA, 17 nt, Human
gcccucuucuucucaag

SEQ ID NO: 3538534 - RNA, 15 nt, Human
gcccugagcucggug

SEQ ID NO: 3538535 - RNA, 16 nt, Human
gcccugagcuuucugc

SEQ ID NO: 3538536 - RNA, 13 nt, Human
gcccugaggugug

SEQ ID NO: 3538537 - RNA, 21 nt, Human
gcccugaggugugggggcugc

SEQ ID NO: 3538538 - RNA, 22 nt, Human
gcccugaguaaucgcuuaaaga

SEQ ID NO: 3538539 - RNA, 17 nt, Human
gcccugagucugggcag

SEQ ID NO: 3538540 - RNA, 23 nt, Human
gcccugaguggaucuccaaggac

SEQ ID NO: 3538541 - RNA, 17 nt, Human
gcccugcaccugugcag

SEQ ID NO: 3538542 - RNA, 18 nt, Human
gcccugcacuguccugcu

SEQ ID NO: 3538543 - RNA, 20 nt, Human
gcccugcacuguccugcucc

SEQ ID NO: 3538544 - RNA, 23 nt, Human
gcccugcacuguccugcuccaca

SEQ ID NO: 3538545 - RNA, 18 nt, Human
gcccugcagacccugccc

SEQ ID NO: 3538546 - RNA, 13 nt, Human
gcccugcagaggg

SEQ ID NO: 3538547 - RNA, 12 nt, Human
gcccugcagcuc

SEQ ID NO: 3538548 - RNA, 13 nt, Human
gcccugcagcucu

SEQ ID NO: 3538549 - RNA, 19 nt, Human
gcccugcagcucucaugcu

SEQ ID NO: 3538550 - RNA, 22 nt, Human
gcccugcaugggccagccccuc

SEQ ID NO: 3538551 - RNA, 15 nt, Human
gcccugccaccuguc

SEQ ID NO: 3538552 - RNA, 12 nt, Human
gcccugccacuc

SEQ ID NO: 3538553 - RNA, 19 nt, Human
gcccugccacucacuaggc

SEQ ID NO: 3538554 - RNA, 15 nt, Human
gcccugcccaccugg

SEQ ID NO: 3538555 - RNA, 20 nt, Human
gcccugcccaccuggccucu

SEQ ID NO: 3538556 - RNA, 13 nt, Human
gcccugccccaca

SEQ ID NO: 3538557 - RNA, 14 nt, Human
gcccugccccacac

SEQ ID NO: 3538558 - RNA, 15 nt, Human
gcccugcccuagcuc

SEQ ID NO: 3538559 - RNA, 11 nt, Human
gcccugcccug

SEQ ID NO: 3538560 - RNA, 20 nt, Human
gcccugcccugaggaaggag

SEQ ID NO: 3538561 - RNA, 15 nt, Human
gcccugcccuggcag

SEQ ID NO: 3538562 - RNA, 17 nt, Human
gcccugcccuggcaggg

SEQ ID NO: 3538563 - RNA, 18 nt, Human
gcccugcccugguuuccu

SEQ ID NO: 3538564 - RNA, 15 nt, Human
gcccugcccuucagc

SEQ ID NO: 3538565 - RNA, 11 nt, Human
gcccugccucc

SEQ ID NO: 3538566 - RNA, 13 nt, Human
gcccugccucucc

SEQ ID NO: 3538567 - RNA, 13 nt, Human
gcccugccucugu

SEQ ID NO: 3538568 - RNA, 11 nt, Human
gcccugccuga

SEQ ID NO: 3538569 - RNA, 13 nt, Human
gcccugccugagg

SEQ ID NO: 3538570 - RNA, 12 nt, Human
gcccugccugga

SEQ ID NO: 3538571 - RNA, 13 nt, Human
gcccugccuggag

SEQ ID NO: 3538572 - RNA, 15 nt, Human
gcccugccuggagga

SEQ ID NO: 3538573 - RNA, 16 nt, Human
gcccugccuggaggac

SEQ ID NO: 3538574 - RNA, 20 nt, Human
gcccugccuggaggaccuga

SEQ ID NO: 3538575 - RNA, 22 nt, Human
gcccugccuggaggaccugagc

SEQ ID NO: 3538576 - RNA, 15 nt, Human
gcccugcggccccgu

SEQ ID NO: 3538577 - RNA, 12 nt, Human
gcccugcucccu

SEQ ID NO: 3538578 - RNA, 13 nt, Human
gcccugcucccuc

SEQ ID NO: 3538579 - RNA, 16 nt, Human
gcccugcuccucccug

SEQ ID NO: 3538580 - RNA, 19 nt, Human
gcccugcuccucccuggcu

SEQ ID NO: 3538581 - RNA, 13 nt, Human
gcccugcugaguc

SEQ ID NO: 3538582 - RNA, 16 nt, Human
gcccugcugaguccca

SEQ ID NO: 3538583 - RNA, 21 nt, Human
gcccugcugagucccaggcug

SEQ ID NO: 3538584 - RNA, 14 nt, Human
gcccugcugcccuc

SEQ ID NO: 3538585 - RNA, 22 nt, Human
gcccugcugcugacccagccug

SEQ ID NO: 3538586 - RNA, 15 nt, Human
gcccugcuuccugcu

SEQ ID NO: 3538587 - RNA, 19 nt, Human
gcccugcuuugggcugccc

SEQ ID NO: 3538588 - RNA, 20 nt, Human
gcccuggacugugugcucag

SEQ ID NO: 3538589 - RNA, 21 nt, Human
uauuuguaaauuuaguguuuu

SEQ ID NO: 3538590 - RNA, 17 nt, Human
uauuuguaagauauuug

SEQ ID NO: 3538591 - RNA, 14 nt, Human
uauuuguaauagau

SEQ ID NO: 3538592 - RNA, 12 nt, Human
uauuuguaauua

SEQ ID NO: 3538593 - RNA, 19 nt, Human
uauuuguacaguucaguuc

SEQ ID NO: 3538594 - RNA, 17 nt, Human
uauuuguacuuucuguu

SEQ ID NO: 3538595 - RNA, 18 nt, Human
uauuuguauaaaagugug

SEQ ID NO: 3538596 - RNA, 15 nt, Human
uauuuguaucucuga

SEQ ID NO: 3538597 - RNA, 23 nt, Human
uauuuguaucucugaagcauguu

SEQ ID NO: 3538598 - RNA, 21 nt, Human
uauuuguauuuuuuugcaagu

SEQ ID NO: 3538599 - RNA, 10 nt, Human
uauuugucaa

SEQ ID NO: 3538600 - RNA, 12 nt, Human
uauuugugacua

SEQ ID NO: 3538601 - RNA, 19 nt, Human
uauuugugacuaauuguau

SEQ ID NO: 3538602 - RNA, 17 nt, Human
uauuugugcuauaguau

SEQ ID NO: 3538603 - RNA, 12 nt, Human
uauuuguggaau

SEQ ID NO: 3538604 - RNA, 13 nt, Human
uauuuguguaaua

SEQ ID NO: 3538605 - RNA, 18 nt, Human
uauuuguguauuuaacag

SEQ ID NO: 3538606 - RNA, 15 nt, Human
uauuugugugcuaaa

SEQ ID NO: 3538607 - RNA, 12 nt, Human
uauuuguguuuu

SEQ ID NO: 3538608 - RNA, 19 nt, Human
uauuuguguuuuaauuuaa

SEQ ID NO: 3538609 - RNA, 17 nt, Human
uauuuguuauuuucagu

SEQ ID NO: 3538610 - RNA, 16 nt, Human
uauuuguucauguuug

SEQ ID NO: 3538611 - RNA, 22 nt, Human
uauuuguucauguuuggugcau

SEQ ID NO: 3538612 - RNA, 19 nt, Human
uauuuguuuaguucagcaa

SEQ ID NO: 3538613 - RNA, 21 nt, Human
uauuuguuuaguucagcaaaa

SEQ ID NO: 3538614 - RNA, 13 nt, Human
uauuuuaaaacaa

SEQ ID NO: 3538615 - RNA, 19 nt, Human
uauuuuaaaaucuccuaaa

SEQ ID NO: 3538616 - RNA, 18 nt, Human
uauuuuaaaaucugucac

SEQ ID NO: 3538617 - RNA, 12 nt, Human
uauuuuaaacaa

SEQ ID NO: 3538618 - RNA, 14 nt, Human
uauuuuaaacaaaa

SEQ ID NO: 3538619 - RNA, 14 nt, Human
uauuuuaaagaauu

SEQ ID NO: 3538620 - RNA, 22 nt, Human
uauuuuaaaggggucugaaauu

SEQ ID NO: 3538621 - RNA, 22 nt, Human
uauuuuaagacgaaacauuugu

SEQ ID NO: 3538622 - RNA, 14 nt, Human
uauuuuaagcauua

SEQ ID NO: 3538623 - RNA, 19 nt, Human
uauuuuaauaauguuucaa

SEQ ID NO: 3538624 - RNA, 22 nt, Human
uauuuuaauaauguuucaaaca

SEQ ID NO: 3538625 - RNA, 15 nt, Human
uauuuuacacagaaa

SEQ ID NO: 3538626 - RNA, 18 nt, Human
uauuuuacacagaaacac

SEQ ID NO: 3538627 - RNA, 12 nt, Human
uauuuuacuauu

SEQ ID NO: 3538628 - RNA, 13 nt, Human
uauuuuacuuuua

SEQ ID NO: 3538629 - RNA, 20 nt, Human
uauuuuagcaguucugcaaa

SEQ ID NO: 3538630 - RNA, 21 nt, Human
uauuuuagcaguucugcaaau

SEQ ID NO: 3538631 - RNA, 22 nt, Human
uauuuuagcaguucugcaaaua

SEQ ID NO: 3538632 - RNA, 22 nt, Human
uauuuuaggcagggauuugagg

SEQ ID NO: 3538633 - RNA, 23 nt, Human
uauuuuaguggacccugaaaugu

SEQ ID NO: 3538634 - RNA, 14 nt, Human
uauuuuaguuucug

SEQ ID NO: 3538635 - RNA, 15 nt, Human
uauuuuauauaauaa

SEQ ID NO: 3538636 - RNA, 21 nt, Human
uauuuuauauaauaaaguauu

SEQ ID NO: 3538637 - RNA, 14 nt, Human
uauuuuaugagaaa

SEQ ID NO: 3538638 - RNA, 12 nt, Human
uauuuuaugauc

SEQ ID NO: 3538639 - RNA, 12 nt, Human
uauuuuauguua

SEQ ID NO: 3538640 - RNA, 14 nt, Human
uauuuuauguuaua

SEQ ID NO: 3538641 - RNA, 15 nt, Human
uauuuuauguugcau

SEQ ID NO: 3538642 - RNA, 14 nt, Human
uauuuuauuacugu

SEQ ID NO: 3538643 - RNA, 15 nt, Human
uauuuuauuacuguu

SEQ ID NO: 3538644 - RNA, 17 nt, Human
uauuuuauuaugaagaa

SEQ ID NO: 3538645 - RNA, 14 nt, Human
uauuuuauuaugca

SEQ ID NO: 3538646 - RNA, 17 nt, Human
uauuuuauuaugcauga

SEQ ID NO: 3538647 - RNA, 19 nt, Human
uauuuuauuguaacagaca

SEQ ID NO: 3538648 - RNA, 17 nt, Human
uauuuuauuuagacaag

SEQ ID NO: 3538649 - RNA, 22 nt, Human
uauuuucaaauuguaucuagug

SEQ ID NO: 3538650 - RNA, 19 nt, Human
uauuuucaacgcagcccug

SEQ ID NO: 3538651 - RNA, 21 nt, Human
uauuuucaacgcagcccugcu

SEQ ID NO: 3538652 - RNA, 19 nt, Human
uauuuucaauagccacuaa

SEQ ID NO: 3538653 - RNA, 12 nt, Human
uauuuucacaau

SEQ ID NO: 3538654 - RNA, 14 nt, Human
uauuuucacaaugu

SEQ ID NO: 3538655 - RNA, 13 nt, Human
uauuuucaccauu

SEQ ID NO: 3538656 - RNA, 18 nt, Human
uauuuucaguaauguuau

SEQ ID NO: 3538657 - RNA, 16 nt, Human
uauuuucauacaaauu

SEQ ID NO: 3538658 - RNA, 21 nt, Human
uauuuucaugacuuuuccaug

SEQ ID NO: 3538659 - RNA, 21 nt, Human
uauuuucauuacaauggaaac

SEQ ID NO: 3538660 - RNA, 13 nt, Human
uauuuucauugua

SEQ ID NO: 3538661 - RNA, 16 nt, Human
uauuuucauuguaaaa

SEQ ID NO: 3538662 - RNA, 22 nt, Human
uauuuuccaaaaguggccucuu

SEQ ID NO: 3538663 - RNA, 16 nt, Human
uauuuuccaugaaaau

SEQ ID NO: 3538664 - RNA, 20 nt, Human
uauuuuccaugaaaaugcaa

SEQ ID NO: 3538665 - RNA, 22 nt, Human
uauuuucccuauuagagaagag

SEQ ID NO: 3538666 - RNA, 16 nt, Human
uauuuuccuaaagaga

SEQ ID NO: 3538667 - RNA, 21 nt, Human
uauuuuccuauauuacgguuu

SEQ ID NO: 3538668 - RNA, 16 nt, Human
uauuuuccuccccagc

SEQ ID NO: 3538669 - RNA, 19 nt, Human
uauuuuccugauagcauau

SEQ ID NO: 3538670 - RNA, 16 nt, Human
uauuuucguaugaaaa

SEQ ID NO: 3538671 - RNA, 14 nt, Human
uauuuucuauguac

SEQ ID NO: 3538672 - RNA, 14 nt, Human
uauuuucuauuuua

SEQ ID NO: 3538673 - RNA, 22 nt, Human
uauuuucugguaaaaagaaaaa

SEQ ID NO: 3538674 - RNA, 20 nt, Human
uauuuucugguagauagaaa

SEQ ID NO: 3538675 - RNA, 14 nt, Human
uauuuucugucaga

SEQ ID NO: 3538676 - RNA, 21 nt, Human
uauuuucugugccugaauauu

SEQ ID NO: 3538677 - RNA, 17 nt, Human
uauuuucuguguguucc

SEQ ID NO: 3538678 - RNA, 21 nt, Human
uauuuucuuacccaauuuccc

SEQ ID NO: 3538679 - RNA, 19 nt, Human
uauuuucuucauccaacuu

SEQ ID NO: 3538680 - RNA, 15 nt, Human
uauuuucuucuaagu

SEQ ID NO: 3538681 - RNA, 14 nt, Human
uauuuucuuuaaug

SEQ ID NO: 3538682 - RNA, 19 nt, Human
uauuuucuuuugaauuguu

SEQ ID NO: 3538683 - RNA, 17 nt, Human
uauuuugaaaagcuucu

SEQ ID NO: 3538684 - RNA, 21 nt, Human
uauuuugaagugagaaaauga

SEQ ID NO: 3538685 - RNA, 19 nt, Human
uaucaauaaauagaccauu

SEQ ID NO: 3538686 - RNA, 15 nt, Human
uaucaauagucaaga

SEQ ID NO: 3538687 - RNA, 19 nt, Human
uaucaauauaauguuuuua

SEQ ID NO: 3538688 - RNA, 18 nt, Human
uaucaaucaguauaauuc

SEQ ID NO: 3538689 - RNA, 16 nt, Human
uaucaaugugucuuuc

SEQ ID NO: 3538690 - RNA, 22 nt, Human
uaucaaugugucuuucuaagaa

SEQ ID NO: 3538691 - RNA, 14 nt, Human
uaucaauuugucau

SEQ ID NO: 3538692 - RNA, 23 nt, Human
uaucacaaccaccguuacaagua

SEQ ID NO: 3538693 - RNA, 17 nt, Human
uaucacacuucugugag

SEQ ID NO: 3538694 - RNA, 12 nt, Human
uaucacauguau

SEQ ID NO: 3538695 - RNA, 13 nt, Human
uaucacauuauuu

SEQ ID NO: 3538696 - RNA, 15 nt, Human
uaucaccacaguaag

SEQ ID NO: 3538697 - RNA, 18 nt, Human
uaucaccagagagggacu

SEQ ID NO: 3538698 - RNA, 15 nt, Human
uaucaccagcugccu

SEQ ID NO: 3538699 - RNA, 17 nt, Human
uaucaccagcugccucu

SEQ ID NO: 3538700 - RNA, 19 nt, Human
uaucacccagaagaaaaua

SEQ ID NO: 3538701 - RNA, 16 nt, Human
uaucaccuagcugaau

SEQ ID NO: 3538702 - RNA, 14 nt, Human
uaucaccuccccuc

SEQ ID NO: 3538703 - RNA, 20 nt, Human
uaucaccuccccuccuugcc

SEQ ID NO: 3538704 - RNA, 12 nt, Human
uaucaccuggcu

SEQ ID NO: 3538705 - RNA, 19 nt, Human
uaucaccuggcuuguuuau

SEQ ID NO: 3538706 - RNA, 20 nt, Human
uaucaccugucuugccuuuu

SEQ ID NO: 3538707 - RNA, 18 nt, Human
uaucacugaagcuuuuua

SEQ ID NO: 3538708 - RNA, 16 nt, Human
uaucacuuaaacuugc

SEQ ID NO: 3538709 - RNA, 17 nt, Human
uaucacuuuuugaacua

SEQ ID NO: 3538710 - RNA, 16 nt, Human
uaucagaagagagggg

SEQ ID NO: 3538711 - RNA, 19 nt, Human
uaucagaauugaaacacuu

SEQ ID NO: 3538712 - RNA, 19 nt, Human
uaucagacacucuggcugg

SEQ ID NO: 3538713 - RNA, 17 nt, Human
uaucagacuaagccagc

SEQ ID NO: 3538714 - RNA, 21 nt, Human
uaucagacucggaaucuauuu

SEQ ID NO: 3538715 - RNA, 20 nt, Human
uaucagaggccuauaaugaa

SEQ ID NO: 3538716 - RNA, 20 nt, Human
uaucagauugcuuuugugca

SEQ ID NO: 3538717 - RNA, 14 nt, Human
uaucagcacgugug

SEQ ID NO: 3538718 - RNA, 19 nt, Human
uaucagccugagucuccug

SEQ ID NO: 3538719 - RNA, 20 nt, Human
uaucagcuacuuaagagaaa

SEQ ID NO: 3538720 - RNA, 15 nt, Human
uaucaggucucccac

SEQ ID NO: 3538721 - RNA, 16 nt, Human
uaucaggugcccaucc

SEQ ID NO: 3538722 - RNA, 17 nt, Human
uaucaggugcugccauc

SEQ ID NO: 3538723 - RNA, 20 nt, Human
uaucaggugcugccauccag

SEQ ID NO: 3538724 - RNA, 22 nt, Human
uaucagucauaacuaaauaaag

SEQ ID NO: 3538725 - RNA, 22 nt, Human
uaucagucuuguaccaaggcaa

SEQ ID NO: 3538726 - RNA, 15 nt, Human
uaucagugacagagu

SEQ ID NO: 3538727 - RNA, 11 nt, Human
uaucagugcuu

SEQ ID NO: 3538728 - RNA, 13 nt, Human
uaucagugugccc

SEQ ID NO: 3538729 - RNA, 18 nt, Human
uaucaguuacucagcccu

SEQ ID NO: 3538730 - RNA, 19 nt, Human
uaucaguuacucagcccug

SEQ ID NO: 3538731 - RNA, 20 nt, Human
uaucaguuacucagcccugg

SEQ ID NO: 3538732 - RNA, 21 nt, Human
uaucaguugcaauaauacuuc

SEQ ID NO: 3538733 - RNA, 13 nt, Human
uaucauaauuacc

SEQ ID NO: 3538734 - RNA, 17 nt, Human
uaucuaggcaacauagu

SEQ ID NO: 3538735 - RNA, 15 nt, Human
uaucuagguuuauga

SEQ ID NO: 3538736 - RNA, 14 nt, Human
uaucuaguaugaaa

SEQ ID NO: 3538737 - RNA, 17 nt, Human
uaucuaguaugaaauua

SEQ ID NO: 3538738 - RNA, 14 nt, Human
uaucuagugcagcu

SEQ ID NO: 3538739 - RNA, 16 nt, Human
uaucuaguguuugauu

SEQ ID NO: 3538740 - RNA, 22 nt, Human
uaucuaguuuaauuaaucugua

SEQ ID NO: 3538741 - RNA, 12 nt, Human
uaucuauaaaau

SEQ ID NO: 3538742 - RNA, 13 nt, Human
uaucuauaaaaua

SEQ ID NO: 3538743 - RNA, 16 nt, Human
uaucuauaaacacugu

SEQ ID NO: 3538744 - RNA, 16 nt, Human
uaucuauaauuuaccu

SEQ ID NO: 3538745 - RNA, 13 nt, Human
uaucuauagcuaa

SEQ ID NO: 3538746 - RNA, 13 nt, Human
uaucuauauaaaa

SEQ ID NO: 3538747 - RNA, 21 nt, Human
uaucuauauauaauucuguac

SEQ ID NO: 3538748 - RNA, 13 nt, Human
uaucuauauaugu

SEQ ID NO: 3538749 - RNA, 16 nt, Human
uaucuauauaugugua

SEQ ID NO: 3538750 - RNA, 16 nt, Human
uaucuauauguacuug

SEQ ID NO: 3538751 - RNA, 16 nt, Human
uaucuaucuauuugag

SEQ ID NO: 3538752 - RNA, 17 nt, Human
uaucuaucuauuugagg

SEQ ID NO: 3538753 - RNA, 13 nt, Human
uaucuaucuuaua

SEQ ID NO: 3538754 - RNA, 15 nt, Human
uaucuauuaauauau

SEQ ID NO: 3538755 - RNA, 19 nt, Human
uaucuauuaauauauguau

SEQ ID NO: 3538756 - RNA, 19 nt, Human
uaucuauucugagaaaaca

SEQ ID NO: 3538757 - RNA, 23 nt, Human
uaucuauucugagaaaacaagca

SEQ ID NO: 3538758 - RNA, 13 nt, Human
uaucuauuguaag

SEQ ID NO: 3538759 - RNA, 14 nt, Human
uaucuauuguaaga

SEQ ID NO: 3538760 - RNA, 18 nt, Human
uaucuauuguaagauaaa

SEQ ID NO: 3538761 - RNA, 12 nt, Human
uaucucaaacaa

SEQ ID NO: 3538762 - RNA, 14 nt, Human
uaucucaaauugua

SEQ ID NO: 3538763 - RNA, 16 nt, Human
uaucucaaugaaccau

SEQ ID NO: 3538764 - RNA, 16 nt, Human
uaucucacuugugcca

SEQ ID NO: 3538765 - RNA, 17 nt, Human
uaucucagauauuugca

SEQ ID NO: 3538766 - RNA, 15 nt, Human
uaucucagauguuaa

SEQ ID NO: 3538767 - RNA, 15 nt, Human
uaucuccaagaccag

SEQ ID NO: 3538768 - RNA, 22 nt, Human
uaucuccaugaugauaguugaa

SEQ ID NO: 3538769 - RNA, 14 nt, Human
uaucucccccagcc

SEQ ID NO: 3538770 - RNA, 16 nt, Human
uaucucccugccuccu

SEQ ID NO: 3538771 - RNA, 18 nt, Human
uaucuccggcucccagcc

SEQ ID NO: 3538772 - RNA, 20 nt, Human
uaucuccggcucccagccuc

SEQ ID NO: 3538773 - RNA, 11 nt, Human
uaucuccugac

SEQ ID NO: 3538774 - RNA, 17 nt, Human
uaucucuauuugagaau

SEQ ID NO: 3538775 - RNA, 20 nt, Human
uaucucugucuaccaucucc

SEQ ID NO: 3538776 - RNA, 11 nt, Human
uaucucugugu

SEQ ID NO: 3538777 - RNA, 15 nt, Human
uaucugaaaacugga

SEQ ID NO: 3538778 - RNA, 15 nt, Human
uaucugaaaauguau

SEQ ID NO: 3538779 - RNA, 18 nt, Human
uaucugaagucagaucug

SEQ ID NO: 3538780 - RNA, 20 nt, Human
uaucugagcucuuugcacua

SEQ ID NO: 3538781 - RNA, 18 nt, Human
uaucugaggaauucugua

SEQ ID NO: 3538782 - RNA, 23 nt, Human
uaucugaguuacagaaaugauua

SEQ ID NO: 3538783 - RNA, 14 nt, Human
uaucugaguugcca

SEQ ID NO: 3538784 - RNA, 16 nt, Human
uaucugauuuugugca

SEQ ID NO: 3538785 - RNA, 22 nt, Human
uaucugauuuugugcaaaagcu

SEQ ID NO: 3538786 - RNA, 15 nt, Human
uaucugcaggcagac

SEQ ID NO: 3538787 - RNA, 19 nt, Human
uaucugcaggcagacacgg

SEQ ID NO: 3538788 - RNA, 13 nt, Human
uaucugccuuuau

SEQ ID NO: 3538789 - RNA, 18 nt, Human
uaucugccuuuauugugu

SEQ ID NO: 3538790 - RNA, 15 nt, Human
uaucugcuguauguc

SEQ ID NO: 3538791 - RNA, 22 nt, Human
uaucugcuguccagacagccug

SEQ ID NO: 3538792 - RNA, 23 nt, Human
uaucugcuuuugguuauaaugug

SEQ ID NO: 3538793 - RNA, 15 nt, Human
uaucuggccucugcu

SEQ ID NO: 3538794 - RNA, 23 nt, Human
uaucugggauuaugguuuuguga

SEQ ID NO: 3538795 - RNA, 21 nt, Human
uaucugggauucuacuuuaag

SEQ ID NO: 3538796 - RNA, 18 nt, Human
uaucugggcugugggcaa

SEQ ID NO: 3538797 - RNA, 14 nt, Human
uaucugggcuuccu

SEQ ID NO: 3538798 - RNA, 19 nt, Human
uaucugggugcaugaucuu

SEQ ID NO: 3538799 - RNA, 22 nt, Human
uaucuguaaugguacugacuuu

SEQ ID NO: 3538800 - RNA, 22 nt, Human
uaucuguauuuaauuuugacac

SEQ ID NO: 3538801 - RNA, 20 nt, Human
uaucuguuuccugacauugu

SEQ ID NO: 3538802 - RNA, 15 nt, Human
uaucuguuugagaaa

SEQ ID NO: 3538803 - RNA, 16 nt, Human
uaucuguuugagaaag

SEQ ID NO: 3538804 - RNA, 19 nt, Human
uaucuguuugagaaaguca

SEQ ID NO: 3538805 - RNA, 15 nt, Human
uaucuguuuuacugc

SEQ ID NO: 3538806 - RNA, 15 nt, Human
uaucuuaaagaaaca

SEQ ID NO: 3538807 - RNA, 20 nt, Human
uaucuuaaagaaacagcuuu

SEQ ID NO: 3538808 - RNA, 14 nt, Human
uaucuuaaagcacu

SEQ ID NO: 3538809 - RNA, 15 nt, Human
uaucuuaaagcacuu

SEQ ID NO: 3538810 - RNA, 14 nt, Human
uaucuuaaauuuga

SEQ ID NO: 3538811 - RNA, 20 nt, Human
uaucuuaauuuugguuguau

SEQ ID NO: 3538812 - RNA, 14 nt, Human
uaucuuacaauauu

SEQ ID NO: 3538813 - RNA, 14 nt, Human
uaucuuacuuuccu

SEQ ID NO: 3538814 - RNA, 19 nt, Human
uaucuuagauguuucacac

SEQ ID NO: 3538815 - RNA, 12 nt, Human
uaucuucacaau

SEQ ID NO: 3538816 - RNA, 18 nt, Human
uaucuucagcucuuuuug

SEQ ID NO: 3538817 - RNA, 14 nt, Human
uaucuucauguaaa

SEQ ID NO: 3538818 - RNA, 15 nt, Human
uaucuucauguaaau

SEQ ID NO: 3538819 - RNA, 14 nt, Human
uaucuuccauauuu

SEQ ID NO: 3538820 - RNA, 23 nt, Human
uaucuucguuaguaaucuguaua

SEQ ID NO: 3538821 - RNA, 18 nt, Human
uaucuucucaaguucuaa

SEQ ID NO: 3538822 - RNA, 15 nt, Human
uaucuucuggacuau

SEQ ID NO: 3538823 - RNA, 17 nt, Human
uaucuugaaggaaaaau

SEQ ID NO: 3538824 - RNA, 15 nt, Human
uaucuugaauaaugu

SEQ ID NO: 3538825 - RNA, 23 nt, Human
uaucuugcaguaucggcacugua

SEQ ID NO: 3538826 - RNA, 15 nt, Human
uaucuugcucuguaa

SEQ ID NO: 3538827 - RNA, 13 nt, Human
uaucuugcuugaa

SEQ ID NO: 3538828 - RNA, 15 nt, Human
uaucuuguuccaagg

SEQ ID NO: 3538829 - RNA, 18 nt, Human
uaucuuguuuuuccacua

SEQ ID NO: 3538830 - RNA, 22 nt, Human
uaucuuguuuuuccacuacugc

SEQ ID NO: 3538831 - RNA, 24 nt, Human
uaucuuuaaacgaaacaaagacaa

SEQ ID NO: 3538832 - RNA, 13 nt, Human
uaucuuucuacag

SEQ ID NO: 3538833 - RNA, 12 nt, Human
uaucuuugauaa

SEQ ID NO: 3538834 - RNA, 14 nt, Human
uaucuuugccaccc

SEQ ID NO: 3538835 - RNA, 17 nt, Human
uaucuuuguaauuauuu

SEQ ID NO: 3538836 - RNA, 16 nt, Human
uaucuuuucuacagca

SEQ ID NO: 3538837 - RNA, 18 nt, Human
uaucuuuuuaccuuucau

SEQ ID NO: 3538838 - RNA, 16 nt, Human
uaucuuuuuauugaug

SEQ ID NO: 3538839 - RNA, 17 nt, Human
uaucuuuuuauugaugu

SEQ ID NO: 3538840 - RNA, 21 nt, Human
uaucuuuuuuuuauuccacau

SEQ ID NO: 3538841 - RNA, 13 nt, Human
uaugaaaacaugg

SEQ ID NO: 3538842 - RNA, 18 nt, Human
uaugaaaacauggaacag

SEQ ID NO: 3538843 - RNA, 22 nt, Human
uaugaaaacuauacaacaaagg

SEQ ID NO: 3538844 - RNA, 14 nt, Human
uaugaaaagcuaga

SEQ ID NO: 3538845 - RNA, 19 nt, Human
uaugaaaaugaguugugaa

SEQ ID NO: 3538846 - RNA, 20 nt, Human
uaugaaaaugaguugugaaa

SEQ ID NO: 3538847 - RNA, 15 nt, Human
gccuaggugacagag

SEQ ID NO: 3538848 - RNA, 14 nt, Human
gccuaguauugaca

SEQ ID NO: 3538849 - RNA, 19 nt, Human
gccuagucagccacauggg

SEQ ID NO: 3538850 - RNA, 19 nt, Human
gccuagucccuuccacacc

SEQ ID NO: 3538851 - RNA, 19 nt, Human
gccuagugaaggcuucucu

SEQ ID NO: 3538852 - RNA, 22 nt, Human
gccuagugaaggcuucucucug

SEQ ID NO: 3538853 - RNA, 14 nt, Human
gccuaguggcuugu

SEQ ID NO: 3538854 - RNA, 22 nt, Human
gccuaguggggucucccucucc

SEQ ID NO: 3538855 - RNA, 17 nt, Human
gccuaguucauccaauc

SEQ ID NO: 3538856 - RNA, 19 nt, Human
gccuauaugagaagaauag

SEQ ID NO: 3538857 - RNA, 19 nt, Human
gccuaucagugugcccccc

SEQ ID NO: 3538858 - RNA, 23 nt, Human
gccuaucagugugccccccaucc

SEQ ID NO: 3538859 - RNA, 16 nt, Human
gccuaugacuugggca

SEQ ID NO: 3538860 - RNA, 20 nt, Human
gccuaugagcauccugagcc

SEQ ID NO: 3538861 - RNA, 22 nt, Human
gccuaugcacauauggacucug

SEQ ID NO: 3538862 - RNA, 17 nt, Human
gccuauggagagcccug

SEQ ID NO: 3538863 - RNA, 18 nt, Human
gccuauggagagcccugg

SEQ ID NO: 3538864 - RNA, 19 nt, Human
gccuauggagagcccuggg

SEQ ID NO: 3538865 - RNA, 21 nt, Human
gccuauggagagcccugggac

SEQ ID NO: 3538866 - RNA, 22 nt, Human
gccuauggagagcccugggacc

SEQ ID NO: 3538867 - RNA, 15 nt, Human
gccuauuauauuaaa

SEQ ID NO: 3538868 - RNA, 20 nt, Human
gccuauuauauuaaaauaug

SEQ ID NO: 3538869 - RNA, 15 nt, Human
gccuauugauacuug

SEQ ID NO: 3538870 - RNA, 18 nt, Human
gccuauuguaaauacaag

SEQ ID NO: 3538871 - RNA, 21 nt, Human
gccuauuguaauauagaaaaa

SEQ ID NO: 3538872 - RNA, 11 nt, Human
gccuauuucau

SEQ ID NO: 3538873 - RNA, 13 nt, Human
gccuauuugugug

SEQ ID NO: 3538874 - RNA, 17 nt, Human
gccuauuuuaauaaaca

SEQ ID NO: 3538875 - RNA, 19 nt, Human
gccucaaauccaggacccu

SEQ ID NO: 3538876 - RNA, 18 nt, Human
gccucaaaugagaaaaug

SEQ ID NO: 3538877 - RNA, 15 nt, Human
gccucaacccucccu

SEQ ID NO: 3538878 - RNA, 14 nt, Human
gccucaaccuccug

SEQ ID NO: 3538879 - RNA, 17 nt, Human
gccucaaccuccugggc

SEQ ID NO: 3538880 - RNA, 19 nt, Human
ucaccccgaggcccugcau

SEQ ID NO: 3538881 - RNA, 15 nt, Human
ucaccccggcaggcc

SEQ ID NO: 3538882 - RNA, 21 nt, Human
ucaccccggcaggcccugcag

SEQ ID NO: 3538883 - RNA, 14 nt, Human
ucaccccgucuggg

SEQ ID NO: 3538884 - RNA, 23 nt, Human
ucaccccuaaaagaaacccugca

SEQ ID NO: 3538885 - RNA, 14 nt, Human
ucaccccucccuuu

SEQ ID NO: 3538886 - RNA, 14 nt, Human
ucaccccuguccuc

SEQ ID NO: 3538887 - RNA, 21 nt, Human
ucacccgaucgccagcaaaac

SEQ ID NO: 3538888 - RNA, 21 nt, Human
ucacccuagcccucucccucu

SEQ ID NO: 3538889 - RNA, 13 nt, Human
ucacccuccaccu

SEQ ID NO: 3538890 - RNA, 15 nt, Human
ucacccuccaccucu

SEQ ID NO: 3538891 - RNA, 17 nt, Human
ucacccuggaggcaccu

SEQ ID NO: 3538892 - RNA, 17 nt, Human
ucacccuuaacccaagg

SEQ ID NO: 3538893 - RNA, 19 nt, Human
ucacccuuaccaugugccu

SEQ ID NO: 3538894 - RNA, 22 nt, Human
ucacccuuauagucuaagacua

SEQ ID NO: 3538895 - RNA, 17 nt, Human
ucacccuuggacaagac

SEQ ID NO: 3538896 - RNA, 22 nt, Human
ucacccuuugcugugaggcugu

SEQ ID NO: 3538897 - RNA, 20 nt, Human
ucaccgaaaacguggcugcu

SEQ ID NO: 3538898 - RNA, 21 nt, Human
ucaccgaaaacguggcugcuu

SEQ ID NO: 3538899 - RNA, 17 nt, Human
ucaccgacgcgucuccu

SEQ ID NO: 3538900 - RNA, 22 nt, Human
ucaccgacugaaaauauuguuu

SEQ ID NO: 3538901 - RNA, 15 nt, Human
ucaccggauccuggg

SEQ ID NO: 3538902 - RNA, 17 nt, Human
ucaccguggaccuuccu

SEQ ID NO: 3538903 - RNA, 19 nt, Human
ucaccguggaccuuccugc

SEQ ID NO: 3538904 - RNA, 16 nt, Human
ucaccgugggcucccu

SEQ ID NO: 3538905 - RNA, 17 nt, Human
ucaccgugggcucccug

SEQ ID NO: 3538906 - RNA, 16 nt, Human
uauucaauuccucugg

SEQ ID NO: 3538907 - RNA, 18 nt, Human
uauucaauuccucuggga

SEQ ID NO: 3538908 - RNA, 15 nt, Human
uauucaccuucaguu

SEQ ID NO: 3538909 - RNA, 17 nt, Human
uauucaccuucaguuuu

SEQ ID NO: 3538910 - RNA, 12 nt, Human
uauucagaauau

SEQ ID NO: 3538911 - RNA, 20 nt, Human
uauucagaauuaugauggaa

SEQ ID NO: 3538912 - RNA, 21 nt, Human
uauucagacaaaauggauaca

SEQ ID NO: 3538913 - RNA, 14 nt, Human
uauucagacaagca

SEQ ID NO: 3538914 - RNA, 19 nt, Human
uauucagcuucauuugugu

SEQ ID NO: 3538915 - RNA, 21 nt, Human
uauucagcuugcacauuuggu

SEQ ID NO: 3538916 - RNA, 20 nt, Human
uauucaggacuugaaagaaa

SEQ ID NO: 3538917 - RNA, 18 nt, Human
uauucaguuaagaaaaaa

SEQ ID NO: 3538918 - RNA, 21 nt, Human
uauucaguuaagaaaaaaaua

SEQ ID NO: 3538919 - RNA, 13 nt, Human
uauucauaugcau

SEQ ID NO: 3538920 - RNA, 16 nt, Human
uauucauauuggaaaa

SEQ ID NO: 3538921 - RNA, 17 nt, Human
uauucauauuggaaaaa

SEQ ID NO: 3538922 - RNA, 15 nt, Human
uauucauauuuguac

SEQ ID NO: 3538923 - RNA, 23 nt, Human
uauucauauuuguacuuucuguu

SEQ ID NO: 3538924 - RNA, 21 nt, Human
uauucauauuuucuuucaaaa

SEQ ID NO: 3538925 - RNA, 17 nt, Human
uauucauccaaguuaaa

SEQ ID NO: 3538926 - RNA, 15 nt, Human
uauucaucucaagga

SEQ ID NO: 3538927 - RNA, 20 nt, Human
uauucaugaagcggucacag

SEQ ID NO: 3538928 - RNA, 14 nt, Human
uauucaugcuucuu

SEQ ID NO: 3538929 - RNA, 18 nt, Human
uauucauuauuugucaaa

SEQ ID NO: 3538930 - RNA, 19 nt, Human
uauucauuauuugucaaau

SEQ ID NO: 3538931 - RNA, 20 nt, Human
uauucauucugugaucauuu

SEQ ID NO: 3538932 - RNA, 13 nt, Human
uauucauuuaaaa

SEQ ID NO: 3538933 - RNA, 17 nt, Human
uauucauuuaaaaugau

SEQ ID NO: 3538934 - RNA, 16 nt, Human
uauucauuuucucuaa

SEQ ID NO: 3538935 - RNA, 19 nt, Human
uauuccaagacaugucugu

SEQ ID NO: 3538936 - RNA, 18 nt, Human
uauuccaccuuaaauuaa

SEQ ID NO: 3538937 - RNA, 22 nt, Human
uauuccagacuugggaggaugu

SEQ ID NO: 3538938 - RNA, 22 nt, Human
uauuccagcuguccccccacuc

SEQ ID NO: 3538939 - RNA, 16 nt, Human
uauuccauaguauauu

SEQ ID NO: 3538940 - RNA, 19 nt, Human
uauuccauaguauauuaaa

SEQ ID NO: 3538941 - RNA, 14 nt, Human
uauuccauauuaga

SEQ ID NO: 3538942 - RNA, 23 nt, Human
uauuccauauuagaaaacuuugu

SEQ ID NO: 3538943 - RNA, 16 nt, Human
uauuccaugaauguau

SEQ ID NO: 3538944 - RNA, 23 nt, Human
uauuccaugaauguaucaggaaa

SEQ ID NO: 3538945 - RNA, 15 nt, Human
uauuccaugacugcu

SEQ ID NO: 3538946 - RNA, 12 nt, Human
uauucccaugag

SEQ ID NO: 3538947 - RNA, 19 nt, Human
uauuccccacccuccccuu

SEQ ID NO: 3538948 - RNA, 20 nt, Human
uauuccccuaucucuagaau

SEQ ID NO: 3538949 - RNA, 21 nt, Human
uauucccuguacaauauuuaa

SEQ ID NO: 3538950 - RNA, 22 nt, Human
uauuccugaccuccgccaucca

SEQ ID NO: 3538951 - RNA, 17 nt, Human
uauuccugcauuuguga

SEQ ID NO: 3538952 - RNA, 14 nt, Human
uauuccuguauguu

SEQ ID NO: 3538953 - RNA, 17 nt, Human
uauuccuguauguuguc

SEQ ID NO: 3538954 - RNA, 15 nt, Human
uauuccuucuggccu

SEQ ID NO: 3538955 - RNA, 21 nt, Human
uauuccuucuggccuuuccuc

SEQ ID NO: 3538956 - RNA, 12 nt, Human
uauuccuuuccc

SEQ ID NO: 3538957 - RNA, 13 nt, Human
uauuccuuucccu

SEQ ID NO: 3538958 - RNA, 16 nt, Human
uauuccuuucccuucc

SEQ ID NO: 3538959 - RNA, 17 nt, Human
uauuccuuucccuuccu

SEQ ID NO: 3538960 - RNA, 21 nt, Human
uauuccuuugggccucugcuu

SEQ ID NO: 3538961 - RNA, 16 nt, Human
uauucgaaugaaaaga

SEQ ID NO: 3538962 - RNA, 22 nt, Human
uauucgcuugagaaaaaaagaa

SEQ ID NO: 3538963 - RNA, 15 nt, Human
uauucuaaauuuuau

SEQ ID NO: 3538964 - RNA, 20 nt, Human
uauucuaaauuuuauaucuu

SEQ ID NO: 3538965 - RNA, 11 nt, Human
uauucuaagac

SEQ ID NO: 3538966 - RNA, 15 nt, Human
uauucuacauuucac

SEQ ID NO: 3538967 - RNA, 16 nt, Human
uauucuagccugcauu

SEQ ID NO: 3538968 - RNA, 19 nt, Human
uauucuagcuaauguaaua

SEQ ID NO: 3538969 - RNA, 10 nt, Human
uauucuaguc

SEQ ID NO: 3538970 - RNA, 19 nt, Human
uauucuauaaaacucugca

SEQ ID NO: 3538971 - RNA, 14 nt, Human
uauucuauaugaau

SEQ ID NO: 3538972 - RNA, 19 nt, Human
uauucuauaugaauuuaaa

SEQ ID NO: 3538973 - RNA, 13 nt, Human
uauucuauuaacu

SEQ ID NO: 3538974 - RNA, 12 nt, Human
uauucuauuuua

SEQ ID NO: 3538975 - RNA, 14 nt, Human
uauucuauuuuaca

SEQ ID NO: 3538976 - RNA, 15 nt, Human
uauucuauuuuacaa

SEQ ID NO: 3538977 - RNA, 22 nt, Human
uauucuauuuucauuuucugca

SEQ ID NO: 3538978 - RNA, 14 nt, Human
uauucucaccagga

SEQ ID NO: 3538979 - RNA, 22 nt, Human
uauucucacuccaccacccaaa

SEQ ID NO: 3538980 - RNA, 22 nt, Human
uauucuccuucugucaaaguca

SEQ ID NO: 3538981 - RNA, 17 nt, Human
uauucucuccuguaccu

SEQ ID NO: 3538982 - RNA, 20 nt, Human
uauucucuccuguaccucuu

SEQ ID NO: 3538983 - RNA, 24 nt, Human
uauucucuccuguaccucuugagc

SEQ ID NO: 3538984 - RNA, 12 nt, Human
uauucucugagc

SEQ ID NO: 3538985 - RNA, 18 nt, Human
uauucucugagcugugca

SEQ ID NO: 3538986 - RNA, 14 nt, Human
uauucucuguacau

SEQ ID NO: 3538987 - RNA, 16 nt, Human
uauucucuguacauau

SEQ ID NO: 3538988 - RNA, 13 nt, Human
uauucucuuuggu

SEQ ID NO: 3538989 - RNA, 18 nt, Human
uauucucuuuuaucuguu

SEQ ID NO: 3538990 - RNA, 20 nt, Human
uauucugccuuugcagaaac

SEQ ID NO: 3538991 - RNA, 17 nt, Human
uauucuggcugauaaaa

SEQ ID NO: 3538992 - RNA, 21 nt, Human
uauucuggcugauaaaagaua

SEQ ID NO: 3538993 - RNA, 22 nt, Human
uauucugggcaccacaaaauau

SEQ ID NO: 3538994 - RNA, 22 nt, Human
uauucugugcuguuacaguuuu

SEQ ID NO: 3538995 - RNA, 16 nt, Human
uauucuguuggccagu

SEQ ID NO: 3538996 - RNA, 18 nt, Human
uauucuuaaaaugcaaua

SEQ ID NO: 3538997 - RNA, 19 nt, Human
uauucuuaaaaugcaauau

SEQ ID NO: 3538998 - RNA, 13 nt, Human
uauucuucuagag

SEQ ID NO: 3538999 - RNA, 14 nt, Human
uauucuucuagagu

SEQ ID NO: 3539000 - RNA, 22 nt, Human
uauucuucucuuccuuuuauca

SEQ ID NO: 3539001 - RNA, 14 nt, Human
uauucuugauguaa

SEQ ID NO: 3539002 - RNA, 20 nt, Human
uauucuugauuuauuugcuu

SEQ ID NO: 3539003 - RNA, 13 nt, Human
uauucuugugcuu

SEQ ID NO: 3539004 - RNA, 21 nt, Human
uauucuuucaauucuguaggu

SEQ ID NO: 3539005 - RNA, 22 nt, Human
uauucuuucgaaagaagaaaau

SEQ ID NO: 3539006 - RNA, 21 nt, Human
uauucuuugauguuaacacau

SEQ ID NO: 3539007 - RNA, 22 nt, Human
uauucuuugauguuaacacauu

SEQ ID NO: 3539008 - RNA, 12 nt, Human
uauucuuuguua

SEQ ID NO: 3539009 - RNA, 17 nt, Human
uauucuuuguuaauuug

SEQ ID NO: 3539010 - RNA, 19 nt, Human
uauucuuuguuaauuugga

SEQ ID NO: 3539011 - RNA, 13 nt, Human
uauucuuuuucca

SEQ ID NO: 3539012 - RNA, 17 nt, Human
uauucuuuuuuucucua

SEQ ID NO: 3539013 - RNA, 14 nt, Human
uauugaaaaaaaua

SEQ ID NO: 3539014 - RNA, 13 nt, Human
uauugaaauucua

SEQ ID NO: 3539015 - RNA, 13 nt, Human
uauugaacuuuuu

SEQ ID NO: 3539016 - RNA, 14 nt, Human
uauugaagaaacag

SEQ ID NO: 3539017 - RNA, 22 nt, Human
uauugaagaaacagauaccaua

SEQ ID NO: 3539018 - RNA, 20 nt, Human
uauugaagacaauuugauac

SEQ ID NO: 3539019 - RNA, 22 nt, Human
uauugaagacaauuugauacau

SEQ ID NO: 3539020 - RNA, 16 nt, Human
uauugaagcauuuuau

SEQ ID NO: 3539021 - RNA, 21 nt, Human
uauugaaggaagccaaauuua

SEQ ID NO: 3539022 - RNA, 22 nt, Human
uauugaaucauguaguaucaaa

SEQ ID NO: 3539023 - RNA, 17 nt, Human
uauugaaucuauuuaag

SEQ ID NO: 3539024 - RNA, 21 nt, Human
ucacuaugaaucuauuauacu

SEQ ID NO: 3539025 - RNA, 15 nt, Human
ucacuaugcauuuua

SEQ ID NO: 3539026 - RNA, 14 nt, Human
ucacuauggugcca

SEQ ID NO: 3539027 - RNA, 17 nt, Human
ucacuauguugcccagg

SEQ ID NO: 3539028 - RNA, 15 nt, Human
ucacucaagcacuga

SEQ ID NO: 3539029 - RNA, 17 nt, Human
ucacucaagcacugaua

SEQ ID NO: 3539030 - RNA, 20 nt, Human
ucacucaaggcggugcuuga

SEQ ID NO: 3539031 - RNA, 14 nt, Human
ucacucagauggaa

SEQ ID NO: 3539032 - RNA, 16 nt, Human
ucacucagcaccacuc

SEQ ID NO: 3539033 - RNA, 17 nt, Human
ucacucagcaccacuca

SEQ ID NO: 3539034 - RNA, 13 nt, Human
ucacucaggcugg

SEQ ID NO: 3539035 - RNA, 21 nt, Human
ucacucaggcuggaguacagu

SEQ ID NO: 3539036 - RNA, 13 nt, Human
ucacucauugcug

SEQ ID NO: 3539037 - RNA, 17 nt, Human
ucacucauugcugagcc

SEQ ID NO: 3539038 - RNA, 18 nt, Human
ucacucauugcugagccu

SEQ ID NO: 3539039 - RNA, 14 nt, Human
ucacuccagccugg

SEQ ID NO: 3539040 - RNA, 23 nt, Human
ucacuccaggaaggggcuggacu

SEQ ID NO: 3539041 - RNA, 14 nt, Human
ucacucccagucca

SEQ ID NO: 3539042 - RNA, 17 nt, Human
ucacuccccaaggaaga

SEQ ID NO: 3539043 - RNA, 18 nt, Human
ucacuccccaaggaagag

SEQ ID NO: 3539044 - RNA, 17 nt, Human
ucacuccccagccuggg

SEQ ID NO: 3539045 - RNA, 19 nt, Human
ucacuccccagccugggcc

SEQ ID NO: 3539046 - RNA, 13 nt, Human
ucacuccccucca

SEQ ID NO: 3539047 - RNA, 18 nt, Human
ucacucccuucuccuuga

SEQ ID NO: 3539048 - RNA, 20 nt, Human
ucacucccuucuccuugaua

SEQ ID NO: 3539049 - RNA, 17 nt, Human
ucacuccggugugccug

SEQ ID NO: 3539050 - RNA, 22 nt, Human
ucacuccggugugccugcagcc

SEQ ID NO: 3539051 - RNA, 17 nt, Human
ucacuccugacugcccg

SEQ ID NO: 3539052 - RNA, 23 nt, Human
ucacuccugagaccccuggccuc

SEQ ID NO: 3539053 - RNA, 12 nt, Human
ucacuccugcug

SEQ ID NO: 3539054 - RNA, 14 nt, Human
ucacuccugcugua

SEQ ID NO: 3539055 - RNA, 16 nt, Human
ucacuccugcuguaaa

SEQ ID NO: 3539056 - RNA, 12 nt, Human
ucacuccugggg

SEQ ID NO: 3539057 - RNA, 13 nt, Human
ucacuccuggggc

SEQ ID NO: 3539058 - RNA, 10 nt, Human
ucacuccugu

SEQ ID NO: 3539059 - RNA, 13 nt, Human
ucacuccuugaaa

SEQ ID NO: 3539060 - RNA, 13 nt, Human
ucacuccuuuuaa

SEQ ID NO: 3539061 - RNA, 18 nt, Human
ucacuccuuuuaaagaaa

SEQ ID NO: 3539062 - RNA, 15 nt, Human
ucacucgcccccggg

SEQ ID NO: 3539063 - RNA, 20 nt, Human
ucacucggguuucucugugg

SEQ ID NO: 3539064 - RNA, 15 nt, Human
ucacucuaagauguu

SEQ ID NO: 3539065 - RNA, 20 nt, Human
ucacucuaagucauguaugu

SEQ ID NO: 3539066 - RNA, 15 nt, Human
uauugauugggaaaa

SEQ ID NO: 3539067 - RNA, 22 nt, Human
uauugauugggaaaacauuugc

SEQ ID NO: 3539068 - RNA, 14 nt, Human
uauugcaaagucag

SEQ ID NO: 3539069 - RNA, 18 nt, Human
uauugcaauaaaguauaa

SEQ ID NO: 3539070 - RNA, 17 nt, Human
uauugcaaugaaggaaa

SEQ ID NO: 3539071 - RNA, 17 nt, Human
uauugcacaugucuuaa

SEQ ID NO: 3539072 - RNA, 20 nt, Human
uauugcacaugucuuaauga

SEQ ID NO: 3539073 - RNA, 22 nt, Human
uauugcacaugucuuaaugaag

SEQ ID NO: 3539074 - RNA, 15 nt, Human
uauugcaguuuauca

SEQ ID NO: 3539075 - RNA, 19 nt, Human
uauugcaguuuaucauuca

SEQ ID NO: 3539076 - RNA, 23 nt, Human
uauugcauacuauuaaacaugcu

SEQ ID NO: 3539077 - RNA, 16 nt, Human
uauugcaucuguauaa

SEQ ID NO: 3539078 - RNA, 22 nt, Human
uauugcauuuggauuggggucc

SEQ ID NO: 3539079 - RNA, 15 nt, Human
uauugccaaacauua

SEQ ID NO: 3539080 - RNA, 14 nt, Human
uauugccaaugcua

SEQ ID NO: 3539081 - RNA, 15 nt, Human
uauugcccaggcugg

SEQ ID NO: 3539082 - RNA, 13 nt, Human
uauugcccagguu

SEQ ID NO: 3539083 - RNA, 15 nt, Human
uauugccucugagag

SEQ ID NO: 3539084 - RNA, 19 nt, Human
uauugccuucucaccagcu

SEQ ID NO: 3539085 - RNA, 19 nt, Human
uauugccuucuuugaagaa

SEQ ID NO: 3539086 - RNA, 21 nt, Human
uauugccuuuuaauuuuuaau

SEQ ID NO: 3539087 - RNA, 20 nt, Human
uauugcuagagcuccucccu

SEQ ID NO: 3539088 - RNA, 14 nt, Human
uauugcuaguauuu

SEQ ID NO: 3539089 - RNA, 16 nt, Human
uauugcuaguauuuga

SEQ ID NO: 3539090 - RNA, 17 nt, Human
uauugcuaguauuugaa

SEQ ID NO: 3539091 - RNA, 18 nt, Human
uauugcuaguauuugaau

SEQ ID NO: 3539092 - RNA, 12 nt, Human
uauugcuggggu

SEQ ID NO: 3539093 - RNA, 16 nt, Human
uauugcuguugcuuga

SEQ ID NO: 3539094 - RNA, 17 nt, Human
uauugcuguugcuugaa

SEQ ID NO: 3539095 - RNA, 17 nt, Human
uauugcuuaguaaaauu

SEQ ID NO: 3539096 - RNA, 23 nt, Human
uauugcuucuucuccuaugugua

SEQ ID NO: 3539097 - RNA, 21 nt, Human
uauugcuugcacaaaccaauu

SEQ ID NO: 3539098 - RNA, 16 nt, Human
uauuggaauauaauug

SEQ ID NO: 3539099 - RNA, 16 nt, Human
uauuggaauuaaccug

SEQ ID NO: 3539100 - RNA, 21 nt, Human
uauuggaggguaaaugaugug

SEQ ID NO: 3539101 - RNA, 23 nt, Human
uauuggggccaugaguaaaauag

SEQ ID NO: 3539102 - RNA, 16 nt, Human
uauuggggucugaccc

SEQ ID NO: 3539103 - RNA, 18 nt, Human
uauuggguucauuauugg

SEQ ID NO: 3539104 - RNA, 15 nt, Human
uauugguaacauccu

SEQ ID NO: 3539105 - RNA, 21 nt, Human
uauugguaacauccuuucuau

SEQ ID NO: 3539106 - RNA, 15 nt, Human
uauugguauacuguu

SEQ ID NO: 3539107 - RNA, 14 nt, Human
uauugguauauccu

SEQ ID NO: 3539108 - RNA, 13 nt, Human
uauugguggaauc

SEQ ID NO: 3539109 - RNA, 18 nt, Human
uauuggugguucucagca

SEQ ID NO: 3539110 - RNA, 20 nt, Human
uauugguuuaaagaaagugu

SEQ ID NO: 3539111 - RNA, 15 nt, Human
uauugguuuuaugau

SEQ ID NO: 3539112 - RNA, 15 nt, Human
uauuguaaaacaggu

SEQ ID NO: 3539113 - RNA, 15 nt, Human
uauuguaaacaugug

SEQ ID NO: 3539114 - RNA, 17 nt, Human
uauuguaaacauguguu

SEQ ID NO: 3539115 - RNA, 17 nt, Human
uauuguaaauuuuagaa

SEQ ID NO: 3539116 - RNA, 11 nt, Human
uauuguaagaa

SEQ ID NO: 3539117 - RNA, 23 nt, Human
uauuguaauauagaaaaaaacau

SEQ ID NO: 3539118 - RNA, 18 nt, Human
uauuguaaugagugaauu

SEQ ID NO: 3539119 - RNA, 21 nt, Human
uauuguacaaaguauuaagca

SEQ ID NO: 3539120 - RNA, 13 nt, Human
uauuguacacuuu

SEQ ID NO: 3539121 - RNA, 11 nt, Human
uauuguacaga

SEQ ID NO: 3539122 - RNA, 14 nt, Human
uauuguacaguuuu

SEQ ID NO: 3539123 - RNA, 15 nt, Human
uauuguacaguuuuu

SEQ ID NO: 3539124 - RNA, 13 nt, Human
uauuguaccuuuu

SEQ ID NO: 3539125 - RNA, 17 nt, Human
uauuguaccuuuuaaca

SEQ ID NO: 3539126 - RNA, 17 nt, Human
uauuguagcauccugga

SEQ ID NO: 3539127 - RNA, 16 nt, Human
uauuguagcauuucuu

SEQ ID NO: 3539128 - RNA, 21 nt, Human
uauuguauaaacuaucaguuu

SEQ ID NO: 3539129 - RNA, 17 nt, Human
uauuguauauuacaaug

SEQ ID NO: 3539130 - RNA, 19 nt, Human
uauuguauauuacaaugau

SEQ ID NO: 3539131 - RNA, 22 nt, Human
uauuguaucaaucuuuagaaaa

SEQ ID NO: 3539132 - RNA, 10 nt, Human
uauuguauuu

SEQ ID NO: 3539133 - RNA, 18 nt, Human
uauuguauuuauucaaua

SEQ ID NO: 3539134 - RNA, 16 nt, Human
uauugucagauauuuu

SEQ ID NO: 3539135 - RNA, 17 nt, Human
uauugucauuaaaggua

SEQ ID NO: 3539136 - RNA, 21 nt, Human
uauugucccuggcuuccuuac

SEQ ID NO: 3539137 - RNA, 22 nt, Human
uauugucccuggcuuccuuacu

SEQ ID NO: 3539138 - RNA, 22 nt, Human
uauuguccuauuaguguuauau

SEQ ID NO: 3539139 - RNA, 17 nt, Human
uauugucuagugaaacu

SEQ ID NO: 3539140 - RNA, 16 nt, Human
uauugucuguaaaucu

SEQ ID NO: 3539141 - RNA, 22 nt, Human
uauugucuguaaaucuaacauu

SEQ ID NO: 3539142 - RNA, 14 nt, Human
uauugucuuuuugu

SEQ ID NO: 3539143 - RNA, 17 nt, Human
uauugugaaguacauau

SEQ ID NO: 3539144 - RNA, 13 nt, Human
uauugugaaugau

SEQ ID NO: 3539145 - RNA, 21 nt, Human
uauugugaucuaucaauaguc

SEQ ID NO: 3539146 - RNA, 19 nt, Human
uauugugcgcuaaacuuuu

SEQ ID NO: 3539147 - RNA, 22 nt, Human
uauugugcgcuaaacuuuucug

SEQ ID NO: 3539148 - RNA, 23 nt, Human
uauugugcgcuaaacuuuucuga

SEQ ID NO: 3539149 - RNA, 23 nt, Human
uauugugguauugaauauugugu

SEQ ID NO: 3539150 - RNA, 19 nt, Human
uauugugucuuuugcauga

SEQ ID NO: 3539151 - RNA, 17 nt, Human
uauuguguguuauuuaa

SEQ ID NO: 3539152 - RNA, 14 nt, Human
uauuguguugugaa

SEQ ID NO: 3539153 - RNA, 17 nt, Human
uauuguguuugucauua

SEQ ID NO: 3539154 - RNA, 16 nt, Human
uauuguuaauacaagg

SEQ ID NO: 3539155 - RNA, 14 nt, Human
uauuguuagauguu

SEQ ID NO: 3539156 - RNA, 14 nt, Human
uauuguucaaacaa

SEQ ID NO: 3539157 - RNA, 18 nt, Human
uauuguuccaagacauug

SEQ ID NO: 3539158 - RNA, 17 nt, Human
uauuguuccagcaguuu

SEQ ID NO: 3539159 - RNA, 15 nt, Human
uauuguucucacacu

SEQ ID NO: 3539160 - RNA, 19 nt, Human
uauuguugacaacugugac

SEQ ID NO: 3539161 - RNA, 23 nt, Human
uauuguugacaacugugacugua

SEQ ID NO: 3539162 - RNA, 17 nt, Human
uauuguugcauugcuuu

SEQ ID NO: 3539163 - RNA, 13 nt, Human
uauuguugguaau

SEQ ID NO: 3539164 - RNA, 20 nt, Human
uauuguuuaaaaucauuucu

SEQ ID NO: 3539165 - RNA, 17 nt, Human
uauuguuuaaaauguaa

SEQ ID NO: 3539166 - RNA, 12 nt, Human
uauuguuucaau

SEQ ID NO: 3539167 - RNA, 18 nt, Human
uauuguuucaauugcauc

SEQ ID NO: 3539168 - RNA, 16 nt, Human
uauuguuucucugaaa

SEQ ID NO: 3539169 - RNA, 15 nt, Human
ucagcuacuaaugau

SEQ ID NO: 3539170 - RNA, 19 nt, Human
ucagcuacugauuuuugug

SEQ ID NO: 3539171 - RNA, 23 nt, Human
ucagcuaggaacaaaucuuccug

SEQ ID NO: 3539172 - RNA, 23 nt, Human
ucagcuauuuaaaaaaaaaagag

SEQ ID NO: 3539173 - RNA, 19 nt, Human
ucagcuauuuacugccaaa

SEQ ID NO: 3539174 - RNA, 13 nt, Human
ucagcucacugca

SEQ ID NO: 3539175 - RNA, 15 nt, Human
ucagcucauccaugc

SEQ ID NO: 3539176 - RNA, 12 nt, Human
ucagcucaugga

SEQ ID NO: 3539177 - RNA, 13 nt, Human
ucagcuccagccc

SEQ ID NO: 3539178 - RNA, 23 nt, Human
ucagcuccagcucaccagcccca

SEQ ID NO: 3539179 - RNA, 24 nt, Human
ucagcuccagcucaccagccccag

SEQ ID NO: 3539180 - RNA, 23 nt, Human
ucagcuccagggaauccaagccu

SEQ ID NO: 3539181 - RNA, 20 nt, Human
ucagcucccacaagccucug

SEQ ID NO: 3539182 - RNA, 15 nt, Human
ucagcuccccagagu

SEQ ID NO: 3539183 - RNA, 17 nt, Human
ucagcuccccagagucc

SEQ ID NO: 3539184 - RNA, 13 nt, Human
ucagcucccccug

SEQ ID NO: 3539185 - RNA, 23 nt, Human
ucagcucccccuguccccucagc

SEQ ID NO: 3539186 - RNA, 17 nt, Human
ucagcuccccucggaga

SEQ ID NO: 3539187 - RNA, 21 nt, Human
ucagcuccccucggagaagag

SEQ ID NO: 3539188 - RNA, 12 nt, Human
ucagcuccugac

SEQ ID NO: 3539189 - RNA, 17 nt, Human
ucagcuccugaccaguu

SEQ ID NO: 3539190 - RNA, 18 nt, Human
ucagcuccugaccaguug

SEQ ID NO: 3539191 - RNA, 14 nt, Human
ucagcuccuuccug

SEQ ID NO: 3539192 - RNA, 16 nt, Human
ucagcuccuuccugga

SEQ ID NO: 3539193 - RNA, 13 nt, Human
ucagcucggcuca

SEQ ID NO: 3539194 - RNA, 19 nt, Human
ucagcucucaguugcagcc

SEQ ID NO: 3539195 - RNA, 20 nt, Human
ucagcucucugcccugugua

SEQ ID NO: 3539196 - RNA, 15 nt, Human
ucagcucucuguaua

SEQ ID NO: 3539197 - RNA, 20 nt, Human
ucagcucucuguauaaacau

SEQ ID NO: 3539198 - RNA, 21 nt, Human
ucagcucugaaagagaaacac

SEQ ID NO: 3539199 - RNA, 20 nt, Human
ucagcucuggcucacagacu

SEQ ID NO: 3539200 - RNA, 12 nt, Human
ucagcucuggga

SEQ ID NO: 3539201 - RNA, 16 nt, Human
ucagcucugggagagg

SEQ ID NO: 3539202 - RNA, 19 nt, Human
ucagcucugggccauucuc

SEQ ID NO: 3539203 - RNA, 16 nt, Human
ucagcugaaccugggu

SEQ ID NO: 3539204 - RNA, 21 nt, Human
ucagcugaaugccuccugugg

SEQ ID NO: 3539205 - RNA, 23 nt, Human
ucagcugaaugccuccugugggg

SEQ ID NO: 3539206 - RNA, 21 nt, Human
ucagcugagccuucugagcug

SEQ ID NO: 3539207 - RNA, 18 nt, Human
ucagcugcauuccgcagc

SEQ ID NO: 3539208 - RNA, 20 nt, Human
ucagcugcauuccgcagccc

SEQ ID NO: 3539209 - RNA, 16 nt, Human
ucagcugccccacagg

SEQ ID NO: 3539210 - RNA, 12 nt, Human
ucagcugccuca

SEQ ID NO: 3539211 - RNA, 24 nt, Human
ucagcugccucacuuccuacaaga

SEQ ID NO: 3539212 - RNA, 12 nt, Human
ucagcugcucag

SEQ ID NO: 3539213 - RNA, 15 nt, Human
ucagcugcuuuguua

SEQ ID NO: 3539214 - RNA, 16 nt, Human
ucagcugcuuuguuac

SEQ ID NO: 3539215 - RNA, 21 nt, Human
ucagcuggcacugucucugcu

SEQ ID NO: 3539216 - RNA, 20 nt, Human
ucagcuguaagaagagacug

SEQ ID NO: 3539217 - RNA, 17 nt, Human
ucagcuguacuucgucu

SEQ ID NO: 3539218 - RNA, 19 nt, Human
ucagcuguccugcagcaaa

SEQ ID NO: 3539219 - RNA, 13 nt, Human
ucagcugucuuuu

SEQ ID NO: 3539220 - RNA, 19 nt, Human
ucagcugucuuuuggagga

SEQ ID NO: 3539221 - RNA, 21 nt, Human
ucagcuuaaaauaaacaguug

SEQ ID NO: 3539222 - RNA, 13 nt, Human
ucagcuuaucucu

SEQ ID NO: 3539223 - RNA, 19 nt, Human
ucagcuuaucucuuuuaua

SEQ ID NO: 3539224 - RNA, 16 nt, Human
ucagcuucauuugugu

SEQ ID NO: 3539225 - RNA, 13 nt, Human
ucagcuuccccag

SEQ ID NO: 3539226 - RNA, 17 nt, Human
ucagcuuccccaguagc

SEQ ID NO: 3539227 - RNA, 15 nt, Human
ucagcuucugcuggg

SEQ ID NO: 3539228 - RNA, 17 nt, Human
ucagcuucugcugggcu

SEQ ID NO: 3539229 - RNA, 18 nt, Human
ucagcuucugcugggcug

SEQ ID NO: 3539230 - RNA, 21 nt, Human
ucagcuucugcugggcugggg

SEQ ID NO: 3539231 - RNA, 14 nt, Human
ucagcuucuuaaua

SEQ ID NO: 3539232 - RNA, 14 nt, Human
ucagcuucuucauc

SEQ ID NO: 3539233 - RNA, 16 nt, Human
ucagcuugugcacaau

SEQ ID NO: 3539234 - RNA, 22 nt, Human
ucagcuuugagaagccuucagc

SEQ ID NO: 3539235 - RNA, 20 nt, Human
ucagcuuuuugucuuuucug

SEQ ID NO: 3539236 - RNA, 16 nt, Human
ucaggaaaaggccugg

SEQ ID NO: 3539237 - RNA, 18 nt, Human
ucaggaaaaggccugggg

SEQ ID NO: 3539238 - RNA, 15 nt, Human
ucaggaaaagguuga

SEQ ID NO: 3539239 - RNA, 21 nt, Human
ucaggaaacgagacuuuccau

SEQ ID NO: 3539240 - RNA, 12 nt, Human
ucaggaaagaau

SEQ ID NO: 3539241 - RNA, 14 nt, Human
ucaggaaagaauag

SEQ ID NO: 3539242 - RNA, 13 nt, Human
ucaggaaagagaa

SEQ ID NO: 3539243 - RNA, 22 nt, Human
ucaggaaaggaaucauuucuau

SEQ ID NO: 3539244 - RNA, 19 nt, Human
ucaggaaauauauaugugu

SEQ ID NO: 3539245 - RNA, 21 nt, Human
ucaggaaaucaaauaugcaaa

SEQ ID NO: 3539246 - RNA, 22 nt, Human
ucaggaaaucaaauaugcaaag

SEQ ID NO: 3539247 - RNA, 18 nt, Human
ucaggaacagcuauggga

SEQ ID NO: 3539248 - RNA, 19 nt, Human
ucaggaaccucgaguacug

SEQ ID NO: 3539249 - RNA, 22 nt, Human
ucaggaaccuggaccaaagcug

SEQ ID NO: 3539250 - RNA, 23 nt, Human
ucaggaaccuggaccaaagcuga

SEQ ID NO: 3539251 - RNA, 22 nt, Human
ucaggaacguuuagcugacaaa

SEQ ID NO: 3539252 - RNA, 23 nt, Human
ucaggaagaaaggagucugcaca

SEQ ID NO: 3539253 - RNA, 15 nt, Human
ucaggaagaaaucac

SEQ ID NO: 3539254 - RNA, 22 nt, Human
ucaggaagaaaucacagaauca

SEQ ID NO: 3539255 - RNA, 22 nt, Human
ucaggaagaacacccucuaaau

SEQ ID NO: 3539256 - RNA, 15 nt, Human
ucaggaagagaagga

SEQ ID NO: 3539257 - RNA, 20 nt, Human
ucaggaagaugaaagaggag

SEQ ID NO: 3539258 - RNA, 13 nt, Human
ucaggaagcucag

SEQ ID NO: 3539259 - RNA, 17 nt, Human
ucaggaauauuuuccaa

SEQ ID NO: 3539260 - RNA, 16 nt, Human
ucaggaauucuuggag

SEQ ID NO: 3539261 - RNA, 15 nt, Human
ucaggacacaggccu

SEQ ID NO: 3539262 - RNA, 18 nt, Human
ucaggacacaggccugug

SEQ ID NO: 3539263 - RNA, 13 nt, Human
ucaggacacuaau

SEQ ID NO: 3539264 - RNA, 15 nt, Human
ucaggacccagagga

SEQ ID NO: 3539265 - RNA, 18 nt, Human
ucaggacccucgcuggcc

SEQ ID NO: 3539266 - RNA, 20 nt, Human
ucaggacccucgcuggcccc

SEQ ID NO: 3539267 - RNA, 21 nt, Human
ucaggacccucgcuggccccc

SEQ ID NO: 3539268 - RNA, 18 nt, Human
ucaggaccuccaagccac

SEQ ID NO: 3539269 - RNA, 18 nt, Human
ucaggacuccagcccauu

SEQ ID NO: 3539270 - RNA, 14 nt, Human
ucaggacuccucuc

SEQ ID NO: 3539271 - RNA, 13 nt, Human
ucaggacugggag

SEQ ID NO: 3539272 - RNA, 14 nt, Human
gcgcuucccagcac

SEQ ID NO: 3539273 - RNA, 15 nt, Human
gcgcuuucuggaaaa

SEQ ID NO: 3539274 - RNA, 22 nt, Human
gcgcuuucuggaaaagaggagu

SEQ ID NO: 3539275 - RNA, 15 nt, Human
gcggacagccacggc

SEQ ID NO: 3539276 - RNA, 19 nt, Human
gcggacagccacggccagg

SEQ ID NO: 3539277 - RNA, 19 nt, Human
gcggacaguggcaggacag

SEQ ID NO: 3539278 - RNA, 13 nt, Human
gcggaccccagcu

SEQ ID NO: 3539279 - RNA, 14 nt, Human
gcggacguuccagc

SEQ ID NO: 3539280 - RNA, 15 nt, Human
gcggacguuccagcc

SEQ ID NO: 3539281 - RNA, 19 nt, Human
gcggacuccuccuuucucc

SEQ ID NO: 3539282 - RNA, 18 nt, Human
gcggagaaccuugugccu

SEQ ID NO: 3539283 - RNA, 17 nt, Human
gcggagcaagaggaggc

SEQ ID NO: 3539284 - RNA, 17 nt, Human
gcggagcacacuggcuc

SEQ ID NO: 3539285 - RNA, 14 nt, Human
gcggagugaagagg

SEQ ID NO: 3539286 - RNA, 20 nt, Human
gcggaucucuggagugagcu

SEQ ID NO: 3539287 - RNA, 16 nt, Human
gcggcaaaaggaaagc

SEQ ID NO: 3539288 - RNA, 17 nt, Human
gcggccagccccggccc

SEQ ID NO: 3539289 - RNA, 19 nt, Human
gcggccagccccggcccug

SEQ ID NO: 3539290 - RNA, 21 nt, Human
gcggccagccccggcccuggg

SEQ ID NO: 3539291 - RNA, 22 nt, Human
gcggcccaauccaagguggggu

SEQ ID NO: 3539292 - RNA, 15 nt, Human
gcggcccagcccggc

SEQ ID NO: 3539293 - RNA, 20 nt, Human
gcggccccaacucgggcucc

SEQ ID NO: 3539294 - RNA, 17 nt, Human
gcggccccggccggggu

SEQ ID NO: 3539295 - RNA, 14 nt, Human
gcggccccucccac

SEQ ID NO: 3539296 - RNA, 15 nt, Human
gcggccccucccaca

SEQ ID NO: 3539297 - RNA, 17 nt, Human
gcggccgcauucccuga

SEQ ID NO: 3539298 - RNA, 18 nt, Human
gcggccuaugacuugggc

SEQ ID NO: 3539299 - RNA, 15 nt, Human
gcggccucuucucuc

SEQ ID NO: 3539300 - RNA, 13 nt, Human
gcggccuggcgcu

SEQ ID NO: 3539301 - RNA, 16 nt, Human
gcggcggagcuggccc

SEQ ID NO: 3539302 - RNA, 18 nt, Human
gcggcggagcuggccccg

SEQ ID NO: 3539303 - RNA, 17 nt, Human
gcggcguacaggcuggc

SEQ ID NO: 3539304 - RNA, 15 nt, Human
gcggcucccggggca

SEQ ID NO: 3539305 - RNA, 23 nt, Human
gcggcugagagccccagcugaca

SEQ ID NO: 3539306 - RNA, 22 nt, Human
gcggcugagucaugaucucccu

SEQ ID NO: 3539307 - RNA, 17 nt, Human
gcggcugcugugugccu

SEQ ID NO: 3539308 - RNA, 16 nt, Human
gcggcuggacuuggag

SEQ ID NO: 3539309 - RNA, 19 nt, Human
gcggcuggccauggagaaa

SEQ ID NO: 3539310 - RNA, 14 nt, Human
gcggcugggaggag

SEQ ID NO: 3539311 - RNA, 17 nt, Human
gcggcugggaggagggc

SEQ ID NO: 3539312 - RNA, 22 nt, Human
gcggcugggaggagggcaggca

SEQ ID NO: 3539313 - RNA, 13 nt, Human
gcuaaaauguuuu

SEQ ID NO: 3539314 - RNA, 15 nt, Human
gcuaaaauguuuuca

SEQ ID NO: 3539315 - RNA, 16 nt, Human
gcuaaaauguuuucag

SEQ ID NO: 3539316 - RNA, 22 nt, Human
gcuaaacguguauguuuuucag

SEQ ID NO: 3539317 - RNA, 20 nt, Human
gcuaaagaaguuugaacauu

SEQ ID NO: 3539318 - RNA, 19 nt, Human
gcuaaauaaaauuuguugc

SEQ ID NO: 3539319 - RNA, 17 nt, Human
gcuaaauauauauuuua

SEQ ID NO: 3539320 - RNA, 18 nt, Human
gcuaaauuacaauuguca

SEQ ID NO: 3539321 - RNA, 22 nt, Human
gcuaaauuacucaggaagaaca

SEQ ID NO: 3539322 - RNA, 21 nt, Human
gcuaaauugauguugaugcaa

SEQ ID NO: 3539323 - RNA, 23 nt, Human
gcuaaauugauguugaugcaauc

SEQ ID NO: 3539324 - RNA, 13 nt, Human
gcuaaauuuucug

SEQ ID NO: 3539325 - RNA, 14 nt, Human
gcuaacaaagacaa

SEQ ID NO: 3539326 - RNA, 20 nt, Human
gcuaacacacagcucccaua

SEQ ID NO: 3539327 - RNA, 22 nt, Human
gcuaacagggaaggcaggcagg

SEQ ID NO: 3539328 - RNA, 19 nt, Human
gcuaacaguucacuugcag

SEQ ID NO: 3539329 - RNA, 22 nt, Human
gcuaacaugaagaccuuuuucu

SEQ ID NO: 3539330 - RNA, 18 nt, Human
gcuaacauggaaguacua

SEQ ID NO: 3539331 - RNA, 13 nt, Human
gcuaacauuuuaa

SEQ ID NO: 3539332 - RNA, 17 nt, Human
gcuaacauuuuaaauaa

SEQ ID NO: 3539333 - RNA, 21 nt, Human
gcuaacccccuucuacugagc

SEQ ID NO: 3539334 - RNA, 21 nt, Human
gcuaaccuuauccugcauugu

SEQ ID NO: 3539335 - RNA, 11 nt, Human
gcuaacugaac

SEQ ID NO: 3539336 - RNA, 13 nt, Human
gcuaacuguaaau

SEQ ID NO: 3539337 - RNA, 18 nt, Human
gcuaacuuggagccccag

SEQ ID NO: 3539338 - RNA, 14 nt, Human
gcuaacuuggguua

SEQ ID NO: 3539339 - RNA, 17 nt, Human
gcuaagaaccuggaacu

SEQ ID NO: 3539340 - RNA, 16 nt, Human
gcuaagaauauuugaa

SEQ ID NO: 3539341 - RNA, 22 nt, Human
gcuaagaauuuuuuauuuuuug

SEQ ID NO: 3539342 - RNA, 13 nt, Human
gcuaagagaagua

SEQ ID NO: 3539343 - RNA, 20 nt, Human
gcuaagagggagggagggcu

SEQ ID NO: 3539344 - RNA, 22 nt, Human
gcuaagagggagggagggcucc

SEQ ID NO: 3539345 - RNA, 18 nt, Human
gcuaagauuaucugggga

SEQ ID NO: 3539346 - RNA, 20 nt, Human
gcuaagcucacguccugaga

SEQ ID NO: 3539347 - RNA, 16 nt, Human
gcuaaggacaggcagg

SEQ ID NO: 3539348 - RNA, 17 nt, Human
gcuaaggacauuuccca

SEQ ID NO: 3539349 - RNA, 12 nt, Human
gcuaaggacuug

SEQ ID NO: 3539350 - RNA, 16 nt, Human
gcuaaggcguggagcu

SEQ ID NO: 3539351 - RNA, 22 nt, Human
gcuaaggcguggagcugccuga

SEQ ID NO: 3539352 - RNA, 23 nt, Human
gcuaagggaagacauuucuuuuc

SEQ ID NO: 3539353 - RNA, 16 nt, Human
gcuaagggguggggcu

SEQ ID NO: 3539354 - RNA, 16 nt, Human
gcuaagguucuaaggc

SEQ ID NO: 3539355 - RNA, 18 nt, Human
gcuaaguaaaucucuucu

SEQ ID NO: 3539356 - RNA, 21 nt, Human
gcuaaguacacaauaagcaaa

SEQ ID NO: 3539357 - RNA, 22 nt, Human
gcuaaguacacaauaagcaaaa

SEQ ID NO: 3539358 - RNA, 17 nt, Human
gcuaaguauuucccagc

SEQ ID NO: 3539359 - RNA, 13 nt, Human
gcuaagugaaaag

SEQ ID NO: 3539360 - RNA, 17 nt, Human
gcuaaguugggaucuag

SEQ ID NO: 3539361 - RNA, 23 nt, Human
gcuaauaaaauaucauucagcaa

SEQ ID NO: 3539362 - RNA, 18 nt, Human
gcuaauaaugagcuauua

SEQ ID NO: 3539363 - RNA, 14 nt, Human
gcuaauauuaaaag

SEQ ID NO: 3539364 - RNA, 18 nt, Human
gcuaaucaaagccagggu

SEQ ID NO: 3539365 - RNA, 14 nt, Human
gcuaaucagcauuc

SEQ ID NO: 3539366 - RNA, 17 nt, Human
gcuaaucagcauucuca

SEQ ID NO: 3539367 - RNA, 15 nt, Human
gcuaaucagugucuc

SEQ ID NO: 3539368 - RNA, 16 nt, Human
gcuaaucagugucuca

SEQ ID NO: 3539369 - RNA, 18 nt, Human
gcuaaucagugucucaca

SEQ ID NO: 3539370 - RNA, 14 nt, Human
gcuaauuaaaaagu

SEQ ID NO: 3539371 - RNA, 20 nt, Human
gcuaauucucagaaaggcaa

SEQ ID NO: 3539372 - RNA, 14 nt, Human
gcuaauucuuugca

SEQ ID NO: 3539373 - RNA, 17 nt, Human
gcuaauucuuugcaaaa

SEQ ID NO: 3539374 - RNA, 20 nt, Human
gcuaauugcuguugaaagca

SEQ ID NO: 3539375 - RNA, 22 nt, Human
gcuaauugcuguugaaagcaaa

SEQ ID NO: 3539376 - RNA, 16 nt, Human
gcuaauuuaaagagac

SEQ ID NO: 3539377 - RNA, 13 nt, Human
gcuaauuugcauu

SEQ ID NO: 3539378 - RNA, 15 nt, Human
gcuaauuugcauuaa

SEQ ID NO: 3539379 - RNA, 22 nt, Human
gcuaauuuucucaaaagcauuu

SEQ ID NO: 3539380 - RNA, 19 nt, Human
gcuacaaaaacacagcaag

SEQ ID NO: 3539381 - RNA, 18 nt, Human
gcuacaaaacgcgcagau

SEQ ID NO: 3539382 - RNA, 18 nt, Human
gcuacaaagaagacaugu

SEQ ID NO: 3539383 - RNA, 19 nt, Human
gcuacaaagaagacauguu

SEQ ID NO: 3539384 - RNA, 22 nt, Human
gcuacaaagaagacauguuuua

SEQ ID NO: 3539385 - RNA, 20 nt, Human
gcuacaaauacucuuaggaa

SEQ ID NO: 3539386 - RNA, 21 nt, Human
gcuacaauuuucucccaggaa

SEQ ID NO: 3539387 - RNA, 20 nt, Human
gcuacacacugcauguuugu

SEQ ID NO: 3539388 - RNA, 14 nt, Human
gcuacacaggggaa

SEQ ID NO: 3539389 - RNA, 16 nt, Human
gcuacaccacucuggc

SEQ ID NO: 3539390 - RNA, 17 nt, Human
gcuacaccacucuggca

SEQ ID NO: 3539391 - RNA, 21 nt, Human
gcuacaccacucuggcagcca

SEQ ID NO: 3539392 - RNA, 22 nt, Human
gcuacaccacucuggcagccac

SEQ ID NO: 3539393 - RNA, 16 nt, Human
gcuacagaagaaacug

SEQ ID NO: 3539394 - RNA, 11 nt, Human
gcuacagagaa

SEQ ID NO: 3539395 - RNA, 21 nt, Human
gcuacagagaaaccagcuucc

SEQ ID NO: 3539396 - RNA, 12 nt, Human
gcuacagagaag

SEQ ID NO: 3539397 - RNA, 19 nt, Human
gcuacagcaauuucuaauu

SEQ ID NO: 3539398 - RNA, 19 nt, Human
gcuacagcuuucuugcucc

SEQ ID NO: 3539399 - RNA, 19 nt, Human
gcuacaggaagcaccccau

SEQ ID NO: 3539400 - RNA, 20 nt, Human
gcuacaggaagcaccccaug

SEQ ID NO: 3539401 - RNA, 12 nt, Human
gcuacagguuac

SEQ ID NO: 3539402 - RNA, 16 nt, Human
gcuacagguuacaaca

SEQ ID NO: 3539403 - RNA, 15 nt, Human
gcuacaguaauaaau

SEQ ID NO: 3539404 - RNA, 20 nt, Human
gcuacaguuuugugaaucuu

SEQ ID NO: 3539405 - RNA, 13 nt, Human
gcuacauaaauug

SEQ ID NO: 3539406 - RNA, 15 nt, Human
gcuacauuauaaacg

SEQ ID NO: 3539407 - RNA, 21 nt, Human
gcuacauuuccgccacauccc

SEQ ID NO: 3539408 - RNA, 14 nt, Human
gcuaccaaaacagu

SEQ ID NO: 3539409 - RNA, 20 nt, Human
gcuaccaaagcaccuuagcu

SEQ ID NO: 3539410 - RNA, 21 nt, Human
gcuaccaacuuguauccaggc

SEQ ID NO: 3539411 - RNA, 12 nt, Human
gcuaccaccagc

SEQ ID NO: 3539412 - RNA, 13 nt, Human
gcuaccaccagcu

SEQ ID NO: 3539413 - RNA, 13 nt, Human
gcuaccaguauuu

SEQ ID NO: 3539414 - RNA, 15 nt, Human
gcuacccaaaagaga

SEQ ID NO: 3539415 - RNA, 16 nt, Human
gcuacccaaaagagaa

SEQ ID NO: 3539416 - RNA, 23 nt, Human
gcuacccaaaagagaaaaaaaau

SEQ ID NO: 3539417 - RNA, 17 nt, Human
gcuacccacuucuaaau

SEQ ID NO: 3539418 - RNA, 22 nt, Human
gcuacccgcagaguucucagaa

SEQ ID NO: 3539419 - RNA, 16 nt, Human
gcuacccgugagcccu

SEQ ID NO: 3539420 - RNA, 16 nt, Human
gcuacccucccugcug

SEQ ID NO: 3539421 - RNA, 23 nt, Human
gcuacccucccugcuguccccuc

SEQ ID NO: 3539422 - RNA, 12 nt, Human
gcuacccugagc

SEQ ID NO: 3539423 - RNA, 16 nt, Human
gcuacccugagcugag

SEQ ID NO: 3539424 - RNA, 20 nt, Human
gcuacccugagcugaggcag

SEQ ID NO: 3539425 - RNA, 14 nt, Human
gcuacccuuuuccu

SEQ ID NO: 3539426 - RNA, 22 nt, Human
gcuacccuuuuucuccagcugg

SEQ ID NO: 3539427 - RNA, 14 nt, Human
gcuaccucucuguc

SEQ ID NO: 3539428 - RNA, 16 nt, Human
gcuaccucucuguccc

SEQ ID NO: 3539429 - RNA, 18 nt, Human
gcuaccugaucccacucc

SEQ ID NO: 3539430 - RNA, 19 nt, Human
gcuaccugcucagcccugc

SEQ ID NO: 3539431 - RNA, 20 nt, Human
gcuaccugcucagcccugca

SEQ ID NO: 3539432 - RNA, 14 nt, Human
ucaggacugggagc

SEQ ID NO: 3539433 - RNA, 21 nt, Human
ucaggacugggagcccccagc

SEQ ID NO: 3539434 - RNA, 23 nt, Human
ucaggacugggagcccccagccu

SEQ ID NO: 3539435 - RNA, 20 nt, Human
ucaggacuuaacggcuccag

SEQ ID NO: 3539436 - RNA, 12 nt, Human
ucaggagaaaaa

SEQ ID NO: 3539437 - RNA, 18 nt, Human
ucaggagaauuagauuuc

SEQ ID NO: 3539438 - RNA, 18 nt, Human
ucaggagaggggcagaac

SEQ ID NO: 3539439 - RNA, 22 nt, Human
ucaggagaucgagaccauccug

SEQ ID NO: 3539440 - RNA, 15 nt, Human
ucaggagcccuggga

SEQ ID NO: 3539441 - RNA, 18 nt, Human
ucaggagcccugggaggc

SEQ ID NO: 3539442 - RNA, 23 nt, Human
ucaggaggaaggcuuacacccac

SEQ ID NO: 3539443 - RNA, 14 nt, Human
ucaggaggcgcccu

SEQ ID NO: 3539444 - RNA, 18 nt, Human
ucaggaggcugaggcaga

SEQ ID NO: 3539445 - RNA, 21 nt, Human
ucaggaggcuggaggaagggg

SEQ ID NO: 3539446 - RNA, 16 nt, Human
ucaggaguguguguga

SEQ ID NO: 3539447 - RNA, 21 nt, Human
ucaggaguuacuggauuuguu

SEQ ID NO: 3539448 - RNA, 19 nt, Human
ucaggaguuagaggccagc

SEQ ID NO: 3539449 - RNA, 22 nt, Human
ucaggaguuagaggccagccug

SEQ ID NO: 3539450 - RNA, 14 nt, Human
ucaggauacaugug

SEQ ID NO: 3539451 - RNA, 15 nt, Human
ucaggauacaugugc

SEQ ID NO: 3539452 - RNA, 20 nt, Human
ucaggauacucugucagaug

SEQ ID NO: 3539453 - RNA, 23 nt, Human
ucaggauauccuuaucagagcua

SEQ ID NO: 3539454 - RNA, 20 nt, Human
ucaggaucaaaccccgacca

SEQ ID NO: 3539455 - RNA, 23 nt, Human
ucaggaucucuuagcauuuuaau

SEQ ID NO: 3539456 - RNA, 15 nt, Human
ucaggaugaacccag

SEQ ID NO: 3539457 - RNA, 20 nt, Human
ucaugucuauuguccaaagu

SEQ ID NO: 3539458 - RNA, 14 nt, Human
ucaugugaaaucau

SEQ ID NO: 3539459 - RNA, 17 nt, Human
ucaugugaaaucauuca

SEQ ID NO: 3539460 - RNA, 18 nt, Human
ucauguggaauauaaaga

SEQ ID NO: 3539461 - RNA, 16 nt, Human
ucauguggcuggaaga

SEQ ID NO: 3539462 - RNA, 19 nt, Human
ucaugugguuucuaugcaa

SEQ ID NO: 3539463 - RNA, 21 nt, Human
ucauguguaaucaauaaacga

SEQ ID NO: 3539464 - RNA, 13 nt, Human
ucaugugucccag

SEQ ID NO: 3539465 - RNA, 14 nt, Human
ucaugugucccaga

SEQ ID NO: 3539466 - RNA, 17 nt, Human
ucaugugucccagaaga

SEQ ID NO: 3539467 - RNA, 18 nt, Human
ucaugugucccagaagau

SEQ ID NO: 3539468 - RNA, 22 nt, Human
ucaugugucccagaagaugacu

SEQ ID NO: 3539469 - RNA, 14 nt, Human
ucaugugugcucuu

SEQ ID NO: 3539470 - RNA, 21 nt, Human
ucauguuaaccucugcuuuua

SEQ ID NO: 3539471 - RNA, 22 nt, Human
ucauguuaauccuagcugugug

SEQ ID NO: 3539472 - RNA, 18 nt, Human
ucauguuaauugauagaa

SEQ ID NO: 3539473 - RNA, 17 nt, Human
ucauguuaguaauaccu

SEQ ID NO: 3539474 - RNA, 18 nt, Human
ucauguuaguaauaccuc

SEQ ID NO: 3539475 - RNA, 22 nt, Human
ucauguucaauuauuuccccca

SEQ ID NO: 3539476 - RNA, 21 nt, Human
ucauguuccuucaagaucaug

SEQ ID NO: 3539477 - RNA, 11 nt, Human
ucauguucuua

SEQ ID NO: 3539478 - RNA, 17 nt, Human
ucauguucuuaauucuu

SEQ ID NO: 3539479 - RNA, 17 nt, Human
ucauguugaagccacug

SEQ ID NO: 3539480 - RNA, 21 nt, Human
ucauguugaucauguacuuuu

SEQ ID NO: 3539481 - RNA, 17 nt, Human
ucauguuggccaggcug

SEQ ID NO: 3539482 - RNA, 15 nt, Human
ucauguuuauaacua

SEQ ID NO: 3539483 - RNA, 17 nt, Human
ucauguuuaugaaaaua

SEQ ID NO: 3539484 - RNA, 15 nt, Human
ucauguuucuuaaau

SEQ ID NO: 3539485 - RNA, 14 nt, Human
ucauguuucuuuga

SEQ ID NO: 3539486 - RNA, 15 nt, Human
ucauguuugcuucau

SEQ ID NO: 3539487 - RNA, 17 nt, Human
ucauguuugcuucauaa

SEQ ID NO: 3539488 - RNA, 20 nt, Human
ucaccguggaccuuccugcc

SEQ ID NO: 3539489 - RNA, 13 nt, Human
ucaccgugggcuc

SEQ ID NO: 3539490 - RNA, 15 nt, Human
ucaccgugggcuccc

SEQ ID NO: 3539491 - RNA, 18 nt, Human
ucaccgugggcucccuga

SEQ ID NO: 3539492 - RNA, 22 nt, Human
ucaccuaacucauacugugcug

SEQ ID NO: 3539493 - RNA, 17 nt, Human
ucaccuaagucucugug

SEQ ID NO: 3539494 - RNA, 16 nt, Human
ucaccuaauuaauuuc

SEQ ID NO: 3539495 - RNA, 15 nt, Human
ucaccuacuuuguaa

SEQ ID NO: 3539496 - RNA, 15 nt, Human
ucaccuagaaauuga

SEQ ID NO: 3539497 - RNA, 14 nt, Human
ucaccuagagccag

SEQ ID NO: 3539498 - RNA, 16 nt, Human
ucaccuagcugaaugu

SEQ ID NO: 3539499 - RNA, 22 nt, Human
ucaccuagcugaauguuuuucu

SEQ ID NO: 3539500 - RNA, 23 nt, Human
ucaccuagcugaauguuuuucua

SEQ ID NO: 3539501 - RNA, 19 nt, Human
ucaccuaggaagccucaga

SEQ ID NO: 3539502 - RNA, 20 nt, Human
ucaccucacucagcaccacu

SEQ ID NO: 3539503 - RNA, 16 nt, Human
ucaccucagauggcag

SEQ ID NO: 3539504 - RNA, 22 nt, Human
ucaccucagauggcagcuuuua

SEQ ID NO: 3539505 - RNA, 18 nt, Human
ucaccucaggccaggugc

SEQ ID NO: 3539506 - RNA, 13 nt, Human
ucaccucaugccc

SEQ ID NO: 3539507 - RNA, 20 nt, Human
ucaccucaugcccacccccu

SEQ ID NO: 3539508 - RNA, 12 nt, Human
ucaccucaugga

SEQ ID NO: 3539509 - RNA, 13 nt, Human
ucaccucccccau

SEQ ID NO: 3539510 - RNA, 15 nt, Human
ucaccucccccaucu

SEQ ID NO: 3539511 - RNA, 23 nt, Human
ucaccuccggucgugucucuggu

SEQ ID NO: 3539512 - RNA, 11 nt, Human
ucaccuccuaa

SEQ ID NO: 3539513 - RNA, 16 nt, Human
ucaccuccuaaaacaa

SEQ ID NO: 3539514 - RNA, 12 nt, Human
ucaccuccucua

SEQ ID NO: 3539515 - RNA, 15 nt, Human
ucaccuccuucaauu

SEQ ID NO: 3539516 - RNA, 23 nt, Human
ucaccucuacccaaacccuaggu

SEQ ID NO: 3539517 - RNA, 15 nt, Human
ucaccucugccucaa

SEQ ID NO: 3539518 - RNA, 12 nt, Human
ucaccucugcua

SEQ ID NO: 3539519 - RNA, 14 nt, Human
ucaccucuuccgac

SEQ ID NO: 3539520 - RNA, 22 nt, Human
ucaccugagcaggaccucugaa

SEQ ID NO: 3539521 - RNA, 21 nt, Human
ucaccugagcccggaugcuuc

SEQ ID NO: 3539522 - RNA, 22 nt, Human
ucaccugagcccggaugcuucu

SEQ ID NO: 3539523 - RNA, 19 nt, Human
ucaccugauucaacuaaaa

SEQ ID NO: 3539524 - RNA, 11 nt, Human
ucaccugcaaa

SEQ ID NO: 3539525 - RNA, 23 nt, Human
ucaccugcccagaucccagaagg

SEQ ID NO: 3539526 - RNA, 14 nt, Human
ucaccugccuguua

SEQ ID NO: 3539527 - RNA, 17 nt, Human
ucaccugcuggccccuc

SEQ ID NO: 3539528 - RNA, 19 nt, Human
ucaccugcuggccccucac

SEQ ID NO: 3539529 - RNA, 15 nt, Human
ucaccugcuucucug

SEQ ID NO: 3539530 - RNA, 17 nt, Human
ucaccugcuucucugcc

SEQ ID NO: 3539531 - RNA, 22 nt, Human
ucaccugcuucucugcccagcu

SEQ ID NO: 3539532 - RNA, 23 nt, Human
ucaccugcuucucugcccagcuu

SEQ ID NO: 3539533 - RNA, 13 nt, Human
ucaccuggaagca

SEQ ID NO: 3539534 - RNA, 22 nt, Human
ucaccuggacuuaagcaucugg

SEQ ID NO: 3539535 - RNA, 13 nt, Human
ucaccuggcccug

SEQ ID NO: 3539536 - RNA, 19 nt, Human
ucaccuggcccugcuuccu

SEQ ID NO: 3539537 - RNA, 18 nt, Human
ucaccuggcuuguuuauu

SEQ ID NO: 3539538 - RNA, 14 nt, Human
ucaccugggcaccu

SEQ ID NO: 3539539 - RNA, 13 nt, Human
ucaccuguaaaac

SEQ ID NO: 3539540 - RNA, 18 nt, Human
ucaccuguaaaacuuuau

SEQ ID NO: 3539541 - RNA, 17 nt, Human
ucaccugucaggccuga

SEQ ID NO: 3539542 - RNA, 20 nt, Human
ucaccugucuugccuuuuuc

SEQ ID NO: 3539543 - RNA, 14 nt, Human
ucaccugugcuucg

SEQ ID NO: 3539544 - RNA, 20 nt, Human
ucaccugugcuucgggcccu

SEQ ID NO: 3539545 - RNA, 20 nt, Human
ucaccuguuuuuaagcuguu

SEQ ID NO: 3539546 - RNA, 20 nt, Human
ucaccuuaggcagggaagug

SEQ ID NO: 3539547 - RNA, 21 nt, Human
ucaccuuccaggaccccuggg

SEQ ID NO: 3539548 - RNA, 15 nt, Human
ucaccuuuacuuuag

SEQ ID NO: 3539549 - RNA, 13 nt, Human
ucaccuuuauucu

SEQ ID NO: 3539550 - RNA, 17 nt, Human
ucaccuuuucuugccug

SEQ ID NO: 3539551 - RNA, 20 nt, Human
ucacgaauauuaugcccagu

SEQ ID NO: 3539552 - RNA, 16 nt, Human
ucacgacgcugcagag

SEQ ID NO: 3539553 - RNA, 16 nt, Human
ucacgagucauccaga

SEQ ID NO: 3539554 - RNA, 18 nt, Human
ucacgaguucaggagauc

SEQ ID NO: 3539555 - RNA, 14 nt, Human
ucacgauucauuuu

SEQ ID NO: 3539556 - RNA, 18 nt, Human
ucacgauugucaucagga

SEQ ID NO: 3539557 - RNA, 15 nt, Human
ucacgcaacuugaaa

SEQ ID NO: 3539558 - RNA, 23 nt, Human
ucacgcucccaacacaagguggg

SEQ ID NO: 3539559 - RNA, 16 nt, Human
ucacgcuuuuugaaaa

SEQ ID NO: 3539560 - RNA, 18 nt, Human
ucacggcugcgcacugug

SEQ ID NO: 3539561 - RNA, 22 nt, Human
ucacgggagauuucuuguugcu

SEQ ID NO: 3539562 - RNA, 19 nt, Human
ucacgggcaugggcacucc

SEQ ID NO: 3539563 - RNA, 14 nt, Human
ucacgugcaaagcc

SEQ ID NO: 3539564 - RNA, 22 nt, Human
ucacgugcgcugggcacuuccc

SEQ ID NO: 3539565 - RNA, 23 nt, Human
ucacgugcgcugggcacuucccu

SEQ ID NO: 3539566 - RNA, 16 nt, Human
ucacguggaggagcag

SEQ ID NO: 3539567 - RNA, 21 nt, Human
ucacguggcucgacuauagaa

SEQ ID NO: 3539568 - RNA, 17 nt, Human
ucacguguacuggcucc

SEQ ID NO: 3539569 - RNA, 16 nt, Human
ucacuaaagcaugaaa

SEQ ID NO: 3539570 - RNA, 18 nt, Human
ucacuaaagcaugaaaug

SEQ ID NO: 3539571 - RNA, 12 nt, Human
ucacuaacauua

SEQ ID NO: 3539572 - RNA, 23 nt, Human
ucacuaauugguacuuuuaaaaa

SEQ ID NO: 3539573 - RNA, 15 nt, Human
ucacuaauuuuugua

SEQ ID NO: 3539574 - RNA, 13 nt, Human
ucacuacaacuga

SEQ ID NO: 3539575 - RNA, 18 nt, Human
ucacuacagguuaaaaga

SEQ ID NO: 3539576 - RNA, 14 nt, Human
ucacuacaguauua

SEQ ID NO: 3539577 - RNA, 17 nt, Human
ucacuaccuucaugcau

SEQ ID NO: 3539578 - RNA, 22 nt, Human
ucacuacgggggggagaaggaa

SEQ ID NO: 3539579 - RNA, 14 nt, Human
ucacuacucagcau

SEQ ID NO: 3539580 - RNA, 14 nt, Human
ucacuacugcaguc

SEQ ID NO: 3539581 - RNA, 14 nt, Human
ucacuagaauggau

SEQ ID NO: 3539582 - RNA, 17 nt, Human
ucacuagauggcgagca

SEQ ID NO: 3539583 - RNA, 21 nt, Human
ucacuaggcccccacuugccu

SEQ ID NO: 3539584 - RNA, 23 nt, Human
ucacuauaggucauacaauccau

SEQ ID NO: 3539585 - RNA, 14 nt, Human
ucacuauccaugca

SEQ ID NO: 3539586 - RNA, 20 nt, Human
ucacuaucccggcugcccuu

SEQ ID NO: 3539587 - RNA, 13 nt, Human
ucacuaugcauuu

SEQ ID NO: 3539588 - RNA, 23 nt, Human
ucacuauggugccaauggaaccu

SEQ ID NO: 3539589 - RNA, 18 nt, Human
ucacuauguugcccaggc

SEQ ID NO: 3539590 - RNA, 19 nt, Human
ucacuauguugcccaggca

SEQ ID NO: 3539591 - RNA, 20 nt, Human
ucacuauuuuuauuuauauu

SEQ ID NO: 3539592 - RNA, 14 nt, Human
ucacucaauuguuu

SEQ ID NO: 3539593 - RNA, 16 nt, Human
ucacucacagagucaa

SEQ ID NO: 3539594 - RNA, 22 nt, Human
ucacucacagagucaaggccug

SEQ ID NO: 3539595 - RNA, 19 nt, Human
ucacucagaaguccagagu

SEQ ID NO: 3539596 - RNA, 14 nt, Human
ucacucagagcagu

SEQ ID NO: 3539597 - RNA, 15 nt, Human
ucacucagcaccacu

SEQ ID NO: 3539598 - RNA, 21 nt, Human
ucacucaucaauggggccagu

SEQ ID NO: 3539599 - RNA, 15 nt, Human
ucacucauugcugag

SEQ ID NO: 3539600 - RNA, 14 nt, Human
ucacuccaccaccc

SEQ ID NO: 3539601 - RNA, 16 nt, Human
ucacuccccuccuuuc

SEQ ID NO: 3539602 - RNA, 20 nt, Human
ucacuugaugugccauuuua

SEQ ID NO: 3539603 - RNA, 16 nt, Human
ucacuugauucauaaa

SEQ ID NO: 3539604 - RNA, 22 nt, Human
ucacuugauucauaaagauuca

SEQ ID NO: 3539605 - RNA, 12 nt, Human
ucacuugcaugu

SEQ ID NO: 3539606 - RNA, 20 nt, Human
ucacuuggugauauguccua

SEQ ID NO: 3539607 - RNA, 13 nt, Human
ucacuuguacaaa

SEQ ID NO: 3539608 - RNA, 14 nt, Human
ucacuuguacaaaa

SEQ ID NO: 3539609 - RNA, 17 nt, Human
ucacuuguacaaaauaa

SEQ ID NO: 3539610 - RNA, 17 nt, Human
ucacuugucaauaaaau

SEQ ID NO: 3539611 - RNA, 22 nt, Human
ucacuugucaggagugugugug

SEQ ID NO: 3539612 - RNA, 23 nt, Human
ucacuugugcuuugcucuugucc

SEQ ID NO: 3539613 - RNA, 12 nt, Human
ucacuugugggg

SEQ ID NO: 3539614 - RNA, 20 nt, Human
ucacuuguuguuuuacuaaa

SEQ ID NO: 3539615 - RNA, 21 nt, Human
ucacuuguuguuuuacuaaag

SEQ ID NO: 3539616 - RNA, 22 nt, Human
ucacuuguuguuuuacuaaaga

SEQ ID NO: 3539617 - RNA, 13 nt, Human
ucacuuuaaaccu

SEQ ID NO: 3539618 - RNA, 15 nt, Human
ucacuuuaauucuca

SEQ ID NO: 3539619 - RNA, 15 nt, Human
ucacuuuagaugcug

SEQ ID NO: 3539620 - RNA, 16 nt, Human
ucacuuuagaugcuga

SEQ ID NO: 3539621 - RNA, 14 nt, Human
ucacuuuauuucau

SEQ ID NO: 3539622 - RNA, 15 nt, Human
ucacuuuauuucauu

SEQ ID NO: 3539623 - RNA, 17 nt, Human
ucacuuucacauagaug

SEQ ID NO: 3539624 - RNA, 12 nt, Human
ucacuuucauaa

SEQ ID NO: 3539625 - RNA, 19 nt, Human
ucacuuugacacuuuucau

SEQ ID NO: 3539626 - RNA, 12 nt, Human
ucacuuugcucu

SEQ ID NO: 3539627 - RNA, 16 nt, Human
ucacuuugcucugggu

SEQ ID NO: 3539628 - RNA, 21 nt, Human
ucacuuuuaaugaacaaaugg

SEQ ID NO: 3539629 - RNA, 12 nt, Human
ucacuuuuauuu

SEQ ID NO: 3539630 - RNA, 13 nt, Human
ucacuuuucagug

SEQ ID NO: 3539631 - RNA, 16 nt, Human
ucacuuuucagugaug

SEQ ID NO: 3539632 - RNA, 15 nt, Human
ucacuuuucccacuc

SEQ ID NO: 3539633 - RNA, 18 nt, Human
ucacuuuugcaagguucc

SEQ ID NO: 3539634 - RNA, 20 nt, Human
ucacuuuuggcaaugacuca

SEQ ID NO: 3539635 - RNA, 21 nt, Human
ucacuuuuuaugcuauuucug

SEQ ID NO: 3539636 - RNA, 22 nt, Human
ucacuuuuugaacuaagaaacu

SEQ ID NO: 3539637 - RNA, 20 nt, Human
ucacuuuuugaggcaaaaga

SEQ ID NO: 3539638 - RNA, 15 nt, Human
ucacuuuuuuccaca

SEQ ID NO: 3539639 - RNA, 15 nt, Human
ucacuuuuuuuuucc

SEQ ID NO: 3539640 - RNA, 21 nt, Human
ucacuuuuuuuuuccaaaaaa

SEQ ID NO: 3539641 - RNA, 22 nt, Human
ucacuuuuuuuuuuuguuugau

SEQ ID NO: 3539642 - RNA, 17 nt, Human
ucagaaaaaaauaaaug

SEQ ID NO: 3539643 - RNA, 16 nt, Human
ucagaaaaaaauucau

SEQ ID NO: 3539644 - RNA, 23 nt, Human
ucagaaaaaagguucuuugugua

SEQ ID NO: 3539645 - RNA, 17 nt, Human
ucagaaaaauggagcaa

SEQ ID NO: 3539646 - RNA, 11 nt, Human
ucagaaaacag

SEQ ID NO: 3539647 - RNA, 16 nt, Human
ucagaaaacagaaaaa

SEQ ID NO: 3539648 - RNA, 22 nt, Human
ucagaaaacuuuaaaaaauauu

SEQ ID NO: 3539649 - RNA, 17 nt, Human
ucagaaaauauuaugug

SEQ ID NO: 3539650 - RNA, 15 nt, Human
ucagaaaauguucug

SEQ ID NO: 3539651 - RNA, 19 nt, Human
ucagaaaauguucuguuug

SEQ ID NO: 3539652 - RNA, 18 nt, Human
ucagaaacaucaguuacu

SEQ ID NO: 3539653 - RNA, 22 nt, Human
ucagaaacaucaguuacucuga

SEQ ID NO: 3539654 - RNA, 16 nt, Human
ucauuucaggagcagc

SEQ ID NO: 3539655 - RNA, 12 nt, Human
ucauuucaucua

SEQ ID NO: 3539656 - RNA, 18 nt, Human
ucauuucaucucauuuaa

SEQ ID NO: 3539657 - RNA, 20 nt, Human
ucauuucaucucauuuaagg

SEQ ID NO: 3539658 - RNA, 19 nt, Human
ucauuucauuguaugaugu

SEQ ID NO: 3539659 - RNA, 13 nt, Human
ucauuuccugugu

SEQ ID NO: 3539660 - RNA, 18 nt, Human
ucauuucuacugugacug

SEQ ID NO: 3539661 - RNA, 19 nt, Human
ucauuucuccagauuaucu

SEQ ID NO: 3539662 - RNA, 14 nt, Human
ucauuucuuugagu

SEQ ID NO: 3539663 - RNA, 22 nt, Human
ucauuucuuuuugggagagacu

SEQ ID NO: 3539664 - RNA, 21 nt, Human
ucauuugcccuuaaggacaaa

SEQ ID NO: 3539665 - RNA, 20 nt, Human
ucauuugcuaacuagcuugg

SEQ ID NO: 3539666 - RNA, 14 nt, Human
ucauuugcugugaa

SEQ ID NO: 3539667 - RNA, 16 nt, Human
ucauuugcuuuggaag

SEQ ID NO: 3539668 - RNA, 23 nt, Human
ucauuuggaggaaaaaaagcaug

SEQ ID NO: 3539669 - RNA, 17 nt, Human
ucauuuguaugucaaag

SEQ ID NO: 3539670 - RNA, 14 nt, Human
ucauuugucacaca

SEQ ID NO: 3539671 - RNA, 18 nt, Human
ucauuugugccagaaugc

SEQ ID NO: 3539672 - RNA, 18 nt, Human
ucauuuguggguuuuuau

SEQ ID NO: 3539673 - RNA, 23 nt, Human
ucauuuguggguuuuuauuuccu

SEQ ID NO: 3539674 - RNA, 23 nt, Human
ucauuuguggugauauagaauua

SEQ ID NO: 3539675 - RNA, 22 nt, Human
ucauuuguucugggaguauaaa

SEQ ID NO: 3539676 - RNA, 15 nt, Human
ucauuuguuggaaug

SEQ ID NO: 3539677 - RNA, 21 nt, Human
ucauuuguuuaaaaaggcagu

SEQ ID NO: 3539678 - RNA, 12 nt, Human
ucauuuguuuac

SEQ ID NO: 3539679 - RNA, 19 nt, Human
ucauuuguuuguuuuccuu

SEQ ID NO: 3539680 - RNA, 20 nt, Human
ucauuuuaacaucugagaaa

SEQ ID NO: 3539681 - RNA, 22 nt, Human
ucauuuuaacaucugagaaaag

SEQ ID NO: 3539682 - RNA, 15 nt, Human
ucauuuuaauguaaa

SEQ ID NO: 3539683 - RNA, 19 nt, Human
ucauuuuaauguaaagauu

SEQ ID NO: 3539684 - RNA, 13 nt, Human
ucauuuuaauuau

SEQ ID NO: 3539685 - RNA, 14 nt, Human
ucauuuuaauuauu

SEQ ID NO: 3539686 - RNA, 15 nt, Human
ucauuuuaggaaagg

SEQ ID NO: 3539687 - RNA, 22 nt, Human
ucauuuuauauaugaaaacuaa

SEQ ID NO: 3539688 - RNA, 18 nt, Human
ucauuuuauauugaaaaa

SEQ ID NO: 3539689 - RNA, 13 nt, Human
ucauuuuccaaua

SEQ ID NO: 3539690 - RNA, 12 nt, Human
ucauuuucuaga

SEQ ID NO: 3539691 - RNA, 20 nt, Human
ucauuuucuauaacagauau

SEQ ID NO: 3539692 - RNA, 13 nt, Human
ucauuuucucuaa

SEQ ID NO: 3539693 - RNA, 15 nt, Human
ucauuuucucuaaua

SEQ ID NO: 3539694 - RNA, 18 nt, Human
ucauuuucugcaagccug

SEQ ID NO: 3539695 - RNA, 14 nt, Human
ucauuuugaaauug

SEQ ID NO: 3539696 - RNA, 20 nt, Human
ucauuuuguaacaaaugaac

SEQ ID NO: 3539697 - RNA, 16 nt, Human
ucauuuuuaaucauga

SEQ ID NO: 3539698 - RNA, 21 nt, Human
ucauuuuuacaauguaauuau

SEQ ID NO: 3539699 - RNA, 19 nt, Human
ucauuuuuaguagagacag

SEQ ID NO: 3539700 - RNA, 16 nt, Human
ucauuuuuauagcaac

SEQ ID NO: 3539701 - RNA, 21 nt, Human
ucauuuuuauagcaacaacaa

SEQ ID NO: 3539702 - RNA, 22 nt, Human
ucauuuuuccuucccuucucca

SEQ ID NO: 3539703 - RNA, 14 nt, Human
ucauuuuugaauac

SEQ ID NO: 3539704 - RNA, 16 nt, Human
ucauuuuuguacaguu

SEQ ID NO: 3539705 - RNA, 22 nt, Human
ucauuuuuguacaguuugcugu

SEQ ID NO: 3539706 - RNA, 23 nt, Human
ucauuuuuuauggcugcauagua

SEQ ID NO: 3539707 - RNA, 13 nt, Human
ucauuuuuuucca

SEQ ID NO: 3539708 - RNA, 16 nt, Human
ucauuuuuuuccaggc

SEQ ID NO: 3539709 - RNA, 17 nt, Human
ucauuuuuuuuaagaaa

SEQ ID NO: 3539710 - RNA, 17 nt, Human
ucauuuuuuuuaauuga

SEQ ID NO: 3539711 - RNA, 20 nt, Human
ucauuuuuuuucuuugaaua

SEQ ID NO: 3539712 - RNA, 21 nt, Human
uccaaaaaaaaaaaaaauaca

SEQ ID NO: 3539713 - RNA, 13 nt, Human
uccaaaaaaauac

SEQ ID NO: 3539714 - RNA, 14 nt, Human
uccaaaaaaauacu

SEQ ID NO: 3539715 - RNA, 17 nt, Human
uccaaaaauguguaaga

SEQ ID NO: 3539716 - RNA, 22 nt, Human
uccaaaaauuauuauaagcauu

SEQ ID NO: 3539717 - RNA, 22 nt, Human
uccaaaaccgccagcucuguuc

SEQ ID NO: 3539718 - RNA, 12 nt, Human
uccaaaacugcc

SEQ ID NO: 3539719 - RNA, 14 nt, Human
uccaaaagaagccc

SEQ ID NO: 3539720 - RNA, 20 nt, Human
uccaaaagauugcugaaauu

SEQ ID NO: 3539721 - RNA, 20 nt, Human
uccaaaagcaaccacaaacc

SEQ ID NO: 3539722 - RNA, 16 nt, Human
uccaaaagcuuuuuau

SEQ ID NO: 3539723 - RNA, 16 nt, Human
uccaaaauaaaacuuu

SEQ ID NO: 3539724 - RNA, 18 nt, Human
uccaaaauaaaacuuuuu

SEQ ID NO: 3539725 - RNA, 20 nt, Human
uccaaaauaaaacuuuuuaa

SEQ ID NO: 3539726 - RNA, 22 nt, Human
uccaaaauguuggucauuuuau

SEQ ID NO: 3539727 - RNA, 19 nt, Human
uccaaaauuuuucaacccc

SEQ ID NO: 3539728 - RNA, 21 nt, Human
uccaaaauuuuucaaccccac

SEQ ID NO: 3539729 - RNA, 14 nt, Human
uccaaacauccucu

SEQ ID NO: 3539730 - RNA, 22 nt, Human
uccaaacaugagguucucucua

SEQ ID NO: 3539731 - RNA, 20 nt, Human
uccaaacauguauuuaugua

SEQ ID NO: 3539732 - RNA, 14 nt, Human
uccaaaccaaauuu

SEQ ID NO: 3539733 - RNA, 17 nt, Human
uccaaaccaaauuuuaa

SEQ ID NO: 3539734 - RNA, 12 nt, Human
uccaaaccacuu

SEQ ID NO: 3539735 - RNA, 15 nt, Human
uccaaaccuuaucuc

SEQ ID NO: 3539736 - RNA, 18 nt, Human
uccaaaccuucacacaca

SEQ ID NO: 3539737 - RNA, 20 nt, Human
uccaaagaauguuagagcac

SEQ ID NO: 3539738 - RNA, 23 nt, Human
uccaaagaauguuagagcacagu

SEQ ID NO: 3539739 - RNA, 17 nt, Human
uccaaagacucuuggga

SEQ ID NO: 3539740 - RNA, 14 nt, Human
uccaaagaggcugc

SEQ ID NO: 3539741 - RNA, 16 nt, Human
uccaaagaggcugccc

SEQ ID NO: 3539742 - RNA, 18 nt, Human
uccaaagaggcugccccu

SEQ ID NO: 3539743 - RNA, 22 nt, Human
uccaaagaguagaauugcauug

SEQ ID NO: 3539744 - RNA, 14 nt, Human
uccaaagcagacag

SEQ ID NO: 3539745 - RNA, 15 nt, Human
uccaaagcagacagc

SEQ ID NO: 3539746 - RNA, 17 nt, Human
ucagcuccuuccuggag

SEQ ID NO: 3539747 - RNA, 17 nt, Human
ucagcucggggagccuu

SEQ ID NO: 3539748 - RNA, 19 nt, Human
ucagcucucugcccugugu

SEQ ID NO: 3539749 - RNA, 18 nt, Human
ucagcucugaaagagaaa

SEQ ID NO: 3539750 - RNA, 14 nt, Human
ucagcucuggcuca

SEQ ID NO: 3539751 - RNA, 17 nt, Human
ucagcucuggcucacag

SEQ ID NO: 3539752 - RNA, 18 nt, Human
ucagcucugggagaggau

SEQ ID NO: 3539753 - RNA, 13 nt, Human
ucagcucuuuuug

SEQ ID NO: 3539754 - RNA, 14 nt, Human
ucagcugagccuuc

SEQ ID NO: 3539755 - RNA, 20 nt, Human
ucagcugcaagguacucugg

SEQ ID NO: 3539756 - RNA, 21 nt, Human
ucagcugcaagguacucuggu

SEQ ID NO: 3539757 - RNA, 12 nt, Human
ucagcugccagu

SEQ ID NO: 3539758 - RNA, 12 nt, Human
ucagcugccccc

SEQ ID NO: 3539759 - RNA, 14 nt, Human
ucagcugccucacu

SEQ ID NO: 3539760 - RNA, 15 nt, Human
ucagcugccucacuu

SEQ ID NO: 3539761 - RNA, 12 nt, Human
ucagcuguacuu

SEQ ID NO: 3539762 - RNA, 13 nt, Human
ucagcuguccucc

SEQ ID NO: 3539763 - RNA, 18 nt, Human
ucagcuguccucccucca

SEQ ID NO: 3539764 - RNA, 17 nt, Human
ucagcugucuguggcuu

SEQ ID NO: 3539765 - RNA, 15 nt, Human
ucagcuguuugucau

SEQ ID NO: 3539766 - RNA, 22 nt, Human
ucagcuuacaucccugagcagg

SEQ ID NO: 3539767 - RNA, 18 nt, Human
ucagcuucauuuguguca

SEQ ID NO: 3539768 - RNA, 21 nt, Human
ucagcuucauuugugucaaug

SEQ ID NO: 3539769 - RNA, 19 nt, Human
ucagcuuccccaguagcug

SEQ ID NO: 3539770 - RNA, 19 nt, Human
ucagcuucguuuauuuuca

SEQ ID NO: 3539771 - RNA, 14 nt, Human
ucagcuucugcugg

SEQ ID NO: 3539772 - RNA, 13 nt, Human
ucagcuucuuaau

SEQ ID NO: 3539773 - RNA, 16 nt, Human
ucagcuugcacauuug

SEQ ID NO: 3539774 - RNA, 21 nt, Human
ucagcuuguaaauagcucagg

SEQ ID NO: 3539775 - RNA, 21 nt, Human
ucagcuuucuuuaaaguucuu

SEQ ID NO: 3539776 - RNA, 16 nt, Human
ucagcuuugccuucca

SEQ ID NO: 3539777 - RNA, 18 nt, Human
ucagcuuuuugucuuuuc

SEQ ID NO: 3539778 - RNA, 20 nt, Human
ucaggaaaacugacagagga

SEQ ID NO: 3539779 - RNA, 21 nt, Human
ucaggaaaacugacagaggag

SEQ ID NO: 3539780 - RNA, 18 nt, Human
ucaggaaaagccucugug

SEQ ID NO: 3539781 - RNA, 15 nt, Human
ucaggaaaaggccug

SEQ ID NO: 3539782 - RNA, 17 nt, Human
ucaggaaaaggccuggg

SEQ ID NO: 3539783 - RNA, 19 nt, Human
ucaggaaaagguugaauaa

SEQ ID NO: 3539784 - RNA, 12 nt, Human
ucaggaaaauug

SEQ ID NO: 3539785 - RNA, 18 nt, Human
ucaggaaaauugaaugca

SEQ ID NO: 3539786 - RNA, 9 nt, Human
ucaggaaac

SEQ ID NO: 3539787 - RNA, 22 nt, Human
ucaggaaacgagacuuuccauu

SEQ ID NO: 3539788 - RNA, 20 nt, Human
ucaggaaagaauagaaagaa

SEQ ID NO: 3539789 - RNA, 14 nt, Human
ucaggaaagacgga

SEQ ID NO: 3539790 - RNA, 19 nt, Human
ucaggaaagagaacuucca

SEQ ID NO: 3539791 - RNA, 21 nt, Human
ucaggaaauauauaugugugu

SEQ ID NO: 3539792 - RNA, 20 nt, Human
ucaggaaaucaaauaugcaa

SEQ ID NO: 3539793 - RNA, 13 nt, Human
ucaggaacagaag

SEQ ID NO: 3539794 - RNA, 17 nt, Human
ucaggaaccgaggcagg

SEQ ID NO: 3539795 - RNA, 18 nt, Human
ucaggaaccgaggcaggg

SEQ ID NO: 3539796 - RNA, 15 nt, Human
ucaggaaccuggacc

SEQ ID NO: 3539797 - RNA, 17 nt, Human
ucaggaaccuggaccaa

SEQ ID NO: 3539798 - RNA, 23 nt, Human
ucaggaacguuuagcugacaaaa

SEQ ID NO: 3539799 - RNA, 12 nt, Human
ucaggaagaaau

SEQ ID NO: 3539800 - RNA, 20 nt, Human
ucaggaagagaaggagcaga

SEQ ID NO: 3539801 - RNA, 15 nt, Human
ucaggaagcucaggg

SEQ ID NO: 3539802 - RNA, 16 nt, Human
ucaggaagcucagggc

SEQ ID NO: 3539803 - RNA, 19 nt, Human
ucaggaagcucagggccug

SEQ ID NO: 3539804 - RNA, 20 nt, Human
ucaggaagcucagggccugg

SEQ ID NO: 3539805 - RNA, 23 nt, Human
ucaggaagcucagggccuggcuc

SEQ ID NO: 3539806 - RNA, 14 nt, Human
ucaggaaugggcug

SEQ ID NO: 3539807 - RNA, 16 nt, Human
ucaggacacaggccug

SEQ ID NO: 3539808 - RNA, 19 nt, Human
ucaggacacaggccugugu

SEQ ID NO: 3539809 - RNA, 23 nt, Human
ucaggacacaggccuguguagcu

SEQ ID NO: 3539810 - RNA, 14 nt, Human
ucaggaccaggcaa

SEQ ID NO: 3539811 - RNA, 16 nt, Human
ucaggacccagaggaa

SEQ ID NO: 3539812 - RNA, 17 nt, Human
ucaggacccucgcuggc

SEQ ID NO: 3539813 - RNA, 17 nt, Human
ucaggaccugggaccuc

SEQ ID NO: 3539814 - RNA, 21 nt, Human
ucaggacucagaagccucugg

SEQ ID NO: 3539815 - RNA, 12 nt, Human
ucaggacuccag

SEQ ID NO: 3539816 - RNA, 12 nt, Human
ucaggacuggga

SEQ ID NO: 3539817 - RNA, 15 nt, Human
ucaggacuuggucug

SEQ ID NO: 3539818 - RNA, 20 nt, Human
ucaggagagaguugaaccua

SEQ ID NO: 3539819 - RNA, 13 nt, Human
ucaggagagcagc

SEQ ID NO: 3539820 - RNA, 22 nt, Human
ucaggagaguagaacagauaau

SEQ ID NO: 3539821 - RNA, 11 nt, Human
ucaggagcaca

SEQ ID NO: 3539822 - RNA, 12 nt, Human
ucaggagcccug

SEQ ID NO: 3539823 - RNA, 20 nt, Human
ucaggagcccugggaggcuc

SEQ ID NO: 3539824 - RNA, 16 nt, Human
ucaggaggaaggcuua

SEQ ID NO: 3539825 - RNA, 17 nt, Human
ucaggaggaauacugaa

SEQ ID NO: 3539826 - RNA, 18 nt, Human
ucaggaggccaagguggg

SEQ ID NO: 3539827 - RNA, 12 nt, Human
ucaggaggcgcc

SEQ ID NO: 3539828 - RNA, 18 nt, Human
ucaggaggcugaggggag

SEQ ID NO: 3539829 - RNA, 13 nt, Human
ucaggaggcugga

SEQ ID NO: 3539830 - RNA, 18 nt, Human
ucaggaguccaagaccag

SEQ ID NO: 3539831 - RNA, 19 nt, Human
ucaggagucccaaggaaag

SEQ ID NO: 3539832 - RNA, 17 nt, Human
ucaggaguuagaggcca

SEQ ID NO: 3539833 - RNA, 16 nt, Human
ucaggaucaagaaagu

SEQ ID NO: 3539834 - RNA, 20 nt, Human
ucaggauccaagcuaagcac

SEQ ID NO: 3539835 - RNA, 14 nt, Human
ucaggaucuauuuu

SEQ ID NO: 3539836 - RNA, 17 nt, Human
ucaggaugaacccagga

SEQ ID NO: 3539837 - RNA, 14 nt, Human
ucaggaugcccagg

SEQ ID NO: 3539838 - RNA, 23 nt, Human
ucaggauucuccuuuuuaccccu

SEQ ID NO: 3539839 - RNA, 17 nt, Human
ucaggauucuguuccuu

SEQ ID NO: 3539840 - RNA, 13 nt, Human
ucaggauugcgag

SEQ ID NO: 3539841 - RNA, 18 nt, Human
ucaggauugcgagagaug

SEQ ID NO: 3539842 - RNA, 16 nt, Human
ucaggauuuaaaaacu

SEQ ID NO: 3539843 - RNA, 17 nt, Human
ucaggauuuccucuuga

SEQ ID NO: 3539844 - RNA, 12 nt, Human
ucaggcaccagu

SEQ ID NO: 3539845 - RNA, 16 nt, Human
ucaggcacuagccuuu

SEQ ID NO: 3539846 - RNA, 20 nt, Human
ucaggcagccagugagauga

SEQ ID NO: 3539847 - RNA, 17 nt, Human
ucaggcaggggccucca

SEQ ID NO: 3539848 - RNA, 21 nt, Human
ucaggcaggggccuccauggg

SEQ ID NO: 3539849 - RNA, 17 nt, Human
ucaggcaggugggaugg

SEQ ID NO: 3539850 - RNA, 20 nt, Human
ucaggcauaggccugggugc

SEQ ID NO: 3539851 - RNA, 18 nt, Human
ucaggcaugaacauguac

SEQ ID NO: 3539852 - RNA, 20 nt, Human
ucaggcauuggauauuuuuu

SEQ ID NO: 3539853 - RNA, 18 nt, Human
ucaggccaaccccaaaga

SEQ ID NO: 3539854 - RNA, 14 nt, Human
ucaggccacggcag

SEQ ID NO: 3539855 - RNA, 17 nt, Human
ucaggccagagccaagg

SEQ ID NO: 3539856 - RNA, 11 nt, Human
ucaggccaggc

SEQ ID NO: 3539857 - RNA, 12 nt, Human
ucaggccaggcc

SEQ ID NO: 3539858 - RNA, 14 nt, Human
ucaggccaggcccu

SEQ ID NO: 3539859 - RNA, 23 nt, Human
ucaggccaggcccucugcccacu

SEQ ID NO: 3539860 - RNA, 18 nt, Human
ucaggccaggugcagugg

SEQ ID NO: 3539861 - RNA, 23 nt, Human
ucaggccaucaucaguggagcca

SEQ ID NO: 3539862 - RNA, 12 nt, Human
ucaggcccaggc

SEQ ID NO: 3539863 - RNA, 13 nt, Human
gcugaggcagcag

SEQ ID NO: 3539864 - RNA, 21 nt, Human
gcugaggcaggagacuggcgu

SEQ ID NO: 3539865 - RNA, 15 nt, Human
gcugaggcaggagga

SEQ ID NO: 3539866 - RNA, 12 nt, Human
gcugaggccugg

SEQ ID NO: 3539867 - RNA, 13 nt, Human
gcugaggccuggg

SEQ ID NO: 3539868 - RNA, 20 nt, Human
gcugaggccugggccgcugc

SEQ ID NO: 3539869 - RNA, 13 nt, Human
gcugaggcuggca

SEQ ID NO: 3539870 - RNA, 15 nt, Human
gcugagggaccagcc

SEQ ID NO: 3539871 - RNA, 16 nt, Human
gcugagggccugcugg

SEQ ID NO: 3539872 - RNA, 23 nt, Human
gcugaggggggccgugcccaggg

SEQ ID NO: 3539873 - RNA, 14 nt, Human
gcugaggguuugaa

SEQ ID NO: 3539874 - RNA, 15 nt, Human
gcugaggugagagga

SEQ ID NO: 3539875 - RNA, 16 nt, Human
gcugaggugcccagga

SEQ ID NO: 3539876 - RNA, 18 nt, Human
gcugaggugcccaggaga

SEQ ID NO: 3539877 - RNA, 15 nt, Human
gcugaggugggagga

SEQ ID NO: 3539878 - RNA, 19 nt, Human
gcugaggugggaggaucac

SEQ ID NO: 3539879 - RNA, 16 nt, Human
gcugagguuccucugc

SEQ ID NO: 3539880 - RNA, 18 nt, Human
gcugagguuccucugccu

SEQ ID NO: 3539881 - RNA, 19 nt, Human
gcugagguuccucugccug

SEQ ID NO: 3539882 - RNA, 22 nt, Human
gcugagguuccucugccugccc

SEQ ID NO: 3539883 - RNA, 23 nt, Human
gcugagguuccucugccugcccc

SEQ ID NO: 3539884 - RNA, 16 nt, Human
gcugaguauuaaaaug

SEQ ID NO: 3539885 - RNA, 17 nt, Human
gcugaguauuaaaaugu

SEQ ID NO: 3539886 - RNA, 15 nt, Human
gcugagucaucuguu

SEQ ID NO: 3539887 - RNA, 23 nt, Human
gcugagucaucuguuagggccuu

SEQ ID NO: 3539888 - RNA, 21 nt, Human
gcugagucaugaucucccugc

SEQ ID NO: 3539889 - RNA, 14 nt, Human
gcugagucucccaa

SEQ ID NO: 3539890 - RNA, 15 nt, Human
gcugagucucccaag

SEQ ID NO: 3539891 - RNA, 17 nt, Human
gcugagucucccaaggc

SEQ ID NO: 3539892 - RNA, 17 nt, Human
aagaaagagaaggagcc

SEQ ID NO: 3539893 - RNA, 12 nt, Human
aagaaagagaga

SEQ ID NO: 3539894 - RNA, 14 nt, Human
aagaaagagagaaa

SEQ ID NO: 3539895 - RNA, 18 nt, Human
aagaaagagagaaaauaa

SEQ ID NO: 3539896 - RNA, 20 nt, Human
aagaaagagagaaaauaaaa

SEQ ID NO: 3539897 - RNA, 23 nt, Human
aagaaagagcaacaauccaucuc

SEQ ID NO: 3539898 - RNA, 12 nt, Human
aagaaagaggaa

SEQ ID NO: 3539899 - RNA, 17 nt, Human
aagaaagaggaaaagaa

SEQ ID NO: 3539900 - RNA, 19 nt, Human
aagaaagccagucuuaaca

SEQ ID NO: 3539901 - RNA, 13 nt, Human
aagaaagccugag

SEQ ID NO: 3539902 - RNA, 15 nt, Human
aagaaaggaacauuu

SEQ ID NO: 3539903 - RNA, 15 nt, Human
aagaaaggcugcugu

SEQ ID NO: 3539904 - RNA, 21 nt, Human
aagaaaggggcaggagcucag

SEQ ID NO: 3539905 - RNA, 16 nt, Human
aagaaaggguguuuuu

SEQ ID NO: 3539906 - RNA, 19 nt, Human
aagaaagucuaucuaauga

SEQ ID NO: 3539907 - RNA, 22 nt, Human
aagaaagucuaucuaaugacau

SEQ ID NO: 3539908 - RNA, 15 nt, Human
aagaaaguguauuug

SEQ ID NO: 3539909 - RNA, 23 nt, Human
aagaaaguuuccccaccagugaa

SEQ ID NO: 3539910 - RNA, 13 nt, Human
aagaaauaaccac

SEQ ID NO: 3539911 - RNA, 21 nt, Human
aagaaauaauuuuauuccaga

SEQ ID NO: 3539912 - RNA, 13 nt, Human
aagaaauacugua

SEQ ID NO: 3539913 - RNA, 14 nt, Human
aagaaauagaacaa

SEQ ID NO: 3539914 - RNA, 15 nt, Human
aagaaauaucuguga

SEQ ID NO: 3539915 - RNA, 18 nt, Human
aagaaauaucugugaaau

SEQ ID NO: 3539916 - RNA, 16 nt, Human
aagaaauaugugagau

SEQ ID NO: 3539917 - RNA, 18 nt, Human
aagaaauaugugagauuu

SEQ ID NO: 3539918 - RNA, 20 nt, Human
aagaaauaugugagauuuuu

SEQ ID NO: 3539919 - RNA, 20 nt, Human
aagaaauauuccaaaugucu

SEQ ID NO: 3539920 - RNA, 18 nt, Human
aagaaaucacagaaucau

SEQ ID NO: 3539921 - RNA, 13 nt, Human
aagaaaucauguu

SEQ ID NO: 3539922 - RNA, 14 nt, Human
aagaaaucauguua

SEQ ID NO: 3539923 - RNA, 23 nt, Human
aagaaaucccuguuuaauauuua

SEQ ID NO: 3539924 - RNA, 14 nt, Human
aagaaaucuauaga

SEQ ID NO: 3539925 - RNA, 16 nt, Human
aagaaaucuauagaaa

SEQ ID NO: 3539926 - RNA, 13 nt, Human
aagaaaucuauuu

SEQ ID NO: 3539927 - RNA, 14 nt, Human
aagaaaugaaauuu

SEQ ID NO: 3539928 - RNA, 13 nt, Human
aagaaaugaagag

SEQ ID NO: 3539929 - RNA, 14 nt, Human
aagaaaugacacuu

SEQ ID NO: 3539930 - RNA, 15 nt, Human
aagaaaugacuaauu

SEQ ID NO: 3539931 - RNA, 19 nt, Human
aagaaaugcacaaugucuu

SEQ ID NO: 3539932 - RNA, 21 nt, Human
aagaaauguaguugauguauc

SEQ ID NO: 3539933 - RNA, 13 nt, Human
aagaaaugucuua

SEQ ID NO: 3539934 - RNA, 13 nt, Human
aagaaauuaugug

SEQ ID NO: 3539935 - RNA, 17 nt, Human
aagaaauuccuguagca

SEQ ID NO: 3539936 - RNA, 13 nt, Human
aagaaauugcaau

SEQ ID NO: 3539937 - RNA, 16 nt, Human
aagaaauugcaauaac

SEQ ID NO: 3539938 - RNA, 14 nt, Human
aagaaauuucaggu

SEQ ID NO: 3539939 - RNA, 15 nt, Human
aagaaauuuuuuaaa

SEQ ID NO: 3539940 - RNA, 20 nt, Human
aagaacaaaaaaaucugcag

SEQ ID NO: 3539941 - RNA, 21 nt, Human
aagaacaauuguccauggucu

SEQ ID NO: 3539942 - RNA, 21 nt, Human
aagaacacaaagcggggggag

SEQ ID NO: 3539943 - RNA, 12 nt, Human
aagaacauaaag

SEQ ID NO: 3539944 - RNA, 18 nt, Human
aagaacauggacuuguau

SEQ ID NO: 3539945 - RNA, 11 nt, Human
aagaacaugug

SEQ ID NO: 3539946 - RNA, 13 nt, Human
aagaaccacuugu

SEQ ID NO: 3539947 - RNA, 14 nt, Human
aagaaccccucugc

SEQ ID NO: 3539948 - RNA, 17 nt, Human
aagaaccuaacauuuau

SEQ ID NO: 3539949 - RNA, 21 nt, Human
aagaacguuuuuuccucagug

SEQ ID NO: 3539950 - RNA, 21 nt, Human
aagaacuacaaacaaaauuuc

SEQ ID NO: 3539951 - RNA, 23 nt, Human
aagaacuauugugcucagagaca

SEQ ID NO: 3539952 - RNA, 20 nt, Human
aagaacucaaacuucuggcu

SEQ ID NO: 3539953 - RNA, 18 nt, Human
aagaacucaccaggguuu

SEQ ID NO: 3539954 - RNA, 13 nt, Human
aagaacucucugg

SEQ ID NO: 3539955 - RNA, 11 nt, Human
aagaacugaaa

SEQ ID NO: 3539956 - RNA, 16 nt, Human
aagaacugaaaacaua

SEQ ID NO: 3539957 - RNA, 18 nt, Human
aagaacugaaaacauaaa

SEQ ID NO: 3539958 - RNA, 22 nt, Human
aagaacugucauguaaacauac

SEQ ID NO: 3539959 - RNA, 15 nt, Human
aagaacuuacugauu

SEQ ID NO: 3539960 - RNA, 15 nt, Human
aagaacuugcaugga

SEQ ID NO: 3539961 - RNA, 15 nt, Human
aagaacuuguuuaau

SEQ ID NO: 3539962 - RNA, 18 nt, Human
aagaacuuugagcuacug

SEQ ID NO: 3539963 - RNA, 9 nt, Human
aagaagaaa

SEQ ID NO: 3539964 - RNA, 12 nt, Human
aagaagaaaaaa

SEQ ID NO: 3539965 - RNA, 21 nt, Human
aagaagaaaagagaagaagaa

SEQ ID NO: 3539966 - RNA, 16 nt, Human
aagaagaaacgucuau

SEQ ID NO: 3539967 - RNA, 15 nt, Human
aagaagaaagacucu

SEQ ID NO: 3539968 - RNA, 15 nt, Human
aagaagaacuugcau

SEQ ID NO: 3539969 - RNA, 13 nt, Human
aagaagaagggca

SEQ ID NO: 3539970 - RNA, 14 nt, Human
aagaagacauguuu

SEQ ID NO: 3539971 - RNA, 15 nt, Human
aagaagacauguuuu

SEQ ID NO: 3539972 - RNA, 19 nt, Human
aagaagaccagacugugga

SEQ ID NO: 3539973 - RNA, 21 nt, Human
aagaagaccagacuguggaga

SEQ ID NO: 3539974 - RNA, 20 nt, Human
aagaagaccugagaauguau

SEQ ID NO: 3539975 - RNA, 15 nt, Human
aagaagacugcauua

SEQ ID NO: 3539976 - RNA, 17 nt, Human
aagaagagaagcugcug

SEQ ID NO: 3539977 - RNA, 19 nt, Human
aagaagagaagcugcugac

SEQ ID NO: 3539978 - RNA, 11 nt, Human
aagaagagaca

SEQ ID NO: 3539979 - RNA, 22 nt, Human
aagaagagagaagacccuucuc

SEQ ID NO: 3539980 - RNA, 22 nt, Human
aagaagagcgagagaucaaaga

SEQ ID NO: 3539981 - RNA, 23 nt, Human
aagaagagcgagagaucaaagau

SEQ ID NO: 3539982 - RNA, 21 nt, Human
aagaagaucacgcuccccgcc

SEQ ID NO: 3539983 - RNA, 19 nt, Human
aagaagauccuaaaacaaa

SEQ ID NO: 3539984 - RNA, 14 nt, Human
aagaagaucuguaa

SEQ ID NO: 3539985 - RNA, 12 nt, Human
aagaagaugcuc

SEQ ID NO: 3539986 - RNA, 22 nt, Human
aagaagaugcuccagcaacaca

SEQ ID NO: 3539987 - RNA, 16 nt, Human
aagaagcaaauaaaua

SEQ ID NO: 3539988 - RNA, 14 nt, Human
aagaagcaaauuuu

SEQ ID NO: 3539989 - RNA, 16 nt, Human
aagaagcaaggaacca

SEQ ID NO: 3539990 - RNA, 12 nt, Human
aagaagcagaga

SEQ ID NO: 3539991 - RNA, 22 nt, Human
aagaagcaguggccuuauugca

SEQ ID NO: 3539992 - RNA, 22 nt, Human
aagaagcauuuuguaaguugaa

SEQ ID NO: 3539993 - RNA, 15 nt, Human
aagaagcccccagcu

SEQ ID NO: 3539994 - RNA, 19 nt, Human
aagaagcccggcuccuggu

SEQ ID NO: 3539995 - RNA, 14 nt, Human
aagaagcucucucc

SEQ ID NO: 3539996 - RNA, 21 nt, Human
aagaagcuguuguacauuuau

SEQ ID NO: 3539997 - RNA, 23 nt, Human
aagaagcuguuguacauuuauga

SEQ ID NO: 3539998 - RNA, 15 nt, Human
aagaagcuucuaaua

SEQ ID NO: 3539999 - RNA, 21 nt, Human
aagaagcuuuaauauuuaaau

SEQ ID NO: 3540000 - RNA, 17 nt, Human
aagaaggaaaaggcagg

SEQ ID NO: 3540001 - RNA, 23 nt, Human
aagaaggaaaaugaucugagucc

SEQ ID NO: 3540002 - RNA, 14 nt, Human
aagaaggaaagaug

SEQ ID NO: 3540003 - RNA, 15 nt, Human
aagaaggcaaaaaua

SEQ ID NO: 3540004 - RNA, 22 nt, Human
aagaagggcugcaugauguuug

SEQ ID NO: 3540005 - RNA, 21 nt, Human
aagaaggggacaauggcagaa

SEQ ID NO: 3540006 - RNA, 17 nt, Human
aagaaggguccuucccu

SEQ ID NO: 3540007 - RNA, 24 nt, Human
aagaaggguccuucccucucccca

SEQ ID NO: 3540008 - RNA, 16 nt, Human
aagaagguggaccuuu

SEQ ID NO: 3540009 - RNA, 23 nt, Human
aagaagguuucagaaagaagugg

SEQ ID NO: 3540010 - RNA, 14 nt, Human
aagaaguaaaagca

SEQ ID NO: 3540011 - RNA, 20 nt, Human
aagaaguaggggaagacaug

SEQ ID NO: 3540012 - RNA, 21 nt, Human
aagaagugaguguuucuauga

SEQ ID NO: 3540013 - RNA, 19 nt, Human
aagaaguguccgagaacua

SEQ ID NO: 3540014 - RNA, 19 nt, Human
aagaagugugucacccuua

SEQ ID NO: 3540015 - RNA, 15 nt, Human
aagaaguuucaucau

SEQ ID NO: 3540016 - RNA, 21 nt, Human
aagaauaaaauguugaaaagu

SEQ ID NO: 3540017 - RNA, 16 nt, Human
aagaauaaaggcagcu

SEQ ID NO: 3540018 - RNA, 12 nt, Human
aagaauaauaaa

SEQ ID NO: 3540019 - RNA, 14 nt, Human
aagaauaauaaaau

SEQ ID NO: 3540020 - RNA, 15 nt, Human
aagaauaauaaaauc

SEQ ID NO: 3540021 - RNA, 23 nt, Human
aagaauaaucacgcuuuccugaa

SEQ ID NO: 3540022 - RNA, 11 nt, Human
aagaauaauuu

SEQ ID NO: 3540023 - RNA, 18 nt, Human
aagaauaauuuauaguaa

SEQ ID NO: 3540024 - RNA, 20 nt, Human
aagaauaauuuauaguaaug

SEQ ID NO: 3540025 - RNA, 13 nt, Human
aagaauacagaaa

SEQ ID NO: 3540026 - RNA, 22 nt, Human
aagaauacuucucauuuuuuaa

SEQ ID NO: 3540027 - RNA, 17 nt, Human
aagaauacuugaacuug

SEQ ID NO: 3540028 - RNA, 11 nt, Human
aagaauagaac

SEQ ID NO: 3540029 - RNA, 20 nt, Human
aagaauagccuagauaugaa

SEQ ID NO: 3540030 - RNA, 17 nt, Human
aagaauagcuuuaauga

SEQ ID NO: 3540031 - RNA, 16 nt, Human
ucaguccauuuauaua

SEQ ID NO: 3540032 - RNA, 17 nt, Human
ucagucccaucagagag

SEQ ID NO: 3540033 - RNA, 23 nt, Human
ucaguccccucccaucugggagu

SEQ ID NO: 3540034 - RNA, 17 nt, Human
ucagucccuauguauuu

SEQ ID NO: 3540035 - RNA, 23 nt, Human
ucagucccuauguauuugcaguu

SEQ ID NO: 3540036 - RNA, 19 nt, Human
ucaguccuccccucacagc

SEQ ID NO: 3540037 - RNA, 22 nt, Human
uccaaacaugguuuauugguga

SEQ ID NO: 3540038 - RNA, 16 nt, Human
uccaaaccaaauaaaa

SEQ ID NO: 3540039 - RNA, 23 nt, Human
uccaaaccuucacacacagacug

SEQ ID NO: 3540040 - RNA, 16 nt, Human
uccaaacuaauuuuua

SEQ ID NO: 3540041 - RNA, 19 nt, Human
uccaaacugaagcagccuc

SEQ ID NO: 3540042 - RNA, 20 nt, Human
uccaaacugccuaagcccuc

SEQ ID NO: 3540043 - RNA, 17 nt, Human
uccaaacuggaaugagc

SEQ ID NO: 3540044 - RNA, 13 nt, Human
uccaaagaaaguu

SEQ ID NO: 3540045 - RNA, 13 nt, Human
uccaaagaauguu

SEQ ID NO: 3540046 - RNA, 20 nt, Human
uccaaagaguagaauugcau

SEQ ID NO: 3540047 - RNA, 11 nt, Human
uccaaagcaaa

SEQ ID NO: 3540048 - RNA, 19 nt, Human
uccaaagcaaaaccagaac

SEQ ID NO: 3540049 - RNA, 17 nt, Human
uccaaagcuuuccugga

SEQ ID NO: 3540050 - RNA, 22 nt, Human
uccaaaggaggauggcauauaa

SEQ ID NO: 3540051 - RNA, 13 nt, Human
uccaaaggaggcu

SEQ ID NO: 3540052 - RNA, 13 nt, Human
uccaaaguacacu

SEQ ID NO: 3540053 - RNA, 15 nt, Human
uccaaagucauaauu

SEQ ID NO: 3540054 - RNA, 14 nt, Human
uccaaagucucuaa

SEQ ID NO: 3540055 - RNA, 15 nt, Human
uccaaauaauaaagu

SEQ ID NO: 3540056 - RNA, 17 nt, Human
uccaaauacuaaugaaa

SEQ ID NO: 3540057 - RNA, 16 nt, Human
uccaaaugaaugaccu

SEQ ID NO: 3540058 - RNA, 20 nt, Human
uccaaauggcgucuggaagu

SEQ ID NO: 3540059 - RNA, 17 nt, Human
uccaaauuauuucuuaa

SEQ ID NO: 3540060 - RNA, 14 nt, Human
uccaaauucaguuu

SEQ ID NO: 3540061 - RNA, 16 nt, Human
uccaaauucaguuuca

SEQ ID NO: 3540062 - RNA, 18 nt, Human
uccaaauucaguuucaua

SEQ ID NO: 3540063 - RNA, 15 nt, Human
uccaaauugugcuuc

SEQ ID NO: 3540064 - RNA, 22 nt, Human
uccaaauugugcuucuccccag

SEQ ID NO: 3540065 - RNA, 23 nt, Human
uccaacaccaagcacagcagccu

SEQ ID NO: 3540066 - RNA, 19 nt, Human
uccaacaccacagacacac

SEQ ID NO: 3540067 - RNA, 21 nt, Human
uccaacaccacagacacacac

SEQ ID NO: 3540068 - RNA, 17 nt, Human
uccaacagaacuaaaug

SEQ ID NO: 3540069 - RNA, 15 nt, Human
uccaacaguuuaaug

SEQ ID NO: 3540070 - RNA, 15 nt, Human
uccaacauccacucu

SEQ ID NO: 3540071 - RNA, 16 nt, Human
uccaaccagaccugga

SEQ ID NO: 3540072 - RNA, 19 nt, Human
uccaaccccaacuccagua

SEQ ID NO: 3540073 - RNA, 17 nt, Human
uccaaccccccaccugc

SEQ ID NO: 3540074 - RNA, 14 nt, Human
uccaaccccccagc

SEQ ID NO: 3540075 - RNA, 18 nt, Human
uccaaccccccagcacug

SEQ ID NO: 3540076 - RNA, 21 nt, Human
uccaaccccccagcacugagg

SEQ ID NO: 3540077 - RNA, 13 nt, Human
uccaaccccucgc

SEQ ID NO: 3540078 - RNA, 14 nt, Human
uccaaccccucgcc

SEQ ID NO: 3540079 - RNA, 19 nt, Human
uccaaccccucgcccaguc

SEQ ID NO: 3540080 - RNA, 12 nt, Human
uccaacccugcc

SEQ ID NO: 3540081 - RNA, 13 nt, Human
uccaacccugccg

SEQ ID NO: 3540082 - RNA, 21 nt, Human
uccaacccugccgucaccacc

SEQ ID NO: 3540083 - RNA, 22 nt, Human
uccaacccugccgucaccacca

SEQ ID NO: 3540084 - RNA, 20 nt, Human
uccaaccuaaccccuuuccu

SEQ ID NO: 3540085 - RNA, 17 nt, Human
uccccuugggcggcuga

SEQ ID NO: 3540086 - RNA, 20 nt, Human
uccccuugucugaacuggag

SEQ ID NO: 3540087 - RNA, 21 nt, Human
uccccuuguuugucccuucua

SEQ ID NO: 3540088 - RNA, 17 nt, Human
uccccuuuccuguccca

SEQ ID NO: 3540089 - RNA, 16 nt, Human
uccccuuucgcccaca

SEQ ID NO: 3540090 - RNA, 24 nt, Human
uccccuuugcuucauucaagucag

SEQ ID NO: 3540091 - RNA, 22 nt, Human
uccccuuuucuuuucuacccua

SEQ ID NO: 3540092 - RNA, 23 nt, Human
ucccgaaccccaaggagggagau

SEQ ID NO: 3540093 - RNA, 20 nt, Human
ucccgaagaauggagaggaa

SEQ ID NO: 3540094 - RNA, 15 nt, Human
ucccgaguacagucu

SEQ ID NO: 3540095 - RNA, 16 nt, Human
ucccgaguacagucug

SEQ ID NO: 3540096 - RNA, 15 nt, Human
ucccgaguagcuggg

SEQ ID NO: 3540097 - RNA, 18 nt, Human
ucccgaguagcugggacu

SEQ ID NO: 3540098 - RNA, 20 nt, Human
ucccgaguagcugggacuac

SEQ ID NO: 3540099 - RNA, 15 nt, Human
ucccgagucugggac

SEQ ID NO: 3540100 - RNA, 21 nt, Human
ucccgcaaacccccuuugugc

SEQ ID NO: 3540101 - RNA, 23 nt, Human
ucccgcaucaaggucagcaugag

SEQ ID NO: 3540102 - RNA, 18 nt, Human
ucccgccagacuguuaga

SEQ ID NO: 3540103 - RNA, 17 nt, Human
ucccgccagagggcuug

SEQ ID NO: 3540104 - RNA, 19 nt, Human
ucccgcccaaaccuuuccc

SEQ ID NO: 3540105 - RNA, 20 nt, Human
ucccgcccaaaccuuucccc

SEQ ID NO: 3540106 - RNA, 16 nt, Human
ucccgccccccacacu

SEQ ID NO: 3540107 - RNA, 19 nt, Human
ucccgccccccacacuucc

SEQ ID NO: 3540108 - RNA, 21 nt, Human
ucccgccccuucccacucacc

SEQ ID NO: 3540109 - RNA, 21 nt, Human
ucccgccuccaaccccucgcc

SEQ ID NO: 3540110 - RNA, 16 nt, Human
ucccgcucagcccucc

SEQ ID NO: 3540111 - RNA, 15 nt, Human
ucccgcugcugcugc

SEQ ID NO: 3540112 - RNA, 17 nt, Human
ucccggcacuccaugcu

SEQ ID NO: 3540113 - RNA, 23 nt, Human
ucccggcaugggaaagccaccuc

SEQ ID NO: 3540114 - RNA, 15 nt, Human
ucccggcccugccug

SEQ ID NO: 3540115 - RNA, 13 nt, Human
ucccggcugcccu

SEQ ID NO: 3540116 - RNA, 14 nt, Human
ucccggcugcccuu

SEQ ID NO: 3540117 - RNA, 15 nt, Human
ucccggcugcccuuu

SEQ ID NO: 3540118 - RNA, 16 nt, Human
ucccggcuuuggugcg

SEQ ID NO: 3540119 - RNA, 14 nt, Human
ucccgggacucugc

SEQ ID NO: 3540120 - RNA, 14 nt, Human
ucccggggcuccac

SEQ ID NO: 3540121 - RNA, 16 nt, Human
ucccgguucuuccagu

SEQ ID NO: 3540122 - RNA, 17 nt, Human
ucccgucuacucauucc

SEQ ID NO: 3540123 - RNA, 13 nt, Human
ucccguggcccca

SEQ ID NO: 3540124 - RNA, 18 nt, Human
ucccguggccccagccug

SEQ ID NO: 3540125 - RNA, 22 nt, Human
ucccguggccccagccuggccc

SEQ ID NO: 3540126 - RNA, 24 nt, Human
ucccguggccccagccuggcccag

SEQ ID NO: 3540127 - RNA, 23 nt, Human
ucccguuuagaguuauuuaggcu

SEQ ID NO: 3540128 - RNA, 20 nt, Human
ucccguuucuccaccuagac

SEQ ID NO: 3540129 - RNA, 13 nt, Human
ucccuaaacugua

SEQ ID NO: 3540130 - RNA, 13 nt, Human
ucccuaagccagc

SEQ ID NO: 3540131 - RNA, 13 nt, Human
ucccuaauaaagc

SEQ ID NO: 3540132 - RNA, 16 nt, Human
ucccuaaucuaugguc

SEQ ID NO: 3540133 - RNA, 23 nt, Human
ucccuaaucuauggucgggagac

SEQ ID NO: 3540134 - RNA, 20 nt, Human
ucccuaaugcugcagauuug

SEQ ID NO: 3540135 - RNA, 20 nt, Human
ucccuaauuuaacccagcuc

SEQ ID NO: 3540136 - RNA, 24 nt, Human
ucccuacauguauugcacauugua

SEQ ID NO: 3540137 - RNA, 13 nt, Human
ucccuaccaccuc

SEQ ID NO: 3540138 - RNA, 15 nt, Human
ucccuaccgacccag

SEQ ID NO: 3540139 - RNA, 22 nt, Human
ucccuaccgagucucuucucca

SEQ ID NO: 3540140 - RNA, 11 nt, Human
ucccuaccuca

SEQ ID NO: 3540141 - RNA, 20 nt, Human
ucccuaccucaaccuguaaa

SEQ ID NO: 3540142 - RNA, 22 nt, Human
ucccuaccucaaccuguaaauu

SEQ ID NO: 3540143 - RNA, 19 nt, Human
ucccuagaaacuuccaaau

SEQ ID NO: 3540144 - RNA, 13 nt, Human
ucccuagacuuua

SEQ ID NO: 3540145 - RNA, 14 nt, Human
ucccuagacuuuag

SEQ ID NO: 3540146 - RNA, 17 nt, Human
ucccuagaggguuccug

SEQ ID NO: 3540147 - RNA, 18 nt, Human
ucccuagaggguuccugu

SEQ ID NO: 3540148 - RNA, 16 nt, Human
ucccuagcagugaacu

SEQ ID NO: 3540149 - RNA, 22 nt, Human
ucccuagcuuuagacccugggu

SEQ ID NO: 3540150 - RNA, 15 nt, Human
ucccuagggcugggu

SEQ ID NO: 3540151 - RNA, 18 nt, Human
ucccuaggggacacuucc

SEQ ID NO: 3540152 - RNA, 17 nt, Human
ucccuagucuauucauu

SEQ ID NO: 3540153 - RNA, 15 nt, Human
ucccuauacugcuug

SEQ ID NO: 3540154 - RNA, 18 nt, Human
ucccuauguauuugcagu

SEQ ID NO: 3540155 - RNA, 18 nt, Human
ucccuauuagagaagaga

SEQ ID NO: 3540156 - RNA, 18 nt, Human
ucccuauuuuucucuccu

SEQ ID NO: 3540157 - RNA, 20 nt, Human
ucccuauuuuucucuccugu

SEQ ID NO: 3540158 - RNA, 21 nt, Human
ucccuauuuuuuuucuguuau

SEQ ID NO: 3540159 - RNA, 22 nt, Human
ucccuauuuuuuuucuguuaua

SEQ ID NO: 3540160 - RNA, 18 nt, Human
ucccucaacaagggagag

SEQ ID NO: 3540161 - RNA, 22 nt, Human
ucccucaacaagggagagaccu

SEQ ID NO: 3540162 - RNA, 16 nt, Human
ucccucaauucccccu

SEQ ID NO: 3540163 - RNA, 13 nt, Human
ucccucacaagug

SEQ ID NO: 3540164 - RNA, 10 nt, Human
ucccucaccc

SEQ ID NO: 3540165 - RNA, 17 nt, Human
ucccucacccacccaca

SEQ ID NO: 3540166 - RNA, 12 nt, Human
ucccucaccccc

SEQ ID NO: 3540167 - RNA, 20 nt, Human
ucccucacccccucccaccc

SEQ ID NO: 3540168 - RNA, 23 nt, Human
ucccucacccccucccaccccca

SEQ ID NO: 3540169 - RNA, 19 nt, Human
ucccucacccugagccccu

SEQ ID NO: 3540170 - RNA, 12 nt, Human
ucccucaccugu

SEQ ID NO: 3540171 - RNA, 20 nt, Human
ucccucaccuguagcagcca

SEQ ID NO: 3540172 - RNA, 14 nt, Human
ucccucaccuucug

SEQ ID NO: 3540173 - RNA, 15 nt, Human
ucccucaccuuggca

SEQ ID NO: 3540174 - RNA, 20 nt, Human
ucccucaccuuggcaccaga

SEQ ID NO: 3540175 - RNA, 18 nt, Human
ucccucacucgucucccc

SEQ ID NO: 3540176 - RNA, 20 nt, Human
ucccucacucgucuccccca

SEQ ID NO: 3540177 - RNA, 15 nt, Human
ucccucacucucagg

SEQ ID NO: 3540178 - RNA, 17 nt, Human
ucccucacucucaggaa

SEQ ID NO: 3540179 - RNA, 14 nt, Human
ucccucagacuggg

SEQ ID NO: 3540180 - RNA, 16 nt, Human
ucccucagacuggggc

SEQ ID NO: 3540181 - RNA, 20 nt, Human
uccacucuacccucccaccc

SEQ ID NO: 3540182 - RNA, 21 nt, Human
uccacucuacccucccacccc

SEQ ID NO: 3540183 - RNA, 18 nt, Human
uccacucugauagaauua

SEQ ID NO: 3540184 - RNA, 23 nt, Human
uccacucugcuucucugacuucu

SEQ ID NO: 3540185 - RNA, 20 nt, Human
uccacucuggauucagccuu

SEQ ID NO: 3540186 - RNA, 21 nt, Human
uccacucuggauucagccuuc

SEQ ID NO: 3540187 - RNA, 22 nt, Human
uccacucuggauucagccuucu

SEQ ID NO: 3540188 - RNA, 13 nt, Human
uccacugagcucc

SEQ ID NO: 3540189 - RNA, 18 nt, Human
uccacugccucugccuua

SEQ ID NO: 3540190 - RNA, 17 nt, Human
uccacuggacuugagcu

SEQ ID NO: 3540191 - RNA, 22 nt, Human
uccacuggccggagucagugcc

SEQ ID NO: 3540192 - RNA, 18 nt, Human
uccacuggggauugggcc

SEQ ID NO: 3540193 - RNA, 17 nt, Human
uccacugugccuuugca

SEQ ID NO: 3540194 - RNA, 12 nt, Human
uccacuguguau

SEQ ID NO: 3540195 - RNA, 16 nt, Human
uccacuuauagccucu

SEQ ID NO: 3540196 - RNA, 20 nt, Human
uccacuuauagccucugucu

SEQ ID NO: 3540197 - RNA, 22 nt, Human
uccacuuauagccucugucugg

SEQ ID NO: 3540198 - RNA, 23 nt, Human
uccacuuauagccucugucuggc

SEQ ID NO: 3540199 - RNA, 13 nt, Human
uccacuuggucug

SEQ ID NO: 3540200 - RNA, 16 nt, Human
uccacuuggucuguga

SEQ ID NO: 3540201 - RNA, 17 nt, Human
uccacuuggucugugag

SEQ ID NO: 3540202 - RNA, 17 nt, Human
uccacuuuaucuugaau

SEQ ID NO: 3540203 - RNA, 14 nt, Human
uccacuuucuagcc

SEQ ID NO: 3540204 - RNA, 18 nt, Human
uccacuuuguuucguggg

SEQ ID NO: 3540205 - RNA, 13 nt, Human
uccagaaaacaaa

SEQ ID NO: 3540206 - RNA, 21 nt, Human
uccagaaacggccauucagca

SEQ ID NO: 3540207 - RNA, 15 nt, Human
uccagaaacuuguuc

SEQ ID NO: 3540208 - RNA, 20 nt, Human
uccagaaagccccacccagg

SEQ ID NO: 3540209 - RNA, 17 nt, Human
uccagaaaggauauuua

SEQ ID NO: 3540210 - RNA, 19 nt, Human
uccagaaaggauauuuaag

SEQ ID NO: 3540211 - RNA, 23 nt, Human
uccagaaaggauauuuaagaaaa

SEQ ID NO: 3540212 - RNA, 16 nt, Human
uccagaaaugucccuu

SEQ ID NO: 3540213 - RNA, 16 nt, Human
uccagaacucuuccuc

SEQ ID NO: 3540214 - RNA, 18 nt, Human
uccagaacucuuccucca

SEQ ID NO: 3540215 - RNA, 20 nt, Human
uccagaagaagagaagcugc

SEQ ID NO: 3540216 - RNA, 18 nt, Human
uccagaagaauauucagg

SEQ ID NO: 3540217 - RNA, 22 nt, Human
uccagaagaauauucaggacuu

SEQ ID NO: 3540218 - RNA, 21 nt, Human
uccagaagggguuuggucugg

SEQ ID NO: 3540219 - RNA, 15 nt, Human
uccagaagugugauu

SEQ ID NO: 3540220 - RNA, 22 nt, Human
uccagaaguuugagaucagccu

SEQ ID NO: 3540221 - RNA, 14 nt, Human
uccagaauaucugg

SEQ ID NO: 3540222 - RNA, 19 nt, Human
uccagaaucuaaagccagu

SEQ ID NO: 3540223 - RNA, 13 nt, Human
uccagaaugcugu

SEQ ID NO: 3540224 - RNA, 15 nt, Human
uccagaaugcuguac

SEQ ID NO: 3540225 - RNA, 17 nt, Human
uccagaaugcuguacau

SEQ ID NO: 3540226 - RNA, 21 nt, Human
uccagaaugcuguacaucuau

SEQ ID NO: 3540227 - RNA, 15 nt, Human
uccagaauuucccaa

SEQ ID NO: 3540228 - RNA, 19 nt, Human
uccagacaaaccagaagca

SEQ ID NO: 3540229 - RNA, 17 nt, Human
uccagacccccaccccu

SEQ ID NO: 3540230 - RNA, 22 nt, Human
uccagacccccaccccuucccc

SEQ ID NO: 3540231 - RNA, 23 nt, Human
uccagaccccuggcuuuucacug

SEQ ID NO: 3540232 - RNA, 15 nt, Human
uccagacccggcugc

SEQ ID NO: 3540233 - RNA, 18 nt, Human
uccagacccggcugcgug

SEQ ID NO: 3540234 - RNA, 16 nt, Human
uccagaccugaagaau

SEQ ID NO: 3540235 - RNA, 19 nt, Human
uccagaccugauccuggag

SEQ ID NO: 3540236 - RNA, 20 nt, Human
uccagacuuccuugagacac

SEQ ID NO: 3540237 - RNA, 19 nt, Human
uccagagaguccucuggau

SEQ ID NO: 3540238 - RNA, 16 nt, Human
uccagagaguggcucc

SEQ ID NO: 3540239 - RNA, 17 nt, Human
uccagagaguggcuccu

SEQ ID NO: 3540240 - RNA, 16 nt, Human
uccagagauucauuuu

SEQ ID NO: 3540241 - RNA, 18 nt, Human
uccagagauucauuuucu

SEQ ID NO: 3540242 - RNA, 23 nt, Human
uccagagauucauuuucuagaua

SEQ ID NO: 3540243 - RNA, 12 nt, Human
uccagagcauuc

SEQ ID NO: 3540244 - RNA, 21 nt, Human
uccagagcggaggcugugugc

SEQ ID NO: 3540245 - RNA, 15 nt, Human
uccagagcugccagu

SEQ ID NO: 3540246 - RNA, 15 nt, Human
uccagagcugcuucc

SEQ ID NO: 3540247 - RNA, 22 nt, Human
ucccucucccccuuaccccaca

SEQ ID NO: 3540248 - RNA, 14 nt, Human
ucccucucccuguc

SEQ ID NO: 3540249 - RNA, 13 nt, Human
ucccucuccugcc

SEQ ID NO: 3540250 - RNA, 15 nt, Human
ucccucuccugccua

SEQ ID NO: 3540251 - RNA, 16 nt, Human
ucccucucucauaccc

SEQ ID NO: 3540252 - RNA, 12 nt, Human
ucccucucucug

SEQ ID NO: 3540253 - RNA, 14 nt, Human
ucccucucucugga

SEQ ID NO: 3540254 - RNA, 20 nt, Human
ucccucucucuucugcucca

SEQ ID NO: 3540255 - RNA, 23 nt, Human
ucccucucucuucugcuccaccc

SEQ ID NO: 3540256 - RNA, 14 nt, Human
ucccucucuggaga

SEQ ID NO: 3540257 - RNA, 21 nt, Human
ucccucugagaauuccaagga

SEQ ID NO: 3540258 - RNA, 16 nt, Human
ucccucugaggcugua

SEQ ID NO: 3540259 - RNA, 19 nt, Human
ucccucugaggcuguagga

SEQ ID NO: 3540260 - RNA, 16 nt, Human
ucccucugcagucucu

SEQ ID NO: 3540261 - RNA, 15 nt, Human
ucccucugccccucc

SEQ ID NO: 3540262 - RNA, 21 nt, Human
ucccucugccugaaccuucca

SEQ ID NO: 3540263 - RNA, 16 nt, Human
ucccucugcucagcca

SEQ ID NO: 3540264 - RNA, 21 nt, Human
ucccucugcucagccaagcuu

SEQ ID NO: 3540265 - RNA, 16 nt, Human
ucccucuggcccugcc

SEQ ID NO: 3540266 - RNA, 17 nt, Human
ucccucuggcccugccu

SEQ ID NO: 3540267 - RNA, 18 nt, Human
ucccucuggcccugccuu

SEQ ID NO: 3540268 - RNA, 19 nt, Human
ucccucuggcccugccuuc

SEQ ID NO: 3540269 - RNA, 13 nt, Human
ucccucuggggcu

SEQ ID NO: 3540270 - RNA, 18 nt, Human
ucccucuguccaccagcc

SEQ ID NO: 3540271 - RNA, 12 nt, Human
ucccucuucacu

SEQ ID NO: 3540272 - RNA, 15 nt, Human
ucccucuucccucag

SEQ ID NO: 3540273 - RNA, 14 nt, Human
ucccucuucucaag

SEQ ID NO: 3540274 - RNA, 17 nt, Human
ucccucuucucaagugc

SEQ ID NO: 3540275 - RNA, 20 nt, Human
ucccucuucuuucagacuug

SEQ ID NO: 3540276 - RNA, 17 nt, Human
ucccucuuguuuuguuu

SEQ ID NO: 3540277 - RNA, 13 nt, Human
ucccucuuuucuu

SEQ ID NO: 3540278 - RNA, 16 nt, Human
ucccucuuuucuuacu

SEQ ID NO: 3540279 - RNA, 18 nt, Human
ucccucuuuucuuacucc

SEQ ID NO: 3540280 - RNA, 22 nt, Human
ucccucuuuucuuacuccuccu

SEQ ID NO: 3540281 - RNA, 17 nt, Human
ucccugaaaauguuuuu

SEQ ID NO: 3540282 - RNA, 15 nt, Human
ucccugaacugggac

SEQ ID NO: 3540283 - RNA, 16 nt, Human
ucccugaacugggacc

SEQ ID NO: 3540284 - RNA, 19 nt, Human
ucccugaagccagccuucu

SEQ ID NO: 3540285 - RNA, 15 nt, Human
ucccugaaggccccg

SEQ ID NO: 3540286 - RNA, 16 nt, Human
ucccugaaggccccgc

SEQ ID NO: 3540287 - RNA, 22 nt, Human
ucccugaaggccccgcccaggc

SEQ ID NO: 3540288 - RNA, 16 nt, Human
ucccugacccuguaua

SEQ ID NO: 3540289 - RNA, 17 nt, Human
ucccugacccuguauau

SEQ ID NO: 3540290 - RNA, 22 nt, Human
ucccugacccuguauauagccc

SEQ ID NO: 3540291 - RNA, 16 nt, Human
ucccugaccucccucu

SEQ ID NO: 3540292 - RNA, 14 nt, Human
ucccugacugggag

SEQ ID NO: 3540293 - RNA, 21 nt, Human
ucccugaggacugauuucaga

SEQ ID NO: 3540294 - RNA, 15 nt, Human
ucccugaggaugggu

SEQ ID NO: 3540295 - RNA, 22 nt, Human
ucccugaggaugggucagagcu

SEQ ID NO: 3540296 - RNA, 15 nt, Human
ucccugagucaccag

SEQ ID NO: 3540297 - RNA, 21 nt, Human
ucccugagucaccaggaaugu

SEQ ID NO: 3540298 - RNA, 15 nt, Human
ucccugauaaauauu

SEQ ID NO: 3540299 - RNA, 18 nt, Human
ucccugauugaccugcuc

SEQ ID NO: 3540300 - RNA, 22 nt, Human
ucccugcagaugccacccuagc

SEQ ID NO: 3540301 - RNA, 18 nt, Human
ucccugcaucugaccagc

SEQ ID NO: 3540302 - RNA, 20 nt, Human
ucccugcaucugaccagcag

SEQ ID NO: 3540303 - RNA, 15 nt, Human
ucccugccaaacuga

SEQ ID NO: 3540304 - RNA, 16 nt, Human
ucccugccccccagcc

SEQ ID NO: 3540305 - RNA, 14 nt, Human
ucccugccccuccc

SEQ ID NO: 3540306 - RNA, 16 nt, Human
ucccugcccucaucuc

SEQ ID NO: 3540307 - RNA, 23 nt, Human
ucccugccucaccucugccauuu

SEQ ID NO: 3540308 - RNA, 13 nt, Human
ucccugccuccug

SEQ ID NO: 3540309 - RNA, 23 nt, Human
ucccugccucucaucaacugaau

SEQ ID NO: 3540310 - RNA, 11 nt, Human
ucccugccugg

SEQ ID NO: 3540311 - RNA, 21 nt, Human
ucccugcgccugugaugcugg

SEQ ID NO: 3540312 - RNA, 17 nt, Human
ucccugcuccacgucug

SEQ ID NO: 3540313 - RNA, 21 nt, Human
ucccugcuguccccucuugcc

SEQ ID NO: 3540314 - RNA, 22 nt, Human
ucccugcuguccccucuugccc

SEQ ID NO: 3540315 - RNA, 19 nt, Human
ucccugcugucgucuuagc

SEQ ID NO: 3540316 - RNA, 16 nt, Human
ucccugcuguguuccc

SEQ ID NO: 3540317 - RNA, 18 nt, Human
ucccugcuuccaggaaac

SEQ ID NO: 3540318 - RNA, 20 nt, Human
ucccuggaaaccuuccaccc

SEQ ID NO: 3540319 - RNA, 22 nt, Human
ucccuggaaaccuuccacccag

SEQ ID NO: 3540320 - RNA, 22 nt, Human
ucccuggaaugaguugaggcca

SEQ ID NO: 3540321 - RNA, 11 nt, Human
ucccuggacca

SEQ ID NO: 3540322 - RNA, 18 nt, Human
ucccuggaccagaugcug

SEQ ID NO: 3540323 - RNA, 17 nt, Human
ucccuggagccagacuc

SEQ ID NO: 3540324 - RNA, 10 nt, Human
ucccuggagu

SEQ ID NO: 3540325 - RNA, 12 nt, Human
gcuuugauucau

SEQ ID NO: 3540326 - RNA, 17 nt, Human
gcuuugauuccaucucc

SEQ ID NO: 3540327 - RNA, 23 nt, Human
gcuuugcauguuccacuaacccc

SEQ ID NO: 3540328 - RNA, 22 nt, Human
gcuuugcauuccuacaaagaug

SEQ ID NO: 3540329 - RNA, 18 nt, Human
gcuuugcccaaccucagc

SEQ ID NO: 3540330 - RNA, 19 nt, Human
gcuuugcccaaccucagca

SEQ ID NO: 3540331 - RNA, 12 nt, Human
gcuuugcccagc

SEQ ID NO: 3540332 - RNA, 17 nt, Human
gcuuugcccuucuuucu

SEQ ID NO: 3540333 - RNA, 18 nt, Human
gcuuugccuuccacgcug

SEQ ID NO: 3540334 - RNA, 19 nt, Human
gcuuugcgugcccggggca

SEQ ID NO: 3540335 - RNA, 18 nt, Human
gcuuugcugcugaaggcu

SEQ ID NO: 3540336 - RNA, 17 nt, Human
gcuuuggacccaaggaa

SEQ ID NO: 3540337 - RNA, 17 nt, Human
gcuuuggaccuaaucca

SEQ ID NO: 3540338 - RNA, 19 nt, Human
gcuuuggacgcacacagcu

SEQ ID NO: 3540339 - RNA, 17 nt, Human
gcuuuggauuugacauu

SEQ ID NO: 3540340 - RNA, 14 nt, Human
gcuuugggcugccc

SEQ ID NO: 3540341 - RNA, 17 nt, Human
gcuuuggucacuuuuag

SEQ ID NO: 3540342 - RNA, 20 nt, Human
gcuuugguuauauuuagcuc

SEQ ID NO: 3540343 - RNA, 20 nt, Human
gcuuuguauagaaccucuuu

SEQ ID NO: 3540344 - RNA, 15 nt, Human
gcuuugucccacagc

SEQ ID NO: 3540345 - RNA, 15 nt, Human
gcuuuguccccugcu

SEQ ID NO: 3540346 - RNA, 22 nt, Human
gcuuuguggcacuggggcaggg

SEQ ID NO: 3540347 - RNA, 15 nt, Human
gcuuuguguuguaau

SEQ ID NO: 3540348 - RNA, 18 nt, Human
gcuuuguugugugccucu

SEQ ID NO: 3540349 - RNA, 20 nt, Human
gcuuuguuuggauguaauuu

SEQ ID NO: 3540350 - RNA, 14 nt, Human
gcuuuguuuugcac

SEQ ID NO: 3540351 - RNA, 17 nt, Human
gcuuuuaaaaaaaaaua

SEQ ID NO: 3540352 - RNA, 14 nt, Human
gcuuuuaaaacuac

SEQ ID NO: 3540353 - RNA, 16 nt, Human
gcuuuuaaaauuuuaa

SEQ ID NO: 3540354 - RNA, 17 nt, Human
gcuuuuaacuucugaua

SEQ ID NO: 3540355 - RNA, 15 nt, Human
gcuuuuaauuaaaua

SEQ ID NO: 3540356 - RNA, 13 nt, Human
gcuuuuagacaga

SEQ ID NO: 3540357 - RNA, 23 nt, Human
gcuuuuaguacccaccugagcuu

SEQ ID NO: 3540358 - RNA, 21 nt, Human
gcuuuuaguauuuuagugaac

SEQ ID NO: 3540359 - RNA, 18 nt, Human
gcuuuuauaucuguaugu

SEQ ID NO: 3540360 - RNA, 13 nt, Human
gcuuuuaugugaa

SEQ ID NO: 3540361 - RNA, 19 nt, Human
gcuuuuaugugaaacaugu

SEQ ID NO: 3540362 - RNA, 15 nt, Human
gcuuuuauuaaauuu

SEQ ID NO: 3540363 - RNA, 14 nt, Human
gcuuuucacugcug

SEQ ID NO: 3540364 - RNA, 16 nt, Human
gcuuuucacugcugca

SEQ ID NO: 3540365 - RNA, 18 nt, Human
gcuuuucacugcuggcug

SEQ ID NO: 3540366 - RNA, 18 nt, Human
gcuuuuccccggucccuu

SEQ ID NO: 3540367 - RNA, 12 nt, Human
gcuuuucccucu

SEQ ID NO: 3540368 - RNA, 17 nt, Human
gcuuuucccucuuuucu

SEQ ID NO: 3540369 - RNA, 16 nt, Human
gcuuuucccuuuguga

SEQ ID NO: 3540370 - RNA, 22 nt, Human
gcuuuuccucaaagggagagag

SEQ ID NO: 3540371 - RNA, 15 nt, Human
gcuuuuccucccuug

SEQ ID NO: 3540372 - RNA, 14 nt, Human
gcuuuuccuugggg

SEQ ID NO: 3540373 - RNA, 22 nt, Human
gcuuuuccuuggggcaggcagu

SEQ ID NO: 3540374 - RNA, 13 nt, Human
gcuuuucuccucu

SEQ ID NO: 3540375 - RNA, 17 nt, Human
gcuuuucuccucuuucc

SEQ ID NO: 3540376 - RNA, 15 nt, Human
gcuuuucugauccag

SEQ ID NO: 3540377 - RNA, 16 nt, Human
gcuuuucugauccagu

SEQ ID NO: 3540378 - RNA, 19 nt, Human
gcuuuucugcccuggcugc

SEQ ID NO: 3540379 - RNA, 13 nt, Human
gcuuuugaaaucu

SEQ ID NO: 3540380 - RNA, 21 nt, Human
gcuuuugcccauuuugaauca

SEQ ID NO: 3540381 - RNA, 15 nt, Human
gcuuuugcuggucac

SEQ ID NO: 3540382 - RNA, 19 nt, Human
gcuuuugcuggucacugcc

SEQ ID NO: 3540383 - RNA, 21 nt, Human
gcuuuugcuggucacugccau

SEQ ID NO: 3540384 - RNA, 11 nt, Human
gcuuuuggcaa

SEQ ID NO: 3540385 - RNA, 12 nt, Human
gcuuuuggccug

SEQ ID NO: 3540386 - RNA, 14 nt, Human
gcuuuuggccugga

SEQ ID NO: 3540387 - RNA, 22 nt, Human
gcuuuuggcggggaggaggaaa

SEQ ID NO: 3540388 - RNA, 15 nt, Human
gcuuuuggucugugu

SEQ ID NO: 3540389 - RNA, 20 nt, Human
gcuuuugucuaauuaaaaca

SEQ ID NO: 3540390 - RNA, 20 nt, Human
gcuuuugucuacacacccug

SEQ ID NO: 3540391 - RNA, 21 nt, Human
gcuuuugugggggacuguaag

SEQ ID NO: 3540392 - RNA, 17 nt, Human
gcuuuuuaaaacauuag

SEQ ID NO: 3540393 - RNA, 13 nt, Human
gcuuuuuaauuaa

SEQ ID NO: 3540394 - RNA, 13 nt, Human
gcuuuuuaauugu

SEQ ID NO: 3540395 - RNA, 12 nt, Human
gcuuuuuauaaa

SEQ ID NO: 3540396 - RNA, 19 nt, Human
gcuuuuuauuccuccugcu

SEQ ID NO: 3540397 - RNA, 11 nt, Human
gcuuuuucuga

SEQ ID NO: 3540398 - RNA, 12 nt, Human
gcuuuuucugac

SEQ ID NO: 3540399 - RNA, 14 nt, Human
gcuuuuucugacuc

SEQ ID NO: 3540400 - RNA, 14 nt, Human
gcuuuuugaaauga

SEQ ID NO: 3540401 - RNA, 13 nt, Human
gcuuuuuggaauc

SEQ ID NO: 3540402 - RNA, 14 nt, Human
gcuuuuugguguau

SEQ ID NO: 3540403 - RNA, 16 nt, Human
gcuuuuugucuuuucu

SEQ ID NO: 3540404 - RNA, 17 nt, Human
gcuuuuuuccaaaacaa

SEQ ID NO: 3540405 - RNA, 13 nt, Human
gcuuuuuuugaaa

SEQ ID NO: 3540406 - RNA, 22 nt, Human
gcuuuuuuuguguguauuugcu

SEQ ID NO: 3540407 - RNA, 17 nt, Human
gcuuuuuuuuuuccagc

SEQ ID NO: 3540408 - RNA, 21 nt, Human
gcuuuuuuuuuuccagcaagu

SEQ ID NO: 3540409 - RNA, 16 nt, Human
gcuuuuuuuuuuuaau

SEQ ID NO: 3540410 - RNA, 20 nt, Human
gcuuuuuuuuuuuaauuuug

SEQ ID NO: 3540411 - RNA, 23 nt, Human
ggaaaaaaacuuuuauaaauuaa

SEQ ID NO: 3540412 - RNA, 12 nt, Human
ggaaaaaaagac

SEQ ID NO: 3540413 - RNA, 14 nt, Human
ggaaaaaaaugacu

SEQ ID NO: 3540414 - RNA, 12 nt, Human
ggaaaaaaaugu

SEQ ID NO: 3540415 - RNA, 15 nt, Human
ggaaaaaauaacaau

SEQ ID NO: 3540416 - RNA, 19 nt, Human
ggaaaaaauguuggauuua

SEQ ID NO: 3540417 - RNA, 14 nt, Human
ggaaaaacugauuu

SEQ ID NO: 3540418 - RNA, 17 nt, Human
ggaaaaacuuuggaacc

SEQ ID NO: 3540419 - RNA, 23 nt, Human
ggaaaaagcaaguucgucuguug

SEQ ID NO: 3540420 - RNA, 23 nt, Human
ggaaaaaggacaggcagaaagag

SEQ ID NO: 3540421 - RNA, 21 nt, Human
ggaaaaaguaucauggaaaua

SEQ ID NO: 3540422 - RNA, 15 nt, Human
ggaaaaauagccugc

SEQ ID NO: 3540423 - RNA, 14 nt, Human
ggaaaaauauuuaa

SEQ ID NO: 3540424 - RNA, 15 nt, Human
ggaaaaauauuuaag

SEQ ID NO: 3540425 - RNA, 18 nt, Human
ggaaaacagacucagguu

SEQ ID NO: 3540426 - RNA, 23 nt, Human
ggaaaagaaaaaaaaaagaagaa

SEQ ID NO: 3540427 - RNA, 17 nt, Human
ggaaaagaaagaaguua

SEQ ID NO: 3540428 - RNA, 13 nt, Human
ggaaaagaaaucu

SEQ ID NO: 3540429 - RNA, 14 nt, Human
ggaaaagaauacag

SEQ ID NO: 3540430 - RNA, 21 nt, Human
ggaaaagaggaguuucgaggu

SEQ ID NO: 3540431 - RNA, 10 nt, Human
ggaaaagcuu

SEQ ID NO: 3540432 - RNA, 20 nt, Human
ggaaaaggcagggagcgagg

SEQ ID NO: 3540433 - RNA, 15 nt, Human
ggaaaaggcauauau

SEQ ID NO: 3540434 - RNA, 20 nt, Human
ggaaaagguugaauaauaua

SEQ ID NO: 3540435 - RNA, 18 nt, Human
ggaaaaguuuaauauuaa

SEQ ID NO: 3540436 - RNA, 21 nt, Human
ggaaaauaaaaaaagaaaaaa

SEQ ID NO: 3540437 - RNA, 14 nt, Human
ggaaaauaaauuau

SEQ ID NO: 3540438 - RNA, 19 nt, Human
ggaaaauaggcaggaagcc

SEQ ID NO: 3540439 - RNA, 16 nt, Human
ggaaaauauguccaua

SEQ ID NO: 3540440 - RNA, 12 nt, Human
ggaaaauauuuu

SEQ ID NO: 3540441 - RNA, 15 nt, Human
ggaaaaucagccugc

SEQ ID NO: 3540442 - RNA, 18 nt, Human
ggaaaauucuaacccagg

SEQ ID NO: 3540443 - RNA, 14 nt, Human
ggaaacaaagcuua

SEQ ID NO: 3540444 - RNA, 16 nt, Human
ggaaacaacagcuuua

SEQ ID NO: 3540445 - RNA, 22 nt, Human
ggaaacagacucgauucauauu

SEQ ID NO: 3540446 - RNA, 21 nt, Human
ggaaacagcaucuccaagcag

SEQ ID NO: 3540447 - RNA, 20 nt, Human
ggaaacagcuaaugggacac

SEQ ID NO: 3540448 - RNA, 14 nt, Human
ggaaacagucauuu

SEQ ID NO: 3540449 - RNA, 24 nt, Human
ggaaacccauaggcccacacacag

SEQ ID NO: 3540450 - RNA, 17 nt, Human
ggaaaccugcccugccu

SEQ ID NO: 3540451 - RNA, 22 nt, Human
ggaaaccugcccugccugaggg

SEQ ID NO: 3540452 - RNA, 17 nt, Human
ggaaacuaagauucuuu

SEQ ID NO: 3540453 - RNA, 22 nt, Human
uccucuagaagccaagggaaag

SEQ ID NO: 3540454 - RNA, 14 nt, Human
uccucuaggagguc

SEQ ID NO: 3540455 - RNA, 13 nt, Human
uccucucaauaaa

SEQ ID NO: 3540456 - RNA, 22 nt, Human
uccucucacuccccagccuggg

SEQ ID NO: 3540457 - RNA, 14 nt, Human
uccucucagccccu

SEQ ID NO: 3540458 - RNA, 16 nt, Human
uccucuccacugccuu

SEQ ID NO: 3540459 - RNA, 13 nt, Human
uccucucccaucc

SEQ ID NO: 3540460 - RNA, 15 nt, Human
uccucucccaucccc

SEQ ID NO: 3540461 - RNA, 17 nt, Human
uccucucccaucccccu

SEQ ID NO: 3540462 - RNA, 22 nt, Human
uccucucccauugucccucugc

SEQ ID NO: 3540463 - RNA, 15 nt, Human
uccucuccccagcaa

SEQ ID NO: 3540464 - RNA, 15 nt, Human
uccucuccccagccc

SEQ ID NO: 3540465 - RNA, 21 nt, Human
uccucuccccagcccagagac

SEQ ID NO: 3540466 - RNA, 17 nt, Human
uccucuccccaugaugu

SEQ ID NO: 3540467 - RNA, 17 nt, Human
uccucuccccuaccacu

SEQ ID NO: 3540468 - RNA, 18 nt, Human
uccucuccccuaccacug

SEQ ID NO: 3540469 - RNA, 20 nt, Human
uccucuccgcaguuccuguc

SEQ ID NO: 3540470 - RNA, 12 nt, Human
uccucuccugga

SEQ ID NO: 3540471 - RNA, 14 nt, Human
uccugauuccucuc

SEQ ID NO: 3540472 - RNA, 23 nt, Human
uccugauugguuucucuucuccc

SEQ ID NO: 3540473 - RNA, 20 nt, Human
uccugcaaccaaacucccau

SEQ ID NO: 3540474 - RNA, 18 nt, Human
uccugcaacucaaggacu

SEQ ID NO: 3540475 - RNA, 20 nt, Human
uccugcacaguuuucuggcu

SEQ ID NO: 3540476 - RNA, 19 nt, Human
uccugcaccggggccuggg

SEQ ID NO: 3540477 - RNA, 21 nt, Human
uccugcaccggggccugggca

SEQ ID NO: 3540478 - RNA, 17 nt, Human
uccugcacugacucugg

SEQ ID NO: 3540479 - RNA, 21 nt, Human
uccugcacugacucuggaaaa

SEQ ID NO: 3540480 - RNA, 13 nt, Human
uccugcagcaaac

SEQ ID NO: 3540481 - RNA, 16 nt, Human
uccugcagcagagccu

SEQ ID NO: 3540482 - RNA, 15 nt, Human
uccugcagccuccuc

SEQ ID NO: 3540483 - RNA, 19 nt, Human
uccugcagccuccuccuga

SEQ ID NO: 3540484 - RNA, 17 nt, Human
uccugcagccugcagga

SEQ ID NO: 3540485 - RNA, 17 nt, Human
uccugcagccuggaggc

SEQ ID NO: 3540486 - RNA, 13 nt, Human
uccugcaggcagc

SEQ ID NO: 3540487 - RNA, 14 nt, Human
uccugcaggcagcc

SEQ ID NO: 3540488 - RNA, 19 nt, Human
uccugcaggcagccaggcc

SEQ ID NO: 3540489 - RNA, 19 nt, Human
uccugcaggccaggccagc

SEQ ID NO: 3540490 - RNA, 20 nt, Human
uccugcaggccaggccagcu

SEQ ID NO: 3540491 - RNA, 23 nt, Human
uccugcauugggugaucauucac

SEQ ID NO: 3540492 - RNA, 16 nt, Human
uccugcauuugugaaa

SEQ ID NO: 3540493 - RNA, 16 nt, Human
uccugccacccagccc

SEQ ID NO: 3540494 - RNA, 20 nt, Human
uccugccacccagccccagc

SEQ ID NO: 3540495 - RNA, 14 nt, Human
uccugccagcccca

SEQ ID NO: 3540496 - RNA, 15 nt, Human
uccugccagccccac

SEQ ID NO: 3540497 - RNA, 21 nt, Human
uccugccagccccacacagcu

SEQ ID NO: 3540498 - RNA, 14 nt, Human
uccugccagccccu

SEQ ID NO: 3540499 - RNA, 20 nt, Human
uccugcccacugcugcagua

SEQ ID NO: 3540500 - RNA, 17 nt, Human
uccugcccaguccccca

SEQ ID NO: 3540501 - RNA, 14 nt, Human
uccugccccaggcc

SEQ ID NO: 3540502 - RNA, 15 nt, Human
uccugccccaggccu

SEQ ID NO: 3540503 - RNA, 16 nt, Human
uccugcccccacaccu

SEQ ID NO: 3540504 - RNA, 19 nt, Human
uccugcccccacaccuggc

SEQ ID NO: 3540505 - RNA, 20 nt, Human
uccugcccccacaccuggcc

SEQ ID NO: 3540506 - RNA, 23 nt, Human
uccugcccccacaccuggcccug

SEQ ID NO: 3540507 - RNA, 17 nt, Human
uccugcccccugaaacu

SEQ ID NO: 3540508 - RNA, 12 nt, Human
uccugccccucu

SEQ ID NO: 3540509 - RNA, 19 nt, Human
uccugccccucuuucucuu

SEQ ID NO: 3540510 - RNA, 17 nt, Human
uccugccccugagccca

SEQ ID NO: 3540511 - RNA, 16 nt, Human
uccugccccuguucuc

SEQ ID NO: 3540512 - RNA, 22 nt, Human
uccugcccgccacacagaccac

SEQ ID NO: 3540513 - RNA, 14 nt, Human
uccugcccuacaga

SEQ ID NO: 3540514 - RNA, 10 nt, Human
uccugcccug

SEQ ID NO: 3540515 - RNA, 15 nt, Human
uccugcccugggagg

SEQ ID NO: 3540516 - RNA, 12 nt, Human
uccugcccuguu

SEQ ID NO: 3540517 - RNA, 20 nt, Human
uccugcccuuaccugccagg

SEQ ID NO: 3540518 - RNA, 15 nt, Human
uccugcccuuccuca

SEQ ID NO: 3540519 - RNA, 13 nt, Human
uccugccgcagag

SEQ ID NO: 3540520 - RNA, 17 nt, Human
uccugccgcagagcugg

SEQ ID NO: 3540521 - RNA, 22 nt, Human
uccugccggagaggaagagaca

SEQ ID NO: 3540522 - RNA, 14 nt, Human
uccugccggcuccu

SEQ ID NO: 3540523 - RNA, 14 nt, Human
uccugccuccgccu

SEQ ID NO: 3540524 - RNA, 12 nt, Human
uccugccuggcc

SEQ ID NO: 3540525 - RNA, 14 nt, Human
uccugccuggucuc

SEQ ID NO: 3540526 - RNA, 17 nt, Human
uccugccuggucuccug

SEQ ID NO: 3540527 - RNA, 18 nt, Human
uccugccugucugaagcc

SEQ ID NO: 3540528 - RNA, 19 nt, Human
uccugccugucugccccag

SEQ ID NO: 3540529 - RNA, 12 nt, Human
uccugccugugc

SEQ ID NO: 3540530 - RNA, 22 nt, Human
uccugccuucuguccugguguc

SEQ ID NO: 3540531 - RNA, 16 nt, Human
uccugccuugaaaaag

SEQ ID NO: 3540532 - RNA, 18 nt, Human
uccugccuuugccuccag

SEQ ID NO: 3540533 - RNA, 17 nt, Human
uccugcgaggcuaugag

SEQ ID NO: 3540534 - RNA, 21 nt, Human
uccugcggagugaagaggggc

SEQ ID NO: 3540535 - RNA, 12 nt, Human
uccugcgggcuu

SEQ ID NO: 3540536 - RNA, 13 nt, Human
uccugcggguggg

SEQ ID NO: 3540537 - RNA, 13 nt, Human
uccugcguccucc

SEQ ID NO: 3540538 - RNA, 21 nt, Human
uccugcguccuccucaccuca

SEQ ID NO: 3540539 - RNA, 21 nt, Human
uccugcuaccucccuugccuu

SEQ ID NO: 3540540 - RNA, 18 nt, Human
uccugcuacucuguuccu

SEQ ID NO: 3540541 - RNA, 22 nt, Human
uccugcuauuucccaagcugga

SEQ ID NO: 3540542 - RNA, 13 nt, Human
uccugcucagcag

SEQ ID NO: 3540543 - RNA, 22 nt, Human
uccugcucauuaugccacuucc

SEQ ID NO: 3540544 - RNA, 14 nt, Human
uccugcuccacagc

SEQ ID NO: 3540545 - RNA, 12 nt, Human
uccugcuccaga

SEQ ID NO: 3540546 - RNA, 17 nt, Human
uccugcucucuacccag

SEQ ID NO: 3540547 - RNA, 19 nt, Human
uccugcucucuacccagcc

SEQ ID NO: 3540548 - RNA, 22 nt, Human
uccugcucucuacccagcccau

SEQ ID NO: 3540549 - RNA, 13 nt, Human
uccugcucugccc

SEQ ID NO: 3540550 - RNA, 13 nt, Human
uccugcugcacca

SEQ ID NO: 3540551 - RNA, 17 nt, Human
uccugcugcaccaaccc

SEQ ID NO: 3540552 - RNA, 21 nt, Human
uccugcugcagaggggcaggc

SEQ ID NO: 3540553 - RNA, 13 nt, Human
uccugcugcaguu

SEQ ID NO: 3540554 - RNA, 14 nt, Human
uccugcugcucccu

SEQ ID NO: 3540555 - RNA, 18 nt, Human
uccugcugcucccucaga

SEQ ID NO: 3540556 - RNA, 13 nt, Human
uccugcugcuguc

SEQ ID NO: 3540557 - RNA, 17 nt, Human
uccugcugcugucuggg

SEQ ID NO: 3540558 - RNA, 14 nt, Human
uccugcugcugugu

SEQ ID NO: 3540559 - RNA, 13 nt, Human
uccugcuuccuca

SEQ ID NO: 3540560 - RNA, 19 nt, Human
uccugcuugccaaggcaga

SEQ ID NO: 3540561 - RNA, 19 nt, Human
uccugcuuugcgugcccgg

SEQ ID NO: 3540562 - RNA, 16 nt, Human
uccuggaaaucagggu

SEQ ID NO: 3540563 - RNA, 14 nt, Human
uccuggaacaauau

SEQ ID NO: 3540564 - RNA, 16 nt, Human
uccuggaacaauauuu

SEQ ID NO: 3540565 - RNA, 20 nt, Human
uccuggaacaauauuuuaug

SEQ ID NO: 3540566 - RNA, 21 nt, Human
uccuggaacaauauuuuaugg

SEQ ID NO: 3540567 - RNA, 18 nt, Human
uccuggaaccuugcuguc

SEQ ID NO: 3540568 - RNA, 20 nt, Human
uccuggaaccuugcuguccu

SEQ ID NO: 3540569 - RNA, 19 nt, Human
uccuggacacucagaccug

SEQ ID NO: 3540570 - RNA, 14 nt, Human
uccuggacagcugu

SEQ ID NO: 3540571 - RNA, 15 nt, Human
uccuggacaggccag

SEQ ID NO: 3540572 - RNA, 17 nt, Human
uccuggacaggccaggu

SEQ ID NO: 3540573 - RNA, 21 nt, Human
uccuggacauccucuucugcu

SEQ ID NO: 3540574 - RNA, 22 nt, Human
uccuggacaugaagauucuuuc

SEQ ID NO: 3540575 - RNA, 22 nt, Human
uccuggacugagggggccugga

SEQ ID NO: 3540576 - RNA, 13 nt, Human
uccuggagcagaa

SEQ ID NO: 3540577 - RNA, 18 nt, Human
uccuggagcagaagcagc

SEQ ID NO: 3540578 - RNA, 18 nt, Human
uccuggagcccagaggag

SEQ ID NO: 3540579 - RNA, 18 nt, Human
uccuggagccuuugaaua

SEQ ID NO: 3540580 - RNA, 19 nt, Human
uccuggagguuccccagcc

SEQ ID NO: 3540581 - RNA, 14 nt, Human
uccuggaguugcau

SEQ ID NO: 3540582 - RNA, 16 nt, Human
uccuggaguugcauug

SEQ ID NO: 3540583 - RNA, 20 nt, Human
uccuggcaauaguguguucu

SEQ ID NO: 3540584 - RNA, 21 nt, Human
uccuggcaauaguguguucug

SEQ ID NO: 3540585 - RNA, 14 nt, Human
uccuggcacccggc

SEQ ID NO: 3540586 - RNA, 16 nt, Human
uccuggcacccggccc

SEQ ID NO: 3540587 - RNA, 20 nt, Human
uccuggcacccggccccugc

SEQ ID NO: 3540588 - RNA, 21 nt, Human
uccuggcacccggccccugcu

SEQ ID NO: 3540589 - RNA, 22 nt, Human
uccuggcacccggccccugcug

SEQ ID NO: 3540590 - RNA, 18 nt, Human
uccuggcacugcuuccag

SEQ ID NO: 3540591 - RNA, 13 nt, Human
uccuggcacugga

SEQ ID NO: 3540592 - RNA, 16 nt, Human
uccuggcagcccagag

SEQ ID NO: 3540593 - RNA, 16 nt, Human
uccuggccaucccaca

SEQ ID NO: 3540594 - RNA, 11 nt, Human
uccuggcccau

SEQ ID NO: 3540595 - RNA, 14 nt, Human
uccuggcccaucag

SEQ ID NO: 3540596 - RNA, 18 nt, Human
uccuggcccaucagugua

SEQ ID NO: 3540597 - RNA, 14 nt, Human
uccuggccccucaa

SEQ ID NO: 3540598 - RNA, 18 nt, Human
uccuggccccucaaccuc

SEQ ID NO: 3540599 - RNA, 13 nt, Human
uccuggccucaga

SEQ ID NO: 3540600 - RNA, 14 nt, Human
uccuggccucagac

SEQ ID NO: 3540601 - RNA, 17 nt, Human
uccuggccucagacugc

SEQ ID NO: 3540602 - RNA, 13 nt, Human
uccuggccuggca

SEQ ID NO: 3540603 - RNA, 23 nt, Human
uccuggccuggcacaucagaaag

SEQ ID NO: 3540604 - RNA, 12 nt, Human
uccuggcgccug

SEQ ID NO: 3540605 - RNA, 21 nt, Human
uccuggcuucccauccccagc

SEQ ID NO: 3540606 - RNA, 15 nt, Human
uccuggcuuugccca

SEQ ID NO: 3540607 - RNA, 21 nt, Human
uccugggaaauauucccuaga

SEQ ID NO: 3540608 - RNA, 20 nt, Human
uccugggagaaccucaggcu

SEQ ID NO: 3540609 - RNA, 15 nt, Human
uccugggagacccau

SEQ ID NO: 3540610 - RNA, 15 nt, Human
uccugggagcuuuug

SEQ ID NO: 3540611 - RNA, 12 nt, Human
uccugggaguga

SEQ ID NO: 3540612 - RNA, 18 nt, Human
uccugggagugagcuggu

SEQ ID NO: 3540613 - RNA, 19 nt, Human
uccugggcagcugccuccc

SEQ ID NO: 3540614 - RNA, 23 nt, Human
uccugggcagcugccuccccucc

SEQ ID NO: 3540615 - RNA, 16 nt, Human
uccugggccccucccu

SEQ ID NO: 3540616 - RNA, 17 nt, Human
uccugggccccucccua

SEQ ID NO: 3540617 - RNA, 18 nt, Human
ucggccccaccagugccu

SEQ ID NO: 3540618 - RNA, 15 nt, Human
ucggccuccauccug

SEQ ID NO: 3540619 - RNA, 18 nt, Human
ucggccucuaaccccagg

SEQ ID NO: 3540620 - RNA, 19 nt, Human
ucggccucuaaccccaggc

SEQ ID NO: 3540621 - RNA, 20 nt, Human
ucggccucuaaccccaggcc

SEQ ID NO: 3540622 - RNA, 22 nt, Human
ucggccucuaaccccaggcccc

SEQ ID NO: 3540623 - RNA, 23 nt, Human
ucggccucuaaccccaggccccg

SEQ ID NO: 3540624 - RNA, 15 nt, Human
ucggcuccugcugca

SEQ ID NO: 3540625 - RNA, 21 nt, Human
ucggcuccuggacucauugcu

SEQ ID NO: 3540626 - RNA, 13 nt, Human
ucggcucugggug

SEQ ID NO: 3540627 - RNA, 15 nt, Human
ucggcugaccaugcu

SEQ ID NO: 3540628 - RNA, 16 nt, Human
ucggcugaccaugcuc

SEQ ID NO: 3540629 - RNA, 21 nt, Human
ucggcuggcuccccugcagcc

SEQ ID NO: 3540630 - RNA, 21 nt, Human
ucgggaaaagguagaggaguc

SEQ ID NO: 3540631 - RNA, 15 nt, Human
ucgggaacaguguuu

SEQ ID NO: 3540632 - RNA, 16 nt, Human
ucgggaaccucacucu

SEQ ID NO: 3540633 - RNA, 20 nt, Human
ucgggaagagaggaguucaa

SEQ ID NO: 3540634 - RNA, 20 nt, Human
ucgggaauacuagggagaag

SEQ ID NO: 3540635 - RNA, 10 nt, Human
ucgggaccag

SEQ ID NO: 3540636 - RNA, 11 nt, Human
ucgggaccagg

SEQ ID NO: 3540637 - RNA, 16 nt, Human
ucgggagacagcauca

SEQ ID NO: 3540638 - RNA, 14 nt, Human
ucgggagcaguguc

SEQ ID NO: 3540639 - RNA, 15 nt, Human
ucgggagcagugucu

SEQ ID NO: 3540640 - RNA, 23 nt, Human
ucgggagcagugucuuccauaau

SEQ ID NO: 3540641 - RNA, 23 nt, Human
ucgggaggcugaggcaggagacu

SEQ ID NO: 3540642 - RNA, 22 nt, Human
ucgggcagcacaaguguaauga

SEQ ID NO: 3540643 - RNA, 12 nt, Human
ucgggcaugaca

SEQ ID NO: 3540644 - RNA, 21 nt, Human
ucgggcccaccuggccaccug

SEQ ID NO: 3540645 - RNA, 14 nt, Human
ucgggcccagcccc

SEQ ID NO: 3540646 - RNA, 15 nt, Human
ucgggcccagccccc

SEQ ID NO: 3540647 - RNA, 20 nt, Human
ucgggccccaccugcagcuc

SEQ ID NO: 3540648 - RNA, 13 nt, Human
ucgggcccuucuu

SEQ ID NO: 3540649 - RNA, 16 nt, Human
ucgggcucagcucugg

SEQ ID NO: 3540650 - RNA, 14 nt, Human
ucgggcuccagcca

SEQ ID NO: 3540651 - RNA, 15 nt, Human
ucgggcuccugugcc

SEQ ID NO: 3540652 - RNA, 16 nt, Human
ucggggcaugcugggg

SEQ ID NO: 3540653 - RNA, 16 nt, Human
ucggggcugggaaguc

SEQ ID NO: 3540654 - RNA, 19 nt, Human
ucgggggggacccuccaag

SEQ ID NO: 3540655 - RNA, 14 nt, Human
ucggggugcacagg

SEQ ID NO: 3540656 - RNA, 15 nt, Human
ucggggugcacagga

SEQ ID NO: 3540657 - RNA, 16 nt, Human
ucgguccuggugcccu

SEQ ID NO: 3540658 - RNA, 15 nt, Human
ucgguguccauuuau

SEQ ID NO: 3540659 - RNA, 15 nt, Human
ucgguuaacaaauaa

SEQ ID NO: 3540660 - RNA, 20 nt, Human
ucgguuaacaaauaacaacu

SEQ ID NO: 3540661 - RNA, 22 nt, Human
ucgguuugccaaaauucauuuc

SEQ ID NO: 3540662 - RNA, 20 nt, Human
ucguaagauuuccuucuuuu

SEQ ID NO: 3540663 - RNA, 13 nt, Human
ucguaaugacuua

SEQ ID NO: 3540664 - RNA, 14 nt, Human
ucguacaguucuuc

SEQ ID NO: 3540665 - RNA, 12 nt, Human
ucguagcuuucc

SEQ ID NO: 3540666 - RNA, 20 nt, Human
ucguauagaagucuucauga

SEQ ID NO: 3540667 - RNA, 17 nt, Human
ucguauagcuguauuga

SEQ ID NO: 3540668 - RNA, 21 nt, Human
ucguauagcuguauugaauca

SEQ ID NO: 3540669 - RNA, 20 nt, Human
ucguaucccgagucugggac

SEQ ID NO: 3540670 - RNA, 12 nt, Human
ucguaugaaaau

SEQ ID NO: 3540671 - RNA, 21 nt, Human
ucguaugauacuucgacacug

SEQ ID NO: 3540672 - RNA, 13 nt, Human
ucguccucccccu

SEQ ID NO: 3540673 - RNA, 16 nt, Human
ucguccuuacuccugu

SEQ ID NO: 3540674 - RNA, 15 nt, Human
ucgucugacugugug

SEQ ID NO: 3540675 - RNA, 16 nt, Human
ucgucuuaacucacca

SEQ ID NO: 3540676 - RNA, 19 nt, Human
ucgucuuccgucucccccg

SEQ ID NO: 3540677 - RNA, 22 nt, Human
ucgucuuccgucucccccgugu

SEQ ID NO: 3540678 - RNA, 19 nt, Human
ggagaagcagugagccgca

SEQ ID NO: 3540679 - RNA, 12 nt, Human
ggagaagccagg

SEQ ID NO: 3540680 - RNA, 17 nt, Human
ggagaagccauugucuu

SEQ ID NO: 3540681 - RNA, 16 nt, Human
ggagaagcugaugcuu

SEQ ID NO: 3540682 - RNA, 13 nt, Human
ggagaagcugcag

SEQ ID NO: 3540683 - RNA, 12 nt, Human
ggagaaggaagg

SEQ ID NO: 3540684 - RNA, 14 nt, Human
ggagaaggcaugaa

SEQ ID NO: 3540685 - RNA, 22 nt, Human
ggagaagucuuagacuugaaau

SEQ ID NO: 3540686 - RNA, 20 nt, Human
ggagaagucuucuauuuauu

SEQ ID NO: 3540687 - RNA, 16 nt, Human
ggagaauaauucuuug

SEQ ID NO: 3540688 - RNA, 17 nt, Human
ggagaauaauucuuuga

SEQ ID NO: 3540689 - RNA, 13 nt, Human
ggagaaucacagg

SEQ ID NO: 3540690 - RNA, 15 nt, Human
ggagaaucacaggcu

SEQ ID NO: 3540691 - RNA, 17 nt, Human
ggagaaucacaggcugg

SEQ ID NO: 3540692 - RNA, 18 nt, Human
ggagaaucauguuucuuu

SEQ ID NO: 3540693 - RNA, 20 nt, Human
ggagaaucgcuugaacccag

SEQ ID NO: 3540694 - RNA, 17 nt, Human
ggagaaugcaccauacu

SEQ ID NO: 3540695 - RNA, 20 nt, Human
ggagaaugcaccauacucau

SEQ ID NO: 3540696 - RNA, 23 nt, Human
ggagacaaugcagaugccagagc

SEQ ID NO: 3540697 - RNA, 21 nt, Human
ggagacacauccagcaauugu

SEQ ID NO: 3540698 - RNA, 17 nt, Human
ggagacacuggccccuc

SEQ ID NO: 3540699 - RNA, 22 nt, Human
ggagacagagcaaccccuggac

SEQ ID NO: 3540700 - RNA, 14 nt, Human
ggagacagccccag

SEQ ID NO: 3540701 - RNA, 20 nt, Human
ggagacagccccagagcagg

SEQ ID NO: 3540702 - RNA, 12 nt, Human
ggagacaggcag

SEQ ID NO: 3540703 - RNA, 19 nt, Human
ggagacagguuagcugcuc

SEQ ID NO: 3540704 - RNA, 18 nt, Human
ggagacagugaucuccau

SEQ ID NO: 3540705 - RNA, 12 nt, Human
ggagaccaccag

SEQ ID NO: 3540706 - RNA, 18 nt, Human
ggagaccaugcagagcgc

SEQ ID NO: 3540707 - RNA, 19 nt, Human
ggagaccaugcagagcgcc

SEQ ID NO: 3540708 - RNA, 19 nt, Human
ggagacccaccccaccugc

SEQ ID NO: 3540709 - RNA, 20 nt, Human
ggagacccaccccaccugca

SEQ ID NO: 3540710 - RNA, 17 nt, Human
ggagaccccaccagccu

SEQ ID NO: 3540711 - RNA, 21 nt, Human
ggagaccccuuggggagcagg

SEQ ID NO: 3540712 - RNA, 16 nt, Human
ggagacccugcaaaca

SEQ ID NO: 3540713 - RNA, 21 nt, Human
ggagacccugcaaacagaaca

SEQ ID NO: 3540714 - RNA, 20 nt, Human
ggagaccggccugccaggag

SEQ ID NO: 3540715 - RNA, 21 nt, Human
ggagaccggccugccaggagg

SEQ ID NO: 3540716 - RNA, 12 nt, Human
ggagacgccaug

SEQ ID NO: 3540717 - RNA, 21 nt, Human
ggagacgguuuccagggaggg

SEQ ID NO: 3540718 - RNA, 16 nt, Human
ggagacuaagcccugu

SEQ ID NO: 3540719 - RNA, 19 nt, Human
ggagacuagauugccuuug

SEQ ID NO: 3540720 - RNA, 17 nt, Human
ggagacuaucagcccaa

SEQ ID NO: 3540721 - RNA, 9 nt, Human
ggagacuca

SEQ ID NO: 3540722 - RNA, 17 nt, Human
ggagacucaccucugcc

SEQ ID NO: 3540723 - RNA, 13 nt, Human
ggagacuccuagg

SEQ ID NO: 3540724 - RNA, 13 nt, Human
ggagacucugugg

SEQ ID NO: 3540725 - RNA, 16 nt, Human
ggagacucuguggggc

SEQ ID NO: 3540726 - RNA, 20 nt, Human
ggagacugcuccugagcccc

SEQ ID NO: 3540727 - RNA, 22 nt, Human
ggagacugcugagucaacccaa

SEQ ID NO: 3540728 - RNA, 14 nt, Human
ggagacugcuuccc

SEQ ID NO: 3540729 - RNA, 15 nt, Human
ggagacugcuuccca

SEQ ID NO: 3540730 - RNA, 18 nt, Human
ggagacugcuucccaucc

SEQ ID NO: 3540731 - RNA, 13 nt, Human
ggagacugggcug

SEQ ID NO: 3540732 - RNA, 20 nt, Human
ggagacugguccugugugca

SEQ ID NO: 3540733 - RNA, 20 nt, Human
ggagacugugugugcccucu

SEQ ID NO: 3540734 - RNA, 13 nt, Human
ggagagaaaaaag

SEQ ID NO: 3540735 - RNA, 15 nt, Human
ggagagaaaauauau

SEQ ID NO: 3540736 - RNA, 18 nt, Human
ggagagaaagugggugag

SEQ ID NO: 3540737 - RNA, 18 nt, Human
ggagagaccgagugaacc

SEQ ID NO: 3540738 - RNA, 15 nt, Human
ggagagacgggcccu

SEQ ID NO: 3540739 - RNA, 19 nt, Human
ggagagagacguguacaua

SEQ ID NO: 3540740 - RNA, 18 nt, Human
ggagagauagccuguggc

SEQ ID NO: 3540741 - RNA, 19 nt, Human
ggagagauagccuguggcc

SEQ ID NO: 3540742 - RNA, 12 nt, Human
ggagagcaggcu

SEQ ID NO: 3540743 - RNA, 22 nt, Human
ggagagccaccaagagggacgc

SEQ ID NO: 3540744 - RNA, 12 nt, Human
ggagagccagcc

SEQ ID NO: 3540745 - RNA, 14 nt, Human
ggagagccagcccu

SEQ ID NO: 3540746 - RNA, 23 nt, Human
ggagagccagcccucccuguccu

SEQ ID NO: 3540747 - RNA, 12 nt, Human
ggagagcccagg

SEQ ID NO: 3540748 - RNA, 22 nt, Human
ggagagcccaggagcuccccuc

SEQ ID NO: 3540749 - RNA, 12 nt, Human
ggagagcccugg

SEQ ID NO: 3540750 - RNA, 11 nt, Human
ggagagccugc

SEQ ID NO: 3540751 - RNA, 16 nt, Human
ggagagccugcuggca

SEQ ID NO: 3540752 - RNA, 20 nt, Human
ggagagcuagaacccggcag

SEQ ID NO: 3540753 - RNA, 18 nt, Human
ggagagcuagaaccugga

SEQ ID NO: 3540754 - RNA, 21 nt, Human
ggagagcuaggagcaaagccu

SEQ ID NO: 3540755 - RNA, 18 nt, Human
ggagagcuggagccuggu

SEQ ID NO: 3540756 - RNA, 15 nt, Human
ggagagcuggugccc

SEQ ID NO: 3540757 - RNA, 16 nt, Human
ggagagcuuagggucu

SEQ ID NO: 3540758 - RNA, 18 nt, Human
ggagagcuuagggucuca

SEQ ID NO: 3540759 - RNA, 20 nt, Human
ggagagcuuagggucucagg

SEQ ID NO: 3540760 - RNA, 17 nt, Human
ggagaggaaaaguaagg

SEQ ID NO: 3540761 - RNA, 17 nt, Human
ggagaggaacuccuugg

SEQ ID NO: 3540762 - RNA, 18 nt, Human
ggagcuggccccgccgcc

SEQ ID NO: 3540763 - RNA, 17 nt, Human
ggagcuggcgucugucu

SEQ ID NO: 3540764 - RNA, 21 nt, Human
ggagcugggacacuuaacaga

SEQ ID NO: 3540765 - RNA, 18 nt, Human
ggagcugggcagaaggcc

SEQ ID NO: 3540766 - RNA, 14 nt, Human
ggagcugggccugg

SEQ ID NO: 3540767 - RNA, 17 nt, Human
ggagcuggggaucccuc

SEQ ID NO: 3540768 - RNA, 20 nt, Human
ggagcuguucucugucguga

SEQ ID NO: 3540769 - RNA, 18 nt, Human
ggagcuuaagccacugcc

SEQ ID NO: 3540770 - RNA, 21 nt, Human
ggagcuucucugaugugauau

SEQ ID NO: 3540771 - RNA, 15 nt, Human
ggagcuucugggguc

SEQ ID NO: 3540772 - RNA, 20 nt, Human
ggagcuucuuguuuccuugu

SEQ ID NO: 3540773 - RNA, 19 nt, Human
ggagcuuugacucaggagc

SEQ ID NO: 3540774 - RNA, 21 nt, Human
ggagcuuuuuuccuuaaucca

SEQ ID NO: 3540775 - RNA, 12 nt, Human
ggaggaaagcaa

SEQ ID NO: 3540776 - RNA, 23 nt, Human
ggaggaaauuugaauggguccau

SEQ ID NO: 3540777 - RNA, 21 nt, Human
ggaggaagaagcuuaggcagg

SEQ ID NO: 3540778 - RNA, 14 nt, Human
ggaggaagcagaau

SEQ ID NO: 3540779 - RNA, 19 nt, Human
ggaggaaggaaacccagcu

SEQ ID NO: 3540780 - RNA, 13 nt, Human
ggaggaaggauug

SEQ ID NO: 3540781 - RNA, 23 nt, Human
ggaggaaucgaggaaccagagcc

SEQ ID NO: 3540782 - RNA, 17 nt, Human
ggaggaaugcuccccca

SEQ ID NO: 3540783 - RNA, 13 nt, Human
ggaggacaauuca

SEQ ID NO: 3540784 - RNA, 13 nt, Human
ggaggaccagggc

SEQ ID NO: 3540785 - RNA, 15 nt, Human
ggaggacccaggaca

SEQ ID NO: 3540786 - RNA, 22 nt, Human
ggaggaccugacccuacucccu

SEQ ID NO: 3540787 - RNA, 14 nt, Human
ggaggaccugagcc

SEQ ID NO: 3540788 - RNA, 15 nt, Human
ggaggaccugagccu

SEQ ID NO: 3540789 - RNA, 22 nt, Human
ggaggaccugagccugccgagc

SEQ ID NO: 3540790 - RNA, 14 nt, Human
ggaggaccugcccg

SEQ ID NO: 3540791 - RNA, 12 nt, Human
ggaggaccuggg

SEQ ID NO: 3540792 - RNA, 13 nt, Human
ggaggaccugggg

SEQ ID NO: 3540793 - RNA, 12 nt, Human
ggaggaccuuau

SEQ ID NO: 3540794 - RNA, 16 nt, Human
ggaggacgcucucugg

SEQ ID NO: 3540795 - RNA, 19 nt, Human
ggaggacgcucucuggccu

SEQ ID NO: 3540796 - RNA, 11 nt, Human
ggaggagagcc

SEQ ID NO: 3540797 - RNA, 14 nt, Human
ggaggagagccugg

SEQ ID NO: 3540798 - RNA, 12 nt, Human
ggaggagcaaag

SEQ ID NO: 3540799 - RNA, 17 nt, Human
ggaggagcaaaggcuga

SEQ ID NO: 3540800 - RNA, 17 nt, Human
ggaggagcagugcaggc

SEQ ID NO: 3540801 - RNA, 13 nt, Human
ggaggagcccagg

SEQ ID NO: 3540802 - RNA, 20 nt, Human
ggaggagcccaggccaggac

SEQ ID NO: 3540803 - RNA, 12 nt, Human
ggaggagccugu

SEQ ID NO: 3540804 - RNA, 13 nt, Human
ggaggagccuguc

SEQ ID NO: 3540805 - RNA, 20 nt, Human
ggaggaggacccuggaaaug

SEQ ID NO: 3540806 - RNA, 13 nt, Human
ggaggaggaggca

SEQ ID NO: 3540807 - RNA, 13 nt, Human
ggaggaggccacc

SEQ ID NO: 3540808 - RNA, 16 nt, Human
ggaggaggccaccucu

SEQ ID NO: 3540809 - RNA, 22 nt, Human
ggaggaggccaccucuccaagg

SEQ ID NO: 3540810 - RNA, 12 nt, Human
ggaggaggccug

SEQ ID NO: 3540811 - RNA, 22 nt, Human
ggaggaggccugggggcaggga

SEQ ID NO: 3540812 - RNA, 15 nt, Human
ggaggagggcaggca

SEQ ID NO: 3540813 - RNA, 20 nt, Human
ggaggagggucuagaggccu

SEQ ID NO: 3540814 - RNA, 18 nt, Human
ggaggaucaguuuuuugu

SEQ ID NO: 3540815 - RNA, 21 nt, Human
ggaggaucucuugagccuggg

SEQ ID NO: 3540816 - RNA, 20 nt, Human
ggaggaucuuuugaacccag

SEQ ID NO: 3540817 - RNA, 12 nt, Human
ggaggauggaga

SEQ ID NO: 3540818 - RNA, 20 nt, Human
ggaggaugucccugggccag

SEQ ID NO: 3540819 - RNA, 18 nt, Human
ggaggauguucugggaca

SEQ ID NO: 3540820 - RNA, 20 nt, Human
ggaggauugcuugagcccag

SEQ ID NO: 3540821 - RNA, 17 nt, Human
ggaggcaaagcuggcuc

SEQ ID NO: 3540822 - RNA, 21 nt, Human
ggaggcaaagcuggcucaccu

SEQ ID NO: 3540823 - RNA, 19 nt, Human
ggaggcaagagggguggag

SEQ ID NO: 3540824 - RNA, 16 nt, Human
ggaggcacacagcugc

SEQ ID NO: 3540825 - RNA, 21 nt, Human
ggaggcagaaagcagaggcug

SEQ ID NO: 3540826 - RNA, 19 nt, Human
ggaggcagagaagaaagaa

SEQ ID NO: 3540827 - RNA, 13 nt, Human
ggaggcagcagga

SEQ ID NO: 3540828 - RNA, 17 nt, Human
ggaggcaggaguuucgu

SEQ ID NO: 3540829 - RNA, 13 nt, Human
ggaggcaggggcu

SEQ ID NO: 3540830 - RNA, 17 nt, Human
ggaggcauggcccuggg

SEQ ID NO: 3540831 - RNA, 14 nt, Human
ggaggccaccucuc

SEQ ID NO: 3540832 - RNA, 12 nt, Human
ggaggccagcca

SEQ ID NO: 3540833 - RNA, 12 nt, Human
ggaggccagccu

SEQ ID NO: 3540834 - RNA, 23 nt, Human
ggaggccaggccggcgagcccug

SEQ ID NO: 3540835 - RNA, 17 nt, Human
ggaggccauugugugag

SEQ ID NO: 3540836 - RNA, 22 nt, Human
ggaggcccaggcugggaacuca

SEQ ID NO: 3540837 - RNA, 19 nt, Human
ggaggcccaguucacccug

SEQ ID NO: 3540838 - RNA, 22 nt, Human
ggaggccccaacccuguccucc

SEQ ID NO: 3540839 - RNA, 16 nt, Human
ggaggccccacugaug

SEQ ID NO: 3540840 - RNA, 17 nt, Human
ggaggccccacugggga

SEQ ID NO: 3540841 - RNA, 16 nt, Human
ggaggccccuggccca

SEQ ID NO: 3540842 - RNA, 17 nt, Human
ggaggcccguccggcag

SEQ ID NO: 3540843 - RNA, 16 nt, Human
uccggaaugccaccca

SEQ ID NO: 3540844 - RNA, 15 nt, Human
uccggacacuccuag

SEQ ID NO: 3540845 - RNA, 18 nt, Human
uccggacacuccuagaga

SEQ ID NO: 3540846 - RNA, 14 nt, Human
uccggacuggugcc

SEQ ID NO: 3540847 - RNA, 21 nt, Human
uccggagugagaagcuuugcc

SEQ ID NO: 3540848 - RNA, 17 nt, Human
uccggauuggcuugugu

SEQ ID NO: 3540849 - RNA, 13 nt, Human
uccggcauggaca

SEQ ID NO: 3540850 - RNA, 19 nt, Human
uccggccaggugccuccug

SEQ ID NO: 3540851 - RNA, 23 nt, Human
uccggcccuccuacccugcgccc

SEQ ID NO: 3540852 - RNA, 16 nt, Human
uccggccucuccagcc

SEQ ID NO: 3540853 - RNA, 17 nt, Human
uccggcgucagccucca

SEQ ID NO: 3540854 - RNA, 18 nt, Human
uccggcgucagccuccag

SEQ ID NO: 3540855 - RNA, 21 nt, Human
uccggcgucagccuccagccu

SEQ ID NO: 3540856 - RNA, 17 nt, Human
uccggcuaagcaggcgc

SEQ ID NO: 3540857 - RNA, 18 nt, Human
uccggcucccagccucag

SEQ ID NO: 3540858 - RNA, 21 nt, Human
uccggcucccagccucagcgc

SEQ ID NO: 3540859 - RNA, 14 nt, Human
uccggcuccugugc

SEQ ID NO: 3540860 - RNA, 17 nt, Human
uccggcuccugugcuuu

SEQ ID NO: 3540861 - RNA, 21 nt, Human
uccggcuugaccuguuucucu

SEQ ID NO: 3540862 - RNA, 13 nt, Human
uccgggaccccca

SEQ ID NO: 3540863 - RNA, 21 nt, Human
uccgggaccuggugcugccuc

SEQ ID NO: 3540864 - RNA, 19 nt, Human
uccgggcaaaugccagggc

SEQ ID NO: 3540865 - RNA, 20 nt, Human
uccgggcaaaugccagggcc

SEQ ID NO: 3540866 - RNA, 16 nt, Human
uccggggagcgcccgc

SEQ ID NO: 3540867 - RNA, 14 nt, Human
uccgggucuuccua

SEQ ID NO: 3540868 - RNA, 15 nt, Human
uccgguuuacuuuaa

SEQ ID NO: 3540869 - RNA, 14 nt, Human
uccgguuugccaug

SEQ ID NO: 3540870 - RNA, 16 nt, Human
uccgucaaaacagauu

SEQ ID NO: 3540871 - RNA, 18 nt, Human
uccgucaacguuguacug

SEQ ID NO: 3540872 - RNA, 15 nt, Human
uccgucacuaccugg

SEQ ID NO: 3540873 - RNA, 18 nt, Human
uccgucacuaccuggcug

SEQ ID NO: 3540874 - RNA, 18 nt, Human
uccguccccugcccaugc

SEQ ID NO: 3540875 - RNA, 15 nt, Human
uccgugagcagugug

SEQ ID NO: 3540876 - RNA, 23 nt, Human
uccgugagcagugugucuccugc

SEQ ID NO: 3540877 - RNA, 21 nt, Human
uccgugccuccaccaccacug

SEQ ID NO: 3540878 - RNA, 16 nt, Human
uccgugccucuuuuua

SEQ ID NO: 3540879 - RNA, 16 nt, Human
uccgugcuaaggacuu

SEQ ID NO: 3540880 - RNA, 17 nt, Human
uccgugcuaaggacuug

SEQ ID NO: 3540881 - RNA, 18 nt, Human
uccgugcuaaggacuugu

SEQ ID NO: 3540882 - RNA, 23 nt, Human
uccgugcuaaggacuuguuagau

SEQ ID NO: 3540883 - RNA, 13 nt, Human
uccgugcugacag

SEQ ID NO: 3540884 - RNA, 19 nt, Human
uccgugcugacagcugcuc

SEQ ID NO: 3540885 - RNA, 21 nt, Human
uccgugcugacagcugcuccu

SEQ ID NO: 3540886 - RNA, 23 nt, Human
uccgugggacggugcccaagcca

SEQ ID NO: 3540887 - RNA, 21 nt, Human
uccguggguugcuaacugaac

SEQ ID NO: 3540888 - RNA, 18 nt, Human
uccgugucaccgccaccc

SEQ ID NO: 3540889 - RNA, 15 nt, Human
uccguguccaccccc

SEQ ID NO: 3540890 - RNA, 17 nt, Human
uccguguggauccaaug

SEQ ID NO: 3540891 - RNA, 22 nt, Human
uccguguugcagguucauggau

SEQ ID NO: 3540892 - RNA, 15 nt, Human
uccguuagcuccugu

SEQ ID NO: 3540893 - RNA, 19 nt, Human
uccguuagcuccuguggcc

SEQ ID NO: 3540894 - RNA, 13 nt, Human
uccguuggccacu

SEQ ID NO: 3540895 - RNA, 22 nt, Human
uccguugggccccagccuucuu

SEQ ID NO: 3540896 - RNA, 19 nt, Human
uccguuuccagguguuuau

SEQ ID NO: 3540897 - RNA, 15 nt, Human
uccuaaaacaaauag

SEQ ID NO: 3540898 - RNA, 12 nt, Human
uccuaaaacaac

SEQ ID NO: 3540899 - RNA, 14 nt, Human
uccuaaaagcaaaa

SEQ ID NO: 3540900 - RNA, 23 nt, Human
uccuaaaagcaaaauaaaaacua

SEQ ID NO: 3540901 - RNA, 15 nt, Human
uccuaaaaggcccag

SEQ ID NO: 3540902 - RNA, 13 nt, Human
uccuaaaaguuca

SEQ ID NO: 3540903 - RNA, 17 nt, Human
uccuaaaauaagggcag

SEQ ID NO: 3540904 - RNA, 17 nt, Human
uccuaaaauuauggaaa

SEQ ID NO: 3540905 - RNA, 18 nt, Human
uccuaaagagaguauuuu

SEQ ID NO: 3540906 - RNA, 14 nt, Human
uccuaaauauuaug

SEQ ID NO: 3540907 - RNA, 14 nt, Human
ucuccacugccuuc

SEQ ID NO: 3540908 - RNA, 12 nt, Human
ucuccacugugc

SEQ ID NO: 3540909 - RNA, 19 nt, Human
ucuccacugugccuuugca

SEQ ID NO: 3540910 - RNA, 14 nt, Human
ucuccacuuucagc

SEQ ID NO: 3540911 - RNA, 18 nt, Human
ucuccacuuucagcuguc

SEQ ID NO: 3540912 - RNA, 18 nt, Human
ucuccagaaagccccacc

SEQ ID NO: 3540913 - RNA, 19 nt, Human
ucuccagacccccaccccu

SEQ ID NO: 3540914 - RNA, 17 nt, Human
ucuccagaggccaagga

SEQ ID NO: 3540915 - RNA, 14 nt, Human
ucuccagauuuuua

SEQ ID NO: 3540916 - RNA, 11 nt, Human
ucuccagcagg

SEQ ID NO: 3540917 - RNA, 14 nt, Human
ucuccagcaggccc

SEQ ID NO: 3540918 - RNA, 15 nt, Human
ucuccagccagcaau

SEQ ID NO: 3540919 - RNA, 14 nt, Human
ucuccagccccugg

SEQ ID NO: 3540920 - RNA, 15 nt, Human
ucuccagccccugga

SEQ ID NO: 3540921 - RNA, 16 nt, Human
ucuccagccccuggau

SEQ ID NO: 3540922 - RNA, 18 nt, Human
ucuccagccccuggaugc

SEQ ID NO: 3540923 - RNA, 19 nt, Human
ucuccagccucagccuccc

SEQ ID NO: 3540924 - RNA, 19 nt, Human
ucuccagccuggaccccca

SEQ ID NO: 3540925 - RNA, 21 nt, Human
ucuccagccuggacccccagc

SEQ ID NO: 3540926 - RNA, 20 nt, Human
ucuccagcucagaacccagg

SEQ ID NO: 3540927 - RNA, 21 nt, Human
ucuccagcucagaacccaggg

SEQ ID NO: 3540928 - RNA, 23 nt, Human
ucuccagcucagaacccagggcu

SEQ ID NO: 3540929 - RNA, 15 nt, Human
ucuccagcugacuaa

SEQ ID NO: 3540930 - RNA, 13 nt, Human
ucuccagcugcug

SEQ ID NO: 3540931 - RNA, 23 nt, Human
ucuccaggcacccuucuuuccuc

SEQ ID NO: 3540932 - RNA, 15 nt, Human
ucuccaggcaggucu

SEQ ID NO: 3540933 - RNA, 15 nt, Human
ucuccaggcgccggc

SEQ ID NO: 3540934 - RNA, 11 nt, Human
ucuccaggcug

SEQ ID NO: 3540935 - RNA, 16 nt, Human
ucuccagggguuuaca

SEQ ID NO: 3540936 - RNA, 19 nt, Human
ucuccagggguuuacagug

SEQ ID NO: 3540937 - RNA, 21 nt, Human
ucuccagggucagaaacagga

SEQ ID NO: 3540938 - RNA, 19 nt, Human
ucuccaggucucacgggca

SEQ ID NO: 3540939 - RNA, 19 nt, Human
ucuccaguauccacuuugc

SEQ ID NO: 3540940 - RNA, 17 nt, Human
ucuccagucuuccaccu

SEQ ID NO: 3540941 - RNA, 21 nt, Human
ucuccagugcuguccaugcuu

SEQ ID NO: 3540942 - RNA, 18 nt, Human
ucuccaguggauucccag

SEQ ID NO: 3540943 - RNA, 18 nt, Human
ucuccagugguugcuguu

SEQ ID NO: 3540944 - RNA, 15 nt, Human
ucuccaguuuucagu

SEQ ID NO: 3540945 - RNA, 17 nt, Human
ucuccauaaccccaccc

SEQ ID NO: 3540946 - RNA, 20 nt, Human
ucuccauaaccccacccuug

SEQ ID NO: 3540947 - RNA, 17 nt, Human
ucuccaucagcuguaag

SEQ ID NO: 3540948 - RNA, 17 nt, Human
ucuccauccuuucugcc

SEQ ID NO: 3540949 - RNA, 19 nt, Human
ucuccauccuuucugccuc

SEQ ID NO: 3540950 - RNA, 18 nt, Human
ucuccaucuucagcuucu

SEQ ID NO: 3540951 - RNA, 20 nt, Human
ucuccauggcuuccuccucc

SEQ ID NO: 3540952 - RNA, 19 nt, Human
ucucccaaggcugcgucug

SEQ ID NO: 3540953 - RNA, 16 nt, Human
ucucccacccucuucc

SEQ ID NO: 3540954 - RNA, 19 nt, Human
ucucccacccucuuccuac

SEQ ID NO: 3540955 - RNA, 20 nt, Human
ucucccacccucuuccuacu

SEQ ID NO: 3540956 - RNA, 18 nt, Human
ucucccacuccagcgcug

SEQ ID NO: 3540957 - RNA, 14 nt, Human
ucucccacucuccu

SEQ ID NO: 3540958 - RNA, 15 nt, Human
ucucccacucuccua

SEQ ID NO: 3540959 - RNA, 15 nt, Human
ucucccagaauccca

SEQ ID NO: 3540960 - RNA, 17 nt, Human
ucucccagaaucccagc

SEQ ID NO: 3540961 - RNA, 19 nt, Human
ucucccagaaucccagccg

SEQ ID NO: 3540962 - RNA, 16 nt, Human
ucucccagauaaugug

SEQ ID NO: 3540963 - RNA, 19 nt, Human
ucucccaggcaaggcugug

SEQ ID NO: 3540964 - RNA, 20 nt, Human
ucucccaggcaaggcugugg

SEQ ID NO: 3540965 - RNA, 12 nt, Human
ucucccaggccc

SEQ ID NO: 3540966 - RNA, 20 nt, Human
ucucccaggccccaugaccu

SEQ ID NO: 3540967 - RNA, 21 nt, Human
ucucccaggccccaugaccuc

SEQ ID NO: 3540968 - RNA, 23 nt, Human
ucucccaggccccaugaccucca

SEQ ID NO: 3540969 - RNA, 23 nt, Human
ucucccauccagugucucacagc

SEQ ID NO: 3540970 - RNA, 17 nt, Human
ucucccaucccccugcc

SEQ ID NO: 3540971 - RNA, 19 nt, Human
ucucccaucccccugcccu

SEQ ID NO: 3540972 - RNA, 20 nt, Human
ucucccaucccccugcccuc

SEQ ID NO: 3540973 - RNA, 13 nt, Human
ucucccauggagc

SEQ ID NO: 3540974 - RNA, 21 nt, Human
ucucccauggagccccagccc

SEQ ID NO: 3540975 - RNA, 23 nt, Human
ucucccauuuuggaauuugccug

SEQ ID NO: 3540976 - RNA, 20 nt, Human
ucuccccaacccccauucuc

SEQ ID NO: 3540977 - RNA, 22 nt, Human
ucuccccacacuaaccuggguu

SEQ ID NO: 3540978 - RNA, 20 nt, Human
ucuccccacgagggcuggcu

SEQ ID NO: 3540979 - RNA, 23 nt, Human
ucuccccagcaagugagagcugg

SEQ ID NO: 3540980 - RNA, 14 nt, Human
ucuccccagcuccc

SEQ ID NO: 3540981 - RNA, 19 nt, Human
ucuccccagguccagcucu

SEQ ID NO: 3540982 - RNA, 15 nt, Human
ucucccccacccccu

SEQ ID NO: 3540983 - RNA, 19 nt, Human
ucucccccacccccucccc

SEQ ID NO: 3540984 - RNA, 20 nt, Human
ucucccccacccccuccccg

SEQ ID NO: 3540985 - RNA, 14 nt, Human
ucucccccagcccc

SEQ ID NO: 3540986 - RNA, 18 nt, Human
ucucccccagccccaucc

SEQ ID NO: 3540987 - RNA, 20 nt, Human
ucucccccagccccauccuc

SEQ ID NO: 3540988 - RNA, 22 nt, Human
ucucccccagccccauccucug

SEQ ID NO: 3540989 - RNA, 14 nt, Human
ucucccccauccua

SEQ ID NO: 3540990 - RNA, 20 nt, Human
ucucccccccggggcugggu

SEQ ID NO: 3540991 - RNA, 13 nt, Human
ucucccccugggc

SEQ ID NO: 3540992 - RNA, 14 nt, Human
ucucccccugggcu

SEQ ID NO: 3540993 - RNA, 20 nt, Human
ucucccccugggcucugccc

SEQ ID NO: 3540994 - RNA, 19 nt, Human
ucuccccgcuaaggaagau

SEQ ID NO: 3540995 - RNA, 11 nt, Human
ucuccccucaa

SEQ ID NO: 3540996 - RNA, 16 nt, Human
ucuccccucaaagucu

SEQ ID NO: 3540997 - RNA, 14 nt, Human
ucuccccucagcuc

SEQ ID NO: 3540998 - RNA, 12 nt, Human
ucuccccuccag

SEQ ID NO: 3540999 - RNA, 15 nt, Human
ucuccccuccagccu

SEQ ID NO: 3541000 - RNA, 12 nt, Human
ucuccccucugc

SEQ ID NO: 3541001 - RNA, 15 nt, Human
ucuccccucuuaugu

SEQ ID NO: 3541002 - RNA, 13 nt, Human
ucuccccugcacu

SEQ ID NO: 3541003 - RNA, 14 nt, Human
ucuccccugcacug

SEQ ID NO: 3541004 - RNA, 17 nt, Human
ucuccccugcacuguaa

SEQ ID NO: 3541005 - RNA, 14 nt, Human
ucuccccugccccc

SEQ ID NO: 3541006 - RNA, 20 nt, Human
ucuccccugcccccaggacu

SEQ ID NO: 3541007 - RNA, 14 nt, Human
ucuccccugcccug

SEQ ID NO: 3541008 - RNA, 16 nt, Human
ucucccgggacucugc

SEQ ID NO: 3541009 - RNA, 20 nt, Human
ucucccgucagggcccaagu

SEQ ID NO: 3541010 - RNA, 15 nt, Human
ucucccuagcuccuc

SEQ ID NO: 3541011 - RNA, 18 nt, Human
ucucccucuccugccuac

SEQ ID NO: 3541012 - RNA, 16 nt, Human
ucucccucuggaucaa

SEQ ID NO: 3541013 - RNA, 19 nt, Human
ucucccucuggcccugccu

SEQ ID NO: 3541014 - RNA, 20 nt, Human
ucucccucuggcccugccuu

SEQ ID NO: 3541015 - RNA, 15 nt, Human
ucucccucuucucaa

SEQ ID NO: 3541016 - RNA, 22 nt, Human
ucucccucuucucaagugccuu

SEQ ID NO: 3541017 - RNA, 10 nt, Human
ucucccugga

SEQ ID NO: 3541018 - RNA, 22 nt, Human
ucucccuggaucuaccuggagg

SEQ ID NO: 3541019 - RNA, 15 nt, Human
ucucccuucccuccu

SEQ ID NO: 3541020 - RNA, 16 nt, Human
ucucccuucccuccuc

SEQ ID NO: 3541021 - RNA, 18 nt, Human
ucucccuucucccaugag

SEQ ID NO: 3541022 - RNA, 11 nt, Human
ucucccuugga

SEQ ID NO: 3541023 - RNA, 16 nt, Human
ucucccuugggcucug

SEQ ID NO: 3541024 - RNA, 15 nt, Human
ucucccuuucccuuc

SEQ ID NO: 3541025 - RNA, 13 nt, Human
ucuccgccagccu

SEQ ID NO: 3541026 - RNA, 15 nt, Human
ucuccgccagccucc

SEQ ID NO: 3541027 - RNA, 21 nt, Human
ucuccgccagccuccucugga

SEQ ID NO: 3541028 - RNA, 16 nt, Human
ucuccgccccugagcc

SEQ ID NO: 3541029 - RNA, 17 nt, Human
ucuccggcucccagccu

SEQ ID NO: 3541030 - RNA, 17 nt, Human
ucuccguuagcuccugu

SEQ ID NO: 3541031 - RNA, 19 nt, Human
ucuccguuagcuccugugg

SEQ ID NO: 3541032 - RNA, 20 nt, Human
ucuccguuagcuccuguggc

SEQ ID NO: 3541033 - RNA, 20 nt, Human
ucuccguuuauuauaaacug

SEQ ID NO: 3541034 - RNA, 23 nt, Human
ucuccuaagcaccuguaaugugc

SEQ ID NO: 3541035 - RNA, 19 nt, Human
ucuccuaagcuggagugca

SEQ ID NO: 3541036 - RNA, 20 nt, Human
ucuccuacauaucccuucca

SEQ ID NO: 3541037 - RNA, 20 nt, Human
ucuccuagagacagaagcag

SEQ ID NO: 3541038 - RNA, 19 nt, Human
ucuccuaggcauucuggac

SEQ ID NO: 3541039 - RNA, 23 nt, Human
ucuccuaggcauucuggaccucu

SEQ ID NO: 3541040 - RNA, 18 nt, Human
ucuccuauauauuucuau

SEQ ID NO: 3541041 - RNA, 22 nt, Human
ucuccuauauauuucuauuauu

SEQ ID NO: 3541042 - RNA, 12 nt, Human
ucuccuauuuuu

SEQ ID NO: 3541043 - RNA, 13 nt, Human
ucuccuauuuuuu

SEQ ID NO: 3541044 - RNA, 15 nt, Human
ucuccucacuguauc

SEQ ID NO: 3541045 - RNA, 13 nt, Human
ucuccucagccuc

SEQ ID NO: 3541046 - RNA, 14 nt, Human
ucuccucaucucua

SEQ ID NO: 3541047 - RNA, 15 nt, Human
ucuccucaucucuaa

SEQ ID NO: 3541048 - RNA, 19 nt, Human
ucuccuccaagacacugug

SEQ ID NO: 3541049 - RNA, 16 nt, Human
ucuccuccaugggaga

SEQ ID NO: 3541050 - RNA, 12 nt, Human
ucuccuccccaa

SEQ ID NO: 3541051 - RNA, 18 nt, Human
ucuccuccccacccgccc

SEQ ID NO: 3541052 - RNA, 14 nt, Human
uccuugcuacccag

SEQ ID NO: 3541053 - RNA, 21 nt, Human
uccuugcuccuggccuugcug

SEQ ID NO: 3541054 - RNA, 14 nt, Human
uccuugcucucccu

SEQ ID NO: 3541055 - RNA, 19 nt, Human
uccuugcucucccucuucu

SEQ ID NO: 3541056 - RNA, 17 nt, Human
uccuugcuguccuaggc

SEQ ID NO: 3541057 - RNA, 22 nt, Human
uccuuggaaaucaaauguaaag

SEQ ID NO: 3541058 - RNA, 21 nt, Human
uccuuggagaaaugaaaacag

SEQ ID NO: 3541059 - RNA, 19 nt, Human
uccuuggauaggcuuuuua

SEQ ID NO: 3541060 - RNA, 12 nt, Human
uccuuggcacca

SEQ ID NO: 3541061 - RNA, 15 nt, Human
uccuuggcaccaaag

SEQ ID NO: 3541062 - RNA, 16 nt, Human
uccuuggcaccaaaga

SEQ ID NO: 3541063 - RNA, 18 nt, Human
uccuuggcaugccuucca

SEQ ID NO: 3541064 - RNA, 23 nt, Human
uccuuggccugcuaaggucuugg

SEQ ID NO: 3541065 - RNA, 20 nt, Human
uccuuggcucccauucacuc

SEQ ID NO: 3541066 - RNA, 15 nt, Human
uccuuggcuggugca

SEQ ID NO: 3541067 - RNA, 20 nt, Human
uccuuggcuuaccugaccuc

SEQ ID NO: 3541068 - RNA, 15 nt, Human
uccuugggaggaagc

SEQ ID NO: 3541069 - RNA, 17 nt, Human
uccuugggaggaagcag

SEQ ID NO: 3541070 - RNA, 18 nt, Human
uccuugggaggaagcaga

SEQ ID NO: 3541071 - RNA, 21 nt, Human
uccuugggaggccccacuggg

SEQ ID NO: 3541072 - RNA, 17 nt, Human
uccuugggcacuuuuua

SEQ ID NO: 3541073 - RNA, 23 nt, Human
uccuuggucuuuguaucuuccau

SEQ ID NO: 3541074 - RNA, 21 nt, Human
uccuuggugucgggcaugaca

SEQ ID NO: 3541075 - RNA, 21 nt, Human
uccuuggugugacccucugaa

SEQ ID NO: 3541076 - RNA, 15 nt, Human
uccuuguagccuuuu

SEQ ID NO: 3541077 - RNA, 13 nt, Human
ggcagaggccugg

SEQ ID NO: 3541078 - RNA, 13 nt, Human
ggcagaggcugga

SEQ ID NO: 3541079 - RNA, 21 nt, Human
ggcagaggcuggaggcagggc

SEQ ID NO: 3541080 - RNA, 22 nt, Human
ggcagaggcuggaggcagggcc

SEQ ID NO: 3541081 - RNA, 23 nt, Human
ggcagaggcuggaggcagggccu

SEQ ID NO: 3541082 - RNA, 14 nt, Human
ggcagagggcagag

SEQ ID NO: 3541083 - RNA, 20 nt, Human
ggcagagggcuggaggccca

SEQ ID NO: 3541084 - RNA, 18 nt, Human
ggcagaguuacaguucug

SEQ ID NO: 3541085 - RNA, 19 nt, Human
ggcagaguuacaguucugu

SEQ ID NO: 3541086 - RNA, 17 nt, Human
ggcagaguugaagacag

SEQ ID NO: 3541087 - RNA, 23 nt, Human
ggcagaguugaagacagagcuac

SEQ ID NO: 3541088 - RNA, 17 nt, Human
ggcagaguuguaaauau

SEQ ID NO: 3541089 - RNA, 22 nt, Human
ggcagaguuguaaauauauaaa

SEQ ID NO: 3541090 - RNA, 18 nt, Human
ggcagauaaucagccucu

SEQ ID NO: 3541091 - RNA, 23 nt, Human
ggcagauacaggaaaagcugcug

SEQ ID NO: 3541092 - RNA, 18 nt, Human
ggcagaucaccagagguc

SEQ ID NO: 3541093 - RNA, 20 nt, Human
ggcagaucugugccccaugc

SEQ ID NO: 3541094 - RNA, 18 nt, Human
ggcagaugcagcucuucc

SEQ ID NO: 3541095 - RNA, 20 nt, Human
ggcagaugcagcucuuccug

SEQ ID NO: 3541096 - RNA, 20 nt, Human
ggcagauguaggagggacug

SEQ ID NO: 3541097 - RNA, 16 nt, Human
ggcagauuuuacaaaa

SEQ ID NO: 3541098 - RNA, 21 nt, Human
ggcagauuuuacagagcgcac

SEQ ID NO: 3541099 - RNA, 13 nt, Human
ggcagcaaggccc

SEQ ID NO: 3541100 - RNA, 18 nt, Human
ggcagcaaggcccgagca

SEQ ID NO: 3541101 - RNA, 20 nt, Human
ggcagcaaggcccgagcagc

SEQ ID NO: 3541102 - RNA, 21 nt, Human
ggcagcaaggcccgagcagcu

SEQ ID NO: 3541103 - RNA, 21 nt, Human
ggcagcacagagacccccgga

SEQ ID NO: 3541104 - RNA, 13 nt, Human
ggcagcacccagg

SEQ ID NO: 3541105 - RNA, 12 nt, Human
ggcagcaccgcc

SEQ ID NO: 3541106 - RNA, 10 nt, Human
ggcagcagau

SEQ ID NO: 3541107 - RNA, 15 nt, Human
ggcagcagcagcccu

SEQ ID NO: 3541108 - RNA, 17 nt, Human
ggcagcagcagcccugc

SEQ ID NO: 3541109 - RNA, 17 nt, Human
ggcagcagccagcccug

SEQ ID NO: 3541110 - RNA, 19 nt, Human
ggcagcagccagcccugcc

SEQ ID NO: 3541111 - RNA, 20 nt, Human
ggcagcagccagcccugccu

SEQ ID NO: 3541112 - RNA, 21 nt, Human
ggcagcagccagcccugccug

SEQ ID NO: 3541113 - RNA, 12 nt, Human
ggcagcagccau

SEQ ID NO: 3541114 - RNA, 17 nt, Human
ggcagcauagcaagaca

SEQ ID NO: 3541115 - RNA, 19 nt, Human
ggcagcauagcaagacaca

SEQ ID NO: 3541116 - RNA, 16 nt, Human
ggcagccaaacccaug

SEQ ID NO: 3541117 - RNA, 19 nt, Human
ggcagccaaacccaugagg

SEQ ID NO: 3541118 - RNA, 20 nt, Human
ggcagccaaacccaugaggc

SEQ ID NO: 3541119 - RNA, 20 nt, Human
ggcagccagggagagcccag

SEQ ID NO: 3541120 - RNA, 21 nt, Human
ggcagccagggagagcccagg

SEQ ID NO: 3541121 - RNA, 15 nt, Human
ggcagccagugcccu

SEQ ID NO: 3541122 - RNA, 21 nt, Human
ggcagcccagagacuuuguag

SEQ ID NO: 3541123 - RNA, 13 nt, Human
ggcagcccagcca

SEQ ID NO: 3541124 - RNA, 15 nt, Human
ggcagccccagccug

SEQ ID NO: 3541125 - RNA, 18 nt, Human
ggcagccccagccugcua

SEQ ID NO: 3541126 - RNA, 18 nt, Human
ggcagccccaggccaaag

SEQ ID NO: 3541127 - RNA, 22 nt, Human
ggcagccccuguucuggcagag

SEQ ID NO: 3541128 - RNA, 21 nt, Human
ggcagcccuugcuuguuggga

SEQ ID NO: 3541129 - RNA, 19 nt, Human
ggcagccgugccuucagcu

SEQ ID NO: 3541130 - RNA, 22 nt, Human
ggcagccgugggccccacccuc

SEQ ID NO: 3541131 - RNA, 19 nt, Human
ggcagccuacuagggaccu

SEQ ID NO: 3541132 - RNA, 22 nt, Human
ggcagccucccauccagggccc

SEQ ID NO: 3541133 - RNA, 12 nt, Human
ggcagccucugu

SEQ ID NO: 3541134 - RNA, 20 nt, Human
ggcagccucugucaggccuu

SEQ ID NO: 3541135 - RNA, 14 nt, Human
ggcagccugccugg

SEQ ID NO: 3541136 - RNA, 23 nt, Human
ggcagccugccuugcccacuccu

SEQ ID NO: 3541137 - RNA, 19 nt, Human
ggcagccugcguggcugac

SEQ ID NO: 3541138 - RNA, 22 nt, Human
ggcagccugcguggcugacccc

SEQ ID NO: 3541139 - RNA, 18 nt, Human
ggcagcgccaagcaaccu

SEQ ID NO: 3541140 - RNA, 14 nt, Human
ggcagcgccaggcu

SEQ ID NO: 3541141 - RNA, 21 nt, Human
ggcagcgccaggcugaccaca

SEQ ID NO: 3541142 - RNA, 22 nt, Human
ggcagcgccaggcugaccacag

SEQ ID NO: 3541143 - RNA, 16 nt, Human
ggcagcgcccuuccuc

SEQ ID NO: 3541144 - RNA, 17 nt, Human
ggcagcgcccuuccucu

SEQ ID NO: 3541145 - RNA, 15 nt, Human
ggcagcuauaggaaa

SEQ ID NO: 3541146 - RNA, 21 nt, Human
ggcagcucaccucucccuugg

SEQ ID NO: 3541147 - RNA, 16 nt, Human
ggcagcucuccaguca

SEQ ID NO: 3541148 - RNA, 21 nt, Human
ggcagcugaacuauuggaggg

SEQ ID NO: 3541149 - RNA, 11 nt, Human
ggcagcugccu

SEQ ID NO: 3541150 - RNA, 21 nt, Human
ggcagcugccuccccuccucu

SEQ ID NO: 3541151 - RNA, 22 nt, Human
ggcagcugccuccccuccucug

SEQ ID NO: 3541152 - RNA, 12 nt, Human
ggcagcugggcc

SEQ ID NO: 3541153 - RNA, 13 nt, Human
ggcagcugggccc

SEQ ID NO: 3541154 - RNA, 15 nt, Human
ggcagcuuagggccc

SEQ ID NO: 3541155 - RNA, 20 nt, Human
ggcagcuucugcccccugca

SEQ ID NO: 3541156 - RNA, 23 nt, Human
ggcagcuucugcccccugcagaa

SEQ ID NO: 3541157 - RNA, 19 nt, Human
ggcaggaccagcccacgcu

SEQ ID NO: 3541158 - RNA, 23 nt, Human
ggcaggaccuucgggcugugccc

SEQ ID NO: 3541159 - RNA, 15 nt, Human
ggcaggagcucagau

SEQ ID NO: 3541160 - RNA, 14 nt, Human
ggcaggagggcccu

SEQ ID NO: 3541161 - RNA, 17 nt, Human
ggcaggaguagcugagc

SEQ ID NO: 3541162 - RNA, 15 nt, Human
ggcaggauuggggaa

SEQ ID NO: 3541163 - RNA, 20 nt, Human
ggcaggcagaggcccaggcu

SEQ ID NO: 3541164 - RNA, 15 nt, Human
ggcaggcagcgccaa

SEQ ID NO: 3541165 - RNA, 11 nt, Human
ggcaggcaggg

SEQ ID NO: 3541166 - RNA, 14 nt, Human
ggcaggcagggcuc

SEQ ID NO: 3541167 - RNA, 16 nt, Human
ggcaggcauggcccug

SEQ ID NO: 3541168 - RNA, 18 nt, Human
ggcaggcauggcccuggg

SEQ ID NO: 3541169 - RNA, 20 nt, Human
ggcaggcauggcccugggcg

SEQ ID NO: 3541170 - RNA, 18 nt, Human
ggcaggccaccuggcucu

SEQ ID NO: 3541171 - RNA, 12 nt, Human
ggcaggcccugc

SEQ ID NO: 3541172 - RNA, 13 nt, Human
ggcaggcccugca

SEQ ID NO: 3541173 - RNA, 21 nt, Human
ggcaggcccugcacuguccug

SEQ ID NO: 3541174 - RNA, 14 nt, Human
ggcaggcccugcag

SEQ ID NO: 3541175 - RNA, 16 nt, Human
ggcaggcccugcagug

SEQ ID NO: 3541176 - RNA, 21 nt, Human
ggcaggcuaaggcguggagcu

SEQ ID NO: 3541177 - RNA, 22 nt, Human
ggcaggcucacugccaggccag

SEQ ID NO: 3541178 - RNA, 17 nt, Human
ggcaggcuggccagucc

SEQ ID NO: 3541179 - RNA, 15 nt, Human
ggcaggcugggccau

SEQ ID NO: 3541180 - RNA, 22 nt, Human
ggcaggcugggccauguccaaa

SEQ ID NO: 3541181 - RNA, 17 nt, Human
ggcagggaacaugggga

SEQ ID NO: 3541182 - RNA, 20 nt, Human
ggcagggaacauggggagga

SEQ ID NO: 3541183 - RNA, 20 nt, Human
ggcagggaagaggggugcag

SEQ ID NO: 3541184 - RNA, 14 nt, Human
ggcagggaccacac

SEQ ID NO: 3541185 - RNA, 16 nt, Human
ggcagggaggcagccg

SEQ ID NO: 3541186 - RNA, 13 nt, Human
ggcagggagggga

SEQ ID NO: 3541187 - RNA, 23 nt, Human
ggcagggcaaaugacaugcacug

SEQ ID NO: 3541188 - RNA, 19 nt, Human
ggcagggcacagggccugg

SEQ ID NO: 3541189 - RNA, 22 nt, Human
ggcagggcacagggccuggccc

SEQ ID NO: 3541190 - RNA, 15 nt, Human
ggcagggcaucuccu

SEQ ID NO: 3541191 - RNA, 17 nt, Human
ggcagggccagggggug

SEQ ID NO: 3541192 - RNA, 22 nt, Human
ggcagggcgggcagagggcugg

SEQ ID NO: 3541193 - RNA, 23 nt, Human
ggcagggcgggcagagggcugga

SEQ ID NO: 3541194 - RNA, 17 nt, Human
ggcagggcucuccuggc

SEQ ID NO: 3541195 - RNA, 17 nt, Human
ggcccagcauugcuggu

SEQ ID NO: 3541196 - RNA, 16 nt, Human
ggcccagcccccacag

SEQ ID NO: 3541197 - RNA, 14 nt, Human
ggcccagccccuag

SEQ ID NO: 3541198 - RNA, 24 nt, Human
ggcccagccccuagaaacccaagc

SEQ ID NO: 3541199 - RNA, 16 nt, Human
ggcccagcccggcucc

SEQ ID NO: 3541200 - RNA, 12 nt, Human
ggcccagcccug

SEQ ID NO: 3541201 - RNA, 22 nt, Human
ggcccagcccugcuggccgccu

SEQ ID NO: 3541202 - RNA, 19 nt, Human
ggcccagccgacccccucu

SEQ ID NO: 3541203 - RNA, 22 nt, Human
ggcccagcgcggacauccccug

SEQ ID NO: 3541204 - RNA, 15 nt, Human
ggcccaggaccagcu

SEQ ID NO: 3541205 - RNA, 18 nt, Human
ggcccaggaguuuggcca

SEQ ID NO: 3541206 - RNA, 21 nt, Human
ggcccaggaguuuggccagaa

SEQ ID NO: 3541207 - RNA, 23 nt, Human
ggcccaggaguuuggccagaagu

SEQ ID NO: 3541208 - RNA, 15 nt, Human
ggcccaggcugccgu

SEQ ID NO: 3541209 - RNA, 15 nt, Human
ggcccagggcccaga

SEQ ID NO: 3541210 - RNA, 17 nt, Human
ggcccagggcccagagc

SEQ ID NO: 3541211 - RNA, 22 nt, Human
ggcccagggcccagagcccagc

SEQ ID NO: 3541212 - RNA, 22 nt, Human
ggcccagggggcuuccugaggg

SEQ ID NO: 3541213 - RNA, 17 nt, Human
ggcccaguaugagcccu

SEQ ID NO: 3541214 - RNA, 14 nt, Human
ggcccaguccuggc

SEQ ID NO: 3541215 - RNA, 21 nt, Human
ggcccagugcaugguggccag

SEQ ID NO: 3541216 - RNA, 22 nt, Human
ggcccagugucaaguugugcuu

SEQ ID NO: 3541217 - RNA, 23 nt, Human
ggcccauagaaacaugacacuga

SEQ ID NO: 3541218 - RNA, 21 nt, Human
ggcccaucaggguaggcugga

SEQ ID NO: 3541219 - RNA, 13 nt, Human
ggcccaucccccc

SEQ ID NO: 3541220 - RNA, 14 nt, Human
ggcccaucucccug

SEQ ID NO: 3541221 - RNA, 16 nt, Human
ggcccaucucccugcu

SEQ ID NO: 3541222 - RNA, 18 nt, Human
ggcccaucucccugcuuu

SEQ ID NO: 3541223 - RNA, 19 nt, Human
ggcccaucucccugcuuug

SEQ ID NO: 3541224 - RNA, 20 nt, Human
ggcccaugggagggagcuga

SEQ ID NO: 3541225 - RNA, 15 nt, Human
ggcccauucuacuug

SEQ ID NO: 3541226 - RNA, 19 nt, Human
ggccccaacccuguccucc

SEQ ID NO: 3541227 - RNA, 13 nt, Human
ggccccacaccag

SEQ ID NO: 3541228 - RNA, 14 nt, Human
ggccccaccaccua

SEQ ID NO: 3541229 - RNA, 16 nt, Human
ggccccaccagugccu

SEQ ID NO: 3541230 - RNA, 23 nt, Human
ggccccacccugggcccugggcu

SEQ ID NO: 3541231 - RNA, 19 nt, Human
ggccccaccugcagcuccc

SEQ ID NO: 3541232 - RNA, 13 nt, Human
ggccccaccuggc

SEQ ID NO: 3541233 - RNA, 22 nt, Human
ggccccaccuggcccucucuga

SEQ ID NO: 3541234 - RNA, 13 nt, Human
ggccccagagacu

SEQ ID NO: 3541235 - RNA, 18 nt, Human
ggccccagagacucagag

SEQ ID NO: 3541236 - RNA, 11 nt, Human
ggccccagcca

SEQ ID NO: 3541237 - RNA, 23 nt, Human
ggccccagcccacccuccugucu

SEQ ID NO: 3541238 - RNA, 16 nt, Human
ggccccagcccugcug

SEQ ID NO: 3541239 - RNA, 12 nt, Human
ggccccagccug

SEQ ID NO: 3541240 - RNA, 13 nt, Human
ggccccagccugg

SEQ ID NO: 3541241 - RNA, 19 nt, Human
ggccccagccuggcccagc

SEQ ID NO: 3541242 - RNA, 19 nt, Human
ggccccagcuucucagcuc

SEQ ID NO: 3541243 - RNA, 16 nt, Human
ggccccagggcacccu

SEQ ID NO: 3541244 - RNA, 14 nt, Human
ggccccaugaccuc

SEQ ID NO: 3541245 - RNA, 18 nt, Human
ggccccaugaccuccagc

SEQ ID NO: 3541246 - RNA, 14 nt, Human
ggcccccaaaugga

SEQ ID NO: 3541247 - RNA, 13 nt, Human
ggcccccacaugg

SEQ ID NO: 3541248 - RNA, 20 nt, Human
ggcccccaccacacauccca

SEQ ID NO: 3541249 - RNA, 22 nt, Human
ggcccccaccacacaucccagc

SEQ ID NO: 3541250 - RNA, 12 nt, Human
ggcccccacugg

SEQ ID NO: 3541251 - RNA, 12 nt, Human
ggcccccagagc

SEQ ID NO: 3541252 - RNA, 15 nt, Human
ggcccccagagcgcc

SEQ ID NO: 3541253 - RNA, 14 nt, Human
ggcccccagcccag

SEQ ID NO: 3541254 - RNA, 23 nt, Human
ggcccccagcccagggcuccugc

SEQ ID NO: 3541255 - RNA, 15 nt, Human
ggcccccagcugugg

SEQ ID NO: 3541256 - RNA, 17 nt, Human
ggccccccuccuugcuc

SEQ ID NO: 3541257 - RNA, 20 nt, Human
ggccccccuccuugcucugc

SEQ ID NO: 3541258 - RNA, 21 nt, Human
ggccccccugguccccuccuu

SEQ ID NO: 3541259 - RNA, 13 nt, Human
ggcccccgagcug

SEQ ID NO: 3541260 - RNA, 15 nt, Human
ggcccccgagcuggg

SEQ ID NO: 3541261 - RNA, 16 nt, Human
ggcccccgggaggacg

SEQ ID NO: 3541262 - RNA, 16 nt, Human
ggcccccucccuggau

SEQ ID NO: 3541263 - RNA, 20 nt, Human
ggcccccucucaggagccau

SEQ ID NO: 3541264 - RNA, 13 nt, Human
ggcccccugccug

SEQ ID NO: 3541265 - RNA, 17 nt, Human
ggcccccugccugcccu

SEQ ID NO: 3541266 - RNA, 18 nt, Human
ggcccccuggucucuggu

SEQ ID NO: 3541267 - RNA, 17 nt, Human
ggccccgaggacccaga

SEQ ID NO: 3541268 - RNA, 15 nt, Human
ggccccgcccaggcu

SEQ ID NO: 3541269 - RNA, 15 nt, Human
ggccccgccgccugg

SEQ ID NO: 3541270 - RNA, 18 nt, Human
ggccccgccgccugguac

SEQ ID NO: 3541271 - RNA, 21 nt, Human
ggccccgcuuguccagcgccu

SEQ ID NO: 3541272 - RNA, 18 nt, Human
ggccccggccccagccag

SEQ ID NO: 3541273 - RNA, 22 nt, Human
ggccccuauguaguccgugcug

SEQ ID NO: 3541274 - RNA, 19 nt, Human
ggccccucacccugccuua

SEQ ID NO: 3541275 - RNA, 15 nt, Human
ggccccucaccuacu

SEQ ID NO: 3541276 - RNA, 19 nt, Human
ggccccucagggucccugg

SEQ ID NO: 3541277 - RNA, 12 nt, Human
ggccccuccagc

SEQ ID NO: 3541278 - RNA, 13 nt, Human
ggccccucccccg

SEQ ID NO: 3541279 - RNA, 16 nt, Human
ggccccucccccugag

SEQ ID NO: 3541280 - RNA, 14 nt, Human
ggccccuccccucc

SEQ ID NO: 3541281 - RNA, 18 nt, Human
ucugcccacauuggaccc

SEQ ID NO: 3541282 - RNA, 22 nt, Human
ucugcccaccucagccucccaa

SEQ ID NO: 3541283 - RNA, 14 nt, Human
ucugcccacucccu

SEQ ID NO: 3541284 - RNA, 18 nt, Human
ucugcccacucccugcaa

SEQ ID NO: 3541285 - RNA, 13 nt, Human
ucugcccaggcac

SEQ ID NO: 3541286 - RNA, 22 nt, Human
ucugcccaggcacugcuaggcu

SEQ ID NO: 3541287 - RNA, 19 nt, Human
ucugcccaggggugccccc

SEQ ID NO: 3541288 - RNA, 21 nt, Human
ucugcccaggggugcccccuc

SEQ ID NO: 3541289 - RNA, 22 nt, Human
ucugcccaggggugcccccucc

SEQ ID NO: 3541290 - RNA, 19 nt, Human
ucugcccauuccccagccu

SEQ ID NO: 3541291 - RNA, 14 nt, Human
ucugccccagaggc

SEQ ID NO: 3541292 - RNA, 14 nt, Human
ucugccccagcucu

SEQ ID NO: 3541293 - RNA, 17 nt, Human
ucugccccagcucuggc

SEQ ID NO: 3541294 - RNA, 21 nt, Human
ucugccccauccuccagcagg

SEQ ID NO: 3541295 - RNA, 14 nt, Human
ucugcccccagccc

SEQ ID NO: 3541296 - RNA, 15 nt, Human
ucugcccccagccca

SEQ ID NO: 3541297 - RNA, 20 nt, Human
ucugccccccccccccaucu

SEQ ID NO: 3541298 - RNA, 14 nt, Human
ucugcccccugcag

SEQ ID NO: 3541299 - RNA, 15 nt, Human
ucugcccccugcaga

SEQ ID NO: 3541300 - RNA, 16 nt, Human
ucugcccccugcuggc

SEQ ID NO: 3541301 - RNA, 12 nt, Human
ucugccccuccc

SEQ ID NO: 3541302 - RNA, 15 nt, Human
ucugccccuccccca

SEQ ID NO: 3541303 - RNA, 13 nt, Human
ucugccccucccu

SEQ ID NO: 3541304 - RNA, 23 nt, Human
ucugcccgccugcccaccugccu

SEQ ID NO: 3541305 - RNA, 10 nt, Human
ucugcccggg

SEQ ID NO: 3541306 - RNA, 18 nt, Human
ucugcccucauuacuggg

SEQ ID NO: 3541307 - RNA, 18 nt, Human
ucugcccuccaagaccuu

SEQ ID NO: 3541308 - RNA, 19 nt, Human
ucugcccuccaagaccuuc

SEQ ID NO: 3541309 - RNA, 18 nt, Human
ucugcccucccuccuucc

SEQ ID NO: 3541310 - RNA, 10 nt, Human
ucugcccugc

SEQ ID NO: 3541311 - RNA, 22 nt, Human
ucugcccugcgggucacaggag

SEQ ID NO: 3541312 - RNA, 15 nt, Human
ucugcccuggcugcu

SEQ ID NO: 3541313 - RNA, 16 nt, Human
ucugcccuggcugcug

SEQ ID NO: 3541314 - RNA, 21 nt, Human
ucugcccuggcugcugccccc

SEQ ID NO: 3541315 - RNA, 20 nt, Human
ucugcccugugggaccccag

SEQ ID NO: 3541316 - RNA, 22 nt, Human
ucugcccugugggaccccaggc

SEQ ID NO: 3541317 - RNA, 12 nt, Human
ucugcccuuggu

SEQ ID NO: 3541318 - RNA, 14 nt, Human
ucugccgcagcccu

SEQ ID NO: 3541319 - RNA, 15 nt, Human
ucugccuaaggacuu

SEQ ID NO: 3541320 - RNA, 16 nt, Human
ucugccuaaggacuuc

SEQ ID NO: 3541321 - RNA, 20 nt, Human
ucugccuaaggacuucuuua

SEQ ID NO: 3541322 - RNA, 21 nt, Human
ucugccuacagaacuucagaa

SEQ ID NO: 3541323 - RNA, 21 nt, Human
ucugccucaaugugaaucaga

SEQ ID NO: 3541324 - RNA, 21 nt, Human
ucugccucaccgcuucccucc

SEQ ID NO: 3541325 - RNA, 12 nt, Human
ucugccucccau

SEQ ID NO: 3541326 - RNA, 21 nt, Human
ucugccucccaucacccgcua

SEQ ID NO: 3541327 - RNA, 22 nt, Human
ucugccuccccuuaaaggggag

SEQ ID NO: 3541328 - RNA, 12 nt, Human
ucugccucucaa

SEQ ID NO: 3541329 - RNA, 15 nt, Human
ucugccucugacaca

SEQ ID NO: 3541330 - RNA, 18 nt, Human
ucugccucugacacacag

SEQ ID NO: 3541331 - RNA, 22 nt, Human
ucugccucugacacacagcucu

SEQ ID NO: 3541332 - RNA, 19 nt, Human
ucugccucuucugggaggg

SEQ ID NO: 3541333 - RNA, 19 nt, Human
ucugccugaagucacacag

SEQ ID NO: 3541334 - RNA, 21 nt, Human
ucugccugaggggcagccugc

SEQ ID NO: 3541335 - RNA, 22 nt, Human
ucugccugaggggcagccugcc

SEQ ID NO: 3541336 - RNA, 21 nt, Human
ucugccugccagcugcacuga

SEQ ID NO: 3541337 - RNA, 21 nt, Human
ucugccuggaguguaugacug

SEQ ID NO: 3541338 - RNA, 12 nt, Human
ucugccugucuc

SEQ ID NO: 3541339 - RNA, 21 nt, Human
ucugccuguuauaacucugca

SEQ ID NO: 3541340 - RNA, 17 nt, Human
ggcccuccacaccugcg

SEQ ID NO: 3541341 - RNA, 15 nt, Human
ggcccuccagagccc

SEQ ID NO: 3541342 - RNA, 15 nt, Human
ggcccuccgacagcc

SEQ ID NO: 3541343 - RNA, 17 nt, Human
ggcccuccuacccugcg

SEQ ID NO: 3541344 - RNA, 21 nt, Human
ggcccuccuacccugcgccca

SEQ ID NO: 3541345 - RNA, 14 nt, Human
ggcccuccugugcu

SEQ ID NO: 3541346 - RNA, 20 nt, Human
ggcccuccugugcuggggga

SEQ ID NO: 3541347 - RNA, 22 nt, Human
ggcccucgcugccagcucugua

SEQ ID NO: 3541348 - RNA, 17 nt, Human
ggcccucgggcccagcc

SEQ ID NO: 3541349 - RNA, 19 nt, Human
ggcccucgggcccagcccc

SEQ ID NO: 3541350 - RNA, 23 nt, Human
ggcccucuccccugcccccugca

SEQ ID NO: 3541351 - RNA, 14 nt, Human
ggcccucuccugcc

SEQ ID NO: 3541352 - RNA, 23 nt, Human
ggcccucucugaaggaggccacc

SEQ ID NO: 3541353 - RNA, 21 nt, Human
ggcccucucugcucugcgugu

SEQ ID NO: 3541354 - RNA, 13 nt, Human
ggcccucugccca

SEQ ID NO: 3541355 - RNA, 15 nt, Human
ggcccucugcccacu

SEQ ID NO: 3541356 - RNA, 16 nt, Human
ggcccucugcccacuc

SEQ ID NO: 3541357 - RNA, 17 nt, Human
ggcccucugcccacucc

SEQ ID NO: 3541358 - RNA, 19 nt, Human
ggcccucugguagacacag

SEQ ID NO: 3541359 - RNA, 19 nt, Human
ggcccugacauuggagccu

SEQ ID NO: 3541360 - RNA, 11 nt, Human
ggcccugagcg

SEQ ID NO: 3541361 - RNA, 23 nt, Human
ggcccugagcgaguggagucugc

SEQ ID NO: 3541362 - RNA, 19 nt, Human
ggcccugagcucgguggac

SEQ ID NO: 3541363 - RNA, 21 nt, Human
ggcccugagcucgguggaccc

SEQ ID NO: 3541364 - RNA, 16 nt, Human
ggcccugagguguggg

SEQ ID NO: 3541365 - RNA, 18 nt, Human
ggcccugagguguggggg

SEQ ID NO: 3541366 - RNA, 19 nt, Human
ggcccugaggugugggggc

SEQ ID NO: 3541367 - RNA, 19 nt, Human
ggcccugagucugggcagc

SEQ ID NO: 3541368 - RNA, 18 nt, Human
ggcccugcaccugugcag

SEQ ID NO: 3541369 - RNA, 23 nt, Human
ggcccugcacuguccugcuccac

SEQ ID NO: 3541370 - RNA, 23 nt, Human
ggcccugcaguguucgcuuggcu

SEQ ID NO: 3541371 - RNA, 12 nt, Human
ggcccugcccac

SEQ ID NO: 3541372 - RNA, 20 nt, Human
ggcccugcccacaccuccug

SEQ ID NO: 3541373 - RNA, 13 nt, Human
ggcccugcccugg

SEQ ID NO: 3541374 - RNA, 11 nt, Human
ggcccugccug

SEQ ID NO: 3541375 - RNA, 14 nt, Human
ggcccugccuucuu

SEQ ID NO: 3541376 - RNA, 18 nt, Human
ggcccugcuccugcagca

SEQ ID NO: 3541377 - RNA, 13 nt, Human
ggcccugcugccc

SEQ ID NO: 3541378 - RNA, 14 nt, Human
ggcccugcugccca

SEQ ID NO: 3541379 - RNA, 18 nt, Human
ggcccugcuuccugcuug

SEQ ID NO: 3541380 - RNA, 21 nt, Human
ggcccuggagcagccacccca

SEQ ID NO: 3541381 - RNA, 13 nt, Human
ggcccuggcuccc

SEQ ID NO: 3541382 - RNA, 18 nt, Human
ggcccuggcucugcuguc

SEQ ID NO: 3541383 - RNA, 18 nt, Human
ggcccugggccugccuca

SEQ ID NO: 3541384 - RNA, 23 nt, Human
ggcccugggccugccucaccacg

SEQ ID NO: 3541385 - RNA, 18 nt, Human
ggcccugggcucggaggc

SEQ ID NO: 3541386 - RNA, 12 nt, Human
ggcccugggcug

SEQ ID NO: 3541387 - RNA, 11 nt, Human
ggcccuggggc

SEQ ID NO: 3541388 - RNA, 16 nt, Human
ggcccuggggccugua

SEQ ID NO: 3541389 - RNA, 17 nt, Human
ggcccuggggccuguac

SEQ ID NO: 3541390 - RNA, 23 nt, Human
ggcccuggggccuguacugccug

SEQ ID NO: 3541391 - RNA, 19 nt, Human
ggcccugucauccagcuca

SEQ ID NO: 3541392 - RNA, 17 nt, Human
ggcccugucccucccac

SEQ ID NO: 3541393 - RNA, 21 nt, Human
ggcccugucccucccaccucu

SEQ ID NO: 3541394 - RNA, 17 nt, Human
ggcccugugccuuggug

SEQ ID NO: 3541395 - RNA, 14 nt, Human
ggcccugugugcag

SEQ ID NO: 3541396 - RNA, 16 nt, Human
ggcccuuccuccucca

SEQ ID NO: 3541397 - RNA, 13 nt, Human
ggcccuuccucuc

SEQ ID NO: 3541398 - RNA, 18 nt, Human
ggcccuuccucuccacug

SEQ ID NO: 3541399 - RNA, 17 nt, Human
ggcccuuccuggacagc

SEQ ID NO: 3541400 - RNA, 19 nt, Human
ggcccuuccuggacagcug

SEQ ID NO: 3541401 - RNA, 21 nt, Human
ggcccuuccuggacagcugug

SEQ ID NO: 3541402 - RNA, 19 nt, Human
ggcccuucucuccagcccc

SEQ ID NO: 3541403 - RNA, 17 nt, Human
ggcccuucuugcugccc

SEQ ID NO: 3541404 - RNA, 18 nt, Human
ggcccuucuugcugcccu

SEQ ID NO: 3541405 - RNA, 21 nt, Human
ggcccuugcaguucagcacca

SEQ ID NO: 3541406 - RNA, 13 nt, Human
ggcccuuugcugu

SEQ ID NO: 3541407 - RNA, 18 nt, Human
ggccgaagcucuggcuga

SEQ ID NO: 3541408 - RNA, 14 nt, Human
ggccgacggagccg

SEQ ID NO: 3541409 - RNA, 15 nt, Human
ggccgagaagcaaga

SEQ ID NO: 3541410 - RNA, 18 nt, Human
ggccgaggguccuggcuc

SEQ ID NO: 3541411 - RNA, 15 nt, Human
ggccgaugcccagag

SEQ ID NO: 3541412 - RNA, 20 nt, Human
ggccgauuugggaaccaagc

SEQ ID NO: 3541413 - RNA, 16 nt, Human
ggccgcauucccugag

SEQ ID NO: 3541414 - RNA, 12 nt, Human
ggccgcccccug

SEQ ID NO: 3541415 - RNA, 16 nt, Human
ggccgcccccugcccc

SEQ ID NO: 3541416 - RNA, 13 nt, Human
ggccgccucaccc

SEQ ID NO: 3541417 - RNA, 17 nt, Human
ggccgccugcgggcugc

SEQ ID NO: 3541418 - RNA, 22 nt, Human
ggccgcgccaaauaaugucucu

SEQ ID NO: 3541419 - RNA, 19 nt, Human
ggccgcgcguccagcugcc

SEQ ID NO: 3541420 - RNA, 16 nt, Human
ggccgcggagccugca

SEQ ID NO: 3541421 - RNA, 19 nt, Human
ggccgcuagaggccugagg

SEQ ID NO: 3541422 - RNA, 16 nt, Human
ggccgcuagaugggca

SEQ ID NO: 3541423 - RNA, 19 nt, Human
ggccgcuagaugggcaugg

SEQ ID NO: 3541424 - RNA, 17 nt, Human
ggccgcugaguggcagg

SEQ ID NO: 3541425 - RNA, 12 nt, Human
ggccgcugccac

SEQ ID NO: 3541426 - RNA, 15 nt, Human
ggccgcugccaccca

SEQ ID NO: 3541427 - RNA, 19 nt, Human
ggccgcugccacccaccuc

SEQ ID NO: 3541428 - RNA, 19 nt, Human
ggccgcuguucacccacag

SEQ ID NO: 3541429 - RNA, 13 nt, Human
ggccggccagcca

SEQ ID NO: 3541430 - RNA, 19 nt, Human
ggccggccagccagccacu

SEQ ID NO: 3541431 - RNA, 15 nt, Human
ggccggccagccccu

SEQ ID NO: 3541432 - RNA, 13 nt, Human
ggccggccagccu

SEQ ID NO: 3541433 - RNA, 15 nt, Human
ggccggcgagcccug

SEQ ID NO: 3541434 - RNA, 19 nt, Human
ggccggcuugccacacccc

SEQ ID NO: 3541435 - RNA, 22 nt, Human
ggccgggaccccgagccuggcu

SEQ ID NO: 3541436 - RNA, 15 nt, Human
ggccgggcacagcug

SEQ ID NO: 3541437 - RNA, 22 nt, Human
ggccgggccuguacagucuguc

SEQ ID NO: 3541438 - RNA, 19 nt, Human
ggccggggaacuggccaag

SEQ ID NO: 3541439 - RNA, 21 nt, Human
ggccggggaacuggccaagcu

SEQ ID NO: 3541440 - RNA, 18 nt, Human
ggccggucugcaagucag

SEQ ID NO: 3541441 - RNA, 20 nt, Human
ggccggucugcaagucagag

SEQ ID NO: 3541442 - RNA, 15 nt, Human
ggccggugugggcug

SEQ ID NO: 3541443 - RNA, 23 nt, Human
ggccgguuucgaaguugaugcaa

SEQ ID NO: 3541444 - RNA, 19 nt, Human
ggccgucaggacccaccau

SEQ ID NO: 3541445 - RNA, 18 nt, Human
ucugggagucacacagug

SEQ ID NO: 3541446 - RNA, 19 nt, Human
ucugggaguggggaaguga

SEQ ID NO: 3541447 - RNA, 19 nt, Human
ucugggcaggaccucagag

SEQ ID NO: 3541448 - RNA, 19 nt, Human
ucugggcaucuguucuggu

SEQ ID NO: 3541449 - RNA, 16 nt, Human
ucugggccaaguuccu

SEQ ID NO: 3541450 - RNA, 20 nt, Human
ucugggcccggccauguccu

SEQ ID NO: 3541451 - RNA, 18 nt, Human
ucugggccuuggccugga

SEQ ID NO: 3541452 - RNA, 15 nt, Human
ucugggcuauggaca

SEQ ID NO: 3541453 - RNA, 23 nt, Human
ucugggcuguaacguggcacugg

SEQ ID NO: 3541454 - RNA, 20 nt, Human
ucugggcuuauaucuggccu

SEQ ID NO: 3541455 - RNA, 15 nt, Human
ucugggcuuccugga

SEQ ID NO: 3541456 - RNA, 19 nt, Human
ucugggcuuggggcuuccu

SEQ ID NO: 3541457 - RNA, 22 nt, Human
ucuggggaaagacacugccugg

SEQ ID NO: 3541458 - RNA, 15 nt, Human
ucuggggaccagcuu

SEQ ID NO: 3541459 - RNA, 23 nt, Human
ucuggggagcgggucugcuccca

SEQ ID NO: 3541460 - RNA, 18 nt, Human
ucuggggauacuggcaaa

SEQ ID NO: 3541461 - RNA, 23 nt, Human
ucuggggcagcacccuauaaauc

SEQ ID NO: 3541462 - RNA, 11 nt, Human
ucuggggcugu

SEQ ID NO: 3541463 - RNA, 14 nt, Human
ucuggggcuguuca

SEQ ID NO: 3541464 - RNA, 19 nt, Human
ucugggggcacaagacuga

SEQ ID NO: 3541465 - RNA, 15 nt, Human
ucugggggcugcagu

SEQ ID NO: 3541466 - RNA, 18 nt, Human
ucuggggggacccagugc

SEQ ID NO: 3541467 - RNA, 19 nt, Human
ucugggggguggccaggcc

SEQ ID NO: 3541468 - RNA, 21 nt, Human
ucugggguauggcguaaguac

SEQ ID NO: 3541469 - RNA, 16 nt, Human
ucugggguucagcccc

SEQ ID NO: 3541470 - RNA, 19 nt, Human
ucugggguucagccccucc

SEQ ID NO: 3541471 - RNA, 21 nt, Human
ucugggguucagccccuccuc

SEQ ID NO: 3541472 - RNA, 18 nt, Human
ucuggguagcuguaaggc

SEQ ID NO: 3541473 - RNA, 18 nt, Human
ucugggugcuacugggga

SEQ ID NO: 3541474 - RNA, 16 nt, Human
ucugggugguugcccu

SEQ ID NO: 3541475 - RNA, 16 nt, Human
ucuggguucacugcaa

SEQ ID NO: 3541476 - RNA, 16 nt, Human
ucuggguuccuuccuc

SEQ ID NO: 3541477 - RNA, 15 nt, Human
ucuggguucugggug

SEQ ID NO: 3541478 - RNA, 16 nt, Human
ucuggguuugagaaau

SEQ ID NO: 3541479 - RNA, 15 nt, Human
ucugguacucuccua

SEQ ID NO: 3541480 - RNA, 21 nt, Human
ucugguagaagggaaagccca

SEQ ID NO: 3541481 - RNA, 18 nt, Human
ucugguagauagaaauaa

SEQ ID NO: 3541482 - RNA, 20 nt, Human
ucugguagauuuuuaacgaa

SEQ ID NO: 3541483 - RNA, 14 nt, Human
ucugguauuaaaug

SEQ ID NO: 3541484 - RNA, 19 nt, Human
ucucuuuucuuuagagcau

SEQ ID NO: 3541485 - RNA, 22 nt, Human
ucucuuuugaauccaugcuugg

SEQ ID NO: 3541486 - RNA, 18 nt, Human
ucucuuuuugcuuucgaa

SEQ ID NO: 3541487 - RNA, 20 nt, Human
ucucuuuuuggaggugcuua

SEQ ID NO: 3541488 - RNA, 12 nt, Human
ucucuuuuuguu

SEQ ID NO: 3541489 - RNA, 14 nt, Human
ucucuuuuuguuug

SEQ ID NO: 3541490 - RNA, 14 nt, Human
ucucuuuuuuaagu

SEQ ID NO: 3541491 - RNA, 17 nt, Human
ucucuuuuuuacaaagg

SEQ ID NO: 3541492 - RNA, 19 nt, Human
ucucuuuuuuuggcccagg

SEQ ID NO: 3541493 - RNA, 23 nt, Human
ucugaaaaauuccuuuguguuuc

SEQ ID NO: 3541494 - RNA, 12 nt, Human
ucugaaaacugg

SEQ ID NO: 3541495 - RNA, 12 nt, Human
ucugaaaagaaa

SEQ ID NO: 3541496 - RNA, 14 nt, Human
ucugaaaauauaac

SEQ ID NO: 3541497 - RNA, 16 nt, Human
ucugaaaauguaugug

SEQ ID NO: 3541498 - RNA, 22 nt, Human
ucugaaaauguuguuaugcuau

SEQ ID NO: 3541499 - RNA, 17 nt, Human
ucugaaaauuaacacug

SEQ ID NO: 3541500 - RNA, 21 nt, Human
ucugaaacacacugaaagcuc

SEQ ID NO: 3541501 - RNA, 14 nt, Human
ucuucgacuguugu

SEQ ID NO: 3541502 - RNA, 15 nt, Human
ucuucgcgcccgccc

SEQ ID NO: 3541503 - RNA, 17 nt, Human
ucuucgggaccaggauu

SEQ ID NO: 3541504 - RNA, 14 nt, Human
ucuucguacaguuc

SEQ ID NO: 3541505 - RNA, 17 nt, Human
ucuucguacaguucuuc

SEQ ID NO: 3541506 - RNA, 16 nt, Human
ucuucuaaaaaaaaac

SEQ ID NO: 3541507 - RNA, 18 nt, Human
ucuucuacaacucauaca

SEQ ID NO: 3541508 - RNA, 12 nt, Human
ucuucuagaguu

SEQ ID NO: 3541509 - RNA, 22 nt, Human
ucuucuauauaauuccuguuuu

SEQ ID NO: 3541510 - RNA, 15 nt, Human
ucuucuauugccucu

SEQ ID NO: 3541511 - RNA, 16 nt, Human
ucuucuauugccucug

SEQ ID NO: 3541512 - RNA, 17 nt, Human
ucuucucaagugccuua

SEQ ID NO: 3541513 - RNA, 19 nt, Human
ucuucucaaguucuaagau

SEQ ID NO: 3541514 - RNA, 21 nt, Human
ucuucucaaguucuaagauuc

SEQ ID NO: 3541515 - RNA, 20 nt, Human
ucuucucaggcucugcccug

SEQ ID NO: 3541516 - RNA, 17 nt, Human
ucuucucauagcauuaa

SEQ ID NO: 3541517 - RNA, 20 nt, Human
ucuucucauagcauuaacua

SEQ ID NO: 3541518 - RNA, 10 nt, Human
ucuucucauu

SEQ ID NO: 3541519 - RNA, 17 nt, Human
ucuucucauuacuuguu

SEQ ID NO: 3541520 - RNA, 20 nt, Human
ucuucucauuucaccccucc

SEQ ID NO: 3541521 - RNA, 12 nt, Human
ucuucuccacca

SEQ ID NO: 3541522 - RNA, 12 nt, Human
ucuucuccacug

SEQ ID NO: 3541523 - RNA, 19 nt, Human
ucuucuccacuuucuagcc

SEQ ID NO: 3541524 - RNA, 23 nt, Human
ucuucuccagauuuuucggaggc

SEQ ID NO: 3541525 - RNA, 16 nt, Human
ucuucucccaauucau

SEQ ID NO: 3541526 - RNA, 22 nt, Human
ucuucucccagaaucccagccg

SEQ ID NO: 3541527 - RNA, 14 nt, Human
ucuucuccccaggu

SEQ ID NO: 3541528 - RNA, 17 nt, Human
ucuucuccuauguguaa

SEQ ID NO: 3541529 - RNA, 13 nt, Human
ucuucucucagac

SEQ ID NO: 3541530 - RNA, 20 nt, Human
ucuucucucucaauuuuauc

SEQ ID NO: 3541531 - RNA, 12 nt, Human
ucuucucucugc

SEQ ID NO: 3541532 - RNA, 14 nt, Human
ucuucucugugaga

SEQ ID NO: 3541533 - RNA, 18 nt, Human
ucuucucugugagaaggu

SEQ ID NO: 3541534 - RNA, 13 nt, Human
ucuucugaaauga

SEQ ID NO: 3541535 - RNA, 22 nt, Human
ucuucugaaaugaaacaaauaa

SEQ ID NO: 3541536 - RNA, 18 nt, Human
ucuucugaauaaagcaau

SEQ ID NO: 3541537 - RNA, 16 nt, Human
ucuucugaauauuuua

SEQ ID NO: 3541538 - RNA, 22 nt, Human
ucuucugacaaacuguguacau

SEQ ID NO: 3541539 - RNA, 19 nt, Human
ucuucugagcuauuucauc

SEQ ID NO: 3541540 - RNA, 23 nt, Human
ucuucugcauuuuucagagaaua

SEQ ID NO: 3541541 - RNA, 20 nt, Human
ucuucugcccaauuggagga

SEQ ID NO: 3541542 - RNA, 12 nt, Human
ucuucugcucca

SEQ ID NO: 3541543 - RNA, 20 nt, Human
ucuucugcuccacccuuggc

SEQ ID NO: 3541544 - RNA, 23 nt, Human
ucuucugcuccacccuuggccug

SEQ ID NO: 3541545 - RNA, 16 nt, Human
ucuucugcucuuucuu

SEQ ID NO: 3541546 - RNA, 19 nt, Human
ucuucugcuucagccuccc

SEQ ID NO: 3541547 - RNA, 12 nt, Human
ucuucugcuuug

SEQ ID NO: 3541548 - RNA, 21 nt, Human
ucuucugcuuuguugugugcc

SEQ ID NO: 3541549 - RNA, 20 nt, Human
ucuucugggagggcagcagg

SEQ ID NO: 3541550 - RNA, 16 nt, Human
ucuucugggcacccuc

SEQ ID NO: 3541551 - RNA, 21 nt, Human
ucuucuggggcaggcugggcc

SEQ ID NO: 3541552 - RNA, 22 nt, Human
ucuucugguacuuucuguuaug

SEQ ID NO: 3541553 - RNA, 15 nt, Human
ucuucuguaauauuu

SEQ ID NO: 3541554 - RNA, 18 nt, Human
ucuucuguaauauuuaca

SEQ ID NO: 3541555 - RNA, 15 nt, Human
ucuucuguacgucug

SEQ ID NO: 3541556 - RNA, 22 nt, Human
ucuucuguacgucugacaggca

SEQ ID NO: 3541557 - RNA, 14 nt, Human
ucuucugucaucua

SEQ ID NO: 3541558 - RNA, 17 nt, Human
ucuucugucaucuaccu

SEQ ID NO: 3541559 - RNA, 12 nt, Human
ucuucuguccaa

SEQ ID NO: 3541560 - RNA, 23 nt, Human
ucuucugugauucgguggagacu

SEQ ID NO: 3541561 - RNA, 16 nt, Human
ucuucuguuuucuguu

SEQ ID NO: 3541562 - RNA, 17 nt, Human
ucuucuguuuucuguuu

SEQ ID NO: 3541563 - RNA, 16 nt, Human
ucuucuuaauguacau

SEQ ID NO: 3541564 - RNA, 24 nt, Human
ucuucuuaauguacauagugcuaa

SEQ ID NO: 3541565 - RNA, 18 nt, Human
ucuucuuccacacaugca

SEQ ID NO: 3541566 - RNA, 22 nt, Human
ucuucuugaacacucaugcuga

SEQ ID NO: 3541567 - RNA, 23 nt, Human
ucuucuugaacacucaugcugaa

SEQ ID NO: 3541568 - RNA, 23 nt, Human
ucuucuuggccaugggaggccuu

SEQ ID NO: 3541569 - RNA, 15 nt, Human
ucuucuuguuucucc

SEQ ID NO: 3541570 - RNA, 17 nt, Human
ucuucuuucagacuugc

SEQ ID NO: 3541571 - RNA, 17 nt, Human
ucuucuuucugucuuua

SEQ ID NO: 3541572 - RNA, 19 nt, Human
ucuucuuuugagcaacuuu

SEQ ID NO: 3541573 - RNA, 18 nt, Human
ucuucuuuuuuugugaug

SEQ ID NO: 3541574 - RNA, 17 nt, Human
ucuugaaagaagaaugu

SEQ ID NO: 3541575 - RNA, 18 nt, Human
ucuugaaagaagaaugug

SEQ ID NO: 3541576 - RNA, 14 nt, Human
ucuugaaagcugug

SEQ ID NO: 3541577 - RNA, 21 nt, Human
ucuugaaauauaggaacuuaa

SEQ ID NO: 3541578 - RNA, 14 nt, Human
ucuugaaauuaaga

SEQ ID NO: 3541579 - RNA, 20 nt, Human
ucuugaaauuaagaaggcaa

SEQ ID NO: 3541580 - RNA, 21 nt, Human
ucuugaaauuaagaaggcaaa

SEQ ID NO: 3541581 - RNA, 19 nt, Human
ucuugaacacucaugcuga

SEQ ID NO: 3541582 - RNA, 17 nt, Human
ucuugaacuccuggccu

SEQ ID NO: 3541583 - RNA, 17 nt, Human
ucuugaacugagcuugg

SEQ ID NO: 3541584 - RNA, 22 nt, Human
ucuugaagacuuuucuuucagc

SEQ ID NO: 3541585 - RNA, 15 nt, Human
ucuugaagggcccag

SEQ ID NO: 3541586 - RNA, 16 nt, Human
ucuugaagggcccagg

SEQ ID NO: 3541587 - RNA, 16 nt, Human
ucuugaauccuuccau

SEQ ID NO: 3541588 - RNA, 22 nt, Human
ucuugaauggcaauguuuugcu

SEQ ID NO: 3541589 - RNA, 23 nt, Human
ucuugaauggcaauguuuugcuu

SEQ ID NO: 3541590 - RNA, 12 nt, Human
ucuugaaugugg

SEQ ID NO: 3541591 - RNA, 13 nt, Human
ucuugaauuuaau

SEQ ID NO: 3541592 - RNA, 16 nt, Human
ucuugacccugcaccc

SEQ ID NO: 3541593 - RNA, 17 nt, Human
ucuugacccugcacccu

SEQ ID NO: 3541594 - RNA, 17 nt, Human
ucuugagcaaguuccuu

SEQ ID NO: 3541595 - RNA, 16 nt, Human
ucuugagccugggagg

SEQ ID NO: 3541596 - RNA, 12 nt, Human
ucuugagcuggc

SEQ ID NO: 3541597 - RNA, 14 nt, Human
ucuugagcuggccu

SEQ ID NO: 3541598 - RNA, 22 nt, Human
ucuugaggggaagcuagucuuu

SEQ ID NO: 3541599 - RNA, 18 nt, Human
ucuugaggggaccaggag

SEQ ID NO: 3541600 - RNA, 22 nt, Human
ucuugaggugguaguaaaacac

SEQ ID NO: 3541601 - RNA, 20 nt, Human
ucuugaguauaagaaaugca

SEQ ID NO: 3541602 - RNA, 21 nt, Human
ucuugaguauaagaaaugcau

SEQ ID NO: 3541603 - RNA, 13 nt, Human
ucuugaguuuguc

SEQ ID NO: 3541604 - RNA, 14 nt, Human
ucuugaguuugucg

SEQ ID NO: 3541605 - RNA, 18 nt, Human
ucuugaguuuuucaggua

SEQ ID NO: 3541606 - RNA, 14 nt, Human
ucuugauaagacca

SEQ ID NO: 3541607 - RNA, 19 nt, Human
ucuugaucaacaucuuuuc

SEQ ID NO: 3541608 - RNA, 16 nt, Human
ucuugaucaguuaaga

SEQ ID NO: 3541609 - RNA, 22 nt, Human
ucuugaucugcucagcccugga

SEQ ID NO: 3541610 - RNA, 12 nt, Human
ucuugaugacca

SEQ ID NO: 3541611 - RNA, 18 nt, Human
ucuugaugacuggaauuu

SEQ ID NO: 3541612 - RNA, 20 nt, Human
ucuugaugacuggaauuuuu

SEQ ID NO: 3541613 - RNA, 21 nt, Human
ucuugaugcaugcacuguucc

SEQ ID NO: 3541614 - RNA, 18 nt, Human
ucuugauguggugaggca

SEQ ID NO: 3541615 - RNA, 23 nt, Human
ucuugauuauccauauugaguca

SEQ ID NO: 3541616 - RNA, 23 nt, Human
ucuugauucguagauuuaauaac

SEQ ID NO: 3541617 - RNA, 17 nt, Human
ucuugcaaaauuccuga

SEQ ID NO: 3541618 - RNA, 17 nt, Human
ucuugcaagcaugcuug

SEQ ID NO: 3541619 - RNA, 18 nt, Human
ucuugcaauggcagccuu

SEQ ID NO: 3541620 - RNA, 19 nt, Human
ucuugcacagucacugcuc

SEQ ID NO: 3541621 - RNA, 20 nt, Human
ucuugcacagucacugcucu

SEQ ID NO: 3541622 - RNA, 18 nt, Human
ucuugcacccgccucucc

SEQ ID NO: 3541623 - RNA, 13 nt, Human
ucuugcagugauu

SEQ ID NO: 3541624 - RNA, 23 nt, Human
ucuugcauccuuccuauaacuug

SEQ ID NO: 3541625 - RNA, 19 nt, Human
ucuugccaaauauaaauaa

SEQ ID NO: 3541626 - RNA, 20 nt, Human
ucuugccaaccuguaauaaa

SEQ ID NO: 3541627 - RNA, 13 nt, Human
ucuugcccauccu

SEQ ID NO: 3541628 - RNA, 9 nt, Human
ucugagaaa

SEQ ID NO: 3541629 - RNA, 22 nt, Human
ucugagaaaagaacguauuuua

SEQ ID NO: 3541630 - RNA, 15 nt, Human
ucugagaaacaauga

SEQ ID NO: 3541631 - RNA, 14 nt, Human
ucugagaaagacua

SEQ ID NO: 3541632 - RNA, 13 nt, Human
ucugagaacucau

SEQ ID NO: 3541633 - RNA, 16 nt, Human
ucugagaagaggagcc

SEQ ID NO: 3541634 - RNA, 17 nt, Human
ucugagaagguccuuaa

SEQ ID NO: 3541635 - RNA, 12 nt, Human
ucugagaaucuu

SEQ ID NO: 3541636 - RNA, 22 nt, Human
ucugagaaucuuuauugagaaa

SEQ ID NO: 3541637 - RNA, 18 nt, Human
ucugagaauuccaaggag

SEQ ID NO: 3541638 - RNA, 20 nt, Human
ucugagaauuccaaggaguu

SEQ ID NO: 3541639 - RNA, 23 nt, Human
ucugagacucgcgacaaugcaaa

SEQ ID NO: 3541640 - RNA, 20 nt, Human
ucugagagaggcuaaaaugu

SEQ ID NO: 3541641 - RNA, 16 nt, Human
ucugagagcaaacugg

SEQ ID NO: 3541642 - RNA, 12 nt, Human
ucugagagcugu

SEQ ID NO: 3541643 - RNA, 16 nt, Human
ucugagaggcccugga

SEQ ID NO: 3541644 - RNA, 17 nt, Human
ucugagaggcccuggau

SEQ ID NO: 3541645 - RNA, 19 nt, Human
ucugagagucuagauucuc

SEQ ID NO: 3541646 - RNA, 24 nt, Human
ucugagaucaaaacgguuuuacug

SEQ ID NO: 3541647 - RNA, 18 nt, Human
ucugagauggcucccagg

SEQ ID NO: 3541648 - RNA, 19 nt, Human
ucugagcagcgagccugcu

SEQ ID NO: 3541649 - RNA, 20 nt, Human
ucugagcauuagauuucuca

SEQ ID NO: 3541650 - RNA, 18 nt, Human
ucugagccaaagagaaug

SEQ ID NO: 3541651 - RNA, 15 nt, Human
ucugagccacagcag

SEQ ID NO: 3541652 - RNA, 20 nt, Human
ucugagccagugcuuuaaug

SEQ ID NO: 3541653 - RNA, 22 nt, Human
ucugagccaguucaguaccugg

SEQ ID NO: 3541654 - RNA, 15 nt, Human
ucugagcccgggcug

SEQ ID NO: 3541655 - RNA, 21 nt, Human
ucugagcccgggcugccuggg

SEQ ID NO: 3541656 - RNA, 24 nt, Human
ucugagcccgggcugccugggcug

SEQ ID NO: 3541657 - RNA, 17 nt, Human
ucugagcccucaaagug

SEQ ID NO: 3541658 - RNA, 14 nt, Human
ucugagcgccucca

SEQ ID NO: 3541659 - RNA, 16 nt, Human
ucugagcgggaggcag

SEQ ID NO: 3541660 - RNA, 22 nt, Human
ucugagcuauuucaucuauuuu

SEQ ID NO: 3541661 - RNA, 12 nt, Human
ucugagcuccug

SEQ ID NO: 3541662 - RNA, 20 nt, Human
ucugagcuccuguccccugc

SEQ ID NO: 3541663 - RNA, 18 nt, Human
ucugagcucugcauuugu

SEQ ID NO: 3541664 - RNA, 18 nt, Human
ucugagcucuuugcacua

SEQ ID NO: 3541665 - RNA, 23 nt, Human
ggcucugaagcaaggcgguggac

SEQ ID NO: 3541666 - RNA, 18 nt, Human
ggcucugagaaggggagg

SEQ ID NO: 3541667 - RNA, 15 nt, Human
ggcucugagagucua

SEQ ID NO: 3541668 - RNA, 18 nt, Human
ggcucugagagucuagau

SEQ ID NO: 3541669 - RNA, 20 nt, Human
ggcucugagagucuagauuc

SEQ ID NO: 3541670 - RNA, 19 nt, Human
ggcucugaggugccugucc

SEQ ID NO: 3541671 - RNA, 16 nt, Human
ggcucugccccagagg

SEQ ID NO: 3541672 - RNA, 21 nt, Human
ggcucugccccagaggccucu

SEQ ID NO: 3541673 - RNA, 20 nt, Human
ggcucugccccagcucuggc

SEQ ID NO: 3541674 - RNA, 21 nt, Human
ggcucugccccagucguuaga

SEQ ID NO: 3541675 - RNA, 13 nt, Human
ggcucugcccugc

SEQ ID NO: 3541676 - RNA, 13 nt, Human
ggcucugccuccc

SEQ ID NO: 3541677 - RNA, 19 nt, Human
ggcucugcuggccggagca

SEQ ID NO: 3541678 - RNA, 15 nt, Human
ggcucuggagacagc

SEQ ID NO: 3541679 - RNA, 13 nt, Human
ggcucuggagccc

SEQ ID NO: 3541680 - RNA, 17 nt, Human
ggcucuggagcccacug

SEQ ID NO: 3541681 - RNA, 23 nt, Human
ggcucuggagcccacuguacuug

SEQ ID NO: 3541682 - RNA, 14 nt, Human
ggcucuguccccag

SEQ ID NO: 3541683 - RNA, 16 nt, Human
ggcucuguccccagcc

SEQ ID NO: 3541684 - RNA, 18 nt, Human
ggcucuguccccagccug

SEQ ID NO: 3541685 - RNA, 16 nt, Human
ggcucugugcugaccc

SEQ ID NO: 3541686 - RNA, 14 nt, Human
ggcucugugggcug

SEQ ID NO: 3541687 - RNA, 19 nt, Human
ggcucuuagcagcuuccag

SEQ ID NO: 3541688 - RNA, 11 nt, Human
ggcucuuccaa

SEQ ID NO: 3541689 - RNA, 20 nt, Human
ggcucuuccaggcugggaga

SEQ ID NO: 3541690 - RNA, 23 nt, Human
ggcucuuccaggcugggagagcc

SEQ ID NO: 3541691 - RNA, 12 nt, Human
ggcucuucuccu

SEQ ID NO: 3541692 - RNA, 13 nt, Human
ggcucuucugacu

SEQ ID NO: 3541693 - RNA, 17 nt, Human
ggcucuuuccuugcuca

SEQ ID NO: 3541694 - RNA, 13 nt, Human
ggcugaaaacaau

SEQ ID NO: 3541695 - RNA, 24 nt, Human
ggcugaaagaacauggacuuguau

SEQ ID NO: 3541696 - RNA, 13 nt, Human
ggcugaaagacag

SEQ ID NO: 3541697 - RNA, 21 nt, Human
ggcugaaaggaagcugugcgu

SEQ ID NO: 3541698 - RNA, 14 nt, Human
ggcugaaauucucc

SEQ ID NO: 3541699 - RNA, 17 nt, Human
ggcugaaauucuccugg

SEQ ID NO: 3541700 - RNA, 19 nt, Human
ggcugaaauucuccuggag

SEQ ID NO: 3541701 - RNA, 22 nt, Human
ggcugaaauucuccuggagguc

SEQ ID NO: 3541702 - RNA, 14 nt, Human
ggcugaacccugug

SEQ ID NO: 3541703 - RNA, 22 nt, Human
ggcugaacccugugcugguguc

SEQ ID NO: 3541704 - RNA, 23 nt, Human
ggcugaacccugugcuggugucc

SEQ ID NO: 3541705 - RNA, 17 nt, Human
ggcugaacggggagaaa

SEQ ID NO: 3541706 - RNA, 14 nt, Human
ggcugaaggacugu

SEQ ID NO: 3541707 - RNA, 16 nt, Human
ggcugaauagcagaag

SEQ ID NO: 3541708 - RNA, 18 nt, Human
ggcugacaucuguguuuc

SEQ ID NO: 3541709 - RNA, 16 nt, Human
ggcugaccacagcaca

SEQ ID NO: 3541710 - RNA, 17 nt, Human
ggcugaccacagcacag

SEQ ID NO: 3541711 - RNA, 22 nt, Human
ggcugaccacagcacagccaac

SEQ ID NO: 3541712 - RNA, 18 nt, Human
ggcugacccagucccugg

SEQ ID NO: 3541713 - RNA, 20 nt, Human
ggcugaccuuccucgcagag

SEQ ID NO: 3541714 - RNA, 23 nt, Human
ggcugacgugugagggaggacag

SEQ ID NO: 3541715 - RNA, 24 nt, Human
ggcugacuagaagggccaguccug

SEQ ID NO: 3541716 - RNA, 17 nt, Human
ggcugagaacccugcgu

SEQ ID NO: 3541717 - RNA, 18 nt, Human
ggcugagacaggagaauc

SEQ ID NO: 3541718 - RNA, 15 nt, Human
ggcugagagaguggc

SEQ ID NO: 3541719 - RNA, 17 nt, Human
ggcugagagaguggcau

SEQ ID NO: 3541720 - RNA, 14 nt, Human
ggcugagagcccca

SEQ ID NO: 3541721 - RNA, 16 nt, Human
ggcugagagccccagc

SEQ ID NO: 3541722 - RNA, 17 nt, Human
ggcugagagccccagcu

SEQ ID NO: 3541723 - RNA, 19 nt, Human
ggcugagagccccagcuga

SEQ ID NO: 3541724 - RNA, 22 nt, Human
ggcugagccccuaccccacacc

SEQ ID NO: 3541725 - RNA, 14 nt, Human
ggcugagcccuggc

SEQ ID NO: 3541726 - RNA, 21 nt, Human
ggcugaggaagcacagcagca

SEQ ID NO: 3541727 - RNA, 13 nt, Human
ggcugaggagcag

SEQ ID NO: 3541728 - RNA, 20 nt, Human
ggcugaggaggccuccaucu

SEQ ID NO: 3541729 - RNA, 17 nt, Human
ggcugaggcagaagaau

SEQ ID NO: 3541730 - RNA, 18 nt, Human
ggcugaggcaggagaauc

SEQ ID NO: 3541731 - RNA, 15 nt, Human
ggcugagggagccug

SEQ ID NO: 3541732 - RNA, 16 nt, Human
ggcugagggagccugg

SEQ ID NO: 3541733 - RNA, 22 nt, Human
ggcugagggauggacugaugcu

SEQ ID NO: 3541734 - RNA, 13 nt, Human
ggcugagggccug

SEQ ID NO: 3541735 - RNA, 17 nt, Human
ggcugagggccugcugg

SEQ ID NO: 3541736 - RNA, 18 nt, Human
ggcugagguuccucugcc

SEQ ID NO: 3541737 - RNA, 22 nt, Human
ggcugagguuccucugccugcc

SEQ ID NO: 3541738 - RNA, 17 nt, Human
ggcugaguagcucugcc

SEQ ID NO: 3541739 - RNA, 13 nt, Human
ggcugagugcagg

SEQ ID NO: 3541740 - RNA, 18 nt, Human
ggcugagugcaggcccac

SEQ ID NO: 3541741 - RNA, 13 nt, Human
ggcugaucucagg

SEQ ID NO: 3541742 - RNA, 14 nt, Human
ggcugaucucaggg

SEQ ID NO: 3541743 - RNA, 21 nt, Human
ggcugaugccaaguuguuuga

SEQ ID NO: 3541744 - RNA, 22 nt, Human
ggcugaugccaaguuguuugag

SEQ ID NO: 3541745 - RNA, 18 nt, Human
ggcugcaaaggguaucag

SEQ ID NO: 3541746 - RNA, 15 nt, Human
ggcugcacucugugc

SEQ ID NO: 3541747 - RNA, 13 nt, Human
ggcugcagaggcc

SEQ ID NO: 3541748 - RNA, 20 nt, Human
ggcugcagcagcgguggccu

SEQ ID NO: 3541749 - RNA, 12 nt, Human
ggcugcagcaug

SEQ ID NO: 3541750 - RNA, 22 nt, Human
ggcugcagccaggccacuggcc

SEQ ID NO: 3541751 - RNA, 14 nt, Human
ggcugcagccucag

SEQ ID NO: 3541752 - RNA, 17 nt, Human
ggcugcagcuggacaga

SEQ ID NO: 3541753 - RNA, 19 nt, Human
ggcugcagcuggacagagg

SEQ ID NO: 3541754 - RNA, 12 nt, Human
ggcugcagggag

SEQ ID NO: 3541755 - RNA, 22 nt, Human
ggcugcaguccuccgguugcau

SEQ ID NO: 3541756 - RNA, 15 nt, Human
ggcugcagugagcca

SEQ ID NO: 3541757 - RNA, 17 nt, Human
ggcugcaguucuacuca

SEQ ID NO: 3541758 - RNA, 21 nt, Human
ggcugcauacccgggcagggc

SEQ ID NO: 3541759 - RNA, 13 nt, Human
ggcugcauagaag

SEQ ID NO: 3541760 - RNA, 22 nt, Human
ggcugcaugauguuugcccaaa

SEQ ID NO: 3541761 - RNA, 22 nt, Human
ggcugcaugcgggcuuccuccu

SEQ ID NO: 3541762 - RNA, 19 nt, Human
ggcugccaaugggagcuca

SEQ ID NO: 3541763 - RNA, 20 nt, Human
ggcugccaaugggagcucau

SEQ ID NO: 3541764 - RNA, 17 nt, Human
ggcugccagugccuggg

SEQ ID NO: 3541765 - RNA, 21 nt, Human
ggcugcccccggcccccuggu

SEQ ID NO: 3541766 - RNA, 23 nt, Human
ggcugccccuaaucucuguagga

SEQ ID NO: 3541767 - RNA, 16 nt, Human
ggcugcccgcucccag

SEQ ID NO: 3541768 - RNA, 13 nt, Human
ggcugcccuccug

SEQ ID NO: 3541769 - RNA, 14 nt, Human
ggcugcccugagaa

SEQ ID NO: 3541770 - RNA, 21 nt, Human
ggcugcccugagaagcugcuc

SEQ ID NO: 3541771 - RNA, 17 nt, Human
ggcugcccuggcccuga

SEQ ID NO: 3541772 - RNA, 15 nt, Human
ucuggggcaggguua

SEQ ID NO: 3541773 - RNA, 19 nt, Human
ucuggggccuaauaaaacu

SEQ ID NO: 3541774 - RNA, 18 nt, Human
ucugggggcacaagacug

SEQ ID NO: 3541775 - RNA, 20 nt, Human
ucuggggggacccagugcag

SEQ ID NO: 3541776 - RNA, 17 nt, Human
ucugggggguggccagg

SEQ ID NO: 3541777 - RNA, 18 nt, Human
ucugggggguggccaggc

SEQ ID NO: 3541778 - RNA, 20 nt, Human
ucugggggguggccaggccg

SEQ ID NO: 3541779 - RNA, 19 nt, Human
ucugggguccccagggcug

SEQ ID NO: 3541780 - RNA, 22 nt, Human
ucuggggucuuuuuaugcauuu

SEQ ID NO: 3541781 - RNA, 17 nt, Human
ucugggguuaugauggc

SEQ ID NO: 3541782 - RNA, 22 nt, Human
ucugggguucagccccuccucu

SEQ ID NO: 3541783 - RNA, 23 nt, Human
ucugggguucagccccuccucug

SEQ ID NO: 3541784 - RNA, 13 nt, Human
ucuggguggcccu

SEQ ID NO: 3541785 - RNA, 13 nt, Human
ucuggguggccuc

SEQ ID NO: 3541786 - RNA, 19 nt, Human
ucugggugguugcccuuca

SEQ ID NO: 3541787 - RNA, 14 nt, Human
ucuggguucacugc

SEQ ID NO: 3541788 - RNA, 16 nt, Human
ucuggguucugggugg

SEQ ID NO: 3541789 - RNA, 23 nt, Human
ucugguagaagggaaagcccaua

SEQ ID NO: 3541790 - RNA, 22 nt, Human
ucugguaugaacuugaggacac

SEQ ID NO: 3541791 - RNA, 15 nt, Human
ucugguauuaaaugc

SEQ ID NO: 3541792 - RNA, 18 nt, Human
ucugguccauagagagca

SEQ ID NO: 3541793 - RNA, 14 nt, Human
ucuggucccuugca

SEQ ID NO: 3541794 - RNA, 13 nt, Human
ucugguccuaccc

SEQ ID NO: 3541795 - RNA, 13 nt, Human
ucugguccuuuuu

SEQ ID NO: 3541796 - RNA, 15 nt, Human
ucuggucgcuccugc

SEQ ID NO: 3541797 - RNA, 17 nt, Human
ucuggucgcuccugccc

SEQ ID NO: 3541798 - RNA, 22 nt, Human
ucuggucuaaauuguguuacua

SEQ ID NO: 3541799 - RNA, 18 nt, Human
ucuggucuccucagccuc

SEQ ID NO: 3541800 - RNA, 16 nt, Human
ucuggucucuaggcug

SEQ ID NO: 3541801 - RNA, 15 nt, Human
ucuggucucucuauu

SEQ ID NO: 3541802 - RNA, 17 nt, Human
ucuggugaagcucacuu

SEQ ID NO: 3541803 - RNA, 23 nt, Human
ucuggugaccuuccaagagccug

SEQ ID NO: 3541804 - RNA, 16 nt, Human
ucuggugacuuuccuc

SEQ ID NO: 3541805 - RNA, 23 nt, Human
ucuggugacuuuccucuuugguc

SEQ ID NO: 3541806 - RNA, 20 nt, Human
ucuggugagucaccacuuca

SEQ ID NO: 3541807 - RNA, 16 nt, Human
ucuggugauaaggaca

SEQ ID NO: 3541808 - RNA, 16 nt, Human
ucuggugccuccagag

SEQ ID NO: 3541809 - RNA, 12 nt, Human
ucugguggcccc

SEQ ID NO: 3541810 - RNA, 13 nt, Human
ucuggugucugcu

SEQ ID NO: 3541811 - RNA, 17 nt, Human
ucugguuagcucagccc

SEQ ID NO: 3541812 - RNA, 22 nt, Human
ucugguuagcucagccccagcc

SEQ ID NO: 3541813 - RNA, 13 nt, Human
ucugguuccuccc

SEQ ID NO: 3541814 - RNA, 15 nt, Human
ucugguuguuucugu

SEQ ID NO: 3541815 - RNA, 18 nt, Human
ucugguuguuucuguucc

SEQ ID NO: 3541816 - RNA, 22 nt, Human
ucugguuguuucuguuccaaau

SEQ ID NO: 3541817 - RNA, 14 nt, Human
ucugguuucucauu

SEQ ID NO: 3541818 - RNA, 22 nt, Human
ucugguuugacuccgcuggagg

SEQ ID NO: 3541819 - RNA, 15 nt, Human
ucugguuuugcuauu

SEQ ID NO: 3541820 - RNA, 11 nt, Human
ucuguaaaauc

SEQ ID NO: 3541821 - RNA, 13 nt, Human
ucuguaaaaucuu

SEQ ID NO: 3541822 - RNA, 18 nt, Human
ucuguaaacucaaaacuu

SEQ ID NO: 3541823 - RNA, 14 nt, Human
ucuguaaacugugu

SEQ ID NO: 3541824 - RNA, 16 nt, Human
ucuguaaauauguuuu

SEQ ID NO: 3541825 - RNA, 22 nt, Human
ucuguaagcuguuugguuuuaa

SEQ ID NO: 3541826 - RNA, 23 nt, Human
ucuguaagcuguuugguuuuaaa

SEQ ID NO: 3541827 - RNA, 24 nt, Human
ucuguaauaaacucauuucuagca

SEQ ID NO: 3541828 - RNA, 13 nt, Human
ucuguaauauuua

SEQ ID NO: 3541829 - RNA, 17 nt, Human
ucuguaauuguguguga

SEQ ID NO: 3541830 - RNA, 23 nt, Human
ucuguacagagcccacgccccca

SEQ ID NO: 3541831 - RNA, 23 nt, Human
ucuguacagagccguaaaaacug

SEQ ID NO: 3541832 - RNA, 18 nt, Human
ucuguacauagccuauau

SEQ ID NO: 3541833 - RNA, 22 nt, Human
ucuguaccaguuaauuuuucca

SEQ ID NO: 3541834 - RNA, 17 nt, Human
ucuguacgucugacagg

SEQ ID NO: 3541835 - RNA, 22 nt, Human
ucuguacuaaacaguaagauau

SEQ ID NO: 3541836 - RNA, 14 nt, Human
ucuguacuuccuga

SEQ ID NO: 3541837 - RNA, 14 nt, Human
ucuguacuuuuugg

SEQ ID NO: 3541838 - RNA, 18 nt, Human
ucuguagagggcccuggu

SEQ ID NO: 3541839 - RNA, 19 nt, Human
ucuguagagggcccuggug

SEQ ID NO: 3541840 - RNA, 13 nt, Human
ucuguagcuccuc

SEQ ID NO: 3541841 - RNA, 23 nt, Human
ucuguaggccaguaguucucaaa

SEQ ID NO: 3541842 - RNA, 22 nt, Human
ucuguagggauuuuuggcuaca

SEQ ID NO: 3541843 - RNA, 16 nt, Human
ucuguagggcuggacc

SEQ ID NO: 3541844 - RNA, 20 nt, Human
ucuguagguugcacacuuug

SEQ ID NO: 3541845 - RNA, 19 nt, Human
ucuguaguacuccuuaaga

SEQ ID NO: 3541846 - RNA, 19 nt, Human
ucuguagucauuuacuaaa

SEQ ID NO: 3541847 - RNA, 22 nt, Human
ucuguauaaacauuaaaugucu

SEQ ID NO: 3541848 - RNA, 23 nt, Human
ucuguauaaacauuaaaugucuu

SEQ ID NO: 3541849 - RNA, 23 nt, Human
ucuguauaaagccuguauucuca

SEQ ID NO: 3541850 - RNA, 20 nt, Human
ucuguauaaaugucuuuaau

SEQ ID NO: 3541851 - RNA, 17 nt, Human
ucuguauaaguaagaaa

SEQ ID NO: 3541852 - RNA, 22 nt, Human
ucuguauaaguaagaaaauauu

SEQ ID NO: 3541853 - RNA, 16 nt, Human
ucuguauaauacuuug

SEQ ID NO: 3541854 - RNA, 19 nt, Human
ucuguauaauacuuuguau

SEQ ID NO: 3541855 - RNA, 15 nt, Human
ucuguauauaaaugg

SEQ ID NO: 3541856 - RNA, 13 nt, Human
ucuguaucucucu

SEQ ID NO: 3541857 - RNA, 13 nt, Human
ucuguauguauua

SEQ ID NO: 3541858 - RNA, 15 nt, Human
ucuguauguguucua

SEQ ID NO: 3541859 - RNA, 23 nt, Human
ucuguauuuaugugugaggagcu

SEQ ID NO: 3541860 - RNA, 13 nt, Human
ucuguauuugaaa

SEQ ID NO: 3541861 - RNA, 22 nt, Human
ucuguauuuuuucuugcauuga

SEQ ID NO: 3541862 - RNA, 17 nt, Human
ucugucaaaacacugug

SEQ ID NO: 3541863 - RNA, 19 nt, Human
ucugucaaaacacugugga

SEQ ID NO: 3541864 - RNA, 20 nt, Human
ucugucaaaacacuguggaa

SEQ ID NO: 3541865 - RNA, 13 nt, Human
ucugucaagaaga

SEQ ID NO: 3541866 - RNA, 14 nt, Human
ugaacaaaaggguc

SEQ ID NO: 3541867 - RNA, 14 nt, Human
ugaacaaaauaaau

SEQ ID NO: 3541868 - RNA, 15 nt, Human
ugaacaaaaucuguu

SEQ ID NO: 3541869 - RNA, 13 nt, Human
ugaacaaacuaaa

SEQ ID NO: 3541870 - RNA, 14 nt, Human
ugaacaaagcagcc

SEQ ID NO: 3541871 - RNA, 16 nt, Human
ugaacaaagcagccac

SEQ ID NO: 3541872 - RNA, 17 nt, Human
ugaacaaagcagccacg

SEQ ID NO: 3541873 - RNA, 22 nt, Human
ugaacaaccucggcuccuggac

SEQ ID NO: 3541874 - RNA, 11 nt, Human
ugaacaagaau

SEQ ID NO: 3541875 - RNA, 12 nt, Human
ugaacaagaauu

SEQ ID NO: 3541876 - RNA, 23 nt, Human
ugaacaagcaaacccagacggcu

SEQ ID NO: 3541877 - RNA, 15 nt, Human
ugaacaagcauucuc

SEQ ID NO: 3541878 - RNA, 16 nt, Human
ugaacaagugaacaca

SEQ ID NO: 3541879 - RNA, 19 nt, Human
ugaacaaguuguuucauug

SEQ ID NO: 3541880 - RNA, 22 nt, Human
ugaacaaguuguuucauugacu

SEQ ID NO: 3541881 - RNA, 18 nt, Human
ugaacaaguuuuaaugua

SEQ ID NO: 3541882 - RNA, 21 nt, Human
ugaacaauugucgaaaagagu

SEQ ID NO: 3541883 - RNA, 12 nt, Human
ugaacacaaauu

SEQ ID NO: 3541884 - RNA, 17 nt, Human
ugaacacaaauuaugcu

SEQ ID NO: 3541885 - RNA, 18 nt, Human
ugaacacacuguguccug

SEQ ID NO: 3541886 - RNA, 23 nt, Human
ugaacacacuguguccuggugcu

SEQ ID NO: 3541887 - RNA, 14 nt, Human
ugaacacaggcagc

SEQ ID NO: 3541888 - RNA, 11 nt, Human
ugaacacagua

SEQ ID NO: 3541889 - RNA, 16 nt, Human
ugaacacucaugcuga

SEQ ID NO: 3541890 - RNA, 18 nt, Human
ugaacacucaugcugaaa

SEQ ID NO: 3541891 - RNA, 18 nt, Human
ugaacacuccaauuaagg

SEQ ID NO: 3541892 - RNA, 14 nt, Human
ugaacacuggggga

SEQ ID NO: 3541893 - RNA, 15 nt, Human
ugaacacuuauugcu

SEQ ID NO: 3541894 - RNA, 17 nt, Human
ugaacacuuauugcuuu

SEQ ID NO: 3541895 - RNA, 18 nt, Human
ugaacacuuauugcuuug

SEQ ID NO: 3541896 - RNA, 16 nt, Human
ugaacacuuggugcug

SEQ ID NO: 3541897 - RNA, 18 nt, Human
ugaacacuuggugcuggg

SEQ ID NO: 3541898 - RNA, 19 nt, Human
ugaacacuuggugcuggga

SEQ ID NO: 3541899 - RNA, 13 nt, Human
ugaacagaacaua

SEQ ID NO: 3541900 - RNA, 16 nt, Human
ugaacagaagcucuua

SEQ ID NO: 3541901 - RNA, 17 nt, Human
ugaacagacugaccuug

SEQ ID NO: 3541902 - RNA, 23 nt, Human
ugaacagcauggcacucccucca

SEQ ID NO: 3541903 - RNA, 21 nt, Human
ugaacagcggcuggacuugga

SEQ ID NO: 3541904 - RNA, 22 nt, Human
ugaacagcggcuggacuuggag

SEQ ID NO: 3541905 - RNA, 13 nt, Human
ugaacagcuggug

SEQ ID NO: 3541906 - RNA, 19 nt, Human
ugaacaggugggugucugc

SEQ ID NO: 3541907 - RNA, 12 nt, Human
ugaacagugcac

SEQ ID NO: 3541908 - RNA, 22 nt, Human
ugaacaguuuaugcagugcugc

SEQ ID NO: 3541909 - RNA, 17 nt, Human
ugaacauauuguugaaa

SEQ ID NO: 3541910 - RNA, 17 nt, Human
ugaacauccccucccau

SEQ ID NO: 3541911 - RNA, 17 nt, Human
ugaacauccuuccuucc

SEQ ID NO: 3541912 - RNA, 14 nt, Human
ugaacauggacucu

SEQ ID NO: 3541913 - RNA, 17 nt, Human
ugaacauugcaauagaa

SEQ ID NO: 3541914 - RNA, 12 nt, Human
ugaacauugcau

SEQ ID NO: 3541915 - RNA, 20 nt, Human
ugaacauuuacuacaguuuu

SEQ ID NO: 3541916 - RNA, 16 nt, Human
ucuguucugauauuaa

SEQ ID NO: 3541917 - RNA, 14 nt, Human
ucuguucuguggaa

SEQ ID NO: 3541918 - RNA, 23 nt, Human
ucuguucuguggaaaguguaaag

SEQ ID NO: 3541919 - RNA, 22 nt, Human
ucuguucuuuccaaaguacacu

SEQ ID NO: 3541920 - RNA, 12 nt, Human
ucuguugaaguu

SEQ ID NO: 3541921 - RNA, 16 nt, Human
ucuguugcaagugcaa

SEQ ID NO: 3541922 - RNA, 22 nt, Human
ucuguugcaauuaggauuuuga

SEQ ID NO: 3541923 - RNA, 22 nt, Human
ucuguuggaagcuuguuuucca

SEQ ID NO: 3541924 - RNA, 18 nt, Human
ucuguuggauuccaugcu

SEQ ID NO: 3541925 - RNA, 15 nt, Human
ucuguuggcaggcug

SEQ ID NO: 3541926 - RNA, 12 nt, Human
ucuguuggccag

SEQ ID NO: 3541927 - RNA, 18 nt, Human
ucuguuggccagugugac

SEQ ID NO: 3541928 - RNA, 23 nt, Human
ucuguuggguggcaucauuccag

SEQ ID NO: 3541929 - RNA, 14 nt, Human
ucuguuguaacuua

SEQ ID NO: 3541930 - RNA, 16 nt, Human
ucuguuguaacuuaug

SEQ ID NO: 3541931 - RNA, 12 nt, Human
ucuguuguuuuu

SEQ ID NO: 3541932 - RNA, 17 nt, Human
ucuguuuaaaguagauu

SEQ ID NO: 3541933 - RNA, 13 nt, Human
ucuguuuaagaaa

SEQ ID NO: 3541934 - RNA, 18 nt, Human
ucuguuuaauuuucacuu

SEQ ID NO: 3541935 - RNA, 12 nt, Human
ucuguuucaagg

SEQ ID NO: 3541936 - RNA, 23 nt, Human
ucuguuucaaggcacucuagauu

SEQ ID NO: 3541937 - RNA, 16 nt, Human
ucuguuucucuuuccu

SEQ ID NO: 3541938 - RNA, 13 nt, Human
ucuguuugcugug

SEQ ID NO: 3541939 - RNA, 14 nt, Human
ucuguuugcuguug

SEQ ID NO: 3541940 - RNA, 13 nt, Human
ucuguuuguuaaa

SEQ ID NO: 3541941 - RNA, 16 nt, Human
ucuguuuuaaaaaccu

SEQ ID NO: 3541942 - RNA, 14 nt, Human
ucuguuuuacaagu

SEQ ID NO: 3541943 - RNA, 18 nt, Human
ucuguuuuauaauuuugu

SEQ ID NO: 3541944 - RNA, 17 nt, Human
ucuguuuuaugacuuca

SEQ ID NO: 3541945 - RNA, 13 nt, Human
ucuguuuuccuuu

SEQ ID NO: 3541946 - RNA, 12 nt, Human
ucuguuuucugu

SEQ ID NO: 3541947 - RNA, 17 nt, Human
ucuguuuugaaggcaaa

SEQ ID NO: 3541948 - RNA, 22 nt, Human
ucuguuuuguaaaguccccaga

SEQ ID NO: 3541949 - RNA, 19 nt, Human
ucuguuuuguuucgcucuu

SEQ ID NO: 3541950 - RNA, 21 nt, Human
ucuguuuuguuucgcucuuug

SEQ ID NO: 3541951 - RNA, 23 nt, Human
ucuguuuuguuuggcaaggaaag

SEQ ID NO: 3541952 - RNA, 14 nt, Human
ucuguuuuuaaaaa

SEQ ID NO: 3541953 - RNA, 13 nt, Human
ucuuaaaaaguaa

SEQ ID NO: 3541954 - RNA, 13 nt, Human
ucuuaaaaagugg

SEQ ID NO: 3541955 - RNA, 19 nt, Human
ucuuaaaaaguuguucaac

SEQ ID NO: 3541956 - RNA, 13 nt, Human
ucuuaaaaccugc

SEQ ID NO: 3541957 - RNA, 13 nt, Human
ucuuaaaacuccu

SEQ ID NO: 3541958 - RNA, 19 nt, Human
ucuuaaaagcuaucuucau

SEQ ID NO: 3541959 - RNA, 14 nt, Human
ucuuaaaauaacuu

SEQ ID NO: 3541960 - RNA, 16 nt, Human
ucuuaaaaugcaauau

SEQ ID NO: 3541961 - RNA, 21 nt, Human
ucuuaaaaugcaauauuugua

SEQ ID NO: 3541962 - RNA, 20 nt, Human
ucuuaaaauguuucaaaugg

SEQ ID NO: 3541963 - RNA, 17 nt, Human
ucuuaaagaaacagcuu

SEQ ID NO: 3541964 - RNA, 22 nt, Human
ucuuaaagaaacagcuuucaag

SEQ ID NO: 3541965 - RNA, 23 nt, Human
ucuuaaagcugccuguaguuagg

SEQ ID NO: 3541966 - RNA, 19 nt, Human
ucuuaaagugccaguauuu

SEQ ID NO: 3541967 - RNA, 21 nt, Human
ucuuaaaguugaauuuauugg

SEQ ID NO: 3541968 - RNA, 13 nt, Human
ucuuaaauaaaag

SEQ ID NO: 3541969 - RNA, 15 nt, Human
ucuuaaauaaaccuu

SEQ ID NO: 3541970 - RNA, 19 nt, Human
ucuuaaauaauaaagauca

SEQ ID NO: 3541971 - RNA, 22 nt, Human
ucuuaaauaaugcuucagauau

SEQ ID NO: 3541972 - RNA, 11 nt, Human
ucuuaaauuuu

SEQ ID NO: 3541973 - RNA, 15 nt, Human
ucuuaacaauuucug

SEQ ID NO: 3541974 - RNA, 19 nt, Human
ucuuaacaauuucuguccu

SEQ ID NO: 3541975 - RNA, 12 nt, Human
ucuuaaccaucu

SEQ ID NO: 3541976 - RNA, 14 nt, Human
ucuuaagaaauaaa

SEQ ID NO: 3541977 - RNA, 16 nt, Human
ucuuaagaaauaaauc

SEQ ID NO: 3541978 - RNA, 18 nt, Human
ucuuaagaagacugcauu

SEQ ID NO: 3541979 - RNA, 21 nt, Human
ucuuaagacagcauguguuaa

SEQ ID NO: 3541980 - RNA, 22 nt, Human
ucuuaagaccaccucaaauuua

SEQ ID NO: 3541981 - RNA, 16 nt, Human
ucuuaagccaucuugg

SEQ ID NO: 3541982 - RNA, 17 nt, Human
ucuuaagccaucuuggu

SEQ ID NO: 3541983 - RNA, 19 nt, Human
ucuuaaggacaaagugcca

SEQ ID NO: 3541984 - RNA, 16 nt, Human
ucuuaaggggcagcuu

SEQ ID NO: 3541985 - RNA, 18 nt, Human
ucuuaaggugaggccugu

SEQ ID NO: 3541986 - RNA, 23 nt, Human
ucuuaaggugaggccugucugug

SEQ ID NO: 3541987 - RNA, 18 nt, Human
ucuuaaguuucucagcuc

SEQ ID NO: 3541988 - RNA, 14 nt, Human
ucuuaauauaaauu

SEQ ID NO: 3541989 - RNA, 20 nt, Human
ucuuaauauaaauucacuuu

SEQ ID NO: 3541990 - RNA, 15 nt, Human
ucuuaauauaacugc

SEQ ID NO: 3541991 - RNA, 18 nt, Human
ucuuaauauaacugccuu

SEQ ID NO: 3541992 - RNA, 14 nt, Human
ucuuaaucauuuuu

SEQ ID NO: 3541993 - RNA, 18 nt, Human
ucuuaaucuuuucacaaa

SEQ ID NO: 3541994 - RNA, 19 nt, Human
ucuuaaugaaguuugaaug

SEQ ID NO: 3541995 - RNA, 22 nt, Human
ucuuaaugaaguuugaauguua

SEQ ID NO: 3541996 - RNA, 19 nt, Human
ucuuaauggaugaaaucau

SEQ ID NO: 3541997 - RNA, 19 nt, Human
ucuuaauguacauagugcu

SEQ ID NO: 3541998 - RNA, 13 nt, Human
ucuuaauguuccu

SEQ ID NO: 3541999 - RNA, 15 nt, Human
ucuuaauguuccuca

SEQ ID NO: 3542000 - RNA, 21 nt, Human
ucuuaauuaaguaaacuaaug

SEQ ID NO: 3542001 - RNA, 14 nt, Human
ucuuaauuaauuug

SEQ ID NO: 3542002 - RNA, 19 nt, Human
ucuuaauuauuauaaaaau

SEQ ID NO: 3542003 - RNA, 20 nt, Human
ucuuaauuauuauuuguguu

SEQ ID NO: 3542004 - RNA, 19 nt, Human
ucuuaauugccaccucuaa

SEQ ID NO: 3542005 - RNA, 21 nt, Human
ucuuaauuuugguuguauucu

SEQ ID NO: 3542006 - RNA, 13 nt, Human
ucuuacaaagugu

SEQ ID NO: 3542007 - RNA, 16 nt, Human
ucuuacaaaguguauu

SEQ ID NO: 3542008 - RNA, 23 nt, Human
ucuuacacugccuguauacuuua

SEQ ID NO: 3542009 - RNA, 15 nt, Human
ucuuacccaauuucc

SEQ ID NO: 3542010 - RNA, 22 nt, Human
ucuuacccuguacauauguaaa

SEQ ID NO: 3542011 - RNA, 15 nt, Human
ucuuacccuucugug

SEQ ID NO: 3542012 - RNA, 18 nt, Human
ucuuacccuucugugccc

SEQ ID NO: 3542013 - RNA, 22 nt, Human
ucuuacccuucugugcccagcu

SEQ ID NO: 3542014 - RNA, 17 nt, Human
ucuuaccgacaagcaca

SEQ ID NO: 3542015 - RNA, 19 nt, Human
ucuuacgcccaacccuucc

SEQ ID NO: 3542016 - RNA, 24 nt, Human
ucuuacuaaacauuuuguuauugg

SEQ ID NO: 3542017 - RNA, 20 nt, Human
ucuuacuaauguaaaaugau

SEQ ID NO: 3542018 - RNA, 21 nt, Human
ucuuacuauuaagcaguaaaa

SEQ ID NO: 3542019 - RNA, 19 nt, Human
ucuuacuccuccucuuucu

SEQ ID NO: 3542020 - RNA, 20 nt, Human
ucuuacuccuccucuuucuc

SEQ ID NO: 3542021 - RNA, 21 nt, Human
ucuuacuccuccucuuucucu

SEQ ID NO: 3542022 - RNA, 13 nt, Human
ucuuacugaaggu

SEQ ID NO: 3542023 - RNA, 14 nt, Human
ucuuacugauaauu

SEQ ID NO: 3542024 - RNA, 18 nt, Human
ucuuacuguaccuguucc

SEQ ID NO: 3542025 - RNA, 17 nt, Human
ucuuacuugagccuuua

SEQ ID NO: 3542026 - RNA, 23 nt, Human
ucuuacuuuccuuuccccagccc

SEQ ID NO: 3542027 - RNA, 13 nt, Human
ucuuacuuuguaa

SEQ ID NO: 3542028 - RNA, 18 nt, Human
ucuuacuuuguaaauucu

SEQ ID NO: 3542029 - RNA, 20 nt, Human
ucuuacuuuguaaauucuga

SEQ ID NO: 3542030 - RNA, 22 nt, Human
ucuuacuuuguaaauucugauu

SEQ ID NO: 3542031 - RNA, 20 nt, Human
ucuuagaaaaggugauaaaa

SEQ ID NO: 3542032 - RNA, 13 nt, Human
ucuuagaaaugaa

SEQ ID NO: 3542033 - RNA, 11 nt, Human
ucuuagaaauu

SEQ ID NO: 3542034 - RNA, 15 nt, Human
ucuuagaagaauauu

SEQ ID NO: 3542035 - RNA, 17 nt, Human
ucuuagaagaauauugu

SEQ ID NO: 3542036 - RNA, 18 nt, Human
ucuuagaagaauauugua

SEQ ID NO: 3542037 - RNA, 19 nt, Human
ucuuagaagaauauuguau

SEQ ID NO: 3542038 - RNA, 14 nt, Human
gggaggggcuccuu

SEQ ID NO: 3542039 - RNA, 13 nt, Human
gggagggggcaga

SEQ ID NO: 3542040 - RNA, 15 nt, Human
gggagggggcagaag

SEQ ID NO: 3542041 - RNA, 17 nt, Human
gggaggggggcacaugc

SEQ ID NO: 3542042 - RNA, 21 nt, Human
gggaggggguuacaaacugca

SEQ ID NO: 3542043 - RNA, 23 nt, Human
gggagggguugccacaggccucc

SEQ ID NO: 3542044 - RNA, 16 nt, Human
gggaggguaggcagga

SEQ ID NO: 3542045 - RNA, 17 nt, Human
gggaggguuggggaggg

SEQ ID NO: 3542046 - RNA, 18 nt, Human
gggaggucaaggcugcag

SEQ ID NO: 3542047 - RNA, 15 nt, Human
gggaggucaggcccu

SEQ ID NO: 3542048 - RNA, 16 nt, Human
gggaggucgagguagg

SEQ ID NO: 3542049 - RNA, 23 nt, Human
gggaggugcuucuaguucugcca

SEQ ID NO: 3542050 - RNA, 20 nt, Human
gggaggugggauccuccagg

SEQ ID NO: 3542051 - RNA, 17 nt, Human
gggaguagacuugcuuu

SEQ ID NO: 3542052 - RNA, 21 nt, Human
gggaguaugcaaaaguucuga

SEQ ID NO: 3542053 - RNA, 17 nt, Human
gggaguccccuuuucuu

SEQ ID NO: 3542054 - RNA, 15 nt, Human
gggagucccgucagg

SEQ ID NO: 3542055 - RNA, 14 nt, Human
gggagucugccagg

SEQ ID NO: 3542056 - RNA, 17 nt, Human
gggagugacagaggcag

SEQ ID NO: 3542057 - RNA, 19 nt, Human
gggagugagacagaaguaa

SEQ ID NO: 3542058 - RNA, 14 nt, Human
gggagugagcuggu

SEQ ID NO: 3542059 - RNA, 15 nt, Human
gggaguggaguggaa

SEQ ID NO: 3542060 - RNA, 13 nt, Human
gggaguggccaca

SEQ ID NO: 3542061 - RNA, 20 nt, Human
ucuugucuuccuauuucaga

SEQ ID NO: 3542062 - RNA, 14 nt, Human
ucuugugaaauggc

SEQ ID NO: 3542063 - RNA, 18 nt, Human
ucuugugaauauguacau

SEQ ID NO: 3542064 - RNA, 16 nt, Human
ucuugugacuagugcu

SEQ ID NO: 3542065 - RNA, 22 nt, Human
ucuugugacuagugcugaagcu

SEQ ID NO: 3542066 - RNA, 22 nt, Human
ucuugugcacuggcaccaagug

SEQ ID NO: 3542067 - RNA, 23 nt, Human
ucuugugcuggauggagcccagg

SEQ ID NO: 3542068 - RNA, 18 nt, Human
ucuugugcuuuuccugau

SEQ ID NO: 3542069 - RNA, 22 nt, Human
ucuuguggcuuugcaaccauuu

SEQ ID NO: 3542070 - RNA, 18 nt, Human
ucuugugugauuaacuua

SEQ ID NO: 3542071 - RNA, 19 nt, Human
ucuugugugauuaacuuau

SEQ ID NO: 3542072 - RNA, 15 nt, Human
ucuuguguguaugca

SEQ ID NO: 3542073 - RNA, 12 nt, Human
ucuuguguuucu

SEQ ID NO: 3542074 - RNA, 16 nt, Human
ucuuguuaagugcagu

SEQ ID NO: 3542075 - RNA, 11 nt, Human
ucuuguugcuu

SEQ ID NO: 3542076 - RNA, 13 nt, Human
ucuuguugcuuug

SEQ ID NO: 3542077 - RNA, 19 nt, Human
ucuuguugcuuuguugcac

SEQ ID NO: 3542078 - RNA, 13 nt, Human
ucuuguuuauuga

SEQ ID NO: 3542079 - RNA, 14 nt, Human
ucuuguuucaauuc

SEQ ID NO: 3542080 - RNA, 15 nt, Human
ucuuguuuccuuguu

SEQ ID NO: 3542081 - RNA, 22 nt, Human
ucuuguuucuuuucacauagcu

SEQ ID NO: 3542082 - RNA, 16 nt, Human
ucuuguuuugcuuccc

SEQ ID NO: 3542083 - RNA, 15 nt, Human
ucuuguuuuguuugu

SEQ ID NO: 3542084 - RNA, 22 nt, Human
ucuuguuuuguuugucucuccu

SEQ ID NO: 3542085 - RNA, 21 nt, Human
ucuuguuuuuaaguuugcacu

SEQ ID NO: 3542086 - RNA, 21 nt, Human
ucuuguuuuuauuaauuuaua

SEQ ID NO: 3542087 - RNA, 18 nt, Human
ucuuuaaaaaaaaaauug

SEQ ID NO: 3542088 - RNA, 19 nt, Human
ucuuuaaaaaaaaaauugg

SEQ ID NO: 3542089 - RNA, 12 nt, Human
ucuuuaaaaacu

SEQ ID NO: 3542090 - RNA, 15 nt, Human
ucuuuaaaaacuguu

SEQ ID NO: 3542091 - RNA, 14 nt, Human
ucuuuaaaacaaaa

SEQ ID NO: 3542092 - RNA, 16 nt, Human
ucuuuaaaacaaaaca

SEQ ID NO: 3542093 - RNA, 22 nt, Human
ugacccuucccaaucagcacug

SEQ ID NO: 3542094 - RNA, 15 nt, Human
ugacccuugcuguga

SEQ ID NO: 3542095 - RNA, 14 nt, Human
ugaccggaggcaaa

SEQ ID NO: 3542096 - RNA, 14 nt, Human
ugaccgugaggcca

SEQ ID NO: 3542097 - RNA, 20 nt, Human
ugaccgugggcggggccuug

SEQ ID NO: 3542098 - RNA, 17 nt, Human
ugaccuaaauuauuuac

SEQ ID NO: 3542099 - RNA, 16 nt, Human
ugaccuacaaaucaau

SEQ ID NO: 3542100 - RNA, 20 nt, Human
ugaccucaggcaaucugccc

SEQ ID NO: 3542101 - RNA, 21 nt, Human
ugaccucaggcaaucugcccg

SEQ ID NO: 3542102 - RNA, 21 nt, Human
ugaccucaggugauccaccca

SEQ ID NO: 3542103 - RNA, 13 nt, Human
ugaccucaugcau

SEQ ID NO: 3542104 - RNA, 16 nt, Human
ugaccucaugcaucuc

SEQ ID NO: 3542105 - RNA, 22 nt, Human
ugaccucaugcaucuccaccug

SEQ ID NO: 3542106 - RNA, 21 nt, Human
ugaccucauuaaccgaugcuu

SEQ ID NO: 3542107 - RNA, 15 nt, Human
ugaccuccacagcuu

SEQ ID NO: 3542108 - RNA, 17 nt, Human
ugaccuccacagcuucc

SEQ ID NO: 3542109 - RNA, 13 nt, Human
ugaccuccagcuu

SEQ ID NO: 3542110 - RNA, 22 nt, Human
ugaccuccaugacugcacagua

SEQ ID NO: 3542111 - RNA, 14 nt, Human
ugaccucccagccc

SEQ ID NO: 3542112 - RNA, 16 nt, Human
ugaccucccagcccua

SEQ ID NO: 3542113 - RNA, 13 nt, Human
ugaccucccccuc

SEQ ID NO: 3542114 - RNA, 22 nt, Human
ugaccucccucuaauuuaucuu

SEQ ID NO: 3542115 - RNA, 19 nt, Human
ugaccuccgccauccaccc

SEQ ID NO: 3542116 - RNA, 19 nt, Human
ugaccuccucccuguuauu

SEQ ID NO: 3542117 - RNA, 21 nt, Human
ugaccucuauaauugccacug

SEQ ID NO: 3542118 - RNA, 13 nt, Human
ugaccucugcagc

SEQ ID NO: 3542119 - RNA, 21 nt, Human
ugaccucugcagcaauaaagc

SEQ ID NO: 3542120 - RNA, 17 nt, Human
ugaccucuguccucccu

SEQ ID NO: 3542121 - RNA, 19 nt, Human
ugaccucuguuguccuccc

SEQ ID NO: 3542122 - RNA, 16 nt, Human
ugaccucuugcugucu

SEQ ID NO: 3542123 - RNA, 17 nt, Human
ugaccucuugcugucuc

SEQ ID NO: 3542124 - RNA, 21 nt, Human
ugaccucuugcugucucugcu

SEQ ID NO: 3542125 - RNA, 23 nt, Human
ugaccucuugcugucucugcucg

SEQ ID NO: 3542126 - RNA, 13 nt, Human
ugaccugaaguuc

SEQ ID NO: 3542127 - RNA, 22 nt, Human
ugaccugacuugccuccguguc

SEQ ID NO: 3542128 - RNA, 15 nt, Human
ugaccugaggcccuu

SEQ ID NO: 3542129 - RNA, 17 nt, Human
ugaccugaggcccuucu

SEQ ID NO: 3542130 - RNA, 18 nt, Human
ugaccugaggcccuucuc

SEQ ID NO: 3542131 - RNA, 19 nt, Human
ugaccugaggcccuucucu

SEQ ID NO: 3542132 - RNA, 18 nt, Human
ugaccugaggcuccugug

SEQ ID NO: 3542133 - RNA, 17 nt, Human
ugaccugaggcuguggu

SEQ ID NO: 3542134 - RNA, 11 nt, Human
ugaccugcagg

SEQ ID NO: 3542135 - RNA, 12 nt, Human
ugaccugcauug

SEQ ID NO: 3542136 - RNA, 18 nt, Human
ugaccugcauuguaaaua

SEQ ID NO: 3542137 - RNA, 16 nt, Human
ugaccugccaggcaca

SEQ ID NO: 3542138 - RNA, 16 nt, Human
ugaccugccucccuuc

SEQ ID NO: 3542139 - RNA, 23 nt, Human
ugaccugccucccuucaugcaug

SEQ ID NO: 3542140 - RNA, 18 nt, Human
ugaccugcuaggccagag

SEQ ID NO: 3542141 - RNA, 18 nt, Human
ugaccugcuccgcugcuc

SEQ ID NO: 3542142 - RNA, 13 nt, Human
ugaccugcugacc

SEQ ID NO: 3542143 - RNA, 14 nt, Human
ugaccugcugagcu

SEQ ID NO: 3542144 - RNA, 15 nt, Human
ugaccugcugagcuc

SEQ ID NO: 3542145 - RNA, 21 nt, Human
ugaccugcugagcucugagag

SEQ ID NO: 3542146 - RNA, 15 nt, Human
ugaccugguccacag

SEQ ID NO: 3542147 - RNA, 20 nt, Human
ugaccugguccacagggcac

SEQ ID NO: 3542148 - RNA, 16 nt, Human
ugaccugucaugcccc

SEQ ID NO: 3542149 - RNA, 21 nt, Human
ugaccuguggggauuucuccc

SEQ ID NO: 3542150 - RNA, 14 nt, Human
ugaccugugucacu

SEQ ID NO: 3542151 - RNA, 15 nt, Human
ugaccugugucacua

SEQ ID NO: 3542152 - RNA, 15 nt, Human
ugaccuguuucucug

SEQ ID NO: 3542153 - RNA, 15 nt, Human
ugaccuuaguguuuc

SEQ ID NO: 3542154 - RNA, 20 nt, Human
ugaccuucauuucauguaua

SEQ ID NO: 3542155 - RNA, 18 nt, Human
ugaccuuccaagagccug

SEQ ID NO: 3542156 - RNA, 20 nt, Human
ugaccuuccucgcagagagg

SEQ ID NO: 3542157 - RNA, 14 nt, Human
ugaccuuccuuccu

SEQ ID NO: 3542158 - RNA, 17 nt, Human
ugaccuucuaggaagcu

SEQ ID NO: 3542159 - RNA, 19 nt, Human
ugaccuugaacuccugggc

SEQ ID NO: 3542160 - RNA, 22 nt, Human
ugaccuugaggagucuugugug

SEQ ID NO: 3542161 - RNA, 20 nt, Human
ugaccuuggagagacacagc

SEQ ID NO: 3542162 - RNA, 16 nt, Human
ugaccuuguaauguaa

SEQ ID NO: 3542163 - RNA, 16 nt, Human
ugaccuuuagguauua

SEQ ID NO: 3542164 - RNA, 14 nt, Human
ugaccuuuguacag

SEQ ID NO: 3542165 - RNA, 23 nt, Human
ugaccuuuuauguaguaauugac

SEQ ID NO: 3542166 - RNA, 15 nt, Human
ugacgaggcugggcc

SEQ ID NO: 3542167 - RNA, 19 nt, Human
ugacgcaacccacguguaa

SEQ ID NO: 3542168 - RNA, 23 nt, Human
ugacgccaggguaugaagagugu

SEQ ID NO: 3542169 - RNA, 15 nt, Human
ugacgccaucccagc

SEQ ID NO: 3542170 - RNA, 18 nt, Human
ugacgcugaauaaauguc

SEQ ID NO: 3542171 - RNA, 14 nt, Human
ugacgcugauacau

SEQ ID NO: 3542172 - RNA, 23 nt, Human
ugacgcugauacauaacuaaauu

SEQ ID NO: 3542173 - RNA, 14 nt, Human
ugacggaagaacau

SEQ ID NO: 3542174 - RNA, 18 nt, Human
ugacggaagaacauagaa

SEQ ID NO: 3542175 - RNA, 23 nt, Human
ugacggaaggaccuauguuugcu

SEQ ID NO: 3542176 - RNA, 20 nt, Human
ugacggcccucaucuaugag

SEQ ID NO: 3542177 - RNA, 12 nt, Human
ugacggcccugc

SEQ ID NO: 3542178 - RNA, 18 nt, Human
ugacggcgcccccagugu

SEQ ID NO: 3542179 - RNA, 20 nt, Human
ugacggcgcccccagugugc

SEQ ID NO: 3542180 - RNA, 18 nt, Human
ugacgguauuaugcuucu

SEQ ID NO: 3542181 - RNA, 23 nt, Human
ugacggucccacacuggugacug

SEQ ID NO: 3542182 - RNA, 23 nt, Human
ugacgguuccuacacaggacagg

SEQ ID NO: 3542183 - RNA, 19 nt, Human
ugacguacaaguaguucug

SEQ ID NO: 3542184 - RNA, 21 nt, Human
ugacguacaaguaguucugua

SEQ ID NO: 3542185 - RNA, 14 nt, Human
ugacgucugaagcu

SEQ ID NO: 3542186 - RNA, 15 nt, Human
ugacgucuggguggc

SEQ ID NO: 3542187 - RNA, 18 nt, Human
ugacgucuggguggcccu

SEQ ID NO: 3542188 - RNA, 22 nt, Human
ugacgugaccggacuuuucugc

SEQ ID NO: 3542189 - RNA, 24 nt, Human
ugacgugaccggacuuuucugcaa

SEQ ID NO: 3542190 - RNA, 16 nt, Human
ugacgugccuuuugca

SEQ ID NO: 3542191 - RNA, 12 nt, Human
ugacguuuacau

SEQ ID NO: 3542192 - RNA, 15 nt, Human
ugacuaaaaaacaaa

SEQ ID NO: 3542193 - RNA, 14 nt, Human
ugacuaaaauauuu

SEQ ID NO: 3542194 - RNA, 15 nt, Human
ugacuaaaccauugu

SEQ ID NO: 3542195 - RNA, 16 nt, Human
ugacuaaagagagaau

SEQ ID NO: 3542196 - RNA, 19 nt, Human
ugacuaaauucgugauuuu

SEQ ID NO: 3542197 - RNA, 16 nt, Human
ugacuaaauuugggga

SEQ ID NO: 3542198 - RNA, 20 nt, Human
ugacuaacuagacaccaaag

SEQ ID NO: 3542199 - RNA, 22 nt, Human
ugacuaacucaaauacacauuu

SEQ ID NO: 3542200 - RNA, 16 nt, Human
ugacuaauggcaugag

SEQ ID NO: 3542201 - RNA, 23 nt, Human
ugacuaauucuugcauauuuugu

SEQ ID NO: 3542202 - RNA, 15 nt, Human
ugacuaauuguauaa

SEQ ID NO: 3542203 - RNA, 17 nt, Human
ugacuaauuguauaaca

SEQ ID NO: 3542204 - RNA, 19 nt, Human
ugacuaauuguauaacagg

SEQ ID NO: 3542205 - RNA, 14 nt, Human
ucuuuccuuccucu

SEQ ID NO: 3542206 - RNA, 16 nt, Human
ucuuuccuuccucuca

SEQ ID NO: 3542207 - RNA, 19 nt, Human
ucuuucuaguucagcugcc

SEQ ID NO: 3542208 - RNA, 15 nt, Human
ucuuucuaugcugcu

SEQ ID NO: 3542209 - RNA, 18 nt, Human
ucuuucuaugcugcuuuu

SEQ ID NO: 3542210 - RNA, 15 nt, Human
ucuuucuauuccaaa

SEQ ID NO: 3542211 - RNA, 17 nt, Human
ucuuucucacuaaaucu

SEQ ID NO: 3542212 - RNA, 18 nt, Human
ucuuucucacuaaaucuu

SEQ ID NO: 3542213 - RNA, 21 nt, Human
ucuuucuccaaaguuauccag

SEQ ID NO: 3542214 - RNA, 18 nt, Human
ucuuucuccuuagucuuc

SEQ ID NO: 3542215 - RNA, 21 nt, Human
ucuuucuccuugaauaucuuu

SEQ ID NO: 3542216 - RNA, 16 nt, Human
ucuuucucuacuuuga

SEQ ID NO: 3542217 - RNA, 14 nt, Human
ucuuucucucagcc

SEQ ID NO: 3542218 - RNA, 21 nt, Human
ucuuucucucagccuuacauu

SEQ ID NO: 3542219 - RNA, 12 nt, Human
ucuuucucuccc

SEQ ID NO: 3542220 - RNA, 12 nt, Human
ucuuucucuccu

SEQ ID NO: 3542221 - RNA, 18 nt, Human
ucuuucucucuucccuca

SEQ ID NO: 3542222 - RNA, 13 nt, Human
ucuuucucugagg

SEQ ID NO: 3542223 - RNA, 17 nt, Human
ucuuucucugccaguga

SEQ ID NO: 3542224 - RNA, 13 nt, Human
ucuuucucuuuua

SEQ ID NO: 3542225 - RNA, 21 nt, Human
ucuuucugagcacacuuuagu

SEQ ID NO: 3542226 - RNA, 18 nt, Human
ucuuucugagugccuucu

SEQ ID NO: 3542227 - RNA, 14 nt, Human
ucuuucugauaacu

SEQ ID NO: 3542228 - RNA, 20 nt, Human
ucuuucugauaacuagaugg

SEQ ID NO: 3542229 - RNA, 21 nt, Human
ucuuucugcagaaacagaaag

SEQ ID NO: 3542230 - RNA, 13 nt, Human
ucuuucuggaguc

SEQ ID NO: 3542231 - RNA, 18 nt, Human
ucuuucuggccugccuuc

SEQ ID NO: 3542232 - RNA, 19 nt, Human
ucuuucuguccccucuucc

SEQ ID NO: 3542233 - RNA, 15 nt, Human
ucuuucuuccucugc

SEQ ID NO: 3542234 - RNA, 16 nt, Human
ucuuucuuccucugcu

SEQ ID NO: 3542235 - RNA, 15 nt, Human
ucuuucuuccuuuac

SEQ ID NO: 3542236 - RNA, 14 nt, Human
ucuuucuugcuccc

SEQ ID NO: 3542237 - RNA, 17 nt, Human
ucuuucuuuaccugaga

SEQ ID NO: 3542238 - RNA, 16 nt, Human
ucuuucuuucaauaaa

SEQ ID NO: 3542239 - RNA, 12 nt, Human
ucuuucuuugga

SEQ ID NO: 3542240 - RNA, 23 nt, Human
ucuuucuuugggaauauuugaau

SEQ ID NO: 3542241 - RNA, 14 nt, Human
ucuuugaaacaacu

SEQ ID NO: 3542242 - RNA, 23 nt, Human
ucuuugaaagacuuccaaagaau

SEQ ID NO: 3542243 - RNA, 22 nt, Human
ucuuugaaauagucugugugaa

SEQ ID NO: 3542244 - RNA, 12 nt, Human
ucuuugaaauua

SEQ ID NO: 3542245 - RNA, 21 nt, Human
ucuuugaauaaaugucacuuu

SEQ ID NO: 3542246 - RNA, 18 nt, Human
ucuuugaauacaaagaac

SEQ ID NO: 3542247 - RNA, 13 nt, Human
ucuuugaauuuuc

SEQ ID NO: 3542248 - RNA, 14 nt, Human
ucuuugaauuuuca

SEQ ID NO: 3542249 - RNA, 15 nt, Human
ucuuugaauuuucau

SEQ ID NO: 3542250 - RNA, 19 nt, Human
ucuuugaauuuucauuuua

SEQ ID NO: 3542251 - RNA, 21 nt, Human
ucuuugaauuuucauuuuaca

SEQ ID NO: 3542252 - RNA, 17 nt, Human
ucuuugaauuuucugug

SEQ ID NO: 3542253 - RNA, 21 nt, Human
ucuuugacaauugggagcugc

SEQ ID NO: 3542254 - RNA, 23 nt, Human
ucuuugaccucaaccugugauga

SEQ ID NO: 3542255 - RNA, 17 nt, Human
ucuuugagauagaagaa

SEQ ID NO: 3542256 - RNA, 23 nt, Human
ucuuugagggacugccucugcca

SEQ ID NO: 3542257 - RNA, 20 nt, Human
ucuuugauaaagaaaagaau

SEQ ID NO: 3542258 - RNA, 13 nt, Human
ucuuugauaaugu

SEQ ID NO: 3542259 - RNA, 20 nt, Human
ucuuugaucaugaauaacug

SEQ ID NO: 3542260 - RNA, 15 nt, Human
ucuuugauccuucuc

SEQ ID NO: 3542261 - RNA, 19 nt, Human
ucuuugauguuaacacauu

SEQ ID NO: 3542262 - RNA, 19 nt, Human
ucuuugauuauuugcaugu

SEQ ID NO: 3542263 - RNA, 15 nt, Human
ucuuugauucuccuu

SEQ ID NO: 3542264 - RNA, 22 nt, Human
ucuuugcaaaaauccaaauauu

SEQ ID NO: 3542265 - RNA, 15 nt, Human
ucuuugcaaaguauu

SEQ ID NO: 3542266 - RNA, 23 nt, Human
ucuuugcaaaguauuguaaauua

SEQ ID NO: 3542267 - RNA, 13 nt, Human
ucuuugcagacag

SEQ ID NO: 3542268 - RNA, 15 nt, Human
ucuuugcauggaauu

SEQ ID NO: 3542269 - RNA, 21 nt, Human
ucuuugccaagaccuuucaaa

SEQ ID NO: 3542270 - RNA, 12 nt, Human
ucuuugccaagu

SEQ ID NO: 3542271 - RNA, 17 nt, Human
ucuuugccacccucaug

SEQ ID NO: 3542272 - RNA, 18 nt, Human
ucuuugccacccucaugc

SEQ ID NO: 3542273 - RNA, 21 nt, Human
ucuuugccacccucaugcugu

SEQ ID NO: 3542274 - RNA, 22 nt, Human
ucuuugccacccucaugcugug

SEQ ID NO: 3542275 - RNA, 21 nt, Human
ucuuugccagucauucagcag

SEQ ID NO: 3542276 - RNA, 16 nt, Human
ucuuugccaucucugc

SEQ ID NO: 3542277 - RNA, 12 nt, Human
ucuuugccucaa

SEQ ID NO: 3542278 - RNA, 12 nt, Human
ucuuugccucuc

SEQ ID NO: 3542279 - RNA, 14 nt, Human
ucuuugccuugggc

SEQ ID NO: 3542280 - RNA, 21 nt, Human
ucuuugccuugggcugcuccu

SEQ ID NO: 3542281 - RNA, 15 nt, Human
ucuuugcuugaacac

SEQ ID NO: 3542282 - RNA, 15 nt, Human
ucuuugcuugccucu

SEQ ID NO: 3542283 - RNA, 17 nt, Human
ucuuugcuuugcccagc

SEQ ID NO: 3542284 - RNA, 21 nt, Human
ucuuuggacccugaggcccag

SEQ ID NO: 3542285 - RNA, 22 nt, Human
ucuuuggagaaaugcuuagaaa

SEQ ID NO: 3542286 - RNA, 16 nt, Human
ucuuugggaauauuug

SEQ ID NO: 3542287 - RNA, 20 nt, Human
ucuuugggaauauuugaauc

SEQ ID NO: 3542288 - RNA, 18 nt, Human
ucuuugggaauguuuguc

SEQ ID NO: 3542289 - RNA, 21 nt, Human
ucuuuggggucagccagggcc

SEQ ID NO: 3542290 - RNA, 13 nt, Human
ucuuuggugccuu

SEQ ID NO: 3542291 - RNA, 15 nt, Human
ucuuuggugccuuuc

SEQ ID NO: 3542292 - RNA, 15 nt, Human
ucuuugguucuaagg

SEQ ID NO: 3542293 - RNA, 16 nt, Human
ucuuugguucuaagga

SEQ ID NO: 3542294 - RNA, 19 nt, Human
ucuuugguuuaauuuaaag

SEQ ID NO: 3542295 - RNA, 20 nt, Human
ucuuuguaagaacuaaagaa

SEQ ID NO: 3542296 - RNA, 21 nt, Human
ucuuuguaagaacuaaagaag

SEQ ID NO: 3542297 - RNA, 22 nt, Human
ucuuuguaagaguguagaagca

SEQ ID NO: 3542298 - RNA, 23 nt, Human
ucuuuguaagaguguagaagcau

SEQ ID NO: 3542299 - RNA, 13 nt, Human
ucuuuguaaugaa

SEQ ID NO: 3542300 - RNA, 15 nt, Human
ucuuuguacagacaa

SEQ ID NO: 3542301 - RNA, 20 nt, Human
ucuuuguacagacaacaaac

SEQ ID NO: 3542302 - RNA, 12 nt, Human
ucuuuguaucuu

SEQ ID NO: 3542303 - RNA, 21 nt, Human
ucuuugucagggaguguuccc

SEQ ID NO: 3542304 - RNA, 22 nt, Human
ucuuugugauaauuuaagagcu

SEQ ID NO: 3542305 - RNA, 14 nt, Human
ucuuuguggcuucc

SEQ ID NO: 3542306 - RNA, 13 nt, Human
ucuuuguguagcu

SEQ ID NO: 3542307 - RNA, 17 nt, Human
ucuuugugucaacauga

SEQ ID NO: 3542308 - RNA, 14 nt, Human
ucuuuguuaauuug

SEQ ID NO: 3542309 - RNA, 15 nt, Human
ucuuuguuauaccau

SEQ ID NO: 3542310 - RNA, 12 nt, Human
ucuuuguucuca

SEQ ID NO: 3542311 - RNA, 16 nt, Human
ucuuuguucucagcuc

SEQ ID NO: 3542312 - RNA, 19 nt, Human
ucuuuguucucagcucccc

SEQ ID NO: 3542313 - RNA, 15 nt, Human
ucuuuguuucuuucu

SEQ ID NO: 3542314 - RNA, 19 nt, Human
ucuuuuaaaaauucaaaug

SEQ ID NO: 3542315 - RNA, 21 nt, Human
ucuuuuaaaguguuacuuuuu

SEQ ID NO: 3542316 - RNA, 23 nt, Human
ucuuuuaaaguguuacuuuuugu

SEQ ID NO: 3542317 - RNA, 19 nt, Human
ucuuuuaaauuagaaaaua

SEQ ID NO: 3542318 - RNA, 21 nt, Human
ucuuuuaaauuagaaaauauu

SEQ ID NO: 3542319 - RNA, 12 nt, Human
ucuuuuaaugcu

SEQ ID NO: 3542320 - RNA, 19 nt, Human
ucuuuuaaugcuucauuca

SEQ ID NO: 3542321 - RNA, 12 nt, Human
ucuuuuacaacu

SEQ ID NO: 3542322 - RNA, 17 nt, Human
ucuuuuacccuggcccc

SEQ ID NO: 3542323 - RNA, 22 nt, Human
ucuuuuacccuggccccucucc

SEQ ID NO: 3542324 - RNA, 14 nt, Human
ucuuuuaccugcug

SEQ ID NO: 3542325 - RNA, 20 nt, Human
ucuuuuaccugcugcuucuc

SEQ ID NO: 3542326 - RNA, 18 nt, Human
ucuuuuacucaugaucuu

SEQ ID NO: 3542327 - RNA, 18 nt, Human
ucuuuuauacucagcuuu

SEQ ID NO: 3542328 - RNA, 15 nt, Human
ucuuuuauguuugaa

SEQ ID NO: 3542329 - RNA, 16 nt, Human
ucuuuuauguuugaau

SEQ ID NO: 3542330 - RNA, 22 nt, Human
ucuuuucaucugggaaagacau

SEQ ID NO: 3542331 - RNA, 20 nt, Human
ucuuuucccauuuaucuaaa

SEQ ID NO: 3542332 - RNA, 19 nt, Human
ucuuuucccccauuaauca

SEQ ID NO: 3542333 - RNA, 24 nt, Human
ucuuuucccccuuugugcacauuu

SEQ ID NO: 3542334 - RNA, 17 nt, Human
ucuuuuccccuuuccug

SEQ ID NO: 3542335 - RNA, 16 nt, Human
ucuuuuccuacuuuuc

SEQ ID NO: 3542336 - RNA, 12 nt, Human
ucuuuucuacag

SEQ ID NO: 3542337 - RNA, 18 nt, Human
ucuuuucuacccuagcca

SEQ ID NO: 3542338 - RNA, 19 nt, Human
ucuuuucuacccuagccau

SEQ ID NO: 3542339 - RNA, 18 nt, Human
ucuuuucuauuuucccuc

SEQ ID NO: 3542340 - RNA, 14 nt, Human
ucuuuucucaugug

SEQ ID NO: 3542341 - RNA, 18 nt, Human
ucuuuucugaaucuucug

SEQ ID NO: 3542342 - RNA, 22 nt, Human
ucuuuucugaaucuucugaaac

SEQ ID NO: 3542343 - RNA, 12 nt, Human
ucuuuucuuauu

SEQ ID NO: 3542344 - RNA, 16 nt, Human
ucuuuucuugccucug

SEQ ID NO: 3542345 - RNA, 12 nt, Human
ucuuuucuugga

SEQ ID NO: 3542346 - RNA, 13 nt, Human
ucuuuucuuggac

SEQ ID NO: 3542347 - RNA, 17 nt, Human
ucuuuucuuuagagaac

SEQ ID NO: 3542348 - RNA, 22 nt, Human
ucuuuucuuuagagaacugaaa

SEQ ID NO: 3542349 - RNA, 13 nt, Human
ucuuuucuuuuua

SEQ ID NO: 3542350 - RNA, 16 nt, Human
ugagugugcauggagg

SEQ ID NO: 3542351 - RNA, 22 nt, Human
ugagugugcggcugugugugca

SEQ ID NO: 3542352 - RNA, 23 nt, Human
ugagugugcugcuguaagaaauc

SEQ ID NO: 3542353 - RNA, 14 nt, Human
ugaguguggcuccc

SEQ ID NO: 3542354 - RNA, 16 nt, Human
ugaguguggcuccccu

SEQ ID NO: 3542355 - RNA, 17 nt, Human
ugaguguggcuccccuc

SEQ ID NO: 3542356 - RNA, 18 nt, Human
ugagugugugugugcaug

SEQ ID NO: 3542357 - RNA, 14 nt, Human
ugaguguuucuaug

SEQ ID NO: 3542358 - RNA, 23 nt, Human
ugaguuacaccagaccuguucug

SEQ ID NO: 3542359 - RNA, 14 nt, Human
ugaguuacagaaau

SEQ ID NO: 3542360 - RNA, 24 nt, Human
ugaguuacuugcugcccugugcuc

SEQ ID NO: 3542361 - RNA, 13 nt, Human
ugaguuaggaaca

SEQ ID NO: 3542362 - RNA, 18 nt, Human
ugaguuaggaaugagaag

SEQ ID NO: 3542363 - RNA, 21 nt, Human
ugaguuaucaugaauuuuaaa

SEQ ID NO: 3542364 - RNA, 15 nt, Human
ugaguuaugauguaa

SEQ ID NO: 3542365 - RNA, 21 nt, Human
ugaguuauugagauuguccuc

SEQ ID NO: 3542366 - RNA, 15 nt, Human
ugaguucagguagcu

SEQ ID NO: 3542367 - RNA, 17 nt, Human
ugaguuccggcaccagu

SEQ ID NO: 3542368 - RNA, 20 nt, Human
ugaguucuacauaaguaauu

SEQ ID NO: 3542369 - RNA, 17 nt, Human
ugaguucucagggcucc

SEQ ID NO: 3542370 - RNA, 20 nt, Human
ugaguugauagcacagaccc

SEQ ID NO: 3542371 - RNA, 16 nt, Human
ugaguugauugagaag

SEQ ID NO: 3542372 - RNA, 17 nt, Human
ugaguugccaagacaaa

SEQ ID NO: 3542373 - RNA, 18 nt, Human
ugaguugccaagacaaau

SEQ ID NO: 3542374 - RNA, 19 nt, Human
ugaguugccaagacaaauc

SEQ ID NO: 3542375 - RNA, 17 nt, Human
ugaguuggcugggaaua

SEQ ID NO: 3542376 - RNA, 17 nt, Human
ugaguuggggucuggca

SEQ ID NO: 3542377 - RNA, 21 nt, Human
ugaguuggggucuggcagccu

SEQ ID NO: 3542378 - RNA, 20 nt, Human
ugaguugguguugacaugug

SEQ ID NO: 3542379 - RNA, 22 nt, Human
ugaguuguuaccccaagcgccc

SEQ ID NO: 3542380 - RNA, 18 nt, Human
ugaguuguugcccugggu

SEQ ID NO: 3542381 - RNA, 15 nt, Human
ugaguuguuuuugua

SEQ ID NO: 3542382 - RNA, 18 nt, Human
ugaguuguuuuuguauau

SEQ ID NO: 3542383 - RNA, 12 nt, Human
ugaguuuaaaaa

SEQ ID NO: 3542384 - RNA, 19 nt, Human
ugaguuuaaaaaucaacuu

SEQ ID NO: 3542385 - RNA, 14 nt, Human
ugaguuuaaagcaa

SEQ ID NO: 3542386 - RNA, 15 nt, Human
ugaguuuaccauuug

SEQ ID NO: 3542387 - RNA, 19 nt, Human
ugaguuuaccauuuguaau

SEQ ID NO: 3542388 - RNA, 14 nt, Human
ugaguuucauagcu

SEQ ID NO: 3542389 - RNA, 11 nt, Human
ugaguuuccua

SEQ ID NO: 3542390 - RNA, 16 nt, Human
ugaguuuccucaggcu

SEQ ID NO: 3542391 - RNA, 17 nt, Human
ugaguuuccucaggcug

SEQ ID NO: 3542392 - RNA, 22 nt, Human
ugaguuuccucaggcugcugga

SEQ ID NO: 3542393 - RNA, 14 nt, Human
ugaguuucuuagac

SEQ ID NO: 3542394 - RNA, 13 nt, Human
ugaguuugcuuau

SEQ ID NO: 3542395 - RNA, 22 nt, Human
ugaguuugcuuauguaaucuca

SEQ ID NO: 3542396 - RNA, 16 nt, Human
ugaguuuguagguaaa

SEQ ID NO: 3542397 - RNA, 18 nt, Human
ugaguuuguagguaaaau

SEQ ID NO: 3542398 - RNA, 20 nt, Human
ugaguuugucgcucaugugu

SEQ ID NO: 3542399 - RNA, 13 nt, Human
ugaguuuguuucu

SEQ ID NO: 3542400 - RNA, 20 nt, Human
ugaguuuguuucuuugaauu

SEQ ID NO: 3542401 - RNA, 13 nt, Human
ugaguuuuaccaa

SEQ ID NO: 3542402 - RNA, 18 nt, Human
ugaguuuucuucugugau

SEQ ID NO: 3542403 - RNA, 18 nt, Human
ugaguuuuguguuuguug

SEQ ID NO: 3542404 - RNA, 21 nt, Human
ugaguuuuguguuuguuguag

SEQ ID NO: 3542405 - RNA, 13 nt, Human
ugaguuuuugaua

SEQ ID NO: 3542406 - RNA, 18 nt, Human
ugaguuuuugauagcuuu

SEQ ID NO: 3542407 - RNA, 17 nt, Human
ugaguuuuuucucuugg

SEQ ID NO: 3542408 - RNA, 19 nt, Human
ugaguuuuuucucuugggc

SEQ ID NO: 3542409 - RNA, 22 nt, Human
ugauaaaaaauuuuguaauuuu

SEQ ID NO: 3542410 - RNA, 14 nt, Human
ugauaaaaacucag

SEQ ID NO: 3542411 - RNA, 17 nt, Human
ugauaaaagauacauuu

SEQ ID NO: 3542412 - RNA, 17 nt, Human
ugauaaagaaaagaauc

SEQ ID NO: 3542413 - RNA, 20 nt, Human
ugauaaagccucaagguuuu

SEQ ID NO: 3542414 - RNA, 17 nt, Human
ugauaaauaguguuauu

SEQ ID NO: 3542415 - RNA, 20 nt, Human
ugauaaaucauuuuauguca

SEQ ID NO: 3542416 - RNA, 19 nt, Human
ugauaaauuccacuggacu

SEQ ID NO: 3542417 - RNA, 17 nt, Human
ugauaaauuugacuguu

SEQ ID NO: 3542418 - RNA, 20 nt, Human
ugauaaccauagcauuaaua

SEQ ID NO: 3542419 - RNA, 23 nt, Human
ugauaacuagauggugcugagaa

SEQ ID NO: 3542420 - RNA, 22 nt, Human
ugauaacuguuuauauguguug

SEQ ID NO: 3542421 - RNA, 24 nt, Human
ugauaagcagucauccucagauca

SEQ ID NO: 3542422 - RNA, 16 nt, Human
ugauaagggaaaagau

SEQ ID NO: 3542423 - RNA, 15 nt, Human
ugauaaguucauaca

SEQ ID NO: 3542424 - RNA, 19 nt, Human
ugauaaguuccuuuccuuu

SEQ ID NO: 3542425 - RNA, 13 nt, Human
ugauaauaaauug

SEQ ID NO: 3542426 - RNA, 18 nt, Human
ugauaauaaauugaaauu

SEQ ID NO: 3542427 - RNA, 19 nt, Human
ugauaauauuguggugcca

SEQ ID NO: 3542428 - RNA, 21 nt, Human
ugauaaugauaaaacaccuca

SEQ ID NO: 3542429 - RNA, 16 nt, Human
ugauaauguuaaauuu

SEQ ID NO: 3542430 - RNA, 13 nt, Human
ugauaauuuaaga

SEQ ID NO: 3542431 - RNA, 16 nt, Human
ugauacaagauuagaa

SEQ ID NO: 3542432 - RNA, 16 nt, Human
ugauacaaugaacacu

SEQ ID NO: 3542433 - RNA, 13 nt, Human
ugauacauaauaa

SEQ ID NO: 3542434 - RNA, 16 nt, Human
ugauacauccaaagca

SEQ ID NO: 3542435 - RNA, 14 nt, Human
ugauaccagcugga

SEQ ID NO: 3542436 - RNA, 18 nt, Human
ugauaccccccucugucu

SEQ ID NO: 3542437 - RNA, 19 nt, Human
ugauaccgaauugugacuc

SEQ ID NO: 3542438 - RNA, 16 nt, Human
ugauacgaugcuucaa

SEQ ID NO: 3542439 - RNA, 19 nt, Human
ugauacgcaacauaauuaa

SEQ ID NO: 3542440 - RNA, 15 nt, Human
ugauacuaauaaacu

SEQ ID NO: 3542441 - RNA, 16 nt, Human
ugauacucauuucuua

SEQ ID NO: 3542442 - RNA, 11 nt, Human
ugauacuguug

SEQ ID NO: 3542443 - RNA, 16 nt, Human
ugauacuguugcacgu

SEQ ID NO: 3542444 - RNA, 15 nt, Human
ugauacuuauauuuu

SEQ ID NO: 3542445 - RNA, 16 nt, Human
ugauacuuauauuuuc

SEQ ID NO: 3542446 - RNA, 13 nt, Human
ugauacuucauuu

SEQ ID NO: 3542447 - RNA, 14 nt, Human
ugauacuuguuuuc

SEQ ID NO: 3542448 - RNA, 15 nt, Human
ugauacuuuugacaa

SEQ ID NO: 3542449 - RNA, 17 nt, Human
ugauacuuuuuugaaau

SEQ ID NO: 3542450 - RNA, 20 nt, Human
ugauacuuuuuugaaaucag

SEQ ID NO: 3542451 - RNA, 19 nt, Human
ugauagaaaugccaagcac

SEQ ID NO: 3542452 - RNA, 15 nt, Human
ugauagaggaagccu

SEQ ID NO: 3542453 - RNA, 12 nt, Human
ugauagauuuga

SEQ ID NO: 3542454 - RNA, 18 nt, Human
ugauagauuugaccuccu

SEQ ID NO: 3542455 - RNA, 17 nt, Human
ugauagcaaaaucaaga

SEQ ID NO: 3542456 - RNA, 14 nt, Human
ugauagcacagacc

SEQ ID NO: 3542457 - RNA, 15 nt, Human
ugauagcacagaccc

SEQ ID NO: 3542458 - RNA, 17 nt, Human
ugauagcacagacccug

SEQ ID NO: 3542459 - RNA, 21 nt, Human
ugauagcacagacccugcccu

SEQ ID NO: 3542460 - RNA, 12 nt, Human
ugauagcacuuu

SEQ ID NO: 3542461 - RNA, 14 nt, Human
ugauagcauuguaa

SEQ ID NO: 3542462 - RNA, 17 nt, Human
ggucugccaggccccca

SEQ ID NO: 3542463 - RNA, 23 nt, Human
ggucugccucuucugggagggca

SEQ ID NO: 3542464 - RNA, 20 nt, Human
ggucugcucccaaggggccu

SEQ ID NO: 3542465 - RNA, 19 nt, Human
ggucugcucgggcccaggc

SEQ ID NO: 3542466 - RNA, 16 nt, Human
ggucugcucuuucucu

SEQ ID NO: 3542467 - RNA, 22 nt, Human
ggucugcucuuucucugccagu

SEQ ID NO: 3542468 - RNA, 19 nt, Human
ggucuggacugacagcaug

SEQ ID NO: 3542469 - RNA, 14 nt, Human
ggucuggaggaccu

SEQ ID NO: 3542470 - RNA, 12 nt, Human
ggucuggcuggu

SEQ ID NO: 3542471 - RNA, 16 nt, Human
ggucugggacuuccuu

SEQ ID NO: 3542472 - RNA, 20 nt, Human
ggucugggggucaggaggca

SEQ ID NO: 3542473 - RNA, 19 nt, Human
ggucugugucucuuuucuc

SEQ ID NO: 3542474 - RNA, 15 nt, Human
ggucugugugaaugu

SEQ ID NO: 3542475 - RNA, 17 nt, Human
ggucuguucuguuucaa

SEQ ID NO: 3542476 - RNA, 17 nt, Human
ggucuguucuuuccaaa

SEQ ID NO: 3542477 - RNA, 16 nt, Human
ggucuguuggcaggcu

SEQ ID NO: 3542478 - RNA, 18 nt, Human
ggucuguuggcaggcugg

SEQ ID NO: 3542479 - RNA, 19 nt, Human
ggucuguuggcaggcuggc

SEQ ID NO: 3542480 - RNA, 12 nt, Human
ggucuguuugca

SEQ ID NO: 3542481 - RNA, 20 nt, Human
ggucuguuuuccuuucucac

SEQ ID NO: 3542482 - RNA, 18 nt, Human
ggucuuccuacucuucuc

SEQ ID NO: 3542483 - RNA, 22 nt, Human
ggucuucuuacaugcauuugag

SEQ ID NO: 3542484 - RNA, 21 nt, Human
ggucuugaacuccuggacuca

SEQ ID NO: 3542485 - RNA, 21 nt, Human
ggucuugaacuccuggccuca

SEQ ID NO: 3542486 - RNA, 16 nt, Human
ggucuugcauuuaaaa

SEQ ID NO: 3542487 - RNA, 19 nt, Human
ggucuugccccaucacugc

SEQ ID NO: 3542488 - RNA, 23 nt, Human
ggucuuggaacuugccugccuuu

SEQ ID NO: 3542489 - RNA, 18 nt, Human
ggucuuggagcugagccu

SEQ ID NO: 3542490 - RNA, 23 nt, Human
ggucuuggagcugagccucucac

SEQ ID NO: 3542491 - RNA, 20 nt, Human
ggucuugguuccagccugcc

SEQ ID NO: 3542492 - RNA, 18 nt, Human
ggucuuuccuaaggcugc

SEQ ID NO: 3542493 - RNA, 17 nt, Human
ggucuuugagcucccac

SEQ ID NO: 3542494 - RNA, 16 nt, Human
ggucuuuucaucuggg

SEQ ID NO: 3542495 - RNA, 14 nt, Human
ugaugagaggaaau

SEQ ID NO: 3542496 - RNA, 14 nt, Human
ugaugaggcccucc

SEQ ID NO: 3542497 - RNA, 17 nt, Human
ugaugaggcccuccaca

SEQ ID NO: 3542498 - RNA, 18 nt, Human
ugaugaggccucuuggac

SEQ ID NO: 3542499 - RNA, 17 nt, Human
ugaugagggcagcagcc

SEQ ID NO: 3542500 - RNA, 21 nt, Human
ugaugagggcagcagccagcc

SEQ ID NO: 3542501 - RNA, 14 nt, Human
ugaugaggggaggg

SEQ ID NO: 3542502 - RNA, 19 nt, Human
ugaugagguauuuuuuccu

SEQ ID NO: 3542503 - RNA, 18 nt, Human
ugaugaguguaacaagaa

SEQ ID NO: 3542504 - RNA, 21 nt, Human
ugaugaguguaacaagaaagg

SEQ ID NO: 3542505 - RNA, 22 nt, Human
ugaugaguguaacaagaaagga

SEQ ID NO: 3542506 - RNA, 15 nt, Human
ugaugauacaagauu

SEQ ID NO: 3542507 - RNA, 20 nt, Human
ugaugauccuaggcauuugc

SEQ ID NO: 3542508 - RNA, 14 nt, Human
ugaugaucuuuaaa

SEQ ID NO: 3542509 - RNA, 19 nt, Human
ugaugaucuuugcagacag

SEQ ID NO: 3542510 - RNA, 20 nt, Human
ugaugaucuuugcagacagg

SEQ ID NO: 3542511 - RNA, 14 nt, Human
ugaugaugaaaauu

SEQ ID NO: 3542512 - RNA, 15 nt, Human
ugaugaugauaauga

SEQ ID NO: 3542513 - RNA, 20 nt, Human
ugaugauuuagagugcuguc

SEQ ID NO: 3542514 - RNA, 16 nt, Human
ugaugauuucagaaac

SEQ ID NO: 3542515 - RNA, 16 nt, Human
ugaugcacagagaagc

SEQ ID NO: 3542516 - RNA, 14 nt, Human
ugaugcacauuuca

SEQ ID NO: 3542517 - RNA, 14 nt, Human
ugaugcagcauuug

SEQ ID NO: 3542518 - RNA, 22 nt, Human
ugaugcaggauuuguucucugu

SEQ ID NO: 3542519 - RNA, 14 nt, Human
ugaugcagucuccu

SEQ ID NO: 3542520 - RNA, 17 nt, Human
ugaugcaugcacuguuc

SEQ ID NO: 3542521 - RNA, 17 nt, Human
ugaugcauuaaaagaaa

SEQ ID NO: 3542522 - RNA, 18 nt, Human
ugaugcauuaaaagaaaa

SEQ ID NO: 3542523 - RNA, 18 nt, Human
ugaugccaaaaaaaaaua

SEQ ID NO: 3542524 - RNA, 22 nt, Human
ugaugccaauacuagucacccc

SEQ ID NO: 3542525 - RNA, 23 nt, Human
ugaugccacaccaagcugugcca

SEQ ID NO: 3542526 - RNA, 14 nt, Human
ugaugccaugagga

SEQ ID NO: 3542527 - RNA, 18 nt, Human
ugaugcccugcuccaggg

SEQ ID NO: 3542528 - RNA, 14 nt, Human
ugaugccucccugu

SEQ ID NO: 3542529 - RNA, 20 nt, Human
ugaugccugugaacugaacu

SEQ ID NO: 3542530 - RNA, 13 nt, Human
ugaugcuauuugc

SEQ ID NO: 3542531 - RNA, 20 nt, Human
ugaugcuauuugcaauuccu

SEQ ID NO: 3542532 - RNA, 16 nt, Human
ugaugcucccuccccu

SEQ ID NO: 3542533 - RNA, 22 nt, Human
ugaugcucuuucccacccagcc

SEQ ID NO: 3542534 - RNA, 21 nt, Human
ugaugcugagauucuucaggc

SEQ ID NO: 3542535 - RNA, 18 nt, Human
ugaugcuggaacucuuga

SEQ ID NO: 3542536 - RNA, 12 nt, Human
ugaugcugggau

SEQ ID NO: 3542537 - RNA, 14 nt, Human
ugaugcugggcugg

SEQ ID NO: 3542538 - RNA, 15 nt, Human
ugaugcugggcuggg

SEQ ID NO: 3542539 - RNA, 13 nt, Human
ugaugcuguauuc

SEQ ID NO: 3542540 - RNA, 14 nt, Human
ugauggaaacaaag

SEQ ID NO: 3542541 - RNA, 17 nt, Human
ugauggaaacaaagugg

SEQ ID NO: 3542542 - RNA, 23 nt, Human
ugauggaaacaaaguggaaggaa

SEQ ID NO: 3542543 - RNA, 15 nt, Human
ugauggaacacagaa

SEQ ID NO: 3542544 - RNA, 14 nt, Human
ugauggaaccuuaa

SEQ ID NO: 3542545 - RNA, 22 nt, Human
ugauggaaguaaagccucaacc

SEQ ID NO: 3542546 - RNA, 20 nt, Human
ugauggaauuuuuuuguacg

SEQ ID NO: 3542547 - RNA, 20 nt, Human
ugauggaccuucuagaauua

SEQ ID NO: 3542548 - RNA, 12 nt, Human
ugauggagaagg

SEQ ID NO: 3542549 - RNA, 13 nt, Human
ugauggagaagga

SEQ ID NO: 3542550 - RNA, 16 nt, Human
ugauggagaaggaagg

SEQ ID NO: 3542551 - RNA, 18 nt, Human
ugauggagguuucauacu

SEQ ID NO: 3542552 - RNA, 15 nt, Human
ugauggagugugagc

SEQ ID NO: 3542553 - RNA, 18 nt, Human
ugauggcaacagaucugg

SEQ ID NO: 3542554 - RNA, 23 nt, Human
ugauggcaacagaucuggaaccu

SEQ ID NO: 3542555 - RNA, 15 nt, Human
ugauggcaauuuugu

SEQ ID NO: 3542556 - RNA, 20 nt, Human
ugauggcaggauggccuggc

SEQ ID NO: 3542557 - RNA, 19 nt, Human
ugauggcccauucuacuug

SEQ ID NO: 3542558 - RNA, 13 nt, Human
ugaugggaaaacu

SEQ ID NO: 3542559 - RNA, 20 nt, Human
ugaugggaugauugaagaaa

SEQ ID NO: 3542560 - RNA, 21 nt, Human
ugaugggaugauugaagaaac

SEQ ID NO: 3542561 - RNA, 22 nt, Human
ugaugggcaacccccagccugc

SEQ ID NO: 3542562 - RNA, 17 nt, Human
ugaugggcagccugcug

SEQ ID NO: 3542563 - RNA, 22 nt, Human
ugaugggcagccugcuggucag

SEQ ID NO: 3542564 - RNA, 16 nt, Human
ugauggggcccugccu

SEQ ID NO: 3542565 - RNA, 15 nt, Human
ugaugggggaggggg

SEQ ID NO: 3542566 - RNA, 19 nt, Human
ugauggguuaguggaugga

SEQ ID NO: 3542567 - RNA, 23 nt, Human
ugauggguuaguggauggaaggg

SEQ ID NO: 3542568 - RNA, 23 nt, Human
ugauggucacuuaaaaugugcag

SEQ ID NO: 3542569 - RNA, 15 nt, Human
ugauggucagcuccc

SEQ ID NO: 3542570 - RNA, 16 nt, Human
ugauggucagcucccu

SEQ ID NO: 3542571 - RNA, 16 nt, Human
ugauggucuucagccu

SEQ ID NO: 3542572 - RNA, 23 nt, Human
ugauggugcaaugaccuuucaau

SEQ ID NO: 3542573 - RNA, 15 nt, Human
ugauggugguauguu

SEQ ID NO: 3542574 - RNA, 13 nt, Human
ugaugguuguaca

SEQ ID NO: 3542575 - RNA, 16 nt, Human
ugauguaaaaucuugu

SEQ ID NO: 3542576 - RNA, 23 nt, Human
ugauguaaaaucuugucaugugu

SEQ ID NO: 3542577 - RNA, 21 nt, Human
ugauguaaaugaaguaacuug

SEQ ID NO: 3542578 - RNA, 16 nt, Human
ugauguaauuaugguu

SEQ ID NO: 3542579 - RNA, 17 nt, Human
ugauguacagauucuuu

SEQ ID NO: 3542580 - RNA, 18 nt, Human
ugauguacagucugucau

SEQ ID NO: 3542581 - RNA, 15 nt, Human
ugauguaccugaugc

SEQ ID NO: 3542582 - RNA, 21 nt, Human
ugauguacugauugagaaguu

SEQ ID NO: 3542583 - RNA, 17 nt, Human
ugauguagugccucuuu

SEQ ID NO: 3542584 - RNA, 18 nt, Human
ugaugucacaucuuggca

SEQ ID NO: 3542585 - RNA, 18 nt, Human
ugaugucagcaguugcug

SEQ ID NO: 3542586 - RNA, 22 nt, Human
ugaugucagcaguugcugguaa

SEQ ID NO: 3542587 - RNA, 14 nt, Human
ugaugucauacaga

SEQ ID NO: 3542588 - RNA, 17 nt, Human
ugaugucauacagagaa

SEQ ID NO: 3542589 - RNA, 20 nt, Human
ugaugucauacagagaaguc

SEQ ID NO: 3542590 - RNA, 15 nt, Human
ugauguccagaagaa

SEQ ID NO: 3542591 - RNA, 19 nt, Human
ugauguccuguaaacacuc

SEQ ID NO: 3542592 - RNA, 14 nt, Human
ugaugugaagccaa

SEQ ID NO: 3542593 - RNA, 14 nt, Human
ugaugugcaaaaau

SEQ ID NO: 3542594 - RNA, 17 nt, Human
ugaugugcaaaaauuuu

SEQ ID NO: 3542595 - RNA, 21 nt, Human
ugaugugcaaaaauuuuugga

SEQ ID NO: 3542596 - RNA, 22 nt, Human
ugaugugcaaaaauuuuuggau

SEQ ID NO: 3542597 - RNA, 22 nt, Human
ugaugugcaaaaccuuuuacug

SEQ ID NO: 3542598 - RNA, 21 nt, Human
ugaugugccauuuuaaaaaaa

SEQ ID NO: 3542599 - RNA, 17 nt, Human
ugaugugcuuaacaggg

SEQ ID NO: 3542600 - RNA, 14 nt, Human
ugauguggcaacug

SEQ ID NO: 3542601 - RNA, 16 nt, Human
ugauguggcaacugcu

SEQ ID NO: 3542602 - RNA, 18 nt, Human
ugauguggcaacugcuga

SEQ ID NO: 3542603 - RNA, 18 nt, Human
ugaugugggucaaggaau

SEQ ID NO: 3542604 - RNA, 16 nt, Human
ugauguguuaucucuu

SEQ ID NO: 3542605 - RNA, 18 nt, Human
ugauguguugccacuuuc

SEQ ID NO: 3542606 - RNA, 23 nt, Human
ugauguguugugauagcuaacau

SEQ ID NO: 3542607 - RNA, 14 nt, Human
ugauguguuuauuu

SEQ ID NO: 3542608 - RNA, 17 nt, Human
ugauguuaaaauuccau

SEQ ID NO: 3542609 - RNA, 16 nt, Human
ugauguuaacacauuu

SEQ ID NO: 3542610 - RNA, 17 nt, Human
ugauguuaacacauuuu

SEQ ID NO: 3542611 - RNA, 18 nt, Human
ugauguuaacacauuuug

SEQ ID NO: 3542612 - RNA, 21 nt, Human
ugauguuaacacauuuuguau

SEQ ID NO: 3542613 - RNA, 22 nt, Human
ugauguuaacacauuuuguaua

SEQ ID NO: 3542614 - RNA, 13 nt, Human
ugauguucagugu

SEQ ID NO: 3542615 - RNA, 20 nt, Human
ugauguucaguguaauuucu

SEQ ID NO: 3542616 - RNA, 14 nt, Human
ugauguucuaaggc

SEQ ID NO: 3542617 - RNA, 20 nt, Human
ugauguucuuucacccuuuu

SEQ ID NO: 3542618 - RNA, 17 nt, Human
ugauguugagggaacag

SEQ ID NO: 3542619 - RNA, 14 nt, Human
ugauguugaugcaa

SEQ ID NO: 3542620 - RNA, 16 nt, Human
ugauguugccuuaaua

SEQ ID NO: 3542621 - RNA, 15 nt, Human
ugauguuggcuggga

SEQ ID NO: 3542622 - RNA, 15 nt, Human
ugauguuugcccaaa

SEQ ID NO: 3542623 - RNA, 19 nt, Human
ugauguuugcccaaaauuu

SEQ ID NO: 3542624 - RNA, 13 nt, Human
ugauguuugcucu

SEQ ID NO: 3542625 - RNA, 13 nt, Human
ugauguuuguccu

SEQ ID NO: 3542626 - RNA, 14 nt, Human
ugauguuugugcag

SEQ ID NO: 3542627 - RNA, 20 nt, Human
ggugcugcuaauucuuugca

SEQ ID NO: 3542628 - RNA, 22 nt, Human
ggugcugcuaauucuuugcaaa

SEQ ID NO: 3542629 - RNA, 13 nt, Human
ggugcugcuaccc

SEQ ID NO: 3542630 - RNA, 20 nt, Human
ggugcuggagcacugggcuc

SEQ ID NO: 3542631 - RNA, 16 nt, Human
ggugcuggagguggga

SEQ ID NO: 3542632 - RNA, 23 nt, Human
ggugcuggagguuggaucuugau

SEQ ID NO: 3542633 - RNA, 14 nt, Human
ggugcugggacuga

SEQ ID NO: 3542634 - RNA, 19 nt, Human
ggugcugggacugagccag

SEQ ID NO: 3542635 - RNA, 20 nt, Human
ggugcugggacugagccagu

SEQ ID NO: 3542636 - RNA, 12 nt, Human
ggugcugggaga

SEQ ID NO: 3542637 - RNA, 15 nt, Human
ggugcugggaggagg

SEQ ID NO: 3542638 - RNA, 20 nt, Human
ggugcugggaggagggagag

SEQ ID NO: 3542639 - RNA, 13 nt, Human
guaagauuuccuu

SEQ ID NO: 3542640 - RNA, 16 nt, Human
guaagauuuguuuuua

SEQ ID NO: 3542641 - RNA, 16 nt, Human
guaagcacugacuggg

SEQ ID NO: 3542642 - RNA, 19 nt, Human
guaagcacuguuuuuccau

SEQ ID NO: 3542643 - RNA, 18 nt, Human
guaagcaucuacuucagg

SEQ ID NO: 3542644 - RNA, 22 nt, Human
guaagcggcucaagcccaggag

SEQ ID NO: 3542645 - RNA, 20 nt, Human
guaagcguauggcuuuauuu

SEQ ID NO: 3542646 - RNA, 24 nt, Human
guaagcuccuuuguggagugcugg

SEQ ID NO: 3542647 - RNA, 21 nt, Human
guaagcuguuugguuuuaaaa

SEQ ID NO: 3542648 - RNA, 18 nt, Human
guaaggaauaccuguccc

SEQ ID NO: 3542649 - RNA, 23 nt, Human
guaaggaauaccugucccccuga

SEQ ID NO: 3542650 - RNA, 18 nt, Human
guaaggauccggaaagaa

SEQ ID NO: 3542651 - RNA, 19 nt, Human
guaaggauccggaaagaag

SEQ ID NO: 3542652 - RNA, 14 nt, Human
guaaggcuguguaa

SEQ ID NO: 3542653 - RNA, 19 nt, Human
guaaggcuguguaagauuu

SEQ ID NO: 3542654 - RNA, 15 nt, Human
guaagggaaauagaa

SEQ ID NO: 3542655 - RNA, 23 nt, Human
guaagggaggaggagcuucuggg

SEQ ID NO: 3542656 - RNA, 16 nt, Human
guaagggauuucuuag

SEQ ID NO: 3542657 - RNA, 17 nt, Human
guaagggugacaaaugg

SEQ ID NO: 3542658 - RNA, 19 nt, Human
guaagguauaucauucuaa

SEQ ID NO: 3542659 - RNA, 17 nt, Human
guaaguaaacugcccug

SEQ ID NO: 3542660 - RNA, 15 nt, Human
guaaguacagagaag

SEQ ID NO: 3542661 - RNA, 18 nt, Human
guaaguauaucucaguuu

SEQ ID NO: 3542662 - RNA, 22 nt, Human
guaaguauucuuauuuaaugaa

SEQ ID NO: 3542663 - RNA, 17 nt, Human
guaagucaguguugaga

SEQ ID NO: 3542664 - RNA, 14 nt, Human
guaagugggcccac

SEQ ID NO: 3542665 - RNA, 21 nt, Human
guaagugggguugcaaccacu

SEQ ID NO: 3542666 - RNA, 22 nt, Human
guaagugggguugcaaccacug

SEQ ID NO: 3542667 - RNA, 20 nt, Human
guaagugugaguaagagcug

SEQ ID NO: 3542668 - RNA, 21 nt, Human
guaagugugaguaagagcugg

SEQ ID NO: 3542669 - RNA, 20 nt, Human
guaauaaaauucaacaaaca

SEQ ID NO: 3542670 - RNA, 15 nt, Human
guaauaaacuuuaau

SEQ ID NO: 3542671 - RNA, 14 nt, Human
guaauaaaguauau

SEQ ID NO: 3542672 - RNA, 17 nt, Human
guaauaaaguauauaau

SEQ ID NO: 3542673 - RNA, 16 nt, Human
guaauaaaguguuuuc

SEQ ID NO: 3542674 - RNA, 18 nt, Human
guaauaaaguguuuucag

SEQ ID NO: 3542675 - RNA, 11 nt, Human
guaauaaauau

SEQ ID NO: 3542676 - RNA, 12 nt, Human
guaauaaauaug

SEQ ID NO: 3542677 - RNA, 16 nt, Human
guaauaacugugaagu

SEQ ID NO: 3542678 - RNA, 20 nt, Human
guaauaagaauggaaaagag

SEQ ID NO: 3542679 - RNA, 14 nt, Human
guaauaagacauaa

SEQ ID NO: 3542680 - RNA, 13 nt, Human
guaauaagcacug

SEQ ID NO: 3542681 - RNA, 18 nt, Human
guaauaagggaaaaauca

SEQ ID NO: 3542682 - RNA, 16 nt, Human
guaauaauaaagaaua

SEQ ID NO: 3542683 - RNA, 23 nt, Human
ugcaccaacccagccgcugcccg

SEQ ID NO: 3542684 - RNA, 22 nt, Human
ugcaccaagcaggaaaugaaaa

SEQ ID NO: 3542685 - RNA, 12 nt, Human
ugcaccaccaag

SEQ ID NO: 3542686 - RNA, 15 nt, Human
ugcaccaccaagcca

SEQ ID NO: 3542687 - RNA, 14 nt, Human
ugcaccacugcacu

SEQ ID NO: 3542688 - RNA, 10 nt, Human
ugcaccagga

SEQ ID NO: 3542689 - RNA, 13 nt, Human
ugcaccauacuca

SEQ ID NO: 3542690 - RNA, 15 nt, Human
ugcaccaucccuuuu

SEQ ID NO: 3542691 - RNA, 17 nt, Human
ugcacccacccaggagu

SEQ ID NO: 3542692 - RNA, 14 nt, Human
ugcacccagaacag

SEQ ID NO: 3542693 - RNA, 17 nt, Human
ugcacccagaacagugg

SEQ ID NO: 3542694 - RNA, 14 nt, Human
ugcacccagcccag

SEQ ID NO: 3542695 - RNA, 15 nt, Human
ugcacccaugggcuc

SEQ ID NO: 3542696 - RNA, 18 nt, Human
ugcacccaugggcucuga

SEQ ID NO: 3542697 - RNA, 22 nt, Human
ugcaccccaaagcuuuccugcc

SEQ ID NO: 3542698 - RNA, 14 nt, Human
ugcaccccccuggg

SEQ ID NO: 3542699 - RNA, 16 nt, Human
ugcaccccccugggcu

SEQ ID NO: 3542700 - RNA, 14 nt, Human
ugcacccccuccug

SEQ ID NO: 3542701 - RNA, 18 nt, Human
ugcacccccuccugcugc

SEQ ID NO: 3542702 - RNA, 19 nt, Human
ugcacccccuccugcugca

SEQ ID NO: 3542703 - RNA, 13 nt, Human
ugcaccccuuccu

SEQ ID NO: 3542704 - RNA, 15 nt, Human
ugcaccccuucucuc

SEQ ID NO: 3542705 - RNA, 20 nt, Human
ugcaccccuucucuccuccc

SEQ ID NO: 3542706 - RNA, 14 nt, Human
ugcacccgccucuc

SEQ ID NO: 3542707 - RNA, 14 nt, Human
ugcacccuucuuuu

SEQ ID NO: 3542708 - RNA, 23 nt, Human
ugcacccuucuuuucucaugugu

SEQ ID NO: 3542709 - RNA, 15 nt, Human
ugcaccggcuggccu

SEQ ID NO: 3542710 - RNA, 18 nt, Human
ugcaccggcuggccuggc

SEQ ID NO: 3542711 - RNA, 15 nt, Human
ugcaccuaaaacuua

SEQ ID NO: 3542712 - RNA, 13 nt, Human
ugcaccuaaagaa

SEQ ID NO: 3542713 - RNA, 14 nt, Human
ugcaccuaaagaaa

SEQ ID NO: 3542714 - RNA, 19 nt, Human
ugcaccuagcugugcaaga

SEQ ID NO: 3542715 - RNA, 19 nt, Human
ugcaccuccccccacugca

SEQ ID NO: 3542716 - RNA, 15 nt, Human
ugcaccugccagccu

SEQ ID NO: 3542717 - RNA, 19 nt, Human
ugcaccugccagccuggcu

SEQ ID NO: 3542718 - RNA, 22 nt, Human
ugcaccugccagccuggcuucu

SEQ ID NO: 3542719 - RNA, 22 nt, Human
ugcaccuggaauauauaaccag

SEQ ID NO: 3542720 - RNA, 16 nt, Human
ugcaccuguacucagg

SEQ ID NO: 3542721 - RNA, 17 nt, Human
ugcaccuguacucagga

SEQ ID NO: 3542722 - RNA, 17 nt, Human
ugcaccuguccccaccc

SEQ ID NO: 3542723 - RNA, 21 nt, Human
ugcaccuguccccacccucca

SEQ ID NO: 3542724 - RNA, 13 nt, Human
ugcaccuuaccaa

SEQ ID NO: 3542725 - RNA, 19 nt, Human
ugcaccuuaccaacuuucu

SEQ ID NO: 3542726 - RNA, 20 nt, Human
ugcaccuuaccaacuuucug

SEQ ID NO: 3542727 - RNA, 17 nt, Human
ugcacgcacacugucug

SEQ ID NO: 3542728 - RNA, 22 nt, Human
ugcacgcugggcaaugagaauc

SEQ ID NO: 3542729 - RNA, 22 nt, Human
ugcacgguuucgaagucauuaa

SEQ ID NO: 3542730 - RNA, 23 nt, Human
ugcacgguuucgaagucauuaaa

SEQ ID NO: 3542731 - RNA, 16 nt, Human
ugcacguaaaguacuu

SEQ ID NO: 3542732 - RNA, 21 nt, Human
ugcacguaaaguacuuguagu

SEQ ID NO: 3542733 - RNA, 19 nt, Human
ugcacguacacacacauac

SEQ ID NO: 3542734 - RNA, 22 nt, Human
ugcacguaguagggucaggcca

SEQ ID NO: 3542735 - RNA, 16 nt, Human
ugcacguggagagcug

SEQ ID NO: 3542736 - RNA, 17 nt, Human
ugcacguggagagcugg

SEQ ID NO: 3542737 - RNA, 18 nt, Human
ugcacguggagagcuggu

SEQ ID NO: 3542738 - RNA, 20 nt, Human
ugcacguggagagcuggugc

SEQ ID NO: 3542739 - RNA, 12 nt, Human
ugcacgugugca

SEQ ID NO: 3542740 - RNA, 12 nt, Human
ugcacguguguu

SEQ ID NO: 3542741 - RNA, 17 nt, Human
ugcacguuaugguguuu

SEQ ID NO: 3542742 - RNA, 17 nt, Human
ugcacuaaagccagccu

SEQ ID NO: 3542743 - RNA, 18 nt, Human
ugcacuaaagccagccug

SEQ ID NO: 3542744 - RNA, 19 nt, Human
ugcacuaaagccagccuga

SEQ ID NO: 3542745 - RNA, 22 nt, Human
ugcacuaaagccagccugaccu

SEQ ID NO: 3542746 - RNA, 18 nt, Human
ugcacuaaaguauguaaa

SEQ ID NO: 3542747 - RNA, 13 nt, Human
ugcacuaaauaug

SEQ ID NO: 3542748 - RNA, 23 nt, Human
ugcacuaaggggcccggccagcc

SEQ ID NO: 3542749 - RNA, 23 nt, Human
ugcacuaagucucuuuuuuacaa

SEQ ID NO: 3542750 - RNA, 15 nt, Human
ugcacuacuccucug

SEQ ID NO: 3542751 - RNA, 18 nt, Human
ugcacuacuccucugcag

SEQ ID NO: 3542752 - RNA, 14 nt, Human
ugcacuacugacau

SEQ ID NO: 3542753 - RNA, 22 nt, Human
ugcacuauagccuaggugacag

SEQ ID NO: 3542754 - RNA, 14 nt, Human
ugcacuauaugcaa

SEQ ID NO: 3542755 - RNA, 15 nt, Human
ugcacuaucuuucag

SEQ ID NO: 3542756 - RNA, 15 nt, Human
ugcacucaaaucuua

SEQ ID NO: 3542757 - RNA, 13 nt, Human
ugcacuccagccu

SEQ ID NO: 3542758 - RNA, 16 nt, Human
ugcacuccagccuggg

SEQ ID NO: 3542759 - RNA, 17 nt, Human
ugcacucccaccugaca

SEQ ID NO: 3542760 - RNA, 15 nt, Human
ugcacuccccugcug

SEQ ID NO: 3542761 - RNA, 17 nt, Human
ugcacuccccugcuggg

SEQ ID NO: 3542762 - RNA, 19 nt, Human
ugcacuccccugcugggug

SEQ ID NO: 3542763 - RNA, 16 nt, Human
ugcacuccucagggca

SEQ ID NO: 3542764 - RNA, 18 nt, Human
ugcacucuaaaagguuca

SEQ ID NO: 3542765 - RNA, 22 nt, Human
ugcacucuaacccuaggcauca

SEQ ID NO: 3542766 - RNA, 13 nt, Human
ugcacucugugcc

SEQ ID NO: 3542767 - RNA, 13 nt, Human
ugcacugaaguuu

SEQ ID NO: 3542768 - RNA, 20 nt, Human
ugcacugacccuuccagaca

SEQ ID NO: 3542769 - RNA, 13 nt, Human
ugcacugacucug

SEQ ID NO: 3542770 - RNA, 14 nt, Human
ugcacugagggcca

SEQ ID NO: 3542771 - RNA, 15 nt, Human
ugcacugagggccac

SEQ ID NO: 3542772 - RNA, 17 nt, Human
ugcacugagggccacac

SEQ ID NO: 3542773 - RNA, 13 nt, Human
ugcacugauguug

SEQ ID NO: 3542774 - RNA, 19 nt, Human
ugcacugcccauggacagg

SEQ ID NO: 3542775 - RNA, 18 nt, Human
ugcacuggaguccagucu

SEQ ID NO: 3542776 - RNA, 16 nt, Human
ugcacuggccccaccc

SEQ ID NO: 3542777 - RNA, 12 nt, Human
ugcacugggagg

SEQ ID NO: 3542778 - RNA, 20 nt, Human
ugcacugggaggcuccccuu

SEQ ID NO: 3542779 - RNA, 16 nt, Human
ugcacuggggagcccg

SEQ ID NO: 3542780 - RNA, 12 nt, Human
ugcacuguaaaa

SEQ ID NO: 3542781 - RNA, 13 nt, Human
ugcacuguaaaau

SEQ ID NO: 3542782 - RNA, 14 nt, Human
ugcacuguaaaaug

SEQ ID NO: 3542783 - RNA, 15 nt, Human
ugcacuguaaaaugu

SEQ ID NO: 3542784 - RNA, 15 nt, Human
guaauuuguguaaua

SEQ ID NO: 3542785 - RNA, 16 nt, Human
guaauuuguguaauaa

SEQ ID NO: 3542786 - RNA, 21 nt, Human
guaauuuguguaauaaagugu

SEQ ID NO: 3542787 - RNA, 15 nt, Human
guaauuuuauaugaa

SEQ ID NO: 3542788 - RNA, 23 nt, Human
guaauuuuggguggggagaagag

SEQ ID NO: 3542789 - RNA, 21 nt, Human
guaauuuuguucuaguuuuca

SEQ ID NO: 3542790 - RNA, 21 nt, Human
guaauuuuuuuaucgucacug

SEQ ID NO: 3542791 - RNA, 15 nt, Human
guaauuuuuuucacc

SEQ ID NO: 3542792 - RNA, 12 nt, Human
guacaaaaauaa

SEQ ID NO: 3542793 - RNA, 16 nt, Human
guacaaaagggacaug

SEQ ID NO: 3542794 - RNA, 14 nt, Human
guacaaaauaaagu

SEQ ID NO: 3542795 - RNA, 12 nt, Human
guacaaaauuaa

SEQ ID NO: 3542796 - RNA, 18 nt, Human
guacaaacuaaggugcua

SEQ ID NO: 3542797 - RNA, 17 nt, Human
guacaaauauaagaaua

SEQ ID NO: 3542798 - RNA, 15 nt, Human
guacaacggaggccu

SEQ ID NO: 3542799 - RNA, 21 nt, Human
guacaacuuuuuaccuaguac

SEQ ID NO: 3542800 - RNA, 15 nt, Human
guacaagaagcauuu

SEQ ID NO: 3542801 - RNA, 13 nt, Human
guacaaggcaugg

SEQ ID NO: 3542802 - RNA, 14 nt, Human
guacaaguaguucu

SEQ ID NO: 3542803 - RNA, 15 nt, Human
guacaaguaguucug

SEQ ID NO: 3542804 - RNA, 16 nt, Human
guacaaguaguucugu

SEQ ID NO: 3542805 - RNA, 22 nt, Human
guacaaguaguucuguauuuga

SEQ ID NO: 3542806 - RNA, 17 nt, Human
guacaagucaguuucua

SEQ ID NO: 3542807 - RNA, 19 nt, Human
guacaauaauucauauucu

SEQ ID NO: 3542808 - RNA, 14 nt, Human
guacaauauuuaaa

SEQ ID NO: 3542809 - RNA, 16 nt, Human
guacaauguacacacu

SEQ ID NO: 3542810 - RNA, 18 nt, Human
guacacaauaagcaaaaa

SEQ ID NO: 3542811 - RNA, 23 nt, Human
guacacagaacacauaauucagg

SEQ ID NO: 3542812 - RNA, 18 nt, Human
guacacagcaccagaaug

SEQ ID NO: 3542813 - RNA, 20 nt, Human
guacacagcucuagacacug

SEQ ID NO: 3542814 - RNA, 16 nt, Human
guacacccaugaaaga

SEQ ID NO: 3542815 - RNA, 14 nt, Human
guacaccccaccuc

SEQ ID NO: 3542816 - RNA, 17 nt, Human
guacaccccaccucuuc

SEQ ID NO: 3542817 - RNA, 19 nt, Human
guacacguaaaucuguuca

SEQ ID NO: 3542818 - RNA, 18 nt, Human
guacacucugcuguuuga

SEQ ID NO: 3542819 - RNA, 13 nt, Human
guacacugccugc

SEQ ID NO: 3542820 - RNA, 17 nt, Human
guacacugccugccuua

SEQ ID NO: 3542821 - RNA, 22 nt, Human
guacacuucaguuaucuugauc

SEQ ID NO: 3542822 - RNA, 15 nt, Human
guacacuugugaaua

SEQ ID NO: 3542823 - RNA, 13 nt, Human
guacagaaagcug

SEQ ID NO: 3542824 - RNA, 17 nt, Human
guacagaauauuucuau

SEQ ID NO: 3542825 - RNA, 21 nt, Human
guacagaaucauugcuuauga

SEQ ID NO: 3542826 - RNA, 15 nt, Human
guacagaauuugaau

SEQ ID NO: 3542827 - RNA, 15 nt, Human
guacagaauuuugga

SEQ ID NO: 3542828 - RNA, 16 nt, Human
guacagacaacaaacc

SEQ ID NO: 3542829 - RNA, 16 nt, Human
guacagacauauuuaa

SEQ ID NO: 3542830 - RNA, 14 nt, Human
guacagagaagcca

SEQ ID NO: 3542831 - RNA, 16 nt, Human
guacagagaagccagc

SEQ ID NO: 3542832 - RNA, 18 nt, Human
guacagagaagccagcuu

SEQ ID NO: 3542833 - RNA, 23 nt, Human
guacagagaagccagcuuguuua

SEQ ID NO: 3542834 - RNA, 18 nt, Human
guacagagaagccaucac

SEQ ID NO: 3542835 - RNA, 14 nt, Human
guacagagaaggaa

SEQ ID NO: 3542836 - RNA, 19 nt, Human
guacagaugaaugauaaac

SEQ ID NO: 3542837 - RNA, 17 nt, Human
guacagauugcugcuuc

SEQ ID NO: 3542838 - RNA, 20 nt, Human
guacagauugcugcuucugc

SEQ ID NO: 3542839 - RNA, 20 nt, Human
guacagcaaggagauuuaca

SEQ ID NO: 3542840 - RNA, 22 nt, Human
guacagcacuuucuucuuccca

SEQ ID NO: 3542841 - RNA, 15 nt, Human
guacagcuggcucua

SEQ ID NO: 3542842 - RNA, 12 nt, Human
guacaggcagca

SEQ ID NO: 3542843 - RNA, 17 nt, Human
guacaggcagcacagag

SEQ ID NO: 3542844 - RNA, 15 nt, Human
guacagguaagguga

SEQ ID NO: 3542845 - RNA, 17 nt, Human
guacaguaggauaagcc

SEQ ID NO: 3542846 - RNA, 24 nt, Human
guacaguauggggguuguaaauug

SEQ ID NO: 3542847 - RNA, 17 nt, Human
guacagucugucuucug

SEQ ID NO: 3542848 - RNA, 20 nt, Human
guacaguggugccaucauug

SEQ ID NO: 3542849 - RNA, 13 nt, Human
ugcagacuggagg

SEQ ID NO: 3542850 - RNA, 17 nt, Human
ugcagacuggaggggac

SEQ ID NO: 3542851 - RNA, 22 nt, Human
ugcagacuucccagcuaggaag

SEQ ID NO: 3542852 - RNA, 24 nt, Human
ugcagagacagagaggacgugggc

SEQ ID NO: 3542853 - RNA, 15 nt, Human
ugcagagagaagccu

SEQ ID NO: 3542854 - RNA, 21 nt, Human
ugcagagagccauuuugugaa

SEQ ID NO: 3542855 - RNA, 23 nt, Human
ugcagagagccauuuugugaaug

SEQ ID NO: 3542856 - RNA, 15 nt, Human
ugcagagauuucuca

SEQ ID NO: 3542857 - RNA, 21 nt, Human
ugcagagcaggaaacaugacu

SEQ ID NO: 3542858 - RNA, 16 nt, Human
ugcagagccuucucag

SEQ ID NO: 3542859 - RNA, 17 nt, Human
ugcagagccuucucaga

SEQ ID NO: 3542860 - RNA, 21 nt, Human
ugcagaggaaguacaaacuaa

SEQ ID NO: 3542861 - RNA, 15 nt, Human
ugcagaggccagagg

SEQ ID NO: 3542862 - RNA, 17 nt, Human
ugcagaggccagaggcc

SEQ ID NO: 3542863 - RNA, 17 nt, Human
ugcagaggggcaggccc

SEQ ID NO: 3542864 - RNA, 22 nt, Human
ugcagaggggcaggcccugcac

SEQ ID NO: 3542865 - RNA, 19 nt, Human
ugcagaggguacuuuaaga

SEQ ID NO: 3542866 - RNA, 20 nt, Human
ugcagagguaaaagugugag

SEQ ID NO: 3542867 - RNA, 19 nt, Human
ugcagaggucugugcugag

SEQ ID NO: 3542868 - RNA, 22 nt, Human
ugcagaggucugugcugaggcc

SEQ ID NO: 3542869 - RNA, 13 nt, Human
ugcagagucagca

SEQ ID NO: 3542870 - RNA, 17 nt, Human
ugcagagucagcagaac

SEQ ID NO: 3542871 - RNA, 17 nt, Human
ugcagaguccugcacag

SEQ ID NO: 3542872 - RNA, 15 nt, Human
ugcagagugcccaga

SEQ ID NO: 3542873 - RNA, 18 nt, Human
ugcagagugcccagaacu

SEQ ID NO: 3542874 - RNA, 23 nt, Human
ugcagagugccccaucggucacc

SEQ ID NO: 3542875 - RNA, 24 nt, Human
ugcagaguucagggaagauaaguu

SEQ ID NO: 3542876 - RNA, 16 nt, Human
ugcagauaaacaguag

SEQ ID NO: 3542877 - RNA, 16 nt, Human
ugcagauagaaagcau

SEQ ID NO: 3542878 - RNA, 17 nt, Human
ugcagauaucacagagg

SEQ ID NO: 3542879 - RNA, 15 nt, Human
ugcagaugcaauugu

SEQ ID NO: 3542880 - RNA, 16 nt, Human
ugcagaugccagagca

SEQ ID NO: 3542881 - RNA, 14 nt, Human
ugcagaugccuggg

SEQ ID NO: 3542882 - RNA, 13 nt, Human
ugcagauucauuu

SEQ ID NO: 3542883 - RNA, 16 nt, Human
ugcagauuugggcugg

SEQ ID NO: 3542884 - RNA, 18 nt, Human
ugcagcaaacacuccacc

SEQ ID NO: 3542885 - RNA, 14 nt, Human
ugcagcaaccagag

SEQ ID NO: 3542886 - RNA, 16 nt, Human
ugcagcaaccagagca

SEQ ID NO: 3542887 - RNA, 22 nt, Human
ugcagcaaccagagcacuguau

SEQ ID NO: 3542888 - RNA, 19 nt, Human
ugcagcaaggcccugcugc

SEQ ID NO: 3542889 - RNA, 14 nt, Human
ugcagcaauaaagc

SEQ ID NO: 3542890 - RNA, 15 nt, Human
ugcagcaauaaagca

SEQ ID NO: 3542891 - RNA, 23 nt, Human
ugcagcaauaaagcagcguuucu

SEQ ID NO: 3542892 - RNA, 17 nt, Human
ugcagcaaucuuugaaa

SEQ ID NO: 3542893 - RNA, 22 nt, Human
ugcagcaauuaaaaauugucuu

SEQ ID NO: 3542894 - RNA, 23 nt, Human
ugcagcacagcugagaggcuguc

SEQ ID NO: 3542895 - RNA, 21 nt, Human
ugcagcaccgaggggccuuug

SEQ ID NO: 3542896 - RNA, 17 nt, Human
ugcagcacggacaauaa

SEQ ID NO: 3542897 - RNA, 19 nt, Human
ugcagcacggacaauaaac

SEQ ID NO: 3542898 - RNA, 13 nt, Human
ugcagcagagccu

SEQ ID NO: 3542899 - RNA, 13 nt, Human
ugcagcagauugg

SEQ ID NO: 3542900 - RNA, 18 nt, Human
ugcagcagcgguggccuc

SEQ ID NO: 3542901 - RNA, 12 nt, Human
ugcagcagcuug

SEQ ID NO: 3542902 - RNA, 23 nt, Human
ugcagcaggaguggugcagacag

SEQ ID NO: 3542903 - RNA, 16 nt, Human
ugcagcagggaugccc

SEQ ID NO: 3542904 - RNA, 18 nt, Human
ugcagcagugagucucuu

SEQ ID NO: 3542905 - RNA, 22 nt, Human
ugcagcaugaccugugaccagc

SEQ ID NO: 3542906 - RNA, 23 nt, Human
ugcagcauguugcugaggaguga

SEQ ID NO: 3542907 - RNA, 23 nt, Human
ugcagccagaccuauuccuccug

SEQ ID NO: 3542908 - RNA, 14 nt, Human
ugcagccagcccag

SEQ ID NO: 3542909 - RNA, 17 nt, Human
ugcagccagcccagccc

SEQ ID NO: 3542910 - RNA, 21 nt, Human
ugcagccagcccagcccagcu

SEQ ID NO: 3542911 - RNA, 23 nt, Human
ugcagccagcccagcccagcugg

SEQ ID NO: 3542912 - RNA, 11 nt, Human
ugcagccagcu

SEQ ID NO: 3542913 - RNA, 13 nt, Human
ugcagcccaugcc

SEQ ID NO: 3542914 - RNA, 18 nt, Human
ugcagcccaugcccaccu

SEQ ID NO: 3542915 - RNA, 23 nt, Human
ugcagcccaugcccaccugccca

SEQ ID NO: 3542916 - RNA, 20 nt, Human
ugcagcccauuucuccagaa

SEQ ID NO: 3542917 - RNA, 21 nt, Human
ugcagcccauuucuccagaac

SEQ ID NO: 3542918 - RNA, 22 nt, Human
ugcagcccggcgccaccauccu

SEQ ID NO: 3542919 - RNA, 19 nt, Human
ugcagcccguguggccccu

SEQ ID NO: 3542920 - RNA, 13 nt, Human
ugcagcccuggcc

SEQ ID NO: 3542921 - RNA, 16 nt, Human
ugcagccgccuuccuu

SEQ ID NO: 3542922 - RNA, 18 nt, Human
ugcagccucaaccuccug

SEQ ID NO: 3542923 - RNA, 21 nt, Human
ugcagccucaaccuccugggc

SEQ ID NO: 3542924 - RNA, 22 nt, Human
ugcagccucaaccuccugggcu

SEQ ID NO: 3542925 - RNA, 23 nt, Human
ugcagccucaaccuccugggcua

SEQ ID NO: 3542926 - RNA, 13 nt, Human
ugcagccucacag

SEQ ID NO: 3542927 - RNA, 17 nt, Human
ugcagccucacaguccu

SEQ ID NO: 3542928 - RNA, 20 nt, Human
guaguauggccugugucacu

SEQ ID NO: 3542929 - RNA, 15 nt, Human
guaguauucuucccu

SEQ ID NO: 3542930 - RNA, 15 nt, Human
guaguauuuuuugua

SEQ ID NO: 3542931 - RNA, 21 nt, Human
guagucagaauuagcugcuuc

SEQ ID NO: 3542932 - RNA, 23 nt, Human
guagucccagcuacuugggaggc

SEQ ID NO: 3542933 - RNA, 16 nt, Human
guaguccgugcugaca

SEQ ID NO: 3542934 - RNA, 12 nt, Human
guaguccuguga

SEQ ID NO: 3542935 - RNA, 14 nt, Human
guagucggcacagc

SEQ ID NO: 3542936 - RNA, 15 nt, Human
guagucuaaccaaau

SEQ ID NO: 3542937 - RNA, 19 nt, Human
guagucuaaccaaaugcau

SEQ ID NO: 3542938 - RNA, 14 nt, Human
guagucucugugcu

SEQ ID NO: 3542939 - RNA, 19 nt, Human
guagugaagacuccagaaa

SEQ ID NO: 3542940 - RNA, 14 nt, Human
guagugagauagca

SEQ ID NO: 3542941 - RNA, 22 nt, Human
guagugugggaggcuccuguua

SEQ ID NO: 3542942 - RNA, 21 nt, Human
guaguguuauugccaggaaag

SEQ ID NO: 3542943 - RNA, 21 nt, Human
guaguuaaaaaaaaaaaaagg

SEQ ID NO: 3542944 - RNA, 15 nt, Human
guaguuaauuuaucu

SEQ ID NO: 3542945 - RNA, 13 nt, Human
guaguuaggaaau

SEQ ID NO: 3542946 - RNA, 15 nt, Human
guaguuaggaaauaa

SEQ ID NO: 3542947 - RNA, 16 nt, Human
guaguuaggaaauaaa

SEQ ID NO: 3542948 - RNA, 23 nt, Human
guaguuccacuuauagccucugu

SEQ ID NO: 3542949 - RNA, 20 nt, Human
guaguucccugaaaacccag

SEQ ID NO: 3542950 - RNA, 14 nt, Human
guaguucucaaagu

SEQ ID NO: 3542951 - RNA, 20 nt, Human
guaguucucuugguguuaaa

SEQ ID NO: 3542952 - RNA, 17 nt, Human
guaguucuguauuugaa

SEQ ID NO: 3542953 - RNA, 18 nt, Human
guaguucuguauuugaaa

SEQ ID NO: 3542954 - RNA, 21 nt, Human
guaguucuguuuggugugucc

SEQ ID NO: 3542955 - RNA, 14 nt, Human
guaguucuuuaaac

SEQ ID NO: 3542956 - RNA, 17 nt, Human
guaguucuuuaaacugu

SEQ ID NO: 3542957 - RNA, 21 nt, Human
guaguuuuaucacauguaugu

SEQ ID NO: 3542958 - RNA, 22 nt, Human
guaguuuuuacagcuguguuau

SEQ ID NO: 3542959 - RNA, 13 nt, Human
guaguuuuuucau

SEQ ID NO: 3542960 - RNA, 23 nt, Human
guaguuuuuuuuuuuuuuaugug

SEQ ID NO: 3542961 - RNA, 19 nt, Human
guauaaaaauaaaaaagau

SEQ ID NO: 3542962 - RNA, 13 nt, Human
guauaaaagaugg

SEQ ID NO: 3542963 - RNA, 18 nt, Human
guauaaaagggacugaga

SEQ ID NO: 3542964 - RNA, 15 nt, Human
guauaaaauaauuuu

SEQ ID NO: 3542965 - RNA, 22 nt, Human
guauaaaauacauagugaaaau

SEQ ID NO: 3542966 - RNA, 17 nt, Human
guauaaaaucagccaau

SEQ ID NO: 3542967 - RNA, 19 nt, Human
guauaaaaugguguuuuca

SEQ ID NO: 3542968 - RNA, 14 nt, Human
guauaaacauuaaa

SEQ ID NO: 3542969 - RNA, 18 nt, Human
guauaaacauuaaauguc

SEQ ID NO: 3542970 - RNA, 16 nt, Human
guauaaacugauggau

SEQ ID NO: 3542971 - RNA, 13 nt, Human
guauaaagaaaag

SEQ ID NO: 3542972 - RNA, 14 nt, Human
guauaaagaaaagu

SEQ ID NO: 3542973 - RNA, 12 nt, Human
guauaaagaaca

SEQ ID NO: 3542974 - RNA, 21 nt, Human
guauaaagaauaggacuuguu

SEQ ID NO: 3542975 - RNA, 12 nt, Human
guauaaauauac

SEQ ID NO: 3542976 - RNA, 12 nt, Human
guauaaaugguu

SEQ ID NO: 3542977 - RNA, 21 nt, Human
guauaaauguauauacacaua

SEQ ID NO: 3542978 - RNA, 22 nt, Human
guauaaauguauauacacauau

SEQ ID NO: 3542979 - RNA, 16 nt, Human
guauaaaugucuuuaa

SEQ ID NO: 3542980 - RNA, 17 nt, Human
guauaagcacugaaaaa

SEQ ID NO: 3542981 - RNA, 17 nt, Human
guauaaguaagaaaaua

SEQ ID NO: 3542982 - RNA, 18 nt, Human
guauaaguaagaaaauau

SEQ ID NO: 3542983 - RNA, 17 nt, Human
guauaagugcacacaga

SEQ ID NO: 3542984 - RNA, 19 nt, Human
guauaaguggaggcacuuu

SEQ ID NO: 3542985 - RNA, 13 nt, Human
guauaauaaaauu

SEQ ID NO: 3542986 - RNA, 12 nt, Human
guauaauaggcu

SEQ ID NO: 3542987 - RNA, 14 nt, Human
guauaauauaaaaa

SEQ ID NO: 3542988 - RNA, 12 nt, Human
guauaauauuuu

SEQ ID NO: 3542989 - RNA, 15 nt, Human
guauaauauuuuuaa

SEQ ID NO: 3542990 - RNA, 19 nt, Human
guauaaugguugacugggu

SEQ ID NO: 3542991 - RNA, 10 nt, Human
guauaauuaa

SEQ ID NO: 3542992 - RNA, 14 nt, Human
guauaauuaacaug

SEQ ID NO: 3542993 - RNA, 23 nt, Human
guauaauuaacauguuaaaccau

SEQ ID NO: 3542994 - RNA, 19 nt, Human
guauaauuggauuuccuaa

SEQ ID NO: 3542995 - RNA, 20 nt, Human
guauaauuggauuuccuaau

SEQ ID NO: 3542996 - RNA, 18 nt, Human
guauaauuguaucguaua

SEQ ID NO: 3542997 - RNA, 14 nt, Human
guauaauuucgaga

SEQ ID NO: 3542998 - RNA, 15 nt, Human
guauacaaauauauu

SEQ ID NO: 3542999 - RNA, 15 nt, Human
guauacaauauauaa

SEQ ID NO: 3543000 - RNA, 17 nt, Human
guauacaauauauaaaa

SEQ ID NO: 3543001 - RNA, 17 nt, Human
guauacauccuggguaa

SEQ ID NO: 3543002 - RNA, 12 nt, Human
guauacaugcca

SEQ ID NO: 3543003 - RNA, 15 nt, Human
guauaccugauuuuu

SEQ ID NO: 3543004 - RNA, 15 nt, Human
guauacuauaguacc

SEQ ID NO: 3543005 - RNA, 22 nt, Human
guauacuuuaaauaauuuaacu

SEQ ID NO: 3543006 - RNA, 23 nt, Human
guauagaaaugcugguuuuucag

SEQ ID NO: 3543007 - RNA, 16 nt, Human
guauagacaggagaag

SEQ ID NO: 3543008 - RNA, 15 nt, Human
guauagacaguuugu

SEQ ID NO: 3543009 - RNA, 17 nt, Human
guauagacaguuuguaa

SEQ ID NO: 3543010 - RNA, 16 nt, Human
guauagacuccugaaa

SEQ ID NO: 3543011 - RNA, 14 nt, Human
guauagaugcaaga

SEQ ID NO: 3543012 - RNA, 14 nt, Human
guauagauuagaau

SEQ ID NO: 3543013 - RNA, 20 nt, Human
guauagcaugcaucuguuua

SEQ ID NO: 3543014 - RNA, 18 nt, Human
guauagcugcuuccagug

SEQ ID NO: 3543015 - RNA, 19 nt, Human
guauaguacuggcauggua

SEQ ID NO: 3543016 - RNA, 15 nt, Human
guauaguauuugaaa

SEQ ID NO: 3543017 - RNA, 17 nt, Human
guauaguauuugaaaac

SEQ ID NO: 3543018 - RNA, 18 nt, Human
guauaguauuugaaaaca

SEQ ID NO: 3543019 - RNA, 21 nt, Human
guauaguauuugaaaacagaa

SEQ ID NO: 3543020 - RNA, 13 nt, Human
guauaguguaaaa

SEQ ID NO: 3543021 - RNA, 15 nt, Human
guauaguguaaaaua

SEQ ID NO: 3543022 - RNA, 19 nt, Human
guauaguuaggauagcauu

SEQ ID NO: 3543023 - RNA, 19 nt, Human
guauaguugauguaacauu

SEQ ID NO: 3543024 - RNA, 16 nt, Human
guauauaaaauauuuu

SEQ ID NO: 3543025 - RNA, 12 nt, Human
guauauaauuuu

SEQ ID NO: 3543026 - RNA, 13 nt, Human
guauauacacaua

SEQ ID NO: 3543027 - RNA, 15 nt, Human
guauauacacauaua

SEQ ID NO: 3543028 - RNA, 16 nt, Human
guauauacgcaucuau

SEQ ID NO: 3543029 - RNA, 11 nt, Human
guauauauaca

SEQ ID NO: 3543030 - RNA, 16 nt, Human
guauauauacauaaca

SEQ ID NO: 3543031 - RNA, 14 nt, Human
guauauauguguau

SEQ ID NO: 3543032 - RNA, 14 nt, Human
guauauaugugugu

SEQ ID NO: 3543033 - RNA, 19 nt, Human
guauauauguguguuuaaa

SEQ ID NO: 3543034 - RNA, 13 nt, Human
guauauauuccca

SEQ ID NO: 3543035 - RNA, 13 nt, Human
guauauauuuugu

SEQ ID NO: 3543036 - RNA, 14 nt, Human
guauauccuuuucu

SEQ ID NO: 3543037 - RNA, 18 nt, Human
guauaucguuaucacugu

SEQ ID NO: 3543038 - RNA, 19 nt, Human
guauaucuagguuuaugac

SEQ ID NO: 3543039 - RNA, 17 nt, Human
guauaucuggacaagcc

SEQ ID NO: 3543040 - RNA, 18 nt, Human
guauaucuggacaagcca

SEQ ID NO: 3543041 - RNA, 21 nt, Human
guauaucugggcuggccaguu

SEQ ID NO: 3543042 - RNA, 17 nt, Human
guauauguaugugugua

SEQ ID NO: 3543043 - RNA, 18 nt, Human
guauauuacacauuugua

SEQ ID NO: 3543044 - RNA, 22 nt, Human
guauauuacacauuuguacaga

SEQ ID NO: 3543045 - RNA, 17 nt, Human
ugccaggccagccuccg

SEQ ID NO: 3543046 - RNA, 17 nt, Human
ugccaggcccccaccac

SEQ ID NO: 3543047 - RNA, 21 nt, Human
ugccaggcccccaccacacau

SEQ ID NO: 3543048 - RNA, 14 nt, Human
ugccaggcucucuu

SEQ ID NO: 3543049 - RNA, 20 nt, Human
ugccaggcuggagugcagug

SEQ ID NO: 3543050 - RNA, 17 nt, Human
ugccagggcaaugauga

SEQ ID NO: 3543051 - RNA, 15 nt, Human
ugccagggcagggcc

SEQ ID NO: 3543052 - RNA, 17 nt, Human
ugccagggccccucucc

SEQ ID NO: 3543053 - RNA, 23 nt, Human
ugccagggccccucuccccaggg

SEQ ID NO: 3543054 - RNA, 22 nt, Human
ugccaggucccuuucauuugcu

SEQ ID NO: 3543055 - RNA, 20 nt, Human
ugccagguccuugcccuuug

SEQ ID NO: 3543056 - RNA, 17 nt, Human
ugccaggugaggucagc

SEQ ID NO: 3543057 - RNA, 17 nt, Human
ugccagguuuuuggucu

SEQ ID NO: 3543058 - RNA, 18 nt, Human
ugccagguuuuuggucug

SEQ ID NO: 3543059 - RNA, 19 nt, Human
ugccagguuuuuggucuga

SEQ ID NO: 3543060 - RNA, 24 nt, Human
ugccagguuuuuggucugacccac

SEQ ID NO: 3543061 - RNA, 23 nt, Human
ugccaguaacacaggccacccug

SEQ ID NO: 3543062 - RNA, 23 nt, Human
ugccaguaccagccccacccugu

SEQ ID NO: 3543063 - RNA, 14 nt, Human
ugccagucaccccg

SEQ ID NO: 3543064 - RNA, 15 nt, Human
ugccagucaccccgg

SEQ ID NO: 3543065 - RNA, 13 nt, Human
ugccaguccuguc

SEQ ID NO: 3543066 - RNA, 12 nt, Human
ugccagucgcgc

SEQ ID NO: 3543067 - RNA, 19 nt, Human
ugccagucgcgcugccugu

SEQ ID NO: 3543068 - RNA, 20 nt, Human
ugccagucgcgcugccugug

SEQ ID NO: 3543069 - RNA, 19 nt, Human
ugccagugacagacaggcu

SEQ ID NO: 3543070 - RNA, 12 nt, Human
ugccagugccug

SEQ ID NO: 3543071 - RNA, 15 nt, Human
ugccagugccuuacc

SEQ ID NO: 3543072 - RNA, 16 nt, Human
ugccaguggggccuga

SEQ ID NO: 3543073 - RNA, 16 nt, Human
ugccaguguccugagc

SEQ ID NO: 3543074 - RNA, 17 nt, Human
ugaguagaaaggccuuu

SEQ ID NO: 3543075 - RNA, 18 nt, Human
ugaguagaaaggccuuua

SEQ ID NO: 3543076 - RNA, 23 nt, Human
ugaguagaaaggccuuuaaaauu

SEQ ID NO: 3543077 - RNA, 14 nt, Human
ugaguagaguugau

SEQ ID NO: 3543078 - RNA, 17 nt, Human
ugaguagaguugaucaa

SEQ ID NO: 3543079 - RNA, 13 nt, Human
ugaguagcuggga

SEQ ID NO: 3543080 - RNA, 15 nt, Human
ugaguauacaauaua

SEQ ID NO: 3543081 - RNA, 15 nt, Human
ugaguauauuauaau

SEQ ID NO: 3543082 - RNA, 14 nt, Human
ugaguauuaaaaug

SEQ ID NO: 3543083 - RNA, 17 nt, Human
ugaguauuaaaauguau

SEQ ID NO: 3543084 - RNA, 18 nt, Human
ugaguauuaaaauguaug

SEQ ID NO: 3543085 - RNA, 15 nt, Human
ugaguauuguuuaaa

SEQ ID NO: 3543086 - RNA, 23 nt, Human
ugaguauuguuuaaaauguaauu

SEQ ID NO: 3543087 - RNA, 18 nt, Human
ugagucaaguuguuccuu

SEQ ID NO: 3543088 - RNA, 15 nt, Human
ugagucaaugugcag

SEQ ID NO: 3543089 - RNA, 18 nt, Human
ugagucaccaagcccagu

SEQ ID NO: 3543090 - RNA, 16 nt, Human
ugagucacccaugaag

SEQ ID NO: 3543091 - RNA, 23 nt, Human
ugagucacuaugggaugagaaaa

SEQ ID NO: 3543092 - RNA, 15 nt, Human
ugagucagggcccag

SEQ ID NO: 3543093 - RNA, 17 nt, Human
ugagucagggcccagag

SEQ ID NO: 3543094 - RNA, 18 nt, Human
ugagucagggcccagagg

SEQ ID NO: 3543095 - RNA, 22 nt, Human
ugagucaugaucucccugccgc

SEQ ID NO: 3543096 - RNA, 17 nt, Human
ugaguccauucucccag

SEQ ID NO: 3543097 - RNA, 20 nt, Human
ugaguccauucucccaggua

SEQ ID NO: 3543098 - RNA, 19 nt, Human
ugagucccaggcugagccu

SEQ ID NO: 3543099 - RNA, 21 nt, Human
ugagucccaggcugagccuca

SEQ ID NO: 3543100 - RNA, 20 nt, Human
ugaguccccauugaggcuug

SEQ ID NO: 3543101 - RNA, 22 nt, Human
ugaguccccauugaggcuuggu

SEQ ID NO: 3543102 - RNA, 18 nt, Human
ugagucccuuccaggcca

SEQ ID NO: 3543103 - RNA, 21 nt, Human
ugagucccuuccaggccauca

SEQ ID NO: 3543104 - RNA, 16 nt, Human
ugaguccuagagcuac

SEQ ID NO: 3543105 - RNA, 17 nt, Human
ugaguccuccagaacuc

SEQ ID NO: 3543106 - RNA, 23 nt, Human
ugaguccuccagaacucuuccuc

SEQ ID NO: 3543107 - RNA, 19 nt, Human
ugaguccuggaugauacua

SEQ ID NO: 3543108 - RNA, 18 nt, Human
ugaguccuggcaugggaa

SEQ ID NO: 3543109 - RNA, 22 nt, Human
ugaguccuggcaugggaaugaa

SEQ ID NO: 3543110 - RNA, 13 nt, Human
ugaguccuggccc

SEQ ID NO: 3543111 - RNA, 18 nt, Human
ugaguccuuaaacagggc

SEQ ID NO: 3543112 - RNA, 18 nt, Human
ugaguccuugauuucaaa

SEQ ID NO: 3543113 - RNA, 18 nt, Human
ugagucgaggacagggag

SEQ ID NO: 3543114 - RNA, 17 nt, Human
ugagucgugaccugcua

SEQ ID NO: 3543115 - RNA, 23 nt, Human
ugagucucccaaggcugcgucug

SEQ ID NO: 3543116 - RNA, 15 nt, Human
ugagucucucugggc

SEQ ID NO: 3543117 - RNA, 14 nt, Human
ugagucucuggggc

SEQ ID NO: 3543118 - RNA, 13 nt, Human
ugagucugaaggc

SEQ ID NO: 3543119 - RNA, 18 nt, Human
ugagucugaaggcugggu

SEQ ID NO: 3543120 - RNA, 14 nt, Human
ugagucugggcagc

SEQ ID NO: 3543121 - RNA, 17 nt, Human
ugagucuguucugguaa

SEQ ID NO: 3543122 - RNA, 17 nt, Human
ugagucuguuuuguaaa

SEQ ID NO: 3543123 - RNA, 16 nt, Human
ugagucuuggcggcag

SEQ ID NO: 3543124 - RNA, 18 nt, Human
ugagucuuggcggcagca

SEQ ID NO: 3543125 - RNA, 22 nt, Human
ugagucuuuuuuuuuuaaguga

SEQ ID NO: 3543126 - RNA, 21 nt, Human
ugagugaaauacuguacaggg

SEQ ID NO: 3543127 - RNA, 15 nt, Human
ugagugaauaaaugu

SEQ ID NO: 3543128 - RNA, 14 nt, Human
ugagugagcaugcc

SEQ ID NO: 3543129 - RNA, 14 nt, Human
ugagugagccuggc

SEQ ID NO: 3543130 - RNA, 20 nt, Human
ugagugaugcggcagauuga

SEQ ID NO: 3543131 - RNA, 20 nt, Human
ugagugcaaacuucagaguu

SEQ ID NO: 3543132 - RNA, 12 nt, Human
ugagugccuucu

SEQ ID NO: 3543133 - RNA, 13 nt, Human
ugagugccuucug

SEQ ID NO: 3543134 - RNA, 18 nt, Human
ugagugccuucugugggg

SEQ ID NO: 3543135 - RNA, 18 nt, Human
ugaguggaugauguuucg

SEQ ID NO: 3543136 - RNA, 13 nt, Human
ugaguggcagggg

SEQ ID NO: 3543137 - RNA, 12 nt, Human
ugaguggcccuu

SEQ ID NO: 3543138 - RNA, 19 nt, Human
ugaguggcuucacuccugc

SEQ ID NO: 3543139 - RNA, 22 nt, Human
ugaguggcuucacuccugcugu

SEQ ID NO: 3543140 - RNA, 12 nt, Human
ugagugggaagc

SEQ ID NO: 3543141 - RNA, 14 nt, Human
ugagugggaagccc

SEQ ID NO: 3543142 - RNA, 15 nt, Human
ugagugggagaaggc

SEQ ID NO: 3543143 - RNA, 19 nt, Human
ugaguggggagacaccuca

SEQ ID NO: 3543144 - RNA, 20 nt, Human
ugaguggggagacaccucag

SEQ ID NO: 3543145 - RNA, 21 nt, Human
ugaguggggagacaccucaga

SEQ ID NO: 3543146 - RNA, 21 nt, Human
ugagugggggaucacagccuc

SEQ ID NO: 3543147 - RNA, 22 nt, Human
ugagugggguuaucucuguguu

SEQ ID NO: 3543148 - RNA, 14 nt, Human
ugaguguaagugug

SEQ ID NO: 3543149 - RNA, 11 nt, Human
ugaguguacca

SEQ ID NO: 3543150 - RNA, 14 nt, Human
ugaguguaugagua

SEQ ID NO: 3543151 - RNA, 17 nt, Human
ugagugugacagggcca

SEQ ID NO: 3543152 - RNA, 21 nt, Human
ugagugugauccaguuuuuca

SEQ ID NO: 3543153 - RNA, 12 nt, Human
ugaguguggaag

SEQ ID NO: 3543154 - RNA, 17 nt, Human
ugaguguguccaagugu

SEQ ID NO: 3543155 - RNA, 15 nt, Human
ugagugugugugugc

SEQ ID NO: 3543156 - RNA, 16 nt, Human
ugagugugugugugca

SEQ ID NO: 3543157 - RNA, 18 nt, Human
ugaguguuuaauaaaguu

SEQ ID NO: 3543158 - RNA, 21 nt, Human
ugaguguuuuaugagaaagcc

SEQ ID NO: 3543159 - RNA, 17 nt, Human
ugaguuacugugcauug

SEQ ID NO: 3543160 - RNA, 12 nt, Human
ugaguuaggaac

SEQ ID NO: 3543161 - RNA, 16 nt, Human
ugaguuauguuaaaau

SEQ ID NO: 3543162 - RNA, 22 nt, Human
ugaguuauuccuugaucauuuu

SEQ ID NO: 3543163 - RNA, 23 nt, Human
ugaguuauuccuugaucauuuug

SEQ ID NO: 3543164 - RNA, 14 nt, Human
ugaguuauuuuaau

SEQ ID NO: 3543165 - RNA, 17 nt, Human
ugaguuccaguugaagu

SEQ ID NO: 3543166 - RNA, 18 nt, Human
ugaguuccuagccaccgc

SEQ ID NO: 3543167 - RNA, 21 nt, Human
ugaguucgaggacuacaacca

SEQ ID NO: 3543168 - RNA, 13 nt, Human
ugaguucucaggg

SEQ ID NO: 3543169 - RNA, 19 nt, Human
ugaguucucagggcuccug

SEQ ID NO: 3543170 - RNA, 15 nt, Human
ugaguucucccugua

SEQ ID NO: 3543171 - RNA, 14 nt, Human
ugaguucugcugaa

SEQ ID NO: 3543172 - RNA, 15 nt, Human
ugaguucuuccugua

SEQ ID NO: 3543173 - RNA, 23 nt, Human
ugaguugacuugacagaacacug

SEQ ID NO: 3543174 - RNA, 21 nt, Human
ugaguugauagcacagacccu

SEQ ID NO: 3543175 - RNA, 14 nt, Human
ugaguuggcuggga

SEQ ID NO: 3543176 - RNA, 18 nt, Human
ugaguugugaaaguuuug

SEQ ID NO: 3543177 - RNA, 23 nt, Human
ugaguuguuuucagacucagacu

SEQ ID NO: 3543178 - RNA, 17 nt, Human
ugaguuguuuuuguaua

SEQ ID NO: 3543179 - RNA, 20 nt, Human
ugaguuguuuuuguauauug

SEQ ID NO: 3543180 - RNA, 16 nt, Human
ugaguuuaaaaaucaa

SEQ ID NO: 3543181 - RNA, 20 nt, Human
ugaguuuaaaaaucaacuuu

SEQ ID NO: 3543182 - RNA, 20 nt, Human
ugaguuuaccauuuguaaua

SEQ ID NO: 3543183 - RNA, 21 nt, Human
ugaguuuagugaucugaacag

SEQ ID NO: 3543184 - RNA, 17 nt, Human
ugaguuuauaucucuca

SEQ ID NO: 3543185 - RNA, 18 nt, Human
ugaguuucauucuccugc

SEQ ID NO: 3543186 - RNA, 19 nt, Human
ugaguuucucucacauuac

SEQ ID NO: 3543187 - RNA, 18 nt, Human
ugaguuugagcugccuuc

SEQ ID NO: 3543188 - RNA, 21 nt, Human
ugaguuugagcugccuucccu

SEQ ID NO: 3543189 - RNA, 14 nt, Human
ugaguuugcccugg

SEQ ID NO: 3543190 - RNA, 23 nt, Human
ugaguuugggccccagaggcugg

SEQ ID NO: 3543191 - RNA, 21 nt, Human
ugaguuuguagguaaaaugua

SEQ ID NO: 3543192 - RNA, 23 nt, Human
ugaguuuucucuuuguggggcuu

SEQ ID NO: 3543193 - RNA, 17 nt, Human
ugaguuuuguguuuguu

SEQ ID NO: 3543194 - RNA, 20 nt, Human
ugaguuuuguuuuaaaauua

SEQ ID NO: 3543195 - RNA, 18 nt, Human
ugaguuuuuauggggcug

SEQ ID NO: 3543196 - RNA, 19 nt, Human
ugaguuuuugauagcuuua

SEQ ID NO: 3543197 - RNA, 18 nt, Human
ugaguuuuuucucuuggg

SEQ ID NO: 3543198 - RNA, 16 nt, Human
ugauaaaaaauuuugu

SEQ ID NO: 3543199 - RNA, 19 nt, Human
ugauaaaaaauuuuguaau

SEQ ID NO: 3543200 - RNA, 17 nt, Human
ugauaaaggccagauua

SEQ ID NO: 3543201 - RNA, 19 nt, Human
ugauaaaguaguaaaaauu

SEQ ID NO: 3543202 - RNA, 13 nt, Human
ugauaaaguuucu

SEQ ID NO: 3543203 - RNA, 16 nt, Human
ugauaaaguuucucag

SEQ ID NO: 3543204 - RNA, 22 nt, Human
ugauaaaguuucucagauccuu

SEQ ID NO: 3543205 - RNA, 14 nt, Human
ugauaaauaguguu

SEQ ID NO: 3543206 - RNA, 21 nt, Human
ugauaaauauucacacuugaa

SEQ ID NO: 3543207 - RNA, 14 nt, Human
ugauaaaucauuuu

SEQ ID NO: 3543208 - RNA, 13 nt, Human
ugauaaauccauc

SEQ ID NO: 3543209 - RNA, 17 nt, Human
ugauaacaaccuggaga

SEQ ID NO: 3543210 - RNA, 14 nt, Human
guauuagauguucu

SEQ ID NO: 3543211 - RNA, 17 nt, Human
guauuagauguucucua

SEQ ID NO: 3543212 - RNA, 18 nt, Human
guauuagauguucucuau

SEQ ID NO: 3543213 - RNA, 22 nt, Human
guauuagauguucucuaucauu

SEQ ID NO: 3543214 - RNA, 22 nt, Human
guauuagugauauuucucuagu

SEQ ID NO: 3543215 - RNA, 23 nt, Human
guauuauaaacaagaaugaaggu

SEQ ID NO: 3543216 - RNA, 20 nt, Human
guauuauaaauuauguuuau

SEQ ID NO: 3543217 - RNA, 18 nt, Human
guauuauaccaaaauguu

SEQ ID NO: 3543218 - RNA, 22 nt, Human
guccaugcagggggcuccuggg

SEQ ID NO: 3543219 - RNA, 14 nt, Human
guccauggaaugcu

SEQ ID NO: 3543220 - RNA, 15 nt, Human
guccauggaaugcuu

SEQ ID NO: 3543221 - RNA, 18 nt, Human
guccauggaaugcuugaa

SEQ ID NO: 3543222 - RNA, 14 nt, Human
guccaugugugugc

SEQ ID NO: 3543223 - RNA, 15 nt, Human
guccauugacaugua

SEQ ID NO: 3543224 - RNA, 19 nt, Human
guccauugacauguacaga

SEQ ID NO: 3543225 - RNA, 16 nt, Human
guccauuuacacguau

SEQ ID NO: 3543226 - RNA, 22 nt, Human
guccauuuauauaugaaaacua

SEQ ID NO: 3543227 - RNA, 13 nt, Human
guccauuucuacc

SEQ ID NO: 3543228 - RNA, 15 nt, Human
guccauuuguaaaac

SEQ ID NO: 3543229 - RNA, 15 nt, Human
guccauuuugugaag

SEQ ID NO: 3543230 - RNA, 23 nt, Human
guccauuuuuacaaguuauagua

SEQ ID NO: 3543231 - RNA, 19 nt, Human
gucccaaauccuucccaag

SEQ ID NO: 3543232 - RNA, 15 nt, Human
gucccaacuuguaaa

SEQ ID NO: 3543233 - RNA, 21 nt, Human
gucccaacuuguaaaaauuaa

SEQ ID NO: 3543234 - RNA, 15 nt, Human
gucccaagcugggcc

SEQ ID NO: 3543235 - RNA, 21 nt, Human
gucccaagcugggccccagcc

SEQ ID NO: 3543236 - RNA, 23 nt, Human
gucccaagcugggccccagccca

SEQ ID NO: 3543237 - RNA, 16 nt, Human
gucccaaggaaagccc

SEQ ID NO: 3543238 - RNA, 22 nt, Human
gucccaaggcaaggggugccug

SEQ ID NO: 3543239 - RNA, 23 nt, Human
gucccaaugcacauccauuccca

SEQ ID NO: 3543240 - RNA, 17 nt, Human
gucccacacuggugacu

SEQ ID NO: 3543241 - RNA, 11 nt, Human
gucccacagcu

SEQ ID NO: 3543242 - RNA, 17 nt, Human
gucccacaucccugggc

SEQ ID NO: 3543243 - RNA, 19 nt, Human
gucccacaucccugggccu

SEQ ID NO: 3543244 - RNA, 20 nt, Human
gucccacaucccugggccug

SEQ ID NO: 3543245 - RNA, 22 nt, Human
gucccacaucccugggccugcu

SEQ ID NO: 3543246 - RNA, 23 nt, Human
gucccacaucccugggccugcug

SEQ ID NO: 3543247 - RNA, 23 nt, Human
gucccaccucaaaugggucuggg

SEQ ID NO: 3543248 - RNA, 16 nt, Human
gucccaccuccagccc

SEQ ID NO: 3543249 - RNA, 17 nt, Human
gucccaccuccagcccg

SEQ ID NO: 3543250 - RNA, 13 nt, Human
gucccaccucuuc

SEQ ID NO: 3543251 - RNA, 19 nt, Human
gucccaccucuucucuucc

SEQ ID NO: 3543252 - RNA, 22 nt, Human
gucccaccucuucucuuccugu

SEQ ID NO: 3543253 - RNA, 17 nt, Human
gucccaccuuggcugca

SEQ ID NO: 3543254 - RNA, 18 nt, Human
gucccaccuuggcugcag

SEQ ID NO: 3543255 - RNA, 20 nt, Human
gucccacgaauuugcugggg

SEQ ID NO: 3543256 - RNA, 13 nt, Human
gucccacgugucu

SEQ ID NO: 3543257 - RNA, 16 nt, Human
gucccacucaagccaa

SEQ ID NO: 3543258 - RNA, 21 nt, Human
gucccacucaagccaagcagc

SEQ ID NO: 3543259 - RNA, 14 nt, Human
gucccacucagucc

SEQ ID NO: 3543260 - RNA, 15 nt, Human
gucccacucagucca

SEQ ID NO: 3543261 - RNA, 13 nt, Human
gucccacuccaag

SEQ ID NO: 3543262 - RNA, 18 nt, Human
gucccacugccucagguu

SEQ ID NO: 3543263 - RNA, 12 nt, Human
gucccacugugc

SEQ ID NO: 3543264 - RNA, 16 nt, Human
ugauucgagcuauauu

SEQ ID NO: 3543265 - RNA, 18 nt, Human
ugauucguagauuuaaua

SEQ ID NO: 3543266 - RNA, 12 nt, Human
ugauucucaggg

SEQ ID NO: 3543267 - RNA, 22 nt, Human
ugauucucagggucucugcugc

SEQ ID NO: 3543268 - RNA, 21 nt, Human
ugauucuccugccucagccuc

SEQ ID NO: 3543269 - RNA, 21 nt, Human
ugauucuccuucagcccucac

SEQ ID NO: 3543270 - RNA, 12 nt, Human
ugauucugccuu

SEQ ID NO: 3543271 - RNA, 17 nt, Human
ugauucugcuugagaau

SEQ ID NO: 3543272 - RNA, 18 nt, Human
ugauucugcuugagaaua

SEQ ID NO: 3543273 - RNA, 17 nt, Human
ugauucugcuuuuacca

SEQ ID NO: 3543274 - RNA, 14 nt, Human
ugauucuggcuuua

SEQ ID NO: 3543275 - RNA, 18 nt, Human
ugauucuggcuuuaagcc

SEQ ID NO: 3543276 - RNA, 13 nt, Human
ugauucugugugu

SEQ ID NO: 3543277 - RNA, 15 nt, Human
ugauucuguguguuu

SEQ ID NO: 3543278 - RNA, 14 nt, Human
ugauucuuuguuac

SEQ ID NO: 3543279 - RNA, 12 nt, Human
ugauugaagaaa

SEQ ID NO: 3543280 - RNA, 19 nt, Human
ugauugaauaaugccacca

SEQ ID NO: 3543281 - RNA, 17 nt, Human
ugauugacagcuuugcu

SEQ ID NO: 3543282 - RNA, 19 nt, Human
ugauugacagcuuugcugc

SEQ ID NO: 3543283 - RNA, 21 nt, Human
ugauugaccguguuggucugu

SEQ ID NO: 3543284 - RNA, 15 nt, Human
ugauugaccugcucc

SEQ ID NO: 3543285 - RNA, 15 nt, Human
ugauugaugacccuu

SEQ ID NO: 3543286 - RNA, 12 nt, Human
ugauugcagcuu

SEQ ID NO: 3543287 - RNA, 14 nt, Human
ugauugcuaaaugu

SEQ ID NO: 3543288 - RNA, 19 nt, Human
ugauugcuaaauguaacag

SEQ ID NO: 3543289 - RNA, 22 nt, Human
ugauugcuaaauguaacagucu

SEQ ID NO: 3543290 - RNA, 16 nt, Human
ugauugcuuuuaaaau

SEQ ID NO: 3543291 - RNA, 19 nt, Human
ugauugcuuuuaaaauuuu

SEQ ID NO: 3543292 - RNA, 20 nt, Human
ugauugcuuuuaaaauuuua

SEQ ID NO: 3543293 - RNA, 22 nt, Human
ugauugcuuuuaaaauuuuaag

SEQ ID NO: 3543294 - RNA, 19 nt, Human
ugauuggaagggcuuuuca

SEQ ID NO: 3543295 - RNA, 22 nt, Human
ugauuggacaggcaugggugca

SEQ ID NO: 3543296 - RNA, 23 nt, Human
ugauuggacauuuucuucagaga

SEQ ID NO: 3543297 - RNA, 16 nt, Human
ugauuggaccaggcca

SEQ ID NO: 3543298 - RNA, 17 nt, Human
ugauuggaccaggccau

SEQ ID NO: 3543299 - RNA, 20 nt, Human
ugauuggcaggaguuggaag

SEQ ID NO: 3543300 - RNA, 12 nt, Human
ugauuggcucac

SEQ ID NO: 3543301 - RNA, 15 nt, Human
ugauugggaaaacau

SEQ ID NO: 3543302 - RNA, 17 nt, Human
ugauugggaaaacauuu

SEQ ID NO: 3543303 - RNA, 12 nt, Human
ugauugggaaua

SEQ ID NO: 3543304 - RNA, 17 nt, Human
ugauugggaauaaauau

SEQ ID NO: 3543305 - RNA, 20 nt, Human
ugauugggaauaaauaugcc

SEQ ID NO: 3543306 - RNA, 18 nt, Human
ugauugggcacaucauuu

SEQ ID NO: 3543307 - RNA, 20 nt, Human
ugauugggcacaucauuuca

SEQ ID NO: 3543308 - RNA, 23 nt, Human
ugauugggcacaucauuucaaga

SEQ ID NO: 3543309 - RNA, 17 nt, Human
ugauuggugcaacccuu

SEQ ID NO: 3543310 - RNA, 12 nt, Human
ugauuguaaaau

SEQ ID NO: 3543311 - RNA, 14 nt, Human
ugauuguaaaauag

SEQ ID NO: 3543312 - RNA, 23 nt, Human
ugauuguaacguugcugugggaa

SEQ ID NO: 3543313 - RNA, 23 nt, Human
ugauuguacagaaucauugcuua

SEQ ID NO: 3543314 - RNA, 21 nt, Human
ugauuguccuuuaaaaaagaa

SEQ ID NO: 3543315 - RNA, 13 nt, Human
ugauugucuuaau

SEQ ID NO: 3543316 - RNA, 16 nt, Human
ugauugugucucuugg

SEQ ID NO: 3543317 - RNA, 19 nt, Human
ugauuguucgggugugcaa

SEQ ID NO: 3543318 - RNA, 19 nt, Human
ugauuguuucucaaaucuu

SEQ ID NO: 3543319 - RNA, 17 nt, Human
ugauuuaaacacauuaa

SEQ ID NO: 3543320 - RNA, 18 nt, Human
ugauuuaaacacauuaaa

SEQ ID NO: 3543321 - RNA, 20 nt, Human
ugauuuaagugucucacuaa

SEQ ID NO: 3543322 - RNA, 14 nt, Human
ugauuuaauaaaau

SEQ ID NO: 3543323 - RNA, 15 nt, Human
ugauuuaauaaaaua

SEQ ID NO: 3543324 - RNA, 22 nt, Human
ugauuuaauaaaauaauucuaa

SEQ ID NO: 3543325 - RNA, 23 nt, Human
ugauuuaauaaaauaauucuaaa

SEQ ID NO: 3543326 - RNA, 20 nt, Human
ugauuuaauaacauaacaaa

SEQ ID NO: 3543327 - RNA, 14 nt, Human
ugauuuaauaugga

SEQ ID NO: 3543328 - RNA, 13 nt, Human
ugauuuaauguuu

SEQ ID NO: 3543329 - RNA, 16 nt, Human
ugauuuaauguuuuca

SEQ ID NO: 3543330 - RNA, 17 nt, Human
ugauuuacaguuucaaa

SEQ ID NO: 3543331 - RNA, 17 nt, Human
ugauuuagauugaguaa

SEQ ID NO: 3543332 - RNA, 20 nt, Human
ugauuuagauugaguaagau

SEQ ID NO: 3543333 - RNA, 17 nt, Human
ugauuuagcaggaagcu

SEQ ID NO: 3543334 - RNA, 20 nt, Human
ugauuuagcaggaagcugug

SEQ ID NO: 3543335 - RNA, 22 nt, Human
ugauuuaguguuuuuaccucug

SEQ ID NO: 3543336 - RNA, 20 nt, Human
ugauuuauaaaugccauuua

SEQ ID NO: 3543337 - RNA, 16 nt, Human
ugauuuauaguuugua

SEQ ID NO: 3543338 - RNA, 22 nt, Human
ugauuuauaguuuguacaugca

SEQ ID NO: 3543339 - RNA, 22 nt, Human
ugauuuaucugagucaacuccu

SEQ ID NO: 3543340 - RNA, 15 nt, Human
ugauuuauuaacuua

SEQ ID NO: 3543341 - RNA, 19 nt, Human
ugauuuauuaacuuaauaa

SEQ ID NO: 3543342 - RNA, 17 nt, Human
ugauuuauuugcuucuu

SEQ ID NO: 3543343 - RNA, 19 nt, Human
ugauuucacaaauauuaaa

SEQ ID NO: 3543344 - RNA, 19 nt, Human
ugauuucacaacagaucaa

SEQ ID NO: 3543345 - RNA, 14 nt, Human
ugauuucacuagaa

SEQ ID NO: 3543346 - RNA, 20 nt, Human
ugauuucagcaccuacagug

SEQ ID NO: 3543347 - RNA, 11 nt, Human
ugauuucagga

SEQ ID NO: 3543348 - RNA, 18 nt, Human
ugauuucaggauacucug

SEQ ID NO: 3543349 - RNA, 15 nt, Human
ugauuucaguucuag

SEQ ID NO: 3543350 - RNA, 18 nt, Human
ugauuucaguucuaggaa

SEQ ID NO: 3543351 - RNA, 17 nt, Human
ugauuucauuucaacug

SEQ ID NO: 3543352 - RNA, 16 nt, Human
ugauuuccccccuccg

SEQ ID NO: 3543353 - RNA, 20 nt, Human
ugauuuccccccuccgccuc

SEQ ID NO: 3543354 - RNA, 13 nt, Human
ugauuuccccucu

SEQ ID NO: 3543355 - RNA, 23 nt, Human
ugauuuccccuuuugcauucucc

SEQ ID NO: 3543356 - RNA, 17 nt, Human
ugauuucccguggcccc

SEQ ID NO: 3543357 - RNA, 14 nt, Human
ugauuuccuguguc

SEQ ID NO: 3543358 - RNA, 13 nt, Human
ugauuucuagaac

SEQ ID NO: 3543359 - RNA, 11 nt, Human
ugauuucuagg

SEQ ID NO: 3543360 - RNA, 19 nt, Human
ugauuucuucuguuuucug

SEQ ID NO: 3543361 - RNA, 23 nt, Human
ugauuucuuuucaccauucguac

SEQ ID NO: 3543362 - RNA, 16 nt, Human
ugcuagugagcugggc

SEQ ID NO: 3543363 - RNA, 19 nt, Human
ugcuagugagcugggcaug

SEQ ID NO: 3543364 - RNA, 16 nt, Human
ugcuaguggugggcag

SEQ ID NO: 3543365 - RNA, 11 nt, Human
ugcuaguguga

SEQ ID NO: 3543366 - RNA, 20 nt, Human
ugcuauaaagcuagaugcuu

SEQ ID NO: 3543367 - RNA, 23 nt, Human
ugcuauaggcuggagaagcucac

SEQ ID NO: 3543368 - RNA, 15 nt, Human
ugcuauaguauuuga

SEQ ID NO: 3543369 - RNA, 21 nt, Human
ugcuauauauaaaacggugcu

SEQ ID NO: 3543370 - RNA, 12 nt, Human
ugcuauauauau

SEQ ID NO: 3543371 - RNA, 16 nt, Human
ugcuauauauauaaau

SEQ ID NO: 3543372 - RNA, 17 nt, Human
ugcuauauauauaaaua

SEQ ID NO: 3543373 - RNA, 18 nt, Human
ugcuauauuuucaugacu

SEQ ID NO: 3543374 - RNA, 15 nt, Human
ugcuauccauuucuc

SEQ ID NO: 3543375 - RNA, 19 nt, Human
ugcuauccccaucucccug

SEQ ID NO: 3543376 - RNA, 22 nt, Human
ugcuaucgcaccacuguguauu

SEQ ID NO: 3543377 - RNA, 13 nt, Human
ugcuaucuccccc

SEQ ID NO: 3543378 - RNA, 14 nt, Human
ugcuaucuccccca

SEQ ID NO: 3543379 - RNA, 16 nt, Human
ugcuaucucugugugc

SEQ ID NO: 3543380 - RNA, 20 nt, Human
ugcuaucuggaggccuucca

SEQ ID NO: 3543381 - RNA, 19 nt, Human
ugcuaugagcuggggaugu

SEQ ID NO: 3543382 - RNA, 20 nt, Human
ugcuaugagcuggggauguc

SEQ ID NO: 3543383 - RNA, 22 nt, Human
ugcuaugagcuggggaugucuc

SEQ ID NO: 3543384 - RNA, 16 nt, Human
ugcuauggauggcuuc

SEQ ID NO: 3543385 - RNA, 12 nt, Human
ugcuauggggac

SEQ ID NO: 3543386 - RNA, 18 nt, Human
ugcuauggggagaaaaga

SEQ ID NO: 3543387 - RNA, 14 nt, Human
ugcuaugguuuucu

SEQ ID NO: 3543388 - RNA, 15 nt, Human
ugcuaugucauuuca

SEQ ID NO: 3543389 - RNA, 16 nt, Human
ugcuaugucauuucau

SEQ ID NO: 3543390 - RNA, 16 nt, Human
ugcuauguuacuauuu

SEQ ID NO: 3543391 - RNA, 19 nt, Human
ugcuauguuacuauuuucu

SEQ ID NO: 3543392 - RNA, 12 nt, Human
ugcuauuaaagu

SEQ ID NO: 3543393 - RNA, 13 nt, Human
ugcuauuaauauu

SEQ ID NO: 3543394 - RNA, 13 nt, Human
ugcuauucugucc

SEQ ID NO: 3543395 - RNA, 15 nt, Human
ugcuauucugucccu

SEQ ID NO: 3543396 - RNA, 20 nt, Human
ugcuauucugucccuaggug

SEQ ID NO: 3543397 - RNA, 21 nt, Human
ugcuauugacaauaaaauauu

SEQ ID NO: 3543398 - RNA, 16 nt, Human
ugcuauuguaaauaug

SEQ ID NO: 3543399 - RNA, 18 nt, Human
ugcuauuguagagccaga

SEQ ID NO: 3543400 - RNA, 20 nt, Human
ugcuauuguuacucuuacga

SEQ ID NO: 3543401 - RNA, 13 nt, Human
ugcuauuucuaua

SEQ ID NO: 3543402 - RNA, 20 nt, Human
ugcuauuucuauauuuucau

SEQ ID NO: 3543403 - RNA, 21 nt, Human
ugcuauuucuauauuuucauu

SEQ ID NO: 3543404 - RNA, 17 nt, Human
ugcuauuugaacaagug

SEQ ID NO: 3543405 - RNA, 19 nt, Human
ugcuauuuuacugucuuaa

SEQ ID NO: 3543406 - RNA, 19 nt, Human
ugcuauuuuucauccuaaa

SEQ ID NO: 3543407 - RNA, 13 nt, Human
ugcuauuuuugua

SEQ ID NO: 3543408 - RNA, 15 nt, Human
ugcuauuuuuguaaa

SEQ ID NO: 3543409 - RNA, 17 nt, Human
ugcuauuuuuguaaagu

SEQ ID NO: 3543410 - RNA, 15 nt, Human
ugcucaaaaaaugag

SEQ ID NO: 3543411 - RNA, 15 nt, Human
ugcucaaaaaucugu

SEQ ID NO: 3543412 - RNA, 13 nt, Human
ugcucaaaaugca

SEQ ID NO: 3543413 - RNA, 15 nt, Human
ugcucaaaaugcaaa

SEQ ID NO: 3543414 - RNA, 18 nt, Human
ugcucaaaauuugaagaa

SEQ ID NO: 3543415 - RNA, 14 nt, Human
ugcucaaagaaauc

SEQ ID NO: 3543416 - RNA, 21 nt, Human
ugcucaaaucuauucagacaa

SEQ ID NO: 3543417 - RNA, 16 nt, Human
ugcucaaggccagcuu

SEQ ID NO: 3543418 - RNA, 18 nt, Human
ugcucaaugacucucugg

SEQ ID NO: 3543419 - RNA, 15 nt, Human
ugcucacaccccauu

SEQ ID NO: 3543420 - RNA, 13 nt, Human
ugcucacagucuc

SEQ ID NO: 3543421 - RNA, 16 nt, Human
ugcucacauaucuguc

SEQ ID NO: 3543422 - RNA, 17 nt, Human
ugcucacauaucuguca

SEQ ID NO: 3543423 - RNA, 19 nt, Human
ugcucacccagugcccucu

SEQ ID NO: 3543424 - RNA, 22 nt, Human
ugcucacguuaccuugacacau

SEQ ID NO: 3543425 - RNA, 15 nt, Human
ugcaaaauuuccagu

SEQ ID NO: 3543426 - RNA, 16 nt, Human
ugcaaaauuuccagua

SEQ ID NO: 3543427 - RNA, 19 nt, Human
ugcaaaauuuuuuuaaucu

SEQ ID NO: 3543428 - RNA, 18 nt, Human
ugcaaacagaacaggguc

SEQ ID NO: 3543429 - RNA, 19 nt, Human
ugcaaacagaacaggguca

SEQ ID NO: 3543430 - RNA, 20 nt, Human
ugcaaacauaacaaaaucac

SEQ ID NO: 3543431 - RNA, 22 nt, Human
ugcaaacaugggguuggcuggg

SEQ ID NO: 3543432 - RNA, 13 nt, Human
ugcaaaccaucau

SEQ ID NO: 3543433 - RNA, 14 nt, Human
ugcaaacgcugccu

SEQ ID NO: 3543434 - RNA, 21 nt, Human
ugcaaacgcugccugccggua

SEQ ID NO: 3543435 - RNA, 22 nt, Human
ugcaaacugggaaccccuuucc

SEQ ID NO: 3543436 - RNA, 23 nt, Human
ugcaaacugggaaccccuuuccc

SEQ ID NO: 3543437 - RNA, 19 nt, Human
ugcaaacugggcuggaaga

SEQ ID NO: 3543438 - RNA, 17 nt, Human
ugcaaacuuuauuuuca

SEQ ID NO: 3543439 - RNA, 12 nt, Human
ugcaaagaaaau

SEQ ID NO: 3543440 - RNA, 19 nt, Human
ugcaaagaggcaagaggcu

SEQ ID NO: 3543441 - RNA, 23 nt, Human
ugcaaagaugaaggucuguuuug

SEQ ID NO: 3543442 - RNA, 18 nt, Human
ugcaaagcacugacuucu

SEQ ID NO: 3543443 - RNA, 13 nt, Human
ugcaaaggaaaua

SEQ ID NO: 3543444 - RNA, 23 nt, Human
ugcaaaguacaauguguuuuucu

SEQ ID NO: 3543445 - RNA, 15 nt, Human
ugcaaaguacuguaa

SEQ ID NO: 3543446 - RNA, 21 nt, Human
ugcaaaguauaaauuugugua

SEQ ID NO: 3543447 - RNA, 16 nt, Human
ugcaaaguauuguaaa

SEQ ID NO: 3543448 - RNA, 17 nt, Human
ugcaaaguauuguaaau

SEQ ID NO: 3543449 - RNA, 17 nt, Human
ugcaaagucaggaauca

SEQ ID NO: 3543450 - RNA, 18 nt, Human
ugcaaagucaggaaucau

SEQ ID NO: 3543451 - RNA, 20 nt, Human
ugcaaagucaugcaaaggcu

SEQ ID NO: 3543452 - RNA, 21 nt, Human
ugcaaagucaugcaaaggcug

SEQ ID NO: 3543453 - RNA, 21 nt, Human
ugcaaaguguuuuguaccagu

SEQ ID NO: 3543454 - RNA, 22 nt, Human
ugcaaaguguuuuguaccagug

SEQ ID NO: 3543455 - RNA, 13 nt, Human
ugcaaaguucugu

SEQ ID NO: 3543456 - RNA, 23 nt, Human
ugcaaauaaauauccuuuaauug

SEQ ID NO: 3543457 - RNA, 23 nt, Human
ugcaaauaaguguauuuugaaau

SEQ ID NO: 3543458 - RNA, 15 nt, Human
ugcaaauagaaaaca

SEQ ID NO: 3543459 - RNA, 17 nt, Human
ugcaaauagaaaacagg

SEQ ID NO: 3543460 - RNA, 21 nt, Human
ugcaaauauuuuuuuguagau

SEQ ID NO: 3543461 - RNA, 10 nt, Human
ugcaaauccu

SEQ ID NO: 3543462 - RNA, 17 nt, Human
ugcaaauccuaugugau

SEQ ID NO: 3543463 - RNA, 14 nt, Human
ugcaaaucuugaaa

SEQ ID NO: 3543464 - RNA, 18 nt, Human
ugcaaaugagcucugaaa

SEQ ID NO: 3543465 - RNA, 21 nt, Human
ugcaaaugagcucugaaaucu

SEQ ID NO: 3543466 - RNA, 21 nt, Human
ugcaaaugcuaugagaugcau

SEQ ID NO: 3543467 - RNA, 15 nt, Human
ugcaaaugcuguauu

SEQ ID NO: 3543468 - RNA, 24 nt, Human
ugcaaauggugguuguuucuucca

SEQ ID NO: 3543469 - RNA, 16 nt, Human
ugcaacaaaauguaga

SEQ ID NO: 3543470 - RNA, 13 nt, Human
ugcaacaacaugu

SEQ ID NO: 3543471 - RNA, 15 nt, Human
ugcaacaacauguau

SEQ ID NO: 3543472 - RNA, 15 nt, Human
ugcaacacacagaca

SEQ ID NO: 3543473 - RNA, 13 nt, Human
ugcaacagcacug

SEQ ID NO: 3543474 - RNA, 14 nt, Human
ugcaacagcacugg

SEQ ID NO: 3543475 - RNA, 15 nt, Human
ugcaacaggcacuca

SEQ ID NO: 3543476 - RNA, 15 nt, Human
ugcaacauuuacagu

SEQ ID NO: 3543477 - RNA, 11 nt, Human
ugcaaccacug

SEQ ID NO: 3543478 - RNA, 13 nt, Human
ugcaaccacugca

SEQ ID NO: 3543479 - RNA, 20 nt, Human
ugcaaccagggagcugcagg

SEQ ID NO: 3543480 - RNA, 16 nt, Human
ugcaaccauuugaaac

SEQ ID NO: 3543481 - RNA, 21 nt, Human
ugcaacccaaggacugaggga

SEQ ID NO: 3543482 - RNA, 18 nt, Human
ugcaaccuccaccuccug

SEQ ID NO: 3543483 - RNA, 20 nt, Human
ugcaaccuccgccucuuggg

SEQ ID NO: 3543484 - RNA, 14 nt, Human
ugcaaccucgcuga

SEQ ID NO: 3543485 - RNA, 19 nt, Human
ugcaaccucgcuggacucu

SEQ ID NO: 3543486 - RNA, 12 nt, Human
ugcaaccucugc

SEQ ID NO: 3543487 - RNA, 21 nt, Human
ugcaaccucugccuccugggu

SEQ ID NO: 3543488 - RNA, 20 nt, Human
ugcaaccucugcuucccagg

SEQ ID NO: 3543489 - RNA, 19 nt, Human
ugcaaccugauugugucuc

SEQ ID NO: 3543490 - RNA, 20 nt, Human
ugcaaccugauugugucucu

SEQ ID NO: 3543491 - RNA, 18 nt, Human
ugcaaccuucgccaccug

SEQ ID NO: 3543492 - RNA, 21 nt, Human
ugcaaccuucgccaccugggu

SEQ ID NO: 3543493 - RNA, 19 nt, Human
ugcaaccuuguuuauuaaa

SEQ ID NO: 3543494 - RNA, 22 nt, Human
ugcaacggucuccugacuggug

SEQ ID NO: 3543495 - RNA, 22 nt, Human
ugcaacucugaaggguaauuau

SEQ ID NO: 3543496 - RNA, 15 nt, Human
ugcaacuucauguca

SEQ ID NO: 3543497 - RNA, 22 nt, Human
ugcaacuucaugucaacuucug

SEQ ID NO: 3543498 - RNA, 18 nt, Human
ugcaacuuguaaaugugg

SEQ ID NO: 3543499 - RNA, 18 nt, Human
ugcaacuuuguauaaaag

SEQ ID NO: 3543500 - RNA, 21 nt, Human
ugcaagaacucaucacugugg

SEQ ID NO: 3543501 - RNA, 22 nt, Human
ugcaagaaguggggcagcagca

SEQ ID NO: 3543502 - RNA, 19 nt, Human
ugcaagagugauugcagcu

SEQ ID NO: 3543503 - RNA, 15 nt, Human
ugcaagaugugaauu

SEQ ID NO: 3543504 - RNA, 13 nt, Human
ugcaagcagagga

SEQ ID NO: 3543505 - RNA, 19 nt, Human
ugcaagcaggacuuugagg

SEQ ID NO: 3543506 - RNA, 12 nt, Human
ugcuccuuggcu

SEQ ID NO: 3543507 - RNA, 15 nt, Human
ugcuccuuggcuuac

SEQ ID NO: 3543508 - RNA, 14 nt, Human
ugcuccuugggccc

SEQ ID NO: 3543509 - RNA, 15 nt, Human
ugcuccuugggcccu

SEQ ID NO: 3543510 - RNA, 16 nt, Human
ugcuccuugggcccuu

SEQ ID NO: 3543511 - RNA, 14 nt, Human
ugcuccuuuccccu

SEQ ID NO: 3543512 - RNA, 18 nt, Human
ugcuccuuucuuguuuua

SEQ ID NO: 3543513 - RNA, 14 nt, Human
ugcucgccccagca

SEQ ID NO: 3543514 - RNA, 15 nt, Human
ugcucggccgucuuc

SEQ ID NO: 3543515 - RNA, 15 nt, Human
ugcucgggcccaggc

SEQ ID NO: 3543516 - RNA, 16 nt, Human
ugcucgggcccaggcc

SEQ ID NO: 3543517 - RNA, 12 nt, Human
ugcucuaaaaua

SEQ ID NO: 3543518 - RNA, 13 nt, Human
ugcucuaaaauau

SEQ ID NO: 3543519 - RNA, 19 nt, Human
ugcucuaaaauauuuauga

SEQ ID NO: 3543520 - RNA, 20 nt, Human
ugcucuaaaauauuuaugaa

SEQ ID NO: 3543521 - RNA, 18 nt, Human
ugcucuaagcacacggag

SEQ ID NO: 3543522 - RNA, 19 nt, Human
ugcucuagaugagcugggc

SEQ ID NO: 3543523 - RNA, 19 nt, Human
ugcucuaggaagacauuuu

SEQ ID NO: 3543524 - RNA, 14 nt, Human
ugcucuaucuugcu

SEQ ID NO: 3543525 - RNA, 21 nt, Human
ugcucuaucuugcucuguaau

SEQ ID NO: 3543526 - RNA, 12 nt, Human
ugcucuaugcuu

SEQ ID NO: 3543527 - RNA, 21 nt, Human
ugcucuaugcuuuccaaaccu

SEQ ID NO: 3543528 - RNA, 20 nt, Human
ugcucucaaaccccugaccu

SEQ ID NO: 3543529 - RNA, 22 nt, Human
ugcucucaccuugguuccuggg

SEQ ID NO: 3543530 - RNA, 14 nt, Human
ugcucucacuguuu

SEQ ID NO: 3543531 - RNA, 18 nt, Human
ugcucuccaagucucagu

SEQ ID NO: 3543532 - RNA, 20 nt, Human
ugcucuccagccugggaggc

SEQ ID NO: 3543533 - RNA, 12 nt, Human
ugcucuccccug

SEQ ID NO: 3543534 - RNA, 15 nt, Human
ugcucuccccugccc

SEQ ID NO: 3543535 - RNA, 17 nt, Human
ugcucuccccugcccug

SEQ ID NO: 3543536 - RNA, 20 nt, Human
ugcucuccccugcccugcug

SEQ ID NO: 3543537 - RNA, 23 nt, Human
ugcucuccgaccagacaccuuga

SEQ ID NO: 3543538 - RNA, 22 nt, Human
ugcucuccucuugccacugccu

SEQ ID NO: 3543539 - RNA, 23 nt, Human
ugcucuccuuccuggagcccaga

SEQ ID NO: 3543540 - RNA, 19 nt, Human
ugcucucgcaccuuuccaa

SEQ ID NO: 3543541 - RNA, 22 nt, Human
ugcucucuacccagcccaucuu

SEQ ID NO: 3543542 - RNA, 13 nt, Human
ugcucucugcagc

SEQ ID NO: 3543543 - RNA, 15 nt, Human
ugcucucugcagcca

SEQ ID NO: 3543544 - RNA, 21 nt, Human
ugcucucugcagccagcccag

SEQ ID NO: 3543545 - RNA, 22 nt, Human
ugcucugaauuaguccuugcuu

SEQ ID NO: 3543546 - RNA, 20 nt, Human
ugcucugagaauuguugaga

SEQ ID NO: 3543547 - RNA, 17 nt, Human
ugcucugaggcuuccag

SEQ ID NO: 3543548 - RNA, 22 nt, Human
ugcucugaucauccacugugcc

SEQ ID NO: 3543549 - RNA, 13 nt, Human
ugcucugaucccu

SEQ ID NO: 3543550 - RNA, 16 nt, Human
ugcucugaugcaucag

SEQ ID NO: 3543551 - RNA, 19 nt, Human
ugcucugcaggcaccuuag

SEQ ID NO: 3543552 - RNA, 15 nt, Human
ugcucugcauguuac

SEQ ID NO: 3543553 - RNA, 11 nt, Human
ugcucugccca

SEQ ID NO: 3543554 - RNA, 12 nt, Human
ugcucugcccag

SEQ ID NO: 3543555 - RNA, 14 nt, Human
ugcucugcccagag

SEQ ID NO: 3543556 - RNA, 22 nt, Human
ugcucugcccagagcuggguga

SEQ ID NO: 3543557 - RNA, 14 nt, Human
ugcucugccccagc

SEQ ID NO: 3543558 - RNA, 15 nt, Human
ugcucugccccagcu

SEQ ID NO: 3543559 - RNA, 17 nt, Human
ugcucugccccagcuug

SEQ ID NO: 3543560 - RNA, 23 nt, Human
ugcucugcgugucaccugugcuu

SEQ ID NO: 3543561 - RNA, 18 nt, Human
ugcucugcuggucuucaa

SEQ ID NO: 3543562 - RNA, 16 nt, Human
ugcucugcuugacaac

SEQ ID NO: 3543563 - RNA, 23 nt, Human
ugcucuggaaaaugugacccaga

SEQ ID NO: 3543564 - RNA, 19 nt, Human
ugcucugugcccacccucc

SEQ ID NO: 3543565 - RNA, 19 nt, Human
ugcucuuacuacacugagg

SEQ ID NO: 3543566 - RNA, 14 nt, Human
ugcucuucaagaaa

SEQ ID NO: 3543567 - RNA, 13 nt, Human
ugcucuucagugg

SEQ ID NO: 3543568 - RNA, 17 nt, Human
ugcucuucaucccauuc

SEQ ID NO: 3543569 - RNA, 14 nt, Human
ugcucuuggcugga

SEQ ID NO: 3543570 - RNA, 19 nt, Human
ugcucuuggcuggacccag

SEQ ID NO: 3543571 - RNA, 17 nt, Human
ugcucuugggcaauauu

SEQ ID NO: 3543572 - RNA, 21 nt, Human
ugcucuugucccacgugucuu

SEQ ID NO: 3543573 - RNA, 19 nt, Human
ugcucuuguccuagcuugg

SEQ ID NO: 3543574 - RNA, 18 nt, Human
ugcucuuguuuuuauuaa

SEQ ID NO: 3543575 - RNA, 18 nt, Human
ugcucuuucaucucugcu

SEQ ID NO: 3543576 - RNA, 16 nt, Human
ugcucuuucccaccca

SEQ ID NO: 3543577 - RNA, 16 nt, Human
ugcucuuucuacucug

SEQ ID NO: 3543578 - RNA, 15 nt, Human
ugcucuuucucugcc

SEQ ID NO: 3543579 - RNA, 21 nt, Human
ugcucuuucucugccagugac

SEQ ID NO: 3543580 - RNA, 22 nt, Human
ugcucuuucucugccagugaca

SEQ ID NO: 3543581 - RNA, 23 nt, Human
ugcucuuuggccugaugaccaau

SEQ ID NO: 3543582 - RNA, 14 nt, Human
ugcucuuuguuuug

SEQ ID NO: 3543583 - RNA, 15 nt, Human
ugcucuuuguuuugu

SEQ ID NO: 3543584 - RNA, 18 nt, Human
ugcucuuuguuuuguguc

SEQ ID NO: 3543585 - RNA, 16 nt, Human
ugcaauuaaagugaua

SEQ ID NO: 3543586 - RNA, 19 nt, Human
ugcaauuagccucauaguu

SEQ ID NO: 3543587 - RNA, 14 nt, Human
ugcaauucaaaagu

SEQ ID NO: 3543588 - RNA, 17 nt, Human
ugcaauucaaaaguucc

SEQ ID NO: 3543589 - RNA, 18 nt, Human
ugcaauucaaaaguucca

SEQ ID NO: 3543590 - RNA, 19 nt, Human
ugcaauucaaaaguuccaa

SEQ ID NO: 3543591 - RNA, 23 nt, Human
ugcaauuggcaccgaagcccaga

SEQ ID NO: 3543592 - RNA, 22 nt, Human
ugcaauuguaggggugugugug

SEQ ID NO: 3543593 - RNA, 20 nt, Human
ugcaauuucaagguucuaac

SEQ ID NO: 3543594 - RNA, 14 nt, Human
ugcaauuucuacua

SEQ ID NO: 3543595 - RNA, 19 nt, Human
ugcaauuugggagauauau

SEQ ID NO: 3543596 - RNA, 18 nt, Human
ugcaauuuuaacacacau

SEQ ID NO: 3543597 - RNA, 20 nt, Human
ugcaauuuuaauugauuauu

SEQ ID NO: 3543598 - RNA, 22 nt, Human
ugcaauuuuauaaggacuuccu

SEQ ID NO: 3543599 - RNA, 23 nt, Human
ugcaauuuucuaagcaauuucuu

SEQ ID NO: 3543600 - RNA, 13 nt, Human
ugcacaaaaugua

SEQ ID NO: 3543601 - RNA, 21 nt, Human
ugcacaaaauucgaccugauu

SEQ ID NO: 3543602 - RNA, 15 nt, Human
ugcacaaacagaggc

SEQ ID NO: 3543603 - RNA, 15 nt, Human
ugcacaaagcccuuc

SEQ ID NO: 3543604 - RNA, 14 nt, Human
ugcacaaaguggca

SEQ ID NO: 3543605 - RNA, 21 nt, Human
ugcacaaauacggauccugca

SEQ ID NO: 3543606 - RNA, 15 nt, Human
ugcacaagaauggau

SEQ ID NO: 3543607 - RNA, 23 nt, Human
ugcacaagaauggaucacaagau

SEQ ID NO: 3543608 - RNA, 13 nt, Human
ugcacaagccagg

SEQ ID NO: 3543609 - RNA, 15 nt, Human
ugcacaaggauugaa

SEQ ID NO: 3543610 - RNA, 13 nt, Human
ugcacaaguaggg

SEQ ID NO: 3543611 - RNA, 21 nt, Human
ugcacaauaaaaauguuuaac

SEQ ID NO: 3543612 - RNA, 21 nt, Human
ugcacaauaacuccucccagg

SEQ ID NO: 3543613 - RNA, 22 nt, Human
ugcacaauaacuccucccaggg

SEQ ID NO: 3543614 - RNA, 14 nt, Human
ugcacaaugucuug

SEQ ID NO: 3543615 - RNA, 21 nt, Human
ugcacaauuccaugacaauau

SEQ ID NO: 3543616 - RNA, 22 nt, Human
ugcacacacacacacaugcaca

SEQ ID NO: 3543617 - RNA, 13 nt, Human
ugcacacacauau

SEQ ID NO: 3543618 - RNA, 15 nt, Human
ugcacacacauauau

SEQ ID NO: 3543619 - RNA, 17 nt, Human
ugcacacaccagagccc

SEQ ID NO: 3543620 - RNA, 19 nt, Human
ugcacacagaaauauauau

SEQ ID NO: 3543621 - RNA, 23 nt, Human
ugcacacagaaauauauauacau

SEQ ID NO: 3543622 - RNA, 16 nt, Human
ugcacacaucaucugu

SEQ ID NO: 3543623 - RNA, 17 nt, Human
ugcacacaucaucugua

SEQ ID NO: 3543624 - RNA, 21 nt, Human
ugcacacaucaucuguaagcu

SEQ ID NO: 3543625 - RNA, 18 nt, Human
ugcacacccacucagcuc

SEQ ID NO: 3543626 - RNA, 23 nt, Human
ugcacacgagcagacacccuugg

SEQ ID NO: 3543627 - RNA, 19 nt, Human
ugcacacuagccucuccag

SEQ ID NO: 3543628 - RNA, 21 nt, Human
ugcacacuguccuauuauauu

SEQ ID NO: 3543629 - RNA, 14 nt, Human
ugcacacuuugcca

SEQ ID NO: 3543630 - RNA, 13 nt, Human
ugcacacuuuggc

SEQ ID NO: 3543631 - RNA, 17 nt, Human
ugcacacuuuggcccag

SEQ ID NO: 3543632 - RNA, 13 nt, Human
ugcacacuuuggu

SEQ ID NO: 3543633 - RNA, 22 nt, Human
ugcacagaaguccuguaugucu

SEQ ID NO: 3543634 - RNA, 12 nt, Human
ugcacagagaag

SEQ ID NO: 3543635 - RNA, 17 nt, Human
ugcacagagaagcuggg

SEQ ID NO: 3543636 - RNA, 14 nt, Human
ugcacagagcucuc

SEQ ID NO: 3543637 - RNA, 16 nt, Human
ugcacagagcucucca

SEQ ID NO: 3543638 - RNA, 18 nt, Human
ugcacagagcucuccagc

SEQ ID NO: 3543639 - RNA, 23 nt, Human
ugcacagaguuguuacauuuuua

SEQ ID NO: 3543640 - RNA, 18 nt, Human
ugcacagcacaaauuagu

SEQ ID NO: 3543641 - RNA, 22 nt, Human
ugcacagcaggcugccagugcc

SEQ ID NO: 3543642 - RNA, 14 nt, Human
ugcacagcaucuca

SEQ ID NO: 3543643 - RNA, 18 nt, Human
ugcacagcuaacauggaa

SEQ ID NO: 3543644 - RNA, 23 nt, Human
ugcacagcuaacauggaaguacu

SEQ ID NO: 3543645 - RNA, 11 nt, Human
ugcacagcugu

SEQ ID NO: 3543646 - RNA, 19 nt, Human
ugcacagcuguaguacccc

SEQ ID NO: 3543647 - RNA, 12 nt, Human
ugcacagcuguc

SEQ ID NO: 3543648 - RNA, 14 nt, Human
ugcacagggagacg

SEQ ID NO: 3543649 - RNA, 16 nt, Human
ugcacagggcagcugg

SEQ ID NO: 3543650 - RNA, 13 nt, Human
gucucgagcgccc

SEQ ID NO: 3543651 - RNA, 18 nt, Human
gucucgcucugucaccca

SEQ ID NO: 3543652 - RNA, 18 nt, Human
gucucgcugaugcugggc

SEQ ID NO: 3543653 - RNA, 19 nt, Human
gucucgcugaugcugggcu

SEQ ID NO: 3543654 - RNA, 19 nt, Human
gucucggaaccugugagcu

SEQ ID NO: 3543655 - RNA, 20 nt, Human
gucucggaucaggcucccag

SEQ ID NO: 3543656 - RNA, 15 nt, Human
gucucggccuucaca

SEQ ID NO: 3543657 - RNA, 14 nt, Human
gucucuaaagcacu

SEQ ID NO: 3543658 - RNA, 18 nt, Human
gucucuagagcagggauu

SEQ ID NO: 3543659 - RNA, 14 nt, Human
gucucuagccacuu

SEQ ID NO: 3543660 - RNA, 15 nt, Human
gucucuaggcugggg

SEQ ID NO: 3543661 - RNA, 18 nt, Human
gucucuagugcugugaaa

SEQ ID NO: 3543662 - RNA, 19 nt, Human
gucucuauuuaaauucuuu

SEQ ID NO: 3543663 - RNA, 12 nt, Human
gucucucacaga

SEQ ID NO: 3543664 - RNA, 23 nt, Human
gucucucacagacaggaccccug

SEQ ID NO: 3543665 - RNA, 23 nt, Human
gucucucuauuaccacugaagau

SEQ ID NO: 3543666 - RNA, 13 nt, Human
gucucucucccau

SEQ ID NO: 3543667 - RNA, 16 nt, Human
gucucucucccaugga

SEQ ID NO: 3543668 - RNA, 18 nt, Human
gucucucugggccuuagg

SEQ ID NO: 3543669 - RNA, 20 nt, Human
gucucucuucagacucucag

SEQ ID NO: 3543670 - RNA, 18 nt, Human
gucucucuucucagagug

SEQ ID NO: 3543671 - RNA, 23 nt, Human
gucucucuucucuccagcugacu

SEQ ID NO: 3543672 - RNA, 20 nt, Human
gucucucuuuggacucuccc

SEQ ID NO: 3543673 - RNA, 21 nt, Human
gucucugaagugaaacugcuu

SEQ ID NO: 3543674 - RNA, 14 nt, Human
gucucugagggcuu

SEQ ID NO: 3543675 - RNA, 19 nt, Human
gucucugaggggcuaccag

SEQ ID NO: 3543676 - RNA, 15 nt, Human
gucucugaugcagcu

SEQ ID NO: 3543677 - RNA, 19 nt, Human
gucucugaugcagcuuaua

SEQ ID NO: 3543678 - RNA, 17 nt, Human
gucucugccggcucuuu

SEQ ID NO: 3543679 - RNA, 18 nt, Human
gucucugccucccucacc

SEQ ID NO: 3543680 - RNA, 16 nt, Human
gucucugccuugccuu

SEQ ID NO: 3543681 - RNA, 15 nt, Human
gucucugcucgcccu

SEQ ID NO: 3543682 - RNA, 23 nt, Human
gucucugcucgcccuccuuucug

SEQ ID NO: 3543683 - RNA, 12 nt, Human
gucucugcugaa

SEQ ID NO: 3543684 - RNA, 22 nt, Human
gucucugcugcauuugugucau

SEQ ID NO: 3543685 - RNA, 12 nt, Human
gucucugcugcc

SEQ ID NO: 3543686 - RNA, 13 nt, Human
gucucugcuggcc

SEQ ID NO: 3543687 - RNA, 13 nt, Human
gucucuggccugu

SEQ ID NO: 3543688 - RNA, 20 nt, Human
gucucuguugacuggcugug

SEQ ID NO: 3543689 - RNA, 22 nt, Human
gucucuuauggauguccccagc

SEQ ID NO: 3543690 - RNA, 13 nt, Human
gucucuuccccuc

SEQ ID NO: 3543691 - RNA, 17 nt, Human
gucucuucuccacugga

SEQ ID NO: 3543692 - RNA, 18 nt, Human
gucucuucuccacuggau

SEQ ID NO: 3543693 - RNA, 14 nt, Human
gucucuucucccag

SEQ ID NO: 3543694 - RNA, 20 nt, Human
gucucuucugaauaaagcaa

SEQ ID NO: 3543695 - RNA, 22 nt, Human
gucucuucugaauaaagcaauu

SEQ ID NO: 3543696 - RNA, 22 nt, Human
gucucuucugagcuauuucauc

SEQ ID NO: 3543697 - RNA, 20 nt, Human
gucucuucuuggggcccagu

SEQ ID NO: 3543698 - RNA, 21 nt, Human
gucucuucuuggggcccagug

SEQ ID NO: 3543699 - RNA, 13 nt, Human
gucucuugaggga

SEQ ID NO: 3543700 - RNA, 13 nt, Human
gucucuugguccu

SEQ ID NO: 3543701 - RNA, 19 nt, Human
gucucuuuaaugucacagg

SEQ ID NO: 3543702 - RNA, 22 nt, Human
gucucuuuaaugucacaggcag

SEQ ID NO: 3543703 - RNA, 14 nt, Human
gucucuuuuacccu

SEQ ID NO: 3543704 - RNA, 20 nt, Human
gucucuuuuacccuggcccc

SEQ ID NO: 3543705 - RNA, 15 nt, Human
gucucuuuuuuacaa

SEQ ID NO: 3543706 - RNA, 16 nt, Human
gucucuuuuuuacaaa

SEQ ID NO: 3543707 - RNA, 13 nt, Human
gucugaaauuuuu

SEQ ID NO: 3543708 - RNA, 11 nt, Human
gucugaacuuu

SEQ ID NO: 3543709 - RNA, 16 nt, Human
gucugaacuuugggaa

SEQ ID NO: 3543710 - RNA, 14 nt, Human
gucugaagcagaug

SEQ ID NO: 3543711 - RNA, 19 nt, Human
gucugaaggacacuuccug

SEQ ID NO: 3543712 - RNA, 19 nt, Human
gucugaaggcuggguucug

SEQ ID NO: 3543713 - RNA, 19 nt, Human
gucugaagucacugcacag

SEQ ID NO: 3543714 - RNA, 17 nt, Human
gucugaauguucugaca

SEQ ID NO: 3543715 - RNA, 13 nt, Human
gucugacaggcaa

SEQ ID NO: 3543716 - RNA, 20 nt, Human
gucugacaggcaaugcuggc

SEQ ID NO: 3543717 - RNA, 24 nt, Human
gucugacaucagagguaucuuacu

SEQ ID NO: 3543718 - RNA, 13 nt, Human
gucugacccacug

SEQ ID NO: 3543719 - RNA, 14 nt, Human
gucugacugugugu

SEQ ID NO: 3543720 - RNA, 21 nt, Human
gucugagacucacaggaagga

SEQ ID NO: 3543721 - RNA, 18 nt, Human
gucugagagaggccauuc

SEQ ID NO: 3543722 - RNA, 21 nt, Human
gucugagccacagcagcauuu

SEQ ID NO: 3543723 - RNA, 19 nt, Human
gucugaggaauccagaccc

SEQ ID NO: 3543724 - RNA, 17 nt, Human
gucugagguugggagag

SEQ ID NO: 3543725 - RNA, 20 nt, Human
gucugaucgugacgcugaau

SEQ ID NO: 3543726 - RNA, 13 nt, Human
gucugaucugugc

SEQ ID NO: 3543727 - RNA, 21 nt, Human
gucugaucugugcuuuccagc

SEQ ID NO: 3543728 - RNA, 18 nt, Human
gucugauggaucccgaag

SEQ ID NO: 3543729 - RNA, 18 nt, Human
gucugauucccaagcucu

SEQ ID NO: 3543730 - RNA, 19 nt, Human
gucugauucccaagcucug

SEQ ID NO: 3543731 - RNA, 20 nt, Human
gucugauucccaagcucugc

SEQ ID NO: 3543732 - RNA, 20 nt, Human
gucugauugguuuuaauuga

SEQ ID NO: 3543733 - RNA, 22 nt, Human
gucugcaacuuuaagcagcucu

SEQ ID NO: 3543734 - RNA, 22 nt, Human
gucugcaagauucugaaacauu

SEQ ID NO: 3543735 - RNA, 15 nt, Human
gucugcaagucagag

SEQ ID NO: 3543736 - RNA, 21 nt, Human
gucugcaagucagaggauggc

SEQ ID NO: 3543737 - RNA, 20 nt, Human
gucugcacaccuugaaucug

SEQ ID NO: 3543738 - RNA, 17 nt, Human
gucugcacccaggggug

SEQ ID NO: 3543739 - RNA, 19 nt, Human
gucugcagauagaaagcau

SEQ ID NO: 3543740 - RNA, 12 nt, Human
gucugcagcccu

SEQ ID NO: 3543741 - RNA, 22 nt, Human
gucugcaggauugauuaugcag

SEQ ID NO: 3543742 - RNA, 19 nt, Human
gucugccaaccuaaaacuc

SEQ ID NO: 3543743 - RNA, 18 nt, Human
gucugccaauuuuugccu

SEQ ID NO: 3543744 - RNA, 17 nt, Human
gucugccacacaaacgu

SEQ ID NO: 3543745 - RNA, 14 nt, Human
gucugccacccagg

SEQ ID NO: 3543746 - RNA, 16 nt, Human
gucugccagccagcag

SEQ ID NO: 3543747 - RNA, 21 nt, Human
gucugccaggcccccaccaca

SEQ ID NO: 3543748 - RNA, 11 nt, Human
gucugccaggg

SEQ ID NO: 3543749 - RNA, 18 nt, Human
gucugccccaaguuuugu

SEQ ID NO: 3543750 - RNA, 10 nt, Human
gucugcccuu

SEQ ID NO: 3543751 - RNA, 17 nt, Human
gucugcccuucacccca

SEQ ID NO: 3543752 - RNA, 11 nt, Human
gucugccucuu

SEQ ID NO: 3543753 - RNA, 19 nt, Human
gucugcucccaaggggccu

SEQ ID NO: 3543754 - RNA, 19 nt, Human
gucugcucuuucucugcca

SEQ ID NO: 3543755 - RNA, 20 nt, Human
gucugcucuuucucugccag

SEQ ID NO: 3543756 - RNA, 17 nt, Human
gucugcugaauaauaaa

SEQ ID NO: 3543757 - RNA, 19 nt, Human
gucugcugaauaauaaacu

SEQ ID NO: 3543758 - RNA, 13 nt, Human
gucugcugcccuc

SEQ ID NO: 3543759 - RNA, 14 nt, Human
gucugcuguagaaa

SEQ ID NO: 3543760 - RNA, 12 nt, Human
gucugcuuagaa

SEQ ID NO: 3543761 - RNA, 14 nt, Human
gucugcuuagaaau

SEQ ID NO: 3543762 - RNA, 16 nt, Human
gucugcuucugcaccu

SEQ ID NO: 3543763 - RNA, 21 nt, Human
gucugcuucugcaccuuaucu

SEQ ID NO: 3543764 - RNA, 23 nt, Human
gucuggaagauggggaccagcag

SEQ ID NO: 3543765 - RNA, 15 nt, Human
gucuggaaugcagug

SEQ ID NO: 3543766 - RNA, 15 nt, Human
gucuggacugacagc

SEQ ID NO: 3543767 - RNA, 21 nt, Human
gucuggagaauaauucuuuga

SEQ ID NO: 3543768 - RNA, 10 nt, Human
gucuggagac

SEQ ID NO: 3543769 - RNA, 18 nt, Human
gucuggaggaccugcccg

SEQ ID NO: 3543770 - RNA, 11 nt, Human
gucuggagggg

SEQ ID NO: 3543771 - RNA, 12 nt, Human
gucuggaguggg

SEQ ID NO: 3543772 - RNA, 21 nt, Human
gucuggaguugaucuggaacc

SEQ ID NO: 3543773 - RNA, 18 nt, Human
gucuggauaacuuccaca

SEQ ID NO: 3543774 - RNA, 14 nt, Human
gucuggaucaguaa

SEQ ID NO: 3543775 - RNA, 23 nt, Human
gucuggaugcgggcauggcagcc

SEQ ID NO: 3543776 - RNA, 22 nt, Human
gucuggcaaugccacagcccug

SEQ ID NO: 3543777 - RNA, 17 nt, Human
gucuggcacagccugca

SEQ ID NO: 3543778 - RNA, 22 nt, Human
gucuggcagccucccauccagg

SEQ ID NO: 3543779 - RNA, 15 nt, Human
gucuggcccaccagg

SEQ ID NO: 3543780 - RNA, 14 nt, Human
uggaaacaggacca

SEQ ID NO: 3543781 - RNA, 21 nt, Human
uggaaacccauaggcccacac

SEQ ID NO: 3543782 - RNA, 18 nt, Human
uggaaacccgaggguuga

SEQ ID NO: 3543783 - RNA, 15 nt, Human
uggaaaccugaaaaa

SEQ ID NO: 3543784 - RNA, 22 nt, Human
uggaaaccugcccugccugagg

SEQ ID NO: 3543785 - RNA, 13 nt, Human
uggaaacuaauaa

SEQ ID NO: 3543786 - RNA, 15 nt, Human
uggaaacuaauaaaa

SEQ ID NO: 3543787 - RNA, 17 nt, Human
uggaaacuaauaaaaua

SEQ ID NO: 3543788 - RNA, 21 nt, Human
uggaaacuaauaaaauauuuu

SEQ ID NO: 3543789 - RNA, 23 nt, Human
uggaaacuucagcgguuuauaua

SEQ ID NO: 3543790 - RNA, 22 nt, Human
uggaaacuuuucuuaaaaaguu

SEQ ID NO: 3543791 - RNA, 19 nt, Human
uggaaagcaucaccucagg

SEQ ID NO: 3543792 - RNA, 21 nt, Human
uggaaagcaucaccucaggcc

SEQ ID NO: 3543793 - RNA, 16 nt, Human
uggaaagccucugcug

SEQ ID NO: 3543794 - RNA, 14 nt, Human
uggaaguguggguc

SEQ ID NO: 3543795 - RNA, 18 nt, Human
uggaaguuauuaacuuua

SEQ ID NO: 3543796 - RNA, 16 nt, Human
uggaaguugcauggca

SEQ ID NO: 3543797 - RNA, 16 nt, Human
uggaaguuuguguucu

SEQ ID NO: 3543798 - RNA, 23 nt, Human
uggaaguuuguguucuguuuguu

SEQ ID NO: 3543799 - RNA, 19 nt, Human
uggaaguuuuccuacacuu

SEQ ID NO: 3543800 - RNA, 14 nt, Human
uggaaguuuugcau

SEQ ID NO: 3543801 - RNA, 23 nt, Human
uggaauaaaaauuccagaaugaa

SEQ ID NO: 3543802 - RNA, 18 nt, Human
uggaauaaaauacuauuu

SEQ ID NO: 3543803 - RNA, 14 nt, Human
uggaauaacaugua

SEQ ID NO: 3543804 - RNA, 14 nt, Human
uggaauaauguaaa

SEQ ID NO: 3543805 - RNA, 16 nt, Human
uggaauacucuuauau

SEQ ID NO: 3543806 - RNA, 18 nt, Human
uggaauacuuuuuguuau

SEQ ID NO: 3543807 - RNA, 17 nt, Human
uggaauaguauccucca

SEQ ID NO: 3543808 - RNA, 21 nt, Human
uggaauaguauccuccagguu

SEQ ID NO: 3543809 - RNA, 22 nt, Human
uggaauaguauccuccagguuu

SEQ ID NO: 3543810 - RNA, 13 nt, Human
uggaauauaaaga

SEQ ID NO: 3543811 - RNA, 18 nt, Human
uggaauauaaggaaagca

SEQ ID NO: 3543812 - RNA, 23 nt, Human
uggaaucccacuaaugcaaacug

SEQ ID NO: 3543813 - RNA, 18 nt, Human
uggaaucccacuguauga

SEQ ID NO: 3543814 - RNA, 13 nt, Human
uggaauccuuuca

SEQ ID NO: 3543815 - RNA, 16 nt, Human
uggaaucuagaagaaa

SEQ ID NO: 3543816 - RNA, 21 nt, Human
uggaaucuagaagaaaugaaa

SEQ ID NO: 3543817 - RNA, 20 nt, Human
uggaaucuucucuuugacaa

SEQ ID NO: 3543818 - RNA, 21 nt, Human
uggaaucuucucuuugacaau

SEQ ID NO: 3543819 - RNA, 18 nt, Human
uggaaugagugugcaugg

SEQ ID NO: 3543820 - RNA, 19 nt, Human
uggaaugagugugcaugga

SEQ ID NO: 3543821 - RNA, 21 nt, Human
uggaaugagugugcauggagg

SEQ ID NO: 3543822 - RNA, 17 nt, Human
uggaaugcccuucacug

SEQ ID NO: 3543823 - RNA, 16 nt, Human
uggaaugcuguguuaa

SEQ ID NO: 3543824 - RNA, 24 nt, Human
uggaaugcuuccuagaaguuacug

SEQ ID NO: 3543825 - RNA, 18 nt, Human
uggaaugcuucuucucag

SEQ ID NO: 3543826 - RNA, 21 nt, Human
uggaaugguuauaaaagugau

SEQ ID NO: 3543827 - RNA, 15 nt, Human
uggaauguuggauaa

SEQ ID NO: 3543828 - RNA, 21 nt, Human
uggaauguuggauaaggaauu

SEQ ID NO: 3543829 - RNA, 17 nt, Human
uggaauuaaaaggauag

SEQ ID NO: 3543830 - RNA, 21 nt, Human
uggaauuaaccuggugcugga

SEQ ID NO: 3543831 - RNA, 22 nt, Human
uggaauuagaacccuugcacag

SEQ ID NO: 3543832 - RNA, 22 nt, Human
uggaauuagcuuggggccaggg

SEQ ID NO: 3543833 - RNA, 20 nt, Human
uggaauuauuuuaaaagaua

SEQ ID NO: 3543834 - RNA, 16 nt, Human
uggaauucacaaagua

SEQ ID NO: 3543835 - RNA, 15 nt, Human
uggaauucuguucau

SEQ ID NO: 3543836 - RNA, 16 nt, Human
uggaauugcuuaccaa

SEQ ID NO: 3543837 - RNA, 13 nt, Human
uggaauuguggcu

SEQ ID NO: 3543838 - RNA, 20 nt, Human
uggaauuuauaauucaguau

SEQ ID NO: 3543839 - RNA, 22 nt, Human
uggaauuucucccagucauuua

SEQ ID NO: 3543840 - RNA, 14 nt, Human
uggaauuucuuguu

SEQ ID NO: 3543841 - RNA, 15 nt, Human
uggaauuucuuguuu

SEQ ID NO: 3543842 - RNA, 17 nt, Human
uggaauuucuuguuucu

SEQ ID NO: 3543843 - RNA, 14 nt, Human
uggaauuugaaaca

SEQ ID NO: 3543844 - RNA, 16 nt, Human
uggaauuuguaaccuc

SEQ ID NO: 3543845 - RNA, 15 nt, Human
uggaauuuugcaaag

SEQ ID NO: 3543846 - RNA, 22 nt, Human
uggaauuuugcaaagauuuaau

SEQ ID NO: 3543847 - RNA, 18 nt, Human
uggaauuuuuauuaugca

SEQ ID NO: 3543848 - RNA, 19 nt, Human
uggaauuuuuauuaugcau

SEQ ID NO: 3543849 - RNA, 23 nt, Human
uggaauuuuuauuaugcauaacu

SEQ ID NO: 3543850 - RNA, 23 nt, Human
uggaauuuuucauugauaugaaa

SEQ ID NO: 3543851 - RNA, 14 nt, Human
uggacaaaaugacu

SEQ ID NO: 3543852 - RNA, 20 nt, Human
uggacaaacuggagucugga

SEQ ID NO: 3543853 - RNA, 22 nt, Human
uggacaaacuggagucuggagu

SEQ ID NO: 3543854 - RNA, 15 nt, Human
uggacaaagaaccuu

SEQ ID NO: 3543855 - RNA, 20 nt, Human
uggacaaagaauuccaaagc

SEQ ID NO: 3543856 - RNA, 23 nt, Human
uggacaaagaauuccaaagcaaa

SEQ ID NO: 3543857 - RNA, 22 nt, Human
uggacaaaucacauauuuuaaa

SEQ ID NO: 3543858 - RNA, 16 nt, Human
uggacaaggaggucug

SEQ ID NO: 3543859 - RNA, 17 nt, Human
uggacacacaaggugca

SEQ ID NO: 3543860 - RNA, 14 nt, Human
uggacacacacagc

SEQ ID NO: 3543861 - RNA, 13 nt, Human
uggacacagcucu

SEQ ID NO: 3543862 - RNA, 14 nt, Human
uggacacagcucuu

SEQ ID NO: 3543863 - RNA, 23 nt, Human
uggacacagcucuucuccaggcu

SEQ ID NO: 3543864 - RNA, 20 nt, Human
uggacaccccuuauccagga

SEQ ID NO: 3543865 - RNA, 23 nt, Human
uggacaccccuuauccaggacuc

SEQ ID NO: 3543866 - RNA, 16 nt, Human
uggacaccugcccugc

SEQ ID NO: 3543867 - RNA, 18 nt, Human
uggacaccugcccugccc

SEQ ID NO: 3543868 - RNA, 23 nt, Human
uggacaccugcccugcccugcca

SEQ ID NO: 3543869 - RNA, 18 nt, Human
uggacaccuuuagguucu

SEQ ID NO: 3543870 - RNA, 16 nt, Human
uggacacuccagggac

SEQ ID NO: 3543871 - RNA, 17 nt, Human
uggacacuccagugcca

SEQ ID NO: 3543872 - RNA, 23 nt, Human
uggacacuuaauacuaccuugaa

SEQ ID NO: 3543873 - RNA, 20 nt, Human
uggacacuuaauucuguucu

SEQ ID NO: 3543874 - RNA, 14 nt, Human
uggacacuuugaaa

SEQ ID NO: 3543875 - RNA, 20 nt, Human
uggacacuuugaaauguguu

SEQ ID NO: 3543876 - RNA, 16 nt, Human
uggacacuuuucaccu

SEQ ID NO: 3543877 - RNA, 12 nt, Human
uggacagaagaa

SEQ ID NO: 3543878 - RNA, 15 nt, Human
uggacagagaagggc

SEQ ID NO: 3543879 - RNA, 12 nt, Human
uggacagagggg

SEQ ID NO: 3543880 - RNA, 14 nt, Human
uggacagaggggac

SEQ ID NO: 3543881 - RNA, 16 nt, Human
uggacagauuaauauu

SEQ ID NO: 3543882 - RNA, 15 nt, Human
uggacagcaaaacca

SEQ ID NO: 3543883 - RNA, 14 nt, Human
uggacagccccacc

SEQ ID NO: 3543884 - RNA, 15 nt, Human
uggacagcugugccu

SEQ ID NO: 3543885 - RNA, 13 nt, Human
uggacagcuugug

SEQ ID NO: 3543886 - RNA, 14 nt, Human
uggacaggucuggg

SEQ ID NO: 3543887 - RNA, 23 nt, Human
uggacaguaucacugucuuuccu

SEQ ID NO: 3543888 - RNA, 13 nt, Human
uggacagucacug

SEQ ID NO: 3543889 - RNA, 13 nt, Human
uggacaguccugg

SEQ ID NO: 3543890 - RNA, 14 nt, Human
uggacaguccuggg

SEQ ID NO: 3543891 - RNA, 15 nt, Human
uggacaguccuggga

SEQ ID NO: 3543892 - RNA, 19 nt, Human
uggacaguucacacccugc

SEQ ID NO: 3543893 - RNA, 20 nt, Human
uggacauccuccucccaccc

SEQ ID NO: 3543894 - RNA, 22 nt, Human
uggacauggcaggccgauuugg

SEQ ID NO: 3543895 - RNA, 15 nt, Human
uggacauucagaaca

SEQ ID NO: 3543896 - RNA, 18 nt, Human
uggacauuugccuugcug

SEQ ID NO: 3543897 - RNA, 16 nt, Human
uggacauuuuaugucu

SEQ ID NO: 3543898 - RNA, 17 nt, Human
uggaccaaaaaccagua

SEQ ID NO: 3543899 - RNA, 13 nt, Human
uggaccaaagcug

SEQ ID NO: 3543900 - RNA, 19 nt, Human
uggaccaauuauugauaua

SEQ ID NO: 3543901 - RNA, 22 nt, Human
uggaccaauuauugauauauau

SEQ ID NO: 3543902 - RNA, 15 nt, Human
uggaccacuguuucu

SEQ ID NO: 3543903 - RNA, 18 nt, Human
uggaccacuguuucuugc

SEQ ID NO: 3543904 - RNA, 13 nt, Human
uggaccagaugcu

SEQ ID NO: 3543905 - RNA, 14 nt, Human
uggaccagaugcug

SEQ ID NO: 3543906 - RNA, 15 nt, Human
uggaccagccucucc

SEQ ID NO: 3543907 - RNA, 16 nt, Human
uggaccagccucucca

SEQ ID NO: 3543908 - RNA, 14 nt, Human
uggaccaggacagg

SEQ ID NO: 3543909 - RNA, 18 nt, Human
uggaccaguggucucaca

SEQ ID NO: 3543910 - RNA, 19 nt, Human
uggaccagugguuuccagu

SEQ ID NO: 3543911 - RNA, 22 nt, Human
uggaccaugcugucuggcacag

SEQ ID NO: 3543912 - RNA, 19 nt, Human
uggaccauggaguggcagc

SEQ ID NO: 3543913 - RNA, 15 nt, Human
uggacccaaggaaaa

SEQ ID NO: 3543914 - RNA, 20 nt, Human
uggacccaaggaaaacugca

SEQ ID NO: 3543915 - RNA, 21 nt, Human
uggacccaaggaaaacugcau

SEQ ID NO: 3543916 - RNA, 18 nt, Human
uggacccagccaggccca

SEQ ID NO: 3543917 - RNA, 21 nt, Human
uggacccagccaggcccagcc

SEQ ID NO: 3543918 - RNA, 14 nt, Human
uggaccccagccuc

SEQ ID NO: 3543919 - RNA, 15 nt, Human
uggaccccagccuca

SEQ ID NO: 3543920 - RNA, 16 nt, Human
uggaccccagcuggga

SEQ ID NO: 3543921 - RNA, 16 nt, Human
uggaccccaucuguga

SEQ ID NO: 3543922 - RNA, 17 nt, Human
uggaccccccuuucaca

SEQ ID NO: 3543923 - RNA, 12 nt, Human
uggaccccugca

SEQ ID NO: 3543924 - RNA, 14 nt, Human
uggacccgcucugg

SEQ ID NO: 3543925 - RNA, 15 nt, Human
uggacccgcucugga

SEQ ID NO: 3543926 - RNA, 16 nt, Human
uggacccgcucuggac

SEQ ID NO: 3543927 - RNA, 16 nt, Human
uggacccugaaaugug

SEQ ID NO: 3543928 - RNA, 18 nt, Human
uggacccugaaaugugug

SEQ ID NO: 3543929 - RNA, 20 nt, Human
uggacccugaccagcucccc

SEQ ID NO: 3543930 - RNA, 23 nt, Human
uggacccugaccagcucccccuc

SEQ ID NO: 3543931 - RNA, 19 nt, Human
uggacccugaggcccagag

SEQ ID NO: 3543932 - RNA, 16 nt, Human
uggacccuguugcuaa

SEQ ID NO: 3543933 - RNA, 13 nt, Human
uggaccgaguaga

SEQ ID NO: 3543934 - RNA, 17 nt, Human
uggaccgaguagaggca

SEQ ID NO: 3543935 - RNA, 15 nt, Human
uggaccggagagugg

SEQ ID NO: 3543936 - RNA, 22 nt, Human
uggaccggagaguggggguggg

SEQ ID NO: 3543937 - RNA, 15 nt, Human
uggaccuaacauucg

SEQ ID NO: 3543938 - RNA, 23 nt, Human
aagaucaaaaaggcuuauaaaac

SEQ ID NO: 3543939 - RNA, 20 nt, Human
aagaucaaaagguuaauaaa

SEQ ID NO: 3543940 - RNA, 17 nt, Human
aagaucaaaauaaaaag

SEQ ID NO: 3543941 - RNA, 16 nt, Human
aagaucacgcuccccg

SEQ ID NO: 3543942 - RNA, 17 nt, Human
aagaucacgcuccccgc

SEQ ID NO: 3543943 - RNA, 19 nt, Human
aagaucacgcuccccgccu

SEQ ID NO: 3543944 - RNA, 12 nt, Human
aagaucacuguu

SEQ ID NO: 3543945 - RNA, 14 nt, Human
aagaucacuguuua

SEQ ID NO: 3543946 - RNA, 19 nt, Human
aagaucacuuguuguuuua

SEQ ID NO: 3543947 - RNA, 21 nt, Human
aagaucacuuguuguuuuacu

SEQ ID NO: 3543948 - RNA, 17 nt, Human
aagaucacuuucucagu

SEQ ID NO: 3543949 - RNA, 17 nt, Human
aagaucauauacgugaa

SEQ ID NO: 3543950 - RNA, 14 nt, Human
aagauccagcugcc

SEQ ID NO: 3543951 - RNA, 22 nt, Human
aagauccuaaaacaaaagcuca

SEQ ID NO: 3543952 - RNA, 21 nt, Human
aagauccugucuuuaaggaaa

SEQ ID NO: 3543953 - RNA, 14 nt, Human
aagauccugugagg

SEQ ID NO: 3543954 - RNA, 16 nt, Human
aagaucguucucugcc

SEQ ID NO: 3543955 - RNA, 15 nt, Human
aagaucucuuucuaa

SEQ ID NO: 3543956 - RNA, 19 nt, Human
aagaucucuuucuaaagac

SEQ ID NO: 3543957 - RNA, 17 nt, Human
aagaucuguccucagcc

SEQ ID NO: 3543958 - RNA, 17 nt, Human
aagaucugugcagcccc

SEQ ID NO: 3543959 - RNA, 15 nt, Human
aagaucuuaaauuuu

SEQ ID NO: 3543960 - RNA, 13 nt, Human
aagaucuuagauu

SEQ ID NO: 3543961 - RNA, 17 nt, Human
aagaucuuagauucucu

SEQ ID NO: 3543962 - RNA, 23 nt, Human
aagaucuucaaaaguaaugccuc

SEQ ID NO: 3543963 - RNA, 13 nt, Human
aagaucuuucagg

SEQ ID NO: 3543964 - RNA, 11 nt, Human
aagaucuuuua

SEQ ID NO: 3543965 - RNA, 19 nt, Human
aagaugaaaggcaggccua

SEQ ID NO: 3543966 - RNA, 22 nt, Human
aagaugaacccgaggcugagaa

SEQ ID NO: 3543967 - RNA, 14 nt, Human
aagaugaaguuuua

SEQ ID NO: 3543968 - RNA, 11 nt, Human
aagaugaauga

SEQ ID NO: 3543969 - RNA, 13 nt, Human
aagaugacauugc

SEQ ID NO: 3543970 - RNA, 15 nt, Human
aagaugacauugcua

SEQ ID NO: 3543971 - RNA, 23 nt, Human
aagaugacauugcuaagaugcuc

SEQ ID NO: 3543972 - RNA, 22 nt, Human
aagaugagaacagauaaagauu

SEQ ID NO: 3543973 - RNA, 17 nt, Human
aagaugagagaacugga

SEQ ID NO: 3543974 - RNA, 21 nt, Human
aagaugagauuggcauggcuu

SEQ ID NO: 3543975 - RNA, 15 nt, Human
aagaugaucagaccu

SEQ ID NO: 3543976 - RNA, 20 nt, Human
aagaugcaaggaccaggacu

SEQ ID NO: 3543977 - RNA, 18 nt, Human
aagaugcacuuugcuuua

SEQ ID NO: 3543978 - RNA, 18 nt, Human
aagaugcauuguaguuua

SEQ ID NO: 3543979 - RNA, 22 nt, Human
aagaugccacauucaaaauagg

SEQ ID NO: 3543980 - RNA, 21 nt, Human
aagaugcucuaucuugcucug

SEQ ID NO: 3543981 - RNA, 15 nt, Human
aagaugcucuuuuaa

SEQ ID NO: 3543982 - RNA, 16 nt, Human
aagaugcuucucacug

SEQ ID NO: 3543983 - RNA, 17 nt, Human
aagaugcuucucacugc

SEQ ID NO: 3543984 - RNA, 19 nt, Human
aagaugcuucucacugcca

SEQ ID NO: 3543985 - RNA, 22 nt, Human
aagaugcuuuuaacagagucug

SEQ ID NO: 3543986 - RNA, 14 nt, Human
aagauggaguuucu

SEQ ID NO: 3543987 - RNA, 15 nt, Human
aagauggaguuucua

SEQ ID NO: 3543988 - RNA, 20 nt, Human
aagauggaguuucuaagguc

SEQ ID NO: 3543989 - RNA, 21 nt, Human
aagauggauucucagauauuu

SEQ ID NO: 3543990 - RNA, 21 nt, Human
aagauggauugguguaaaagg

SEQ ID NO: 3543991 - RNA, 21 nt, Human
aagauggcugugccucugccu

SEQ ID NO: 3543992 - RNA, 21 nt, Human
aagaugggaacgcagaugauc

SEQ ID NO: 3543993 - RNA, 18 nt, Human
aagaugggcagcuaguuc

SEQ ID NO: 3543994 - RNA, 20 nt, Human
aagaugggcaucuuuuguau

SEQ ID NO: 3543995 - RNA, 18 nt, Human
aagauggggaccagcagc

SEQ ID NO: 3543996 - RNA, 20 nt, Human
aagauggggaccagcagccc

SEQ ID NO: 3543997 - RNA, 17 nt, Human
uggccaagcugaggugc

SEQ ID NO: 3543998 - RNA, 23 nt, Human
uggccaagcugaggugcccagga

SEQ ID NO: 3543999 - RNA, 16 nt, Human
uggccaaggaaaggca

SEQ ID NO: 3544000 - RNA, 17 nt, Human
uggccaaggagcugcua

SEQ ID NO: 3544001 - RNA, 19 nt, Human
uggccaaggagcugcuaua

SEQ ID NO: 3544002 - RNA, 22 nt, Human
uggccaaugcaccuaaagaaaa

SEQ ID NO: 3544003 - RNA, 16 nt, Human
uggccacacugugaca

SEQ ID NO: 3544004 - RNA, 12 nt, Human
uggccacagcca

SEQ ID NO: 3544005 - RNA, 16 nt, Human
uggccacagccagggg

SEQ ID NO: 3544006 - RNA, 18 nt, Human
uggccaccaggcuggcgc

SEQ ID NO: 3544007 - RNA, 19 nt, Human
uggccaccaggcuggcgca

SEQ ID NO: 3544008 - RNA, 20 nt, Human
uggccaccaggcuggcgcag

SEQ ID NO: 3544009 - RNA, 21 nt, Human
uggccaccaggcuggcgcagc

SEQ ID NO: 3544010 - RNA, 22 nt, Human
uggccaccaggugccuuucaaa

SEQ ID NO: 3544011 - RNA, 20 nt, Human
uggccaccucucuccuuugc

SEQ ID NO: 3544012 - RNA, 22 nt, Human
uggccaccugaggugggcccag

SEQ ID NO: 3544013 - RNA, 17 nt, Human
uggccacgcagccagga

SEQ ID NO: 3544014 - RNA, 11 nt, Human
uggccacgccc

SEQ ID NO: 3544015 - RNA, 18 nt, Human
uggccacuaagcagagga

SEQ ID NO: 3544016 - RNA, 12 nt, Human
uggccacucagc

SEQ ID NO: 3544017 - RNA, 15 nt, Human
uggccacucagcuuc

SEQ ID NO: 3544018 - RNA, 22 nt, Human
uggccacuccagaccccuggcu

SEQ ID NO: 3544019 - RNA, 20 nt, Human
uggccacuccgagagguggg

SEQ ID NO: 3544020 - RNA, 19 nt, Human
uggccacugcucccuaagc

SEQ ID NO: 3544021 - RNA, 22 nt, Human
uggccacuuuaagagagaaauc

SEQ ID NO: 3544022 - RNA, 20 nt, Human
uggccagaagggggccauga

SEQ ID NO: 3544023 - RNA, 12 nt, Human
uggccagacaca

SEQ ID NO: 3544024 - RNA, 15 nt, Human
uggccagaccagagc

SEQ ID NO: 3544025 - RNA, 21 nt, Human
uggccagaccagagcucugga

SEQ ID NO: 3544026 - RNA, 22 nt, Human
uggccagaccagagcucuggag

SEQ ID NO: 3544027 - RNA, 12 nt, Human
uggccagacucg

SEQ ID NO: 3544028 - RNA, 13 nt, Human
uggccagagagcc

SEQ ID NO: 3544029 - RNA, 18 nt, Human
uggccagagcugggaggc

SEQ ID NO: 3544030 - RNA, 14 nt, Human
uggccagaggcuug

SEQ ID NO: 3544031 - RNA, 17 nt, Human
uggccagaugcaccagc

SEQ ID NO: 3544032 - RNA, 18 nt, Human
uggccagaugcaccagcc

SEQ ID NO: 3544033 - RNA, 15 nt, Human
uggccagcagcaccu

SEQ ID NO: 3544034 - RNA, 21 nt, Human
uggccagccaacuuuugcaug

SEQ ID NO: 3544035 - RNA, 12 nt, Human
uggccagcccca

SEQ ID NO: 3544036 - RNA, 13 nt, Human
uggccagccccac

SEQ ID NO: 3544037 - RNA, 17 nt, Human
uggccagccccacagcc

SEQ ID NO: 3544038 - RNA, 19 nt, Human
uggccagccccacagccca

SEQ ID NO: 3544039 - RNA, 12 nt, Human
uggccagccccu

SEQ ID NO: 3544040 - RNA, 20 nt, Human
uggccagccccuuagacaga

SEQ ID NO: 3544041 - RNA, 14 nt, Human
uggccagccgcucu

SEQ ID NO: 3544042 - RNA, 17 nt, Human
uggccagccgcucuccu

SEQ ID NO: 3544043 - RNA, 18 nt, Human
uggccagccgcucuccug

SEQ ID NO: 3544044 - RNA, 21 nt, Human
uggccagccgcucuccugcca

SEQ ID NO: 3544045 - RNA, 16 nt, Human
uggccagccuggaucu

SEQ ID NO: 3544046 - RNA, 23 nt, Human
uggccagcgagcgcccagcuccu

SEQ ID NO: 3544047 - RNA, 19 nt, Human
uggccaggaaguagcacag

SEQ ID NO: 3544048 - RNA, 21 nt, Human
uggccaggaaguagcacaggc

SEQ ID NO: 3544049 - RNA, 12 nt, Human
uggccaggagca

SEQ ID NO: 3544050 - RNA, 14 nt, Human
uggccaggagcagg

SEQ ID NO: 3544051 - RNA, 22 nt, Human
uggccaggagcucuucaggccu

SEQ ID NO: 3544052 - RNA, 23 nt, Human
uggccaggagcucuucaggccuc

SEQ ID NO: 3544053 - RNA, 14 nt, Human
uggccaggauggag

SEQ ID NO: 3544054 - RNA, 20 nt, Human
uggccaggcacccccuggag

SEQ ID NO: 3544055 - RNA, 21 nt, Human
uggccaggcacccccuggaga

SEQ ID NO: 3544056 - RNA, 12 nt, Human
uggccaggcaga

SEQ ID NO: 3544057 - RNA, 16 nt, Human
uggccaggcagaucug

SEQ ID NO: 3544058 - RNA, 22 nt, Human
uggccaggccgggaaaaagccc

SEQ ID NO: 3544059 - RNA, 20 nt, Human
uggccaggcugaucucgaac

SEQ ID NO: 3544060 - RNA, 17 nt, Human
uggccaggcuggucuca

SEQ ID NO: 3544061 - RNA, 20 nt, Human
uggccagggccacgcuccag

SEQ ID NO: 3544062 - RNA, 11 nt, Human
uggccaggugg

SEQ ID NO: 3544063 - RNA, 21 nt, Human
uggccaguccacccugccugc

SEQ ID NO: 3544064 - RNA, 16 nt, Human
uggccaguccaggcug

SEQ ID NO: 3544065 - RNA, 20 nt, Human
uggccagucuggucucgaac

SEQ ID NO: 3544066 - RNA, 15 nt, Human
uggccaguggcugga

SEQ ID NO: 3544067 - RNA, 23 nt, Human
uggccagugugacaaggauugcu

SEQ ID NO: 3544068 - RNA, 16 nt, Human
uggccagugugauccc

SEQ ID NO: 3544069 - RNA, 15 nt, Human
uggccauauuuaccu

SEQ ID NO: 3544070 - RNA, 20 nt, Human
uggccauauuuaccucagcc

SEQ ID NO: 3544071 - RNA, 13 nt, Human
uggccaucccaca

SEQ ID NO: 3544072 - RNA, 14 nt, Human
uggccaucccugug

SEQ ID NO: 3544073 - RNA, 16 nt, Human
uggccaucccugugag

SEQ ID NO: 3544074 - RNA, 16 nt, Human
uggccaucucuggaug

SEQ ID NO: 3544075 - RNA, 16 nt, Human
uggccaugacccugcc

SEQ ID NO: 3544076 - RNA, 17 nt, Human
uggccaugacccugccu

SEQ ID NO: 3544077 - RNA, 22 nt, Human
uggccaugccacccuguuuuca

SEQ ID NO: 3544078 - RNA, 21 nt, Human
uggccaugcuccucuucccca

SEQ ID NO: 3544079 - RNA, 18 nt, Human
uggccauggagaaagcug

SEQ ID NO: 3544080 - RNA, 23 nt, Human
uggccauggagaaagcugacuug

SEQ ID NO: 3544081 - RNA, 22 nt, Human
uggccaugguacccccuucugg

SEQ ID NO: 3544082 - RNA, 23 nt, Human
ugccgggcugagggccugcugga

SEQ ID NO: 3544083 - RNA, 16 nt, Human
ugccggggcagccccc

SEQ ID NO: 3544084 - RNA, 14 nt, Human
ugccggguuuuaua

SEQ ID NO: 3544085 - RNA, 15 nt, Human
ugccggugagaccca

SEQ ID NO: 3544086 - RNA, 14 nt, Human
ugccguaauuuaac

SEQ ID NO: 3544087 - RNA, 16 nt, Human
ugccgucaccaccacc

SEQ ID NO: 3544088 - RNA, 18 nt, Human
ugccgucaccaccacccc

SEQ ID NO: 3544089 - RNA, 14 nt, Human
ugccgucucuggag

SEQ ID NO: 3544090 - RNA, 20 nt, Human
ugccguggauugcacguggc

SEQ ID NO: 3544091 - RNA, 16 nt, Human
ugccgugugaguguga

SEQ ID NO: 3544092 - RNA, 22 nt, Human
ugccgugugagugugacagggc

SEQ ID NO: 3544093 - RNA, 23 nt, Human
ugccgugugagugugacagggcc

SEQ ID NO: 3544094 - RNA, 20 nt, Human
ugccgugugcccucgggcga

SEQ ID NO: 3544095 - RNA, 16 nt, Human
ugccguuacucuccaa

SEQ ID NO: 3544096 - RNA, 19 nt, Human
ugccguuacucuccaaccu

SEQ ID NO: 3544097 - RNA, 20 nt, Human
ugccguuacuuuucauauuu

SEQ ID NO: 3544098 - RNA, 12 nt, Human
ugccuaaaauaa

SEQ ID NO: 3544099 - RNA, 13 nt, Human
ugccuaaauccau

SEQ ID NO: 3544100 - RNA, 20 nt, Human
ugccuaaauccauuuggaaa

SEQ ID NO: 3544101 - RNA, 18 nt, Human
ugccuaagaauaaacauu

SEQ ID NO: 3544102 - RNA, 13 nt, Human
ugccuaaggacuu

SEQ ID NO: 3544103 - RNA, 17 nt, Human
ugccuaaguauuccuuu

SEQ ID NO: 3544104 - RNA, 22 nt, Human
ugccuaauacauuaaagcaguc

SEQ ID NO: 3544105 - RNA, 17 nt, Human
ugccuacagaacuucag

SEQ ID NO: 3544106 - RNA, 15 nt, Human
ugccuagaggcccca

SEQ ID NO: 3544107 - RNA, 16 nt, Human
ugccuagcaagcuggc

SEQ ID NO: 3544108 - RNA, 17 nt, Human
ugccuagcaagcuggcc

SEQ ID NO: 3544109 - RNA, 19 nt, Human
ugccuagcacucacaugcu

SEQ ID NO: 3544110 - RNA, 20 nt, Human
ugccuaggauucacacccca

SEQ ID NO: 3544111 - RNA, 23 nt, Human
ugccuaggauucacaccccaccu

SEQ ID NO: 3544112 - RNA, 14 nt, Human
ugccuaggccuggg

SEQ ID NO: 3544113 - RNA, 14 nt, Human
ugccuaggcugacc

SEQ ID NO: 3544114 - RNA, 16 nt, Human
ugccuaguauugacaa

SEQ ID NO: 3544115 - RNA, 20 nt, Human
ugccuauaagccaaaauuaa

SEQ ID NO: 3544116 - RNA, 15 nt, Human
ugccuauauuuuccu

SEQ ID NO: 3544117 - RNA, 15 nt, Human
ugccuauccugcugu

SEQ ID NO: 3544118 - RNA, 17 nt, Human
ugccuauccugcuguuc

SEQ ID NO: 3544119 - RNA, 21 nt, Human
ugccuauuaucugucagcugc

SEQ ID NO: 3544120 - RNA, 13 nt, Human
ugccuauucccac

SEQ ID NO: 3544121 - RNA, 17 nt, Human
ugccuauuuguguggac

SEQ ID NO: 3544122 - RNA, 15 nt, Human
ugccucaagaggaau

SEQ ID NO: 3544123 - RNA, 23 nt, Human
ugccucaaugugaaucagacccu

SEQ ID NO: 3544124 - RNA, 23 nt, Human
ugccucaaugugaccagggguga

SEQ ID NO: 3544125 - RNA, 23 nt, Human
ugccucacccacccuuuuuuaaa

SEQ ID NO: 3544126 - RNA, 15 nt, Human
ugccucaccccuugc

SEQ ID NO: 3544127 - RNA, 22 nt, Human
ugccucacuaauuuuuguauua

SEQ ID NO: 3544128 - RNA, 15 nt, Human
ugccucagagaccag

SEQ ID NO: 3544129 - RNA, 23 nt, Human
ugccucagccacuugccugugcu

SEQ ID NO: 3544130 - RNA, 15 nt, Human
ugccucagcccugac

SEQ ID NO: 3544131 - RNA, 18 nt, Human
ugccucagccucccgagu

SEQ ID NO: 3544132 - RNA, 17 nt, Human
ugccucagcuuccccag

SEQ ID NO: 3544133 - RNA, 18 nt, Human
ugccucagcuuccccagu

SEQ ID NO: 3544134 - RNA, 18 nt, Human
ugccucaggaggcaggac

SEQ ID NO: 3544135 - RNA, 21 nt, Human
ugccucaggaggcaggaccuu

SEQ ID NO: 3544136 - RNA, 14 nt, Human
ugccucagguuccu

SEQ ID NO: 3544137 - RNA, 14 nt, Human
ugccuccaccacca

SEQ ID NO: 3544138 - RNA, 21 nt, Human
ugccuccaccaccacuggcca

SEQ ID NO: 3544139 - RNA, 14 nt, Human
ugccuccacccucu

SEQ ID NO: 3544140 - RNA, 17 nt, Human
ugccuccaccgcugccu

SEQ ID NO: 3544141 - RNA, 20 nt, Human
ugccuccaccgcugccuaag

SEQ ID NO: 3544142 - RNA, 14 nt, Human
ugccuccacuccca

SEQ ID NO: 3544143 - RNA, 14 nt, Human
ugccuccaggaacc

SEQ ID NO: 3544144 - RNA, 15 nt, Human
ugccuccagggcugg

SEQ ID NO: 3544145 - RNA, 19 nt, Human
ugccuccagggcuggacug

SEQ ID NO: 3544146 - RNA, 23 nt, Human
ugccuccagggcuggacugaggc

SEQ ID NO: 3544147 - RNA, 14 nt, Human
ugccuccaggugca

SEQ ID NO: 3544148 - RNA, 15 nt, Human
ugccuccaggugcag

SEQ ID NO: 3544149 - RNA, 12 nt, Human
ugccuccauccu

SEQ ID NO: 3544150 - RNA, 15 nt, Human
ugccuccauggugcc

SEQ ID NO: 3544151 - RNA, 22 nt, Human
ugccucccaucacccgcuaaga

SEQ ID NO: 3544152 - RNA, 21 nt, Human
ugccuccccaacccugccccu

SEQ ID NO: 3544153 - RNA, 23 nt, Human
ugccuccccaacccugccccugc

SEQ ID NO: 3544154 - RNA, 23 nt, Human
ugccuccccauuucccaucugca

SEQ ID NO: 3544155 - RNA, 11 nt, Human
ugccuccccuc

SEQ ID NO: 3544156 - RNA, 12 nt, Human
ugccuccccucc

SEQ ID NO: 3544157 - RNA, 22 nt, Human
ugccuccccuccucugcuugcc

SEQ ID NO: 3544158 - RNA, 13 nt, Human
ugccuccccugug

SEQ ID NO: 3544159 - RNA, 17 nt, Human
ugccucccucacccuga

SEQ ID NO: 3544160 - RNA, 21 nt, Human
ugccucccucacccugagccc

SEQ ID NO: 3544161 - RNA, 18 nt, Human
ugccucccuccccagugc

SEQ ID NO: 3544162 - RNA, 19 nt, Human
gugcccugcucgguggcag

SEQ ID NO: 3544163 - RNA, 19 nt, Human
gugcccuggaugcccagga

SEQ ID NO: 3544164 - RNA, 20 nt, Human
gugcccuuccugcugcgcag

SEQ ID NO: 3544165 - RNA, 16 nt, Human
gugcccuuggaggcca

SEQ ID NO: 3544166 - RNA, 14 nt, Human
gugccgacagaagg

SEQ ID NO: 3544167 - RNA, 13 nt, Human
gugccgccugccc

SEQ ID NO: 3544168 - RNA, 14 nt, Human
gugccgccugcccg

SEQ ID NO: 3544169 - RNA, 14 nt, Human
gugccguggcacca

SEQ ID NO: 3544170 - RNA, 22 nt, Human
gugccguguccccugacagggc

SEQ ID NO: 3544171 - RNA, 15 nt, Human
gugccgugugagugu

SEQ ID NO: 3544172 - RNA, 20 nt, Human
gugccgugugagugugacag

SEQ ID NO: 3544173 - RNA, 15 nt, Human
gugccguuacucucc

SEQ ID NO: 3544174 - RNA, 22 nt, Human
gugccguuacucuccaaccugg

SEQ ID NO: 3544175 - RNA, 17 nt, Human
gugccuaaaauaagaau

SEQ ID NO: 3544176 - RNA, 21 nt, Human
gugccuaggauugugccugua

SEQ ID NO: 3544177 - RNA, 14 nt, Human
gugccuaggccugg

SEQ ID NO: 3544178 - RNA, 18 nt, Human
gugccuauagucccagcu

SEQ ID NO: 3544179 - RNA, 20 nt, Human
gugccuauugcuagagcucc

SEQ ID NO: 3544180 - RNA, 22 nt, Human
gugccucacauuuuuuucuacc

SEQ ID NO: 3544181 - RNA, 20 nt, Human
gugccucagagaccagggcu

SEQ ID NO: 3544182 - RNA, 14 nt, Human
gugccucauugcuu

SEQ ID NO: 3544183 - RNA, 20 nt, Human
gugccuccaccaccacuggc

SEQ ID NO: 3544184 - RNA, 20 nt, Human
gugccucccuccccagugca

SEQ ID NO: 3544185 - RNA, 15 nt, Human
gugccucccugguga

SEQ ID NO: 3544186 - RNA, 22 nt, Human
gugccuccugacacaccugcag

SEQ ID NO: 3544187 - RNA, 13 nt, Human
gugccuccuucca

SEQ ID NO: 3544188 - RNA, 21 nt, Human
gugccuccuuccaccucccuc

SEQ ID NO: 3544189 - RNA, 21 nt, Human
gugccucgcuccccacucugc

SEQ ID NO: 3544190 - RNA, 13 nt, Human
gugccucuagcug

SEQ ID NO: 3544191 - RNA, 14 nt, Human
gugccucucccugc

SEQ ID NO: 3544192 - RNA, 16 nt, Human
gugccucucccugcug

SEQ ID NO: 3544193 - RNA, 12 nt, Human
gugccucugccu

SEQ ID NO: 3544194 - RNA, 13 nt, Human
gugccucugggac

SEQ ID NO: 3544195 - RNA, 15 nt, Human
gugccucugggacug

SEQ ID NO: 3544196 - RNA, 14 nt, Human
gugccugagaggca

SEQ ID NO: 3544197 - RNA, 20 nt, Human
gugccugauccagccucucc

SEQ ID NO: 3544198 - RNA, 23 nt, Human
gugccugauccagccucuccccu

SEQ ID NO: 3544199 - RNA, 19 nt, Human
gugccugauucggcugucu

SEQ ID NO: 3544200 - RNA, 15 nt, Human
gugccugcaccagga

SEQ ID NO: 3544201 - RNA, 19 nt, Human
gugccugcaccaggagaca

SEQ ID NO: 3544202 - RNA, 23 nt, Human
gugccugcuucagccucccacag

SEQ ID NO: 3544203 - RNA, 19 nt, Human
gugccuggagcuccuggga

SEQ ID NO: 3544204 - RNA, 15 nt, Human
gugccuggccuggca

SEQ ID NO: 3544205 - RNA, 14 nt, Human
gugccuggcucaga

SEQ ID NO: 3544206 - RNA, 18 nt, Human
gugccuggcucagagcca

SEQ ID NO: 3544207 - RNA, 16 nt, Human
gugccugggggaguuu

SEQ ID NO: 3544208 - RNA, 18 nt, Human
gugccuggguggggcugc

SEQ ID NO: 3544209 - RNA, 21 nt, Human
gugccuguaugcaacaggcac

SEQ ID NO: 3544210 - RNA, 20 nt, Human
gugccugucccacccccacc

SEQ ID NO: 3544211 - RNA, 17 nt, Human
gugccugugaggcaggg

SEQ ID NO: 3544212 - RNA, 13 nt, Human
gugccugugucca

SEQ ID NO: 3544213 - RNA, 14 nt, Human
gugccuuaccuccu

SEQ ID NO: 3544214 - RNA, 18 nt, Human
gugccuuaccuccugccc

SEQ ID NO: 3544215 - RNA, 19 nt, Human
gugccuuaccuccugccca

SEQ ID NO: 3544216 - RNA, 11 nt, Human
gugccuucauu

SEQ ID NO: 3544217 - RNA, 20 nt, Human
gugccuucgcgguggaaggc

SEQ ID NO: 3544218 - RNA, 17 nt, Human
gugccuucuguggggac

SEQ ID NO: 3544219 - RNA, 19 nt, Human
gugccuucuuauucucacu

SEQ ID NO: 3544220 - RNA, 20 nt, Human
gugccuucuucagggccugg

SEQ ID NO: 3544221 - RNA, 19 nt, Human
gugccuugucacgccagac

SEQ ID NO: 3544222 - RNA, 13 nt, Human
gugccuuguuuuu

SEQ ID NO: 3544223 - RNA, 18 nt, Human
gugccuuuauguauuugc

SEQ ID NO: 3544224 - RNA, 18 nt, Human
gugccuuuauuuccacug

SEQ ID NO: 3544225 - RNA, 20 nt, Human
gugccuuuauuuccacugug

SEQ ID NO: 3544226 - RNA, 14 nt, Human
ugcuaccucacugg

SEQ ID NO: 3544227 - RNA, 15 nt, Human
ugcuaccucacuggg

SEQ ID NO: 3544228 - RNA, 16 nt, Human
ugcuaccucacugggg

SEQ ID NO: 3544229 - RNA, 15 nt, Human
ugcuaccucccuugc

SEQ ID NO: 3544230 - RNA, 18 nt, Human
ugcuaccugaucccacuc

SEQ ID NO: 3544231 - RNA, 23 nt, Human
ugcuaccugaucccacuccuagg

SEQ ID NO: 3544232 - RNA, 14 nt, Human
ugcuaccuugcccc

SEQ ID NO: 3544233 - RNA, 16 nt, Human
ugcuacgccugcaugu

SEQ ID NO: 3544234 - RNA, 14 nt, Human
ugcuacgugugauu

SEQ ID NO: 3544235 - RNA, 14 nt, Human
ugcuacuacaaaaa

SEQ ID NO: 3544236 - RNA, 15 nt, Human
ugcuacucuguuccu

SEQ ID NO: 3544237 - RNA, 20 nt, Human
ugcuacugauuguuucauug

SEQ ID NO: 3544238 - RNA, 18 nt, Human
ugcuacuggggaaacugg

SEQ ID NO: 3544239 - RNA, 22 nt, Human
ugcuacuggggaaacuggccau

SEQ ID NO: 3544240 - RNA, 16 nt, Human
ugcuacuuauauaauu

SEQ ID NO: 3544241 - RNA, 17 nt, Human
ugcuacuuugccuuuug

SEQ ID NO: 3544242 - RNA, 14 nt, Human
ugcuagaaauuuuc

SEQ ID NO: 3544243 - RNA, 14 nt, Human
ugcuagaacucccu

SEQ ID NO: 3544244 - RNA, 14 nt, Human
ugcuagaacuuuuu

SEQ ID NO: 3544245 - RNA, 15 nt, Human
ugcuagaagcuguaa

SEQ ID NO: 3544246 - RNA, 17 nt, Human
ugcuagacacauuuuua

SEQ ID NO: 3544247 - RNA, 19 nt, Human
ugcuagacucuagacaaga

SEQ ID NO: 3544248 - RNA, 19 nt, Human
ugcuaggccagagcccacu

SEQ ID NO: 3544249 - RNA, 17 nt, Human
ugcuaggcgagugccag

SEQ ID NO: 3544250 - RNA, 19 nt, Human
ugcuaggcgagugccagga

SEQ ID NO: 3544251 - RNA, 17 nt, Human
ugcuagggaaacuuccc

SEQ ID NO: 3544252 - RNA, 22 nt, Human
ugcuaggucucggacuaagccu

SEQ ID NO: 3544253 - RNA, 23 nt, Human
ugcuagguuaauuccaauuauau

SEQ ID NO: 3544254 - RNA, 12 nt, Human
ugcuaguauuug

SEQ ID NO: 3544255 - RNA, 23 nt, Human
ugcuaguauuugaauuaaaacuu

SEQ ID NO: 3544256 - RNA, 18 nt, Human
ugcuagugagcugggcau

SEQ ID NO: 3544257 - RNA, 17 nt, Human
ugcuauaaucuguuuuu

SEQ ID NO: 3544258 - RNA, 14 nt, Human
ugcuauagccuggg

SEQ ID NO: 3544259 - RNA, 13 nt, Human
ugcuauaguauuu

SEQ ID NO: 3544260 - RNA, 17 nt, Human
ugcuauauugcccaggc

SEQ ID NO: 3544261 - RNA, 23 nt, Human
ugcuaucaugauggaauuucaua

SEQ ID NO: 3544262 - RNA, 22 nt, Human
ugcuauccauuucucauguuuu

SEQ ID NO: 3544263 - RNA, 21 nt, Human
ugcuauccccaucucccugcc

SEQ ID NO: 3544264 - RNA, 22 nt, Human
ugcuauccccaucucccugccu

SEQ ID NO: 3544265 - RNA, 20 nt, Human
ugcuaucggggaagccagac

SEQ ID NO: 3544266 - RNA, 18 nt, Human
ugcuaucucccccagccc

SEQ ID NO: 3544267 - RNA, 20 nt, Human
ugcuaucucccccagcccca

SEQ ID NO: 3544268 - RNA, 16 nt, Human
ugcuaucuuaauuuug

SEQ ID NO: 3544269 - RNA, 16 nt, Human
ugcuaugagcugggga

SEQ ID NO: 3544270 - RNA, 21 nt, Human
ugcuaugauguuaguuuuccu

SEQ ID NO: 3544271 - RNA, 12 nt, Human
ugcuauggggag

SEQ ID NO: 3544272 - RNA, 17 nt, Human
ugcuaugguuuucucca

SEQ ID NO: 3544273 - RNA, 18 nt, Human
ugcuaugucauuucaugu

SEQ ID NO: 3544274 - RNA, 21 nt, Human
ugcuauuaauauuuguuuagu

SEQ ID NO: 3544275 - RNA, 18 nt, Human
ugcuauuacgaaguucaa

SEQ ID NO: 3544276 - RNA, 14 nt, Human
ugcuauuagacugu

SEQ ID NO: 3544277 - RNA, 14 nt, Human
ugcuauucuguccc

SEQ ID NO: 3544278 - RNA, 13 nt, Human
ugcuauugacaau

SEQ ID NO: 3544279 - RNA, 18 nt, Human
ugcuauugacaauaaaau

SEQ ID NO: 3544280 - RNA, 20 nt, Human
ugcuauugacaauaaaauau

SEQ ID NO: 3544281 - RNA, 20 nt, Human
ugcuauuggaggaucaguuu

SEQ ID NO: 3544282 - RNA, 13 nt, Human
ugcuauuguaaau

SEQ ID NO: 3544283 - RNA, 16 nt, Human
ugcuauuuauuuuccu

SEQ ID NO: 3544284 - RNA, 13 nt, Human
ugcuauuugaagu

SEQ ID NO: 3544285 - RNA, 12 nt, Human
ugcuauuuuacu

SEQ ID NO: 3544286 - RNA, 14 nt, Human
ugcuauuuuucauc

SEQ ID NO: 3544287 - RNA, 16 nt, Human
ugcuauuuuuguaaag

SEQ ID NO: 3544288 - RNA, 22 nt, Human
ugcuauuuuuguaaaguuuccg

SEQ ID NO: 3544289 - RNA, 15 nt, Human
ugcucaaaaagaaau

SEQ ID NO: 3544290 - RNA, 21 nt, Human
ugcucaaaauuugaagaauga

SEQ ID NO: 3544291 - RNA, 13 nt, Human
ugcucaaagaaau

SEQ ID NO: 3544292 - RNA, 15 nt, Human
ugcucaaagaaaucu

SEQ ID NO: 3544293 - RNA, 18 nt, Human
ugcucaaaucuauucaga

SEQ ID NO: 3544294 - RNA, 14 nt, Human
ugcucaagaagaca

SEQ ID NO: 3544295 - RNA, 15 nt, Human
ugcucaagaagacau

SEQ ID NO: 3544296 - RNA, 14 nt, Human
ugcucacaccccau

SEQ ID NO: 3544297 - RNA, 15 nt, Human
ugcucacaguaaccc

SEQ ID NO: 3544298 - RNA, 15 nt, Human
ugcucacauaucugu

SEQ ID NO: 3544299 - RNA, 19 nt, Human
ugcucaccgcccaucaggg

SEQ ID NO: 3544300 - RNA, 17 nt, Human
ugcucacuaccuccuca

SEQ ID NO: 3544301 - RNA, 13 nt, Human
ugcucagaacaca

SEQ ID NO: 3544302 - RNA, 17 nt, Human
ugcucagaacuugcugc

SEQ ID NO: 3544303 - RNA, 13 nt, Human
ugcucagacagaa

SEQ ID NO: 3544304 - RNA, 17 nt, Human
ugcucagagcaguguuu

SEQ ID NO: 3544305 - RNA, 20 nt, Human
ugcucagcaaggggcucugc

SEQ ID NO: 3544306 - RNA, 17 nt, Human
ugcucagcagugagagc

SEQ ID NO: 3544307 - RNA, 20 nt, Human
ugcucagcagugagagcaga

SEQ ID NO: 3544308 - RNA, 12 nt, Human
ugcucagccaag

SEQ ID NO: 3544309 - RNA, 14 nt, Human
ugcucagccaagcu

SEQ ID NO: 3544310 - RNA, 12 nt, Human
ugcucagcccug

SEQ ID NO: 3544311 - RNA, 13 nt, Human
ugcucagcccugc

SEQ ID NO: 3544312 - RNA, 14 nt, Human
ugcucagcccugga

SEQ ID NO: 3544313 - RNA, 20 nt, Human
ugcucagcccuggaggugcc

SEQ ID NO: 3544314 - RNA, 21 nt, Human
ugcucagcccuggaggugcca

SEQ ID NO: 3544315 - RNA, 17 nt, Human
ugcucagcucugggcca

SEQ ID NO: 3544316 - RNA, 17 nt, Human
ugcucagcuucuccaac

SEQ ID NO: 3544317 - RNA, 20 nt, Human
ugcucagcuucuccaacaau

SEQ ID NO: 3544318 - RNA, 15 nt, Human
ugcucagcuucuccu

SEQ ID NO: 3544319 - RNA, 21 nt, Human
ugcucagcuucuccuguguga

SEQ ID NO: 3544320 - RNA, 12 nt, Human
ugcucaggcugc

SEQ ID NO: 3544321 - RNA, 19 nt, Human
ugcucaggcuugaaaugca

SEQ ID NO: 3544322 - RNA, 19 nt, Human
ugcucagggaaaagcagcu

SEQ ID NO: 3544323 - RNA, 14 nt, Human
ugcucagggcugac

SEQ ID NO: 3544324 - RNA, 20 nt, Human
ugcucagggucaauuucuuu

SEQ ID NO: 3544325 - RNA, 13 nt, Human
ugcucagguacuu

SEQ ID NO: 3544326 - RNA, 17 nt, Human
ugcucagguacuuguaa

SEQ ID NO: 3544327 - RNA, 16 nt, Human
ugcucaguagucagac

SEQ ID NO: 3544328 - RNA, 14 nt, Human
ugcucagucucccu

SEQ ID NO: 3544329 - RNA, 21 nt, Human
ugcucaguggguaaaauuaga

SEQ ID NO: 3544330 - RNA, 23 nt, Human
ugcucaguggguaaaauuagaug

SEQ ID NO: 3544331 - RNA, 20 nt, Human
ugcucaguguuuuugugaau

SEQ ID NO: 3544332 - RNA, 12 nt, Human
ugcucaguugcu

SEQ ID NO: 3544333 - RNA, 19 nt, Human
ugcucaguugcuaaacacu

SEQ ID NO: 3544334 - RNA, 15 nt, Human
ugcucaguuguagaa

SEQ ID NO: 3544335 - RNA, 20 nt, Human
ugcucaguuguagaauguau

SEQ ID NO: 3544336 - RNA, 21 nt, Human
ugcucauauugugauucugcc

SEQ ID NO: 3544337 - RNA, 23 nt, Human
ugcucauauugugauucugccuu

SEQ ID NO: 3544338 - RNA, 15 nt, Human
ugcucauauuuccca

SEQ ID NO: 3544339 - RNA, 15 nt, Human
ugcucaucauucucu

SEQ ID NO: 3544340 - RNA, 20 nt, Human
ugcucaucauucucugucuc

SEQ ID NO: 3544341 - RNA, 20 nt, Human
ugcucaucucaguccucaaa

SEQ ID NO: 3544342 - RNA, 13 nt, Human
ugcucaucugcug

SEQ ID NO: 3544343 - RNA, 18 nt, Human
ugcucaucugcugguccg

SEQ ID NO: 3544344 - RNA, 16 nt, Human
ugcucaucuguuguag

SEQ ID NO: 3544345 - RNA, 19 nt, Human
ugcucaugggcugugugau

SEQ ID NO: 3544346 - RNA, 17 nt, Human
ugcucauuaugccacuu

SEQ ID NO: 3544347 - RNA, 21 nt, Human
ugcucauucuaaugauggccc

SEQ ID NO: 3544348 - RNA, 14 nt, Human
ugcuccaagauucu

SEQ ID NO: 3544349 - RNA, 16 nt, Human
ugcuccaagauucuag

SEQ ID NO: 3544350 - RNA, 18 nt, Human
ugcuccaagauucuagau

SEQ ID NO: 3544351 - RNA, 12 nt, Human
ugcuccacagug

SEQ ID NO: 3544352 - RNA, 22 nt, Human
ugcuccaccccacucacagaga

SEQ ID NO: 3544353 - RNA, 16 nt, Human
ugcuccacccuuggcc

SEQ ID NO: 3544354 - RNA, 17 nt, Human
ugcuccacccuuggccu

SEQ ID NO: 3544355 - RNA, 18 nt, Human
ugcuccacccuuggccug

SEQ ID NO: 3544356 - RNA, 19 nt, Human
ugcuccagaauuuggaaau

SEQ ID NO: 3544357 - RNA, 20 nt, Human
ugcuccagaauuuggaaauc

SEQ ID NO: 3544358 - RNA, 21 nt, Human
ugcuccagaauuuggaaaucc

SEQ ID NO: 3544359 - RNA, 19 nt, Human
ugcuccagccaaccccugu

SEQ ID NO: 3544360 - RNA, 17 nt, Human
ugcuccagccuggcucc

SEQ ID NO: 3544361 - RNA, 12 nt, Human
ugcuccagcucu

SEQ ID NO: 3544362 - RNA, 13 nt, Human
ugcuccagcucug

SEQ ID NO: 3544363 - RNA, 19 nt, Human
ugcuccagcucuggcaugg

SEQ ID NO: 3544364 - RNA, 16 nt, Human
ugcuccagcuguucag

SEQ ID NO: 3544365 - RNA, 21 nt, Human
ugcuccagcuguucagcuggu

SEQ ID NO: 3544366 - RNA, 13 nt, Human
ugcuccaggccug

SEQ ID NO: 3544367 - RNA, 14 nt, Human
ugcuccaggccugc

SEQ ID NO: 3544368 - RNA, 16 nt, Human
ugcuccaggccugcag

SEQ ID NO: 3544369 - RNA, 15 nt, Human
ugcuccauccuccug

SEQ ID NO: 3544370 - RNA, 21 nt, Human
ugcucccaaggggccugagca

SEQ ID NO: 3544371 - RNA, 13 nt, Human
guggcucuccagu

SEQ ID NO: 3544372 - RNA, 15 nt, Human
ugcugacagacacag

SEQ ID NO: 3544373 - RNA, 19 nt, Human
ugcugacagacacaggccc

SEQ ID NO: 3544374 - RNA, 23 nt, Human
ugcugacagacacaggcccggcu

SEQ ID NO: 3544375 - RNA, 18 nt, Human
ugcugacagcugcuccua

SEQ ID NO: 3544376 - RNA, 19 nt, Human
ugcugacccaugggcagga

SEQ ID NO: 3544377 - RNA, 23 nt, Human
ugcugacccaugggcaggagacu

SEQ ID NO: 3544378 - RNA, 13 nt, Human
ugcugacccuccc

SEQ ID NO: 3544379 - RNA, 23 nt, Human
ugcugaccugcugaccugugcac

SEQ ID NO: 3544380 - RNA, 14 nt, Human
ugcugacggccagg

SEQ ID NO: 3544381 - RNA, 12 nt, Human
ugggcugagccc

SEQ ID NO: 3544382 - RNA, 16 nt, Human
ugggcugagcccuggc

SEQ ID NO: 3544383 - RNA, 11 nt, Human
ugggcugaggg

SEQ ID NO: 3544384 - RNA, 18 nt, Human
ugggcugcacucugugcc

SEQ ID NO: 3544385 - RNA, 19 nt, Human
ugggcugcacucugugccc

SEQ ID NO: 3544386 - RNA, 21 nt, Human
ugggcugcacucugugcccau

SEQ ID NO: 3544387 - RNA, 15 nt, Human
ugggcugcccuggug

SEQ ID NO: 3544388 - RNA, 19 nt, Human
ugggcugcccuggugcugc

SEQ ID NO: 3544389 - RNA, 20 nt, Human
ugggcugcccuggugcugcc

SEQ ID NO: 3544390 - RNA, 23 nt, Human
ugggcugcccuggugcugccaca

SEQ ID NO: 3544391 - RNA, 12 nt, Human
ugggcuggacuu

SEQ ID NO: 3544392 - RNA, 19 nt, Human
ugggcuggcucccucuugg

SEQ ID NO: 3544393 - RNA, 21 nt, Human
ugggcugggcccucucuucuc

SEQ ID NO: 3544394 - RNA, 18 nt, Human
ugggcuggggccugaugg

SEQ ID NO: 3544395 - RNA, 19 nt, Human
ugggcuggguucuacccag

SEQ ID NO: 3544396 - RNA, 20 nt, Human
ugggcugguaucucagaaag

SEQ ID NO: 3544397 - RNA, 23 nt, Human
ugggcugguaucucagaaagugc

SEQ ID NO: 3544398 - RNA, 19 nt, Human
ugggcugguggcucccgga

SEQ ID NO: 3544399 - RNA, 20 nt, Human
ugggcuguaacguggcacug

SEQ ID NO: 3544400 - RNA, 22 nt, Human
ugggcugugaguguaaguguga

SEQ ID NO: 3544401 - RNA, 14 nt, Human
ugggcuuaagaaau

SEQ ID NO: 3544402 - RNA, 13 nt, Human
ugggcuuauaucu

SEQ ID NO: 3544403 - RNA, 20 nt, Human
ugggcuuauaucuggccucu

SEQ ID NO: 3544404 - RNA, 22 nt, Human
ugggcuucagccuaguggcuug

SEQ ID NO: 3544405 - RNA, 17 nt, Human
ugggcuucagcugccag

SEQ ID NO: 3544406 - RNA, 15 nt, Human
ugggcuucaguggca

SEQ ID NO: 3544407 - RNA, 18 nt, Human
ugggcuucaguggcagcu

SEQ ID NO: 3544408 - RNA, 19 nt, Human
ugggcuucaguggcagcug

SEQ ID NO: 3544409 - RNA, 22 nt, Human
ugggcuucaguggcagcugcuu

SEQ ID NO: 3544410 - RNA, 14 nt, Human
ugggcuucccaagg

SEQ ID NO: 3544411 - RNA, 21 nt, Human
ugggcuucccaguggcugcug

SEQ ID NO: 3544412 - RNA, 22 nt, Human
ugggcuucccaguggcugcugc

SEQ ID NO: 3544413 - RNA, 14 nt, Human
ugggcuugauucug

SEQ ID NO: 3544414 - RNA, 14 nt, Human
ugggcuugcugugg

SEQ ID NO: 3544415 - RNA, 16 nt, Human
ugggcuuggccugcug

SEQ ID NO: 3544416 - RNA, 22 nt, Human
ugggcuugggccuaggcugcau

SEQ ID NO: 3544417 - RNA, 21 nt, Human
ugggcuuggggaccagagcug

SEQ ID NO: 3544418 - RNA, 18 nt, Human
ugggcuuguggggccugg

SEQ ID NO: 3544419 - RNA, 19 nt, Human
ugggcuuguggggccuggg

SEQ ID NO: 3544420 - RNA, 14 nt, Human
ugggcuuguuuucu

SEQ ID NO: 3544421 - RNA, 16 nt, Human
ugggcuuugauuucca

SEQ ID NO: 3544422 - RNA, 22 nt, Human
ugggcuuuuuuuuucucuuucu

SEQ ID NO: 3544423 - RNA, 14 nt, Human
uggggaaaccuaga

SEQ ID NO: 3544424 - RNA, 18 nt, Human
uggggaaagacacugccu

SEQ ID NO: 3544425 - RNA, 20 nt, Human
uggggaaagacacugccugg

SEQ ID NO: 3544426 - RNA, 22 nt, Human
uggggaaagacacugccugggc

SEQ ID NO: 3544427 - RNA, 11 nt, Human
uggggaaaggg

SEQ ID NO: 3544428 - RNA, 15 nt, Human
uggggaacaagggug

SEQ ID NO: 3544429 - RNA, 17 nt, Human
uggggaagacaguggcc

SEQ ID NO: 3544430 - RNA, 24 nt, Human
uggggaagacuguggcugcuagca

SEQ ID NO: 3544431 - RNA, 11 nt, Human
uggggaagagu

SEQ ID NO: 3544432 - RNA, 20 nt, Human
uggggacaggggcaggagga

SEQ ID NO: 3544433 - RNA, 15 nt, Human
uggggaccagcagcc

SEQ ID NO: 3544434 - RNA, 14 nt, Human
uggggacccaggcu

SEQ ID NO: 3544435 - RNA, 17 nt, Human
uggggaccucaggccug

SEQ ID NO: 3544436 - RNA, 21 nt, Human
uggggacgcuccgcugccgug

SEQ ID NO: 3544437 - RNA, 22 nt, Human
uggggacggggggccccaguca

SEQ ID NO: 3544438 - RNA, 23 nt, Human
uggggacuccggcugugcuggga

SEQ ID NO: 3544439 - RNA, 17 nt, Human
uggggagacaccucaga

SEQ ID NO: 3544440 - RNA, 22 nt, Human
uggggagaggaacuccuuggcc

SEQ ID NO: 3544441 - RNA, 14 nt, Human
uggggagauuugcc

SEQ ID NO: 3544442 - RNA, 15 nt, Human
uggggagcagagaca

SEQ ID NO: 3544443 - RNA, 19 nt, Human
uggggagcccgucucagug

SEQ ID NO: 3544444 - RNA, 21 nt, Human
uggggagcccgucucaguguu

SEQ ID NO: 3544445 - RNA, 19 nt, Human
uggggagcgggucugcucc

SEQ ID NO: 3544446 - RNA, 20 nt, Human
uggggagcgggucugcuccc

SEQ ID NO: 3544447 - RNA, 12 nt, Human
uggggaggacaa

SEQ ID NO: 3544448 - RNA, 15 nt, Human
uggggaggacaaaac

SEQ ID NO: 3544449 - RNA, 13 nt, Human
uggggaggaccug

SEQ ID NO: 3544450 - RNA, 23 nt, Human
uggggaggcggacguuccagccg

SEQ ID NO: 3544451 - RNA, 18 nt, Human
uggggagggauucugguu

SEQ ID NO: 3544452 - RNA, 12 nt, Human
uggggaggggcg

SEQ ID NO: 3544453 - RNA, 21 nt, Human
uggggaggggcgcuggcccag

SEQ ID NO: 3544454 - RNA, 17 nt, Human
uggggaguggggguggg

SEQ ID NO: 3544455 - RNA, 17 nt, Human
uggggaguuaagaccug

SEQ ID NO: 3544456 - RNA, 20 nt, Human
uggggaguuaagaccuggca

SEQ ID NO: 3544457 - RNA, 20 nt, Human
uggggaguuuaggguggggg

SEQ ID NO: 3544458 - RNA, 17 nt, Human
uggggauaaaggagaag

SEQ ID NO: 3544459 - RNA, 17 nt, Human
uggggauagaugugugg

SEQ ID NO: 3544460 - RNA, 20 nt, Human
uggggauagauguguggaca

SEQ ID NO: 3544461 - RNA, 18 nt, Human
uggggaucaaaguucugc

SEQ ID NO: 3544462 - RNA, 15 nt, Human
uggggaucacagaga

SEQ ID NO: 3544463 - RNA, 14 nt, Human
uggggaucucaggg

SEQ ID NO: 3544464 - RNA, 18 nt, Human
uggggaucucaggggcug

SEQ ID NO: 3544465 - RNA, 15 nt, Human
uggggaugagaaagg

SEQ ID NO: 3544466 - RNA, 23 nt, Human
uggggaugagaaagguugaagca

SEQ ID NO: 3544467 - RNA, 14 nt, Human
uggggaugugggag

SEQ ID NO: 3544468 - RNA, 16 nt, Human
uggggaugugggaggg

SEQ ID NO: 3544469 - RNA, 20 nt, Human
uggggauucagauuucucuu

SEQ ID NO: 3544470 - RNA, 20 nt, Human
uggggauucuuaaaguugaa

SEQ ID NO: 3544471 - RNA, 19 nt, Human
uggggcaagucccugacuc

SEQ ID NO: 3544472 - RNA, 11 nt, Human
uggggcacagu

SEQ ID NO: 3544473 - RNA, 15 nt, Human
uggggcacaguccag

SEQ ID NO: 3544474 - RNA, 13 nt, Human
uggggcagcacag

SEQ ID NO: 3544475 - RNA, 16 nt, Human
uggggcagcacagaga

SEQ ID NO: 3544476 - RNA, 18 nt, Human
uggggcagcacagagagg

SEQ ID NO: 3544477 - RNA, 22 nt, Human
uggggcagcacagagagggggc

SEQ ID NO: 3544478 - RNA, 20 nt, Human
uggggcagcuccucugucuc

SEQ ID NO: 3544479 - RNA, 13 nt, Human
uggggcagcuuga

SEQ ID NO: 3544480 - RNA, 20 nt, Human
uggggcaggaguagcugagc

SEQ ID NO: 3544481 - RNA, 17 nt, Human
uggggcaggcuggcugg

SEQ ID NO: 3544482 - RNA, 15 nt, Human
uggggcaggcugggc

SEQ ID NO: 3544483 - RNA, 16 nt, Human
uggggcaggcugggcc

SEQ ID NO: 3544484 - RNA, 23 nt, Human
uggggcagugcuuggcccaggag

SEQ ID NO: 3544485 - RNA, 11 nt, Human
uggggcagugg

SEQ ID NO: 3544486 - RNA, 17 nt, Human
uggggcauccugugcca

SEQ ID NO: 3544487 - RNA, 17 nt, Human
uggggccacacagaaac

SEQ ID NO: 3544488 - RNA, 14 nt, Human
uggggccagaucca

SEQ ID NO: 3544489 - RNA, 16 nt, Human
uggggccagauccagc

SEQ ID NO: 3544490 - RNA, 20 nt, Human
uggggccagauccagccugg

SEQ ID NO: 3544491 - RNA, 20 nt, Human
uggggccaggcugggucgcc

SEQ ID NO: 3544492 - RNA, 19 nt, Human
uggggcccuaauucagcca

SEQ ID NO: 3544493 - RNA, 14 nt, Human
uggggcccugccuc

SEQ ID NO: 3544494 - RNA, 16 nt, Human
uggggcccugccuccu

SEQ ID NO: 3544495 - RNA, 21 nt, Human
uggggccuaauaaaacugaug

SEQ ID NO: 3544496 - RNA, 22 nt, Human
uggggccuaauaaaacugaugu

SEQ ID NO: 3544497 - RNA, 21 nt, Human
uggggccuagcgaucucuccu

SEQ ID NO: 3544498 - RNA, 20 nt, Human
uggggccuccagaacucacu

SEQ ID NO: 3544499 - RNA, 12 nt, Human
uggggccucugu

SEQ ID NO: 3544500 - RNA, 17 nt, Human
uggggccugacugcuca

SEQ ID NO: 3544501 - RNA, 14 nt, Human
uggggccugagaga

SEQ ID NO: 3544502 - RNA, 18 nt, Human
uggggccugagagaauug

SEQ ID NO: 3544503 - RNA, 11 nt, Human
uggggccuggc

SEQ ID NO: 3544504 - RNA, 14 nt, Human
uggggccugggaca

SEQ ID NO: 3544505 - RNA, 13 nt, Human
uggggccugggag

SEQ ID NO: 3544506 - RNA, 14 nt, Human
uggggccugguucc

SEQ ID NO: 3544507 - RNA, 20 nt, Human
uggggccuguacugccugcu

SEQ ID NO: 3544508 - RNA, 12 nt, Human
uggggccuuggu

SEQ ID NO: 3544509 - RNA, 14 nt, Human
uggggcgaggcaga

SEQ ID NO: 3544510 - RNA, 15 nt, Human
uggggcgcgugaggc

SEQ ID NO: 3544511 - RNA, 18 nt, Human
uggggcggugagagggga

SEQ ID NO: 3544512 - RNA, 20 nt, Human
uggggcucccagccaggccc

SEQ ID NO: 3544513 - RNA, 23 nt, Human
uggggcucuaggguugcuggagc

SEQ ID NO: 3544514 - RNA, 22 nt, Human
uggggcucucugaguccuggcc

SEQ ID NO: 3544515 - RNA, 13 nt, Human
uggggcucuggga

SEQ ID NO: 3544516 - RNA, 19 nt, Human
guguauuugcuaauuuuua

SEQ ID NO: 3544517 - RNA, 19 nt, Human
guguauuuggaaauaaagu

SEQ ID NO: 3544518 - RNA, 23 nt, Human
guguauuuguauuuuuuugcaag

SEQ ID NO: 3544519 - RNA, 20 nt, Human
guguauuuuauaaaauuaaa

SEQ ID NO: 3544520 - RNA, 16 nt, Human
gugucaaauaaacacu

SEQ ID NO: 3544521 - RNA, 17 nt, Human
gugucaaauaaacacug

SEQ ID NO: 3544522 - RNA, 15 nt, Human
gugucaaccagacag

SEQ ID NO: 3544523 - RNA, 15 nt, Human
gugucaacuucaaca

SEQ ID NO: 3544524 - RNA, 14 nt, Human
gugucaaguggcaa

SEQ ID NO: 3544525 - RNA, 17 nt, Human
gugucaccccagagcca

SEQ ID NO: 3544526 - RNA, 19 nt, Human
gugucaccccagagccaca

SEQ ID NO: 3544527 - RNA, 22 nt, Human
gugucaccccagagccacacau

SEQ ID NO: 3544528 - RNA, 14 nt, Human
gugucaccugaaga

SEQ ID NO: 3544529 - RNA, 22 nt, Human
gugucaccugaagacucauucu

SEQ ID NO: 3544530 - RNA, 22 nt, Human
gugucacucaaggcggugcuug

SEQ ID NO: 3544531 - RNA, 16 nt, Human
gugucacuggcugccu

SEQ ID NO: 3544532 - RNA, 23 nt, Human
gugucacuggcugccuccacucc

SEQ ID NO: 3544533 - RNA, 14 nt, Human
gugucacugucccu

SEQ ID NO: 3544534 - RNA, 17 nt, Human
gugucacugucccuccu

SEQ ID NO: 3544535 - RNA, 19 nt, Human
gugucaggcacugggcaug

SEQ ID NO: 3544536 - RNA, 22 nt, Human
gugucaggcacugggcaugagg

SEQ ID NO: 3544537 - RNA, 19 nt, Human
gugucagguggggcagcuu

SEQ ID NO: 3544538 - RNA, 20 nt, Human
gugucaguggggcucucuga

SEQ ID NO: 3544539 - RNA, 16 nt, Human
gugucauuucauucca

SEQ ID NO: 3544540 - RNA, 17 nt, Human
guguccaaaaccgccag

SEQ ID NO: 3544541 - RNA, 20 nt, Human
ugggggaaagcaaagcacag

SEQ ID NO: 3544542 - RNA, 15 nt, Human
ugggggaaagcacag

SEQ ID NO: 3544543 - RNA, 17 nt, Human
ugggggaagaccuggca

SEQ ID NO: 3544544 - RNA, 22 nt, Human
ugggggaagagcacagcccucc

SEQ ID NO: 3544545 - RNA, 14 nt, Human
ugggggaagcccug

SEQ ID NO: 3544546 - RNA, 16 nt, Human
ugggggaagcccugga

SEQ ID NO: 3544547 - RNA, 15 nt, Human
ugggggacagggcug

SEQ ID NO: 3544548 - RNA, 21 nt, Human
ugggggacuuacaugauucau

SEQ ID NO: 3544549 - RNA, 14 nt, Human
ugggggagagcagg

SEQ ID NO: 3544550 - RNA, 12 nt, Human
ugggggagugga

SEQ ID NO: 3544551 - RNA, 21 nt, Human
ugggggaucacagccucugaa

SEQ ID NO: 3544552 - RNA, 15 nt, Human
ugggggaugcuucau

SEQ ID NO: 3544553 - RNA, 13 nt, Human
ugggggcagaggg

SEQ ID NO: 3544554 - RNA, 16 nt, Human
ugggggcagagggcag

SEQ ID NO: 3544555 - RNA, 18 nt, Human
ugggggcagagggcagag

SEQ ID NO: 3544556 - RNA, 22 nt, Human
ugggggcagccugcguggcuga

SEQ ID NO: 3544557 - RNA, 15 nt, Human
ugggggcagggcugu

SEQ ID NO: 3544558 - RNA, 14 nt, Human
ugggggccaccugc

SEQ ID NO: 3544559 - RNA, 16 nt, Human
ugggggccaccugccu

SEQ ID NO: 3544560 - RNA, 18 nt, Human
ugggggccaccugccugc

SEQ ID NO: 3544561 - RNA, 18 nt, Human
ugggggccccgucucagg

SEQ ID NO: 3544562 - RNA, 22 nt, Human
ugggggccccgucucaggucug

SEQ ID NO: 3544563 - RNA, 21 nt, Human
ugggggccucacuccaggaag

SEQ ID NO: 3544564 - RNA, 16 nt, Human
ugggggccucagugcc

SEQ ID NO: 3544565 - RNA, 19 nt, Human
ugggggccuggcuggcuga

SEQ ID NO: 3544566 - RNA, 17 nt, Human
ugggggcugaggagcag

SEQ ID NO: 3544567 - RNA, 14 nt, Human
ugggggcugcagca

SEQ ID NO: 3544568 - RNA, 14 nt, Human
ugggggcuggccuc

SEQ ID NO: 3544569 - RNA, 18 nt, Human
ugggggcugggcagagga

SEQ ID NO: 3544570 - RNA, 17 nt, Human
uggggggacccagugca

SEQ ID NO: 3544571 - RNA, 16 nt, Human
uggggggagcacccug

SEQ ID NO: 3544572 - RNA, 17 nt, Human
uggggggccaacaccag

SEQ ID NO: 3544573 - RNA, 19 nt, Human
uggggggcugaggugggag

SEQ ID NO: 3544574 - RNA, 21 nt, Human
ugggggggccaaaaggaaaaa

SEQ ID NO: 3544575 - RNA, 23 nt, Human
ugggggggcucccguggccugua

SEQ ID NO: 3544576 - RNA, 24 nt, Human
uggggggugaugagggcagcagcc

SEQ ID NO: 3544577 - RNA, 17 nt, Human
uggggguagcagcugga

SEQ ID NO: 3544578 - RNA, 19 nt, Human
uggggguagggggcuggag

SEQ ID NO: 3544579 - RNA, 21 nt, Human
uggggguagggggcuggagga

SEQ ID NO: 3544580 - RNA, 15 nt, Human
ugggggucugugugu

SEQ ID NO: 3544581 - RNA, 12 nt, Human
ugggggugcauu

SEQ ID NO: 3544582 - RNA, 14 nt, Human
ugggggugccagga

SEQ ID NO: 3544583 - RNA, 15 nt, Human
uggggguggaauaaa

SEQ ID NO: 3544584 - RNA, 18 nt, Human
uggggguggaggcuuccu

SEQ ID NO: 3544585 - RNA, 19 nt, Human
uggggguggaggcuuccug

SEQ ID NO: 3544586 - RNA, 10 nt, Human
uggggguggg

SEQ ID NO: 3544587 - RNA, 16 nt, Human
uggggguggggguagg

SEQ ID NO: 3544588 - RNA, 14 nt, Human
ugggggugggucag

SEQ ID NO: 3544589 - RNA, 15 nt, Human
ugggggugggucaga

SEQ ID NO: 3544590 - RNA, 16 nt, Human
uggggguucaggcccg

SEQ ID NO: 3544591 - RNA, 15 nt, Human
uggggguucuuucuu

SEQ ID NO: 3544592 - RNA, 20 nt, Human
uggggguucuuucuuccucu

SEQ ID NO: 3544593 - RNA, 12 nt, Human
uggggguuuuuu

SEQ ID NO: 3544594 - RNA, 21 nt, Human
ugggguaccaagagacuccuu

SEQ ID NO: 3544595 - RNA, 15 nt, Human
ugggguacccacugc

SEQ ID NO: 3544596 - RNA, 19 nt, Human
ugggguacccacugcucug

SEQ ID NO: 3544597 - RNA, 20 nt, Human
ugggguagcuagaggaacca

SEQ ID NO: 3544598 - RNA, 13 nt, Human
ugggguagggcug

SEQ ID NO: 3544599 - RNA, 21 nt, Human
ugggguagguugggagaaugu

SEQ ID NO: 3544600 - RNA, 19 nt, Human
ugggguauggauucuaaaa

SEQ ID NO: 3544601 - RNA, 20 nt, Human
ugggguauggauucuaaaau

SEQ ID NO: 3544602 - RNA, 22 nt, Human
uggggucaagaaacagccagca

SEQ ID NO: 3544603 - RNA, 16 nt, Human
uggggucacucuggca

SEQ ID NO: 3544604 - RNA, 20 nt, Human
uggggucacucuggcagcuc

SEQ ID NO: 3544605 - RNA, 13 nt, Human
uggggucaugccc

SEQ ID NO: 3544606 - RNA, 16 nt, Human
ugggguccuggggccu

SEQ ID NO: 3544607 - RNA, 23 nt, Human
uggggucucaaaguuugacagga

SEQ ID NO: 3544608 - RNA, 22 nt, Human
uggggucucccucuccugccua

SEQ ID NO: 3544609 - RNA, 14 nt, Human
uggggucugacccc

SEQ ID NO: 3544610 - RNA, 13 nt, Human
uggggucuguaaa

SEQ ID NO: 3544611 - RNA, 16 nt, Human
uggggugacagucauc

SEQ ID NO: 3544612 - RNA, 17 nt, Human
uggggugaugcugggcu

SEQ ID NO: 3544613 - RNA, 11 nt, Human
uggggugcagg

SEQ ID NO: 3544614 - RNA, 13 nt, Human
ugggguggcugca

SEQ ID NO: 3544615 - RNA, 16 nt, Human
ugggguggcugcagcc

SEQ ID NO: 3544616 - RNA, 19 nt, Human
ugggguggcugcagccuca

SEQ ID NO: 3544617 - RNA, 20 nt, Human
uggggugggaggucuugcua

SEQ ID NO: 3544618 - RNA, 12 nt, Human
uggggugggccu

SEQ ID NO: 3544619 - RNA, 16 nt, Human
uggggugggccucugg

SEQ ID NO: 3544620 - RNA, 21 nt, Human
ugggguggggggggugcuggg

SEQ ID NO: 3544621 - RNA, 15 nt, Human
ugggguggguauaaa

SEQ ID NO: 3544622 - RNA, 19 nt, Human
ugggguggguauaaaagau

SEQ ID NO: 3544623 - RNA, 15 nt, Human
uggggugugcuggga

SEQ ID NO: 3544624 - RNA, 19 nt, Human
ugggguucagccccuccuc

SEQ ID NO: 3544625 - RNA, 21 nt, Human
ugggguucagccccuccucug

SEQ ID NO: 3544626 - RNA, 19 nt, Human
ugggguugcaucagaaaug

SEQ ID NO: 3544627 - RNA, 14 nt, Human
ugggguuguguugu

SEQ ID NO: 3544628 - RNA, 15 nt, Human
ugggguuucgcagcc

SEQ ID NO: 3544629 - RNA, 18 nt, Human
ugggguuucgcagccuga

SEQ ID NO: 3544630 - RNA, 19 nt, Human
uggguaaaauuagaugcau

SEQ ID NO: 3544631 - RNA, 15 nt, Human
uggguaaaugcagcg

SEQ ID NO: 3544632 - RNA, 17 nt, Human
uggguacuuguggacac

SEQ ID NO: 3544633 - RNA, 18 nt, Human
uggguacuuguggacaca

SEQ ID NO: 3544634 - RNA, 20 nt, Human
uggguacuuguggacacagc

SEQ ID NO: 3544635 - RNA, 21 nt, Human
uggguagaaagagauacagag

SEQ ID NO: 3544636 - RNA, 14 nt, Human
uggguagacacaca

SEQ ID NO: 3544637 - RNA, 16 nt, Human
uggguagacacacaug

SEQ ID NO: 3544638 - RNA, 16 nt, Human
uggguagccugggugu

SEQ ID NO: 3544639 - RNA, 13 nt, Human
uggguagcuguaa

SEQ ID NO: 3544640 - RNA, 22 nt, Human
uggguagcuguaaggcaugaag

SEQ ID NO: 3544641 - RNA, 23 nt, Human
uggguaggaaagaggaagcaaau

SEQ ID NO: 3544642 - RNA, 21 nt, Human
uggguagugagcagugagcag

SEQ ID NO: 3544643 - RNA, 17 nt, Human
uggguaguggggaagag

SEQ ID NO: 3544644 - RNA, 15 nt, Human
uggguauauucauuu

SEQ ID NO: 3544645 - RNA, 20 nt, Human
uggguaucaagacauagcau

SEQ ID NO: 3544646 - RNA, 21 nt, Human
uggguaucaccacuggagauc

SEQ ID NO: 3544647 - RNA, 21 nt, Human
uggguauuugcaauauuccuu

SEQ ID NO: 3544648 - RNA, 19 nt, Human
ugggucacacacggaggca

SEQ ID NO: 3544649 - RNA, 19 nt, Human
ugggucaccagacggggcu

SEQ ID NO: 3544650 - RNA, 20 nt, Human
ugggucaccagacggggcug

SEQ ID NO: 3544651 - RNA, 18 nt, Human
ugggucaccccuccagga

SEQ ID NO: 3544652 - RNA, 9 nt, Human
ugggucaga

SEQ ID NO: 3544653 - RNA, 17 nt, Human
ugggucagaacccugcc

SEQ ID NO: 3544654 - RNA, 18 nt, Human
ugggucagaacccugcca

SEQ ID NO: 3544655 - RNA, 12 nt, Human
ugggucagucug

SEQ ID NO: 3544656 - RNA, 14 nt, Human
ugggucauagaaau

SEQ ID NO: 3544657 - RNA, 16 nt, Human
ugggucauagaaauuc

SEQ ID NO: 3544658 - RNA, 14 nt, Human
uggguccaaauaaa

SEQ ID NO: 3544659 - RNA, 12 nt, Human
uggguccaggag

SEQ ID NO: 3544660 - RNA, 13 nt, Human
uggguccaggagg

SEQ ID NO: 3544661 - RNA, 14 nt, Human
guuaucgaaauaac

SEQ ID NO: 3544662 - RNA, 12 nt, Human
guuaucucugug

SEQ ID NO: 3544663 - RNA, 13 nt, Human
guuaucucugugu

SEQ ID NO: 3544664 - RNA, 22 nt, Human
guuaucuucucaaguucuaaga

SEQ ID NO: 3544665 - RNA, 17 nt, Human
guuaugaaagaauauau

SEQ ID NO: 3544666 - RNA, 20 nt, Human
guuaugaaauucacccccuu

SEQ ID NO: 3544667 - RNA, 15 nt, Human
guuaugauaaaaaau

SEQ ID NO: 3544668 - RNA, 16 nt, Human
guuaugauaaaaaauu

SEQ ID NO: 3544669 - RNA, 22 nt, Human
guuaugaugugcuuaacaggga

SEQ ID NO: 3544670 - RNA, 20 nt, Human
guuaugauuuuuuuuucaua

SEQ ID NO: 3544671 - RNA, 23 nt, Human
guuauggcagaugacaagauggu

SEQ ID NO: 3544672 - RNA, 20 nt, Human
guuaugguagaaaaauuuca

SEQ ID NO: 3544673 - RNA, 15 nt, Human
guuaugguguuucuc

SEQ ID NO: 3544674 - RNA, 17 nt, Human
guuauguacuaguguuc

SEQ ID NO: 3544675 - RNA, 12 nt, Human
guuauguauuuc

SEQ ID NO: 3544676 - RNA, 13 nt, Human
guuauguauuucc

SEQ ID NO: 3544677 - RNA, 18 nt, Human
guuauguguaugugccau

SEQ ID NO: 3544678 - RNA, 19 nt, Human
guuauguguaugugccauu

SEQ ID NO: 3544679 - RNA, 17 nt, Human
guuauguuuaauaagcu

SEQ ID NO: 3544680 - RNA, 17 nt, Human
guuauguuuuucugugu

SEQ ID NO: 3544681 - RNA, 22 nt, Human
guuauuaaacguaugcauguga

SEQ ID NO: 3544682 - RNA, 12 nt, Human
guuauuaaaugu

SEQ ID NO: 3544683 - RNA, 13 nt, Human
guuauuagauguu

SEQ ID NO: 3544684 - RNA, 19 nt, Human
guuauuagggugguauuua

SEQ ID NO: 3544685 - RNA, 16 nt, Human
guuauuauaauuguau

SEQ ID NO: 3544686 - RNA, 22 nt, Human
guuauucauucugugaucauuu

SEQ ID NO: 3544687 - RNA, 17 nt, Human
guuauuccuugaucauu

SEQ ID NO: 3544688 - RNA, 20 nt, Human
guuauucuaguacuagaaac

SEQ ID NO: 3544689 - RNA, 12 nt, Human
guuauucuuugc

SEQ ID NO: 3544690 - RNA, 13 nt, Human
guuauucuuugca

SEQ ID NO: 3544691 - RNA, 16 nt, Human
guuauugaagcagagu

SEQ ID NO: 3544692 - RNA, 16 nt, Human
guuauugacaaacucu

SEQ ID NO: 3544693 - RNA, 20 nt, Human
guuauugagagagaugugua

SEQ ID NO: 3544694 - RNA, 22 nt, Human
guuauugauaaguucauacauu

SEQ ID NO: 3544695 - RNA, 18 nt, Human
guuauugcaauaaaguau

SEQ ID NO: 3544696 - RNA, 14 nt, Human
guuauugcaguuua

SEQ ID NO: 3544697 - RNA, 16 nt, Human
guuauugcaguuuauc

SEQ ID NO: 3544698 - RNA, 22 nt, Human
guuauugguguaagguacuuuc

SEQ ID NO: 3544699 - RNA, 15 nt, Human
guuauuuaaagaaga

SEQ ID NO: 3544700 - RNA, 23 nt, Human
guuauuucccuacauuaaacaug

SEQ ID NO: 3544701 - RNA, 15 nt, Human
guuauuucugcaaac

SEQ ID NO: 3544702 - RNA, 13 nt, Human
guuauuuguacag

SEQ ID NO: 3544703 - RNA, 14 nt, Human
guuauuuguacagu

SEQ ID NO: 3544704 - RNA, 15 nt, Human
guuauuuuaguuucu

SEQ ID NO: 3544705 - RNA, 14 nt, Human
guuauuuucaguau

SEQ ID NO: 3544706 - RNA, 15 nt, Human
guuauuuucaguauu

SEQ ID NO: 3544707 - RNA, 17 nt, Human
guuauuuucaguauuuu

SEQ ID NO: 3544708 - RNA, 15 nt, Human
guuauuuucuacagu

SEQ ID NO: 3544709 - RNA, 15 nt, Human
guuauuuugauaaca

SEQ ID NO: 3544710 - RNA, 14 nt, Human
guucaaaaagucua

SEQ ID NO: 3544711 - RNA, 13 nt, Human
guucaaaaugucu

SEQ ID NO: 3544712 - RNA, 14 nt, Human
guucaaaaugucug

SEQ ID NO: 3544713 - RNA, 16 nt, Human
guucaaacaauaucau

SEQ ID NO: 3544714 - RNA, 15 nt, Human
guucaaacauuuacc

SEQ ID NO: 3544715 - RNA, 20 nt, Human
guucaaagauauuuugcuuu

SEQ ID NO: 3544716 - RNA, 18 nt, Human
guucaaagucaugauguu

SEQ ID NO: 3544717 - RNA, 13 nt, Human
guucaacaaagaa

SEQ ID NO: 3544718 - RNA, 23 nt, Human
guucaacaaagaaacaaagaugu

SEQ ID NO: 3544719 - RNA, 14 nt, Human
guucaacuauuuua

SEQ ID NO: 3544720 - RNA, 13 nt, Human
guucaagaaauga

SEQ ID NO: 3544721 - RNA, 20 nt, Human
guucaagaucaaaaaggcuu

SEQ ID NO: 3544722 - RNA, 20 nt, Human
guucaagcgauucuucugcu

SEQ ID NO: 3544723 - RNA, 18 nt, Human
guucaaggaaucauuguu

SEQ ID NO: 3544724 - RNA, 18 nt, Human
guucaaggccauccuucc

SEQ ID NO: 3544725 - RNA, 19 nt, Human
guucaaggccauccuuccc

SEQ ID NO: 3544726 - RNA, 21 nt, Human
guucaaggucacuguuuccug

SEQ ID NO: 3544727 - RNA, 12 nt, Human
guucaaguuuug

SEQ ID NO: 3544728 - RNA, 13 nt, Human
guucaaugaucua

SEQ ID NO: 3544729 - RNA, 19 nt, Human
guucaaugaucuagguuua

SEQ ID NO: 3544730 - RNA, 21 nt, Human
guucaaugaucuagguuuaac

SEQ ID NO: 3544731 - RNA, 16 nt, Human
guucaauucucauuug

SEQ ID NO: 3544732 - RNA, 16 nt, Human
guucacacccugcaag

SEQ ID NO: 3544733 - RNA, 11 nt, Human
guucaccagcc

SEQ ID NO: 3544734 - RNA, 19 nt, Human
guucacccaucuuaucaag

SEQ ID NO: 3544735 - RNA, 14 nt, Human
guucaccccuccac

SEQ ID NO: 3544736 - RNA, 16 nt, Human
guucaccccuccaccc

SEQ ID NO: 3544737 - RNA, 23 nt, Human
guucaccuuuguagcacucaggc

SEQ ID NO: 3544738 - RNA, 16 nt, Human
guucacggguggccug

SEQ ID NO: 3544739 - RNA, 15 nt, Human
guucacuaaacucug

SEQ ID NO: 3544740 - RNA, 18 nt, Human
guucacuaaacucugaau

SEQ ID NO: 3544741 - RNA, 20 nt, Human
guucacuaaacucugaauaa

SEQ ID NO: 3544742 - RNA, 13 nt, Human
guucacucuucuc

SEQ ID NO: 3544743 - RNA, 20 nt, Human
guucacucuucucagccacu

SEQ ID NO: 3544744 - RNA, 17 nt, Human
guucacucuuggagccu

SEQ ID NO: 3544745 - RNA, 19 nt, Human
guucacucuuggagccugc

SEQ ID NO: 3544746 - RNA, 12 nt, Human
guucagaaaaaa

SEQ ID NO: 3544747 - RNA, 18 nt, Human
guucagaaaugcugccug

SEQ ID NO: 3544748 - RNA, 19 nt, Human
guucagaaaugcugccugc

SEQ ID NO: 3544749 - RNA, 15 nt, Human
uggacacucagaccu

SEQ ID NO: 3544750 - RNA, 13 nt, Human
uggacacuccagg

SEQ ID NO: 3544751 - RNA, 14 nt, Human
uggacacuccaggg

SEQ ID NO: 3544752 - RNA, 19 nt, Human
uggacacuccagggacaca

SEQ ID NO: 3544753 - RNA, 24 nt, Human
uggacacuccagggacacacagcc

SEQ ID NO: 3544754 - RNA, 21 nt, Human
uggacacuccagugccagcaa

SEQ ID NO: 3544755 - RNA, 17 nt, Human
uggacacuuaauucugu

SEQ ID NO: 3544756 - RNA, 18 nt, Human
uggacacuuaauucuguu

SEQ ID NO: 3544757 - RNA, 23 nt, Human
uggacacuuugaaauguguuucu

SEQ ID NO: 3544758 - RNA, 19 nt, Human
uggacagaggggacucugg

SEQ ID NO: 3544759 - RNA, 22 nt, Human
uggacagauugccuguuucuga

SEQ ID NO: 3544760 - RNA, 20 nt, Human
uggacagcaaaaccauugcu

SEQ ID NO: 3544761 - RNA, 12 nt, Human
uggacagcccca

SEQ ID NO: 3544762 - RNA, 12 nt, Human
uggacagcuugu

SEQ ID NO: 3544763 - RNA, 16 nt, Human
uggacaggcauguucu

SEQ ID NO: 3544764 - RNA, 17 nt, Human
uggacaggucugggaga

SEQ ID NO: 3544765 - RNA, 20 nt, Human
uggacaggucugggagaggc

SEQ ID NO: 3544766 - RNA, 22 nt, Human
uggacaggucugggagaggcag

SEQ ID NO: 3544767 - RNA, 12 nt, Human
uggacaguccug

SEQ ID NO: 3544768 - RNA, 17 nt, Human
uggacaguccugggaga

SEQ ID NO: 3544769 - RNA, 17 nt, Human
uggacagucugcucuag

SEQ ID NO: 3544770 - RNA, 18 nt, Human
uggacaguucacacccug

SEQ ID NO: 3544771 - RNA, 22 nt, Human
uggacaguucacacccugcaag

SEQ ID NO: 3544772 - RNA, 19 nt, Human
uggacauagagagggagaa

SEQ ID NO: 3544773 - RNA, 23 nt, Human
uggacauagagagggagaagaag

SEQ ID NO: 3544774 - RNA, 19 nt, Human
uggacauagauauuuucac

SEQ ID NO: 3544775 - RNA, 14 nt, Human
uggacauccuccuc

SEQ ID NO: 3544776 - RNA, 18 nt, Human
uggacauccuccucccac

SEQ ID NO: 3544777 - RNA, 19 nt, Human
uggacauccucuucugcuu

SEQ ID NO: 3544778 - RNA, 13 nt, Human
uggacaugcacag

SEQ ID NO: 3544779 - RNA, 22 nt, Human
uggacauuguuggcagcauaaa

SEQ ID NO: 3544780 - RNA, 17 nt, Human
uggacauuuagaagaaa

SEQ ID NO: 3544781 - RNA, 22 nt, Human
uggacauuugccuugcuggacg

SEQ ID NO: 3544782 - RNA, 21 nt, Human
uggacauuuggguugguucca

SEQ ID NO: 3544783 - RNA, 17 nt, Human
uggacauuuuaugucuu

SEQ ID NO: 3544784 - RNA, 17 nt, Human
uggacauuuuuucaguc

SEQ ID NO: 3544785 - RNA, 22 nt, Human
uggaccaaaaaccaguauugua

SEQ ID NO: 3544786 - RNA, 21 nt, Human
uggaccaauagggcugagcuc

SEQ ID NO: 3544787 - RNA, 20 nt, Human
uggaccaauuauugauauau

SEQ ID NO: 3544788 - RNA, 15 nt, Human
uggaccacugggcaa

SEQ ID NO: 3544789 - RNA, 21 nt, Human
uggaccacuguuucuugcuug

SEQ ID NO: 3544790 - RNA, 22 nt, Human
uggaccacuguuucuugcuugu

SEQ ID NO: 3544791 - RNA, 18 nt, Human
uggaccaggacaggacca

SEQ ID NO: 3544792 - RNA, 20 nt, Human
uggaccauggaguggcagcc

SEQ ID NO: 3544793 - RNA, 14 nt, Human
uggaccauuuuccu

SEQ ID NO: 3544794 - RNA, 14 nt, Human
uggacccagacaca

SEQ ID NO: 3544795 - RNA, 13 nt, Human
uggaccccagaga

SEQ ID NO: 3544796 - RNA, 13 nt, Human
uggaccccagccu

SEQ ID NO: 3544797 - RNA, 15 nt, Human
uggaccccagcuggg

SEQ ID NO: 3544798 - RNA, 18 nt, Human
uggaccccagcugggagg

SEQ ID NO: 3544799 - RNA, 19 nt, Human
uggaccccagcugggaggc

SEQ ID NO: 3544800 - RNA, 23 nt, Human
uggaccccagcugggaggcaaga

SEQ ID NO: 3544801 - RNA, 22 nt, Human
uggaccccccuuucacaggcag

SEQ ID NO: 3544802 - RNA, 23 nt, Human
uggaccccccuuucacaggcagc

SEQ ID NO: 3544803 - RNA, 14 nt, Human
uggacccugaaaug

SEQ ID NO: 3544804 - RNA, 19 nt, Human
uggacccugaccagcuccc

SEQ ID NO: 3544805 - RNA, 12 nt, Human
uggacccugagg

SEQ ID NO: 3544806 - RNA, 19 nt, Human
uggagagggaaugugaaau

SEQ ID NO: 3544807 - RNA, 21 nt, Human
uggagagggaugaggugcugg

SEQ ID NO: 3544808 - RNA, 15 nt, Human
uggagaguaaaaacu

SEQ ID NO: 3544809 - RNA, 16 nt, Human
uggagagucagaucuu

SEQ ID NO: 3544810 - RNA, 16 nt, Human
uggagagugagcuaca

SEQ ID NO: 3544811 - RNA, 16 nt, Human
uggagauagggaaaga

SEQ ID NO: 3544812 - RNA, 19 nt, Human
uggagauauuuaugggggg

SEQ ID NO: 3544813 - RNA, 23 nt, Human
uggagauauuuauggggggagaa

SEQ ID NO: 3544814 - RNA, 16 nt, Human
uggagauccuccugca

SEQ ID NO: 3544815 - RNA, 14 nt, Human
uggagaugaggcca

SEQ ID NO: 3544816 - RNA, 18 nt, Human
uggagaugaggccagacc

SEQ ID NO: 3544817 - RNA, 15 nt, Human
uggagauggggagaa

SEQ ID NO: 3544818 - RNA, 14 nt, Human
uggagaugguggau

SEQ ID NO: 3544819 - RNA, 22 nt, Human
uggagaugucuucguacaguuc

SEQ ID NO: 3544820 - RNA, 13 nt, Human
uggagauguuuag

SEQ ID NO: 3544821 - RNA, 15 nt, Human
uggagauuauaauaa

SEQ ID NO: 3544822 - RNA, 22 nt, Human
uggagauuugaaggucugcaag

SEQ ID NO: 3544823 - RNA, 15 nt, Human
uggagcaaagcugau

SEQ ID NO: 3544824 - RNA, 18 nt, Human
uggagcaaucacagauga

SEQ ID NO: 3544825 - RNA, 15 nt, Human
uggagcacaaaauuc

SEQ ID NO: 3544826 - RNA, 16 nt, Human
uggagcacaaaauuca

SEQ ID NO: 3544827 - RNA, 17 nt, Human
uggagcacaaaauucaa

SEQ ID NO: 3544828 - RNA, 22 nt, Human
uggagcacaauaaauggcugua

SEQ ID NO: 3544829 - RNA, 21 nt, Human
uggagcacucugaguuuacca

SEQ ID NO: 3544830 - RNA, 12 nt, Human
uggagcacuggg

SEQ ID NO: 3544831 - RNA, 15 nt, Human
uggagcagaagcagc

SEQ ID NO: 3544832 - RNA, 20 nt, Human
uggagcagagcaagucugca

SEQ ID NO: 3544833 - RNA, 21 nt, Human
uggagcagagcaagucugcag

SEQ ID NO: 3544834 - RNA, 12 nt, Human
uggagcagaggg

SEQ ID NO: 3544835 - RNA, 17 nt, Human
uggagcagaggggcuga

SEQ ID NO: 3544836 - RNA, 19 nt, Human
uggagcagccuggagaccc

SEQ ID NO: 3544837 - RNA, 18 nt, Human
uggagcaggacucuauuu

SEQ ID NO: 3544838 - RNA, 22 nt, Human
uggagcaggcgguggggagaga

SEQ ID NO: 3544839 - RNA, 22 nt, Human
uggagcaguacaugggaaagga

SEQ ID NO: 3544840 - RNA, 17 nt, Human
uggagcaugggccuggc

SEQ ID NO: 3544841 - RNA, 18 nt, Human
uggagcaugggccuggcc

SEQ ID NO: 3544842 - RNA, 17 nt, Human
uggagcauuucucauca

SEQ ID NO: 3544843 - RNA, 21 nt, Human
uggagcauuucucaucaguag

SEQ ID NO: 3544844 - RNA, 15 nt, Human
uggagccaaguccag

SEQ ID NO: 3544845 - RNA, 16 nt, Human
uggagccacuaacuag

SEQ ID NO: 3544846 - RNA, 23 nt, Human
uggagcccagaggagggcagcag

SEQ ID NO: 3544847 - RNA, 18 nt, Human
uggagcccaggcgggagc

SEQ ID NO: 3544848 - RNA, 15 nt, Human
uggagcccagggagc

SEQ ID NO: 3544849 - RNA, 20 nt, Human
uggagcccagggagcggaaa

SEQ ID NO: 3544850 - RNA, 14 nt, Human
uggagcccagggca

SEQ ID NO: 3544851 - RNA, 14 nt, Human
uggagccccacacu

SEQ ID NO: 3544852 - RNA, 18 nt, Human
uggagccccacugcccuu

SEQ ID NO: 3544853 - RNA, 15 nt, Human
uggagccccagcccc

SEQ ID NO: 3544854 - RNA, 16 nt, Human
uggagcccgcaccccc

SEQ ID NO: 3544855 - RNA, 13 nt, Human
uggagcccuggag

SEQ ID NO: 3544856 - RNA, 14 nt, Human
uggagcccuggaga

SEQ ID NO: 3544857 - RNA, 15 nt, Human
uggagcccuuggguu

SEQ ID NO: 3544858 - RNA, 23 nt, Human
uggagccugcacggugaauggcu

SEQ ID NO: 3544859 - RNA, 16 nt, Human
uggagccugcagagcu

SEQ ID NO: 3544860 - RNA, 19 nt, Human
uggagccuggcacaggacu

SEQ ID NO: 3544861 - RNA, 21 nt, Human
uggagccuggcacaggacuga

SEQ ID NO: 3544862 - RNA, 12 nt, Human
uggagccugugu

SEQ ID NO: 3544863 - RNA, 14 nt, Human
uggagccuguguaa

SEQ ID NO: 3544864 - RNA, 16 nt, Human
uggagccuguguaaca

SEQ ID NO: 3544865 - RNA, 20 nt, Human
uggagccuguguaacagcuc

SEQ ID NO: 3544866 - RNA, 19 nt, Human
uggagccuuugaauaaaaa

SEQ ID NO: 3544867 - RNA, 16 nt, Human
uggagcgcaccugccc

SEQ ID NO: 3544868 - RNA, 15 nt, Human
uggagcguggacugg

SEQ ID NO: 3544869 - RNA, 22 nt, Human
uggagcucagccccgagcuguc

SEQ ID NO: 3544870 - RNA, 15 nt, Human
uggagcuccagccug

SEQ ID NO: 3544871 - RNA, 12 nt, Human
uggagcuccugg

SEQ ID NO: 3544872 - RNA, 20 nt, Human
uggagcuccugggaaggcua

SEQ ID NO: 3544873 - RNA, 14 nt, Human
uggagcucguggaa

SEQ ID NO: 3544874 - RNA, 21 nt, Human
uggagcugaggacucucacga

SEQ ID NO: 3544875 - RNA, 19 nt, Human
uggagcuuaagccacugcc

SEQ ID NO: 3544876 - RNA, 20 nt, Human
uggagcuuaagccacugccu

SEQ ID NO: 3544877 - RNA, 22 nt, Human
uggagcuuaagccacugccucu

SEQ ID NO: 3544878 - RNA, 23 nt, Human
uggagcuucucuuuaacucagga

SEQ ID NO: 3544879 - RNA, 19 nt, Human
uggaggaacacuugaugga

SEQ ID NO: 3544880 - RNA, 23 nt, Human
uggaggaaggaaacccagcucug

SEQ ID NO: 3544881 - RNA, 20 nt, Human
uggaggaaggauuguaaaaa

SEQ ID NO: 3544882 - RNA, 20 nt, Human
uggaggaccaaaaaaauaag

SEQ ID NO: 3544883 - RNA, 16 nt, Human
uggaggaccugagccu

SEQ ID NO: 3544884 - RNA, 17 nt, Human
uggaggaccugagccug

SEQ ID NO: 3544885 - RNA, 19 nt, Human
uggaggacuagaaccugga

SEQ ID NO: 3544886 - RNA, 20 nt, Human
uggaggacuagaaccuggag

SEQ ID NO: 3544887 - RNA, 15 nt, Human
uggaggagagccugg

SEQ ID NO: 3544888 - RNA, 13 nt, Human
uggaggagcagug

SEQ ID NO: 3544889 - RNA, 22 nt, Human
uggaggagcucaggacacuaau

SEQ ID NO: 3544890 - RNA, 13 nt, Human
uggaggaggaagg

SEQ ID NO: 3544891 - RNA, 15 nt, Human
uggaggaggaaggca

SEQ ID NO: 3544892 - RNA, 16 nt, Human
uggaggaggaaggcaa

SEQ ID NO: 3544893 - RNA, 16 nt, Human
uggaggaggagcaggg

SEQ ID NO: 3544894 - RNA, 14 nt, Human
uggaggaggaggca

SEQ ID NO: 3544895 - RNA, 15 nt, Human
uggaggaggaggcaa

SEQ ID NO: 3544896 - RNA, 23 nt, Human
uggaggaggccugggggcaggga

SEQ ID NO: 3544897 - RNA, 21 nt, Human
uggaggauccccuccaagccu

SEQ ID NO: 3544898 - RNA, 20 nt, Human
uggaggcaauccuaccuugc

SEQ ID NO: 3544899 - RNA, 17 nt, Human
uggaggcacacagcugc

SEQ ID NO: 3544900 - RNA, 18 nt, Human
uggaggcacacagcugca

SEQ ID NO: 3544901 - RNA, 22 nt, Human
uggaggcacacagcugcagaga

SEQ ID NO: 3544902 - RNA, 18 nt, Human
uggaggcagccagggcuu

SEQ ID NO: 3544903 - RNA, 22 nt, Human
uggaggcagggccuugcccaga

SEQ ID NO: 3544904 - RNA, 17 nt, Human
uggaggcaggggcuucc

SEQ ID NO: 3544905 - RNA, 18 nt, Human
uggaggcaggggcuuccu

SEQ ID NO: 3544906 - RNA, 20 nt, Human
uggaggcauugaugcaugcu

SEQ ID NO: 3544907 - RNA, 14 nt, Human
uggaggccagccag

SEQ ID NO: 3544908 - RNA, 15 nt, Human
uggaggcccaguuca

SEQ ID NO: 3544909 - RNA, 13 nt, Human
uggaggccccugg

SEQ ID NO: 3544910 - RNA, 16 nt, Human
uggaggccccuggagc

SEQ ID NO: 3544911 - RNA, 21 nt, Human
uggaggcccuccugugcuggg

SEQ ID NO: 3544912 - RNA, 21 nt, Human
uggaggccgggugcucagggc

SEQ ID NO: 3544913 - RNA, 18 nt, Human
uguaacuguuacaguaau

SEQ ID NO: 3544914 - RNA, 17 nt, Human
uguaacuuauguagaua

SEQ ID NO: 3544915 - RNA, 16 nt, Human
uguaacuugcuuaaau

SEQ ID NO: 3544916 - RNA, 17 nt, Human
uguaacuuucugaaaua

SEQ ID NO: 3544917 - RNA, 21 nt, Human
uguaacuuugguuaaaaucuc

SEQ ID NO: 3544918 - RNA, 15 nt, Human
uguaacuuuuguaag

SEQ ID NO: 3544919 - RNA, 16 nt, Human
uguaacuuuuguaaga

SEQ ID NO: 3544920 - RNA, 20 nt, Human
uguaacuuuuguaagacaaa

SEQ ID NO: 3544921 - RNA, 22 nt, Human
uguaagaaaccaaucaagauaa

SEQ ID NO: 3544922 - RNA, 24 nt, Human
uguaagaaaccaaucaagauaaag

SEQ ID NO: 3544923 - RNA, 15 nt, Human
uguaagaaauacaga

SEQ ID NO: 3544924 - RNA, 17 nt, Human
uguaagaaggcaauauu

SEQ ID NO: 3544925 - RNA, 12 nt, Human
uguaagaauaau

SEQ ID NO: 3544926 - RNA, 22 nt, Human
uguaagaauaggcauuaacaca

SEQ ID NO: 3544927 - RNA, 15 nt, Human
uguaagaaucauugu

SEQ ID NO: 3544928 - RNA, 18 nt, Human
uguaagacccuuauugcu

SEQ ID NO: 3544929 - RNA, 18 nt, Human
uguaagagcaccuuccuc

SEQ ID NO: 3544930 - RNA, 18 nt, Human
uguaagaguguagaagca

SEQ ID NO: 3544931 - RNA, 19 nt, Human
uguaagaguguagaagcau

SEQ ID NO: 3544932 - RNA, 20 nt, Human
uguaagaguguagaagcauu

SEQ ID NO: 3544933 - RNA, 21 nt, Human
uguaagaguguagaagcauuc

SEQ ID NO: 3544934 - RNA, 20 nt, Human
uguaagaucguucucugccu

SEQ ID NO: 3544935 - RNA, 21 nt, Human
uguaagauuauagauucuaaa

SEQ ID NO: 3544936 - RNA, 13 nt, Human
uguaagauuuguu

SEQ ID NO: 3544937 - RNA, 21 nt, Human
uguaagauuuguuuuuaaacu

SEQ ID NO: 3544938 - RNA, 23 nt, Human
uguaagauuuguuuuuaaacugu

SEQ ID NO: 3544939 - RNA, 17 nt, Human
uguaagcacucuggaug

SEQ ID NO: 3544940 - RNA, 19 nt, Human
uguaagcaggagagaaauu

SEQ ID NO: 3544941 - RNA, 20 nt, Human
uguaagccaaagaaaugaac

SEQ ID NO: 3544942 - RNA, 21 nt, Human
uguaagccaaagaaaugaaca

SEQ ID NO: 3544943 - RNA, 15 nt, Human
uguaagccugcaagc

SEQ ID NO: 3544944 - RNA, 15 nt, Human
uguaagcucuuugaa

SEQ ID NO: 3544945 - RNA, 14 nt, Human
uguaagcuguuuau

SEQ ID NO: 3544946 - RNA, 16 nt, Human
uguaagcuguuuauuu

SEQ ID NO: 3544947 - RNA, 13 nt, Human
uguaaggaaugau

SEQ ID NO: 3544948 - RNA, 15 nt, Human
uguaaggaaugcuug

SEQ ID NO: 3544949 - RNA, 21 nt, Human
uguaaggauccggaaagaaga

SEQ ID NO: 3544950 - RNA, 22 nt, Human
uggccguugauguuggcuggga

SEQ ID NO: 3544951 - RNA, 21 nt, Human
uggccuaaaacuggccugacu

SEQ ID NO: 3544952 - RNA, 22 nt, Human
uggccuaagaggcugcccuccu

SEQ ID NO: 3544953 - RNA, 18 nt, Human
uggccuagaccagcagac

SEQ ID NO: 3544954 - RNA, 21 nt, Human
uggccuagaccagcagacaga

SEQ ID NO: 3544955 - RNA, 18 nt, Human
uggccuagcccacccugc

SEQ ID NO: 3544956 - RNA, 19 nt, Human
uggccuagcccacccugcu

SEQ ID NO: 3544957 - RNA, 23 nt, Human
uggccuagcccacccugcugccu

SEQ ID NO: 3544958 - RNA, 21 nt, Human
uggccuaggagauaucugagg

SEQ ID NO: 3544959 - RNA, 18 nt, Human
uggccuauccgcugccag

SEQ ID NO: 3544960 - RNA, 15 nt, Human
uggccuaucuccuag

SEQ ID NO: 3544961 - RNA, 16 nt, Human
uggccuaucuccuagg

SEQ ID NO: 3544962 - RNA, 20 nt, Human
uggccuaugcacauauggac

SEQ ID NO: 3544963 - RNA, 20 nt, Human
uggccuauuauauuaaaaua

SEQ ID NO: 3544964 - RNA, 15 nt, Human
uggccucaaagcaag

SEQ ID NO: 3544965 - RNA, 21 nt, Human
uggccucaacccucccucagc

SEQ ID NO: 3544966 - RNA, 22 nt, Human
uggccucaacccucccucagcc

SEQ ID NO: 3544967 - RNA, 23 nt, Human
uggccucaacccucccucagccc

SEQ ID NO: 3544968 - RNA, 17 nt, Human
guuuaauauuuaaacag

SEQ ID NO: 3544969 - RNA, 19 nt, Human
guuuaaucauauaaauaga

SEQ ID NO: 3544970 - RNA, 21 nt, Human
guuuaauccccaguaaaauug

SEQ ID NO: 3544971 - RNA, 20 nt, Human
guuuaaugaagaucuaaaua

SEQ ID NO: 3544972 - RNA, 15 nt, Human
guuuaaugugaacuu

SEQ ID NO: 3544973 - RNA, 21 nt, Human
guuuaaugugaacuuguagcu

SEQ ID NO: 3544974 - RNA, 14 nt, Human
guuuaauuuaaagc

SEQ ID NO: 3544975 - RNA, 15 nt, Human
guuuaauuuaaagcc

SEQ ID NO: 3544976 - RNA, 19 nt, Human
guuuacaaaaucagguaac

SEQ ID NO: 3544977 - RNA, 20 nt, Human
guuuacaaauggacauagga

SEQ ID NO: 3544978 - RNA, 19 nt, Human
guuuacaagcccccccuuc

SEQ ID NO: 3544979 - RNA, 19 nt, Human
guuuacaaguguauaucag

SEQ ID NO: 3544980 - RNA, 23 nt, Human
guuuacaauuuacaaagugugua

SEQ ID NO: 3544981 - RNA, 16 nt, Human
guuuacacucuuugua

SEQ ID NO: 3544982 - RNA, 13 nt, Human
guuuacagaaaaa

SEQ ID NO: 3544983 - RNA, 19 nt, Human
guuuacagcucugacuuua

SEQ ID NO: 3544984 - RNA, 19 nt, Human
guuuacagggagccuccug

SEQ ID NO: 3544985 - RNA, 13 nt, Human
guuuacagugaag

SEQ ID NO: 3544986 - RNA, 15 nt, Human
guuuacaguguuccg

SEQ ID NO: 3544987 - RNA, 14 nt, Human
guuuacaugcuuau

SEQ ID NO: 3544988 - RNA, 11 nt, Human
guuuacaugua

SEQ ID NO: 3544989 - RNA, 18 nt, Human
guuuacauuuaaagcauu

SEQ ID NO: 3544990 - RNA, 17 nt, Human
guuuaccauuuguaaua

SEQ ID NO: 3544991 - RNA, 20 nt, Human
guuuaccauuuguaauaaag

SEQ ID NO: 3544992 - RNA, 17 nt, Human
guuuaccauuuuucauu

SEQ ID NO: 3544993 - RNA, 22 nt, Human
guuuaccugaauaaaugguagu

SEQ ID NO: 3544994 - RNA, 23 nt, Human
guuuaccuuuuaauuaaugaaau

SEQ ID NO: 3544995 - RNA, 16 nt, Human
guuuacuaugccugug

SEQ ID NO: 3544996 - RNA, 15 nt, Human
guuuacucacagcca

SEQ ID NO: 3544997 - RNA, 16 nt, Human
guuuacucacagccag

SEQ ID NO: 3544998 - RNA, 17 nt, Human
guuuacucacagccagc

SEQ ID NO: 3544999 - RNA, 16 nt, Human
guuuacuuaaagauuu

SEQ ID NO: 3545000 - RNA, 17 nt, Human
guuuacuuuucagggca

SEQ ID NO: 3545001 - RNA, 23 nt, Human
guuuagaauugaagguuuuugau

SEQ ID NO: 3545002 - RNA, 22 nt, Human
guuuagaccaaggaacaaaaaa

SEQ ID NO: 3545003 - RNA, 17 nt, Human
guuuagaugaaugucag

SEQ ID NO: 3545004 - RNA, 14 nt, Human
guuuagauuucaag

SEQ ID NO: 3545005 - RNA, 20 nt, Human
guuuagcugacaaaauacuu

SEQ ID NO: 3545006 - RNA, 18 nt, Human
guuuagucuugucucaga

SEQ ID NO: 3545007 - RNA, 18 nt, Human
guuuaguggcucaacauu

SEQ ID NO: 3545008 - RNA, 15 nt, Human
guuuaguguaaaaau

SEQ ID NO: 3545009 - RNA, 17 nt, Human
guuuaguguaaaaauga

SEQ ID NO: 3545010 - RNA, 21 nt, Human
guuuagugugguuuucuguuu

SEQ ID NO: 3545011 - RNA, 16 nt, Human
guuuaguuugcauuua

SEQ ID NO: 3545012 - RNA, 18 nt, Human
guuuauacaguuuuaaag

SEQ ID NO: 3545013 - RNA, 20 nt, Human
guuuauacuccaguguacau

SEQ ID NO: 3545014 - RNA, 21 nt, Human
guuuauagagggccaagacuu

SEQ ID NO: 3545015 - RNA, 15 nt, Human
guuuauaucuccuuu

SEQ ID NO: 3545016 - RNA, 19 nt, Human
guuuauaucucucaugcau

SEQ ID NO: 3545017 - RNA, 18 nt, Human
guuuauauguguugaaaa

SEQ ID NO: 3545018 - RNA, 21 nt, Human
guuuaucagaaagggcagaag

SEQ ID NO: 3545019 - RNA, 19 nt, Human
guuuaucagauacaucacu

SEQ ID NO: 3545020 - RNA, 15 nt, Human
guuuaucaugaagcc

SEQ ID NO: 3545021 - RNA, 15 nt, Human
guuuauccuuucaua

SEQ ID NO: 3545022 - RNA, 15 nt, Human
guuuaucuagaugua

SEQ ID NO: 3545023 - RNA, 13 nt, Human
guuuaugagccag

SEQ ID NO: 3545024 - RNA, 21 nt, Human
guuuaugauaauaaaggcacc

SEQ ID NO: 3545025 - RNA, 15 nt, Human
guuuaugcagugcug

SEQ ID NO: 3545026 - RNA, 18 nt, Human
guuuaugcagugcugcuu

SEQ ID NO: 3545027 - RNA, 18 nt, Human
guuuauggccacauuuaa

SEQ ID NO: 3545028 - RNA, 14 nt, Human
guuuauggccucag

SEQ ID NO: 3545029 - RNA, 19 nt, Human
guuuauguaaacaaaucuu

SEQ ID NO: 3545030 - RNA, 13 nt, Human
guuuaugugugug

SEQ ID NO: 3545031 - RNA, 15 nt, Human
guuuauuaaaugcuu

SEQ ID NO: 3545032 - RNA, 15 nt, Human
guuuauuaaauugca

SEQ ID NO: 3545033 - RNA, 13 nt, Human
guuuauuaacaaa

SEQ ID NO: 3545034 - RNA, 14 nt, Human
guuuauuaaucuua

SEQ ID NO: 3545035 - RNA, 21 nt, Human
guuuauuaaucuuaguguaug

SEQ ID NO: 3545036 - RNA, 20 nt, Human
guuuauuacuuccaugaauu

SEQ ID NO: 3545037 - RNA, 19 nt, Human
guuuauucaaacugaaaag

SEQ ID NO: 3545038 - RNA, 14 nt, Human
guuuauucauaugc

SEQ ID NO: 3545039 - RNA, 17 nt, Human
guuuauucauaugcaua

SEQ ID NO: 3545040 - RNA, 19 nt, Human
guuuauucauaugcauauu

SEQ ID NO: 3545041 - RNA, 15 nt, Human
guuuauucuucuaga

SEQ ID NO: 3545042 - RNA, 16 nt, Human
guuuauucuugaugaa

SEQ ID NO: 3545043 - RNA, 17 nt, Human
guuuauucuugaugaaa

SEQ ID NO: 3545044 - RNA, 21 nt, Human
guuuauugaguuuguagguaa

SEQ ID NO: 3545045 - RNA, 13 nt, Human
guuuauugucaaa

SEQ ID NO: 3545046 - RNA, 22 nt, Human
guuuauuuaacuuuuaguaaag

SEQ ID NO: 3545047 - RNA, 14 nt, Human
guuuauuuaucagu

SEQ ID NO: 3545048 - RNA, 17 nt, Human
guuuauuuauucugcau

SEQ ID NO: 3545049 - RNA, 12 nt, Human
guuuauuuccaa

SEQ ID NO: 3545050 - RNA, 16 nt, Human
guuuauuuuucauauu

SEQ ID NO: 3545051 - RNA, 20 nt, Human
guuucaaaaacacaguguuu

SEQ ID NO: 3545052 - RNA, 17 nt, Human
guuucaaaaacuguauu

SEQ ID NO: 3545053 - RNA, 15 nt, Human
guuucaaaaaucuga

SEQ ID NO: 3545054 - RNA, 23 nt, Human
guuucaaaauaaaaaccaagaag

SEQ ID NO: 3545055 - RNA, 13 nt, Human
guuucaaacuuua

SEQ ID NO: 3545056 - RNA, 14 nt, Human
guuucaaacuuuac

SEQ ID NO: 3545057 - RNA, 16 nt, Human
guuucaaacuuuacua

SEQ ID NO: 3545058 - RNA, 19 nt, Human
guuucaaggcacucuagau

SEQ ID NO: 3545059 - RNA, 12 nt, Human
guuucaauaaag

SEQ ID NO: 3545060 - RNA, 17 nt, Human
guuucaauaaaguuuga

SEQ ID NO: 3545061 - RNA, 14 nt, Human
guuucaaucacugu

SEQ ID NO: 3545062 - RNA, 13 nt, Human
guuucaaugugau

SEQ ID NO: 3545063 - RNA, 22 nt, Human
guuucaauuccaccugcaauca

SEQ ID NO: 3545064 - RNA, 19 nt, Human
guuucacaaggucuuuaaa

SEQ ID NO: 3545065 - RNA, 15 nt, Human
guuucacacaaacaa

SEQ ID NO: 3545066 - RNA, 18 nt, Human
guuucacaguuugaaaua

SEQ ID NO: 3545067 - RNA, 22 nt, Human
guuucaccaugauggccaggcu

SEQ ID NO: 3545068 - RNA, 22 nt, Human
guuucaccauguuggccaggcu

SEQ ID NO: 3545069 - RNA, 21 nt, Human
guuucacccuuaacccaagga

SEQ ID NO: 3545070 - RNA, 22 nt, Human
guuucacccuuaacccaaggag

SEQ ID NO: 3545071 - RNA, 18 nt, Human
guuucagaaauguguuau

SEQ ID NO: 3545072 - RNA, 21 nt, Human
guuucagauauauaucauauu

SEQ ID NO: 3545073 - RNA, 21 nt, Human
guuucagugucaaauaaacac

SEQ ID NO: 3545074 - RNA, 22 nt, Human
guuucagugucaaauaaacacu

SEQ ID NO: 3545075 - RNA, 23 nt, Human
guuucagugucaaauaaacacug

SEQ ID NO: 3545076 - RNA, 18 nt, Human
guuucaguuuguuggaaa

SEQ ID NO: 3545077 - RNA, 21 nt, Human
guuucaguuuguuggaaagua

SEQ ID NO: 3545078 - RNA, 18 nt, Human
guuucauaauuguguacu

SEQ ID NO: 3545079 - RNA, 17 nt, Human
guuucauaggagacaca

SEQ ID NO: 3545080 - RNA, 14 nt, Human
guuucauauuucuu

SEQ ID NO: 3545081 - RNA, 18 nt, Human
guuucauguaauccucaa

SEQ ID NO: 3545082 - RNA, 20 nt, Human
guuucauugcgaaucuuuuu

SEQ ID NO: 3545083 - RNA, 14 nt, Human
guuucauuuugguu

SEQ ID NO: 3545084 - RNA, 15 nt, Human
guuuccaaggagcug

SEQ ID NO: 3545085 - RNA, 14 nt, Human
guuuccacaugcuc

SEQ ID NO: 3545086 - RNA, 16 nt, Human
guuuccagcauuccca

SEQ ID NO: 3545087 - RNA, 14 nt, Human
guuuccauaguuua

SEQ ID NO: 3545088 - RNA, 13 nt, Human
guuucccauaauu

SEQ ID NO: 3545089 - RNA, 19 nt, Human
guuucccaucccacugcuc

SEQ ID NO: 3545090 - RNA, 21 nt, Human
guuuccccacaaaacaaagca

SEQ ID NO: 3545091 - RNA, 20 nt, Human
guuuccccaccagugaauga

SEQ ID NO: 3545092 - RNA, 22 nt, Human
guuuccuaaaauaucugggugg

SEQ ID NO: 3545093 - RNA, 15 nt, Human
guuuccuaaauccaa

SEQ ID NO: 3545094 - RNA, 14 nt, Human
ugucauuuucauua

SEQ ID NO: 3545095 - RNA, 13 nt, Human
ugucauuuuggua

SEQ ID NO: 3545096 - RNA, 19 nt, Human
uguccaaaaccgccagcuc

SEQ ID NO: 3545097 - RNA, 20 nt, Human
uguccaaaaccgccagcucu

SEQ ID NO: 3545098 - RNA, 21 nt, Human
uguccaaaaccgccagcucug

SEQ ID NO: 3545099 - RNA, 22 nt, Human
uguccaaaaccgccagcucugu

SEQ ID NO: 3545100 - RNA, 15 nt, Human
uguccaaaacugccu

SEQ ID NO: 3545101 - RNA, 23 nt, Human
uguccaaaccaaccgcacaugca

SEQ ID NO: 3545102 - RNA, 15 nt, Human
uguccaaacugccua

SEQ ID NO: 3545103 - RNA, 17 nt, Human
uguccaaagaggcugcc

SEQ ID NO: 3545104 - RNA, 18 nt, Human
uguccaaagcagggucug

SEQ ID NO: 3545105 - RNA, 15 nt, Human
uguccaaccuaaccc

SEQ ID NO: 3545106 - RNA, 22 nt, Human
uguccaaccuaaccccuuuccu

SEQ ID NO: 3545107 - RNA, 22 nt, Human
uguccaacuaaaaacaaacccu

SEQ ID NO: 3545108 - RNA, 13 nt, Human
uguccaacuccag

SEQ ID NO: 3545109 - RNA, 23 nt, Human
uguccaacugagaaguaccuuau

SEQ ID NO: 3545110 - RNA, 17 nt, Human
uguccacauagguuuag

SEQ ID NO: 3545111 - RNA, 21 nt, Human
uguccacccaccuaugugcca

SEQ ID NO: 3545112 - RNA, 11 nt, Human
uguccaccccc

SEQ ID NO: 3545113 - RNA, 11 nt, Human
uguccaccugg

SEQ ID NO: 3545114 - RNA, 20 nt, Human
uguccagaagaauauucagg

SEQ ID NO: 3545115 - RNA, 12 nt, Human
uguccagagaca

SEQ ID NO: 3545116 - RNA, 20 nt, Human
uguccagagcugcuuccccg

SEQ ID NO: 3545117 - RNA, 19 nt, Human
uguccagcaccuugugccu

SEQ ID NO: 3545118 - RNA, 20 nt, Human
uguccagcaccuugugccug

SEQ ID NO: 3545119 - RNA, 14 nt, Human
uguccagccugggc

SEQ ID NO: 3545120 - RNA, 16 nt, Human
uguccagcuccaaccu

SEQ ID NO: 3545121 - RNA, 20 nt, Human
uguccagcuccaaccugcaa

SEQ ID NO: 3545122 - RNA, 19 nt, Human
uguccaggcacugcugccc

SEQ ID NO: 3545123 - RNA, 20 nt, Human
uguccaggcacugcugccca

SEQ ID NO: 3545124 - RNA, 19 nt, Human
uguccagggcccugagcuc

SEQ ID NO: 3545125 - RNA, 17 nt, Human
uguccaguaagaucacu

SEQ ID NO: 3545126 - RNA, 20 nt, Human
uguccaguaagaucacuguu

SEQ ID NO: 3545127 - RNA, 13 nt, Human
guuucuauacaaa

SEQ ID NO: 3545128 - RNA, 15 nt, Human
guuucuauacaaaua

SEQ ID NO: 3545129 - RNA, 23 nt, Human
guuucuauacaaauauaaaucuu

SEQ ID NO: 3545130 - RNA, 22 nt, Human
guuucuaugacacaugcaaggu

SEQ ID NO: 3545131 - RNA, 18 nt, Human
guuucuaugcaaaguucu

SEQ ID NO: 3545132 - RNA, 13 nt, Human
guuucuauuuucu

SEQ ID NO: 3545133 - RNA, 19 nt, Human
guuucucagauccuuguuu

SEQ ID NO: 3545134 - RNA, 21 nt, Human
guuucucagauccuuguuuca

SEQ ID NO: 3545135 - RNA, 14 nt, Human
guuucucauucuug

SEQ ID NO: 3545136 - RNA, 15 nt, Human
guuucucauuuguuu

SEQ ID NO: 3545137 - RNA, 18 nt, Human
guuucuccaaacugaagc

SEQ ID NO: 3545138 - RNA, 14 nt, Human
guuucucccaguuc

SEQ ID NO: 3545139 - RNA, 15 nt, Human
guuucucccccuggg

SEQ ID NO: 3545140 - RNA, 23 nt, Human
guuucucugccgcuaccucccuc

SEQ ID NO: 3545141 - RNA, 21 nt, Human
guuucucuucuccccuuccau

SEQ ID NO: 3545142 - RNA, 20 nt, Human
guuucucuugagcuggccuc

SEQ ID NO: 3545143 - RNA, 21 nt, Human
guuucucuuuccuuggcuccc

SEQ ID NO: 3545144 - RNA, 22 nt, Human
guuucucuuugauuauuugcau

SEQ ID NO: 3545145 - RNA, 14 nt, Human
guuucugaaaagaa

SEQ ID NO: 3545146 - RNA, 16 nt, Human
guuucugaaaauucca

SEQ ID NO: 3545147 - RNA, 18 nt, Human
guuucugaaagggacgcu

SEQ ID NO: 3545148 - RNA, 12 nt, Human
guuucugacucu

SEQ ID NO: 3545149 - RNA, 13 nt, Human
guuucugacucug

SEQ ID NO: 3545150 - RNA, 13 nt, Human
guuucugagaaaa

SEQ ID NO: 3545151 - RNA, 17 nt, Human
guuucugagaaaagaac

SEQ ID NO: 3545152 - RNA, 16 nt, Human
guuucugaguuuuacc

SEQ ID NO: 3545153 - RNA, 17 nt, Human
guuucugaguuuuacca

SEQ ID NO: 3545154 - RNA, 20 nt, Human
guuucugcaguagucucugu

SEQ ID NO: 3545155 - RNA, 13 nt, Human
guuucugcccugc

SEQ ID NO: 3545156 - RNA, 14 nt, Human
guuucugccgcagc

SEQ ID NO: 3545157 - RNA, 15 nt, Human
guuucugccgcagcc

SEQ ID NO: 3545158 - RNA, 16 nt, Human
guuucugccucugagg

SEQ ID NO: 3545159 - RNA, 23 nt, Human
guuucuggguccugaagaauuaa

SEQ ID NO: 3545160 - RNA, 21 nt, Human
guuucugguggucuguuggca

SEQ ID NO: 3545161 - RNA, 10 nt, Human
guuucuguac

SEQ ID NO: 3545162 - RNA, 20 nt, Human
guuucuguacuuuuuggcau

SEQ ID NO: 3545163 - RNA, 17 nt, Human
guuucuguccugcuggu

SEQ ID NO: 3545164 - RNA, 22 nt, Human
guuucugucguuaaaaacagau

SEQ ID NO: 3545165 - RNA, 17 nt, Human
guuucugugcauggugg

SEQ ID NO: 3545166 - RNA, 14 nt, Human
guuucuguuauuaa

SEQ ID NO: 3545167 - RNA, 14 nt, Human
guuucuguuuaacu

SEQ ID NO: 3545168 - RNA, 19 nt, Human
guuucuguuuaacuucuua

SEQ ID NO: 3545169 - RNA, 16 nt, Human
guuucuuaauuuggaa

SEQ ID NO: 3545170 - RNA, 11 nt, Human
guuucuuagac

SEQ ID NO: 3545171 - RNA, 11 nt, Human
guuucuuccaa

SEQ ID NO: 3545172 - RNA, 20 nt, Human
guuucuucuaacugccccuc

SEQ ID NO: 3545173 - RNA, 17 nt, Human
guuucuugcaagcaugc

SEQ ID NO: 3545174 - RNA, 13 nt, Human
guuucuugccuca

SEQ ID NO: 3545175 - RNA, 14 nt, Human
guuucuugccucau

SEQ ID NO: 3545176 - RNA, 14 nt, Human
guuucuugcuugua

SEQ ID NO: 3545177 - RNA, 13 nt, Human
guuucuugguaaa

SEQ ID NO: 3545178 - RNA, 17 nt, Human
guuucuuuaagaaagua

SEQ ID NO: 3545179 - RNA, 16 nt, Human
guuucuuuaguuuuug

SEQ ID NO: 3545180 - RNA, 18 nt, Human
guuucuuucaaagaagcc

SEQ ID NO: 3545181 - RNA, 23 nt, Human
guuucuuucuaguggucuuugua

SEQ ID NO: 3545182 - RNA, 17 nt, Human
guuucuuugaauuuuca

SEQ ID NO: 3545183 - RNA, 21 nt, Human
guuucuuuuguauguaaaugu

SEQ ID NO: 3545184 - RNA, 20 nt, Human
guuugaaaacuucagaagca

SEQ ID NO: 3545185 - RNA, 21 nt, Human
guuugaaaacuucagaagcaa

SEQ ID NO: 3545186 - RNA, 15 nt, Human
guuugaaaagcaaua

SEQ ID NO: 3545187 - RNA, 20 nt, Human
guuugaaaagcaauauugua

SEQ ID NO: 3545188 - RNA, 13 nt, Human
guuugaaaauagu

SEQ ID NO: 3545189 - RNA, 16 nt, Human
guuugaaaauaguuua

SEQ ID NO: 3545190 - RNA, 20 nt, Human
guuugaaaugaggucuguuu

SEQ ID NO: 3545191 - RNA, 22 nt, Human
guuugaaauucugaauuugcaa

SEQ ID NO: 3545192 - RNA, 16 nt, Human
guuugaaccaagaacu

SEQ ID NO: 3545193 - RNA, 15 nt, Human
guuugaagccugccc

SEQ ID NO: 3545194 - RNA, 14 nt, Human
guuugaagccugga

SEQ ID NO: 3545195 - RNA, 17 nt, Human
guuugaaggaaacaguu

SEQ ID NO: 3545196 - RNA, 13 nt, Human
guuugaauauaaa

SEQ ID NO: 3545197 - RNA, 19 nt, Human
guuugaauauaaacacuau

SEQ ID NO: 3545198 - RNA, 14 nt, Human
guuugaauguuaaa

SEQ ID NO: 3545199 - RNA, 16 nt, Human
guuugaauguuaaaua

SEQ ID NO: 3545200 - RNA, 16 nt, Human
guuugacggcaagguu

SEQ ID NO: 3545201 - RNA, 16 nt, Human
guuugacuagaugaug

SEQ ID NO: 3545202 - RNA, 15 nt, Human
guuugagaagcacug

SEQ ID NO: 3545203 - RNA, 15 nt, Human
guuugagaugcugua

SEQ ID NO: 3545204 - RNA, 15 nt, Human
guuugagauucucaa

SEQ ID NO: 3545205 - RNA, 13 nt, Human
guuugagcucaga

SEQ ID NO: 3545206 - RNA, 15 nt, Human
guuugagcucagacc

SEQ ID NO: 3545207 - RNA, 16 nt, Human
guuugagcucagaccc

SEQ ID NO: 3545208 - RNA, 23 nt, Human
guuugaggauauauuuucacuuu

SEQ ID NO: 3545209 - RNA, 16 nt, Human
guuugagguuuuuaag

SEQ ID NO: 3545210 - RNA, 20 nt, Human
guuugaucacacuauuuuag

SEQ ID NO: 3545211 - RNA, 14 nt, Human
guuugauccuuguu

SEQ ID NO: 3545212 - RNA, 22 nt, Human
guuugaugcaggcacuuauugu

SEQ ID NO: 3545213 - RNA, 20 nt, Human
guuugaugcauuaaaagaaa

SEQ ID NO: 3545214 - RNA, 18 nt, Human
guuugcaaaaaauguuuu

SEQ ID NO: 3545215 - RNA, 15 nt, Human
guuugcacacuugug

SEQ ID NO: 3545216 - RNA, 15 nt, Human
guuugcaccuguccc

SEQ ID NO: 3545217 - RNA, 23 nt, Human
guuugcacucaaaucuuaagaaa

SEQ ID NO: 3545218 - RNA, 15 nt, Human
guuugcacuuccucu

SEQ ID NO: 3545219 - RNA, 20 nt, Human
guuugcagagcuugaacaca

SEQ ID NO: 3545220 - RNA, 16 nt, Human
guuugcaggggugacg

SEQ ID NO: 3545221 - RNA, 14 nt, Human
guuugccauacuuu

SEQ ID NO: 3545222 - RNA, 22 nt, Human
guuugccauacuuugucugaaa

SEQ ID NO: 3545223 - RNA, 14 nt, Human
guuugccccguucu

SEQ ID NO: 3545224 - RNA, 16 nt, Human
guuugccucugccucu

SEQ ID NO: 3545225 - RNA, 17 nt, Human
guuugccucugccucug

SEQ ID NO: 3545226 - RNA, 18 nt, Human
guuugccuuccuuucucc

SEQ ID NO: 3545227 - RNA, 16 nt, Human
guuugcuaucuuaauu

SEQ ID NO: 3545228 - RNA, 20 nt, Human
guuugcugaacauuggagaa

SEQ ID NO: 3545229 - RNA, 12 nt, Human
guuugcugcuau

SEQ ID NO: 3545230 - RNA, 14 nt, Human
guuugcuuauuguu

SEQ ID NO: 3545231 - RNA, 17 nt, Human
guuugcuuguuucuugg

SEQ ID NO: 3545232 - RNA, 21 nt, Human
guuugcuuucugaucaaggcc

SEQ ID NO: 3545233 - RNA, 17 nt, Human
guuuggaaaaguggcgu

SEQ ID NO: 3545234 - RNA, 18 nt, Human
guuuggaccaaaaaccag

SEQ ID NO: 3545235 - RNA, 18 nt, Human
guuuggaccccagcuggg

SEQ ID NO: 3545236 - RNA, 21 nt, Human
guuuggacugcagaagcaagg

SEQ ID NO: 3545237 - RNA, 13 nt, Human
guuuggagacauu

SEQ ID NO: 3545238 - RNA, 21 nt, Human
guuuggagagagcagacuggc

SEQ ID NO: 3545239 - RNA, 18 nt, Human
ugggauccaggccccucc

SEQ ID NO: 3545240 - RNA, 22 nt, Human
ugggaucccugucuuuccuaag

SEQ ID NO: 3545241 - RNA, 15 nt, Human
ugggauccuccaggu

SEQ ID NO: 3545242 - RNA, 14 nt, Human
ugggaucuaggaga

SEQ ID NO: 3545243 - RNA, 13 nt, Human
ugggaucugacug

SEQ ID NO: 3545244 - RNA, 16 nt, Human
ugggaucugacugcac

SEQ ID NO: 3545245 - RNA, 16 nt, Human
ugggaucugccccucc

SEQ ID NO: 3545246 - RNA, 19 nt, Human
ugggaucugccccucccug

SEQ ID NO: 3545247 - RNA, 16 nt, Human
ugggaugaaacuaaag

SEQ ID NO: 3545248 - RNA, 15 nt, Human
ugggaugaugccuca

SEQ ID NO: 3545249 - RNA, 18 nt, Human
ugggaugauugaagaaac

SEQ ID NO: 3545250 - RNA, 13 nt, Human
ugggauggaggag

SEQ ID NO: 3545251 - RNA, 18 nt, Human
ugggaugguggagggcca

SEQ ID NO: 3545252 - RNA, 21 nt, Human
ugggauucaggaaaaggccug

SEQ ID NO: 3545253 - RNA, 20 nt, Human
ugggauucccaccaaggucu

SEQ ID NO: 3545254 - RNA, 16 nt, Human
ugggauuccugaccca

SEQ ID NO: 3545255 - RNA, 17 nt, Human
ugggauuccugacccag

SEQ ID NO: 3545256 - RNA, 20 nt, Human
ugggauuccugacccaggcc

SEQ ID NO: 3545257 - RNA, 21 nt, Human
ugggauucuggacaggaugug

SEQ ID NO: 3545258 - RNA, 10 nt, Human
ugggauugcu

SEQ ID NO: 3545259 - RNA, 19 nt, Human
ugggauugggggcuggugc

SEQ ID NO: 3545260 - RNA, 22 nt, Human
ugggauuuccagaaccacacuu

SEQ ID NO: 3545261 - RNA, 16 nt, Human
ugggauuuggucaaca

SEQ ID NO: 3545262 - RNA, 18 nt, Human
ugggauuuuaaacuagau

SEQ ID NO: 3545263 - RNA, 14 nt, Human
ugggcaaacaggca

SEQ ID NO: 3545264 - RNA, 15 nt, Human
ugggcaaacaggcag

SEQ ID NO: 3545265 - RNA, 15 nt, Human
ugggcaaagccuagu

SEQ ID NO: 3545266 - RNA, 21 nt, Human
ugggcaacccccagccugcua

SEQ ID NO: 3545267 - RNA, 22 nt, Human
ugggcaauauaaccaauguuua

SEQ ID NO: 3545268 - RNA, 19 nt, Human
ugggcaaugauggcaauuu

SEQ ID NO: 3545269 - RNA, 15 nt, Human
ugggcaauugucuga

SEQ ID NO: 3545270 - RNA, 16 nt, Human
ugggcaauuuagaaaa

SEQ ID NO: 3545271 - RNA, 20 nt, Human
ugggcacaaagggcccagau

SEQ ID NO: 3545272 - RNA, 12 nt, Human
ugggcacacgcu

SEQ ID NO: 3545273 - RNA, 17 nt, Human
ugggcacacgcugcucu

SEQ ID NO: 3545274 - RNA, 21 nt, Human
ugggcacacgcugcucugccc

SEQ ID NO: 3545275 - RNA, 15 nt, Human
ugggcacaucauuuc

SEQ ID NO: 3545276 - RNA, 15 nt, Human
ugggcacaugcucag

SEQ ID NO: 3545277 - RNA, 16 nt, Human
ugggcacaugcucagg

SEQ ID NO: 3545278 - RNA, 16 nt, Human
ugggcaccccacugca

SEQ ID NO: 3545279 - RNA, 15 nt, Human
ugggcacccccagcc

SEQ ID NO: 3545280 - RNA, 17 nt, Human
ugggcaccuggggagug

SEQ ID NO: 3545281 - RNA, 22 nt, Human
ugggcacugcuggguggcccau

SEQ ID NO: 3545282 - RNA, 16 nt, Human
ugggcacuggcccagg

SEQ ID NO: 3545283 - RNA, 22 nt, Human
ugggcacugggaugagccgcug

SEQ ID NO: 3545284 - RNA, 20 nt, Human
ugggcacuucccugcugccu

SEQ ID NO: 3545285 - RNA, 13 nt, Human
ugggcacuugaga

SEQ ID NO: 3545286 - RNA, 15 nt, Human
ugggcacuuuuuaau

SEQ ID NO: 3545287 - RNA, 15 nt, Human
ugggcagaaggccaa

SEQ ID NO: 3545288 - RNA, 18 nt, Human
ugggcagaagggagaagg

SEQ ID NO: 3545289 - RNA, 19 nt, Human
ugggcagaagggagaagga

SEQ ID NO: 3545290 - RNA, 13 nt, Human
ugggcagagccca

SEQ ID NO: 3545291 - RNA, 18 nt, Human
ugggcagagcuggcucug

SEQ ID NO: 3545292 - RNA, 16 nt, Human
ugggcagaggaaagca

SEQ ID NO: 3545293 - RNA, 15 nt, Human
ugggcagaucuaccc

SEQ ID NO: 3545294 - RNA, 22 nt, Human
ugggcagaucucccacaugcca

SEQ ID NO: 3545295 - RNA, 15 nt, Human
ugggcagauuuucag

SEQ ID NO: 3545296 - RNA, 17 nt, Human
ugggcagauuuucagca

SEQ ID NO: 3545297 - RNA, 12 nt, Human
ugggcagcaauu

SEQ ID NO: 3545298 - RNA, 17 nt, Human
ugggcagcaauuuaaau

SEQ ID NO: 3545299 - RNA, 21 nt, Human
ugggcagcaauuuaaauguua

SEQ ID NO: 3545300 - RNA, 12 nt, Human
ugggcagccaga

SEQ ID NO: 3545301 - RNA, 13 nt, Human
ugggcagccagac

SEQ ID NO: 3545302 - RNA, 15 nt, Human
ugggcagccaggcug

SEQ ID NO: 3545303 - RNA, 12 nt, Human
ugggcagcccgc

SEQ ID NO: 3545304 - RNA, 19 nt, Human
ugggcagcucaucucuguc

SEQ ID NO: 3545305 - RNA, 17 nt, Human
ugggcagcugccucccc

SEQ ID NO: 3545306 - RNA, 23 nt, Human
ugggcagcugccuccccuccucu

SEQ ID NO: 3545307 - RNA, 17 nt, Human
ugggcaggacucagcuc

SEQ ID NO: 3545308 - RNA, 22 nt, Human
ugggcaggacucagcuccccag

SEQ ID NO: 3545309 - RNA, 14 nt, Human
ugggcaggagacug

SEQ ID NO: 3545310 - RNA, 15 nt, Human
ugggcaggugguggc

SEQ ID NO: 3545311 - RNA, 17 nt, Human
ugggcaggugguggcac

SEQ ID NO: 3545312 - RNA, 14 nt, Human
ugggcagucauuuu

SEQ ID NO: 3545313 - RNA, 16 nt, Human
ugggcauacuaauaaa

SEQ ID NO: 3545314 - RNA, 15 nt, Human
ugggcaucuuuugua

SEQ ID NO: 3545315 - RNA, 18 nt, Human
ugggcaucuuuuguauua

SEQ ID NO: 3545316 - RNA, 22 nt, Human
ugggcaugagggguuccucccc

SEQ ID NO: 3545317 - RNA, 22 nt, Human
ugggcauggggugggccucugg

SEQ ID NO: 3545318 - RNA, 19 nt, Human
ugggcauugacaaaucugu

SEQ ID NO: 3545319 - RNA, 17 nt, Human
ugggcauugauggggaa

SEQ ID NO: 3545320 - RNA, 13 nt, Human
ugggcauugcuuu

SEQ ID NO: 3545321 - RNA, 20 nt, Human
ugggcauugcuuuccacuga

SEQ ID NO: 3545322 - RNA, 16 nt, Human
ugggcauuugugaggc

SEQ ID NO: 3545323 - RNA, 23 nt, Human
ugggccaacaaagaacacuaacu

SEQ ID NO: 3545324 - RNA, 16 nt, Human
ugggccaacucaccug

SEQ ID NO: 3545325 - RNA, 20 nt, Human
ugggccagaaguaccagacu

SEQ ID NO: 3545326 - RNA, 19 nt, Human
ugggccagacaugccacaa

SEQ ID NO: 3545327 - RNA, 15 nt, Human
ugggccagccccucc

SEQ ID NO: 3545328 - RNA, 22 nt, Human
ugggccagccccucccaccaca

SEQ ID NO: 3545329 - RNA, 13 nt, Human
ugggccaggagcc

SEQ ID NO: 3545330 - RNA, 14 nt, Human
ugggccaggagccu

SEQ ID NO: 3545331 - RNA, 16 nt, Human
ugggccaggagccucc

SEQ ID NO: 3545332 - RNA, 18 nt, Human
ugggccaggagccuccug

SEQ ID NO: 3545333 - RNA, 22 nt, Human
ugggccagggcugcccugagaa

SEQ ID NO: 3545334 - RNA, 13 nt, Human
ugggccagggucu

SEQ ID NO: 3545335 - RNA, 24 nt, Human
ugggccauacuggccucgccuggc

SEQ ID NO: 3545336 - RNA, 16 nt, Human
uaaaaacccacaaaaa

SEQ ID NO: 3545337 - RNA, 17 nt, Human
uaaaaaccgaauaaaug

SEQ ID NO: 3545338 - RNA, 20 nt, Human
uaaaaaccgaauaaauguuu

SEQ ID NO: 3545339 - RNA, 15 nt, Human
uaaaaaccuguucaa

SEQ ID NO: 3545340 - RNA, 14 nt, Human
uaaaaacucaagga

SEQ ID NO: 3545341 - RNA, 23 nt, Human
uaaaaagaaaagauaaagaugau

SEQ ID NO: 3545342 - RNA, 13 nt, Human
uaaaaagaaaggc

SEQ ID NO: 3545343 - RNA, 16 nt, Human
uaaaaagaaaucuggu

SEQ ID NO: 3545344 - RNA, 21 nt, Human
uaaaaagacauucuuccaaaa

SEQ ID NO: 3545345 - RNA, 19 nt, Human
uaaaaagagagaaaacuua

SEQ ID NO: 3545346 - RNA, 14 nt, Human
uaaaaagaucacuu

SEQ ID NO: 3545347 - RNA, 18 nt, Human
uaaaaagauugaaguauu

SEQ ID NO: 3545348 - RNA, 20 nt, Human
uaaaaagauugaaguauuuu

SEQ ID NO: 3545349 - RNA, 11 nt, Human
uaaaaagcaac

SEQ ID NO: 3545350 - RNA, 19 nt, Human
uaaaaagccugcaauuuca

SEQ ID NO: 3545351 - RNA, 22 nt, Human
uaaaaagcuccaaaugcagcuu

SEQ ID NO: 3545352 - RNA, 11 nt, Human
uaaaaagcuga

SEQ ID NO: 3545353 - RNA, 18 nt, Human
uaaaaaggaauaugaaag

SEQ ID NO: 3545354 - RNA, 19 nt, Human
uaaaaaggacaucagcaaa

SEQ ID NO: 3545355 - RNA, 21 nt, Human
uaaaaaggacaucagcaaaca

SEQ ID NO: 3545356 - RNA, 17 nt, Human
uaaaaaggaguauacaa

SEQ ID NO: 3545357 - RNA, 19 nt, Human
uaaaaaggcaccuauaaaa

SEQ ID NO: 3545358 - RNA, 23 nt, Human
uaaaaagguccucacaggugucu

SEQ ID NO: 3545359 - RNA, 19 nt, Human
uaaaaaguaauaaaauuca

SEQ ID NO: 3545360 - RNA, 13 nt, Human
uaaaaaguauaaa

SEQ ID NO: 3545361 - RNA, 16 nt, Human
uaaaaaguauauguua

SEQ ID NO: 3545362 - RNA, 21 nt, Human
uaaaaaguauugccaaacauu

SEQ ID NO: 3545363 - RNA, 18 nt, Human
uaaaaaguauuuuuucaa

SEQ ID NO: 3545364 - RNA, 16 nt, Human
uaaaaagucaauguuu

SEQ ID NO: 3545365 - RNA, 19 nt, Human
uaaaaagucagauguuuga

SEQ ID NO: 3545366 - RNA, 16 nt, Human
uaaaaagucugcauua

SEQ ID NO: 3545367 - RNA, 17 nt, Human
uaaaaagugcuuuugug

SEQ ID NO: 3545368 - RNA, 15 nt, Human
uaaaaaguggaaaaa

SEQ ID NO: 3545369 - RNA, 9 nt, Human
uaaaaaguu

SEQ ID NO: 3545370 - RNA, 20 nt, Human
uaaaaaguuuuaguuuugau

SEQ ID NO: 3545371 - RNA, 18 nt, Human
uaaaaauaaaaaacacug

SEQ ID NO: 3545372 - RNA, 16 nt, Human
uaaaaauaaaaaagau

SEQ ID NO: 3545373 - RNA, 17 nt, Human
uaaaaauaaaaaagauc

SEQ ID NO: 3545374 - RNA, 19 nt, Human
uaaaaauaaaaaagauccc

SEQ ID NO: 3545375 - RNA, 19 nt, Human
uaaaaauaaagcacaaacc

SEQ ID NO: 3545376 - RNA, 15 nt, Human
uaaaaauaacuguaa

SEQ ID NO: 3545377 - RNA, 14 nt, Human
uaaaaauaaggucu

SEQ ID NO: 3545378 - RNA, 15 nt, Human
uaaaaauacaaacaa

SEQ ID NO: 3545379 - RNA, 10 nt, Human
uaaaaauaua

SEQ ID NO: 3545380 - RNA, 12 nt, Human
uaaaaauauaaa

SEQ ID NO: 3545381 - RNA, 15 nt, Human
uaaaaauauaaaacu

SEQ ID NO: 3545382 - RNA, 13 nt, Human
uaaaaauauacau

SEQ ID NO: 3545383 - RNA, 15 nt, Human
uaaaaauauacaugu

SEQ ID NO: 3545384 - RNA, 21 nt, Human
uaaaaauauacauguuuaugu

SEQ ID NO: 3545385 - RNA, 16 nt, Human
ugugucacuugugcuu

SEQ ID NO: 3545386 - RNA, 22 nt, Human
ugugucacuugugcuuugcucu

SEQ ID NO: 3545387 - RNA, 20 nt, Human
ugugucagguggggcagcuu

SEQ ID NO: 3545388 - RNA, 15 nt, Human
ugugucaguuuaugu

SEQ ID NO: 3545389 - RNA, 18 nt, Human
ugugucaguuuauguuuu

SEQ ID NO: 3545390 - RNA, 19 nt, Human
ugugucaguuuauguuuug

SEQ ID NO: 3545391 - RNA, 20 nt, Human
ugugucaucaauaguguccu

SEQ ID NO: 3545392 - RNA, 14 nt, Human
ugugucaugccagu

SEQ ID NO: 3545393 - RNA, 19 nt, Human
uguguccaaaaccgccagc

SEQ ID NO: 3545394 - RNA, 23 nt, Human
uguguccaaaaccgccagcucug

SEQ ID NO: 3545395 - RNA, 16 nt, Human
uguguccaaaacugcc

SEQ ID NO: 3545396 - RNA, 15 nt, Human
uguguccaccguugu

SEQ ID NO: 3545397 - RNA, 19 nt, Human
uguguccacgacugucucc

SEQ ID NO: 3545398 - RNA, 23 nt, Human
ugugucccagaagaugacugagg

SEQ ID NO: 3545399 - RNA, 15 nt, Human
ugugucccucucucu

SEQ ID NO: 3545400 - RNA, 16 nt, Human
ugugucccucucucug

SEQ ID NO: 3545401 - RNA, 21 nt, Human
uguguccuccaggagcuucuu

SEQ ID NO: 3545402 - RNA, 15 nt, Human
uguguccuggugcuc

SEQ ID NO: 3545403 - RNA, 16 nt, Human
uguguccuugugcaug

SEQ ID NO: 3545404 - RNA, 21 nt, Human
ugugucuaaacugcauuaccg

SEQ ID NO: 3545405 - RNA, 22 nt, Human
ugugucuaaauuugaauguuaa

SEQ ID NO: 3545406 - RNA, 15 nt, Human
ugugucuaagauucu

SEQ ID NO: 3545407 - RNA, 17 nt, Human
ugugucucuugguccug

SEQ ID NO: 3545408 - RNA, 20 nt, Human
ugugucucuugguccugcug

SEQ ID NO: 3545409 - RNA, 22 nt, Human
ugugucucuugguccugcugca

SEQ ID NO: 3545410 - RNA, 12 nt, Human
ugugucugagug

SEQ ID NO: 3545411 - RNA, 14 nt, Human
ugugucuguacacg

SEQ ID NO: 3545412 - RNA, 24 nt, Human
ugugucuguauuucauguggcugu

SEQ ID NO: 3545413 - RNA, 19 nt, Human
ugugucuuuaaaugcugcu

SEQ ID NO: 3545414 - RNA, 20 nt, Human
ugugucuuuggaggugcugc

SEQ ID NO: 3545415 - RNA, 16 nt, Human
ugugucuuuugcauga

SEQ ID NO: 3545416 - RNA, 21 nt, Human
ugugugaaagguacuucaaau

SEQ ID NO: 3545417 - RNA, 23 nt, Human
ugugugaagaucacguuccuucc

SEQ ID NO: 3545418 - RNA, 18 nt, Human
ugugugaauaccccaaga

SEQ ID NO: 3545419 - RNA, 12 nt, Human
ugugugaaugaa

SEQ ID NO: 3545420 - RNA, 17 nt, Human
ugugugaaugaacacuc

SEQ ID NO: 3545421 - RNA, 14 nt, Human
ugugugacaauucu

SEQ ID NO: 3545422 - RNA, 12 nt, Human
ugugugaccaac

SEQ ID NO: 3545423 - RNA, 18 nt, Human
ugugugaccccuccuggg

SEQ ID NO: 3545424 - RNA, 16 nt, Human
ugugugagacuacuaa

SEQ ID NO: 3545425 - RNA, 17 nt, Human
ugugugaugaacuuucu

SEQ ID NO: 3545426 - RNA, 16 nt, Human
ugugugauugaaucug

SEQ ID NO: 3545427 - RNA, 19 nt, Human
ugugugauugacagcuuug

SEQ ID NO: 3545428 - RNA, 22 nt, Human
ugugugcaacaggguauggacu

SEQ ID NO: 3545429 - RNA, 19 nt, Human
ugugugcagacucaauaaa

SEQ ID NO: 3545430 - RNA, 21 nt, Human
ugugugcagucucucuuaccc

SEQ ID NO: 3545431 - RNA, 14 nt, Human
ugugugcaugugug

SEQ ID NO: 3545432 - RNA, 19 nt, Human
ugugugcauguguguauaa

SEQ ID NO: 3545433 - RNA, 20 nt, Human
ugugugcaugugugugcuca

SEQ ID NO: 3545434 - RNA, 23 nt, Human
ugugugccauagaguuuaacaca

SEQ ID NO: 3545435 - RNA, 24 nt, Human
ugugugccauagaguuuaacacaa

SEQ ID NO: 3545436 - RNA, 14 nt, Human
ugugugcccucugg

SEQ ID NO: 3545437 - RNA, 20 nt, Human
ugugugcccucugggcucug

SEQ ID NO: 3545438 - RNA, 20 nt, Human
ugugugccgagcccuugccc

SEQ ID NO: 3545439 - RNA, 21 nt, Human
ugugugccgagcccuugccca

SEQ ID NO: 3545440 - RNA, 18 nt, Human
ugugugccucuagcugaa

SEQ ID NO: 3545441 - RNA, 17 nt, Human
ugugugcuaaacgugua

SEQ ID NO: 3545442 - RNA, 13 nt, Human
ugugugcucucca

SEQ ID NO: 3545443 - RNA, 16 nt, Human
uguguggacuguggca

SEQ ID NO: 3545444 - RNA, 23 nt, Human
uguguggacuguggcacuugccu

SEQ ID NO: 3545445 - RNA, 14 nt, Human
ugugugggacugua

SEQ ID NO: 3545446 - RNA, 16 nt, Human
ugugugggacuguaca

SEQ ID NO: 3545447 - RNA, 17 nt, Human
ugugugggacuguacac

SEQ ID NO: 3545448 - RNA, 14 nt, Human
ugugugggagugug

SEQ ID NO: 3545449 - RNA, 20 nt, Human
uguguggguggauauaaaua

SEQ ID NO: 3545450 - RNA, 23 nt, Human
uguguggguggauauaaauauau

SEQ ID NO: 3545451 - RNA, 16 nt, Human
ugugugguggccucag

SEQ ID NO: 3545452 - RNA, 11 nt, Human
uguguguacuc

SEQ ID NO: 3545453 - RNA, 21 nt, Human
uguguguacucacugaagccu

SEQ ID NO: 3545454 - RNA, 14 nt, Human
uguguguauauaug

SEQ ID NO: 3545455 - RNA, 12 nt, Human
uguguguaugca

SEQ ID NO: 3545456 - RNA, 14 nt, Human
uguguguaugcugc

SEQ ID NO: 3545457 - RNA, 16 nt, Human
uguguguaugcugcuu

SEQ ID NO: 3545458 - RNA, 20 nt, Human
uguguguauuugcuaauuuu

SEQ ID NO: 3545459 - RNA, 22 nt, Human
uguguguccacgacugucucca

SEQ ID NO: 3545460 - RNA, 22 nt, Human
ugugugucuaggcaggaccugu

SEQ ID NO: 3545461 - RNA, 16 nt, Human
ugugugugacaauucu

SEQ ID NO: 3545462 - RNA, 13 nt, Human
ugugugugaugug

SEQ ID NO: 3545463 - RNA, 15 nt, Human
ugugugugaugugac

SEQ ID NO: 3545464 - RNA, 20 nt, Human
ugugugugcuuauguaugag

SEQ ID NO: 3545465 - RNA, 12 nt, Human
ugugugugggag

SEQ ID NO: 3545466 - RNA, 20 nt, Human
ugugugugggaguguguaau

SEQ ID NO: 3545467 - RNA, 11 nt, Human
uguguguguau

SEQ ID NO: 3545468 - RNA, 14 nt, Human
ugugugugucagcu

SEQ ID NO: 3545469 - RNA, 11 nt, Human
uguguguguga

SEQ ID NO: 3545470 - RNA, 13 nt, Human
ugugugugugaga

SEQ ID NO: 3545471 - RNA, 12 nt, Human
ugugugugugca

SEQ ID NO: 3545472 - RNA, 13 nt, Human
ugugugugugcau

SEQ ID NO: 3545473 - RNA, 14 nt, Human
ugugugugugcaug

SEQ ID NO: 3545474 - RNA, 14 nt, Human
ugugugugugcgug

SEQ ID NO: 3545475 - RNA, 11 nt, Human
ugugugugugu

SEQ ID NO: 3545476 - RNA, 14 nt, Human
ugugugugugugcg

SEQ ID NO: 3545477 - RNA, 14 nt, Human
ugugugugugugua

SEQ ID NO: 3545478 - RNA, 16 nt, Human
ugugugugugugugcg

SEQ ID NO: 3545479 - RNA, 14 nt, Human
uguguguuacaaug

SEQ ID NO: 3545480 - RNA, 13 nt, Human
uguguguuccugg

SEQ ID NO: 3545481 - RNA, 16 nt, Human
uguguguugauacugu

SEQ ID NO: 3545482 - RNA, 12 nt, Human
uguguguugcuu

SEQ ID NO: 3545483 - RNA, 18 nt, Human
uguguguugcuuauguug

SEQ ID NO: 3545484 - RNA, 18 nt, Human
uguguguugucucuugag

SEQ ID NO: 3545485 - RNA, 14 nt, Human
uguguguugucuga

SEQ ID NO: 3545486 - RNA, 22 nt, Human
uguguguuuaaauaaaguauca

SEQ ID NO: 3545487 - RNA, 15 nt, Human
uguguguuucacuuu

SEQ ID NO: 3545488 - RNA, 15 nt, Human
uguguguuucugucc

SEQ ID NO: 3545489 - RNA, 16 nt, Human
uguguguuugugcuga

SEQ ID NO: 3545490 - RNA, 14 nt, Human
uguguuaauuuaag

SEQ ID NO: 3545491 - RNA, 13 nt, Human
uguguuauuuaaa

SEQ ID NO: 3545492 - RNA, 16 nt, Human
uguguuauuuaaauga

SEQ ID NO: 3545493 - RNA, 20 nt, Human
uguguucacuaaacucugaa

SEQ ID NO: 3545494 - RNA, 20 nt, Human
uguguuccaaacaugagguu

SEQ ID NO: 3545495 - RNA, 15 nt, Human
uguguuccaaccacu

SEQ ID NO: 3545496 - RNA, 16 nt, Human
uguguuccaaccacug

SEQ ID NO: 3545497 - RNA, 16 nt, Human
uguguuccaaguuucc

SEQ ID NO: 3545498 - RNA, 19 nt, Human
uguguucccauuucagcug

SEQ ID NO: 3545499 - RNA, 15 nt, Human
uguguuccccaaagg

SEQ ID NO: 3545500 - RNA, 11 nt, Human
uguguuccugg

SEQ ID NO: 3545501 - RNA, 20 nt, Human
uguguucuauccaaacaugu

SEQ ID NO: 3545502 - RNA, 17 nt, Human
uguguucugauuagaaa

SEQ ID NO: 3545503 - RNA, 17 nt, Human
uguguugaagagcagcu

SEQ ID NO: 3545504 - RNA, 15 nt, Human
uguguugacuuuaua

SEQ ID NO: 3545505 - RNA, 23 nt, Human
uguguugauacuguugcacgugu

SEQ ID NO: 3545506 - RNA, 18 nt, Human
uguguugccacaggacac

SEQ ID NO: 3545507 - RNA, 15 nt, Human
uguguugcuuauguu

SEQ ID NO: 3545508 - RNA, 15 nt, Human
uguguuggacagaga

SEQ ID NO: 3545509 - RNA, 12 nt, Human
uguguuggcugu

SEQ ID NO: 3545510 - RNA, 12 nt, Human
uguguuggcuug

SEQ ID NO: 3545511 - RNA, 13 nt, Human
uguguugucucua

SEQ ID NO: 3545512 - RNA, 19 nt, Human
uguguugucucuugaguuu

SEQ ID NO: 3545513 - RNA, 13 nt, Human
uguguugugauag

SEQ ID NO: 3545514 - RNA, 13 nt, Human
uguguugugcuuu

SEQ ID NO: 3545515 - RNA, 23 nt, Human
uguguugugugugggagugugua

SEQ ID NO: 3545516 - RNA, 14 nt, Human
uguguuguugcuuu

SEQ ID NO: 3545517 - RNA, 12 nt, Human
uguguuuaaaua

SEQ ID NO: 3545518 - RNA, 14 nt, Human
uguguuuaaauaaa

SEQ ID NO: 3545519 - RNA, 16 nt, Human
uguguuuaauuucuuc

SEQ ID NO: 3545520 - RNA, 17 nt, Human
uguguuuacagagaugu

SEQ ID NO: 3545521 - RNA, 20 nt, Human
uguguuuacuuuauguuacu

SEQ ID NO: 3545522 - RNA, 17 nt, Human
uguguuuagaauugaag

SEQ ID NO: 3545523 - RNA, 14 nt, Human
uguguuuauaaaau

SEQ ID NO: 3545524 - RNA, 12 nt, Human
uguguuuauaug

SEQ ID NO: 3545525 - RNA, 15 nt, Human
uguguuuauauggaa

SEQ ID NO: 3545526 - RNA, 13 nt, Human
uguguuuaugugu

SEQ ID NO: 3545527 - RNA, 15 nt, Human
uguguuuaugugugu

SEQ ID NO: 3545528 - RNA, 23 nt, Human
uguguuuauucaaacugaaaagc

SEQ ID NO: 3545529 - RNA, 23 nt, Human
uguguuuauucuugaugaaaagc

SEQ ID NO: 3545530 - RNA, 16 nt, Human
uguguuuauugucaaa

SEQ ID NO: 3545531 - RNA, 16 nt, Human
uaaauaaauuugacuu

SEQ ID NO: 3545532 - RNA, 21 nt, Human
uaaauaagaaacaacucuuug

SEQ ID NO: 3545533 - RNA, 22 nt, Human
uaaauaagaaacaacucuuuga

SEQ ID NO: 3545534 - RNA, 15 nt, Human
uaaauaagagauuug

SEQ ID NO: 3545535 - RNA, 13 nt, Human
uaaauaagauucu

SEQ ID NO: 3545536 - RNA, 14 nt, Human
uaaauaagauucua

SEQ ID NO: 3545537 - RNA, 20 nt, Human
uaaauaaguuugcaauuugg

SEQ ID NO: 3545538 - RNA, 13 nt, Human
uaaauaaugcuuu

SEQ ID NO: 3545539 - RNA, 16 nt, Human
uaaauaaugcuuugaa

SEQ ID NO: 3545540 - RNA, 19 nt, Human
uaaauaaugugaaacugga

SEQ ID NO: 3545541 - RNA, 12 nt, Human
uaaauaauucuu

SEQ ID NO: 3545542 - RNA, 14 nt, Human
uaaauaauuuaacu

SEQ ID NO: 3545543 - RNA, 15 nt, Human
uaaauacagacacua

SEQ ID NO: 3545544 - RNA, 18 nt, Human
uaaauacagacacuaagu

SEQ ID NO: 3545545 - RNA, 15 nt, Human
uaaauacaggaaaca

SEQ ID NO: 3545546 - RNA, 16 nt, Human
uaaauacaggaaacag

SEQ ID NO: 3545547 - RNA, 18 nt, Human
uaaauacaggaaacaguu

SEQ ID NO: 3545548 - RNA, 12 nt, Human
uaaauaccauug

SEQ ID NO: 3545549 - RNA, 13 nt, Human
uaaauacugcaaa

SEQ ID NO: 3545550 - RNA, 20 nt, Human
uaaauagaauguaaaugucu

SEQ ID NO: 3545551 - RNA, 17 nt, Human
uaaauagaccauuaauc

SEQ ID NO: 3545552 - RNA, 19 nt, Human
uaaauagaugacauugacu

SEQ ID NO: 3545553 - RNA, 15 nt, Human
uaaauagcauucucu

SEQ ID NO: 3545554 - RNA, 19 nt, Human
uaaauagcuagacugguga

SEQ ID NO: 3545555 - RNA, 17 nt, Human
uaaauagcuauauccau

SEQ ID NO: 3545556 - RNA, 20 nt, Human
uaaauagcuauauccaugua

SEQ ID NO: 3545557 - RNA, 22 nt, Human
uaaauagcuauauccauguacu

SEQ ID NO: 3545558 - RNA, 22 nt, Human
uaaauagguucuucuuguucug

SEQ ID NO: 3545559 - RNA, 18 nt, Human
uggucuacacugugcuga

SEQ ID NO: 3545560 - RNA, 15 nt, Human
uggucuauugucugu

SEQ ID NO: 3545561 - RNA, 23 nt, Human
uggucucaaacuccugaccucag

SEQ ID NO: 3545562 - RNA, 23 nt, Human
uggucucacccuggaggcaccug

SEQ ID NO: 3545563 - RNA, 22 nt, Human
uggucucagcagcgaccacccc

SEQ ID NO: 3545564 - RNA, 14 nt, Human
uggucuccacuggg

SEQ ID NO: 3545565 - RNA, 15 nt, Human
uggucucccuucucu

SEQ ID NO: 3545566 - RNA, 17 nt, Human
uggucuccugcccccac

SEQ ID NO: 3545567 - RNA, 14 nt, Human
uggucucuaggcug

SEQ ID NO: 3545568 - RNA, 18 nt, Human
uggucucuaggcugggga

SEQ ID NO: 3545569 - RNA, 22 nt, Human
uggucucugcugaagguuguaa

SEQ ID NO: 3545570 - RNA, 19 nt, Human
uggucucuucuuggggccc

SEQ ID NO: 3545571 - RNA, 15 nt, Human
uggucugaauguucu

SEQ ID NO: 3545572 - RNA, 17 nt, Human
uggucugaauguucuga

SEQ ID NO: 3545573 - RNA, 19 nt, Human
uggucugaauguucugaca

SEQ ID NO: 3545574 - RNA, 22 nt, Human
uggucugaggggcaacugaguc

SEQ ID NO: 3545575 - RNA, 17 nt, Human
uggucugcucgggccca

SEQ ID NO: 3545576 - RNA, 18 nt, Human
uggucugcucgggcccag

SEQ ID NO: 3545577 - RNA, 19 nt, Human
uggucugcucgggcccagg

SEQ ID NO: 3545578 - RNA, 21 nt, Human
uggucugcucgggcccaggcc

SEQ ID NO: 3545579 - RNA, 17 nt, Human
uggucugggacuuccuu

SEQ ID NO: 3545580 - RNA, 22 nt, Human
uggucuggguguagcucuuaga

SEQ ID NO: 3545581 - RNA, 12 nt, Human
uggucuguguga

SEQ ID NO: 3545582 - RNA, 23 nt, Human
uggucugugugugugugugugcg

SEQ ID NO: 3545583 - RNA, 15 nt, Human
uggucuuacagcagg

SEQ ID NO: 3545584 - RNA, 14 nt, Human
uggucuucagccuc

SEQ ID NO: 3545585 - RNA, 17 nt, Human
uggucuucccaggcugg

SEQ ID NO: 3545586 - RNA, 15 nt, Human
uggucuugaaguccu

SEQ ID NO: 3545587 - RNA, 19 nt, Human
uggucuugaaguccuggcu

SEQ ID NO: 3545588 - RNA, 17 nt, Human
uggucuuggcagcaccu

SEQ ID NO: 3545589 - RNA, 21 nt, Human
uggucuuguaagagcuauaca

SEQ ID NO: 3545590 - RNA, 16 nt, Human
uggucuuguggaauug

SEQ ID NO: 3545591 - RNA, 14 nt, Human
uggucuuuaaugaa

SEQ ID NO: 3545592 - RNA, 22 nt, Human
uggucuuuccuaucauggagug

SEQ ID NO: 3545593 - RNA, 15 nt, Human
uggucuuucuggaga

SEQ ID NO: 3545594 - RNA, 17 nt, Human
uggucuuucuggagagg

SEQ ID NO: 3545595 - RNA, 11 nt, Human
uggucuuugag

SEQ ID NO: 3545596 - RNA, 15 nt, Human
uggucuuuguaagag

SEQ ID NO: 3545597 - RNA, 23 nt, Human
uggucuuuguaagaguguagaag

SEQ ID NO: 3545598 - RNA, 16 nt, Human
uggucuuuuauaauuc

SEQ ID NO: 3545599 - RNA, 17 nt, Human
uggucuuuuccucgcuu

SEQ ID NO: 3545600 - RNA, 23 nt, Human
uggugaaagcugagaacuccuga

SEQ ID NO: 3545601 - RNA, 20 nt, Human
uggugaacauugcaauagaa

SEQ ID NO: 3545602 - RNA, 19 nt, Human
uggugaacuugguuuuaau

SEQ ID NO: 3545603 - RNA, 15 nt, Human
uggugaagugcuugg

SEQ ID NO: 3545604 - RNA, 13 nt, Human
uggugaauauugu

SEQ ID NO: 3545605 - RNA, 14 nt, Human
uggugaauuugaau

SEQ ID NO: 3545606 - RNA, 16 nt, Human
uggugacaccagccuu

SEQ ID NO: 3545607 - RNA, 18 nt, Human
uggugacaccagccuuuc

SEQ ID NO: 3545608 - RNA, 17 nt, Human
uggugacccagucagag

SEQ ID NO: 3545609 - RNA, 22 nt, Human
uggugaccucugccugaaguca

SEQ ID NO: 3545610 - RNA, 15 nt, Human
uggugacugauucuu

SEQ ID NO: 3545611 - RNA, 16 nt, Human
uggugacugauucuuc

SEQ ID NO: 3545612 - RNA, 12 nt, Human
uggugacuuccu

SEQ ID NO: 3545613 - RNA, 16 nt, Human
uggugacuuuggauaa

SEQ ID NO: 3545614 - RNA, 18 nt, Human
uggugacuuuggauaaua

SEQ ID NO: 3545615 - RNA, 14 nt, Human
uggugagaaaccug

SEQ ID NO: 3545616 - RNA, 19 nt, Human
uggugagaaauuucuguga

SEQ ID NO: 3545617 - RNA, 20 nt, Human
uggugagaugcagcuggaaa

SEQ ID NO: 3545618 - RNA, 14 nt, Human
uggugaggaagcuc

SEQ ID NO: 3545619 - RNA, 17 nt, Human
uggugagggaagacgcc

SEQ ID NO: 3545620 - RNA, 18 nt, Human
uggugagucuuggcggca

SEQ ID NO: 3545621 - RNA, 22 nt, Human
uggugagucuuggcggcagcag

SEQ ID NO: 3545622 - RNA, 15 nt, Human
uggugauaaggacau

SEQ ID NO: 3545623 - RNA, 15 nt, Human
uggugauauagaauu

SEQ ID NO: 3545624 - RNA, 17 nt, Human
uggugaucaauuaaaug

SEQ ID NO: 3545625 - RNA, 19 nt, Human
uggugauccaaacaaaaug

SEQ ID NO: 3545626 - RNA, 15 nt, Human
uggugaugaaaugua

SEQ ID NO: 3545627 - RNA, 20 nt, Human
uggugauggagguuucauac

SEQ ID NO: 3545628 - RNA, 22 nt, Human
uggugauuuagcaggaagcugu

SEQ ID NO: 3545629 - RNA, 14 nt, Human
uggugauuugaaaa

SEQ ID NO: 3545630 - RNA, 22 nt, Human
uggugauuugaaaaauauaaaa

SEQ ID NO: 3545631 - RNA, 16 nt, Human
uggugauuuuaaaugu

SEQ ID NO: 3545632 - RNA, 22 nt, Human
uggugcaaguugaggacuucuu

SEQ ID NO: 3545633 - RNA, 21 nt, Human
uggugcaaugaccuuucaaua

SEQ ID NO: 3545634 - RNA, 23 nt, Human
uggugcacagcacaaauuaguua

SEQ ID NO: 3545635 - RNA, 15 nt, Human
uggugcacagugauu

SEQ ID NO: 3545636 - RNA, 15 nt, Human
uggugcacuuuguaa

SEQ ID NO: 3545637 - RNA, 10 nt, Human
uggugcauua

SEQ ID NO: 3545638 - RNA, 13 nt, Human
uggugccagccuu

SEQ ID NO: 3545639 - RNA, 18 nt, Human
uggugccaucauugcugu

SEQ ID NO: 3545640 - RNA, 14 nt, Human
uggugccccaggac

SEQ ID NO: 3545641 - RNA, 16 nt, Human
uggugccccaggacca

SEQ ID NO: 3545642 - RNA, 17 nt, Human
uggugccccaggaccag

SEQ ID NO: 3545643 - RNA, 16 nt, Human
uggugccccccacccc

SEQ ID NO: 3545644 - RNA, 17 nt, Human
uggugcccuccucacuc

SEQ ID NO: 3545645 - RNA, 15 nt, Human
uggugccuaguauug

SEQ ID NO: 3545646 - RNA, 14 nt, Human
uggugccugagagg

SEQ ID NO: 3545647 - RNA, 18 nt, Human
uggugccugagaggcagg

SEQ ID NO: 3545648 - RNA, 20 nt, Human
uggugccugagaggcaggca

SEQ ID NO: 3545649 - RNA, 13 nt, Human
uggugccuggccu

SEQ ID NO: 3545650 - RNA, 14 nt, Human
uggugccuggccug

SEQ ID NO: 3545651 - RNA, 11 nt, Human
uggugccuuca

SEQ ID NO: 3545652 - RNA, 15 nt, Human
uggugccuuuccugu

SEQ ID NO: 3545653 - RNA, 20 nt, Human
uggugcgaucauggcucacu

SEQ ID NO: 3545654 - RNA, 18 nt, Human
uggugcgggcacaauaaa

SEQ ID NO: 3545655 - RNA, 18 nt, Human
uggugcuauaggcuggag

SEQ ID NO: 3545656 - RNA, 11 nt, Human
uggugcucagu

SEQ ID NO: 3545657 - RNA, 18 nt, Human
uggugcucauuuaaauau

SEQ ID NO: 3545658 - RNA, 13 nt, Human
uggugcugagaag

SEQ ID NO: 3545659 - RNA, 13 nt, Human
uggugcugggaac

SEQ ID NO: 3545660 - RNA, 15 nt, Human
uggugcugggacuga

SEQ ID NO: 3545661 - RNA, 21 nt, Human
uggugcugggacugagccagu

SEQ ID NO: 3545662 - RNA, 12 nt, Human
uggugcuguggc

SEQ ID NO: 3545663 - RNA, 13 nt, Human
uggugcuguggcc

SEQ ID NO: 3545664 - RNA, 20 nt, Human
uggugcuguggccaggguga

SEQ ID NO: 3545665 - RNA, 16 nt, Human
ugguggcaagagcccc

SEQ ID NO: 3545666 - RNA, 19 nt, Human
ugguggcacugagcccccc

SEQ ID NO: 3545667 - RNA, 20 nt, Human
ugguggcagcucaccucucc

SEQ ID NO: 3545668 - RNA, 23 nt, Human
ugguggcagcucaccucucccuu

SEQ ID NO: 3545669 - RNA, 12 nt, Human
ugguggcagcug

SEQ ID NO: 3545670 - RNA, 14 nt, Human
ugguggcagcugcg

SEQ ID NO: 3545671 - RNA, 21 nt, Human
ugguggcagugcagcaaccag

SEQ ID NO: 3545672 - RNA, 17 nt, Human
ugguggcaguggaggug

SEQ ID NO: 3545673 - RNA, 13 nt, Human
ugguggcaguggg

SEQ ID NO: 3545674 - RNA, 20 nt, Human
ugguggcagugggagcugcc

SEQ ID NO: 3545675 - RNA, 14 nt, Human
ugguggccaugcuc

SEQ ID NO: 3545676 - RNA, 21 nt, Human
ugguggcccucuccccugccc

SEQ ID NO: 3545677 - RNA, 15 nt, Human
uguuugccauacuuu

SEQ ID NO: 3545678 - RNA, 15 nt, Human
uguuugcuaagcauu

SEQ ID NO: 3545679 - RNA, 17 nt, Human
uguuugcucagaacaca

SEQ ID NO: 3545680 - RNA, 23 nt, Human
uguuugcucagaacacauucuuu

SEQ ID NO: 3545681 - RNA, 20 nt, Human
uguuugcucagcuucuccaa

SEQ ID NO: 3545682 - RNA, 14 nt, Human
uguuugcucucccg

SEQ ID NO: 3545683 - RNA, 24 nt, Human
uguuugcucucccgguucuuccag

SEQ ID NO: 3545684 - RNA, 14 nt, Human
uguuugcugugaac

SEQ ID NO: 3545685 - RNA, 15 nt, Human
uguuugcuuauuguu

SEQ ID NO: 3545686 - RNA, 20 nt, Human
uguuugcuuauuguuccaag

SEQ ID NO: 3545687 - RNA, 15 nt, Human
uguuugcuucaacug

SEQ ID NO: 3545688 - RNA, 18 nt, Human
uguuugcuucauaaauga

SEQ ID NO: 3545689 - RNA, 23 nt, Human
uguuugcuucaugugucccagaa

SEQ ID NO: 3545690 - RNA, 16 nt, Human
uguuuggaaaagacag

SEQ ID NO: 3545691 - RNA, 17 nt, Human
uguuuggaaaagacagu

SEQ ID NO: 3545692 - RNA, 14 nt, Human
uguuuggaaacauu

SEQ ID NO: 3545693 - RNA, 19 nt, Human
uguuuggaccaaaaaccag

SEQ ID NO: 3545694 - RNA, 17 nt, Human
uguuuggacuuuguaua

SEQ ID NO: 3545695 - RNA, 22 nt, Human
uguuuggauuuuuaauuaaaaa

SEQ ID NO: 3545696 - RNA, 15 nt, Human
uguuuggcaaggaaa

SEQ ID NO: 3545697 - RNA, 16 nt, Human
uguuuggcaaggaaag

SEQ ID NO: 3545698 - RNA, 17 nt, Human
uguuuggcaaggaaagg

SEQ ID NO: 3545699 - RNA, 11 nt, Human
uguuuggcugg

SEQ ID NO: 3545700 - RNA, 12 nt, Human
uguuuggcuggg

SEQ ID NO: 3545701 - RNA, 15 nt, Human
uguuuggggaugaga

SEQ ID NO: 3545702 - RNA, 18 nt, Human
uguuugggggacguuucu

SEQ ID NO: 3545703 - RNA, 21 nt, Human
uguuugggggacguuucucau

SEQ ID NO: 3545704 - RNA, 24 nt, Human
uguuugggggacguuucucauuug

SEQ ID NO: 3545705 - RNA, 18 nt, Human
uguuuggguauccugccc

SEQ ID NO: 3545706 - RNA, 17 nt, Human
uguuugguauuguauuu

SEQ ID NO: 3545707 - RNA, 20 nt, Human
uguuugguucuggggccccu

SEQ ID NO: 3545708 - RNA, 15 nt, Human
uguuugguuuacauu

SEQ ID NO: 3545709 - RNA, 16 nt, Human
uguuugguuuuaaaau

SEQ ID NO: 3545710 - RNA, 21 nt, Human
uguuugguuuuaaaauacugu

SEQ ID NO: 3545711 - RNA, 24 nt, Human
uguuugguuuuuuguucuugcgau

SEQ ID NO: 3545712 - RNA, 16 nt, Human
uguuuguaaauaagag

SEQ ID NO: 3545713 - RNA, 20 nt, Human
uguuuguacacaacaauccu

SEQ ID NO: 3545714 - RNA, 19 nt, Human
uguuuguauaaugaaugag

SEQ ID NO: 3545715 - RNA, 16 nt, Human
uguuugucagauauga

SEQ ID NO: 3545716 - RNA, 16 nt, Human
uguuugucucauccca

SEQ ID NO: 3545717 - RNA, 16 nt, Human
uguuugucucuccuuu

SEQ ID NO: 3545718 - RNA, 14 nt, Human
uguuugucucuucu

SEQ ID NO: 3545719 - RNA, 15 nt, Human
uguuugucucuucug

SEQ ID NO: 3545720 - RNA, 19 nt, Human
uguuugucugucuucauag

SEQ ID NO: 3545721 - RNA, 19 nt, Human
uguuugucuguuuguuuca

SEQ ID NO: 3545722 - RNA, 20 nt, Human
uguuugucuguuuguuucaa

SEQ ID NO: 3545723 - RNA, 19 nt, Human
uguuugucuuuuaaugcuu

SEQ ID NO: 3545724 - RNA, 15 nt, Human
uguuuguggccucag

SEQ ID NO: 3545725 - RNA, 16 nt, Human
uguaaaaucuugucau

SEQ ID NO: 3545726 - RNA, 19 nt, Human
uguaaaaucuugucaugug

SEQ ID NO: 3545727 - RNA, 22 nt, Human
uguaaaaucuugucauguguau

SEQ ID NO: 3545728 - RNA, 16 nt, Human
uguaaaaugacaauca

SEQ ID NO: 3545729 - RNA, 18 nt, Human
uguaaaaugcaaaaaauc

SEQ ID NO: 3545730 - RNA, 22 nt, Human
uguaaaauggaaaacuuaguuu

SEQ ID NO: 3545731 - RNA, 15 nt, Human
uguaaaauguauuau

SEQ ID NO: 3545732 - RNA, 14 nt, Human
uguaaaauuguaua

SEQ ID NO: 3545733 - RNA, 21 nt, Human
uguaaacaaaauuuaguuuuu

SEQ ID NO: 3545734 - RNA, 21 nt, Human
uguaaacaaacuguguaacug

SEQ ID NO: 3545735 - RNA, 16 nt, Human
uguaaacagugccugc

SEQ ID NO: 3545736 - RNA, 17 nt, Human
uguaaacagugccugcu

SEQ ID NO: 3545737 - RNA, 19 nt, Human
uguaaacauaccaacaugu

SEQ ID NO: 3545738 - RNA, 22 nt, Human
uguaaacucaucugaaauguua

SEQ ID NO: 3545739 - RNA, 13 nt, Human
uguaaacugccau

SEQ ID NO: 3545740 - RNA, 23 nt, Human
uguaaacuguacuagucugugug

SEQ ID NO: 3545741 - RNA, 22 nt, Human
uguaaacuguguauuccaagac

SEQ ID NO: 3545742 - RNA, 17 nt, Human
uguaaacuuuaucacuu

SEQ ID NO: 3545743 - RNA, 18 nt, Human
uguaaacuuuaucacuua

SEQ ID NO: 3545744 - RNA, 19 nt, Human
uguaaacuuuaucacuuaa

SEQ ID NO: 3545745 - RNA, 18 nt, Human
uguaaacuuugaaauaua

SEQ ID NO: 3545746 - RNA, 16 nt, Human
uguaaagaaaaauauu

SEQ ID NO: 3545747 - RNA, 18 nt, Human
uguaaagaaaaauauuua

SEQ ID NO: 3545748 - RNA, 17 nt, Human
uguaaagaaagagagaa

SEQ ID NO: 3545749 - RNA, 13 nt, Human
uguaaagaaaugu

SEQ ID NO: 3545750 - RNA, 18 nt, Human
uguaaagauauuuuuauc

SEQ ID NO: 3545751 - RNA, 15 nt, Human
uguaaagauuucugu

SEQ ID NO: 3545752 - RNA, 16 nt, Human
uguaaagauuucuguu

SEQ ID NO: 3545753 - RNA, 19 nt, Human
uguaaagauuucuguucag

SEQ ID NO: 3545754 - RNA, 18 nt, Human
uguaaagccaacacccug

SEQ ID NO: 3545755 - RNA, 20 nt, Human
uguaaagcuaaaauaaagaa

SEQ ID NO: 3545756 - RNA, 13 nt, Human
uguaaagcuuguc

SEQ ID NO: 3545757 - RNA, 16 nt, Human
uguaaaggaauuuaaa

SEQ ID NO: 3545758 - RNA, 19 nt, Human
uguaaaguauguauuauuu

SEQ ID NO: 3545759 - RNA, 13 nt, Human
uguaaagugaaga

SEQ ID NO: 3545760 - RNA, 20 nt, Human
uguaaagugaagaauccuuu

SEQ ID NO: 3545761 - RNA, 17 nt, Human
uguaaaguguaaauccu

SEQ ID NO: 3545762 - RNA, 12 nt, Human
uguaaaguuagu

SEQ ID NO: 3545763 - RNA, 21 nt, Human
uguaaaguuauucuugaaguc

SEQ ID NO: 3545764 - RNA, 14 nt, Human
uguaaauaaaaaga

SEQ ID NO: 3545765 - RNA, 17 nt, Human
uguaaauaaaggaacca

SEQ ID NO: 3545766 - RNA, 23 nt, Human
uguaaauaauacauuauauuucu

SEQ ID NO: 3545767 - RNA, 15 nt, Human
uguaaauaauucuuu

SEQ ID NO: 3545768 - RNA, 15 nt, Human
uguaaauacaauuuu

SEQ ID NO: 3545769 - RNA, 16 nt, Human
uguaaauacaauuuug

SEQ ID NO: 3545770 - RNA, 17 nt, Human
uguaaauacaauuuugu

SEQ ID NO: 3545771 - RNA, 19 nt, Human
uguaaauacaauuuuguuu

SEQ ID NO: 3545772 - RNA, 14 nt, Human
uguaaauaccagga

SEQ ID NO: 3545773 - RNA, 15 nt, Human
uguaaauacuguugg

SEQ ID NO: 3545774 - RNA, 17 nt, Human
uguaaauacuguuggug

SEQ ID NO: 3545775 - RNA, 15 nt, Human
uguaaauagcucagg

SEQ ID NO: 3545776 - RNA, 16 nt, Human
uguaaauagcucaggu

SEQ ID NO: 3545777 - RNA, 15 nt, Human
uguaaauauucuaua

SEQ ID NO: 3545778 - RNA, 14 nt, Human
uguaaauauugugu

SEQ ID NO: 3545779 - RNA, 14 nt, Human
uguaaauauuuuaa

SEQ ID NO: 3545780 - RNA, 20 nt, Human
uguaaauauuuuaaagaauu

SEQ ID NO: 3545781 - RNA, 16 nt, Human
uguaaaucccauuauu

SEQ ID NO: 3545782 - RNA, 19 nt, Human
uguaaaucccauuauucaa

SEQ ID NO: 3545783 - RNA, 22 nt, Human
uguaaaucccauuauucaaagu

SEQ ID NO: 3545784 - RNA, 15 nt, Human
uguaaaucuacacac

SEQ ID NO: 3545785 - RNA, 16 nt, Human
uguaaaucugcucagg

SEQ ID NO: 3545786 - RNA, 15 nt, Human
uguaaaugcaucugu

SEQ ID NO: 3545787 - RNA, 22 nt, Human
uguaaaugcugucaacuaugau

SEQ ID NO: 3545788 - RNA, 16 nt, Human
uguaaauguaaacuca

SEQ ID NO: 3545789 - RNA, 12 nt, Human
uguaaauguguu

SEQ ID NO: 3545790 - RNA, 11 nt, Human
uguaaauguua

SEQ ID NO: 3545791 - RNA, 16 nt, Human
uguaaauguuauuucu

SEQ ID NO: 3545792 - RNA, 21 nt, Human
uguaaauguuauuucugcaaa

SEQ ID NO: 3545793 - RNA, 10 nt, Human
uguaaauuau

SEQ ID NO: 3545794 - RNA, 22 nt, Human
uguaaauuauauuugugcuaua

SEQ ID NO: 3545795 - RNA, 12 nt, Human
uguaaauuaugu

SEQ ID NO: 3545796 - RNA, 16 nt, Human
uguaaauuauuuaugu

SEQ ID NO: 3545797 - RNA, 18 nt, Human
uguaaauuauuuuaaauu

SEQ ID NO: 3545798 - RNA, 12 nt, Human
uguaaauucuga

SEQ ID NO: 3545799 - RNA, 15 nt, Human
uguaaauucugauuu

SEQ ID NO: 3545800 - RNA, 15 nt, Human
uguaaauuuaguguu

SEQ ID NO: 3545801 - RNA, 17 nt, Human
uguaaauuuaugugaug

SEQ ID NO: 3545802 - RNA, 16 nt, Human
uguaaauuuggcuucu

SEQ ID NO: 3545803 - RNA, 14 nt, Human
uguaaauuuguacu

SEQ ID NO: 3545804 - RNA, 20 nt, Human
uguaaauuuuguaugaaaaa

SEQ ID NO: 3545805 - RNA, 14 nt, Human
uguaacaagaaagg

SEQ ID NO: 3545806 - RNA, 17 nt, Human
uguaacaagccacccca

SEQ ID NO: 3545807 - RNA, 11 nt, Human
uguaacacaag

SEQ ID NO: 3545808 - RNA, 16 nt, Human
uguaacacaagccaca

SEQ ID NO: 3545809 - RNA, 21 nt, Human
uguaacacagcugagagacuu

SEQ ID NO: 3545810 - RNA, 17 nt, Human
uguaacagaaagggcaa

SEQ ID NO: 3545811 - RNA, 18 nt, Human
uguaacagccaggagugu

SEQ ID NO: 3545812 - RNA, 17 nt, Human
uguaacagcuccuuggg

SEQ ID NO: 3545813 - RNA, 11 nt, Human
uguaacagcug

SEQ ID NO: 3545814 - RNA, 15 nt, Human
uguaacagcugaggu

SEQ ID NO: 3545815 - RNA, 15 nt, Human
uguaacauaugcaaa

SEQ ID NO: 3545816 - RNA, 20 nt, Human
uguaaccgauucaucucuca

SEQ ID NO: 3545817 - RNA, 15 nt, Human
uguaaccucagcucu

SEQ ID NO: 3545818 - RNA, 19 nt, Human
uguaaccucuucagaggcc

SEQ ID NO: 3545819 - RNA, 22 nt, Human
uguaaccugagauggcccucug

SEQ ID NO: 3545820 - RNA, 16 nt, Human
uguaacguggcacugg

SEQ ID NO: 3545821 - RNA, 19 nt, Human
uguaacgugugcuguguuu

SEQ ID NO: 3545822 - RNA, 22 nt, Human
uuaauaaagacgauuugucagu

SEQ ID NO: 3545823 - RNA, 20 nt, Human
uuaauaacauuaccuuacug

SEQ ID NO: 3545824 - RNA, 21 nt, Human
uuaauaacauuaccuuacugu

SEQ ID NO: 3545825 - RNA, 22 nt, Human
uuaauaagcuacuagcaaaaua

SEQ ID NO: 3545826 - RNA, 23 nt, Human
uuaauaauaaauucccuggccuu

SEQ ID NO: 3545827 - RNA, 18 nt, Human
uuaauaauauacuugugg

SEQ ID NO: 3545828 - RNA, 21 nt, Human
uuaauaauuagaaacaccaaa

SEQ ID NO: 3545829 - RNA, 18 nt, Human
uuaauaauuauaugcuau

SEQ ID NO: 3545830 - RNA, 19 nt, Human
uuaauacaagguauaauaa

SEQ ID NO: 3545831 - RNA, 22 nt, Human
uuaauacaagguauaauaaaau

SEQ ID NO: 3545832 - RNA, 21 nt, Human
uuaauacaaugaugcuauuug

SEQ ID NO: 3545833 - RNA, 17 nt, Human
uuaauacuaccuugaaa

SEQ ID NO: 3545834 - RNA, 18 nt, Human
uuaauacuguuauucuuu

SEQ ID NO: 3545835 - RNA, 20 nt, Human
uuaauagagaaggaaagcuu

SEQ ID NO: 3545836 - RNA, 17 nt, Human
uuaauagaucuuagggu

SEQ ID NO: 3545837 - RNA, 14 nt, Human
uuaauagcagccuu

SEQ ID NO: 3545838 - RNA, 16 nt, Human
uuaauagcagccuuuc

SEQ ID NO: 3545839 - RNA, 17 nt, Human
uuaauagggaauauauc

SEQ ID NO: 3545840 - RNA, 16 nt, Human
uuaauagguuuggaca

SEQ ID NO: 3545841 - RNA, 23 nt, Human
uuaauagucaucacauuucuaug

SEQ ID NO: 3545842 - RNA, 21 nt, Human
uuaauaguguuaaucaauuua

SEQ ID NO: 3545843 - RNA, 18 nt, Human
uuaauaguuugucuauuu

SEQ ID NO: 3545844 - RNA, 22 nt, Human
uuaauauaaaguuuuauauauu

SEQ ID NO: 3545845 - RNA, 15 nt, Human
uuaauauaaaugcaa

SEQ ID NO: 3545846 - RNA, 17 nt, Human
uuaauauaaaugcaaau

SEQ ID NO: 3545847 - RNA, 15 nt, Human
uuaauauaacugccu

SEQ ID NO: 3545848 - RNA, 17 nt, Human
uuaauauagcuauuuuu

SEQ ID NO: 3545849 - RNA, 19 nt, Human
uuaauauaucccagaaauu

SEQ ID NO: 3545850 - RNA, 20 nt, Human
uuaauauaucccagaaauua

SEQ ID NO: 3545851 - RNA, 20 nt, Human
uuaauauauuaaaauuccaa

SEQ ID NO: 3545852 - RNA, 14 nt, Human
uuaauauauuucca

SEQ ID NO: 3545853 - RNA, 15 nt, Human
uuaauaucacucauu

SEQ ID NO: 3545854 - RNA, 14 nt, Human
uuaauauccuaaac

SEQ ID NO: 3545855 - RNA, 17 nt, Human
uuaauauccuaaacauc

SEQ ID NO: 3545856 - RNA, 15 nt, Human
uuaauaugaaaacuu

SEQ ID NO: 3545857 - RNA, 16 nt, Human
uuaauaugaaaacuua

SEQ ID NO: 3545858 - RNA, 17 nt, Human
uuaauaugaaaacuuau

SEQ ID NO: 3545859 - RNA, 13 nt, Human
uuaauaugaaauu

SEQ ID NO: 3545860 - RNA, 20 nt, Human
uuaauaugcugcaacaaaau

SEQ ID NO: 3545861 - RNA, 13 nt, Human
uuaauauguauuu

SEQ ID NO: 3545862 - RNA, 23 nt, Human
uuaauauguauuuuauguauguu

SEQ ID NO: 3545863 - RNA, 11 nt, Human
uuaauauuaaa

SEQ ID NO: 3545864 - RNA, 19 nt, Human
uuaauauuaaagccauguu

SEQ ID NO: 3545865 - RNA, 14 nt, Human
uuaauauuacagau

SEQ ID NO: 3545866 - RNA, 16 nt, Human
uuaauauuauuacugu

SEQ ID NO: 3545867 - RNA, 12 nt, Human
uuaauauuuaaa

SEQ ID NO: 3545868 - RNA, 17 nt, Human
uuaauauuuaaacagca

SEQ ID NO: 3545869 - RNA, 18 nt, Human
uuaauauuuaaacagcag

SEQ ID NO: 3545870 - RNA, 22 nt, Human
uuaauauuuaaacagcaguguu

SEQ ID NO: 3545871 - RNA, 12 nt, Human
uuaauauuuaac

SEQ ID NO: 3545872 - RNA, 16 nt, Human
uuaauauuuaacauua

SEQ ID NO: 3545873 - RNA, 12 nt, Human
uuaauauuugcu

SEQ ID NO: 3545874 - RNA, 19 nt, Human
uuaauauuugcugacagcu

SEQ ID NO: 3545875 - RNA, 19 nt, Human
uuaauauuuuuucuuuucc

SEQ ID NO: 3545876 - RNA, 17 nt, Human
uuaaucaaguugaauug

SEQ ID NO: 3545877 - RNA, 20 nt, Human
uuaaucacaaauuucacuua

SEQ ID NO: 3545878 - RNA, 14 nt, Human
uuaaucacugugua

SEQ ID NO: 3545879 - RNA, 15 nt, Human
uuaaucacuguguau

SEQ ID NO: 3545880 - RNA, 20 nt, Human
uuaaucacuguguauauuug

SEQ ID NO: 3545881 - RNA, 15 nt, Human
uuaaucacuuaacau

SEQ ID NO: 3545882 - RNA, 16 nt, Human
uuaaucagacaaagua

SEQ ID NO: 3545883 - RNA, 17 nt, Human
uuaaucagauagauauu

SEQ ID NO: 3545884 - RNA, 23 nt, Human
uuaaucauaguuacuguguaaac

SEQ ID NO: 3545885 - RNA, 17 nt, Human
uuaaucauauaaauaga

SEQ ID NO: 3545886 - RNA, 18 nt, Human
uuaaucaucuauaaagaa

SEQ ID NO: 3545887 - RNA, 13 nt, Human
uuaaucaugaaau

SEQ ID NO: 3545888 - RNA, 18 nt, Human
uuaaucaugaauaugaug

SEQ ID NO: 3545889 - RNA, 22 nt, Human
uuaaucauuaggugugacugaa

SEQ ID NO: 3545890 - RNA, 19 nt, Human
uuaaucauuuucauuccua

SEQ ID NO: 3545891 - RNA, 20 nt, Human
uuaauccagaauaacuagca

SEQ ID NO: 3545892 - RNA, 23 nt, Human
uuaauccagaauaacuagcacca

SEQ ID NO: 3545893 - RNA, 18 nt, Human
uuaauccaguuauaagaa

SEQ ID NO: 3545894 - RNA, 20 nt, Human
uuaauccaguuauaagaaga

SEQ ID NO: 3545895 - RNA, 17 nt, Human
uuaauccccaguaaaau

SEQ ID NO: 3545896 - RNA, 21 nt, Human
uuaauccccaguaaaauugcc

SEQ ID NO: 3545897 - RNA, 20 nt, Human
uuaauccgccaauauuagua

SEQ ID NO: 3545898 - RNA, 19 nt, Human
uuaaucugaaauucuaaag

SEQ ID NO: 3545899 - RNA, 16 nt, Human
uuaaucuuaauguaua

SEQ ID NO: 3545900 - RNA, 19 nt, Human
uuaaucuuaguguaugauu

SEQ ID NO: 3545901 - RNA, 15 nt, Human
uuaaucuuaucaaga

SEQ ID NO: 3545902 - RNA, 15 nt, Human
uuaaucuucaguuuu

SEQ ID NO: 3545903 - RNA, 22 nt, Human
uuaaucuucaguuuuaucuuua

SEQ ID NO: 3545904 - RNA, 13 nt, Human
uuaaucuucaugg

SEQ ID NO: 3545905 - RNA, 13 nt, Human
uuaaucuuccaug

SEQ ID NO: 3545906 - RNA, 19 nt, Human
uuaaucuuggauagcuaau

SEQ ID NO: 3545907 - RNA, 16 nt, Human
uuaaucuuuucacaaa

SEQ ID NO: 3545908 - RNA, 17 nt, Human
uuaaucuuuucacaaau

SEQ ID NO: 3545909 - RNA, 14 nt, Human
uuaaugaaaaggaa

SEQ ID NO: 3545910 - RNA, 21 nt, Human
uuaaugaaauaucuguauuua

SEQ ID NO: 3545911 - RNA, 14 nt, Human
uuaaugaacaaaug

SEQ ID NO: 3545912 - RNA, 17 nt, Human
uuaaugaaguuugaaug

SEQ ID NO: 3545913 - RNA, 19 nt, Human
uuaaugagcaauaucugcu

SEQ ID NO: 3545914 - RNA, 16 nt, Human
uuaaugauaaguaaau

SEQ ID NO: 3545915 - RNA, 19 nt, Human
uuaaugauauacugaucuu

SEQ ID NO: 3545916 - RNA, 14 nt, Human
uuaaugcacuuucu

SEQ ID NO: 3545917 - RNA, 22 nt, Human
uuaaugcauuaaaccugucucc

SEQ ID NO: 3545918 - RNA, 13 nt, Human
uuaaugcuaaggg

SEQ ID NO: 3545919 - RNA, 18 nt, Human
uuaaugcuaaucuuguga

SEQ ID NO: 3545920 - RNA, 22 nt, Human
uuaaugcuaaucuugugaaaau

SEQ ID NO: 3545921 - RNA, 14 nt, Human
uuaaugcuacaugu

SEQ ID NO: 3545922 - RNA, 14 nt, Human
uuaaugcuauuuga

SEQ ID NO: 3545923 - RNA, 20 nt, Human
uuaaugcuauuugaacaagu

SEQ ID NO: 3545924 - RNA, 14 nt, Human
uuaaugcuucauuc

SEQ ID NO: 3545925 - RNA, 15 nt, Human
uuaaugcuucauuca

SEQ ID NO: 3545926 - RNA, 15 nt, Human
uuaaugcuucuuuca

SEQ ID NO: 3545927 - RNA, 14 nt, Human
uuaauggaaauguu

SEQ ID NO: 3545928 - RNA, 20 nt, Human
uuaauggaaguguauuuauu

SEQ ID NO: 3545929 - RNA, 22 nt, Human
uuaauggacaugagauaauguu

SEQ ID NO: 3545930 - RNA, 14 nt, Human
uuaauggauuguua

SEQ ID NO: 3545931 - RNA, 19 nt, Human
uuaaugguaguuuuacagu

SEQ ID NO: 3545932 - RNA, 15 nt, Human
uuaauggucuaaaaa

SEQ ID NO: 3545933 - RNA, 17 nt, Human
uuaauggugccuucauu

SEQ ID NO: 3545934 - RNA, 18 nt, Human
uuaauguaaucugauggc

SEQ ID NO: 3545935 - RNA, 15 nt, Human
uuaauguagauuuuu

SEQ ID NO: 3545936 - RNA, 19 nt, Human
uuaauguauaguaaaucac

SEQ ID NO: 3545937 - RNA, 18 nt, Human
uaagaagugaaaaucuac

SEQ ID NO: 3545938 - RNA, 16 nt, Human
uaagaauaaaauguug

SEQ ID NO: 3545939 - RNA, 19 nt, Human
uaagaauauguuuccuugu

SEQ ID NO: 3545940 - RNA, 21 nt, Human
uaagaauauguuuccuuguuu

SEQ ID NO: 3545941 - RNA, 15 nt, Human
uaagaauauuugaau

SEQ ID NO: 3545942 - RNA, 20 nt, Human
uaagaaucagaguagaaaua

SEQ ID NO: 3545943 - RNA, 14 nt, Human
uaagaauggaaaag

SEQ ID NO: 3545944 - RNA, 17 nt, Human
uaagaauggaaaagaga

SEQ ID NO: 3545945 - RNA, 12 nt, Human
uaagaauguucu

SEQ ID NO: 3545946 - RNA, 18 nt, Human
uaagaauguugguuuacu

SEQ ID NO: 3545947 - RNA, 18 nt, Human
uaagaauucugauugauu

SEQ ID NO: 3545948 - RNA, 19 nt, Human
uaagaauugaccaucugcu

SEQ ID NO: 3545949 - RNA, 19 nt, Human
uaagaauugaguaauggug

SEQ ID NO: 3545950 - RNA, 20 nt, Human
uaagaauugaguaauggugu

SEQ ID NO: 3545951 - RNA, 21 nt, Human
uaagaauugaguaauggugua

SEQ ID NO: 3545952 - RNA, 22 nt, Human
uaagaauugaguaaugguguag

SEQ ID NO: 3545953 - RNA, 16 nt, Human
uaagaauuuagggaga

SEQ ID NO: 3545954 - RNA, 14 nt, Human
uaagaauuugcaua

SEQ ID NO: 3545955 - RNA, 23 nt, Human
uaagacaaaaagcuacuuauugu

SEQ ID NO: 3545956 - RNA, 22 nt, Human
uaagacaauggacccuuuuugu

SEQ ID NO: 3545957 - RNA, 19 nt, Human
uaagacagucccaucaaaa

SEQ ID NO: 3545958 - RNA, 16 nt, Human
uaagacauaucucuaa

SEQ ID NO: 3545959 - RNA, 16 nt, Human
uaagacaugauuuccu

SEQ ID NO: 3545960 - RNA, 21 nt, Human
uaagacaugauuuccuugaau

SEQ ID NO: 3545961 - RNA, 19 nt, Human
uaagacauguaacgaaaca

SEQ ID NO: 3545962 - RNA, 17 nt, Human
uaagacauuuuuggaag

SEQ ID NO: 3545963 - RNA, 13 nt, Human
uaagaccagccug

SEQ ID NO: 3545964 - RNA, 20 nt, Human
uaagacgguuaaauacugug

SEQ ID NO: 3545965 - RNA, 23 nt, Human
uaagacuaaaucuguaagcucuu

SEQ ID NO: 3545966 - RNA, 19 nt, Human
ugucauuaaaauaaauaaa

SEQ ID NO: 3545967 - RNA, 15 nt, Human
ugucauuaaacauga

SEQ ID NO: 3545968 - RNA, 17 nt, Human
ugucauuaaagguauca

SEQ ID NO: 3545969 - RNA, 13 nt, Human
ugucauuagccug

SEQ ID NO: 3545970 - RNA, 14 nt, Human
ugucauuagccuga

SEQ ID NO: 3545971 - RNA, 24 nt, Human
ugucauuagugagacauauuuaca

SEQ ID NO: 3545972 - RNA, 19 nt, Human
ugucauucagagucagcca

SEQ ID NO: 3545973 - RNA, 17 nt, Human
ugucauugcacauaagc

SEQ ID NO: 3545974 - RNA, 21 nt, Human
ugucauugcacauaagcuucc

SEQ ID NO: 3545975 - RNA, 18 nt, Human
ugucauugcuguuguccc

SEQ ID NO: 3545976 - RNA, 14 nt, Human
ugucauugcuuuac

SEQ ID NO: 3545977 - RNA, 14 nt, Human
ugucauuguaaaca

SEQ ID NO: 3545978 - RNA, 18 nt, Human
ugucauuguaaacaaacu

SEQ ID NO: 3545979 - RNA, 14 nt, Human
ugucauuguuauau

SEQ ID NO: 3545980 - RNA, 22 nt, Human
ugucauuucauguccuguguca

SEQ ID NO: 3545981 - RNA, 20 nt, Human
ugucauuucauuccauugcc

SEQ ID NO: 3545982 - RNA, 19 nt, Human
ugucauuugagcagggcuc

SEQ ID NO: 3545983 - RNA, 16 nt, Human
ugucauuuguuaaaau

SEQ ID NO: 3545984 - RNA, 17 nt, Human
ugucauuuguugugaug

SEQ ID NO: 3545985 - RNA, 15 nt, Human
ugucauuuucuccau

SEQ ID NO: 3545986 - RNA, 12 nt, Human
ugucauuuugaa

SEQ ID NO: 3545987 - RNA, 15 nt, Human
ugucauuuugaagcu

SEQ ID NO: 3545988 - RNA, 19 nt, Human
ugucauuuugaagcuaauu

SEQ ID NO: 3545989 - RNA, 11 nt, Human
uguccaaagag

SEQ ID NO: 3545990 - RNA, 18 nt, Human
uguccaacccgaggcccg

SEQ ID NO: 3545991 - RNA, 14 nt, Human
uguccaacuccagu

SEQ ID NO: 3545992 - RNA, 15 nt, Human
uguccaacuccagua

SEQ ID NO: 3545993 - RNA, 23 nt, Human
uguccaacuccaguacuggagcu

SEQ ID NO: 3545994 - RNA, 15 nt, Human
uguccaagaagccca

SEQ ID NO: 3545995 - RNA, 16 nt, Human
uguccaagaagcccag

SEQ ID NO: 3545996 - RNA, 16 nt, Human
uguccaauucucuuua

SEQ ID NO: 3545997 - RNA, 23 nt, Human
uguccaauuguugacaguucuga

SEQ ID NO: 3545998 - RNA, 18 nt, Human
uguccacacccagcucag

SEQ ID NO: 3545999 - RNA, 14 nt, Human
uguccacagaugcc

SEQ ID NO: 3546000 - RNA, 18 nt, Human
uguccacagaugccucca

SEQ ID NO: 3546001 - RNA, 13 nt, Human
uguccacccccau

SEQ ID NO: 3546002 - RNA, 14 nt, Human
uguccaccuggccc

SEQ ID NO: 3546003 - RNA, 14 nt, Human
uguccaccuguggg

SEQ ID NO: 3546004 - RNA, 17 nt, Human
uguccacgacugucucc

SEQ ID NO: 3546005 - RNA, 13 nt, Human
uguccacugugua

SEQ ID NO: 3546006 - RNA, 12 nt, Human
uguccagacagc

SEQ ID NO: 3546007 - RNA, 14 nt, Human
uguccagacagccu

SEQ ID NO: 3546008 - RNA, 16 nt, Human
uguccagacagccugu

SEQ ID NO: 3546009 - RNA, 17 nt, Human
uguccagacagccugua

SEQ ID NO: 3546010 - RNA, 21 nt, Human
uguccagagagcaacucugag

SEQ ID NO: 3546011 - RNA, 15 nt, Human
uguccagcaccuugu

SEQ ID NO: 3546012 - RNA, 19 nt, Human
uguccagccugggcagcca

SEQ ID NO: 3546013 - RNA, 21 nt, Human
uguccagcugagcgccaggau

SEQ ID NO: 3546014 - RNA, 13 nt, Human
uguccagggcccu

SEQ ID NO: 3546015 - RNA, 16 nt, Human
uguccaguaagaucac

SEQ ID NO: 3546016 - RNA, 17 nt, Human
uguccagugcccauucc

SEQ ID NO: 3546017 - RNA, 18 nt, Human
uguccagugcccauuccu

SEQ ID NO: 3546018 - RNA, 23 nt, Human
uguccagugcccauuccucaccu

SEQ ID NO: 3546019 - RNA, 13 nt, Human
uguccauacacuu

SEQ ID NO: 3546020 - RNA, 20 nt, Human
uguccauacacuuuguugca

SEQ ID NO: 3546021 - RNA, 16 nt, Human
uguccauauuuucaca

SEQ ID NO: 3546022 - RNA, 14 nt, Human
uguccaucagauga

SEQ ID NO: 3546023 - RNA, 16 nt, Human
uguccaucagaugaca

SEQ ID NO: 3546024 - RNA, 17 nt, Human
uguccaucagaugacaa

SEQ ID NO: 3546025 - RNA, 18 nt, Human
uguccaucagaugacaag

SEQ ID NO: 3546026 - RNA, 20 nt, Human
uguccaugcgcucagggcca

SEQ ID NO: 3546027 - RNA, 15 nt, Human
uguccaugcuucuca

SEQ ID NO: 3546028 - RNA, 17 nt, Human
uguccaugcuucucauc

SEQ ID NO: 3546029 - RNA, 20 nt, Human
uguccaugugguucuucaaa

SEQ ID NO: 3546030 - RNA, 15 nt, Human
uguccaugugugugc

SEQ ID NO: 3546031 - RNA, 18 nt, Human
uguccauugacauguaca

SEQ ID NO: 3546032 - RNA, 14 nt, Human
uguccauuguccaa

SEQ ID NO: 3546033 - RNA, 21 nt, Human
uguccauuuauccacaggaaa

SEQ ID NO: 3546034 - RNA, 16 nt, Human
uguccauuuugugaag

SEQ ID NO: 3546035 - RNA, 19 nt, Human
uguccauuuugugaagccc

SEQ ID NO: 3546036 - RNA, 16 nt, Human
ugucccaacuuguaaa

SEQ ID NO: 3546037 - RNA, 13 nt, Human
ugucccaagugcc

SEQ ID NO: 3546038 - RNA, 17 nt, Human
ugucccacagcuugggg

SEQ ID NO: 3546039 - RNA, 22 nt, Human
ugucccacccccacccccagcu

SEQ ID NO: 3546040 - RNA, 20 nt, Human
ugucccacccccuuccccca

SEQ ID NO: 3546041 - RNA, 22 nt, Human
ugucccaccucuucucuuccug

SEQ ID NO: 3546042 - RNA, 17 nt, Human
ugucccacgugucuucc

SEQ ID NO: 3546043 - RNA, 22 nt, Human
ugucccacgugucuuccacuuu

SEQ ID NO: 3546044 - RNA, 17 nt, Human
ugucccacucaagccaa

SEQ ID NO: 3546045 - RNA, 20 nt, Human
ugucccacucaagccaagca

SEQ ID NO: 3546046 - RNA, 21 nt, Human
ugucccagaagaugacugagg

SEQ ID NO: 3546047 - RNA, 14 nt, Human
ugucccaggcaggg

SEQ ID NO: 3546048 - RNA, 14 nt, Human
ugucccagguccuc

SEQ ID NO: 3546049 - RNA, 16 nt, Human
ugucccagguccucac

SEQ ID NO: 3546050 - RNA, 18 nt, Human
ugucccauagucccugcc

SEQ ID NO: 3546051 - RNA, 21 nt, Human
ugucccaugacccaccccugu

SEQ ID NO: 3546052 - RNA, 16 nt, Human
ugucccaugaucccug

SEQ ID NO: 3546053 - RNA, 17 nt, Human
ugucccaugcaggcccu

SEQ ID NO: 3546054 - RNA, 19 nt, Human
ugucccauggacacuccag

SEQ ID NO: 3546055 - RNA, 15 nt, Human
ugucccauucccugg

SEQ ID NO: 3546056 - RNA, 17 nt, Human
ugucccauucccuggga

SEQ ID NO: 3546057 - RNA, 18 nt, Human
ugucccauucccugggau

SEQ ID NO: 3546058 - RNA, 20 nt, Human
ugucccauuucuaaaggccu

SEQ ID NO: 3546059 - RNA, 21 nt, Human
ugucccauuuucagacugcuu

SEQ ID NO: 3546060 - RNA, 18 nt, Human
uguccccaaaccugcaag

SEQ ID NO: 3546061 - RNA, 22 nt, Human
uguccccaaauccgaaccuccu

SEQ ID NO: 3546062 - RNA, 20 nt, Human
uguccccaacagcgcccaaa

SEQ ID NO: 3546063 - RNA, 11 nt, Human
uguccccacac

SEQ ID NO: 3546064 - RNA, 14 nt, Human
uguccccacacucc

SEQ ID NO: 3546065 - RNA, 14 nt, Human
uguccccaccaucu

SEQ ID NO: 3546066 - RNA, 12 nt, Human
uguccccagcag

SEQ ID NO: 3546067 - RNA, 13 nt, Human
uguccccagccca

SEQ ID NO: 3546068 - RNA, 13 nt, Human
uguccccaucugu

SEQ ID NO: 3546069 - RNA, 17 nt, Human
ugucccccagcucuggu

SEQ ID NO: 3546070 - RNA, 20 nt, Human
ugucccccagguuccgaaga

SEQ ID NO: 3546071 - RNA, 20 nt, Human
ugucccccugagaucagagu

SEQ ID NO: 3546072 - RNA, 21 nt, Human
ugucccccugagaucagaguc

SEQ ID NO: 3546073 - RNA, 21 nt, Human
ugucccccuuuagaucucuga

SEQ ID NO: 3546074 - RNA, 16 nt, Human
uguccccggccucagc

SEQ ID NO: 3546075 - RNA, 16 nt, Human
uguccccggggcccag

SEQ ID NO: 3546076 - RNA, 17 nt, Human
uguccccguguugcaug

SEQ ID NO: 3546077 - RNA, 15 nt, Human
uguccccucuugccc

SEQ ID NO: 3546078 - RNA, 16 nt, Human
uguccccugacagggc

SEQ ID NO: 3546079 - RNA, 18 nt, Human
uguccccugacagggcca

SEQ ID NO: 3546080 - RNA, 12 nt, Human
uguccccugcuu

SEQ ID NO: 3546081 - RNA, 11 nt, Human
uguccccuucu

SEQ ID NO: 3546082 - RNA, 22 nt, Human
uguccccuucucucaucucuua

SEQ ID NO: 3546083 - RNA, 16 nt, Human
ugucccgauuguaacu

SEQ ID NO: 3546084 - RNA, 16 nt, Human
ugucccgggguccugu

SEQ ID NO: 3546085 - RNA, 19 nt, Human
ugucccgggguccuguggc

SEQ ID NO: 3546086 - RNA, 12 nt, Human
ugucccuacacc

SEQ ID NO: 3546087 - RNA, 21 nt, Human
ugucccuaccgagucucuucu

SEQ ID NO: 3546088 - RNA, 14 nt, Human
ugucccuaggucag

SEQ ID NO: 3546089 - RNA, 17 nt, Human
ugucccuaugcauauca

SEQ ID NO: 3546090 - RNA, 21 nt, Human
ugucccucacuguugaauuuu

SEQ ID NO: 3546091 - RNA, 13 nt, Human
ugucccucccacc

SEQ ID NO: 3546092 - RNA, 17 nt, Human
ugucccucccaccucug

SEQ ID NO: 3546093 - RNA, 18 nt, Human
ugucccucccaccucugu

SEQ ID NO: 3546094 - RNA, 20 nt, Human
ugucccucccaccucuguga

SEQ ID NO: 3546095 - RNA, 14 nt, Human
ugucccucccccuu

SEQ ID NO: 3546096 - RNA, 12 nt, Human
ugucccuccggg

SEQ ID NO: 3546097 - RNA, 13 nt, Human
ugucccuccuggu

SEQ ID NO: 3546098 - RNA, 11 nt, Human
ugucccucuca

SEQ ID NO: 3546099 - RNA, 14 nt, Human
ugucccucucaggc

SEQ ID NO: 3546100 - RNA, 21 nt, Human
ugucccucucggaaggcuggc

SEQ ID NO: 3546101 - RNA, 18 nt, Human
ugucccugcgccuuuccu

SEQ ID NO: 3546102 - RNA, 20 nt, Human
uaagcauuccaacuaucuca

SEQ ID NO: 3546103 - RNA, 20 nt, Human
uaagcauugaaauuauaguu

SEQ ID NO: 3546104 - RNA, 19 nt, Human
uaagcauuguuugcuuauu

SEQ ID NO: 3546105 - RNA, 16 nt, Human
uaagccaaagaaauga

SEQ ID NO: 3546106 - RNA, 20 nt, Human
uaagccaaagaaaugaacau

SEQ ID NO: 3546107 - RNA, 21 nt, Human
uaagccaaagaaaugaacauu

SEQ ID NO: 3546108 - RNA, 15 nt, Human
uaagccaauuucaau

SEQ ID NO: 3546109 - RNA, 16 nt, Human
uaagccacaagaaauu

SEQ ID NO: 3546110 - RNA, 19 nt, Human
uaagccacugccucucccu

SEQ ID NO: 3546111 - RNA, 23 nt, Human
uaagccacugccucucccucugg

SEQ ID NO: 3546112 - RNA, 15 nt, Human
ugugcaaggcagccg

SEQ ID NO: 3546113 - RNA, 19 nt, Human
ugugcaaggcagccguggg

SEQ ID NO: 3546114 - RNA, 18 nt, Human
ugugcaaguaugugagug

SEQ ID NO: 3546115 - RNA, 17 nt, Human
ugugcaauguaaauauu

SEQ ID NO: 3546116 - RNA, 15 nt, Human
ugugcaauguguaua

SEQ ID NO: 3546117 - RNA, 20 nt, Human
ugugcaauguguauaaacaa

SEQ ID NO: 3546118 - RNA, 16 nt, Human
ugugcacaggcagagc

SEQ ID NO: 3546119 - RNA, 20 nt, Human
ugugcacaucucugcuugag

SEQ ID NO: 3546120 - RNA, 15 nt, Human
ugugcacaucuguuu

SEQ ID NO: 3546121 - RNA, 13 nt, Human
ugugcacaucuuc

SEQ ID NO: 3546122 - RNA, 14 nt, Human
ugugcaccaggguu

SEQ ID NO: 3546123 - RNA, 14 nt, Human
ugugcacccauggg

SEQ ID NO: 3546124 - RNA, 19 nt, Human
ugugcacguggcauguggc

SEQ ID NO: 3546125 - RNA, 12 nt, Human
ugugcacuaagg

SEQ ID NO: 3546126 - RNA, 16 nt, Human
ugugcacuaaggggcc

SEQ ID NO: 3546127 - RNA, 20 nt, Human
ugugcacuggcaccaagugc

SEQ ID NO: 3546128 - RNA, 15 nt, Human
ugugcagaaaacauu

SEQ ID NO: 3546129 - RNA, 16 nt, Human
ugugcagaaaacauug

SEQ ID NO: 3546130 - RNA, 17 nt, Human
ugugcagaaaacauugu

SEQ ID NO: 3546131 - RNA, 19 nt, Human
ugugcagaaaacauuguuc

SEQ ID NO: 3546132 - RNA, 18 nt, Human
ugugcagacucaauaaaa

SEQ ID NO: 3546133 - RNA, 22 nt, Human
ugugcagacucaauaaaaucau

SEQ ID NO: 3546134 - RNA, 23 nt, Human
ugugcagacucaauaaaaucaug

SEQ ID NO: 3546135 - RNA, 13 nt, Human
ugugcagacuuca

SEQ ID NO: 3546136 - RNA, 21 nt, Human
ugugcagagcugaagagcugg

SEQ ID NO: 3546137 - RNA, 13 nt, Human
ugugcagaugaag

SEQ ID NO: 3546138 - RNA, 13 nt, Human
ugugcagcagauu

SEQ ID NO: 3546139 - RNA, 16 nt, Human
ugugcagcauuucacu

SEQ ID NO: 3546140 - RNA, 20 nt, Human
ugugcagcgcagcuggacuc

SEQ ID NO: 3546141 - RNA, 16 nt, Human
ugugcagcuuuugguc

SEQ ID NO: 3546142 - RNA, 18 nt, Human
ugugcaggugcuauuguu

SEQ ID NO: 3546143 - RNA, 21 nt, Human
ugugcaggugcuauuguuacu

SEQ ID NO: 3546144 - RNA, 23 nt, Human
ugugcagguggggagacugggcu

SEQ ID NO: 3546145 - RNA, 19 nt, Human
ugugcaguacuuugugcau

SEQ ID NO: 3546146 - RNA, 17 nt, Human
ugugcagucacuggagg

SEQ ID NO: 3546147 - RNA, 18 nt, Human
ugugcagucacuggaggu

SEQ ID NO: 3546148 - RNA, 14 nt, Human
ugugcaguguagcc

SEQ ID NO: 3546149 - RNA, 16 nt, Human
ugugcaguugcuguuu

SEQ ID NO: 3546150 - RNA, 19 nt, Human
ugugcauagagccacguau

SEQ ID NO: 3546151 - RNA, 18 nt, Human
ugugcauagugcugggau

SEQ ID NO: 3546152 - RNA, 15 nt, Human
ugugcauauuguaca

SEQ ID NO: 3546153 - RNA, 17 nt, Human
ugugcauauuguacacu

SEQ ID NO: 3546154 - RNA, 23 nt, Human
ugugcauguaugucuuggacacu

SEQ ID NO: 3546155 - RNA, 22 nt, Human
ugugcaugugugcgagugugug

SEQ ID NO: 3546156 - RNA, 14 nt, Human
ugugcaugugugug

SEQ ID NO: 3546157 - RNA, 23 nt, Human
ugugcauuuggugguuucagaaa

SEQ ID NO: 3546158 - RNA, 14 nt, Human
uaaucccagcuacu

SEQ ID NO: 3546159 - RNA, 19 nt, Human
uaaucccagcuacuuggga

SEQ ID NO: 3546160 - RNA, 20 nt, Human
uaaucccagcuacuugggaa

SEQ ID NO: 3546161 - RNA, 18 nt, Human
uaauccccaguaaaauug

SEQ ID NO: 3546162 - RNA, 20 nt, Human
uaauccccaguaaaauugcc

SEQ ID NO: 3546163 - RNA, 21 nt, Human
uaauccccaguaaaauugcca

SEQ ID NO: 3546164 - RNA, 15 nt, Human
uaaucccccaggaga

SEQ ID NO: 3546165 - RNA, 17 nt, Human
uaauccccuucuccccu

SEQ ID NO: 3546166 - RNA, 21 nt, Human
uaauccccuucuccccugcac

SEQ ID NO: 3546167 - RNA, 20 nt, Human
uaaucccugggcauugcuuu

SEQ ID NO: 3546168 - RNA, 19 nt, Human
uaauccgaaucucuuuuug

SEQ ID NO: 3546169 - RNA, 14 nt, Human
uaauccuguaggaa

SEQ ID NO: 3546170 - RNA, 23 nt, Human
uaauccuguaggaagguacugua

SEQ ID NO: 3546171 - RNA, 21 nt, Human
uaauccuucuaguuucccaca

SEQ ID NO: 3546172 - RNA, 16 nt, Human
uaauccuuuguuuucu

SEQ ID NO: 3546173 - RNA, 20 nt, Human
uaauccuuuguuuucugacu

SEQ ID NO: 3546174 - RNA, 13 nt, Human
uaaucgaaagaaa

SEQ ID NO: 3546175 - RNA, 16 nt, Human
uaaucgaccugccucg

SEQ ID NO: 3546176 - RNA, 15 nt, Human
uaaucggcccacagc

SEQ ID NO: 3546177 - RNA, 16 nt, Human
uaaucguguccccuau

SEQ ID NO: 3546178 - RNA, 15 nt, Human
uaaucguuaugugug

SEQ ID NO: 3546179 - RNA, 17 nt, Human
uaaucguuaugugugua

SEQ ID NO: 3546180 - RNA, 18 nt, Human
uaaucguuauguguguau

SEQ ID NO: 3546181 - RNA, 14 nt, Human
uaaucuagaacaca

SEQ ID NO: 3546182 - RNA, 18 nt, Human
uaaucuauuggguucauu

SEQ ID NO: 3546183 - RNA, 19 nt, Human
uaaucuauuucuaugagaa

SEQ ID NO: 3546184 - RNA, 17 nt, Human
uaaucucauaccucuga

SEQ ID NO: 3546185 - RNA, 18 nt, Human
uaaucuccucuuuuaucu

SEQ ID NO: 3546186 - RNA, 17 nt, Human
uaaucucucugcagcug

SEQ ID NO: 3546187 - RNA, 18 nt, Human
uaaucucucugcagcugc

SEQ ID NO: 3546188 - RNA, 23 nt, Human
uaaucucugauucccugauuuaa

SEQ ID NO: 3546189 - RNA, 17 nt, Human
uaaucucuguaaagcua

SEQ ID NO: 3546190 - RNA, 12 nt, Human
uaaucucuguua

SEQ ID NO: 3546191 - RNA, 18 nt, Human
uaaucucuguuauguacu

SEQ ID NO: 3546192 - RNA, 22 nt, Human
uaaucucuguuauguacuguac

SEQ ID NO: 3546193 - RNA, 14 nt, Human
uaaucugaaauucu

SEQ ID NO: 3546194 - RNA, 15 nt, Human
uaaucugcuaugcuu

SEQ ID NO: 3546195 - RNA, 18 nt, Human
uaaucuggacuccucugu

SEQ ID NO: 3546196 - RNA, 20 nt, Human
uaaucuggacuccucugucc

SEQ ID NO: 3546197 - RNA, 22 nt, Human
uaaucuggacuccucuguccag

SEQ ID NO: 3546198 - RNA, 16 nt, Human
uaaucugucaaaacac

SEQ ID NO: 3546199 - RNA, 17 nt, Human
uaaucugucaaaacacu

SEQ ID NO: 3546200 - RNA, 18 nt, Human
uaaucugucaaaacacug

SEQ ID NO: 3546201 - RNA, 20 nt, Human
uaaucuuaggggagagcuuu

SEQ ID NO: 3546202 - RNA, 15 nt, Human
uaaucuuauaauugu

SEQ ID NO: 3546203 - RNA, 21 nt, Human
uaaucuuauucauuuucucua

SEQ ID NO: 3546204 - RNA, 15 nt, Human
uaaucuuauuuagga

SEQ ID NO: 3546205 - RNA, 16 nt, Human
uaaucuucaguuuuau

SEQ ID NO: 3546206 - RNA, 22 nt, Human
uaaucuugaauuguaacuguuc

SEQ ID NO: 3546207 - RNA, 16 nt, Human
uaaucuuuucacaaau

SEQ ID NO: 3546208 - RNA, 17 nt, Human
uaaucuuuucacaaaua

SEQ ID NO: 3546209 - RNA, 17 nt, Human
uaaugaaacaaagaguu

SEQ ID NO: 3546210 - RNA, 18 nt, Human
uaaugaaagacuguacaa

SEQ ID NO: 3546211 - RNA, 22 nt, Human
uaaugaaagacuguacaaagua

SEQ ID NO: 3546212 - RNA, 19 nt, Human
uaaugaaagugaugacaua

SEQ ID NO: 3546213 - RNA, 13 nt, Human
uaaugaaauggag

SEQ ID NO: 3546214 - RNA, 17 nt, Human
uaaugaacaaaauuauu

SEQ ID NO: 3546215 - RNA, 13 nt, Human
uaaugaacaaaug

SEQ ID NO: 3546216 - RNA, 22 nt, Human
uaaugaagaaaguggaaaacaa

SEQ ID NO: 3546217 - RNA, 17 nt, Human
uaaugaagaucuaaaua

SEQ ID NO: 3546218 - RNA, 22 nt, Human
uaaugaagggaaaggauauuuu

SEQ ID NO: 3546219 - RNA, 15 nt, Human
uaaugaaguuugaau

SEQ ID NO: 3546220 - RNA, 16 nt, Human
uaaugaaguuugaaug

SEQ ID NO: 3546221 - RNA, 18 nt, Human
uaaugaaguuugaauguu

SEQ ID NO: 3546222 - RNA, 19 nt, Human
uaaugaaguuugaauguua

SEQ ID NO: 3546223 - RNA, 20 nt, Human
uaaugaaguuugaauguuaa

SEQ ID NO: 3546224 - RNA, 17 nt, Human
uaaugaaugaaacauuu

SEQ ID NO: 3546225 - RNA, 13 nt, Human
uaaugaaugcuua

SEQ ID NO: 3546226 - RNA, 15 nt, Human
uaaugacacuugucc

SEQ ID NO: 3546227 - RNA, 15 nt, Human
uaaugacaggccugu

SEQ ID NO: 3546228 - RNA, 20 nt, Human
uaaugacaggccuguccaac

SEQ ID NO: 3546229 - RNA, 20 nt, Human
uaaugaccaugaaagacuuc

SEQ ID NO: 3546230 - RNA, 14 nt, Human
uaaugacgaggaac

SEQ ID NO: 3546231 - RNA, 21 nt, Human
uaaugacuuaagcacacuuga

SEQ ID NO: 3546232 - RNA, 21 nt, Human
uaaugagcaauaucugcuaga

SEQ ID NO: 3546233 - RNA, 21 nt, Human
uaaugagcuauuaaaacucag

SEQ ID NO: 3546234 - RNA, 16 nt, Human
uaaugaggaugauuau

SEQ ID NO: 3546235 - RNA, 19 nt, Human
uaaugauaaguaaaugcua

SEQ ID NO: 3546236 - RNA, 16 nt, Human
uaaugauaugcuugua

SEQ ID NO: 3546237 - RNA, 22 nt, Human
uaaugaugaugggaauugugug

SEQ ID NO: 3546238 - RNA, 22 nt, Human
uaaugauggcccauucuacuug

SEQ ID NO: 3546239 - RNA, 17 nt, Human
uaaugaugucguuugaa

SEQ ID NO: 3546240 - RNA, 12 nt, Human
uaaugcacuuuc

SEQ ID NO: 3546241 - RNA, 13 nt, Human
uaaugcacuuucu

SEQ ID NO: 3546242 - RNA, 17 nt, Human
uaaugcaguaugguaca

SEQ ID NO: 3546243 - RNA, 20 nt, Human
uaaugcaguaugguacauuu

SEQ ID NO: 3546244 - RNA, 21 nt, Human
uaaugcauguuaggaaaauuu

SEQ ID NO: 3546245 - RNA, 14 nt, Human
uaaugcgauuuuau

SEQ ID NO: 3546246 - RNA, 15 nt, Human
uaaugcgauuuuauu

SEQ ID NO: 3546247 - RNA, 15 nt, Human
uaaugcgugcauacc

SEQ ID NO: 3546248 - RNA, 23 nt, Human
uaaugcgugcauaccacuuuugu

SEQ ID NO: 3546249 - RNA, 22 nt, Human
uaaugcuaaauguaagaaucau

SEQ ID NO: 3546250 - RNA, 18 nt, Human
uaaugcuacgugugauuu

SEQ ID NO: 3546251 - RNA, 13 nt, Human
uaaugcuacuguc

SEQ ID NO: 3546252 - RNA, 13 nt, Human
uaaugcuccuugu

SEQ ID NO: 3546253 - RNA, 18 nt, Human
uaaugcuccuuguuccua

SEQ ID NO: 3546254 - RNA, 16 nt, Human
uaaugcugcacuuccu

SEQ ID NO: 3546255 - RNA, 12 nt, Human
uaaugcugccuu

SEQ ID NO: 3546256 - RNA, 21 nt, Human
uaauucagguuuuuccuuuuu

SEQ ID NO: 3546257 - RNA, 21 nt, Human
uaauucaguauguuuuacacu

SEQ ID NO: 3546258 - RNA, 20 nt, Human
uaauucaguguauuucaguu

SEQ ID NO: 3546259 - RNA, 15 nt, Human
uaauucauauucuuc

SEQ ID NO: 3546260 - RNA, 18 nt, Human
uaauuccaauaugaugac

SEQ ID NO: 3546261 - RNA, 19 nt, Human
uaauuccaauaugaugacu

SEQ ID NO: 3546262 - RNA, 14 nt, Human
uaauuccacagcug

SEQ ID NO: 3546263 - RNA, 15 nt, Human
uaauuccaugaaugu

SEQ ID NO: 3546264 - RNA, 16 nt, Human
uaauucccauuuugca

SEQ ID NO: 3546265 - RNA, 21 nt, Human
uaauucccauuuugcaaaauu

SEQ ID NO: 3546266 - RNA, 15 nt, Human
uaauucccuaucuuu

SEQ ID NO: 3546267 - RNA, 13 nt, Human
uaauuccuacagc

SEQ ID NO: 3546268 - RNA, 19 nt, Human
uaauuccucaacguauugu

SEQ ID NO: 3546269 - RNA, 19 nt, Human
uaauuccuuuccagguauu

SEQ ID NO: 3546270 - RNA, 16 nt, Human
uaauucuaaccagagc

SEQ ID NO: 3546271 - RNA, 20 nt, Human
uaauucucaugugauccuuu

SEQ ID NO: 3546272 - RNA, 14 nt, Human
uaauucugaaguua

SEQ ID NO: 3546273 - RNA, 17 nt, Human
uaauucugaaguuauau

SEQ ID NO: 3546274 - RNA, 19 nt, Human
uaauucugaaguuauauuu

SEQ ID NO: 3546275 - RNA, 12 nt, Human
uaauucuguaaa

SEQ ID NO: 3546276 - RNA, 21 nt, Human
uaauucuguacauagccuaua

SEQ ID NO: 3546277 - RNA, 14 nt, Human
uaauucuguacuga

SEQ ID NO: 3546278 - RNA, 20 nt, Human
uaauucuguucugauauuaa

SEQ ID NO: 3546279 - RNA, 16 nt, Human
uaauucuuauuccaua

SEQ ID NO: 3546280 - RNA, 15 nt, Human
uaauucuuccuuugu

SEQ ID NO: 3546281 - RNA, 15 nt, Human
uaauucuucuguccu

SEQ ID NO: 3546282 - RNA, 19 nt, Human
uaauucuuugaccuguugg

SEQ ID NO: 3546283 - RNA, 16 nt, Human
uaauucuuuuuuauua

SEQ ID NO: 3546284 - RNA, 17 nt, Human
uaauucuuuuuuauuaa

SEQ ID NO: 3546285 - RNA, 19 nt, Human
uaauucuuuuuuauuaauc

SEQ ID NO: 3546286 - RNA, 21 nt, Human
uaauucuuuuuuauuaaucac

SEQ ID NO: 3546287 - RNA, 14 nt, Human
uaauugaaggaaag

SEQ ID NO: 3546288 - RNA, 22 nt, Human
uaauugaaggaaagauuuguac

SEQ ID NO: 3546289 - RNA, 17 nt, Human
uaauugacgguuuuuua

SEQ ID NO: 3546290 - RNA, 17 nt, Human
uaauugaucaguuuuca

SEQ ID NO: 3546291 - RNA, 14 nt, Human
uaauugcacaacag

SEQ ID NO: 3546292 - RNA, 11 nt, Human
uaauugcacuc

SEQ ID NO: 3546293 - RNA, 18 nt, Human
uaauugcaucucaaaauu

SEQ ID NO: 3546294 - RNA, 12 nt, Human
uaauugcauuca

SEQ ID NO: 3546295 - RNA, 17 nt, Human
uaauugcauuugcuuuu

SEQ ID NO: 3546296 - RNA, 23 nt, Human
uaauugccaaaaagugaaauaau

SEQ ID NO: 3546297 - RNA, 18 nt, Human
uaauugccaccucuaaca

SEQ ID NO: 3546298 - RNA, 11 nt, Human
uaauugccaug

SEQ ID NO: 3546299 - RNA, 16 nt, Human
uaauugcugaggcaug

SEQ ID NO: 3546300 - RNA, 18 nt, Human
uaauugcuguugaaagca

SEQ ID NO: 3546301 - RNA, 20 nt, Human
uaauugcuguugaaagcaaa

SEQ ID NO: 3546302 - RNA, 13 nt, Human
uaauugcuuauuu

SEQ ID NO: 3546303 - RNA, 21 nt, Human
uaauugcuuauuuauuguauu

SEQ ID NO: 3546304 - RNA, 12 nt, Human
uaauugcuuuga

SEQ ID NO: 3546305 - RNA, 16 nt, Human
uaauuggauuuccuaa

SEQ ID NO: 3546306 - RNA, 14 nt, Human
uaauuggcagcaga

SEQ ID NO: 3546307 - RNA, 17 nt, Human
uaauugggcacuauuua

SEQ ID NO: 3546308 - RNA, 18 nt, Human
uaauugggucauagaaau

SEQ ID NO: 3546309 - RNA, 20 nt, Human
uaauugguuaucaugggaaa

SEQ ID NO: 3546310 - RNA, 14 nt, Human
uaauuguaaacugu

SEQ ID NO: 3546311 - RNA, 17 nt, Human
uaauuguacaaaauuaa

SEQ ID NO: 3546312 - RNA, 23 nt, Human
uaauuguacaaaauuaagcaaau

SEQ ID NO: 3546313 - RNA, 22 nt, Human
uaauuguacuaaagccaaacau

SEQ ID NO: 3546314 - RNA, 16 nt, Human
uaauuguauaacaggu

SEQ ID NO: 3546315 - RNA, 23 nt, Human
uaauuguaucguauagcuguauu

SEQ ID NO: 3546316 - RNA, 15 nt, Human
uaauuguauuuuugu

SEQ ID NO: 3546317 - RNA, 21 nt, Human
uaauugugaaaaaguuaaaca

SEQ ID NO: 3546318 - RNA, 22 nt, Human
uaauugugauuagacagaacac

SEQ ID NO: 3546319 - RNA, 12 nt, Human
uaauugugugaa

SEQ ID NO: 3546320 - RNA, 20 nt, Human
uaauugugugaacuuggaag

SEQ ID NO: 3546321 - RNA, 21 nt, Human
uaauugugugaacuuggaagc

SEQ ID NO: 3546322 - RNA, 15 nt, Human
uaauugugugauauu

SEQ ID NO: 3546323 - RNA, 18 nt, Human
uaauuguguuuacauuuu

SEQ ID NO: 3546324 - RNA, 22 nt, Human
uuauauggaugauucagaaauu

SEQ ID NO: 3546325 - RNA, 16 nt, Human
uuauauguacaugaga

SEQ ID NO: 3546326 - RNA, 19 nt, Human
uuauauguacaugagaagg

SEQ ID NO: 3546327 - RNA, 15 nt, Human
uuauauguauccagu

SEQ ID NO: 3546328 - RNA, 17 nt, Human
uuauaugugaucuuugu

SEQ ID NO: 3546329 - RNA, 20 nt, Human
uuauauuaauaguaauuugu

SEQ ID NO: 3546330 - RNA, 16 nt, Human
uuauauuaugaagcuu

SEQ ID NO: 3546331 - RNA, 14 nt, Human
uuauauuccauaua

SEQ ID NO: 3546332 - RNA, 16 nt, Human
uuauauuccauauauu

SEQ ID NO: 3546333 - RNA, 21 nt, Human
uuauauuccauauauuagcau

SEQ ID NO: 3546334 - RNA, 18 nt, Human
uuauauuccucuugcauu

SEQ ID NO: 3546335 - RNA, 16 nt, Human
uuauauucucagcaga

SEQ ID NO: 3546336 - RNA, 18 nt, Human
uuauauucucagcagagu

SEQ ID NO: 3546337 - RNA, 20 nt, Human
uuauauucucagcagagugc

SEQ ID NO: 3546338 - RNA, 12 nt, Human
uuauauugaaaa

SEQ ID NO: 3546339 - RNA, 15 nt, Human
uuauauugaagacaa

SEQ ID NO: 3546340 - RNA, 14 nt, Human
uuauauugagacaa

SEQ ID NO: 3546341 - RNA, 24 nt, Human
uuauauuguaagaaauacuguaca

SEQ ID NO: 3546342 - RNA, 11 nt, Human
uuauauuuaau

SEQ ID NO: 3546343 - RNA, 19 nt, Human
uuauauuuaguuauaguuu

SEQ ID NO: 3546344 - RNA, 22 nt, Human
uuauauuuaguuauaguuucag

SEQ ID NO: 3546345 - RNA, 20 nt, Human
uuauauuuauuacuguaaga

SEQ ID NO: 3546346 - RNA, 19 nt, Human
uuauauuucaaguacacug

SEQ ID NO: 3546347 - RNA, 11 nt, Human
uuauauuucag

SEQ ID NO: 3546348 - RNA, 21 nt, Human
uuauauuucagauguaauguu

SEQ ID NO: 3546349 - RNA, 22 nt, Human
uuauauuucagauguaauguuu

SEQ ID NO: 3546350 - RNA, 23 nt, Human
uuauauuucccuaaaauacauuu

SEQ ID NO: 3546351 - RNA, 12 nt, Human
uuauauuuccuu

SEQ ID NO: 3546352 - RNA, 13 nt, Human
uuauauuuccuuu

SEQ ID NO: 3546353 - RNA, 16 nt, Human
uuauauuuccuuuaug

SEQ ID NO: 3546354 - RNA, 21 nt, Human
uuauauuuccuuuaugugaau

SEQ ID NO: 3546355 - RNA, 15 nt, Human
uuauauuugaaauau

SEQ ID NO: 3546356 - RNA, 19 nt, Human
uuauauuugaaauauugac

SEQ ID NO: 3546357 - RNA, 22 nt, Human
uuauauuuggaugcagaguuca

SEQ ID NO: 3546358 - RNA, 15 nt, Human
uuauauuuguaggag

SEQ ID NO: 3546359 - RNA, 13 nt, Human
uuauauuuguauc

SEQ ID NO: 3546360 - RNA, 18 nt, Human
uuauauuuucguaugaaa

SEQ ID NO: 3546361 - RNA, 17 nt, Human
uuauauuuucuuuguaa

SEQ ID NO: 3546362 - RNA, 13 nt, Human
uuauauuuuuaaa

SEQ ID NO: 3546363 - RNA, 17 nt, Human
uuauauuuuuaauaaaa

SEQ ID NO: 3546364 - RNA, 15 nt, Human
uuaucaaaacuuucu

SEQ ID NO: 3546365 - RNA, 23 nt, Human
uuaucaaaauagucuaaggccau

SEQ ID NO: 3546366 - RNA, 19 nt, Human
uuaucaaacccuagccuug

SEQ ID NO: 3546367 - RNA, 13 nt, Human
uuaucaaagcaua

SEQ ID NO: 3546368 - RNA, 15 nt, Human
uuaucaaagcauaga

SEQ ID NO: 3546369 - RNA, 17 nt, Human
uuaucaauagcccagga

SEQ ID NO: 3546370 - RNA, 16 nt, Human
uuaucaauaucuaaua

SEQ ID NO: 3546371 - RNA, 20 nt, Human
uuaucaaugugucuuucuaa

SEQ ID NO: 3546372 - RNA, 15 nt, Human
uuaucaauuugucau

SEQ ID NO: 3546373 - RNA, 20 nt, Human
uuaucacaaaaaagaaaaug

SEQ ID NO: 3546374 - RNA, 13 nt, Human
uuaucacacaaag

SEQ ID NO: 3546375 - RNA, 23 nt, Human
uuaucacaccaucgcuggccccu

SEQ ID NO: 3546376 - RNA, 18 nt, Human
uuaucacauguauguuuu

SEQ ID NO: 3546377 - RNA, 22 nt, Human
uuaucaccacaguaaguuccua

SEQ ID NO: 3546378 - RNA, 19 nt, Human
uuaucaccuagcugaaugu

SEQ ID NO: 3546379 - RNA, 23 nt, Human
uuaucaccuagcugaauguuuuu

SEQ ID NO: 3546380 - RNA, 18 nt, Human
uuaucacugacacaaaaa

SEQ ID NO: 3546381 - RNA, 14 nt, Human
uuaucagauacauc

SEQ ID NO: 3546382 - RNA, 21 nt, Human
uuaucagauugcuuuugugca

SEQ ID NO: 3546383 - RNA, 20 nt, Human
uuaucaguaagaaaaagaag

SEQ ID NO: 3546384 - RNA, 15 nt, Human
uuaucagucaauauu

SEQ ID NO: 3546385 - RNA, 21 nt, Human
uuaucagucauaacuaaauaa

SEQ ID NO: 3546386 - RNA, 17 nt, Human
uuaucagugacagaguu

SEQ ID NO: 3546387 - RNA, 19 nt, Human
uuaucaguuugcuaauguu

SEQ ID NO: 3546388 - RNA, 20 nt, Human
uuaucaguuugcuaauguuu

SEQ ID NO: 3546389 - RNA, 16 nt, Human
uuaucaugcaaaugcu

SEQ ID NO: 3546390 - RNA, 19 nt, Human
uuaucauggucucagucau

SEQ ID NO: 3546391 - RNA, 18 nt, Human
uuaucaugugaaaucauu

SEQ ID NO: 3546392 - RNA, 12 nt, Human
uuaucaugugua

SEQ ID NO: 3546393 - RNA, 17 nt, Human
uuaucauguuaguaaua

SEQ ID NO: 3546394 - RNA, 17 nt, Human
uuauccaaaauguguau

SEQ ID NO: 3546395 - RNA, 14 nt, Human
uuauccaaucuugu

SEQ ID NO: 3546396 - RNA, 17 nt, Human
uuauccaaucuuguuuc

SEQ ID NO: 3546397 - RNA, 19 nt, Human
uuauccacagaaacauuuu

SEQ ID NO: 3546398 - RNA, 18 nt, Human
uuauccacaugaaaauaa

SEQ ID NO: 3546399 - RNA, 16 nt, Human
uuauccaccuccaucu

SEQ ID NO: 3546400 - RNA, 12 nt, Human
uuauccaggacu

SEQ ID NO: 3546401 - RNA, 21 nt, Human
uguucuccugcugcucccuca

SEQ ID NO: 3546402 - RNA, 21 nt, Human
uguucuccuuuuccucucucc

SEQ ID NO: 3546403 - RNA, 17 nt, Human
uguucucggagugugua

SEQ ID NO: 3546404 - RNA, 18 nt, Human
uguucucggaguguguau

SEQ ID NO: 3546405 - RNA, 16 nt, Human
uguucucucuucucca

SEQ ID NO: 3546406 - RNA, 13 nt, Human
uguucucugagga

SEQ ID NO: 3546407 - RNA, 18 nt, Human
uguucucugaggacacua

SEQ ID NO: 3546408 - RNA, 13 nt, Human
uguucugaacugu

SEQ ID NO: 3546409 - RNA, 20 nt, Human
uguucugacauuaacaguuu

SEQ ID NO: 3546410 - RNA, 14 nt, Human
uguucugacccugc

SEQ ID NO: 3546411 - RNA, 16 nt, Human
uguucugauuagaaau

SEQ ID NO: 3546412 - RNA, 12 nt, Human
uguucugcacug

SEQ ID NO: 3546413 - RNA, 15 nt, Human
uguucugcacugaaa

SEQ ID NO: 3546414 - RNA, 17 nt, Human
uguucugcacugaaaag

SEQ ID NO: 3546415 - RNA, 16 nt, Human
uguucugcccccagcc

SEQ ID NO: 3546416 - RNA, 18 nt, Human
uguucugcccccagccca

SEQ ID NO: 3546417 - RNA, 18 nt, Human
uguucugcuguucucuag

SEQ ID NO: 3546418 - RNA, 13 nt, Human
uguucuggcccuc

SEQ ID NO: 3546419 - RNA, 12 nt, Human
uguucugggaca

SEQ ID NO: 3546420 - RNA, 21 nt, Human
uguucuggugaggccuugcuc

SEQ ID NO: 3546421 - RNA, 15 nt, Human
uguucugugauauaa

SEQ ID NO: 3546422 - RNA, 18 nt, Human
uguucugugauauaagug

SEQ ID NO: 3546423 - RNA, 22 nt, Human
uguucuguggaaaguguaaagc

SEQ ID NO: 3546424 - RNA, 14 nt, Human
uguucugugucuuu

SEQ ID NO: 3546425 - RNA, 21 nt, Human
uguucuguuaacugaauacca

SEQ ID NO: 3546426 - RNA, 14 nt, Human
uguucuguuuguua

SEQ ID NO: 3546427 - RNA, 17 nt, Human
uguucuguuuguuaaaa

SEQ ID NO: 3546428 - RNA, 21 nt, Human
uguucuguuuguuaaaacugg

SEQ ID NO: 3546429 - RNA, 19 nt, Human
uguucuguuuguuauuguu

SEQ ID NO: 3546430 - RNA, 14 nt, Human
uguucuuacacaua

SEQ ID NO: 3546431 - RNA, 22 nt, Human
uguucuuaccuguaugucucca

SEQ ID NO: 3546432 - RNA, 18 nt, Human
uguucuuagcucaaugag

SEQ ID NO: 3546433 - RNA, 11 nt, Human
uguucuuccag

SEQ ID NO: 3546434 - RNA, 13 nt, Human
uguucuuccucca

SEQ ID NO: 3546435 - RNA, 12 nt, Human
uguucuuccugg

SEQ ID NO: 3546436 - RNA, 15 nt, Human
uguucuuccuggccg

SEQ ID NO: 3546437 - RNA, 13 nt, Human
uguucuugaauuu

SEQ ID NO: 3546438 - RNA, 23 nt, Human
uguucuugaauuuaauaaucugu

SEQ ID NO: 3546439 - RNA, 13 nt, Human
uguucuugcugcu

SEQ ID NO: 3546440 - RNA, 14 nt, Human
uguucuugcugcua

SEQ ID NO: 3546441 - RNA, 17 nt, Human
uguucuugcugcuagaa

SEQ ID NO: 3546442 - RNA, 20 nt, Human
uguucuuggcaauaaauuuu

SEQ ID NO: 3546443 - RNA, 20 nt, Human
uguucuugguuuguaaauua

SEQ ID NO: 3546444 - RNA, 18 nt, Human
uguucuuguuuuuaaguu

SEQ ID NO: 3546445 - RNA, 13 nt, Human
uguucuuuauaua

SEQ ID NO: 3546446 - RNA, 14 nt, Human
uguucuuuauauac

SEQ ID NO: 3546447 - RNA, 15 nt, Human
uguucuuuauauaca

SEQ ID NO: 3546448 - RNA, 15 nt, Human
uguucuuucagaaag

SEQ ID NO: 3546449 - RNA, 13 nt, Human
uguucuuuccaaa

SEQ ID NO: 3546450 - RNA, 21 nt, Human
uguucuuuucccccaaagugg

SEQ ID NO: 3546451 - RNA, 14 nt, Human
uguucuuuuuauug

SEQ ID NO: 3546452 - RNA, 13 nt, Human
uguugaaaaaauu

SEQ ID NO: 3546453 - RNA, 18 nt, Human
uguugaaaaccaaaauga

SEQ ID NO: 3546454 - RNA, 20 nt, Human
uguugaaaagaguaguacuu

SEQ ID NO: 3546455 - RNA, 21 nt, Human
uguugaaacggaugauuucua

SEQ ID NO: 3546456 - RNA, 12 nt, Human
uguugaacaaaa

SEQ ID NO: 3546457 - RNA, 15 nt, Human
uguugaacaaaauaa

SEQ ID NO: 3546458 - RNA, 15 nt, Human
uguugaacuguuaga

SEQ ID NO: 3546459 - RNA, 11 nt, Human
uguugaagagc

SEQ ID NO: 3546460 - RNA, 19 nt, Human
uguugaagagguuuuaaag

SEQ ID NO: 3546461 - RNA, 22 nt, Human
uguugaaugcccacaggcaaau

SEQ ID NO: 3546462 - RNA, 19 nt, Human
uguugacauccaagcuucc

SEQ ID NO: 3546463 - RNA, 14 nt, Human
uguugacaugugcu

SEQ ID NO: 3546464 - RNA, 12 nt, Human
uguugacauuag

SEQ ID NO: 3546465 - RNA, 23 nt, Human
uguugacauucugaaugcuucua

SEQ ID NO: 3546466 - RNA, 22 nt, Human
uguugaccaggcaccuccccuc

SEQ ID NO: 3546467 - RNA, 18 nt, Human
uguugaccaugucuauga

SEQ ID NO: 3546468 - RNA, 16 nt, Human
uguugacgcaccugug

SEQ ID NO: 3546469 - RNA, 22 nt, Human
uguugagaaucccaaauuugau

SEQ ID NO: 3546470 - RNA, 13 nt, Human
uguugagagguuc

SEQ ID NO: 3546471 - RNA, 16 nt, Human
uguugagccuuuuccc

SEQ ID NO: 3546472 - RNA, 21 nt, Human
uguugagcugguaacaucguu

SEQ ID NO: 3546473 - RNA, 13 nt, Human
uguugagcuguuu

SEQ ID NO: 3546474 - RNA, 22 nt, Human
uguugaggcuuauauuugugua

SEQ ID NO: 3546475 - RNA, 19 nt, Human
uguugauaaaaauacugac

SEQ ID NO: 3546476 - RNA, 22 nt, Human
uguugauaaauuccacuggacu

SEQ ID NO: 3546477 - RNA, 17 nt, Human
uguugaucauguacuuu

SEQ ID NO: 3546478 - RNA, 20 nt, Human
uguugaucauguacuuuuua

SEQ ID NO: 3546479 - RNA, 20 nt, Human
uguugauccauccagcuugc

SEQ ID NO: 3546480 - RNA, 20 nt, Human
uguugaugcaauccuuacaa

SEQ ID NO: 3546481 - RNA, 16 nt, Human
uguugaugcuguauuc

SEQ ID NO: 3546482 - RNA, 16 nt, Human
uguugaugcuuucguc

SEQ ID NO: 3546483 - RNA, 21 nt, Human
uguugaugggaugauugaaga

SEQ ID NO: 3546484 - RNA, 23 nt, Human
uguugaugggaugauugaagaaa

SEQ ID NO: 3546485 - RNA, 13 nt, Human
uguugauguaucu

SEQ ID NO: 3546486 - RNA, 13 nt, Human
uguugauuaaaac

SEQ ID NO: 3546487 - RNA, 11 nt, Human
uguugauuauu

SEQ ID NO: 3546488 - RNA, 16 nt, Human
uguugauuauuagcca

SEQ ID NO: 3546489 - RNA, 13 nt, Human
uguugauugcuaa

SEQ ID NO: 3546490 - RNA, 14 nt, Human
uguugauugcuaaa

SEQ ID NO: 3546491 - RNA, 16 nt, Human
uguugauugcuaaaug

SEQ ID NO: 3546492 - RNA, 17 nt, Human
uguugauugcuaaaugu

SEQ ID NO: 3546493 - RNA, 19 nt, Human
uguugauugcuaaauguaa

SEQ ID NO: 3546494 - RNA, 20 nt, Human
uguugauuuuuacuguguuu

SEQ ID NO: 3546495 - RNA, 16 nt, Human
uguugcaagaugugaa

SEQ ID NO: 3546496 - RNA, 19 nt, Human
uguugcaagaugugaauua

SEQ ID NO: 3546497 - RNA, 17 nt, Human
uguugcacccagcccug

SEQ ID NO: 3546498 - RNA, 19 nt, Human
uguugcacccagcccuggu

SEQ ID NO: 3546499 - RNA, 15 nt, Human
uguugcauagaauaa

SEQ ID NO: 3546500 - RNA, 14 nt, Human
uguugcauggaugu

SEQ ID NO: 3546501 - RNA, 15 nt, Human
uguugcauguuugaa

SEQ ID NO: 3546502 - RNA, 20 nt, Human
uguugccaaauauguccugg

SEQ ID NO: 3546503 - RNA, 22 nt, Human
uguugccaaauauguccugggg

SEQ ID NO: 3546504 - RNA, 20 nt, Human
uguugccaagcuccaagccc

SEQ ID NO: 3546505 - RNA, 14 nt, Human
uguugccacaggac

SEQ ID NO: 3546506 - RNA, 16 nt, Human
uguugccacuuuccaa

SEQ ID NO: 3546507 - RNA, 15 nt, Human
uguugccauguguuu

SEQ ID NO: 3546508 - RNA, 18 nt, Human
uguugcccaggcaggucu

SEQ ID NO: 3546509 - RNA, 19 nt, Human
uguugcccaggcaggucuu

SEQ ID NO: 3546510 - RNA, 20 nt, Human
uguugcccaggcuggcgugc

SEQ ID NO: 3546511 - RNA, 23 nt, Human
uguugcccaggcuggcgugcagu

SEQ ID NO: 3546512 - RNA, 17 nt, Human
uguugccccuuucucuu

SEQ ID NO: 3546513 - RNA, 12 nt, Human
uguugcccuggg

SEQ ID NO: 3546514 - RNA, 15 nt, Human
uguugcccuuucugu

SEQ ID NO: 3546515 - RNA, 22 nt, Human
uguugccuaaguauuaaaacau

SEQ ID NO: 3546516 - RNA, 18 nt, Human
uguugccuauaagccaaa

SEQ ID NO: 3546517 - RNA, 20 nt, Human
uguugccuugaaccacuucc

SEQ ID NO: 3546518 - RNA, 22 nt, Human
uguugccuuuuucauuuuccaa

SEQ ID NO: 3546519 - RNA, 19 nt, Human
uguugcucaaaaaaugagc

SEQ ID NO: 3546520 - RNA, 14 nt, Human
uguugcucagaagu

SEQ ID NO: 3546521 - RNA, 14 nt, Human
uguugcucagucuc

SEQ ID NO: 3546522 - RNA, 17 nt, Human
uguugcucuaggaagac

SEQ ID NO: 3546523 - RNA, 15 nt, Human
uguugcuuacaauuu

SEQ ID NO: 3546524 - RNA, 17 nt, Human
uguugcuucuugugaag

SEQ ID NO: 3546525 - RNA, 14 nt, Human
uguugcuuggacua

SEQ ID NO: 3546526 - RNA, 12 nt, Human
uguugcuuuguu

SEQ ID NO: 3546527 - RNA, 13 nt, Human
uguuggaaaaaau

SEQ ID NO: 3546528 - RNA, 14 nt, Human
uguuggaaaaaauu

SEQ ID NO: 3546529 - RNA, 15 nt, Human
uguuggaaaaaauuu

SEQ ID NO: 3546530 - RNA, 13 nt, Human
uguuggaaaagaa

SEQ ID NO: 3546531 - RNA, 20 nt, Human
uguuggacaaaugugaagau

SEQ ID NO: 3546532 - RNA, 20 nt, Human
uucaagucuaccaauuauaa

SEQ ID NO: 3546533 - RNA, 20 nt, Human
uucaagugauucuccugccu

SEQ ID NO: 3546534 - RNA, 18 nt, Human
uucaagugcuucuccagc

SEQ ID NO: 3546535 - RNA, 18 nt, Human
uucaaguggggcucgcca

SEQ ID NO: 3546536 - RNA, 19 nt, Human
uucaaguguaaaauauuuu

SEQ ID NO: 3546537 - RNA, 14 nt, Human
uucaaguuauugua

SEQ ID NO: 3546538 - RNA, 20 nt, Human
uucaaguuauuguacagcug

SEQ ID NO: 3546539 - RNA, 14 nt, Human
uucaaguucaaucc

SEQ ID NO: 3546540 - RNA, 23 nt, Human
uucaaguuccaaguugcuaauac

SEQ ID NO: 3546541 - RNA, 14 nt, Human
uucaaguuuuaaag

SEQ ID NO: 3546542 - RNA, 15 nt, Human
uucaaguuuuaaagu

SEQ ID NO: 3546543 - RNA, 14 nt, Human
uucaauaaaguauc

SEQ ID NO: 3546544 - RNA, 18 nt, Human
uucaauaaaguauuuaau

SEQ ID NO: 3546545 - RNA, 18 nt, Human
uucaauaaaguuugaucu

SEQ ID NO: 3546546 - RNA, 21 nt, Human
uucaauaaaguuugaucuucc

SEQ ID NO: 3546547 - RNA, 11 nt, Human
uucagaaaaaa

SEQ ID NO: 3546548 - RNA, 12 nt, Human
uucagaaaacag

SEQ ID NO: 3546549 - RNA, 18 nt, Human
uucagaaaacagaaaaaa

SEQ ID NO: 3546550 - RNA, 19 nt, Human
uucagaaaacagaaaaaaa

SEQ ID NO: 3546551 - RNA, 22 nt, Human
uucagaaaacagaaaaaaaaca

SEQ ID NO: 3546552 - RNA, 23 nt, Human
uucagaaaacagaaaaaaaacac

SEQ ID NO: 3546553 - RNA, 23 nt, Human
uucagaaaacccuuuucuacagu

SEQ ID NO: 3546554 - RNA, 20 nt, Human
uucagaaaauauuauguguu

SEQ ID NO: 3546555 - RNA, 22 nt, Human
uucagaaacaaagcauuugacu

SEQ ID NO: 3546556 - RNA, 15 nt, Human
uucagaaagaagugg

SEQ ID NO: 3546557 - RNA, 16 nt, Human
uucagaaagacuuggu

SEQ ID NO: 3546558 - RNA, 21 nt, Human
uucagaaagccuuucauuuug

SEQ ID NO: 3546559 - RNA, 15 nt, Human
uucagaaaugcugcc

SEQ ID NO: 3546560 - RNA, 16 nt, Human
uucagaaaugcugccu

SEQ ID NO: 3546561 - RNA, 13 nt, Human
uucagaaauugga

SEQ ID NO: 3546562 - RNA, 20 nt, Human
uucagaacaccaagacuuga

SEQ ID NO: 3546563 - RNA, 22 nt, Human
uucagaaccccaacuacugugu

SEQ ID NO: 3546564 - RNA, 16 nt, Human
uucagaaccucuuccc

SEQ ID NO: 3546565 - RNA, 18 nt, Human
uucagaaccucuucccca

SEQ ID NO: 3546566 - RNA, 14 nt, Human
uucagaagaaaaag

SEQ ID NO: 3546567 - RNA, 12 nt, Human
uucagaagagau

SEQ ID NO: 3546568 - RNA, 23 nt, Human
uucagaagugagcuuugcugcua

SEQ ID NO: 3546569 - RNA, 23 nt, Human
uucagaaguuuggcaauaguuug

SEQ ID NO: 3546570 - RNA, 15 nt, Human
uucagaaucacuucu

SEQ ID NO: 3546571 - RNA, 15 nt, Human
uucagaaucugaaug

SEQ ID NO: 3546572 - RNA, 23 nt, Human
uucagaaucugaauguaauuugu

SEQ ID NO: 3546573 - RNA, 16 nt, Human
uucagaaucuuuguua

SEQ ID NO: 3546574 - RNA, 15 nt, Human
uucagaauuuagugu

SEQ ID NO: 3546575 - RNA, 21 nt, Human
uucagacagcugccugggauc

SEQ ID NO: 3546576 - RNA, 20 nt, Human
uucagacauagaauuaacac

SEQ ID NO: 3546577 - RNA, 10 nt, Human
uucagacccc

SEQ ID NO: 3546578 - RNA, 13 nt, Human
uucagaccccagc

SEQ ID NO: 3546579 - RNA, 14 nt, Human
uucagacucagacu

SEQ ID NO: 3546580 - RNA, 21 nt, Human
uucagacucccauuccugaag

SEQ ID NO: 3546581 - RNA, 13 nt, Human
uucagacucucuc

SEQ ID NO: 3546582 - RNA, 15 nt, Human
uucagacuugucaag

SEQ ID NO: 3546583 - RNA, 20 nt, Human
uucagagacucagggcccca

SEQ ID NO: 3546584 - RNA, 21 nt, Human
uucagagacucagggccccag

SEQ ID NO: 3546585 - RNA, 15 nt, Human
uucagagacuccugc

SEQ ID NO: 3546586 - RNA, 13 nt, Human
uucagagagcagu

SEQ ID NO: 3546587 - RNA, 18 nt, Human
uucagagagcagugcuuu

SEQ ID NO: 3546588 - RNA, 19 nt, Human
uucagagagcuaaauuaca

SEQ ID NO: 3546589 - RNA, 14 nt, Human
uucagagagcuggu

SEQ ID NO: 3546590 - RNA, 15 nt, Human
uucagagagcuggua

SEQ ID NO: 3546591 - RNA, 13 nt, Human
uucagagcugccc

SEQ ID NO: 3546592 - RNA, 20 nt, Human
uucagagcugcccucuccug

SEQ ID NO: 3546593 - RNA, 22 nt, Human
uucagaggcucagauuguaaua

SEQ ID NO: 3546594 - RNA, 16 nt, Human
uucagaggcugaggug

SEQ ID NO: 3546595 - RNA, 19 nt, Human
uucagagguggcucuggaa

SEQ ID NO: 3546596 - RNA, 22 nt, Human
uucagaguucuuuuugaaguau

SEQ ID NO: 3546597 - RNA, 21 nt, Human
uucagaguugaugguuguaca

SEQ ID NO: 3546598 - RNA, 22 nt, Human
uucagaguugaugguuguacau

SEQ ID NO: 3546599 - RNA, 18 nt, Human
uucagauaacuguuauuu

SEQ ID NO: 3546600 - RNA, 20 nt, Human
uucagauaaucacaauacau

SEQ ID NO: 3546601 - RNA, 22 nt, Human
uucagauauaaaagacugacca

SEQ ID NO: 3546602 - RNA, 22 nt, Human
uucagauaucuuggacaaauca

SEQ ID NO: 3546603 - RNA, 16 nt, Human
uucagauaugauucaa

SEQ ID NO: 3546604 - RNA, 17 nt, Human
uucagauaugauucaaa

SEQ ID NO: 3546605 - RNA, 16 nt, Human
uucagaucacugaauu

SEQ ID NO: 3546606 - RNA, 17 nt, Human
uucagaucucuaacuuc

SEQ ID NO: 3546607 - RNA, 19 nt, Human
uucagaucuuaauauaaau

SEQ ID NO: 3546608 - RNA, 19 nt, Human
uucagaugcuucugggaga

SEQ ID NO: 3546609 - RNA, 15 nt, Human
uucagauguaauguu

SEQ ID NO: 3546610 - RNA, 16 nt, Human
uucagauguaauguuu

SEQ ID NO: 3546611 - RNA, 18 nt, Human
uucagaugucuucugccu

SEQ ID NO: 3546612 - RNA, 14 nt, Human
uucagauucccaga

SEQ ID NO: 3546613 - RNA, 15 nt, Human
uucagauuggacaua

SEQ ID NO: 3546614 - RNA, 16 nt, Human
uucagauuugcacaaa

SEQ ID NO: 3546615 - RNA, 23 nt, Human
uucagauuuugauaacuguuuau

SEQ ID NO: 3546616 - RNA, 21 nt, Human
uucagcaaaaauauuuuauga

SEQ ID NO: 3546617 - RNA, 22 nt, Human
uucagcaaacuuguugaauuua

SEQ ID NO: 3546618 - RNA, 13 nt, Human
uucagcaagacaa

SEQ ID NO: 3546619 - RNA, 18 nt, Human
uucagcaagauaaacauu

SEQ ID NO: 3546620 - RNA, 19 nt, Human
uucagcaagauaaacauua

SEQ ID NO: 3546621 - RNA, 21 nt, Human
uucagcaaggcgcuaacuugc

SEQ ID NO: 3546622 - RNA, 18 nt, Human
uucagcaauauuuaagga

SEQ ID NO: 3546623 - RNA, 10 nt, Human
uucagcacca

SEQ ID NO: 3546624 - RNA, 23 nt, Human
uucagcaccuacaguguacaguc

SEQ ID NO: 3546625 - RNA, 19 nt, Human
uucagcacuagccaaaccu

SEQ ID NO: 3546626 - RNA, 23 nt, Human
uucagcacuagccaaaccucacc

SEQ ID NO: 3546627 - RNA, 13 nt, Human
uucagcacugucc

SEQ ID NO: 3546628 - RNA, 15 nt, Human
uucagcacugucccu

SEQ ID NO: 3546629 - RNA, 15 nt, Human
uucagcacuugucuc

SEQ ID NO: 3546630 - RNA, 20 nt, Human
uucagcagcaaauuuucagc

SEQ ID NO: 3546631 - RNA, 12 nt, Human
uucagcaucuga

SEQ ID NO: 3546632 - RNA, 21 nt, Human
uucagcaucugaccucuaccu

SEQ ID NO: 3546633 - RNA, 12 nt, Human
uucagcaugcaa

SEQ ID NO: 3546634 - RNA, 19 nt, Human
uucagcauucuuagccugu

SEQ ID NO: 3546635 - RNA, 20 nt, Human
uucagcauucuuagccugug

SEQ ID NO: 3546636 - RNA, 11 nt, Human
uucagccaagg

SEQ ID NO: 3546637 - RNA, 21 nt, Human
uucagccacugagggacaaaa

SEQ ID NO: 3546638 - RNA, 12 nt, Human
uucagccaggag

SEQ ID NO: 3546639 - RNA, 17 nt, Human
uucagccaggagcuggg

SEQ ID NO: 3546640 - RNA, 16 nt, Human
uucagccauguacaga

SEQ ID NO: 3546641 - RNA, 20 nt, Human
uucagcccauauuucaucgu

SEQ ID NO: 3546642 - RNA, 13 nt, Human
uucagcccccagc

SEQ ID NO: 3546643 - RNA, 15 nt, Human
uucagcccccagccc

SEQ ID NO: 3546644 - RNA, 13 nt, Human
uucagccccuccu

SEQ ID NO: 3546645 - RNA, 18 nt, Human
uucagccccuccucugcc

SEQ ID NO: 3546646 - RNA, 20 nt, Human
uucagccccuccucugccac

SEQ ID NO: 3546647 - RNA, 23 nt, Human
uucagccuagccgaccucagccu

SEQ ID NO: 3546648 - RNA, 15 nt, Human
uucagccugccuucu

SEQ ID NO: 3546649 - RNA, 20 nt, Human
uucagccugccuucuuuucu

SEQ ID NO: 3546650 - RNA, 16 nt, Human
uucagcgauguaugca

SEQ ID NO: 3546651 - RNA, 24 nt, Human
uucagcgauguaugcagcuaucug

SEQ ID NO: 3546652 - RNA, 14 nt, Human
uucagcuaagcuag

SEQ ID NO: 3546653 - RNA, 23 nt, Human
uucagcuaagggaagacauuucu

SEQ ID NO: 3546654 - RNA, 14 nt, Human
uucagcucacgcuu

SEQ ID NO: 3546655 - RNA, 16 nt, Human
uucagcucacgcuuca

SEQ ID NO: 3546656 - RNA, 19 nt, Human
uucagcucacgcuucacag

SEQ ID NO: 3546657 - RNA, 14 nt, Human
uucagcuccagccc

SEQ ID NO: 3546658 - RNA, 22 nt, Human
uucagcuccagccccuuuccaa

SEQ ID NO: 3546659 - RNA, 13 nt, Human
uucagcuccugac

SEQ ID NO: 3546660 - RNA, 15 nt, Human
uucagcucucuguau

SEQ ID NO: 3546661 - RNA, 16 nt, Human
uucagcucucuguaua

SEQ ID NO: 3546662 - RNA, 19 nt, Human
uucagcuguccucccucca

SEQ ID NO: 3546663 - RNA, 23 nt, Human
uucagcugugaacauggacucuu

SEQ ID NO: 3546664 - RNA, 22 nt, Human
uucagcuucguuuauuuucaag

SEQ ID NO: 3546665 - RNA, 15 nt, Human
uucagcuucugcugg

SEQ ID NO: 3546666 - RNA, 18 nt, Human
uucagcuucugcugggcu

SEQ ID NO: 3546667 - RNA, 22 nt, Human
uucagcuuguaaauagcucagg

SEQ ID NO: 3546668 - RNA, 16 nt, Human
uucaggaacaccccca

SEQ ID NO: 3546669 - RNA, 11 nt, Human
uucaggaaccu

SEQ ID NO: 3546670 - RNA, 21 nt, Human
uucaggaaccucgaguacugu

SEQ ID NO: 3546671 - RNA, 16 nt, Human
uucaggaaccuggacc

SEQ ID NO: 3546672 - RNA, 22 nt, Human
uucaggaaccuggaccaaagcu

SEQ ID NO: 3546673 - RNA, 14 nt, Human
uucaggaagaugaa

SEQ ID NO: 3546674 - RNA, 15 nt, Human
uucaggaagcucagg

SEQ ID NO: 3546675 - RNA, 17 nt, Human
uucaggaagcucagggc

SEQ ID NO: 3546676 - RNA, 20 nt, Human
uucaggaagcucagggccug

SEQ ID NO: 3546677 - RNA, 14 nt, Human
uucaggagcgcaag

SEQ ID NO: 3546678 - RNA, 15 nt, Human
uucaggaggaauacu

SEQ ID NO: 3546679 - RNA, 14 nt, Human
uucaggaggcugga

SEQ ID NO: 3546680 - RNA, 22 nt, Human
uucaggaucuauuuuuggaggu

SEQ ID NO: 3546681 - RNA, 23 nt, Human
uucaggaucuauuuuuggagguu

SEQ ID NO: 3546682 - RNA, 13 nt, Human
uucaggcucuucu

SEQ ID NO: 3546683 - RNA, 16 nt, Human
uucaggcucuucuccu

SEQ ID NO: 3546684 - RNA, 19 nt, Human
uucaggcuuccugcaauuu

SEQ ID NO: 3546685 - RNA, 22 nt, Human
uucaggcuuuaggcauaugcuu

SEQ ID NO: 3546686 - RNA, 20 nt, Human
uucagggaagauaaguugga

SEQ ID NO: 3546687 - RNA, 23 nt, Human
uucagggaagauaaguuggaaac

SEQ ID NO: 3546688 - RNA, 20 nt, Human
uucagggaaggaggagccug

SEQ ID NO: 3546689 - RNA, 21 nt, Human
uucagggaaggaggagccugu

SEQ ID NO: 3546690 - RNA, 22 nt, Human
uucagggaaggaggagccuguc

SEQ ID NO: 3546691 - RNA, 23 nt, Human
uucccucaaagcuuccauuccac

SEQ ID NO: 3546692 - RNA, 13 nt, Human
uucccucaccccc

SEQ ID NO: 3546693 - RNA, 22 nt, Human
uucccucacccccucccacccc

SEQ ID NO: 3546694 - RNA, 15 nt, Human
uucccucaucucucc

SEQ ID NO: 3546695 - RNA, 23 nt, Human
uucccucccugcugucauugcuu

SEQ ID NO: 3546696 - RNA, 18 nt, Human
uucccucggaguucuucu

SEQ ID NO: 3546697 - RNA, 19 nt, Human
uucccucggaguucuucuu

SEQ ID NO: 3546698 - RNA, 17 nt, Human
uucccucgucuuuccca

SEQ ID NO: 3546699 - RNA, 14 nt, Human
uucccucucccagg

SEQ ID NO: 3546700 - RNA, 15 nt, Human
uucccucucccaggc

SEQ ID NO: 3546701 - RNA, 17 nt, Human
uucccucucccaggccc

SEQ ID NO: 3546702 - RNA, 14 nt, Human
uucccucucccugu

SEQ ID NO: 3546703 - RNA, 15 nt, Human
uucccucucucugac

SEQ ID NO: 3546704 - RNA, 23 nt, Human
uucccucugagaauuccaaggag

SEQ ID NO: 3546705 - RNA, 13 nt, Human
uucccucugccug

SEQ ID NO: 3546706 - RNA, 17 nt, Human
uucccucugccuguccc

SEQ ID NO: 3546707 - RNA, 14 nt, Human
uucccucugcucag

SEQ ID NO: 3546708 - RNA, 19 nt, Human
uucccucugcuccuggagc

SEQ ID NO: 3546709 - RNA, 20 nt, Human
uucccucuuucuuauaauac

SEQ ID NO: 3546710 - RNA, 16 nt, Human
uucccucuuuggcucc

SEQ ID NO: 3546711 - RNA, 14 nt, Human
uucccucuuuucuu

SEQ ID NO: 3546712 - RNA, 17 nt, Human
uucccucuuuucuuacu

SEQ ID NO: 3546713 - RNA, 17 nt, Human
uucccugaaaacccaga

SEQ ID NO: 3546714 - RNA, 19 nt, Human
uucccugaaaacccagaga

SEQ ID NO: 3546715 - RNA, 22 nt, Human
uucccugaaacacgaaacuugu

SEQ ID NO: 3546716 - RNA, 23 nt, Human
uucccugaaacacgaaacuuguu

SEQ ID NO: 3546717 - RNA, 16 nt, Human
uucccugaaggaacca

SEQ ID NO: 3546718 - RNA, 16 nt, Human
uucccugacucauucu

SEQ ID NO: 3546719 - RNA, 18 nt, Human
uucccugagucaccagga

SEQ ID NO: 3546720 - RNA, 12 nt, Human
uucccugaucaa

SEQ ID NO: 3546721 - RNA, 22 nt, Human
uucccugcugucgucuuagcaa

SEQ ID NO: 3546722 - RNA, 22 nt, Human
uucccugcugugaaagaaguaa

SEQ ID NO: 3546723 - RNA, 13 nt, Human
uucccugcuucca

SEQ ID NO: 3546724 - RNA, 19 nt, Human
uucccuggaccagaugcug

SEQ ID NO: 3546725 - RNA, 16 nt, Human
uucccugguaagaaaa

SEQ ID NO: 3546726 - RNA, 17 nt, Human
uucccugguaagaaaaa

SEQ ID NO: 3546727 - RNA, 18 nt, Human
uucccugguaagaaaaag

SEQ ID NO: 3546728 - RNA, 16 nt, Human
uucccuguauuuucuu

SEQ ID NO: 3546729 - RNA, 11 nt, Human
uucccugugcu

SEQ ID NO: 3546730 - RNA, 16 nt, Human
uucccuguucuuccuc

SEQ ID NO: 3546731 - RNA, 18 nt, Human
uucccuguucuuccucca

SEQ ID NO: 3546732 - RNA, 19 nt, Human
uucccuguucuuccuccag

SEQ ID NO: 3546733 - RNA, 12 nt, Human
uucccuuccucu

SEQ ID NO: 3546734 - RNA, 13 nt, Human
uucccuuccucuu

SEQ ID NO: 3546735 - RNA, 14 nt, Human
uucccuugaaacuu

SEQ ID NO: 3546736 - RNA, 23 nt, Human
uucccuugaaauuuuaaacuaua

SEQ ID NO: 3546737 - RNA, 19 nt, Human
uucccuugccacuuugcac

SEQ ID NO: 3546738 - RNA, 17 nt, Human
uucccuugcuuuucccu

SEQ ID NO: 3546739 - RNA, 19 nt, Human
uucccuugcuuuucccucu

SEQ ID NO: 3546740 - RNA, 12 nt, Human
uucccuuggccu

SEQ ID NO: 3546741 - RNA, 16 nt, Human
uucccuuggccucaga

SEQ ID NO: 3546742 - RNA, 15 nt, Human
uucccuuuagcugug

SEQ ID NO: 3546743 - RNA, 22 nt, Human
uucccuuugacgccaucccagc

SEQ ID NO: 3546744 - RNA, 12 nt, Human
uucccuuuguga

SEQ ID NO: 3546745 - RNA, 18 nt, Human
uucccuuuuuuggcugcu

SEQ ID NO: 3546746 - RNA, 13 nt, Human
uuccgcacuuucc

SEQ ID NO: 3546747 - RNA, 22 nt, Human
uuccgcacuuuccacuucuucc

SEQ ID NO: 3546748 - RNA, 18 nt, Human
uuccgccacuggggcuca

SEQ ID NO: 3546749 - RNA, 21 nt, Human
uuccggaauccuguccucagc

SEQ ID NO: 3546750 - RNA, 21 nt, Human
uuccggccccuccccuccaaa

SEQ ID NO: 3546751 - RNA, 17 nt, Human
uuccguaacccaacucu

SEQ ID NO: 3546752 - RNA, 18 nt, Human
uuccguagccagcugcuc

SEQ ID NO: 3546753 - RNA, 19 nt, Human
uuccgucaacguuguacug

SEQ ID NO: 3546754 - RNA, 20 nt, Human
uuaaauucuugcaaaguauc

SEQ ID NO: 3546755 - RNA, 16 nt, Human
uuaaauuggaaagcag

SEQ ID NO: 3546756 - RNA, 14 nt, Human
uuaaauuggguuca

SEQ ID NO: 3546757 - RNA, 19 nt, Human
uuaaauuucuuaugugaca

SEQ ID NO: 3546758 - RNA, 13 nt, Human
uuaaauuuguaag

SEQ ID NO: 3546759 - RNA, 14 nt, Human
uuaaauuuguaagu

SEQ ID NO: 3546760 - RNA, 15 nt, Human
uuaaauuuguaaguu

SEQ ID NO: 3546761 - RNA, 17 nt, Human
uuaaauuuucuucaguu

SEQ ID NO: 3546762 - RNA, 14 nt, Human
uuaaauuuuguaau

SEQ ID NO: 3546763 - RNA, 15 nt, Human
uuaaauuuuguaaug

SEQ ID NO: 3546764 - RNA, 12 nt, Human
uuaaauuuuucc

SEQ ID NO: 3546765 - RNA, 20 nt, Human
uuaaauuuuuuuguaugaaa

SEQ ID NO: 3546766 - RNA, 17 nt, Human
uuaaauuuuuuuuacau

SEQ ID NO: 3546767 - RNA, 19 nt, Human
uuaaauuuuuuuuacauuu

SEQ ID NO: 3546768 - RNA, 11 nt, Human
uuaacaaaagu

SEQ ID NO: 3546769 - RNA, 22 nt, Human
uuaacaaacaucacucugcugc

SEQ ID NO: 3546770 - RNA, 12 nt, Human
uuaacaaauaug

SEQ ID NO: 3546771 - RNA, 13 nt, Human
uuaacaaaugcua

SEQ ID NO: 3546772 - RNA, 14 nt, Human
uuaacaacagcugg

SEQ ID NO: 3546773 - RNA, 19 nt, Human
uuaacaauaacuacugugu

SEQ ID NO: 3546774 - RNA, 21 nt, Human
uuaacaauaacuacuguguuc

SEQ ID NO: 3546775 - RNA, 21 nt, Human
uuaacaaugucuuguaagcaa

SEQ ID NO: 3546776 - RNA, 16 nt, Human
uuaacaauuccaaagg

SEQ ID NO: 3546777 - RNA, 16 nt, Human
uuaacacaaguccugu

SEQ ID NO: 3546778 - RNA, 12 nt, Human
uuaacacacuac

SEQ ID NO: 3546779 - RNA, 12 nt, Human
uuaacacauuuu

SEQ ID NO: 3546780 - RNA, 15 nt, Human
uuaacaccugaugug

SEQ ID NO: 3546781 - RNA, 16 nt, Human
uuaacaccugaugugu

SEQ ID NO: 3546782 - RNA, 18 nt, Human
uuaacaccuuuaaagugu

SEQ ID NO: 3546783 - RNA, 14 nt, Human
uuaacagaaaugua

SEQ ID NO: 3546784 - RNA, 16 nt, Human
uuaacagaaauguaca

SEQ ID NO: 3546785 - RNA, 20 nt, Human
uuaacagaaauguacagcaa

SEQ ID NO: 3546786 - RNA, 16 nt, Human
uuaacagaaauuguau

SEQ ID NO: 3546787 - RNA, 21 nt, Human
uuaacagaaauuguauauugu

SEQ ID NO: 3546788 - RNA, 14 nt, Human
uuaacagagucuga

SEQ ID NO: 3546789 - RNA, 18 nt, Human
uuaacagcaguccuuugu

SEQ ID NO: 3546790 - RNA, 15 nt, Human
uuaacaguuguauuu

SEQ ID NO: 3546791 - RNA, 17 nt, Human
uuaacaguuuuccauga

SEQ ID NO: 3546792 - RNA, 19 nt, Human
uuaacaguuuuccaugaaa

SEQ ID NO: 3546793 - RNA, 20 nt, Human
uuaacauaguaaguucagca

SEQ ID NO: 3546794 - RNA, 22 nt, Human
uuaacauaguaaguucagcacu

SEQ ID NO: 3546795 - RNA, 17 nt, Human
uuaacauauuuacuaag

SEQ ID NO: 3546796 - RNA, 22 nt, Human
uuaacaucucagaaaacucugg

SEQ ID NO: 3546797 - RNA, 21 nt, Human
uuaacaugacauuuaccagca

SEQ ID NO: 3546798 - RNA, 23 nt, Human
uuaacaugcuguguaagcugugu

SEQ ID NO: 3546799 - RNA, 19 nt, Human
uuaacaugggcucuucacu

SEQ ID NO: 3546800 - RNA, 22 nt, Human
uuaacaugggcucuucacuagu

SEQ ID NO: 3546801 - RNA, 12 nt, Human
uuaacauguuaa

SEQ ID NO: 3546802 - RNA, 22 nt, Human
uuaacauuccuaaaaugcuuca

SEQ ID NO: 3546803 - RNA, 23 nt, Human
uuaacauuccucaugaauguaaa

SEQ ID NO: 3546804 - RNA, 13 nt, Human
uuaacauuugccu

SEQ ID NO: 3546805 - RNA, 17 nt, Human
uuaacauuuuguucuua

SEQ ID NO: 3546806 - RNA, 19 nt, Human
uuaaccaaaaagaccagac

SEQ ID NO: 3546807 - RNA, 17 nt, Human
uuaaccaaacaauuauu

SEQ ID NO: 3546808 - RNA, 21 nt, Human
uuaaccaaacaauuauuuaaa

SEQ ID NO: 3546809 - RNA, 14 nt, Human
uuaaccaaagguga

SEQ ID NO: 3546810 - RNA, 17 nt, Human
uuaaccacuucagcuga

SEQ ID NO: 3546811 - RNA, 13 nt, Human
uuaaccagaucua

SEQ ID NO: 3546812 - RNA, 21 nt, Human
uuaaccagucugaaguuucau

SEQ ID NO: 3546813 - RNA, 16 nt, Human
uuaaccaguuguggug

SEQ ID NO: 3546814 - RNA, 13 nt, Human
uuaacccaaggag

SEQ ID NO: 3546815 - RNA, 20 nt, Human
uuaaccccccuguacacaac

SEQ ID NO: 3546816 - RNA, 17 nt, Human
uuaaccccgucaacaaa

SEQ ID NO: 3546817 - RNA, 15 nt, Human
uuaacccuucaucuu

SEQ ID NO: 3546818 - RNA, 15 nt, Human
uuaaccucaguguca

SEQ ID NO: 3546819 - RNA, 12 nt, Human
uuaaccucugca

SEQ ID NO: 3546820 - RNA, 15 nt, Human
uuaaccucugcuuuu

SEQ ID NO: 3546821 - RNA, 15 nt, Human
uuaaccuuguauaaa

SEQ ID NO: 3546822 - RNA, 12 nt, Human
uuaaccuuugau

SEQ ID NO: 3546823 - RNA, 17 nt, Human
uuaacuaaauuuuaaag

SEQ ID NO: 3546824 - RNA, 20 nt, Human
uuaacuacuauauugauugu

SEQ ID NO: 3546825 - RNA, 15 nt, Human
uuaacuagaauuuau

SEQ ID NO: 3546826 - RNA, 17 nt, Human
uuaacuagacacagaua

SEQ ID NO: 3546827 - RNA, 23 nt, Human
uuaacuauguacaauauuuuaag

SEQ ID NO: 3546828 - RNA, 14 nt, Human
uuaacucagaucac

SEQ ID NO: 3546829 - RNA, 15 nt, Human
uuaacucagaucacu

SEQ ID NO: 3546830 - RNA, 17 nt, Human
uuaacucaggacuccag

SEQ ID NO: 3546831 - RNA, 18 nt, Human
uuaacucaggacuccagc

SEQ ID NO: 3546832 - RNA, 17 nt, Human
uuaacucauuagacugg

SEQ ID NO: 3546833 - RNA, 22 nt, Human
uuaacucccauuaccauguaau

SEQ ID NO: 3546834 - RNA, 17 nt, Human
uuaacucuacuguguaa

SEQ ID NO: 3546835 - RNA, 15 nt, Human
uuaacucucuuuaug

SEQ ID NO: 3546836 - RNA, 21 nt, Human
uuaaguauugcaucuguauaa

SEQ ID NO: 3546837 - RNA, 11 nt, Human
uuaaguauuua

SEQ ID NO: 3546838 - RNA, 19 nt, Human
uuaagucuaaauauuuccu

SEQ ID NO: 3546839 - RNA, 20 nt, Human
uuaagucuguuuuaugacuu

SEQ ID NO: 3546840 - RNA, 21 nt, Human
uuaagucuguuuuaugacuuc

SEQ ID NO: 3546841 - RNA, 17 nt, Human
uuaagugaaaauauagc

SEQ ID NO: 3546842 - RNA, 14 nt, Human
uuaagugaaauuua

SEQ ID NO: 3546843 - RNA, 18 nt, Human
uuaagugcguguguagag

SEQ ID NO: 3546844 - RNA, 15 nt, Human
uuaagugcugcauuu

SEQ ID NO: 3546845 - RNA, 19 nt, Human
uuaagugcugcauuuaaaa

SEQ ID NO: 3546846 - RNA, 22 nt, Human
uuaagugcugcauuuaaaagau

SEQ ID NO: 3546847 - RNA, 19 nt, Human
uuaaguguacuaauuaaca

SEQ ID NO: 3546848 - RNA, 18 nt, Human
uuaaguguuggaaaaaau

SEQ ID NO: 3546849 - RNA, 20 nt, Human
uuaaguguuggaaaaaauuu

SEQ ID NO: 3546850 - RNA, 12 nt, Human
uuaaguuacuuc

SEQ ID NO: 3546851 - RNA, 20 nt, Human
uuaaguuaguuccacugaga

SEQ ID NO: 3546852 - RNA, 11 nt, Human
uuaaguugaga

SEQ ID NO: 3546853 - RNA, 22 nt, Human
uuaaguugagauaguuuucauc

SEQ ID NO: 3546854 - RNA, 18 nt, Human
uuaaguugcugaugaacu

SEQ ID NO: 3546855 - RNA, 21 nt, Human
uuaaguuggcuucuguuucua

SEQ ID NO: 3546856 - RNA, 22 nt, Human
uuaaguuggcuucuguuucuag

SEQ ID NO: 3546857 - RNA, 20 nt, Human
uuaaguuuccuuccagccca

SEQ ID NO: 3546858 - RNA, 12 nt, Human
uuaaguuucuca

SEQ ID NO: 3546859 - RNA, 14 nt, Human
uuaauaaaaauaau

SEQ ID NO: 3546860 - RNA, 15 nt, Human
uuaauaaaaaugaca

SEQ ID NO: 3546861 - RNA, 16 nt, Human
uuaauaaaacacuauu

SEQ ID NO: 3546862 - RNA, 16 nt, Human
uuaauaaaauaauucu

SEQ ID NO: 3546863 - RNA, 13 nt, Human
uuaauaaacacuc

SEQ ID NO: 3546864 - RNA, 19 nt, Human
uuaauaaacuacucuuuga

SEQ ID NO: 3546865 - RNA, 22 nt, Human
uuaauaaacuuuuuuuugagaa

SEQ ID NO: 3546866 - RNA, 16 nt, Human
uuaauaaauagagcaa

SEQ ID NO: 3546867 - RNA, 18 nt, Human
uuaauaaauuauuuauua

SEQ ID NO: 3546868 - RNA, 20 nt, Human
uuaauaaauuauuuauuauu

SEQ ID NO: 3546869 - RNA, 13 nt, Human
uuaauaacauuac

SEQ ID NO: 3546870 - RNA, 15 nt, Human
uuaauaacauuaccu

SEQ ID NO: 3546871 - RNA, 16 nt, Human
uuaauaacauuaccuu

SEQ ID NO: 3546872 - RNA, 17 nt, Human
uuaauaacauuaccuua

SEQ ID NO: 3546873 - RNA, 20 nt, Human
uuaauaacccuugaaaguca

SEQ ID NO: 3546874 - RNA, 17 nt, Human
uuaauaaguuucacuga

SEQ ID NO: 3546875 - RNA, 13 nt, Human
uuaauaauaaucu

SEQ ID NO: 3546876 - RNA, 22 nt, Human
uuaauaauagauugugaauaau

SEQ ID NO: 3546877 - RNA, 20 nt, Human
uuaauaaucucacauauaca

SEQ ID NO: 3546878 - RNA, 23 nt, Human
uuaauacaagguauaauaaaauu

SEQ ID NO: 3546879 - RNA, 23 nt, Human
uuaauaccagauaccuuaucuua

SEQ ID NO: 3546880 - RNA, 15 nt, Human
uuaauacuaaaauau

SEQ ID NO: 3546881 - RNA, 19 nt, Human
uuaauacuauaaauaauau

SEQ ID NO: 3546882 - RNA, 21 nt, Human
uuaauacucauccuuguauaa

SEQ ID NO: 3546883 - RNA, 22 nt, Human
uuaauacucauccuuguauaaa

SEQ ID NO: 3546884 - RNA, 19 nt, Human
uuaauagaauauaauuauc

SEQ ID NO: 3546885 - RNA, 15 nt, Human
uuaauagcaaagaau

SEQ ID NO: 3546886 - RNA, 15 nt, Human
uuaauagcagccuuu

SEQ ID NO: 3546887 - RNA, 22 nt, Human
uuaauagcagccuuucucucuu

SEQ ID NO: 3546888 - RNA, 15 nt, Human
uuaauagucauucca

SEQ ID NO: 3546889 - RNA, 19 nt, Human
uuaauagucauuccaaaua

SEQ ID NO: 3546890 - RNA, 16 nt, Human
uuaauaguguuaauca

SEQ ID NO: 3546891 - RNA, 18 nt, Human
uuaauaguguuaaucaau

SEQ ID NO: 3546892 - RNA, 21 nt, Human
uuaauauaaaguuuuauauau

SEQ ID NO: 3546893 - RNA, 15 nt, Human
uuaauauagcuauuu

SEQ ID NO: 3546894 - RNA, 15 nt, Human
uuaauauauguauua

SEQ ID NO: 3546895 - RNA, 16 nt, Human
uuaauauauuaaaauu

SEQ ID NO: 3546896 - RNA, 18 nt, Human
uuaauauauuaaaauucc

SEQ ID NO: 3546897 - RNA, 18 nt, Human
uuaauauauuugaaaaaa

SEQ ID NO: 3546898 - RNA, 16 nt, Human
uuaauaucacucauua

SEQ ID NO: 3546899 - RNA, 15 nt, Human
uuaauaucaucagua

SEQ ID NO: 3546900 - RNA, 19 nt, Human
uuaauaucccuacauguau

SEQ ID NO: 3546901 - RNA, 14 nt, Human
uuaauaucuuucug

SEQ ID NO: 3546902 - RNA, 16 nt, Human
uuaauaucuuucugca

SEQ ID NO: 3546903 - RNA, 12 nt, Human
uuaauaugaaaa

SEQ ID NO: 3546904 - RNA, 14 nt, Human
uuaauaugaaauuu

SEQ ID NO: 3546905 - RNA, 13 nt, Human
uuaauauggcucu

SEQ ID NO: 3546906 - RNA, 16 nt, Human
uuaauauggggaugca

SEQ ID NO: 3546907 - RNA, 17 nt, Human
uuaauauguauuuuaug

SEQ ID NO: 3546908 - RNA, 23 nt, Human
uuaauauguuaaccucaguguca

SEQ ID NO: 3546909 - RNA, 17 nt, Human
uuaauauuaaagccaug

SEQ ID NO: 3546910 - RNA, 18 nt, Human
uuaauauuaaagccaugu

SEQ ID NO: 3546911 - RNA, 22 nt, Human
uuaauauucauuguauaaaaau

SEQ ID NO: 3546912 - RNA, 13 nt, Human
uuaauauugauuu

SEQ ID NO: 3546913 - RNA, 21 nt, Human
uuaauauuuaaacagcagugu

SEQ ID NO: 3546914 - RNA, 17 nt, Human
uuaauauuuaacauuau

SEQ ID NO: 3546915 - RNA, 12 nt, Human
uuaauauuucuu

SEQ ID NO: 3546916 - RNA, 17 nt, Human
uuaauauuuuuacaugc

SEQ ID NO: 3546917 - RNA, 19 nt, Human
uuaauauuuuuacaugcag

SEQ ID NO: 3546918 - RNA, 14 nt, Human
uuaaucaaguugaa

SEQ ID NO: 3546919 - RNA, 18 nt, Human
uuaaucaauuuaaaccca

SEQ ID NO: 3546920 - RNA, 23 nt, Human
uacuagucugugugggacuguac

SEQ ID NO: 3546921 - RNA, 15 nt, Human
uacuaguguucuguu

SEQ ID NO: 3546922 - RNA, 16 nt, Human
uacuaguguucuguuu

SEQ ID NO: 3546923 - RNA, 21 nt, Human
uacuaguugugaccuuagugu

SEQ ID NO: 3546924 - RNA, 13 nt, Human
uacuauaaagaga

SEQ ID NO: 3546925 - RNA, 14 nt, Human
uacuauaacauaug

SEQ ID NO: 3546926 - RNA, 17 nt, Human
uacuauagcaaaguagu

SEQ ID NO: 3546927 - RNA, 13 nt, Human
uacuauaguacca

SEQ ID NO: 3546928 - RNA, 16 nt, Human
uacuauaguaccagua

SEQ ID NO: 3546929 - RNA, 20 nt, Human
uacuaucaugucaaacguga

SEQ ID NO: 3546930 - RNA, 17 nt, Human
uacuaucuacucuccuc

SEQ ID NO: 3546931 - RNA, 21 nt, Human
uacuaucuuaucucagauauu

SEQ ID NO: 3546932 - RNA, 22 nt, Human
uacuaucuuaucucagauauuu

SEQ ID NO: 3546933 - RNA, 22 nt, Human
uacuaugaaauauguauaacuu

SEQ ID NO: 3546934 - RNA, 13 nt, Human
uacuaugccugug

SEQ ID NO: 3546935 - RNA, 15 nt, Human
uacuauggaguacca

SEQ ID NO: 3546936 - RNA, 13 nt, Human
uacuauguaucaa

SEQ ID NO: 3546937 - RNA, 22 nt, Human
uacuauuaagcaguaaaaacug

SEQ ID NO: 3546938 - RNA, 15 nt, Human
uacuauuguuacauu

SEQ ID NO: 3546939 - RNA, 19 nt, Human
uacuauuuaaagccuccuc

SEQ ID NO: 3546940 - RNA, 22 nt, Human
uacuauuuaaagccuccucauc

SEQ ID NO: 3546941 - RNA, 18 nt, Human
uacuauuuaagaugugaa

SEQ ID NO: 3546942 - RNA, 12 nt, Human
uacuauuucaca

SEQ ID NO: 3546943 - RNA, 19 nt, Human
uacuauuuuacuucuagag

SEQ ID NO: 3546944 - RNA, 18 nt, Human
uacuauuuucuacaauua

SEQ ID NO: 3546945 - RNA, 17 nt, Human
uacuauuuugacaguua

SEQ ID NO: 3546946 - RNA, 18 nt, Human
uacuauuuuuacugccac

SEQ ID NO: 3546947 - RNA, 19 nt, Human
uacuauuuuuacugccacu

SEQ ID NO: 3546948 - RNA, 14 nt, Human
uacucaacccucuc

SEQ ID NO: 3546949 - RNA, 22 nt, Human
uacucaagagugguaucuugca

SEQ ID NO: 3546950 - RNA, 21 nt, Human
uacucaaguagcauuuacugu

SEQ ID NO: 3546951 - RNA, 21 nt, Human
uacucacagucucuuuaaucu

SEQ ID NO: 3546952 - RNA, 12 nt, Human
uacucaccucac

SEQ ID NO: 3546953 - RNA, 23 nt, Human
uacucacucaaguucaaggacca

SEQ ID NO: 3546954 - RNA, 17 nt, Human
uacucacuuuucccacu

SEQ ID NO: 3546955 - RNA, 17 nt, Human
uacucagaagccugagg

SEQ ID NO: 3546956 - RNA, 19 nt, Human
uacucagaagccugaggcu

SEQ ID NO: 3546957 - RNA, 16 nt, Human
uacucagauaagguaa

SEQ ID NO: 3546958 - RNA, 23 nt, Human
uacucagauaagguaaaaugcca

SEQ ID NO: 3546959 - RNA, 17 nt, Human
uacucagcagcccuccu

SEQ ID NO: 3546960 - RNA, 18 nt, Human
uacucagcagcccuccuc

SEQ ID NO: 3546961 - RNA, 23 nt, Human
uacucagcagcccuccucacccc

SEQ ID NO: 3546962 - RNA, 15 nt, Human
uacucaggaggcuga

SEQ ID NO: 3546963 - RNA, 21 nt, Human
uacucagggaaagcauuuaaa

SEQ ID NO: 3546964 - RNA, 17 nt, Human
uacucagggcuccuccc

SEQ ID NO: 3546965 - RNA, 15 nt, Human
uacucauaaugugaa

SEQ ID NO: 3546966 - RNA, 19 nt, Human
uacucauaaugugaagugu

SEQ ID NO: 3546967 - RNA, 21 nt, Human
uacucauauauaucuaucuua

SEQ ID NO: 3546968 - RNA, 17 nt, Human
uacucauccuuguauaa

SEQ ID NO: 3546969 - RNA, 17 nt, Human
uacucaugaucuuguga

SEQ ID NO: 3546970 - RNA, 16 nt, Human
uacucauggaagagau

SEQ ID NO: 3546971 - RNA, 11 nt, Human
uacucaugugu

SEQ ID NO: 3546972 - RNA, 12 nt, Human
uacucaugugua

SEQ ID NO: 3546973 - RNA, 13 nt, Human
uacucauguguau

SEQ ID NO: 3546974 - RNA, 20 nt, Human
uacucauucauuuauucauu

SEQ ID NO: 3546975 - RNA, 13 nt, Human
uacucauugaaau

SEQ ID NO: 3546976 - RNA, 14 nt, Human
uacucauugaaaug

SEQ ID NO: 3546977 - RNA, 22 nt, Human
uacucauuucuaaaagaauauu

SEQ ID NO: 3546978 - RNA, 16 nt, Human
uacucauuuuucauga

SEQ ID NO: 3546979 - RNA, 13 nt, Human
uacuccacacugc

SEQ ID NO: 3546980 - RNA, 21 nt, Human
uacuccagugccaacaauccu

SEQ ID NO: 3546981 - RNA, 13 nt, Human
uagaaauuuucaa

SEQ ID NO: 3546982 - RNA, 13 nt, Human
uagaaauuuugua

SEQ ID NO: 3546983 - RNA, 17 nt, Human
uagaaauuuuguaagaa

SEQ ID NO: 3546984 - RNA, 12 nt, Human
uagaacacacac

SEQ ID NO: 3546985 - RNA, 14 nt, Human
uagaacacuauuuu

SEQ ID NO: 3546986 - RNA, 16 nt, Human
uagaacacuauuuuca

SEQ ID NO: 3546987 - RNA, 18 nt, Human
uagaacacuauuuucaga

SEQ ID NO: 3546988 - RNA, 19 nt, Human
uagaacacuauuuucagaa

SEQ ID NO: 3546989 - RNA, 18 nt, Human
uagaacauaaagcaaaua

SEQ ID NO: 3546990 - RNA, 22 nt, Human
uagaacaugguuaccaugucuu

SEQ ID NO: 3546991 - RNA, 13 nt, Human
uagaaccuagaag

SEQ ID NO: 3546992 - RNA, 16 nt, Human
uagaaccuggaagggc

SEQ ID NO: 3546993 - RNA, 17 nt, Human
uagaaccuggaagggcu

SEQ ID NO: 3546994 - RNA, 13 nt, Human
uagaaccuggagg

SEQ ID NO: 3546995 - RNA, 14 nt, Human
uagaacuagccaaa

SEQ ID NO: 3546996 - RNA, 22 nt, Human
uagaacucaguuuuaacuagaa

SEQ ID NO: 3546997 - RNA, 16 nt, Human
uagaacucccuuucaa

SEQ ID NO: 3546998 - RNA, 23 nt, Human
uagaacucuccaucuuauuuuca

SEQ ID NO: 3546999 - RNA, 19 nt, Human
uagaacucugaaaugaaga

SEQ ID NO: 3547000 - RNA, 13 nt, Human
uagaacuggguaa

SEQ ID NO: 3547001 - RNA, 19 nt, Human
uagaacuguaugucagaca

SEQ ID NO: 3547002 - RNA, 20 nt, Human
uagaacuguaugucagacau

SEQ ID NO: 3547003 - RNA, 18 nt, Human
uagaacuuacuauucauu

SEQ ID NO: 3547004 - RNA, 21 nt, Human
uagaacuucauggaucagauc

SEQ ID NO: 3547005 - RNA, 19 nt, Human
uagaacuuuaagcaacaag

SEQ ID NO: 3547006 - RNA, 13 nt, Human
uagaacuuuguau

SEQ ID NO: 3547007 - RNA, 16 nt, Human
uagaacuuuguauagu

SEQ ID NO: 3547008 - RNA, 15 nt, Human
uagaacuuuuuuaaa

SEQ ID NO: 3547009 - RNA, 16 nt, Human
uagaacuuuuuuaaau

SEQ ID NO: 3547010 - RNA, 23 nt, Human
uagaacuuuuuuaaauaaacuuu

SEQ ID NO: 3547011 - RNA, 14 nt, Human
uagaagaaaugaaa

SEQ ID NO: 3547012 - RNA, 16 nt, Human
uagaagaaaugaaauu

SEQ ID NO: 3547013 - RNA, 19 nt, Human
uagaagaaaugaaauuuua

SEQ ID NO: 3547014 - RNA, 20 nt, Human
uagaagaaaugaaauuuuac

SEQ ID NO: 3547015 - RNA, 22 nt, Human
uagaagaaaugaaauuuuacca

SEQ ID NO: 3547016 - RNA, 18 nt, Human
uagaagaacauccaagga

SEQ ID NO: 3547017 - RNA, 18 nt, Human
uagaagacaaaauguuca

SEQ ID NO: 3547018 - RNA, 13 nt, Human
uagaagacauuua

SEQ ID NO: 3547019 - RNA, 15 nt, Human
uagaagacauuuaua

SEQ ID NO: 3547020 - RNA, 20 nt, Human
uagaagacucuaccagacug

SEQ ID NO: 3547021 - RNA, 19 nt, Human
uagaagaggguuuuaggua

SEQ ID NO: 3547022 - RNA, 16 nt, Human
uagaagauccuacccc

SEQ ID NO: 3547023 - RNA, 14 nt, Human
uagaagcauuccuu

SEQ ID NO: 3547024 - RNA, 21 nt, Human
uagaagcauuccuucuuugau

SEQ ID NO: 3547025 - RNA, 15 nt, Human
uagaagccaagggaa

SEQ ID NO: 3547026 - RNA, 19 nt, Human
uagaagccaagggaaaggg

SEQ ID NO: 3547027 - RNA, 22 nt, Human
uagaagccccguuauaacuccu

SEQ ID NO: 3547028 - RNA, 16 nt, Human
uagaagcugcaguggu

SEQ ID NO: 3547029 - RNA, 14 nt, Human
uagaagcuggagga

SEQ ID NO: 3547030 - RNA, 17 nt, Human
uagaaggagacagagcu

SEQ ID NO: 3547031 - RNA, 11 nt, Human
uagaaggccac

SEQ ID NO: 3547032 - RNA, 19 nt, Human
uagaaggccacaugucacc

SEQ ID NO: 3547033 - RNA, 19 nt, Human
uagaagggccaguccugcc

SEQ ID NO: 3547034 - RNA, 14 nt, Human
uagaaguagaauug

SEQ ID NO: 3547035 - RNA, 19 nt, Human
uagaagucuuagauguaua

SEQ ID NO: 3547036 - RNA, 22 nt, Human
uagaagucuucaugaaaugcua

SEQ ID NO: 3547037 - RNA, 16 nt, Human
uagaagugcauuucug

SEQ ID NO: 3547038 - RNA, 23 nt, Human
uagaagugcauuucugaauagaa

SEQ ID NO: 3547039 - RNA, 18 nt, Human
uagaaguggaccaggaca

SEQ ID NO: 3547040 - RNA, 16 nt, Human
uagaagugucauguuu

SEQ ID NO: 3547041 - RNA, 15 nt, Human
uagaaguuacugaau

SEQ ID NO: 3547042 - RNA, 16 nt, Human
uagaaguuacugaaug

SEQ ID NO: 3547043 - RNA, 20 nt, Human
uagaaguuacugaaugcacc

SEQ ID NO: 3547044 - RNA, 22 nt, Human
uagaaguucuaguguuuucaau

SEQ ID NO: 3547045 - RNA, 23 nt, Human
uagaaguuuguccauuuguaaaa

SEQ ID NO: 3547046 - RNA, 22 nt, Human
uagaauaaaggcaguuuucuaa

SEQ ID NO: 3547047 - RNA, 19 nt, Human
uagaauaagaauuugcaua

SEQ ID NO: 3547048 - RNA, 16 nt, Human
uagaauaauaaauauu

SEQ ID NO: 3547049 - RNA, 17 nt, Human
uagaauaauaaauauuu

SEQ ID NO: 3547050 - RNA, 23 nt, Human
uagaauacaguuuugaguagagu

SEQ ID NO: 3547051 - RNA, 17 nt, Human
uagaauagcauguugua

SEQ ID NO: 3547052 - RNA, 22 nt, Human
uagaauaggcacuuuaaaacac

SEQ ID NO: 3547053 - RNA, 23 nt, Human
uagaauaguguucugcaaaaaua

SEQ ID NO: 3547054 - RNA, 15 nt, Human
uagaauauaggucuc

SEQ ID NO: 3547055 - RNA, 15 nt, Human
uagaauauauuuccu

SEQ ID NO: 3547056 - RNA, 12 nt, Human
uagaauauuuau

SEQ ID NO: 3547057 - RNA, 15 nt, Human
uagaauauuuauuac

SEQ ID NO: 3547058 - RNA, 21 nt, Human
uagaaucaaacauuuugaaag

SEQ ID NO: 3547059 - RNA, 22 nt, Human
uagaaucaaacauuuugaaagu

SEQ ID NO: 3547060 - RNA, 20 nt, Human
uagaauccacguauuccccu

SEQ ID NO: 3547061 - RNA, 18 nt, Human
uagaaucccagcccccug

SEQ ID NO: 3547062 - RNA, 15 nt, Human
uagaaucuauuuucu

SEQ ID NO: 3547063 - RNA, 17 nt, Human
uagaaucuauuuucuau

SEQ ID NO: 3547064 - RNA, 19 nt, Human
uagaaucuauuuucuaugu

SEQ ID NO: 3547065 - RNA, 20 nt, Human
uagaaucuauuuucuaugua

SEQ ID NO: 3547066 - RNA, 12 nt, Human
uagaaugaaaau

SEQ ID NO: 3547067 - RNA, 17 nt, Human
uagaaugaccuuguaau

SEQ ID NO: 3547068 - RNA, 20 nt, Human
uagaaugaccuuguaaugua

SEQ ID NO: 3547069 - RNA, 21 nt, Human
uagaaugauuucaugcuaucu

SEQ ID NO: 3547070 - RNA, 21 nt, Human
uagaauggauaaaauaaugcu

SEQ ID NO: 3547071 - RNA, 22 nt, Human
uagaauggauaaaauaaugcug

SEQ ID NO: 3547072 - RNA, 18 nt, Human
uagaauggugauuuuaaa

SEQ ID NO: 3547073 - RNA, 14 nt, Human
uagaauguaaaugu

SEQ ID NO: 3547074 - RNA, 16 nt, Human
uagaauguaaaugucu

SEQ ID NO: 3547075 - RNA, 12 nt, Human
uagaauguaguu

SEQ ID NO: 3547076 - RNA, 21 nt, Human
uagaauguaguuugaggaaau

SEQ ID NO: 3547077 - RNA, 22 nt, Human
uagaauguauuguaccuuuuaa

SEQ ID NO: 3547078 - RNA, 13 nt, Human
uagaauguguuuu

SEQ ID NO: 3547079 - RNA, 20 nt, Human
uagaauguguuuucugaaua

SEQ ID NO: 3547080 - RNA, 18 nt, Human
uagaauguuuucaaaugu

SEQ ID NO: 3547081 - RNA, 14 nt, Human
uagaauuaaaaaag

SEQ ID NO: 3547082 - RNA, 17 nt, Human
uagaauuaccauuuguu

SEQ ID NO: 3547083 - RNA, 16 nt, Human
uagaauuaucuaauuu

SEQ ID NO: 3547084 - RNA, 22 nt, Human
uagaauuaucuaauuuauaaaa

SEQ ID NO: 3547085 - RNA, 15 nt, Human
uagaauuauuuaaac

SEQ ID NO: 3547086 - RNA, 20 nt, Human
uagaauucccucucucugac

SEQ ID NO: 3547087 - RNA, 21 nt, Human
uagaauucccucucucugacu

SEQ ID NO: 3547088 - RNA, 16 nt, Human
uagaauuccuucaggg

SEQ ID NO: 3547089 - RNA, 18 nt, Human
uagaauucuagugcugcu

SEQ ID NO: 3547090 - RNA, 19 nt, Human
uagaauucuagugcugcug

SEQ ID NO: 3547091 - RNA, 13 nt, Human
uagaauucuguau

SEQ ID NO: 3547092 - RNA, 17 nt, Human
uagaauugaguguuuaa

SEQ ID NO: 3547093 - RNA, 19 nt, Human
uagaauugaguguuuaaag

SEQ ID NO: 3547094 - RNA, 23 nt, Human
uagaauuuauucaauuccucugg

SEQ ID NO: 3547095 - RNA, 19 nt, Human
uagaauuugauaugugaac

SEQ ID NO: 3547096 - RNA, 23 nt, Human
uagaauuuuaagccuuuguugaa

SEQ ID NO: 3547097 - RNA, 14 nt, Human
uagacaaaaaguau

SEQ ID NO: 3547098 - RNA, 16 nt, Human
uagacaaaaaguauau

SEQ ID NO: 3547099 - RNA, 16 nt, Human
uagacaaauacucaug

SEQ ID NO: 3547100 - RNA, 18 nt, Human
uagacaaauacucaugug

SEQ ID NO: 3547101 - RNA, 19 nt, Human
uagacaaauauuuggaggg

SEQ ID NO: 3547102 - RNA, 15 nt, Human
uagacaaaucuaagg

SEQ ID NO: 3547103 - RNA, 20 nt, Human
uagacaagauauuguacaua

SEQ ID NO: 3547104 - RNA, 22 nt, Human
uagacaaguccagccuggcaag

SEQ ID NO: 3547105 - RNA, 14 nt, Human
uagacaauauacaa

SEQ ID NO: 3547106 - RNA, 23 nt, Human
uagacaaucauuguuuugaauau

SEQ ID NO: 3547107 - RNA, 15 nt, Human
uagacaauugaggua

SEQ ID NO: 3547108 - RNA, 12 nt, Human
uagacacacaaa

SEQ ID NO: 3547109 - RNA, 13 nt, Human
uagacacacauga

SEQ ID NO: 3547110 - RNA, 13 nt, Human
uagacacagauaa

SEQ ID NO: 3547111 - RNA, 20 nt, Human
uagacacaugaagguaaaua

SEQ ID NO: 3547112 - RNA, 20 nt, Human
uagacaccaaaguucuaaua

SEQ ID NO: 3547113 - RNA, 16 nt, Human
uagacacgcacggcag

SEQ ID NO: 3547114 - RNA, 21 nt, Human
uagacacuccccgaagucuuu

SEQ ID NO: 3547115 - RNA, 22 nt, Human
uagacacuggcugccagcuauu

SEQ ID NO: 3547116 - RNA, 19 nt, Human
uagacagaggcccucaagu

SEQ ID NO: 3547117 - RNA, 18 nt, Human
uagacagccaaaggcugg

SEQ ID NO: 3547118 - RNA, 23 nt, Human
uagacagcuuuucucaacugggu

SEQ ID NO: 3547119 - RNA, 22 nt, Human
uagacaggaaaagcaugucuua

SEQ ID NO: 3547120 - RNA, 18 nt, Human
uagacaggagaagaaaga

SEQ ID NO: 3547121 - RNA, 12 nt, Human
uagacagucccu

SEQ ID NO: 3547122 - RNA, 16 nt, Human
uagacagucccugcca

SEQ ID NO: 3547123 - RNA, 21 nt, Human
uagacagucccugccaaugga

SEQ ID NO: 3547124 - RNA, 15 nt, Human
uagacaguuuguaaa

SEQ ID NO: 3547125 - RNA, 15 nt, Human
uagaguuuacagcuc

SEQ ID NO: 3547126 - RNA, 18 nt, Human
uagaguuuagcuggaaaa

SEQ ID NO: 3547127 - RNA, 20 nt, Human
uagaguuucuguuugauucu

SEQ ID NO: 3547128 - RNA, 23 nt, Human
uagaguuucuguuugauucuuuu

SEQ ID NO: 3547129 - RNA, 18 nt, Human
uagaguuuuuaaacauca

SEQ ID NO: 3547130 - RNA, 23 nt, Human
uagauaaaacaucuuugaaauua

SEQ ID NO: 3547131 - RNA, 14 nt, Human
uagauaacucuuug

SEQ ID NO: 3547132 - RNA, 18 nt, Human
uagauaauacaccacuac

SEQ ID NO: 3547133 - RNA, 13 nt, Human
uagauacaauaaa

SEQ ID NO: 3547134 - RNA, 16 nt, Human
uagauacaauaaauug

SEQ ID NO: 3547135 - RNA, 17 nt, Human
uagauacaauaaauugc

SEQ ID NO: 3547136 - RNA, 13 nt, Human
uagauacaaucag

SEQ ID NO: 3547137 - RNA, 14 nt, Human
uagauacaaucagc

SEQ ID NO: 3547138 - RNA, 16 nt, Human
uagauacucucuucuu

SEQ ID NO: 3547139 - RNA, 16 nt, Human
uagauacuguaucaug

SEQ ID NO: 3547140 - RNA, 16 nt, Human
uuaguauuugcauauu

SEQ ID NO: 3547141 - RNA, 23 nt, Human
uuagucacugccugcagaggucu

SEQ ID NO: 3547142 - RNA, 22 nt, Human
uuagucacuuuuuuuuuccaaa

SEQ ID NO: 3547143 - RNA, 13 nt, Human
uuagucaugugac

SEQ ID NO: 3547144 - RNA, 14 nt, Human
uuagucaugugacc

SEQ ID NO: 3547145 - RNA, 22 nt, Human
uuagucccccaacucugagccc

SEQ ID NO: 3547146 - RNA, 22 nt, Human
uuaguccuguuauagacgagaa

SEQ ID NO: 3547147 - RNA, 19 nt, Human
uuagucgugagcucuugug

SEQ ID NO: 3547148 - RNA, 19 nt, Human
uuagucuacucuuaagcca

SEQ ID NO: 3547149 - RNA, 22 nt, Human
uuagucuacucuuaagccaucu

SEQ ID NO: 3547150 - RNA, 12 nt, Human
uuagucucaguu

SEQ ID NO: 3547151 - RNA, 20 nt, Human
uuagucucaguucucuuaau

SEQ ID NO: 3547152 - RNA, 21 nt, Human
uuagucucaguuugugugucu

SEQ ID NO: 3547153 - RNA, 14 nt, Human
uuagucucuuuauu

SEQ ID NO: 3547154 - RNA, 14 nt, Human
uuagucuucucaua

SEQ ID NO: 3547155 - RNA, 23 nt, Human
uuagugacuaaaccauugugcau

SEQ ID NO: 3547156 - RNA, 17 nt, Human
uuagugauauuucucua

SEQ ID NO: 3547157 - RNA, 18 nt, Human
uuagugauauuucucuag

SEQ ID NO: 3547158 - RNA, 17 nt, Human
uuagugaucuuagcaua

SEQ ID NO: 3547159 - RNA, 14 nt, Human
uuagugcaucuuug

SEQ ID NO: 3547160 - RNA, 19 nt, Human
uuagugccacuuaauguau

SEQ ID NO: 3547161 - RNA, 14 nt, Human
uuagugccugugug

SEQ ID NO: 3547162 - RNA, 12 nt, Human
uuagugcuaagu

SEQ ID NO: 3547163 - RNA, 17 nt, Human
uuagugcuaagugugaa

SEQ ID NO: 3547164 - RNA, 20 nt, Human
uuaguggcucaacauugugu

SEQ ID NO: 3547165 - RNA, 12 nt, Human
uuaguggcuuuu

SEQ ID NO: 3547166 - RNA, 16 nt, Human
uuagugggccagggcu

SEQ ID NO: 3547167 - RNA, 15 nt, Human
uuaguguaauaagac

SEQ ID NO: 3547168 - RNA, 14 nt, Human
uuagugucacuuac

SEQ ID NO: 3547169 - RNA, 19 nt, Human
uuagugugguuuucuguuu

SEQ ID NO: 3547170 - RNA, 14 nt, Human
uuaguguucauaaa

SEQ ID NO: 3547171 - RNA, 16 nt, Human
uuaguguuucugugca

SEQ ID NO: 3547172 - RNA, 17 nt, Human
uuaguguuucugugcau

SEQ ID NO: 3547173 - RNA, 18 nt, Human
uuaguuaccuuauaguua

SEQ ID NO: 3547174 - RNA, 21 nt, Human
uuaguuaccuuauaguuacug

SEQ ID NO: 3547175 - RNA, 16 nt, Human
uuaguuauagaugucu

SEQ ID NO: 3547176 - RNA, 13 nt, Human
uuaguuauaguuu

SEQ ID NO: 3547177 - RNA, 15 nt, Human
uuaguuauaguuuca

SEQ ID NO: 3547178 - RNA, 15 nt, Human
uuaguuccacugaga

SEQ ID NO: 3547179 - RNA, 23 nt, Human
uuaguuccccaaauacaaaguua

SEQ ID NO: 3547180 - RNA, 16 nt, Human
uuaguuccucauuagc

SEQ ID NO: 3547181 - RNA, 14 nt, Human
uuaguuccuugagu

SEQ ID NO: 3547182 - RNA, 12 nt, Human
uuaguucuauuu

SEQ ID NO: 3547183 - RNA, 16 nt, Human
uuaguucuuuggaaau

SEQ ID NO: 3547184 - RNA, 22 nt, Human
uuaguugccuaagcauugccug

SEQ ID NO: 3547185 - RNA, 17 nt, Human
uuaguuuacaaucagcc

SEQ ID NO: 3547186 - RNA, 22 nt, Human
uuaguuucaguagauugcagaa

SEQ ID NO: 3547187 - RNA, 15 nt, Human
uuaguuucuguucug

SEQ ID NO: 3547188 - RNA, 20 nt, Human
uuaguuucuguucuguggaa

SEQ ID NO: 3547189 - RNA, 14 nt, Human
uuaguuuucuuguu

SEQ ID NO: 3547190 - RNA, 16 nt, Human
uuaguuuugaugaguu

SEQ ID NO: 3547191 - RNA, 20 nt, Human
uuaguuuuuaaaauaucuuu

SEQ ID NO: 3547192 - RNA, 16 nt, Human
uuaguuuuucauuaaa

SEQ ID NO: 3547193 - RNA, 18 nt, Human
uuaguuuuugguugggaa

SEQ ID NO: 3547194 - RNA, 21 nt, Human
uuaguuuuugugaaguuuaau

SEQ ID NO: 3547195 - RNA, 14 nt, Human
uuauaaaaaauggu

SEQ ID NO: 3547196 - RNA, 14 nt, Human
uuauaaaaagauaa

SEQ ID NO: 3547197 - RNA, 21 nt, Human
uuauaaaaauaaaaaacacug

SEQ ID NO: 3547198 - RNA, 13 nt, Human
uuauaaaaauauu

SEQ ID NO: 3547199 - RNA, 22 nt, Human
uuauaaaacagaguaaucuugu

SEQ ID NO: 3547200 - RNA, 22 nt, Human
uuauaaaacguguuuguauugu

SEQ ID NO: 3547201 - RNA, 13 nt, Human
uuauaaaacuucu

SEQ ID NO: 3547202 - RNA, 23 nt, Human
uuauaaaagaauaaaauugcacu

SEQ ID NO: 3547203 - RNA, 13 nt, Human
uuauaaaagugau

SEQ ID NO: 3547204 - RNA, 12 nt, Human
uuauaaaagugu

SEQ ID NO: 3547205 - RNA, 18 nt, Human
uuauaaaauauaaacaaa

SEQ ID NO: 3547206 - RNA, 16 nt, Human
uuauaaaaucaaguuu

SEQ ID NO: 3547207 - RNA, 18 nt, Human
uuauaaaauccugugcaa

SEQ ID NO: 3547208 - RNA, 10 nt, Human
uuauaaaauu

SEQ ID NO: 3547209 - RNA, 18 nt, Human
uuauaaaauuuugcuuuu

SEQ ID NO: 3547210 - RNA, 17 nt, Human
uuauaaaccucuaauuu

SEQ ID NO: 3547211 - RNA, 22 nt, Human
uuauaaacuuuuuucuuacugu

SEQ ID NO: 3547212 - RNA, 19 nt, Human
uuauaaagaauguuucuua

SEQ ID NO: 3547213 - RNA, 12 nt, Human
uuauaaauauga

SEQ ID NO: 3547214 - RNA, 23 nt, Human
uuauaaaucauauugaugaaaag

SEQ ID NO: 3547215 - RNA, 14 nt, Human
uuauaaaucgcuuu

SEQ ID NO: 3547216 - RNA, 18 nt, Human
uuauaaaucgcuuuugau

SEQ ID NO: 3547217 - RNA, 15 nt, Human
uuauaaaugagcaaa

SEQ ID NO: 3547218 - RNA, 14 nt, Human
uuauaaauuauguu

SEQ ID NO: 3547219 - RNA, 15 nt, Human
uuauaaauuauguuu

SEQ ID NO: 3547220 - RNA, 16 nt, Human
uuauaaauuauguuua

SEQ ID NO: 3547221 - RNA, 17 nt, Human
uuauaaauuauguuuau

SEQ ID NO: 3547222 - RNA, 23 nt, Human
uuauaaccuaguuaaagaaagga

SEQ ID NO: 3547223 - RNA, 16 nt, Human
uuauaaccuuaauuua

SEQ ID NO: 3547224 - RNA, 19 nt, Human
uuauaacuaacauguccug

SEQ ID NO: 3547225 - RNA, 22 nt, Human
uuauaacuacuccggagacagg

SEQ ID NO: 3547226 - RNA, 16 nt, Human
uuauaacuauucaguu

SEQ ID NO: 3547227 - RNA, 21 nt, Human
uuauaacucaucauaaaauaa

SEQ ID NO: 3547228 - RNA, 16 nt, Human
uuauaacucugcacua

SEQ ID NO: 3547229 - RNA, 21 nt, Human
uuauaacuuaaugaaaacaau

SEQ ID NO: 3547230 - RNA, 17 nt, Human
uuauaagaaaaacuuuu

SEQ ID NO: 3547231 - RNA, 13 nt, Human
uuauaagaaaaau

SEQ ID NO: 3547232 - RNA, 16 nt, Human
uuauaagaaagccuga

SEQ ID NO: 3547233 - RNA, 21 nt, Human
uuauaagaagaaguucauguc

SEQ ID NO: 3547234 - RNA, 13 nt, Human
uuauaagacucuc

SEQ ID NO: 3547235 - RNA, 17 nt, Human
uuauaagcaucauuauu

SEQ ID NO: 3547236 - RNA, 13 nt, Human
uuauaagcauuga

SEQ ID NO: 3547237 - RNA, 15 nt, Human
uuauaaggacugcau

SEQ ID NO: 3547238 - RNA, 18 nt, Human
uuauaagggcaaauugga

SEQ ID NO: 3547239 - RNA, 18 nt, Human
uuauaaguagcaggccaa

SEQ ID NO: 3547240 - RNA, 18 nt, Human
uuauaagucauuguaugu

SEQ ID NO: 3547241 - RNA, 17 nt, Human
uuauaagugaagugaua

SEQ ID NO: 3547242 - RNA, 15 nt, Human
uuauaaguucacaaa

SEQ ID NO: 3547243 - RNA, 17 nt, Human
uuauaauaaaaggaaaa

SEQ ID NO: 3547244 - RNA, 22 nt, Human
uuauaauaaaaggaaaagcaaa

SEQ ID NO: 3547245 - RNA, 19 nt, Human
uuauaauaaaggacuguaa

SEQ ID NO: 3547246 - RNA, 21 nt, Human
uuauaauaaaggacuguaauc

SEQ ID NO: 3547247 - RNA, 15 nt, Human
uuauaauaaauauau

SEQ ID NO: 3547248 - RNA, 18 nt, Human
uuauaauauuuuaaugua

SEQ ID NO: 3547249 - RNA, 20 nt, Human
uuauaaucuuccauacuucu

SEQ ID NO: 3547250 - RNA, 19 nt, Human
uuauaaugaggaugauuau

SEQ ID NO: 3547251 - RNA, 19 nt, Human
uuauaauguauucauauuu

SEQ ID NO: 3547252 - RNA, 14 nt, Human
uuauaauucuuuca

SEQ ID NO: 3547253 - RNA, 21 nt, Human
uuauaauucuuucaauacaga

SEQ ID NO: 3547254 - RNA, 14 nt, Human
uuauaauuguauca

SEQ ID NO: 3547255 - RNA, 22 nt, Human
uuauaauuguaucagaggccua

SEQ ID NO: 3547256 - RNA, 14 nt, Human
uuauaauuguugca

SEQ ID NO: 3547257 - RNA, 17 nt, Human
uuauaauuuuaaauguu

SEQ ID NO: 3547258 - RNA, 18 nt, Human
uuauaauuuuaagauucc

SEQ ID NO: 3547259 - RNA, 14 nt, Human
uuauaauuuuccua

SEQ ID NO: 3547260 - RNA, 12 nt, Human
uuauaauuuucu

SEQ ID NO: 3547261 - RNA, 15 nt, Human
uuauaauuuucugaa

SEQ ID NO: 3547262 - RNA, 14 nt, Human
uuauaauuuuguga

SEQ ID NO: 3547263 - RNA, 17 nt, Human
uuauaauuuugugaagc

SEQ ID NO: 3547264 - RNA, 18 nt, Human
uuauaauuuugugaagca

SEQ ID NO: 3547265 - RNA, 21 nt, Human
uuauaauuuuuuuauuacuga

SEQ ID NO: 3547266 - RNA, 21 nt, Human
uuauacaaaccuaccaaaaug

SEQ ID NO: 3547267 - RNA, 15 nt, Human
uuauacaaaugucuu

SEQ ID NO: 3547268 - RNA, 18 nt, Human
uuauacaaauuaaaaaga

SEQ ID NO: 3547269 - RNA, 23 nt, Human
uuauacaacagugcuaaaaaugg

SEQ ID NO: 3547270 - RNA, 15 nt, Human
uagcuucaggaaccu

SEQ ID NO: 3547271 - RNA, 22 nt, Human
uagcuucccuccccucuaguuu

SEQ ID NO: 3547272 - RNA, 18 nt, Human
uagcuucugaccucagca

SEQ ID NO: 3547273 - RNA, 19 nt, Human
uagcuucugaccucagcau

SEQ ID NO: 3547274 - RNA, 13 nt, Human
uagcuucugcuuu

SEQ ID NO: 3547275 - RNA, 17 nt, Human
uagcuugcgcauucuca

SEQ ID NO: 3547276 - RNA, 18 nt, Human
uagcuugggacaaaucaa

SEQ ID NO: 3547277 - RNA, 15 nt, Human
uagcuuguucccugu

SEQ ID NO: 3547278 - RNA, 22 nt, Human
uagcuuuaacuuaaauaguauu

SEQ ID NO: 3547279 - RNA, 17 nt, Human
uagcuuuagacccuggg

SEQ ID NO: 3547280 - RNA, 18 nt, Human
uagcuuuagacccugggu

SEQ ID NO: 3547281 - RNA, 14 nt, Human
uagcuuuauucuuc

SEQ ID NO: 3547282 - RNA, 15 nt, Human
uagcuuucaauuccg

SEQ ID NO: 3547283 - RNA, 17 nt, Human
uagcuuucaauuccgua

SEQ ID NO: 3547284 - RNA, 23 nt, Human
uagcuuucaauuccguagccagc

SEQ ID NO: 3547285 - RNA, 19 nt, Human
uagcuuucccaaauaaacu

SEQ ID NO: 3547286 - RNA, 21 nt, Human
uagcuuucugagcaagaggau

SEQ ID NO: 3547287 - RNA, 14 nt, Human
uagcuuugcucugc

SEQ ID NO: 3547288 - RNA, 16 nt, Human
uagcuuugcucugcca

SEQ ID NO: 3547289 - RNA, 18 nt, Human
uagcuuuuauuguauaaa

SEQ ID NO: 3547290 - RNA, 14 nt, Human
uagcuuuucaccuu

SEQ ID NO: 3547291 - RNA, 20 nt, Human
uagcuuuugugggggacugu

SEQ ID NO: 3547292 - RNA, 17 nt, Human
uagcuuuuuaaaacauu

SEQ ID NO: 3547293 - RNA, 14 nt, Human
uagcuuuuuaauug

SEQ ID NO: 3547294 - RNA, 16 nt, Human
uagcuuuuuaauuguu

SEQ ID NO: 3547295 - RNA, 20 nt, Human
uagcuuuuucauccccuuac

SEQ ID NO: 3547296 - RNA, 13 nt, Human
uagcuuuuuucuc

SEQ ID NO: 3547297 - RNA, 22 nt, Human
uaggaaaaaaacuauuaaggau

SEQ ID NO: 3547298 - RNA, 15 nt, Human
uaggaaaagaaaucu

SEQ ID NO: 3547299 - RNA, 19 nt, Human
uaggaaaaguacauuuaau

SEQ ID NO: 3547300 - RNA, 21 nt, Human
uaggaaaaucacuuugucuaa

SEQ ID NO: 3547301 - RNA, 21 nt, Human
uaggaaacaaagcuuagcagg

SEQ ID NO: 3547302 - RNA, 19 nt, Human
uaggaaagccucacugaua

SEQ ID NO: 3547303 - RNA, 17 nt, Human
uaggaaauaaaaccuuu

SEQ ID NO: 3547304 - RNA, 19 nt, Human
uaggaaauauuuauuuuaa

SEQ ID NO: 3547305 - RNA, 16 nt, Human
uaggaaauccagggug

SEQ ID NO: 3547306 - RNA, 22 nt, Human
uaggaaauggcuuugugauuca

SEQ ID NO: 3547307 - RNA, 16 nt, Human
uaggaacaaaucuucc

SEQ ID NO: 3547308 - RNA, 17 nt, Human
uaggaacacuccuucac

SEQ ID NO: 3547309 - RNA, 18 nt, Human
uaggaagaauuuuaaaaa

SEQ ID NO: 3547310 - RNA, 21 nt, Human
uaggaagaauuuuaaaaauga

SEQ ID NO: 3547311 - RNA, 22 nt, Human
uaggaagaauuuuaaaaaugaa

SEQ ID NO: 3547312 - RNA, 21 nt, Human
uaggaagacacauuaucuucu

SEQ ID NO: 3547313 - RNA, 14 nt, Human
uaggaagagaaacc

SEQ ID NO: 3547314 - RNA, 15 nt, Human
uaggaagagaaacca

SEQ ID NO: 3547315 - RNA, 18 nt, Human
uaggaagggaccaaggca

SEQ ID NO: 3547316 - RNA, 18 nt, Human
uaggaagguacuguauga

SEQ ID NO: 3547317 - RNA, 14 nt, Human
uaggaaggucauuu

SEQ ID NO: 3547318 - RNA, 16 nt, Human
uaggaaggucauuucc

SEQ ID NO: 3547319 - RNA, 18 nt, Human
uaggaaggucauuuccau

SEQ ID NO: 3547320 - RNA, 19 nt, Human
uaggaaggucauuuccaug

SEQ ID NO: 3547321 - RNA, 18 nt, Human
uaggaaggucucauucuu

SEQ ID NO: 3547322 - RNA, 19 nt, Human
uaggaaguguaacagcuga

SEQ ID NO: 3547323 - RNA, 22 nt, Human
uaggaaguguaacagcugaggu

SEQ ID NO: 3547324 - RNA, 22 nt, Human
uaggaaguuuucuguagucauu

SEQ ID NO: 3547325 - RNA, 15 nt, Human
uaggaauagcauguc

SEQ ID NO: 3547326 - RNA, 13 nt, Human
uaggaauauuaua

SEQ ID NO: 3547327 - RNA, 20 nt, Human
uaggaauauuauauuuggau

SEQ ID NO: 3547328 - RNA, 20 nt, Human
uaggaaucauucagaaaugu

SEQ ID NO: 3547329 - RNA, 18 nt, Human
uaggaauuaaguuaucuu

SEQ ID NO: 3547330 - RNA, 18 nt, Human
uaggaauucaucuuuuga

SEQ ID NO: 3547331 - RNA, 23 nt, Human
uaggaauugacccacaagaaaug

SEQ ID NO: 3547332 - RNA, 16 nt, Human
uaggaccacucagccc

SEQ ID NO: 3547333 - RNA, 17 nt, Human
uaggaccacucagcccc

SEQ ID NO: 3547334 - RNA, 18 nt, Human
uaggaccacucagccccu

SEQ ID NO: 3547335 - RNA, 21 nt, Human
uaggaccacucagccccuagg

SEQ ID NO: 3547336 - RNA, 16 nt, Human
uaggaccaggauccag

SEQ ID NO: 3547337 - RNA, 13 nt, Human
uaggaccuugggc

SEQ ID NO: 3547338 - RNA, 14 nt, Human
uaggaccuugggcc

SEQ ID NO: 3547339 - RNA, 16 nt, Human
uaggacgccacccagc

SEQ ID NO: 3547340 - RNA, 19 nt, Human
uaggacucaaaguuucaga

SEQ ID NO: 3547341 - RNA, 16 nt, Human
uaggacucugaggcuc

SEQ ID NO: 3547342 - RNA, 21 nt, Human
uaggacuuuggugguuuaaaa

SEQ ID NO: 3547343 - RNA, 17 nt, Human
uaggagaaccaaaucug

SEQ ID NO: 3547344 - RNA, 15 nt, Human
uaggagaagccagga

SEQ ID NO: 3547345 - RNA, 19 nt, Human
uugcaauggcuauauggca

SEQ ID NO: 3547346 - RNA, 19 nt, Human
uugcacaauauugaacuuu

SEQ ID NO: 3547347 - RNA, 18 nt, Human
uugcacacacucagugca

SEQ ID NO: 3547348 - RNA, 15 nt, Human
uugcacacaucaucu

SEQ ID NO: 3547349 - RNA, 17 nt, Human
uugcacacuccccugca

SEQ ID NO: 3547350 - RNA, 21 nt, Human
uugcacagaaguccuguaugu

SEQ ID NO: 3547351 - RNA, 18 nt, Human
uugcacagccaaauuuaa

SEQ ID NO: 3547352 - RNA, 19 nt, Human
uugcacagggauucucaca

SEQ ID NO: 3547353 - RNA, 16 nt, Human
uugcacaguuagcaaa

SEQ ID NO: 3547354 - RNA, 15 nt, Human
uugcacaugucuuaa

SEQ ID NO: 3547355 - RNA, 16 nt, Human
uugcacaugucuuaau

SEQ ID NO: 3547356 - RNA, 17 nt, Human
uugcacaugucuuaaug

SEQ ID NO: 3547357 - RNA, 23 nt, Human
uugcacauuaaaugacucuuccc

SEQ ID NO: 3547358 - RNA, 13 nt, Human
uugcacauuguuc

SEQ ID NO: 3547359 - RNA, 14 nt, Human
uugcacauuguuca

SEQ ID NO: 3547360 - RNA, 20 nt, Human
uugcaccaaauuaucuugau

SEQ ID NO: 3547361 - RNA, 15 nt, Human
uugcaccacugcacu

SEQ ID NO: 3547362 - RNA, 16 nt, Human
uugcaccacugcacuc

SEQ ID NO: 3547363 - RNA, 13 nt, Human
uugcacccagccc

SEQ ID NO: 3547364 - RNA, 15 nt, Human
uugcacccagcccag

SEQ ID NO: 3547365 - RNA, 19 nt, Human
uugcacccagcccuggucu

SEQ ID NO: 3547366 - RNA, 13 nt, Human
uugcaccccucac

SEQ ID NO: 3547367 - RNA, 13 nt, Human
uugcaccccuccc

SEQ ID NO: 3547368 - RNA, 17 nt, Human
uugcaccuaccucacag

SEQ ID NO: 3547369 - RNA, 16 nt, Human
uugcaccuguccccac

SEQ ID NO: 3547370 - RNA, 17 nt, Human
uugcacgacgcccucuc

SEQ ID NO: 3547371 - RNA, 21 nt, Human
uugcacgacgcccucucccca

SEQ ID NO: 3547372 - RNA, 17 nt, Human
uugcacgcccaugugug

SEQ ID NO: 3547373 - RNA, 20 nt, Human
uugcacgcccaugugugagu

SEQ ID NO: 3547374 - RNA, 18 nt, Human
uugcacgcgcccuuucua

SEQ ID NO: 3547375 - RNA, 15 nt, Human
uugcacggcugcuga

SEQ ID NO: 3547376 - RNA, 18 nt, Human
uugcacguguguuuuucu

SEQ ID NO: 3547377 - RNA, 21 nt, Human
uugcacguguguuuuucuauu

SEQ ID NO: 3547378 - RNA, 22 nt, Human
uugcacguguguuuuucuauua

SEQ ID NO: 3547379 - RNA, 19 nt, Human
uugcacuaaaguauguaaa

SEQ ID NO: 3547380 - RNA, 17 nt, Human
uugcacucaaaucuuaa

SEQ ID NO: 3547381 - RNA, 21 nt, Human
uugcacucaaaucuuaagaaa

SEQ ID NO: 3547382 - RNA, 14 nt, Human
uugcacuccagccu

SEQ ID NO: 3547383 - RNA, 13 nt, Human
uugcacugaaguu

SEQ ID NO: 3547384 - RNA, 16 nt, Human
uugcacugaaguuuga

SEQ ID NO: 3547385 - RNA, 13 nt, Human
uugcacugagggc

SEQ ID NO: 3547386 - RNA, 16 nt, Human
uugcacuguuuaauca

SEQ ID NO: 3547387 - RNA, 22 nt, Human
uugcacuucuaagacuuuacuu

SEQ ID NO: 3547388 - RNA, 15 nt, Human
uugcacuuucagacu

SEQ ID NO: 3547389 - RNA, 21 nt, Human
uugcacuuucagacucucucu

SEQ ID NO: 3547390 - RNA, 13 nt, Human
uugcacuuuguag

SEQ ID NO: 3547391 - RNA, 21 nt, Human
uugcagaaaagcaccugccga

SEQ ID NO: 3547392 - RNA, 16 nt, Human
uugcagaaaauucugu

SEQ ID NO: 3547393 - RNA, 19 nt, Human
uugcagaacuaaacucauu

SEQ ID NO: 3547394 - RNA, 21 nt, Human
uugcagaacuaaacucauuua

SEQ ID NO: 3547395 - RNA, 14 nt, Human
uugcagaacugcca

SEQ ID NO: 3547396 - RNA, 16 nt, Human
uugcagacaggaaucu

SEQ ID NO: 3547397 - RNA, 22 nt, Human
uugcagacaggcaagcaccucc

SEQ ID NO: 3547398 - RNA, 23 nt, Human
uugcagacaggcaagcaccuccu

SEQ ID NO: 3547399 - RNA, 14 nt, Human
uugcagcagugagu

SEQ ID NO: 3547400 - RNA, 23 nt, Human
uugcagcagugagucucuucaga

SEQ ID NO: 3547401 - RNA, 21 nt, Human
uugcagcccuugugaugugau

SEQ ID NO: 3547402 - RNA, 18 nt, Human
uugcagccggcacagggu

SEQ ID NO: 3547403 - RNA, 15 nt, Human
uugcagccugcucua

SEQ ID NO: 3547404 - RNA, 15 nt, Human
uugcagcgacuggca

SEQ ID NO: 3547405 - RNA, 23 nt, Human
uugcagcuaaggaggggaaaaaa

SEQ ID NO: 3547406 - RNA, 23 nt, Human
uugcagcucccauucuauguguc

SEQ ID NO: 3547407 - RNA, 17 nt, Human
uugcagcugggagaagg

SEQ ID NO: 3547408 - RNA, 14 nt, Human
uugcagcuuuaugu

SEQ ID NO: 3547409 - RNA, 18 nt, Human
uugcagggagcauggcug

SEQ ID NO: 3547410 - RNA, 21 nt, Human
uugcagggcagccccacaacu

SEQ ID NO: 3547411 - RNA, 18 nt, Human
uugcagguggaacucagu

SEQ ID NO: 3547412 - RNA, 23 nt, Human
uugcagguggccaaguuccucua

SEQ ID NO: 3547413 - RNA, 23 nt, Human
uugcagguggggguugcuguaua

SEQ ID NO: 3547414 - RNA, 18 nt, Human
uaggccuggccagaugca

SEQ ID NO: 3547415 - RNA, 13 nt, Human
uaggccugggugc

SEQ ID NO: 3547416 - RNA, 21 nt, Human
uaggccuuccucucuccagau

SEQ ID NO: 3547417 - RNA, 18 nt, Human
uaggcgagugccaggacu

SEQ ID NO: 3547418 - RNA, 23 nt, Human
uaggcgaucacaacgugcauugu

SEQ ID NO: 3547419 - RNA, 16 nt, Human
uaggcgggaaggaggg

SEQ ID NO: 3547420 - RNA, 21 nt, Human
uaggcgggcggucagggguuc

SEQ ID NO: 3547421 - RNA, 19 nt, Human
uaggcggggcuugccuucu

SEQ ID NO: 3547422 - RNA, 22 nt, Human
uaggcggggcuugccuucuggu

SEQ ID NO: 3547423 - RNA, 17 nt, Human
uaggcuacagagaagcc

SEQ ID NO: 3547424 - RNA, 19 nt, Human
uaggcuacagagaagccuu

SEQ ID NO: 3547425 - RNA, 13 nt, Human
uaggcuagggugg

SEQ ID NO: 3547426 - RNA, 16 nt, Human
uaggcuagggugggga

SEQ ID NO: 3547427 - RNA, 15 nt, Human
uaggcuauuccugag

SEQ ID NO: 3547428 - RNA, 17 nt, Human
uaggcuauuccugagag

SEQ ID NO: 3547429 - RNA, 16 nt, Human
uaggcuauuuguaaau

SEQ ID NO: 3547430 - RNA, 16 nt, Human
uaggcucauuuacugu

SEQ ID NO: 3547431 - RNA, 22 nt, Human
uaggcuccugccaguguggaac

SEQ ID NO: 3547432 - RNA, 17 nt, Human
uaggcucgccuucccuc

SEQ ID NO: 3547433 - RNA, 19 nt, Human
uaggcugacaccuaacucu

SEQ ID NO: 3547434 - RNA, 17 nt, Human
uaggcuggagaagcuca

SEQ ID NO: 3547435 - RNA, 20 nt, Human
uaggcuggaguuagggacug

SEQ ID NO: 3547436 - RNA, 17 nt, Human
uaggcugggcccagagg

SEQ ID NO: 3547437 - RNA, 18 nt, Human
uaggcugggcccagaggc

SEQ ID NO: 3547438 - RNA, 18 nt, Human
uaggcuuaguuugugugu

SEQ ID NO: 3547439 - RNA, 20 nt, Human
uagggaaaaaccagcgugug

SEQ ID NO: 3547440 - RNA, 13 nt, Human
uagggaaaacauu

SEQ ID NO: 3547441 - RNA, 13 nt, Human
uagggaaaugaaa

SEQ ID NO: 3547442 - RNA, 16 nt, Human
uagggaaaugaaagaa

SEQ ID NO: 3547443 - RNA, 15 nt, Human
uagggaacaauuugg

SEQ ID NO: 3547444 - RNA, 15 nt, Human
uagggaacuggggaa

SEQ ID NO: 3547445 - RNA, 13 nt, Human
uagggaagauaau

SEQ ID NO: 3547446 - RNA, 21 nt, Human
uagggaaggauacaaaagcau

SEQ ID NO: 3547447 - RNA, 14 nt, Human
uagggaagggccug

SEQ ID NO: 3547448 - RNA, 14 nt, Human
uagggaaguaacag

SEQ ID NO: 3547449 - RNA, 22 nt, Human
uagggacaauacagaacccauu

SEQ ID NO: 3547450 - RNA, 19 nt, Human
uagggacaggaccccagcu

SEQ ID NO: 3547451 - RNA, 14 nt, Human
uagggaccccuccu

SEQ ID NO: 3547452 - RNA, 23 nt, Human
uagggaggaccacaggugugagc

SEQ ID NO: 3547453 - RNA, 22 nt, Human
uagggaggaccuuaucugugcg

SEQ ID NO: 3547454 - RNA, 17 nt, Human
uagggauagucaccuuu

SEQ ID NO: 3547455 - RNA, 20 nt, Human
uagggauagucaccuuuuaa

SEQ ID NO: 3547456 - RNA, 18 nt, Human
uagggauguucuggcccu

SEQ ID NO: 3547457 - RNA, 15 nt, Human
uagggauucaggcug

SEQ ID NO: 3547458 - RNA, 16 nt, Human
uagggauucaggcugc

SEQ ID NO: 3547459 - RNA, 23 nt, Human
uagggcaauuaauuccuucagca

SEQ ID NO: 3547460 - RNA, 20 nt, Human
uagggcaccagggguuucuc

SEQ ID NO: 3547461 - RNA, 13 nt, Human
uagggcacugggc

SEQ ID NO: 3547462 - RNA, 11 nt, Human
uagggcagcuu

SEQ ID NO: 3547463 - RNA, 13 nt, Human
uagggcagcuugc

SEQ ID NO: 3547464 - RNA, 24 nt, Human
uagggcauuguaucugucuuucca

SEQ ID NO: 3547465 - RNA, 18 nt, Human
uagggcauuugagaaaug

SEQ ID NO: 3547466 - RNA, 14 nt, Human
uagggccaggcagg

SEQ ID NO: 3547467 - RNA, 17 nt, Human
uagggcucuaauuuccu

SEQ ID NO: 3547468 - RNA, 16 nt, Human
uagggcugggaaacac

SEQ ID NO: 3547469 - RNA, 17 nt, Human
uaggggaagaauaauuu

SEQ ID NO: 3547470 - RNA, 18 nt, Human
uaggggaaggagaaguaa

SEQ ID NO: 3547471 - RNA, 17 nt, Human
uaggggaaugagggggc

SEQ ID NO: 3547472 - RNA, 19 nt, Human
uaggggccccucucagccc

SEQ ID NO: 3547473 - RNA, 23 nt, Human
uaggggccccucucagcccucac

SEQ ID NO: 3547474 - RNA, 14 nt, Human
uaggggcugggaac

SEQ ID NO: 3547475 - RNA, 16 nt, Human
uagggggaacucuagc

SEQ ID NO: 3547476 - RNA, 23 nt, Human
uagggguaauauauugcugcugg

SEQ ID NO: 3547477 - RNA, 14 nt, Human
uaggggucacugua

SEQ ID NO: 3547478 - RNA, 14 nt, Human
uaggguacuaaauu

SEQ ID NO: 3547479 - RNA, 15 nt, Human
uagggucucuucagg

SEQ ID NO: 3547480 - RNA, 13 nt, Human
uagggugcagcca

SEQ ID NO: 3547481 - RNA, 15 nt, Human
uaggguuauaauaau

SEQ ID NO: 3547482 - RNA, 18 nt, Human
uaggguugcuggagccug

SEQ ID NO: 3547483 - RNA, 20 nt, Human
uagguaaucaaugaauauug

SEQ ID NO: 3547484 - RNA, 16 nt, Human
uagguagaaaaagggu

SEQ ID NO: 3547485 - RNA, 15 nt, Human
uagguagauguucag

SEQ ID NO: 3547486 - RNA, 11 nt, Human
uagguauuuug

SEQ ID NO: 3547487 - RNA, 12 nt, Human
uaggucacuggc

SEQ ID NO: 3547488 - RNA, 14 nt, Human
uaggucagugaggc

SEQ ID NO: 3547489 - RNA, 16 nt, Human
uaggucagugcaaaua

SEQ ID NO: 3547490 - RNA, 16 nt, Human
uagguccuuuagaaac

SEQ ID NO: 3547491 - RNA, 20 nt, Human
uaggucuagccuauguggau

SEQ ID NO: 3547492 - RNA, 18 nt, Human
uaggucucuucucccaga

SEQ ID NO: 3547493 - RNA, 12 nt, Human
uaggucugaaau

SEQ ID NO: 3547494 - RNA, 19 nt, Human
uaggucugaaauuuuucuu

SEQ ID NO: 3547495 - RNA, 14 nt, Human
uaggucuuuguaag

SEQ ID NO: 3547496 - RNA, 11 nt, Human
uaggugacaga

SEQ ID NO: 3547497 - RNA, 23 nt, Human
uaggugaucccguuuuccccaug

SEQ ID NO: 3547498 - RNA, 14 nt, Human
uaggugauuugaag

SEQ ID NO: 3547499 - RNA, 22 nt, Human
uaggugcaauuucaagguucua

SEQ ID NO: 3547500 - RNA, 15 nt, Human
uagguggcaaggcug

SEQ ID NO: 3547501 - RNA, 16 nt, Human
uaggugggccagcccc

SEQ ID NO: 3547502 - RNA, 21 nt, Human
uaggugggccagccccuccca

SEQ ID NO: 3547503 - RNA, 22 nt, Human
uagguuauuuugauguaaagau

SEQ ID NO: 3547504 - RNA, 14 nt, Human
uagguucagccaag

SEQ ID NO: 3547505 - RNA, 17 nt, Human
uugccaccaccucugug

SEQ ID NO: 3547506 - RNA, 14 nt, Human
uugccaccaggaga

SEQ ID NO: 3547507 - RNA, 15 nt, Human
uugccaccaggagaa

SEQ ID NO: 3547508 - RNA, 12 nt, Human
uugccaccccac

SEQ ID NO: 3547509 - RNA, 21 nt, Human
uugccaccccacccucccugg

SEQ ID NO: 3547510 - RNA, 18 nt, Human
uugccaccucuaacagca

SEQ ID NO: 3547511 - RNA, 12 nt, Human
uugccacuaauu

SEQ ID NO: 3547512 - RNA, 18 nt, Human
uugccacugauauucaga

SEQ ID NO: 3547513 - RNA, 19 nt, Human
uugccacugauauucagaa

SEQ ID NO: 3547514 - RNA, 14 nt, Human
uugccacugccucu

SEQ ID NO: 3547515 - RNA, 15 nt, Human
uugccacugccucuu

SEQ ID NO: 3547516 - RNA, 16 nt, Human
uugccacuuugcacga

SEQ ID NO: 3547517 - RNA, 15 nt, Human
uugccagaaagcaua

SEQ ID NO: 3547518 - RNA, 17 nt, Human
uugccagaaagcauaaa

SEQ ID NO: 3547519 - RNA, 15 nt, Human
uugccagaaguugug

SEQ ID NO: 3547520 - RNA, 22 nt, Human
uugccagacauguggugggaca

SEQ ID NO: 3547521 - RNA, 18 nt, Human
uugccagaugcugcagag

SEQ ID NO: 3547522 - RNA, 12 nt, Human
uugccagcccau

SEQ ID NO: 3547523 - RNA, 20 nt, Human
uugccagcuuuuccucccuu

SEQ ID NO: 3547524 - RNA, 22 nt, Human
uugccaggaaaggagaguacuu

SEQ ID NO: 3547525 - RNA, 15 nt, Human
uugccaggacaugca

SEQ ID NO: 3547526 - RNA, 17 nt, Human
uugccaggacaugcaau

SEQ ID NO: 3547527 - RNA, 20 nt, Human
uugccaggugacugucuggg

SEQ ID NO: 3547528 - RNA, 18 nt, Human
uugccagucaccccggcc

SEQ ID NO: 3547529 - RNA, 15 nt, Human
uugccagugucuuuc

SEQ ID NO: 3547530 - RNA, 16 nt, Human
uugccagugucuuucu

SEQ ID NO: 3547531 - RNA, 15 nt, Human
uugccaguuguccuc

SEQ ID NO: 3547532 - RNA, 17 nt, Human
uugccaguuguccuccu

SEQ ID NO: 3547533 - RNA, 19 nt, Human
uugccaguuguccuccuuc

SEQ ID NO: 3547534 - RNA, 18 nt, Human
uugccauacuuugucuga

SEQ ID NO: 3547535 - RNA, 19 nt, Human
uugccauauuuucaccauu

SEQ ID NO: 3547536 - RNA, 17 nt, Human
uugccaucucugcucca

SEQ ID NO: 3547537 - RNA, 23 nt, Human
uugccaucugcgugacaauaaaa

SEQ ID NO: 3547538 - RNA, 20 nt, Human
uugccaugggcuucacugua

SEQ ID NO: 3547539 - RNA, 18 nt, Human
uugccauguuggccaggc

SEQ ID NO: 3547540 - RNA, 19 nt, Human
uugccauguuggccaggcu

SEQ ID NO: 3547541 - RNA, 20 nt, Human
uugccauguuggccaggcug

SEQ ID NO: 3547542 - RNA, 13 nt, Human
uugccauuuagcg

SEQ ID NO: 3547543 - RNA, 13 nt, Human
uugccauuugaua

SEQ ID NO: 3547544 - RNA, 18 nt, Human
uugccauuugauaccccu

SEQ ID NO: 3547545 - RNA, 13 nt, Human
uugcccaacacca

SEQ ID NO: 3547546 - RNA, 13 nt, Human
uugcccaaccuca

SEQ ID NO: 3547547 - RNA, 16 nt, Human
uugcccaaccucagca

SEQ ID NO: 3547548 - RNA, 17 nt, Human
uugcccaaccucagcaa

SEQ ID NO: 3547549 - RNA, 16 nt, Human
uugcccacuccugcuc

SEQ ID NO: 3547550 - RNA, 21 nt, Human
uugcccacuccugcucugcuc

SEQ ID NO: 3547551 - RNA, 11 nt, Human
uugcccaggcu

SEQ ID NO: 3547552 - RNA, 12 nt, Human
uugcccaggcug

SEQ ID NO: 3547553 - RNA, 23 nt, Human
uugcccaggcuggcgugcagugg

SEQ ID NO: 3547554 - RNA, 18 nt, Human
uugcccaggcuggucuca

SEQ ID NO: 3547555 - RNA, 20 nt, Human
uugcccaguacauuuaaauu

SEQ ID NO: 3547556 - RNA, 14 nt, Human
uugcccauccaucu

SEQ ID NO: 3547557 - RNA, 14 nt, Human
uugcccauccugac

SEQ ID NO: 3547558 - RNA, 15 nt, Human
uugcccauuuacacu

SEQ ID NO: 3547559 - RNA, 15 nt, Human
uugccccaaccccca

SEQ ID NO: 3547560 - RNA, 13 nt, Human
uauaauaaaagga

SEQ ID NO: 3547561 - RNA, 23 nt, Human
uuguacacccaugaaagaaaacu

SEQ ID NO: 3547562 - RNA, 11 nt, Human
uuguacacuuu

SEQ ID NO: 3547563 - RNA, 21 nt, Human
uuguacagaauauuucuauug

SEQ ID NO: 3547564 - RNA, 20 nt, Human
uuguacagaaucauugcuua

SEQ ID NO: 3547565 - RNA, 18 nt, Human
uuguacagaauuuuggaa

SEQ ID NO: 3547566 - RNA, 13 nt, Human
uuguacagacaac

SEQ ID NO: 3547567 - RNA, 15 nt, Human
uuguacagcccagag

SEQ ID NO: 3547568 - RNA, 16 nt, Human
uuguacaguucaguuc

SEQ ID NO: 3547569 - RNA, 12 nt, Human
uuguacaguuuu

SEQ ID NO: 3547570 - RNA, 13 nt, Human
uuguacaguuuuu

SEQ ID NO: 3547571 - RNA, 19 nt, Human
uuguacauacgauuuaagg

SEQ ID NO: 3547572 - RNA, 22 nt, Human
uuguacauacgauuuaagguau

SEQ ID NO: 3547573 - RNA, 21 nt, Human
uuguacauauuuguggaauaa

SEQ ID NO: 3547574 - RNA, 17 nt, Human
uuguacaucuggcuuau

SEQ ID NO: 3547575 - RNA, 23 nt, Human
uuguacaucuggcuuauuuuaau

SEQ ID NO: 3547576 - RNA, 13 nt, Human
uuguacaugaaca

SEQ ID NO: 3547577 - RNA, 21 nt, Human
uuguacauguguagccugugc

SEQ ID NO: 3547578 - RNA, 23 nt, Human
uuguacauuuaugauuuaauaaa

SEQ ID NO: 3547579 - RNA, 20 nt, Human
uuguaccacuuuugcaaaua

SEQ ID NO: 3547580 - RNA, 20 nt, Human
uuguaccccccaaccccuga

SEQ ID NO: 3547581 - RNA, 18 nt, Human
uuguacguuuaaagugua

SEQ ID NO: 3547582 - RNA, 23 nt, Human
uuguacuaaagccaaacauauau

SEQ ID NO: 3547583 - RNA, 22 nt, Human
uuguacuauuuaacugacuauu

SEQ ID NO: 3547584 - RNA, 22 nt, Human
uuguacugaauuuuuuuguaau

SEQ ID NO: 3547585 - RNA, 15 nt, Human
uuguacuuaaauggu

SEQ ID NO: 3547586 - RNA, 23 nt, Human
uuguacuuaaaugguaauaagca

SEQ ID NO: 3547587 - RNA, 17 nt, Human
uuguagaacucacucug

SEQ ID NO: 3547588 - RNA, 16 nt, Human
uuguagaauguauugu

SEQ ID NO: 3547589 - RNA, 21 nt, Human
uuguagagaaaacaugcagaa

SEQ ID NO: 3547590 - RNA, 23 nt, Human
uuguagagaacacgcguauuuac

SEQ ID NO: 3547591 - RNA, 14 nt, Human
uuguagagccaggg

SEQ ID NO: 3547592 - RNA, 19 nt, Human
uuguagaugaaaaagcaug

SEQ ID NO: 3547593 - RNA, 21 nt, Human
uuguagaugaaaaagcaugua

SEQ ID NO: 3547594 - RNA, 15 nt, Human
uuguagauugauugu

SEQ ID NO: 3547595 - RNA, 19 nt, Human
uuguagauugauuguauug

SEQ ID NO: 3547596 - RNA, 15 nt, Human
uuguagauuuagugu

SEQ ID NO: 3547597 - RNA, 16 nt, Human
uuguagcacugacaga

SEQ ID NO: 3547598 - RNA, 17 nt, Human
uuguagcacugacagau

SEQ ID NO: 3547599 - RNA, 22 nt, Human
uuguagcagauuguuuccucuu

SEQ ID NO: 3547600 - RNA, 21 nt, Human
uuguagcggaugauucuucaa

SEQ ID NO: 3547601 - RNA, 21 nt, Human
uuguagcgucuuucuuuuuug

SEQ ID NO: 3547602 - RNA, 19 nt, Human
uuguagcuggggcuuugau

SEQ ID NO: 3547603 - RNA, 16 nt, Human
uuguagcuuuaucaaa

SEQ ID NO: 3547604 - RNA, 15 nt, Human
uuguaggagacuugc

SEQ ID NO: 3547605 - RNA, 16 nt, Human
uuguaggguuacagag

SEQ ID NO: 3547606 - RNA, 13 nt, Human
uuguagguaaaau

SEQ ID NO: 3547607 - RNA, 19 nt, Human
uuguaggugcaagauggaa

SEQ ID NO: 3547608 - RNA, 22 nt, Human
uuguaguagcguuuuuuaaaug

SEQ ID NO: 3547609 - RNA, 17 nt, Human
uuguagugcuuugagag

SEQ ID NO: 3547610 - RNA, 14 nt, Human
uuguauaaaauaga

SEQ ID NO: 3547611 - RNA, 23 nt, Human
uuguauaaauuuauuuacugcua

SEQ ID NO: 3547612 - RNA, 16 nt, Human
uuguauaacagguuau

SEQ ID NO: 3547613 - RNA, 14 nt, Human
uuguauaacuucuu

SEQ ID NO: 3547614 - RNA, 11 nt, Human
uuguauaauug

SEQ ID NO: 3547615 - RNA, 12 nt, Human
uuguauaauugg

SEQ ID NO: 3547616 - RNA, 21 nt, Human
uuguauaauuggauuuccuaa

SEQ ID NO: 3547617 - RNA, 16 nt, Human
uuguauaauuguaucg

SEQ ID NO: 3547618 - RNA, 22 nt, Human
uuguauaauuucgagauuugua

SEQ ID NO: 3547619 - RNA, 14 nt, Human
uuguauacaaauau

SEQ ID NO: 3547620 - RNA, 20 nt, Human
uuguauacaccauauacugu

SEQ ID NO: 3547621 - RNA, 19 nt, Human
uuguauacuuuaaauaauu

SEQ ID NO: 3547622 - RNA, 22 nt, Human
uuguauagcaugaaauaaaaua

SEQ ID NO: 3547623 - RNA, 18 nt, Human
uuguauagguagauguuc

SEQ ID NO: 3547624 - RNA, 16 nt, Human
uuguauaguuauguaa

SEQ ID NO: 3547625 - RNA, 22 nt, Human
uuguauaguuauguaaauaauu

SEQ ID NO: 3547626 - RNA, 14 nt, Human
uuguauaguugcuu

SEQ ID NO: 3547627 - RNA, 15 nt, Human
uuguauaguugcuug

SEQ ID NO: 3547628 - RNA, 19 nt, Human
uuguauaguugcuugccug

SEQ ID NO: 3547629 - RNA, 16 nt, Human
uuguauauaugugugu

SEQ ID NO: 3547630 - RNA, 21 nt, Human
uuguauauauguguguuuaaa

SEQ ID NO: 3547631 - RNA, 20 nt, Human
uuguauauuacacauuugua

SEQ ID NO: 3547632 - RNA, 20 nt, Human
uuguauauuauggaagauuu

SEQ ID NO: 3547633 - RNA, 13 nt, Human
uuguauauucacu

SEQ ID NO: 3547634 - RNA, 14 nt, Human
uuguauauucuauu

SEQ ID NO: 3547635 - RNA, 14 nt, Human
uuguauauugguuu

SEQ ID NO: 3547636 - RNA, 22 nt, Human
uuguauauugguuuuaugauga

SEQ ID NO: 3547637 - RNA, 15 nt, Human
uuguauauuguguuu

SEQ ID NO: 3547638 - RNA, 19 nt, Human
uuguauauuguguuugugu

SEQ ID NO: 3547639 - RNA, 13 nt, Human
uuguauauuugua

SEQ ID NO: 3547640 - RNA, 14 nt, Human
uuguauauuuguac

SEQ ID NO: 3547641 - RNA, 19 nt, Human
uuguaucauuugaacaacu

SEQ ID NO: 3547642 - RNA, 18 nt, Human
uuguaucgauguuaugua

SEQ ID NO: 3547643 - RNA, 21 nt, Human
uuguaucgauguuauguaaaa

SEQ ID NO: 3547644 - RNA, 18 nt, Human
uuguaucuagugcagcug

SEQ ID NO: 3547645 - RNA, 20 nt, Human
uuguaucucugaagcauguu

SEQ ID NO: 3547646 - RNA, 20 nt, Human
uuguaucucuuuugaaucca

SEQ ID NO: 3547647 - RNA, 14 nt, Human
uuguaucugucuuu

SEQ ID NO: 3547648 - RNA, 14 nt, Human
uuguaucuuaaauu

SEQ ID NO: 3547649 - RNA, 16 nt, Human
uuguaugaaacuaaag

SEQ ID NO: 3547650 - RNA, 22 nt, Human
uuguaugaaagauggcugugcc

SEQ ID NO: 3547651 - RNA, 17 nt, Human
uuguaugaaauauaugu

SEQ ID NO: 3547652 - RNA, 22 nt, Human
uuguaugaaauauaugugaaag

SEQ ID NO: 3547653 - RNA, 14 nt, Human
uuguaugauguguu

SEQ ID NO: 3547654 - RNA, 20 nt, Human
uuguaugauguguugugaua

SEQ ID NO: 3547655 - RNA, 19 nt, Human
uuguaugcaagcaguuuca

SEQ ID NO: 3547656 - RNA, 21 nt, Human
uuguaugccuuuaaaucugug

SEQ ID NO: 3547657 - RNA, 22 nt, Human
uuguaugccuuuaaaucuguga

SEQ ID NO: 3547658 - RNA, 23 nt, Human
uuguaugccuuuaaaucugugau

SEQ ID NO: 3547659 - RNA, 15 nt, Human
uuguauguaucuauu

SEQ ID NO: 3547660 - RNA, 17 nt, Human
uuguauguguguagaca

SEQ ID NO: 3547661 - RNA, 19 nt, Human
uuguauguuaaguuacuuc

SEQ ID NO: 3547662 - RNA, 12 nt, Human
uuguauuaagaa

SEQ ID NO: 3547663 - RNA, 13 nt, Human
uuguauuaagaau

SEQ ID NO: 3547664 - RNA, 18 nt, Human
uuguauuaagaaugaaau

SEQ ID NO: 3547665 - RNA, 17 nt, Human
uuguauuagauguucuc

SEQ ID NO: 3547666 - RNA, 14 nt, Human
uuguauuauugcug

SEQ ID NO: 3547667 - RNA, 19 nt, Human
uuguauuauugcuguugcu

SEQ ID NO: 3547668 - RNA, 18 nt, Human
uuguauucaauuaaagaa

SEQ ID NO: 3547669 - RNA, 21 nt, Human
uuguauucagaguugaugguu

SEQ ID NO: 3547670 - RNA, 17 nt, Human
uuguauuccaagcauau

SEQ ID NO: 3547671 - RNA, 16 nt, Human
uuguauucucuccugu

SEQ ID NO: 3547672 - RNA, 21 nt, Human
uuguauucucuccuguaccuc

SEQ ID NO: 3547673 - RNA, 14 nt, Human
uuguauucucugag

SEQ ID NO: 3547674 - RNA, 15 nt, Human
uuguauucucugagc

SEQ ID NO: 3547675 - RNA, 22 nt, Human
uuguauucucugagcugugcag

SEQ ID NO: 3547676 - RNA, 18 nt, Human
uuguauuguauauuacaa

SEQ ID NO: 3547677 - RNA, 16 nt, Human
uuguauuguccuauua

SEQ ID NO: 3547678 - RNA, 16 nt, Human
uuguauuguuucaauu

SEQ ID NO: 3547679 - RNA, 20 nt, Human
uuguauuuauucaauaaagu

SEQ ID NO: 3547680 - RNA, 14 nt, Human
uuguauuuuaacuc

SEQ ID NO: 3547681 - RNA, 20 nt, Human
uuguauuuuauuuuuuucuc

SEQ ID NO: 3547682 - RNA, 16 nt, Human
uuguauuuucaugaaa

SEQ ID NO: 3547683 - RNA, 21 nt, Human
uuguauuuuccaagugugcau

SEQ ID NO: 3547684 - RNA, 15 nt, Human
uuguauuuuuccaga

SEQ ID NO: 3547685 - RNA, 20 nt, Human
uuguauuuuuuugcaaguga

SEQ ID NO: 3547686 - RNA, 21 nt, Human
uuguauuuuuuugcaagugaa

SEQ ID NO: 3547687 - RNA, 13 nt, Human
uugucaaacugua

SEQ ID NO: 3547688 - RNA, 13 nt, Human
uugucaaagagag

SEQ ID NO: 3547689 - RNA, 19 nt, Human
uugucaauuuaugaauaua

SEQ ID NO: 3547690 - RNA, 14 nt, Human
uugucacaauaaau

SEQ ID NO: 3547691 - RNA, 19 nt, Human
uugucaccugcuucucugc

SEQ ID NO: 3547692 - RNA, 17 nt, Human
uugucaccuucaccucc

SEQ ID NO: 3547693 - RNA, 20 nt, Human
uugucacgccagacuuccca

SEQ ID NO: 3547694 - RNA, 19 nt, Human
uugucacgcuucuucuuuu

SEQ ID NO: 3547695 - RNA, 22 nt, Human
uugucacucaacaaaagugcuu

SEQ ID NO: 3547696 - RNA, 22 nt, Human
uugucacugacacaaaggaagu

SEQ ID NO: 3547697 - RNA, 17 nt, Human
uugucacugcuuuuggc

SEQ ID NO: 3547698 - RNA, 16 nt, Human
uugucacuugcauguc

SEQ ID NO: 3547699 - RNA, 14 nt, Human
uugucacuuuuuau

SEQ ID NO: 3547700 - RNA, 14 nt, Human
uugucacuuuuucu

SEQ ID NO: 3547701 - RNA, 12 nt, Human
uugucagacuuu

SEQ ID NO: 3547702 - RNA, 14 nt, Human
uugucagacuuuaa

SEQ ID NO: 3547703 - RNA, 13 nt, Human
uugucagagcugg

SEQ ID NO: 3547704 - RNA, 22 nt, Human
uauacuguacuuaauaaauuca

SEQ ID NO: 3547705 - RNA, 14 nt, Human
uauacuguguguga

SEQ ID NO: 3547706 - RNA, 14 nt, Human
uauacuugaacaaa

SEQ ID NO: 3547707 - RNA, 15 nt, Human
uauacuugaacaaaa

SEQ ID NO: 3547708 - RNA, 16 nt, Human
uauacuugaacaaaag

SEQ ID NO: 3547709 - RNA, 14 nt, Human
uauacuugaaugaa

SEQ ID NO: 3547710 - RNA, 16 nt, Human
uauacuugaaugaaaa

SEQ ID NO: 3547711 - RNA, 23 nt, Human
uauacuugcuuuguguucuuugu

SEQ ID NO: 3547712 - RNA, 13 nt, Human
uauacuuguaauu

SEQ ID NO: 3547713 - RNA, 18 nt, Human
uauacuuguaauuaugga

SEQ ID NO: 3547714 - RNA, 22 nt, Human
uauacuuguaauuauggaguca

SEQ ID NO: 3547715 - RNA, 21 nt, Human
uauacuuguggacuaaaagau

SEQ ID NO: 3547716 - RNA, 23 nt, Human
uauacuuguggacuaaaagauau

SEQ ID NO: 3547717 - RNA, 19 nt, Human
uauacuugugguuuucaaa

SEQ ID NO: 3547718 - RNA, 20 nt, Human
uauacuuguuuuuguaaaga

SEQ ID NO: 3547719 - RNA, 22 nt, Human
uauacuuguuuuuguaaagaaa

SEQ ID NO: 3547720 - RNA, 15 nt, Human
uauacuuuaaauaau

SEQ ID NO: 3547721 - RNA, 12 nt, Human
uauacuuuagua

SEQ ID NO: 3547722 - RNA, 12 nt, Human
uauacuuucccu

SEQ ID NO: 3547723 - RNA, 17 nt, Human
uauacuuucccuacccu

SEQ ID NO: 3547724 - RNA, 22 nt, Human
uauagaaaaauaaaaaucucuu

SEQ ID NO: 3547725 - RNA, 22 nt, Human
uuccauaauuaugacaguuaua

SEQ ID NO: 3547726 - RNA, 15 nt, Human
uuccauagcaacagg

SEQ ID NO: 3547727 - RNA, 17 nt, Human
uuccauagcugcugccc

SEQ ID NO: 3547728 - RNA, 17 nt, Human
uuccauaguauauuaaa

SEQ ID NO: 3547729 - RNA, 18 nt, Human
uuccauaguauauuaaaa

SEQ ID NO: 3547730 - RNA, 16 nt, Human
uuccauaguuaaagaa

SEQ ID NO: 3547731 - RNA, 15 nt, Human
uuccauauauccuuu

SEQ ID NO: 3547732 - RNA, 18 nt, Human
uuccauauauuagcauuu

SEQ ID NO: 3547733 - RNA, 15 nt, Human
uuccauauccuggug

SEQ ID NO: 3547734 - RNA, 15 nt, Human
uuccauaugaccuca

SEQ ID NO: 3547735 - RNA, 18 nt, Human
uuccauauggauccacug

SEQ ID NO: 3547736 - RNA, 19 nt, Human
uuccauauggauccacugg

SEQ ID NO: 3547737 - RNA, 22 nt, Human
uuccauauggauccacuggcug

SEQ ID NO: 3547738 - RNA, 15 nt, Human
uuccauauggauuuu

SEQ ID NO: 3547739 - RNA, 20 nt, Human
uuccauauggauuuucuauu

SEQ ID NO: 3547740 - RNA, 14 nt, Human
uuccauauucaugu

SEQ ID NO: 3547741 - RNA, 14 nt, Human
uuccauauuuggaa

SEQ ID NO: 3547742 - RNA, 17 nt, Human
uuccauccauggccagc

SEQ ID NO: 3547743 - RNA, 21 nt, Human
uuccauccuagucacuaccuu

SEQ ID NO: 3547744 - RNA, 12 nt, Human
uuccaucugaaa

SEQ ID NO: 3547745 - RNA, 12 nt, Human
uuccaucugauu

SEQ ID NO: 3547746 - RNA, 17 nt, Human
uuccaucugauuccagc

SEQ ID NO: 3547747 - RNA, 15 nt, Human
uuccaugaaaacguu

SEQ ID NO: 3547748 - RNA, 18 nt, Human
uuccaugaagaccacauc

SEQ ID NO: 3547749 - RNA, 15 nt, Human
uuccaugaaucgcuu

SEQ ID NO: 3547750 - RNA, 20 nt, Human
uuccaugaaucgcuucucuu

SEQ ID NO: 3547751 - RNA, 17 nt, Human
uuccaugaguccccugu

SEQ ID NO: 3547752 - RNA, 13 nt, Human
uuccaugaugcug

SEQ ID NO: 3547753 - RNA, 17 nt, Human
uuccaugauucuauuua

SEQ ID NO: 3547754 - RNA, 14 nt, Human
uuccaugccugagg

SEQ ID NO: 3547755 - RNA, 16 nt, Human
uuccaugccugagggu

SEQ ID NO: 3547756 - RNA, 18 nt, Human
uuccaugccugagggugg

SEQ ID NO: 3547757 - RNA, 16 nt, Human
uuccaugcuaagcaag

SEQ ID NO: 3547758 - RNA, 14 nt, Human
uuccaugcugugcg

SEQ ID NO: 3547759 - RNA, 15 nt, Human
uuccauggacuuugu

SEQ ID NO: 3547760 - RNA, 15 nt, Human
uuccauggcccucau

SEQ ID NO: 3547761 - RNA, 16 nt, Human
uuccauggccucuuca

SEQ ID NO: 3547762 - RNA, 14 nt, Human
uuccauguaugcau

SEQ ID NO: 3547763 - RNA, 21 nt, Human
uuccaugucaagauucagcua

SEQ ID NO: 3547764 - RNA, 19 nt, Human
uuccaugucgccucugcau

SEQ ID NO: 3547765 - RNA, 20 nt, Human
uuccaugucgccucugcauu

SEQ ID NO: 3547766 - RNA, 23 nt, Human
uuccaugugaggguuuucagcau

SEQ ID NO: 3547767 - RNA, 16 nt, Human
uuccaugugcccaguu

SEQ ID NO: 3547768 - RNA, 16 nt, Human
uuccauguugcugcca

SEQ ID NO: 3547769 - RNA, 23 nt, Human
uuccauuaaacgauuuuuaaaau

SEQ ID NO: 3547770 - RNA, 14 nt, Human
uuccauuaugauuc

SEQ ID NO: 3547771 - RNA, 16 nt, Human
uuccauuaugauucuu

SEQ ID NO: 3547772 - RNA, 13 nt, Human
uuccauuccagaa

SEQ ID NO: 3547773 - RNA, 16 nt, Human
uuccauuccauuguuu

SEQ ID NO: 3547774 - RNA, 13 nt, Human
uuccauucucacc

SEQ ID NO: 3547775 - RNA, 20 nt, Human
uuccauucuggauuuuguca

SEQ ID NO: 3547776 - RNA, 16 nt, Human
uuccauugguccaaga

SEQ ID NO: 3547777 - RNA, 20 nt, Human
uuccauugguccaagauucc

SEQ ID NO: 3547778 - RNA, 15 nt, Human
uuccauuucucucuc

SEQ ID NO: 3547779 - RNA, 17 nt, Human
uuccauuugcaagggaa

SEQ ID NO: 3547780 - RNA, 15 nt, Human
uuccauuugcauuug

SEQ ID NO: 3547781 - RNA, 17 nt, Human
uuccauuugcauuuguu

SEQ ID NO: 3547782 - RNA, 14 nt, Human
uuccauuuuccccc

SEQ ID NO: 3547783 - RNA, 16 nt, Human
uuccauuuucccccac

SEQ ID NO: 3547784 - RNA, 23 nt, Human
uuccauuuuggcgcuauuacaaa

SEQ ID NO: 3547785 - RNA, 11 nt, Human
uucccaaaagc

SEQ ID NO: 3547786 - RNA, 21 nt, Human
uucccaaaagcccauucauuc

SEQ ID NO: 3547787 - RNA, 19 nt, Human
uucccaaaauguugaaaua

SEQ ID NO: 3547788 - RNA, 22 nt, Human
uucccaaaauguugaaauauga

SEQ ID NO: 3547789 - RNA, 23 nt, Human
uucccaaagcagugcaugcuguc

SEQ ID NO: 3547790 - RNA, 20 nt, Human
uucccaaaugugugcccagc

SEQ ID NO: 3547791 - RNA, 16 nt, Human
uucccaaccugcucau

SEQ ID NO: 3547792 - RNA, 18 nt, Human
uucccaacuccagaaagu

SEQ ID NO: 3547793 - RNA, 17 nt, Human
uucccaacucuagcugg

SEQ ID NO: 3547794 - RNA, 21 nt, Human
uucccaagagcaucaugccuc

SEQ ID NO: 3547795 - RNA, 23 nt, Human
uucccaagccuucgggcgucugu

SEQ ID NO: 3547796 - RNA, 17 nt, Human
uucccaaggccuuaagc

SEQ ID NO: 3547797 - RNA, 20 nt, Human
uucccaaguaagaggcugga

SEQ ID NO: 3547798 - RNA, 17 nt, Human
uucccaaucagcacuga

SEQ ID NO: 3547799 - RNA, 18 nt, Human
uucccaaucagcacugaa

SEQ ID NO: 3547800 - RNA, 19 nt, Human
uucccaaucagcacugaaa

SEQ ID NO: 3547801 - RNA, 20 nt, Human
uucccaaucagcacugaaaa

SEQ ID NO: 3547802 - RNA, 14 nt, Human
uucccaauuaggaa

SEQ ID NO: 3547803 - RNA, 14 nt, Human
uucccaauucacau

SEQ ID NO: 3547804 - RNA, 18 nt, Human
uucccaccaggcugcuca

SEQ ID NO: 3547805 - RNA, 15 nt, Human
uucccacccagccug

SEQ ID NO: 3547806 - RNA, 15 nt, Human
uucccacccaucgcu

SEQ ID NO: 3547807 - RNA, 21 nt, Human
uucccaccccaaccugcucuc

SEQ ID NO: 3547808 - RNA, 14 nt, Human
uucccaccucccug

SEQ ID NO: 3547809 - RNA, 16 nt, Human
uucccaccucccugcc

SEQ ID NO: 3547810 - RNA, 18 nt, Human
uucccacucuagggcagu

SEQ ID NO: 3547811 - RNA, 13 nt, Human
uucccacugcacc

SEQ ID NO: 3547812 - RNA, 15 nt, Human
uucccacuguuuaag

SEQ ID NO: 3547813 - RNA, 18 nt, Human
uucccacuucccacccug

SEQ ID NO: 3547814 - RNA, 17 nt, Human
uucccacuuucccaccc

SEQ ID NO: 3547815 - RNA, 23 nt, Human
uucccagaaggcauaucagucuc

SEQ ID NO: 3547816 - RNA, 15 nt, Human
uucccagagacagga

SEQ ID NO: 3547817 - RNA, 22 nt, Human
uucccagagacaggaaaauccu

SEQ ID NO: 3547818 - RNA, 14 nt, Human
uucccagauacuuc

SEQ ID NO: 3547819 - RNA, 21 nt, Human
uucccagcacuaugcuuuccu

SEQ ID NO: 3547820 - RNA, 22 nt, Human
uucccagcacuaugcuuuccuu

SEQ ID NO: 3547821 - RNA, 23 nt, Human
uucccagcacuaugcuuuccuuc

SEQ ID NO: 3547822 - RNA, 17 nt, Human
uucccagcucucccucu

SEQ ID NO: 3547823 - RNA, 15 nt, Human
uucccagcugccccu

SEQ ID NO: 3547824 - RNA, 13 nt, Human
uucccagcugucu

SEQ ID NO: 3547825 - RNA, 18 nt, Human
uucccagcuucugccaca

SEQ ID NO: 3547826 - RNA, 19 nt, Human
uucccaggaaagaagcauu

SEQ ID NO: 3547827 - RNA, 19 nt, Human
uucccaggacccugaaggg

SEQ ID NO: 3547828 - RNA, 20 nt, Human
uucccaggaguucugcucau

SEQ ID NO: 3547829 - RNA, 20 nt, Human
uucccaggcaaauaaaauuc

SEQ ID NO: 3547830 - RNA, 12 nt, Human
uucccaggccca

SEQ ID NO: 3547831 - RNA, 18 nt, Human
uucccagguucuguuuau

SEQ ID NO: 3547832 - RNA, 23 nt, Human
uucccagugacacuucagagagc

SEQ ID NO: 3547833 - RNA, 18 nt, Human
uucccaguuggagcucca

SEQ ID NO: 3547834 - RNA, 11 nt, Human
uucccauaauu

SEQ ID NO: 3547835 - RNA, 16 nt, Human
uucccauaauuuucuu

SEQ ID NO: 3547836 - RNA, 14 nt, Human
uucccaucgcuguc

SEQ ID NO: 3547837 - RNA, 13 nt, Human
uucccaugauuuc

SEQ ID NO: 3547838 - RNA, 18 nt, Human
uucccaugauuucaugua

SEQ ID NO: 3547839 - RNA, 21 nt, Human
uucccaugauuucauguacug

SEQ ID NO: 3547840 - RNA, 15 nt, Human
uucccauggggaggg

SEQ ID NO: 3547841 - RNA, 17 nt, Human
uucccauguagcccccu

SEQ ID NO: 3547842 - RNA, 14 nt, Human
uucccauuuagaau

SEQ ID NO: 3547843 - RNA, 22 nt, Human
uucccauuuagaauggugauuu

SEQ ID NO: 3547844 - RNA, 15 nt, Human
uucccauuucagcug

SEQ ID NO: 3547845 - RNA, 17 nt, Human
uucccauuugugccaga

SEQ ID NO: 3547846 - RNA, 15 nt, Human
uuccccaaagucuua

SEQ ID NO: 3547847 - RNA, 14 nt, Human
uuccccaaauacaa

SEQ ID NO: 3547848 - RNA, 13 nt, Human
uuccccaacagug

SEQ ID NO: 3547849 - RNA, 15 nt, Human
uucuaauugccaugu

SEQ ID NO: 3547850 - RNA, 16 nt, Human
uucuaauugcuuauuu

SEQ ID NO: 3547851 - RNA, 18 nt, Human
uucuaauuggcuuuacua

SEQ ID NO: 3547852 - RNA, 17 nt, Human
uucuaauuugcugcuga

SEQ ID NO: 3547853 - RNA, 15 nt, Human
uucuaauuuuuaaga

SEQ ID NO: 3547854 - RNA, 18 nt, Human
uucuacaaaauccugaug

SEQ ID NO: 3547855 - RNA, 21 nt, Human
uucuacaacucauacacucgu

SEQ ID NO: 3547856 - RNA, 16 nt, Human
uucuacaaucuauuua

SEQ ID NO: 3547857 - RNA, 16 nt, Human
uucuacaaugugaacu

SEQ ID NO: 3547858 - RNA, 17 nt, Human
uucuacaauuaauaguu

SEQ ID NO: 3547859 - RNA, 15 nt, Human
uucuacacagagcag

SEQ ID NO: 3547860 - RNA, 17 nt, Human
uucuacagaaaaacaau

SEQ ID NO: 3547861 - RNA, 17 nt, Human
uucuacagcaaauuuau

SEQ ID NO: 3547862 - RNA, 15 nt, Human
uucuacauacuaugg

SEQ ID NO: 3547863 - RNA, 15 nt, Human
uucuacauagaugcu

SEQ ID NO: 3547864 - RNA, 18 nt, Human
uucuacauuauugcuuau

SEQ ID NO: 3547865 - RNA, 16 nt, Human
uucuacauuucuuaga

SEQ ID NO: 3547866 - RNA, 19 nt, Human
uucuaccaaggucuucuua

SEQ ID NO: 3547867 - RNA, 22 nt, Human
uucuaccaugaacagaaaacau

SEQ ID NO: 3547868 - RNA, 14 nt, Human
uucuaccauuucag

SEQ ID NO: 3547869 - RNA, 12 nt, Human
uucuacccagcg

SEQ ID NO: 3547870 - RNA, 21 nt, Human
uucuacccagcgagcccuggu

SEQ ID NO: 3547871 - RNA, 15 nt, Human
uucuacccuagccau

SEQ ID NO: 3547872 - RNA, 23 nt, Human
uucuaccggagagagaauguauu

SEQ ID NO: 3547873 - RNA, 14 nt, Human
uucuaccucccaga

SEQ ID NO: 3547874 - RNA, 12 nt, Human
uucuaccugcca

SEQ ID NO: 3547875 - RNA, 13 nt, Human
uucuacgccaggg

SEQ ID NO: 3547876 - RNA, 19 nt, Human
uucuacggaucaucaacaa

SEQ ID NO: 3547877 - RNA, 20 nt, Human
uucuacggaucaucaacaag

SEQ ID NO: 3547878 - RNA, 13 nt, Human
uucuacguuucuu

SEQ ID NO: 3547879 - RNA, 20 nt, Human
uucuacucacuuuucccacu

SEQ ID NO: 3547880 - RNA, 21 nt, Human
uucuacucacuuuucccacuc

SEQ ID NO: 3547881 - RNA, 12 nt, Human
uucuacuguaug

SEQ ID NO: 3547882 - RNA, 19 nt, Human
uucuacugucaaaugaugu

SEQ ID NO: 3547883 - RNA, 18 nt, Human
uucuacuuuaagcacuac

SEQ ID NO: 3547884 - RNA, 22 nt, Human
uucuagaacaucccugccagcu

SEQ ID NO: 3547885 - RNA, 22 nt, Human
uucuagacauggagguucuaag

SEQ ID NO: 3547886 - RNA, 23 nt, Human
uucuagacauggagguucuaagg

SEQ ID NO: 3547887 - RNA, 14 nt, Human
uucuagacuauaaa

SEQ ID NO: 3547888 - RNA, 22 nt, Human
uucuagagaagaggcuggugcu

SEQ ID NO: 3547889 - RNA, 20 nt, Human
uucuagagccugcuggaucu

SEQ ID NO: 3547890 - RNA, 14 nt, Human
uucuagaguucaga

SEQ ID NO: 3547891 - RNA, 18 nt, Human
uucuagauacaauaaauu

SEQ ID NO: 3547892 - RNA, 23 nt, Human
uucuagaucagaugcuccaagau

SEQ ID NO: 3547893 - RNA, 12 nt, Human
uucuagaugauu

SEQ ID NO: 3547894 - RNA, 19 nt, Human
uucuagaugcaagucucuu

SEQ ID NO: 3547895 - RNA, 15 nt, Human
uucuagcacuggccu

SEQ ID NO: 3547896 - RNA, 17 nt, Human
uucuagcacuggccugc

SEQ ID NO: 3547897 - RNA, 20 nt, Human
uucuagcauggcauauuuuu

SEQ ID NO: 3547898 - RNA, 18 nt, Human
uucuagcccgaauacaaa

SEQ ID NO: 3547899 - RNA, 17 nt, Human
uucuagcuaauguaaua

SEQ ID NO: 3547900 - RNA, 12 nt, Human
uucuaggaaaau

SEQ ID NO: 3547901 - RNA, 14 nt, Human
uucuaggaagaauu

SEQ ID NO: 3547902 - RNA, 18 nt, Human
uucuaggaagaauuuuaa

SEQ ID NO: 3547903 - RNA, 19 nt, Human
uucuaggaagaauuuuaaa

SEQ ID NO: 3547904 - RNA, 16 nt, Human
uucuaggacugaauua

SEQ ID NO: 3547905 - RNA, 19 nt, Human
uucuaggcaucucuguacu

SEQ ID NO: 3547906 - RNA, 14 nt, Human
uucuagggcuggga

SEQ ID NO: 3547907 - RNA, 19 nt, Human
uucuagggcugggaaacac

SEQ ID NO: 3547908 - RNA, 20 nt, Human
uucuagggcugggaaacacu

SEQ ID NO: 3547909 - RNA, 21 nt, Human
uucuaggucaaggccuguccc

SEQ ID NO: 3547910 - RNA, 15 nt, Human
uucuagguucuaaaa

SEQ ID NO: 3547911 - RNA, 17 nt, Human
uucuagguuucaaagau

SEQ ID NO: 3547912 - RNA, 20 nt, Human
uucuaguaauaaagacucua

SEQ ID NO: 3547913 - RNA, 23 nt, Human
uucuagugaugaugguucacguu

SEQ ID NO: 3547914 - RNA, 14 nt, Human
uucuagugcugcug

SEQ ID NO: 3547915 - RNA, 16 nt, Human
uucuagugcugcugaa

SEQ ID NO: 3547916 - RNA, 18 nt, Human
uucuagugcugcugaaga

SEQ ID NO: 3547917 - RNA, 19 nt, Human
uucuaguggucuuuguaag

SEQ ID NO: 3547918 - RNA, 17 nt, Human
uucuaguugaggaguuu

SEQ ID NO: 3547919 - RNA, 14 nt, Human
uucuaguuucucuu

SEQ ID NO: 3547920 - RNA, 15 nt, Human
uucuaguuugcauuc

SEQ ID NO: 3547921 - RNA, 14 nt, Human
uucuaguuuucagu

SEQ ID NO: 3547922 - RNA, 23 nt, Human
uucuaguuuucaguuuguauaua

SEQ ID NO: 3547923 - RNA, 14 nt, Human
uucuauaacagaua

SEQ ID NO: 3547924 - RNA, 13 nt, Human
uucuauaaggcca

SEQ ID NO: 3547925 - RNA, 21 nt, Human
uucuauaaguuuuauguuaaa

SEQ ID NO: 3547926 - RNA, 20 nt, Human
uuuaagcugcaaaucugaug

SEQ ID NO: 3547927 - RNA, 22 nt, Human
uuuaagcuguggucaaggcuac

SEQ ID NO: 3547928 - RNA, 13 nt, Human
uuuaagcuguuuc

SEQ ID NO: 3547929 - RNA, 18 nt, Human
uuuaagcuguuuccauag

SEQ ID NO: 3547930 - RNA, 22 nt, Human
uuuaagcuuauuuaauuaaaaa

SEQ ID NO: 3547931 - RNA, 15 nt, Human
uuuaaggaaaggcaa

SEQ ID NO: 3547932 - RNA, 19 nt, Human
uuuaaggacugacugaggc

SEQ ID NO: 3547933 - RNA, 22 nt, Human
uuuaaggcuucaauuuauugca

SEQ ID NO: 3547934 - RNA, 20 nt, Human
uuuaagggcaugccuugugc

SEQ ID NO: 3547935 - RNA, 18 nt, Human
uuuaagggcccuuuuuca

SEQ ID NO: 3547936 - RNA, 21 nt, Human
uuuaagggcccuuuuucaaua

SEQ ID NO: 3547937 - RNA, 14 nt, Human
uuuaaguaaugugg

SEQ ID NO: 3547938 - RNA, 16 nt, Human
uuuaaguaauguggaa

SEQ ID NO: 3547939 - RNA, 14 nt, Human
uuuaaguagauuuc

SEQ ID NO: 3547940 - RNA, 12 nt, Human
uuuaaguauuua

SEQ ID NO: 3547941 - RNA, 14 nt, Human
uuuaaguauuuaua

SEQ ID NO: 3547942 - RNA, 18 nt, Human
uuuaaguauuuauauauu

SEQ ID NO: 3547943 - RNA, 15 nt, Human
uuuaagucccuguca

SEQ ID NO: 3547944 - RNA, 19 nt, Human
uuuaagugaaagugaggaa

SEQ ID NO: 3547945 - RNA, 20 nt, Human
uuuaagugcguguguagagu

SEQ ID NO: 3547946 - RNA, 14 nt, Human
uuuaaguguaacug

SEQ ID NO: 3547947 - RNA, 17 nt, Human
uuuaaguguuggaaaaa

SEQ ID NO: 3547948 - RNA, 16 nt, Human
uuuaaguuauuaagag

SEQ ID NO: 3547949 - RNA, 15 nt, Human
uuuaaguuguuugca

SEQ ID NO: 3547950 - RNA, 21 nt, Human
uuuaaguuguuugcaugugaa

SEQ ID NO: 3547951 - RNA, 18 nt, Human
uuuaaguuugcacucaaa

SEQ ID NO: 3547952 - RNA, 16 nt, Human
uuuaauaaaauaauaa

SEQ ID NO: 3547953 - RNA, 14 nt, Human
uuuaauaaacacuc

SEQ ID NO: 3547954 - RNA, 13 nt, Human
uuuaauaaaccau

SEQ ID NO: 3547955 - RNA, 13 nt, Human
uuuaauaaacuuu

SEQ ID NO: 3547956 - RNA, 14 nt, Human
uuuaauaacaauug

SEQ ID NO: 3547957 - RNA, 19 nt, Human
uuuaauaacauaacaaaua

SEQ ID NO: 3547958 - RNA, 12 nt, Human
uuuaauaacauu

SEQ ID NO: 3547959 - RNA, 18 nt, Human
uuuaauaacauuaccuua

SEQ ID NO: 3547960 - RNA, 13 nt, Human
uuuaauaauguuu

SEQ ID NO: 3547961 - RNA, 15 nt, Human
uuuaauaauguuuca

SEQ ID NO: 3547962 - RNA, 21 nt, Human
uuuaauaauuauaugcuauuu

SEQ ID NO: 3547963 - RNA, 16 nt, Human
uuuaauaauuuuuaau

SEQ ID NO: 3547964 - RNA, 14 nt, Human
uuuaauacagggua

SEQ ID NO: 3547965 - RNA, 17 nt, Human
uuuaauagaaccauguu

SEQ ID NO: 3547966 - RNA, 18 nt, Human
uuuaauagcaaagaauug

SEQ ID NO: 3547967 - RNA, 19 nt, Human
uuuaauagcuauggaauca

SEQ ID NO: 3547968 - RNA, 17 nt, Human
uuuaauagucauuccaa

SEQ ID NO: 3547969 - RNA, 18 nt, Human
uuuaauaguguuaaucaa

SEQ ID NO: 3547970 - RNA, 13 nt, Human
uuuaauauaaagu

SEQ ID NO: 3547971 - RNA, 22 nt, Human
uuuaauauaaaguuuuauauau

SEQ ID NO: 3547972 - RNA, 16 nt, Human
uuuaauaugcaaaguc

SEQ ID NO: 3547973 - RNA, 14 nt, Human
uuuaauauguauuu

SEQ ID NO: 3547974 - RNA, 17 nt, Human
uuuaauauuaaagccau

SEQ ID NO: 3547975 - RNA, 20 nt, Human
uuuaauauuaaagccauguu

SEQ ID NO: 3547976 - RNA, 18 nt, Human
uuuaauauuuaaacagca

SEQ ID NO: 3547977 - RNA, 13 nt, Human
uuuaaucaaauuu

SEQ ID NO: 3547978 - RNA, 19 nt, Human
uuuaaucaaguuguaacuu

SEQ ID NO: 3547979 - RNA, 19 nt, Human
uuuaaucauaguuacugug

SEQ ID NO: 3547980 - RNA, 23 nt, Human
uuuaaucauaguuacuguguaaa

SEQ ID NO: 3547981 - RNA, 13 nt, Human
uuuaaucauauaa

SEQ ID NO: 3547982 - RNA, 22 nt, Human
uuuaaucauauaaauagaaugu

SEQ ID NO: 3547983 - RNA, 20 nt, Human
uuuaaucaugaauaugauga

SEQ ID NO: 3547984 - RNA, 15 nt, Human
uuuaauccccaguaa

SEQ ID NO: 3547985 - RNA, 18 nt, Human
uuuaaucuacugcauuua

SEQ ID NO: 3547986 - RNA, 21 nt, Human
uuuaaugaaagacuguacaaa

SEQ ID NO: 3547987 - RNA, 23 nt, Human
uuuaaugaaagacuguacaaagu

SEQ ID NO: 3547988 - RNA, 16 nt, Human
uuuaaugaacaaaugg

SEQ ID NO: 3547989 - RNA, 22 nt, Human
uuuaaugaaugcuuaaagaauu

SEQ ID NO: 3547990 - RNA, 20 nt, Human
uuuaaugcauuaaaccuguc

SEQ ID NO: 3547991 - RNA, 17 nt, Human
uuuaaugcuucauucaa

SEQ ID NO: 3547992 - RNA, 21 nt, Human
uuuaauggacacuuuucaccu

SEQ ID NO: 3547993 - RNA, 22 nt, Human
uuuaauggacuuauuucuucaa

SEQ ID NO: 3547994 - RNA, 20 nt, Human
uuuacuucuaagucauucau

SEQ ID NO: 3547995 - RNA, 19 nt, Human
uuuacuucuuauacauuug

SEQ ID NO: 3547996 - RNA, 18 nt, Human
uuuacuugaauaguauug

SEQ ID NO: 3547997 - RNA, 18 nt, Human
uuuacuugcauugaauau

SEQ ID NO: 3547998 - RNA, 21 nt, Human
uuuacuugcauugaauauauu

SEQ ID NO: 3547999 - RNA, 15 nt, Human
uuuacuuguuucaga

SEQ ID NO: 3548000 - RNA, 17 nt, Human
uuuacuuguuucagagu

SEQ ID NO: 3548001 - RNA, 16 nt, Human
uuuacuuuaaacuugu

SEQ ID NO: 3548002 - RNA, 18 nt, Human
uuuacuuuagaagccugc

SEQ ID NO: 3548003 - RNA, 16 nt, Human
uuuacuuucccuugcu

SEQ ID NO: 3548004 - RNA, 17 nt, Human
uuuacuuucccuugcuu

SEQ ID NO: 3548005 - RNA, 14 nt, Human
uuuacuuuucuucu

SEQ ID NO: 3548006 - RNA, 23 nt, Human
uuuacuuuuuggaaaagaauaaa

SEQ ID NO: 3548007 - RNA, 23 nt, Human
uuuacuuuuuuuaguaaguuaau

SEQ ID NO: 3548008 - RNA, 22 nt, Human
uuuagaaaaagaacaugcaguu

SEQ ID NO: 3548009 - RNA, 13 nt, Human
uuuagaaaacuuu

SEQ ID NO: 3548010 - RNA, 16 nt, Human
uuuagaaaacuuuaaa

SEQ ID NO: 3548011 - RNA, 11 nt, Human
uuuagaaaaua

SEQ ID NO: 3548012 - RNA, 22 nt, Human
uuuagaaacagugcaacacugg

SEQ ID NO: 3548013 - RNA, 20 nt, Human
uuuagaaacuuaucuuacaa

SEQ ID NO: 3548014 - RNA, 21 nt, Human
uuuagaaagauaauucacugu

SEQ ID NO: 3548015 - RNA, 14 nt, Human
uuuagaaagcauuu

SEQ ID NO: 3548016 - RNA, 16 nt, Human
uuuagaaagcauuuga

SEQ ID NO: 3548017 - RNA, 18 nt, Human
uuuagaaagcauuugaau

SEQ ID NO: 3548018 - RNA, 19 nt, Human
uuuagaaagcauuugaaug

SEQ ID NO: 3548019 - RNA, 20 nt, Human
uuuagaaauacugcaagaaa

SEQ ID NO: 3548020 - RNA, 19 nt, Human
uuuagaacaauuuucuugu

SEQ ID NO: 3548021 - RNA, 15 nt, Human
uuuagaacagaaaac

SEQ ID NO: 3548022 - RNA, 17 nt, Human
uuuagaacagaaaacaa

SEQ ID NO: 3548023 - RNA, 15 nt, Human
uuuagaagacucuac

SEQ ID NO: 3548024 - RNA, 19 nt, Human
uuuagaagugcauuucuga

SEQ ID NO: 3548025 - RNA, 14 nt, Human
uuuagaagugucau

SEQ ID NO: 3548026 - RNA, 18 nt, Human
uuuagacaaauacucaug

SEQ ID NO: 3548027 - RNA, 19 nt, Human
uuuagacaaauacucaugu

SEQ ID NO: 3548028 - RNA, 20 nt, Human
uuuagacaaauacucaugug

SEQ ID NO: 3548029 - RNA, 14 nt, Human
uuuagacaccuuca

SEQ ID NO: 3548030 - RNA, 14 nt, Human
uuuagacacuggcu

SEQ ID NO: 3548031 - RNA, 11 nt, Human
uuuagacagua

SEQ ID NO: 3548032 - RNA, 14 nt, Human
uuuagaccaaggaa

SEQ ID NO: 3548033 - RNA, 15 nt, Human
uuuagacuucaagca

SEQ ID NO: 3548034 - RNA, 23 nt, Human
uuuagacuugaaaagagacaggc

SEQ ID NO: 3548035 - RNA, 15 nt, Human
uuuagacuuuaacau

SEQ ID NO: 3548036 - RNA, 15 nt, Human
uuuagagaacugaaa

SEQ ID NO: 3548037 - RNA, 18 nt, Human
uuuagagaacuguggccg

SEQ ID NO: 3548038 - RNA, 16 nt, Human
uuuagagcauugccau

SEQ ID NO: 3548039 - RNA, 13 nt, Human
uuuagaugcugau

SEQ ID NO: 3548040 - RNA, 12 nt, Human
uuuagauuucaa

SEQ ID NO: 3548041 - RNA, 20 nt, Human
uuuagauuuuaaucaaauuu

SEQ ID NO: 3548042 - RNA, 23 nt, Human
uuuagcaaagcggguuauaauga

SEQ ID NO: 3548043 - RNA, 22 nt, Human
uuuagcagcagccuuuaaugca

SEQ ID NO: 3548044 - RNA, 15 nt, Human
uuuagcaguucugca

SEQ ID NO: 3548045 - RNA, 14 nt, Human
uuuagcauaaaauu

SEQ ID NO: 3548046 - RNA, 15 nt, Human
uuuagccaccaucuu

SEQ ID NO: 3548047 - RNA, 20 nt, Human
uuuagcuaggauuugaacac

SEQ ID NO: 3548048 - RNA, 20 nt, Human
uuuagcucaaacguggcuuu

SEQ ID NO: 3548049 - RNA, 13 nt, Human
uuuagcucugaga

SEQ ID NO: 3548050 - RNA, 14 nt, Human
uuuagcucugagaa

SEQ ID NO: 3548051 - RNA, 18 nt, Human
uuuaggaagauaaaaguu

SEQ ID NO: 3548052 - RNA, 18 nt, Human
uuuaggaagcaagcuuaa

SEQ ID NO: 3548053 - RNA, 17 nt, Human
uuuaggacaugaaaaua

SEQ ID NO: 3548054 - RNA, 13 nt, Human
uuuaggagauuuu

SEQ ID NO: 3548055 - RNA, 17 nt, Human
uuuaggagauuuuaggu

SEQ ID NO: 3548056 - RNA, 20 nt, Human
uuuaggagggaguuaucuaa

SEQ ID NO: 3548057 - RNA, 19 nt, Human
uuuaggcagggauuugagg

SEQ ID NO: 3548058 - RNA, 21 nt, Human
uuuaggcauaugcuucuuuaa

SEQ ID NO: 3548059 - RNA, 19 nt, Human
uuuaggccaaucagaagcu

SEQ ID NO: 3548060 - RNA, 17 nt, Human
uuuagggaacaauuugg

SEQ ID NO: 3548061 - RNA, 19 nt, Human
uuuagggagagucauauuu

SEQ ID NO: 3548062 - RNA, 18 nt, Human
uuuagggaguauucuaau

SEQ ID NO: 3548063 - RNA, 14 nt, Human
uuuagggccaggca

SEQ ID NO: 3548064 - RNA, 17 nt, Human
uuuagggguagcauuug

SEQ ID NO: 3548065 - RNA, 14 nt, Human
uuuaggguacuaaa

SEQ ID NO: 3548066 - RNA, 15 nt, Human
uuuagguaagaaguu

SEQ ID NO: 3548067 - RNA, 17 nt, Human
uuuaggucuuuguaaga

SEQ ID NO: 3548068 - RNA, 14 nt, Human
uuuaggugaaaaua

SEQ ID NO: 3548069 - RNA, 15 nt, Human
uuuagguucuaaagu

SEQ ID NO: 3548070 - RNA, 12 nt, Human
uuuaguaaaugu

SEQ ID NO: 3548071 - RNA, 16 nt, Human
uuuaguaaggcugugu

SEQ ID NO: 3548072 - RNA, 15 nt, Human
uuuaguaauuucuuu

SEQ ID NO: 3548073 - RNA, 19 nt, Human
uuuaguacccaccugagcu

SEQ ID NO: 3548074 - RNA, 21 nt, Human
uuuaguaccugaaaaguaacu

SEQ ID NO: 3548075 - RNA, 21 nt, Human
uuuaguagauauuaccaguuu

SEQ ID NO: 3548076 - RNA, 21 nt, Human
uuuaguagcagugauugucuu

SEQ ID NO: 3548077 - RNA, 20 nt, Human
uuuaguaugacgcugauaca

SEQ ID NO: 3548078 - RNA, 12 nt, Human
uuuagucacuuu

SEQ ID NO: 3548079 - RNA, 15 nt, Human
uuuagucaugugacc

SEQ ID NO: 3548080 - RNA, 13 nt, Human
uuuagucucuuua

SEQ ID NO: 3548081 - RNA, 17 nt, Human
uuuagucuuuagcuauu

SEQ ID NO: 3548082 - RNA, 23 nt, Human
uuuagugacuaaaccauugugca

SEQ ID NO: 3548083 - RNA, 19 nt, Human
uuuagugaucacagcagcu

SEQ ID NO: 3548084 - RNA, 20 nt, Human
uuuaguggccaucauuucug

SEQ ID NO: 3548085 - RNA, 18 nt, Human
uuuaguguuuuuuuauuu

SEQ ID NO: 3548086 - RNA, 21 nt, Human
uuuaguguuuuuuuauuucua

SEQ ID NO: 3548087 - RNA, 16 nt, Human
uuuaguuacuuuagau

SEQ ID NO: 3548088 - RNA, 14 nt, Human
uuuaguuauaguuu

SEQ ID NO: 3548089 - RNA, 23 nt, Human
uuuaguugaauuuuuuuuaacau

SEQ ID NO: 3548090 - RNA, 17 nt, Human
uuuaguugcaacuuugu

SEQ ID NO: 3548091 - RNA, 12 nt, Human
uucuccuuugua

SEQ ID NO: 3548092 - RNA, 13 nt, Human
uucuccuuuuccu

SEQ ID NO: 3548093 - RNA, 18 nt, Human
uucuccuuuuccucucuc

SEQ ID NO: 3548094 - RNA, 23 nt, Human
uucucgcaaaaacguaucuccua

SEQ ID NO: 3548095 - RNA, 21 nt, Human
uucucuaacuucaaggcccau

SEQ ID NO: 3548096 - RNA, 18 nt, Human
uucucuaaguuccacuga

SEQ ID NO: 3548097 - RNA, 15 nt, Human
uucucuaauaauaaa

SEQ ID NO: 3548098 - RNA, 17 nt, Human
uucucuaauaauaaaua

SEQ ID NO: 3548099 - RNA, 19 nt, Human
uucucuaauaauaaauagu

SEQ ID NO: 3548100 - RNA, 21 nt, Human
uucucuaauauggcaaccauu

SEQ ID NO: 3548101 - RNA, 20 nt, Human
uucucuacagacuucuccag

SEQ ID NO: 3548102 - RNA, 19 nt, Human
uucucuacuuugaggaaac

SEQ ID NO: 3548103 - RNA, 20 nt, Human
uucucuagcucucuaggccu

SEQ ID NO: 3548104 - RNA, 22 nt, Human
uucucuagcucucuaggccucu

SEQ ID NO: 3548105 - RNA, 15 nt, Human
uucucuaguuugauu

SEQ ID NO: 3548106 - RNA, 18 nt, Human
uucucuauaaaaaauaug

SEQ ID NO: 3548107 - RNA, 23 nt, Human
uucucucagaccgucuuccucca

SEQ ID NO: 3548108 - RNA, 17 nt, Human
uucucucaucucuuagc

SEQ ID NO: 3548109 - RNA, 20 nt, Human
uucucucaucucuuagcucc

SEQ ID NO: 3548110 - RNA, 16 nt, Human
uucucuccaauuuaac

SEQ ID NO: 3548111 - RNA, 21 nt, Human
uucucucccaggggcuggcuu

SEQ ID NO: 3548112 - RNA, 22 nt, Human
uucucuccccaacccccauucu

SEQ ID NO: 3548113 - RNA, 20 nt, Human
uucucuccugauuauuuauc

SEQ ID NO: 3548114 - RNA, 19 nt, Human
uucucuccuguaccucuug

SEQ ID NO: 3548115 - RNA, 20 nt, Human
uucucucggaguaucuggga

SEQ ID NO: 3548116 - RNA, 17 nt, Human
uucucucggcuccccau

SEQ ID NO: 3548117 - RNA, 22 nt, Human
uucucucuaugguaaagauauu

SEQ ID NO: 3548118 - RNA, 21 nt, Human
uucucucucucucaaaauuau

SEQ ID NO: 3548119 - RNA, 24 nt, Human
uucucugaacacaggcagcuuucu

SEQ ID NO: 3548120 - RNA, 17 nt, Human
uucucugagcugugcag

SEQ ID NO: 3548121 - RNA, 22 nt, Human
uucucugaguaucuccucgcaa

SEQ ID NO: 3548122 - RNA, 15 nt, Human
uucucugauacagaa

SEQ ID NO: 3548123 - RNA, 12 nt, Human
uucucugccagu

SEQ ID NO: 3548124 - RNA, 20 nt, Human
uucucugcccagcuuuucau

SEQ ID NO: 3548125 - RNA, 16 nt, Human
uucucugcccauuccc

SEQ ID NO: 3548126 - RNA, 12 nt, Human
uucucugcccuc

SEQ ID NO: 3548127 - RNA, 17 nt, Human
uucucugcccuccaaga

SEQ ID NO: 3548128 - RNA, 22 nt, Human
uucucugccgcuaccucccucc

SEQ ID NO: 3548129 - RNA, 11 nt, Human
uucucugcucc

SEQ ID NO: 3548130 - RNA, 15 nt, Human
uucucugcuucagcu

SEQ ID NO: 3548131 - RNA, 18 nt, Human
uucucuguacauauuagc

SEQ ID NO: 3548132 - RNA, 17 nt, Human
uucucuguagggaacuc

SEQ ID NO: 3548133 - RNA, 11 nt, Human
uucucugucca

SEQ ID NO: 3548134 - RNA, 12 nt, Human
uucucugucuca

SEQ ID NO: 3548135 - RNA, 20 nt, Human
uucucugugaacgauuuaga

SEQ ID NO: 3548136 - RNA, 18 nt, Human
uucucugugucuaagauu

SEQ ID NO: 3548137 - RNA, 23 nt, Human
uucucugugucuaagauucuaga

SEQ ID NO: 3548138 - RNA, 21 nt, Human
uuucccccuuuucugcauuuu

SEQ ID NO: 3548139 - RNA, 20 nt, Human
uuuccccugcccccagaccu

SEQ ID NO: 3548140 - RNA, 14 nt, Human
uuuccccuguccug

SEQ ID NO: 3548141 - RNA, 13 nt, Human
uuuccccuuuccu

SEQ ID NO: 3548142 - RNA, 21 nt, Human
uuucccgagcaaagucuaaag

SEQ ID NO: 3548143 - RNA, 16 nt, Human
uuucccguggccccag

SEQ ID NO: 3548144 - RNA, 23 nt, Human
uuucccuacugaagcccuuguga

SEQ ID NO: 3548145 - RNA, 16 nt, Human
uugaaaagccauguuu

SEQ ID NO: 3548146 - RNA, 23 nt, Human
uugaaaagccauguuuaagauuu

SEQ ID NO: 3548147 - RNA, 19 nt, Human
uugaaaagcuucuuaauua

SEQ ID NO: 3548148 - RNA, 21 nt, Human
uugaaaagcuucuuaauuaau

SEQ ID NO: 3548149 - RNA, 22 nt, Human
uugaaaagcuucuuaauuaauu

SEQ ID NO: 3548150 - RNA, 17 nt, Human
uugaaaaguaauauuua

SEQ ID NO: 3548151 - RNA, 23 nt, Human
uugaaaauaguuuauuuuaaaac

SEQ ID NO: 3548152 - RNA, 23 nt, Human
uugaaaauauuaucuuuguaauu

SEQ ID NO: 3548153 - RNA, 19 nt, Human
uugaaaauuauuuuaaaca

SEQ ID NO: 3548154 - RNA, 22 nt, Human
uugaaaauuauuuuaaacaaaa

SEQ ID NO: 3548155 - RNA, 23 nt, Human
uugaaacaauacucauaauguga

SEQ ID NO: 3548156 - RNA, 13 nt, Human
uugaaacagaacc

SEQ ID NO: 3548157 - RNA, 14 nt, Human
uugaaacauugcuu

SEQ ID NO: 3548158 - RNA, 19 nt, Human
uugaaacauugcuuuuaaa

SEQ ID NO: 3548159 - RNA, 19 nt, Human
uugaaacggaugauuucua

SEQ ID NO: 3548160 - RNA, 16 nt, Human
uugaaacuuugagauc

SEQ ID NO: 3548161 - RNA, 20 nt, Human
uugaaacuuugggaaaacau

SEQ ID NO: 3548162 - RNA, 22 nt, Human
uugaaacuuugggaaaacaugu

SEQ ID NO: 3548163 - RNA, 15 nt, Human
uugaaagaaaauaug

SEQ ID NO: 3548164 - RNA, 17 nt, Human
uugaaagagaaccaguu

SEQ ID NO: 3548165 - RNA, 20 nt, Human
uugaaagagaaccaguuuca

SEQ ID NO: 3548166 - RNA, 14 nt, Human
uugaaagaguccua

SEQ ID NO: 3548167 - RNA, 22 nt, Human
uugaaagauucagguauguugc

SEQ ID NO: 3548168 - RNA, 16 nt, Human
uugaaagcauccaugu

SEQ ID NO: 3548169 - RNA, 22 nt, Human
uugaaagguuuuuuuucaguug

SEQ ID NO: 3548170 - RNA, 19 nt, Human
uugaaagugggcaaaagcu

SEQ ID NO: 3548171 - RNA, 16 nt, Human
uugaaaguuuacagga

SEQ ID NO: 3548172 - RNA, 14 nt, Human
uugaaauaaagcua

SEQ ID NO: 3548173 - RNA, 16 nt, Human
uugaaauaagaauuca

SEQ ID NO: 3548174 - RNA, 14 nt, Human
uugaaauaccucau

SEQ ID NO: 3548175 - RNA, 17 nt, Human
uugaaauaccucauguu

SEQ ID NO: 3548176 - RNA, 18 nt, Human
uugaaauaccucauguuu

SEQ ID NO: 3548177 - RNA, 22 nt, Human
uugaaauaccucauguuuauga

SEQ ID NO: 3548178 - RNA, 13 nt, Human
uugaaaugaaauu

SEQ ID NO: 3548179 - RNA, 19 nt, Human
uugaaaugaaauuuaaaca

SEQ ID NO: 3548180 - RNA, 20 nt, Human
uugaaaugaaauuuaaacau

SEQ ID NO: 3548181 - RNA, 18 nt, Human
uugaaaugaggucuguuu

SEQ ID NO: 3548182 - RNA, 21 nt, Human
uugaaaugaggucuguuuaaa

SEQ ID NO: 3548183 - RNA, 13 nt, Human
uugaaaugcugaa

SEQ ID NO: 3548184 - RNA, 17 nt, Human
uugaaaugcugaaaauu

SEQ ID NO: 3548185 - RNA, 17 nt, Human
uugaaauguaaggcugu

SEQ ID NO: 3548186 - RNA, 14 nt, Human
uugaaauuauaucu

SEQ ID NO: 3548187 - RNA, 16 nt, Human
uugaaauuauaucugu

SEQ ID NO: 3548188 - RNA, 14 nt, Human
uugaaauucuauuu

SEQ ID NO: 3548189 - RNA, 14 nt, Human
uugaaauucugaau

SEQ ID NO: 3548190 - RNA, 20 nt, Human
uugaaauucugaauuugcaa

SEQ ID NO: 3548191 - RNA, 21 nt, Human
uugaaauucugaauuugcaaa

SEQ ID NO: 3548192 - RNA, 17 nt, Human
uugaaauuguaauuaua

SEQ ID NO: 3548193 - RNA, 13 nt, Human
uugaaauugugaa

SEQ ID NO: 3548194 - RNA, 19 nt, Human
uugaaauuguuuaaguguu

SEQ ID NO: 3548195 - RNA, 18 nt, Human
uugaaauuuugcaaauau

SEQ ID NO: 3548196 - RNA, 22 nt, Human
uugaaauuuugcaaauauaaac

SEQ ID NO: 3548197 - RNA, 12 nt, Human
uugaacaaaaua

SEQ ID NO: 3548198 - RNA, 14 nt, Human
uugaacaaaauaaa

SEQ ID NO: 3548199 - RNA, 17 nt, Human
uugaacaaaaucuguug

SEQ ID NO: 3548200 - RNA, 20 nt, Human
uugaacaaguuguuucauug

SEQ ID NO: 3548201 - RNA, 20 nt, Human
uugaacacaguauuuuccca

SEQ ID NO: 3548202 - RNA, 19 nt, Human
uugaacacucaugcugaaa

SEQ ID NO: 3548203 - RNA, 11 nt, Human
uugaacacugg

SEQ ID NO: 3548204 - RNA, 20 nt, Human
uugaacacuuggugcuggga

SEQ ID NO: 3548205 - RNA, 23 nt, Human
uugaacauuuggguuacuauuuc

SEQ ID NO: 3548206 - RNA, 12 nt, Human
uugaaccaauaa

SEQ ID NO: 3548207 - RNA, 16 nt, Human
uugaaccacuucccuc

SEQ ID NO: 3548208 - RNA, 14 nt, Human
uugaaccauaaaau

SEQ ID NO: 3548209 - RNA, 21 nt, Human
uugaaccauaaaauguccagu

SEQ ID NO: 3548210 - RNA, 15 nt, Human
uugaaccuauuucuc

SEQ ID NO: 3548211 - RNA, 19 nt, Human
uugaaccuauuucucuuuc

SEQ ID NO: 3548212 - RNA, 18 nt, Human
uugaaccugaugaaaaua

SEQ ID NO: 3548213 - RNA, 13 nt, Human
uugaaccugggag

SEQ ID NO: 3548214 - RNA, 18 nt, Human
uugaacguuuucuaauug

SEQ ID NO: 3548215 - RNA, 19 nt, Human
uugaacguuuucuaauugc

SEQ ID NO: 3548216 - RNA, 13 nt, Human
uugaacuccaaga

SEQ ID NO: 3548217 - RNA, 20 nt, Human
uugaacucuucucauuacuu

SEQ ID NO: 3548218 - RNA, 15 nt, Human
uugaacugauaguua

SEQ ID NO: 3548219 - RNA, 19 nt, Human
uugaacugauaguuacugu

SEQ ID NO: 3548220 - RNA, 20 nt, Human
uugaacugauaguuacuguu

SEQ ID NO: 3548221 - RNA, 22 nt, Human
uugaacugauaguuacuguugu

SEQ ID NO: 3548222 - RNA, 23 nt, Human
uugaacuggcaauugucuauuua

SEQ ID NO: 3548223 - RNA, 14 nt, Human
uugaacuguuagaa

SEQ ID NO: 3548224 - RNA, 18 nt, Human
uugaacuguuagaaugua

SEQ ID NO: 3548225 - RNA, 18 nt, Human
uugaacuuaaauaaaugu

SEQ ID NO: 3548226 - RNA, 19 nt, Human
uugaagaacugcaggcccu

SEQ ID NO: 3548227 - RNA, 14 nt, Human
uugaagaaggugga

SEQ ID NO: 3548228 - RNA, 13 nt, Human
uugaagaaugaac

SEQ ID NO: 3548229 - RNA, 15 nt, Human
uugaagaaugaacaa

SEQ ID NO: 3548230 - RNA, 19 nt, Human
uugaagaauguuaagacuu

SEQ ID NO: 3548231 - RNA, 19 nt, Human
uugaagacaauuugauaca

SEQ ID NO: 3548232 - RNA, 23 nt, Human
uugaagacaauuugauacauaau

SEQ ID NO: 3548233 - RNA, 17 nt, Human
uugaagacagagcuaca

SEQ ID NO: 3548234 - RNA, 20 nt, Human
uugaagacccgcuacaaaac

SEQ ID NO: 3548235 - RNA, 16 nt, Human
uugaagacuucaaaau

SEQ ID NO: 3548236 - RNA, 14 nt, Human
uugaagagacagag

SEQ ID NO: 3548237 - RNA, 20 nt, Human
uugaagagacagagacaagu

SEQ ID NO: 3548238 - RNA, 18 nt, Human
uugaagagagauauaucu

SEQ ID NO: 3548239 - RNA, 19 nt, Human
uugaagaggggagcucagu

SEQ ID NO: 3548240 - RNA, 14 nt, Human
uugaagagugaaau

SEQ ID NO: 3548241 - RNA, 20 nt, Human
uugaagaucguuaguaucua

SEQ ID NO: 3548242 - RNA, 16 nt, Human
uugaagcaaacaguug

SEQ ID NO: 3548243 - RNA, 14 nt, Human
uugaagcagagugg

SEQ ID NO: 3548244 - RNA, 11 nt, Human
uugaagcauag

SEQ ID NO: 3548245 - RNA, 23 nt, Human
uugaagcauuuuauaaaucgcuu

SEQ ID NO: 3548246 - RNA, 11 nt, Human
uugaagccaaa

SEQ ID NO: 3548247 - RNA, 14 nt, Human
uugaagccaaagaa

SEQ ID NO: 3548248 - RNA, 15 nt, Human
uugaagccaaagaaa

SEQ ID NO: 3548249 - RNA, 23 nt, Human
uugaagccaagucagcuuugccu

SEQ ID NO: 3548250 - RNA, 17 nt, Human
uugaagccacugaagcu

SEQ ID NO: 3548251 - RNA, 18 nt, Human
uugaagccgacucuggcc

SEQ ID NO: 3548252 - RNA, 19 nt, Human
uugaagccugcuccuuccc

SEQ ID NO: 3548253 - RNA, 14 nt, Human
uugaagcuaagauu

SEQ ID NO: 3548254 - RNA, 13 nt, Human
uugaagcucuggu

SEQ ID NO: 3548255 - RNA, 18 nt, Human
uugaagcugaaaauauaa

SEQ ID NO: 3548256 - RNA, 17 nt, Human
uugaaggaaaaugauac

SEQ ID NO: 3548257 - RNA, 12 nt, Human
uugaaggcuuaa

SEQ ID NO: 3548258 - RNA, 15 nt, Human
uugaagggaggggcu

SEQ ID NO: 3548259 - RNA, 17 nt, Human
uugaagggccagagcca

SEQ ID NO: 3548260 - RNA, 18 nt, Human
uugaaggguaaagaaguu

SEQ ID NO: 3548261 - RNA, 16 nt, Human
uugaagguagaauguu

SEQ ID NO: 3548262 - RNA, 19 nt, Human
uugaaggucuugauuuguu

SEQ ID NO: 3548263 - RNA, 14 nt, Human
uugaaguaaaaugu

SEQ ID NO: 3548264 - RNA, 15 nt, Human
uugaaguaaacugca

SEQ ID NO: 3548265 - RNA, 17 nt, Human
uugaaguaaugaauuuu

SEQ ID NO: 3548266 - RNA, 16 nt, Human
uugaaguagcucuuuu

SEQ ID NO: 3548267 - RNA, 15 nt, Human
uugaagucaccuugu

SEQ ID NO: 3548268 - RNA, 13 nt, Human
uugaagucuugua

SEQ ID NO: 3548269 - RNA, 14 nt, Human
uugaagucuuguau

SEQ ID NO: 3548270 - RNA, 20 nt, Human
uugaagugagaaaaugaaca

SEQ ID NO: 3548271 - RNA, 16 nt, Human
uugaaguguauaauau

SEQ ID NO: 3548272 - RNA, 19 nt, Human
uugaaguuguuacuaacua

SEQ ID NO: 3548273 - RNA, 13 nt, Human
uugaaguuuacau

SEQ ID NO: 3548274 - RNA, 19 nt, Human
uugaaguuucaaguuuuaa

SEQ ID NO: 3548275 - RNA, 16 nt, Human
uugaauaaaaaugcac

SEQ ID NO: 3548276 - RNA, 12 nt, Human
uugaauaaagaa

SEQ ID NO: 3548277 - RNA, 18 nt, Human
uugaauaaagaauacuug

SEQ ID NO: 3548278 - RNA, 22 nt, Human
uugaauaaagaauacuugaacu

SEQ ID NO: 3548279 - RNA, 20 nt, Human
uugaauaauaagcaggaugu

SEQ ID NO: 3548280 - RNA, 18 nt, Human
uugaauacucugcccucu

SEQ ID NO: 3548281 - RNA, 15 nt, Human
uugaauacuuacauu

SEQ ID NO: 3548282 - RNA, 16 nt, Human
uugaauacuugaacca

SEQ ID NO: 3548283 - RNA, 13 nt, Human
uugacucuggguc

SEQ ID NO: 3548284 - RNA, 18 nt, Human
uugacucuggguccuucc

SEQ ID NO: 3548285 - RNA, 21 nt, Human
uugacucuggguccuuccuga

SEQ ID NO: 3548286 - RNA, 15 nt, Human
uugacucuuuugcca

SEQ ID NO: 3548287 - RNA, 23 nt, Human
uugacuggguuucucuguauagu

SEQ ID NO: 3548288 - RNA, 16 nt, Human
uugacuugcaugaaga

SEQ ID NO: 3548289 - RNA, 21 nt, Human
uugacuuucagguacuaaaua

SEQ ID NO: 3548290 - RNA, 13 nt, Human
uugacuuucccca

SEQ ID NO: 3548291 - RNA, 14 nt, Human
uugacuuugcuccu

SEQ ID NO: 3548292 - RNA, 16 nt, Human
uugacuuuuuagaugu

SEQ ID NO: 3548293 - RNA, 21 nt, Human
uugagaaaaaaagaauaguug

SEQ ID NO: 3548294 - RNA, 17 nt, Human
uugagaaaauaaagcua

SEQ ID NO: 3548295 - RNA, 21 nt, Human
uugagaaauauggacacuuaa

SEQ ID NO: 3548296 - RNA, 22 nt, Human
uugagaaaugaauaauuuccca

SEQ ID NO: 3548297 - RNA, 16 nt, Human
uugagaaaugcauauu

SEQ ID NO: 3548298 - RNA, 15 nt, Human
uugagaacguaaaga

SEQ ID NO: 3548299 - RNA, 19 nt, Human
uugagaagccuucagcucc

SEQ ID NO: 3548300 - RNA, 21 nt, Human
uugagaagccuucagcuccag

SEQ ID NO: 3548301 - RNA, 16 nt, Human
uugagaaguuuuguac

SEQ ID NO: 3548302 - RNA, 16 nt, Human
uugagaauauugaagu

SEQ ID NO: 3548303 - RNA, 17 nt, Human
uugagaauggaaaccac

SEQ ID NO: 3548304 - RNA, 18 nt, Human
uugagaaugguuacaaag

SEQ ID NO: 3548305 - RNA, 16 nt, Human
uugagacaaaaauuau

SEQ ID NO: 3548306 - RNA, 10 nt, Human
uugagacaga

SEQ ID NO: 3548307 - RNA, 12 nt, Human
uugagacagagu

SEQ ID NO: 3548308 - RNA, 20 nt, Human
uugagacagugcacaugaac

SEQ ID NO: 3548309 - RNA, 17 nt, Human
uugagacaguuucuuag

SEQ ID NO: 3548310 - RNA, 19 nt, Human
uugagacaguuucuuagcu

SEQ ID NO: 3548311 - RNA, 22 nt, Human
uuucuauguacuaguacugugu

SEQ ID NO: 3548312 - RNA, 23 nt, Human
uuucuauuaaaagacucauccgu

SEQ ID NO: 3548313 - RNA, 14 nt, Human
uuucuauuccaaag

SEQ ID NO: 3548314 - RNA, 17 nt, Human
uuucuauugaaaaauca

SEQ ID NO: 3548315 - RNA, 14 nt, Human
uuucuauuguuacu

SEQ ID NO: 3548316 - RNA, 17 nt, Human
uuucuauuucuccucca

SEQ ID NO: 3548317 - RNA, 14 nt, Human
uuucuauuugacuu

SEQ ID NO: 3548318 - RNA, 15 nt, Human
uuucuauuuuuaucu

SEQ ID NO: 3548319 - RNA, 15 nt, Human
uuucucaaagaaauu

SEQ ID NO: 3548320 - RNA, 21 nt, Human
uuucucaacuggguccagaag

SEQ ID NO: 3548321 - RNA, 22 nt, Human
uuucucacagaagaugaagcac

SEQ ID NO: 3548322 - RNA, 16 nt, Human
uuucucaguuuguaua

SEQ ID NO: 3548323 - RNA, 16 nt, Human
uuucucaguuuucaua

SEQ ID NO: 3548324 - RNA, 14 nt, Human
uuucucauucuugu

SEQ ID NO: 3548325 - RNA, 15 nt, Human
uuucuccaagagcua

SEQ ID NO: 3548326 - RNA, 17 nt, Human
uuucuccaauaucagug

SEQ ID NO: 3548327 - RNA, 23 nt, Human
uuucuccauauuagauuuaccca

SEQ ID NO: 3548328 - RNA, 20 nt, Human
uuucucccaggccaggcucc

SEQ ID NO: 3548329 - RNA, 17 nt, Human
uuucucccagucauuua

SEQ ID NO: 3548330 - RNA, 10 nt, Human
uuucuccccc

SEQ ID NO: 3548331 - RNA, 21 nt, Human
uuucucccccauguucugucc

SEQ ID NO: 3548332 - RNA, 15 nt, Human
uuucucccccugggc

SEQ ID NO: 3548333 - RNA, 13 nt, Human
uuucuccccugcc

SEQ ID NO: 3548334 - RNA, 14 nt, Human
uuucuccccugccc

SEQ ID NO: 3548335 - RNA, 17 nt, Human
uuucuccccugccccca

SEQ ID NO: 3548336 - RNA, 22 nt, Human
uuucuccccugcccccaggacu

SEQ ID NO: 3548337 - RNA, 24 nt, Human
uuucuccccugcccccaggacugg

SEQ ID NO: 3548338 - RNA, 13 nt, Human
uuucucccucugg

SEQ ID NO: 3548339 - RNA, 12 nt, Human
uuucucccugga

SEQ ID NO: 3548340 - RNA, 13 nt, Human
uuucuccuaucuu

SEQ ID NO: 3548341 - RNA, 23 nt, Human
uuucuccuugaauaucuuucgau

SEQ ID NO: 3548342 - RNA, 16 nt, Human
uuucuccuuuguacuu

SEQ ID NO: 3548343 - RNA, 17 nt, Human
uuucucgauuuuaucuu

SEQ ID NO: 3548344 - RNA, 22 nt, Human
uuucucuaacuucaaggcccau

SEQ ID NO: 3548345 - RNA, 17 nt, Human
uuucucuaauaauaaau

SEQ ID NO: 3548346 - RNA, 22 nt, Human
uuucucuacagaugucccauuu

SEQ ID NO: 3548347 - RNA, 21 nt, Human
uuucucucagccuuacauuug

SEQ ID NO: 3548348 - RNA, 15 nt, Human
uuucucuccuguccu

SEQ ID NO: 3548349 - RNA, 18 nt, Human
uuucucucuacagugcca

SEQ ID NO: 3548350 - RNA, 12 nt, Human
uuucucucucua

SEQ ID NO: 3548351 - RNA, 14 nt, Human
uuucucucuucccu

SEQ ID NO: 3548352 - RNA, 20 nt, Human
uuucucucuuuauacagcug

SEQ ID NO: 3548353 - RNA, 15 nt, Human
uuucucugaaagugu

SEQ ID NO: 3548354 - RNA, 15 nt, Human
uuucucugaacacau

SEQ ID NO: 3548355 - RNA, 15 nt, Human
uuucucugauacaga

SEQ ID NO: 3548356 - RNA, 22 nt, Human
uuucucugcauuuaaaaaaauc

SEQ ID NO: 3548357 - RNA, 17 nt, Human
uuucucuguauaguacu

SEQ ID NO: 3548358 - RNA, 16 nt, Human
uuucucuguggcucca

SEQ ID NO: 3548359 - RNA, 16 nt, Human
uuucucuucuccccuu

SEQ ID NO: 3548360 - RNA, 20 nt, Human
uuucucuucuccccuuccau

SEQ ID NO: 3548361 - RNA, 15 nt, Human
uuucucuugagcugg

SEQ ID NO: 3548362 - RNA, 16 nt, Human
uuucucuugagcuggc

SEQ ID NO: 3548363 - RNA, 21 nt, Human
uuucucuugggcugagacugg

SEQ ID NO: 3548364 - RNA, 20 nt, Human
uuucucuuucccuggucccu

SEQ ID NO: 3548365 - RNA, 20 nt, Human
uuucucuuugaaacaugcuu

SEQ ID NO: 3548366 - RNA, 21 nt, Human
uuucucuuugauuauuugcau

SEQ ID NO: 3548367 - RNA, 23 nt, Human
uuucucuuuguggggcuuggcgu

SEQ ID NO: 3548368 - RNA, 22 nt, Human
uuucucuuuuccccuuuccugu

SEQ ID NO: 3548369 - RNA, 15 nt, Human
uuucucuuuucuaaa

SEQ ID NO: 3548370 - RNA, 13 nt, Human
uuucugaaaagau

SEQ ID NO: 3548371 - RNA, 14 nt, Human
uuucugaaauaaca

SEQ ID NO: 3548372 - RNA, 12 nt, Human
uuucugaaauuu

SEQ ID NO: 3548373 - RNA, 19 nt, Human
uuucugaaauuuccuggga

SEQ ID NO: 3548374 - RNA, 13 nt, Human
uuucugaacagcu

SEQ ID NO: 3548375 - RNA, 15 nt, Human
uuucugaacagcugg

SEQ ID NO: 3548376 - RNA, 14 nt, Human
uuucugaaggcuuu

SEQ ID NO: 3548377 - RNA, 15 nt, Human
uuucugaaguggacu

SEQ ID NO: 3548378 - RNA, 15 nt, Human
uuucugaauagaaau

SEQ ID NO: 3548379 - RNA, 16 nt, Human
uuucugagcacacuuu

SEQ ID NO: 3548380 - RNA, 18 nt, Human
uuucugaguuuuaccaaa

SEQ ID NO: 3548381 - RNA, 14 nt, Human
uuucugauauagaa

SEQ ID NO: 3548382 - RNA, 17 nt, Human
uuucugaucaaggccuu

SEQ ID NO: 3548383 - RNA, 13 nt, Human
uuucugauccagu

SEQ ID NO: 3548384 - RNA, 15 nt, Human
uuucugauccaguuu

SEQ ID NO: 3548385 - RNA, 22 nt, Human
uuucugauccaguuuuguuugg

SEQ ID NO: 3548386 - RNA, 19 nt, Human
uuucugauuagcuuugugu

SEQ ID NO: 3548387 - RNA, 17 nt, Human
uuucugauuugcugcuc

SEQ ID NO: 3548388 - RNA, 14 nt, Human
uuucugcaaaauag

SEQ ID NO: 3548389 - RNA, 14 nt, Human
uuucugcaaacaaa

SEQ ID NO: 3548390 - RNA, 19 nt, Human
uuucugcagccacuauugu

SEQ ID NO: 3548391 - RNA, 19 nt, Human
uuucugcaguagucucugu

SEQ ID NO: 3548392 - RNA, 16 nt, Human
uuucugcaucuccacu

SEQ ID NO: 3548393 - RNA, 15 nt, Human
uuucugccuccuuua

SEQ ID NO: 3548394 - RNA, 14 nt, Human
uuucugccucucaa

SEQ ID NO: 3548395 - RNA, 14 nt, Human
uuucugccuggagu

SEQ ID NO: 3548396 - RNA, 18 nt, Human
uuucugcucagcuucucc

SEQ ID NO: 3548397 - RNA, 21 nt, Human
uuucugcugaauuuucacaug

SEQ ID NO: 3548398 - RNA, 17 nt, Human
uuucugcuuuagacuug

SEQ ID NO: 3548399 - RNA, 20 nt, Human
uuucugcuuuagacuugaaa

SEQ ID NO: 3548400 - RNA, 22 nt, Human
uuucugcuuucuuugauucucc

SEQ ID NO: 3548401 - RNA, 21 nt, Human
uuucuggacugaagccugcag

SEQ ID NO: 3548402 - RNA, 21 nt, Human
uuucuggagguugauaacuuu

SEQ ID NO: 3548403 - RNA, 22 nt, Human
uuucuggagguugauaacuuug

SEQ ID NO: 3548404 - RNA, 23 nt, Human
uuucuggauuccccaucucaggc

SEQ ID NO: 3548405 - RNA, 21 nt, Human
uuucuggcagguccuccccuc

SEQ ID NO: 3548406 - RNA, 17 nt, Human
uuucuggccaaaagcag

SEQ ID NO: 3548407 - RNA, 11 nt, Human
uuucuggccag

SEQ ID NO: 3548408 - RNA, 15 nt, Human
uuucuggcuaugcau

SEQ ID NO: 3548409 - RNA, 18 nt, Human
uuucuggcuaugcauuug

SEQ ID NO: 3548410 - RNA, 19 nt, Human
uuucuggcuaugcauuuga

SEQ ID NO: 3548411 - RNA, 23 nt, Human
uuucugggcaccggggccucgga

SEQ ID NO: 3548412 - RNA, 22 nt, Human
uuucuggggccuaauaaaacug

SEQ ID NO: 3548413 - RNA, 19 nt, Human
uuucugggguuuuucuguu

SEQ ID NO: 3548414 - RNA, 15 nt, Human
uuucugggucuuuug

SEQ ID NO: 3548415 - RNA, 15 nt, Human
uuucugguucuaaca

SEQ ID NO: 3548416 - RNA, 21 nt, Human
uuucugguuguuaugugauca

SEQ ID NO: 3548417 - RNA, 19 nt, Human
uuucuguagucauuuacua

SEQ ID NO: 3548418 - RNA, 14 nt, Human
uuucuguauagaca

SEQ ID NO: 3548419 - RNA, 15 nt, Human
uuucugucaagaaga

SEQ ID NO: 3548420 - RNA, 15 nt, Human
uuucugucagaaugc

SEQ ID NO: 3548421 - RNA, 23 nt, Human
uuucugucagaugagaacaaagc

SEQ ID NO: 3548422 - RNA, 14 nt, Human
uuucuguccuguaa

SEQ ID NO: 3548423 - RNA, 14 nt, Human
uuucugucuucucu

SEQ ID NO: 3548424 - RNA, 18 nt, Human
uuucugugcccuacucau

SEQ ID NO: 3548425 - RNA, 10 nt, Human
uuucugugug

SEQ ID NO: 3548426 - RNA, 22 nt, Human
uuucugugugucaguuuucaua

SEQ ID NO: 3548427 - RNA, 13 nt, Human
uuucuguguguuc

SEQ ID NO: 3548428 - RNA, 14 nt, Human
uuuguaaagcuauu

SEQ ID NO: 3548429 - RNA, 15 nt, Human
uuuguaaaguuuccg

SEQ ID NO: 3548430 - RNA, 15 nt, Human
uuuguaaauaagaga

SEQ ID NO: 3548431 - RNA, 14 nt, Human
uuuguaaauaggau

SEQ ID NO: 3548432 - RNA, 20 nt, Human
uuuguaaauaggauuuuuag

SEQ ID NO: 3548433 - RNA, 16 nt, Human
uuuguaaauuaacuuu

SEQ ID NO: 3548434 - RNA, 17 nt, Human
uuuguaaauuaacuuuu

SEQ ID NO: 3548435 - RNA, 11 nt, Human
uuuguaaauuc

SEQ ID NO: 3548436 - RNA, 21 nt, Human
uuuguaacccagauuuugcug

SEQ ID NO: 3548437 - RNA, 16 nt, Human
uuuguaaccucagcuc

SEQ ID NO: 3548438 - RNA, 16 nt, Human
uuuguaagaguguaga

SEQ ID NO: 3548439 - RNA, 19 nt, Human
uuuguaagaguguagaagc

SEQ ID NO: 3548440 - RNA, 19 nt, Human
uuuguaagauauuugcagu

SEQ ID NO: 3548441 - RNA, 18 nt, Human
uuuguaagguuuuuguag

SEQ ID NO: 3548442 - RNA, 22 nt, Human
uuuguaagucaguguugagaug

SEQ ID NO: 3548443 - RNA, 22 nt, Human
uuuguaaguuagguaacuguau

SEQ ID NO: 3548444 - RNA, 20 nt, Human
uuuguaaguugaagcaaauc

SEQ ID NO: 3548445 - RNA, 18 nt, Human
uuuguaaucguuaugugu

SEQ ID NO: 3548446 - RNA, 21 nt, Human
uuuguaaucguuaugugugua

SEQ ID NO: 3548447 - RNA, 13 nt, Human
uuuguaaugaaaa

SEQ ID NO: 3548448 - RNA, 14 nt, Human
uuuguaaugaaaac

SEQ ID NO: 3548449 - RNA, 20 nt, Human
uuuguaaugaauuccuagaa

SEQ ID NO: 3548450 - RNA, 23 nt, Human
uuuguaaugucuugagcucuauu

SEQ ID NO: 3548451 - RNA, 14 nt, Human
uuuguaauuaaaag

SEQ ID NO: 3548452 - RNA, 22 nt, Human
uuuguaauuaaauuaugguauu

SEQ ID NO: 3548453 - RNA, 12 nt, Human
uuuguaauuauu

SEQ ID NO: 3548454 - RNA, 13 nt, Human
uuuguaauuuaag

SEQ ID NO: 3548455 - RNA, 16 nt, Human
uuuguaauuuuuuuau

SEQ ID NO: 3548456 - RNA, 21 nt, Human
uuuguacaauugaacuuaaau

SEQ ID NO: 3548457 - RNA, 18 nt, Human
uuuguacagacguaugcu

SEQ ID NO: 3548458 - RNA, 19 nt, Human
uuuguacagacguaugcuu

SEQ ID NO: 3548459 - RNA, 16 nt, Human
uuuguacauagauuua

SEQ ID NO: 3548460 - RNA, 19 nt, Human
uuuguacauaguuauuuau

SEQ ID NO: 3548461 - RNA, 17 nt, Human
uuuguaccagugaauuu

SEQ ID NO: 3548462 - RNA, 14 nt, Human
uuuguaccauuuca

SEQ ID NO: 3548463 - RNA, 18 nt, Human
uuuguaccccccaacccc

SEQ ID NO: 3548464 - RNA, 15 nt, Human
uuuguacugaauuuu

SEQ ID NO: 3548465 - RNA, 22 nt, Human
uuuguacugaauuuuuuuguaa

SEQ ID NO: 3548466 - RNA, 15 nt, Human
uuuguacuguaaaga

SEQ ID NO: 3548467 - RNA, 20 nt, Human
uuuguacuguaaagagaccu

SEQ ID NO: 3548468 - RNA, 14 nt, Human
uuuguacuguuuaa

SEQ ID NO: 3548469 - RNA, 18 nt, Human
uuuguacuuucuguuaaa

SEQ ID NO: 3548470 - RNA, 19 nt, Human
uuuguagcacugacagauu

SEQ ID NO: 3548471 - RNA, 20 nt, Human
uuuguagcuggggcuuugau

SEQ ID NO: 3548472 - RNA, 23 nt, Human
uuuguaggaaggucucauucuuc

SEQ ID NO: 3548473 - RNA, 20 nt, Human
uuuguaggggucaaagaaau

SEQ ID NO: 3548474 - RNA, 21 nt, Human
uuuguaggggucaaagaaaug

SEQ ID NO: 3548475 - RNA, 15 nt, Human
uuuguaguagcguuu

SEQ ID NO: 3548476 - RNA, 16 nt, Human
uuuguagugaaauaau

SEQ ID NO: 3548477 - RNA, 15 nt, Human
uuuguagugauuuuu

SEQ ID NO: 3548478 - RNA, 17 nt, Human
uuuguaguguuggagaa

SEQ ID NO: 3548479 - RNA, 21 nt, Human
uuuguaguguuggagaagaac

SEQ ID NO: 3548480 - RNA, 12 nt, Human
uuuguauaaaag

SEQ ID NO: 3548481 - RNA, 13 nt, Human
uuuguauaaaaua

SEQ ID NO: 3548482 - RNA, 16 nt, Human
uuuguauaaaauaauu

SEQ ID NO: 3548483 - RNA, 21 nt, Human
uuuguauaaaauaauuuuuau

SEQ ID NO: 3548484 - RNA, 16 nt, Human
uuuguauaguaaagug

SEQ ID NO: 3548485 - RNA, 17 nt, Human
uuuguauaguaaaguga

SEQ ID NO: 3548486 - RNA, 21 nt, Human
uuuguauaguuauguaaauaa

SEQ ID NO: 3548487 - RNA, 19 nt, Human
uuuguauauauacauaaca

SEQ ID NO: 3548488 - RNA, 20 nt, Human
uuuguauauugguuuuauga

SEQ ID NO: 3548489 - RNA, 12 nt, Human
uuuguauauugu

SEQ ID NO: 3548490 - RNA, 13 nt, Human
uuuguaucugaag

SEQ ID NO: 3548491 - RNA, 21 nt, Human
uuuguaucugcaggcagacac

SEQ ID NO: 3548492 - RNA, 17 nt, Human
uuuguaucuuaaauuug

SEQ ID NO: 3548493 - RNA, 14 nt, Human
uuuguaucuugaug

SEQ ID NO: 3548494 - RNA, 23 nt, Human
uuuguaugaaaacauggaacagu

SEQ ID NO: 3548495 - RNA, 20 nt, Human
uuuguaugaaauauauguga

SEQ ID NO: 3548496 - RNA, 12 nt, Human
uuuguaugauau

SEQ ID NO: 3548497 - RNA, 12 nt, Human
uuuguauguaaa

SEQ ID NO: 3548498 - RNA, 10 nt, Human
uuuguauguu

SEQ ID NO: 3548499 - RNA, 14 nt, Human
uuuguauuauugcu

SEQ ID NO: 3548500 - RNA, 13 nt, Human
uuuguauucaaaa

SEQ ID NO: 3548501 - RNA, 12 nt, Human
uuuguauucugu

SEQ ID NO: 3548502 - RNA, 13 nt, Human
uuuguauuguccu

SEQ ID NO: 3548503 - RNA, 15 nt, Human
uuuguauuguccuau

SEQ ID NO: 3548504 - RNA, 21 nt, Human
uuuguauuguuucaauugcau

SEQ ID NO: 3548505 - RNA, 10 nt, Human
uuuguauuuu

SEQ ID NO: 3548506 - RNA, 23 nt, Human
uuuguauuuuauuuuuuucucuc

SEQ ID NO: 3548507 - RNA, 15 nt, Human
uuuguauuuucauga

SEQ ID NO: 3548508 - RNA, 16 nt, Human
uuuguauuuuguguga

SEQ ID NO: 3548509 - RNA, 14 nt, Human
uuugucaaacugua

SEQ ID NO: 3548510 - RNA, 23 nt, Human
uuugucaaacuguagaaaugaug

SEQ ID NO: 3548511 - RNA, 11 nt, Human
uuugucaauga

SEQ ID NO: 3548512 - RNA, 17 nt, Human
uuugucaaugacaguuu

SEQ ID NO: 3548513 - RNA, 19 nt, Human
uuugucaauuuaugaauau

SEQ ID NO: 3548514 - RNA, 23 nt, Human
uuugucacaauccuaacacauua

SEQ ID NO: 3548515 - RNA, 21 nt, Human
uuugucagggaguguucccua

SEQ ID NO: 3548516 - RNA, 19 nt, Human
uuugucaucagauggaaau

SEQ ID NO: 3548517 - RNA, 15 nt, Human
uauuucccaugauuu

SEQ ID NO: 3548518 - RNA, 16 nt, Human
uauuucccaugauuuc

SEQ ID NO: 3548519 - RNA, 15 nt, Human
uauuucccccuuucu

SEQ ID NO: 3548520 - RNA, 22 nt, Human
uauuucccuacauuaaacauga

SEQ ID NO: 3548521 - RNA, 22 nt, Human
uauuucccugaaggaaccaaag

SEQ ID NO: 3548522 - RNA, 16 nt, Human
uauuucccuuuagcug

SEQ ID NO: 3548523 - RNA, 13 nt, Human
uauuuccucccuc

SEQ ID NO: 3548524 - RNA, 15 nt, Human
uauuuccuuaaacug

SEQ ID NO: 3548525 - RNA, 16 nt, Human
uauuucuacugucaaa

SEQ ID NO: 3548526 - RNA, 18 nt, Human
uauuucuacugucaaaug

SEQ ID NO: 3548527 - RNA, 20 nt, Human
uauuucuagacacuuuuucu

SEQ ID NO: 3548528 - RNA, 19 nt, Human
uauuucuaggaagaauuuu

SEQ ID NO: 3548529 - RNA, 22 nt, Human
uauuucuaggaagaauuuuaaa

SEQ ID NO: 3548530 - RNA, 17 nt, Human
uauuucuaguccaaaau

SEQ ID NO: 3548531 - RNA, 21 nt, Human
uauuucuaguccaaaauuaca

SEQ ID NO: 3548532 - RNA, 18 nt, Human
uauuucuauauuuucauu

SEQ ID NO: 3548533 - RNA, 15 nt, Human
uauuucuaugaaaua

SEQ ID NO: 3548534 - RNA, 21 nt, Human
uauuucuauuauuaauugcaa

SEQ ID NO: 3548535 - RNA, 21 nt, Human
uauuucucaacaaagcacagu

SEQ ID NO: 3548536 - RNA, 22 nt, Human
uauuucucagacuuuggaaaau

SEQ ID NO: 3548537 - RNA, 21 nt, Human
uauuucugaagguagcauucu

SEQ ID NO: 3548538 - RNA, 16 nt, Human
uauuucugagaagguc

SEQ ID NO: 3548539 - RNA, 23 nt, Human
uauuucugaggagccugcaacau

SEQ ID NO: 3548540 - RNA, 16 nt, Human
uauuucugcugaauuu

SEQ ID NO: 3548541 - RNA, 18 nt, Human
uauuucugggucuuuugc

SEQ ID NO: 3548542 - RNA, 17 nt, Human
uauuucuguuucucaua

SEQ ID NO: 3548543 - RNA, 20 nt, Human
uauuucuuaaacaaauguau

SEQ ID NO: 3548544 - RNA, 19 nt, Human
uauuucuuaaaucuaguaa

SEQ ID NO: 3548545 - RNA, 14 nt, Human
uauuucuucaaaua

SEQ ID NO: 3548546 - RNA, 20 nt, Human
uauuucuugugguuauaacu

SEQ ID NO: 3548547 - RNA, 23 nt, Human
uauuucuugugguuauaacuuaa

SEQ ID NO: 3548548 - RNA, 22 nt, Human
uauuucuuuauauuuauccacu

SEQ ID NO: 3548549 - RNA, 19 nt, Human
uauuugaaacugaauguuu

SEQ ID NO: 3548550 - RNA, 20 nt, Human
uauuugaacaaugaaguuga

SEQ ID NO: 3548551 - RNA, 16 nt, Human
uauuugaaccaauaaa

SEQ ID NO: 3548552 - RNA, 14 nt, Human
uauuugaacuuuuu

SEQ ID NO: 3548553 - RNA, 14 nt, Human
uauuugaaggccag

SEQ ID NO: 3548554 - RNA, 12 nt, Human
uauuugaaucuu

SEQ ID NO: 3548555 - RNA, 20 nt, Human
uauuugaaucuugucucaau

SEQ ID NO: 3548556 - RNA, 14 nt, Human
uauuugaauuaaaa

SEQ ID NO: 3548557 - RNA, 16 nt, Human
uauuugaauuaaaacu

SEQ ID NO: 3548558 - RNA, 21 nt, Human
uauuugaauuaaaacuucuua

SEQ ID NO: 3548559 - RNA, 19 nt, Human
uauuugaauuuuaaaucua

SEQ ID NO: 3548560 - RNA, 19 nt, Human
uauuugagaagcugcucaa

SEQ ID NO: 3548561 - RNA, 15 nt, Human
uauuugagaguucua

SEQ ID NO: 3548562 - RNA, 16 nt, Human
uauuugagaguucuaa

SEQ ID NO: 3548563 - RNA, 19 nt, Human
uauuugagaguucuaaauu

SEQ ID NO: 3548564 - RNA, 16 nt, Human
uauuugauuuauuaac

SEQ ID NO: 3548565 - RNA, 17 nt, Human
uauuugcaacauuuaca

SEQ ID NO: 3548566 - RNA, 16 nt, Human
uauuugcacuguagcc

SEQ ID NO: 3548567 - RNA, 17 nt, Human
uauuugcagucauggag

SEQ ID NO: 3548568 - RNA, 18 nt, Human
uauuugcagucauggaga

SEQ ID NO: 3548569 - RNA, 12 nt, Human
uauuugcauguu

SEQ ID NO: 3548570 - RNA, 18 nt, Human
uauuugcauguuauguuu

SEQ ID NO: 3548571 - RNA, 21 nt, Human
uauuugcuaaucaaagccagg

SEQ ID NO: 3548572 - RNA, 15 nt, Human
uauuugcuaauuaaa

SEQ ID NO: 3548573 - RNA, 17 nt, Human
uauuuugugcucauuua

SEQ ID NO: 3548574 - RNA, 13 nt, Human
uauuuuguguaaa

SEQ ID NO: 3548575 - RNA, 16 nt, Human
uauuuuguguaaaaaa

SEQ ID NO: 3548576 - RNA, 17 nt, Human
uauuuugugugaaauug

SEQ ID NO: 3548577 - RNA, 13 nt, Human
uauuuugugugac

SEQ ID NO: 3548578 - RNA, 22 nt, Human
uauuuugugugaccaacugugu

SEQ ID NO: 3548579 - RNA, 17 nt, Human
uauuuuguguuuaggaa

SEQ ID NO: 3548580 - RNA, 20 nt, Human
uauuuuguguuuaggaacua

SEQ ID NO: 3548581 - RNA, 21 nt, Human
uauuuuguuuugugcagagau

SEQ ID NO: 3548582 - RNA, 15 nt, Human
uauuuuuaaaaagaa

SEQ ID NO: 3548583 - RNA, 19 nt, Human
uauuuuuaaaaagaaaucu

SEQ ID NO: 3548584 - RNA, 15 nt, Human
uauuuuuaaagauag

SEQ ID NO: 3548585 - RNA, 17 nt, Human
uauuuuuaauuaaauaa

SEQ ID NO: 3548586 - RNA, 12 nt, Human
uauuuuuacugc

SEQ ID NO: 3548587 - RNA, 20 nt, Human
uauuuuuagaauaagaauuu

SEQ ID NO: 3548588 - RNA, 23 nt, Human
uauuuuuauauagcuugaaacau

SEQ ID NO: 3548589 - RNA, 20 nt, Human
uauuuuuauaucaugcaaaa

SEQ ID NO: 3548590 - RNA, 16 nt, Human
uauuuuuauauuuccu

SEQ ID NO: 3548591 - RNA, 21 nt, Human
uauuuuuauauuuccuuuaug

SEQ ID NO: 3548592 - RNA, 12 nt, Human
uauuuuuaucua

SEQ ID NO: 3548593 - RNA, 12 nt, Human
uauuuuuaucuu

SEQ ID NO: 3548594 - RNA, 12 nt, Human
uauuuuucacau

SEQ ID NO: 3548595 - RNA, 14 nt, Human
uauuuuucaguucc

SEQ ID NO: 3548596 - RNA, 17 nt, Human
uauuuuucaguuccaag

SEQ ID NO: 3548597 - RNA, 11 nt, Human
uauuuuucaua

SEQ ID NO: 3548598 - RNA, 13 nt, Human
uauuuuucauauu

SEQ ID NO: 3548599 - RNA, 16 nt, Human
uauuuuucuaacuaca

SEQ ID NO: 3548600 - RNA, 15 nt, Human
uauuuuucucuccug

SEQ ID NO: 3548601 - RNA, 14 nt, Human
uauuuuucuguuac

SEQ ID NO: 3548602 - RNA, 14 nt, Human
uauuuuugacagaa

SEQ ID NO: 3548603 - RNA, 19 nt, Human
uauuuuugacagaauaugu

SEQ ID NO: 3548604 - RNA, 18 nt, Human
uauuuuugacauggaaau

SEQ ID NO: 3548605 - RNA, 12 nt, Human
uauuuuugcaug

SEQ ID NO: 3548606 - RNA, 18 nt, Human
uauuuuugguugucaaua

SEQ ID NO: 3548607 - RNA, 12 nt, Human
uauuuuuguaaa

SEQ ID NO: 3548608 - RNA, 13 nt, Human
uauuuuuguaaac

SEQ ID NO: 3548609 - RNA, 16 nt, Human
uauuuuuguaaaguuu

SEQ ID NO: 3548610 - RNA, 20 nt, Human
uauuuuuguaauuuuaaaua

SEQ ID NO: 3548611 - RNA, 17 nt, Human
uauuuuuguagagccag

SEQ ID NO: 3548612 - RNA, 14 nt, Human
uauuuuuguaguga

SEQ ID NO: 3548613 - RNA, 14 nt, Human
uauuuuuguuuguu

SEQ ID NO: 3548614 - RNA, 18 nt, Human
uauuuuuguuuguuuugu

SEQ ID NO: 3548615 - RNA, 15 nt, Human
uauuuuuuaaguauu

SEQ ID NO: 3548616 - RNA, 16 nt, Human
uauuuuuuaauuauug

SEQ ID NO: 3548617 - RNA, 13 nt, Human
uauuuuuuauaca

SEQ ID NO: 3548618 - RNA, 12 nt, Human
uauuuuuuauga

SEQ ID NO: 3548619 - RNA, 13 nt, Human
uauuuuuuauugu

SEQ ID NO: 3548620 - RNA, 17 nt, Human
uauuuuuuauuguuuuc

SEQ ID NO: 3548621 - RNA, 13 nt, Human
uauuuuuucagac

SEQ ID NO: 3548622 - RNA, 11 nt, Human
uauuuuuuccu

SEQ ID NO: 3548623 - RNA, 14 nt, Human
uauuuuuuguauaa

SEQ ID NO: 3548624 - RNA, 23 nt, Human
uauuuuuuuaaaaucacuaacau

SEQ ID NO: 3548625 - RNA, 15 nt, Human
uauuuuuuuaacuuu

SEQ ID NO: 3548626 - RNA, 20 nt, Human
uauuuuuuuaacuuuaccau

SEQ ID NO: 3548627 - RNA, 20 nt, Human
uauuuuuuuaagcuguaaaa

SEQ ID NO: 3548628 - RNA, 16 nt, Human
uauuuuuuuaauuuaa

SEQ ID NO: 3548629 - RNA, 18 nt, Human
uauuuuuuuaauuuaaca

SEQ ID NO: 3548630 - RNA, 15 nt, Human
uauuuuuuuacuaau

SEQ ID NO: 3548631 - RNA, 14 nt, Human
uauuuuuuucuaau

SEQ ID NO: 3548632 - RNA, 22 nt, Human
uauuuuuuucugaauuauuuuc

SEQ ID NO: 3548633 - RNA, 18 nt, Human
uauuuuuuucugauugua

SEQ ID NO: 3548634 - RNA, 17 nt, Human
uauuuuuuucuuuucuu

SEQ ID NO: 3548635 - RNA, 18 nt, Human
uauuuuuuuuaauauuau

SEQ ID NO: 3548636 - RNA, 16 nt, Human
uauuuuuuuuaauugu

SEQ ID NO: 3548637 - RNA, 14 nt, Human
uauuuuuuuucugu

SEQ ID NO: 3548638 - RNA, 16 nt, Human
uauuuuuuuuucuaag

SEQ ID NO: 3548639 - RNA, 16 nt, Human
uauuuuuuuuuucuuc

SEQ ID NO: 3548640 - RNA, 19 nt, Human
uauuuuuuuuuucuucuug

SEQ ID NO: 3548641 - RNA, 21 nt, Human
uauuuuuuuuuucuucuuggg

SEQ ID NO: 3548642 - RNA, 14 nt, Human
ucaaaaaaagaaaa

SEQ ID NO: 3548643 - RNA, 14 nt, Human
ucaaaaaacaaaaa

SEQ ID NO: 3548644 - RNA, 13 nt, Human
ucaaaaaaugagc

SEQ ID NO: 3548645 - RNA, 13 nt, Human
ucaaaaaauugca

SEQ ID NO: 3548646 - RNA, 23 nt, Human
ucaaaaacacaguguuuuuguaa

SEQ ID NO: 3548647 - RNA, 17 nt, Human
ucaaaaacuuuggaguc

SEQ ID NO: 3548648 - RNA, 19 nt, Human
ucaaaaaguguuuauuuuu

SEQ ID NO: 3548649 - RNA, 23 nt, Human
ucaaaaaguguuuauuuuucaua

SEQ ID NO: 3548650 - RNA, 16 nt, Human
ucaaaaauauaacuua

SEQ ID NO: 3548651 - RNA, 18 nt, Human
ucaaaaaucaauaugcag

SEQ ID NO: 3548652 - RNA, 11 nt, Human
ucaaaaaucug

SEQ ID NO: 3548653 - RNA, 13 nt, Human
ucaaaaaucugaa

SEQ ID NO: 3548654 - RNA, 15 nt, Human
ucaaaaaucugaaga

SEQ ID NO: 3548655 - RNA, 18 nt, Human
ucaaaaaucugaagauug

SEQ ID NO: 3548656 - RNA, 23 nt, Human
ucaaaaauuaaaccggaccaucu

SEQ ID NO: 3548657 - RNA, 20 nt, Human
ucaaaaauuaucuauagcua

SEQ ID NO: 3548658 - RNA, 21 nt, Human
ucaaaaauugaagagagauau

SEQ ID NO: 3548659 - RNA, 16 nt, Human
ucaaaacaaaggccua

SEQ ID NO: 3548660 - RNA, 13 nt, Human
ucaaaacacugug

SEQ ID NO: 3548661 - RNA, 14 nt, Human
ucaaaacacuugua

SEQ ID NO: 3548662 - RNA, 14 nt, Human
ucaaaacagauugu

SEQ ID NO: 3548663 - RNA, 19 nt, Human
ucaaaacagauuguuugca

SEQ ID NO: 3548664 - RNA, 12 nt, Human
ucaaaacauugu

SEQ ID NO: 3548665 - RNA, 22 nt, Human
ucaaaaccagguccaaugagcu

SEQ ID NO: 3548666 - RNA, 18 nt, Human
ucaaaacggggcagccaa

SEQ ID NO: 3548667 - RNA, 22 nt, Human
ucaaaacgguuuuacugcagcu

SEQ ID NO: 3548668 - RNA, 17 nt, Human
ucaaaacuugguauuuu

SEQ ID NO: 3548669 - RNA, 19 nt, Human
ucaaaagaaucagaaacag

SEQ ID NO: 3548670 - RNA, 21 nt, Human
ucaaaagacauguuguaaauu

SEQ ID NO: 3548671 - RNA, 22 nt, Human
ucaaaagcuauuuaaagcaucu

SEQ ID NO: 3548672 - RNA, 16 nt, Human
ucaaaagcugggcagg

SEQ ID NO: 3548673 - RNA, 23 nt, Human
ucaaaaggugccugugaggcagg

SEQ ID NO: 3548674 - RNA, 17 nt, Human
ucaaaaguagaacuuug

SEQ ID NO: 3548675 - RNA, 18 nt, Human
ucaaaaguagaacuuugu

SEQ ID NO: 3548676 - RNA, 16 nt, Human
ucaaaagugccucaag

SEQ ID NO: 3548677 - RNA, 21 nt, Human
ucaaaaguuccaagagucuaa

SEQ ID NO: 3548678 - RNA, 18 nt, Human
ucaaaaguuggacuaaau

SEQ ID NO: 3548679 - RNA, 13 nt, Human
ucaaaaguuuguu

SEQ ID NO: 3548680 - RNA, 17 nt, Human
ucaaaauaaagaaguau

SEQ ID NO: 3548681 - RNA, 14 nt, Human
ucaaaauaaauuga

SEQ ID NO: 3548682 - RNA, 16 nt, Human
ucaaaauaaauugaaa

SEQ ID NO: 3548683 - RNA, 19 nt, Human
uuggagcucgugggacagu

SEQ ID NO: 3548684 - RNA, 20 nt, Human
uuggagcuuacauaguuuua

SEQ ID NO: 3548685 - RNA, 15 nt, Human
uuggaggggggagcc

SEQ ID NO: 3548686 - RNA, 19 nt, Human
uuggagggguuuaugcuca

SEQ ID NO: 3548687 - RNA, 23 nt, Human
uuggagggucccaagcugggccc

SEQ ID NO: 3548688 - RNA, 22 nt, Human
uuggagggugggagagcccagc

SEQ ID NO: 3548689 - RNA, 23 nt, Human
uuggaggugcuuaagcagaagca

SEQ ID NO: 3548690 - RNA, 17 nt, Human
uuggaguagaauguagu

SEQ ID NO: 3548691 - RNA, 22 nt, Human
uuggagugaguguggcuccccu

SEQ ID NO: 3548692 - RNA, 18 nt, Human
uuggaguguuauguauuu

SEQ ID NO: 3548693 - RNA, 14 nt, Human
uuggaguucauuca

SEQ ID NO: 3548694 - RNA, 16 nt, Human
uuggaguucauucaua

SEQ ID NO: 3548695 - RNA, 21 nt, Human
uuggauaauaaggaaaaguuu

SEQ ID NO: 3548696 - RNA, 22 nt, Human
uuggauaaugcuguugccucau

SEQ ID NO: 3548697 - RNA, 19 nt, Human
uuggauauuuuuuacuuua

SEQ ID NO: 3548698 - RNA, 15 nt, Human
uuggaucaaguauua

SEQ ID NO: 3548699 - RNA, 19 nt, Human
uuggaucuucaauggcuuu

SEQ ID NO: 3548700 - RNA, 18 nt, Human
uuggaugaguuuugggaa

SEQ ID NO: 3548701 - RNA, 22 nt, Human
uuggaugggacuagagcuuucu

SEQ ID NO: 3548702 - RNA, 16 nt, Human
uuggauuaaauacaua

SEQ ID NO: 3548703 - RNA, 23 nt, Human
uuggauuaaauacauauggaugu

SEQ ID NO: 3548704 - RNA, 15 nt, Human
uuggauuaaauuagu

SEQ ID NO: 3548705 - RNA, 18 nt, Human
uuggauuauucauuuaaa

SEQ ID NO: 3548706 - RNA, 23 nt, Human
uuggauuauucauuuaaaaugau

SEQ ID NO: 3548707 - RNA, 20 nt, Human
uuggauuauuuaauaacauu

SEQ ID NO: 3548708 - RNA, 17 nt, Human
uuggauucugagagcug

SEQ ID NO: 3548709 - RNA, 15 nt, Human
uuggauugacaguaa

SEQ ID NO: 3548710 - RNA, 18 nt, Human
uuggauugacaguaacuu

SEQ ID NO: 3548711 - RNA, 21 nt, Human
uuggauuuccuaauacuguca

SEQ ID NO: 3548712 - RNA, 14 nt, Human
uuggauuugacauu

SEQ ID NO: 3548713 - RNA, 19 nt, Human
uuggauuuggagagaaaua

SEQ ID NO: 3548714 - RNA, 18 nt, Human
uuggauuuguuuaaaagg

SEQ ID NO: 3548715 - RNA, 17 nt, Human
uuggauuuuauguugac

SEQ ID NO: 3548716 - RNA, 18 nt, Human
uuggauuuuauguugaca

SEQ ID NO: 3548717 - RNA, 18 nt, Human
uuggauuuuugucuugug

SEQ ID NO: 3548718 - RNA, 13 nt, Human
ucaauaucuaaua

SEQ ID NO: 3548719 - RNA, 15 nt, Human
ucaauaucuaauaua

SEQ ID NO: 3548720 - RNA, 16 nt, Human
ucaauauuaaauacag

SEQ ID NO: 3548721 - RNA, 21 nt, Human
ucaauauuaaauacagacacu

SEQ ID NO: 3548722 - RNA, 22 nt, Human
ucaauauuaaauacagacacua

SEQ ID NO: 3548723 - RNA, 15 nt, Human
ucaauauucaauaaa

SEQ ID NO: 3548724 - RNA, 17 nt, Human
ucaauauucaauaaagc

SEQ ID NO: 3548725 - RNA, 14 nt, Human
ucaauauuccugaa

SEQ ID NO: 3548726 - RNA, 22 nt, Human
ucaauauuccugaaugaaauau

SEQ ID NO: 3548727 - RNA, 15 nt, Human
ucaauauugaauuuu

SEQ ID NO: 3548728 - RNA, 16 nt, Human
ucaauauugacauuug

SEQ ID NO: 3548729 - RNA, 19 nt, Human
ucaauauugacauuuguag

SEQ ID NO: 3548730 - RNA, 12 nt, Human
ucaauauuuauu

SEQ ID NO: 3548731 - RNA, 20 nt, Human
ucaauauuuauuauuuucac

SEQ ID NO: 3548732 - RNA, 15 nt, Human
ucaauauuucagaua

SEQ ID NO: 3548733 - RNA, 17 nt, Human
ucaauauuuucuuuucc

SEQ ID NO: 3548734 - RNA, 16 nt, Human
ucaauauuuuuauauc

SEQ ID NO: 3548735 - RNA, 22 nt, Human
ucaaucaguauaauucuguacu

SEQ ID NO: 3548736 - RNA, 21 nt, Human
ucaaucagucucagaauguca

SEQ ID NO: 3548737 - RNA, 18 nt, Human
ucaaucauuguacaguuu

SEQ ID NO: 3548738 - RNA, 15 nt, Human
ucaaucauuucucac

SEQ ID NO: 3548739 - RNA, 19 nt, Human
ucaauccagcgguucucaa

SEQ ID NO: 3548740 - RNA, 19 nt, Human
ucaaucccaaaagucacca

SEQ ID NO: 3548741 - RNA, 13 nt, Human
uuguccuccugcu

SEQ ID NO: 3548742 - RNA, 23 nt, Human
uuguccugaugcuuuugucuaau

SEQ ID NO: 3548743 - RNA, 15 nt, Human
uuguccuuucccuuc

SEQ ID NO: 3548744 - RNA, 14 nt, Human
uuguccuuuucaua

SEQ ID NO: 3548745 - RNA, 19 nt, Human
uuguccuuuugcaaagaaa

SEQ ID NO: 3548746 - RNA, 14 nt, Human
uugucgcucaugug

SEQ ID NO: 3548747 - RNA, 17 nt, Human
uugucguaaagauuugg

SEQ ID NO: 3548748 - RNA, 22 nt, Human
uugucguugacuuuagggacuc

SEQ ID NO: 3548749 - RNA, 18 nt, Human
uugucuaaaacaauaaaa

SEQ ID NO: 3548750 - RNA, 19 nt, Human
uugucuaacucagaauuau

SEQ ID NO: 3548751 - RNA, 16 nt, Human
uugucuaagaaacauu

SEQ ID NO: 3548752 - RNA, 18 nt, Human
uugucuaagaaacauugg

SEQ ID NO: 3548753 - RNA, 21 nt, Human
uugucuaagaaauugaauacu

SEQ ID NO: 3548754 - RNA, 20 nt, Human
uugucuacaccauuaugugc

SEQ ID NO: 3548755 - RNA, 15 nt, Human
uugucuagugaaacu

SEQ ID NO: 3548756 - RNA, 18 nt, Human
uugucuauuaccuguuag

SEQ ID NO: 3548757 - RNA, 12 nt, Human
uugucuauuuau

SEQ ID NO: 3548758 - RNA, 16 nt, Human
uugucuauuuuaaaau

SEQ ID NO: 3548759 - RNA, 17 nt, Human
uugucucaaugcucaua

SEQ ID NO: 3548760 - RNA, 16 nt, Human
uugucucagauuuuau

SEQ ID NO: 3548761 - RNA, 19 nt, Human
uugucucccuggcccucaa

SEQ ID NO: 3548762 - RNA, 21 nt, Human
uugucucuccuuuucuuuugu

SEQ ID NO: 3548763 - RNA, 22 nt, Human
uugucucuccuuuucuuuuguu

SEQ ID NO: 3548764 - RNA, 15 nt, Human
uugucucucuucaga

SEQ ID NO: 3548765 - RNA, 19 nt, Human
uugucucucuucagacucu

SEQ ID NO: 3548766 - RNA, 20 nt, Human
uugucucugcaaacugccuu

SEQ ID NO: 3548767 - RNA, 22 nt, Human
uugucucugcaaacugccuucu

SEQ ID NO: 3548768 - RNA, 12 nt, Human
uugucucuguuu

SEQ ID NO: 3548769 - RNA, 15 nt, Human
uugucugaacuugca

SEQ ID NO: 3548770 - RNA, 17 nt, Human
uugucugaagucacugc

SEQ ID NO: 3548771 - RNA, 20 nt, Human
uugucugaagucacugcaca

SEQ ID NO: 3548772 - RNA, 16 nt, Human
uugucugauuucuuag

SEQ ID NO: 3548773 - RNA, 18 nt, Human
uugucugccccaaguuuu

SEQ ID NO: 3548774 - RNA, 20 nt, Human
uugucugccccaaguuuugu

SEQ ID NO: 3548775 - RNA, 21 nt, Human
uugucugccccaaguuuugug

SEQ ID NO: 3548776 - RNA, 17 nt, Human
uugucuguuuguuucaa

SEQ ID NO: 3548777 - RNA, 22 nt, Human
uugucuuaaaaaguggaaaaau

SEQ ID NO: 3548778 - RNA, 17 nt, Human
uugucuuaaauaaaaga

SEQ ID NO: 3548779 - RNA, 12 nt, Human
uugucuuaauau

SEQ ID NO: 3548780 - RNA, 15 nt, Human
uugucuuauauauau

SEQ ID NO: 3548781 - RNA, 17 nt, Human
uugucuucaaacuguga

SEQ ID NO: 3548782 - RNA, 14 nt, Human
uugucuuguucugu

SEQ ID NO: 3548783 - RNA, 14 nt, Human
uugucuuuauauga

SEQ ID NO: 3548784 - RNA, 16 nt, Human
uugucuuuauaugaac

SEQ ID NO: 3548785 - RNA, 12 nt, Human
uugucuuucugg

SEQ ID NO: 3548786 - RNA, 14 nt, Human
uugucuuucugggg

SEQ ID NO: 3548787 - RNA, 20 nt, Human
uugucuuuggacccugaggc

SEQ ID NO: 3548788 - RNA, 18 nt, Human
uugucuuuucaaaauauu

SEQ ID NO: 3548789 - RNA, 16 nt, Human
uugugaaaauaauuga

SEQ ID NO: 3548790 - RNA, 20 nt, Human
uugugaaaggaaagaggcuc

SEQ ID NO: 3548791 - RNA, 17 nt, Human
uugugaaauuuuucaua

SEQ ID NO: 3548792 - RNA, 21 nt, Human
uugugaaauuuuucauauuuu

SEQ ID NO: 3548793 - RNA, 13 nt, Human
uugugaacucauu

SEQ ID NO: 3548794 - RNA, 18 nt, Human
uugugaagacugggaagu

SEQ ID NO: 3548795 - RNA, 18 nt, Human
uugugaagguggaaauaa

SEQ ID NO: 3548796 - RNA, 13 nt, Human
uugugaauaauua

SEQ ID NO: 3548797 - RNA, 21 nt, Human
uugugaauaauuacagugccu

SEQ ID NO: 3548798 - RNA, 21 nt, Human
uugugaaucaagggucaggcc

SEQ ID NO: 3548799 - RNA, 23 nt, Human
uugugaaucaagggucaggccuu

SEQ ID NO: 3548800 - RNA, 22 nt, Human
uugugaaugauucauguuauau

SEQ ID NO: 3548801 - RNA, 22 nt, Human
uugugaaugcagguuuuaucag

SEQ ID NO: 3548802 - RNA, 23 nt, Human
uugugaauuaggcuguaacuacu

SEQ ID NO: 3548803 - RNA, 16 nt, Human
uugugaccaaguuaua

SEQ ID NO: 3548804 - RNA, 16 nt, Human
uugugaccugaaguuc

SEQ ID NO: 3548805 - RNA, 20 nt, Human
uugugaccugaaguucacca

SEQ ID NO: 3548806 - RNA, 20 nt, Human
uugugaccuuaguguuucug

SEQ ID NO: 3548807 - RNA, 20 nt, Human
uugugacuaauuguauaaca

SEQ ID NO: 3548808 - RNA, 23 nt, Human
uugugacuaauuguauaacaggu

SEQ ID NO: 3548809 - RNA, 23 nt, Human
uugugacuagugcugaagcuuau

SEQ ID NO: 3548810 - RNA, 22 nt, Human
uugugacuguauauaaaggaaa

SEQ ID NO: 3548811 - RNA, 15 nt, Human
uugugagagcgaggc

SEQ ID NO: 3548812 - RNA, 18 nt, Human
uugugagccaccacgucc

SEQ ID NO: 3548813 - RNA, 17 nt, Human
uugugaggaagccgcug

SEQ ID NO: 3548814 - RNA, 22 nt, Human
uugugaguuuaguaaggcugug

SEQ ID NO: 3548815 - RNA, 17 nt, Human
uugugauauggagcccu

SEQ ID NO: 3548816 - RNA, 15 nt, Human
uugugaucuugcucu

SEQ ID NO: 3548817 - RNA, 19 nt, Human
uugugauguauauuccuuu

SEQ ID NO: 3548818 - RNA, 20 nt, Human
uugugauguauauuccuuug

SEQ ID NO: 3548819 - RNA, 20 nt, Human
uugugaugucauacagagaa

SEQ ID NO: 3548820 - RNA, 19 nt, Human
uugugauuagacagaacac

SEQ ID NO: 3548821 - RNA, 22 nt, Human
uugugauuauuucacuuuagau

SEQ ID NO: 3548822 - RNA, 15 nt, Human
uugugauuggccugu

SEQ ID NO: 3548823 - RNA, 16 nt, Human
uugugauuggccugua

SEQ ID NO: 3548824 - RNA, 23 nt, Human
uugugauuucuuuaaaagaauga

SEQ ID NO: 3548825 - RNA, 17 nt, Human
uugugauuugacuguuu

SEQ ID NO: 3548826 - RNA, 20 nt, Human
uugugcaauguguauaaaca

SEQ ID NO: 3548827 - RNA, 21 nt, Human
uugugcaauguguauaaacaa

SEQ ID NO: 3548828 - RNA, 16 nt, Human
uugugcacauuuauuu

SEQ ID NO: 3548829 - RNA, 18 nt, Human
uugugcacauuuauuucc

SEQ ID NO: 3548830 - RNA, 15 nt, Human
uugugcagaaaacau

SEQ ID NO: 3548831 - RNA, 16 nt, Human
uugugcagucaucaga

SEQ ID NO: 3548832 - RNA, 15 nt, Human
uugugcauuuguaaa

SEQ ID NO: 3548833 - RNA, 17 nt, Human
uugugccaauauguauu

SEQ ID NO: 3548834 - RNA, 16 nt, Human
uugugccagaaugcuu

SEQ ID NO: 3548835 - RNA, 21 nt, Human
uugugccagaaugcuuuagga

SEQ ID NO: 3548836 - RNA, 21 nt, Human
uugugccagaggaauccuggc

SEQ ID NO: 3548837 - RNA, 22 nt, Human
uugugccauagucacauggccu

SEQ ID NO: 3548838 - RNA, 15 nt, Human
uugugccuggcucag

SEQ ID NO: 3548839 - RNA, 22 nt, Human
uugugcgcuaaacuuuucugau

SEQ ID NO: 3548840 - RNA, 16 nt, Human
uugugcuagaaauuuu

SEQ ID NO: 3548841 - RNA, 14 nt, Human
uugugcuauaguau

SEQ ID NO: 3548842 - RNA, 16 nt, Human
uugugcucagagacac

SEQ ID NO: 3548843 - RNA, 22 nt, Human
uugugcugaucgugcuaaauuu

SEQ ID NO: 3548844 - RNA, 14 nt, Human
uugugcugaugaga

SEQ ID NO: 3548845 - RNA, 18 nt, Human
uugugcuggauggagccc

SEQ ID NO: 3548846 - RNA, 19 nt, Human
uugugcugggguuaucuga

SEQ ID NO: 3548847 - RNA, 16 nt, Human
uugugcuucacaguag

SEQ ID NO: 3548848 - RNA, 21 nt, Human
uugugcuucacaguagagcca

SEQ ID NO: 3548849 - RNA, 11 nt, Human
uugugcuucua

SEQ ID NO: 3548850 - RNA, 12 nt, Human
uugugcuucucc

SEQ ID NO: 3548851 - RNA, 18 nt, Human
uugugcuucuccccagaa

SEQ ID NO: 3548852 - RNA, 19 nt, Human
uugugcuucuccccagaau

SEQ ID NO: 3548853 - RNA, 14 nt, Human
uugugcuuguuuac

SEQ ID NO: 3548854 - RNA, 19 nt, Human
uugugcuuugcucuugucc

SEQ ID NO: 3548855 - RNA, 16 nt, Human
uugugcuuuuccuauu

SEQ ID NO: 3548856 - RNA, 14 nt, Human
uugugcuuuuccug

SEQ ID NO: 3548857 - RNA, 21 nt, Human
uuguggaaaaugaaaauuagg

SEQ ID NO: 3548858 - RNA, 22 nt, Human
uuguggaagcaaaaaucugaaa

SEQ ID NO: 3548859 - RNA, 16 nt, Human
uuguggacacagcucu

SEQ ID NO: 3548860 - RNA, 17 nt, Human
uuguggacacagcucuu

SEQ ID NO: 3548861 - RNA, 16 nt, Human
uuguggacuaaaagau

SEQ ID NO: 3548862 - RNA, 20 nt, Human
ucacaacgugcauugugcuu

SEQ ID NO: 3548863 - RNA, 20 nt, Human
ucacaagaacacacacauau

SEQ ID NO: 3548864 - RNA, 14 nt, Human
ucacaagaagacca

SEQ ID NO: 3548865 - RNA, 13 nt, Human
ucacaagacccaa

SEQ ID NO: 3548866 - RNA, 20 nt, Human
ucacaagcugccucccuguc

SEQ ID NO: 3548867 - RNA, 23 nt, Human
ucacaaggcagcaaggcccgagc

SEQ ID NO: 3548868 - RNA, 22 nt, Human
ucacaaggcauucaaguguaca

SEQ ID NO: 3548869 - RNA, 16 nt, Human
ucacaagugaaaaaca

SEQ ID NO: 3548870 - RNA, 22 nt, Human
ucacaagugaaaaacauccaga

SEQ ID NO: 3548871 - RNA, 20 nt, Human
ucacaauacagauaacauua

SEQ ID NO: 3548872 - RNA, 16 nt, Human
ucacaauagaaacuca

SEQ ID NO: 3548873 - RNA, 22 nt, Human
ucacaaugaaaugcucuccuuu

SEQ ID NO: 3548874 - RNA, 23 nt, Human
ucacaaugaaaugcucuccuuuc

SEQ ID NO: 3548875 - RNA, 15 nt, Human
ucacaauguucuuua

SEQ ID NO: 3548876 - RNA, 14 nt, Human
ucacacaaagcaga

SEQ ID NO: 3548877 - RNA, 20 nt, Human
ucacacagccaggugccuug

SEQ ID NO: 3548878 - RNA, 21 nt, Human
ucacacaggacccccuucccc

SEQ ID NO: 3548879 - RNA, 22 nt, Human
ucacacaggacccccuuccccu

SEQ ID NO: 3548880 - RNA, 12 nt, Human
ucacacaggcau

SEQ ID NO: 3548881 - RNA, 20 nt, Human
ucacacaggcauuuccuggg

SEQ ID NO: 3548882 - RNA, 21 nt, Human
ucacacaggcauuuccugggu

SEQ ID NO: 3548883 - RNA, 21 nt, Human
ucacacaguauuacuucugcu

SEQ ID NO: 3548884 - RNA, 13 nt, Human
ucacacagugagu

SEQ ID NO: 3548885 - RNA, 22 nt, Human
ucacacagugagucgaggacag

SEQ ID NO: 3548886 - RNA, 23 nt, Human
ucacacagugagucgaggacagg

SEQ ID NO: 3548887 - RNA, 22 nt, Human
ucacacauccagacaucaugaa

SEQ ID NO: 3548888 - RNA, 23 nt, Human
ucacacaugagcaucaggccagg

SEQ ID NO: 3548889 - RNA, 15 nt, Human
ucacaccacuagccu

SEQ ID NO: 3548890 - RNA, 12 nt, Human
ucacaccagcca

SEQ ID NO: 3548891 - RNA, 23 nt, Human
ucacaccaggcuugccugcaggc

SEQ ID NO: 3548892 - RNA, 18 nt, Human
ucacaccauaacuaggua

SEQ ID NO: 3548893 - RNA, 22 nt, Human
ucacacccaccguccgcccugc

SEQ ID NO: 3548894 - RNA, 12 nt, Human
ucacaccccacc

SEQ ID NO: 3548895 - RNA, 13 nt, Human
ucacaccccaccu

SEQ ID NO: 3548896 - RNA, 14 nt, Human
ucacaccccaccug

SEQ ID NO: 3548897 - RNA, 17 nt, Human
ucacaccccaccugcgc

SEQ ID NO: 3548898 - RNA, 23 nt, Human
ucacaccccagacgaugucuuca

SEQ ID NO: 3548899 - RNA, 20 nt, Human
ucacacccugcaaggcccac

SEQ ID NO: 3548900 - RNA, 23 nt, Human
ucacacccugcaaggcccacagg

SEQ ID NO: 3548901 - RNA, 15 nt, Human
ucacaccuagcguca

SEQ ID NO: 3548902 - RNA, 12 nt, Human
ucacaccugacu

SEQ ID NO: 3548903 - RNA, 17 nt, Human
ucacaccugacucugaa

SEQ ID NO: 3548904 - RNA, 23 nt, Human
ucacaccugacucugaaaucuga

SEQ ID NO: 3548905 - RNA, 22 nt, Human
uuguuucgcucuuugagaaaua

SEQ ID NO: 3548906 - RNA, 16 nt, Human
uuguuucguggggagg

SEQ ID NO: 3548907 - RNA, 17 nt, Human
uuguuucuaccucccag

SEQ ID NO: 3548908 - RNA, 15 nt, Human
uuguuucuauacaaa

SEQ ID NO: 3548909 - RNA, 17 nt, Human
uuguuucucuguuguaa

SEQ ID NO: 3548910 - RNA, 21 nt, Human
uuguuucugaaaauuccagaa

SEQ ID NO: 3548911 - RNA, 14 nt, Human
uuguuucugaucua

SEQ ID NO: 3548912 - RNA, 16 nt, Human
uuguuucuguuccaaa

SEQ ID NO: 3548913 - RNA, 11 nt, Human
uuguuucuucc

SEQ ID NO: 3548914 - RNA, 12 nt, Human
uuguuucuucca

SEQ ID NO: 3548915 - RNA, 15 nt, Human
uuguuugagaaauua

SEQ ID NO: 3548916 - RNA, 16 nt, Human
uuguuugcuaucuuaa

SEQ ID NO: 3548917 - RNA, 12 nt, Human
uuguuugcugcu

SEQ ID NO: 3548918 - RNA, 13 nt, Human
uuguuugcuuauu

SEQ ID NO: 3548919 - RNA, 21 nt, Human
uuguuuggagacguuuauaaa

SEQ ID NO: 3548920 - RNA, 18 nt, Human
uuguuuggauguaauuua

SEQ ID NO: 3548921 - RNA, 11 nt, Human
uuguuuggauu

SEQ ID NO: 3548922 - RNA, 16 nt, Human
uuguuuggguauccug

SEQ ID NO: 3548923 - RNA, 19 nt, Human
uuguuugguaaauguuucu

SEQ ID NO: 3548924 - RNA, 15 nt, Human
uuguuugguauugua

SEQ ID NO: 3548925 - RNA, 13 nt, Human
uuguuuguaaaua

SEQ ID NO: 3548926 - RNA, 16 nt, Human
uuguuugucucuccuu

SEQ ID NO: 3548927 - RNA, 18 nt, Human
uuguuugucucuccuuuu

SEQ ID NO: 3548928 - RNA, 19 nt, Human
uuguuugucucuccuuuuc

SEQ ID NO: 3548929 - RNA, 12 nt, Human
uuguuugucugu

SEQ ID NO: 3548930 - RNA, 15 nt, Human
uuguuugucuguuug

SEQ ID NO: 3548931 - RNA, 12 nt, Human
uuguuugugcuu

SEQ ID NO: 3548932 - RNA, 14 nt, Human
uuguuuguuucuuu

SEQ ID NO: 3548933 - RNA, 23 nt, Human
uuguuuguuuuguuuuuuaguuc

SEQ ID NO: 3548934 - RNA, 13 nt, Human
uuguuuucagugu

SEQ ID NO: 3548935 - RNA, 14 nt, Human
uuguuuucauuauc

SEQ ID NO: 3548936 - RNA, 15 nt, Human
uuguuuucugacuaa

SEQ ID NO: 3548937 - RNA, 22 nt, Human
uuguuuucuuucuuuaaauguu

SEQ ID NO: 3548938 - RNA, 13 nt, Human
uuguuuugcuucc

SEQ ID NO: 3548939 - RNA, 19 nt, Human
uuguuuugcuuuuucugac

SEQ ID NO: 3548940 - RNA, 17 nt, Human
uuguuuuggauggcuug

SEQ ID NO: 3548941 - RNA, 13 nt, Human
uuguuuuguacag

SEQ ID NO: 3548942 - RNA, 10 nt, Human
uuguuuuguu

SEQ ID NO: 3548943 - RNA, 13 nt, Human
uuguuuuguuuua

SEQ ID NO: 3548944 - RNA, 12 nt, Human
uuguuuuucauu

SEQ ID NO: 3548945 - RNA, 19 nt, Human
uuguuuuucauucagucuu

SEQ ID NO: 3548946 - RNA, 22 nt, Human
uuguuuuuccuuguauuuaaau

SEQ ID NO: 3548947 - RNA, 14 nt, Human
uuguuuuucuuucu

SEQ ID NO: 3548948 - RNA, 15 nt, Human
uuguuuuucuuucua

SEQ ID NO: 3548949 - RNA, 14 nt, Human
uuguuuuuugaagu

SEQ ID NO: 3548950 - RNA, 14 nt, Human
uuguuuuuuugcca

SEQ ID NO: 3548951 - RNA, 18 nt, Human
uuguuuuuuuuuuccacu

SEQ ID NO: 3548952 - RNA, 17 nt, Human
uuuaaaaaaaaaauugg

SEQ ID NO: 3548953 - RNA, 18 nt, Human
uuuaaaaaaaaagucaga

SEQ ID NO: 3548954 - RNA, 15 nt, Human
uuuaaaaaaagaaaa

SEQ ID NO: 3548955 - RNA, 17 nt, Human
uuuaaaaaaauaaaaca

SEQ ID NO: 3548956 - RNA, 21 nt, Human
uuuaaaaaacuaaaaacuaga

SEQ ID NO: 3548957 - RNA, 14 nt, Human
uuuaaaaaacuuuc

SEQ ID NO: 3548958 - RNA, 16 nt, Human
uuuaaaaaacuuucua

SEQ ID NO: 3548959 - RNA, 18 nt, Human
uuuaaaaaacuuucuacu

SEQ ID NO: 3548960 - RNA, 19 nt, Human
uuuaaaaaacuuucuacuc

SEQ ID NO: 3548961 - RNA, 20 nt, Human
uuuaaaaaagcuuaaaacuu

SEQ ID NO: 3548962 - RNA, 14 nt, Human
uuuaaaaaaguuua

SEQ ID NO: 3548963 - RNA, 19 nt, Human
uuuaaaaaauagcagcuuu

SEQ ID NO: 3548964 - RNA, 17 nt, Human
uuuaaaaaauauuuucu

SEQ ID NO: 3548965 - RNA, 19 nt, Human
uuuaaaaaaugaaaauaag

SEQ ID NO: 3548966 - RNA, 13 nt, Human
uuuaaaaaaugua

SEQ ID NO: 3548967 - RNA, 18 nt, Human
uuuaaaaacaaaaggcaa

SEQ ID NO: 3548968 - RNA, 14 nt, Human
uuuaaaaacuauuu

SEQ ID NO: 3548969 - RNA, 17 nt, Human
uuuaaaaagaaaucugg

SEQ ID NO: 3548970 - RNA, 17 nt, Human
uuuaaaaagggaagaaa

SEQ ID NO: 3548971 - RNA, 20 nt, Human
uuuaaaaagggaagaaacug

SEQ ID NO: 3548972 - RNA, 17 nt, Human
uuuaaaaaguauugcca

SEQ ID NO: 3548973 - RNA, 16 nt, Human
uuuaaaaaguguuuaa

SEQ ID NO: 3548974 - RNA, 18 nt, Human
uuuaaaaauaagucaaca

SEQ ID NO: 3548975 - RNA, 20 nt, Human
uuuaaaaauaagucaacagu

SEQ ID NO: 3548976 - RNA, 13 nt, Human
uuuaaaaauagaa

SEQ ID NO: 3548977 - RNA, 17 nt, Human
uuuaaaaauagacacuc

SEQ ID NO: 3548978 - RNA, 11 nt, Human
uuuaaaaauau

SEQ ID NO: 3548979 - RNA, 14 nt, Human
uuuaaaaauauuuu

SEQ ID NO: 3548980 - RNA, 23 nt, Human
uuuaaaaaucaacuuuuuauugc

SEQ ID NO: 3548981 - RNA, 12 nt, Human
uuuaaaaaucau

SEQ ID NO: 3548982 - RNA, 13 nt, Human
uuuaaaaaucaua

SEQ ID NO: 3548983 - RNA, 16 nt, Human
uuuaaaaaucauaaac

SEQ ID NO: 3548984 - RNA, 20 nt, Human
uuuaaaaaucauuguaugga

SEQ ID NO: 3548985 - RNA, 11 nt, Human
uuuaaaaaugg

SEQ ID NO: 3548986 - RNA, 20 nt, Human
uuuaaaaaugguaucaaaau

SEQ ID NO: 3548987 - RNA, 17 nt, Human
uuuaaaaaugucuugcu

SEQ ID NO: 3548988 - RNA, 22 nt, Human
uuuaaaacaagaaaguuucccc

SEQ ID NO: 3548989 - RNA, 16 nt, Human
uuuaaaacacauguuu

SEQ ID NO: 3548990 - RNA, 18 nt, Human
uuuaaaacaccuucuaua

SEQ ID NO: 3548991 - RNA, 15 nt, Human
uuuaaaacagacacu

SEQ ID NO: 3548992 - RNA, 21 nt, Human
uuuaaaacccauuuaaauuuu

SEQ ID NO: 3548993 - RNA, 13 nt, Human
uuuaaaacuacuu

SEQ ID NO: 3548994 - RNA, 15 nt, Human
uuuaaaacuguugga

SEQ ID NO: 3548995 - RNA, 18 nt, Human
uuuaaaagaaugggcagu

SEQ ID NO: 3548996 - RNA, 12 nt, Human
uuuaaaagacac

SEQ ID NO: 3548997 - RNA, 14 nt, Human
uuuaaaagagacaa

SEQ ID NO: 3548998 - RNA, 22 nt, Human
uuuaaaagagagagagagaaaa

SEQ ID NO: 3548999 - RNA, 23 nt, Human
uuuaaaagagagagagagaaaaa

SEQ ID NO: 3549000 - RNA, 13 nt, Human
uuuaaaagauaca

SEQ ID NO: 3549001 - RNA, 13 nt, Human
uuuaaaagaucuu

SEQ ID NO: 3549002 - RNA, 17 nt, Human
uuuaaaagaugcuuuua

SEQ ID NO: 3549003 - RNA, 16 nt, Human
uuuaaaagauucauuu

SEQ ID NO: 3549004 - RNA, 13 nt, Human
uuuaaaagcacga

SEQ ID NO: 3549005 - RNA, 20 nt, Human
uuuaaaaggauuuuuaucuu

SEQ ID NO: 3549006 - RNA, 13 nt, Human
uuuaaaaguaaaa

SEQ ID NO: 3549007 - RNA, 20 nt, Human
uuuaaaaguauauaauaaaa

SEQ ID NO: 3549008 - RNA, 15 nt, Human
aaaaagaaaugacua

SEQ ID NO: 3549009 - RNA, 12 nt, Human
aaaaagaagaag

SEQ ID NO: 3549010 - RNA, 18 nt, Human
aaaaagaagcaaccucag

SEQ ID NO: 3549011 - RNA, 13 nt, Human
aaaaagaauguca

SEQ ID NO: 3549012 - RNA, 13 nt, Human
aaaaagacaaaca

SEQ ID NO: 3549013 - RNA, 19 nt, Human
aaaaagagaaguauuauaa

SEQ ID NO: 3549014 - RNA, 12 nt, Human
aaaaagaggcua

SEQ ID NO: 3549015 - RNA, 13 nt, Human
aaaaagauaaaca

SEQ ID NO: 3549016 - RNA, 22 nt, Human
aaaaagauauauuaaaaauaua

SEQ ID NO: 3549017 - RNA, 11 nt, Human
aaaaagauccc

SEQ ID NO: 3549018 - RNA, 14 nt, Human
aaaaagaucccaaa

SEQ ID NO: 3549019 - RNA, 14 nt, Human
aaaaagauuagcaa

SEQ ID NO: 3549020 - RNA, 13 nt, Human
aaaaagauucuuu

SEQ ID NO: 3549021 - RNA, 13 nt, Human
aaaaagcacaaga

SEQ ID NO: 3549022 - RNA, 14 nt, Human
aaaaagcacaagaa

SEQ ID NO: 3549023 - RNA, 13 nt, Human
aaaaagcagacag

SEQ ID NO: 3549024 - RNA, 13 nt, Human
aaaaagcagcuac

SEQ ID NO: 3549025 - RNA, 17 nt, Human
aaaaagcauguacagug

SEQ ID NO: 3549026 - RNA, 21 nt, Human
aaaaagcauguacaguguucu

SEQ ID NO: 3549027 - RNA, 15 nt, Human
aaaaagcauguguca

SEQ ID NO: 3549028 - RNA, 23 nt, Human
aaaaagccaguuuggguaaaaua

SEQ ID NO: 3549029 - RNA, 17 nt, Human
aaaaagcccaccauuug

SEQ ID NO: 3549030 - RNA, 9 nt, Human
aaaaagcuc

SEQ ID NO: 3549031 - RNA, 12 nt, Human
aaaaagcuuaaa

SEQ ID NO: 3549032 - RNA, 19 nt, Human
aaaaagcuuccaugauucu

SEQ ID NO: 3549033 - RNA, 14 nt, Human
aaaaagcuuuuaug

SEQ ID NO: 3549034 - RNA, 17 nt, Human
aaaaaggaaaaaaagac

SEQ ID NO: 3549035 - RNA, 17 nt, Human
aaaaaggaacugcagca

SEQ ID NO: 3549036 - RNA, 22 nt, Human
aaaaagggcagggcaucuccug

SEQ ID NO: 3549037 - RNA, 15 nt, Human
aaaaaguauuauuuu

SEQ ID NO: 3549038 - RNA, 19 nt, Human
aaaaaguauuauuuuccaa

SEQ ID NO: 3549039 - RNA, 21 nt, Human
aaaaaguauugccaaacauua

SEQ ID NO: 3549040 - RNA, 20 nt, Human
aaaaagucagacugcuggga

SEQ ID NO: 3549041 - RNA, 18 nt, Human
aaaaagucagagacagau

SEQ ID NO: 3549042 - RNA, 16 nt, Human
aaaaaguccaauuuua

SEQ ID NO: 3549043 - RNA, 23 nt, Human
aaaaaguccaauuuuaauuuagu

SEQ ID NO: 3549044 - RNA, 17 nt, Human
aaaaagucucuauuuaa

SEQ ID NO: 3549045 - RNA, 14 nt, Human
aaaaagucuuuuaa

SEQ ID NO: 3549046 - RNA, 15 nt, Human
aaaaagucuuuuaaa

SEQ ID NO: 3549047 - RNA, 23 nt, Human
aaaaaguguuuauuuuucauauu

SEQ ID NO: 3549048 - RNA, 13 nt, Human
aaaaaguuccuuc

SEQ ID NO: 3549049 - RNA, 22 nt, Human
aaaaaguugcagcuguuuuguu

SEQ ID NO: 3549050 - RNA, 23 nt, Human
aaaaaguugcagcuguuuuguug

SEQ ID NO: 3549051 - RNA, 21 nt, Human
aaaaaguuguaugaucugugc

SEQ ID NO: 3549052 - RNA, 14 nt, Human
aaaaaguuguucaa

SEQ ID NO: 3549053 - RNA, 16 nt, Human
aaaaaguuuaaaaugu

SEQ ID NO: 3549054 - RNA, 14 nt, Human
aaaaaguuuccaua

SEQ ID NO: 3549055 - RNA, 19 nt, Human
aaaaauaaccccaaaauga

SEQ ID NO: 3549056 - RNA, 14 nt, Human
aaaaauaagaagaa

SEQ ID NO: 3549057 - RNA, 19 nt, Human
aaaaauaaucuauuucuau

SEQ ID NO: 3549058 - RNA, 19 nt, Human
aaaaauacucuaauucuaa

SEQ ID NO: 3549059 - RNA, 13 nt, Human
aaaaauagaaaca

SEQ ID NO: 3549060 - RNA, 18 nt, Human
aaaaauagaugucuuuua

SEQ ID NO: 3549061 - RNA, 12 nt, Human
aaaaauauacau

SEQ ID NO: 3549062 - RNA, 16 nt, Human
aaaaauauacauguuu

SEQ ID NO: 3549063 - RNA, 11 nt, Human
aaaaauauauu

SEQ ID NO: 3549064 - RNA, 15 nt, Human
aaaaauauauuuaau

SEQ ID NO: 3549065 - RNA, 15 nt, Human
ucaggccauggcucc

SEQ ID NO: 3549066 - RNA, 21 nt, Human
ucaggcccggcagggcgggca

SEQ ID NO: 3549067 - RNA, 13 nt, Human
ucaggcccuggaa

SEQ ID NO: 3549068 - RNA, 22 nt, Human
ucaggccggcagccccagccug

SEQ ID NO: 3549069 - RNA, 18 nt, Human
ucaggccucccucucucu

SEQ ID NO: 3549070 - RNA, 20 nt, Human
ucaggcgauccaccugucuc

SEQ ID NO: 3549071 - RNA, 23 nt, Human
ucaggcguagaucaccagaauaa

SEQ ID NO: 3549072 - RNA, 22 nt, Human
ucaggcuacuauagguccagaa

SEQ ID NO: 3549073 - RNA, 21 nt, Human
uuucuaguguaucaaaaugcu

SEQ ID NO: 3549074 - RNA, 15 nt, Human
uuucuaguuauuuau

SEQ ID NO: 3549075 - RNA, 18 nt, Human
uuucuauaauuuuacaag

SEQ ID NO: 3549076 - RNA, 14 nt, Human
uuucuauacaaaua

SEQ ID NO: 3549077 - RNA, 18 nt, Human
uuucuauagccaaaaaua

SEQ ID NO: 3549078 - RNA, 15 nt, Human
uuucuaugacacaug

SEQ ID NO: 3549079 - RNA, 18 nt, Human
uuucuauguacuaguacu

SEQ ID NO: 3549080 - RNA, 17 nt, Human
uuucuauuaaaagacuc

SEQ ID NO: 3549081 - RNA, 20 nt, Human
uuucuauuaaauaguuauau

SEQ ID NO: 3549082 - RNA, 13 nt, Human
uuucuauuguaca

SEQ ID NO: 3549083 - RNA, 19 nt, Human
uuucuauuucacuggagca

SEQ ID NO: 3549084 - RNA, 15 nt, Human
uuucuauuuuaagac

SEQ ID NO: 3549085 - RNA, 14 nt, Human
uuucuauuuucucu

SEQ ID NO: 3549086 - RNA, 22 nt, Human
uuucucaaaagcauuuaucauu

SEQ ID NO: 3549087 - RNA, 13 nt, Human
uuucucaaaguuu

SEQ ID NO: 3549088 - RNA, 13 nt, Human
uuucucaaaucuu

SEQ ID NO: 3549089 - RNA, 22 nt, Human
uuucucaacaaagcacaguguu

SEQ ID NO: 3549090 - RNA, 19 nt, Human
uuucucacacucuaacugu

SEQ ID NO: 3549091 - RNA, 22 nt, Human
uuucucacacucuaacuguaua

SEQ ID NO: 3549092 - RNA, 15 nt, Human
uuucucagcucccau

SEQ ID NO: 3549093 - RNA, 17 nt, Human
uuucucaguguugguau

SEQ ID NO: 3549094 - RNA, 20 nt, Human
uuucucaguguugguauauu

SEQ ID NO: 3549095 - RNA, 18 nt, Human
uuucucaugaaucugcaa

SEQ ID NO: 3549096 - RNA, 13 nt, Human
uuucucauguuga

SEQ ID NO: 3549097 - RNA, 20 nt, Human
uuucucauuuguuuuucuca

SEQ ID NO: 3549098 - RNA, 21 nt, Human
uuucuccaagagcuacauaau

SEQ ID NO: 3549099 - RNA, 18 nt, Human
uuucuccagccagcaaug

SEQ ID NO: 3549100 - RNA, 18 nt, Human
uuucucccagucauuuaa

SEQ ID NO: 3549101 - RNA, 20 nt, Human
uuucuccccugcccccagga

SEQ ID NO: 3549102 - RNA, 23 nt, Human
uuucuccccugcccccaggacug

SEQ ID NO: 3549103 - RNA, 17 nt, Human
uuucucccuaaacugua

SEQ ID NO: 3549104 - RNA, 20 nt, Human
uuucucccucucacugucug

SEQ ID NO: 3549105 - RNA, 21 nt, Human
uuucucccuggauuuuuacca

SEQ ID NO: 3549106 - RNA, 17 nt, Human
uuucuccguaugcacau

SEQ ID NO: 3549107 - RNA, 21 nt, Human
uuucuccuguuuauucccauc

SEQ ID NO: 3549108 - RNA, 19 nt, Human
uuucuccuuagucuucuca

SEQ ID NO: 3549109 - RNA, 19 nt, Human
uuucuccuuuaauuguaaa

SEQ ID NO: 3549110 - RNA, 22 nt, Human
uuucuccuuuaauuguaaagua

SEQ ID NO: 3549111 - RNA, 16 nt, Human
uuucuccuuuuguguu

SEQ ID NO: 3549112 - RNA, 12 nt, Human
uuucucuaggaa

SEQ ID NO: 3549113 - RNA, 20 nt, Human
uuucucuccagccugacuug

SEQ ID NO: 3549114 - RNA, 14 nt, Human
uuucucucuccagu

SEQ ID NO: 3549115 - RNA, 16 nt, Human
uuucucucuucccuca

SEQ ID NO: 3549116 - RNA, 17 nt, Human
uuucucucuucccucag

SEQ ID NO: 3549117 - RNA, 14 nt, Human
uuucucugcuucag

SEQ ID NO: 3549118 - RNA, 20 nt, Human
uuucucugggguauuugggg

SEQ ID NO: 3549119 - RNA, 16 nt, Human
uuucucuguacuuuuc

SEQ ID NO: 3549120 - RNA, 18 nt, Human
uuucucuguacuuuucau

SEQ ID NO: 3549121 - RNA, 17 nt, Human
uuucucuguguuuguuc

SEQ ID NO: 3549122 - RNA, 14 nt, Human
uuucucuguuguaa

SEQ ID NO: 3549123 - RNA, 17 nt, Human
uuucucuuacugcaaau

SEQ ID NO: 3549124 - RNA, 18 nt, Human
uuucucuugagcuggccu

SEQ ID NO: 3549125 - RNA, 13 nt, Human
uuucucuugggcu

SEQ ID NO: 3549126 - RNA, 12 nt, Human
uuucucuuucuc

SEQ ID NO: 3549127 - RNA, 13 nt, Human
uuucucuuucucu

SEQ ID NO: 3549128 - RNA, 16 nt, Human
uuucucuuucucuccu

SEQ ID NO: 3549129 - RNA, 20 nt, Human
uuucucuuucuuccuuuacu

SEQ ID NO: 3549130 - RNA, 15 nt, Human
uuucucuuugaaaca

SEQ ID NO: 3549131 - RNA, 15 nt, Human
uuucucuuugauuau

SEQ ID NO: 3549132 - RNA, 21 nt, Human
uuucucuuuuccccuuuccug

SEQ ID NO: 3549133 - RNA, 17 nt, Human
uuucucuuuucuaguuu

SEQ ID NO: 3549134 - RNA, 22 nt, Human
uuucugaaaauuccagaaagga

SEQ ID NO: 3549135 - RNA, 19 nt, Human
uuucugaaacuaaugaaag

SEQ ID NO: 3549136 - RNA, 14 nt, Human
uuucugaccaaaga

SEQ ID NO: 3549137 - RNA, 16 nt, Human
uuucugagaagguccu

SEQ ID NO: 3549138 - RNA, 10 nt, Human
uuucugagcg

SEQ ID NO: 3549139 - RNA, 15 nt, Human
uuucugagcugcucu

SEQ ID NO: 3549140 - RNA, 16 nt, Human
uuucugaggagaaaca

SEQ ID NO: 3549141 - RNA, 17 nt, Human
uuucugaggcuuuauga

SEQ ID NO: 3549142 - RNA, 21 nt, Human
uuucugaggugcacugggagg

SEQ ID NO: 3549143 - RNA, 17 nt, Human
uuucugagugccuucug

SEQ ID NO: 3549144 - RNA, 16 nt, Human
uuucugaguuccugca

SEQ ID NO: 3549145 - RNA, 16 nt, Human
uuucugaguuuuacca

SEQ ID NO: 3549146 - RNA, 14 nt, Human
uuucugauuagcuu

SEQ ID NO: 3549147 - RNA, 16 nt, Human
uuucugauuagcuuug

SEQ ID NO: 3549148 - RNA, 22 nt, Human
uuucugauuguaacguugcugu

SEQ ID NO: 3549149 - RNA, 19 nt, Human
uuucugcaaacaaacaccu

SEQ ID NO: 3549150 - RNA, 20 nt, Human
uuucugcaaacaaacaccuu

SEQ ID NO: 3549151 - RNA, 14 nt, Human
uuucugcacuauau

SEQ ID NO: 3549152 - RNA, 17 nt, Human
uuucugcacuauaugca

SEQ ID NO: 3549153 - RNA, 13 nt, Human
uuucugcacugag

SEQ ID NO: 3549154 - RNA, 17 nt, Human
uuucugcacugagcaga

SEQ ID NO: 3549155 - RNA, 14 nt, Human
uuucugcagaaaca

SEQ ID NO: 3549156 - RNA, 17 nt, Human
uuucugcauauguugaa

SEQ ID NO: 3549157 - RNA, 22 nt, Human
uuucugcaugaauaucauacaa

SEQ ID NO: 3549158 - RNA, 18 nt, Human
uuucugcauuuugcuauu

SEQ ID NO: 3549159 - RNA, 12 nt, Human
uuucugcccugg

SEQ ID NO: 3549160 - RNA, 15 nt, Human
uuucugcccuggcug

SEQ ID NO: 3549161 - RNA, 15 nt, Human
uuucugccuuccuug

SEQ ID NO: 3549162 - RNA, 15 nt, Human
uuucugcucagcuuc

SEQ ID NO: 3549163 - RNA, 18 nt, Human
uuucugcuuuaaaaaugu

SEQ ID NO: 3549164 - RNA, 18 nt, Human
uuucuggaauacaugaaa

SEQ ID NO: 3549165 - RNA, 21 nt, Human
uuucuggaauacaugaaauau

SEQ ID NO: 3549166 - RNA, 12 nt, Human
uuucuggcaccg

SEQ ID NO: 3549167 - RNA, 16 nt, Human
uuucuggccugccuuc

SEQ ID NO: 3549168 - RNA, 16 nt, Human
uuucuggcuaugcauu

SEQ ID NO: 3549169 - RNA, 19 nt, Human
uuucuggcuggagccuaga

SEQ ID NO: 3549170 - RNA, 14 nt, Human
uuucuggggccuag

SEQ ID NO: 3549171 - RNA, 16 nt, Human
uuucugggguuuuucu

SEQ ID NO: 3549172 - RNA, 15 nt, Human
uuucuggguccugaa

SEQ ID NO: 3549173 - RNA, 15 nt, Human
uuucugguagauaga

SEQ ID NO: 3549174 - RNA, 19 nt, Human
uuucugguagauagaaaua

SEQ ID NO: 3549175 - RNA, 20 nt, Human
uuucugguggucuguuggca

SEQ ID NO: 3549176 - RNA, 22 nt, Human
uuucugguucuuguguuggcug

SEQ ID NO: 3549177 - RNA, 15 nt, Human
uuucuguaaacucug

SEQ ID NO: 3549178 - RNA, 13 nt, Human
uuucuguaccauu

SEQ ID NO: 3549179 - RNA, 17 nt, Human
uuucuguauauacuuuu

SEQ ID NO: 3549180 - RNA, 17 nt, Human
uuucugucagaugagaa

SEQ ID NO: 3549181 - RNA, 19 nt, Human
uuucugucagaugagaaca

SEQ ID NO: 3549182 - RNA, 13 nt, Human
uuucugucauuca

SEQ ID NO: 3549183 - RNA, 23 nt, Human
uuucuguccuuuuggcacugaga

SEQ ID NO: 3549184 - RNA, 13 nt, Human
uuucugugcccuc

SEQ ID NO: 3549185 - RNA, 20 nt, Human
uuucugugugcaccuuacca

SEQ ID NO: 3549186 - RNA, 15 nt, Human
uuucugugugucagu

SEQ ID NO: 3549187 - RNA, 18 nt, Human
uuucugugugucaguuuu

SEQ ID NO: 3549188 - RNA, 21 nt, Human
uuucugugugucaguuuucau

SEQ ID NO: 3549189 - RNA, 16 nt, Human
uuucuguguguuccug

SEQ ID NO: 3549190 - RNA, 18 nt, Human
uuucuguguguuccuggc

SEQ ID NO: 3549191 - RNA, 9 nt, Human
uuucuguuc

SEQ ID NO: 3549192 - RNA, 22 nt, Human
uuucuguucagcguuuugcaag

SEQ ID NO: 3549193 - RNA, 12 nt, Human
uuucuguuccaa

SEQ ID NO: 3549194 - RNA, 22 nt, Human
uuucuguuccaaauucaguuuc

SEQ ID NO: 3549195 - RNA, 15 nt, Human
uuucuguucugugga

SEQ ID NO: 3549196 - RNA, 17 nt, Human
uuucuguucuguggaaa

SEQ ID NO: 3549197 - RNA, 19 nt, Human
uuucuguucuguggaaagu

SEQ ID NO: 3549198 - RNA, 22 nt, Human
uuucuguucuguggaaagugua

SEQ ID NO: 3549199 - RNA, 14 nt, Human
uuucuguuguaacu

SEQ ID NO: 3549200 - RNA, 17 nt, Human
uuucuguuguaacuuau

SEQ ID NO: 3549201 - RNA, 19 nt, Human
uuucuguuguaacuuaugu

SEQ ID NO: 3549202 - RNA, 13 nt, Human
uuucuguuucuca

SEQ ID NO: 3549203 - RNA, 12 nt, Human
uuucuguuuucu

SEQ ID NO: 3549204 - RNA, 21 nt, Human
uuucuuaaagugccaguauuu

SEQ ID NO: 3549205 - RNA, 18 nt, Human
uuucuuaaauaagaaacu

SEQ ID NO: 3549206 - RNA, 17 nt, Human
uuucuuaaccaguugug

SEQ ID NO: 3549207 - RNA, 14 nt, Human
uuucuuaaccaucu

SEQ ID NO: 3549208 - RNA, 13 nt, Human
uuucuuaacuucu

SEQ ID NO: 3549209 - RNA, 17 nt, Human
uuucuuaacuucuugcu

SEQ ID NO: 3549210 - RNA, 18 nt, Human
uuucuuaacuucuugcuu

SEQ ID NO: 3549211 - RNA, 16 nt, Human
uuucuuaaggugaggc

SEQ ID NO: 3549212 - RNA, 20 nt, Human
uuucuuaauauauagcauuu

SEQ ID NO: 3549213 - RNA, 14 nt, Human
uuucuuaauuugga

SEQ ID NO: 3549214 - RNA, 17 nt, Human
uuucuuacauaauuuuu

SEQ ID NO: 3549215 - RNA, 18 nt, Human
uuucuuacccaauuuccc

SEQ ID NO: 3549216 - RNA, 20 nt, Human
uuucuuagcuuuuuaauugu

SEQ ID NO: 3549217 - RNA, 17 nt, Human
uuucuuauuucauuucu

SEQ ID NO: 3549218 - RNA, 12 nt, Human
uuucuucaaaau

SEQ ID NO: 3549219 - RNA, 22 nt, Human
uuucuucaaaauauaaaaugcc

SEQ ID NO: 3549220 - RNA, 17 nt, Human
uuucuucacugcaacau

SEQ ID NO: 3549221 - RNA, 19 nt, Human
uuucuucacugcaacauga

SEQ ID NO: 3549222 - RNA, 22 nt, Human
uuucuucacugcaacaugauga

SEQ ID NO: 3549223 - RNA, 21 nt, Human
uuucuucacuguugaaaauua

SEQ ID NO: 3549224 - RNA, 20 nt, Human
ucaggcuacugcuucaaucu

SEQ ID NO: 3549225 - RNA, 17 nt, Human
ucaggcuagauguaugu

SEQ ID NO: 3549226 - RNA, 14 nt, Human
ucaggcucugcccu

SEQ ID NO: 3549227 - RNA, 15 nt, Human
ucaggcucugccuca

SEQ ID NO: 3549228 - RNA, 15 nt, Human
ucaggcucuucuccu

SEQ ID NO: 3549229 - RNA, 15 nt, Human
ucaggcugaaaacaa

SEQ ID NO: 3549230 - RNA, 13 nt, Human
ucaggcugccuga

SEQ ID NO: 3549231 - RNA, 15 nt, Human
ucaggcugccugagu

SEQ ID NO: 3549232 - RNA, 13 nt, Human
ucaggcugcuggc

SEQ ID NO: 3549233 - RNA, 21 nt, Human
ucaggcugcuggcgccucugc

SEQ ID NO: 3549234 - RNA, 24 nt, Human
ucaggcugcuggggccucagacga

SEQ ID NO: 3549235 - RNA, 15 nt, Human
ucaggcugcuuggga

SEQ ID NO: 3549236 - RNA, 14 nt, Human
ucaggcugguggga

SEQ ID NO: 3549237 - RNA, 16 nt, Human
ucaggcuggugggagg

SEQ ID NO: 3549238 - RNA, 16 nt, Human
ucaggcuugaaaugca

SEQ ID NO: 3549239 - RNA, 16 nt, Human
ucagggaaaagcagcu

SEQ ID NO: 3549240 - RNA, 18 nt, Human
ucagggaaaagcagcucu

SEQ ID NO: 3549241 - RNA, 23 nt, Human
ucagggaaaagcagcucuccccu

SEQ ID NO: 3549242 - RNA, 21 nt, Human
ucagggaaacuaagauucuuu

SEQ ID NO: 3549243 - RNA, 22 nt, Human
ucagggaaagcauuuaaagggu

SEQ ID NO: 3549244 - RNA, 16 nt, Human
ucagggaaaggccagu

SEQ ID NO: 3549245 - RNA, 20 nt, Human
ucagggaagauaaguuggaa

SEQ ID NO: 3549246 - RNA, 20 nt, Human
ucagggaagcccagcuccag

SEQ ID NO: 3549247 - RNA, 19 nt, Human
ucagggaaggaggagccug

SEQ ID NO: 3549248 - RNA, 22 nt, Human
ucagggaaggaggagccugucc

SEQ ID NO: 3549249 - RNA, 22 nt, Human
ucagggaauuucaggaacuaga

SEQ ID NO: 3549250 - RNA, 21 nt, Human
ucagggacagagacaccugca

SEQ ID NO: 3549251 - RNA, 23 nt, Human
ucagggacagagacaccugcacc

SEQ ID NO: 3549252 - RNA, 23 nt, Human
ucagggaccaaggaccccucacc

SEQ ID NO: 3549253 - RNA, 13 nt, Human
ucagggaccacag

SEQ ID NO: 3549254 - RNA, 14 nt, Human
ucagggaccacagc

SEQ ID NO: 3549255 - RNA, 15 nt, Human
ucagggaccacagca

SEQ ID NO: 3549256 - RNA, 17 nt, Human
ucagggaccaccagagg

SEQ ID NO: 3549257 - RNA, 14 nt, Human
ucagggaccccugc

SEQ ID NO: 3549258 - RNA, 16 nt, Human
ucagggaccccugccc

SEQ ID NO: 3549259 - RNA, 19 nt, Human
ucagggaggcccugugccc

SEQ ID NO: 3549260 - RNA, 15 nt, Human
ucagggaggucauuu

SEQ ID NO: 3549261 - RNA, 19 nt, Human
ucagggagugcuggcucac

SEQ ID NO: 3549262 - RNA, 21 nt, Human
ucagggauggccguuggccac

SEQ ID NO: 3549263 - RNA, 15 nt, Human
ucagggcaaagccag

SEQ ID NO: 3549264 - RNA, 20 nt, Human
ucagggcaaagccagguccc

SEQ ID NO: 3549265 - RNA, 22 nt, Human
ucagggcacugcugcugccuuu

SEQ ID NO: 3549266 - RNA, 17 nt, Human
ucagggccaugccugcc

SEQ ID NO: 3549267 - RNA, 14 nt, Human
ucagggccaugcug

SEQ ID NO: 3549268 - RNA, 12 nt, Human
ucagggcccaga

SEQ ID NO: 3549269 - RNA, 19 nt, Human
ucagggcccagaggcugag

SEQ ID NO: 3549270 - RNA, 14 nt, Human
ucagggccccagca

SEQ ID NO: 3549271 - RNA, 16 nt, Human
ucagggccccagcacu

SEQ ID NO: 3549272 - RNA, 23 nt, Human
ucagggccccagcacuaaagcag

SEQ ID NO: 3549273 - RNA, 16 nt, Human
ucagggccuggcucag

SEQ ID NO: 3549274 - RNA, 18 nt, Human
ucagggccuggggccuga

SEQ ID NO: 3549275 - RNA, 22 nt, Human
ucagggccuggggccugagaga

SEQ ID NO: 3549276 - RNA, 15 nt, Human
ucagggccugguuga

SEQ ID NO: 3549277 - RNA, 14 nt, Human
ucagggcucccagg

SEQ ID NO: 3549278 - RNA, 14 nt, Human
ucagggcuccugcc

SEQ ID NO: 3549279 - RNA, 22 nt, Human
ucagggcugacacguccacccc

SEQ ID NO: 3549280 - RNA, 16 nt, Human
ucagggcuucuaguuu

SEQ ID NO: 3549281 - RNA, 17 nt, Human
ucaggggaaaacuguua

SEQ ID NO: 3549282 - RNA, 16 nt, Human
ucaggggagucccguc

SEQ ID NO: 3549283 - RNA, 14 nt, Human
ucaggggccagagg

SEQ ID NO: 3549284 - RNA, 14 nt, Human
ucaggggcugcccg

SEQ ID NO: 3549285 - RNA, 21 nt, Human
ucaggggcugcccgcucccag

SEQ ID NO: 3549286 - RNA, 23 nt, Human
ucaggggucgucaccaccucucc

SEQ ID NO: 3549287 - RNA, 14 nt, Human
ucaggggugacaca

SEQ ID NO: 3549288 - RNA, 12 nt, Human
ucaggggugugc

SEQ ID NO: 3549289 - RNA, 15 nt, Human
ucagggucauagcau

SEQ ID NO: 3549290 - RNA, 17 nt, Human
ucagggucucugcugcc

SEQ ID NO: 3549291 - RNA, 23 nt, Human
ucaggguggucucuucuuggggc

SEQ ID NO: 3549292 - RNA, 16 nt, Human
ucagggugucccagac

SEQ ID NO: 3549293 - RNA, 15 nt, Human
ucagguaauacaaac

SEQ ID NO: 3549294 - RNA, 21 nt, Human
ucagguaaucgaccugccucg

SEQ ID NO: 3549295 - RNA, 14 nt, Human
ucagguacuuguaa

SEQ ID NO: 3549296 - RNA, 13 nt, Human
ucagguagcugcc

SEQ ID NO: 3549297 - RNA, 15 nt, Human
ucagguauaccucac

SEQ ID NO: 3549298 - RNA, 17 nt, Human
ucagguauaccucacuu

SEQ ID NO: 3549299 - RNA, 16 nt, Human
ucagguauguugccuu

SEQ ID NO: 3549300 - RNA, 17 nt, Human
ucagguauuaagaaaau

SEQ ID NO: 3549301 - RNA, 18 nt, Human
ucaggucacauaaaacuu

SEQ ID NO: 3549302 - RNA, 16 nt, Human
ucaggucaggaguucg

SEQ ID NO: 3549303 - RNA, 14 nt, Human
ucagguccugcuca

SEQ ID NO: 3549304 - RNA, 13 nt, Human
ucaggugaaaaug

SEQ ID NO: 3549305 - RNA, 16 nt, Human
ucaggugagaagcaga

SEQ ID NO: 3549306 - RNA, 15 nt, Human
ucaggugcagaggaa

SEQ ID NO: 3549307 - RNA, 23 nt, Human
ucaggugccucaagagaaggcaa

SEQ ID NO: 3549308 - RNA, 13 nt, Human
ucaggugcugcca

SEQ ID NO: 3549309 - RNA, 15 nt, Human
ucaggugcugccauc

SEQ ID NO: 3549310 - RNA, 18 nt, Human
ucaggugcugccauccag

SEQ ID NO: 3549311 - RNA, 23 nt, Human
ucaggugcuggggccugguuccc

SEQ ID NO: 3549312 - RNA, 13 nt, Human
ucaggugcugucc

SEQ ID NO: 3549313 - RNA, 13 nt, Human
ucagguggccaug

SEQ ID NO: 3549314 - RNA, 17 nt, Human
ucaggugggcgugguca

SEQ ID NO: 3549315 - RNA, 14 nt, Human
ucagguggggcagc

SEQ ID NO: 3549316 - RNA, 17 nt, Human
ucagguggggcagcuug

SEQ ID NO: 3549317 - RNA, 17 nt, Human
ucagguggggucacucu

SEQ ID NO: 3549318 - RNA, 22 nt, Human
ucagguggggucacucuggcag

SEQ ID NO: 3549319 - RNA, 22 nt, Human
ucaggugucccugcacuugcag

SEQ ID NO: 3549320 - RNA, 23 nt, Human
ucagguuaggcaguauaaagaau

SEQ ID NO: 3549321 - RNA, 15 nt, Human
ucagguuauacuccu

SEQ ID NO: 3549322 - RNA, 18 nt, Human
ucagguuaucgaaauaac

SEQ ID NO: 3549323 - RNA, 19 nt, Human
ucagguuaucgaaauaaca

SEQ ID NO: 3549324 - RNA, 20 nt, Human
ucagguuaucgaaauaacaa

SEQ ID NO: 3549325 - RNA, 21 nt, Human
ucagguuaucgaaauaacaau

SEQ ID NO: 3549326 - RNA, 14 nt, Human
ucagguuccauccc

SEQ ID NO: 3549327 - RNA, 17 nt, Human
ucagguugacaggaggu

SEQ ID NO: 3549328 - RNA, 19 nt, Human
ucagguugcugguugcugu

SEQ ID NO: 3549329 - RNA, 20 nt, Human
ucagguugcugguugcugug

SEQ ID NO: 3549330 - RNA, 23 nt, Human
ucagguugcugguugcugugugg

SEQ ID NO: 3549331 - RNA, 20 nt, Human
ucagguuguaguaaagaaau

SEQ ID NO: 3549332 - RNA, 19 nt, Human
ucagguuuaacauuugccu

SEQ ID NO: 3549333 - RNA, 23 nt, Human
ucagguuuaacauuugccuugca

SEQ ID NO: 3549334 - RNA, 18 nt, Human
ucagguuugccugagggc

SEQ ID NO: 3549335 - RNA, 15 nt, Human
ucaguaaacacugug

SEQ ID NO: 3549336 - RNA, 18 nt, Human
ucaguaaauaacuggaaa

SEQ ID NO: 3549337 - RNA, 17 nt, Human
ucaguaagaaaaagaag

SEQ ID NO: 3549338 - RNA, 19 nt, Human
ucaguaagaaaaagaagaa

SEQ ID NO: 3549339 - RNA, 13 nt, Human
ucaguaagccgug

SEQ ID NO: 3549340 - RNA, 17 nt, Human
ucaguaaguaucuggag

SEQ ID NO: 3549341 - RNA, 13 nt, Human
ucaguaauaacuc

SEQ ID NO: 3549342 - RNA, 14 nt, Human
ucaguaauauuuau

SEQ ID NO: 3549343 - RNA, 18 nt, Human
ucaguaauuuguuuaaaa

SEQ ID NO: 3549344 - RNA, 16 nt, Human
ucaguaccuggaggag

SEQ ID NO: 3549345 - RNA, 15 nt, Human
ucaguacuuguuucu

SEQ ID NO: 3549346 - RNA, 14 nt, Human
ucaguacuuuuuua

SEQ ID NO: 3549347 - RNA, 23 nt, Human
ucaguagaaacucuacauaauuu

SEQ ID NO: 3549348 - RNA, 17 nt, Human
ucaguagauugcagaaa

SEQ ID NO: 3549349 - RNA, 17 nt, Human
ucaguagcuuaagaaaa

SEQ ID NO: 3549350 - RNA, 19 nt, Human
ucaguagcuuaagaaaaaa

SEQ ID NO: 3549351 - RNA, 13 nt, Human
ucaguaggcuaau

SEQ ID NO: 3549352 - RNA, 13 nt, Human
ucaguagucagac

SEQ ID NO: 3549353 - RNA, 22 nt, Human
ucaguaguuugcauuucagaaa

SEQ ID NO: 3549354 - RNA, 15 nt, Human
ucaguauaauuuuuu

SEQ ID NO: 3549355 - RNA, 20 nt, Human
ucaguauccaugcucuugac

SEQ ID NO: 3549356 - RNA, 20 nt, Human
ucaguaucuguaucucucuc

SEQ ID NO: 3549357 - RNA, 13 nt, Human
ucaguaugaauua

SEQ ID NO: 3549358 - RNA, 16 nt, Human
ucaguauguggaagug

SEQ ID NO: 3549359 - RNA, 18 nt, Human
ucaguauguugucaaaga

SEQ ID NO: 3549360 - RNA, 20 nt, Human
ucaguauguuuuacacugua

SEQ ID NO: 3549361 - RNA, 22 nt, Human
ucaguauuaaaggggggagggg

SEQ ID NO: 3549362 - RNA, 20 nt, Human
ucaguauuagaugcacuuaa

SEQ ID NO: 3549363 - RNA, 15 nt, Human
ucaguauuauaugua

SEQ ID NO: 3549364 - RNA, 15 nt, Human
ucaguauugaagcau

SEQ ID NO: 3549365 - RNA, 16 nt, Human
ucaguauugaagcauu

SEQ ID NO: 3549366 - RNA, 17 nt, Human
ucaguauugaagcauuu

SEQ ID NO: 3549367 - RNA, 22 nt, Human
ucaguauugaagcauuuuauaa

SEQ ID NO: 3549368 - RNA, 23 nt, Human
ucaguauugaagcauuuuauaaa

SEQ ID NO: 3549369 - RNA, 15 nt, Human
ucaguauuguuuugg

SEQ ID NO: 3549370 - RNA, 22 nt, Human
ucaguauuguuuugguuugcua

SEQ ID NO: 3549371 - RNA, 19 nt, Human
ucaguauuuuggagaaauu

SEQ ID NO: 3549372 - RNA, 15 nt, Human
ucagucaaaacuuua

SEQ ID NO: 3549373 - RNA, 16 nt, Human
ucagucaaaacuuuaa

SEQ ID NO: 3549374 - RNA, 15 nt, Human
uuucuucauccaacu

SEQ ID NO: 3549375 - RNA, 23 nt, Human
uuucuuccuaccaagucaaacuu

SEQ ID NO: 3549376 - RNA, 13 nt, Human
uuucuuccucugc

SEQ ID NO: 3549377 - RNA, 14 nt, Human
uuucuuccucugcu

SEQ ID NO: 3549378 - RNA, 17 nt, Human
uuucuucuauugccucu

SEQ ID NO: 3549379 - RNA, 19 nt, Human
uuucuucuauugccucuga

SEQ ID NO: 3549380 - RNA, 12 nt, Human
uuucuucuuccc

SEQ ID NO: 3549381 - RNA, 14 nt, Human
uuucuugauaauuu

SEQ ID NO: 3549382 - RNA, 12 nt, Human
uuucuugccucu

SEQ ID NO: 3549383 - RNA, 18 nt, Human
uuucuugccucugucccc

SEQ ID NO: 3549384 - RNA, 21 nt, Human
uuucuugccucuguccccuuc

SEQ ID NO: 3549385 - RNA, 18 nt, Human
uuucuugcucccugacug

SEQ ID NO: 3549386 - RNA, 14 nt, Human
uuucuugcuuguac

SEQ ID NO: 3549387 - RNA, 22 nt, Human
uuucuugcuuguaccucuggcu

SEQ ID NO: 3549388 - RNA, 23 nt, Human
uuucuuggacacuuaauucuguu

SEQ ID NO: 3549389 - RNA, 19 nt, Human
uuucuugguucauaaauga

SEQ ID NO: 3549390 - RNA, 23 nt, Human
uuucuugguucauaaaugaauuu

SEQ ID NO: 3549391 - RNA, 13 nt, Human
uuucuugucuaua

SEQ ID NO: 3549392 - RNA, 23 nt, Human
uuucuuguuuaucagcaguuguu

SEQ ID NO: 3549393 - RNA, 13 nt, Human
uuucuuuaaaaga

SEQ ID NO: 3549394 - RNA, 20 nt, Human
uuucuuuaagauaauaguuu

SEQ ID NO: 3549395 - RNA, 15 nt, Human
uuucuuuagagaacu

SEQ ID NO: 3549396 - RNA, 20 nt, Human
uuucuuuagagcauugccau

SEQ ID NO: 3549397 - RNA, 14 nt, Human
uuucuuucaaaauu

SEQ ID NO: 3549398 - RNA, 19 nt, Human
uuucuuucaacuugcaucc

SEQ ID NO: 3549399 - RNA, 18 nt, Human
uuucuuuccuccuuuccu

SEQ ID NO: 3549400 - RNA, 13 nt, Human
uuucuuucuagug

SEQ ID NO: 3549401 - RNA, 11 nt, Human
uuucuuugaaa

SEQ ID NO: 3549402 - RNA, 20 nt, Human
uuucuuugaaaaaaaauaaa

SEQ ID NO: 3549403 - RNA, 21 nt, Human
uuucuuugaaaaaaaauaaau

SEQ ID NO: 3549404 - RNA, 14 nt, Human
uuucuuugaauaaa

SEQ ID NO: 3549405 - RNA, 16 nt, Human
uuucuuugaaugcuuu

SEQ ID NO: 3549406 - RNA, 17 nt, Human
uuucuuugaauuuucau

SEQ ID NO: 3549407 - RNA, 16 nt, Human
uuucuuuggugccuuu

SEQ ID NO: 3549408 - RNA, 17 nt, Human
uuucuuuggugccuuuc

SEQ ID NO: 3549409 - RNA, 16 nt, Human
uuucuuuguuaucaaa

SEQ ID NO: 3549410 - RNA, 19 nt, Human
uuucuuuguuucuuucuuu

SEQ ID NO: 3549411 - RNA, 14 nt, Human
uuucuuuucacaua

SEQ ID NO: 3549412 - RNA, 21 nt, Human
uuucuuuucuacccuagccau

SEQ ID NO: 3549413 - RNA, 13 nt, Human
uuucuuuucuuug

SEQ ID NO: 3549414 - RNA, 22 nt, Human
uuucuuuugcccuucacagugu

SEQ ID NO: 3549415 - RNA, 14 nt, Human
uuucuuuuguuacu

SEQ ID NO: 3549416 - RNA, 16 nt, Human
uuucuuuuguuacugu

SEQ ID NO: 3549417 - RNA, 17 nt, Human
uuucuuuuguuacuguu

SEQ ID NO: 3549418 - RNA, 20 nt, Human
uuucuuuuguuuuuugaagu

SEQ ID NO: 3549419 - RNA, 23 nt, Human
uuucuuuuuacccauuuguucau

SEQ ID NO: 3549420 - RNA, 14 nt, Human
uuucuuuuucuucu

SEQ ID NO: 3549421 - RNA, 17 nt, Human
uuucuuuuuuuuuaagu

SEQ ID NO: 3549422 - RNA, 21 nt, Human
uuugaaaaaagcucauuucau

SEQ ID NO: 3549423 - RNA, 20 nt, Human
uuugaaaaagaaaacacuua

SEQ ID NO: 3549424 - RNA, 20 nt, Human
uuugaaaaagcgaaaaaauc

SEQ ID NO: 3549425 - RNA, 23 nt, Human
uuugaaaagcaauauuguauauu

SEQ ID NO: 3549426 - RNA, 13 nt, Human
uuugaaaagcaga

SEQ ID NO: 3549427 - RNA, 13 nt, Human
uuugaaaagcuuc

SEQ ID NO: 3549428 - RNA, 16 nt, Human
uuugaaaagcuucuua

SEQ ID NO: 3549429 - RNA, 11 nt, Human
uuugaaaagua

SEQ ID NO: 3549430 - RNA, 17 nt, Human
uuugaaaaguaauauuu

SEQ ID NO: 3549431 - RNA, 22 nt, Human
uuugaaaaguaauauuuauuaa

SEQ ID NO: 3549432 - RNA, 11 nt, Human
uuugaaaauag

SEQ ID NO: 3549433 - RNA, 24 nt, Human
uuugaaacaacuuucucuuguaaa

SEQ ID NO: 3549434 - RNA, 12 nt, Human
uuugaaacauug

SEQ ID NO: 3549435 - RNA, 20 nt, Human
uuugaaagccccagaaauca

SEQ ID NO: 3549436 - RNA, 18 nt, Human
uuugaaagugccuuugca

SEQ ID NO: 3549437 - RNA, 12 nt, Human
uuugaaauaagc

SEQ ID NO: 3549438 - RNA, 15 nt, Human
uuugaaauaccucau

SEQ ID NO: 3549439 - RNA, 20 nt, Human
uuugaaauaccucauguuua

SEQ ID NO: 3549440 - RNA, 19 nt, Human
uuugaaauagucuguguga

SEQ ID NO: 3549441 - RNA, 22 nt, Human
uuugaaauauauggucuaaugu

SEQ ID NO: 3549442 - RNA, 15 nt, Human
uuugaaaucaguaaa

SEQ ID NO: 3549443 - RNA, 14 nt, Human
uuugaaaugaaauu

SEQ ID NO: 3549444 - RNA, 16 nt, Human
uuugaaaugaaauuua

SEQ ID NO: 3549445 - RNA, 12 nt, Human
uuugaaaugcug

SEQ ID NO: 3549446 - RNA, 20 nt, Human
uuugaaaugcugaaaauugc

SEQ ID NO: 3549447 - RNA, 13 nt, Human
uuugaaauggaaa

SEQ ID NO: 3549448 - RNA, 18 nt, Human
uuugaaauuaaccucuca

SEQ ID NO: 3549449 - RNA, 16 nt, Human
uuugaaauuauguaaa

SEQ ID NO: 3549450 - RNA, 20 nt, Human
uuugaaauucugaauuugca

SEQ ID NO: 3549451 - RNA, 22 nt, Human
uuugaaauucugaauuugcaaa

SEQ ID NO: 3549452 - RNA, 22 nt, Human
uuugaaauuguuccuuggagaa

SEQ ID NO: 3549453 - RNA, 23 nt, Human
uuugaacacuggcuaaagauaau

SEQ ID NO: 3549454 - RNA, 17 nt, Human
uuugaacuaagaaacuu

SEQ ID NO: 3549455 - RNA, 19 nt, Human
uuugaacuaagaaacuuuu

SEQ ID NO: 3549456 - RNA, 16 nt, Human
uuugaacucagaucug

SEQ ID NO: 3549457 - RNA, 21 nt, Human
uuugaacucagaucugucuga

SEQ ID NO: 3549458 - RNA, 17 nt, Human
uuugaacugauaaagau

SEQ ID NO: 3549459 - RNA, 21 nt, Human
uuugaagaagguggaccuuuu

SEQ ID NO: 3549460 - RNA, 23 nt, Human
uuugaagacccgcuacaaaacgc

SEQ ID NO: 3549461 - RNA, 23 nt, Human
uuugaagacuucaaaauauugag

SEQ ID NO: 3549462 - RNA, 15 nt, Human
uuugaagaggaaaau

SEQ ID NO: 3549463 - RNA, 22 nt, Human
uuugaagaugccgcauuuggau

SEQ ID NO: 3549464 - RNA, 16 nt, Human
uuugaagauucuaugu

SEQ ID NO: 3549465 - RNA, 16 nt, Human
uuugaagcaguugugu

SEQ ID NO: 3549466 - RNA, 15 nt, Human
uuugaagccugcccu

SEQ ID NO: 3549467 - RNA, 23 nt, Human
uuugaagcuaauuauuuuaauua

SEQ ID NO: 3549468 - RNA, 21 nt, Human
uuugaaggaauacaauauaua

SEQ ID NO: 3549469 - RNA, 19 nt, Human
uuugaaggaggugagggau

SEQ ID NO: 3549470 - RNA, 14 nt, Human
uuugaagucuugua

SEQ ID NO: 3549471 - RNA, 20 nt, Human
uuugaagugcuguuuauuaa

SEQ ID NO: 3549472 - RNA, 11 nt, Human
uuugaagugua

SEQ ID NO: 3549473 - RNA, 20 nt, Human
uuugaaguguaccuguguac

SEQ ID NO: 3549474 - RNA, 23 nt, Human
uuugaaguuagcuuuaacuuaaa

SEQ ID NO: 3549475 - RNA, 15 nt, Human
uuugaaguuuacauu

SEQ ID NO: 3549476 - RNA, 16 nt, Human
uuugaaguuuacauuu

SEQ ID NO: 3549477 - RNA, 19 nt, Human
uuugaaguuuacauuuuua

SEQ ID NO: 3549478 - RNA, 16 nt, Human
uuugaauaaagaauac

SEQ ID NO: 3549479 - RNA, 15 nt, Human
uuugaauaaaugugu

SEQ ID NO: 3549480 - RNA, 19 nt, Human
uuugaaucaauaauauauu

SEQ ID NO: 3549481 - RNA, 12 nt, Human
uuugaaucuugu

SEQ ID NO: 3549482 - RNA, 16 nt, Human
uuugaaucuugucuca

SEQ ID NO: 3549483 - RNA, 18 nt, Human
uuugaaucuugucucaau

SEQ ID NO: 3549484 - RNA, 19 nt, Human
uuugaaucuuuaauuaaaa

SEQ ID NO: 3549485 - RNA, 13 nt, Human
uuugaaugaaaaa

SEQ ID NO: 3549486 - RNA, 18 nt, Human
uuugaaugcugcaaguua

SEQ ID NO: 3549487 - RNA, 11 nt, Human
uuugaauguua

SEQ ID NO: 3549488 - RNA, 12 nt, Human
uuugaauguuaa

SEQ ID NO: 3549489 - RNA, 13 nt, Human
uuugaauguuaaa

SEQ ID NO: 3549490 - RNA, 18 nt, Human
uuugaauguuaaauaaau

SEQ ID NO: 3549491 - RNA, 19 nt, Human
uuugaauguuaauuuuuug

SEQ ID NO: 3549492 - RNA, 20 nt, Human
uuugaauguuauuuguuauu

SEQ ID NO: 3549493 - RNA, 13 nt, Human
uuugaauuaaaac

SEQ ID NO: 3549494 - RNA, 15 nt, Human
uuugaauuaaaacuu

SEQ ID NO: 3549495 - RNA, 14 nt, Human
uuugaauuguuaca

SEQ ID NO: 3549496 - RNA, 15 nt, Human
uuugaauuguuacau

SEQ ID NO: 3549497 - RNA, 17 nt, Human
uuugaauuuuaaaucua

SEQ ID NO: 3549498 - RNA, 23 nt, Human
uuugaauuuucauuuuacaguua

SEQ ID NO: 3549499 - RNA, 23 nt, Human
uuugacaagcuggcuuacacugg

SEQ ID NO: 3549500 - RNA, 17 nt, Human
uuugacacuauaucugu

SEQ ID NO: 3549501 - RNA, 18 nt, Human
uuugacacuauaucugua

SEQ ID NO: 3549502 - RNA, 22 nt, Human
uuugacacugaaaguuuuguaa

SEQ ID NO: 3549503 - RNA, 19 nt, Human
uuugacagcgcacagcugc

SEQ ID NO: 3549504 - RNA, 13 nt, Human
uuugacaguguuu

SEQ ID NO: 3549505 - RNA, 19 nt, Human
uuugacaucagccagcugc

SEQ ID NO: 3549506 - RNA, 20 nt, Human
uuugacauugcguuugaccu

SEQ ID NO: 3549507 - RNA, 22 nt, Human
uuugacauuguauguaucuauu

SEQ ID NO: 3549508 - RNA, 23 nt, Human
uuugaccuguugggagugaggau

SEQ ID NO: 3549509 - RNA, 19 nt, Human
uuugacgggaaacaaaacu

SEQ ID NO: 3549510 - RNA, 17 nt, Human
uuugacuaauuuuacau

SEQ ID NO: 3549511 - RNA, 21 nt, Human
uuugacuaauuuuacauguuu

SEQ ID NO: 3549512 - RNA, 20 nt, Human
uuugacucuggcaaagcuuu

SEQ ID NO: 3549513 - RNA, 12 nt, Human
uuugacucuuuu

SEQ ID NO: 3549514 - RNA, 16 nt, Human
uuugacuguuuuuacc

SEQ ID NO: 3549515 - RNA, 15 nt, Human
uuugacuuuaauuua

SEQ ID NO: 3549516 - RNA, 14 nt, Human
uuugacuuucauug

SEQ ID NO: 3549517 - RNA, 18 nt, Human
uuugacuuucuucugaau

SEQ ID NO: 3549518 - RNA, 20 nt, Human
uuugagaaaugaaauauugu

SEQ ID NO: 3549519 - RNA, 13 nt, Human
uuugagacaggag

SEQ ID NO: 3549520 - RNA, 15 nt, Human
uuugagacaguuucu

SEQ ID NO: 3549521 - RNA, 17 nt, Human
uuugagacaguuucuua

SEQ ID NO: 3549522 - RNA, 18 nt, Human
uuugagacaguuucuuag

SEQ ID NO: 3549523 - RNA, 20 nt, Human
uuugagacaguuucuuagcu

SEQ ID NO: 3549524 - RNA, 20 nt, Human
ucacugggccaauucaauac

SEQ ID NO: 3549525 - RNA, 17 nt, Human
ucacugggguccugggg

SEQ ID NO: 3549526 - RNA, 17 nt, Human
ucacugguacucugcca

SEQ ID NO: 3549527 - RNA, 14 nt, Human
ucacuguauaaaua

SEQ ID NO: 3549528 - RNA, 15 nt, Human
ucacuguauaaauag

SEQ ID NO: 3549529 - RNA, 16 nt, Human
ucacuguauaaauagg

SEQ ID NO: 3549530 - RNA, 17 nt, Human
ucacuguauaaauagga

SEQ ID NO: 3549531 - RNA, 19 nt, Human
ucacuguauaaauaggaga

SEQ ID NO: 3549532 - RNA, 18 nt, Human
ucacuguaucauuuucuu

SEQ ID NO: 3549533 - RNA, 18 nt, Human
ucacugucaggaagaaau

SEQ ID NO: 3549534 - RNA, 20 nt, Human
ucacugucaggaagaaauca

SEQ ID NO: 3549535 - RNA, 19 nt, Human
ucacugucccuccuggugu

SEQ ID NO: 3549536 - RNA, 16 nt, Human
ucacuguccuccaagc

SEQ ID NO: 3549537 - RNA, 20 nt, Human
ucacugucugagaguuuagu

SEQ ID NO: 3549538 - RNA, 14 nt, Human
ucacugucugucug

SEQ ID NO: 3549539 - RNA, 15 nt, Human
ucacugucuuuccua

SEQ ID NO: 3549540 - RNA, 12 nt, Human
ucacugugauca

SEQ ID NO: 3549541 - RNA, 12 nt, Human
ucacuguggcug

SEQ ID NO: 3549542 - RNA, 18 nt, Human
ucacuguggcugucugga

SEQ ID NO: 3549543 - RNA, 17 nt, Human
ucacugugguccuaugc

SEQ ID NO: 3549544 - RNA, 15 nt, Human
ucacuguguacauaa

SEQ ID NO: 3549545 - RNA, 16 nt, Human
ucacuguguacauaau

SEQ ID NO: 3549546 - RNA, 17 nt, Human
ucacuguguacauaaug

SEQ ID NO: 3549547 - RNA, 12 nt, Human
ucacuguguaua

SEQ ID NO: 3549548 - RNA, 17 nt, Human
ucacuguguauauuuga

SEQ ID NO: 3549549 - RNA, 15 nt, Human
ucacuguguccaggu

SEQ ID NO: 3549550 - RNA, 23 nt, Human
ucacuguuagcuuuuuaaaacau

SEQ ID NO: 3549551 - RNA, 15 nt, Human
ucacuguucccucug

SEQ ID NO: 3549552 - RNA, 18 nt, Human
ucacuguugaaaauuauu

SEQ ID NO: 3549553 - RNA, 17 nt, Human
ucacuguugcccaggcu

SEQ ID NO: 3549554 - RNA, 18 nt, Human
ucacuguugcccaggcug

SEQ ID NO: 3549555 - RNA, 13 nt, Human
ucacuguuuagau

SEQ ID NO: 3549556 - RNA, 21 nt, Human
ucacuguuuagauuugccaua

SEQ ID NO: 3549557 - RNA, 14 nt, Human
ucacuguuucaucu

SEQ ID NO: 3549558 - RNA, 16 nt, Human
ucacuguuuguuuuua

SEQ ID NO: 3549559 - RNA, 14 nt, Human
ucacuguuuuuaga

SEQ ID NO: 3549560 - RNA, 15 nt, Human
ucacuuaaaacacgu

SEQ ID NO: 3549561 - RNA, 17 nt, Human
ucacuuaaauguuacca

SEQ ID NO: 3549562 - RNA, 22 nt, Human
ucacuuaaguuaguuccacuga

SEQ ID NO: 3549563 - RNA, 18 nt, Human
ucacuuacuauuguugcu

SEQ ID NO: 3549564 - RNA, 19 nt, Human
ucacuuacuguuucuguca

SEQ ID NO: 3549565 - RNA, 13 nt, Human
ucacuuagccaug

SEQ ID NO: 3549566 - RNA, 20 nt, Human
ucacuuauuuagauucacuu

SEQ ID NO: 3549567 - RNA, 12 nt, Human
ucacuucacugu

SEQ ID NO: 3549568 - RNA, 14 nt, Human
ucacuucacugugc

SEQ ID NO: 3549569 - RNA, 22 nt, Human
ucacuuccauacagcucuacgu

SEQ ID NO: 3549570 - RNA, 23 nt, Human
ucacuucgcgugcccucgcugcu

SEQ ID NO: 3549571 - RNA, 23 nt, Human
ucacuucgggcuguguaaacaca

SEQ ID NO: 3549572 - RNA, 13 nt, Human
ucacuucuaaaug

SEQ ID NO: 3549573 - RNA, 12 nt, Human
ucacuucuccca

SEQ ID NO: 3549574 - RNA, 17 nt, Human
ucacuucugaccacacu

SEQ ID NO: 3549575 - RNA, 12 nt, Human
uuuauuaaauuu

SEQ ID NO: 3549576 - RNA, 13 nt, Human
uuuauuaaauuug

SEQ ID NO: 3549577 - RNA, 21 nt, Human
uuuauuaaauuuguugacaaa

SEQ ID NO: 3549578 - RNA, 13 nt, Human
uuuauuaaauuuu

SEQ ID NO: 3549579 - RNA, 20 nt, Human
uuuauuaacuuaauaaucaa

SEQ ID NO: 3549580 - RNA, 22 nt, Human
uuuauuaagauggauucucaga

SEQ ID NO: 3549581 - RNA, 23 nt, Human
uuuauuaagauuauuuuauuaug

SEQ ID NO: 3549582 - RNA, 20 nt, Human
uuuauuaagcuuuuuggaau

SEQ ID NO: 3549583 - RNA, 15 nt, Human
uuuauuaaucacugu

SEQ ID NO: 3549584 - RNA, 18 nt, Human
uuuauuaauguuuucaaa

SEQ ID NO: 3549585 - RNA, 16 nt, Human
uuuauuaauuuauaug

SEQ ID NO: 3549586 - RNA, 23 nt, Human
uuuauuacaguauaauuaacaug

SEQ ID NO: 3549587 - RNA, 16 nt, Human
uuuauuacaucuuuca

SEQ ID NO: 3549588 - RNA, 12 nt, Human
uuuauuaccccc

SEQ ID NO: 3549589 - RNA, 23 nt, Human
uuuauuacccccuccuucagaca

SEQ ID NO: 3549590 - RNA, 15 nt, Human
uuuauuacccuucuu

SEQ ID NO: 3549591 - RNA, 20 nt, Human
uuuauuaccucugauaccuc

SEQ ID NO: 3549592 - RNA, 14 nt, Human
uuuauuacguaugu

SEQ ID NO: 3549593 - RNA, 15 nt, Human
uuuauuacuguuuau

SEQ ID NO: 3549594 - RNA, 14 nt, Human
uuuauuacuuauuu

SEQ ID NO: 3549595 - RNA, 16 nt, Human
uuuauuacuuccauga

SEQ ID NO: 3549596 - RNA, 20 nt, Human
uuuauuacuuccaugaauuu

SEQ ID NO: 3549597 - RNA, 20 nt, Human
uuuauuaguauuguuguccu

SEQ ID NO: 3549598 - RNA, 13 nt, Human
uuuauuauggcac

SEQ ID NO: 3549599 - RNA, 16 nt, Human
uuuauuauuacuguuu

SEQ ID NO: 3549600 - RNA, 23 nt, Human
uuuauuauuuauuuuuuuuaauu

SEQ ID NO: 3549601 - RNA, 17 nt, Human
uuuauucaagaaaagua

SEQ ID NO: 3549602 - RNA, 17 nt, Human
uuuauucagcuucauuu

SEQ ID NO: 3549603 - RNA, 16 nt, Human
uuuauuccuguauguu

SEQ ID NO: 3549604 - RNA, 14 nt, Human
uuuauuccuuguga

SEQ ID NO: 3549605 - RNA, 16 nt, Human
uuuauucuucuagagu

SEQ ID NO: 3549606 - RNA, 13 nt, Human
uuuauucuuguga

SEQ ID NO: 3549607 - RNA, 16 nt, Human
uuuauugacucuugag

SEQ ID NO: 3549608 - RNA, 18 nt, Human
uuuauugaugugcaaaaa

SEQ ID NO: 3549609 - RNA, 13 nt, Human
uuuauugcacaaa

SEQ ID NO: 3549610 - RNA, 21 nt, Human
uuuauugcacaaaauauaaag

SEQ ID NO: 3549611 - RNA, 24 nt, Human
uuuauugcaucuggguagcuguaa

SEQ ID NO: 3549612 - RNA, 12 nt, Human
uuuauugccuuc

SEQ ID NO: 3549613 - RNA, 17 nt, Human
uuuauugcuaguauuug

SEQ ID NO: 3549614 - RNA, 19 nt, Human
uuuauugcuaguauuugaa

SEQ ID NO: 3549615 - RNA, 13 nt, Human
uuuauugcuuguu

SEQ ID NO: 3549616 - RNA, 23 nt, Human
uuuauugguuuugcagaagaagg

SEQ ID NO: 3549617 - RNA, 21 nt, Human
uuuauuguguuugucauuagc

SEQ ID NO: 3549618 - RNA, 19 nt, Human
uuuauuguuaauacaaggu

SEQ ID NO: 3549619 - RNA, 14 nt, Human
uuuauuuaaaagau

SEQ ID NO: 3549620 - RNA, 22 nt, Human
uuuauuuaaaagauucauuuuu

SEQ ID NO: 3549621 - RNA, 19 nt, Human
uuuauuuaaauuacaauuu

SEQ ID NO: 3549622 - RNA, 14 nt, Human
uuuauuuacaaaug

SEQ ID NO: 3549623 - RNA, 20 nt, Human
uuuauuuacagaugaaugua

SEQ ID NO: 3549624 - RNA, 19 nt, Human
uuuauuuaguuccuugagu

SEQ ID NO: 3549625 - RNA, 17 nt, Human
uuuauuuauacacuguc

SEQ ID NO: 3549626 - RNA, 17 nt, Human
uuuauuuauauuuauug

SEQ ID NO: 3549627 - RNA, 14 nt, Human
uuuauuuaucagug

SEQ ID NO: 3549628 - RNA, 21 nt, Human
uuuauuuauccagaaaacugu

SEQ ID NO: 3549629 - RNA, 13 nt, Human
uuuauuuaugaag

SEQ ID NO: 3549630 - RNA, 14 nt, Human
uuuauuuauuuaca

SEQ ID NO: 3549631 - RNA, 19 nt, Human
uuuauuucagcaaacuugu

SEQ ID NO: 3549632 - RNA, 11 nt, Human
uuuauuucauu

SEQ ID NO: 3549633 - RNA, 20 nt, Human
uuuauuuccaauguuucaag

SEQ ID NO: 3549634 - RNA, 17 nt, Human
uuuauuuccuaugaugu

SEQ ID NO: 3549635 - RNA, 16 nt, Human
uuuauuucuacuguca

SEQ ID NO: 3549636 - RNA, 20 nt, Human
uuuauuugaacaaugaaguu

SEQ ID NO: 3549637 - RNA, 13 nt, Human
uuuauuugguucc

SEQ ID NO: 3549638 - RNA, 14 nt, Human
uuuauuuguuuuuc

SEQ ID NO: 3549639 - RNA, 20 nt, Human
uuuauuuuaaaauuucauag

SEQ ID NO: 3549640 - RNA, 16 nt, Human
uuuauuuuaauaaugu

SEQ ID NO: 3549641 - RNA, 18 nt, Human
uuuauuuuacacagaaac

SEQ ID NO: 3549642 - RNA, 21 nt, Human
uuuauuuuauauaauaaagua

SEQ ID NO: 3549643 - RNA, 15 nt, Human
uuuauuuuccuaaag

SEQ ID NO: 3549644 - RNA, 19 nt, Human
uuuauuuugaaaagcuucu

SEQ ID NO: 3549645 - RNA, 18 nt, Human
uuuauuuuguaauuauug

SEQ ID NO: 3549646 - RNA, 12 nt, Human
uuuauuuugugg

SEQ ID NO: 3549647 - RNA, 14 nt, Human
uuuauuuuguggga

SEQ ID NO: 3549648 - RNA, 15 nt, Human
uuuauuuuguguaaa

SEQ ID NO: 3549649 - RNA, 20 nt, Human
uuuauuuuguuaaaaucucu

SEQ ID NO: 3549650 - RNA, 17 nt, Human
uuuauuuuuaagaaaga

SEQ ID NO: 3549651 - RNA, 23 nt, Human
uuuauuuuuacaagaaguuuauu

SEQ ID NO: 3549652 - RNA, 19 nt, Human
uuuauuuuuagaauuuugu

SEQ ID NO: 3549653 - RNA, 15 nt, Human
uuuauuuuucauauu

SEQ ID NO: 3549654 - RNA, 16 nt, Human
uuuauuuuucauauug

SEQ ID NO: 3549655 - RNA, 17 nt, Human
uuuauuuuucauauugu

SEQ ID NO: 3549656 - RNA, 20 nt, Human
uuuauuuuucauauugugcc

SEQ ID NO: 3549657 - RNA, 17 nt, Human
uuuauuuuucauuuagu

SEQ ID NO: 3549658 - RNA, 22 nt, Human
uuuauuuuuccauuuacaacaa

SEQ ID NO: 3549659 - RNA, 17 nt, Human
uuuauuuuuuaaguauu

SEQ ID NO: 3549660 - RNA, 15 nt, Human
uuuauuuuuuacauu

SEQ ID NO: 3549661 - RNA, 14 nt, Human
uuuauuuuuuagug

SEQ ID NO: 3549662 - RNA, 17 nt, Human
uuuauuuuuuggacuuc

SEQ ID NO: 3549663 - RNA, 14 nt, Human
uuuauuuuuuucua

SEQ ID NO: 3549664 - RNA, 18 nt, Human
uuuauuuuuuuuaaagaa

SEQ ID NO: 3549665 - RNA, 16 nt, Human
uuucaaaaauauaacu

SEQ ID NO: 3549666 - RNA, 19 nt, Human
uuucaaaaaucugaagauu

SEQ ID NO: 3549667 - RNA, 24 nt, Human
uuucaaaaaucugaagauuguuua

SEQ ID NO: 3549668 - RNA, 15 nt, Human
uuucaaaaauuugga

SEQ ID NO: 3549669 - RNA, 13 nt, Human
uuucaaaaccagg

SEQ ID NO: 3549670 - RNA, 21 nt, Human
uuucaaaaccagguccaauga

SEQ ID NO: 3549671 - RNA, 18 nt, Human
uuucaaaaccuuuugaaa

SEQ ID NO: 3549672 - RNA, 20 nt, Human
uuucaaaacucauuuccuau

SEQ ID NO: 3549673 - RNA, 12 nt, Human
uuucaaaagaca

SEQ ID NO: 3549674 - RNA, 21 nt, Human
uuucaaaauagaaaaguuauu

SEQ ID NO: 3549675 - RNA, 16 nt, Human
uuucaaacacaaaugc

SEQ ID NO: 3549676 - RNA, 24 nt, Human
uuucaaaccaguauacaagauaag

SEQ ID NO: 3549677 - RNA, 20 nt, Human
uuucaaacuccugacuuugu

SEQ ID NO: 3549678 - RNA, 14 nt, Human
uuucaaacuguaaa

SEQ ID NO: 3549679 - RNA, 22 nt, Human
uuucaaacuuacuauuuugaca

SEQ ID NO: 3549680 - RNA, 12 nt, Human
uuucaaacuuua

SEQ ID NO: 3549681 - RNA, 16 nt, Human
uuucaaacuuuacuau

SEQ ID NO: 3549682 - RNA, 14 nt, Human
uuucaaacuuugga

SEQ ID NO: 3549683 - RNA, 13 nt, Human
uuucaaagaugcu

SEQ ID NO: 3549684 - RNA, 17 nt, Human
uuucaaagcuuuuucca

SEQ ID NO: 3549685 - RNA, 12 nt, Human
uuucaaaguuuu

SEQ ID NO: 3549686 - RNA, 14 nt, Human
uuucaaaugugcug

SEQ ID NO: 3549687 - RNA, 21 nt, Human
uuucaaauuggacuuucaaaa

SEQ ID NO: 3549688 - RNA, 16 nt, Human
ucagucacacacacau

SEQ ID NO: 3549689 - RNA, 13 nt, Human
ucagucacagcca

SEQ ID NO: 3549690 - RNA, 15 nt, Human
ucagucacagccacc

SEQ ID NO: 3549691 - RNA, 17 nt, Human
ucagucacauggcaugg

SEQ ID NO: 3549692 - RNA, 17 nt, Human
ucagucagaaaacuuua

SEQ ID NO: 3549693 - RNA, 14 nt, Human
ucagucaugcauaa

SEQ ID NO: 3549694 - RNA, 16 nt, Human
ucagucaugcauaaau

SEQ ID NO: 3549695 - RNA, 17 nt, Human
ucagucaugcauaaaua

SEQ ID NO: 3549696 - RNA, 14 nt, Human
ucagucauguguaa

SEQ ID NO: 3549697 - RNA, 21 nt, Human
ucagucauuagacuccuccuc

SEQ ID NO: 3549698 - RNA, 18 nt, Human
ucaguccccgugaaggag

SEQ ID NO: 3549699 - RNA, 14 nt, Human
ucaguccccuccca

SEQ ID NO: 3549700 - RNA, 18 nt, Human
ucagucccuuccccaugc

SEQ ID NO: 3549701 - RNA, 13 nt, Human
ucaguccuccccu

SEQ ID NO: 3549702 - RNA, 17 nt, Human
ucaguccuccccucaca

SEQ ID NO: 3549703 - RNA, 18 nt, Human
ucaguccuccccucacag

SEQ ID NO: 3549704 - RNA, 21 nt, Human
ucaguccuccccucacagccu

SEQ ID NO: 3549705 - RNA, 15 nt, Human
ucaguccuuugauca

SEQ ID NO: 3549706 - RNA, 16 nt, Human
ucagucuauccacaga

SEQ ID NO: 3549707 - RNA, 19 nt, Human
ucagucucagaaugucauu

SEQ ID NO: 3549708 - RNA, 23 nt, Human
ucagucucccuucucccaugagg

SEQ ID NO: 3549709 - RNA, 20 nt, Human
ucagucucccuuucccuucu

SEQ ID NO: 3549710 - RNA, 23 nt, Human
ucagucucuauaccaauaaagug

SEQ ID NO: 3549711 - RNA, 15 nt, Human
ucagucucugagcag

SEQ ID NO: 3549712 - RNA, 20 nt, Human
ucagucucugagcagugaau

SEQ ID NO: 3549713 - RNA, 17 nt, Human
ucagucugauucccaag

SEQ ID NO: 3549714 - RNA, 22 nt, Human
ucagucugauucccaagcucug

SEQ ID NO: 3549715 - RNA, 17 nt, Human
ucagucugcacuuaaau

SEQ ID NO: 3549716 - RNA, 20 nt, Human
ucagucugcacuuaaauauc

SEQ ID NO: 3549717 - RNA, 23 nt, Human
ucagucugcacuuaaauaucaau

SEQ ID NO: 3549718 - RNA, 15 nt, Human
ucagucuuuuucugu

SEQ ID NO: 3549719 - RNA, 20 nt, Human
ucagugaaguugcugcuucu

SEQ ID NO: 3549720 - RNA, 21 nt, Human
ucagugaauaugccuguaauu

SEQ ID NO: 3549721 - RNA, 18 nt, Human
ucagugacccuggcuccu

SEQ ID NO: 3549722 - RNA, 22 nt, Human
ucagugaccuacuacgcagagg

SEQ ID NO: 3549723 - RNA, 18 nt, Human
ucagugaggcccagggag

SEQ ID NO: 3549724 - RNA, 14 nt, Human
ucagugcaaagauu

SEQ ID NO: 3549725 - RNA, 16 nt, Human
ucagugccaaaaacaa

SEQ ID NO: 3549726 - RNA, 18 nt, Human
ucagugccaacuguggcu

SEQ ID NO: 3549727 - RNA, 19 nt, Human
ucagugccaacuguggcug

SEQ ID NO: 3549728 - RNA, 12 nt, Human
ucagugccacua

SEQ ID NO: 3549729 - RNA, 22 nt, Human
ucagugcccaccaacaucccau

SEQ ID NO: 3549730 - RNA, 14 nt, Human
ucagugcccuccag

SEQ ID NO: 3549731 - RNA, 20 nt, Human
ucagugccgccgccucgccc

SEQ ID NO: 3549732 - RNA, 14 nt, Human
ucagugccuuaugg

SEQ ID NO: 3549733 - RNA, 18 nt, Human
ucagugccuuauggaaca

SEQ ID NO: 3549734 - RNA, 19 nt, Human
ucagugccuuauggaacac

SEQ ID NO: 3549735 - RNA, 17 nt, Human
ucagugcuagcuuauuu

SEQ ID NO: 3549736 - RNA, 19 nt, Human
ucagugcucccucacaugu

SEQ ID NO: 3549737 - RNA, 18 nt, Human
ucagugcucgagacacag

SEQ ID NO: 3549738 - RNA, 13 nt, Human
ucagugcugccug

SEQ ID NO: 3549739 - RNA, 14 nt, Human
ucagugcugccugu

SEQ ID NO: 3549740 - RNA, 13 nt, Human
ucagugcugugcu

SEQ ID NO: 3549741 - RNA, 12 nt, Human
ucagugcugugg

SEQ ID NO: 3549742 - RNA, 14 nt, Human
ucagugcuguggcc

SEQ ID NO: 3549743 - RNA, 15 nt, Human
ucagugcuucgcaga

SEQ ID NO: 3549744 - RNA, 12 nt, Human
ucagugcuucuu

SEQ ID NO: 3549745 - RNA, 15 nt, Human
ucaguggauuuccca

SEQ ID NO: 3549746 - RNA, 16 nt, Human
ucaguggcagggcuca

SEQ ID NO: 3549747 - RNA, 20 nt, Human
ucaguggcauggcuccaguc

SEQ ID NO: 3549748 - RNA, 17 nt, Human
ucaguggcgagaaauaa

SEQ ID NO: 3549749 - RNA, 23 nt, Human
ucagugggaacgugacugcccca

SEQ ID NO: 3549750 - RNA, 12 nt, Human
ucagugggagaa

SEQ ID NO: 3549751 - RNA, 13 nt, Human
ucagugggagaaa

SEQ ID NO: 3549752 - RNA, 17 nt, Human
ucagugggcaggauaaa

SEQ ID NO: 3549753 - RNA, 19 nt, Human
ucagugggcaggauaaacu

SEQ ID NO: 3549754 - RNA, 19 nt, Human
ucaguggggcucucugagu

SEQ ID NO: 3549755 - RNA, 20 nt, Human
ucagugguuauuuagggaac

SEQ ID NO: 3549756 - RNA, 23 nt, Human
ucaguguaaauaguuacuccagu

SEQ ID NO: 3549757 - RNA, 16 nt, Human
ucaguguaagcccugc

SEQ ID NO: 3549758 - RNA, 14 nt, Human
ucaguguaauuucu

SEQ ID NO: 3549759 - RNA, 15 nt, Human
ucaguguaauuucuu

SEQ ID NO: 3549760 - RNA, 18 nt, Human
ucaguguacacucugagu

SEQ ID NO: 3549761 - RNA, 20 nt, Human
ucaguguacccccgcccagg

SEQ ID NO: 3549762 - RNA, 22 nt, Human
ucaguguacccccgcccaggcu

SEQ ID NO: 3549763 - RNA, 23 nt, Human
ucaguguacccccgcccaggcug

SEQ ID NO: 3549764 - RNA, 22 nt, Human
ucaguguagaaccuaauucaau

SEQ ID NO: 3549765 - RNA, 15 nt, Human
ucaguguaguuaauu

SEQ ID NO: 3549766 - RNA, 21 nt, Human
ucaguguauggaaauaaaugu

SEQ ID NO: 3549767 - RNA, 22 nt, Human
ucaguguauggaaauaaaugua

SEQ ID NO: 3549768 - RNA, 14 nt, Human
ucaguguauuugua

SEQ ID NO: 3549769 - RNA, 14 nt, Human
ucagugucaaauaa

SEQ ID NO: 3549770 - RNA, 17 nt, Human
ucagugucaaauaaaca

SEQ ID NO: 3549771 - RNA, 19 nt, Human
ucagugucaaauaaacacu

SEQ ID NO: 3549772 - RNA, 13 nt, Human
ucagugucucaca

SEQ ID NO: 3549773 - RNA, 21 nt, Human
ucagugucucacacuggcgua

SEQ ID NO: 3549774 - RNA, 17 nt, Human
ucagugugacugaucuc

SEQ ID NO: 3549775 - RNA, 13 nt, Human
ucagugugccccc

SEQ ID NO: 3549776 - RNA, 20 nt, Human
ucagugugccccccauccug

SEQ ID NO: 3549777 - RNA, 13 nt, Human
ucaguguuaaaaa

SEQ ID NO: 3549778 - RNA, 15 nt, Human
ucaguguuaaaugug

SEQ ID NO: 3549779 - RNA, 21 nt, Human
ucaguguuaaaugugaugaau

SEQ ID NO: 3549780 - RNA, 20 nt, Human
ucaguguucccuuuccuacu

SEQ ID NO: 3549781 - RNA, 15 nt, Human
ucaguguugagaugg

SEQ ID NO: 3549782 - RNA, 12 nt, Human
ucaguguuucau

SEQ ID NO: 3549783 - RNA, 15 nt, Human
ucaguguuuggugca

SEQ ID NO: 3549784 - RNA, 15 nt, Human
ucaguguuuuaaauu

SEQ ID NO: 3549785 - RNA, 17 nt, Human
ucaguguuuuaaauucu

SEQ ID NO: 3549786 - RNA, 15 nt, Human
ucaguguuuuggacu

SEQ ID NO: 3549787 - RNA, 17 nt, Human
ucaguguuuuugugaau

SEQ ID NO: 3549788 - RNA, 16 nt, Human
ucaguuaacuauugca

SEQ ID NO: 3549789 - RNA, 15 nt, Human
ucaguuaagaaaaaa

SEQ ID NO: 3549790 - RNA, 15 nt, Human
ucaguuacagaaagu

SEQ ID NO: 3549791 - RNA, 16 nt, Human
ucaguuacccacucgg

SEQ ID NO: 3549792 - RNA, 20 nt, Human
ucaguuacuaagaagaaaau

SEQ ID NO: 3549793 - RNA, 14 nt, Human
ucaguuacucagcc

SEQ ID NO: 3549794 - RNA, 17 nt, Human
ucaguuacucugaaggg

SEQ ID NO: 3549795 - RNA, 18 nt, Human
ucaguuagagcugacaca

SEQ ID NO: 3549796 - RNA, 20 nt, Human
ucaguuauacaguuauaaaa

SEQ ID NO: 3549797 - RNA, 19 nt, Human
ucaguuaugacauccacaa

SEQ ID NO: 3549798 - RNA, 12 nt, Human
ucaguuccaaga

SEQ ID NO: 3549799 - RNA, 18 nt, Human
ucaucuuucccuccuugg

SEQ ID NO: 3549800 - RNA, 17 nt, Human
ucaucuuucuuccaaac

SEQ ID NO: 3549801 - RNA, 22 nt, Human
ucaucuuucuugaucaacaucu

SEQ ID NO: 3549802 - RNA, 16 nt, Human
ucaugaaaauaccauu

SEQ ID NO: 3549803 - RNA, 17 nt, Human
ucaugaaacuuguuuca

SEQ ID NO: 3549804 - RNA, 15 nt, Human
ucaugaaauaugcau

SEQ ID NO: 3549805 - RNA, 18 nt, Human
ucaugaaaugcuauguca

SEQ ID NO: 3549806 - RNA, 20 nt, Human
ucaugaaaugcuaugucauu

SEQ ID NO: 3549807 - RNA, 11 nt, Human
ucaugaagccu

SEQ ID NO: 3549808 - RNA, 13 nt, Human
ucaugaagccugu

SEQ ID NO: 3549809 - RNA, 21 nt, Human
ucaugaaugcuuuuagugugu

SEQ ID NO: 3549810 - RNA, 12 nt, Human
ucaugaauguaa

SEQ ID NO: 3549811 - RNA, 14 nt, Human
ucaugaauguaaau

SEQ ID NO: 3549812 - RNA, 16 nt, Human
ucaugaauuaguuuua

SEQ ID NO: 3549813 - RNA, 22 nt, Human
ucaugaauuuauugcacauugu

SEQ ID NO: 3549814 - RNA, 23 nt, Human
ucaugaauuuauugcacauuguu

SEQ ID NO: 3549815 - RNA, 12 nt, Human
ucaugaauuuua

SEQ ID NO: 3549816 - RNA, 16 nt, Human
ucaugacaagcauuuu

SEQ ID NO: 3549817 - RNA, 14 nt, Human
ucaugacauguuau

SEQ ID NO: 3549818 - RNA, 21 nt, Human
ucaugacauguuauauauuuu

SEQ ID NO: 3549819 - RNA, 15 nt, Human
ucaugaccagcaaau

SEQ ID NO: 3549820 - RNA, 14 nt, Human
ucaugaccaguaaa

SEQ ID NO: 3549821 - RNA, 14 nt, Human
ucaugaggggagag

SEQ ID NO: 3549822 - RNA, 22 nt, Human
ucaugauagaaggcuaugggga

SEQ ID NO: 3549823 - RNA, 16 nt, Human
ucaugauccaacuaau

SEQ ID NO: 3549824 - RNA, 17 nt, Human
ucaugaucucccugccg

SEQ ID NO: 3549825 - RNA, 19 nt, Human
ucaugaucucccugccgcc

SEQ ID NO: 3549826 - RNA, 16 nt, Human
ucaugaucuugugaca

SEQ ID NO: 3549827 - RNA, 17 nt, Human
ucaugaucuugugacau

SEQ ID NO: 3549828 - RNA, 23 nt, Human
ucaugaugcucuuucccacccag

SEQ ID NO: 3549829 - RNA, 19 nt, Human
ucaugauguuuuuaaaauc

SEQ ID NO: 3549830 - RNA, 20 nt, Human
ucaugauguuuuuaaaaucu

SEQ ID NO: 3549831 - RNA, 21 nt, Human
ucaugauguuuuuaaaaucuu

SEQ ID NO: 3549832 - RNA, 14 nt, Human
ucaugauuagcaag

SEQ ID NO: 3549833 - RNA, 22 nt, Human
ucaugauucacccccaaacagu

SEQ ID NO: 3549834 - RNA, 14 nt, Human
ucaugauuuugaaa

SEQ ID NO: 3549835 - RNA, 14 nt, Human
ucaugcaaacucuu

SEQ ID NO: 3549836 - RNA, 20 nt, Human
ucaugcaaaugcuguauucu

SEQ ID NO: 3549837 - RNA, 16 nt, Human
ucaugcaaugacaucu

SEQ ID NO: 3549838 - RNA, 21 nt, Human
ucaugcagaguauuucuaaag

SEQ ID NO: 3549839 - RNA, 19 nt, Human
ucaugcagcucaacuuucu

SEQ ID NO: 3549840 - RNA, 12 nt, Human
ucaugcagcugu

SEQ ID NO: 3549841 - RNA, 14 nt, Human
ucaugcagcugugg

SEQ ID NO: 3549842 - RNA, 16 nt, Human
ucaugcagguuagaaa

SEQ ID NO: 3549843 - RNA, 14 nt, Human
ucaugcauaaauau

SEQ ID NO: 3549844 - RNA, 19 nt, Human
ucaugcauaaauaugcagu

SEQ ID NO: 3549845 - RNA, 17 nt, Human
ucaugcauagucccagc

SEQ ID NO: 3549846 - RNA, 14 nt, Human
ucaugcauggaaau

SEQ ID NO: 3549847 - RNA, 16 nt, Human
ucaugcauuguccucu

SEQ ID NO: 3549848 - RNA, 19 nt, Human
ucaugccaccauggccagc

SEQ ID NO: 3549849 - RNA, 23 nt, Human
ucaugccagcuacuuccuccucc

SEQ ID NO: 3549850 - RNA, 15 nt, Human
ucaugccaguauuuu

SEQ ID NO: 3549851 - RNA, 17 nt, Human
ucaugcccaagcccuga

SEQ ID NO: 3549852 - RNA, 15 nt, Human
ucaugcccacccccu

SEQ ID NO: 3549853 - RNA, 21 nt, Human
ucaugcccacccccugcccug

SEQ ID NO: 3549854 - RNA, 18 nt, Human
ucaugcccccuuucagau

SEQ ID NO: 3549855 - RNA, 15 nt, Human
ucaugcccuccucuc

SEQ ID NO: 3549856 - RNA, 16 nt, Human
ucaugccucugaggcc

SEQ ID NO: 3549857 - RNA, 22 nt, Human
ucaugccucugaggccagccug

SEQ ID NO: 3549858 - RNA, 13 nt, Human
ucaugccuggcuu

SEQ ID NO: 3549859 - RNA, 18 nt, Human
ucaugccuggcuucgcaa

SEQ ID NO: 3549860 - RNA, 15 nt, Human
ucaugcuaucucugu

SEQ ID NO: 3549861 - RNA, 19 nt, Human
ucaugcuccccugugccag

SEQ ID NO: 3549862 - RNA, 18 nt, Human
ucaugcucugcaaaagga

SEQ ID NO: 3549863 - RNA, 13 nt, Human
ucaugcugaaagc

SEQ ID NO: 3549864 - RNA, 17 nt, Human
ucaugcugccaauaucc

SEQ ID NO: 3549865 - RNA, 20 nt, Human
ucaugcugccaauauccuaa

SEQ ID NO: 3549866 - RNA, 21 nt, Human
ucaugcugccaauauccuaau

SEQ ID NO: 3549867 - RNA, 18 nt, Human
ucaugcugggauuuccaa

SEQ ID NO: 3549868 - RNA, 13 nt, Human
ucauggaaauauu

SEQ ID NO: 3549869 - RNA, 21 nt, Human
ucauggaacgcguugaaauug

SEQ ID NO: 3549870 - RNA, 22 nt, Human
ucauggaacgcguugaaauugu

SEQ ID NO: 3549871 - RNA, 17 nt, Human
ucauggaauggacaucc

SEQ ID NO: 3549872 - RNA, 19 nt, Human
ucauggaauuggagcucgu

SEQ ID NO: 3549873 - RNA, 14 nt, Human
ucauggacacuuug

SEQ ID NO: 3549874 - RNA, 18 nt, Human
ucauggaccacuguuucu

SEQ ID NO: 3549875 - RNA, 23 nt, Human
ucauggaccacuguuucuugcuu

SEQ ID NO: 3549876 - RNA, 23 nt, Human
ucauggaugggggaacucagauc

SEQ ID NO: 3549877 - RNA, 22 nt, Human
ucauggauuacuucucuauaaa

SEQ ID NO: 3549878 - RNA, 21 nt, Human
ucauggccacacugugacaca

SEQ ID NO: 3549879 - RNA, 14 nt, Human
ucauggccccucug

SEQ ID NO: 3549880 - RNA, 20 nt, Human
ucauggccuauuauauuaaa

SEQ ID NO: 3549881 - RNA, 16 nt, Human
ucauggcucacugcag

SEQ ID NO: 3549882 - RNA, 17 nt, Human
ucaugggauagcacgug

SEQ ID NO: 3549883 - RNA, 18 nt, Human
uuuuacaauaaauaaucu

SEQ ID NO: 3549884 - RNA, 17 nt, Human
uuuuacacagaaacacu

SEQ ID NO: 3549885 - RNA, 18 nt, Human
uuuuacacagaaacacug

SEQ ID NO: 3549886 - RNA, 19 nt, Human
uuuuacagcuuuacacaca

SEQ ID NO: 3549887 - RNA, 11 nt, Human
uuuuacaugaa

SEQ ID NO: 3549888 - RNA, 15 nt, Human
uuuuacauggagaaa

SEQ ID NO: 3549889 - RNA, 13 nt, Human
uuuuacauuaaau

SEQ ID NO: 3549890 - RNA, 21 nt, Human
uuuuaccaaguuauauaaaga

SEQ ID NO: 3549891 - RNA, 22 nt, Human
uuuuaccaugccccugagcaau

SEQ ID NO: 3549892 - RNA, 22 nt, Human
uuuuacccuggccccucucccu

SEQ ID NO: 3549893 - RNA, 18 nt, Human
uuuuaccuaccacagugu

SEQ ID NO: 3549894 - RNA, 14 nt, Human
uuuuaccugcugcu

SEQ ID NO: 3549895 - RNA, 20 nt, Human
uuuuaccugucacauugcau

SEQ ID NO: 3549896 - RNA, 14 nt, Human
uuuuaccuucacug

SEQ ID NO: 3549897 - RNA, 22 nt, Human
uuuuacuaaagaaagauuacuu

SEQ ID NO: 3549898 - RNA, 17 nt, Human
uuuuacuauuguuacau

SEQ ID NO: 3549899 - RNA, 12 nt, Human
uuuuacucugcc

SEQ ID NO: 3549900 - RNA, 15 nt, Human
uuuuacugaagccuu

SEQ ID NO: 3549901 - RNA, 19 nt, Human
uuuuacugaagccuuucuu

SEQ ID NO: 3549902 - RNA, 14 nt, Human
uuuuacugccacuc

SEQ ID NO: 3549903 - RNA, 15 nt, Human
uuuuacuguguuuua

SEQ ID NO: 3549904 - RNA, 14 nt, Human
uuuuacuuagcaau

SEQ ID NO: 3549905 - RNA, 17 nt, Human
uuuuacuuuuuuuagua

SEQ ID NO: 3549906 - RNA, 14 nt, Human
uuuuagaaaacagc

SEQ ID NO: 3549907 - RNA, 18 nt, Human
uuuuagaaacaauaugga

SEQ ID NO: 3549908 - RNA, 17 nt, Human
uuuuagaaauauucaca

SEQ ID NO: 3549909 - RNA, 13 nt, Human
uuuuagaauaaga

SEQ ID NO: 3549910 - RNA, 17 nt, Human
uuuuagaauaagaauuu

SEQ ID NO: 3549911 - RNA, 22 nt, Human
uuuuagaauaagaauuugcaua

SEQ ID NO: 3549912 - RNA, 18 nt, Human
uuuuagacaaauacucau

SEQ ID NO: 3549913 - RNA, 20 nt, Human
uuuuagacaaauacucaugu

SEQ ID NO: 3549914 - RNA, 21 nt, Human
uuuuagacaaauacucaugug

SEQ ID NO: 3549915 - RNA, 19 nt, Human
uuuuagaugugcugcuuug

SEQ ID NO: 3549916 - RNA, 22 nt, Human
uuuuagauuuucugguucuaac

SEQ ID NO: 3549917 - RNA, 23 nt, Human
uuuuagcaaagauaucucaucuc

SEQ ID NO: 3549918 - RNA, 11 nt, Human
uuuuagcaugu

SEQ ID NO: 3549919 - RNA, 19 nt, Human
uuuuagcuccuugacuccu

SEQ ID NO: 3549920 - RNA, 13 nt, Human
uuuuagcuuuugu

SEQ ID NO: 3549921 - RNA, 15 nt, Human
uuuuaggcacucuua

SEQ ID NO: 3549922 - RNA, 18 nt, Human
uuuuaggucucuuccccu

SEQ ID NO: 3549923 - RNA, 14 nt, Human
uuuuagguucuaaa

SEQ ID NO: 3549924 - RNA, 17 nt, Human
uuuuagguuuaucuuuu

SEQ ID NO: 3549925 - RNA, 14 nt, Human
uuuuaguaaguuaa

SEQ ID NO: 3549926 - RNA, 15 nt, Human
uuuuaguacccaccu

SEQ ID NO: 3549927 - RNA, 21 nt, Human
uuuuaguacccaccugagcuu

SEQ ID NO: 3549928 - RNA, 20 nt, Human
uuuuaguauuuauuuaugua

SEQ ID NO: 3549929 - RNA, 23 nt, Human
uuuuaguauuuauuuauguacuu

SEQ ID NO: 3549930 - RNA, 13 nt, Human
uuuuagucacuuu

SEQ ID NO: 3549931 - RNA, 21 nt, Human
uuuuaguggacccugaaaugu

SEQ ID NO: 3549932 - RNA, 18 nt, Human
uuuuaguuaaauuucugg

SEQ ID NO: 3549933 - RNA, 18 nt, Human
uuuuaguuucuguucugu

SEQ ID NO: 3549934 - RNA, 22 nt, Human
uuuuaguuucuguucuguggaa

SEQ ID NO: 3549935 - RNA, 13 nt, Human
uuuuaguuuuagu

SEQ ID NO: 3549936 - RNA, 16 nt, Human
uuuuaguuuuucuguc

SEQ ID NO: 3549937 - RNA, 19 nt, Human
uuuuauaaaaaaaaugaaa

SEQ ID NO: 3549938 - RNA, 14 nt, Human
uuuuauaaaaagau

SEQ ID NO: 3549939 - RNA, 19 nt, Human
uuuuauaaacuuuaccuuu

SEQ ID NO: 3549940 - RNA, 20 nt, Human
uuuuauaaaucgcuuuugau

SEQ ID NO: 3549941 - RNA, 13 nt, Human
uuuuauaaauuaa

SEQ ID NO: 3549942 - RNA, 16 nt, Human
uuuuauaaauuaaaua

SEQ ID NO: 3549943 - RNA, 21 nt, Human
uuuuauaacaucuuuauugaa

SEQ ID NO: 3549944 - RNA, 20 nt, Human
uuuuauaaggacuuccugau

SEQ ID NO: 3549945 - RNA, 19 nt, Human
uuuuauaaguucacaaaau

SEQ ID NO: 3549946 - RNA, 16 nt, Human
uuuuauaauuguacaa

SEQ ID NO: 3549947 - RNA, 19 nt, Human
uuuuauacacauaauuaaa

SEQ ID NO: 3549948 - RNA, 17 nt, Human
uuuuauacaguagugag

SEQ ID NO: 3549949 - RNA, 23 nt, Human
uuuuauacaguagugagaagaau

SEQ ID NO: 3549950 - RNA, 16 nt, Human
uuuuauaccuguuuaa

SEQ ID NO: 3549951 - RNA, 13 nt, Human
uuuuauacucuuu

SEQ ID NO: 3549952 - RNA, 15 nt, Human
uuuuauacuguacuu

SEQ ID NO: 3549953 - RNA, 14 nt, Human
uuuuauaguggaaa

SEQ ID NO: 3549954 - RNA, 15 nt, Human
uuuuauaguggaaaa

SEQ ID NO: 3549955 - RNA, 17 nt, Human
uuuuauauaauaaagua

SEQ ID NO: 3549956 - RNA, 13 nt, Human
uuuuauaucccau

SEQ ID NO: 3549957 - RNA, 14 nt, Human
uuuuauaucuguau

SEQ ID NO: 3549958 - RNA, 15 nt, Human
uuuuauaugcuucug

SEQ ID NO: 3549959 - RNA, 14 nt, Human
uuuuauaugucaaa

SEQ ID NO: 3549960 - RNA, 23 nt, Human
uuuuauauuaaaauaagcacugu

SEQ ID NO: 3549961 - RNA, 20 nt, Human
uuuuauauuaaccagauaua

SEQ ID NO: 3549962 - RNA, 21 nt, Human
uuuuauauuaaccagauauau

SEQ ID NO: 3549963 - RNA, 15 nt, Human
uuuuauauucucagc

SEQ ID NO: 3549964 - RNA, 13 nt, Human
uuuuauauuuagu

SEQ ID NO: 3549965 - RNA, 15 nt, Human
uuuuauauuucaagu

SEQ ID NO: 3549966 - RNA, 14 nt, Human
uuuuauauuuccuu

SEQ ID NO: 3549967 - RNA, 13 nt, Human
uuuuauauuugaa

SEQ ID NO: 3549968 - RNA, 12 nt, Human
uuuuauauuugu

SEQ ID NO: 3549969 - RNA, 14 nt, Human
uuuuauauuuguag

SEQ ID NO: 3549970 - RNA, 17 nt, Human
uuuuauauuuguaucga

SEQ ID NO: 3549971 - RNA, 22 nt, Human
uuuuaucagaacuauguuuuug

SEQ ID NO: 3549972 - RNA, 19 nt, Human
uuuuaucaugacauguuau

SEQ ID NO: 3549973 - RNA, 16 nt, Human
uuuuaucaugcauguc

SEQ ID NO: 3549974 - RNA, 16 nt, Human
uuuuauccaaucuugu

SEQ ID NO: 3549975 - RNA, 22 nt, Human
uuuuaucuauucugagaaaaca

SEQ ID NO: 3549976 - RNA, 12 nt, Human
uuuuuaaccaaa

SEQ ID NO: 3549977 - RNA, 22 nt, Human
uuuuuaacucuacuguguaaua

SEQ ID NO: 3549978 - RNA, 23 nt, Human
uuuuuaagaaaaaggaugcacag

SEQ ID NO: 3549979 - RNA, 17 nt, Human
uuuuuaagaauaucugu

SEQ ID NO: 3549980 - RNA, 18 nt, Human
uuuuuaagaauaucugua

SEQ ID NO: 3549981 - RNA, 15 nt, Human
uuuuuaagauagugu

SEQ ID NO: 3549982 - RNA, 20 nt, Human
uuuuuaagauaguguaacuu

SEQ ID NO: 3549983 - RNA, 20 nt, Human
uuuuuaagcucugagcuguc

SEQ ID NO: 3549984 - RNA, 14 nt, Human
uuuuuaagcuguaa

SEQ ID NO: 3549985 - RNA, 20 nt, Human
uuuuuaagggcccuuuuuca

SEQ ID NO: 3549986 - RNA, 23 nt, Human
uuuuuaaggguuaucuuagaugu

SEQ ID NO: 3549987 - RNA, 13 nt, Human
uuuuuaagugaaa

SEQ ID NO: 3549988 - RNA, 16 nt, Human
uuuuuaagugaaauuu

SEQ ID NO: 3549989 - RNA, 12 nt, Human
uuuuuaauaaac

SEQ ID NO: 3549990 - RNA, 16 nt, Human
uuuuuaauaaauuuca

SEQ ID NO: 3549991 - RNA, 21 nt, Human
uuuuuaauauguaaggaaugc

SEQ ID NO: 3549992 - RNA, 17 nt, Human
uuuuuaaucaugaaauu

SEQ ID NO: 3549993 - RNA, 19 nt, Human
uuuuuaauccgccaauauu

SEQ ID NO: 3549994 - RNA, 22 nt, Human
uuuuuaaucuacugcauuuagg

SEQ ID NO: 3549995 - RNA, 22 nt, Human
uuuuuaaucuagacaauauaca

SEQ ID NO: 3549996 - RNA, 12 nt, Human
uuuuuaaugugc

SEQ ID NO: 3549997 - RNA, 21 nt, Human
uuuuuaaugugcuguguaaag

SEQ ID NO: 3549998 - RNA, 16 nt, Human
uuuuuaauuaaaaacu

SEQ ID NO: 3549999 - RNA, 16 nt, Human
uuuuuaauuuacuugu

SEQ ID NO: 3550000 - RNA, 16 nt, Human
uuuuuaauuuauuuau

SEQ ID NO: 3550001 - RNA, 22 nt, Human
uuuuuacaaauguuaaaaugug

SEQ ID NO: 3550002 - RNA, 13 nt, Human
uuuuuacagcugu

SEQ ID NO: 3550003 - RNA, 22 nt, Human
uuuuuaccuaccacagugucug

SEQ ID NO: 3550004 - RNA, 16 nt, Human
uuuuuacuacaguugu

SEQ ID NO: 3550005 - RNA, 18 nt, Human
uuuuuacucauugaaaug

SEQ ID NO: 3550006 - RNA, 23 nt, Human
uuuuuacucauugaaaugucacg

SEQ ID NO: 3550007 - RNA, 12 nt, Human
uuuuuacugcca

SEQ ID NO: 3550008 - RNA, 13 nt, Human
uuuuuacugccac

SEQ ID NO: 3550009 - RNA, 15 nt, Human
uuuuuacugcucuga

SEQ ID NO: 3550010 - RNA, 11 nt, Human
uuuuuacugug

SEQ ID NO: 3550011 - RNA, 14 nt, Human
uuuuuagaacagaa

SEQ ID NO: 3550012 - RNA, 17 nt, Human
uuuuuagaacagaaaac

SEQ ID NO: 3550013 - RNA, 18 nt, Human
uuuuuagaauaagaauuu

SEQ ID NO: 3550014 - RNA, 23 nt, Human
uuuuuagaauaagaauuugcaua

SEQ ID NO: 3550015 - RNA, 14 nt, Human
uuuuuagacaccuu

SEQ ID NO: 3550016 - RNA, 14 nt, Human
uuuuuagaucaaau

SEQ ID NO: 3550017 - RNA, 20 nt, Human
uuuuuagaugugcugcuuug

SEQ ID NO: 3550018 - RNA, 12 nt, Human
uuuuuaggaaau

SEQ ID NO: 3550019 - RNA, 22 nt, Human
uuuuuaguaaguuaauguauau

SEQ ID NO: 3550020 - RNA, 16 nt, Human
uuuuuaguaaucugua

SEQ ID NO: 3550021 - RNA, 21 nt, Human
uuuuuagugcauccaguuaac

SEQ ID NO: 3550022 - RNA, 12 nt, Human
uuuuuaguugaa

SEQ ID NO: 3550023 - RNA, 20 nt, Human
uuuuuauaaaaauaaauaga

SEQ ID NO: 3550024 - RNA, 12 nt, Human
uuuuuauacagu

SEQ ID NO: 3550025 - RNA, 15 nt, Human
uuuuuauauuaaugu

SEQ ID NO: 3550026 - RNA, 20 nt, Human
uuuuuauauuuacuaaaaug

SEQ ID NO: 3550027 - RNA, 15 nt, Human
uuuuuauauuuaguu

SEQ ID NO: 3550028 - RNA, 21 nt, Human
uuuuuauauuucaaguacacu

SEQ ID NO: 3550029 - RNA, 19 nt, Human
uuuuuauauuugaaauauu

SEQ ID NO: 3550030 - RNA, 20 nt, Human
uuuuuaucgucacugcuuaa

SEQ ID NO: 3550031 - RNA, 18 nt, Human
uuuuuaucuauauaaaau

SEQ ID NO: 3550032 - RNA, 11 nt, Human
uuuuuaucuuu

SEQ ID NO: 3550033 - RNA, 17 nt, Human
uuuuuaucuuuucuaca

SEQ ID NO: 3550034 - RNA, 20 nt, Human
uuuuuaugaggcaaccugau

SEQ ID NO: 3550035 - RNA, 12 nt, Human
uuuuuauggcuu

SEQ ID NO: 3550036 - RNA, 20 nt, Human
uuuuuauggcuuuugugcau

SEQ ID NO: 3550037 - RNA, 14 nt, Human
uuuuuauuaaaaua

SEQ ID NO: 3550038 - RNA, 13 nt, Human
uuuuuauuaugca

SEQ ID NO: 3550039 - RNA, 14 nt, Human
uuuuuauuauuugu

SEQ ID NO: 3550040 - RNA, 13 nt, Human
uuuuuauucauaa

SEQ ID NO: 3550041 - RNA, 11 nt, Human
uuuuuauucuu

SEQ ID NO: 3550042 - RNA, 23 nt, Human
uuuuuauugaaucuauuuaagua

SEQ ID NO: 3550043 - RNA, 18 nt, Human
uuuuuauugaugugcaaa

SEQ ID NO: 3550044 - RNA, 12 nt, Human
uuuuuauugcua

SEQ ID NO: 3550045 - RNA, 17 nt, Human
uuuuuauuuauauguau

SEQ ID NO: 3550046 - RNA, 15 nt, Human
uuuuuauuucuccuu

SEQ ID NO: 3550047 - RNA, 12 nt, Human
uuuuuauuucuu

SEQ ID NO: 3550048 - RNA, 20 nt, Human
uuuuucaaaauagaaaaguu

SEQ ID NO: 3550049 - RNA, 15 nt, Human
uuuuucaaagcaauu

SEQ ID NO: 3550050 - RNA, 17 nt, Human
uuuuucaaguuguaaau

SEQ ID NO: 3550051 - RNA, 21 nt, Human
uuuuucaaguuguaaauaauu

SEQ ID NO: 3550052 - RNA, 17 nt, Human
uuuuucaauauauugaa

SEQ ID NO: 3550053 - RNA, 16 nt, Human
uuuuucaauauuuauu

SEQ ID NO: 3550054 - RNA, 11 nt, Human
uuuuucaaugu

SEQ ID NO: 3550055 - RNA, 12 nt, Human
uuuuucaaugug

SEQ ID NO: 3550056 - RNA, 14 nt, Human
uuuuucaauuaaac

SEQ ID NO: 3550057 - RNA, 15 nt, Human
uuuuucaauuaaacg

SEQ ID NO: 3550058 - RNA, 22 nt, Human
uuuuucacauaaagggaacaaa

SEQ ID NO: 3550059 - RNA, 13 nt, Human
uuuuucacauuuu

SEQ ID NO: 3550060 - RNA, 22 nt, Human
uuuuucacggaaguuuucaaug

SEQ ID NO: 3550061 - RNA, 21 nt, Human
uuuuucagcagacuaugaaua

SEQ ID NO: 3550062 - RNA, 13 nt, Human
uuuuucaguucaa

SEQ ID NO: 3550063 - RNA, 11 nt, Human
uuuuucaguug

SEQ ID NO: 3550064 - RNA, 20 nt, Human
uuuuucaguuguucuuuuua

SEQ ID NO: 3550065 - RNA, 12 nt, Human
uuuuucaguuuu

SEQ ID NO: 3550066 - RNA, 13 nt, Human
uuuuucauaaaca

SEQ ID NO: 3550067 - RNA, 13 nt, Human
uuuuucauauugu

SEQ ID NO: 3550068 - RNA, 15 nt, Human
uuuuucaucuucagu

SEQ ID NO: 3550069 - RNA, 16 nt, Human
uuuuucaugauaauga

SEQ ID NO: 3550070 - RNA, 11 nt, Human
uuuuucauguu

SEQ ID NO: 3550071 - RNA, 22 nt, Human
uuuuucauuaaauaaauuugac

SEQ ID NO: 3550072 - RNA, 20 nt, Human
uuuuuccacuuuguucuuua

SEQ ID NO: 3550073 - RNA, 21 nt, Human
uuuuuccaucauaauucuaau

SEQ ID NO: 3550074 - RNA, 23 nt, Human
uuuuucccaggcaaauaaaauuc

SEQ ID NO: 3550075 - RNA, 14 nt, Human
uuuuuccccaaagu

SEQ ID NO: 3550076 - RNA, 15 nt, Human
uuuuuccccaaaguc

SEQ ID NO: 3550077 - RNA, 16 nt, Human
uuuuuccccaaagucu

SEQ ID NO: 3550078 - RNA, 21 nt, Human
uuuuuccccagacuuguuggc

SEQ ID NO: 3550079 - RNA, 14 nt, Human
uuuuuccguaaaaa

SEQ ID NO: 3550080 - RNA, 16 nt, Human
uuuuuccguaaaaaug

SEQ ID NO: 3550081 - RNA, 19 nt, Human
uuuuuccuagccuguuucu

SEQ ID NO: 3550082 - RNA, 21 nt, Human
uuuuuccuagccuguuucuuc

SEQ ID NO: 3550083 - RNA, 13 nt, Human
uuuuuccucucca

SEQ ID NO: 3550084 - RNA, 19 nt, Human
uuuuuccugugaacacaua

SEQ ID NO: 3550085 - RNA, 15 nt, Human
uuuuuccuuaaucca

SEQ ID NO: 3550086 - RNA, 20 nt, Human
uuuuuccuuaauccagcuga

SEQ ID NO: 3550087 - RNA, 20 nt, Human
uuuuuccuuacauaaacauc

SEQ ID NO: 3550088 - RNA, 18 nt, Human
uuuuuccuucaaaguuua

SEQ ID NO: 3550089 - RNA, 19 nt, Human
uuuuuccuucaaaguuuaa

SEQ ID NO: 3550090 - RNA, 22 nt, Human
uuuuuccuuguccccacacucc

SEQ ID NO: 3550091 - RNA, 10 nt, Human
uuuuuccuuu

SEQ ID NO: 3550092 - RNA, 11 nt, Human
uuuuuccuuuu

SEQ ID NO: 3550093 - RNA, 16 nt, Human
uuuuucguuuguuugu

SEQ ID NO: 3550094 - RNA, 17 nt, Human
uuuuucguuuguuuguu

SEQ ID NO: 3550095 - RNA, 14 nt, Human
uuuuucuaguacac

SEQ ID NO: 3550096 - RNA, 13 nt, Human
uuuuucuauuaaa

SEQ ID NO: 3550097 - RNA, 19 nt, Human
uuuuucuauuaaaagacuc

SEQ ID NO: 3550098 - RNA, 18 nt, Human
uuuuucucaaaguuuuga

SEQ ID NO: 3550099 - RNA, 21 nt, Human
uuuuucucgcuguccuuucua

SEQ ID NO: 3550100 - RNA, 23 nt, Human
uuuuucucugauacagaaaaguu

SEQ ID NO: 3550101 - RNA, 13 nt, Human
uuuuucugauaaa

SEQ ID NO: 3550102 - RNA, 11 nt, Human
uuuuucugauu

SEQ ID NO: 3550103 - RNA, 18 nt, Human
uuuuucugcacuauaugc

SEQ ID NO: 3550104 - RNA, 17 nt, Human
uuuuucugcacugagca

SEQ ID NO: 3550105 - RNA, 11 nt, Human
uuuuucuggac

SEQ ID NO: 3550106 - RNA, 14 nt, Human
uuuuucuguaccag

SEQ ID NO: 3550107 - RNA, 16 nt, Human
uuuuucuguaccaguu

SEQ ID NO: 3550108 - RNA, 11 nt, Human
uuuuucuguau

SEQ ID NO: 3550109 - RNA, 18 nt, Human
uuuuucugugugucaguu

SEQ ID NO: 3550110 - RNA, 23 nt, Human
uuuuucuuguaaauguguuggac

SEQ ID NO: 3550111 - RNA, 19 nt, Human
uuuuucuuuauaagaaagc

SEQ ID NO: 3550112 - RNA, 21 nt, Human
uuuuucuuuucggaaaucuua

SEQ ID NO: 3550113 - RNA, 10 nt, Human
uuuuugaaaa

SEQ ID NO: 3550114 - RNA, 23 nt, Human
uuuuugaaaaagcgaaaaaauca

SEQ ID NO: 3550115 - RNA, 23 nt, Human
uuuuugaaggcagaaagcaaaau

SEQ ID NO: 3550116 - RNA, 19 nt, Human
uuuuugaagucuuguauaa

SEQ ID NO: 3550117 - RNA, 18 nt, Human
uccagaccccuggcuuuu

SEQ ID NO: 3550118 - RNA, 14 nt, Human
uccagacccggcug

SEQ ID NO: 3550119 - RNA, 19 nt, Human
uccagacccggcugcgugg

SEQ ID NO: 3550120 - RNA, 11 nt, Human
uccagaccuga

SEQ ID NO: 3550121 - RNA, 22 nt, Human
uccagacugcuuccaauuuucu

SEQ ID NO: 3550122 - RNA, 12 nt, Human
uuuuugaagugu

SEQ ID NO: 3550123 - RNA, 24 nt, Human
uuuuugaaguguaggcagacacag

SEQ ID NO: 3550124 - RNA, 13 nt, Human
uuuuugacacuga

SEQ ID NO: 3550125 - RNA, 15 nt, Human
uuuuugacacugaaa

SEQ ID NO: 3550126 - RNA, 18 nt, Human
uuuuugacacugaaaguu

SEQ ID NO: 3550127 - RNA, 23 nt, Human
uuuuugacuuuuuuuguaugugu

SEQ ID NO: 3550128 - RNA, 20 nt, Human
uuuuugaggcuaugaauaua

SEQ ID NO: 3550129 - RNA, 15 nt, Human
uuuuugauacuaagc

SEQ ID NO: 3550130 - RNA, 14 nt, Human
uuuuugauagcauu

SEQ ID NO: 3550131 - RNA, 12 nt, Human
uuuuugcaauaa

SEQ ID NO: 3550132 - RNA, 20 nt, Human
uuuuugcaccccaugcuguu

SEQ ID NO: 3550133 - RNA, 22 nt, Human
uuuuugcaccccaugcuguuga

SEQ ID NO: 3550134 - RNA, 22 nt, Human
uuuuuggaagaggacuccuuaa

SEQ ID NO: 3550135 - RNA, 15 nt, Human
uuuuuggaagugaaa

SEQ ID NO: 3550136 - RNA, 19 nt, Human
uuuuuggaagugaaaacuu

SEQ ID NO: 3550137 - RNA, 22 nt, Human
uuuuuggagggguuuaugcuca

SEQ ID NO: 3550138 - RNA, 20 nt, Human
uuuuuggaggugcuuaagca

SEQ ID NO: 3550139 - RNA, 20 nt, Human
uuuuuggaguguuauguauu

SEQ ID NO: 3550140 - RNA, 17 nt, Human
uuuuuggauugacagua

SEQ ID NO: 3550141 - RNA, 19 nt, Human
uuuuuggugauucaaaugg

SEQ ID NO: 3550142 - RNA, 17 nt, Human
uuuuugguggauguaaa

SEQ ID NO: 3550143 - RNA, 19 nt, Human
uuuuugguggauguaaaua

SEQ ID NO: 3550144 - RNA, 21 nt, Human
uuuuugguuaaaaaaaagaau

SEQ ID NO: 3550145 - RNA, 23 nt, Human
uuuuuguaaacuggaauuaaaag

SEQ ID NO: 3550146 - RNA, 20 nt, Human
uuuuuguaaauguguacaua

SEQ ID NO: 3550147 - RNA, 12 nt, Human
uuuuuguaauaa

SEQ ID NO: 3550148 - RNA, 18 nt, Human
uuuuuguacaguuugcug

SEQ ID NO: 3550149 - RNA, 14 nt, Human
uuuuuguaccauuu

SEQ ID NO: 3550150 - RNA, 23 nt, Human
uuuuuguaccauuuuaaaguuag

SEQ ID NO: 3550151 - RNA, 12 nt, Human
uuuuuguacugu

SEQ ID NO: 3550152 - RNA, 14 nt, Human
uuuuuguacuguaa

SEQ ID NO: 3550153 - RNA, 20 nt, Human
uuuuuguagagccagggucu

SEQ ID NO: 3550154 - RNA, 20 nt, Human
uuuuuguagcacugacagau

SEQ ID NO: 3550155 - RNA, 21 nt, Human
uuuuuguagcacugacagauu

SEQ ID NO: 3550156 - RNA, 22 nt, Human
uuuuuguauauugguuuuauga

SEQ ID NO: 3550157 - RNA, 14 nt, Human
uuuuuguaugugug

SEQ ID NO: 3550158 - RNA, 11 nt, Human
uuuuuguauuc

SEQ ID NO: 3550159 - RNA, 11 nt, Human
uuuuuguauuu

SEQ ID NO: 3550160 - RNA, 13 nt, Human
uuuuugugaagac

SEQ ID NO: 3550161 - RNA, 16 nt, Human
uuuuuguuauuaaaca

SEQ ID NO: 3550162 - RNA, 20 nt, Human
uuuuuguucugguccuuuuu

SEQ ID NO: 3550163 - RNA, 22 nt, Human
uuuuuguucuuaauugcacucu

SEQ ID NO: 3550164 - RNA, 20 nt, Human
uuuuuguuucugagaaaaga

SEQ ID NO: 3550165 - RNA, 16 nt, Human
uuuuuguuuguuuugu

SEQ ID NO: 3550166 - RNA, 16 nt, Human
uuuuuguuuuucugcu

SEQ ID NO: 3550167 - RNA, 12 nt, Human
uuuuuuaaaaaa

SEQ ID NO: 3550168 - RNA, 18 nt, Human
uuuuuuaaaaaaagaaaa

SEQ ID NO: 3550169 - RNA, 12 nt, Human
uuuuuuaaagaa

SEQ ID NO: 3550170 - RNA, 10 nt, Human
uuuuuuaaga

SEQ ID NO: 3550171 - RNA, 11 nt, Human
uuuuuuaagau

SEQ ID NO: 3550172 - RNA, 12 nt, Human
uuuuuuaagauu

SEQ ID NO: 3550173 - RNA, 18 nt, Human
uuuuuuaaguucuuauga

SEQ ID NO: 3550174 - RNA, 19 nt, Human
uuuuuuaauccgccaauau

SEQ ID NO: 3550175 - RNA, 12 nt, Human
uuuuuuaaucua

SEQ ID NO: 3550176 - RNA, 12 nt, Human
uuuuuuaauuuu

SEQ ID NO: 3550177 - RNA, 15 nt, Human
uuuuuuauguuuugu

SEQ ID NO: 3550178 - RNA, 11 nt, Human
uuuuuuauucu

SEQ ID NO: 3550179 - RNA, 18 nt, Human
uuuuuucaaaauagaaaa

SEQ ID NO: 3550180 - RNA, 13 nt, Human
uuuuuucaaugug

SEQ ID NO: 3550181 - RNA, 12 nt, Human
uuuuuucagacc

SEQ ID NO: 3550182 - RNA, 11 nt, Human
uuuuuucaucu

SEQ ID NO: 3550183 - RNA, 15 nt, Human
uuuuuucuaccuaua

SEQ ID NO: 3550184 - RNA, 11 nt, Human
uuuuuucugag

SEQ ID NO: 3550185 - RNA, 13 nt, Human
uuuuuugaagugu

SEQ ID NO: 3550186 - RNA, 10 nt, Human
uuuuuugaga

SEQ ID NO: 3550187 - RNA, 17 nt, Human
uuuuuugagagagaguc

SEQ ID NO: 3550188 - RNA, 15 nt, Human
uuuuuugcaagugaa

SEQ ID NO: 3550189 - RNA, 10 nt, Human
uuuuuugcag

SEQ ID NO: 3550190 - RNA, 13 nt, Human
uuuuuugguacaa

SEQ ID NO: 3550191 - RNA, 16 nt, Human
uuuuuugguacaaaaa

SEQ ID NO: 3550192 - RNA, 14 nt, Human
uuuuuuguaccauu

SEQ ID NO: 3550193 - RNA, 12 nt, Human
uuuuuuguaguu

SEQ ID NO: 3550194 - RNA, 12 nt, Human
uuuuuuguugac

SEQ ID NO: 3550195 - RNA, 12 nt, Human
uuuuuuguuuca

SEQ ID NO: 3550196 - RNA, 16 nt, Human
uuuuuuguuuguuugu

SEQ ID NO: 3550197 - RNA, 13 nt, Human
uuuuuuuaaaauc

SEQ ID NO: 3550198 - RNA, 21 nt, Human
uuuuuuuaauagucauuccaa

SEQ ID NO: 3550199 - RNA, 12 nt, Human
uuuuuuuacauu

SEQ ID NO: 3550200 - RNA, 12 nt, Human
uuuuuuuccauu

SEQ ID NO: 3550201 - RNA, 10 nt, Human
uuuuuuuccu

SEQ ID NO: 3550202 - RNA, 11 nt, Human
uuuuuuuccuu

SEQ ID NO: 3550203 - RNA, 13 nt, Human
uuuuuuuccuuuu

SEQ ID NO: 3550204 - RNA, 10 nt, Human
uuuuuuugca

SEQ ID NO: 3550205 - RNA, 13 nt, Human
uuuuuuuguaaua

SEQ ID NO: 3550206 - RNA, 12 nt, Human
uuuuuuugugug

SEQ ID NO: 3550207 - RNA, 14 nt, Human
uuuuuuuguuauua

SEQ ID NO: 3550208 - RNA, 14 nt, Human
uuuuuuuuaaacaa

SEQ ID NO: 3550209 - RNA, 11 nt, Human
uuuuuuuucca

SEQ ID NO: 3550210 - RNA, 13 nt, Human
uuuuuuuucccau

SEQ ID NO: 3550211 - RNA, 13 nt, Human
uuuuuuuugaaaa

SEQ ID NO: 3550212 - RNA, 12 nt, Human
ucccccaacaga

SEQ ID NO: 3550213 - RNA, 16 nt, Human
ucccccaacccccacc

SEQ ID NO: 3550214 - RNA, 21 nt, Human
ucccccacccccuccccaggg

SEQ ID NO: 3550215 - RNA, 21 nt, Human
ucccccaccgguccagcuggc

SEQ ID NO: 3550216 - RNA, 24 nt, Human
ucccccacuacugcagcaccucca

SEQ ID NO: 3550217 - RNA, 12 nt, Human
ucccccacuuuc

SEQ ID NO: 3550218 - RNA, 14 nt, Human
ucccccagccacuc

SEQ ID NO: 3550219 - RNA, 22 nt, Human
ucccccagccaugccagcuggc

SEQ ID NO: 3550220 - RNA, 11 nt, Human
ucccccagccc

SEQ ID NO: 3550221 - RNA, 13 nt, Human
ucccccagcccca

SEQ ID NO: 3550222 - RNA, 15 nt, Human
ucccccagccccauc

SEQ ID NO: 3550223 - RNA, 16 nt, Human
ucccccagccccaucc

SEQ ID NO: 3550224 - RNA, 17 nt, Human
ucccccagccccauccu

SEQ ID NO: 3550225 - RNA, 18 nt, Human
ucccccagcucuggugag

SEQ ID NO: 3550226 - RNA, 14 nt, Human
ucccccauagccac

SEQ ID NO: 3550227 - RNA, 15 nt, Human
ucccccauagccacc

SEQ ID NO: 3550228 - RNA, 23 nt, Human
ucccccaucucgcucccucccag

SEQ ID NO: 3550229 - RNA, 18 nt, Human
uccccccacucccucaca

SEQ ID NO: 3550230 - RNA, 18 nt, Human
uccccccacugcaggccc

SEQ ID NO: 3550231 - RNA, 13 nt, Human
ucccccccaugca

SEQ ID NO: 3550232 - RNA, 18 nt, Human
uccccccccaaccuuucc

SEQ ID NO: 3550233 - RNA, 17 nt, Human
uccccccccuguauagu

SEQ ID NO: 3550234 - RNA, 12 nt, Human
uccccccucacc

SEQ ID NO: 3550235 - RNA, 13 nt, Human
uccccccucccac

SEQ ID NO: 3550236 - RNA, 19 nt, Human
uccccccuccucugaaaca

SEQ ID NO: 3550237 - RNA, 22 nt, Human
uccccccuccucugaaacagcu

SEQ ID NO: 3550238 - RNA, 20 nt, Human
ucccccgcaaugugccccca

SEQ ID NO: 3550239 - RNA, 21 nt, Human
ucccccguagaaaucccccuu

SEQ ID NO: 3550240 - RNA, 14 nt, Human
ucccccuagccauu

SEQ ID NO: 3550241 - RNA, 15 nt, Human
ucccccuagccauuu

SEQ ID NO: 3550242 - RNA, 16 nt, Human
ucccccuagccauuuu

SEQ ID NO: 3550243 - RNA, 16 nt, Human
ucccccuccaccugcu

SEQ ID NO: 3550244 - RNA, 17 nt, Human
ucccccucccagggcca

SEQ ID NO: 3550245 - RNA, 18 nt, Human
ucccccucccagggccag

SEQ ID NO: 3550246 - RNA, 20 nt, Human
ucccccucccccacugccau

SEQ ID NO: 3550247 - RNA, 20 nt, Human
ucccccucccccuucuccca

SEQ ID NO: 3550248 - RNA, 20 nt, Human
ucccccuccuucccagcugc

SEQ ID NO: 3550249 - RNA, 13 nt, Human
ucccccugcccca

SEQ ID NO: 3550250 - RNA, 12 nt, Human
ucccccugcccu

SEQ ID NO: 3550251 - RNA, 22 nt, Human
ucccccugcccucguggccagc

SEQ ID NO: 3550252 - RNA, 19 nt, Human
ucccccugcuuccaccuca

SEQ ID NO: 3550253 - RNA, 23 nt, Human
ucccccuggccaccaccccccac

SEQ ID NO: 3550254 - RNA, 10 nt, Human
ucccccuggg

SEQ ID NO: 3550255 - RNA, 14 nt, Human
ucccccugggcucu

SEQ ID NO: 3550256 - RNA, 15 nt, Human
ucccccugggcucug

SEQ ID NO: 3550257 - RNA, 10 nt, Human
ucccccuucu

SEQ ID NO: 3550258 - RNA, 12 nt, Human
ucccccuugcca

SEQ ID NO: 3550259 - RNA, 16 nt, Human
ucccccuuucuuccuc

SEQ ID NO: 3550260 - RNA, 21 nt, Human
ucccccuuucuuccucauucc

SEQ ID NO: 3550261 - RNA, 19 nt, Human
ucccccuuuucugcauuuu

SEQ ID NO: 3550262 - RNA, 21 nt, Human
ucccccuuuuuugucccccaa

SEQ ID NO: 3550263 - RNA, 17 nt, Human
uccccgacuggggcagg

SEQ ID NO: 3550264 - RNA, 21 nt, Human
uccccgagggaugaugccaca

SEQ ID NO: 3550265 - RNA, 22 nt, Human
uccccgagggaugaugccacac

SEQ ID NO: 3550266 - RNA, 23 nt, Human
uccccgauaccaugcuguaagga

SEQ ID NO: 3550267 - RNA, 14 nt, Human
uccccgcacccccc

SEQ ID NO: 3550268 - RNA, 18 nt, Human
uccccgcagcccuggcag

SEQ ID NO: 3550269 - RNA, 14 nt, Human
uccccgccuggcca

SEQ ID NO: 3550270 - RNA, 15 nt, Human
uccccgccuggccag

SEQ ID NO: 3550271 - RNA, 17 nt, Human
uccccgccuggccagga

SEQ ID NO: 3550272 - RNA, 22 nt, Human
uccccgccuuccgccccuuccc

SEQ ID NO: 3550273 - RNA, 15 nt, Human
uccccgcuaaggaag

SEQ ID NO: 3550274 - RNA, 16 nt, Human
uccccgcugcugugca

SEQ ID NO: 3550275 - RNA, 17 nt, Human
uccccgcugcugugcaa

SEQ ID NO: 3550276 - RNA, 15 nt, Human
uccccggaguucagu

SEQ ID NO: 3550277 - RNA, 14 nt, Human
uccccggcacccuc

SEQ ID NO: 3550278 - RNA, 18 nt, Human
uccccggcacccucuggc

SEQ ID NO: 3550279 - RNA, 19 nt, Human
uccccggcacccucuggcc

SEQ ID NO: 3550280 - RNA, 17 nt, Human
uccccgggcaucuuugg

SEQ ID NO: 3550281 - RNA, 21 nt, Human
uccccgggcaucuuuggggag

SEQ ID NO: 3550282 - RNA, 16 nt, Human
uccccggggcccaggg

SEQ ID NO: 3550283 - RNA, 15 nt, Human
uccccgucucauucc

SEQ ID NO: 3550284 - RNA, 20 nt, Human
uccccuaagcagaccacuga

SEQ ID NO: 3550285 - RNA, 15 nt, Human
uccccuagaguccca

SEQ ID NO: 3550286 - RNA, 16 nt, Human
uccccuagagucccag

SEQ ID NO: 3550287 - RNA, 22 nt, Human
uccccuaguaagugccuuccau

SEQ ID NO: 3550288 - RNA, 18 nt, Human
uccccuauccacccagcc

SEQ ID NO: 3550289 - RNA, 20 nt, Human
uccccuauccacccagccca

SEQ ID NO: 3550290 - RNA, 21 nt, Human
uccccuauggaauuuauaauu

SEQ ID NO: 3550291 - RNA, 23 nt, Human
uccccuauguggaaguggggcgg

SEQ ID NO: 3550292 - RNA, 17 nt, Human
uccccucaaagucugca

SEQ ID NO: 3550293 - RNA, 20 nt, Human
uccccucacagccucugacc

SEQ ID NO: 3550294 - RNA, 15 nt, Human
uccccucaccuccuc

SEQ ID NO: 3550295 - RNA, 17 nt, Human
uccccucaccuccucua

SEQ ID NO: 3550296 - RNA, 13 nt, Human
uccccucacugga

SEQ ID NO: 3550297 - RNA, 13 nt, Human
uccccuccaaccu

SEQ ID NO: 3550298 - RNA, 16 nt, Human
uccccuccaagguaug

SEQ ID NO: 3550299 - RNA, 14 nt, Human
uccccuccaggagu

SEQ ID NO: 3550300 - RNA, 18 nt, Human
uccccuccaucccuggcc

SEQ ID NO: 3550301 - RNA, 13 nt, Human
uccccucccagag

SEQ ID NO: 3550302 - RNA, 19 nt, Human
uccccucccccaccccugc

SEQ ID NO: 3550303 - RNA, 20 nt, Human
uccccucccccaccccugcu

SEQ ID NO: 3550304 - RNA, 17 nt, Human
uccccuccccugcugca

SEQ ID NO: 3550305 - RNA, 12 nt, Human
uccccucccugg

SEQ ID NO: 3550306 - RNA, 16 nt, Human
uccccucccuggcucc

SEQ ID NO: 3550307 - RNA, 16 nt, Human
uccccucccuggguuc

SEQ ID NO: 3550308 - RNA, 13 nt, Human
uccccucccuguc

SEQ ID NO: 3550309 - RNA, 17 nt, Human
uccccuccgccaggcga

SEQ ID NO: 3550310 - RNA, 20 nt, Human
uccccuccgccaggcgagau

SEQ ID NO: 3550311 - RNA, 19 nt, Human
uccccuccggacuggugcc

SEQ ID NO: 3550312 - RNA, 20 nt, Human
uccccuccggacuggugccc

SEQ ID NO: 3550313 - RNA, 17 nt, Human
uccccuccuaccccucc

SEQ ID NO: 3550314 - RNA, 20 nt, Human
uccccuccuaccccucccag

SEQ ID NO: 3550315 - RNA, 16 nt, Human
uccuuggucuuuguau

SEQ ID NO: 3550316 - RNA, 22 nt, Human
uccuuggugucgggcaugacac

SEQ ID NO: 3550317 - RNA, 19 nt, Human
uccuuguagccuuuugacu

SEQ ID NO: 3550318 - RNA, 20 nt, Human
uccuuguagccuuuugacuu

SEQ ID NO: 3550319 - RNA, 14 nt, Human
uccuuguccccaca

SEQ ID NO: 3550320 - RNA, 22 nt, Human
uccuuguccccacacuccuaca

SEQ ID NO: 3550321 - RNA, 21 nt, Human
uccuugucuuggcagccuacu

SEQ ID NO: 3550322 - RNA, 19 nt, Human
uccuugugaugugcacgua

SEQ ID NO: 3550323 - RNA, 16 nt, Human
uccuugugccagagaa

SEQ ID NO: 3550324 - RNA, 16 nt, Human
uccuuguggcacauuu

SEQ ID NO: 3550325 - RNA, 13 nt, Human
uccuuguggcaga

SEQ ID NO: 3550326 - RNA, 19 nt, Human
uccuuguggccugggccuc

SEQ ID NO: 3550327 - RNA, 18 nt, Human
uccuugugggccugggcu

SEQ ID NO: 3550328 - RNA, 14 nt, Human
uccuuguuccuaga

SEQ ID NO: 3550329 - RNA, 14 nt, Human
uccuuguuguuggu

SEQ ID NO: 3550330 - RNA, 20 nt, Human
uccuuguuuaucagauacau

SEQ ID NO: 3550331 - RNA, 21 nt, Human
uccuuguuuaucagauacauc

SEQ ID NO: 3550332 - RNA, 15 nt, Human
uccuuuaaaaaagaa

SEQ ID NO: 3550333 - RNA, 13 nt, Human
uccuuuaauugua

SEQ ID NO: 3550334 - RNA, 15 nt, Human
uccuuuaauuguaaa

SEQ ID NO: 3550335 - RNA, 21 nt, Human
uccuuuaauuuuuuacuauuu

SEQ ID NO: 3550336 - RNA, 15 nt, Human
uccuuuacaaaagaa

SEQ ID NO: 3550337 - RNA, 19 nt, Human
uccuuuacacucaggcuuu

SEQ ID NO: 3550338 - RNA, 14 nt, Human
uccuuuacguguuu

SEQ ID NO: 3550339 - RNA, 15 nt, Human
uccuuuacuuucccu

SEQ ID NO: 3550340 - RNA, 17 nt, Human
uccuuuacuuucccuug

SEQ ID NO: 3550341 - RNA, 22 nt, Human
uccuuuagauagcagccuggcu

SEQ ID NO: 3550342 - RNA, 13 nt, Human
uccuuuaugugaa

SEQ ID NO: 3550343 - RNA, 21 nt, Human
uccuuuauguggaaaacagaa

SEQ ID NO: 3550344 - RNA, 20 nt, Human
uccuuucacaaccuucugug

SEQ ID NO: 3550345 - RNA, 13 nt, Human
uccuuucacuucu

SEQ ID NO: 3550346 - RNA, 22 nt, Human
uccuuucagggaauuucaggaa

SEQ ID NO: 3550347 - RNA, 14 nt, Human
uccuuuccaccuuc

SEQ ID NO: 3550348 - RNA, 19 nt, Human
uccuuuccaccuucucaca

SEQ ID NO: 3550349 - RNA, 14 nt, Human
uccuuuccagguau

SEQ ID NO: 3550350 - RNA, 21 nt, Human
uccuuuccaguggccuggcuc

SEQ ID NO: 3550351 - RNA, 16 nt, Human
uccuuuccccagccca

SEQ ID NO: 3550352 - RNA, 20 nt, Human
uccuuuccccagcccagggu

SEQ ID NO: 3550353 - RNA, 18 nt, Human
uccuuucccuuccucuuc

SEQ ID NO: 3550354 - RNA, 13 nt, Human
uccuuucccuuua

SEQ ID NO: 3550355 - RNA, 15 nt, Human
uccuuucuauugaaa

SEQ ID NO: 3550356 - RNA, 16 nt, Human
uccuuucuccagccag

SEQ ID NO: 3550357 - RNA, 17 nt, Human
uccuuucuccagccagc

SEQ ID NO: 3550358 - RNA, 18 nt, Human
uccuuucuccagccagca

SEQ ID NO: 3550359 - RNA, 23 nt, Human
uccuuucucuuucucucuucccu

SEQ ID NO: 3550360 - RNA, 12 nt, Human
uccuuucuugau

SEQ ID NO: 3550361 - RNA, 22 nt, Human
uccuuucuugguucauaaauga

SEQ ID NO: 3550362 - RNA, 15 nt, Human
uccuuucuuucuaac

SEQ ID NO: 3550363 - RNA, 20 nt, Human
uccuuugaagaggaaaauga

SEQ ID NO: 3550364 - RNA, 22 nt, Human
uccuuugaagauaguaacugua

SEQ ID NO: 3550365 - RNA, 20 nt, Human
uccuuugaauccucucucug

SEQ ID NO: 3550366 - RNA, 22 nt, Human
uccuuugaucaguauaauuuuu

SEQ ID NO: 3550367 - RNA, 17 nt, Human
uccuuugcacugagggc

SEQ ID NO: 3550368 - RNA, 20 nt, Human
uccuuugcacugagggccac

SEQ ID NO: 3550369 - RNA, 14 nt, Human
uccuuugcagggca

SEQ ID NO: 3550370 - RNA, 17 nt, Human
uccuuugcagggcagcc

SEQ ID NO: 3550371 - RNA, 17 nt, Human
uccuuugcgccugugac

SEQ ID NO: 3550372 - RNA, 23 nt, Human
uccuuuguauauuauuucuagga

SEQ ID NO: 3550373 - RNA, 15 nt, Human
uccuuuguauucugu

SEQ ID NO: 3550374 - RNA, 18 nt, Human
uccuuuguauucugucuu

SEQ ID NO: 3550375 - RNA, 18 nt, Human
uccuuuguguguguguca

SEQ ID NO: 3550376 - RNA, 13 nt, Human
uccuuuguuacuu

SEQ ID NO: 3550377 - RNA, 15 nt, Human
uccuuuguucccggc

SEQ ID NO: 3550378 - RNA, 24 nt, Human
uccuuuguucuuaccuguaugucu

SEQ ID NO: 3550379 - RNA, 23 nt, Human
uccuuuuaaagaaaaaaauugaa

SEQ ID NO: 3550380 - RNA, 20 nt, Human
uccuuuuaaaucuugauacc

SEQ ID NO: 3550381 - RNA, 12 nt, Human
uccuuuuaacug

SEQ ID NO: 3550382 - RNA, 17 nt, Human
uccuuuuaauuuuccug

SEQ ID NO: 3550383 - RNA, 15 nt, Human
uccuuuuauagguga

SEQ ID NO: 3550384 - RNA, 12 nt, Human
uccuuuuauguu

SEQ ID NO: 3550385 - RNA, 23 nt, Human
uccuuuucacaguucucuccuuc

SEQ ID NO: 3550386 - RNA, 12 nt, Human
uccuuuucacug

SEQ ID NO: 3550387 - RNA, 21 nt, Human
uccuuuucauaggucugaaau

SEQ ID NO: 3550388 - RNA, 13 nt, Human
uccuuuuccagag

SEQ ID NO: 3550389 - RNA, 14 nt, Human
uccuuuucccugcu

SEQ ID NO: 3550390 - RNA, 10 nt, Human
uccuuuucuu

SEQ ID NO: 3550391 - RNA, 10 nt, Human
ucgaggccug

SEQ ID NO: 3550392 - RNA, 12 nt, Human
ucgaggccugaa

SEQ ID NO: 3550393 - RNA, 20 nt, Human
ucgaggccugaagccagcug

SEQ ID NO: 3550394 - RNA, 17 nt, Human
ucgaggcggaucuuugg

SEQ ID NO: 3550395 - RNA, 23 nt, Human
ucgagguagguggaucaccugag

SEQ ID NO: 3550396 - RNA, 20 nt, Human
ucgaggugccuucuucaggg

SEQ ID NO: 3550397 - RNA, 13 nt, Human
ucgaguacugugg

SEQ ID NO: 3550398 - RNA, 14 nt, Human
ucgaguacuguggg

SEQ ID NO: 3550399 - RNA, 20 nt, Human
ucgagugccgcaucucacag

SEQ ID NO: 3550400 - RNA, 16 nt, Human
ucgaguggcccaacag

SEQ ID NO: 3550401 - RNA, 17 nt, Human
ucgaguuacagacaaag

SEQ ID NO: 3550402 - RNA, 17 nt, Human
ucgaguuacagccuggg

SEQ ID NO: 3550403 - RNA, 15 nt, Human
ucgaguucccagggu

SEQ ID NO: 3550404 - RNA, 14 nt, Human
ucgauacugcgacu

SEQ ID NO: 3550405 - RNA, 19 nt, Human
ucgauacugcgacuuucug

SEQ ID NO: 3550406 - RNA, 21 nt, Human
ucgauccaaauugugcuucuc

SEQ ID NO: 3550407 - RNA, 20 nt, Human
ucgaucucauucaguauuaa

SEQ ID NO: 3550408 - RNA, 16 nt, Human
ucgauguuauguaaaa

SEQ ID NO: 3550409 - RNA, 18 nt, Human
ucgauuagacuggacagc

SEQ ID NO: 3550410 - RNA, 13 nt, Human
ucgauuuuguauc

SEQ ID NO: 3550411 - RNA, 12 nt, Human
ucgcaccuacca

SEQ ID NO: 3550412 - RNA, 18 nt, Human
ucgcaccuaccaucaggg

SEQ ID NO: 3550413 - RNA, 19 nt, Human
ucgcacucuggcagcaccg

SEQ ID NO: 3550414 - RNA, 12 nt, Human
ucgcagagaggc

SEQ ID NO: 3550415 - RNA, 19 nt, Human
ucgcagagcuuuucagauu

SEQ ID NO: 3550416 - RNA, 19 nt, Human
ucgcagccacccugaggag

SEQ ID NO: 3550417 - RNA, 21 nt, Human
ucgcaggauucuuccucccuc

SEQ ID NO: 3550418 - RNA, 14 nt, Human
ucgcaucaaaagac

SEQ ID NO: 3550419 - RNA, 17 nt, Human
ucgcaucaaaagacaau

SEQ ID NO: 3550420 - RNA, 15 nt, Human
ucgcaucauugcaga

SEQ ID NO: 3550421 - RNA, 14 nt, Human
ucgcaucuucccaa

SEQ ID NO: 3550422 - RNA, 13 nt, Human
ucgcauuugucaa

SEQ ID NO: 3550423 - RNA, 16 nt, Human
ucgccaacauggugaa

SEQ ID NO: 3550424 - RNA, 18 nt, Human
ucgccaccuggcauuccu

SEQ ID NO: 3550425 - RNA, 20 nt, Human
ucgccagcugaugacucaag

SEQ ID NO: 3550426 - RNA, 13 nt, Human
ucgccaugccggg

SEQ ID NO: 3550427 - RNA, 14 nt, Human
ucgccaugccgggg

SEQ ID NO: 3550428 - RNA, 14 nt, Human
ucgcccaccgcaug

SEQ ID NO: 3550429 - RNA, 11 nt, Human
ucgcccaggag

SEQ ID NO: 3550430 - RNA, 14 nt, Human
ucgcccaggcugga

SEQ ID NO: 3550431 - RNA, 19 nt, Human
ucgcccaggcuggagugca

SEQ ID NO: 3550432 - RNA, 17 nt, Human
ucgcccagucccagcag

SEQ ID NO: 3550433 - RNA, 13 nt, Human
ucgcccccaccuc

SEQ ID NO: 3550434 - RNA, 22 nt, Human
ucgcccgagcuguuuauguuuu

SEQ ID NO: 3550435 - RNA, 15 nt, Human
ucgcccgcccacugu

SEQ ID NO: 3550436 - RNA, 17 nt, Human
ucgcccgcccacugucc

SEQ ID NO: 3550437 - RNA, 18 nt, Human
ucgcccgcccacuguccu

SEQ ID NO: 3550438 - RNA, 20 nt, Human
ucgcccgcccacuguccugg

SEQ ID NO: 3550439 - RNA, 13 nt, Human
ucgcccucccagg

SEQ ID NO: 3550440 - RNA, 14 nt, Human
ucgcccuccuuucu

SEQ ID NO: 3550441 - RNA, 16 nt, Human
ucgcccuccuuucugu

SEQ ID NO: 3550442 - RNA, 18 nt, Human
ucgcccuggacugugugc

SEQ ID NO: 3550443 - RNA, 13 nt, Human
ucgcccuggcagg

SEQ ID NO: 3550444 - RNA, 17 nt, Human
ucgcccuggcaggcagg

SEQ ID NO: 3550445 - RNA, 23 nt, Human
ucgcccuuacuucuugcccuggg

SEQ ID NO: 3550446 - RNA, 17 nt, Human
ucgccggaucugaggga

SEQ ID NO: 3550447 - RNA, 15 nt, Human
ucgccgucugugaau

SEQ ID NO: 3550448 - RNA, 11 nt, Human
ucgccugacaa

SEQ ID NO: 3550449 - RNA, 22 nt, Human
ucgccugacaaccacuggucug

SEQ ID NO: 3550450 - RNA, 14 nt, Human
ucgccuggagcccu

SEQ ID NO: 3550451 - RNA, 18 nt, Human
ucgccuguggagcucagc

SEQ ID NO: 3550452 - RNA, 19 nt, Human
ucgccuguggagcucagcc

SEQ ID NO: 3550453 - RNA, 19 nt, Human
ucgccuuccaccucuggga

SEQ ID NO: 3550454 - RNA, 15 nt, Human
ucgccuucccuccug

SEQ ID NO: 3550455 - RNA, 16 nt, Human
ucgccuucccuccugc

SEQ ID NO: 3550456 - RNA, 14 nt, Human
ucgccuuucagcag

SEQ ID NO: 3550457 - RNA, 12 nt, Human
ucgccuuuccuc

SEQ ID NO: 3550458 - RNA, 13 nt, Human
ucgccuuuccucu

SEQ ID NO: 3550459 - RNA, 21 nt, Human
ucgccuuuccucucuauauuu

SEQ ID NO: 3550460 - RNA, 17 nt, Human
ucgcgcccgccccugca

SEQ ID NO: 3550461 - RNA, 19 nt, Human
ucgcgcccgccccugcagc

SEQ ID NO: 3550462 - RNA, 16 nt, Human
ucgcgcugccugugug

SEQ ID NO: 3550463 - RNA, 22 nt, Human
ucgcggcccucaguagucccug

SEQ ID NO: 3550464 - RNA, 14 nt, Human
ucgcuccccacucu

SEQ ID NO: 3550465 - RNA, 17 nt, Human
ucgcucccucccaggac

SEQ ID NO: 3550466 - RNA, 18 nt, Human
ucgcuccucaaccccucc

SEQ ID NO: 3550467 - RNA, 15 nt, Human
ucgcuccugcagccc

SEQ ID NO: 3550468 - RNA, 14 nt, Human
ucgcuccugugucu

SEQ ID NO: 3550469 - RNA, 14 nt, Human
ucgcucucaguucu

SEQ ID NO: 3550470 - RNA, 15 nt, Human
ucgcucugcuggccu

SEQ ID NO: 3550471 - RNA, 17 nt, Human
ucgcucugcuggccugg

SEQ ID NO: 3550472 - RNA, 19 nt, Human
ucgcucuguuacccagggu

SEQ ID NO: 3550473 - RNA, 18 nt, Human
ucgcugacuucauggaau

SEQ ID NO: 3550474 - RNA, 22 nt, Human
ucgcugauauauguguuuuuca

SEQ ID NO: 3550475 - RNA, 16 nt, Human
ucgcugaugcugggcu

SEQ ID NO: 3550476 - RNA, 22 nt, Human
ucgcugaugcugggcugggugc

SEQ ID NO: 3550477 - RNA, 18 nt, Human
ucgcuggcccccacuggc

SEQ ID NO: 3550478 - RNA, 11 nt, Human
ucgcuguccuu

SEQ ID NO: 3550479 - RNA, 16 nt, Human
ucgcugugccacaggc

SEQ ID NO: 3550480 - RNA, 16 nt, Human
ucgcugugguuguuuu

SEQ ID NO: 3550481 - RNA, 15 nt, Human
ucgcuguugcugaau

SEQ ID NO: 3550482 - RNA, 15 nt, Human
ucuaaugucuucauu

SEQ ID NO: 3550483 - RNA, 17 nt, Human
ucuaaugucuucauuuc

SEQ ID NO: 3550484 - RNA, 12 nt, Human
ucuaauguuuaa

SEQ ID NO: 3550485 - RNA, 14 nt, Human
ucuaauguuugcau

SEQ ID NO: 3550486 - RNA, 15 nt, Human
ucuaauguuugcaua

SEQ ID NO: 3550487 - RNA, 16 nt, Human
ucuaauuaaaacacuu

SEQ ID NO: 3550488 - RNA, 18 nt, Human
ucuaauuauguagcucuu

SEQ ID NO: 3550489 - RNA, 21 nt, Human
ucuaauuauguagcucuuugu

SEQ ID NO: 3550490 - RNA, 13 nt, Human
ucuaauucuaacc

SEQ ID NO: 3550491 - RNA, 21 nt, Human
ucuaauucuaaccagagcaag

SEQ ID NO: 3550492 - RNA, 15 nt, Human
ucuaauucucugugg

SEQ ID NO: 3550493 - RNA, 12 nt, Human
ucuaauucugau

SEQ ID NO: 3550494 - RNA, 14 nt, Human
ucuaauucugauuc

SEQ ID NO: 3550495 - RNA, 18 nt, Human
ucuaauucuuccuuugua

SEQ ID NO: 3550496 - RNA, 21 nt, Human
ucuaauugaauuuucaagcau

SEQ ID NO: 3550497 - RNA, 17 nt, Human
ucuaauugcaucucaaa

SEQ ID NO: 3550498 - RNA, 15 nt, Human
ucuaauugccaugua

SEQ ID NO: 3550499 - RNA, 15 nt, Human
ucuaauugcuuauuu

SEQ ID NO: 3550500 - RNA, 22 nt, Human
ucuaauuggaagaaauuccugu

SEQ ID NO: 3550501 - RNA, 23 nt, Human
ucuaauuuaucuugucucugggc

SEQ ID NO: 3550502 - RNA, 20 nt, Human
ucuaauuucaaaaauauaac

SEQ ID NO: 3550503 - RNA, 22 nt, Human
ucuaauuucaaaaauauaacuu

SEQ ID NO: 3550504 - RNA, 19 nt, Human
ucuaauuuuauuuugugaa

SEQ ID NO: 3550505 - RNA, 16 nt, Human
ucuaauuuuggaugga

SEQ ID NO: 3550506 - RNA, 16 nt, Human
ucuaauuuuuaagcaa

SEQ ID NO: 3550507 - RNA, 18 nt, Human
ucuacaaaauccugauga

SEQ ID NO: 3550508 - RNA, 13 nt, Human
ucuacaaauaauu

SEQ ID NO: 3550509 - RNA, 18 nt, Human
ucuacaaauauaagauuu

SEQ ID NO: 3550510 - RNA, 19 nt, Human
ucuacaaauauaagauuuu

SEQ ID NO: 3550511 - RNA, 16 nt, Human
ucuacaaugacacaca

SEQ ID NO: 3550512 - RNA, 21 nt, Human
ucuacacauauaaauugucuu

SEQ ID NO: 3550513 - RNA, 21 nt, Human
ucuacaccuugcuuuuuuacu

SEQ ID NO: 3550514 - RNA, 21 nt, Human
ucuacacuaagagagaaugag

SEQ ID NO: 3550515 - RNA, 17 nt, Human
ucuacacucuccugggc

SEQ ID NO: 3550516 - RNA, 14 nt, Human
ucuacacugugcug

SEQ ID NO: 3550517 - RNA, 13 nt, Human
ucuacagaaaaac

SEQ ID NO: 3550518 - RNA, 16 nt, Human
ucuacagacuucucca

SEQ ID NO: 3550519 - RNA, 17 nt, Human
ucuacagacuucuccag

SEQ ID NO: 3550520 - RNA, 19 nt, Human
ucuacagagcuucccugac

SEQ ID NO: 3550521 - RNA, 16 nt, Human
ucuacagaggccaugg

SEQ ID NO: 3550522 - RNA, 17 nt, Human
ucuacagaugucccauu

SEQ ID NO: 3550523 - RNA, 16 nt, Human
ucuacagcaaauuuau

SEQ ID NO: 3550524 - RNA, 17 nt, Human
ucuacagcaaauuuaua

SEQ ID NO: 3550525 - RNA, 20 nt, Human
ucuacagcuaaucagcauuc

SEQ ID NO: 3550526 - RNA, 23 nt, Human
ucuacagcuaaucagcauucuca

SEQ ID NO: 3550527 - RNA, 16 nt, Human
ucuacagcucccccag

SEQ ID NO: 3550528 - RNA, 23 nt, Human
ucuacagguuuggguacaagugg

SEQ ID NO: 3550529 - RNA, 18 nt, Human
ucuacagucucgucucuu

SEQ ID NO: 3550530 - RNA, 13 nt, Human
ucuacaguguccu

SEQ ID NO: 3550531 - RNA, 22 nt, Human
ucuacauaaguaauucaagaaa

SEQ ID NO: 3550532 - RNA, 16 nt, Human
ucuacauaugaucugu

SEQ ID NO: 3550533 - RNA, 16 nt, Human
ucuacaucuucugccu

SEQ ID NO: 3550534 - RNA, 14 nt, Human
ucuacauuauugcu

SEQ ID NO: 3550535 - RNA, 22 nt, Human
ucuacauuucacauuauucugg

SEQ ID NO: 3550536 - RNA, 17 nt, Human
ucuaccaaaaaucucaa

SEQ ID NO: 3550537 - RNA, 17 nt, Human
ucuaccaaccuguucaa

SEQ ID NO: 3550538 - RNA, 16 nt, Human
ucuaccaacuggaagc

SEQ ID NO: 3550539 - RNA, 21 nt, Human
ucuaccagacuguguauucau

SEQ ID NO: 3550540 - RNA, 23 nt, Human
ucuaccagugcaggcuggccagc

SEQ ID NO: 3550541 - RNA, 15 nt, Human
ucuaccaucucccuc

SEQ ID NO: 3550542 - RNA, 17 nt, Human
ucuaccauuuucugguu

SEQ ID NO: 3550543 - RNA, 16 nt, Human
ucuacccaaacccuag

SEQ ID NO: 3550544 - RNA, 22 nt, Human
ucuacccaaacccuagguuccc

SEQ ID NO: 3550545 - RNA, 16 nt, Human
ucuacccagcccaucu

SEQ ID NO: 3550546 - RNA, 19 nt, Human
ucuacccagcgagcccugg

SEQ ID NO: 3550547 - RNA, 20 nt, Human
ucuacccagcgagcccuggu

SEQ ID NO: 3550548 - RNA, 18 nt, Human
ucuaccccagacuagaug

SEQ ID NO: 3550549 - RNA, 23 nt, Human
ucuaccccagacuagauguagua

SEQ ID NO: 3550550 - RNA, 14 nt, Human
ucuacccuggcacu

SEQ ID NO: 3550551 - RNA, 13 nt, Human
ucuacccugggau

SEQ ID NO: 3550552 - RNA, 18 nt, Human
ucuaccggagagagaaug

SEQ ID NO: 3550553 - RNA, 21 nt, Human
ucuaccuagauuuaauauaaa

SEQ ID NO: 3550554 - RNA, 22 nt, Human
ucuaccuagauuuaauauaaag

SEQ ID NO: 3550555 - RNA, 15 nt, Human
ucuaccugccacuca

SEQ ID NO: 3550556 - RNA, 12 nt, Human
ucuaccuggagg

SEQ ID NO: 3550557 - RNA, 13 nt, Human
ucuaccuggaggg

SEQ ID NO: 3550558 - RNA, 15 nt, Human
ucuaccuggucuggu

SEQ ID NO: 3550559 - RNA, 14 nt, Human
ucuaccuucauaag

SEQ ID NO: 3550560 - RNA, 20 nt, Human
ucuaccuucuccccagcucc

SEQ ID NO: 3550561 - RNA, 16 nt, Human
ucuaccuugaggucuu

SEQ ID NO: 3550562 - RNA, 17 nt, Human
ucuaccuugaggucuuu

SEQ ID NO: 3550563 - RNA, 21 nt, Human
ucuacggaucaucaacaagau

SEQ ID NO: 3550564 - RNA, 19 nt, Human
ucuacuaaugccucuucau

SEQ ID NO: 3550565 - RNA, 18 nt, Human
ucuacuaauuccacaccu

SEQ ID NO: 3550566 - RNA, 20 nt, Human
ucuacucacuuuucccacuc

SEQ ID NO: 3550567 - RNA, 14 nt, Human
ucuacucagaaauu

SEQ ID NO: 3550568 - RNA, 14 nt, Human
ucuacucauauaua

SEQ ID NO: 3550569 - RNA, 18 nt, Human
ucuacucauuccccgggg

SEQ ID NO: 3550570 - RNA, 22 nt, Human
ucuacucauuuaaaguauuuua

SEQ ID NO: 3550571 - RNA, 17 nt, Human
ucuacuccuaccucagc

SEQ ID NO: 3550572 - RNA, 19 nt, Human
ucuacuccuaccucagccu

SEQ ID NO: 3550573 - RNA, 22 nt, Human
ucuacuccuaccucagccuaga

SEQ ID NO: 3550574 - RNA, 19 nt, Human
ucuacuccuuguaaagacu

SEQ ID NO: 3550575 - RNA, 13 nt, Human
ucuacucucccau

SEQ ID NO: 3550576 - RNA, 18 nt, Human
ucuacucucuuuuaauau

SEQ ID NO: 3550577 - RNA, 16 nt, Human
ucuacucuuaagccau

SEQ ID NO: 3550578 - RNA, 21 nt, Human
ucuacucuuaaguuucucagc

SEQ ID NO: 3550579 - RNA, 15 nt, Human
ucuacucuuuuuguu

SEQ ID NO: 3550580 - RNA, 19 nt, Human
ucuacugggaaggcuacuu

SEQ ID NO: 3550581 - RNA, 20 nt, Human
ucuacugggaaggcuacuuc

SEQ ID NO: 3550582 - RNA, 16 nt, Human
ucuacuggucuugugg

SEQ ID NO: 3550583 - RNA, 20 nt, Human
ucuacuggucuuguggaauu

SEQ ID NO: 3550584 - RNA, 22 nt, Human
ucuacugucaaaugaugugcaa

SEQ ID NO: 3550585 - RNA, 19 nt, Human
ucuacuuacacaucuucca

SEQ ID NO: 3550586 - RNA, 20 nt, Human
ucuacuugccagaaccaaau

SEQ ID NO: 3550587 - RNA, 17 nt, Human
ucuacuugcucuggacc

SEQ ID NO: 3550588 - RNA, 18 nt, Human
ucuacuugcucuggaccu

SEQ ID NO: 3550589 - RNA, 19 nt, Human
ucuacuugcucuggaccug

SEQ ID NO: 3550590 - RNA, 21 nt, Human
ucuacuuuauuaauuguuuug

SEQ ID NO: 3550591 - RNA, 16 nt, Human
ucuacuuugaggaaac

SEQ ID NO: 3550592 - RNA, 16 nt, Human
ucuagaaaaacaggca

SEQ ID NO: 3550593 - RNA, 17 nt, Human
ucuagaaaaacaggcac

SEQ ID NO: 3550594 - RNA, 13 nt, Human
ucuagaaagaaua

SEQ ID NO: 3550595 - RNA, 19 nt, Human
ucuagaaagagaaacaguu

SEQ ID NO: 3550596 - RNA, 15 nt, Human
ucuagaacacaggca

SEQ ID NO: 3550597 - RNA, 16 nt, Human
ucuagaagaaaugaaa

SEQ ID NO: 3550598 - RNA, 20 nt, Human
ucuagaagacugucagcuuc

SEQ ID NO: 3550599 - RNA, 20 nt, Human
ucuagaagagucuauugucu

SEQ ID NO: 3550600 - RNA, 21 nt, Human
ucuagaagagucuauugucuc

SEQ ID NO: 3550601 - RNA, 21 nt, Human
ucuagaagccaagggaaaggg

SEQ ID NO: 3550602 - RNA, 18 nt, Human
ucuagaaguuucccuucc

SEQ ID NO: 3550603 - RNA, 19 nt, Human
ucuagaauuuaucacacuu

SEQ ID NO: 3550604 - RNA, 13 nt, Human
ucuagacaacccu

SEQ ID NO: 3550605 - RNA, 17 nt, Human
ucuagacaacccugcaa

SEQ ID NO: 3550606 - RNA, 14 nt, Human
ucuagacaagauau

SEQ ID NO: 3550607 - RNA, 18 nt, Human
ucuagacaagauauugua

SEQ ID NO: 3550608 - RNA, 20 nt, Human
ucuagacaagauauuguaca

SEQ ID NO: 3550609 - RNA, 23 nt, Human
ucuagacaauauacaagccaaag

SEQ ID NO: 3550610 - RNA, 14 nt, Human
ucuagacacugcca

SEQ ID NO: 3550611 - RNA, 18 nt, Human
ucuagaccaggaccuccc

SEQ ID NO: 3550612 - RNA, 14 nt, Human
ucuagacuaaaaga

SEQ ID NO: 3550613 - RNA, 15 nt, Human
ucuagacuuucuguu

SEQ ID NO: 3550614 - RNA, 16 nt, Human
ucuagagauaguacau

SEQ ID NO: 3550615 - RNA, 16 nt, Human
ucuagagauauauaua

SEQ ID NO: 3550616 - RNA, 20 nt, Human
ucuagagccgugaugccucc

SEQ ID NO: 3550617 - RNA, 13 nt, Human
ucuagagccuuca

SEQ ID NO: 3550618 - RNA, 9 nt, Human
ucuagaggc

SEQ ID NO: 3550619 - RNA, 19 nt, Human
ucuagaggccugaaauccu

SEQ ID NO: 3550620 - RNA, 21 nt, Human
ucuagaggccugaaauccugg

SEQ ID NO: 3550621 - RNA, 22 nt, Human
ucuagaguagagguauaauugu

SEQ ID NO: 3550622 - RNA, 17 nt, Human
ucuagauaccuaaaaca

SEQ ID NO: 3550623 - RNA, 18 nt, Human
ucuagauaccuaaaacau

SEQ ID NO: 3550624 - RNA, 19 nt, Human
ucuagauaccuaaaacaua

SEQ ID NO: 3550625 - RNA, 13 nt, Human
ucuagauacugua

SEQ ID NO: 3550626 - RNA, 20 nt, Human
ucuagaucagaugcuccaag

SEQ ID NO: 3550627 - RNA, 21 nt, Human
ucuagaugaaguuuuacauug

SEQ ID NO: 3550628 - RNA, 22 nt, Human
ucuagaugaaguuuuacauugu

SEQ ID NO: 3550629 - RNA, 20 nt, Human
ucuagauggcuccucucagu

SEQ ID NO: 3550630 - RNA, 20 nt, Human
ucuagauuaauacucuauuu

SEQ ID NO: 3550631 - RNA, 18 nt, Human
ucugcacucccaccugac

SEQ ID NO: 3550632 - RNA, 14 nt, Human
ucugcacuccccug

SEQ ID NO: 3550633 - RNA, 15 nt, Human
ucugcacuccccugc

SEQ ID NO: 3550634 - RNA, 18 nt, Human
ucugcacuccccugcugg

SEQ ID NO: 3550635 - RNA, 19 nt, Human
ucugcacuccccugcuggg

SEQ ID NO: 3550636 - RNA, 15 nt, Human
ucugcacugagcaga

SEQ ID NO: 3550637 - RNA, 15 nt, Human
ucugcagaagaggag

SEQ ID NO: 3550638 - RNA, 21 nt, Human
ucugcagaaggaaaaaugugu

SEQ ID NO: 3550639 - RNA, 22 nt, Human
ucugcagaaggaaaaaugugua

SEQ ID NO: 3550640 - RNA, 23 nt, Human
ucugcagacacgccuuccccuca

SEQ ID NO: 3550641 - RNA, 12 nt, Human
ucugcagagcag

SEQ ID NO: 3550642 - RNA, 19 nt, Human
ucugcagauagaaagcauu

SEQ ID NO: 3550643 - RNA, 17 nt, Human
ucugcagcaauaaagca

SEQ ID NO: 3550644 - RNA, 18 nt, Human
ucugcagcaauaaagcag

SEQ ID NO: 3550645 - RNA, 14 nt, Human
ucugcagccagccc

SEQ ID NO: 3550646 - RNA, 18 nt, Human
ucugcagccagcccagcc

SEQ ID NO: 3550647 - RNA, 19 nt, Human
ucugcagccagcccagccc

SEQ ID NO: 3550648 - RNA, 13 nt, Human
ucugcagccuuga

SEQ ID NO: 3550649 - RNA, 13 nt, Human
ucugcagcugacc

SEQ ID NO: 3550650 - RNA, 14 nt, Human
ucugcagcugaccu

SEQ ID NO: 3550651 - RNA, 13 nt, Human
ucugcagcugccg

SEQ ID NO: 3550652 - RNA, 14 nt, Human
ucugcagcugccgg

SEQ ID NO: 3550653 - RNA, 14 nt, Human
ucugcaggcagggc

SEQ ID NO: 3550654 - RNA, 19 nt, Human
ucugcaggcuuaauaaaaa

SEQ ID NO: 3550655 - RNA, 20 nt, Human
ucugcagggccgccagggag

SEQ ID NO: 3550656 - RNA, 19 nt, Human
ucugcagggggugugucug

SEQ ID NO: 3550657 - RNA, 13 nt, Human
ucugcaggucccu

SEQ ID NO: 3550658 - RNA, 14 nt, Human
ucugcaggucccua

SEQ ID NO: 3550659 - RNA, 22 nt, Human
ucugcaggucccuaauaaagcu

SEQ ID NO: 3550660 - RNA, 16 nt, Human
ucugcaguaaaucuuu

SEQ ID NO: 3550661 - RNA, 16 nt, Human
ucugcaguagucucug

SEQ ID NO: 3550662 - RNA, 19 nt, Human
ucugcaguagucucugugc

SEQ ID NO: 3550663 - RNA, 18 nt, Human
ucugcagucucuauacca

SEQ ID NO: 3550664 - RNA, 13 nt, Human
ucugcagugccuu

SEQ ID NO: 3550665 - RNA, 15 nt, Human
ucugcagugccuugg

SEQ ID NO: 3550666 - RNA, 18 nt, Human
ucugcauauguugaauac

SEQ ID NO: 3550667 - RNA, 16 nt, Human
ucugcaucaucuguag

SEQ ID NO: 3550668 - RNA, 19 nt, Human
ucugcaucaucuguagaua

SEQ ID NO: 3550669 - RNA, 21 nt, Human
ucugcauccagagauucauuu

SEQ ID NO: 3550670 - RNA, 19 nt, Human
ucugcauccucuggagcca

SEQ ID NO: 3550671 - RNA, 21 nt, Human
ucugcauccucuggagccagc

SEQ ID NO: 3550672 - RNA, 11 nt, Human
ucugcaucucc

SEQ ID NO: 3550673 - RNA, 17 nt, Human
ucugcaucuccugucuu

SEQ ID NO: 3550674 - RNA, 13 nt, Human
ucugcaucugacc

SEQ ID NO: 3550675 - RNA, 19 nt, Human
ucugcaugcggcccagccc

SEQ ID NO: 3550676 - RNA, 21 nt, Human
ucugcauucauuuuuauagca

SEQ ID NO: 3550677 - RNA, 14 nt, Human
ucugcauuuagcac

SEQ ID NO: 3550678 - RNA, 19 nt, Human
ucugcauuucgguggcuag

SEQ ID NO: 3550679 - RNA, 14 nt, Human
ucugcauuugucua

SEQ ID NO: 3550680 - RNA, 22 nt, Human
ucugcauuuugcuauuguaaau

SEQ ID NO: 3550681 - RNA, 14 nt, Human
ucugccaaccuaaa

SEQ ID NO: 3550682 - RNA, 18 nt, Human
ucugccaaccuaaaacuc

SEQ ID NO: 3550683 - RNA, 22 nt, Human
ucugccaauuuuugccuucauu

SEQ ID NO: 3550684 - RNA, 10 nt, Human
ucugccacca

SEQ ID NO: 3550685 - RNA, 15 nt, Human
ucugccaccagagac

SEQ ID NO: 3550686 - RNA, 15 nt, Human
ucugccacccaggau

SEQ ID NO: 3550687 - RNA, 22 nt, Human
ucugccaccccuaaacuccagg

SEQ ID NO: 3550688 - RNA, 21 nt, Human
ucugccacccuaccuguucag

SEQ ID NO: 3550689 - RNA, 20 nt, Human
ucugccagaagauccccuca

SEQ ID NO: 3550690 - RNA, 23 nt, Human
ucugccagauguccuaaugguga

SEQ ID NO: 3550691 - RNA, 17 nt, Human
ucugccagccagcagcc

SEQ ID NO: 3550692 - RNA, 19 nt, Human
ucugccagccagcagccag

SEQ ID NO: 3550693 - RNA, 15 nt, Human
ucugccaggagacag

SEQ ID NO: 3550694 - RNA, 12 nt, Human
ucugccagggag

SEQ ID NO: 3550695 - RNA, 14 nt, Human
ucugccagggagcu

SEQ ID NO: 3550696 - RNA, 19 nt, Human
ucugccagggagcuugaaa

SEQ ID NO: 3550697 - RNA, 13 nt, Human
ucugccagggcag

SEQ ID NO: 3550698 - RNA, 20 nt, Human
ucugccagggccccucuccc

SEQ ID NO: 3550699 - RNA, 24 nt, Human
ucugccagggccccucuccccagg

SEQ ID NO: 3550700 - RNA, 14 nt, Human
ucugccaguccugu

SEQ ID NO: 3550701 - RNA, 17 nt, Human
ucugccaguccuguccu

SEQ ID NO: 3550702 - RNA, 13 nt, Human
ucugccagugaca

SEQ ID NO: 3550703 - RNA, 21 nt, Human
ucugccagugacagacaggcu

SEQ ID NO: 3550704 - RNA, 23 nt, Human
ucugccagugacagacaggcucu

SEQ ID NO: 3550705 - RNA, 13 nt, Human
ucugccaucaacu

SEQ ID NO: 3550706 - RNA, 18 nt, Human
ucugccaucuagccagcc

SEQ ID NO: 3550707 - RNA, 19 nt, Human
ucugccaugaacuggaggc

SEQ ID NO: 3550708 - RNA, 19 nt, Human
ucugccauguugccccuuu

SEQ ID NO: 3550709 - RNA, 12 nt, Human
ucugcccaaccc

SEQ ID NO: 3550710 - RNA, 13 nt, Human
ucugcccacuccc

SEQ ID NO: 3550711 - RNA, 17 nt, Human
ucugcccacucccugca

SEQ ID NO: 3550712 - RNA, 21 nt, Human
ucugcccacucccugcaaccu

SEQ ID NO: 3550713 - RNA, 12 nt, Human
ucugcccagcuu

SEQ ID NO: 3550714 - RNA, 17 nt, Human
ucugcccagcuuuucau

SEQ ID NO: 3550715 - RNA, 18 nt, Human
ucugcccagcuuuucauu

SEQ ID NO: 3550716 - RNA, 23 nt, Human
ucugcccaggacggggccggcca

SEQ ID NO: 3550717 - RNA, 20 nt, Human
ucugcccaggggugcccccu

SEQ ID NO: 3550718 - RNA, 20 nt, Human
ucugcccauccugccccuga

SEQ ID NO: 3550719 - RNA, 16 nt, Human
ucugcccauuccccag

SEQ ID NO: 3550720 - RNA, 15 nt, Human
ucugccccaaguuuu

SEQ ID NO: 3550721 - RNA, 16 nt, Human
ucugccccaaguuuug

SEQ ID NO: 3550722 - RNA, 22 nt, Human
ucugccccaaguuuugugaaau

SEQ ID NO: 3550723 - RNA, 15 nt, Human
ucugccccagaggcc

SEQ ID NO: 3550724 - RNA, 20 nt, Human
ucugccccagcccagauucc

SEQ ID NO: 3550725 - RNA, 16 nt, Human
ucugccccagcucugg

SEQ ID NO: 3550726 - RNA, 14 nt, Human
ucugccccagcuug

SEQ ID NO: 3550727 - RNA, 15 nt, Human
ucugccccauccucc

SEQ ID NO: 3550728 - RNA, 13 nt, Human
ucugcccccagcc

SEQ ID NO: 3550729 - RNA, 16 nt, Human
ucugcccccagcccaa

SEQ ID NO: 3550730 - RNA, 15 nt, Human
ucugccccucccugc

SEQ ID NO: 3550731 - RNA, 19 nt, Human
ucugcccgccugcccaccu

SEQ ID NO: 3550732 - RNA, 20 nt, Human
ucugcccgccugcccaccug

SEQ ID NO: 3550733 - RNA, 21 nt, Human
ucugcccgccugcccaccugc

SEQ ID NO: 3550734 - RNA, 22 nt, Human
ucugcccgccugcccaccugcc

SEQ ID NO: 3550735 - RNA, 23 nt, Human
ucugcccgggaaggucaccagca

SEQ ID NO: 3550736 - RNA, 19 nt, Human
ucugcccucuagagccuuc

SEQ ID NO: 3550737 - RNA, 18 nt, Human
ucugcccugcccuagcuc

SEQ ID NO: 3550738 - RNA, 12 nt, Human
ucugcccugcgg

SEQ ID NO: 3550739 - RNA, 13 nt, Human
ucugcccuggcug

SEQ ID NO: 3550740 - RNA, 23 nt, Human
ucugcccuugguuaggcauugug

SEQ ID NO: 3550741 - RNA, 15 nt, Human
ucugccgcagcccug

SEQ ID NO: 3550742 - RNA, 22 nt, Human
ucugccgcagcccugcagaggg

SEQ ID NO: 3550743 - RNA, 17 nt, Human
ucugccggcccuggggc

SEQ ID NO: 3550744 - RNA, 13 nt, Human
ucugccggcucuu

SEQ ID NO: 3550745 - RNA, 21 nt, Human
ucugccggugcucggagaaga

SEQ ID NO: 3550746 - RNA, 13 nt, Human
ucugccuaaggac

SEQ ID NO: 3550747 - RNA, 23 nt, Human
ucugccuaaggacuucuuuaauu

SEQ ID NO: 3550748 - RNA, 15 nt, Human
ucugccuauccuggc

SEQ ID NO: 3550749 - RNA, 16 nt, Human
ucugccucccaucacc

SEQ ID NO: 3550750 - RNA, 17 nt, Human
ucugccucccaucaccc

SEQ ID NO: 3550751 - RNA, 15 nt, Human
ucugccucccucacc

SEQ ID NO: 3550752 - RNA, 18 nt, Human
ucugccucuccaggcauu

SEQ ID NO: 3550753 - RNA, 15 nt, Human
ucugccucugaggga

SEQ ID NO: 3550754 - RNA, 14 nt, Human
ucugccucugaugu

SEQ ID NO: 3550755 - RNA, 20 nt, Human
ucugccucugauguauuuug

SEQ ID NO: 3550756 - RNA, 16 nt, Human
ucugccucugccugca

SEQ ID NO: 3550757 - RNA, 14 nt, Human
ucugccucuucugg

SEQ ID NO: 3550758 - RNA, 17 nt, Human
ucugccucuucugggag

SEQ ID NO: 3550759 - RNA, 12 nt, Human
ucugccugagcu

SEQ ID NO: 3550760 - RNA, 23 nt, Human
ucugccugaggggcagccugccu

SEQ ID NO: 3550761 - RNA, 17 nt, Human
ucugccugccagcugca

SEQ ID NO: 3550762 - RNA, 13 nt, Human
ucugccugcccag

SEQ ID NO: 3550763 - RNA, 14 nt, Human
ucugccugcccagg

SEQ ID NO: 3550764 - RNA, 21 nt, Human
ucugccugcccaggccccugc

SEQ ID NO: 3550765 - RNA, 14 nt, Human
ucugccugccccgc

SEQ ID NO: 3550766 - RNA, 12 nt, Human
ucugccugcccu

SEQ ID NO: 3550767 - RNA, 23 nt, Human
ucugccuggagacuuagggcacc

SEQ ID NO: 3550768 - RNA, 12 nt, Human
ucugccuggagu

SEQ ID NO: 3550769 - RNA, 21 nt, Human
ucugccuggguuuuguucccu

SEQ ID NO: 3550770 - RNA, 12 nt, Human
ucugccuguccc

SEQ ID NO: 3550771 - RNA, 19 nt, Human
ucuucuggguuccuuccuc

SEQ ID NO: 3550772 - RNA, 23 nt, Human
ucuucuguacgucugacaggcaa

SEQ ID NO: 3550773 - RNA, 19 nt, Human
ucuucuguauacuguggag

SEQ ID NO: 3550774 - RNA, 17 nt, Human
ucuucuguauauaaaug

SEQ ID NO: 3550775 - RNA, 22 nt, Human
ucuucuguauauaaaugggaac

SEQ ID NO: 3550776 - RNA, 18 nt, Human
ucuucuguuuucuguuuc

SEQ ID NO: 3550777 - RNA, 17 nt, Human
ucuucuuaauguacaua

SEQ ID NO: 3550778 - RNA, 22 nt, Human
ucuucuuauacagauaaaacau

SEQ ID NO: 3550779 - RNA, 12 nt, Human
ucuucuuaugca

SEQ ID NO: 3550780 - RNA, 13 nt, Human
ucuucuucaaacc

SEQ ID NO: 3550781 - RNA, 15 nt, Human
ucuucuucaaaccuu

SEQ ID NO: 3550782 - RNA, 22 nt, Human
ucuucuucccucccuaucuaac

SEQ ID NO: 3550783 - RNA, 21 nt, Human
ucuucuugaacacucaugcug

SEQ ID NO: 3550784 - RNA, 14 nt, Human
ucuucuuguuucuc

SEQ ID NO: 3550785 - RNA, 21 nt, Human
ucuucuuuuaaaccauuuucu

SEQ ID NO: 3550786 - RNA, 22 nt, Human
ucuucuuuuaaaccauuuucuu

SEQ ID NO: 3550787 - RNA, 16 nt, Human
ucuucuuuuggcuucc

SEQ ID NO: 3550788 - RNA, 15 nt, Human
ucuucuuuugugaag

SEQ ID NO: 3550789 - RNA, 17 nt, Human
ucuucuuuuugcuguug

SEQ ID NO: 3550790 - RNA, 20 nt, Human
ucuucuuuuugcuguuguuu

SEQ ID NO: 3550791 - RNA, 13 nt, Human
ucuugaaaaaugc

SEQ ID NO: 3550792 - RNA, 23 nt, Human
ucuugaaaugaaaguauaacuga

SEQ ID NO: 3550793 - RNA, 22 nt, Human
ucuugaaauuaagaaggcaaaa

SEQ ID NO: 3550794 - RNA, 21 nt, Human
ucuugaacacucaugcugaaa

SEQ ID NO: 3550795 - RNA, 15 nt, Human
ucuugaacuccuggc

SEQ ID NO: 3550796 - RNA, 16 nt, Human
ucuuuuaaaagacaag

SEQ ID NO: 3550797 - RNA, 18 nt, Human
ucuuuuaaaguguuacuu

SEQ ID NO: 3550798 - RNA, 12 nt, Human
ucuuuuaagaau

SEQ ID NO: 3550799 - RNA, 14 nt, Human
ucuuuuaagaauca

SEQ ID NO: 3550800 - RNA, 15 nt, Human
ucugggggcugagga

SEQ ID NO: 3550801 - RNA, 21 nt, Human
ucuggggggacccagugcaga

SEQ ID NO: 3550802 - RNA, 13 nt, Human
ucugggggguggc

SEQ ID NO: 3550803 - RNA, 19 nt, Human
ucuggggugcugccugaau

SEQ ID NO: 3550804 - RNA, 17 nt, Human
ucuggggugggcaguuu

SEQ ID NO: 3550805 - RNA, 18 nt, Human
ucugggguucagccccuc

SEQ ID NO: 3550806 - RNA, 16 nt, Human
ucuggguccuuccuga

SEQ ID NO: 3550807 - RNA, 19 nt, Human
ucugggugcuacuggggaa

SEQ ID NO: 3550808 - RNA, 14 nt, Human
ucuggguggcucac

SEQ ID NO: 3550809 - RNA, 22 nt, Human
ucuggguuccuuccucugagcc

SEQ ID NO: 3550810 - RNA, 13 nt, Human
ucuggguucuggg

SEQ ID NO: 3550811 - RNA, 15 nt, Human
ucuggguugccuuua

SEQ ID NO: 3550812 - RNA, 15 nt, Human
ucugguacuuucugu

SEQ ID NO: 3550813 - RNA, 13 nt, Human
ucugguagacaca

SEQ ID NO: 3550814 - RNA, 20 nt, Human
ucugguagacacaggauaga

SEQ ID NO: 3550815 - RNA, 17 nt, Human
ucugguauuaaaugcca

SEQ ID NO: 3550816 - RNA, 17 nt, Human
ucuggucaaccuccugg

SEQ ID NO: 3550817 - RNA, 22 nt, Human
ucuggucccacaaaugggcgcc

SEQ ID NO: 3550818 - RNA, 20 nt, Human
ucuggucuauaccuuaagaa

SEQ ID NO: 3550819 - RNA, 18 nt, Human
ucuggugacaccagccuu

SEQ ID NO: 3550820 - RNA, 14 nt, Human
ucugguggccccgu

SEQ ID NO: 3550821 - RNA, 20 nt, Human
ucugguggucagcccuagga

SEQ ID NO: 3550822 - RNA, 21 nt, Human
ucugguguuggacaagcuucu

SEQ ID NO: 3550823 - RNA, 17 nt, Human
ucugguuaggauggcag

SEQ ID NO: 3550824 - RNA, 12 nt, Human
ucugguuccagg

SEQ ID NO: 3550825 - RNA, 13 nt, Human
ucugguuccaggg

SEQ ID NO: 3550826 - RNA, 14 nt, Human
ucugguuccagggu

SEQ ID NO: 3550827 - RNA, 17 nt, Human
ucugguucucaauucca

SEQ ID NO: 3550828 - RNA, 13 nt, Human
ucugguucugaug

SEQ ID NO: 3550829 - RNA, 14 nt, Human
ucugguucugaugc

SEQ ID NO: 3550830 - RNA, 15 nt, Human
ucugguugaacucug

SEQ ID NO: 3550831 - RNA, 17 nt, Human
ucugguuguuucuguuc

SEQ ID NO: 3550832 - RNA, 13 nt, Human
ucugguuuuaaca

SEQ ID NO: 3550833 - RNA, 15 nt, Human
ucugguuuuaacaau

SEQ ID NO: 3550834 - RNA, 12 nt, Human
ucuguaaaaucu

SEQ ID NO: 3550835 - RNA, 22 nt, Human
ucuguaaaaucuuucuuucuua

SEQ ID NO: 3550836 - RNA, 12 nt, Human
ucuguaaacugu

SEQ ID NO: 3550837 - RNA, 13 nt, Human
ucuguaaagcuaa

SEQ ID NO: 3550838 - RNA, 19 nt, Human
ucuguaaagcuaaaauaaa

SEQ ID NO: 3550839 - RNA, 12 nt, Human
ucuguaaauaug

SEQ ID NO: 3550840 - RNA, 22 nt, Human
ucuguaacucuaaaagauccuu

SEQ ID NO: 3550841 - RNA, 18 nt, Human
ucuguaagcauaagcuua

SEQ ID NO: 3550842 - RNA, 21 nt, Human
ucuguaagcucuuugaaacaa

SEQ ID NO: 3550843 - RNA, 19 nt, Human
ucuguaauaaacucauuuc

SEQ ID NO: 3550844 - RNA, 23 nt, Human
ucuguaauaaacucauuucuagc

SEQ ID NO: 3550845 - RNA, 13 nt, Human
ucuguaauaauag

SEQ ID NO: 3550846 - RNA, 17 nt, Human
ucuguaauauuuacaau

SEQ ID NO: 3550847 - RNA, 18 nt, Human
ucuguaauauuuacaaug

SEQ ID NO: 3550848 - RNA, 19 nt, Human
ucuguaauauuuacaaugu

SEQ ID NO: 3550849 - RNA, 23 nt, Human
ucuguaauauuuacaauguauua

SEQ ID NO: 3550850 - RNA, 18 nt, Human
ucuguaauuauaucuaaa

SEQ ID NO: 3550851 - RNA, 14 nt, Human
ucuguaauugcaaa

SEQ ID NO: 3550852 - RNA, 15 nt, Human
ucuguaauuuuucag

SEQ ID NO: 3550853 - RNA, 14 nt, Human
ucuguacauagccu

SEQ ID NO: 3550854 - RNA, 18 nt, Human
ucuguacaucucuacuua

SEQ ID NO: 3550855 - RNA, 21 nt, Human
ucuguacauuuuguuguaaaa

SEQ ID NO: 3550856 - RNA, 22 nt, Human
ucuguaccauagcgcugcucuu

SEQ ID NO: 3550857 - RNA, 18 nt, Human
ugaaaagaugguaucaua

SEQ ID NO: 3550858 - RNA, 12 nt, Human
ugaaaagaugua

SEQ ID NO: 3550859 - RNA, 16 nt, Human
ugaaaagauguaccug

SEQ ID NO: 3550860 - RNA, 16 nt, Human
ugaaaagauguugugu

SEQ ID NO: 3550861 - RNA, 19 nt, Human
ugaaaagcaauauuguaua

SEQ ID NO: 3550862 - RNA, 15 nt, Human
ugaaaagccauguuu

SEQ ID NO: 3550863 - RNA, 23 nt, Human
ugaaaagccauguuuaagauuua

SEQ ID NO: 3550864 - RNA, 15 nt, Human
ugaaaagcuucuuaa

SEQ ID NO: 3550865 - RNA, 23 nt, Human
ugaaaagcuucuuaauuaauuug

SEQ ID NO: 3550866 - RNA, 12 nt, Human
ugaaaaggaaga

SEQ ID NO: 3550867 - RNA, 12 nt, Human
ugaaaaggaauc

SEQ ID NO: 3550868 - RNA, 16 nt, Human
ugaaaaggugaccuug

SEQ ID NO: 3550869 - RNA, 19 nt, Human
ugaaaagguuuaugaaaaa

SEQ ID NO: 3550870 - RNA, 21 nt, Human
ugaaaagguuuaugaaaaaga

SEQ ID NO: 3550871 - RNA, 18 nt, Human
ugaaaaguaauauuuauu

SEQ ID NO: 3550872 - RNA, 19 nt, Human
ugaaaaguaauauuuauua

SEQ ID NO: 3550873 - RNA, 20 nt, Human
ugaaaaguagcaauuaugga

SEQ ID NO: 3550874 - RNA, 21 nt, Human
ugaaaaguauauugauaaccu

SEQ ID NO: 3550875 - RNA, 20 nt, Human
ugacugaugcuuucagauua

SEQ ID NO: 3550876 - RNA, 20 nt, Human
ugacugauguuaggcugggc

SEQ ID NO: 3550877 - RNA, 17 nt, Human
ugacugauucuucagca

SEQ ID NO: 3550878 - RNA, 21 nt, Human
ugacugccaagacugcugugg

SEQ ID NO: 3550879 - RNA, 14 nt, Human
ugacugccaagcca

SEQ ID NO: 3550880 - RNA, 17 nt, Human
ugacugccaagccaugg

SEQ ID NO: 3550881 - RNA, 14 nt, Human
ugacugcccagcau

SEQ ID NO: 3550882 - RNA, 18 nt, Human
ugacugcccauucaccaa

SEQ ID NO: 3550883 - RNA, 17 nt, Human
ugacugccccaacuccu

SEQ ID NO: 3550884 - RNA, 16 nt, Human
ugacugcucagaacuu

SEQ ID NO: 3550885 - RNA, 15 nt, Human
ugacugcugauucuc

SEQ ID NO: 3550886 - RNA, 14 nt, Human
ugacugcuugcccu

SEQ ID NO: 3550887 - RNA, 14 nt, Human
ugacuggaauuuuu

SEQ ID NO: 3550888 - RNA, 17 nt, Human
ugacuggcauuuuauag

SEQ ID NO: 3550889 - RNA, 17 nt, Human
ugacuggcuucagcaag

SEQ ID NO: 3550890 - RNA, 16 nt, Human
ugacugggcccugccu

SEQ ID NO: 3550891 - RNA, 21 nt, Human
ugacugggcccugccucuguu

SEQ ID NO: 3550892 - RNA, 16 nt, Human
ugacuguaucugugua

SEQ ID NO: 3550893 - RNA, 17 nt, Human
ugacuguaucuguguag

SEQ ID NO: 3550894 - RNA, 19 nt, Human
ugacuguaucuguguagac

SEQ ID NO: 3550895 - RNA, 24 nt, Human
ugacuguucaagagcacacuuggc

SEQ ID NO: 3550896 - RNA, 21 nt, Human
ugacuguuuucucuugagagg

SEQ ID NO: 3550897 - RNA, 11 nt, Human
ugacuguuuuu

SEQ ID NO: 3550898 - RNA, 16 nt, Human
ugacuguuuuuaccca

SEQ ID NO: 3550899 - RNA, 18 nt, Human
ugacuguuuuuacccaua

SEQ ID NO: 3550900 - RNA, 20 nt, Human
ugacuguuuuucggacaguu

SEQ ID NO: 3550901 - RNA, 17 nt, Human
ugacuguuuuuguagug

SEQ ID NO: 3550902 - RNA, 20 nt, Human
ugacuuagaaucccuguguu

SEQ ID NO: 3550903 - RNA, 23 nt, Human
ugacuuagaaucccuguguuaau

SEQ ID NO: 3550904 - RNA, 16 nt, Human
ugacuuagcagaugcu

SEQ ID NO: 3550905 - RNA, 13 nt, Human
ugacuuauaguac

SEQ ID NO: 3550906 - RNA, 21 nt, Human
ugacuuauuuauauaaauuuu

SEQ ID NO: 3550907 - RNA, 19 nt, Human
ugacuucauggaauggaca

SEQ ID NO: 3550908 - RNA, 14 nt, Human
ugacuuccacaccu

SEQ ID NO: 3550909 - RNA, 23 nt, Human
ugacuuccccgcauuccaggcuc

SEQ ID NO: 3550910 - RNA, 19 nt, Human
ugacuuccucgccucuccc

SEQ ID NO: 3550911 - RNA, 23 nt, Human
ugacuucuaaguaaaaccacagc

SEQ ID NO: 3550912 - RNA, 23 nt, Human
ugacuucuccaggucucacgggc

SEQ ID NO: 3550913 - RNA, 13 nt, Human
ugacuucugccug

SEQ ID NO: 3550914 - RNA, 16 nt, Human
ugacuugcaugaagag

SEQ ID NO: 3550915 - RNA, 19 nt, Human
ugacuugcaugaagagaag

SEQ ID NO: 3550916 - RNA, 13 nt, Human
ugacuugcccagu

SEQ ID NO: 3550917 - RNA, 15 nt, Human
ugacuuggcuggugu

SEQ ID NO: 3550918 - RNA, 16 nt, Human
ugacuuggcuggugug

SEQ ID NO: 3550919 - RNA, 19 nt, Human
ugacuugggcacccccagc

SEQ ID NO: 3550920 - RNA, 23 nt, Human
ugacuugggcacccccagccugg

SEQ ID NO: 3550921 - RNA, 18 nt, Human
ugacuuggggagauggag

SEQ ID NO: 3550922 - RNA, 19 nt, Human
ugacuuguuugucuuccau

SEQ ID NO: 3550923 - RNA, 18 nt, Human
ugacuuuacgcccaucuc

SEQ ID NO: 3550924 - RNA, 14 nt, Human
ugacuuuauaaauu

SEQ ID NO: 3550925 - RNA, 18 nt, Human
ugacuuuauauggaugau

SEQ ID NO: 3550926 - RNA, 17 nt, Human
ugacuuuauuauuuauu

SEQ ID NO: 3550927 - RNA, 12 nt, Human
ugacuuucaggu

SEQ ID NO: 3550928 - RNA, 13 nt, Human
ugacuuucaggua

SEQ ID NO: 3550929 - RNA, 17 nt, Human
ugacuuucauuggaaau

SEQ ID NO: 3550930 - RNA, 23 nt, Human
ugacuuuccccaccagaugcuga

SEQ ID NO: 3550931 - RNA, 13 nt, Human
ugacuuuggauaa

SEQ ID NO: 3550932 - RNA, 16 nt, Human
ugacuuuggauaauaa

SEQ ID NO: 3550933 - RNA, 11 nt, Human
ugacuuugucu

SEQ ID NO: 3550934 - RNA, 17 nt, Human
ugacuuuuauaaagcau

SEQ ID NO: 3550935 - RNA, 18 nt, Human
ugacuuuuccauguaucu

SEQ ID NO: 3550936 - RNA, 22 nt, Human
ugacuuuucuguccgagcuuug

SEQ ID NO: 3550937 - RNA, 13 nt, Human
ugacuuuugcuuu

SEQ ID NO: 3550938 - RNA, 19 nt, Human
ugacuuuuuauaaaauggc

SEQ ID NO: 3550939 - RNA, 17 nt, Human
ugacuuuuuuuguaugu

SEQ ID NO: 3550940 - RNA, 14 nt, Human
ugagaaaaaaagaa

SEQ ID NO: 3550941 - RNA, 21 nt, Human
ugagaaaacgaaacugcucua

SEQ ID NO: 3550942 - RNA, 20 nt, Human
ugagaaacaacaauuucuac

SEQ ID NO: 3550943 - RNA, 19 nt, Human
ugagaaacuuaaauguuau

SEQ ID NO: 3550944 - RNA, 17 nt, Human
ugagaaagacuauucaa

SEQ ID NO: 3550945 - RNA, 21 nt, Human
ugagaaagagcacuuaagaga

SEQ ID NO: 3550946 - RNA, 17 nt, Human
ugagaaaucuaaaaaac

SEQ ID NO: 3550947 - RNA, 20 nt, Human
ugagaaaugaauaauuuccc

SEQ ID NO: 3550948 - RNA, 14 nt, Human
ugagaaauguaaug

SEQ ID NO: 3550949 - RNA, 14 nt, Human
ugagaaauguuaaa

SEQ ID NO: 3550950 - RNA, 22 nt, Human
ugagaaauucaacguuaauaau

SEQ ID NO: 3550951 - RNA, 17 nt, Human
ugagaaauuuaaacuau

SEQ ID NO: 3550952 - RNA, 17 nt, Human
ugagaacagauaaagau

SEQ ID NO: 3550953 - RNA, 18 nt, Human
ugagaacagauaaagauu

SEQ ID NO: 3550954 - RNA, 22 nt, Human
ugagaacccugcguggggacag

SEQ ID NO: 3550955 - RNA, 22 nt, Human
ugagaaccuggguugcagacag

SEQ ID NO: 3550956 - RNA, 23 nt, Human
ugagaaccuggguugcagacagg

SEQ ID NO: 3550957 - RNA, 19 nt, Human
ugagaacuacucagggaau

SEQ ID NO: 3550958 - RNA, 15 nt, Human
ugagaacuugacaag

SEQ ID NO: 3550959 - RNA, 18 nt, Human
ugagaagagagaucaaau

SEQ ID NO: 3550960 - RNA, 15 nt, Human
ugagaagaggagccc

SEQ ID NO: 3550961 - RNA, 21 nt, Human
ugagaagagggccugugggag

SEQ ID NO: 3550962 - RNA, 23 nt, Human
ugagaagagggccugugggagcc

SEQ ID NO: 3550963 - RNA, 20 nt, Human
ugagaagcagaggaaggaga

SEQ ID NO: 3550964 - RNA, 16 nt, Human
ugagaagccgugggug

SEQ ID NO: 3550965 - RNA, 13 nt, Human
ugagaagcugcuc

SEQ ID NO: 3550966 - RNA, 21 nt, Human
ugagaagcugcucaacuugca

SEQ ID NO: 3550967 - RNA, 20 nt, Human
ugagaagcuuugcccuccua

SEQ ID NO: 3550968 - RNA, 12 nt, Human
ugagaaggagag

SEQ ID NO: 3550969 - RNA, 16 nt, Human
ugagaaggagagaaag

SEQ ID NO: 3550970 - RNA, 20 nt, Human
ugagaaggcagccaccagcg

SEQ ID NO: 3550971 - RNA, 16 nt, Human
ugagaaggguguugua

SEQ ID NO: 3550972 - RNA, 20 nt, Human
ugagaagguuuauuguuaau

SEQ ID NO: 3550973 - RNA, 17 nt, Human
ugagaaguagccacagu

SEQ ID NO: 3550974 - RNA, 18 nt, Human
ugagaaguccccuuccau

SEQ ID NO: 3550975 - RNA, 19 nt, Human
ugagaaguccccuuccauc

SEQ ID NO: 3550976 - RNA, 19 nt, Human
ugagaauaagagagucaua

SEQ ID NO: 3550977 - RNA, 14 nt, Human
ugagaaucauuuag

SEQ ID NO: 3550978 - RNA, 19 nt, Human
ugagaaucauuuagcaugu

SEQ ID NO: 3550979 - RNA, 21 nt, Human
ugagaaucccaaauuugauug

SEQ ID NO: 3550980 - RNA, 19 nt, Human
ugagaaucuuuauugagaa

SEQ ID NO: 3550981 - RNA, 13 nt, Human
ugagaaugaacaa

SEQ ID NO: 3550982 - RNA, 16 nt, Human
ugagaauguaucccca

SEQ ID NO: 3550983 - RNA, 23 nt, Human
ugagaauucagcugcccccgcuc

SEQ ID NO: 3550984 - RNA, 19 nt, Human
ugagaauuuaaaaauaaga

SEQ ID NO: 3550985 - RNA, 13 nt, Human
ugagaauuucuaa

SEQ ID NO: 3550986 - RNA, 14 nt, Human
ugagacaaaaauua

SEQ ID NO: 3550987 - RNA, 15 nt, Human
ugagacaaaaauuau

SEQ ID NO: 3550988 - RNA, 16 nt, Human
ugagacaaaauuuuag

SEQ ID NO: 3550989 - RNA, 19 nt, Human
ugagacagaaucucagucu

SEQ ID NO: 3550990 - RNA, 15 nt, Human
ugagacagcagucuu

SEQ ID NO: 3550991 - RNA, 18 nt, Human
ugagacagcccgggcucu

SEQ ID NO: 3550992 - RNA, 16 nt, Human
ugagacagcucugcau

SEQ ID NO: 3550993 - RNA, 15 nt, Human
ugagacagucuugcu

SEQ ID NO: 3550994 - RNA, 16 nt, Human
ugagacagugcacaug

SEQ ID NO: 3550995 - RNA, 17 nt, Human
ugagacagugcacauga

SEQ ID NO: 3550996 - RNA, 18 nt, Human
ugagacagugcacaugaa

SEQ ID NO: 3550997 - RNA, 15 nt, Human
ugagacagugggaaa

SEQ ID NO: 3550998 - RNA, 16 nt, Human
ugagacagugggaaau

SEQ ID NO: 3550999 - RNA, 19 nt, Human
ugagacaguuucuuagcuu

SEQ ID NO: 3551000 - RNA, 13 nt, Human
ugagacauccagc

SEQ ID NO: 3551001 - RNA, 18 nt, Human
ugagacauuccaaaacga

SEQ ID NO: 3551002 - RNA, 14 nt, Human
ugagaccaaccugg

SEQ ID NO: 3551003 - RNA, 21 nt, Human
ugagaccacagagagagggga

SEQ ID NO: 3551004 - RNA, 16 nt, Human
ugagacccaggacucc

SEQ ID NO: 3551005 - RNA, 22 nt, Human
ugagacccccacaccucaguuc

SEQ ID NO: 3551006 - RNA, 22 nt, Human
ugagaccccuggccuccggcgu

SEQ ID NO: 3551007 - RNA, 14 nt, Human
ugagacccugucuc

SEQ ID NO: 3551008 - RNA, 15 nt, Human
ugagacccugucucu

SEQ ID NO: 3551009 - RNA, 17 nt, Human
ugagaccucagccauga

SEQ ID NO: 3551010 - RNA, 15 nt, Human
ugagaccugccccuc

SEQ ID NO: 3551011 - RNA, 14 nt, Human
ugaucaaugacaga

SEQ ID NO: 3551012 - RNA, 15 nt, Human
ugaucaauuaaaugu

SEQ ID NO: 3551013 - RNA, 17 nt, Human
ugaucaauuaaauguag

SEQ ID NO: 3551014 - RNA, 20 nt, Human
ugaucaauuauaguuucuga

SEQ ID NO: 3551015 - RNA, 12 nt, Human
ugaucacacucu

SEQ ID NO: 3551016 - RNA, 13 nt, Human
ugaucacacucug

SEQ ID NO: 3551017 - RNA, 14 nt, Human
ugaucaccugcccu

SEQ ID NO: 3551018 - RNA, 16 nt, Human
ugaucacgccuggcua

SEQ ID NO: 3551019 - RNA, 20 nt, Human
ugaucacggcucacugcagc

SEQ ID NO: 3551020 - RNA, 16 nt, Human
ugaucacuuaucaguu

SEQ ID NO: 3551021 - RNA, 24 nt, Human
ugaucacuuucugaaauucacaaa

SEQ ID NO: 3551022 - RNA, 18 nt, Human
ugaucagaccauaauguu

SEQ ID NO: 3551023 - RNA, 16 nt, Human
ugaucagaucugacau

SEQ ID NO: 3551024 - RNA, 23 nt, Human
ugaucagaucugacaugauuccu

SEQ ID NO: 3551025 - RNA, 19 nt, Human
ugaucagcuuucaaagcau

SEQ ID NO: 3551026 - RNA, 21 nt, Human
ugaucagcuuucaaagcauuu

SEQ ID NO: 3551027 - RNA, 12 nt, Human
ugaucaggaccu

SEQ ID NO: 3551028 - RNA, 17 nt, Human
ugaucaguaguuugcau

SEQ ID NO: 3551029 - RNA, 19 nt, Human
ugaucaguaguuugcauuu

SEQ ID NO: 3551030 - RNA, 13 nt, Human
ugaucaugcauug

SEQ ID NO: 3551031 - RNA, 15 nt, Human
ugaucauguacuuuu

SEQ ID NO: 3551032 - RNA, 22 nt, Human
ugaucauguguggaaguuauua

SEQ ID NO: 3551033 - RNA, 23 nt, Human
ugaucauuuauuuuaagcacucu

SEQ ID NO: 3551034 - RNA, 17 nt, Human
ugaucauuuucccccca

SEQ ID NO: 3551035 - RNA, 19 nt, Human
ugaucauuuuccccccacu

SEQ ID NO: 3551036 - RNA, 21 nt, Human
ugaucauuuuccccccacucu

SEQ ID NO: 3551037 - RNA, 14 nt, Human
ugauccaagcuggu

SEQ ID NO: 3551038 - RNA, 17 nt, Human
ugauccaagcugguccc

SEQ ID NO: 3551039 - RNA, 15 nt, Human
ugauccacccaaccc

SEQ ID NO: 3551040 - RNA, 15 nt, Human
ugauccacccaccuc

SEQ ID NO: 3551041 - RNA, 19 nt, Human
ugauccacccaccucagcc

SEQ ID NO: 3551042 - RNA, 20 nt, Human
ugauccacccaccucagccu

SEQ ID NO: 3551043 - RNA, 14 nt, Human
ugauccacucgccu

SEQ ID NO: 3551044 - RNA, 18 nt, Human
ugauccacucgccuucau

SEQ ID NO: 3551045 - RNA, 19 nt, Human
ugauccauccagcuugcca

SEQ ID NO: 3551046 - RNA, 17 nt, Human
ugauccauguaacugcc

SEQ ID NO: 3551047 - RNA, 18 nt, Human
ugauccauguaacugccu

SEQ ID NO: 3551048 - RNA, 19 nt, Human
ugauccauguaacugccua

SEQ ID NO: 3551049 - RNA, 20 nt, Human
ugauccauguaacugccuag

SEQ ID NO: 3551050 - RNA, 14 nt, Human
ugauccauuucuaa

SEQ ID NO: 3551051 - RNA, 17 nt, Human
ugauccauuucuaauua

SEQ ID NO: 3551052 - RNA, 18 nt, Human
ugauccauuucuaauuau

SEQ ID NO: 3551053 - RNA, 12 nt, Human
ugaucccagcac

SEQ ID NO: 3551054 - RNA, 20 nt, Human
ugauccccaaguggugaaug

SEQ ID NO: 3551055 - RNA, 18 nt, Human
ugauccccaagugugaac

SEQ ID NO: 3551056 - RNA, 21 nt, Human
ugaucccuguuacccagagaa

SEQ ID NO: 3551057 - RNA, 22 nt, Human
ugauccuaaugaaugcauaaaa

SEQ ID NO: 3551058 - RNA, 19 nt, Human
ugauccucccaccucagcc

SEQ ID NO: 3551059 - RNA, 20 nt, Human
ugauccucccaccucagccu

SEQ ID NO: 3551060 - RNA, 13 nt, Human
ugauccugcggag

SEQ ID NO: 3551061 - RNA, 13 nt, Human
ugauccugugaag

SEQ ID NO: 3551062 - RNA, 21 nt, Human
ugaucgaugauucaggugcag

SEQ ID NO: 3551063 - RNA, 13 nt, Human
ugaucgccuuccc

SEQ ID NO: 3551064 - RNA, 18 nt, Human
ugaucggagccuccucuc

SEQ ID NO: 3551065 - RNA, 20 nt, Human
ugaucgugacgcugaauaaa

SEQ ID NO: 3551066 - RNA, 22 nt, Human
ugaucgugcuaaauuuucagua

SEQ ID NO: 3551067 - RNA, 15 nt, Human
ugaucuaauauccca

SEQ ID NO: 3551068 - RNA, 18 nt, Human
ugaucuacuucuguaauu

SEQ ID NO: 3551069 - RNA, 14 nt, Human
ugaucuaggaagac

SEQ ID NO: 3551070 - RNA, 16 nt, Human
ugaucuagguuuaacu

SEQ ID NO: 3551071 - RNA, 21 nt, Human
ugaucuagguuuaacucagau

SEQ ID NO: 3551072 - RNA, 22 nt, Human
ugaucucagggaagcccagcuc

SEQ ID NO: 3551073 - RNA, 14 nt, Human
ugaucucagguucu

SEQ ID NO: 3551074 - RNA, 15 nt, Human
ugaucucauuuaauc

SEQ ID NO: 3551075 - RNA, 16 nt, Human
ugaucuccauauguua

SEQ ID NO: 3551076 - RNA, 19 nt, Human
ugaucuccauauguuacac

SEQ ID NO: 3551077 - RNA, 17 nt, Human
ugaucuccauggcuucc

SEQ ID NO: 3551078 - RNA, 17 nt, Human
ugaucucucgugauuga

SEQ ID NO: 3551079 - RNA, 14 nt, Human
ugaucugaaaaaua

SEQ ID NO: 3551080 - RNA, 22 nt, Human
ugaucugauaggguuugugaca

SEQ ID NO: 3551081 - RNA, 14 nt, Human
ugaucugcucagcc

SEQ ID NO: 3551082 - RNA, 19 nt, Human
ugaucugcucagcccugga

SEQ ID NO: 3551083 - RNA, 18 nt, Human
ugaucuggaacccagacu

SEQ ID NO: 3551084 - RNA, 16 nt, Human
ugaucugggaacuccc

SEQ ID NO: 3551085 - RNA, 22 nt, Human
ugaucugggaacucccaagaac

SEQ ID NO: 3551086 - RNA, 17 nt, Human
ugaucugguuugacucc

SEQ ID NO: 3551087 - RNA, 14 nt, Human
ugaucugucuugua

SEQ ID NO: 3551088 - RNA, 17 nt, Human
ugaucugucuuguaaua

SEQ ID NO: 3551089 - RNA, 19 nt, Human
ugaucugucuuguaauauu

SEQ ID NO: 3551090 - RNA, 20 nt, Human
ugaucugugauaguucaccc

SEQ ID NO: 3551091 - RNA, 21 nt, Human
ugaucugugauaguucacccc

SEQ ID NO: 3551092 - RNA, 14 nt, Human
ugaucugugccuuu

SEQ ID NO: 3551093 - RNA, 23 nt, Human
ugaucugugccuuuuuuauaucu

SEQ ID NO: 3551094 - RNA, 19 nt, Human
ugaucugugcuuuccagcu

SEQ ID NO: 3551095 - RNA, 22 nt, Human
ugaucugugcuuuccagcucac

SEQ ID NO: 3551096 - RNA, 15 nt, Human
ugaucuucaacaaau

SEQ ID NO: 3551097 - RNA, 17 nt, Human
ugaucuuccucugcuaa

SEQ ID NO: 3551098 - RNA, 17 nt, Human
ugaucuuuaaaauacac

SEQ ID NO: 3551099 - RNA, 16 nt, Human
ugaucuuugcagacag

SEQ ID NO: 3551100 - RNA, 18 nt, Human
ugaucuuugcagacaggc

SEQ ID NO: 3551101 - RNA, 14 nt, Human
ugaucuuuuaaagu

SEQ ID NO: 3551102 - RNA, 15 nt, Human
ugaucuuuuaaagug

SEQ ID NO: 3551103 - RNA, 19 nt, Human
ugaucuuuuaaaguguuac

SEQ ID NO: 3551104 - RNA, 15 nt, Human
ugaugaaaaauagca

SEQ ID NO: 3551105 - RNA, 19 nt, Human
ugaugaaaaauugcugacu

SEQ ID NO: 3551106 - RNA, 21 nt, Human
ugaugaaaaauugcugacugu

SEQ ID NO: 3551107 - RNA, 14 nt, Human
ugaugaaaagauuu

SEQ ID NO: 3551108 - RNA, 23 nt, Human
ugaugaaaagcuuuguuuguucu

SEQ ID NO: 3551109 - RNA, 13 nt, Human
ugaugaaaauaaa

SEQ ID NO: 3551110 - RNA, 15 nt, Human
ugaugaaaauaaaga

SEQ ID NO: 3551111 - RNA, 16 nt, Human
ugaugaaaauaaagaa

SEQ ID NO: 3551112 - RNA, 19 nt, Human
ugaugaaaauaaagaaugg

SEQ ID NO: 3551113 - RNA, 14 nt, Human
ugaugaaaauauuu

SEQ ID NO: 3551114 - RNA, 15 nt, Human
ugaugaaaauauuua

SEQ ID NO: 3551115 - RNA, 13 nt, Human
ugaugaaagcuga

SEQ ID NO: 3551116 - RNA, 15 nt, Human
ugaugaaagcugauu

SEQ ID NO: 3551117 - RNA, 23 nt, Human
ugaugaaaugaggucagagccug

SEQ ID NO: 3551118 - RNA, 18 nt, Human
ugaugaagaaaagugggc

SEQ ID NO: 3551119 - RNA, 20 nt, Human
ugaugaagaaaagugggcca

SEQ ID NO: 3551120 - RNA, 13 nt, Human
ugaugaagaggag

SEQ ID NO: 3551121 - RNA, 22 nt, Human
ugaugaaucaguccuagaaugu

SEQ ID NO: 3551122 - RNA, 20 nt, Human
ugaugacaacuacagaaaaa

SEQ ID NO: 3551123 - RNA, 21 nt, Human
ugaugacaacuggaauaguuu

SEQ ID NO: 3551124 - RNA, 18 nt, Human
ugaugacaauaaagcuug

SEQ ID NO: 3551125 - RNA, 15 nt, Human
ugaugacagagcgag

SEQ ID NO: 3551126 - RNA, 17 nt, Human
ugaugacaguaguacca

SEQ ID NO: 3551127 - RNA, 15 nt, Human
ugaugacauucccug

SEQ ID NO: 3551128 - RNA, 16 nt, Human
ugaugaccaauuuuaa

SEQ ID NO: 3551129 - RNA, 18 nt, Human
ugaugaccaauuuuaacu

SEQ ID NO: 3551130 - RNA, 15 nt, Human
ugaugacccuuuuca

SEQ ID NO: 3551131 - RNA, 22 nt, Human
ugaugacguacaaguaguucug

SEQ ID NO: 3551132 - RNA, 22 nt, Human
ugaugacuaugcuuugcuauca

SEQ ID NO: 3551133 - RNA, 20 nt, Human
ugaugacuggaauuuuuauu

SEQ ID NO: 3551134 - RNA, 13 nt, Human
ugaugacuguuuu

SEQ ID NO: 3551135 - RNA, 23 nt, Human
ugaugacuuucuuuuuguagcug

SEQ ID NO: 3551136 - RNA, 15 nt, Human
ugaugagaggaaauc

SEQ ID NO: 3551137 - RNA, 14 nt, Human
ugaugagauuuuua

SEQ ID NO: 3551138 - RNA, 19 nt, Human
ugaugagcugugcacaaag

SEQ ID NO: 3551139 - RNA, 22 nt, Human
ugaugaggccucuuggaccucu

SEQ ID NO: 3551140 - RNA, 16 nt, Human
ugaugagggcagcagc

SEQ ID NO: 3551141 - RNA, 19 nt, Human
ugaugagggcagcagccag

SEQ ID NO: 3551142 - RNA, 24 nt, Human
ugaugagggcagcagccagcccug

SEQ ID NO: 3551143 - RNA, 16 nt, Human
ugaugagguauuuuuu

SEQ ID NO: 3551144 - RNA, 22 nt, Human
ugaugagguauuuuuuccuuuu

SEQ ID NO: 3551145 - RNA, 17 nt, Human
ugaugaguguaacaaga

SEQ ID NO: 3551146 - RNA, 19 nt, Human
ugaugaguguaacaagaaa

SEQ ID NO: 3551147 - RNA, 14 nt, Human
ugaugauaaugaug

SEQ ID NO: 3551148 - RNA, 17 nt, Human
ugaugauacaaugaaca

SEQ ID NO: 3551149 - RNA, 21 nt, Human
ugaugaugggaauugugugau

SEQ ID NO: 3551150 - RNA, 23 nt, Human
ugaugcaauccuuacaaaugauu

SEQ ID NO: 3551151 - RNA, 17 nt, Human
ugaugcacagagaagcu

SEQ ID NO: 3551152 - RNA, 17 nt, Human
ugaugcacauuucaugu

SEQ ID NO: 3551153 - RNA, 12 nt, Human
ugaugcagcauu

SEQ ID NO: 3551154 - RNA, 13 nt, Human
ugaugcagcauuu

SEQ ID NO: 3551155 - RNA, 19 nt, Human
ugaugcagcauuugauaau

SEQ ID NO: 3551156 - RNA, 23 nt, Human
ugaugcagcauuugauaaugaua

SEQ ID NO: 3551157 - RNA, 21 nt, Human
ugaugcagcuuauacgaaaua

SEQ ID NO: 3551158 - RNA, 21 nt, Human
ugaugcaggcacuuauuguaa

SEQ ID NO: 3551159 - RNA, 23 nt, Human
ugaugcaugcacuguucccccug

SEQ ID NO: 3551160 - RNA, 11 nt, Human
aaaaaaugucc

SEQ ID NO: 3551161 - RNA, 12 nt, Human
aaaaaauuuaaa

SEQ ID NO: 3551162 - RNA, 14 nt, Human
aaaaaauuuaagug

SEQ ID NO: 3551163 - RNA, 16 nt, Human
aaaaaauuuccaguga

SEQ ID NO: 3551164 - RNA, 11 nt, Human
aaaaaauuuug

SEQ ID NO: 3551165 - RNA, 19 nt, Human
aaaaaauuuuguaauuuuc

SEQ ID NO: 3551166 - RNA, 15 nt, Human
aaaaacaaauaauau

SEQ ID NO: 3551167 - RNA, 18 nt, Human
aaaaacaauauuuauugu

SEQ ID NO: 3551168 - RNA, 14 nt, Human
aaaaacacaaaagu

SEQ ID NO: 3551169 - RNA, 18 nt, Human
aaaaacaccuagcuuuau

SEQ ID NO: 3551170 - RNA, 18 nt, Human
aaaaacagauuuggaaag

SEQ ID NO: 3551171 - RNA, 11 nt, Human
aaaaacagcuu

SEQ ID NO: 3551172 - RNA, 13 nt, Human
aaaaacauaacau

SEQ ID NO: 3551173 - RNA, 16 nt, Human
aaaaacauguaugugc

SEQ ID NO: 3551174 - RNA, 20 nt, Human
aaaaacauguaugugcauuu

SEQ ID NO: 3551175 - RNA, 23 nt, Human
aaaaacauucuaucuacugauuu

SEQ ID NO: 3551176 - RNA, 22 nt, Human
aaaaaccguguuugucucuucu

SEQ ID NO: 3551177 - RNA, 12 nt, Human
aaaaaccuuggg

SEQ ID NO: 3551178 - RNA, 17 nt, Human
aaaaacuaaaaacuaga

SEQ ID NO: 3551179 - RNA, 19 nt, Human
aaaaacuacaaccaaugga

SEQ ID NO: 3551180 - RNA, 15 nt, Human
aaaaacuaguaguuc

SEQ ID NO: 3551181 - RNA, 23 nt, Human
aaaaacuauuaaggauguagcuu

SEQ ID NO: 3551182 - RNA, 20 nt, Human
aaaaacucuuuaacuuguaa

SEQ ID NO: 3551183 - RNA, 14 nt, Human
aaaaacucuuuauu

SEQ ID NO: 3551184 - RNA, 15 nt, Human
aaaaacucuuuauuu

SEQ ID NO: 3551185 - RNA, 14 nt, Human
aaaaacugaaaaau

SEQ ID NO: 3551186 - RNA, 22 nt, Human
aaaaacuucauguaauuuuauu

SEQ ID NO: 3551187 - RNA, 19 nt, Human
aaaaacuuugccagccauu

SEQ ID NO: 3551188 - RNA, 20 nt, Human
aaaaacuuuggaaccagacu

SEQ ID NO: 3551189 - RNA, 23 nt, Human
aaaaacuuuuauaaauuaaauau

SEQ ID NO: 3551190 - RNA, 14 nt, Human
aaaaagaaaaugaa

SEQ ID NO: 3551191 - RNA, 18 nt, Human
aaaaagaaagaaagagga

SEQ ID NO: 3551192 - RNA, 13 nt, Human
aaaaagaacuucc

SEQ ID NO: 3551193 - RNA, 21 nt, Human
aaaaagaaucugcauuuagca

SEQ ID NO: 3551194 - RNA, 14 nt, Human
aaaaagacagggcu

SEQ ID NO: 3551195 - RNA, 13 nt, Human
aaaaagaccagac

SEQ ID NO: 3551196 - RNA, 13 nt, Human
aaaaagauauauu

SEQ ID NO: 3551197 - RNA, 22 nt, Human
aaaaagauggccuuugcuuaug

SEQ ID NO: 3551198 - RNA, 20 nt, Human
aaaaagauguucagucauuu

SEQ ID NO: 3551199 - RNA, 18 nt, Human
aaaaagauuguauugcug

SEQ ID NO: 3551200 - RNA, 15 nt, Human
aaaaagcacaagaag

SEQ ID NO: 3551201 - RNA, 21 nt, Human
aaaaagcagacagaagucacu

SEQ ID NO: 3551202 - RNA, 14 nt, Human
aaaaagcaguucuu

SEQ ID NO: 3551203 - RNA, 20 nt, Human
aaaaagcauaaaaacauuuu

SEQ ID NO: 3551204 - RNA, 14 nt, Human
aaaaagcauguaca

SEQ ID NO: 3551205 - RNA, 20 nt, Human
aaaaagcauguacaguguuc

SEQ ID NO: 3551206 - RNA, 17 nt, Human
aaaaagccagggcugga

SEQ ID NO: 3551207 - RNA, 17 nt, Human
aaaaagccuccagucca

SEQ ID NO: 3551208 - RNA, 18 nt, Human
aaaaagcgaaaaaaucag

SEQ ID NO: 3551209 - RNA, 19 nt, Human
aaaaagcuagucaacagua

SEQ ID NO: 3551210 - RNA, 17 nt, Human
aaaaagcucauuucaug

SEQ ID NO: 3551211 - RNA, 21 nt, Human
aaaaagcucauuucaugcucu

SEQ ID NO: 3551212 - RNA, 20 nt, Human
aaaaagcuccaaaugcagcu

SEQ ID NO: 3551213 - RNA, 13 nt, Human
aaaaagcuggugg

SEQ ID NO: 3551214 - RNA, 17 nt, Human
aaaaagcuuaaaacuuu

SEQ ID NO: 3551215 - RNA, 20 nt, Human
aaaaagcuuaaaacuuugaa

SEQ ID NO: 3551216 - RNA, 13 nt, Human
aaaaagcuucccc

SEQ ID NO: 3551217 - RNA, 23 nt, Human
aaaaagcuuuaugauuuucauaa

SEQ ID NO: 3551218 - RNA, 16 nt, Human
aaaaaggacaucagca

SEQ ID NO: 3551219 - RNA, 14 nt, Human
aaaaaggaggaaga

SEQ ID NO: 3551220 - RNA, 17 nt, Human
aaaaaggauacauaaug

SEQ ID NO: 3551221 - RNA, 19 nt, Human
aaaaaggcauauugcuuuu

SEQ ID NO: 3551222 - RNA, 21 nt, Human
aaaaaggccaguggaaauuca

SEQ ID NO: 3551223 - RNA, 19 nt, Human
aaaaauauauuuaaugaua

SEQ ID NO: 3551224 - RNA, 12 nt, Human
aaaaauauguau

SEQ ID NO: 3551225 - RNA, 23 nt, Human
aaaaauaugugaaggaccuucac

SEQ ID NO: 3551226 - RNA, 16 nt, Human
aaaaauauuauaacuu

SEQ ID NO: 3551227 - RNA, 12 nt, Human
aaaaauauuguu

SEQ ID NO: 3551228 - RNA, 13 nt, Human
aaaaauauuuucu

SEQ ID NO: 3551229 - RNA, 17 nt, Human
aaaaaucacaaaaauuu

SEQ ID NO: 3551230 - RNA, 20 nt, Human
aaaaaucacaauuuuuaaug

SEQ ID NO: 3551231 - RNA, 15 nt, Human
aaaaaucacauccug

SEQ ID NO: 3551232 - RNA, 21 nt, Human
aaaaaucaugccaguauuuuu

SEQ ID NO: 3551233 - RNA, 16 nt, Human
aaaaauccagaaagaa

SEQ ID NO: 3551234 - RNA, 15 nt, Human
aaaaauccucuuccu

SEQ ID NO: 3551235 - RNA, 19 nt, Human
aaaaauccuucuaaucugc

SEQ ID NO: 3551236 - RNA, 22 nt, Human
aaaaaucuaccuucuguaguuu

SEQ ID NO: 3551237 - RNA, 14 nt, Human
aaaaaucucaaauu

SEQ ID NO: 3551238 - RNA, 19 nt, Human
aaaaaucucaaauuucuaa

SEQ ID NO: 3551239 - RNA, 14 nt, Human
aaaaaucugaagau

SEQ ID NO: 3551240 - RNA, 10 nt, Human
aaaaaugaaa

SEQ ID NO: 3551241 - RNA, 14 nt, Human
aaaaaugaaagaug

SEQ ID NO: 3551242 - RNA, 20 nt, Human
aaaaaugaaugucuaaaauu

SEQ ID NO: 3551243 - RNA, 17 nt, Human
aaaaaugacagauguug

SEQ ID NO: 3551244 - RNA, 20 nt, Human
aaaaaugacuaaaaauauua

SEQ ID NO: 3551245 - RNA, 21 nt, Human
aaaaaugagaacauguuggua

SEQ ID NO: 3551246 - RNA, 15 nt, Human
aaaaaugauguucau

SEQ ID NO: 3551247 - RNA, 20 nt, Human
aaaaaugauuucaguagcac

SEQ ID NO: 3551248 - RNA, 15 nt, Human
aaaaaugccauaaua

SEQ ID NO: 3551249 - RNA, 19 nt, Human
aaaaaugccuuugagacag

SEQ ID NO: 3551250 - RNA, 20 nt, Human
aaaaaugccuuugagacagu

SEQ ID NO: 3551251 - RNA, 22 nt, Human
aaaaaugccuuugagacaguuu

SEQ ID NO: 3551252 - RNA, 17 nt, Human
aaaaaugcuaauauuaa

SEQ ID NO: 3551253 - RNA, 16 nt, Human
aaaaaugcugaacauu

SEQ ID NO: 3551254 - RNA, 14 nt, Human
aaaaaugcuuugcu

SEQ ID NO: 3551255 - RNA, 15 nt, Human
aaaaauggaacugug

SEQ ID NO: 3551256 - RNA, 14 nt, Human
aaaaauggcucaga

SEQ ID NO: 3551257 - RNA, 23 nt, Human
aaaaaugggacuucuuuucacau

SEQ ID NO: 3551258 - RNA, 19 nt, Human
aaaaaugguaaaauugcau

SEQ ID NO: 3551259 - RNA, 22 nt, Human
aaaaaugguggcuucagcucca

SEQ ID NO: 3551260 - RNA, 11 nt, Human
aaaaauguagg

SEQ ID NO: 3551261 - RNA, 12 nt, Human
aaaaauguagga

SEQ ID NO: 3551262 - RNA, 18 nt, Human
aaaaauguccugccuuuu

SEQ ID NO: 3551263 - RNA, 21 nt, Human
aaaaaugucuugcuguugaca

SEQ ID NO: 3551264 - RNA, 22 nt, Human
aaaaaugucuuggguaggcggg

SEQ ID NO: 3551265 - RNA, 20 nt, Human
aaaaauguucuauuuuaauu

SEQ ID NO: 3551266 - RNA, 13 nt, Human
aaaaauuaaaaug

SEQ ID NO: 3551267 - RNA, 21 nt, Human
aaaaauuaaaccggaccaucu

SEQ ID NO: 3551268 - RNA, 22 nt, Human
aaaaauuaggacagaaauaaua

SEQ ID NO: 3551269 - RNA, 20 nt, Human
aaaaauucagcaaagugguu

SEQ ID NO: 3551270 - RNA, 22 nt, Human
aaaaauugaaauguaaggcugu

SEQ ID NO: 3551271 - RNA, 15 nt, Human
aaaaauugcugacug

SEQ ID NO: 3551272 - RNA, 21 nt, Human
aaaaauugcugacuguagcuu

SEQ ID NO: 3551273 - RNA, 23 nt, Human
aaaaauugcugacuguagcuuug

SEQ ID NO: 3551274 - RNA, 18 nt, Human
aaaaauuggggauucuua

SEQ ID NO: 3551275 - RNA, 19 nt, Human
aaaaauuggggauucuuaa

SEQ ID NO: 3551276 - RNA, 20 nt, Human
aaaaauuggggauucuuaaa

SEQ ID NO: 3551277 - RNA, 18 nt, Human
aaaaauugguucuuuauu

SEQ ID NO: 3551278 - RNA, 14 nt, Human
aaaaauuuaagcau

SEQ ID NO: 3551279 - RNA, 15 nt, Human
aaaaauuuaagcauu

SEQ ID NO: 3551280 - RNA, 13 nt, Human
aaaaauuuaagug

SEQ ID NO: 3551281 - RNA, 13 nt, Human
aaaaauuuacuuu

SEQ ID NO: 3551282 - RNA, 20 nt, Human
aaaaauuugaaccaaaacau

SEQ ID NO: 3551283 - RNA, 23 nt, Human
aaaaauuugucugaaacauuuca

SEQ ID NO: 3551284 - RNA, 13 nt, Human
aaaaauuuuuguu

SEQ ID NO: 3551285 - RNA, 14 nt, Human
aaaaauuuuuguuu

SEQ ID NO: 3551286 - RNA, 10 nt, Human
aaaacaaaaa

SEQ ID NO: 3551287 - RNA, 15 nt, Human
aaaacaaaaaacaau

SEQ ID NO: 3551288 - RNA, 13 nt, Human
aaaacaaaaggca

SEQ ID NO: 3551289 - RNA, 15 nt, Human
aaaacaaacucauuc

SEQ ID NO: 3551290 - RNA, 12 nt, Human
aaaacaaagaag

SEQ ID NO: 3551291 - RNA, 20 nt, Human
aaaacaaagcaauucuuuca

SEQ ID NO: 3551292 - RNA, 15 nt, Human
aaaacaaaugccaca

SEQ ID NO: 3551293 - RNA, 12 nt, Human
aaaacaacaaaa

SEQ ID NO: 3551294 - RNA, 14 nt, Human
aaaacaaccaagcg

SEQ ID NO: 3551295 - RNA, 12 nt, Human
aaaacaagugaa

SEQ ID NO: 3551296 - RNA, 15 nt, Human
aaaacaagugaaaua

SEQ ID NO: 3551297 - RNA, 15 nt, Human
aaaacaauauuguuu

SEQ ID NO: 3551298 - RNA, 18 nt, Human
aaaacaauauuguuucua

SEQ ID NO: 3551299 - RNA, 14 nt, Human
aaaacaauauuuau

SEQ ID NO: 3551300 - RNA, 19 nt, Human
aaaacaaucauuugcuuuu

SEQ ID NO: 3551301 - RNA, 13 nt, Human
aaaacaaugaaga

SEQ ID NO: 3551302 - RNA, 14 nt, Human
aaaacaauuguaau

SEQ ID NO: 3551303 - RNA, 15 nt, Human
aaaacacaagcaaaa

SEQ ID NO: 3551304 - RNA, 13 nt, Human
aaaacacacaggu

SEQ ID NO: 3551305 - RNA, 12 nt, Human
aaaacacagcaa

SEQ ID NO: 3551306 - RNA, 13 nt, Human
aaaauauuuucug

SEQ ID NO: 3551307 - RNA, 15 nt, Human
aaaauauuuucugug

SEQ ID NO: 3551308 - RNA, 16 nt, Human
aaaauauuuucugugu

SEQ ID NO: 3551309 - RNA, 18 nt, Human
aaaauauuuucugugugu

SEQ ID NO: 3551310 - RNA, 23 nt, Human
aaaauauuuuuuauauauacagu

SEQ ID NO: 3551311 - RNA, 18 nt, Human
aaaaucaaaacaaaaaaa

SEQ ID NO: 3551312 - RNA, 11 nt, Human
aaaaucaacuu

SEQ ID NO: 3551313 - RNA, 13 nt, Human
aaaaucaacuuuu

SEQ ID NO: 3551314 - RNA, 14 nt, Human
aaaaucacaauuuu

SEQ ID NO: 3551315 - RNA, 20 nt, Human
aaaaucacaauuuuuaaugg

SEQ ID NO: 3551316 - RNA, 15 nt, Human
aaaaucacuuucaua

SEQ ID NO: 3551317 - RNA, 18 nt, Human
aaaaucagccaauuaugu

SEQ ID NO: 3551318 - RNA, 17 nt, Human
aaaaucaguuguacagu

SEQ ID NO: 3551319 - RNA, 22 nt, Human
aaaaucauaaacugugugcaga

SEQ ID NO: 3551320 - RNA, 18 nt, Human
aaaaucauauugcuucuu

SEQ ID NO: 3551321 - RNA, 20 nt, Human
aaaaucaucaagaagggcug

SEQ ID NO: 3551322 - RNA, 18 nt, Human
aaaaucaugccaguauuu

SEQ ID NO: 3551323 - RNA, 17 nt, Human
aaaaucauggaaugguu

SEQ ID NO: 3551324 - RNA, 15 nt, Human
aaaaucauguacauu

SEQ ID NO: 3551325 - RNA, 16 nt, Human
aaaaucauguacauuu

SEQ ID NO: 3551326 - RNA, 17 nt, Human
aaaaucauguacauuuc

SEQ ID NO: 3551327 - RNA, 18 nt, Human
aaaaucauguacauuucu

SEQ ID NO: 3551328 - RNA, 19 nt, Human
aaaaucauuuuauauguca

SEQ ID NO: 3551329 - RNA, 14 nt, Human
aaaauccaaaaaga

SEQ ID NO: 3551330 - RNA, 22 nt, Human
aaaauccagaaacuuguucuuc

SEQ ID NO: 3551331 - RNA, 18 nt, Human
aaaauccccaugccugug

SEQ ID NO: 3551332 - RNA, 22 nt, Human
aaaauccuaagacacaaaugca

SEQ ID NO: 3551333 - RNA, 16 nt, Human
aaaauccucuuccucu

SEQ ID NO: 3551334 - RNA, 15 nt, Human
aaaauccuucuaauc

SEQ ID NO: 3551335 - RNA, 16 nt, Human
aaaauccuucuaaucu

SEQ ID NO: 3551336 - RNA, 20 nt, Human
aaaauccuugcuuaugacau

SEQ ID NO: 3551337 - RNA, 22 nt, Human
aaaaucuaagcagcuuauuguu

SEQ ID NO: 3551338 - RNA, 18 nt, Human
aaaaucuaccuucuguag

SEQ ID NO: 3551339 - RNA, 22 nt, Human
aaaaucucaaauuucuaaaucu

SEQ ID NO: 3551340 - RNA, 19 nt, Human
aaaaucucccauuuuggaa

SEQ ID NO: 3551341 - RNA, 19 nt, Human
aaaaucucucauuugugug

SEQ ID NO: 3551342 - RNA, 16 nt, Human
aaaaucucuccacuuu

SEQ ID NO: 3551343 - RNA, 16 nt, Human
aaaaucucucucuguu

SEQ ID NO: 3551344 - RNA, 13 nt, Human
aaaaucugaaaau

SEQ ID NO: 3551345 - RNA, 16 nt, Human
aaaaucugagggaaau

SEQ ID NO: 3551346 - RNA, 13 nt, Human
aaaaucugccugg

SEQ ID NO: 3551347 - RNA, 18 nt, Human
aaaaucuguagagcaggg

SEQ ID NO: 3551348 - RNA, 16 nt, Human
aaaaucuguggugguc

SEQ ID NO: 3551349 - RNA, 20 nt, Human
aaaaucuguugauaaaucca

SEQ ID NO: 3551350 - RNA, 16 nt, Human
aaaaucuuaauacugu

SEQ ID NO: 3551351 - RNA, 22 nt, Human
aaaaucuuaauacuguuauucu

SEQ ID NO: 3551352 - RNA, 12 nt, Human
aaaaucuuauua

SEQ ID NO: 3551353 - RNA, 23 nt, Human
aaaaucuuauuaaaguuucaaaa

SEQ ID NO: 3551354 - RNA, 17 nt, Human
aaaaucuucauggaauu

SEQ ID NO: 3551355 - RNA, 13 nt, Human
aaaaucuugucau

SEQ ID NO: 3551356 - RNA, 21 nt, Human
aaaaucuuucuuucuuagaaa

SEQ ID NO: 3551357 - RNA, 17 nt, Human
aaaaugaaaauaaguga

SEQ ID NO: 3551358 - RNA, 15 nt, Human
aaaaugaaaauugua

SEQ ID NO: 3551359 - RNA, 15 nt, Human
aaaaugaaagaugau

SEQ ID NO: 3551360 - RNA, 14 nt, Human
aaaaugaaaugcau

SEQ ID NO: 3551361 - RNA, 15 nt, Human
aaaaugaauccuaca

SEQ ID NO: 3551362 - RNA, 20 nt, Human
aaaaugacaaucaugugugu

SEQ ID NO: 3551363 - RNA, 13 nt, Human
aaaaugacaauga

SEQ ID NO: 3551364 - RNA, 19 nt, Human
aaaaugacaccaucuuuua

SEQ ID NO: 3551365 - RNA, 13 nt, Human
aaaaugacagaug

SEQ ID NO: 3551366 - RNA, 15 nt, Human
aaaaugacagauguu

SEQ ID NO: 3551367 - RNA, 19 nt, Human
aaaaugaccaguaauugug

SEQ ID NO: 3551368 - RNA, 20 nt, Human
aaaaugaccaguaauuguga

SEQ ID NO: 3551369 - RNA, 14 nt, Human
aaaaugacuacuua

SEQ ID NO: 3551370 - RNA, 12 nt, Human
aaaaugagaaau

SEQ ID NO: 3551371 - RNA, 20 nt, Human
aaaaugagaacauguuggua

SEQ ID NO: 3551372 - RNA, 23 nt, Human
aaaaugagaacauguugguauuu

SEQ ID NO: 3551373 - RNA, 22 nt, Human
aaaaugagacuaugcguuuuua

SEQ ID NO: 3551374 - RNA, 23 nt, Human
aaaaugagagggcaguguuuccu

SEQ ID NO: 3551375 - RNA, 14 nt, Human
aaaaugagccuggc

SEQ ID NO: 3551376 - RNA, 19 nt, Human
aaaaugaggaauguauaug

SEQ ID NO: 3551377 - RNA, 16 nt, Human
aaaaugaggacauguu

SEQ ID NO: 3551378 - RNA, 19 nt, Human
aaaaugauauuguuauaua

SEQ ID NO: 3551379 - RNA, 17 nt, Human
aaaaugcaaaaaaucuu

SEQ ID NO: 3551380 - RNA, 14 nt, Human
aaaaugcaaauccu

SEQ ID NO: 3551381 - RNA, 12 nt, Human
aaaaugcaauau

SEQ ID NO: 3551382 - RNA, 20 nt, Human
aaaaugcacaaacaaugcaa

SEQ ID NO: 3551383 - RNA, 14 nt, Human
aaaaugcacguagc

SEQ ID NO: 3551384 - RNA, 16 nt, Human
aaaaugcauguaauca

SEQ ID NO: 3551385 - RNA, 17 nt, Human
aaaaugccaucaaauga

SEQ ID NO: 3551386 - RNA, 23 nt, Human
aaaaugccaugaugccucugucu

SEQ ID NO: 3551387 - RNA, 11 nt, Human
aaaaugccuuu

SEQ ID NO: 3551388 - RNA, 15 nt, Human
aaaaugccuuugaga

SEQ ID NO: 3551389 - RNA, 17 nt, Human
aaaaugccuuugagaca

SEQ ID NO: 3551390 - RNA, 22 nt, Human
aaaaugccuuugagacaguuuc

SEQ ID NO: 3551391 - RNA, 23 nt, Human
aaaaugccuuugagacaguuucu

SEQ ID NO: 3551392 - RNA, 18 nt, Human
aaaaugcgguuauaaaaa

SEQ ID NO: 3551393 - RNA, 22 nt, Human
aaaaugcgguuauaaaaaaugg

SEQ ID NO: 3551394 - RNA, 18 nt, Human
aaaaugcuccccacagcg

SEQ ID NO: 3551395 - RNA, 20 nt, Human
aaaaugcugaacauugcaua

SEQ ID NO: 3551396 - RNA, 19 nt, Human
aaaaugcuggcuauagaug

SEQ ID NO: 3551397 - RNA, 16 nt, Human
aaaaugcuuacauuug

SEQ ID NO: 3551398 - RNA, 14 nt, Human
aaaauggaaagaau

SEQ ID NO: 3551399 - RNA, 20 nt, Human
aaaauggaagacagcucuua

SEQ ID NO: 3551400 - RNA, 14 nt, Human
aaaauggaauaaaa

SEQ ID NO: 3551401 - RNA, 22 nt, Human
aaaauggaggccauugugugag

SEQ ID NO: 3551402 - RNA, 19 nt, Human
aaaauggcaacaaacugca

SEQ ID NO: 3551403 - RNA, 19 nt, Human
aaaauggccauuugcuuuu

SEQ ID NO: 3551404 - RNA, 16 nt, Human
aaaaugggcacuuaaa

SEQ ID NO: 3551405 - RNA, 16 nt, Human
aaaaugguaaaauugc

SEQ ID NO: 3551406 - RNA, 18 nt, Human
aaaaugguauaaguaacu

SEQ ID NO: 3551407 - RNA, 23 nt, Human
aaaaugguauaaguaacuuuauu

SEQ ID NO: 3551408 - RNA, 15 nt, Human
aaaaugguggcuuca

SEQ ID NO: 3551409 - RNA, 17 nt, Human
aaaaugguguuuucaug

SEQ ID NO: 3551410 - RNA, 18 nt, Human
aaaaugguuuauuuugua

SEQ ID NO: 3551411 - RNA, 11 nt, Human
aaaauguaaau

SEQ ID NO: 3551412 - RNA, 23 nt, Human
aaaauguaagauuauagauucua

SEQ ID NO: 3551413 - RNA, 14 nt, Human
aaaauguaauuuaa

SEQ ID NO: 3551414 - RNA, 19 nt, Human
aaaauguaauuuaaaugaa

SEQ ID NO: 3551415 - RNA, 12 nt, Human
aaaauguacaaa

SEQ ID NO: 3551416 - RNA, 17 nt, Human
aaaauguaggagacugu

SEQ ID NO: 3551417 - RNA, 21 nt, Human
aaaauguaggcuuaguuugug

SEQ ID NO: 3551418 - RNA, 17 nt, Human
aaaauguaggguuauaa

SEQ ID NO: 3551419 - RNA, 23 nt, Human
aaaauguauaaguugaggcauuu

SEQ ID NO: 3551420 - RNA, 20 nt, Human
aaaaguuggacuaaaugccu

SEQ ID NO: 3551421 - RNA, 16 nt, Human
aaaaguuguaugaucu

SEQ ID NO: 3551422 - RNA, 12 nt, Human
aaaaguuguuca

SEQ ID NO: 3551423 - RNA, 13 nt, Human
aaaaguuguucaa

SEQ ID NO: 3551424 - RNA, 16 nt, Human
aaaaguuuaauauuaa

SEQ ID NO: 3551425 - RNA, 13 nt, Human
aaaaguuuacaac

SEQ ID NO: 3551426 - RNA, 16 nt, Human
aaaaguuuuuguuugg

SEQ ID NO: 3551427 - RNA, 16 nt, Human
aaaauaaaaaaaagaa

SEQ ID NO: 3551428 - RNA, 22 nt, Human
aaaauaaaaagugacacagcag

SEQ ID NO: 3551429 - RNA, 14 nt, Human
aaaauaaaacaaag

SEQ ID NO: 3551430 - RNA, 17 nt, Human
aaaauaaaacauagcaa

SEQ ID NO: 3551431 - RNA, 15 nt, Human
aaaauaaaacauuuu

SEQ ID NO: 3551432 - RNA, 13 nt, Human
aaaauaaaauaua

SEQ ID NO: 3551433 - RNA, 13 nt, Human
aaaauaaaaugaa

SEQ ID NO: 3551434 - RNA, 16 nt, Human
aaaauaaaauuaagaa

SEQ ID NO: 3551435 - RNA, 14 nt, Human
aaaauaaacaaaua

SEQ ID NO: 3551436 - RNA, 15 nt, Human
aaaauaaacacuaca

SEQ ID NO: 3551437 - RNA, 20 nt, Human
aaaauaaaccaaaggacauu

SEQ ID NO: 3551438 - RNA, 22 nt, Human
aaaauaaacuuucuuaauauuu

SEQ ID NO: 3551439 - RNA, 21 nt, Human
aaaauaaagaaaagaugcacu

SEQ ID NO: 3551440 - RNA, 13 nt, Human
aaaauaaagaaug

SEQ ID NO: 3551441 - RNA, 22 nt, Human
aaaauaaagacaaccauauuua

SEQ ID NO: 3551442 - RNA, 11 nt, Human
aaaauaaagca

SEQ ID NO: 3551443 - RNA, 13 nt, Human
aaaauaaagcaag

SEQ ID NO: 3551444 - RNA, 13 nt, Human
aaaauaaaguugg

SEQ ID NO: 3551445 - RNA, 16 nt, Human
aaaauaaauaaaagcc

SEQ ID NO: 3551446 - RNA, 14 nt, Human
aaaauaaauauauc

SEQ ID NO: 3551447 - RNA, 17 nt, Human
aaaauaaauauaucuac

SEQ ID NO: 3551448 - RNA, 23 nt, Human
aaaauaaauauugucuuuuugua

SEQ ID NO: 3551449 - RNA, 14 nt, Human
aaaauaaauuuaua

SEQ ID NO: 3551450 - RNA, 18 nt, Human
aaaauaaccuaauuaaua

SEQ ID NO: 3551451 - RNA, 13 nt, Human
aaaacuuuucuca

SEQ ID NO: 3551452 - RNA, 9 nt, Human
aaaagaaaa

SEQ ID NO: 3551453 - RNA, 16 nt, Human
aaaagaaaaaaaaaga

SEQ ID NO: 3551454 - RNA, 14 nt, Human
aaaagaaaaacugu

SEQ ID NO: 3551455 - RNA, 13 nt, Human
aaaagaaaaagau

SEQ ID NO: 3551456 - RNA, 16 nt, Human
aaaagaaaagucaagg

SEQ ID NO: 3551457 - RNA, 13 nt, Human
aaaagaaaaguuu

SEQ ID NO: 3551458 - RNA, 19 nt, Human
aaaagaaaaugaaaaacaa

SEQ ID NO: 3551459 - RNA, 10 nt, Human
aaaagaaaga

SEQ ID NO: 3551460 - RNA, 11 nt, Human
aaaagaaagca

SEQ ID NO: 3551461 - RNA, 15 nt, Human
aaaagaaauaauaau

SEQ ID NO: 3551462 - RNA, 19 nt, Human
aaaagaaaucauguccaua

SEQ ID NO: 3551463 - RNA, 14 nt, Human
aaaagaaaugaaca

SEQ ID NO: 3551464 - RNA, 14 nt, Human
aaaagaagaaguuu

SEQ ID NO: 3551465 - RNA, 19 nt, Human
aaaagaagcccggcuccug

SEQ ID NO: 3551466 - RNA, 21 nt, Human
aaaagaauauucagagaauau

SEQ ID NO: 3551467 - RNA, 21 nt, Human
aaaagaaucugcauuuagcac

SEQ ID NO: 3551468 - RNA, 16 nt, Human
aaaagaaugggcaguu

SEQ ID NO: 3551469 - RNA, 21 nt, Human
aaaagaaugucagaaaaacaa

SEQ ID NO: 3551470 - RNA, 22 nt, Human
aaaagaauuguuggggguuuuu

SEQ ID NO: 3551471 - RNA, 20 nt, Human
aaaagacaaggaaaaaauaa

SEQ ID NO: 3551472 - RNA, 14 nt, Human
aaaagacaauucuu

SEQ ID NO: 3551473 - RNA, 18 nt, Human
aaaagacacuugauacuu

SEQ ID NO: 3551474 - RNA, 12 nt, Human
aaaagacauguu

SEQ ID NO: 3551475 - RNA, 13 nt, Human
aaaagaccagacu

SEQ ID NO: 3551476 - RNA, 13 nt, Human
aaaagacucaucc

SEQ ID NO: 3551477 - RNA, 13 nt, Human
aaaagagaaaaga

SEQ ID NO: 3551478 - RNA, 16 nt, Human
aaaagagaaaagaaaa

SEQ ID NO: 3551479 - RNA, 12 nt, Human
aaaagagaagaa

SEQ ID NO: 3551480 - RNA, 18 nt, Human
aaaagagaagaagaaaaa

SEQ ID NO: 3551481 - RNA, 14 nt, Human
aaaagagaauuaga

SEQ ID NO: 3551482 - RNA, 18 nt, Human
aaaagagaauuagauuau

SEQ ID NO: 3551483 - RNA, 19 nt, Human
aaaagagagaaaacuuauu

SEQ ID NO: 3551484 - RNA, 14 nt, Human
aaaagagauauuuu

SEQ ID NO: 3551485 - RNA, 19 nt, Human
aaaagagaugaugaaaaua

SEQ ID NO: 3551486 - RNA, 19 nt, Human
aaaagagauggccugagaa

SEQ ID NO: 3551487 - RNA, 12 nt, Human
aaaagaggaaaa

SEQ ID NO: 3551488 - RNA, 12 nt, Human
aaaagagggggg

SEQ ID NO: 3551489 - RNA, 22 nt, Human
aaaagagguuuuucuuaaauaa

SEQ ID NO: 3551490 - RNA, 15 nt, Human
aaaagaguuaaggca

SEQ ID NO: 3551491 - RNA, 21 nt, Human
aaaagauaaaaaaacagcuuu

SEQ ID NO: 3551492 - RNA, 12 nt, Human
aaaagauaaaca

SEQ ID NO: 3551493 - RNA, 14 nt, Human
aaaagauaaagaug

SEQ ID NO: 3551494 - RNA, 20 nt, Human
aaaagauaaagaugaucuac

SEQ ID NO: 3551495 - RNA, 19 nt, Human
aaaagauaauauuuuacau

SEQ ID NO: 3551496 - RNA, 22 nt, Human
aaaagauaauauuuuacauaca

SEQ ID NO: 3551497 - RNA, 19 nt, Human
aaaagauauaagugcugua

SEQ ID NO: 3551498 - RNA, 16 nt, Human
aaaagauauauuaaaa

SEQ ID NO: 3551499 - RNA, 16 nt, Human
aaaagauccuuuuuaa

SEQ ID NO: 3551500 - RNA, 10 nt, Human
aaaagaugaa

SEQ ID NO: 3551501 - RNA, 17 nt, Human
aaaagaugaaaauauuu

SEQ ID NO: 3551502 - RNA, 22 nt, Human
aaaagauguagauuuauuucau

SEQ ID NO: 3551503 - RNA, 11 nt, Human
aaaagauucau

SEQ ID NO: 3551504 - RNA, 15 nt, Human
aaaagauuuuaauca

SEQ ID NO: 3551505 - RNA, 14 nt, Human
aaaagcaaaucauu

SEQ ID NO: 3551506 - RNA, 14 nt, Human
aaaagcaagacugu

SEQ ID NO: 3551507 - RNA, 20 nt, Human
aaaagcaaguacucuggagc

SEQ ID NO: 3551508 - RNA, 15 nt, Human
aaaagcaauauugua

SEQ ID NO: 3551509 - RNA, 21 nt, Human
aaaagcacacucauccccuca

SEQ ID NO: 3551510 - RNA, 18 nt, Human
aaaagcagguugauaaau

SEQ ID NO: 3551511 - RNA, 22 nt, Human
aaaagcagguugauaaaucauu

SEQ ID NO: 3551512 - RNA, 15 nt, Human
aaaagcauaaaugca

SEQ ID NO: 3551513 - RNA, 13 nt, Human
aaaagcauguaca

SEQ ID NO: 3551514 - RNA, 16 nt, Human
aaaagcauuuuguaau

SEQ ID NO: 3551515 - RNA, 12 nt, Human
aaaagcauuuuu

SEQ ID NO: 3551516 - RNA, 17 nt, Human
aaaagcauuuuucaaua

SEQ ID NO: 3551517 - RNA, 22 nt, Human
aaaagccagccaagcuuuaaau

SEQ ID NO: 3551518 - RNA, 18 nt, Human
aaaagccagggcuggaga

SEQ ID NO: 3551519 - RNA, 13 nt, Human
aaaagcccaaccu

SEQ ID NO: 3551520 - RNA, 15 nt, Human
aaaagcccaaccucu

SEQ ID NO: 3551521 - RNA, 19 nt, Human
aaaagcccaccauuuggca

SEQ ID NO: 3551522 - RNA, 20 nt, Human
aaaagccucuguuuugauau

SEQ ID NO: 3551523 - RNA, 11 nt, Human
aaaagccuugg

SEQ ID NO: 3551524 - RNA, 11 nt, Human
aaaagccuugu

SEQ ID NO: 3551525 - RNA, 13 nt, Human
aaaagccuugugu

SEQ ID NO: 3551526 - RNA, 17 nt, Human
aaaagccuuguguauau

SEQ ID NO: 3551527 - RNA, 18 nt, Human
aaaagccuuguguauauu

SEQ ID NO: 3551528 - RNA, 16 nt, Human
aaaagcgcuuuuccuu

SEQ ID NO: 3551529 - RNA, 16 nt, Human
aaaagcuaauaccagu

SEQ ID NO: 3551530 - RNA, 17 nt, Human
aaaagcuagaacacugc

SEQ ID NO: 3551531 - RNA, 20 nt, Human
aaaagcuauggugagaugca

SEQ ID NO: 3551532 - RNA, 15 nt, Human
aaaagcuccuggggc

SEQ ID NO: 3551533 - RNA, 20 nt, Human
aaaagcucuuacacuacauu

SEQ ID NO: 3551534 - RNA, 15 nt, Human
aaaagcucuuuuaau

SEQ ID NO: 3551535 - RNA, 16 nt, Human
aaaagcugaacacauu

SEQ ID NO: 3551536 - RNA, 14 nt, Human
aaaagcugggcagg

SEQ ID NO: 3551537 - RNA, 18 nt, Human
aaaagcuguauuuugaaa

SEQ ID NO: 3551538 - RNA, 15 nt, Human
aaaagcuuacaaaua

SEQ ID NO: 3551539 - RNA, 23 nt, Human
aaaagcuuagcuuuagaaacagu

SEQ ID NO: 3551540 - RNA, 14 nt, Human
aaaagcuucaaauu

SEQ ID NO: 3551541 - RNA, 16 nt, Human
aaaagcuucuuaauua

SEQ ID NO: 3551542 - RNA, 22 nt, Human
aaaagcuucuuaauuaauuuga

SEQ ID NO: 3551543 - RNA, 11 nt, Human
aaaagcuuuau

SEQ ID NO: 3551544 - RNA, 21 nt, Human
aaaagcuuugaacccugggac

SEQ ID NO: 3551545 - RNA, 19 nt, Human
aaaagcuuuguuuguucuu

SEQ ID NO: 3551546 - RNA, 13 nt, Human
aaaaggaaaaaaa

SEQ ID NO: 3551547 - RNA, 14 nt, Human
aaaaggaaaaagcu

SEQ ID NO: 3551548 - RNA, 12 nt, Human
aaaaggaaaaga

SEQ ID NO: 3551549 - RNA, 14 nt, Human
aaaaggaaaagcaa

SEQ ID NO: 3551550 - RNA, 14 nt, Human
aaaaggaaagaaaa

SEQ ID NO: 3551551 - RNA, 13 nt, Human
aaaaggaaagcug

SEQ ID NO: 3551552 - RNA, 18 nt, Human
aaaaggaagccaaagagu

SEQ ID NO: 3551553 - RNA, 21 nt, Human
aaaaggaagcuuacaugccua

SEQ ID NO: 3551554 - RNA, 16 nt, Human
aaaaggacaccuuuua

SEQ ID NO: 3551555 - RNA, 19 nt, Human
aaaaggacaggcagaaaga

SEQ ID NO: 3551556 - RNA, 20 nt, Human
aaaaggacaggcagaaagag

SEQ ID NO: 3551557 - RNA, 14 nt, Human
aaaaggauaaguga

SEQ ID NO: 3551558 - RNA, 20 nt, Human
aaaaggaucuuuguggccaa

SEQ ID NO: 3551559 - RNA, 18 nt, Human
aaaaggauuuuuaucuuu

SEQ ID NO: 3551560 - RNA, 16 nt, Human
aaaaggcaaaugugua

SEQ ID NO: 3551561 - RNA, 19 nt, Human
aaaaggccaaaccucuguu

SEQ ID NO: 3551562 - RNA, 23 nt, Human
aaaaggccaaaccucuguucagu

SEQ ID NO: 3551563 - RNA, 21 nt, Human
aaaaggccucuuguaaagacu

SEQ ID NO: 3551564 - RNA, 11 nt, Human
aaaaggccugg

SEQ ID NO: 3551565 - RNA, 15 nt, Human
aaaaggcgcaucuaa

SEQ ID NO: 3551566 - RNA, 20 nt, Human
aaaaggcuagguacacagcu

SEQ ID NO: 3551567 - RNA, 16 nt, Human
aaaaggcugugcugcc

SEQ ID NO: 3551568 - RNA, 15 nt, Human
aaaagggaacaggaa

SEQ ID NO: 3551569 - RNA, 18 nt, Human
aaaagggaaguaguccuu

SEQ ID NO: 3551570 - RNA, 19 nt, Human
aaaagggcucuuuagccag

SEQ ID NO: 3551571 - RNA, 22 nt, Human
aaaagggguaggguuuaaagau

SEQ ID NO: 3551572 - RNA, 12 nt, Human
aaaagggucaga

SEQ ID NO: 3551573 - RNA, 15 nt, Human
aaaaggucuuuaaaa

SEQ ID NO: 3551574 - RNA, 16 nt, Human
aaaagguuaauaaagu

SEQ ID NO: 3551575 - RNA, 17 nt, Human
aaaagguuaauaaagua

SEQ ID NO: 3551576 - RNA, 14 nt, Human
aaaagguuuaugaa

SEQ ID NO: 3551577 - RNA, 20 nt, Human
aaaagguuuaugaaaaagaa

SEQ ID NO: 3551578 - RNA, 15 nt, Human
aaaagguuuuauuuu

SEQ ID NO: 3551579 - RNA, 16 nt, Human
aaaauguauauauuua

SEQ ID NO: 3551580 - RNA, 17 nt, Human
aaaauguauaugcacuu

SEQ ID NO: 3551581 - RNA, 13 nt, Human
aaaauguaucuaa

SEQ ID NO: 3551582 - RNA, 12 nt, Human
aaaauguauuuu

SEQ ID NO: 3551583 - RNA, 18 nt, Human
aaaauguauuuuauguua

SEQ ID NO: 3551584 - RNA, 13 nt, Human
aaaauguauuuuu

SEQ ID NO: 3551585 - RNA, 22 nt, Human
aaaaugucaaaaguagaacuuu

SEQ ID NO: 3551586 - RNA, 16 nt, Human
aaaauguccugccuuu

SEQ ID NO: 3551587 - RNA, 17 nt, Human
aaaauguccugccuuuu

SEQ ID NO: 3551588 - RNA, 13 nt, Human
aaaaugucuuuau

SEQ ID NO: 3551589 - RNA, 23 nt, Human
aaaaugugaauugcaugacuugu

SEQ ID NO: 3551590 - RNA, 20 nt, Human
aaaaugugagugguugaaua

SEQ ID NO: 3551591 - RNA, 15 nt, Human
aaaaugugauaugua

SEQ ID NO: 3551592 - RNA, 15 nt, Human
aaaaugugauguucu

SEQ ID NO: 3551593 - RNA, 19 nt, Human
aaaaugugauguucuaagg

SEQ ID NO: 3551594 - RNA, 21 nt, Human
aaaaugugauguucuaaggcu

SEQ ID NO: 3551595 - RNA, 13 nt, Human
aaaaugugauuuu

SEQ ID NO: 3551596 - RNA, 17 nt, Human
aaaaugugcaaaacagc

SEQ ID NO: 3551597 - RNA, 19 nt, Human
aaaaugugcaaaacagcgu

SEQ ID NO: 3551598 - RNA, 18 nt, Human
aaaaucuuauaguucuag

SEQ ID NO: 3551599 - RNA, 20 nt, Human
aaaaucuuauaguucuaggc

SEQ ID NO: 3551600 - RNA, 16 nt, Human
aaaaucuucauggaau

SEQ ID NO: 3551601 - RNA, 23 nt, Human
aaaaucuucauggaauucacaaa

SEQ ID NO: 3551602 - RNA, 15 nt, Human
aaaaucuugaucagu

SEQ ID NO: 3551603 - RNA, 14 nt, Human
aaaaucuuggaagu

SEQ ID NO: 3551604 - RNA, 17 nt, Human
aaaaucuuggcacagaa

SEQ ID NO: 3551605 - RNA, 22 nt, Human
aaaaucuugugcuagaauacuu

SEQ ID NO: 3551606 - RNA, 20 nt, Human
aaaaucuuucuuucuuagaa

SEQ ID NO: 3551607 - RNA, 16 nt, Human
aaaaucuuuugaagca

SEQ ID NO: 3551608 - RNA, 14 nt, Human
aaaaugaaagauga

SEQ ID NO: 3551609 - RNA, 15 nt, Human
aaaaugaaauccuuu

SEQ ID NO: 3551610 - RNA, 16 nt, Human
aaaaugaaaugcauau

SEQ ID NO: 3551611 - RNA, 16 nt, Human
aaaaugaaauguuuua

SEQ ID NO: 3551612 - RNA, 11 nt, Human
aaaaugaagaa

SEQ ID NO: 3551613 - RNA, 16 nt, Human
aaaaugaauccuacac

SEQ ID NO: 3551614 - RNA, 17 nt, Human
aaaaugacaaucaugug

SEQ ID NO: 3551615 - RNA, 18 nt, Human
aaaaugacaaucaugugu

SEQ ID NO: 3551616 - RNA, 17 nt, Human
aaaaugacaucuuuuua

SEQ ID NO: 3551617 - RNA, 18 nt, Human
aaaaugacuacuuagcau

SEQ ID NO: 3551618 - RNA, 15 nt, Human
aaaaugaggaaugua

SEQ ID NO: 3551619 - RNA, 14 nt, Human
aaaaugauacagca

SEQ ID NO: 3551620 - RNA, 16 nt, Human
aaaaugauuguaaaau

SEQ ID NO: 3551621 - RNA, 20 nt, Human
aaaaugauuguaaaauagcu

SEQ ID NO: 3551622 - RNA, 14 nt, Human
aaaaugauuuuacu

SEQ ID NO: 3551623 - RNA, 23 nt, Human
aaaaugauuuuacuuagcaaugu

SEQ ID NO: 3551624 - RNA, 14 nt, Human
aaaaugauuuuauc

SEQ ID NO: 3551625 - RNA, 16 nt, Human
aaaaugcaaaaaaucu

SEQ ID NO: 3551626 - RNA, 20 nt, Human
aaaaugcaaauccuauguga

SEQ ID NO: 3551627 - RNA, 15 nt, Human
aaaaugcaauauuug

SEQ ID NO: 3551628 - RNA, 16 nt, Human
aaaaugcaugauugca

SEQ ID NO: 3551629 - RNA, 15 nt, Human
aaaaugcccauuugc

SEQ ID NO: 3551630 - RNA, 18 nt, Human
aaaaugccucaguguauu

SEQ ID NO: 3551631 - RNA, 22 nt, Human
aaaaugccucaguguauuugua

SEQ ID NO: 3551632 - RNA, 15 nt, Human
aaaaugcuagguucu

SEQ ID NO: 3551633 - RNA, 18 nt, Human
aaaaugcucuuauuucau

SEQ ID NO: 3551634 - RNA, 21 nt, Human
aaaaugcuguauuagucacag

SEQ ID NO: 3551635 - RNA, 23 nt, Human
aaaaugcuguauuagucacagag

SEQ ID NO: 3551636 - RNA, 18 nt, Human
aaaaugcuuuuuauuucu

SEQ ID NO: 3551637 - RNA, 19 nt, Human
aaaaugcuuuuuauuucug

SEQ ID NO: 3551638 - RNA, 22 nt, Human
aaaaugcuuuuuauuucugcau

SEQ ID NO: 3551639 - RNA, 13 nt, Human
aaaauggaaagaa

SEQ ID NO: 3551640 - RNA, 13 nt, Human
aaaauggaaauuu

SEQ ID NO: 3551641 - RNA, 22 nt, Human
aaaauggacuguggugacuuug

SEQ ID NO: 3551642 - RNA, 13 nt, Human
aaaauggauacau

SEQ ID NO: 3551643 - RNA, 20 nt, Human
aaaauggauauuauuagaaa

SEQ ID NO: 3551644 - RNA, 21 nt, Human
aaaauggauauuauuagaaau

SEQ ID NO: 3551645 - RNA, 22 nt, Human
aaaauggauauuauuagaaauu

SEQ ID NO: 3551646 - RNA, 21 nt, Human
aaaauggaugccuugaauaau

SEQ ID NO: 3551647 - RNA, 23 nt, Human
aaaauggaugccuugaauaauaa

SEQ ID NO: 3551648 - RNA, 21 nt, Human
aaaauggcaggggguggaauu

SEQ ID NO: 3551649 - RNA, 20 nt, Human
aaaauggcagugaugaauuu

SEQ ID NO: 3551650 - RNA, 23 nt, Human
aaaauggcuucagaauuaaaacu

SEQ ID NO: 3551651 - RNA, 22 nt, Human
aaaaugggacuucuuuucacau

SEQ ID NO: 3551652 - RNA, 22 nt, Human
aaaaugguagcauuuuaaacaa

SEQ ID NO: 3551653 - RNA, 15 nt, Human
aaaaugguauaagua

SEQ ID NO: 3551654 - RNA, 13 nt, Human
aaaaugguaucaa

SEQ ID NO: 3551655 - RNA, 22 nt, Human
aaaaugguccaauuaguuuccu

SEQ ID NO: 3551656 - RNA, 19 nt, Human
aaaaugguggcuucagcuc

SEQ ID NO: 3551657 - RNA, 22 nt, Human
aaaaugguuuauuuuguauugu

SEQ ID NO: 3551658 - RNA, 12 nt, Human
aaaauguaacug

SEQ ID NO: 3551659 - RNA, 13 nt, Human
aaaauguaacugu

SEQ ID NO: 3551660 - RNA, 16 nt, Human
aaaauguaacuguuac

SEQ ID NO: 3551661 - RNA, 18 nt, Human
aaaauguaacuguuacca

SEQ ID NO: 3551662 - RNA, 23 nt, Human
aaaauguaaguaaaugucugugg

SEQ ID NO: 3551663 - RNA, 19 nt, Human
aaaauguacaaaauaaagu

SEQ ID NO: 3551664 - RNA, 21 nt, Human
aaaauguacaaaauaaaguua

SEQ ID NO: 3551665 - RNA, 21 nt, Human
aaaauguacauguauuaaauu

SEQ ID NO: 3551666 - RNA, 10 nt, Human
aaaauguacu

SEQ ID NO: 3551667 - RNA, 16 nt, Human
aaaauguagaauauuc

SEQ ID NO: 3551668 - RNA, 12 nt, Human
aaaauguaggag

SEQ ID NO: 3551669 - RNA, 21 nt, Human
aaaauguaggguuauaauaau

SEQ ID NO: 3551670 - RNA, 17 nt, Human
aaaauguauaaguugag

SEQ ID NO: 3551671 - RNA, 21 nt, Human
aaaauguauaaguugaggcau

SEQ ID NO: 3551672 - RNA, 15 nt, Human
aaaauguauuuuaug

SEQ ID NO: 3551673 - RNA, 22 nt, Human
aaaauguauuuuauguuauaua

SEQ ID NO: 3551674 - RNA, 21 nt, Human
aaaaugucuguagcuccucaa

SEQ ID NO: 3551675 - RNA, 18 nt, Human
aaaaugucuguuaacuua

SEQ ID NO: 3551676 - RNA, 12 nt, Human
aaaaugugaagu

SEQ ID NO: 3551677 - RNA, 16 nt, Human
aaaaugugacccagau

SEQ ID NO: 3551678 - RNA, 13 nt, Human
aaaaugugacccu

SEQ ID NO: 3551679 - RNA, 15 nt, Human
aaaaugugacccucc

SEQ ID NO: 3551680 - RNA, 17 nt, Human
aaaaugugauguucuaa

SEQ ID NO: 3551681 - RNA, 20 nt, Human
aaaaugugauguucuaaggc

SEQ ID NO: 3551682 - RNA, 18 nt, Human
aaaaugugauuuuucuga

SEQ ID NO: 3551683 - RNA, 16 nt, Human
aaaauguguaauuuug

SEQ ID NO: 3551684 - RNA, 17 nt, Human
aaaauguguaauuuugu

SEQ ID NO: 3551685 - RNA, 11 nt, Human
aaaauguguuc

SEQ ID NO: 3551686 - RNA, 14 nt, Human
aaaauguuaggaca

SEQ ID NO: 3551687 - RNA, 16 nt, Human
aaaauguucagaaggu

SEQ ID NO: 3551688 - RNA, 12 nt, Human
aaaauguucauc

SEQ ID NO: 3551689 - RNA, 22 nt, Human
aaaauguucaucaauucccauu

SEQ ID NO: 3551690 - RNA, 15 nt, Human
aaaauguucuguuug

SEQ ID NO: 3551691 - RNA, 13 nt, Human
aaaauguugaaau

SEQ ID NO: 3551692 - RNA, 17 nt, Human
aaaauguugaaauauga

SEQ ID NO: 3551693 - RNA, 17 nt, Human
aaaauguugcugaaaaa

SEQ ID NO: 3551694 - RNA, 15 nt, Human
aaaauguuggauuua

SEQ ID NO: 3551695 - RNA, 14 nt, Human
aaaauguuuucagc

SEQ ID NO: 3551696 - RNA, 16 nt, Human
aaaauuaaagaaaaua

SEQ ID NO: 3551697 - RNA, 11 nt, Human
aaaauuaaagc

SEQ ID NO: 3551698 - RNA, 22 nt, Human
aaaauuaacaugaauauuuagu

SEQ ID NO: 3551699 - RNA, 17 nt, Human
aaaauuaagguguuuga

SEQ ID NO: 3551700 - RNA, 18 nt, Human
aaaauuaagguguuugaa

SEQ ID NO: 3551701 - RNA, 12 nt, Human
aaaauuacuaau

SEQ ID NO: 3551702 - RNA, 14 nt, Human
aaaauuacuguuua

SEQ ID NO: 3551703 - RNA, 21 nt, Human
aaaauuacuuaguauugcaaa

SEQ ID NO: 3551704 - RNA, 23 nt, Human
aaaauuacuuaguauugcaaagu

SEQ ID NO: 3551705 - RNA, 21 nt, Human
aaaauuagccaguaauccugu

SEQ ID NO: 3551706 - RNA, 18 nt, Human
aaaauuagccgggcgugg

SEQ ID NO: 3551707 - RNA, 22 nt, Human
aaaauuauagaugggaaugaag

SEQ ID NO: 3551708 - RNA, 19 nt, Human
aaaauuauagcucuaaugu

SEQ ID NO: 3551709 - RNA, 24 nt, Human
aaaauuauagcucuaauguuugca

SEQ ID NO: 3551710 - RNA, 14 nt, Human
aaaauuaucuauuu

SEQ ID NO: 3551711 - RNA, 17 nt, Human
aaaauuaucuauuugua

SEQ ID NO: 3551712 - RNA, 13 nt, Human
aaaauuaugaauc

SEQ ID NO: 3551713 - RNA, 14 nt, Human
aaaauuaugaaucu

SEQ ID NO: 3551714 - RNA, 15 nt, Human
aaaauuauggaaaca

SEQ ID NO: 3551715 - RNA, 13 nt, Human
aaaauuauuuaaa

SEQ ID NO: 3551716 - RNA, 13 nt, Human
aaaauuauuugca

SEQ ID NO: 3551717 - RNA, 21 nt, Human
aaaauuauuuuguucauacau

SEQ ID NO: 3551718 - RNA, 17 nt, Human
aaaauucaaaaaguguu

SEQ ID NO: 3551719 - RNA, 15 nt, Human
aaaauucaaagcaug

SEQ ID NO: 3551720 - RNA, 17 nt, Human
aaaauucaauuguaaau

SEQ ID NO: 3551721 - RNA, 16 nt, Human
aaaauucagcaaacca

SEQ ID NO: 3551722 - RNA, 12 nt, Human
aaaauucauuuu

SEQ ID NO: 3551723 - RNA, 14 nt, Human
aaaauuccacucaa

SEQ ID NO: 3551724 - RNA, 20 nt, Human
aaaauuccagaaaggauauu

SEQ ID NO: 3551725 - RNA, 17 nt, Human
aaaauuccagaaugaag

SEQ ID NO: 3551726 - RNA, 22 nt, Human
aaaauuccuuuguguuucuauu

SEQ ID NO: 3551727 - RNA, 20 nt, Human
aaaauucgcccgagcuguuu

SEQ ID NO: 3551728 - RNA, 20 nt, Human
aaaauucuaaauaaaauaua

SEQ ID NO: 3551729 - RNA, 15 nt, Human
aaaauucuaaaugua

SEQ ID NO: 3551730 - RNA, 16 nt, Human
aaaauucuacuguaug

SEQ ID NO: 3551731 - RNA, 15 nt, Human
aaaauucugaauuuu

SEQ ID NO: 3551732 - RNA, 21 nt, Human
aaaauucugaauuuuggggau

SEQ ID NO: 3551733 - RNA, 20 nt, Human
aaaauucuguagguucugug

SEQ ID NO: 3551734 - RNA, 14 nt, Human
aaaauucugugccu

SEQ ID NO: 3551735 - RNA, 18 nt, Human
aaacaacuuucucuugua

SEQ ID NO: 3551736 - RNA, 20 nt, Human
aaacaagaaaaauaaagaaa

SEQ ID NO: 3551737 - RNA, 18 nt, Human
aaacaagaaaguuucccc

SEQ ID NO: 3551738 - RNA, 15 nt, Human
aaacaagaaugaagg

SEQ ID NO: 3551739 - RNA, 18 nt, Human
aaacaagaccacguuucu

SEQ ID NO: 3551740 - RNA, 19 nt, Human
aaacaagaugcuggauguc

SEQ ID NO: 3551741 - RNA, 19 nt, Human
aaacaagcaaguucugaga

SEQ ID NO: 3551742 - RNA, 16 nt, Human
aaacaagguuuucagu

SEQ ID NO: 3551743 - RNA, 13 nt, Human
aaaaguaauguaa

SEQ ID NO: 3551744 - RNA, 15 nt, Human
aaaaguacaauuuac

SEQ ID NO: 3551745 - RNA, 17 nt, Human
aaaaguacauuuaauac

SEQ ID NO: 3551746 - RNA, 21 nt, Human
aaaaguacauuuaauacagca

SEQ ID NO: 3551747 - RNA, 13 nt, Human
aaaaguagaacuu

SEQ ID NO: 3551748 - RNA, 16 nt, Human
aaaaguauaaaauagu

SEQ ID NO: 3551749 - RNA, 13 nt, Human
aaaaguauauguu

SEQ ID NO: 3551750 - RNA, 14 nt, Human
aaaaguauauguua

SEQ ID NO: 3551751 - RNA, 17 nt, Human
aaaaguauauuaaacaa

SEQ ID NO: 3551752 - RNA, 22 nt, Human
aaaaguauauuaaacaaaguuu

SEQ ID NO: 3551753 - RNA, 22 nt, Human
aaaaguaucgggggcuggggca

SEQ ID NO: 3551754 - RNA, 22 nt, Human
aaaaguauuauuuuccaaaagu

SEQ ID NO: 3551755 - RNA, 11 nt, Human
aaaaguauuuu

SEQ ID NO: 3551756 - RNA, 12 nt, Human
aaaaguauuuuc

SEQ ID NO: 3551757 - RNA, 14 nt, Human
aaaaguauuuugaa

SEQ ID NO: 3551758 - RNA, 16 nt, Human
aaaaguauuuugaagu

SEQ ID NO: 3551759 - RNA, 16 nt, Human
aaaagucacaauguuc

SEQ ID NO: 3551760 - RNA, 13 nt, Human
aaaagucacaguu

SEQ ID NO: 3551761 - RNA, 23 nt, Human
aaaagucguuuuccaaacugacu

SEQ ID NO: 3551762 - RNA, 13 nt, Human
aaaagucucuauu

SEQ ID NO: 3551763 - RNA, 15 nt, Human
aaaagucucuauuua

SEQ ID NO: 3551764 - RNA, 21 nt, Human
aaaagucucuauuuaaauucu

SEQ ID NO: 3551765 - RNA, 17 nt, Human
aaaagucugcauuacau

SEQ ID NO: 3551766 - RNA, 18 nt, Human
aaaagucugcauuacauu

SEQ ID NO: 3551767 - RNA, 23 nt, Human
aaaagucuucaagggcugcuuca

SEQ ID NO: 3551768 - RNA, 17 nt, Human
aaaagugaaugaaagau

SEQ ID NO: 3551769 - RNA, 17 nt, Human
aaaagugacacagcagc

SEQ ID NO: 3551770 - RNA, 23 nt, Human
aaaagugaucaauaaaaugugau

SEQ ID NO: 3551771 - RNA, 14 nt, Human
aaaagugccucaag

SEQ ID NO: 3551772 - RNA, 15 nt, Human
aaaagugcuucauuc

SEQ ID NO: 3551773 - RNA, 17 nt, Human
aaaaguggccucuuugu

SEQ ID NO: 3551774 - RNA, 21 nt, Human
aaaagugggccagugugggaa

SEQ ID NO: 3551775 - RNA, 17 nt, Human
aaaagugggcuugauuc

SEQ ID NO: 3551776 - RNA, 18 nt, Human
aaaaguggggcagagccu

SEQ ID NO: 3551777 - RNA, 19 nt, Human
aaaaguguguauauauuuu

SEQ ID NO: 3551778 - RNA, 13 nt, Human
aaaaguguuuauu

SEQ ID NO: 3551779 - RNA, 14 nt, Human
aaaaguuaaaaagu

SEQ ID NO: 3551780 - RNA, 15 nt, Human
aaaaguuauuaaaau

SEQ ID NO: 3551781 - RNA, 12 nt, Human
aaaaguugaaau

SEQ ID NO: 3551782 - RNA, 18 nt, Human
aaaaguugaauuuuacau

SEQ ID NO: 3551783 - RNA, 21 nt, Human
aaaaguugcagcuguuuuguu

SEQ ID NO: 3551784 - RNA, 14 nt, Human
aaaaguugcuauuu

SEQ ID NO: 3551785 - RNA, 16 nt, Human
aaaaguuggacuaaau

SEQ ID NO: 3551786 - RNA, 15 nt, Human
aaaaguuguaugauc

SEQ ID NO: 3551787 - RNA, 18 nt, Human
aaaaguuguucaacuauu

SEQ ID NO: 3551788 - RNA, 15 nt, Human
aaaaguuuaaaaugu

SEQ ID NO: 3551789 - RNA, 20 nt, Human
aaaaguuuaaaauguauaag

SEQ ID NO: 3551790 - RNA, 14 nt, Human
aaaaguuuaauauu

SEQ ID NO: 3551791 - RNA, 20 nt, Human
aaaaguuuaauauuaaagcc

SEQ ID NO: 3551792 - RNA, 16 nt, Human
aaaaguuuacaagugu

SEQ ID NO: 3551793 - RNA, 17 nt, Human
aaaaguuugaaaagcaa

SEQ ID NO: 3551794 - RNA, 18 nt, Human
aaaaguuugaaaagcaau

SEQ ID NO: 3551795 - RNA, 12 nt, Human
aaaaguuuguuu

SEQ ID NO: 3551796 - RNA, 18 nt, Human
aaaauaaaaaaaagaaaa

SEQ ID NO: 3551797 - RNA, 21 nt, Human
aaaauaaaaaaaagaaaaaag

SEQ ID NO: 3551798 - RNA, 15 nt, Human
aaaauaaaaaaugug

SEQ ID NO: 3551799 - RNA, 16 nt, Human
aaaauaaaaacuauuc

SEQ ID NO: 3551800 - RNA, 21 nt, Human
aaaauaaaaagugacacagca

SEQ ID NO: 3551801 - RNA, 14 nt, Human
aaaauaaaaaguua

SEQ ID NO: 3551802 - RNA, 15 nt, Human
aaaauaaaaaguuaa

SEQ ID NO: 3551803 - RNA, 19 nt, Human
aaaauaaaaaguuaaaaag

SEQ ID NO: 3551804 - RNA, 18 nt, Human
aaaauaaaaauaaauuca

SEQ ID NO: 3551805 - RNA, 12 nt, Human
aaaauaaaacau

SEQ ID NO: 3551806 - RNA, 16 nt, Human
aaaauaaaacauagca

SEQ ID NO: 3551807 - RNA, 14 nt, Human
aaaauaaaacauuu

SEQ ID NO: 3551808 - RNA, 14 nt, Human
aaaauaaaacuguc

SEQ ID NO: 3551809 - RNA, 16 nt, Human
aaaauaaaacuuuuua

SEQ ID NO: 3551810 - RNA, 15 nt, Human
aaaauaaaauaaaua

SEQ ID NO: 3551811 - RNA, 17 nt, Human
aaaauaaaauacuuuga

SEQ ID NO: 3551812 - RNA, 21 nt, Human
aaaauaaaaugaaaauuguau

SEQ ID NO: 3551813 - RNA, 12 nt, Human
aaaauaaaauua

SEQ ID NO: 3551814 - RNA, 19 nt, Human
aaaauaaaauuaaagcuga

SEQ ID NO: 3551815 - RNA, 12 nt, Human
aaaauaaacaaa

SEQ ID NO: 3551816 - RNA, 14 nt, Human
aaaauaaagaaaua

SEQ ID NO: 3551817 - RNA, 14 nt, Human
aaaauaaagaagua

SEQ ID NO: 3551818 - RNA, 16 nt, Human
aaaauaaagaauggaa

SEQ ID NO: 3551819 - RNA, 12 nt, Human
aaaauaaagaca

SEQ ID NO: 3551820 - RNA, 20 nt, Human
aaaauaaauaaaaacuaauu

SEQ ID NO: 3551821 - RNA, 15 nt, Human
aaaauaaauaaaagc

SEQ ID NO: 3551822 - RNA, 15 nt, Human
aaaauaaauagaaaa

SEQ ID NO: 3551823 - RNA, 21 nt, Human
aaaauaaauauugucuuuuug

SEQ ID NO: 3551824 - RNA, 11 nt, Human
aaaauaaaugg

SEQ ID NO: 3551825 - RNA, 23 nt, Human
aaaauaaaugucaccagguacuu

SEQ ID NO: 3551826 - RNA, 20 nt, Human
aaaauaaauuuauaugaaaa

SEQ ID NO: 3551827 - RNA, 13 nt, Human
aaaauaacaguau

SEQ ID NO: 3551828 - RNA, 16 nt, Human
aaaauaaccccaaaau

SEQ ID NO: 3551829 - RNA, 17 nt, Human
aaaauaaccuaauuaau

SEQ ID NO: 3551830 - RNA, 15 nt, Human
aaaauaacuguaauu

SEQ ID NO: 3551831 - RNA, 15 nt, Human
aaaauaacuuauauc

SEQ ID NO: 3551832 - RNA, 16 nt, Human
aaaauaacuucaagca

SEQ ID NO: 3551833 - RNA, 19 nt, Human
aaaauaagcagguggaucu

SEQ ID NO: 3551834 - RNA, 14 nt, Human
aaaauaagucaaca

SEQ ID NO: 3551835 - RNA, 13 nt, Human
aaaauaagucuga

SEQ ID NO: 3551836 - RNA, 16 nt, Human
aaaauaauaaaaaaag

SEQ ID NO: 3551837 - RNA, 16 nt, Human
aaaauaauacugcuga

SEQ ID NO: 3551838 - RNA, 23 nt, Human
aaaauaauacugcugagauacau

SEQ ID NO: 3551839 - RNA, 12 nt, Human
aaaauaauguaa

SEQ ID NO: 3551840 - RNA, 20 nt, Human
aaaauaaugucuuguuaaua

SEQ ID NO: 3551841 - RNA, 19 nt, Human
aaaauaauuuuaaacaaag

SEQ ID NO: 3551842 - RNA, 20 nt, Human
aaaauaauuuuaaacaaagg

SEQ ID NO: 3551843 - RNA, 18 nt, Human
aaaauacaaaaaucagcc

SEQ ID NO: 3551844 - RNA, 13 nt, Human
aaaauacaaacaa

SEQ ID NO: 3551845 - RNA, 16 nt, Human
aaaauacaaacacaug

SEQ ID NO: 3551846 - RNA, 17 nt, Human
aaaauacaagacugcca

SEQ ID NO: 3551847 - RNA, 15 nt, Human
aaaauacaauuuuua

SEQ ID NO: 3551848 - RNA, 16 nt, Human
aaaauacauagugaaa

SEQ ID NO: 3551849 - RNA, 10 nt, Human
aaaauacaug

SEQ ID NO: 3551850 - RNA, 13 nt, Human
aaaauacaugaag

SEQ ID NO: 3551851 - RNA, 18 nt, Human
aaaauacauuuaaaacuu

SEQ ID NO: 3551852 - RNA, 14 nt, Human
aaaauacauuuuau

SEQ ID NO: 3551853 - RNA, 14 nt, Human
aaaauaccaaggaa

SEQ ID NO: 3551854 - RNA, 16 nt, Human
aaaauacggugggggu

SEQ ID NO: 3551855 - RNA, 18 nt, Human
aaaauacuauuuaagaug

SEQ ID NO: 3551856 - RNA, 23 nt, Human
aaaauacuauuuaagaugugaaa

SEQ ID NO: 3551857 - RNA, 22 nt, Human
aaaauacuauuuuuacugccac

SEQ ID NO: 3551858 - RNA, 13 nt, Human
aaaauacucuaau

SEQ ID NO: 3551859 - RNA, 14 nt, Human
aaaauacucuaauu

SEQ ID NO: 3551860 - RNA, 15 nt, Human
aaaauacucuaauuc

SEQ ID NO: 3551861 - RNA, 22 nt, Human
aaaauacugacuccaaccauuc

SEQ ID NO: 3551862 - RNA, 18 nt, Human
aaaauacugccagaugcu

SEQ ID NO: 3551863 - RNA, 19 nt, Human
aaaauacugccagaugcug

SEQ ID NO: 3551864 - RNA, 20 nt, Human
aaaauacugccagaugcuga

SEQ ID NO: 3551865 - RNA, 11 nt, Human
aaaauacugua

SEQ ID NO: 3551866 - RNA, 9 nt, Human
aaaauacuu

SEQ ID NO: 3551867 - RNA, 20 nt, Human
aaaauacuuaaauguuaugu

SEQ ID NO: 3551868 - RNA, 16 nt, Human
aaaauacuuuuacucu

SEQ ID NO: 3551869 - RNA, 12 nt, Human
aaaauagaaaca

SEQ ID NO: 3551870 - RNA, 13 nt, Human
aaaauagaaaguu

SEQ ID NO: 3551871 - RNA, 17 nt, Human
aaaauagaaauuuugua

SEQ ID NO: 3551872 - RNA, 21 nt, Human
aaaauagcaacacucuauauu

SEQ ID NO: 3551873 - RNA, 22 nt, Human
aaaauagcaacacucuauauuu

SEQ ID NO: 3551874 - RNA, 23 nt, Human
aaaauagcaaccuuuuuaucucc

SEQ ID NO: 3551875 - RNA, 15 nt, Human
aaaauagcaaugccu

SEQ ID NO: 3551876 - RNA, 18 nt, Human
aaaauagcguucuuguaa

SEQ ID NO: 3551877 - RNA, 19 nt, Human
aaaauagcguucuuguaau

SEQ ID NO: 3551878 - RNA, 19 nt, Human
aaaauagcuuguauagugu

SEQ ID NO: 3551879 - RNA, 21 nt, Human
aaaauaggguauauuuuccua

SEQ ID NO: 3551880 - RNA, 18 nt, Human
aaaauagguauacagugg

SEQ ID NO: 3551881 - RNA, 18 nt, Human
aaaauaguaaaugcuuug

SEQ ID NO: 3551882 - RNA, 13 nt, Human
aaaauagugaauu

SEQ ID NO: 3551883 - RNA, 16 nt, Human
aaaauaguuguccaua

SEQ ID NO: 3551884 - RNA, 16 nt, Human
aaaauaguuuggauau

SEQ ID NO: 3551885 - RNA, 17 nt, Human
aaaauauaaaacugcgu

SEQ ID NO: 3551886 - RNA, 13 nt, Human
aaaauauaaaaua

SEQ ID NO: 3551887 - RNA, 22 nt, Human
aaaauauaaaauaguuguccau

SEQ ID NO: 3551888 - RNA, 15 nt, Human
aaaauauaaacaaag

SEQ ID NO: 3551889 - RNA, 16 nt, Human
aaaauauaaguaaagu

SEQ ID NO: 3551890 - RNA, 23 nt, Human
aaacaggcacuuggcagccuugu

SEQ ID NO: 3551891 - RNA, 11 nt, Human
aaacaggcagu

SEQ ID NO: 3551892 - RNA, 17 nt, Human
aaacagggccacauaga

SEQ ID NO: 3551893 - RNA, 22 nt, Human
aaacagggcugccuucuggccu

SEQ ID NO: 3551894 - RNA, 20 nt, Human
aaacaggguaacuaacuaaa

SEQ ID NO: 3551895 - RNA, 21 nt, Human
aaacaggguguugucagcauc

SEQ ID NO: 3551896 - RNA, 23 nt, Human
aaacaggguguugucagcaucuu

SEQ ID NO: 3551897 - RNA, 23 nt, Human
aaacagguauauacuuugaaagg

SEQ ID NO: 3551898 - RNA, 14 nt, Human
aaacaguagugaua

SEQ ID NO: 3551899 - RNA, 14 nt, Human
aaacaguauuuauu

SEQ ID NO: 3551900 - RNA, 15 nt, Human
aaacagucucaggaa

SEQ ID NO: 3551901 - RNA, 20 nt, Human
aaacagucucaggaaaucaa

SEQ ID NO: 3551902 - RNA, 16 nt, Human
aaacagucucccuucc

SEQ ID NO: 3551903 - RNA, 18 nt, Human
aaacagugccugcugaau

SEQ ID NO: 3551904 - RNA, 21 nt, Human
aaacaguugcacagcaucuca

SEQ ID NO: 3551905 - RNA, 20 nt, Human
aaacaguugcauguaguaac

SEQ ID NO: 3551906 - RNA, 13 nt, Human
aaacauaaauaaa

SEQ ID NO: 3551907 - RNA, 17 nt, Human
aaacauaaauaaaauga

SEQ ID NO: 3551908 - RNA, 18 nt, Human
aaacauaaugaaaauauu

SEQ ID NO: 3551909 - RNA, 21 nt, Human
aaacauaauucuuguauauua

SEQ ID NO: 3551910 - RNA, 16 nt, Human
aaacauacgugugcau

SEQ ID NO: 3551911 - RNA, 14 nt, Human
aaacauagaaaugg

SEQ ID NO: 3551912 - RNA, 21 nt, Human
aaacauagaaauggaaauuuu

SEQ ID NO: 3551913 - RNA, 18 nt, Human
aaacauagagggagagag

SEQ ID NO: 3551914 - RNA, 21 nt, Human
aaacauauauaacaaugcugu

SEQ ID NO: 3551915 - RNA, 22 nt, Human
aaacauauuuguuaaauauuua

SEQ ID NO: 3551916 - RNA, 22 nt, Human
aaacaucacacacacagacaga

SEQ ID NO: 3551917 - RNA, 22 nt, Human
aaacaucaguuacucugaaggg

SEQ ID NO: 3551918 - RNA, 19 nt, Human
aaacaucauuccuuuuuau

SEQ ID NO: 3551919 - RNA, 19 nt, Human
aaacauccaauauuuucuu

SEQ ID NO: 3551920 - RNA, 20 nt, Human
aaacauccuucaagaacucu

SEQ ID NO: 3551921 - RNA, 15 nt, Human
aaacaucuauucucu

SEQ ID NO: 3551922 - RNA, 18 nt, Human
aaacaucucaucaugucu

SEQ ID NO: 3551923 - RNA, 21 nt, Human
aaacaucuggaaaauaaaagg

SEQ ID NO: 3551924 - RNA, 17 nt, Human
aaacaucuuugaaauua

SEQ ID NO: 3551925 - RNA, 12 nt, Human
aaacaugaagug

SEQ ID NO: 3551926 - RNA, 21 nt, Human
aaacaugacccuaaaucuuga

SEQ ID NO: 3551927 - RNA, 20 nt, Human
aaacaugacucuuuauuguc

SEQ ID NO: 3551928 - RNA, 16 nt, Human
aaacaugcuguacaua

SEQ ID NO: 3551929 - RNA, 21 nt, Human
aaacaugcuguacauacuuuu

SEQ ID NO: 3551930 - RNA, 23 nt, Human
aaacaugcuguacauacuuuuug

SEQ ID NO: 3551931 - RNA, 21 nt, Human
aaacaugguagaauuggagag

SEQ ID NO: 3551932 - RNA, 16 nt, Human
aaacauguuaaugaca

SEQ ID NO: 3551933 - RNA, 22 nt, Human
aaacauguugccaaaauggugg

SEQ ID NO: 3551934 - RNA, 19 nt, Human
aaacauguuuccacuauug

SEQ ID NO: 3551935 - RNA, 19 nt, Human
aaacauguuucuuuguaau

SEQ ID NO: 3551936 - RNA, 14 nt, Human
aaacauuaaaauau

SEQ ID NO: 3551937 - RNA, 20 nt, Human
aaacauuaaaugucuuauau

SEQ ID NO: 3551938 - RNA, 12 nt, Human
aaacauuaagaa

SEQ ID NO: 3551939 - RNA, 15 nt, Human
aaacauuaauguuga

SEQ ID NO: 3551940 - RNA, 20 nt, Human
aaacauuaauguugauuucu

SEQ ID NO: 3551941 - RNA, 21 nt, Human
aaacauuaguacuuuauagaa

SEQ ID NO: 3551942 - RNA, 12 nt, Human
aaacauucuauc

SEQ ID NO: 3551943 - RNA, 19 nt, Human
aaacauucuaucuacugau

SEQ ID NO: 3551944 - RNA, 16 nt, Human
aaagacaguguaugua

SEQ ID NO: 3551945 - RNA, 18 nt, Human
aaagacauccauaaagaa

SEQ ID NO: 3551946 - RNA, 19 nt, Human
aaagacauccauaaagaag

SEQ ID NO: 3551947 - RNA, 14 nt, Human
aaagacaugaaauu

SEQ ID NO: 3551948 - RNA, 19 nt, Human
aaagacauucaggacugcu

SEQ ID NO: 3551949 - RNA, 13 nt, Human
aaagaccaaacuu

SEQ ID NO: 3551950 - RNA, 14 nt, Human
aaagaccaaacuuc

SEQ ID NO: 3551951 - RNA, 22 nt, Human
aaagaccaaacuucacucuggg

SEQ ID NO: 3551952 - RNA, 13 nt, Human
aaagaccagacua

SEQ ID NO: 3551953 - RNA, 16 nt, Human
aaagacccagggggag

SEQ ID NO: 3551954 - RNA, 22 nt, Human
aaagacccuccuauucuauaaa

SEQ ID NO: 3551955 - RNA, 22 nt, Human
aaagaccuggggcugcugugaa

SEQ ID NO: 3551956 - RNA, 17 nt, Human
aaagaccuuguguguau

SEQ ID NO: 3551957 - RNA, 20 nt, Human
aaagaccuuguguguaugug

SEQ ID NO: 3551958 - RNA, 15 nt, Human
aaagacguuuuauaa

SEQ ID NO: 3551959 - RNA, 13 nt, Human
aaagacuaagauc

SEQ ID NO: 3551960 - RNA, 23 nt, Human
aaagacuaauuuaaaaaauaacu

SEQ ID NO: 3551961 - RNA, 15 nt, Human
aaagacuauucaaac

SEQ ID NO: 3551962 - RNA, 22 nt, Human
aaagacuauucaaacagucuca

SEQ ID NO: 3551963 - RNA, 23 nt, Human
aaagacuauucaaacagucucag

SEQ ID NO: 3551964 - RNA, 15 nt, Human
aaagacucaguguuc

SEQ ID NO: 3551965 - RNA, 15 nt, Human
aaagacucauccguc

SEQ ID NO: 3551966 - RNA, 14 nt, Human
aaagacuccaaaga

SEQ ID NO: 3551967 - RNA, 14 nt, Human
aaagacugaucuca

SEQ ID NO: 3551968 - RNA, 15 nt, Human
aaagacugguuuucu

SEQ ID NO: 3551969 - RNA, 13 nt, Human
aaagacuguacaa

SEQ ID NO: 3551970 - RNA, 18 nt, Human
aaagacuuaguauauuuu

SEQ ID NO: 3551971 - RNA, 18 nt, Human
aaagacuuuaaaagugau

SEQ ID NO: 3551972 - RNA, 12 nt, Human
aaagagaaaaaa

SEQ ID NO: 3551973 - RNA, 17 nt, Human
aaagagaaaaagaaaug

SEQ ID NO: 3551974 - RNA, 12 nt, Human
aaagagaaaaga

SEQ ID NO: 3551975 - RNA, 15 nt, Human
aaagagaaaauugaa

SEQ ID NO: 3551976 - RNA, 12 nt, Human
aaagagaaacac

SEQ ID NO: 3551977 - RNA, 13 nt, Human
aaagagaaacacg

SEQ ID NO: 3551978 - RNA, 11 nt, Human
aaagagaaacu

SEQ ID NO: 3551979 - RNA, 13 nt, Human
aaagagaaacuuu

SEQ ID NO: 3551980 - RNA, 21 nt, Human
aaagagaaacuuugugcuaca

SEQ ID NO: 3551981 - RNA, 23 nt, Human
aaagagaaacuuugugcuacaug

SEQ ID NO: 3551982 - RNA, 18 nt, Human
aaagagaacuuccagauc

SEQ ID NO: 3551983 - RNA, 19 nt, Human
aaagagaauuagauuauau

SEQ ID NO: 3551984 - RNA, 15 nt, Human
aaagagacuggagca

SEQ ID NO: 3551985 - RNA, 16 nt, Human
aaagagagaaaauaaa

SEQ ID NO: 3551986 - RNA, 18 nt, Human
aaagagagaaacacugaa

SEQ ID NO: 3551987 - RNA, 18 nt, Human
aaagagagaauguagaua

SEQ ID NO: 3551988 - RNA, 14 nt, Human
aaagagagauuuuu

SEQ ID NO: 3551989 - RNA, 20 nt, Human
aaagagagcagagaauauaa

SEQ ID NO: 3551990 - RNA, 20 nt, Human
aaagagaguuaaucaacuga

SEQ ID NO: 3551991 - RNA, 21 nt, Human
aaagagauaccaagaugccau

SEQ ID NO: 3551992 - RNA, 13 nt, Human
aaagagauauuuu

SEQ ID NO: 3551993 - RNA, 19 nt, Human
aaagagaugaugaaaauau

SEQ ID NO: 3551994 - RNA, 20 nt, Human
aaagagaugaugaaaauauu

SEQ ID NO: 3551995 - RNA, 18 nt, Human
aaagagauggccugagaa

SEQ ID NO: 3551996 - RNA, 15 nt, Human
aaagagauuuaaacu

SEQ ID NO: 3551997 - RNA, 13 nt, Human
aaagagauuucaa

SEQ ID NO: 3551998 - RNA, 19 nt, Human
aaagagcacaaacauuuuu

SEQ ID NO: 3551999 - RNA, 22 nt, Human
aaagagcacuuaagagaauauu

SEQ ID NO: 3552000 - RNA, 18 nt, Human
aaagagcacuuacuguaa

SEQ ID NO: 3552001 - RNA, 12 nt, Human
aaagaggaaaga

SEQ ID NO: 3552002 - RNA, 15 nt, Human
aaagaggaaugaagu

SEQ ID NO: 3552003 - RNA, 21 nt, Human
aaagaggacucgcuuguaaau

SEQ ID NO: 3552004 - RNA, 19 nt, Human
aaagaggcaccaggaagcc

SEQ ID NO: 3552005 - RNA, 14 nt, Human
aaagaggcugcccc

SEQ ID NO: 3552006 - RNA, 18 nt, Human
aaagaggcugccccucuc

SEQ ID NO: 3552007 - RNA, 19 nt, Human
aaagagguuuuucuuaaau

SEQ ID NO: 3552008 - RNA, 12 nt, Human
aaagaguacucu

SEQ ID NO: 3552009 - RNA, 17 nt, Human
aaagaguacucuuguuu

SEQ ID NO: 3552010 - RNA, 13 nt, Human
aaagaguagaauu

SEQ ID NO: 3552011 - RNA, 18 nt, Human
aaagaguagaauugcauu

SEQ ID NO: 3552012 - RNA, 14 nt, Human
aaagaguaggaaga

SEQ ID NO: 3552013 - RNA, 21 nt, Human
aaagaguccauuguuuaaaaa

SEQ ID NO: 3552014 - RNA, 14 nt, Human
aaagagucuagauu

SEQ ID NO: 3552015 - RNA, 15 nt, Human
aaagagucuagauuc

SEQ ID NO: 3552016 - RNA, 14 nt, Human
aaagagucuuccaa

SEQ ID NO: 3552017 - RNA, 18 nt, Human
aaagaguguaaaauauuu

SEQ ID NO: 3552018 - RNA, 14 nt, Human
aaagaguucaagaa

SEQ ID NO: 3552019 - RNA, 14 nt, Human
aaagauaaauauua

SEQ ID NO: 3552020 - RNA, 21 nt, Human
aaagauaaauuauaucaauuu

SEQ ID NO: 3552021 - RNA, 19 nt, Human
aaagauaaucucagugcuu

SEQ ID NO: 3552022 - RNA, 23 nt, Human
aaagauaaucucagugcuuuccu

SEQ ID NO: 3552023 - RNA, 20 nt, Human
aaagauaauugcuauuuauu

SEQ ID NO: 3552024 - RNA, 15 nt, Human
aaagauacaguuacu

SEQ ID NO: 3552025 - RNA, 19 nt, Human
aaagauacauuuguauguu

SEQ ID NO: 3552026 - RNA, 19 nt, Human
aaagauaccuuaaaauuug

SEQ ID NO: 3552027 - RNA, 21 nt, Human
aaagauaccuuaaaauuugaa

SEQ ID NO: 3552028 - RNA, 15 nt, Human
aaagauagauaucca

SEQ ID NO: 3552029 - RNA, 17 nt, Human
aaagauauaagugcugu

SEQ ID NO: 3552030 - RNA, 19 nt, Human
aaagauauauuaaaaauau

SEQ ID NO: 3552031 - RNA, 21 nt, Human
aaagauauauuaaaaauauaa

SEQ ID NO: 3552032 - RNA, 23 nt, Human
aaagauauauuaaaaauauaaaa

SEQ ID NO: 3552033 - RNA, 19 nt, Human
aaagauauggagaauugcu

SEQ ID NO: 3552034 - RNA, 22 nt, Human
aaagcuaguguaccuccucuca

SEQ ID NO: 3552035 - RNA, 23 nt, Human
aaagcuaguguaccuccucucag

SEQ ID NO: 3552036 - RNA, 20 nt, Human
aaagcuauaaagcaguauuu

SEQ ID NO: 3552037 - RNA, 15 nt, Human
aaagcuauuagccag

SEQ ID NO: 3552038 - RNA, 18 nt, Human
aaagcuauuagccaggau

SEQ ID NO: 3552039 - RNA, 17 nt, Human
aaagcucaaagguuugg

SEQ ID NO: 3552040 - RNA, 23 nt, Human
aaagcucaaagguuuggaaggag

SEQ ID NO: 3552041 - RNA, 21 nt, Human
aaagcucauauuuuguauaua

SEQ ID NO: 3552042 - RNA, 20 nt, Human
aaagcuccuggggcguccag

SEQ ID NO: 3552043 - RNA, 14 nt, Human
aaagcucuagaauc

SEQ ID NO: 3552044 - RNA, 12 nt, Human
aaagcugaaaac

SEQ ID NO: 3552045 - RNA, 15 nt, Human
aaagcugaaaacugc

SEQ ID NO: 3552046 - RNA, 13 nt, Human
aaagcugagccug

SEQ ID NO: 3552047 - RNA, 14 nt, Human
aaagcugauuuuuu

SEQ ID NO: 3552048 - RNA, 22 nt, Human
aaagcugcccacuguuucucuu

SEQ ID NO: 3552049 - RNA, 23 nt, Human
aaagcugccuguaguuaggaaau

SEQ ID NO: 3552050 - RNA, 16 nt, Human
aaagcugcuaaaucuc

SEQ ID NO: 3552051 - RNA, 17 nt, Human
aaagcugcuaaaucucc

SEQ ID NO: 3552052 - RNA, 23 nt, Human
aaagcugcugagaaucuagccuc

SEQ ID NO: 3552053 - RNA, 19 nt, Human
aaagcuggugggugaaaga

SEQ ID NO: 3552054 - RNA, 16 nt, Human
aaagcuguugauggua

SEQ ID NO: 3552055 - RNA, 16 nt, Human
aaagcuuaaaacuuug

SEQ ID NO: 3552056 - RNA, 15 nt, Human
aaagcuuagcaggag

SEQ ID NO: 3552057 - RNA, 13 nt, Human
aaagcuuauuaaa

SEQ ID NO: 3552058 - RNA, 20 nt, Human
aaagcuucagugcugccgau

SEQ ID NO: 3552059 - RNA, 19 nt, Human
aaagcuucuaucccaggag

SEQ ID NO: 3552060 - RNA, 21 nt, Human
aaagcuucuaucccaggaggu

SEQ ID NO: 3552061 - RNA, 13 nt, Human
aaagcuucugugg

SEQ ID NO: 3552062 - RNA, 17 nt, Human
aaagcuucuuaauuaau

SEQ ID NO: 3552063 - RNA, 19 nt, Human
aaagcuugcaacaaaauuc

SEQ ID NO: 3552064 - RNA, 18 nt, Human
aaagcuugguucugugaa

SEQ ID NO: 3552065 - RNA, 15 nt, Human
aaagcuuguuaagau

SEQ ID NO: 3552066 - RNA, 19 nt, Human
aaagcuuuaugauuuucau

SEQ ID NO: 3552067 - RNA, 15 nt, Human
aaagcuuuccuggag

SEQ ID NO: 3552068 - RNA, 21 nt, Human
aaagcuuugcuuaugguaaua

SEQ ID NO: 3552069 - RNA, 15 nt, Human
aaagcuuuuagaaau

SEQ ID NO: 3552070 - RNA, 19 nt, Human
aaagcuuuuuauuccuccu

SEQ ID NO: 3552071 - RNA, 16 nt, Human
aaagcuuuuuccuccu

SEQ ID NO: 3552072 - RNA, 16 nt, Human
aaaggaaaaagcacaa

SEQ ID NO: 3552073 - RNA, 19 nt, Human
aaaggaaaaagcacaagaa

SEQ ID NO: 3552074 - RNA, 15 nt, Human
aaaggaaaaagcucc

SEQ ID NO: 3552075 - RNA, 17 nt, Human
aaaggaaaaagcuccau

SEQ ID NO: 3552076 - RNA, 15 nt, Human
aaaggaaaagaaaaa

SEQ ID NO: 3552077 - RNA, 16 nt, Human
aaaggaaaagaaaaaa

SEQ ID NO: 3552078 - RNA, 16 nt, Human
aaaggaaaaugucugu

SEQ ID NO: 3552079 - RNA, 16 nt, Human
aaaggaaagaaaacau

SEQ ID NO: 3552080 - RNA, 17 nt, Human
aaaggaaagugcuuucc

SEQ ID NO: 3552081 - RNA, 17 nt, Human
aaaggaaaucaaaugaa

SEQ ID NO: 3552082 - RNA, 23 nt, Human
aaaggaaaucucaccccauccca

SEQ ID NO: 3552083 - RNA, 12 nt, Human
aaaggaacauuu

SEQ ID NO: 3552084 - RNA, 16 nt, Human
aaaggaacauuuaggg

SEQ ID NO: 3552085 - RNA, 16 nt, Human
aaaggaagacaguucu

SEQ ID NO: 3552086 - RNA, 12 nt, Human
aaaggaagacua

SEQ ID NO: 3552087 - RNA, 17 nt, Human
aaaggaagcauuguaaa

SEQ ID NO: 3552088 - RNA, 22 nt, Human
aaaggaagcuuucucugcuuca

SEQ ID NO: 3552089 - RNA, 23 nt, Human
aaaggaagguucuggugugaacu

SEQ ID NO: 3552090 - RNA, 17 nt, Human
aaaggaagugcccccuc

SEQ ID NO: 3552091 - RNA, 17 nt, Human
aaaggaaucauuucuau

SEQ ID NO: 3552092 - RNA, 13 nt, Human
aaaggaauuuaaa

SEQ ID NO: 3552093 - RNA, 16 nt, Human
aaaggacaauuucaaa

SEQ ID NO: 3552094 - RNA, 22 nt, Human
aaaggacaccuuuuaacucacc

SEQ ID NO: 3552095 - RNA, 18 nt, Human
aaaggacaggcagaaaga

SEQ ID NO: 3552096 - RNA, 15 nt, Human
aaaggacgcacugag

SEQ ID NO: 3552097 - RNA, 15 nt, Human
aaaggagaaugaauc

SEQ ID NO: 3552098 - RNA, 13 nt, Human
aaaggagagcauc

SEQ ID NO: 3552099 - RNA, 14 nt, Human
aaaggagaguacuu

SEQ ID NO: 3552100 - RNA, 19 nt, Human
aaaggagcccuuaucugug

SEQ ID NO: 3552101 - RNA, 11 nt, Human
aaaggagccug

SEQ ID NO: 3552102 - RNA, 16 nt, Human
aaaggaggcaugccuc

SEQ ID NO: 3552103 - RNA, 18 nt, Human
aaaggaggcaugccucug

SEQ ID NO: 3552104 - RNA, 20 nt, Human
aaaggauaaacuuuuagaaa

SEQ ID NO: 3552105 - RNA, 23 nt, Human
aaacauucuuuuaacuucuuucu

SEQ ID NO: 3552106 - RNA, 16 nt, Human
aaacauugaaguaaug

SEQ ID NO: 3552107 - RNA, 20 nt, Human
aaacauugaaguaaugaauu

SEQ ID NO: 3552108 - RNA, 19 nt, Human
aaacauugacgauuccuuc

SEQ ID NO: 3552109 - RNA, 18 nt, Human
aaacauugccuuugaaug

SEQ ID NO: 3552110 - RNA, 19 nt, Human
aaacauugccuuugaaugu

SEQ ID NO: 3552111 - RNA, 19 nt, Human
aaacauuggaagcagguua

SEQ ID NO: 3552112 - RNA, 22 nt, Human
aaacauuggaagcagguuaaau

SEQ ID NO: 3552113 - RNA, 21 nt, Human
aaacauugguucuuguauuaa

SEQ ID NO: 3552114 - RNA, 21 nt, Human
aaacauuuaccaaucauauua

SEQ ID NO: 3552115 - RNA, 17 nt, Human
aaacauuuauuuugaca

SEQ ID NO: 3552116 - RNA, 21 nt, Human
aaacauuuauuuugacauaaa

SEQ ID NO: 3552117 - RNA, 14 nt, Human
aaacauuucauaau

SEQ ID NO: 3552118 - RNA, 21 nt, Human
aaacauuucauaauuuguuuc

SEQ ID NO: 3552119 - RNA, 15 nt, Human
aaacauuucauuucc

SEQ ID NO: 3552120 - RNA, 15 nt, Human
aaacauuuuaaaugg

SEQ ID NO: 3552121 - RNA, 22 nt, Human
aaacauuuucacacaauacaau

SEQ ID NO: 3552122 - RNA, 20 nt, Human
aaacauuuucucuuagaaaa

SEQ ID NO: 3552123 - RNA, 16 nt, Human
aaacauuuucuggcca

SEQ ID NO: 3552124 - RNA, 20 nt, Human
aaaccaaaaguuauuaaaau

SEQ ID NO: 3552125 - RNA, 22 nt, Human
aaaccaaaaguuauuaaaauug

SEQ ID NO: 3552126 - RNA, 19 nt, Human
aaaccaaaaugacaucuuu

SEQ ID NO: 3552127 - RNA, 15 nt, Human
aaaccaaagaagaaa

SEQ ID NO: 3552128 - RNA, 17 nt, Human
aaaccaaagagggcuuc

SEQ ID NO: 3552129 - RNA, 23 nt, Human
aaaccaaauucagggacaaaugg

SEQ ID NO: 3552130 - RNA, 17 nt, Human
aaaccaagagauugcua

SEQ ID NO: 3552131 - RNA, 19 nt, Human
aaaccaagagauugcuaau

SEQ ID NO: 3552132 - RNA, 21 nt, Human
aaaccaagucggaacagcaga

SEQ ID NO: 3552133 - RNA, 16 nt, Human
aaaccaauugcugcua

SEQ ID NO: 3552134 - RNA, 22 nt, Human
aaaccaauuuuuuguucuucag

SEQ ID NO: 3552135 - RNA, 15 nt, Human
aaaccacaaaaaaau

SEQ ID NO: 3552136 - RNA, 15 nt, Human
aaaccacaaaggcca

SEQ ID NO: 3552137 - RNA, 17 nt, Human
aaaccacagcccuguca

SEQ ID NO: 3552138 - RNA, 17 nt, Human
aaaccaccaaaaacaaa

SEQ ID NO: 3552139 - RNA, 15 nt, Human
aaaccacuagaaagu

SEQ ID NO: 3552140 - RNA, 12 nt, Human
aaaccacugaaa

SEQ ID NO: 3552141 - RNA, 18 nt, Human
aaaccacugaaaaaauau

SEQ ID NO: 3552142 - RNA, 16 nt, Human
aaaccagacaaggaaa

SEQ ID NO: 3552143 - RNA, 20 nt, Human
aaaccagcuuccuucagaga

SEQ ID NO: 3552144 - RNA, 21 nt, Human
aaaccaggcuuucuagaaaga

SEQ ID NO: 3552145 - RNA, 17 nt, Human
aaaccaguauuguacaa

SEQ ID NO: 3552146 - RNA, 22 nt, Human
aaaccaguauuguacaaaguau

SEQ ID NO: 3552147 - RNA, 23 nt, Human
aaaccauccagugacaaaccauc

SEQ ID NO: 3552148 - RNA, 22 nt, Human
aaaccaucucccuggugcuuau

SEQ ID NO: 3552149 - RNA, 14 nt, Human
aaaccaucuggccu

SEQ ID NO: 3552150 - RNA, 15 nt, Human
aaaccaucuggccug

SEQ ID NO: 3552151 - RNA, 13 nt, Human
aaaccauguagaa

SEQ ID NO: 3552152 - RNA, 22 nt, Human
aaaccauguagcagugagucau

SEQ ID NO: 3552153 - RNA, 20 nt, Human
aaaccauuaugaagaagaga

SEQ ID NO: 3552154 - RNA, 12 nt, Human
aaaccauugcuu

SEQ ID NO: 3552155 - RNA, 17 nt, Human
aaaccauugcuucacua

SEQ ID NO: 3552156 - RNA, 23 nt, Human
aaaccauuuuuguuacucucuuc

SEQ ID NO: 3552157 - RNA, 13 nt, Human
aaacccacaaaaa

SEQ ID NO: 3552158 - RNA, 17 nt, Human
aaacccacccuuucuac

SEQ ID NO: 3552159 - RNA, 18 nt, Human
aaacccaccugcuagugu

SEQ ID NO: 3552160 - RNA, 15 nt, Human
aaacccagacugaac

SEQ ID NO: 3552161 - RNA, 11 nt, Human
aaacccagaga

SEQ ID NO: 3552162 - RNA, 16 nt, Human
aaacccagcucugguc

SEQ ID NO: 3552163 - RNA, 22 nt, Human
aaacccauauuguaaaacaggu

SEQ ID NO: 3552164 - RNA, 20 nt, Human
aaaccccaccccaaaauuag

SEQ ID NO: 3552165 - RNA, 23 nt, Human
aaaccccauuugcuuucuuuucu

SEQ ID NO: 3552166 - RNA, 22 nt, Human
aaacccccacacacacacacau

SEQ ID NO: 3552167 - RNA, 15 nt, Human
aaaccccggggcucc

SEQ ID NO: 3552168 - RNA, 18 nt, Human
aaaccccuucucugugac

SEQ ID NO: 3552169 - RNA, 23 nt, Human
aaacccgaggguugauuaaggca

SEQ ID NO: 3552170 - RNA, 21 nt, Human
aaacccgucucuacuaaaaau

SEQ ID NO: 3552171 - RNA, 11 nt, Human
aaacccuaggu

SEQ ID NO: 3552172 - RNA, 18 nt, Human
aaacccucauuguguuuc

SEQ ID NO: 3552173 - RNA, 13 nt, Human
aaacccucgaggc

SEQ ID NO: 3552174 - RNA, 22 nt, Human
aaaccgaacugauguaaguaaa

SEQ ID NO: 3552175 - RNA, 15 nt, Human
aaaccgccaaggcug

SEQ ID NO: 3552176 - RNA, 23 nt, Human
aaaccgccagcgaacuugacaau

SEQ ID NO: 3552177 - RNA, 15 nt, Human
aaaccgccagcucug

SEQ ID NO: 3552178 - RNA, 22 nt, Human
aaaggaaugcaaagaugaaggu

SEQ ID NO: 3552179 - RNA, 23 nt, Human
aaaggaauuggcauguguauguu

SEQ ID NO: 3552180 - RNA, 18 nt, Human
aaaggacauuaugugugc

SEQ ID NO: 3552181 - RNA, 21 nt, Human
aaaggacuccugaaaaaaaac

SEQ ID NO: 3552182 - RNA, 22 nt, Human
aaaggacuguuuuuuccugagc

SEQ ID NO: 3552183 - RNA, 20 nt, Human
aaaggagacaaguuccaugg

SEQ ID NO: 3552184 - RNA, 19 nt, Human
aaaggagagaagagagaaa

SEQ ID NO: 3552185 - RNA, 22 nt, Human
aaaggagagacucccaugaagc

SEQ ID NO: 3552186 - RNA, 23 nt, Human
aaaggagagacucccaugaagcc

SEQ ID NO: 3552187 - RNA, 21 nt, Human
aaaggagagucuugcagugau

SEQ ID NO: 3552188 - RNA, 17 nt, Human
aaaggagauuggaagga

SEQ ID NO: 3552189 - RNA, 16 nt, Human
aaaggagcaagaacuu

SEQ ID NO: 3552190 - RNA, 20 nt, Human
aaaggagccuaggccaggug

SEQ ID NO: 3552191 - RNA, 22 nt, Human
aaaggagcucgaaggauauugu

SEQ ID NO: 3552192 - RNA, 21 nt, Human
aaaggagcuuaccucccaccu

SEQ ID NO: 3552193 - RNA, 13 nt, Human
aaaggaggcuggc

SEQ ID NO: 3552194 - RNA, 24 nt, Human
aaaggaguuucuuuagcugacaga

SEQ ID NO: 3552195 - RNA, 13 nt, Human
aaaggauaaagaa

SEQ ID NO: 3552196 - RNA, 23 nt, Human
aaaggauauuuaagaaaauacaa

SEQ ID NO: 3552197 - RNA, 18 nt, Human
aaaggaucuuuguggcca

SEQ ID NO: 3552198 - RNA, 19 nt, Human
aaaggauguaaacagugcc

SEQ ID NO: 3552199 - RNA, 20 nt, Human
aaaggauguaaacagugccu

SEQ ID NO: 3552200 - RNA, 18 nt, Human
aaaggauucauguggaau

SEQ ID NO: 3552201 - RNA, 16 nt, Human
aaaggcaaauguguac

SEQ ID NO: 3552202 - RNA, 17 nt, Human
aaaggcaaauguguaca

SEQ ID NO: 3552203 - RNA, 23 nt, Human
aaaggcaaguuaagagaaacuuu

SEQ ID NO: 3552204 - RNA, 12 nt, Human
aaaggcacagug

SEQ ID NO: 3552205 - RNA, 21 nt, Human
aaaggcacccccgucaagagu

SEQ ID NO: 3552206 - RNA, 20 nt, Human
aaaggcaccuauaaaacagg

SEQ ID NO: 3552207 - RNA, 21 nt, Human
aaaggcaccuauaaaacaggu

SEQ ID NO: 3552208 - RNA, 18 nt, Human
aaaggcaguauuuugugu

SEQ ID NO: 3552209 - RNA, 19 nt, Human
aaaggcaguauuuuguguc

SEQ ID NO: 3552210 - RNA, 17 nt, Human
aaaggcaguggggcugg

SEQ ID NO: 3552211 - RNA, 23 nt, Human
aaaggcaguuaccauuaaaccau

SEQ ID NO: 3552212 - RNA, 14 nt, Human
aaaggccaaaccuc

SEQ ID NO: 3552213 - RNA, 17 nt, Human
aaaggccaaaccucugu

SEQ ID NO: 3552214 - RNA, 18 nt, Human
aaaggccaaaccucuguu

SEQ ID NO: 3552215 - RNA, 17 nt, Human
aaaggccagaccugcag

SEQ ID NO: 3552216 - RNA, 12 nt, Human
aaaggccagcug

SEQ ID NO: 3552217 - RNA, 18 nt, Human
aaaggccagcuggcagca

SEQ ID NO: 3552218 - RNA, 12 nt, Human
aaaggcccccua

SEQ ID NO: 3552219 - RNA, 21 nt, Human
aaaggccuaauucuaugccug

SEQ ID NO: 3552220 - RNA, 14 nt, Human
aaaggccucugucc

SEQ ID NO: 3552221 - RNA, 15 nt, Human
aaaggccugcacaca

SEQ ID NO: 3552222 - RNA, 17 nt, Human
aaaggccuuuaaaauuu

SEQ ID NO: 3552223 - RNA, 21 nt, Human
aaaggcucagucucaggagca

SEQ ID NO: 3552224 - RNA, 19 nt, Human
aaaggcuccaggagcagcc

SEQ ID NO: 3552225 - RNA, 16 nt, Human
aaaggcucgauuuugu

SEQ ID NO: 3552226 - RNA, 23 nt, Human
aaaggcucgauuuuguaucugca

SEQ ID NO: 3552227 - RNA, 20 nt, Human
aaaggcucugaaagccagcu

SEQ ID NO: 3552228 - RNA, 18 nt, Human
aaaggcuguauucagcaa

SEQ ID NO: 3552229 - RNA, 18 nt, Human
aaaggcugugcugcccug

SEQ ID NO: 3552230 - RNA, 23 nt, Human
aaaggcugugcugcccugaagaa

SEQ ID NO: 3552231 - RNA, 18 nt, Human
aaaggcuguuaaauacag

SEQ ID NO: 3552232 - RNA, 17 nt, Human
aaaggcuucucucucac

SEQ ID NO: 3552233 - RNA, 12 nt, Human
aaagggacauga

SEQ ID NO: 3552234 - RNA, 23 nt, Human
aaagggagcacuggguugacuuu

SEQ ID NO: 3552235 - RNA, 20 nt, Human
aaagggagcagaacugaacc

SEQ ID NO: 3552236 - RNA, 18 nt, Human
aaagggagggcucugagg

SEQ ID NO: 3552237 - RNA, 19 nt, Human
aaagggauuacccaagcaa

SEQ ID NO: 3552238 - RNA, 20 nt, Human
aaagggcagggcaucuccug

SEQ ID NO: 3552239 - RNA, 19 nt, Human
aaagggcccaaugaauuau

SEQ ID NO: 3552240 - RNA, 20 nt, Human
aaagggcuguuauaaucuuu

SEQ ID NO: 3552241 - RNA, 15 nt, Human
aaaggggacaggccu

SEQ ID NO: 3552242 - RNA, 11 nt, Human
aaaggggagac

SEQ ID NO: 3552243 - RNA, 14 nt, Human
aaaggggagagccu

SEQ ID NO: 3552244 - RNA, 19 nt, Human
aaaggggagagccugcugg

SEQ ID NO: 3552245 - RNA, 14 nt, Human
aaagggggauuccc

SEQ ID NO: 3552246 - RNA, 16 nt, Human
aaagggggucccagug

SEQ ID NO: 3552247 - RNA, 23 nt, Human
aaagggggucccagugggagggg

SEQ ID NO: 3552248 - RNA, 17 nt, Human
aaagggucuugggaaau

SEQ ID NO: 3552249 - RNA, 10 nt, Human
aaagggugaa

SEQ ID NO: 3552250 - RNA, 14 nt, Human
aaagggugaagcua

SEQ ID NO: 3552251 - RNA, 16 nt, Human
aaaggguuuuaaugua

SEQ ID NO: 3552252 - RNA, 15 nt, Human
aaagguaaaacaaaa

SEQ ID NO: 3552253 - RNA, 14 nt, Human
aaagguaaaucaga

SEQ ID NO: 3552254 - RNA, 14 nt, Human
aaagguacuucaaa

SEQ ID NO: 3552255 - RNA, 20 nt, Human
aaagguauuauacaugugau

SEQ ID NO: 3552256 - RNA, 16 nt, Human
aaaggucaccucacuc

SEQ ID NO: 3552257 - RNA, 20 nt, Human
aaaggucaccucacucagca

SEQ ID NO: 3552258 - RNA, 19 nt, Human
aaagguccacaggucuaga

SEQ ID NO: 3552259 - RNA, 23 nt, Human
aaaggucuuggugccucugcagu

SEQ ID NO: 3552260 - RNA, 23 nt, Human
aaaggugacaucggaaaaauaau

SEQ ID NO: 3552261 - RNA, 23 nt, Human
aaagugaagcaaaucagaaacuu

SEQ ID NO: 3552262 - RNA, 18 nt, Human
aaagugaauaaacuucag

SEQ ID NO: 3552263 - RNA, 20 nt, Human
aaagugaauaaacuucagca

SEQ ID NO: 3552264 - RNA, 21 nt, Human
aaagugaauaaacuucagcac

SEQ ID NO: 3552265 - RNA, 16 nt, Human
aaagugaaugaaagau

SEQ ID NO: 3552266 - RNA, 18 nt, Human
aaagugaauuguugacaa

SEQ ID NO: 3552267 - RNA, 17 nt, Human
aaagugaauuugaauga

SEQ ID NO: 3552268 - RNA, 19 nt, Human
aaagugaauuugaaugaaa

SEQ ID NO: 3552269 - RNA, 14 nt, Human
aaagugacacagca

SEQ ID NO: 3552270 - RNA, 14 nt, Human
aaagugacccuguu

SEQ ID NO: 3552271 - RNA, 19 nt, Human
aaagugacuaauggcauga

SEQ ID NO: 3552272 - RNA, 19 nt, Human
aaagugagcaugcuuucug

SEQ ID NO: 3552273 - RNA, 15 nt, Human
aaagugauaauuucu

SEQ ID NO: 3552274 - RNA, 10 nt, Human
aaagugauua

SEQ ID NO: 3552275 - RNA, 21 nt, Human
aaagugccaaagaaagugguc

SEQ ID NO: 3552276 - RNA, 15 nt, Human
aaagugccacucauu

SEQ ID NO: 3552277 - RNA, 22 nt, Human
aaagugccucaagaggaaugaa

SEQ ID NO: 3552278 - RNA, 17 nt, Human
aaagugccuuucaggau

SEQ ID NO: 3552279 - RNA, 22 nt, Human
aaagugccuuucaggaucuauu

SEQ ID NO: 3552280 - RNA, 14 nt, Human
aaagugcugcggag

SEQ ID NO: 3552281 - RNA, 14 nt, Human
aaagugcugggauu

SEQ ID NO: 3552282 - RNA, 22 nt, Human
aaagugcuucauucuuugcagg

SEQ ID NO: 3552283 - RNA, 13 nt, Human
aaaguggaaaaau

SEQ ID NO: 3552284 - RNA, 19 nt, Human
aaaguggaaaacaaggaag

SEQ ID NO: 3552285 - RNA, 13 nt, Human
aaaguggaacgaa

SEQ ID NO: 3552286 - RNA, 22 nt, Human
aaaguggaauuucuuguuucuc

SEQ ID NO: 3552287 - RNA, 17 nt, Human
aaaguggagaagcacac

SEQ ID NO: 3552288 - RNA, 18 nt, Human
aaaguggcaccugucugc

SEQ ID NO: 3552289 - RNA, 20 nt, Human
aaaguggcaccugucugcuc

SEQ ID NO: 3552290 - RNA, 16 nt, Human
aaaguggccucuuugu

SEQ ID NO: 3552291 - RNA, 22 nt, Human
aaaguggcgugggagccagccu

SEQ ID NO: 3552292 - RNA, 21 nt, Human
aaagugggcccucauacacaa

SEQ ID NO: 3552293 - RNA, 17 nt, Human
aaagugggcuuaaugga

SEQ ID NO: 3552294 - RNA, 17 nt, Human
aaagugguauagaaaug

SEQ ID NO: 3552295 - RNA, 11 nt, Human
aaaguguaaag

SEQ ID NO: 3552296 - RNA, 12 nt, Human
aaaguguaaagc

SEQ ID NO: 3552297 - RNA, 20 nt, Human
aaaguguaaauccuuuuucu

SEQ ID NO: 3552298 - RNA, 15 nt, Human
aaaguguaauaauau

SEQ ID NO: 3552299 - RNA, 10 nt, Human
aaaguguauu

SEQ ID NO: 3552300 - RNA, 11 nt, Human
aaaguguauua

SEQ ID NO: 3552301 - RNA, 18 nt, Human
aaaguguauuauaacagu

SEQ ID NO: 3552302 - RNA, 15 nt, Human
aaaguguauuuguua

SEQ ID NO: 3552303 - RNA, 20 nt, Human
aaaguguauuuuauaaaauu

SEQ ID NO: 3552304 - RNA, 14 nt, Human
aaaguguauuuuuu

SEQ ID NO: 3552305 - RNA, 22 nt, Human
aaaguguauuuuuuuacuaaua

SEQ ID NO: 3552306 - RNA, 18 nt, Human
aaagugucaacucuuugu

SEQ ID NO: 3552307 - RNA, 21 nt, Human
aaagugucaccuuuucuugcc

SEQ ID NO: 3552308 - RNA, 23 nt, Human
aaagugucagaaggagcuacaaa

SEQ ID NO: 3552309 - RNA, 19 nt, Human
aaaguguccauugacaugu

SEQ ID NO: 3552310 - RNA, 22 nt, Human
aaaguguccauugacauguaca

SEQ ID NO: 3552311 - RNA, 18 nt, Human
aaagugugagcaaacuaa

SEQ ID NO: 3552312 - RNA, 19 nt, Human
aaagugugcuuuaugcuga

SEQ ID NO: 3552313 - RNA, 18 nt, Human
aaaguguguauauauuuu

SEQ ID NO: 3552314 - RNA, 21 nt, Human
aaaguguguauauauuuugug

SEQ ID NO: 3552315 - RNA, 23 nt, Human
aaaguguguauauauuuugugug

SEQ ID NO: 3552316 - RNA, 13 nt, Human
aaaguguguauua

SEQ ID NO: 3552317 - RNA, 20 nt, Human
aaaguguguuguugcuuuag

SEQ ID NO: 3552318 - RNA, 13 nt, Human
aaaguguuacuuu

SEQ ID NO: 3552319 - RNA, 17 nt, Human
aaaguguuuauuuuuca

SEQ ID NO: 3552320 - RNA, 13 nt, Human
aaaguguuugccu

SEQ ID NO: 3552321 - RNA, 16 nt, Human
aaagccuccuccagcc

SEQ ID NO: 3552322 - RNA, 21 nt, Human
aaagccucugugucacuggcu

SEQ ID NO: 3552323 - RNA, 16 nt, Human
aaagccucuguuuuga

SEQ ID NO: 3552324 - RNA, 13 nt, Human
aaagccugcaauu

SEQ ID NO: 3552325 - RNA, 18 nt, Human
aaagccugcaauuucaua

SEQ ID NO: 3552326 - RNA, 16 nt, Human
aaagccuguuguuuaa

SEQ ID NO: 3552327 - RNA, 21 nt, Human
aaagccuguuguuuaagugac

SEQ ID NO: 3552328 - RNA, 11 nt, Human
aaagccuucuu

SEQ ID NO: 3552329 - RNA, 14 nt, Human
aaagccuuguguau

SEQ ID NO: 3552330 - RNA, 18 nt, Human
aaagccuuguguauauuu

SEQ ID NO: 3552331 - RNA, 22 nt, Human
aaagccuuguguauauuuguau

SEQ ID NO: 3552332 - RNA, 23 nt, Human
aaagccuuguguauauuuguaua

SEQ ID NO: 3552333 - RNA, 13 nt, Human
aaagccuuucauu

SEQ ID NO: 3552334 - RNA, 18 nt, Human
aaagccuuucauuuugcu

SEQ ID NO: 3552335 - RNA, 22 nt, Human
aaagccuuucauuuugcuuuaa

SEQ ID NO: 3552336 - RNA, 17 nt, Human
aaagcgauauacagaug

SEQ ID NO: 3552337 - RNA, 16 nt, Human
aaagcggggggagggu

SEQ ID NO: 3552338 - RNA, 18 nt, Human
aaagcggggggaggguug

SEQ ID NO: 3552339 - RNA, 14 nt, Human
aaagcuaaaauaaa

SEQ ID NO: 3552340 - RNA, 14 nt, Human
aaagcuaaguauag

SEQ ID NO: 3552341 - RNA, 17 nt, Human
aaagcuacuuauuguag

SEQ ID NO: 3552342 - RNA, 20 nt, Human
aaagcuagaauugaguguuu

SEQ ID NO: 3552343 - RNA, 18 nt, Human
aaagcuaggccuggccag

SEQ ID NO: 3552344 - RNA, 20 nt, Human
aaagcuaguguaccuccucu

SEQ ID NO: 3552345 - RNA, 22 nt, Human
aaagcuauggugagaugcagcu

SEQ ID NO: 3552346 - RNA, 17 nt, Human
aaagcuauuagccagga

SEQ ID NO: 3552347 - RNA, 19 nt, Human
aaagcuauuagccaggauc

SEQ ID NO: 3552348 - RNA, 23 nt, Human
aaagcuauuagccaggaucaugg

SEQ ID NO: 3552349 - RNA, 18 nt, Human
aaagcuauuuaugggccc

SEQ ID NO: 3552350 - RNA, 19 nt, Human
aaagcucauuucaugcucu

SEQ ID NO: 3552351 - RNA, 22 nt, Human
aaagcucuguugcaauuaggau

SEQ ID NO: 3552352 - RNA, 15 nt, Human
aaagcugacauugcc

SEQ ID NO: 3552353 - RNA, 17 nt, Human
aaagcugacgaggcugg

SEQ ID NO: 3552354 - RNA, 15 nt, Human
aaagcugagccugca

SEQ ID NO: 3552355 - RNA, 19 nt, Human
aaagcugauuacugucaau

SEQ ID NO: 3552356 - RNA, 17 nt, Human
aaagcugccuguaguua

SEQ ID NO: 3552357 - RNA, 13 nt, Human
aaagcugcugaca

SEQ ID NO: 3552358 - RNA, 23 nt, Human
aaagcuggugggugaaagaaauc

SEQ ID NO: 3552359 - RNA, 15 nt, Human
aaagcuguauuuuga

SEQ ID NO: 3552360 - RNA, 23 nt, Human
aaagcuguggccagcuuguuauu

SEQ ID NO: 3552361 - RNA, 14 nt, Human
aaagcuguguggca

SEQ ID NO: 3552362 - RNA, 14 nt, Human
aaagcuguuaaacu

SEQ ID NO: 3552363 - RNA, 16 nt, Human
aaagcuguuaaacugu

SEQ ID NO: 3552364 - RNA, 23 nt, Human
aaagcuguuaaacuguuagcacu

SEQ ID NO: 3552365 - RNA, 14 nt, Human
aaagcuuaaaacuu

SEQ ID NO: 3552366 - RNA, 20 nt, Human
aaagcuuauccauaaaaaaa

SEQ ID NO: 3552367 - RNA, 23 nt, Human
aaagcuuauccauaaaaaaaaau

SEQ ID NO: 3552368 - RNA, 17 nt, Human
aaagcuucagugcugcc

SEQ ID NO: 3552369 - RNA, 17 nt, Human
aaagcuuccaugauucu

SEQ ID NO: 3552370 - RNA, 20 nt, Human
aaagcuuccaugauucuauu

SEQ ID NO: 3552371 - RNA, 13 nt, Human
aaagcuucccucc

SEQ ID NO: 3552372 - RNA, 16 nt, Human
aaagcuucccucccug

SEQ ID NO: 3552373 - RNA, 20 nt, Human
aaagcuucccucccugcugu

SEQ ID NO: 3552374 - RNA, 12 nt, Human
aaagcuucugug

SEQ ID NO: 3552375 - RNA, 23 nt, Human
aaagcuucuuaauuaauuugauu

SEQ ID NO: 3552376 - RNA, 20 nt, Human
aaagcuugaagaucguuagu

SEQ ID NO: 3552377 - RNA, 17 nt, Human
aaagcuugaguaaaaua

SEQ ID NO: 3552378 - RNA, 19 nt, Human
aaagcuuggauuaaauaca

SEQ ID NO: 3552379 - RNA, 21 nt, Human
aaagcuuggauuaaauacaua

SEQ ID NO: 3552380 - RNA, 13 nt, Human
aaagcuuuaugau

SEQ ID NO: 3552381 - RNA, 21 nt, Human
aaagcuuuaugauuuucauaa

SEQ ID NO: 3552382 - RNA, 13 nt, Human
aaagcuuucagaa

SEQ ID NO: 3552383 - RNA, 12 nt, Human
aaagcuuuccug

SEQ ID NO: 3552384 - RNA, 13 nt, Human
aaagcuuuccugc

SEQ ID NO: 3552385 - RNA, 23 nt, Human
aaagcuuuccugccccaggccug

SEQ ID NO: 3552386 - RNA, 23 nt, Human
aaagcuuuuaugagcucauguag

SEQ ID NO: 3552387 - RNA, 16 nt, Human
aaagcuuuugucuaca

SEQ ID NO: 3552388 - RNA, 13 nt, Human
aaagcuuuuugaa

SEQ ID NO: 3552389 - RNA, 14 nt, Human
aaaggaaaaagcuc

SEQ ID NO: 3552390 - RNA, 21 nt, Human
aaaggaaaaaguaucauggaa

SEQ ID NO: 3552391 - RNA, 22 nt, Human
aaaggaaaaaguaucauggaaa

SEQ ID NO: 3552392 - RNA, 15 nt, Human
aaaggaaaaccugaa

SEQ ID NO: 3552393 - RNA, 18 nt, Human
aaaggaaaaccugaagac

SEQ ID NO: 3552394 - RNA, 13 nt, Human
aaaggaaaccuuu

SEQ ID NO: 3552395 - RNA, 14 nt, Human
aaaggaaaccuuuu

SEQ ID NO: 3552396 - RNA, 17 nt, Human
aaaggaacauugugucu

SEQ ID NO: 3552397 - RNA, 15 nt, Human
aaaggaacugcagca

SEQ ID NO: 3552398 - RNA, 14 nt, Human
aaaggaagucuagg

SEQ ID NO: 3552399 - RNA, 21 nt, Human
aaaggaauccacucccaggca

SEQ ID NO: 3552400 - RNA, 15 nt, Human
aaaggaauggaggcu

SEQ ID NO: 3552401 - RNA, 19 nt, Human
aaaggacaggcagaaagag

SEQ ID NO: 3552402 - RNA, 14 nt, Human
aaaggacaucagca

SEQ ID NO: 3552403 - RNA, 15 nt, Human
aaaggacaucagcaa

SEQ ID NO: 3552404 - RNA, 16 nt, Human
aaaggacaucagcaaa

SEQ ID NO: 3552405 - RNA, 12 nt, Human
aaaggacucugg

SEQ ID NO: 3552406 - RNA, 15 nt, Human
aaaggacucuggggu

SEQ ID NO: 3552407 - RNA, 20 nt, Human
aaaggacuguuuuuuccuga

SEQ ID NO: 3552408 - RNA, 15 nt, Human
aaaggagagcaucgg

SEQ ID NO: 3552409 - RNA, 23 nt, Human
aaaggagcccuuaucugugcuca

SEQ ID NO: 3552410 - RNA, 12 nt, Human
aaaggagccugu

SEQ ID NO: 3552411 - RNA, 16 nt, Human
aaaggagucaaaacua

SEQ ID NO: 3552412 - RNA, 21 nt, Human
aaaggaguuuauguuccauua

SEQ ID NO: 3552413 - RNA, 19 nt, Human
aaaggauauuuaagaaaau

SEQ ID NO: 3552414 - RNA, 14 nt, Human
aaaggaugcacaga

SEQ ID NO: 3552415 - RNA, 20 nt, Human
aaaggaugcccaaagaugca

SEQ ID NO: 3552416 - RNA, 14 nt, Human
aaaggaugugauau

SEQ ID NO: 3552417 - RNA, 23 nt, Human
aaaggaugugauauauaagugua

SEQ ID NO: 3552418 - RNA, 13 nt, Human
aaaggaugugauu

SEQ ID NO: 3552419 - RNA, 16 nt, Human
aaaggauguugguguu

SEQ ID NO: 3552420 - RNA, 16 nt, Human
aaaggcaaacauuuga

SEQ ID NO: 3552421 - RNA, 12 nt, Human
aaaggcaaaggc

SEQ ID NO: 3552422 - RNA, 22 nt, Human
aaaggcaaguuaagagaaacuu

SEQ ID NO: 3552423 - RNA, 12 nt, Human
aaaggcagcugu

SEQ ID NO: 3552424 - RNA, 14 nt, Human
aaaggcagcuguug

SEQ ID NO: 3552425 - RNA, 23 nt, Human
aaaggcaguuugcaaaaaauguu

SEQ ID NO: 3552426 - RNA, 17 nt, Human
aaaggcauauugcuuuu

SEQ ID NO: 3552427 - RNA, 16 nt, Human
aaaggcauucucugaa

SEQ ID NO: 3552428 - RNA, 15 nt, Human
aaaggccaaaccucu

SEQ ID NO: 3552429 - RNA, 15 nt, Human
aaaggccaaacugcu

SEQ ID NO: 3552430 - RNA, 18 nt, Human
aaaggccaaacugcugga

SEQ ID NO: 3552431 - RNA, 20 nt, Human
aaaggccagcuggcagcaga

SEQ ID NO: 3552432 - RNA, 16 nt, Human
aaaggcccagccccua

SEQ ID NO: 3552433 - RNA, 11 nt, Human
aaaggccucuu

SEQ ID NO: 3552434 - RNA, 14 nt, Human
aaaggccucuuccu

SEQ ID NO: 3552435 - RNA, 21 nt, Human
aaaggccucuuguaaagacug

SEQ ID NO: 3552436 - RNA, 11 nt, Human
aaaggccuggg

SEQ ID NO: 3552437 - RNA, 13 nt, Human
aaaggccuggggu

SEQ ID NO: 3552438 - RNA, 12 nt, Human
aaaggccuuuaa

SEQ ID NO: 3552439 - RNA, 13 nt, Human
aaaggcgcugaga

SEQ ID NO: 3552440 - RNA, 14 nt, Human
aaaggcuaccuuug

SEQ ID NO: 3552441 - RNA, 17 nt, Human
aaaggcuaccuuuguau

SEQ ID NO: 3552442 - RNA, 19 nt, Human
aaaggcuagguacacagcu

SEQ ID NO: 3552443 - RNA, 20 nt, Human
aaaggcuaugauugucuuug

SEQ ID NO: 3552444 - RNA, 14 nt, Human
aaaggcuccaggag

SEQ ID NO: 3552445 - RNA, 16 nt, Human
aaaggcuccaggagca

SEQ ID NO: 3552446 - RNA, 22 nt, Human
aaaggcuccaggagcagccaca

SEQ ID NO: 3552447 - RNA, 18 nt, Human
aaaggcucgauuuuguau

SEQ ID NO: 3552448 - RNA, 15 nt, Human
aaaggcugugcugcc

SEQ ID NO: 3552449 - RNA, 13 nt, Human
aaaggcuguggua

SEQ ID NO: 3552450 - RNA, 20 nt, Human
aaaggcuguuaaauacagga

SEQ ID NO: 3552451 - RNA, 22 nt, Human
aaaggcuguuaaauacaggaaa

SEQ ID NO: 3552452 - RNA, 14 nt, Human
aaaggcuuauaaaa

SEQ ID NO: 3552453 - RNA, 15 nt, Human
aaaggcuucucucuc

SEQ ID NO: 3552454 - RNA, 17 nt, Human
aaaggcuugcagaacuu

SEQ ID NO: 3552455 - RNA, 20 nt, Human
aaagggaacaggaaaagaaa

SEQ ID NO: 3552456 - RNA, 18 nt, Human
aaagggaaguugugccuu

SEQ ID NO: 3552457 - RNA, 21 nt, Human
aaagggagaagugacauugca

SEQ ID NO: 3552458 - RNA, 17 nt, Human
aaagggagagagagagg

SEQ ID NO: 3552459 - RNA, 22 nt, Human
aaagggagcagagaaggccagg

SEQ ID NO: 3552460 - RNA, 18 nt, Human
aaagggagcuaucaggaa

SEQ ID NO: 3552461 - RNA, 19 nt, Human
aaagggagggcucugaggc

SEQ ID NO: 3552462 - RNA, 22 nt, Human
aaagggagggcucugaggcgcc

SEQ ID NO: 3552463 - RNA, 17 nt, Human
aaaggggaaagaacaua

SEQ ID NO: 3552464 - RNA, 23 nt, Human
aaaggggucggcugaccaugcuc

SEQ ID NO: 3552465 - RNA, 24 nt, Human
aaaggggucggcugaccaugcuca

SEQ ID NO: 3552466 - RNA, 18 nt, Human
aaaugguauccagaaugg

SEQ ID NO: 3552467 - RNA, 16 nt, Human
aaaugguaucuuuugg

SEQ ID NO: 3552468 - RNA, 21 nt, Human
aaaugguccaauuaguuuccu

SEQ ID NO: 3552469 - RNA, 22 nt, Human
aaaugguccaauuaguuuccuu

SEQ ID NO: 3552470 - RNA, 14 nt, Human
aaaugguccaggag

SEQ ID NO: 3552471 - RNA, 16 nt, Human
aaauggucgcccagga

SEQ ID NO: 3552472 - RNA, 23 nt, Human
aaauggugaaaauaaaauaaagc

SEQ ID NO: 3552473 - RNA, 19 nt, Human
aaauggugcucaccaugcu

SEQ ID NO: 3552474 - RNA, 18 nt, Human
aaaugguggcuucagcuc

SEQ ID NO: 3552475 - RNA, 19 nt, Human
aaaugguggcuucagcucc

SEQ ID NO: 3552476 - RNA, 20 nt, Human
aaaugguggcuucagcucca

SEQ ID NO: 3552477 - RNA, 23 nt, Human
aaaugcucuuauuucaucauuca

SEQ ID NO: 3552478 - RNA, 12 nt, Human
aaaugcugaccc

SEQ ID NO: 3552479 - RNA, 16 nt, Human
aaaugcugacccaugg

SEQ ID NO: 3552480 - RNA, 21 nt, Human
aaaugcugauuuaaacuucuu

SEQ ID NO: 3552481 - RNA, 14 nt, Human
aaaugcugcauuuu

SEQ ID NO: 3552482 - RNA, 13 nt, Human
aaaugcugccugc

SEQ ID NO: 3552483 - RNA, 16 nt, Human
aaaugcugccugccug

SEQ ID NO: 3552484 - RNA, 21 nt, Human
aaaugcugcgcccuuccccag

SEQ ID NO: 3552485 - RNA, 19 nt, Human
aaaugcuguaacuuucuga

SEQ ID NO: 3552486 - RNA, 22 nt, Human
aaaugcugucuuucuugcuccc

SEQ ID NO: 3552487 - RNA, 16 nt, Human
aaaugcuguguugggu

SEQ ID NO: 3552488 - RNA, 19 nt, Human
aaaugcuucacuguacgua

SEQ ID NO: 3552489 - RNA, 16 nt, Human
aaaugcuucauuugua

SEQ ID NO: 3552490 - RNA, 23 nt, Human
aaaugcuucauuuguaugucaaa

SEQ ID NO: 3552491 - RNA, 19 nt, Human
aaaugcuuuaaaaacuauu

SEQ ID NO: 3552492 - RNA, 22 nt, Human
aaaugcuuuaaaaacuauuuaa

SEQ ID NO: 3552493 - RNA, 14 nt, Human
aaaugcuuuagaaa

SEQ ID NO: 3552494 - RNA, 19 nt, Human
aaaugcuuugugugauuga

SEQ ID NO: 3552495 - RNA, 21 nt, Human
aaauggaaaggagaggaaaga

SEQ ID NO: 3552496 - RNA, 16 nt, Human
aaauggaaaugggcag

SEQ ID NO: 3552497 - RNA, 19 nt, Human
aaauggaauucauucuggu

SEQ ID NO: 3552498 - RNA, 22 nt, Human
aaauggaauugaaaaacucuuu

SEQ ID NO: 3552499 - RNA, 15 nt, Human
aaauggacauggugg

SEQ ID NO: 3552500 - RNA, 23 nt, Human
aaauggacuggagcucaucugca

SEQ ID NO: 3552501 - RNA, 19 nt, Human
aaauggacugguuugagau

SEQ ID NO: 3552502 - RNA, 20 nt, Human
aaauggaggaucucuaaaga

SEQ ID NO: 3552503 - RNA, 15 nt, Human
aaauggauacuacau

SEQ ID NO: 3552504 - RNA, 13 nt, Human
aaauggauacugg

SEQ ID NO: 3552505 - RNA, 17 nt, Human
aaauggaugccuugaau

SEQ ID NO: 3552506 - RNA, 22 nt, Human
aaauggaugccuugaauaauaa

SEQ ID NO: 3552507 - RNA, 22 nt, Human
aaauggccauuugcuuuuucac

SEQ ID NO: 3552508 - RNA, 11 nt, Human
aaauggccuca

SEQ ID NO: 3552509 - RNA, 23 nt, Human
aaauggcugcaucccccccaccu

SEQ ID NO: 3552510 - RNA, 17 nt, Human
aaauggcugguuuuuag

SEQ ID NO: 3552511 - RNA, 19 nt, Human
aaauggcuguaaucauuug

SEQ ID NO: 3552512 - RNA, 21 nt, Human
aaauggcuguaaucauuuguu

SEQ ID NO: 3552513 - RNA, 21 nt, Human
aaauggcuucggacaaaauau

SEQ ID NO: 3552514 - RNA, 23 nt, Human
aaauggcuucggacaaaauaucu

SEQ ID NO: 3552515 - RNA, 22 nt, Human
aaaugggaaaugccuaagaaga

SEQ ID NO: 3552516 - RNA, 22 nt, Human
aaaugggacuucuuuucacauu

SEQ ID NO: 3552517 - RNA, 20 nt, Human
aaaugggcacuuaaagcuuu

SEQ ID NO: 3552518 - RNA, 15 nt, Human
aaaugggcagagcag

SEQ ID NO: 3552519 - RNA, 18 nt, Human
aaaugggcagagcagaga

SEQ ID NO: 3552520 - RNA, 21 nt, Human
aaauggggccagauccagccu

SEQ ID NO: 3552521 - RNA, 19 nt, Human
aaaugggggugcauuugag

SEQ ID NO: 3552522 - RNA, 20 nt, Human
aaauggguuggugcuucuaa

SEQ ID NO: 3552523 - RNA, 22 nt, Human
aaauggguuggugcuucuaacc

SEQ ID NO: 3552524 - RNA, 14 nt, Human
aaauggguuuuacu

SEQ ID NO: 3552525 - RNA, 13 nt, Human
aaaugguaaaauu

SEQ ID NO: 3552526 - RNA, 19 nt, Human
aaaugguaaaauugcaugg

SEQ ID NO: 3552527 - RNA, 14 nt, Human
aaauggugccuuca

SEQ ID NO: 3552528 - RNA, 17 nt, Human
aaaugguggcuucagcu

SEQ ID NO: 3552529 - RNA, 20 nt, Human
aaaugguguacauaauguau

SEQ ID NO: 3552530 - RNA, 17 nt, Human
aaaugguguuuuaucuu

SEQ ID NO: 3552531 - RNA, 22 nt, Human
aaaugguguuuucauguaaaua

SEQ ID NO: 3552532 - RNA, 14 nt, Human
aaaugguguuuuuu

SEQ ID NO: 3552533 - RNA, 17 nt, Human
aaaugguuguauuagau

SEQ ID NO: 3552534 - RNA, 17 nt, Human
aaaugguuuauuuugua

SEQ ID NO: 3552535 - RNA, 22 nt, Human
aaauguaaacucagcaucaaaa

SEQ ID NO: 3552536 - RNA, 19 nt, Human
aaauguaaacuguuucuuu

SEQ ID NO: 3552537 - RNA, 13 nt, Human
aaauguaaagcca

SEQ ID NO: 3552538 - RNA, 17 nt, Human
aaauguaacagucugau

SEQ ID NO: 3552539 - RNA, 17 nt, Human
aaauguaagaaucauug

SEQ ID NO: 3552540 - RNA, 20 nt, Human
aaauguaagaaucauuguaa

SEQ ID NO: 3552541 - RNA, 20 nt, Human
aaauguaagauuauagauuc

SEQ ID NO: 3552542 - RNA, 21 nt, Human
aaauguaagauuauagauucu

SEQ ID NO: 3552543 - RNA, 16 nt, Human
aaauguaagggaaacu

SEQ ID NO: 3552544 - RNA, 22 nt, Human
aaauguaagggaaacugccagc

SEQ ID NO: 3552545 - RNA, 20 nt, Human
aaauguaauguggcuucugg

SEQ ID NO: 3552546 - RNA, 17 nt, Human
aaauguaauuuaaauga

SEQ ID NO: 3552547 - RNA, 19 nt, Human
aaauguaauuuaaaugaaa

SEQ ID NO: 3552548 - RNA, 17 nt, Human
aaauguacagacauauu

SEQ ID NO: 3552549 - RNA, 21 nt, Human
aaauguagcuucagucauuaa

SEQ ID NO: 3552550 - RNA, 16 nt, Human
aaauguaguugaugua

SEQ ID NO: 3552551 - RNA, 14 nt, Human
aaauguauaaacuu

SEQ ID NO: 3552552 - RNA, 13 nt, Human
aaauguauaaaua

SEQ ID NO: 3552553 - RNA, 19 nt, Human
aaauguauauacacauaua

SEQ ID NO: 3552554 - RNA, 22 nt, Human
aaauguauauacacauauaccu

SEQ ID NO: 3552555 - RNA, 17 nt, Human
aaauguauauauguaua

SEQ ID NO: 3552556 - RNA, 14 nt, Human
aaauguauauauuu

SEQ ID NO: 3552557 - RNA, 14 nt, Human
aaauguaugcaugu

SEQ ID NO: 3552558 - RNA, 15 nt, Human
aaauguaugcauguu

SEQ ID NO: 3552559 - RNA, 16 nt, Human
aaauguaugcauguug

SEQ ID NO: 3552560 - RNA, 13 nt, Human
aaauguaugcauu

SEQ ID NO: 3552561 - RNA, 15 nt, Human
aaauguauucaaaua

SEQ ID NO: 3552562 - RNA, 15 nt, Human
aaauguauuuuaugu

SEQ ID NO: 3552563 - RNA, 19 nt, Human
aaauguauuuuauguuaua

SEQ ID NO: 3552564 - RNA, 12 nt, Human
aaauguauuuuu

SEQ ID NO: 3552565 - RNA, 14 nt, Human
aaauguauuuuucu

SEQ ID NO: 3552566 - RNA, 15 nt, Human
aaauguauuuuucua

SEQ ID NO: 3552567 - RNA, 20 nt, Human
aaaugucaaaaguagaacuu

SEQ ID NO: 3552568 - RNA, 20 nt, Human
aaaugucacuuuuugaggca

SEQ ID NO: 3552569 - RNA, 15 nt, Human
aaaugucagauacaa

SEQ ID NO: 3552570 - RNA, 12 nt, Human
aaauguccucca

SEQ ID NO: 3552571 - RNA, 22 nt, Human
aaaugucuaauguauuuuauug

SEQ ID NO: 3552572 - RNA, 16 nt, Human
aaaugucuauuaaggu

SEQ ID NO: 3552573 - RNA, 19 nt, Human
aaaugucuggagaauaauu

SEQ ID NO: 3552574 - RNA, 14 nt, Human
aaaugucuguaaau

SEQ ID NO: 3552575 - RNA, 22 nt, Human
aaaugucuguggccuuguucuc

SEQ ID NO: 3552576 - RNA, 17 nt, Human
aaaugucuuuuagaaga

SEQ ID NO: 3552577 - RNA, 18 nt, Human
aaaugucuuuuagaagau

SEQ ID NO: 3552578 - RNA, 22 nt, Human
aaaugucuuuuuuuuaaugugc

SEQ ID NO: 3552579 - RNA, 19 nt, Human
aaaugugaaugggaaaaga

SEQ ID NO: 3552580 - RNA, 16 nt, Human
aaaugugaauuacuaa

SEQ ID NO: 3552581 - RNA, 23 nt, Human
aaaugugaauuacuaacuucuaa

SEQ ID NO: 3552582 - RNA, 16 nt, Human
aaaugugaguguuuuu

SEQ ID NO: 3552583 - RNA, 18 nt, Human
aaaugugauguucuaagg

SEQ ID NO: 3552584 - RNA, 15 nt, Human
aaauguggcuccugg

SEQ ID NO: 3552585 - RNA, 12 nt, Human
aaauguguacau

SEQ ID NO: 3552586 - RNA, 13 nt, Human
aaauguguauuuu

SEQ ID NO: 3552587 - RNA, 19 nt, Human
aaaugugugugaugugaca

SEQ ID NO: 3552588 - RNA, 20 nt, Human
aaaugugugugaugugacau

SEQ ID NO: 3552589 - RNA, 23 nt, Human
aaaugugugugaugugacauuug

SEQ ID NO: 3552590 - RNA, 14 nt, Human
aaauguuaaaaguu

SEQ ID NO: 3552591 - RNA, 19 nt, Human
aaauguuaaaaguuuuaua

SEQ ID NO: 3552592 - RNA, 23 nt, Human
aaauguuaaaaguuuuauaugcu

SEQ ID NO: 3552593 - RNA, 16 nt, Human
aaauguuaaagaugua

SEQ ID NO: 3552594 - RNA, 21 nt, Human
aaauguuaaagauguagcaaa

SEQ ID NO: 3552595 - RNA, 21 nt, Human
aaauguuacauaguguaggcu

SEQ ID NO: 3552596 - RNA, 14 nt, Human
aaauguuaccucug

SEQ ID NO: 3552597 - RNA, 17 nt, Human
aaauguuaguuucuugg

SEQ ID NO: 3552598 - RNA, 19 nt, Human
aaauguuaguuucuuggua

SEQ ID NO: 3552599 - RNA, 20 nt, Human
aaauguuaucuuauacugua

SEQ ID NO: 3552600 - RNA, 21 nt, Human
aaauguuaucuuauacuguac

SEQ ID NO: 3552601 - RNA, 23 nt, Human
aaauguuaucuuauacuguacaa

SEQ ID NO: 3552602 - RNA, 17 nt, Human
aaauguuaucuucucaa

SEQ ID NO: 3552603 - RNA, 18 nt, Human
aaauguuaucuucucaag

SEQ ID NO: 3552604 - RNA, 13 nt, Human
aaauguuauguau

SEQ ID NO: 3552605 - RNA, 14 nt, Human
aaauguuauguaua

SEQ ID NO: 3552606 - RNA, 15 nt, Human
aaauguuauuuaaca

SEQ ID NO: 3552607 - RNA, 15 nt, Human
aaauguuauuucugc

SEQ ID NO: 3552608 - RNA, 15 nt, Human
aaauguucagaaggu

SEQ ID NO: 3552609 - RNA, 15 nt, Human
aacagauuguuugca

SEQ ID NO: 3552610 - RNA, 14 nt, Human
aacagauuuggaaa

SEQ ID NO: 3552611 - RNA, 14 nt, Human
aacagauuugugaa

SEQ ID NO: 3552612 - RNA, 16 nt, Human
aacagauuugugaacu

SEQ ID NO: 3552613 - RNA, 21 nt, Human
aacagauuugugaacucagcc

SEQ ID NO: 3552614 - RNA, 22 nt, Human
aacagauuugugaacucagcca

SEQ ID NO: 3552615 - RNA, 23 nt, Human
aacagauuugugaacucagccaa

SEQ ID NO: 3552616 - RNA, 13 nt, Human
aacagauuuuuac

SEQ ID NO: 3552617 - RNA, 17 nt, Human
aacagauuuuuacaaau

SEQ ID NO: 3552618 - RNA, 16 nt, Human
aacagcaaaccaagag

SEQ ID NO: 3552619 - RNA, 18 nt, Human
aacagcaacacaaagcuu

SEQ ID NO: 3552620 - RNA, 13 nt, Human
aacagcaggccca

SEQ ID NO: 3552621 - RNA, 15 nt, Human
aacagcaguguuccc

SEQ ID NO: 3552622 - RNA, 15 nt, Human
aacagcaucuccaag

SEQ ID NO: 3552623 - RNA, 14 nt, Human
aacagcauugcuuu

SEQ ID NO: 3552624 - RNA, 15 nt, Human
aacagcauugcuuuc

SEQ ID NO: 3552625 - RNA, 15 nt, Human
aacagccaacagcua

SEQ ID NO: 3552626 - RNA, 19 nt, Human
aacagccaacuagccccug

SEQ ID NO: 3552627 - RNA, 18 nt, Human
aacagccaagauuuuccu

SEQ ID NO: 3552628 - RNA, 19 nt, Human
aacagcccuauuucuugau

SEQ ID NO: 3552629 - RNA, 19 nt, Human
aacagcccuccucugcacu

SEQ ID NO: 3552630 - RNA, 13 nt, Human
aacagccgagugg

SEQ ID NO: 3552631 - RNA, 23 nt, Human
aacagccgaguggauagaugccc

SEQ ID NO: 3552632 - RNA, 15 nt, Human
aacagccgcuccaga

SEQ ID NO: 3552633 - RNA, 13 nt, Human
aacagccucacag

SEQ ID NO: 3552634 - RNA, 12 nt, Human
aacagccugugu

SEQ ID NO: 3552635 - RNA, 15 nt, Human
aacagccugugucuu

SEQ ID NO: 3552636 - RNA, 20 nt, Human
aacagcgaaguagcuugcuc

SEQ ID NO: 3552637 - RNA, 14 nt, Human
aacagcuacaacag

SEQ ID NO: 3552638 - RNA, 15 nt, Human
aacagcuacaacagc

SEQ ID NO: 3552639 - RNA, 20 nt, Human
aacagcuacaacagccucac

SEQ ID NO: 3552640 - RNA, 15 nt, Human
aacagcuaccaugac

SEQ ID NO: 3552641 - RNA, 10 nt, Human
aacagcuccu

SEQ ID NO: 3552642 - RNA, 13 nt, Human
aacagcuccuugg

SEQ ID NO: 3552643 - RNA, 15 nt, Human
aacagcuccuuggga

SEQ ID NO: 3552644 - RNA, 13 nt, Human
aacagcucgacuu

SEQ ID NO: 3552645 - RNA, 19 nt, Human
aacagcucgauccaaauug

SEQ ID NO: 3552646 - RNA, 21 nt, Human
aacagcucugcaggcuuaaua

SEQ ID NO: 3552647 - RNA, 19 nt, Human
aacagcugccuuagcuuca

SEQ ID NO: 3552648 - RNA, 22 nt, Human
aacagcugccuuagcuucagga

SEQ ID NO: 3552649 - RNA, 23 nt, Human
aacagcugccuuagcuucaggaa

SEQ ID NO: 3552650 - RNA, 19 nt, Human
aacagcuggugcccugcuu

SEQ ID NO: 3552651 - RNA, 12 nt, Human
aacagcuggugu

SEQ ID NO: 3552652 - RNA, 13 nt, Human
aacagcuggugua

SEQ ID NO: 3552653 - RNA, 15 nt, Human
aacagcuguugacuc

SEQ ID NO: 3552654 - RNA, 15 nt, Human
aacagcuucagguua

SEQ ID NO: 3552655 - RNA, 21 nt, Human
aacagcuucaugccuuuguaa

SEQ ID NO: 3552656 - RNA, 17 nt, Human
aacaggaaaaaaacuuu

SEQ ID NO: 3552657 - RNA, 14 nt, Human
aacaggaaaagaaa

SEQ ID NO: 3552658 - RNA, 22 nt, Human
aacaggaaaggcucgaaauaca

SEQ ID NO: 3552659 - RNA, 14 nt, Human
aacaggaagaucuu

SEQ ID NO: 3552660 - RNA, 20 nt, Human
aacaggaucaguuaacuauu

SEQ ID NO: 3552661 - RNA, 19 nt, Human
aacaggauuagacagucaa

SEQ ID NO: 3552662 - RNA, 22 nt, Human
aacaggcaaacauuuucucuua

SEQ ID NO: 3552663 - RNA, 17 nt, Human
aacaggcacugcccugg

SEQ ID NO: 3552664 - RNA, 23 nt, Human
aacaggccauugugaaccaaugc

SEQ ID NO: 3552665 - RNA, 12 nt, Human
aacaggcccagc

SEQ ID NO: 3552666 - RNA, 16 nt, Human
aacaggcccuccuccc

SEQ ID NO: 3552667 - RNA, 14 nt, Human
aacaggccucaggg

SEQ ID NO: 3552668 - RNA, 20 nt, Human
aacaggccucagggcuccuu

SEQ ID NO: 3552669 - RNA, 15 nt, Human
aacaggccucuccau

SEQ ID NO: 3552670 - RNA, 21 nt, Human
aacaggcucaauauuccugaa

SEQ ID NO: 3552671 - RNA, 14 nt, Human
aacaggcucagagg

SEQ ID NO: 3552672 - RNA, 13 nt, Human
aacaggcugggcu

SEQ ID NO: 3552673 - RNA, 15 nt, Human
aacagggaaggcagg

SEQ ID NO: 3552674 - RNA, 22 nt, Human
aacagggaaggcaggcagggcu

SEQ ID NO: 3552675 - RNA, 11 nt, Human
aacagggaggg

SEQ ID NO: 3552676 - RNA, 14 nt, Human
aacagggccucugc

SEQ ID NO: 3552677 - RNA, 15 nt, Human
aacaggguaaauuau

SEQ ID NO: 3552678 - RNA, 16 nt, Human
aacaagucccuguaau

SEQ ID NO: 3552679 - RNA, 19 nt, Human
aacaauaaauguuggcuug

SEQ ID NO: 3552680 - RNA, 19 nt, Human
aacaauaacuacuguguuc

SEQ ID NO: 3552681 - RNA, 20 nt, Human
aacaauaacuacuguguucc

SEQ ID NO: 3552682 - RNA, 16 nt, Human
aacaauacaaauggau

SEQ ID NO: 3552683 - RNA, 21 nt, Human
aacaauaccugaaugcucugu

SEQ ID NO: 3552684 - RNA, 18 nt, Human
aacaauaguaauucucag

SEQ ID NO: 3552685 - RNA, 21 nt, Human
aacaauauuuuaugguuaugu

SEQ ID NO: 3552686 - RNA, 17 nt, Human
aacaauccuagugcuuu

SEQ ID NO: 3552687 - RNA, 14 nt, Human
aacaaugaagauaa

SEQ ID NO: 3552688 - RNA, 24 nt, Human
aacaaugaauaaaaacucaaggag

SEQ ID NO: 3552689 - RNA, 17 nt, Human
aacaaugacaaagcaga

SEQ ID NO: 3552690 - RNA, 18 nt, Human
aacaaugacaaagcagau

SEQ ID NO: 3552691 - RNA, 19 nt, Human
aacaaugacacuagaaaac

SEQ ID NO: 3552692 - RNA, 15 nt, Human
aacaaugaugcccug

SEQ ID NO: 3552693 - RNA, 19 nt, Human
aacaaugcagcaaggcccu

SEQ ID NO: 3552694 - RNA, 18 nt, Human
aacaaugccuauuguaau

SEQ ID NO: 3552695 - RNA, 16 nt, Human
aacaauguauuuucuu

SEQ ID NO: 3552696 - RNA, 12 nt, Human
aacaauguuaag

SEQ ID NO: 3552697 - RNA, 18 nt, Human
aacaauguuaaggaaacu

SEQ ID NO: 3552698 - RNA, 20 nt, Human
aacaauucaaagaaucaccu

SEQ ID NO: 3552699 - RNA, 12 nt, Human
aacaauucuaaa

SEQ ID NO: 3552700 - RNA, 22 nt, Human
aacaauugucgaaaagagucuu

SEQ ID NO: 3552701 - RNA, 14 nt, Human
aacaauugugaagu

SEQ ID NO: 3552702 - RNA, 18 nt, Human
aacaauuguguagccuuu

SEQ ID NO: 3552703 - RNA, 14 nt, Human
aacaauuuaaaaau

SEQ ID NO: 3552704 - RNA, 20 nt, Human
aacaauuuccuuuauauuua

SEQ ID NO: 3552705 - RNA, 13 nt, Human
aacaauuucuguc

SEQ ID NO: 3552706 - RNA, 20 nt, Human
aacaauuugagauguauuuc

SEQ ID NO: 3552707 - RNA, 20 nt, Human
aacaauuuucagauuugcac

SEQ ID NO: 3552708 - RNA, 23 nt, Human
aacaauuuucagauuugcacaaa

SEQ ID NO: 3552709 - RNA, 12 nt, Human
aacaauuuucuu

SEQ ID NO: 3552710 - RNA, 18 nt, Human
aacaauuuucuugugaca

SEQ ID NO: 3552711 - RNA, 19 nt, Human
aacacaaacgggcucagca

SEQ ID NO: 3552712 - RNA, 13 nt, Human
aacacaaacugua

SEQ ID NO: 3552713 - RNA, 12 nt, Human
aacacaaagcuu

SEQ ID NO: 3552714 - RNA, 13 nt, Human
aacacaaaugcag

SEQ ID NO: 3552715 - RNA, 15 nt, Human
aacacaacuauauug

SEQ ID NO: 3552716 - RNA, 20 nt, Human
aacacaagauugguguuuuu

SEQ ID NO: 3552717 - RNA, 12 nt, Human
aacacaagcaaa

SEQ ID NO: 3552718 - RNA, 14 nt, Human
aacacaagccacag

SEQ ID NO: 3552719 - RNA, 17 nt, Human
aacacaagccacagaag

SEQ ID NO: 3552720 - RNA, 18 nt, Human
aacacaagcuggaagcac

SEQ ID NO: 3552721 - RNA, 15 nt, Human
aacacaaggugggca

SEQ ID NO: 3552722 - RNA, 23 nt, Human
aacacaaguagaugccugaacuu

SEQ ID NO: 3552723 - RNA, 16 nt, Human
aacacaaguccuguga

SEQ ID NO: 3552724 - RNA, 14 nt, Human
aacacacaaaggua

SEQ ID NO: 3552725 - RNA, 12 nt, Human
aacacacagaca

SEQ ID NO: 3552726 - RNA, 19 nt, Human
aacacacgcgcgcacacac

SEQ ID NO: 3552727 - RNA, 19 nt, Human
aacacacuaccgaaugugu

SEQ ID NO: 3552728 - RNA, 23 nt, Human
aacacacuaccgaaugugucuuu

SEQ ID NO: 3552729 - RNA, 19 nt, Human
aacacacugaggcagggaa

SEQ ID NO: 3552730 - RNA, 23 nt, Human
aacacagcaguucugcagaggac

SEQ ID NO: 3552731 - RNA, 16 nt, Human
aacacagcauguguau

SEQ ID NO: 3552732 - RNA, 18 nt, Human
aacacagcauguguauuu

SEQ ID NO: 3552733 - RNA, 16 nt, Human
aacacagccugggccc

SEQ ID NO: 3552734 - RNA, 15 nt, Human
aacacaggcaaaauc

SEQ ID NO: 3552735 - RNA, 22 nt, Human
aacacaggcaaaauccuugcuu

SEQ ID NO: 3552736 - RNA, 22 nt, Human
aacacaggcagcuuucuagaag

SEQ ID NO: 3552737 - RNA, 12 nt, Human
aacacaguauuu

SEQ ID NO: 3552738 - RNA, 20 nt, Human
aacacaguguuuuuguaaag

SEQ ID NO: 3552739 - RNA, 21 nt, Human
aacacaguguuuuuguaaagu

SEQ ID NO: 3552740 - RNA, 18 nt, Human
aacacauaauuaacacuu

SEQ ID NO: 3552741 - RNA, 21 nt, Human
aacacauacaggaagguagaa

SEQ ID NO: 3552742 - RNA, 17 nt, Human
aacacauagauucaccu

SEQ ID NO: 3552743 - RNA, 21 nt, Human
aacacaucuaguaguuguucu

SEQ ID NO: 3552744 - RNA, 17 nt, Human
aacacaucuuuccuguc

SEQ ID NO: 3552745 - RNA, 18 nt, Human
aacacauggggaaaaaaa

SEQ ID NO: 3552746 - RNA, 22 nt, Human
aacacauggggaaaaaaaucau

SEQ ID NO: 3552747 - RNA, 14 nt, Human
aacacauugccuaa

SEQ ID NO: 3552748 - RNA, 19 nt, Human
aacacauuguuauuuucag

SEQ ID NO: 3552749 - RNA, 13 nt, Human
aacacauuucucu

SEQ ID NO: 3552750 - RNA, 22 nt, Human
aacacauuucuuuuuaaaaaaa

SEQ ID NO: 3552751 - RNA, 22 nt, Human
aacacauuuugguucuucucaa

SEQ ID NO: 3552752 - RNA, 17 nt, Human
aacaccaaaaaauaucu

SEQ ID NO: 3552753 - RNA, 18 nt, Human
aacaccaagcacagcagc

SEQ ID NO: 3552754 - RNA, 21 nt, Human
aacagcuacaacagccucacu

SEQ ID NO: 3552755 - RNA, 19 nt, Human
aacagcuaugggagcccca

SEQ ID NO: 3552756 - RNA, 22 nt, Human
aacagcuaugggagccccaggg

SEQ ID NO: 3552757 - RNA, 10 nt, Human
aacagcucag

SEQ ID NO: 3552758 - RNA, 14 nt, Human
aacagcucaggcug

SEQ ID NO: 3552759 - RNA, 18 nt, Human
aacagcucaguucuaguc

SEQ ID NO: 3552760 - RNA, 23 nt, Human
aacagcuccuugggaggaagcag

SEQ ID NO: 3552761 - RNA, 16 nt, Human
aacagcucgauccaaa

SEQ ID NO: 3552762 - RNA, 23 nt, Human
aacagcucucuucaaugacauag

SEQ ID NO: 3552763 - RNA, 19 nt, Human
aacagcugaggucucuuga

SEQ ID NO: 3552764 - RNA, 21 nt, Human
aacagcugcaauucccuggau

SEQ ID NO: 3552765 - RNA, 17 nt, Human
aacagcugcauuagaaa

SEQ ID NO: 3552766 - RNA, 13 nt, Human
aacagcugccuua

SEQ ID NO: 3552767 - RNA, 18 nt, Human
aacagcugccuuagcuuc

SEQ ID NO: 3552768 - RNA, 20 nt, Human
aacagcugguguagcuacag

SEQ ID NO: 3552769 - RNA, 21 nt, Human
aacagcugguguagcuacaga

SEQ ID NO: 3552770 - RNA, 22 nt, Human
aacagcugguguagcuacagag

SEQ ID NO: 3552771 - RNA, 18 nt, Human
aacagcugucacaacuug

SEQ ID NO: 3552772 - RNA, 14 nt, Human
aacagcuucagguu

SEQ ID NO: 3552773 - RNA, 22 nt, Human
aacagcuucaugccuuuguaag

SEQ ID NO: 3552774 - RNA, 16 nt, Human
aacagcuucucaauuu

SEQ ID NO: 3552775 - RNA, 12 nt, Human
aacaggaaaaga

SEQ ID NO: 3552776 - RNA, 20 nt, Human
aacaggaaucaagagcugcc

SEQ ID NO: 3552777 - RNA, 17 nt, Human
aacaggagacaggaagg

SEQ ID NO: 3552778 - RNA, 19 nt, Human
aacaggagcugggauccua

SEQ ID NO: 3552779 - RNA, 22 nt, Human
aacaggaggacaauucaugaac

SEQ ID NO: 3552780 - RNA, 16 nt, Human
aacaggauuagacagu

SEQ ID NO: 3552781 - RNA, 21 nt, Human
aacaggcacuuggcagccuug

SEQ ID NO: 3552782 - RNA, 15 nt, Human
aacaggccucagggc

SEQ ID NO: 3552783 - RNA, 23 nt, Human
aacaggcugggcuucaguggcag

SEQ ID NO: 3552784 - RNA, 18 nt, Human
aacaggcuuagugaugua

SEQ ID NO: 3552785 - RNA, 16 nt, Human
aacagggauugauuuu

SEQ ID NO: 3552786 - RNA, 17 nt, Human
aacagggauugauuuua

SEQ ID NO: 3552787 - RNA, 21 nt, Human
aacagggauugauuuuaaaau

SEQ ID NO: 3552788 - RNA, 17 nt, Human
aacagggcaucuccagg

SEQ ID NO: 3552789 - RNA, 21 nt, Human
aacagggcugccuucuggccu

SEQ ID NO: 3552790 - RNA, 13 nt, Human
aacaggggcuggu

SEQ ID NO: 3552791 - RNA, 16 nt, Human
aacaggguaaauuauu

SEQ ID NO: 3552792 - RNA, 22 nt, Human
aacagggucucuagugcuguga

SEQ ID NO: 3552793 - RNA, 15 nt, Human
aacagguauauacuu

SEQ ID NO: 3552794 - RNA, 17 nt, Human
aacagguauauacuuug

SEQ ID NO: 3552795 - RNA, 13 nt, Human
aacagguauuuug

SEQ ID NO: 3552796 - RNA, 18 nt, Human
aacagguauuuuguuucu

SEQ ID NO: 3552797 - RNA, 12 nt, Human
aacaggucuccu

SEQ ID NO: 3552798 - RNA, 18 nt, Human
aacaggucuccucuuaaa

SEQ ID NO: 3552799 - RNA, 22 nt, Human
aacagguggcaggaccaggacu

SEQ ID NO: 3552800 - RNA, 19 nt, Human
aacagguuauaacaguguu

SEQ ID NO: 3552801 - RNA, 21 nt, Human
aacagguuauuuuaguuucug

SEQ ID NO: 3552802 - RNA, 13 nt, Human
aacagguugggau

SEQ ID NO: 3552803 - RNA, 19 nt, Human
aacagguuuuccugaagaa

SEQ ID NO: 3552804 - RNA, 22 nt, Human
aacaguaacauagcugugauuu

SEQ ID NO: 3552805 - RNA, 17 nt, Human
aacaguauuuauuuugu

SEQ ID NO: 3552806 - RNA, 23 nt, Human
aacaguauuuauuuuguaauuau

SEQ ID NO: 3552807 - RNA, 22 nt, Human
aacaguauuucauugccugugu

SEQ ID NO: 3552808 - RNA, 13 nt, Human
aacagucauguuu

SEQ ID NO: 3552809 - RNA, 15 nt, Human
aacagucauguuuua

SEQ ID NO: 3552810 - RNA, 14 nt, Human
aacagucauuuaaa

SEQ ID NO: 3552811 - RNA, 23 nt, Human
aacaguccccguggccaucccug

SEQ ID NO: 3552812 - RNA, 19 nt, Human
aacagucucaggaaaucaa

SEQ ID NO: 3552813 - RNA, 13 nt, Human
aacagugagccug

SEQ ID NO: 3552814 - RNA, 21 nt, Human
aacagugagccugaauuuugu

SEQ ID NO: 3552815 - RNA, 22 nt, Human
aacagugauuaccagggacuga

SEQ ID NO: 3552816 - RNA, 14 nt, Human
aacagugccugcug

SEQ ID NO: 3552817 - RNA, 15 nt, Human
aacagugccugcuga

SEQ ID NO: 3552818 - RNA, 15 nt, Human
aacagugcuaaaaau

SEQ ID NO: 3552819 - RNA, 20 nt, Human
aacagugcuugccacagagc

SEQ ID NO: 3552820 - RNA, 18 nt, Human
aacagugugaaguuagaa

SEQ ID NO: 3552821 - RNA, 19 nt, Human
aacagugugcaaggcagcc

SEQ ID NO: 3552822 - RNA, 15 nt, Human
aacaguguguaaaca

SEQ ID NO: 3552823 - RNA, 20 nt, Human
aacaguguuaggccuggcac

SEQ ID NO: 3552824 - RNA, 22 nt, Human
aacaguguuaggccuggcacag

SEQ ID NO: 3552825 - RNA, 15 nt, Human
aacaguguuucccau

SEQ ID NO: 3552826 - RNA, 21 nt, Human
aacaguguuucccauaauuuu

SEQ ID NO: 3552827 - RNA, 20 nt, Human
aacaguguuuuggaauaaaa

SEQ ID NO: 3552828 - RNA, 19 nt, Human
aacaguuaauaccauuuuu

SEQ ID NO: 3552829 - RNA, 16 nt, Human
aacaguuagcuggagc

SEQ ID NO: 3552830 - RNA, 16 nt, Human
aacaguucauguuugc

SEQ ID NO: 3552831 - RNA, 14 nt, Human
aacaguugcacagc

SEQ ID NO: 3552832 - RNA, 18 nt, Human
aacaguugcauguaguaa

SEQ ID NO: 3552833 - RNA, 13 nt, Human
aacaguuguauuu

SEQ ID NO: 3552834 - RNA, 20 nt, Human
aacaguuguauuuaacagaa

SEQ ID NO: 3552835 - RNA, 19 nt, Human
aacaguuguguuugaagca

SEQ ID NO: 3552836 - RNA, 13 nt, Human
aacaguuuuccau

SEQ ID NO: 3552837 - RNA, 15 nt, Human
aacaguuuuccauga

SEQ ID NO: 3552838 - RNA, 22 nt, Human
aacauaaaaaggacaucagcaa

SEQ ID NO: 3552839 - RNA, 14 nt, Human
aacauaaaauacaa

SEQ ID NO: 3552840 - RNA, 19 nt, Human
aacauaaagcaaauagaca

SEQ ID NO: 3552841 - RNA, 17 nt, Human
aacauaaauaaaaugac

SEQ ID NO: 3552842 - RNA, 17 nt, Human
aaaucacgcuuuuugaa

SEQ ID NO: 3552843 - RNA, 20 nt, Human
aaaucacgcuuuuugaaaaa

SEQ ID NO: 3552844 - RNA, 21 nt, Human
aaaucagacuaugaaguuuuu

SEQ ID NO: 3552845 - RNA, 22 nt, Human
aaaucagaguuuucauguauuu

SEQ ID NO: 3552846 - RNA, 19 nt, Human
aaaucagccguguaaccau

SEQ ID NO: 3552847 - RNA, 18 nt, Human
aaaucagccugcuccagc

SEQ ID NO: 3552848 - RNA, 18 nt, Human
aaaucagcuauuuuguga

SEQ ID NO: 3552849 - RNA, 15 nt, Human
aaaucagguauuaau

SEQ ID NO: 3552850 - RNA, 16 nt, Human
aaaucagguuuucuuu

SEQ ID NO: 3552851 - RNA, 18 nt, Human
aaaucagguuuucuuuua

SEQ ID NO: 3552852 - RNA, 13 nt, Human
aaaucaguaagag

SEQ ID NO: 3552853 - RNA, 15 nt, Human
aaaucaguaagaggu

SEQ ID NO: 3552854 - RNA, 16 nt, Human
aaaucaguaagaggug

SEQ ID NO: 3552855 - RNA, 16 nt, Human
aaaucaguuacuaaga

SEQ ID NO: 3552856 - RNA, 17 nt, Human
aaaucaguuacuaagaa

SEQ ID NO: 3552857 - RNA, 14 nt, Human
aaaucauaaacugu

SEQ ID NO: 3552858 - RNA, 16 nt, Human
aaaucauaaacugugu

SEQ ID NO: 3552859 - RNA, 13 nt, Human
aaaucauaaaguc

SEQ ID NO: 3552860 - RNA, 16 nt, Human
aaaucauaaagucagu

SEQ ID NO: 3552861 - RNA, 22 nt, Human
aaaucauaagauauuuuucaug

SEQ ID NO: 3552862 - RNA, 18 nt, Human
aaaucaucaagaagggcu

SEQ ID NO: 3552863 - RNA, 20 nt, Human
aaaucaucagaaaggaaaaa

SEQ ID NO: 3552864 - RNA, 12 nt, Human
aaaucaucuauu

SEQ ID NO: 3552865 - RNA, 17 nt, Human
aaaucaucuauuuugau

SEQ ID NO: 3552866 - RNA, 19 nt, Human
aaaucaucuauuuugaugc

SEQ ID NO: 3552867 - RNA, 17 nt, Human
aaaucauggaaugguua

SEQ ID NO: 3552868 - RNA, 10 nt, Human
aaaucauguu

SEQ ID NO: 3552869 - RNA, 16 nt, Human
aaaucauguuaugaua

SEQ ID NO: 3552870 - RNA, 12 nt, Human
aaaucauuuguu

SEQ ID NO: 3552871 - RNA, 18 nt, Human
aaaucauuuuaggaaagg

SEQ ID NO: 3552872 - RNA, 21 nt, Human
aaaucauuuuauaugucaaag

SEQ ID NO: 3552873 - RNA, 14 nt, Human
aaauccaaauauug

SEQ ID NO: 3552874 - RNA, 16 nt, Human
aaauccaaauauuguu

SEQ ID NO: 3552875 - RNA, 20 nt, Human
aaauccacccauauguuaaa

SEQ ID NO: 3552876 - RNA, 15 nt, Human
aaauccacuuuaucu

SEQ ID NO: 3552877 - RNA, 11 nt, Human
aaauccagaaa

SEQ ID NO: 3552878 - RNA, 14 nt, Human
aaauccagaaagaa

SEQ ID NO: 3552879 - RNA, 15 nt, Human
aaauccauacauuug

SEQ ID NO: 3552880 - RNA, 21 nt, Human
aaauccauuuggaaaucuuua

SEQ ID NO: 3552881 - RNA, 22 nt, Human
aaauccauuuggaaaucuuuaa

SEQ ID NO: 3552882 - RNA, 22 nt, Human
aaaucccauuauucaaaguugc

SEQ ID NO: 3552883 - RNA, 15 nt, Human
aaaucccauuuaaaa

SEQ ID NO: 3552884 - RNA, 17 nt, Human
aaaucccuguuuaauau

SEQ ID NO: 3552885 - RNA, 20 nt, Human
aaauccgaaccuccucugug

SEQ ID NO: 3552886 - RNA, 21 nt, Human
aaauccuaugugauuuuaacu

SEQ ID NO: 3552887 - RNA, 23 nt, Human
aaauccuaugugauuuuaacucu

SEQ ID NO: 3552888 - RNA, 11 nt, Human
aaauccucugg

SEQ ID NO: 3552889 - RNA, 13 nt, Human
aaauccucuuccu

SEQ ID NO: 3552890 - RNA, 15 nt, Human
aaauccucuuccucu

SEQ ID NO: 3552891 - RNA, 15 nt, Human
aaauccugaagagca

SEQ ID NO: 3552892 - RNA, 17 nt, Human
aaauccugaagagcauu

SEQ ID NO: 3552893 - RNA, 16 nt, Human
aaauccugccauuuaa

SEQ ID NO: 3552894 - RNA, 18 nt, Human
aaauccugccauuuaaaa

SEQ ID NO: 3552895 - RNA, 13 nt, Human
aaauccuucuaau

SEQ ID NO: 3552896 - RNA, 15 nt, Human
aaauccuucuaaucu

SEQ ID NO: 3552897 - RNA, 18 nt, Human
aaauccuucuaaucugcu

SEQ ID NO: 3552898 - RNA, 17 nt, Human
aaauuauguuuauauaa

SEQ ID NO: 3552899 - RNA, 22 nt, Human
aaauuauguuuuacuguucauu

SEQ ID NO: 3552900 - RNA, 18 nt, Human
aaauuauuaauuuaugca

SEQ ID NO: 3552901 - RNA, 16 nt, Human
aaauuauuauaagcau

SEQ ID NO: 3552902 - RNA, 22 nt, Human
aaauuauuauaagcauugaaau

SEQ ID NO: 3552903 - RNA, 23 nt, Human
aaauuauucaguuaagaaaaaaa

SEQ ID NO: 3552904 - RNA, 12 nt, Human
aaauuauuuaaa

SEQ ID NO: 3552905 - RNA, 13 nt, Human
aaauuauuucaga

SEQ ID NO: 3552906 - RNA, 12 nt, Human
aaauuauuucuu

SEQ ID NO: 3552907 - RNA, 14 nt, Human
aaauuauuucuuaa

SEQ ID NO: 3552908 - RNA, 15 nt, Human
aaauuauuucuuaau

SEQ ID NO: 3552909 - RNA, 14 nt, Human
aaauuauuugcagg

SEQ ID NO: 3552910 - RNA, 21 nt, Human
aaauuauuuguguaauagaaa

SEQ ID NO: 3552911 - RNA, 22 nt, Human
aaauuauuuguguaauagaaaa

SEQ ID NO: 3552912 - RNA, 15 nt, Human
aaauuauuuuaaaca

SEQ ID NO: 3552913 - RNA, 21 nt, Human
aaauuauuuuguucauacaua

SEQ ID NO: 3552914 - RNA, 11 nt, Human
aaauucaaaua

SEQ ID NO: 3552915 - RNA, 14 nt, Human
aaauucaacaaaca

SEQ ID NO: 3552916 - RNA, 15 nt, Human
aaauucaauuguaaa

SEQ ID NO: 3552917 - RNA, 17 nt, Human
aaauucaauuguaaauu

SEQ ID NO: 3552918 - RNA, 16 nt, Human
aaauucacaaaguuaa

SEQ ID NO: 3552919 - RNA, 19 nt, Human
aaauucacaaguuguguuu

SEQ ID NO: 3552920 - RNA, 19 nt, Human
aaauucacaugaugcacuu

SEQ ID NO: 3552921 - RNA, 15 nt, Human
aaauucacuuucauu

SEQ ID NO: 3552922 - RNA, 13 nt, Human
aaauucaguuuca

SEQ ID NO: 3552923 - RNA, 16 nt, Human
aaauucauauucuguc

SEQ ID NO: 3552924 - RNA, 21 nt, Human
aaauucaucaaauggaagaca

SEQ ID NO: 3552925 - RNA, 17 nt, Human
aaauucauuucacauua

SEQ ID NO: 3552926 - RNA, 12 nt, Human
aaauucauuuua

SEQ ID NO: 3552927 - RNA, 19 nt, Human
aaauucauuuuuuaaauuc

SEQ ID NO: 3552928 - RNA, 20 nt, Human
aaauucccagauuugaagac

SEQ ID NO: 3552929 - RNA, 16 nt, Human
aaauuccccacccuga

SEQ ID NO: 3552930 - RNA, 19 nt, Human
aaauucccuucaucuggaa

SEQ ID NO: 3552931 - RNA, 21 nt, Human
aaauucccuuuucaccuuuuc

SEQ ID NO: 3552932 - RNA, 15 nt, Human
aaauuccuauuguga

SEQ ID NO: 3552933 - RNA, 18 nt, Human
aaauuccuauugugauuu

SEQ ID NO: 3552934 - RNA, 18 nt, Human
aaauuccucuuugcuuug

SEQ ID NO: 3552935 - RNA, 20 nt, Human
aaauuccucuuugcuuugcu

SEQ ID NO: 3552936 - RNA, 11 nt, Human
aaauuccugua

SEQ ID NO: 3552937 - RNA, 22 nt, Human
aaauucuauaggaacauaugaa

SEQ ID NO: 3552938 - RNA, 21 nt, Human
aaauucuauucugaucuuauu

SEQ ID NO: 3552939 - RNA, 20 nt, Human
aaauucucagucaguaauug

SEQ ID NO: 3552940 - RNA, 12 nt, Human
aaauucuccacu

SEQ ID NO: 3552941 - RNA, 14 nt, Human
aaauucugaauuug

SEQ ID NO: 3552942 - RNA, 17 nt, Human
aaauucugaauuugcaa

SEQ ID NO: 3552943 - RNA, 15 nt, Human
aaauucugcucagau

SEQ ID NO: 3552944 - RNA, 9 nt, Human
aaauucugu

SEQ ID NO: 3552945 - RNA, 18 nt, Human
aaauucugucucuggauu

SEQ ID NO: 3552946 - RNA, 16 nt, Human
aaauucugugccuugu

SEQ ID NO: 3552947 - RNA, 19 nt, Human
aaauucuguuaaaaucuau

SEQ ID NO: 3552948 - RNA, 20 nt, Human
aaauucuguuaaaaucuauu

SEQ ID NO: 3552949 - RNA, 14 nt, Human
aaauucuguuucuu

SEQ ID NO: 3552950 - RNA, 15 nt, Human
aaauucuguuucuug

SEQ ID NO: 3552951 - RNA, 12 nt, Human
aaauucuguuuu

SEQ ID NO: 3552952 - RNA, 19 nt, Human
aaauucuguuuuuaaaaau

SEQ ID NO: 3552953 - RNA, 15 nt, Human
aaauucuugcaaagu

SEQ ID NO: 3552954 - RNA, 15 nt, Human
aaauucuuuauuucu

SEQ ID NO: 3552955 - RNA, 20 nt, Human
aaauucuuucagcuaucagu

SEQ ID NO: 3552956 - RNA, 13 nt, Human
aaauucuuucauu

SEQ ID NO: 3552957 - RNA, 21 nt, Human
aaauucuuuuuuaaauuuucu

SEQ ID NO: 3552958 - RNA, 23 nt, Human
aaauucuuuuuuaaauuuucuuc

SEQ ID NO: 3552959 - RNA, 13 nt, Human
aaauugaaauaua

SEQ ID NO: 3552960 - RNA, 13 nt, Human
aaauugaaaugua

SEQ ID NO: 3552961 - RNA, 12 nt, Human
aaauugaaauug

SEQ ID NO: 3552962 - RNA, 22 nt, Human
aaauugaaccuuugugcccuau

SEQ ID NO: 3552963 - RNA, 13 nt, Human
aaauugaauaaug

SEQ ID NO: 3552964 - RNA, 14 nt, Human
aaauugaauacuuu

SEQ ID NO: 3552965 - RNA, 17 nt, Human
aaauugaauacuuugaa

SEQ ID NO: 3552966 - RNA, 23 nt, Human
aaauugaaucaguauaaacaaag

SEQ ID NO: 3552967 - RNA, 15 nt, Human
aaauugaaugcaaac

SEQ ID NO: 3552968 - RNA, 20 nt, Human
aaauugacacaaguggaccu

SEQ ID NO: 3552969 - RNA, 19 nt, Human
aaauugacacuuaaaaaug

SEQ ID NO: 3552970 - RNA, 22 nt, Human
aaauugacagaucaagcuguga

SEQ ID NO: 3552971 - RNA, 14 nt, Human
aaauugacuguacu

SEQ ID NO: 3552972 - RNA, 13 nt, Human
aaauugagagaau

SEQ ID NO: 3552973 - RNA, 17 nt, Human
aaauugagagaauggaa

SEQ ID NO: 3552974 - RNA, 16 nt, Human
aaauugagcugcuuuu

SEQ ID NO: 3552975 - RNA, 14 nt, Human
aaauugauuuugaa

SEQ ID NO: 3552976 - RNA, 19 nt, Human
aaauugcacagaaguccug

SEQ ID NO: 3552977 - RNA, 20 nt, Human
aaauugcacagaaguccugu

SEQ ID NO: 3552978 - RNA, 17 nt, Human
aaauugcauacuuugua

SEQ ID NO: 3552979 - RNA, 23 nt, Human
aaauugcauacuuuguauuuuga

SEQ ID NO: 3552980 - RNA, 17 nt, Human
aaauugcaugcugcuuu

SEQ ID NO: 3552981 - RNA, 18 nt, Human
aaauugcaugcugcuuua

SEQ ID NO: 3552982 - RNA, 21 nt, Human
aaauugcaugcugcuuuaauu

SEQ ID NO: 3552983 - RNA, 22 nt, Human
aaauugcauggguuuuguaggu

SEQ ID NO: 3552984 - RNA, 16 nt, Human
aaauugccauauugca

SEQ ID NO: 3552985 - RNA, 19 nt, Human
aaauugccuuucuguguuu

SEQ ID NO: 3552986 - RNA, 20 nt, Human
aaauugccuuucuguguuua

SEQ ID NO: 3552987 - RNA, 21 nt, Human
aaauugcuauguuacuauuuu

SEQ ID NO: 3552988 - RNA, 18 nt, Human
aaauugcucacaguuauu

SEQ ID NO: 3552989 - RNA, 14 nt, Human
aaauugcuccuuga

SEQ ID NO: 3552990 - RNA, 14 nt, Human
aaauugcugugcuu

SEQ ID NO: 3552991 - RNA, 18 nt, Human
aaauugcuuuguauugua

SEQ ID NO: 3552992 - RNA, 16 nt, Human
aaauuggaaagcaggu

SEQ ID NO: 3552993 - RNA, 19 nt, Human
aaauuggaacagaauguuu

SEQ ID NO: 3552994 - RNA, 23 nt, Human
aaauuggaguuggaguagaaugu

SEQ ID NO: 3552995 - RNA, 23 nt, Human
aaauuggcauggaaauuuaaagc

SEQ ID NO: 3552996 - RNA, 21 nt, Human
aaauuggccugguauggcugc

SEQ ID NO: 3552997 - RNA, 19 nt, Human
aaauuggcuaguugaaucu

SEQ ID NO: 3552998 - RNA, 20 nt, Human
aaauugggaaaggaguagaa

SEQ ID NO: 3552999 - RNA, 16 nt, Human
aaauuggggauucuua

SEQ ID NO: 3553000 - RNA, 20 nt, Human
aaauuggggauucuuaaagu

SEQ ID NO: 3553001 - RNA, 19 nt, Human
aaauuggguucaugaugca

SEQ ID NO: 3553002 - RNA, 16 nt, Human
aaauugguaccuugca

SEQ ID NO: 3553003 - RNA, 22 nt, Human
aaauugguuggagaauuuaggu

SEQ ID NO: 3553004 - RNA, 14 nt, Human
aaauuguaauuaua

SEQ ID NO: 3553005 - RNA, 17 nt, Human
aaauuguauuacaaauc

SEQ ID NO: 3553006 - RNA, 19 nt, Human
aaauugucaccugcuucuc

SEQ ID NO: 3553007 - RNA, 16 nt, Human
aaauugucuuaaugga

SEQ ID NO: 3553008 - RNA, 14 nt, Human
aaauugucuuuaaa

SEQ ID NO: 3553009 - RNA, 20 nt, Human
aaauugucuuuaaaaacugu

SEQ ID NO: 3553010 - RNA, 20 nt, Human
aaauugugaucagaccauaa

SEQ ID NO: 3553011 - RNA, 15 nt, Human
aaauugugauguguc

SEQ ID NO: 3553012 - RNA, 23 nt, Human
aaauugugcaguacuuugugcau

SEQ ID NO: 3553013 - RNA, 17 nt, Human
aaauugugcuucucccc

SEQ ID NO: 3553014 - RNA, 21 nt, Human
aaauugugcuucuccccagaa

SEQ ID NO: 3553015 - RNA, 13 nt, Human
aaauugugugugc

SEQ ID NO: 3553016 - RNA, 23 nt, Human
aaauuguuguccgguuuacuuua

SEQ ID NO: 3553017 - RNA, 22 nt, Human
aaauuguuuaaguguuguaaau

SEQ ID NO: 3553018 - RNA, 19 nt, Human
aaauuguuuaguggaaaau

SEQ ID NO: 3553019 - RNA, 21 nt, Human
aaauuguuucaaaauaaaaac

SEQ ID NO: 3553020 - RNA, 16 nt, Human
aaauuuaaaaaauaaa

SEQ ID NO: 3553021 - RNA, 18 nt, Human
aaauuuaaaaagcccaac

SEQ ID NO: 3553022 - RNA, 18 nt, Human
aaauuuaaaaguaaaaug

SEQ ID NO: 3553023 - RNA, 19 nt, Human
aaauuuaaacuauaagcaa

SEQ ID NO: 3553024 - RNA, 17 nt, Human
aaauuuaagcauuguuu

SEQ ID NO: 3553025 - RNA, 13 nt, Human
aaauuuaaugcug

SEQ ID NO: 3553026 - RNA, 15 nt, Human
aaauuuaaugcugcc

SEQ ID NO: 3553027 - RNA, 18 nt, Human
aaauuuaauucauguuuc

SEQ ID NO: 3553028 - RNA, 12 nt, Human
aaauuuaauucu

SEQ ID NO: 3553029 - RNA, 17 nt, Human
aaauuuacuuuaaacua

SEQ ID NO: 3553030 - RNA, 20 nt, Human
aaauuuacuuuaaacuacau

SEQ ID NO: 3553031 - RNA, 13 nt, Human
aaauuuagaaacu

SEQ ID NO: 3553032 - RNA, 17 nt, Human
aaauuuagaaacuaauu

SEQ ID NO: 3553033 - RNA, 12 nt, Human
aaauuuagaaca

SEQ ID NO: 3553034 - RNA, 16 nt, Human
aaauuuagccgggcgc

SEQ ID NO: 3553035 - RNA, 21 nt, Human
aaauuuauaauuuuaagauuc

SEQ ID NO: 3553036 - RNA, 20 nt, Human
aaauuuauacaccaauugau

SEQ ID NO: 3553037 - RNA, 14 nt, Human
aaauuuauaugaaa

SEQ ID NO: 3553038 - RNA, 16 nt, Human
aaauuuauauuguaaa

SEQ ID NO: 3553039 - RNA, 12 nt, Human
aaauuuaucaaa

SEQ ID NO: 3553040 - RNA, 13 nt, Human
aaauuuaucaaag

SEQ ID NO: 3553041 - RNA, 20 nt, Human
aaauuuauuuaaugugaguu

SEQ ID NO: 3553042 - RNA, 19 nt, Human
aaauuuauuuacugcuagu

SEQ ID NO: 3553043 - RNA, 15 nt, Human
aacugaagauguuga

SEQ ID NO: 3553044 - RNA, 20 nt, Human
aacugaagcagccucucccc

SEQ ID NO: 3553045 - RNA, 19 nt, Human
aacugaagggggcggccua

SEQ ID NO: 3553046 - RNA, 15 nt, Human
aacugaagucugaaa

SEQ ID NO: 3553047 - RNA, 16 nt, Human
aacugaagucugaaau

SEQ ID NO: 3553048 - RNA, 18 nt, Human
aacugaaguucuauuuau

SEQ ID NO: 3553049 - RNA, 13 nt, Human
aacugaaguucug

SEQ ID NO: 3553050 - RNA, 12 nt, Human
aacugaauaaau

SEQ ID NO: 3553051 - RNA, 24 nt, Human
aacugaauaccacucuguaauugc

SEQ ID NO: 3553052 - RNA, 22 nt, Human
aacugaauggaagguuuguaua

SEQ ID NO: 3553053 - RNA, 13 nt, Human
aacugaauuugga

SEQ ID NO: 3553054 - RNA, 14 nt, Human
aacugaauuuggag

SEQ ID NO: 3553055 - RNA, 16 nt, Human
aacugaauuuguacuu

SEQ ID NO: 3553056 - RNA, 14 nt, Human
aacugaauuuuguc

SEQ ID NO: 3553057 - RNA, 20 nt, Human
aacugacaagcuccauuuaa

SEQ ID NO: 3553058 - RNA, 23 nt, Human
aacugauuuuuuuuuccuucagu

SEQ ID NO: 3553059 - RNA, 18 nt, Human
aacugcaaagugaaguug

SEQ ID NO: 3553060 - RNA, 18 nt, Human
aacugcaauaacuucuga

SEQ ID NO: 3553061 - RNA, 18 nt, Human
aacugcaauagagacugu

SEQ ID NO: 3553062 - RNA, 17 nt, Human
aacugcacaugaagaaa

SEQ ID NO: 3553063 - RNA, 19 nt, Human
aacugcacaugauuucaca

SEQ ID NO: 3553064 - RNA, 20 nt, Human
aacugcacaugauuucacaa

SEQ ID NO: 3553065 - RNA, 19 nt, Human
aacugcacugucaagauga

SEQ ID NO: 3553066 - RNA, 16 nt, Human
aacugcagucacugca

SEQ ID NO: 3553067 - RNA, 17 nt, Human
aacugcaugcccagaga

SEQ ID NO: 3553068 - RNA, 22 nt, Human
aacugcaugcccagagacccag

SEQ ID NO: 3553069 - RNA, 14 nt, Human
aacugcaugcugcu

SEQ ID NO: 3553070 - RNA, 14 nt, Human
aacugcauguauaa

SEQ ID NO: 3553071 - RNA, 21 nt, Human
aacugcauuaccgcguuguaa

SEQ ID NO: 3553072 - RNA, 14 nt, Human
aacugcauugagaa

SEQ ID NO: 3553073 - RNA, 12 nt, Human
aacugccauuau

SEQ ID NO: 3553074 - RNA, 18 nt, Human
aacugccauuauuuucug

SEQ ID NO: 3553075 - RNA, 21 nt, Human
aacugccauuauuuucuguca

SEQ ID NO: 3553076 - RNA, 14 nt, Human
aacugcccugucua

SEQ ID NO: 3553077 - RNA, 16 nt, Human
aacugccguaauuuaa

SEQ ID NO: 3553078 - RNA, 22 nt, Human
aacugccuagaaacaacacugu

SEQ ID NO: 3553079 - RNA, 20 nt, Human
aacugccucgaaacacagaa

SEQ ID NO: 3553080 - RNA, 15 nt, Human
aacugccucuuuccu

SEQ ID NO: 3553081 - RNA, 16 nt, Human
aacugccuuggcuuca

SEQ ID NO: 3553082 - RNA, 19 nt, Human
aacugcuaaucuacuuucu

SEQ ID NO: 3553083 - RNA, 23 nt, Human
aacugcugaaaacuagcucguga

SEQ ID NO: 3553084 - RNA, 15 nt, Human
aacugcugacuguuu

SEQ ID NO: 3553085 - RNA, 13 nt, Human
aacugcugccacu

SEQ ID NO: 3553086 - RNA, 14 nt, Human
aacugcugccacug

SEQ ID NO: 3553087 - RNA, 23 nt, Human
aacugcuucccuuacuuugcuga

SEQ ID NO: 3553088 - RNA, 22 nt, Human
aacugcuuccuauaauuuugau

SEQ ID NO: 3553089 - RNA, 20 nt, Human
aacugcuuuaucccacggaa

SEQ ID NO: 3553090 - RNA, 14 nt, Human
aacugcuuucuguu

SEQ ID NO: 3553091 - RNA, 15 nt, Human
aacugcuuucuguuc

SEQ ID NO: 3553092 - RNA, 17 nt, Human
aacugcuuucuguucca

SEQ ID NO: 3553093 - RNA, 20 nt, Human
aacugcuuucuguuccaaau

SEQ ID NO: 3553094 - RNA, 21 nt, Human
aacugcuuucuuucguuuguu

SEQ ID NO: 3553095 - RNA, 15 nt, Human
aacuggaaaacagaa

SEQ ID NO: 3553096 - RNA, 21 nt, Human
aacuggaaaacagaacacuua

SEQ ID NO: 3553097 - RNA, 19 nt, Human
aacuggaacggugaaggug

SEQ ID NO: 3553098 - RNA, 20 nt, Human
aacuggaagcauguaggaga

SEQ ID NO: 3553099 - RNA, 15 nt, Human
aacuggaaguuauuu

SEQ ID NO: 3553100 - RNA, 20 nt, Human
aacuggaauuaaaaggauag

SEQ ID NO: 3553101 - RNA, 20 nt, Human
aacuggacccuguugcuaag

SEQ ID NO: 3553102 - RNA, 21 nt, Human
aacuggacccuguugcuaagc

SEQ ID NO: 3553103 - RNA, 19 nt, Human
aacuggacugguucaaaug

SEQ ID NO: 3553104 - RNA, 14 nt, Human
aacuggagucugga

SEQ ID NO: 3553105 - RNA, 16 nt, Human
aacuggagucuggagu

SEQ ID NO: 3553106 - RNA, 20 nt, Human
aacuggagucuggagugggc

SEQ ID NO: 3553107 - RNA, 21 nt, Human
aacuggccggucugcaaguca

SEQ ID NO: 3553108 - RNA, 20 nt, Human
aacugggaaccccuuuccca

SEQ ID NO: 3553109 - RNA, 21 nt, Human
aacugggaaccccuuucccac

SEQ ID NO: 3553110 - RNA, 22 nt, Human
aacugggaaccccuuucccacc

SEQ ID NO: 3553111 - RNA, 20 nt, Human
aacugggaugaggugacuau

SEQ ID NO: 3553112 - RNA, 16 nt, Human
aacugggcugaacacu

SEQ ID NO: 3553113 - RNA, 22 nt, Human
aacugggggagggugaagugaa

SEQ ID NO: 3553114 - RNA, 14 nt, Human
aacuggucuuccuu

SEQ ID NO: 3553115 - RNA, 22 nt, Human
aacugguggacauggcuguuca

SEQ ID NO: 3553116 - RNA, 20 nt, Human
aacugguuauuuaaaaugua

SEQ ID NO: 3553117 - RNA, 20 nt, Human
aacuguaaaaaaugugugua

SEQ ID NO: 3553118 - RNA, 18 nt, Human
aacuguaauuauuugaau

SEQ ID NO: 3553119 - RNA, 23 nt, Human
aacuguacauuucacaggcuaau

SEQ ID NO: 3553120 - RNA, 16 nt, Human
aacuguaccaugugcu

SEQ ID NO: 3553121 - RNA, 23 nt, Human
aacuguacuagucugugugggac

SEQ ID NO: 3553122 - RNA, 14 nt, Human
aacuguacugggcc

SEQ ID NO: 3553123 - RNA, 18 nt, Human
aacuguacuuuuaaggca

SEQ ID NO: 3553124 - RNA, 14 nt, Human
aacuguauauauuc

SEQ ID NO: 3553125 - RNA, 13 nt, Human
aacuguauuugaa

SEQ ID NO: 3553126 - RNA, 20 nt, Human
aacuguauuugaaauaagaa

SEQ ID NO: 3553127 - RNA, 15 nt, Human
aacugucauuacaga

SEQ ID NO: 3553128 - RNA, 16 nt, Human
aacuguccagagagca

SEQ ID NO: 3553129 - RNA, 13 nt, Human
aacuguccugucc

SEQ ID NO: 3553130 - RNA, 16 nt, Human
aacugucggaggaaag

SEQ ID NO: 3553131 - RNA, 19 nt, Human
aacugucggaggaaagaca

SEQ ID NO: 3553132 - RNA, 14 nt, Human
aacugucuauuucu

SEQ ID NO: 3553133 - RNA, 23 nt, Human
aacugucucgaugcaaugaacac

SEQ ID NO: 3553134 - RNA, 18 nt, Human
aacugucuuuaaaagaga

SEQ ID NO: 3553135 - RNA, 17 nt, Human
aacugugaaguuuacau

SEQ ID NO: 3553136 - RNA, 21 nt, Human
aacugugcugaaugcuuuaga

SEQ ID NO: 3553137 - RNA, 11 nt, Human
aacuguggaua

SEQ ID NO: 3553138 - RNA, 13 nt, Human
aacuguggauauu

SEQ ID NO: 3553139 - RNA, 22 nt, Human
aacuguguaacugcccaaagca

SEQ ID NO: 3553140 - RNA, 14 nt, Human
aacuguguacuguu

SEQ ID NO: 3553141 - RNA, 15 nt, Human
aacuguguagcaucu

SEQ ID NO: 3553142 - RNA, 13 nt, Human
aacuguguaugua

SEQ ID NO: 3553143 - RNA, 21 nt, Human
aacuguguguaauuguuccuu

SEQ ID NO: 3553144 - RNA, 15 nt, Human
aacuguguuguauua

SEQ ID NO: 3553145 - RNA, 16 nt, Human
aacuguguuguauuaa

SEQ ID NO: 3553146 - RNA, 20 nt, Human
aacuguguuguauuaacaaa

SEQ ID NO: 3553147 - RNA, 14 nt, Human
aacuguuaccauug

SEQ ID NO: 3553148 - RNA, 17 nt, Human
aacuguuaccauuggaa

SEQ ID NO: 3553149 - RNA, 18 nt, Human
aacuguuaccauuggaaa

SEQ ID NO: 3553150 - RNA, 20 nt, Human
aacuguuaccuaaaguauuu

SEQ ID NO: 3553151 - RNA, 14 nt, Human
aacuguuagaaugu

SEQ ID NO: 3553152 - RNA, 17 nt, Human
aacuguuagcacuguug

SEQ ID NO: 3553153 - RNA, 15 nt, Human
aacuguuauuuauaa

SEQ ID NO: 3553154 - RNA, 16 nt, Human
aacuguuauuuauaau

SEQ ID NO: 3553155 - RNA, 13 nt, Human
aacuguucccacc

SEQ ID NO: 3553156 - RNA, 14 nt, Human
aacuguuguauaaa

SEQ ID NO: 3553157 - RNA, 19 nt, Human
aacuguuguauaaauuuau

SEQ ID NO: 3553158 - RNA, 22 nt, Human
aacuguuuagggcccugauuug

SEQ ID NO: 3553159 - RNA, 16 nt, Human
aacuguuuauaugugu

SEQ ID NO: 3553160 - RNA, 18 nt, Human
aacuguuuauauguguug

SEQ ID NO: 3553161 - RNA, 19 nt, Human
aacuguuuauauguguuga

SEQ ID NO: 3553162 - RNA, 22 nt, Human
aacuguuuauauguguugaaaa

SEQ ID NO: 3553163 - RNA, 21 nt, Human
aacuguuuuggguagcugcca

SEQ ID NO: 3553164 - RNA, 13 nt, Human
aacuguuuuuuaa

SEQ ID NO: 3553165 - RNA, 20 nt, Human
aacuuaaaaagucugcauua

SEQ ID NO: 3553166 - RNA, 18 nt, Human
aacuuaaaaauguaaaua

SEQ ID NO: 3553167 - RNA, 16 nt, Human
aacuuaaaauauuuua

SEQ ID NO: 3553168 - RNA, 13 nt, Human
aacuuaaauaaua

SEQ ID NO: 3553169 - RNA, 19 nt, Human
aacuuaaauaaugugaaac

SEQ ID NO: 3553170 - RNA, 21 nt, Human
aacuuaaauguuauuaucugg

SEQ ID NO: 3553171 - RNA, 16 nt, Human
aacuuaaauuuuaauu

SEQ ID NO: 3553172 - RNA, 19 nt, Human
aacuuaaauuuuaauuuau

SEQ ID NO: 3553173 - RNA, 15 nt, Human
aacuuaacaugcugu

SEQ ID NO: 3553174 - RNA, 13 nt, Human
aacuuaacuuuaa

SEQ ID NO: 3553175 - RNA, 18 nt, Human
aacuuaaguggcuaaaga

SEQ ID NO: 3553176 - RNA, 21 nt, Human
aacuuaaguugguccuuuaca

SEQ ID NO: 3553177 - RNA, 15 nt, Human
aacuuaauaaucaag

SEQ ID NO: 3553178 - RNA, 17 nt, Human
aacuuaauaaucaagag

SEQ ID NO: 3553179 - RNA, 15 nt, Human
aacuuaauaguauuu

SEQ ID NO: 3553180 - RNA, 15 nt, Human
aacuuaaucuaaaug

SEQ ID NO: 3553181 - RNA, 13 nt, Human
aacuuacacacaa

SEQ ID NO: 3553182 - RNA, 23 nt, Human
aacuuaccuaagugacauuugua

SEQ ID NO: 3553183 - RNA, 18 nt, Human
aacuuacuuaguguuaug

SEQ ID NO: 3553184 - RNA, 21 nt, Human
aacuuacuugcauaccaaguu

SEQ ID NO: 3553185 - RNA, 17 nt, Human
aacuuagaauaaaauug

SEQ ID NO: 3553186 - RNA, 19 nt, Human
aacuuagaauaaaauugua

SEQ ID NO: 3553187 - RNA, 19 nt, Human
aagagaggaguucaaugau

SEQ ID NO: 3553188 - RNA, 21 nt, Human
aagagaggaguucaaugaucu

SEQ ID NO: 3553189 - RNA, 22 nt, Human
aagagaggaguucaaugaucua

SEQ ID NO: 3553190 - RNA, 19 nt, Human
aagagaguuuuuaauagaa

SEQ ID NO: 3553191 - RNA, 16 nt, Human
aagagauaacuguaaa

SEQ ID NO: 3553192 - RNA, 14 nt, Human
aagagauacagagg

SEQ ID NO: 3553193 - RNA, 21 nt, Human
aagagauauuuuaaaaugaga

SEQ ID NO: 3553194 - RNA, 13 nt, Human
aagagauauuuug

SEQ ID NO: 3553195 - RNA, 22 nt, Human
aagagauauuuugggcaugugg

SEQ ID NO: 3553196 - RNA, 15 nt, Human
aagagaucaggaaga

SEQ ID NO: 3553197 - RNA, 16 nt, Human
aagagauccaaagacu

SEQ ID NO: 3553198 - RNA, 18 nt, Human
aagagaugggcuuguuuu

SEQ ID NO: 3553199 - RNA, 15 nt, Human
aagagauugcuaauu

SEQ ID NO: 3553200 - RNA, 17 nt, Human
aagagauuguuguuugc

SEQ ID NO: 3553201 - RNA, 13 nt, Human
aagagauuuuuca

SEQ ID NO: 3553202 - RNA, 14 nt, Human
aagagcaaaucaau

SEQ ID NO: 3553203 - RNA, 17 nt, Human
aagagcaaggaagguaa

SEQ ID NO: 3553204 - RNA, 19 nt, Human
aagagcaauguguggcuga

SEQ ID NO: 3553205 - RNA, 17 nt, Human
aagagcacaaacauuuu

SEQ ID NO: 3553206 - RNA, 21 nt, Human
aagagcacaaacauuuuucaa

SEQ ID NO: 3553207 - RNA, 13 nt, Human
aagagcacagccc

SEQ ID NO: 3553208 - RNA, 17 nt, Human
aagagcacuuaagagaa

SEQ ID NO: 3553209 - RNA, 21 nt, Human
aagagcacuuaagagaauauu

SEQ ID NO: 3553210 - RNA, 14 nt, Human
aagagcagaacaga

SEQ ID NO: 3553211 - RNA, 17 nt, Human
aagagcagcaccuccuc

SEQ ID NO: 3553212 - RNA, 13 nt, Human
aagagcagccugu

SEQ ID NO: 3553213 - RNA, 17 nt, Human
aagagcagccuguggca

SEQ ID NO: 3553214 - RNA, 22 nt, Human
aagagcagcuccuuccuagccu

SEQ ID NO: 3553215 - RNA, 15 nt, Human
aagagcaucaugccu

SEQ ID NO: 3553216 - RNA, 21 nt, Human
aagagcaucaugccucugagg

SEQ ID NO: 3553217 - RNA, 14 nt, Human
aagagcaucugauu

SEQ ID NO: 3553218 - RNA, 21 nt, Human
aagagccauguagaagcugca

SEQ ID NO: 3553219 - RNA, 23 nt, Human
aagagcccagucuguugaguuag

SEQ ID NO: 3553220 - RNA, 16 nt, Human
aagagccccacucuca

SEQ ID NO: 3553221 - RNA, 13 nt, Human
aagagcccuugcc

SEQ ID NO: 3553222 - RNA, 18 nt, Human
aagagcccuugccucccc

SEQ ID NO: 3553223 - RNA, 19 nt, Human
aagagccugaucucuuccu

SEQ ID NO: 3553224 - RNA, 12 nt, Human
aagagccugcag

SEQ ID NO: 3553225 - RNA, 16 nt, Human
aagagccuggagaagc

SEQ ID NO: 3553226 - RNA, 17 nt, Human
aagagccuggagaagcu

SEQ ID NO: 3553227 - RNA, 16 nt, Human
aagagccuuaaaacau

SEQ ID NO: 3553228 - RNA, 18 nt, Human
aagagccuuccacccagg

SEQ ID NO: 3553229 - RNA, 23 nt, Human
aagagcgagagaucaaagaugaa

SEQ ID NO: 3553230 - RNA, 16 nt, Human
aagagcuacauaauuu

SEQ ID NO: 3553231 - RNA, 22 nt, Human
aagagcuaggcagggugucugc

SEQ ID NO: 3553232 - RNA, 23 nt, Human
aagagcuaggcagggugucugcc

SEQ ID NO: 3553233 - RNA, 13 nt, Human
aagagcuauugcc

SEQ ID NO: 3553234 - RNA, 12 nt, Human
aagagcucagga

SEQ ID NO: 3553235 - RNA, 11 nt, Human
aagagcugagg

SEQ ID NO: 3553236 - RNA, 16 nt, Human
aagagcuguccuggua

SEQ ID NO: 3553237 - RNA, 14 nt, Human
aagagcuuagaaac

SEQ ID NO: 3553238 - RNA, 21 nt, Human
aagagcuuagaaacuggaaau

SEQ ID NO: 3553239 - RNA, 18 nt, Human
aagagcuuuacaaaaaga

SEQ ID NO: 3553240 - RNA, 21 nt, Human
aagaggaaaaugaauaauaca

SEQ ID NO: 3553241 - RNA, 15 nt, Human
aagaggaaagaauga

SEQ ID NO: 3553242 - RNA, 20 nt, Human
aagaggaacagcacugggga

SEQ ID NO: 3553243 - RNA, 14 nt, Human
aagaggaagcaaau

SEQ ID NO: 3553244 - RNA, 23 nt, Human
aagaggaaugaaguacucauaca

SEQ ID NO: 3553245 - RNA, 20 nt, Human
aagaggacucgcuuguaaau

SEQ ID NO: 3553246 - RNA, 18 nt, Human
aagaggagcacuuccaaa

SEQ ID NO: 3553247 - RNA, 20 nt, Human
aagaggaggggaagaggccu

SEQ ID NO: 3553248 - RNA, 20 nt, Human
aagaggaguuucgagguaga

SEQ ID NO: 3553249 - RNA, 14 nt, Human
aagaggcagggucu

SEQ ID NO: 3553250 - RNA, 15 nt, Human
aagaggcgggccagc

SEQ ID NO: 3553251 - RNA, 17 nt, Human
aagaggcguugcuuuca

SEQ ID NO: 3553252 - RNA, 22 nt, Human
aagaggcguugcuuucacucuc

SEQ ID NO: 3553253 - RNA, 18 nt, Human
aagaggcugaaagaggcc

SEQ ID NO: 3553254 - RNA, 13 nt, Human
aagaggcugaggc

SEQ ID NO: 3553255 - RNA, 21 nt, Human
aagaggcugauaauuccagug

SEQ ID NO: 3553256 - RNA, 21 nt, Human
aagaggcugccccucucacca

SEQ ID NO: 3553257 - RNA, 23 nt, Human
aagagggaagaaagagaaggagc

SEQ ID NO: 3553258 - RNA, 21 nt, Human
aagagggagggagggcuccag

SEQ ID NO: 3553259 - RNA, 13 nt, Human
aagaggggacagg

SEQ ID NO: 3553260 - RNA, 16 nt, Human
aagaggggcagcccuu

SEQ ID NO: 3553261 - RNA, 22 nt, Human
aagaggggugcagaggcugugg

SEQ ID NO: 3553262 - RNA, 15 nt, Human
aagagguacaggguu

SEQ ID NO: 3553263 - RNA, 20 nt, Human
aagagguacaggguuuuuac

SEQ ID NO: 3553264 - RNA, 21 nt, Human
aacaguuaauuaguuaacagu

SEQ ID NO: 3553265 - RNA, 17 nt, Human
aacaguugcacagcauc

SEQ ID NO: 3553266 - RNA, 18 nt, Human
aacaguugcacagcaucu

SEQ ID NO: 3553267 - RNA, 20 nt, Human
aacaguugcacagcaucuca

SEQ ID NO: 3553268 - RNA, 22 nt, Human
aacaguugcacagcaucucagc

SEQ ID NO: 3553269 - RNA, 14 nt, Human
aacaguugcaugua

SEQ ID NO: 3553270 - RNA, 22 nt, Human
aacaguugcauguaguaacacu

SEQ ID NO: 3553271 - RNA, 17 nt, Human
aacaguugguaacuuuu

SEQ ID NO: 3553272 - RNA, 23 nt, Human
aacaguuguauuuaacagaaauu

SEQ ID NO: 3553273 - RNA, 15 nt, Human
aacaguuuaaugaag

SEQ ID NO: 3553274 - RNA, 20 nt, Human
aacaguuuaaugaagaucua

SEQ ID NO: 3553275 - RNA, 13 nt, Human
aacaguuucaaaa

SEQ ID NO: 3553276 - RNA, 13 nt, Human
aacaguuuguaca

SEQ ID NO: 3553277 - RNA, 11 nt, Human
aacaguuuucc

SEQ ID NO: 3553278 - RNA, 16 nt, Human
aacaguuuuccaugaa

SEQ ID NO: 3553279 - RNA, 18 nt, Human
aacaguuuuccaugaaaa

SEQ ID NO: 3553280 - RNA, 17 nt, Human
aacaguuuuguguaacu

SEQ ID NO: 3553281 - RNA, 20 nt, Human
aacauaaaaaggacaucagc

SEQ ID NO: 3553282 - RNA, 22 nt, Human
aacauaaaaaguuaaaaaaaau

SEQ ID NO: 3553283 - RNA, 13 nt, Human
aacauaaaaauga

SEQ ID NO: 3553284 - RNA, 12 nt, Human
aacauaaaucug

SEQ ID NO: 3553285 - RNA, 14 nt, Human
aacauaaaucugug

SEQ ID NO: 3553286 - RNA, 15 nt, Human
aacauaaaucuguga

SEQ ID NO: 3553287 - RNA, 13 nt, Human
aacauaacauaaa

SEQ ID NO: 3553288 - RNA, 18 nt, Human
aacauaagcuauuuuucu

SEQ ID NO: 3553289 - RNA, 16 nt, Human
aacauaaucuaguuua

SEQ ID NO: 3553290 - RNA, 15 nt, Human
aacauaaugaaaaua

SEQ ID NO: 3553291 - RNA, 14 nt, Human
aacauacaaaugca

SEQ ID NO: 3553292 - RNA, 19 nt, Human
aacauacauuuuguaccaa

SEQ ID NO: 3553293 - RNA, 20 nt, Human
aacauaccccuuacaaauga

SEQ ID NO: 3553294 - RNA, 21 nt, Human
aacauacgugugcaugugucu

SEQ ID NO: 3553295 - RNA, 20 nt, Human
aacauacucccaucugugaa

SEQ ID NO: 3553296 - RNA, 19 nt, Human
aacauaguaaguucagcac

SEQ ID NO: 3553297 - RNA, 15 nt, Human
aacauauaaaauaau

SEQ ID NO: 3553298 - RNA, 18 nt, Human
aacauauaauguuguuau

SEQ ID NO: 3553299 - RNA, 22 nt, Human
aacauauaauguuguuauuuaa

SEQ ID NO: 3553300 - RNA, 14 nt, Human
aacauauggucucc

SEQ ID NO: 3553301 - RNA, 16 nt, Human
aacauauguacauaaa

SEQ ID NO: 3553302 - RNA, 19 nt, Human
aacauauguacauaaauug

SEQ ID NO: 3553303 - RNA, 14 nt, Human
aacauauuguugaa

SEQ ID NO: 3553304 - RNA, 13 nt, Human
aacaucacacaca

SEQ ID NO: 3553305 - RNA, 13 nt, Human
aacaucacagccc

SEQ ID NO: 3553306 - RNA, 17 nt, Human
aacaucacugaaaugcu

SEQ ID NO: 3553307 - RNA, 14 nt, Human
aacaucagcuugac

SEQ ID NO: 3553308 - RNA, 21 nt, Human
aacaucaguuacucugaaggg

SEQ ID NO: 3553309 - RNA, 16 nt, Human
aacaucaucaaggcac

SEQ ID NO: 3553310 - RNA, 14 nt, Human
aacaucauuagaac

SEQ ID NO: 3553311 - RNA, 11 nt, Human
aacauccaaaa

SEQ ID NO: 3553312 - RNA, 15 nt, Human
aacauccaaaaucuu

SEQ ID NO: 3553313 - RNA, 16 nt, Human
aacauccaaguggccu

SEQ ID NO: 3553314 - RNA, 24 nt, Human
aacauccaaguggccuccgucacu

SEQ ID NO: 3553315 - RNA, 21 nt, Human
aacauccaauaggaaugcuaa

SEQ ID NO: 3553316 - RNA, 22 nt, Human
aacauccaauaggaaugcuaac

SEQ ID NO: 3553317 - RNA, 15 nt, Human
aacauccacucucuc

SEQ ID NO: 3553318 - RNA, 15 nt, Human
aacaucccaagauuu

SEQ ID NO: 3553319 - RNA, 15 nt, Human
aacaucccuccuggg

SEQ ID NO: 3553320 - RNA, 22 nt, Human
aacauccuacaagacacaguga

SEQ ID NO: 3553321 - RNA, 12 nt, Human
aacauccugcca

SEQ ID NO: 3553322 - RNA, 14 nt, Human
aacauccugccagc

SEQ ID NO: 3553323 - RNA, 19 nt, Human
aacauccuucaagaacucu

SEQ ID NO: 3553324 - RNA, 20 nt, Human
aacaucuacaaaacauuaaa

SEQ ID NO: 3553325 - RNA, 16 nt, Human
aacaucuagaaauugc

SEQ ID NO: 3553326 - RNA, 16 nt, Human
aacaucugaaagccac

SEQ ID NO: 3553327 - RNA, 16 nt, Human
aacaucugaguccugg

SEQ ID NO: 3553328 - RNA, 22 nt, Human
aacaucuguccugugaaagacu

SEQ ID NO: 3553329 - RNA, 12 nt, Human
aacaucuuuaag

SEQ ID NO: 3553330 - RNA, 11 nt, Human
aacaucuuuuc

SEQ ID NO: 3553331 - RNA, 13 nt, Human
aacaugaaacacc

SEQ ID NO: 3553332 - RNA, 13 nt, Human
aagauacuuugua

SEQ ID NO: 3553333 - RNA, 14 nt, Human
aagauacuuuguau

SEQ ID NO: 3553334 - RNA, 14 nt, Human
aagauagaagaaaa

SEQ ID NO: 3553335 - RNA, 21 nt, Human
aagauagaagaaaaaagaaug

SEQ ID NO: 3553336 - RNA, 12 nt, Human
aagauagacagg

SEQ ID NO: 3553337 - RNA, 19 nt, Human
aagauagacagguccugau

SEQ ID NO: 3553338 - RNA, 23 nt, Human
aagauagauuuggaauaggaaua

SEQ ID NO: 3553339 - RNA, 15 nt, Human
aagauagcagggcau

SEQ ID NO: 3553340 - RNA, 20 nt, Human
aagauauaacuauugcccag

SEQ ID NO: 3553341 - RNA, 17 nt, Human
aagauauaagugcugua

SEQ ID NO: 3553342 - RNA, 20 nt, Human
aagauauaagugcuguauaa

SEQ ID NO: 3553343 - RNA, 21 nt, Human
aagauauaagugcuguauaaa

SEQ ID NO: 3553344 - RNA, 14 nt, Human
aagauauacaugaa

SEQ ID NO: 3553345 - RNA, 15 nt, Human
aagauauacuuguuu

SEQ ID NO: 3553346 - RNA, 19 nt, Human
aagauauacuuguuuuugu

SEQ ID NO: 3553347 - RNA, 21 nt, Human
aagauauauuaaaaauauaaa

SEQ ID NO: 3553348 - RNA, 16 nt, Human
aagauaucuuuucuuu

SEQ ID NO: 3553349 - RNA, 19 nt, Human
aagauaucuuuucuuuaga

SEQ ID NO: 3553350 - RNA, 13 nt, Human
aagauauggagaa

SEQ ID NO: 3553351 - RNA, 15 nt, Human
aagauauggagaauu

SEQ ID NO: 3553352 - RNA, 13 nt, Human
aagauauuauuca

SEQ ID NO: 3553353 - RNA, 13 nt, Human
aagauauuccuga

SEQ ID NO: 3553354 - RNA, 19 nt, Human
aagauauuugcaguuuuuc

SEQ ID NO: 3553355 - RNA, 19 nt, Human
aagauauuuuuaucuuuau

SEQ ID NO: 3553356 - RNA, 15 nt, Human
aagauauuuuucaug

SEQ ID NO: 3553357 - RNA, 21 nt, Human
aagaucaaaaaggcuuauaaa

SEQ ID NO: 3553358 - RNA, 22 nt, Human
aagaucaaaagcuuauucaucu

SEQ ID NO: 3553359 - RNA, 21 nt, Human
aagaucaaaauaaaaagugac

SEQ ID NO: 3553360 - RNA, 22 nt, Human
aagaucaaaauaaaaagugaca

SEQ ID NO: 3553361 - RNA, 15 nt, Human
aagaucacuuucuca

SEQ ID NO: 3553362 - RNA, 16 nt, Human
aagaucauguacccca

SEQ ID NO: 3553363 - RNA, 11 nt, Human
aagauccugug

SEQ ID NO: 3553364 - RNA, 16 nt, Human
aagaucgaauuuuuca

SEQ ID NO: 3553365 - RNA, 20 nt, Human
aagaucgguuaacaaauaac

SEQ ID NO: 3553366 - RNA, 14 nt, Human
aagaucuacaugaa

SEQ ID NO: 3553367 - RNA, 16 nt, Human
aagaucuauaaagcga

SEQ ID NO: 3553368 - RNA, 21 nt, Human
aagaucucacucugccccccc

SEQ ID NO: 3553369 - RNA, 18 nt, Human
aagaucucugcagggccg

SEQ ID NO: 3553370 - RNA, 14 nt, Human
aagaucucuuucua

SEQ ID NO: 3553371 - RNA, 20 nt, Human
aagaucuguuuugaaggcaa

SEQ ID NO: 3553372 - RNA, 16 nt, Human
aagaucuuagauucuc

SEQ ID NO: 3553373 - RNA, 17 nt, Human
aagaucuucaaaaguaa

SEQ ID NO: 3553374 - RNA, 13 nt, Human
aagaucuugcaga

SEQ ID NO: 3553375 - RNA, 19 nt, Human
aagaucuugcagaaguucu

SEQ ID NO: 3553376 - RNA, 15 nt, Human
aagaucuuuuauuuu

SEQ ID NO: 3553377 - RNA, 18 nt, Human
aagaucuuuuauuuugcc

SEQ ID NO: 3553378 - RNA, 15 nt, Human
aagaugaacagacug

SEQ ID NO: 3553379 - RNA, 23 nt, Human
aagaugaacccgaggcugagaau

SEQ ID NO: 3553380 - RNA, 14 nt, Human
aagaugaagaggau

SEQ ID NO: 3553381 - RNA, 23 nt, Human
aagaugaaggagaggcaacaucc

SEQ ID NO: 3553382 - RNA, 19 nt, Human
aagaugaauacauuuuguu

SEQ ID NO: 3553383 - RNA, 15 nt, Human
aagaugaaucaaugg

SEQ ID NO: 3553384 - RNA, 13 nt, Human
aagaugacacaag

SEQ ID NO: 3553385 - RNA, 16 nt, Human
aagaugacauugcuaa

SEQ ID NO: 3553386 - RNA, 22 nt, Human
aagaugacauugcuaagaugcu

SEQ ID NO: 3553387 - RNA, 13 nt, Human
aagaugacugagg

SEQ ID NO: 3553388 - RNA, 14 nt, Human
aagaugacugaggg

SEQ ID NO: 3553389 - RNA, 17 nt, Human
aagaugacuguguugua

SEQ ID NO: 3553390 - RNA, 13 nt, Human
aagaugaucauuu

SEQ ID NO: 3553391 - RNA, 16 nt, Human
aagaugcacuuugcuu

SEQ ID NO: 3553392 - RNA, 18 nt, Human
aagaugccaauuauuguu

SEQ ID NO: 3553393 - RNA, 15 nt, Human
aagaugccacauuca

SEQ ID NO: 3553394 - RNA, 16 nt, Human
aagaugccaucugugu

SEQ ID NO: 3553395 - RNA, 15 nt, Human
aagaugcucuucugu

SEQ ID NO: 3553396 - RNA, 10 nt, Human
aagaugcugg

SEQ ID NO: 3553397 - RNA, 16 nt, Human
aagaugcuggguuggu

SEQ ID NO: 3553398 - RNA, 12 nt, Human
aagaugcuuuua

SEQ ID NO: 3553399 - RNA, 18 nt, Human
aagauggaguuucuaagg

SEQ ID NO: 3553400 - RNA, 15 nt, Human
aagauggaugugcuu

SEQ ID NO: 3553401 - RNA, 14 nt, Human
aagauggauucuca

SEQ ID NO: 3553402 - RNA, 23 nt, Human
aagauggcacuuauaaccaaagc

SEQ ID NO: 3553403 - RNA, 19 nt, Human
aagauggcauaaccugucu

SEQ ID NO: 3553404 - RNA, 19 nt, Human
aagauggcucagaggggga

SEQ ID NO: 3553405 - RNA, 23 nt, Human
aagauggcugugccucugccugu

SEQ ID NO: 3553406 - RNA, 19 nt, Human
aagaugggcaucuuuugua

SEQ ID NO: 3553407 - RNA, 19 nt, Human
aagaugggggcagggcugu

SEQ ID NO: 3553408 - RNA, 18 nt, Human
aagauggggucuguaaaa

SEQ ID NO: 3553409 - RNA, 19 nt, Human
aagauggggucuguaaaau

SEQ ID NO: 3553410 - RNA, 22 nt, Human
aagauggggucuguaaaaucuu

SEQ ID NO: 3553411 - RNA, 18 nt, Human
aagaugggugaaggcugg

SEQ ID NO: 3553412 - RNA, 16 nt, Human
aagaugguacaaccuu

SEQ ID NO: 3553413 - RNA, 17 nt, Human
aagauguaccuggugga

SEQ ID NO: 3553414 - RNA, 17 nt, Human
aagauguacuauaacau

SEQ ID NO: 3553415 - RNA, 19 nt, Human
aagauguagaggagaaacu

SEQ ID NO: 3553416 - RNA, 16 nt, Human
aagauguagauuuauu

SEQ ID NO: 3553417 - RNA, 22 nt, Human
aagauguagauuuauuucauca

SEQ ID NO: 3553418 - RNA, 12 nt, Human
aagaugucuguu

SEQ ID NO: 3553419 - RNA, 16 nt, Human
aagaugucuguuugcu

SEQ ID NO: 3553420 - RNA, 11 nt, Human
aagaugugaaa

SEQ ID NO: 3553421 - RNA, 13 nt, Human
aagaugugaaaau

SEQ ID NO: 3553422 - RNA, 11 nt, Human
aagaugugaau

SEQ ID NO: 3553423 - RNA, 20 nt, Human
aagaugugauauucuaagac

SEQ ID NO: 3553424 - RNA, 21 nt, Human
aagaugugauauucuaagacu

SEQ ID NO: 3553425 - RNA, 17 nt, Human
aagaugugucuucaauu

SEQ ID NO: 3553426 - RNA, 21 nt, Human
aacauuuuguucuuacacaua

SEQ ID NO: 3553427 - RNA, 23 nt, Human
aacauuuuuuuuuuaaaucaagu

SEQ ID NO: 3553428 - RNA, 18 nt, Human
aaccaaaaagaccagacu

SEQ ID NO: 3553429 - RNA, 20 nt, Human
aaccaaaaagaccagacuaa

SEQ ID NO: 3553430 - RNA, 20 nt, Human
aaccaaaaguuauuaaaauu

SEQ ID NO: 3553431 - RNA, 20 nt, Human
aaccaaaaugacaucuuuuu

SEQ ID NO: 3553432 - RNA, 14 nt, Human
aaccaaaaugauac

SEQ ID NO: 3553433 - RNA, 16 nt, Human
aaccaaagagacugga

SEQ ID NO: 3553434 - RNA, 18 nt, Human
aaccaaaggacauuaugu

SEQ ID NO: 3553435 - RNA, 20 nt, Human
aaccaaaggugaaggaauau

SEQ ID NO: 3553436 - RNA, 21 nt, Human
aaccaaaggugaaggaauaua

SEQ ID NO: 3553437 - RNA, 23 nt, Human
aaccaaaggugaaggaauauaug

SEQ ID NO: 3553438 - RNA, 19 nt, Human
aaccaacaccaucacagcu

SEQ ID NO: 3553439 - RNA, 19 nt, Human
aaccaacccuucccugaaa

SEQ ID NO: 3553440 - RNA, 17 nt, Human
aaccaacuacaaccaag

SEQ ID NO: 3553441 - RNA, 15 nt, Human
aaccaagaggcuggu

SEQ ID NO: 3553442 - RNA, 15 nt, Human
aaccaagucaaguga

SEQ ID NO: 3553443 - RNA, 16 nt, Human
aaccaagucaugugca

SEQ ID NO: 3553444 - RNA, 10 nt, Human
aaccaaguuc

SEQ ID NO: 3553445 - RNA, 14 nt, Human
aaccaaucaagaua

SEQ ID NO: 3553446 - RNA, 16 nt, Human
aaccaaucuacaaucu

SEQ ID NO: 3553447 - RNA, 15 nt, Human
aaccaauguuuaaaa

SEQ ID NO: 3553448 - RNA, 13 nt, Human
aaccaauuauuuu

SEQ ID NO: 3553449 - RNA, 16 nt, Human
aaccacaaaacucauc

SEQ ID NO: 3553450 - RNA, 15 nt, Human
aaccacaaaggccaa

SEQ ID NO: 3553451 - RNA, 21 nt, Human
aaccacaaaggccaaacugcu

SEQ ID NO: 3553452 - RNA, 14 nt, Human
aaccacaacugaca

SEQ ID NO: 3553453 - RNA, 20 nt, Human
aaccacaacugacacaggaa

SEQ ID NO: 3553454 - RNA, 12 nt, Human
aaccacagcccu

SEQ ID NO: 3553455 - RNA, 15 nt, Human
aaccacagcccuguc

SEQ ID NO: 3553456 - RNA, 16 nt, Human
aaccacagcccuguca

SEQ ID NO: 3553457 - RNA, 13 nt, Human
aaccacagcuccu

SEQ ID NO: 3553458 - RNA, 19 nt, Human
aaccacagcuccuuuucca

SEQ ID NO: 3553459 - RNA, 15 nt, Human
aaccacagcugcugg

SEQ ID NO: 3553460 - RNA, 16 nt, Human
aaccacagcugcugga

SEQ ID NO: 3553461 - RNA, 18 nt, Human
aaccacagcugcuggaga

SEQ ID NO: 3553462 - RNA, 22 nt, Human
aaccacaguguaccauuaaaau

SEQ ID NO: 3553463 - RNA, 22 nt, Human
aaccacaucuugcucugcugac

SEQ ID NO: 3553464 - RNA, 14 nt, Human
aaccacauggcaca

SEQ ID NO: 3553465 - RNA, 17 nt, Human
aaccacauggcacagag

SEQ ID NO: 3553466 - RNA, 16 nt, Human
aaccaccaaaaacaaa

SEQ ID NO: 3553467 - RNA, 21 nt, Human
aaccaccccggcccccugccc

SEQ ID NO: 3553468 - RNA, 22 nt, Human
aaccaccccggcccccugcccg

SEQ ID NO: 3553469 - RNA, 17 nt, Human
aaccaccgcuccccagc

SEQ ID NO: 3553470 - RNA, 14 nt, Human
aaccacggaaaaga

SEQ ID NO: 3553471 - RNA, 16 nt, Human
aaccacggccacauuu

SEQ ID NO: 3553472 - RNA, 13 nt, Human
aaccacuuaaaaa

SEQ ID NO: 3553473 - RNA, 18 nt, Human
aaccacuuguagauuuga

SEQ ID NO: 3553474 - RNA, 22 nt, Human
aaccagaagcaacagaaaaaau

SEQ ID NO: 3553475 - RNA, 16 nt, Human
aaccagacaaggaaau

SEQ ID NO: 3553476 - RNA, 16 nt, Human
aaccagagcaagcuuu

SEQ ID NO: 3553477 - RNA, 19 nt, Human
aagauugagcucucugccc

SEQ ID NO: 3553478 - RNA, 14 nt, Human
aagauugauaucua

SEQ ID NO: 3553479 - RNA, 20 nt, Human
aagauugguguuuuuuucua

SEQ ID NO: 3553480 - RNA, 23 nt, Human
aagauugguguuuuuuucuaugg

SEQ ID NO: 3553481 - RNA, 17 nt, Human
aagauuuaauuugccaa

SEQ ID NO: 3553482 - RNA, 13 nt, Human
aagauuuagaaaa

SEQ ID NO: 3553483 - RNA, 21 nt, Human
aagauuuaggccaaucagaag

SEQ ID NO: 3553484 - RNA, 17 nt, Human
aagauuuccaagugcca

SEQ ID NO: 3553485 - RNA, 16 nt, Human
aagauuugcuuuaauu

SEQ ID NO: 3553486 - RNA, 21 nt, Human
aagauuuguacuacaguucuu

SEQ ID NO: 3553487 - RNA, 16 nt, Human
aagauuuguuuuuaaa

SEQ ID NO: 3553488 - RNA, 19 nt, Human
aagauuuguuuuuaaacug

SEQ ID NO: 3553489 - RNA, 22 nt, Human
aagauuuguuuuuaaacuguac

SEQ ID NO: 3553490 - RNA, 18 nt, Human
aagauuuuaaucaaguug

SEQ ID NO: 3553491 - RNA, 19 nt, Human
aagauuuuccucuugugau

SEQ ID NO: 3553492 - RNA, 20 nt, Human
aagauuuuccucuugugauu

SEQ ID NO: 3553493 - RNA, 18 nt, Human
aagauuuuccuuuuuuau

SEQ ID NO: 3553494 - RNA, 19 nt, Human
aagauuuugaaauuuuuau

SEQ ID NO: 3553495 - RNA, 17 nt, Human
aagauuuugaaugcuuc

SEQ ID NO: 3553496 - RNA, 21 nt, Human
aagauuuugaucucacauuuu

SEQ ID NO: 3553497 - RNA, 16 nt, Human
aagauuuuuuaauaau

SEQ ID NO: 3553498 - RNA, 18 nt, Human
aagauuuuuuaauuguuu

SEQ ID NO: 3553499 - RNA, 17 nt, Human
aagauuuuuucauuuca

SEQ ID NO: 3553500 - RNA, 13 nt, Human
aagcaaaaaauga

SEQ ID NO: 3553501 - RNA, 14 nt, Human
aagcaaaaaugcua

SEQ ID NO: 3553502 - RNA, 16 nt, Human
aagcaaaaaugcuaau

SEQ ID NO: 3553503 - RNA, 15 nt, Human
aagcaaaauaaaaac

SEQ ID NO: 3553504 - RNA, 14 nt, Human
aagcaaaauauuau

SEQ ID NO: 3553505 - RNA, 23 nt, Human
aagcaaaaucauuuuauauguca

SEQ ID NO: 3553506 - RNA, 19 nt, Human
aagcaaaauuuuuucucua

SEQ ID NO: 3553507 - RNA, 16 nt, Human
aagcaaacccagacgg

SEQ ID NO: 3553508 - RNA, 15 nt, Human
aagcaaagcacagag

SEQ ID NO: 3553509 - RNA, 16 nt, Human
aagcaaagcacagaga

SEQ ID NO: 3553510 - RNA, 17 nt, Human
aagcaaagcaccagcuu

SEQ ID NO: 3553511 - RNA, 14 nt, Human
aagcaaagggcucc

SEQ ID NO: 3553512 - RNA, 12 nt, Human
aagcaaagggga

SEQ ID NO: 3553513 - RNA, 18 nt, Human
aagcaaauacuuagcaaa

SEQ ID NO: 3553514 - RNA, 17 nt, Human
aagcaaaucagaaacuu

SEQ ID NO: 3553515 - RNA, 14 nt, Human
aagcaaaucauuug

SEQ ID NO: 3553516 - RNA, 19 nt, Human
aagcaaaucauuuguuuaa

SEQ ID NO: 3553517 - RNA, 16 nt, Human
aagcaaaugucaugcu

SEQ ID NO: 3553518 - RNA, 21 nt, Human
aagcaaaugucaugcugccuu

SEQ ID NO: 3553519 - RNA, 18 nt, Human
aagcaaaugugaccugug

SEQ ID NO: 3553520 - RNA, 13 nt, Human
aagcaacaauuuu

SEQ ID NO: 3553521 - RNA, 18 nt, Human
aagcaacaauuuucagau

SEQ ID NO: 3553522 - RNA, 20 nt, Human
aagcaacaauuuucagauuu

SEQ ID NO: 3553523 - RNA, 14 nt, Human
aagcaacagguuuu

SEQ ID NO: 3553524 - RNA, 13 nt, Human
aagcaacauggcu

SEQ ID NO: 3553525 - RNA, 20 nt, Human
aagcaacauucauagucuuu

SEQ ID NO: 3553526 - RNA, 15 nt, Human
aagcaaccaaaaaga

SEQ ID NO: 3553527 - RNA, 15 nt, Human
aagcaaccucaguaa

SEQ ID NO: 3553528 - RNA, 19 nt, Human
aagcaaccucaguaauuua

SEQ ID NO: 3553529 - RNA, 21 nt, Human
aagcaaccucaguaauuuaga

SEQ ID NO: 3553530 - RNA, 19 nt, Human
aagcaaccucccaacccag

SEQ ID NO: 3553531 - RNA, 20 nt, Human
aagcaaccuggguccaaaua

SEQ ID NO: 3553532 - RNA, 21 nt, Human
aagcaaccuggguccaaauaa

SEQ ID NO: 3553533 - RNA, 22 nt, Human
aagcaaccuggguccaaauaaa

SEQ ID NO: 3553534 - RNA, 17 nt, Human
aagcaacugucuauuuc

SEQ ID NO: 3553535 - RNA, 22 nt, Human
aagcaacugucuauuucugcug

SEQ ID NO: 3553536 - RNA, 23 nt, Human
aagcaacugucuauuucugcuga

SEQ ID NO: 3553537 - RNA, 23 nt, Human
aagcaagaaucagagaaggaaca

SEQ ID NO: 3553538 - RNA, 22 nt, Human
aagcaagaggccguggcugcug

SEQ ID NO: 3553539 - RNA, 14 nt, Human
aagcaagcaagagg

SEQ ID NO: 3553540 - RNA, 19 nt, Human
aagcaagcauucagaagaa

SEQ ID NO: 3553541 - RNA, 15 nt, Human
aagcaagcuaaccuu

SEQ ID NO: 3553542 - RNA, 13 nt, Human
aagcaagcuuaau

SEQ ID NO: 3553543 - RNA, 16 nt, Human
aagcaaggaucuuuca

SEQ ID NO: 3553544 - RNA, 22 nt, Human
aagcaagugauugggacagagg

SEQ ID NO: 3553545 - RNA, 20 nt, Human
aagcaauaaaauuuuuuugg

SEQ ID NO: 3553546 - RNA, 12 nt, Human
aagcaauagaaa

SEQ ID NO: 3553547 - RNA, 14 nt, Human
aagcaauagaaaca

SEQ ID NO: 3553548 - RNA, 15 nt, Human
aagcaauagaaacaa

SEQ ID NO: 3553549 - RNA, 17 nt, Human
aagcaauauuuuggagu

SEQ ID NO: 3553550 - RNA, 16 nt, Human
aagcaaugcauuuugg

SEQ ID NO: 3553551 - RNA, 13 nt, Human
aagcaauuuuccu

SEQ ID NO: 3553552 - RNA, 21 nt, Human
aagcaauuuuccuugaagccg

SEQ ID NO: 3553553 - RNA, 13 nt, Human
aagcacaaaggaa

SEQ ID NO: 3553554 - RNA, 19 nt, Human
aagcacaccaaucuuacuu

SEQ ID NO: 3553555 - RNA, 13 nt, Human
aagcacagucagg

SEQ ID NO: 3553556 - RNA, 20 nt, Human
aagcacagucugaugacaca

SEQ ID NO: 3553557 - RNA, 12 nt, Human
aagcacaguggu

SEQ ID NO: 3553558 - RNA, 14 nt, Human
aagcacaguggugg

SEQ ID NO: 3553559 - RNA, 20 nt, Human
aagcacagugguggcagggc

SEQ ID NO: 3553560 - RNA, 24 nt, Human
aagcacagugguggcagggccuag

SEQ ID NO: 3553561 - RNA, 13 nt, Human
aagcacaguguua

SEQ ID NO: 3553562 - RNA, 18 nt, Human
aagcacaguuugaacaaa

SEQ ID NO: 3553563 - RNA, 16 nt, Human
aagcacaucugcauuu

SEQ ID NO: 3553564 - RNA, 18 nt, Human
aagcacauuuuaaaagug

SEQ ID NO: 3553565 - RNA, 20 nt, Human
aagcaccagcuucuccaggc

SEQ ID NO: 3553566 - RNA, 14 nt, Human
aagcaccccaugcc

SEQ ID NO: 3553567 - RNA, 12 nt, Human
aagcacccuuga

SEQ ID NO: 3553568 - RNA, 13 nt, Human
aagcaccugccga

SEQ ID NO: 3553569 - RNA, 16 nt, Human
aagcacuaaacaaaga

SEQ ID NO: 3553570 - RNA, 19 nt, Human
aagcacuacaccuugccuu

SEQ ID NO: 3553571 - RNA, 23 nt, Human
aagcacuacauaaacugacuuua

SEQ ID NO: 3553572 - RNA, 12 nt, Human
aagcacucgugu

SEQ ID NO: 3553573 - RNA, 13 nt, Human
aagcacugaaaaa

SEQ ID NO: 3553574 - RNA, 17 nt, Human
aagcacugacuucuaag

SEQ ID NO: 3553575 - RNA, 12 nt, Human
aagcacugugcu

SEQ ID NO: 3553576 - RNA, 13 nt, Human
aagcacugugcua

SEQ ID NO: 3553577 - RNA, 16 nt, Human
aagcacugugcucagg

SEQ ID NO: 3553578 - RNA, 16 nt, Human
aagcacuguuuuucca

SEQ ID NO: 3553579 - RNA, 19 nt, Human
aagcacuuggacucuugcu

SEQ ID NO: 3553580 - RNA, 20 nt, Human
aagcacuuggacucuugcuc

SEQ ID NO: 3553581 - RNA, 12 nt, Human
aagcagaaagug

SEQ ID NO: 3553582 - RNA, 23 nt, Human
aagcagaaagugccuuucaggau

SEQ ID NO: 3553583 - RNA, 17 nt, Human
aagcagaauaaagcaau

SEQ ID NO: 3553584 - RNA, 19 nt, Human
aagcagaauaaagcaauuu

SEQ ID NO: 3553585 - RNA, 21 nt, Human
aagcagaauaaagcaauuuuc

SEQ ID NO: 3553586 - RNA, 22 nt, Human
aagaugcuggaugucugccaau

SEQ ID NO: 3553587 - RNA, 11 nt, Human
aagaugcuggg

SEQ ID NO: 3553588 - RNA, 17 nt, Human
aagauggauucucagau

SEQ ID NO: 3553589 - RNA, 18 nt, Human
aagauggcauccugugaa

SEQ ID NO: 3553590 - RNA, 17 nt, Human
aagauggcucagagggg

SEQ ID NO: 3553591 - RNA, 21 nt, Human
aagauggcucagagggggacu

SEQ ID NO: 3553592 - RNA, 20 nt, Human
aagauggcugugccucugcc

SEQ ID NO: 3553593 - RNA, 22 nt, Human
aagaugggcaucuuuuguauua

SEQ ID NO: 3553594 - RNA, 17 nt, Human
aagauggggucuguaaa

SEQ ID NO: 3553595 - RNA, 18 nt, Human
aagaugguaucauauauu

SEQ ID NO: 3553596 - RNA, 20 nt, Human
aagaugguguggguguccug

SEQ ID NO: 3553597 - RNA, 13 nt, Human
aagauguagagga

SEQ ID NO: 3553598 - RNA, 13 nt, Human
aagauguagcaaa

SEQ ID NO: 3553599 - RNA, 23 nt, Human
aagauguagcaaacccugucaaa

SEQ ID NO: 3553600 - RNA, 21 nt, Human
aagauguagcgcuuugaauau

SEQ ID NO: 3553601 - RNA, 14 nt, Human
aagauguauauagg

SEQ ID NO: 3553602 - RNA, 16 nt, Human
aagaugucagacuggc

SEQ ID NO: 3553603 - RNA, 14 nt, Human
aagaugugaaaauu

SEQ ID NO: 3553604 - RNA, 12 nt, Human
aagaugugaauu

SEQ ID NO: 3553605 - RNA, 20 nt, Human
aagaugugaauuauugacac

SEQ ID NO: 3553606 - RNA, 21 nt, Human
aagaugugaauuauugacacu

SEQ ID NO: 3553607 - RNA, 16 nt, Human
aagaugugauauucua

SEQ ID NO: 3553608 - RNA, 17 nt, Human
aagaugugauauucuaa

SEQ ID NO: 3553609 - RNA, 18 nt, Human
aagaugugcagcauuuca

SEQ ID NO: 3553610 - RNA, 21 nt, Human
aagaugugcagcauuucacuu

SEQ ID NO: 3553611 - RNA, 12 nt, Human
aagauguuauau

SEQ ID NO: 3553612 - RNA, 18 nt, Human
aagauguuauauuuuucu

SEQ ID NO: 3553613 - RNA, 18 nt, Human
aagauguuuaacuuaauc

SEQ ID NO: 3553614 - RNA, 20 nt, Human
aagauuacaaaucagaaguc

SEQ ID NO: 3553615 - RNA, 18 nt, Human
aagauuagaaugaaaauu

SEQ ID NO: 3553616 - RNA, 24 nt, Human
aagauuagcaaggucauuucuuca

SEQ ID NO: 3553617 - RNA, 16 nt, Human
aagauuauagauucua

SEQ ID NO: 3553618 - RNA, 19 nt, Human
aagauuauuuuauuaugcg

SEQ ID NO: 3553619 - RNA, 15 nt, Human
aagauucagcuagug

SEQ ID NO: 3553620 - RNA, 15 nt, Human
aagauucccagagac

SEQ ID NO: 3553621 - RNA, 20 nt, Human
aagauucccagagacaggaa

SEQ ID NO: 3553622 - RNA, 16 nt, Human
aaggccugucccuggc

SEQ ID NO: 3553623 - RNA, 11 nt, Human
aaggccuuaag

SEQ ID NO: 3553624 - RNA, 17 nt, Human
aaggccuuuaaaauuuu

SEQ ID NO: 3553625 - RNA, 18 nt, Human
aaggcgcuaacuugcuua

SEQ ID NO: 3553626 - RNA, 13 nt, Human
aaggcggccccuc

SEQ ID NO: 3553627 - RNA, 18 nt, Human
aaggcgggagcaucucuu

SEQ ID NO: 3553628 - RNA, 14 nt, Human
aaggcguggagcug

SEQ ID NO: 3553629 - RNA, 16 nt, Human
aaggcuaaaaagcaac

SEQ ID NO: 3553630 - RNA, 16 nt, Human
aaggcuaaaacuuaac

SEQ ID NO: 3553631 - RNA, 21 nt, Human
aaggcuaccuuauuguacguu

SEQ ID NO: 3553632 - RNA, 20 nt, Human
aaggcuacuucggggcuggg

SEQ ID NO: 3553633 - RNA, 23 nt, Human
aaggcuacuucggggcugggaag

SEQ ID NO: 3553634 - RNA, 19 nt, Human
aaggcuccaggagcagcca

SEQ ID NO: 3553635 - RNA, 15 nt, Human
aaggcuccauauaua

SEQ ID NO: 3553636 - RNA, 16 nt, Human
aaggcucgagcaugcc

SEQ ID NO: 3553637 - RNA, 22 nt, Human
aaggcucgagcaugccuggaug

SEQ ID NO: 3553638 - RNA, 17 nt, Human
aaggcucgauuuuguau

SEQ ID NO: 3553639 - RNA, 13 nt, Human
aaggcucuagauc

SEQ ID NO: 3553640 - RNA, 16 nt, Human
aaggcucuaugagucu

SEQ ID NO: 3553641 - RNA, 21 nt, Human
aaggcucuaugagucuagaug

SEQ ID NO: 3553642 - RNA, 21 nt, Human
aagcuacagguuacaacagau

SEQ ID NO: 3553643 - RNA, 13 nt, Human
aagcuacuuauug

SEQ ID NO: 3553644 - RNA, 16 nt, Human
aagcuagaaccuggag

SEQ ID NO: 3553645 - RNA, 17 nt, Human
aagcuagaaggccacau

SEQ ID NO: 3553646 - RNA, 19 nt, Human
aagcuagaauugaguguuu

SEQ ID NO: 3553647 - RNA, 15 nt, Human
aagcuagacacauga

SEQ ID NO: 3553648 - RNA, 16 nt, Human
aagcuagacacaugaa

SEQ ID NO: 3553649 - RNA, 15 nt, Human
aagcuagcuccccuc

SEQ ID NO: 3553650 - RNA, 22 nt, Human
aagcuaggccuggccagaugca

SEQ ID NO: 3553651 - RNA, 15 nt, Human
aagcuaggugcuaau

SEQ ID NO: 3553652 - RNA, 12 nt, Human
aagcuagucuuu

SEQ ID NO: 3553653 - RNA, 19 nt, Human
aagcuagucuuuugcuuuu

SEQ ID NO: 3553654 - RNA, 19 nt, Human
aagcuaguugaauacuuga

SEQ ID NO: 3553655 - RNA, 20 nt, Human
aagcuaguugaauacuugaa

SEQ ID NO: 3553656 - RNA, 21 nt, Human
aagcuaguugaauacuugaac

SEQ ID NO: 3553657 - RNA, 20 nt, Human
aagcuauaaagcaguauuuu

SEQ ID NO: 3553658 - RNA, 14 nt, Human
aagcuauaaauuau

SEQ ID NO: 3553659 - RNA, 17 nt, Human
aagcuaucguaaaauua

SEQ ID NO: 3553660 - RNA, 15 nt, Human
aagcuaucuucaugu

SEQ ID NO: 3553661 - RNA, 15 nt, Human
aagcuauggugagau

SEQ ID NO: 3553662 - RNA, 21 nt, Human
aagcuauggugagaugcagcu

SEQ ID NO: 3553663 - RNA, 18 nt, Human
aagcuauuuaugggcccc

SEQ ID NO: 3553664 - RNA, 14 nt, Human
aagcuauuugaugu

SEQ ID NO: 3553665 - RNA, 16 nt, Human
aagcuauuugauguaa

SEQ ID NO: 3553666 - RNA, 23 nt, Human
aagcuauuugauguaauacuucu

SEQ ID NO: 3553667 - RNA, 21 nt, Human
aagcucaaagguuuggaagga

SEQ ID NO: 3553668 - RNA, 18 nt, Human
aagcucaaauaaaaauaa

SEQ ID NO: 3553669 - RNA, 19 nt, Human
aagcucaaguguucacaac

SEQ ID NO: 3553670 - RNA, 20 nt, Human
aagcucacagaccuuugaac

SEQ ID NO: 3553671 - RNA, 19 nt, Human
aagcucacaguuccucgcc

SEQ ID NO: 3553672 - RNA, 16 nt, Human
aagcucagaaggcucu

SEQ ID NO: 3553673 - RNA, 14 nt, Human
aagcucagaaucca

SEQ ID NO: 3553674 - RNA, 13 nt, Human
aagcucagcccac

SEQ ID NO: 3553675 - RNA, 17 nt, Human
aagcucagggccuggcu

SEQ ID NO: 3553676 - RNA, 12 nt, Human
aagcucauauuu

SEQ ID NO: 3553677 - RNA, 22 nt, Human
aagcucauauuuuguauauauc

SEQ ID NO: 3553678 - RNA, 16 nt, Human
aagcuccacugucacc

SEQ ID NO: 3553679 - RNA, 14 nt, Human
aagcuccagguaga

SEQ ID NO: 3553680 - RNA, 11 nt, Human
aagcucccagg

SEQ ID NO: 3553681 - RNA, 15 nt, Human
aagcucccccagcaa

SEQ ID NO: 3553682 - RNA, 11 nt, Human
aagcucccugc

SEQ ID NO: 3553683 - RNA, 16 nt, Human
aagcucccugccccaa

SEQ ID NO: 3553684 - RNA, 17 nt, Human
aagcucccugccccaaa

SEQ ID NO: 3553685 - RNA, 15 nt, Human
aagcuccgcaggacu

SEQ ID NO: 3553686 - RNA, 17 nt, Human
aagcuccuccucccugc

SEQ ID NO: 3553687 - RNA, 19 nt, Human
aagcuccuccucccugcau

SEQ ID NO: 3553688 - RNA, 21 nt, Human
aagcuccuccucccugcaucu

SEQ ID NO: 3553689 - RNA, 17 nt, Human
aagcuccuccucggaac

SEQ ID NO: 3553690 - RNA, 18 nt, Human
aagcuccucuccccagcc

SEQ ID NO: 3553691 - RNA, 19 nt, Human
aagcuccuggucuugagau

SEQ ID NO: 3553692 - RNA, 13 nt, Human
aagcuccuguccu

SEQ ID NO: 3553693 - RNA, 17 nt, Human
aagcuccuguccuccca

SEQ ID NO: 3553694 - RNA, 20 nt, Human
aagcuccuguccucccaucc

SEQ ID NO: 3553695 - RNA, 22 nt, Human
aagcuccuguccucccaucccc

SEQ ID NO: 3553696 - RNA, 23 nt, Human
aagcucgauguggucacagcugu

SEQ ID NO: 3553697 - RNA, 12 nt, Human
aagcucugaagu

SEQ ID NO: 3553698 - RNA, 12 nt, Human
aagcucugacau

SEQ ID NO: 3553699 - RNA, 16 nt, Human
aagcucugaccacuug

SEQ ID NO: 3553700 - RNA, 12 nt, Human
aagcucugagcu

SEQ ID NO: 3553701 - RNA, 16 nt, Human
aagcucugagcuguca

SEQ ID NO: 3553702 - RNA, 14 nt, Human
aagcucugcuauua

SEQ ID NO: 3553703 - RNA, 17 nt, Human
aagcucugcuccucucc

SEQ ID NO: 3553704 - RNA, 11 nt, Human
aagcucuggcu

SEQ ID NO: 3553705 - RNA, 21 nt, Human
aagcucuggcugaacccugug

SEQ ID NO: 3553706 - RNA, 23 nt, Human
aagcucuggcugaacccugugcu

SEQ ID NO: 3553707 - RNA, 22 nt, Human
aagcucuuacacuacauuagaa

SEQ ID NO: 3553708 - RNA, 19 nt, Human
aagcucuugaagacacuga

SEQ ID NO: 3553709 - RNA, 16 nt, Human
aagcucuuugaaacaa

SEQ ID NO: 3553710 - RNA, 12 nt, Human
aagcugaaaaua

SEQ ID NO: 3553711 - RNA, 13 nt, Human
aagcugaaauuuu

SEQ ID NO: 3553712 - RNA, 15 nt, Human
aagcugaagccgcca

SEQ ID NO: 3553713 - RNA, 19 nt, Human
aagcugaagugcauccaaa

SEQ ID NO: 3553714 - RNA, 21 nt, Human
aagcugaagugcauccaaagg

SEQ ID NO: 3553715 - RNA, 23 nt, Human
aagcugaauacauucugcuuuca

SEQ ID NO: 3553716 - RNA, 21 nt, Human
aagcugaaucagacaguggau

SEQ ID NO: 3553717 - RNA, 20 nt, Human
aagcugacgaacuuccaugg

SEQ ID NO: 3553718 - RNA, 17 nt, Human
aagcugacuuggcuggu

SEQ ID NO: 3553719 - RNA, 19 nt, Human
aagcugacuuggcuggugu

SEQ ID NO: 3553720 - RNA, 14 nt, Human
aagcugaggcggga

SEQ ID NO: 3553721 - RNA, 19 nt, Human
aagcugaggugcccaggag

SEQ ID NO: 3553722 - RNA, 18 nt, Human
aagcugaguauuaaaaug

SEQ ID NO: 3553723 - RNA, 19 nt, Human
aagcugaguauuaaaaugu

SEQ ID NO: 3553724 - RNA, 22 nt, Human
aagcugaucauaagugaauuua

SEQ ID NO: 3553725 - RNA, 19 nt, Human
aagcugauuacugucaaua

SEQ ID NO: 3553726 - RNA, 18 nt, Human
aagcugauuuuuuuuaau

SEQ ID NO: 3553727 - RNA, 15 nt, Human
aagcugcaaaucuga

SEQ ID NO: 3553728 - RNA, 13 nt, Human
aagcugcacccuc

SEQ ID NO: 3553729 - RNA, 19 nt, Human
aagcugcacccucaggcag

SEQ ID NO: 3553730 - RNA, 12 nt, Human
aagcugcagcuu

SEQ ID NO: 3553731 - RNA, 14 nt, Human
aagcugcagcuucc

SEQ ID NO: 3553732 - RNA, 15 nt, Human
aagcugcagcuuccu

SEQ ID NO: 3553733 - RNA, 17 nt, Human
aagcugcagcuuccugu

SEQ ID NO: 3553734 - RNA, 15 nt, Human
aagcugccucccugu

SEQ ID NO: 3553735 - RNA, 12 nt, Human
aagcugccugcu

SEQ ID NO: 3553736 - RNA, 15 nt, Human
aagcugccugcuuuu

SEQ ID NO: 3553737 - RNA, 14 nt, Human
aagcugccuguagu

SEQ ID NO: 3553738 - RNA, 19 nt, Human
aagcugccuguaguuagga

SEQ ID NO: 3553739 - RNA, 17 nt, Human
aagcugcuccaggccug

SEQ ID NO: 3553740 - RNA, 16 nt, Human
aagcugcucuggaauu

SEQ ID NO: 3553741 - RNA, 14 nt, Human
aagcugcugacagu

SEQ ID NO: 3553742 - RNA, 21 nt, Human
aagcugcugaccaauugugcu

SEQ ID NO: 3553743 - RNA, 14 nt, Human
aagcugcuuuauuc

SEQ ID NO: 3553744 - RNA, 14 nt, Human
aagcugcuuuugac

SEQ ID NO: 3553745 - RNA, 20 nt, Human
aagcuggcugggguggccug

SEQ ID NO: 3553746 - RNA, 23 nt, Human
aagcuggcugggguggccugugu

SEQ ID NO: 3553747 - RNA, 18 nt, Human
aagcuggucccacucagu

SEQ ID NO: 3553748 - RNA, 19 nt, Human
aagcugguggcagaguccu

SEQ ID NO: 3553749 - RNA, 17 nt, Human
aagcugguggccuuggc

SEQ ID NO: 3553750 - RNA, 17 nt, Human
aagcuggugggugaaag

SEQ ID NO: 3553751 - RNA, 17 nt, Human
aagcuguaaaaagagag

SEQ ID NO: 3553752 - RNA, 17 nt, Human
aagcugugacccucaau

SEQ ID NO: 3553753 - RNA, 22 nt, Human
aagcugugagacagugggaaau

SEQ ID NO: 3553754 - RNA, 20 nt, Human
aagcuguguccuugcaccug

SEQ ID NO: 3553755 - RNA, 22 nt, Human
aagcuguguccuugcaccugca

SEQ ID NO: 3553756 - RNA, 20 nt, Human
aagcuguuaaacuguuagca

SEQ ID NO: 3553757 - RNA, 18 nt, Human
aagcuguuacugucuuca

SEQ ID NO: 3553758 - RNA, 14 nt, Human
aagcuguucuuccu

SEQ ID NO: 3553759 - RNA, 15 nt, Human
aagcuguucuuccug

SEQ ID NO: 3553760 - RNA, 14 nt, Human
aagcuguuguacau

SEQ ID NO: 3553761 - RNA, 23 nt, Human
aagcuguuuccauagggugacac

SEQ ID NO: 3553762 - RNA, 21 nt, Human
aagcuguuuggaaaagacagu

SEQ ID NO: 3553763 - RNA, 20 nt, Human
aagcuguuugguuuuaaaau

SEQ ID NO: 3553764 - RNA, 15 nt, Human
aagcuuaaaaaaaac

SEQ ID NO: 3553765 - RNA, 19 nt, Human
aagcuuaauggcugauaau

SEQ ID NO: 3553766 - RNA, 16 nt, Human
aagcuuagcaggagag

SEQ ID NO: 3553767 - RNA, 13 nt, Human
aagggucaggccu

SEQ ID NO: 3553768 - RNA, 20 nt, Human
aagggucaggccuuugagcu

SEQ ID NO: 3553769 - RNA, 17 nt, Human
aagggucuagggagaga

SEQ ID NO: 3553770 - RNA, 24 nt, Human
aagggucuccgaaaugcugucuuu

SEQ ID NO: 3553771 - RNA, 15 nt, Human
aagggucuugggaaa

SEQ ID NO: 3553772 - RNA, 16 nt, Human
aagggugaaaauuauu

SEQ ID NO: 3553773 - RNA, 21 nt, Human
aaggguguugggagggugguu

SEQ ID NO: 3553774 - RNA, 17 nt, Human
aaggguucuggcugccc

SEQ ID NO: 3553775 - RNA, 16 nt, Human
aaggguucuguaaaau

SEQ ID NO: 3553776 - RNA, 17 nt, Human
aaggguuuguggcuggg

SEQ ID NO: 3553777 - RNA, 20 nt, Human
aaggguuuguggcugggggc

SEQ ID NO: 3553778 - RNA, 16 nt, Human
aaggguuuuaauguag

SEQ ID NO: 3553779 - RNA, 21 nt, Human
aaggguuuuccacccuggaau

SEQ ID NO: 3553780 - RNA, 22 nt, Human
aagguaaaaugccaugaugccu

SEQ ID NO: 3553781 - RNA, 14 nt, Human
aagguacuucaaau

SEQ ID NO: 3553782 - RNA, 19 nt, Human
aagguacuuucauauuuua

SEQ ID NO: 3553783 - RNA, 22 nt, Human
aagguacuuucauauuuuaaac

SEQ ID NO: 3553784 - RNA, 17 nt, Human
aagguagaaccucaccu

SEQ ID NO: 3553785 - RNA, 20 nt, Human
aagguagcauucuuuggagu

SEQ ID NO: 3553786 - RNA, 14 nt, Human
aagguagccauccc

SEQ ID NO: 3553787 - RNA, 20 nt, Human
aagguagcuuaccugacaca

SEQ ID NO: 3553788 - RNA, 22 nt, Human
aagguaggguaggcagccugag

SEQ ID NO: 3553789 - RNA, 18 nt, Human
aagguauaauaaaauuau

SEQ ID NO: 3553790 - RNA, 11 nt, Human
aagguauaauu

SEQ ID NO: 3553791 - RNA, 16 nt, Human
aagguauaucauucua

SEQ ID NO: 3553792 - RNA, 19 nt, Human
aagguaucaguugcaauaa

SEQ ID NO: 3553793 - RNA, 22 nt, Human
aagguauuccuuuuguguacag

SEQ ID NO: 3553794 - RNA, 17 nt, Human
aagguauuugggaaacu

SEQ ID NO: 3553795 - RNA, 21 nt, Human
aagguauuugggaaacuuguc

SEQ ID NO: 3553796 - RNA, 22 nt, Human
aagguauuugggaaacuuguca

SEQ ID NO: 3553797 - RNA, 19 nt, Human
aagguauuuugaauaccau

SEQ ID NO: 3553798 - RNA, 12 nt, Human
aaggucauuuuu

SEQ ID NO: 3553799 - RNA, 20 nt, Human
aaggucguuuuuuucauucc

SEQ ID NO: 3553800 - RNA, 13 nt, Human
aaggucugagcca

SEQ ID NO: 3553801 - RNA, 18 nt, Human
aaggucuguuugcuguug

SEQ ID NO: 3553802 - RNA, 18 nt, Human
aacuguuagcacuguuga

SEQ ID NO: 3553803 - RNA, 16 nt, Human
aacuguuaugaaauaa

SEQ ID NO: 3553804 - RNA, 17 nt, Human
aacuguuauuuauaauc

SEQ ID NO: 3553805 - RNA, 15 nt, Human
aacuguucccaccug

SEQ ID NO: 3553806 - RNA, 18 nt, Human
aacuguugccagagaugg

SEQ ID NO: 3553807 - RNA, 18 nt, Human
aacuguuguagaagacaa

SEQ ID NO: 3553808 - RNA, 19 nt, Human
aacuguuguagaagacaaa

SEQ ID NO: 3553809 - RNA, 16 nt, Human
aacuguuucaaagcca

SEQ ID NO: 3553810 - RNA, 17 nt, Human
aacuuaaaaaaaugaca

SEQ ID NO: 3553811 - RNA, 14 nt, Human
aacuuaaauaauaa

SEQ ID NO: 3553812 - RNA, 15 nt, Human
aacuuaaauguuauu

SEQ ID NO: 3553813 - RNA, 16 nt, Human
aacuuaacauauuuac

SEQ ID NO: 3553814 - RNA, 15 nt, Human
aacuuaacaugggcu

SEQ ID NO: 3553815 - RNA, 15 nt, Human
aacuuaagaaacacu

SEQ ID NO: 3553816 - RNA, 14 nt, Human
aacuuaagcaaagg

SEQ ID NO: 3553817 - RNA, 20 nt, Human
aacuuaauaaucaagagccu

SEQ ID NO: 3553818 - RNA, 16 nt, Human
aacuuaaucuaaaugg

SEQ ID NO: 3553819 - RNA, 13 nt, Human
aacuuaaugaaaa

SEQ ID NO: 3553820 - RNA, 23 nt, Human
aacuuaauguucuuaugcaaaau

SEQ ID NO: 3553821 - RNA, 21 nt, Human
aacuuacauuguucaauuaga

SEQ ID NO: 3553822 - RNA, 22 nt, Human
aacuuacauuguucaauuagaa

SEQ ID NO: 3553823 - RNA, 23 nt, Human
aacuuacccuguauaucagggua

SEQ ID NO: 3553824 - RNA, 15 nt, Human
aacuuacugauuauu

SEQ ID NO: 3553825 - RNA, 14 nt, Human
aacuuacuuagugu

SEQ ID NO: 3553826 - RNA, 15 nt, Human
aacuuagaauaaaau

SEQ ID NO: 3553827 - RNA, 20 nt, Human
aacuuagacucuaguauuua

SEQ ID NO: 3553828 - RNA, 16 nt, Human
aacuuagcauguguug

SEQ ID NO: 3553829 - RNA, 21 nt, Human
aacuuagcuuaugaguagcuu

SEQ ID NO: 3553830 - RNA, 19 nt, Human
aacuuaguguaauauacca

SEQ ID NO: 3553831 - RNA, 12 nt, Human
aacuuaguuuug

SEQ ID NO: 3553832 - RNA, 14 nt, Human
aacuuauaaaucau

SEQ ID NO: 3553833 - RNA, 23 nt, Human
aacuuauaucaucagcauaccuu

SEQ ID NO: 3553834 - RNA, 12 nt, Human
aacuuauauuga

SEQ ID NO: 3553835 - RNA, 21 nt, Human
aacuuauauuguaagaaauac

SEQ ID NO: 3553836 - RNA, 16 nt, Human
aacuuaugaauguuuc

SEQ ID NO: 3553837 - RNA, 21 nt, Human
aacuuaugaccucuuccuuua

SEQ ID NO: 3553838 - RNA, 14 nt, Human
aacuuauguagaua

SEQ ID NO: 3553839 - RNA, 22 nt, Human
aacuuauucaaagagaaaacau

SEQ ID NO: 3553840 - RNA, 19 nt, Human
aacuuauuuuaaauaugcc

SEQ ID NO: 3553841 - RNA, 18 nt, Human
aacuuauuuuuuucugau

SEQ ID NO: 3553842 - RNA, 22 nt, Human
aacuuauuuuuuucugauugua

SEQ ID NO: 3553843 - RNA, 14 nt, Human
aacuucaacauuua

SEQ ID NO: 3553844 - RNA, 16 nt, Human
aacuucacaacuaggc

SEQ ID NO: 3553845 - RNA, 13 nt, Human
aacuucacauauu

SEQ ID NO: 3553846 - RNA, 22 nt, Human
aacuucaccauauuaccacaga

SEQ ID NO: 3553847 - RNA, 23 nt, Human
aacuucagagggaaaguaaauau

SEQ ID NO: 3553848 - RNA, 17 nt, Human
aacuucagcuguacuuc

SEQ ID NO: 3553849 - RNA, 21 nt, Human
aacuucaggauaauaaagugu

SEQ ID NO: 3553850 - RNA, 19 nt, Human
aacuucaguuucacagaaa

SEQ ID NO: 3553851 - RNA, 16 nt, Human
aacuucaucuggaagu

SEQ ID NO: 3553852 - RNA, 16 nt, Human
aacuucaucugucugu

SEQ ID NO: 3553853 - RNA, 12 nt, Human
aacuucauggau

SEQ ID NO: 3553854 - RNA, 13 nt, Human
aacuuccaaagaa

SEQ ID NO: 3553855 - RNA, 14 nt, Human
aacuuccaaagaaa

SEQ ID NO: 3553856 - RNA, 17 nt, Human
aacuuccaaagaaaguu

SEQ ID NO: 3553857 - RNA, 23 nt, Human
aacuuccaaauaaauaauuuuca

SEQ ID NO: 3553858 - RNA, 22 nt, Human
aacuuccagguguuacuguaau

SEQ ID NO: 3553859 - RNA, 23 nt, Human
aacuuccccauacaaauaagcau

SEQ ID NO: 3553860 - RNA, 17 nt, Human
aacuuccccaucuucua

SEQ ID NO: 3553861 - RNA, 22 nt, Human
aacuucccgucccauauccugc

SEQ ID NO: 3553862 - RNA, 23 nt, Human
aacuucccgucccauauccugcc

SEQ ID NO: 3553863 - RNA, 15 nt, Human
aacuuccugcaggua

SEQ ID NO: 3553864 - RNA, 23 nt, Human
aacuucgcaucaaaagacaauuc

SEQ ID NO: 3553865 - RNA, 13 nt, Human
aacuucuaaaacu

SEQ ID NO: 3553866 - RNA, 23 nt, Human
aacuucuaaaacuguacuuugau

SEQ ID NO: 3553867 - RNA, 16 nt, Human
aacuucuaauugccau

SEQ ID NO: 3553868 - RNA, 17 nt, Human
aacuucuaauugccaug

SEQ ID NO: 3553869 - RNA, 14 nt, Human
aacuucucucagac

SEQ ID NO: 3553870 - RNA, 22 nt, Human
aacuucugcaacaagcaugcag

SEQ ID NO: 3553871 - RNA, 15 nt, Human
aacuucuuauggaau

SEQ ID NO: 3553872 - RNA, 16 nt, Human
aacuucuuauggaauu

SEQ ID NO: 3553873 - RNA, 19 nt, Human
aacuucuuauggaauugau

SEQ ID NO: 3553874 - RNA, 24 nt, Human
aacuucuuauggaauugauuugca

SEQ ID NO: 3553875 - RNA, 11 nt, Human
aacuucuucag

SEQ ID NO: 3553876 - RNA, 12 nt, Human
aacuucuugcuu

SEQ ID NO: 3553877 - RNA, 18 nt, Human
aacuucuugcuucuuucu

SEQ ID NO: 3553878 - RNA, 14 nt, Human
aacuucuugucaga

SEQ ID NO: 3553879 - RNA, 16 nt, Human
aacuucuugucagaca

SEQ ID NO: 3553880 - RNA, 18 nt, Human
aacuucuugucagacaua

SEQ ID NO: 3553881 - RNA, 22 nt, Human
aacuucuugucagacauaaagc

SEQ ID NO: 3553882 - RNA, 14 nt, Human
aacuugaaaauaua

SEQ ID NO: 3553883 - RNA, 19 nt, Human
aacuugaaauuauaucugu

SEQ ID NO: 3553884 - RNA, 18 nt, Human
aacuugaagccugcuccu

SEQ ID NO: 3553885 - RNA, 21 nt, Human
aacuugagaacuuuauuucca

SEQ ID NO: 3553886 - RNA, 21 nt, Human
aacuugagccugucaagaggc

SEQ ID NO: 3553887 - RNA, 22 nt, Human
aacuugagcgugaaucuguauc

SEQ ID NO: 3553888 - RNA, 13 nt, Human
aacuugaggacac

SEQ ID NO: 3553889 - RNA, 17 nt, Human
aacuugaggacacaugu

SEQ ID NO: 3553890 - RNA, 18 nt, Human
aacuugaggacacauguc

SEQ ID NO: 3553891 - RNA, 23 nt, Human
aacuugagguggccuccuugcuu

SEQ ID NO: 3553892 - RNA, 18 nt, Human
aacuugcaaaaucaguuu

SEQ ID NO: 3553893 - RNA, 14 nt, Human
aacuugccuuugaa

SEQ ID NO: 3553894 - RNA, 15 nt, Human
aacuugccuuugaag

SEQ ID NO: 3553895 - RNA, 14 nt, Human
aacuugcugccucg

SEQ ID NO: 3553896 - RNA, 16 nt, Human
aacuugcugcugucuu

SEQ ID NO: 3553897 - RNA, 12 nt, Human
aacuugcuuaaa

SEQ ID NO: 3553898 - RNA, 17 nt, Human
aacuugcuuaaauguga

SEQ ID NO: 3553899 - RNA, 15 nt, Human
aacuugcuuaaauuu

SEQ ID NO: 3553900 - RNA, 18 nt, Human
aacuugcuuaaauuucuu

SEQ ID NO: 3553901 - RNA, 19 nt, Human
aacuugcuuaaauuucuua

SEQ ID NO: 3553902 - RNA, 21 nt, Human
aacuugcuuaaauuucuuaug

SEQ ID NO: 3553903 - RNA, 15 nt, Human
aacuuggagccccag

SEQ ID NO: 3553904 - RNA, 12 nt, Human
aacuuggagccg

SEQ ID NO: 3553905 - RNA, 14 nt, Human
aacuuggcgcugcc

SEQ ID NO: 3553906 - RNA, 22 nt, Human
aacuuggcucgaaucucugugc

SEQ ID NO: 3553907 - RNA, 22 nt, Human
aacuugggagugugguuucuuu

SEQ ID NO: 3553908 - RNA, 22 nt, Human
aacuuggggaguuaagaccugg

SEQ ID NO: 3553909 - RNA, 17 nt, Human
aacuugguauuuuucag

SEQ ID NO: 3553910 - RNA, 14 nt, Human
aacuugguuauaca

SEQ ID NO: 3553911 - RNA, 11 nt, Human
aaguuuucagg

SEQ ID NO: 3553912 - RNA, 22 nt, Human
aaguuuucccuugaggaaacaa

SEQ ID NO: 3553913 - RNA, 20 nt, Human
aaguuuuccuacacuugaga

SEQ ID NO: 3553914 - RNA, 21 nt, Human
aaguuuucuguagucauuuac

SEQ ID NO: 3553915 - RNA, 16 nt, Human
aaguuuugaaaagcua

SEQ ID NO: 3553916 - RNA, 13 nt, Human
aaguuuuguacag

SEQ ID NO: 3553917 - RNA, 13 nt, Human
aaguuuugugaaa

SEQ ID NO: 3553918 - RNA, 14 nt, Human
aaguuuugugaaau

SEQ ID NO: 3553919 - RNA, 15 nt, Human
aaguuuugugaaauu

SEQ ID NO: 3553920 - RNA, 18 nt, Human
aaguuuugugaaauuuuu

SEQ ID NO: 3553921 - RNA, 21 nt, Human
aaguuuugugaaauuuuucau

SEQ ID NO: 3553922 - RNA, 14 nt, Human
aaguuuuuguacug

SEQ ID NO: 3553923 - RNA, 12 nt, Human
aaguuuuuuugc

SEQ ID NO: 3553924 - RNA, 15 nt, Human
aauaaaaaagauccc

SEQ ID NO: 3553925 - RNA, 16 nt, Human
aauaaaaaauuaugac

SEQ ID NO: 3553926 - RNA, 12 nt, Human
aauaaaaacuau

SEQ ID NO: 3553927 - RNA, 14 nt, Human
aauaaaaagacaac

SEQ ID NO: 3553928 - RNA, 19 nt, Human
aauaaaaagaucacuuucu

SEQ ID NO: 3553929 - RNA, 16 nt, Human
aauaaaaagcuuuugu

SEQ ID NO: 3553930 - RNA, 18 nt, Human
aauaaaaagcuuuugucu

SEQ ID NO: 3553931 - RNA, 13 nt, Human
aauaaaaagugac

SEQ ID NO: 3553932 - RNA, 15 nt, Human
aauaaaaaguuaaaa

SEQ ID NO: 3553933 - RNA, 16 nt, Human
aauaaaaauaaauuug

SEQ ID NO: 3553934 - RNA, 17 nt, Human
aauaaaaauuaaggcaa

SEQ ID NO: 3553935 - RNA, 21 nt, Human
aauaaaacagcugucucuaac

SEQ ID NO: 3553936 - RNA, 14 nt, Human
aauaaaacauuaug

SEQ ID NO: 3553937 - RNA, 17 nt, Human
aauaaaacauuuucaca

SEQ ID NO: 3553938 - RNA, 13 nt, Human
aauaaaaccagcu

SEQ ID NO: 3553939 - RNA, 15 nt, Human
aauaaaaccuuucaa

SEQ ID NO: 3553940 - RNA, 12 nt, Human
aauaaaacugau

SEQ ID NO: 3553941 - RNA, 15 nt, Human
aauaaaacugaugug

SEQ ID NO: 3553942 - RNA, 19 nt, Human
aauaaaagaaaugcacaau

SEQ ID NO: 3553943 - RNA, 16 nt, Human
aauaaaagauauaaau

SEQ ID NO: 3553944 - RNA, 13 nt, Human
aauaaaagcccag

SEQ ID NO: 3553945 - RNA, 19 nt, Human
aauaaaagcccaggagccc

SEQ ID NO: 3553946 - RNA, 12 nt, Human
aauaaaaggaaa

SEQ ID NO: 3553947 - RNA, 13 nt, Human
aauaaaaggaaaa

SEQ ID NO: 3553948 - RNA, 14 nt, Human
aauaaaagugcaca

SEQ ID NO: 3553949 - RNA, 19 nt, Human
aauaaaagugcacaccuua

SEQ ID NO: 3553950 - RNA, 14 nt, Human
aauaaaauaaaaau

SEQ ID NO: 3553951 - RNA, 17 nt, Human
aauaaaauaauucuaaa

SEQ ID NO: 3553952 - RNA, 14 nt, Human
aauaaaauauaauu

SEQ ID NO: 3553953 - RNA, 14 nt, Human
aauaaaauaucauu

SEQ ID NO: 3553954 - RNA, 16 nt, Human
aauaaaauaucauuca

SEQ ID NO: 3553955 - RNA, 18 nt, Human
aauaaaauaucauucagc

SEQ ID NO: 3553956 - RNA, 20 nt, Human
aauaaaauaucauucagcaa

SEQ ID NO: 3553957 - RNA, 13 nt, Human
aauaaaaucaauu

SEQ ID NO: 3553958 - RNA, 18 nt, Human
aauaaaaucauguacauu

SEQ ID NO: 3553959 - RNA, 19 nt, Human
aauaaaaugaaaauuguau

SEQ ID NO: 3553960 - RNA, 19 nt, Human
aauaaaaugaggacauguu

SEQ ID NO: 3553961 - RNA, 13 nt, Human
aauaaaaugugau

SEQ ID NO: 3553962 - RNA, 18 nt, Human
aauaaaauuaaagcugaa

SEQ ID NO: 3553963 - RNA, 14 nt, Human
aauaaaauuauuug

SEQ ID NO: 3553964 - RNA, 16 nt, Human
aauaaaauuauuugca

SEQ ID NO: 3553965 - RNA, 19 nt, Human
aauaaaauuauuugcaggu

SEQ ID NO: 3553966 - RNA, 22 nt, Human
aauaaaauucaacaaacauuug

SEQ ID NO: 3553967 - RNA, 19 nt, Human
aauaaaauucccuaaagcc

SEQ ID NO: 3553968 - RNA, 14 nt, Human
aauaaaauugcacu

SEQ ID NO: 3553969 - RNA, 14 nt, Human
aauaaaauuguaaa

SEQ ID NO: 3553970 - RNA, 11 nt, Human
aauaaaauuug

SEQ ID NO: 3553971 - RNA, 17 nt, Human
aauaaaauuuguugcau

SEQ ID NO: 3553972 - RNA, 19 nt, Human
aauaaaauuuuuuuucaug

SEQ ID NO: 3553973 - RNA, 22 nt, Human
aauaaacacauagauucaccug

SEQ ID NO: 3553974 - RNA, 13 nt, Human
aauaaacacugug

SEQ ID NO: 3553975 - RNA, 22 nt, Human
aauaaacagcuucaugccuuug

SEQ ID NO: 3553976 - RNA, 12 nt, Human
aauaaacaggag

SEQ ID NO: 3553977 - RNA, 23 nt, Human
aauaaacauccuucaagaacucu

SEQ ID NO: 3553978 - RNA, 17 nt, Human
aauaaaccaaaggacau

SEQ ID NO: 3553979 - RNA, 21 nt, Human
aauaaaccaaaggacauuaug

SEQ ID NO: 3553980 - RNA, 15 nt, Human
aauaaacgucuuaaa

SEQ ID NO: 3553981 - RNA, 17 nt, Human
aauaaacgucuuaaaua

SEQ ID NO: 3553982 - RNA, 14 nt, Human
aauaaacuacucuu

SEQ ID NO: 3553983 - RNA, 17 nt, Human
aauaaacuacucuuuga

SEQ ID NO: 3553984 - RNA, 19 nt, Human
aauaaacuacucuuugauu

SEQ ID NO: 3553985 - RNA, 19 nt, Human
aauaaacuuagaauaaaau

SEQ ID NO: 3553986 - RNA, 12 nt, Human
aauaaacuuucu

SEQ ID NO: 3553987 - RNA, 13 nt, Human
aauaaacuuuuuu

SEQ ID NO: 3553988 - RNA, 20 nt, Human
aauaaacuuuuuuuugagaa

SEQ ID NO: 3553989 - RNA, 16 nt, Human
aauaaagaaaagaugc

SEQ ID NO: 3553990 - RNA, 14 nt, Human
aauaaagaauacuu

SEQ ID NO: 3553991 - RNA, 18 nt, Human
aauaaagaguuagaauga

SEQ ID NO: 3553992 - RNA, 19 nt, Human
aauaaagaucauguaaaag

SEQ ID NO: 3553993 - RNA, 12 nt, Human
aauaaagcaauu

SEQ ID NO: 3553994 - RNA, 24 nt, Human
aauaaagcaauuuuccuugaagcc

SEQ ID NO: 3553995 - RNA, 14 nt, Human
aauaaagcagcguu

SEQ ID NO: 3553996 - RNA, 14 nt, Human
aauaaagcugcuga

SEQ ID NO: 3553997 - RNA, 11 nt, Human
aauaaaggacu

SEQ ID NO: 3553998 - RNA, 18 nt, Human
aauaaaggaugugauugu

SEQ ID NO: 3553999 - RNA, 19 nt, Human
aauaaagguaugaaagggu

SEQ ID NO: 3554000 - RNA, 9 nt, Human
aauaaagua

SEQ ID NO: 3554001 - RNA, 14 nt, Human
aauaaaguauauaa

SEQ ID NO: 3554002 - RNA, 15 nt, Human
aauaaaguauauaua

SEQ ID NO: 3554003 - RNA, 11 nt, Human
aauaaaguauc

SEQ ID NO: 3554004 - RNA, 18 nt, Human
aauaaaguaucaugcauu

SEQ ID NO: 3554005 - RNA, 19 nt, Human
aagacauaacguuuuuccu

SEQ ID NO: 3554006 - RNA, 20 nt, Human
aagacauaacguuuuuccuu

SEQ ID NO: 3554007 - RNA, 23 nt, Human
aagacauacuccuuccaucaaau

SEQ ID NO: 3554008 - RNA, 18 nt, Human
aagacauagcauccaagu

SEQ ID NO: 3554009 - RNA, 21 nt, Human
aagacauccauaaagaagcaa

SEQ ID NO: 3554010 - RNA, 13 nt, Human
aagacaugaacca

SEQ ID NO: 3554011 - RNA, 12 nt, Human
aagacaugaagc

SEQ ID NO: 3554012 - RNA, 15 nt, Human
aagacaugaauauga

SEQ ID NO: 3554013 - RNA, 14 nt, Human
aagacaugcagccu

SEQ ID NO: 3554014 - RNA, 16 nt, Human
aagacaugucuguucu

SEQ ID NO: 3554015 - RNA, 18 nt, Human
aagacauuaaaucuauga

SEQ ID NO: 3554016 - RNA, 21 nt, Human
aagacauuaguaacauaauaa

SEQ ID NO: 3554017 - RNA, 18 nt, Human
aagacauucuuauauuuc

SEQ ID NO: 3554018 - RNA, 21 nt, Human
aagacauucuuccaaaaagau

SEQ ID NO: 3554019 - RNA, 18 nt, Human
aagaccaaaaugacaaug

SEQ ID NO: 3554020 - RNA, 19 nt, Human
aagaccaccucaaauuuaa

SEQ ID NO: 3554021 - RNA, 12 nt, Human
aagaccagccug

SEQ ID NO: 3554022 - RNA, 13 nt, Human
aagaccauuuuuc

SEQ ID NO: 3554023 - RNA, 13 nt, Human
aagacccaaaagg

SEQ ID NO: 3554024 - RNA, 22 nt, Human
aagaccccacccaagcuuggca

SEQ ID NO: 3554025 - RNA, 15 nt, Human
aagacccccagcacu

SEQ ID NO: 3554026 - RNA, 15 nt, Human
aagaccccuaacccu

SEQ ID NO: 3554027 - RNA, 15 nt, Human
aagacccgagcuggg

SEQ ID NO: 3554028 - RNA, 18 nt, Human
aagacccuaaacauccau

SEQ ID NO: 3554029 - RNA, 22 nt, Human
aagacccucuugcccauccuga

SEQ ID NO: 3554030 - RNA, 22 nt, Human
aagacccuuguggucccacccc

SEQ ID NO: 3554031 - RNA, 21 nt, Human
aagaccuacuguucuaaagcu

SEQ ID NO: 3554032 - RNA, 18 nt, Human
aagaccuagugcucuuaa

SEQ ID NO: 3554033 - RNA, 15 nt, Human
aagaccucagggcac

SEQ ID NO: 3554034 - RNA, 12 nt, Human
aagaccuggcaa

SEQ ID NO: 3554035 - RNA, 17 nt, Human
aagaccuggcagcucug

SEQ ID NO: 3554036 - RNA, 19 nt, Human
aagaccugggguugucagc

SEQ ID NO: 3554037 - RNA, 18 nt, Human
aagaccuucuccuucacc

SEQ ID NO: 3554038 - RNA, 20 nt, Human
aagaccuuuuucugcacuau

SEQ ID NO: 3554039 - RNA, 16 nt, Human
aagacgcaccagccca

SEQ ID NO: 3554040 - RNA, 15 nt, Human
aagacgcugugcugc

SEQ ID NO: 3554041 - RNA, 18 nt, Human
aagacgcugugcugcccu

SEQ ID NO: 3554042 - RNA, 20 nt, Human
aagacgcugugcugcccugc

SEQ ID NO: 3554043 - RNA, 21 nt, Human
aagacgcugugcugcccugcc

SEQ ID NO: 3554044 - RNA, 19 nt, Human
aagacggcacggucuuccc

SEQ ID NO: 3554045 - RNA, 23 nt, Human
aagacgugauuuugcuguagaag

SEQ ID NO: 3554046 - RNA, 17 nt, Human
aagacguuuuauaagca

SEQ ID NO: 3554047 - RNA, 16 nt, Human
aagacuaucuaaaugu

SEQ ID NO: 3554048 - RNA, 17 nt, Human
aagacuaucuaaauguu

SEQ ID NO: 3554049 - RNA, 14 nt, Human
aagacuauucaaac

SEQ ID NO: 3554050 - RNA, 10 nt, Human
aagacucauc

SEQ ID NO: 3554051 - RNA, 11 nt, Human
aagacucaucc

SEQ ID NO: 3554052 - RNA, 17 nt, Human
aagacuccaaagaaaug

SEQ ID NO: 3554053 - RNA, 13 nt, Human
aagacuccagaaa

SEQ ID NO: 3554054 - RNA, 22 nt, Human
aagacucccaugagggagaugc

SEQ ID NO: 3554055 - RNA, 12 nt, Human
aagacucuagag

SEQ ID NO: 3554056 - RNA, 15 nt, Human
aagacucuagagucc

SEQ ID NO: 3554057 - RNA, 22 nt, Human
aagacucuuuuugguuguccuc

SEQ ID NO: 3554058 - RNA, 12 nt, Human
aauaacauguaa

SEQ ID NO: 3554059 - RNA, 22 nt, Human
aauaaccacuuaaaaaaugucc

SEQ ID NO: 3554060 - RNA, 22 nt, Human
aauaaccccauucuuugcuuga

SEQ ID NO: 3554061 - RNA, 16 nt, Human
aauaacuccucccagg

SEQ ID NO: 3554062 - RNA, 13 nt, Human
aauaacugaauuu

SEQ ID NO: 3554063 - RNA, 21 nt, Human
aauaacugauuaguaagucuu

SEQ ID NO: 3554064 - RNA, 16 nt, Human
aauaacugugaaguuu

SEQ ID NO: 3554065 - RNA, 22 nt, Human
aauaagaaacaacucuuugaga

SEQ ID NO: 3554066 - RNA, 15 nt, Human
aauaagaagcaaaua

SEQ ID NO: 3554067 - RNA, 18 nt, Human
aauaagaauagaaauaaa

SEQ ID NO: 3554068 - RNA, 20 nt, Human
aauaagaauagaacaacaua

SEQ ID NO: 3554069 - RNA, 14 nt, Human
aauaagaaugauuu

SEQ ID NO: 3554070 - RNA, 14 nt, Human
aauaagaauuuagg

SEQ ID NO: 3554071 - RNA, 12 nt, Human
aauaagaauuug

SEQ ID NO: 3554072 - RNA, 16 nt, Human
aauaagaauuugcaua

SEQ ID NO: 3554073 - RNA, 14 nt, Human
aauaagagaaagaa

SEQ ID NO: 3554074 - RNA, 16 nt, Human
aauaagauacaucaca

SEQ ID NO: 3554075 - RNA, 14 nt, Human
aauaagaucuuuuu

SEQ ID NO: 3554076 - RNA, 13 nt, Human
aauaagauucuaa

SEQ ID NO: 3554077 - RNA, 17 nt, Human
aauaagcacuuuuuaaa

SEQ ID NO: 3554078 - RNA, 13 nt, Human
aauaagcuaaaga

SEQ ID NO: 3554079 - RNA, 14 nt, Human
aauaagcuaaagag

SEQ ID NO: 3554080 - RNA, 19 nt, Human
aauaagcuacuagcaaaau

SEQ ID NO: 3554081 - RNA, 20 nt, Human
aauaagcuacuagcaaaaua

SEQ ID NO: 3554082 - RNA, 14 nt, Human
aauaagcuauuuga

SEQ ID NO: 3554083 - RNA, 18 nt, Human
aauaagcuauuugaugua

SEQ ID NO: 3554084 - RNA, 21 nt, Human
aauaagcuauuugauguaaua

SEQ ID NO: 3554085 - RNA, 14 nt, Human
aauaaggaaaagcu

SEQ ID NO: 3554086 - RNA, 13 nt, Human
aauaaggaaaagu

SEQ ID NO: 3554087 - RNA, 19 nt, Human
aauaaggaaaaguuuaaua

SEQ ID NO: 3554088 - RNA, 22 nt, Human
aauaaggaaaaguuuaauauua

SEQ ID NO: 3554089 - RNA, 14 nt, Human
aauaaggauuuuuc

SEQ ID NO: 3554090 - RNA, 21 nt, Human
aauaagggaaaaaucaaguau

SEQ ID NO: 3554091 - RNA, 19 nt, Human
aauaagguacaagaagcau

SEQ ID NO: 3554092 - RNA, 15 nt, Human
aauaagucugauuua

SEQ ID NO: 3554093 - RNA, 18 nt, Human
aauaagugcccucuccca

SEQ ID NO: 3554094 - RNA, 17 nt, Human
aauaagugguuauuucu

SEQ ID NO: 3554095 - RNA, 22 nt, Human
aauaagugugugguagaaacaa

SEQ ID NO: 3554096 - RNA, 22 nt, Human
aauaaguuaacuauuuuauuuu

SEQ ID NO: 3554097 - RNA, 22 nt, Human
aauaaguucaaauucuucugaa

SEQ ID NO: 3554098 - RNA, 21 nt, Human
aauaauaaaagauucaccuga

SEQ ID NO: 3554099 - RNA, 13 nt, Human
aauaauaaaauca

SEQ ID NO: 3554100 - RNA, 12 nt, Human
aauaauaaagaa

SEQ ID NO: 3554101 - RNA, 16 nt, Human
aauaauaaauaguucu

SEQ ID NO: 3554102 - RNA, 14 nt, Human
aauaauaaauauuu

SEQ ID NO: 3554103 - RNA, 21 nt, Human
aauaauaaauugcaugcugcu

SEQ ID NO: 3554104 - RNA, 18 nt, Human
aauaauaccuaagccuuc

SEQ ID NO: 3554105 - RNA, 18 nt, Human
aauaauagauugugaaua

SEQ ID NO: 3554106 - RNA, 17 nt, Human
aauaauaguaugaguaa

SEQ ID NO: 3554107 - RNA, 12 nt, Human
aauaauauacuu

SEQ ID NO: 3554108 - RNA, 20 nt, Human
aauaauauccaggucaacag

SEQ ID NO: 3554109 - RNA, 22 nt, Human
aauaauauccaggucaacagaa

SEQ ID NO: 3554110 - RNA, 11 nt, Human
aauaauaugca

SEQ ID NO: 3554111 - RNA, 12 nt, Human
aauaauaugcau

SEQ ID NO: 3554112 - RNA, 22 nt, Human
aauaauauuguuuuucuuucua

SEQ ID NO: 3554113 - RNA, 11 nt, Human
aauaaucaaga

SEQ ID NO: 3554114 - RNA, 13 nt, Human
aauaaucauugga

SEQ ID NO: 3554115 - RNA, 13 nt, Human
aauaaucuuauua

SEQ ID NO: 3554116 - RNA, 14 nt, Human
aauaaucuuugggu

SEQ ID NO: 3554117 - RNA, 22 nt, Human
aauaaugaauggacucaaacug

SEQ ID NO: 3554118 - RNA, 22 nt, Human
aauaaugagcuauuaaaacuca

SEQ ID NO: 3554119 - RNA, 19 nt, Human
aauaaugcuacaauuuuaa

SEQ ID NO: 3554120 - RNA, 13 nt, Human
aauaaugcuuuga

SEQ ID NO: 3554121 - RNA, 19 nt, Human
aauaaugggcuuagagcag

SEQ ID NO: 3554122 - RNA, 13 nt, Human
aauaaugguacca

SEQ ID NO: 3554123 - RNA, 23 nt, Human
aauaaugguaccagauaaaauua

SEQ ID NO: 3554124 - RNA, 21 nt, Human
aauaauggucccauccaggca

SEQ ID NO: 3554125 - RNA, 12 nt, Human
aauaauguaaga

SEQ ID NO: 3554126 - RNA, 19 nt, Human
aauaauguacaucuggccu

SEQ ID NO: 3554127 - RNA, 20 nt, Human
aauaaugucuuguuaauauu

SEQ ID NO: 3554128 - RNA, 17 nt, Human
aauaaugugaaacugga

SEQ ID NO: 3554129 - RNA, 21 nt, Human
aauaaugugggaagaaacaaa

SEQ ID NO: 3554130 - RNA, 14 nt, Human
aauaauguguaguu

SEQ ID NO: 3554131 - RNA, 20 nt, Human
aauaauguguaguucaugua

SEQ ID NO: 3554132 - RNA, 22 nt, Human
aauaauguguaguucauguaaa

SEQ ID NO: 3554133 - RNA, 19 nt, Human
aauaauuacagugccuaaa

SEQ ID NO: 3554134 - RNA, 20 nt, Human
aauaauuauaugcuauuucu

SEQ ID NO: 3554135 - RNA, 21 nt, Human
aauaauuauaugcuauuucua

SEQ ID NO: 3554136 - RNA, 18 nt, Human
aauaauuauccagaguuu

SEQ ID NO: 3554137 - RNA, 18 nt, Human
aauaauuauuuauuuaau

SEQ ID NO: 3554138 - RNA, 19 nt, Human
aauaauucauauucuucau

SEQ ID NO: 3554139 - RNA, 17 nt, Human
aauaauucugaguuuug

SEQ ID NO: 3554140 - RNA, 19 nt, Human
aauaauucugaguuuugug

SEQ ID NO: 3554141 - RNA, 15 nt, Human
aauaauucuuugauu

SEQ ID NO: 3554142 - RNA, 21 nt, Human
aauaauugaucaaauucauuu

SEQ ID NO: 3554143 - RNA, 21 nt, Human
aauaauugcagaacuaaacuc

SEQ ID NO: 3554144 - RNA, 22 nt, Human
aauaauuguuguucuguuaacu

SEQ ID NO: 3554145 - RNA, 23 nt, Human
aauaauuuaacuacccuuaauua

SEQ ID NO: 3554146 - RNA, 22 nt, Human
aauaauuucccaauuaggaagu

SEQ ID NO: 3554147 - RNA, 20 nt, Human
aauaauuuccuggugugaag

SEQ ID NO: 3554148 - RNA, 21 nt, Human
aauaauuuccuggugugaagg

SEQ ID NO: 3554149 - RNA, 15 nt, Human
aauaauuucuaaugu

SEQ ID NO: 3554150 - RNA, 16 nt, Human
aauaauuucuaauguu

SEQ ID NO: 3554151 - RNA, 15 nt, Human
aauaauuucucuaca

SEQ ID NO: 3554152 - RNA, 21 nt, Human
aauaauuuuaggcacccaucc

SEQ ID NO: 3554153 - RNA, 14 nt, Human
aauaauuuuaugaa

SEQ ID NO: 3554154 - RNA, 22 nt, Human
aauaauuuuaugaacugcaugu

SEQ ID NO: 3554155 - RNA, 13 nt, Human
aauaauuuuguaa

SEQ ID NO: 3554156 - RNA, 15 nt, Human
aauaauuuuguaaug

SEQ ID NO: 3554157 - RNA, 17 nt, Human
aauaauuuuuauauuua

SEQ ID NO: 3554158 - RNA, 22 nt, Human
aauaauuuuuauauuuaauuau

SEQ ID NO: 3554159 - RNA, 22 nt, Human
aauaauuuuucacuucaaaaca

SEQ ID NO: 3554160 - RNA, 20 nt, Human
aauacaaaaauuagccgggc

SEQ ID NO: 3554161 - RNA, 16 nt, Human
aauacaaaaggcucca

SEQ ID NO: 3554162 - RNA, 11 nt, Human
aauacaaacaa

SEQ ID NO: 3554163 - RNA, 13 nt, Human
aauacaaacaaug

SEQ ID NO: 3554164 - RNA, 17 nt, Human
aauacaaacauauuugu

SEQ ID NO: 3554165 - RNA, 21 nt, Human
aauacaaacauauuuguuaaa

SEQ ID NO: 3554166 - RNA, 12 nt, Human
aauacaaaugga

SEQ ID NO: 3554167 - RNA, 18 nt, Human
aauacaacuuaaauaaua

SEQ ID NO: 3554168 - RNA, 12 nt, Human
aauacaagguau

SEQ ID NO: 3554169 - RNA, 20 nt, Human
aauacaagguauaauaaaau

SEQ ID NO: 3554170 - RNA, 22 nt, Human
aauacaagguauaauaaaauua

SEQ ID NO: 3554171 - RNA, 16 nt, Human
aauacaaguucuauuu

SEQ ID NO: 3554172 - RNA, 11 nt, Human
aauacaauaaa

SEQ ID NO: 3554173 - RNA, 15 nt, Human
aauacaauuuuguuu

SEQ ID NO: 3554174 - RNA, 22 nt, Human
aauacaauuuuguuucuguacu

SEQ ID NO: 3554175 - RNA, 22 nt, Human
aauacaauuuuuauuucuuuua

SEQ ID NO: 3554176 - RNA, 20 nt, Human
aauacaauuuuuuuuauuag

SEQ ID NO: 3554177 - RNA, 16 nt, Human
aauacacaaaaucaaa

SEQ ID NO: 3554178 - RNA, 17 nt, Human
aauacacacaaguauac

SEQ ID NO: 3554179 - RNA, 14 nt, Human
aauacacacucaaa

SEQ ID NO: 3554180 - RNA, 20 nt, Human
aauacaccaccucacuccug

SEQ ID NO: 3554181 - RNA, 16 nt, Human
aauacacuaguuguuu

SEQ ID NO: 3554182 - RNA, 17 nt, Human
aauacacuaguuguuuc

SEQ ID NO: 3554183 - RNA, 15 nt, Human
aauacagacacuaag

SEQ ID NO: 3554184 - RNA, 13 nt, Human
aauacagauauau

SEQ ID NO: 3554185 - RNA, 15 nt, Human
aauacagaucaucuu

SEQ ID NO: 3554186 - RNA, 19 nt, Human
aauacagauuuugauagca

SEQ ID NO: 3554187 - RNA, 20 nt, Human
aauacagauuuugauagcaa

SEQ ID NO: 3554188 - RNA, 21 nt, Human
aauacagauuuugauagcaaa

SEQ ID NO: 3554189 - RNA, 18 nt, Human
aauacagcagcaagaaaa

SEQ ID NO: 3554190 - RNA, 24 nt, Human
aauacagccaaagauaaucucuca

SEQ ID NO: 3554191 - RNA, 14 nt, Human
aauacagcuuucug

SEQ ID NO: 3554192 - RNA, 15 nt, Human
aauacaggaaacagu

SEQ ID NO: 3554193 - RNA, 23 nt, Human
aauacagggcaugcauuuugcag

SEQ ID NO: 3554194 - RNA, 21 nt, Human
aauacaguaagcugcucuauu

SEQ ID NO: 3554195 - RNA, 18 nt, Human
aauacaguacaggcagca

SEQ ID NO: 3554196 - RNA, 15 nt, Human
aauacaguauucugu

SEQ ID NO: 3554197 - RNA, 16 nt, Human
aauacagucuuccaca

SEQ ID NO: 3554198 - RNA, 18 nt, Human
aauacagucuuccacaaa

SEQ ID NO: 3554199 - RNA, 21 nt, Human
aauacagucuuccauuugcaa

SEQ ID NO: 3554200 - RNA, 12 nt, Human
aauacaguguua

SEQ ID NO: 3554201 - RNA, 18 nt, Human
aauacaguuguuggccuc

SEQ ID NO: 3554202 - RNA, 22 nt, Human
aagaggcaguugcccagccucu

SEQ ID NO: 3554203 - RNA, 14 nt, Human
aagaggcgggccag

SEQ ID NO: 3554204 - RNA, 20 nt, Human
aagaggcgggccagccaggc

SEQ ID NO: 3554205 - RNA, 19 nt, Human
aagaggcgucuguauauuu

SEQ ID NO: 3554206 - RNA, 15 nt, Human
aagaggcuacagggc

SEQ ID NO: 3554207 - RNA, 16 nt, Human
aagaggcugaaagagg

SEQ ID NO: 3554208 - RNA, 14 nt, Human
aagaggcugaggca

SEQ ID NO: 3554209 - RNA, 20 nt, Human
aagaggcugaggccuggacu

SEQ ID NO: 3554210 - RNA, 17 nt, Human
aagaggcugccccucuc

SEQ ID NO: 3554211 - RNA, 22 nt, Human
aagaggcugccccucucaccaa

SEQ ID NO: 3554212 - RNA, 16 nt, Human
aagaggcugcccuccu

SEQ ID NO: 3554213 - RNA, 13 nt, Human
aagaggcugguuc

SEQ ID NO: 3554214 - RNA, 13 nt, Human
aagaggcugguuu

SEQ ID NO: 3554215 - RNA, 19 nt, Human
aagaggggaccagaagcca

SEQ ID NO: 3554216 - RNA, 15 nt, Human
aagaggggcugggcu

SEQ ID NO: 3554217 - RNA, 13 nt, Human
aagagggggugga

SEQ ID NO: 3554218 - RNA, 19 nt, Human
aagaggggugcagaggcug

SEQ ID NO: 3554219 - RNA, 14 nt, Human
aagagggguggaga

SEQ ID NO: 3554220 - RNA, 15 nt, Human
aagagggguggagac

SEQ ID NO: 3554221 - RNA, 15 nt, Human
aagagguauaaagcu

SEQ ID NO: 3554222 - RNA, 21 nt, Human
aagaggugaccccagggcaca

SEQ ID NO: 3554223 - RNA, 15 nt, Human
aagaggugggagggc

SEQ ID NO: 3554224 - RNA, 20 nt, Human
aagaguagaaacugcaggga

SEQ ID NO: 3554225 - RNA, 13 nt, Human
aagaguagacauu

SEQ ID NO: 3554226 - RNA, 13 nt, Human
aagaguaggaaga

SEQ ID NO: 3554227 - RNA, 22 nt, Human
aagaguaguugauguugcauuu

SEQ ID NO: 3554228 - RNA, 18 nt, Human
aagaguccauuguuuaaa

SEQ ID NO: 3554229 - RNA, 15 nt, Human
aagagucgcugugcc

SEQ ID NO: 3554230 - RNA, 14 nt, Human
aagagucuagauuc

SEQ ID NO: 3554231 - RNA, 16 nt, Human
aagagucuauugucuc

SEQ ID NO: 3554232 - RNA, 17 nt, Human
aagagucuggggaccag

SEQ ID NO: 3554233 - RNA, 13 nt, Human
aagagucuuucuu

SEQ ID NO: 3554234 - RNA, 20 nt, Human
aagagugacuaguacaaauu

SEQ ID NO: 3554235 - RNA, 18 nt, Human
aagagugacucuccaggg

SEQ ID NO: 3554236 - RNA, 19 nt, Human
aagagugacucuccagggg

SEQ ID NO: 3554237 - RNA, 16 nt, Human
aagagugauucuugcu

SEQ ID NO: 3554238 - RNA, 21 nt, Human
aagagugauugcagcuuuaug

SEQ ID NO: 3554239 - RNA, 15 nt, Human
aagaguggaggugga

SEQ ID NO: 3554240 - RNA, 16 nt, Human
aagaguggccccaccu

SEQ ID NO: 3554241 - RNA, 17 nt, Human
aagaguggccccaccug

SEQ ID NO: 3554242 - RNA, 16 nt, Human
aagagugggcugcauc

SEQ ID NO: 3554243 - RNA, 15 nt, Human
aagaguguaaaauau

SEQ ID NO: 3554244 - RNA, 12 nt, Human
aagaguguacug

SEQ ID NO: 3554245 - RNA, 14 nt, Human
aagaguguagaagc

SEQ ID NO: 3554246 - RNA, 15 nt, Human
aagaguguagaagca

SEQ ID NO: 3554247 - RNA, 22 nt, Human
aagaguguagaagcauuccuuc

SEQ ID NO: 3554248 - RNA, 19 nt, Human
aagaguguagaucagagca

SEQ ID NO: 3554249 - RNA, 21 nt, Human
aagaguguggagucauucuca

SEQ ID NO: 3554250 - RNA, 23 nt, Human
aagaguguggagucauucucauu

SEQ ID NO: 3554251 - RNA, 12 nt, Human
aagaguguggca

SEQ ID NO: 3554252 - RNA, 21 nt, Human
aagaguugccccgucucuguu

SEQ ID NO: 3554253 - RNA, 19 nt, Human
aagaguuucaguuuguugg

SEQ ID NO: 3554254 - RNA, 21 nt, Human
aagaguuugagaccugaauag

SEQ ID NO: 3554255 - RNA, 14 nt, Human
aagaguuuugggag

SEQ ID NO: 3554256 - RNA, 20 nt, Human
aagauaacaagaucuuucag

SEQ ID NO: 3554257 - RNA, 17 nt, Human
aagauaauugcuauuua

SEQ ID NO: 3554258 - RNA, 18 nt, Human
aagauacaaauuaauuuu

SEQ ID NO: 3554259 - RNA, 20 nt, Human
aagauacagaacucuuucaa

SEQ ID NO: 3554260 - RNA, 22 nt, Human
aagauacagccugcaaguggua

SEQ ID NO: 3554261 - RNA, 17 nt, Human
aagauacaguuacucag

SEQ ID NO: 3554262 - RNA, 13 nt, Human
aagauaccuaaaa

SEQ ID NO: 3554263 - RNA, 22 nt, Human
aagauaccuaaaagagauuuca

SEQ ID NO: 3554264 - RNA, 16 nt, Human
aagauaccuuaaaauu

SEQ ID NO: 3554265 - RNA, 20 nt, Human
aagauaccuuaaaauuugaa

SEQ ID NO: 3554266 - RNA, 23 nt, Human
aagauaccuuaaaauuugaaaca

SEQ ID NO: 3554267 - RNA, 21 nt, Human
aagauaccuuuuuuuuucuuu

SEQ ID NO: 3554268 - RNA, 18 nt, Human
aagauacgacuuuauuuu

SEQ ID NO: 3554269 - RNA, 20 nt, Human
aagauacuaaggacguuguu

SEQ ID NO: 3554270 - RNA, 14 nt, Human
aagauacuuaagug

SEQ ID NO: 3554271 - RNA, 13 nt, Human
aagauagacaggu

SEQ ID NO: 3554272 - RNA, 17 nt, Human
aagauagacagguccug

SEQ ID NO: 3554273 - RNA, 13 nt, Human
aagauaggcucug

SEQ ID NO: 3554274 - RNA, 16 nt, Human
aagauagucuuggaag

SEQ ID NO: 3554275 - RNA, 19 nt, Human
aagauauaagugcuguaua

SEQ ID NO: 3554276 - RNA, 16 nt, Human
aagauauacuuguuuu

SEQ ID NO: 3554277 - RNA, 15 nt, Human
aagauauauuaaaaa

SEQ ID NO: 3554278 - RNA, 13 nt, Human
aagauaucuuuuc

SEQ ID NO: 3554279 - RNA, 17 nt, Human
aagauauggagaauugc

SEQ ID NO: 3554280 - RNA, 16 nt, Human
aagauaugggacauuu

SEQ ID NO: 3554281 - RNA, 17 nt, Human
aagauauuguacauaaa

SEQ ID NO: 3554282 - RNA, 18 nt, Human
aagauauuuauauauauu

SEQ ID NO: 3554283 - RNA, 11 nt, Human
aagauauuuua

SEQ ID NO: 3554284 - RNA, 12 nt, Human
aagauauuuuau

SEQ ID NO: 3554285 - RNA, 17 nt, Human
aagauauuuugcuuugu

SEQ ID NO: 3554286 - RNA, 20 nt, Human
aagauauuuugcuuugugau

SEQ ID NO: 3554287 - RNA, 22 nt, Human
aagauauuuugcuuugugauuu

SEQ ID NO: 3554288 - RNA, 17 nt, Human
aagauauuuuucaugau

SEQ ID NO: 3554289 - RNA, 13 nt, Human
aagauauuuuucc

SEQ ID NO: 3554290 - RNA, 23 nt, Human
aagaucaaaagguuaauaaagua

SEQ ID NO: 3554291 - RNA, 15 nt, Human
aagaucaaaauaaaa

SEQ ID NO: 3554292 - RNA, 12 nt, Human
aagaucaauaaa

SEQ ID NO: 3554293 - RNA, 20 nt, Human
aagaucacuguuuagauuug

SEQ ID NO: 3554294 - RNA, 14 nt, Human
aagauccaagaagg

SEQ ID NO: 3554295 - RNA, 14 nt, Human
aagaucccauuuga

SEQ ID NO: 3554296 - RNA, 23 nt, Human
aagauccuaccccaauuccuugu

SEQ ID NO: 3554297 - RNA, 21 nt, Human
aagaucgguuaacaaauaaca

SEQ ID NO: 3554298 - RNA, 14 nt, Human
aagaucguuaguau

SEQ ID NO: 3554299 - RNA, 17 nt, Human
aagaucguucucugccu

SEQ ID NO: 3554300 - RNA, 12 nt, Human
aagaucuaaauc

SEQ ID NO: 3554301 - RNA, 18 nt, Human
aagaucucagugguuaag

SEQ ID NO: 3554302 - RNA, 18 nt, Human
aagaucuguccucagccu

SEQ ID NO: 3554303 - RNA, 19 nt, Human
aagaucuguccucagccuu

SEQ ID NO: 3554304 - RNA, 20 nt, Human
aagaucuguccucagccuug

SEQ ID NO: 3554305 - RNA, 21 nt, Human
aagaucuguuuugaaggcaaa

SEQ ID NO: 3554306 - RNA, 14 nt, Human
aagaucuuaaauuu

SEQ ID NO: 3554307 - RNA, 14 nt, Human
aagaucuuagauuc

SEQ ID NO: 3554308 - RNA, 15 nt, Human
aagaucuuagauucu

SEQ ID NO: 3554309 - RNA, 23 nt, Human
aagaucuuagauucucugugucu

SEQ ID NO: 3554310 - RNA, 22 nt, Human
aagaucuucaaaaguaaugccu

SEQ ID NO: 3554311 - RNA, 13 nt, Human
aagaugaaaauau

SEQ ID NO: 3554312 - RNA, 14 nt, Human
aagaugaaaauauu

SEQ ID NO: 3554313 - RNA, 21 nt, Human
aagaugaaaggcaggccuauu

SEQ ID NO: 3554314 - RNA, 17 nt, Human
aagaugaacagacugac

SEQ ID NO: 3554315 - RNA, 14 nt, Human
aagaugaacucuga

SEQ ID NO: 3554316 - RNA, 18 nt, Human
aagaugaaggucuguuuu

SEQ ID NO: 3554317 - RNA, 20 nt, Human
aagaugacauugcuaagaug

SEQ ID NO: 3554318 - RNA, 21 nt, Human
aagaugacauugcuaagaugc

SEQ ID NO: 3554319 - RNA, 14 nt, Human
aagaugacuuccca

SEQ ID NO: 3554320 - RNA, 15 nt, Human
aagaugacuucccaa

SEQ ID NO: 3554321 - RNA, 19 nt, Human
aagaugagaacagauaaag

SEQ ID NO: 3554322 - RNA, 20 nt, Human
aagaugagauuggcauggcu

SEQ ID NO: 3554323 - RNA, 14 nt, Human
aagaugaucauuug

SEQ ID NO: 3554324 - RNA, 17 nt, Human
aagaugaucuacucaga

SEQ ID NO: 3554325 - RNA, 16 nt, Human
aauagcaucuguacaa

SEQ ID NO: 3554326 - RNA, 20 nt, Human
aauagcaucuguacaaaggg

SEQ ID NO: 3554327 - RNA, 14 nt, Human
aauagcauguauug

SEQ ID NO: 3554328 - RNA, 16 nt, Human
aauagcauguuguaga

SEQ ID NO: 3554329 - RNA, 22 nt, Human
aauagccaacacccaucuguuu

SEQ ID NO: 3554330 - RNA, 20 nt, Human
aauagccacauuuggaauac

SEQ ID NO: 3554331 - RNA, 23 nt, Human
aauagccacauuuggaauacuuu

SEQ ID NO: 3554332 - RNA, 23 nt, Human
aauagccacuaaccuugccuggu

SEQ ID NO: 3554333 - RNA, 15 nt, Human
aauagccauauuugu

SEQ ID NO: 3554334 - RNA, 21 nt, Human
aauagccauauuuguaaaaug

SEQ ID NO: 3554335 - RNA, 14 nt, Human
aauagcguucuugu

SEQ ID NO: 3554336 - RNA, 18 nt, Human
aauagcguucuuguaauu

SEQ ID NO: 3554337 - RNA, 19 nt, Human
aauagcguucuuguaauuu

SEQ ID NO: 3554338 - RNA, 20 nt, Human
aauagcuagacuggugacug

SEQ ID NO: 3554339 - RNA, 19 nt, Human
aauagcucuuucagggggg

SEQ ID NO: 3554340 - RNA, 21 nt, Human
aauagcugcccauuucgugag

SEQ ID NO: 3554341 - RNA, 13 nt, Human
aauaggaaacaag

SEQ ID NO: 3554342 - RNA, 19 nt, Human
aauaggaaucauucagaaa

SEQ ID NO: 3554343 - RNA, 22 nt, Human
aauaggaaucauucagaaaugu

SEQ ID NO: 3554344 - RNA, 15 nt, Human
aauaggcaaauuaau

SEQ ID NO: 3554345 - RNA, 16 nt, Human
aauaggcaaauuaauc

SEQ ID NO: 3554346 - RNA, 19 nt, Human
aauaggcggggcuugccuu

SEQ ID NO: 3554347 - RNA, 23 nt, Human
aauacaucccuuaccugggaaag

SEQ ID NO: 3554348 - RNA, 18 nt, Human
aauacaugccacaucaaa

SEQ ID NO: 3554349 - RNA, 14 nt, Human
aauacaugcugcua

SEQ ID NO: 3554350 - RNA, 13 nt, Human
aauacauuaaagc

SEQ ID NO: 3554351 - RNA, 17 nt, Human
aauacauugaauuagaa

SEQ ID NO: 3554352 - RNA, 17 nt, Human
aauacauuuaaaacauu

SEQ ID NO: 3554353 - RNA, 21 nt, Human
aauacauuuaaaacauuaaaa

SEQ ID NO: 3554354 - RNA, 21 nt, Human
aauaccacucuguaauugcaa

SEQ ID NO: 3554355 - RNA, 18 nt, Human
aauaccauuaaaacugcu

SEQ ID NO: 3554356 - RNA, 15 nt, Human
aauaccauuuaguaa

SEQ ID NO: 3554357 - RNA, 21 nt, Human
aauacccaugucuacacagau

SEQ ID NO: 3554358 - RNA, 20 nt, Human
aauaccccaagacucccaug

SEQ ID NO: 3554359 - RNA, 17 nt, Human
aauaccucaauguuuga

SEQ ID NO: 3554360 - RNA, 15 nt, Human
aauaccucauguuua

SEQ ID NO: 3554361 - RNA, 23 nt, Human
aauaccucauguuuaugaaaaua

SEQ ID NO: 3554362 - RNA, 14 nt, Human
aauaccucuuagcu

SEQ ID NO: 3554363 - RNA, 17 nt, Human
aauaccugaaugcucug

SEQ ID NO: 3554364 - RNA, 12 nt, Human
aauaccugcuca

SEQ ID NO: 3554365 - RNA, 15 nt, Human
aauaccugucccccu

SEQ ID NO: 3554366 - RNA, 13 nt, Human
aauaccuuagaag

SEQ ID NO: 3554367 - RNA, 19 nt, Human
aauacgcaggcaucugauu

SEQ ID NO: 3554368 - RNA, 19 nt, Human
aauacgugggcauucaaau

SEQ ID NO: 3554369 - RNA, 15 nt, Human
aauacuaaggaacca

SEQ ID NO: 3554370 - RNA, 15 nt, Human
aauacuacuccugua

SEQ ID NO: 3554371 - RNA, 14 nt, Human
aauacuauuuaaga

SEQ ID NO: 3554372 - RNA, 15 nt, Human
aauacuauuuuuacu

SEQ ID NO: 3554373 - RNA, 23 nt, Human
aauacucagggaaagcauuuaaa

SEQ ID NO: 3554374 - RNA, 16 nt, Human
aauacucauguguaug

SEQ ID NO: 3554375 - RNA, 15 nt, Human
aauacucuaauucua

SEQ ID NO: 3554376 - RNA, 12 nt, Human
aauacucuauuu

SEQ ID NO: 3554377 - RNA, 13 nt, Human
aauacucuuauau

SEQ ID NO: 3554378 - RNA, 14 nt, Human
aauacucuuuauuu

SEQ ID NO: 3554379 - RNA, 13 nt, Human
aauacugaaccac

SEQ ID NO: 3554380 - RNA, 15 nt, Human
aauacugaaccacuu

SEQ ID NO: 3554381 - RNA, 16 nt, Human
aauacugagaaaaccu

SEQ ID NO: 3554382 - RNA, 18 nt, Human
aauacugauggaauuuuu

SEQ ID NO: 3554383 - RNA, 16 nt, Human
aaucucaaggaaucuu

SEQ ID NO: 3554384 - RNA, 16 nt, Human
aaucucaauauuucag

SEQ ID NO: 3554385 - RNA, 16 nt, Human
aaucucaauccugcag

SEQ ID NO: 3554386 - RNA, 17 nt, Human
aaucucaauucuucccu

SEQ ID NO: 3554387 - RNA, 14 nt, Human
aaucucaauuugag

SEQ ID NO: 3554388 - RNA, 23 nt, Human
aaucucacauauacaaguagcuu

SEQ ID NO: 3554389 - RNA, 22 nt, Human
aaucucaccccaucccacaccc

SEQ ID NO: 3554390 - RNA, 22 nt, Human
aaucucagcaaugauuacucuu

SEQ ID NO: 3554391 - RNA, 14 nt, Human
aaucucagugcuuu

SEQ ID NO: 3554392 - RNA, 16 nt, Human
aaucucaguugauuuu

SEQ ID NO: 3554393 - RNA, 18 nt, Human
aaucucauaauuuauaca

SEQ ID NO: 3554394 - RNA, 16 nt, Human
aaucucauaccucuga

SEQ ID NO: 3554395 - RNA, 22 nt, Human
aaucucauaccucugaccaaca

SEQ ID NO: 3554396 - RNA, 12 nt, Human
aaucucauuugg

SEQ ID NO: 3554397 - RNA, 18 nt, Human
aaucuccaaaauaaaacu

SEQ ID NO: 3554398 - RNA, 22 nt, Human
aaucucccauuuuggaauuugc

SEQ ID NO: 3554399 - RNA, 17 nt, Human
aaucucccgcugcugcu

SEQ ID NO: 3554400 - RNA, 19 nt, Human
aaucucccgcugcugcugc

SEQ ID NO: 3554401 - RNA, 18 nt, Human
aaucucccuucacaaguu

SEQ ID NO: 3554402 - RNA, 15 nt, Human
aaucuccucuuuuau

SEQ ID NO: 3554403 - RNA, 18 nt, Human
aaucucggcucacugcau

SEQ ID NO: 3554404 - RNA, 19 nt, Human
aaucucguauagaagucuu

SEQ ID NO: 3554405 - RNA, 20 nt, Human
aaucucguauagaagucuuc

SEQ ID NO: 3554406 - RNA, 21 nt, Human
aaucucuacaaacccucugua

SEQ ID NO: 3554407 - RNA, 15 nt, Human
aaucucuaggaaguc

SEQ ID NO: 3554408 - RNA, 13 nt, Human
aaucucuauacug

SEQ ID NO: 3554409 - RNA, 19 nt, Human
aaucucuccacuuucagcu

SEQ ID NO: 3554410 - RNA, 16 nt, Human
aaucucuccauucccg

SEQ ID NO: 3554411 - RNA, 19 nt, Human
aaucucucugcagcugccg

SEQ ID NO: 3554412 - RNA, 21 nt, Human
aaucucugauucccugauuua

SEQ ID NO: 3554413 - RNA, 13 nt, Human
aaucucuguuaug

SEQ ID NO: 3554414 - RNA, 12 nt, Human
aaucucuucugu

SEQ ID NO: 3554415 - RNA, 19 nt, Human
aaucucuucuuauacagau

SEQ ID NO: 3554416 - RNA, 20 nt, Human
aaucucuuuuugcuuucgaa

SEQ ID NO: 3554417 - RNA, 14 nt, Human
aaucugaaauucua

SEQ ID NO: 3554418 - RNA, 14 nt, Human
aaucugaagauugu

SEQ ID NO: 3554419 - RNA, 21 nt, Human
aaucugaagauuguuuaucua

SEQ ID NO: 3554420 - RNA, 15 nt, Human
aaucugaauguaauu

SEQ ID NO: 3554421 - RNA, 18 nt, Human
aaucugaauguaauuugu

SEQ ID NO: 3554422 - RNA, 18 nt, Human
aaucugaauuggaaugca

SEQ ID NO: 3554423 - RNA, 15 nt, Human
aaucugacccagugc

SEQ ID NO: 3554424 - RNA, 19 nt, Human
aaucugagggaaauguuuu

SEQ ID NO: 3554425 - RNA, 22 nt, Human
aaucugagggaaauguuuugua

SEQ ID NO: 3554426 - RNA, 16 nt, Human
aaucugagggagcuga

SEQ ID NO: 3554427 - RNA, 20 nt, Human
aaucugauauguauuguuug

SEQ ID NO: 3554428 - RNA, 14 nt, Human
aaucugauggccuu

SEQ ID NO: 3554429 - RNA, 16 nt, Human
aaucugauggccuuaa

SEQ ID NO: 3554430 - RNA, 21 nt, Human
aaucugauggccuuaauuucc

SEQ ID NO: 3554431 - RNA, 17 nt, Human
aaucugcagaaggaaaa

SEQ ID NO: 3554432 - RNA, 16 nt, Human
aaucugcauuauugga

SEQ ID NO: 3554433 - RNA, 17 nt, Human
aaucugcauuuagcaca

SEQ ID NO: 3554434 - RNA, 12 nt, Human
aaucugccuggg

SEQ ID NO: 3554435 - RNA, 20 nt, Human
aaucugcucacuuuaaaccu

SEQ ID NO: 3554436 - RNA, 22 nt, Human
aaucugcuuuuuaaagaaugcu

SEQ ID NO: 3554437 - RNA, 15 nt, Human
aaucuggaagaaaaa

SEQ ID NO: 3554438 - RNA, 16 nt, Human
aaucuggacuccucug

SEQ ID NO: 3554439 - RNA, 14 nt, Human
aaucuggagugagg

SEQ ID NO: 3554440 - RNA, 19 nt, Human
aaucuggaugccucauuau

SEQ ID NO: 3554441 - RNA, 16 nt, Human
aaucuggauucauauu

SEQ ID NO: 3554442 - RNA, 23 nt, Human
aaucuggcuucuggccaggaagc

SEQ ID NO: 3554443 - RNA, 18 nt, Human
aaucugggccagaauuuc

SEQ ID NO: 3554444 - RNA, 20 nt, Human
aaucuggucuuguuagaaaa

SEQ ID NO: 3554445 - RNA, 11 nt, Human
aaucuguaaaa

SEQ ID NO: 3554446 - RNA, 23 nt, Human
aaucuguaaacuguguauuccaa

SEQ ID NO: 3554447 - RNA, 12 nt, Human
aaucuguacauu

SEQ ID NO: 3554448 - RNA, 19 nt, Human
aaucuguagggcuggaccu

SEQ ID NO: 3554449 - RNA, 22 nt, Human
aaucugucacguagaacuugga

SEQ ID NO: 3554450 - RNA, 19 nt, Human
aaucugugaacuugaaauu

SEQ ID NO: 3554451 - RNA, 16 nt, Human
aaucugugcuguuuca

SEQ ID NO: 3554452 - RNA, 19 nt, Human
aaucugugggucugggagu

SEQ ID NO: 3554453 - RNA, 13 nt, Human
aaucuguguacaa

SEQ ID NO: 3554454 - RNA, 17 nt, Human
aaucuguguauauuauu

SEQ ID NO: 3554455 - RNA, 18 nt, Human
aaucuguguauauuauuu

SEQ ID NO: 3554456 - RNA, 12 nt, Human
aaucuguuaucc

SEQ ID NO: 3554457 - RNA, 14 nt, Human
aaucuguuauccca

SEQ ID NO: 3554458 - RNA, 11 nt, Human
aaucuguugcc

SEQ ID NO: 3554459 - RNA, 17 nt, Human
aaucuguuugaucccug

SEQ ID NO: 3554460 - RNA, 17 nt, Human
aaucuuaaaaaguuguu

SEQ ID NO: 3554461 - RNA, 14 nt, Human
aaucuuaagaaaua

SEQ ID NO: 3554462 - RNA, 20 nt, Human
aaucuuaagguguagccaca

SEQ ID NO: 3554463 - RNA, 13 nt, Human
aaucuuaauguuc

SEQ ID NO: 3554464 - RNA, 23 nt, Human
aaucuuacagcuggguggcacug

SEQ ID NO: 3554465 - RNA, 16 nt, Human
aaucuuacuuuguaaa

SEQ ID NO: 3554466 - RNA, 17 nt, Human
aaucuuacuuuguaaau

SEQ ID NO: 3554467 - RNA, 23 nt, Human
aaucuuaguguaugauuacuggc

SEQ ID NO: 3554468 - RNA, 14 nt, Human
aaucuuauaauugu

SEQ ID NO: 3554469 - RNA, 15 nt, Human
aaucuuauaauuguu

SEQ ID NO: 3554470 - RNA, 15 nt, Human
aaucuuauauuccau

SEQ ID NO: 3554471 - RNA, 18 nt, Human
aaucuuauuaaaguuuca

SEQ ID NO: 3554472 - RNA, 21 nt, Human
aaucuuauuaaaguuucaaaa

SEQ ID NO: 3554473 - RNA, 16 nt, Human
aaucuucaaagccuuc

SEQ ID NO: 3554474 - RNA, 21 nt, Human
aaucuucauggaauucacaaa

SEQ ID NO: 3554475 - RNA, 23 nt, Human
aaucuucauggaauucacaaagu

SEQ ID NO: 3554476 - RNA, 13 nt, Human
aaucuucugaacu

SEQ ID NO: 3554477 - RNA, 23 nt, Human
aaucuugaucaguuaagaaauuu

SEQ ID NO: 3554478 - RNA, 13 nt, Human
aaucuugcucugc

SEQ ID NO: 3554479 - RNA, 17 nt, Human
aaucuugucauguguau

SEQ ID NO: 3554480 - RNA, 18 nt, Human
aaucuugucauguguaua

SEQ ID NO: 3554481 - RNA, 19 nt, Human
aaucuugucauguguauaa

SEQ ID NO: 3554482 - RNA, 17 nt, Human
aaucuugucucaaugcu

SEQ ID NO: 3554483 - RNA, 21 nt, Human
aaucuugucucaaugcucaua

SEQ ID NO: 3554484 - RNA, 19 nt, Human
aaucuuguuucugaaaaga

SEQ ID NO: 3554485 - RNA, 17 nt, Human
aaucuuuaaaagaugcu

SEQ ID NO: 3554486 - RNA, 21 nt, Human
aaucuuuaaaagaugcuuuua

SEQ ID NO: 3554487 - RNA, 15 nt, Human
aaucuuuaaaccaau

SEQ ID NO: 3554488 - RNA, 23 nt, Human
aaucuuuaaaccaauugcugcua

SEQ ID NO: 3554489 - RNA, 15 nt, Human
aaucuuuaccuguau

SEQ ID NO: 3554490 - RNA, 22 nt, Human
aaucuuuaccuguauacagugc

SEQ ID NO: 3554491 - RNA, 21 nt, Human
aaucuuuagagaaguauacau

SEQ ID NO: 3554492 - RNA, 15 nt, Human
aagcugaguuuccua

SEQ ID NO: 3554493 - RNA, 13 nt, Human
aagcugauccugc

SEQ ID NO: 3554494 - RNA, 16 nt, Human
aagcugauuaaaugac

SEQ ID NO: 3554495 - RNA, 16 nt, Human
aagcugauuacuguca

SEQ ID NO: 3554496 - RNA, 23 nt, Human
aagcugauuacugucaauaaaca

SEQ ID NO: 3554497 - RNA, 21 nt, Human
aagcugcacccucaggcaggu

SEQ ID NO: 3554498 - RNA, 11 nt, Human
aagcugcagcu

SEQ ID NO: 3554499 - RNA, 13 nt, Human
aagcugcagcuuc

SEQ ID NO: 3554500 - RNA, 16 nt, Human
aagcugcagcuuccug

SEQ ID NO: 3554501 - RNA, 11 nt, Human
aagcugccagc

SEQ ID NO: 3554502 - RNA, 20 nt, Human
aagcugcccacuguuucucu

SEQ ID NO: 3554503 - RNA, 16 nt, Human
aagcugccucaaggaa

SEQ ID NO: 3554504 - RNA, 23 nt, Human
aagcugccuccccucuccuuccu

SEQ ID NO: 3554505 - RNA, 14 nt, Human
aagcugccucccug

SEQ ID NO: 3554506 - RNA, 17 nt, Human
aagcugccucccugucc

SEQ ID NO: 3554507 - RNA, 15 nt, Human
aagcugccuguaguu

SEQ ID NO: 3554508 - RNA, 21 nt, Human
aagcugccuguaguuaggaaa

SEQ ID NO: 3554509 - RNA, 22 nt, Human
aagcugccuguaguuaggaaau

SEQ ID NO: 3554510 - RNA, 23 nt, Human
aagcugcucaacuugcaaaauca

SEQ ID NO: 3554511 - RNA, 12 nt, Human
aagcugcucuga

SEQ ID NO: 3554512 - RNA, 19 nt, Human
aagcugcucugagccacag

SEQ ID NO: 3554513 - RNA, 13 nt, Human
aagcugcugacca

SEQ ID NO: 3554514 - RNA, 21 nt, Human
aagcugcugagaaucuagccu

SEQ ID NO: 3554515 - RNA, 14 nt, Human
aagcuggaagcaca

SEQ ID NO: 3554516 - RNA, 19 nt, Human
aagcuggaggacuagaacc

SEQ ID NO: 3554517 - RNA, 20 nt, Human
aagcuggagugcaguggcau

SEQ ID NO: 3554518 - RNA, 12 nt, Human
aagcuggccucu

SEQ ID NO: 3554519 - RNA, 13 nt, Human
aagcuggccugag

SEQ ID NO: 3554520 - RNA, 23 nt, Human
aagcuggcggcuggggucccagc

SEQ ID NO: 3554521 - RNA, 12 nt, Human
aagcuggcuggg

SEQ ID NO: 3554522 - RNA, 18 nt, Human
aagcuggcuuacacuggc

SEQ ID NO: 3554523 - RNA, 13 nt, Human
aagcugggcaggu

SEQ ID NO: 3554524 - RNA, 15 nt, Human
aagcugggcagguug

SEQ ID NO: 3554525 - RNA, 18 nt, Human
aagcugggccccagccca

SEQ ID NO: 3554526 - RNA, 17 nt, Human
aagcugguaaacuauuu

SEQ ID NO: 3554527 - RNA, 21 nt, Human
aagcuggugggugaaagaaau

SEQ ID NO: 3554528 - RNA, 16 nt, Human
aagcugguuuaauguu

SEQ ID NO: 3554529 - RNA, 23 nt, Human
aagcuguaguagcccuuucugug

SEQ ID NO: 3554530 - RNA, 19 nt, Human
aagcugugacuucuccagg

SEQ ID NO: 3554531 - RNA, 13 nt, Human
aagcugugagaca

SEQ ID NO: 3554532 - RNA, 20 nt, Human
aagcugugccacccugggcu

SEQ ID NO: 3554533 - RNA, 21 nt, Human
aagcugugccacccugggcuc

SEQ ID NO: 3554534 - RNA, 21 nt, Human
aagcugugugcucuccaagcc

SEQ ID NO: 3554535 - RNA, 18 nt, Human
aagcuguguggcagucug

SEQ ID NO: 3554536 - RNA, 18 nt, Human
aagcuguuaaacuguuag

SEQ ID NO: 3554537 - RNA, 18 nt, Human
aagcuguugaccaggcac

SEQ ID NO: 3554538 - RNA, 19 nt, Human
aagcuguuggccucugcaa

SEQ ID NO: 3554539 - RNA, 13 nt, Human
aagcuguuguaca

SEQ ID NO: 3554540 - RNA, 17 nt, Human
aagcuguuguacauuua

SEQ ID NO: 3554541 - RNA, 20 nt, Human
aagcuguuguacauuuauga

SEQ ID NO: 3554542 - RNA, 21 nt, Human
aagcuguuguacauuuaugau

SEQ ID NO: 3554543 - RNA, 14 nt, Human
aaugaaauuguaaa

SEQ ID NO: 3554544 - RNA, 22 nt, Human
aaugaaauuuuaccaaguuaua

SEQ ID NO: 3554545 - RNA, 12 nt, Human
aaugaacaagag

SEQ ID NO: 3554546 - RNA, 17 nt, Human
aaugaacaagagaagca

SEQ ID NO: 3554547 - RNA, 22 nt, Human
aaugaacagaacauagacagaa

SEQ ID NO: 3554548 - RNA, 14 nt, Human
aaugaacauuaaca

SEQ ID NO: 3554549 - RNA, 17 nt, Human
aaugaaccauaaauuca

SEQ ID NO: 3554550 - RNA, 18 nt, Human
aaugaaccauaaauucaa

SEQ ID NO: 3554551 - RNA, 21 nt, Human
aaugaacccccaugauguaag

SEQ ID NO: 3554552 - RNA, 22 nt, Human
aaugaacccccaugauguaagu

SEQ ID NO: 3554553 - RNA, 11 nt, Human
aaugaacugaa

SEQ ID NO: 3554554 - RNA, 15 nt, Human
aaugaagaauuuaaa

SEQ ID NO: 3554555 - RNA, 17 nt, Human
aaugaagaauuuaaaga

SEQ ID NO: 3554556 - RNA, 12 nt, Human
aaugaagaucua

SEQ ID NO: 3554557 - RNA, 15 nt, Human
aaugaagccuuagcc

SEQ ID NO: 3554558 - RNA, 16 nt, Human
aaugaagcuuguguau

SEQ ID NO: 3554559 - RNA, 22 nt, Human
aaugaaggugucagaauaauaa

SEQ ID NO: 3554560 - RNA, 21 nt, Human
aaugaagguuaggauuuaaca

SEQ ID NO: 3554561 - RNA, 20 nt, Human
aaugaagguuuuuguaaaga

SEQ ID NO: 3554562 - RNA, 14 nt, Human
aaugaagucucuga

SEQ ID NO: 3554563 - RNA, 16 nt, Human
aaugaagucucugaag

SEQ ID NO: 3554564 - RNA, 17 nt, Human
aaugaaguuguagguaa

SEQ ID NO: 3554565 - RNA, 15 nt, Human
aaugaaguuuauaca

SEQ ID NO: 3554566 - RNA, 18 nt, Human
aaugaaguuugaauguua

SEQ ID NO: 3554567 - RNA, 15 nt, Human
aaugaauaauggaaa

SEQ ID NO: 3554568 - RNA, 21 nt, Human
aaugaauaauggaaaaugcca

SEQ ID NO: 3554569 - RNA, 16 nt, Human
aaugaauaauuuccca

SEQ ID NO: 3554570 - RNA, 12 nt, Human
aaugaauaccuu

SEQ ID NO: 3554571 - RNA, 20 nt, Human
aaugaauacuuuauaaagga

SEQ ID NO: 3554572 - RNA, 15 nt, Human
aaugaauaucuauua

SEQ ID NO: 3554573 - RNA, 18 nt, Human
aaugaauccuacacaccu

SEQ ID NO: 3554574 - RNA, 17 nt, Human
aaugaaugcauaaaaug

SEQ ID NO: 3554575 - RNA, 21 nt, Human
aaugaauggaggaacuuucca

SEQ ID NO: 3554576 - RNA, 13 nt, Human
aaugaaugucagu

SEQ ID NO: 3554577 - RNA, 13 nt, Human
aaugaaugugugu

SEQ ID NO: 3554578 - RNA, 17 nt, Human
aaugaauuccuagaauu

SEQ ID NO: 3554579 - RNA, 21 nt, Human
aaugaauuccuagaauuaaac

SEQ ID NO: 3554580 - RNA, 13 nt, Human
aaugaauuuuguu

SEQ ID NO: 3554581 - RNA, 12 nt, Human
aaugacaauauu

SEQ ID NO: 3554582 - RNA, 16 nt, Human
aaugacagagccagug

SEQ ID NO: 3554583 - RNA, 22 nt, Human
aaugacagguuugggaccccug

SEQ ID NO: 3554584 - RNA, 22 nt, Human
aaugacaguccgucaaaacaga

SEQ ID NO: 3554585 - RNA, 18 nt, Human
aaugacaucuucaaagcu

SEQ ID NO: 3554586 - RNA, 13 nt, Human
aaugacaucuuuu

SEQ ID NO: 3554587 - RNA, 21 nt, Human
aaugacaucuuuuuaaagcuu

SEQ ID NO: 3554588 - RNA, 22 nt, Human
aaugacaucuuuuuaaagcuua

SEQ ID NO: 3554589 - RNA, 16 nt, Human
aaugacaugcacugac

SEQ ID NO: 3554590 - RNA, 23 nt, Human
aaugacaugugucaagcugcuug

SEQ ID NO: 3554591 - RNA, 15 nt, Human
aaugacauuuugcca

SEQ ID NO: 3554592 - RNA, 14 nt, Human
aaugaccaauauua

SEQ ID NO: 3554593 - RNA, 16 nt, Human
aaugaccucaagaugu

SEQ ID NO: 3554594 - RNA, 16 nt, Human
aaugaccuuguaaugu

SEQ ID NO: 3554595 - RNA, 22 nt, Human
aaugaccuuguaauguaacugc

SEQ ID NO: 3554596 - RNA, 20 nt, Human
aaugacuaaaaaacaaagaa

SEQ ID NO: 3554597 - RNA, 17 nt, Human
aaugacuaauucuugca

SEQ ID NO: 3554598 - RNA, 18 nt, Human
aaugacuaauucuugcau

SEQ ID NO: 3554599 - RNA, 20 nt, Human
aaugacuaauucuugcauau

SEQ ID NO: 3554600 - RNA, 21 nt, Human
aaugacuauauaauuuauuuc

SEQ ID NO: 3554601 - RNA, 15 nt, Human
aaugacucaaagucu

SEQ ID NO: 3554602 - RNA, 11 nt, Human
aaugacuuuau

SEQ ID NO: 3554603 - RNA, 17 nt, Human
aaugagaaggaauuuga

SEQ ID NO: 3554604 - RNA, 13 nt, Human
aaugagacaucca

SEQ ID NO: 3554605 - RNA, 18 nt, Human
aaugagagaauaagucau

SEQ ID NO: 3554606 - RNA, 12 nt, Human
aaugagagcaua

SEQ ID NO: 3554607 - RNA, 23 nt, Human
aaugagagggcaguguuuccuuu

SEQ ID NO: 3554608 - RNA, 17 nt, Human
aaugagaucaggcucug

SEQ ID NO: 3554609 - RNA, 18 nt, Human
aaugagauuaauuccuuu

SEQ ID NO: 3554610 - RNA, 16 nt, Human
aaugagauugaauuuc

SEQ ID NO: 3554611 - RNA, 18 nt, Human
aaugagcaauaucugcua

SEQ ID NO: 3554612 - RNA, 23 nt, Human
aaugagcacccauuccaaagcuu

SEQ ID NO: 3554613 - RNA, 13 nt, Human
aaugagcaccucc

SEQ ID NO: 3554614 - RNA, 14 nt, Human
aaugagcaccucca

SEQ ID NO: 3554615 - RNA, 18 nt, Human
aaugagcagcuuuagcaa

SEQ ID NO: 3554616 - RNA, 14 nt, Human
aaugagcauguuua

SEQ ID NO: 3554617 - RNA, 13 nt, Human
aaugagccuggca

SEQ ID NO: 3554618 - RNA, 14 nt, Human
aaugagccuggcaa

SEQ ID NO: 3554619 - RNA, 20 nt, Human
aaugagcuuucugaacagcu

SEQ ID NO: 3554620 - RNA, 22 nt, Human
aaugagcuuucugaacagcugg

SEQ ID NO: 3554621 - RNA, 17 nt, Human
aaugaggauuauugaua

SEQ ID NO: 3554622 - RNA, 20 nt, Human
aaugagggacuggaaccagg

SEQ ID NO: 3554623 - RNA, 21 nt, Human
aaugagggacuggaaccaggg

SEQ ID NO: 3554624 - RNA, 15 nt, Human
aaugagggggcucag

SEQ ID NO: 3554625 - RNA, 15 nt, Human
aaugaggucccaggc

SEQ ID NO: 3554626 - RNA, 12 nt, Human
aaugaguaacau

SEQ ID NO: 3554627 - RNA, 19 nt, Human
aaugaguaacauuugcugu

SEQ ID NO: 3554628 - RNA, 19 nt, Human
aaugagucuguuguguguc

SEQ ID NO: 3554629 - RNA, 14 nt, Human
aaugaguugugaaa

SEQ ID NO: 3554630 - RNA, 13 nt, Human
aaugauaaaacac

SEQ ID NO: 3554631 - RNA, 14 nt, Human
aaugauaaaacacc

SEQ ID NO: 3554632 - RNA, 15 nt, Human
aaugauaaacucucu

SEQ ID NO: 3554633 - RNA, 18 nt, Human
aaugauaaguaaaugcua

SEQ ID NO: 3554634 - RNA, 21 nt, Human
aaugauagacaauugagguaa

SEQ ID NO: 3554635 - RNA, 18 nt, Human
aaugauaguugauuuuca

SEQ ID NO: 3554636 - RNA, 18 nt, Human
aaugauauagccagaaaa

SEQ ID NO: 3554637 - RNA, 17 nt, Human
aaggcuuucagggccuc

SEQ ID NO: 3554638 - RNA, 22 nt, Human
aaggcuuucagggccuccagcc

SEQ ID NO: 3554639 - RNA, 22 nt, Human
aaggcuuugcccugcugcccuc

SEQ ID NO: 3554640 - RNA, 22 nt, Human
aaggcuuuuggucucccuggga

SEQ ID NO: 3554641 - RNA, 11 nt, Human
aagggaaaaau

SEQ ID NO: 3554642 - RNA, 16 nt, Human
aagggaaaagucucuu

SEQ ID NO: 3554643 - RNA, 23 nt, Human
aagggaaacugccagcaacgcag

SEQ ID NO: 3554644 - RNA, 15 nt, Human
aagggaaagaaaaug

SEQ ID NO: 3554645 - RNA, 12 nt, Human
aagggaaauaga

SEQ ID NO: 3554646 - RNA, 16 nt, Human
aagggaacaggaaaag

SEQ ID NO: 3554647 - RNA, 20 nt, Human
aagggaagaaggaggaaugc

SEQ ID NO: 3554648 - RNA, 18 nt, Human
aagggaagacauuucuuu

SEQ ID NO: 3554649 - RNA, 16 nt, Human
aagggaagauuuaugu

SEQ ID NO: 3554650 - RNA, 14 nt, Human
aagggaaggacaga

SEQ ID NO: 3554651 - RNA, 21 nt, Human
aagggaccagggagaugccac

SEQ ID NO: 3554652 - RNA, 15 nt, Human
aagggagaagaaagg

SEQ ID NO: 3554653 - RNA, 14 nt, Human
aagggagccaaggg

SEQ ID NO: 3554654 - RNA, 18 nt, Human
aagggagccaagggaugg

SEQ ID NO: 3554655 - RNA, 19 nt, Human
aagggagccaagggaugga

SEQ ID NO: 3554656 - RNA, 21 nt, Human
aagggagccaagggauggaca

SEQ ID NO: 3554657 - RNA, 17 nt, Human
aagggagcuagccagag

SEQ ID NO: 3554658 - RNA, 22 nt, Human
aagggaggacgggagcugggga

SEQ ID NO: 3554659 - RNA, 13 nt, Human
aagggagggcaga

SEQ ID NO: 3554660 - RNA, 13 nt, Human
aagggagggcucu

SEQ ID NO: 3554661 - RNA, 19 nt, Human
aagggagggcucugaggcg

SEQ ID NO: 3554662 - RNA, 15 nt, Human
aagggaguuuaaaaa

SEQ ID NO: 3554663 - RNA, 19 nt, Human
aagggauauauaagaugga

SEQ ID NO: 3554664 - RNA, 16 nt, Human
aagggaucaucaugca

SEQ ID NO: 3554665 - RNA, 23 nt, Human
aagggaugcaggcuccccugagg

SEQ ID NO: 3554666 - RNA, 20 nt, Human
aagggauggaaaaggaagac

SEQ ID NO: 3554667 - RNA, 22 nt, Human
aagggauggaagaaguaaauau

SEQ ID NO: 3554668 - RNA, 16 nt, Human
aagggauggacaucuu

SEQ ID NO: 3554669 - RNA, 17 nt, Human
aagggauuuuagucaca

SEQ ID NO: 3554670 - RNA, 18 nt, Human
aagggcaaauuggagaaa

SEQ ID NO: 3554671 - RNA, 20 nt, Human
aagggcaacaauaaaauagc

SEQ ID NO: 3554672 - RNA, 15 nt, Human
aagggcagagucaca

SEQ ID NO: 3554673 - RNA, 21 nt, Human
aagggcaggaaggagagccug

SEQ ID NO: 3554674 - RNA, 22 nt, Human
aagggcaggaaggagagccugc

SEQ ID NO: 3554675 - RNA, 14 nt, Human
aagggcaguggagg

SEQ ID NO: 3554676 - RNA, 13 nt, Human
aagggcaugccuu

SEQ ID NO: 3554677 - RNA, 23 nt, Human
aagggcauuggccauucuauugu

SEQ ID NO: 3554678 - RNA, 12 nt, Human
aagggccagagc

SEQ ID NO: 3554679 - RNA, 17 nt, Human
aagggccaggagaugga

SEQ ID NO: 3554680 - RNA, 16 nt, Human
aagggccaguccugcc

SEQ ID NO: 3554681 - RNA, 16 nt, Human
aagggccaugcugaag

SEQ ID NO: 3554682 - RNA, 16 nt, Human
aagggcccuccuuccu

SEQ ID NO: 3554683 - RNA, 12 nt, Human
aagggcccuggg

SEQ ID NO: 3554684 - RNA, 20 nt, Human
aagggcccuucacugccuuu

SEQ ID NO: 3554685 - RNA, 16 nt, Human
aagggcccuuuuucaa

SEQ ID NO: 3554686 - RNA, 18 nt, Human
aagggcugaccugccucu

SEQ ID NO: 3554687 - RNA, 15 nt, Human
aagggcuguuauaau

SEQ ID NO: 3554688 - RNA, 18 nt, Human
aagggcuucugcacccuc

SEQ ID NO: 3554689 - RNA, 16 nt, Human
aaggggaaucuggagg

SEQ ID NO: 3554690 - RNA, 21 nt, Human
aaggggaaucuggagguagcc

SEQ ID NO: 3554691 - RNA, 22 nt, Human
aaggggaauguuugccucugcc

SEQ ID NO: 3554692 - RNA, 15 nt, Human
aaggggaauuaacaa

SEQ ID NO: 3554693 - RNA, 11 nt, Human
aaggggacagc

SEQ ID NO: 3554694 - RNA, 15 nt, Human
aaggggacaggccuc

SEQ ID NO: 3554695 - RNA, 19 nt, Human
aaggggacugccaccuccc

SEQ ID NO: 3554696 - RNA, 12 nt, Human
aaggggagagcc

SEQ ID NO: 3554697 - RNA, 14 nt, Human
aaggggagagccug

SEQ ID NO: 3554698 - RNA, 15 nt, Human
aaggggagagccugc

SEQ ID NO: 3554699 - RNA, 19 nt, Human
aaggggagagccugcuggc

SEQ ID NO: 3554700 - RNA, 13 nt, Human
aaggggagaguaa

SEQ ID NO: 3554701 - RNA, 13 nt, Human
aaggggagcccac

SEQ ID NO: 3554702 - RNA, 15 nt, Human
aaggggccugagcag

SEQ ID NO: 3554703 - RNA, 13 nt, Human
aaggggcuucagg

SEQ ID NO: 3554704 - RNA, 15 nt, Human
aagggggaggggaag

SEQ ID NO: 3554705 - RNA, 21 nt, Human
aagggggauaugaauggagau

SEQ ID NO: 3554706 - RNA, 16 nt, Human
aaggggggagggggag

SEQ ID NO: 3554707 - RNA, 18 nt, Human
aagggggggcuacauuau

SEQ ID NO: 3554708 - RNA, 20 nt, Human
aagggggggcuacauuauaa

SEQ ID NO: 3554709 - RNA, 16 nt, Human
aaggggguccacccag

SEQ ID NO: 3554710 - RNA, 17 nt, Human
aagggggucccaguggg

SEQ ID NO: 3554711 - RNA, 13 nt, Human
aagggguaaaagg

SEQ ID NO: 3554712 - RNA, 16 nt, Human
aaggggucacuuacag

SEQ ID NO: 3554713 - RNA, 16 nt, Human
aaggggucugaaauuu

SEQ ID NO: 3554714 - RNA, 14 nt, Human
aagggguuccucaa

SEQ ID NO: 3554715 - RNA, 18 nt, Human
aagggguuccucaaauuu

SEQ ID NO: 3554716 - RNA, 19 nt, Human
aagggguuggggugacagu

SEQ ID NO: 3554717 - RNA, 13 nt, Human
aagggguuuucuu

SEQ ID NO: 3554718 - RNA, 15 nt, Human
aaggguaaacaauau

SEQ ID NO: 3554719 - RNA, 16 nt, Human
aaggguaucuggugac

SEQ ID NO: 3554720 - RNA, 16 nt, Human
aagggucaggccuuug

SEQ ID NO: 3554721 - RNA, 18 nt, Human
aagggucgaaagcucuag

SEQ ID NO: 3554722 - RNA, 22 nt, Human
aagggucgaaagcucuagaauc

SEQ ID NO: 3554723 - RNA, 16 nt, Human
aagggucuagggagag

SEQ ID NO: 3554724 - RNA, 18 nt, Human
aagggucuagggagagac

SEQ ID NO: 3554725 - RNA, 19 nt, Human
aagggucuugggaaauaug

SEQ ID NO: 3554726 - RNA, 19 nt, Human
aagggugcugcuucccucu

SEQ ID NO: 3554727 - RNA, 23 nt, Human
aagggugcugcuucccucugccu

SEQ ID NO: 3554728 - RNA, 18 nt, Human
aagggugggugcucagaa

SEQ ID NO: 3554729 - RNA, 13 nt, Human
aagggugucugag

SEQ ID NO: 3554730 - RNA, 14 nt, Human
aaggguugagcugg

SEQ ID NO: 3554731 - RNA, 13 nt, Human
aaggguuucucua

SEQ ID NO: 3554732 - RNA, 14 nt, Human
aaggguuucucuau

SEQ ID NO: 3554733 - RNA, 14 nt, Human
aagguaaaaaguua

SEQ ID NO: 3554734 - RNA, 18 nt, Human
aagguaaaaugccaugau

SEQ ID NO: 3554735 - RNA, 13 nt, Human
aagguaaugugug

SEQ ID NO: 3554736 - RNA, 17 nt, Human
aagguaauuucuugugc

SEQ ID NO: 3554737 - RNA, 19 nt, Human
aagguacaagaagcauuuu

SEQ ID NO: 3554738 - RNA, 14 nt, Human
aagguacuguauga

SEQ ID NO: 3554739 - RNA, 15 nt, Human
aagguacuguaugau

SEQ ID NO: 3554740 - RNA, 19 nt, Human
aagguacuguaugaucaaa

SEQ ID NO: 3554741 - RNA, 21 nt, Human
aagguacuguaugaucaaaug

SEQ ID NO: 3554742 - RNA, 13 nt, Human
aagguagaaugac

SEQ ID NO: 3554743 - RNA, 17 nt, Human
aagguagaaugaccuug

SEQ ID NO: 3554744 - RNA, 20 nt, Human
aagguagaaugaccuuguaa

SEQ ID NO: 3554745 - RNA, 23 nt, Human
aauuaggcaaggcuaugugauua

SEQ ID NO: 3554746 - RNA, 20 nt, Human
aauuaggcccccaucauccu

SEQ ID NO: 3554747 - RNA, 17 nt, Human
aauuaggcuguaacuac

SEQ ID NO: 3554748 - RNA, 21 nt, Human
aauuaggcuguaacuacuuua

SEQ ID NO: 3554749 - RNA, 23 nt, Human
aauuaggcuguaacuacuuuaua

SEQ ID NO: 3554750 - RNA, 18 nt, Human
aauuagggcucuaauuuc

SEQ ID NO: 3554751 - RNA, 16 nt, Human
aauuagguuaacauug

SEQ ID NO: 3554752 - RNA, 14 nt, Human
aauuagguugaaac

SEQ ID NO: 3554753 - RNA, 21 nt, Human
aauuagguuuuuccuuauuug

SEQ ID NO: 3554754 - RNA, 20 nt, Human
aauuaguaaaaaaucaauua

SEQ ID NO: 3554755 - RNA, 15 nt, Human
aauuagugccacuua

SEQ ID NO: 3554756 - RNA, 20 nt, Human
aauuagugccacuuaaugua

SEQ ID NO: 3554757 - RNA, 14 nt, Human
aauuagugcuaagu

SEQ ID NO: 3554758 - RNA, 20 nt, Human
aauuagugcuaagugugaac

SEQ ID NO: 3554759 - RNA, 14 nt, Human
aauuaguuauauau

SEQ ID NO: 3554760 - RNA, 21 nt, Human
aauuaguuguguacucuggcc

SEQ ID NO: 3554761 - RNA, 13 nt, Human
aauuaguuuccuu

SEQ ID NO: 3554762 - RNA, 24 nt, Human
aauuaguuuuaaaaugauauuguu

SEQ ID NO: 3554763 - RNA, 18 nt, Human
aauuauaaagauaaagcu

SEQ ID NO: 3554764 - RNA, 23 nt, Human
aauuauaacuuaaaauauuuuau

SEQ ID NO: 3554765 - RNA, 17 nt, Human
aauuauaagaggcugau

SEQ ID NO: 3554766 - RNA, 15 nt, Human
aauuauaaggacugc

SEQ ID NO: 3554767 - RNA, 14 nt, Human
aauuauaagucaca

SEQ ID NO: 3554768 - RNA, 14 nt, Human
aauuauacuacuuu

SEQ ID NO: 3554769 - RNA, 16 nt, Human
aauuauacugugugug

SEQ ID NO: 3554770 - RNA, 19 nt, Human
aauuauagcucuaauguuu

SEQ ID NO: 3554771 - RNA, 21 nt, Human
aauuauaggagccuuaauuuu

SEQ ID NO: 3554772 - RNA, 21 nt, Human
aauuauagugucaugcagagu

SEQ ID NO: 3554773 - RNA, 15 nt, Human
aauuauaguuucuga

SEQ ID NO: 3554774 - RNA, 17 nt, Human
aauuauauaacuguauu

SEQ ID NO: 3554775 - RNA, 15 nt, Human
aauuauauaaguauu

SEQ ID NO: 3554776 - RNA, 16 nt, Human
aauuauauaaguauuc

SEQ ID NO: 3554777 - RNA, 17 nt, Human
aauuauauaaguauucu

SEQ ID NO: 3554778 - RNA, 21 nt, Human
aauuauaucuguggucuucaa

SEQ ID NO: 3554779 - RNA, 20 nt, Human
aauuauaugcuauuucuaua

SEQ ID NO: 3554780 - RNA, 21 nt, Human
aauuauaugcuauuucuauau

SEQ ID NO: 3554781 - RNA, 23 nt, Human
aauuauauuugugcuauaguauu

SEQ ID NO: 3554782 - RNA, 18 nt, Human
aauucuagugcugcugaa

SEQ ID NO: 3554783 - RNA, 13 nt, Human
aauucuccacugu

SEQ ID NO: 3554784 - RNA, 19 nt, Human
aauucucccgggacucugc

SEQ ID NO: 3554785 - RNA, 16 nt, Human
aauucuccugauaaaa

SEQ ID NO: 3554786 - RNA, 15 nt, Human
aauucucuauuuuuu

SEQ ID NO: 3554787 - RNA, 23 nt, Human
aauucucuuccaaccauuuaucu

SEQ ID NO: 3554788 - RNA, 14 nt, Human
aauucucuuucaaa

SEQ ID NO: 3554789 - RNA, 14 nt, Human
aauucugaaguuau

SEQ ID NO: 3554790 - RNA, 10 nt, Human
aauucugaau

SEQ ID NO: 3554791 - RNA, 19 nt, Human
aauucugagacauguguca

SEQ ID NO: 3554792 - RNA, 17 nt, Human
aauucugaguuuugugu

SEQ ID NO: 3554793 - RNA, 14 nt, Human
aauucugauuucuu

SEQ ID NO: 3554794 - RNA, 22 nt, Human
aauucugauuucuuuucaccau

SEQ ID NO: 3554795 - RNA, 20 nt, Human
aauucugcaauguuuuccuu

SEQ ID NO: 3554796 - RNA, 15 nt, Human
aauucugcuaccuca

SEQ ID NO: 3554797 - RNA, 16 nt, Human
aauucugcucagauag

SEQ ID NO: 3554798 - RNA, 12 nt, Human
aauucuguaaau

SEQ ID NO: 3554799 - RNA, 19 nt, Human
aauucuguacauagccuau

SEQ ID NO: 3554800 - RNA, 13 nt, Human
aauucuguauaga

SEQ ID NO: 3554801 - RNA, 20 nt, Human
aauucuguauagauuagaga

SEQ ID NO: 3554802 - RNA, 19 nt, Human
aauucugucacucaccacu

SEQ ID NO: 3554803 - RNA, 15 nt, Human
aauucuguuaaaauc

SEQ ID NO: 3554804 - RNA, 18 nt, Human
aauucuguucauuuguua

SEQ ID NO: 3554805 - RNA, 22 nt, Human
aauucuguucauuuguuauucu

SEQ ID NO: 3554806 - RNA, 15 nt, Human
aauucuguuuaauuu

SEQ ID NO: 3554807 - RNA, 17 nt, Human
aauucuguuuuuaaaaa

SEQ ID NO: 3554808 - RNA, 20 nt, Human
aauucuguuuuuaaaaauua

SEQ ID NO: 3554809 - RNA, 21 nt, Human
aauucuguuuuuaaugcuauu

SEQ ID NO: 3554810 - RNA, 22 nt, Human
aauucuuauuccauauuagaaa

SEQ ID NO: 3554811 - RNA, 17 nt, Human
aauucuuauuuugugga

SEQ ID NO: 3554812 - RNA, 21 nt, Human
aauucuucagcguaaaauggu

SEQ ID NO: 3554813 - RNA, 18 nt, Human
aauucuucagguggaaaa

SEQ ID NO: 3554814 - RNA, 13 nt, Human
aauucuuccuuug

SEQ ID NO: 3554815 - RNA, 15 nt, Human
aauucuuccuuugua

SEQ ID NO: 3554816 - RNA, 16 nt, Human
aauucuugaaggaaaa

SEQ ID NO: 3554817 - RNA, 14 nt, Human
aauucuugcaaagu

SEQ ID NO: 3554818 - RNA, 20 nt, Human
aauucuugcaaaguaucccu

SEQ ID NO: 3554819 - RNA, 21 nt, Human
aauucuugccaaauauaaaua

SEQ ID NO: 3554820 - RNA, 13 nt, Human
aauucuuggaaua

SEQ ID NO: 3554821 - RNA, 18 nt, Human
aauucuugguugaggaaa

SEQ ID NO: 3554822 - RNA, 20 nt, Human
aauucuuuauacaacagugc

SEQ ID NO: 3554823 - RNA, 17 nt, Human
aauucuuucaauacaga

SEQ ID NO: 3554824 - RNA, 18 nt, Human
aauucuuucaauacagau

SEQ ID NO: 3554825 - RNA, 21 nt, Human
aauucuuucaauacagauaua

SEQ ID NO: 3554826 - RNA, 18 nt, Human
aauucuuugaccuguugg

SEQ ID NO: 3554827 - RNA, 14 nt, Human
aauucuuuuuuauu

SEQ ID NO: 3554828 - RNA, 16 nt, Human
aauucuuuuuuauuaa

SEQ ID NO: 3554829 - RNA, 16 nt, Human
aauugaaaagaaguag

SEQ ID NO: 3554830 - RNA, 12 nt, Human
aauugaaccuuu

SEQ ID NO: 3554831 - RNA, 22 nt, Human
aauugaauaaugguaccagaua

SEQ ID NO: 3554832 - RNA, 23 nt, Human
aauugaauaaugguaccagauaa

SEQ ID NO: 3554833 - RNA, 15 nt, Human
aauugaaucacugcu

SEQ ID NO: 3554834 - RNA, 19 nt, Human
aauugacagaucaagcugu

SEQ ID NO: 3554835 - RNA, 17 nt, Human
aauugacauugaaaucu

SEQ ID NO: 3554836 - RNA, 18 nt, Human
aauugacauugaaaucua

SEQ ID NO: 3554837 - RNA, 24 nt, Human
aauugacgguuuuuuauuauugug

SEQ ID NO: 3554838 - RNA, 11 nt, Human
aauugacuacc

SEQ ID NO: 3554839 - RNA, 14 nt, Human
aauugacuguauuu

SEQ ID NO: 3554840 - RNA, 22 nt, Human
aauugagagaauggaaaacaga

SEQ ID NO: 3554841 - RNA, 19 nt, Human
aauugagaugauuaaaaug

SEQ ID NO: 3554842 - RNA, 17 nt, Human
aauugagccuaaaaaua

SEQ ID NO: 3554843 - RNA, 23 nt, Human
aauugagccuaaaaauaaagcac

SEQ ID NO: 3554844 - RNA, 21 nt, Human
aauugaguaaugguguagaac

SEQ ID NO: 3554845 - RNA, 13 nt, Human
aauugauaauaaa

SEQ ID NO: 3554846 - RNA, 14 nt, Human
aauugauaauaaac

SEQ ID NO: 3554847 - RNA, 22 nt, Human
aauugaucauuuuccccccacu

SEQ ID NO: 3554848 - RNA, 14 nt, Human
aauugauguguuua

SEQ ID NO: 3554849 - RNA, 23 nt, Human
aauugauugggcacaucauuuca

SEQ ID NO: 3554850 - RNA, 16 nt, Human
aauugauuugcauuga

SEQ ID NO: 3554851 - RNA, 20 nt, Human
aauugauuugcauugaacac

SEQ ID NO: 3554852 - RNA, 20 nt, Human
aauugauuuuuauaaauacu

SEQ ID NO: 3554853 - RNA, 19 nt, Human
aauugcacagaaguccugu

SEQ ID NO: 3554854 - RNA, 22 nt, Human
aauugcacgcggagugaguuuu

SEQ ID NO: 3554855 - RNA, 14 nt, Human
aauugcacucuaaa

SEQ ID NO: 3554856 - RNA, 15 nt, Human
aauugcauaaagcau

SEQ ID NO: 3554857 - RNA, 11 nt, Human
aauugcauuga

SEQ ID NO: 3554858 - RNA, 18 nt, Human
aauugcauugacuuuccc

SEQ ID NO: 3554859 - RNA, 21 nt, Human
aauugccaaaaagugaaauaa

SEQ ID NO: 3554860 - RNA, 23 nt, Human
aauugccaaaaagugaaauaaug

SEQ ID NO: 3554861 - RNA, 12 nt, Human
aauugccagcug

SEQ ID NO: 3554862 - RNA, 22 nt, Human
aauugccuauccugcuguucua

SEQ ID NO: 3554863 - RNA, 15 nt, Human
aauugccugacgaac

SEQ ID NO: 3554864 - RNA, 14 nt, Human
aauugcguuggucu

SEQ ID NO: 3554865 - RNA, 18 nt, Human
aauugcguuggucucugc

SEQ ID NO: 3554866 - RNA, 20 nt, Human
aauugcguuggucucugcau

SEQ ID NO: 3554867 - RNA, 15 nt, Human
aauugcuaauguugc

SEQ ID NO: 3554868 - RNA, 16 nt, Human
aauugcuaauguugcu

SEQ ID NO: 3554869 - RNA, 20 nt, Human
aauugcuauguuacuauuuu

SEQ ID NO: 3554870 - RNA, 23 nt, Human
aauugcuauguuuugacauuuuu

SEQ ID NO: 3554871 - RNA, 13 nt, Human
aauugcucacagu

SEQ ID NO: 3554872 - RNA, 21 nt, Human
aauugcucacaguuauuacau

SEQ ID NO: 3554873 - RNA, 18 nt, Human
aauugcucauaagcaaua

SEQ ID NO: 3554874 - RNA, 17 nt, Human
aauugcugacuguagcu

SEQ ID NO: 3554875 - RNA, 13 nt, Human
aauugcugcuacu

SEQ ID NO: 3554876 - RNA, 13 nt, Human
aauugcugugccu

SEQ ID NO: 3554877 - RNA, 19 nt, Human
aauugcuuaccaaaggaua

SEQ ID NO: 3554878 - RNA, 23 nt, Human
aauugcuuacuuuggaauacauu

SEQ ID NO: 3554879 - RNA, 22 nt, Human
aauugcuugaaagaaaauaugc

SEQ ID NO: 3554880 - RNA, 22 nt, Human
aauugcuuuaccuuuuuucuua

SEQ ID NO: 3554881 - RNA, 10 nt, Human
aauugcuuug

SEQ ID NO: 3554882 - RNA, 17 nt, Human
aauugcuuuuuuaaaua

SEQ ID NO: 3554883 - RNA, 20 nt, Human
aauuggaacagaauguuuua

SEQ ID NO: 3554884 - RNA, 20 nt, Human
aauuggaagcugcccugccc

SEQ ID NO: 3554885 - RNA, 18 nt, Human
aauuggaccauccuauuu

SEQ ID NO: 3554886 - RNA, 15 nt, Human
aauuggagcagggac

SEQ ID NO: 3554887 - RNA, 22 nt, Human
aauuggauacgacaacuugcac

SEQ ID NO: 3554888 - RNA, 20 nt, Human
aauuggcaccgaagcccaga

SEQ ID NO: 3554889 - RNA, 23 nt, Human
aauuggcauggaaauuuaaagca

SEQ ID NO: 3554890 - RNA, 17 nt, Human
aauuggcauuaaaacuu

SEQ ID NO: 3554891 - RNA, 14 nt, Human
aauugggaguccag

SEQ ID NO: 3554892 - RNA, 15 nt, Human
aauugggaguccagg

SEQ ID NO: 3554893 - RNA, 18 nt, Human
aauugggaguccaggcac

SEQ ID NO: 3554894 - RNA, 16 nt, Human
aauugggcacuauuua

SEQ ID NO: 3554895 - RNA, 16 nt, Human
aauuggggaggagggg

SEQ ID NO: 3554896 - RNA, 17 nt, Human
aauuggggauucuuaaa

SEQ ID NO: 3554897 - RNA, 20 nt, Human
aauuggggauucuuaaaguu

SEQ ID NO: 3554898 - RNA, 13 nt, Human
aauuggggcacuu

SEQ ID NO: 3554899 - RNA, 18 nt, Human
aauugggucauagaaauu

SEQ ID NO: 3554900 - RNA, 23 nt, Human
aauuggguggggggcuucauaca

SEQ ID NO: 3554901 - RNA, 16 nt, Human
aauuggguucaugaug

SEQ ID NO: 3554902 - RNA, 20 nt, Human
aauuggguucaugaugcagu

SEQ ID NO: 3554903 - RNA, 20 nt, Human
aauugguaaaacucacugug

SEQ ID NO: 3554904 - RNA, 15 nt, Human
aauugguaccuugca

SEQ ID NO: 3554905 - RNA, 19 nt, Human
aauugguacuuuuaaaaac

SEQ ID NO: 3554906 - RNA, 18 nt, Human
aauuguaaaauuguauag

SEQ ID NO: 3554907 - RNA, 13 nt, Human
aauuguaaacugu

SEQ ID NO: 3554908 - RNA, 17 nt, Human
aauuguaaacuguacua

SEQ ID NO: 3554909 - RNA, 22 nt, Human
aaucuguagggcuggaccuaug

SEQ ID NO: 3554910 - RNA, 20 nt, Human
aaucuguaucuguagugaga

SEQ ID NO: 3554911 - RNA, 16 nt, Human
aaucugucaaaacacu

SEQ ID NO: 3554912 - RNA, 17 nt, Human
aaucugucaaaacacug

SEQ ID NO: 3554913 - RNA, 21 nt, Human
aaucugucaaaacacugugga

SEQ ID NO: 3554914 - RNA, 21 nt, Human
aaucuguccaaaggaggcugg

SEQ ID NO: 3554915 - RNA, 15 nt, Human
aaucugugaacuuga

SEQ ID NO: 3554916 - RNA, 17 nt, Human
aaucugugaacuugaaa

SEQ ID NO: 3554917 - RNA, 21 nt, Human
aaucugugaacuugaaauuug

SEQ ID NO: 3554918 - RNA, 17 nt, Human
aaucugugggucuggga

SEQ ID NO: 3554919 - RNA, 19 nt, Human
aaucuguguacaaagaaau

SEQ ID NO: 3554920 - RNA, 18 nt, Human
aaucuguguagacgaagg

SEQ ID NO: 3554921 - RNA, 23 nt, Human
aaucugugugaaacuuucauucc

SEQ ID NO: 3554922 - RNA, 20 nt, Human
aaucuguuauguacuagugu

SEQ ID NO: 3554923 - RNA, 19 nt, Human
aaucuguugauaaauccau

SEQ ID NO: 3554924 - RNA, 21 nt, Human
aaucuguuuuauaccuugcuu

SEQ ID NO: 3554925 - RNA, 19 nt, Human
aaucuguuuuuacguaugu

SEQ ID NO: 3554926 - RNA, 21 nt, Human
aaguacugguaagauuguuau

SEQ ID NO: 3554927 - RNA, 23 nt, Human
aaguacuguaagaauaauuuaua

SEQ ID NO: 3554928 - RNA, 14 nt, Human
aaguacuguaauaa

SEQ ID NO: 3554929 - RNA, 20 nt, Human
aaguacuguaauaauaccuc

SEQ ID NO: 3554930 - RNA, 18 nt, Human
aaguacuucuccacccug

SEQ ID NO: 3554931 - RNA, 20 nt, Human
aaguacuucuccacccugcu

SEQ ID NO: 3554932 - RNA, 17 nt, Human
aaguacuuguaguucca

SEQ ID NO: 3554933 - RNA, 15 nt, Human
aaguacuuuuggcau

SEQ ID NO: 3554934 - RNA, 16 nt, Human
aaguagaaacaaaaua

SEQ ID NO: 3554935 - RNA, 13 nt, Human
aaguagaaauggu

SEQ ID NO: 3554936 - RNA, 18 nt, Human
aaguagaacuuuguauag

SEQ ID NO: 3554937 - RNA, 21 nt, Human
aaguagaacuuuguauaguua

SEQ ID NO: 3554938 - RNA, 18 nt, Human
aaguagacaaucauuguu

SEQ ID NO: 3554939 - RNA, 21 nt, Human
aaguagacaaucauuguuuug

SEQ ID NO: 3554940 - RNA, 23 nt, Human
aaguagacuucauuuuuccuaac

SEQ ID NO: 3554941 - RNA, 12 nt, Human
aaguagaggagg

SEQ ID NO: 3554942 - RNA, 15 nt, Human
aaguagaugcauuug

SEQ ID NO: 3554943 - RNA, 13 nt, Human
aaguagauuucau

SEQ ID NO: 3554944 - RNA, 15 nt, Human
aaguagcagugugaa

SEQ ID NO: 3554945 - RNA, 17 nt, Human
aaguagcauuuacugug

SEQ ID NO: 3554946 - RNA, 22 nt, Human
aaguagccaccugaguuccuga

SEQ ID NO: 3554947 - RNA, 13 nt, Human
aaguaggaaguaa

SEQ ID NO: 3554948 - RNA, 14 nt, Human
aaguaggcaggacc

SEQ ID NO: 3554949 - RNA, 21 nt, Human
aaguagggacuucugucuuca

SEQ ID NO: 3554950 - RNA, 18 nt, Human
aaguaguaaaaauuaaaa

SEQ ID NO: 3554951 - RNA, 19 nt, Human
aaguaguacuucuucugua

SEQ ID NO: 3554952 - RNA, 20 nt, Human
aaguaguacuucuucuguaa

SEQ ID NO: 3554953 - RNA, 15 nt, Human
aaguaguggagcccc

SEQ ID NO: 3554954 - RNA, 15 nt, Human
aaguagugugcaguu

SEQ ID NO: 3554955 - RNA, 19 nt, Human
aaguaguuaucauguuagu

SEQ ID NO: 3554956 - RNA, 19 nt, Human
aaguaguucuguauuugaa

SEQ ID NO: 3554957 - RNA, 16 nt, Human
aaguauaaauuugugu

SEQ ID NO: 3554958 - RNA, 15 nt, Human
aaguauacauaaguu

SEQ ID NO: 3554959 - RNA, 13 nt, Human
aaguauagagaga

SEQ ID NO: 3554960 - RNA, 18 nt, Human
aaguauauaaugguuuca

SEQ ID NO: 3554961 - RNA, 23 nt, Human
aaguauaucauguaaagaaaugu

SEQ ID NO: 3554962 - RNA, 19 nt, Human
aaguaucaaguauagaaaa

SEQ ID NO: 3554963 - RNA, 12 nt, Human
aaguaucagaaa

SEQ ID NO: 3554964 - RNA, 13 nt, Human
aaguaucagaaag

SEQ ID NO: 3554965 - RNA, 19 nt, Human
aaguaucaucaguguagaa

SEQ ID NO: 3554966 - RNA, 18 nt, Human
aaguaucuuuuuucaaaa

SEQ ID NO: 3554967 - RNA, 21 nt, Human
aaguaugagggaaaaugagua

SEQ ID NO: 3554968 - RNA, 22 nt, Human
aaguauguaaaguauguaaaca

SEQ ID NO: 3554969 - RNA, 21 nt, Human
aaguauguauauuaaaaaaga

SEQ ID NO: 3554970 - RNA, 22 nt, Human
aaguauguauauuaaaaaagag

SEQ ID NO: 3554971 - RNA, 14 nt, Human
aaguauguauuauu

SEQ ID NO: 3554972 - RNA, 13 nt, Human
aaguaugugagug

SEQ ID NO: 3554973 - RNA, 18 nt, Human
aaguaugugguuuuguaa

SEQ ID NO: 3554974 - RNA, 14 nt, Human
aaguauuaaaacau

SEQ ID NO: 3554975 - RNA, 15 nt, Human
aaguauuaaaacauu

SEQ ID NO: 3554976 - RNA, 21 nt, Human
aaguauuaaaacauuggauua

SEQ ID NO: 3554977 - RNA, 16 nt, Human
aaguauuccaccuuaa

SEQ ID NO: 3554978 - RNA, 17 nt, Human
aaguauuccaccuuaaa

SEQ ID NO: 3554979 - RNA, 14 nt, Human
aaguauucugccuu

SEQ ID NO: 3554980 - RNA, 20 nt, Human
aaguauucugccuuugcaga

SEQ ID NO: 3554981 - RNA, 23 nt, Human
aaguauucuuauuuaaugaaaga

SEQ ID NO: 3554982 - RNA, 17 nt, Human
aaguauugccaaacauu

SEQ ID NO: 3554983 - RNA, 18 nt, Human
aaguauugccaaacauua

SEQ ID NO: 3554984 - RNA, 13 nt, Human
aaguauuguaaau

SEQ ID NO: 3554985 - RNA, 21 nt, Human
aaguauuguaaauuauauuug

SEQ ID NO: 3554986 - RNA, 13 nt, Human
aaguauuuaagcc

SEQ ID NO: 3554987 - RNA, 16 nt, Human
aaguauuuaauuagug

SEQ ID NO: 3554988 - RNA, 19 nt, Human
aaguauuuaauuagugcua

SEQ ID NO: 3554989 - RNA, 12 nt, Human
aaguauuuauaa

SEQ ID NO: 3554990 - RNA, 13 nt, Human
aaguauuuauaua

SEQ ID NO: 3554991 - RNA, 16 nt, Human
aaguauuuauauauuu

SEQ ID NO: 3554992 - RNA, 22 nt, Human
aaguauuuauauauuuauaacu

SEQ ID NO: 3554993 - RNA, 23 nt, Human
aaguauuuauauauuuauaacuc

SEQ ID NO: 3554994 - RNA, 20 nt, Human
aaguauuuguuaauuuagaa

SEQ ID NO: 3554995 - RNA, 14 nt, Human
aaguauuuuauucu

SEQ ID NO: 3554996 - RNA, 14 nt, Human
aaguauuuuccugu

SEQ ID NO: 3554997 - RNA, 15 nt, Human
aaguauuuuccugua

SEQ ID NO: 3554998 - RNA, 15 nt, Human
aaguauuuuccuguu

SEQ ID NO: 3554999 - RNA, 11 nt, Human
aaguauuuuga

SEQ ID NO: 3555000 - RNA, 14 nt, Human
aaguauuuugaagu

SEQ ID NO: 3555001 - RNA, 16 nt, Human
aaguauuuugaaguuu

SEQ ID NO: 3555002 - RNA, 21 nt, Human
aaguauuuugaaguuuacauu

SEQ ID NO: 3555003 - RNA, 22 nt, Human
aaguauuuugaaguuuacauuu

SEQ ID NO: 3555004 - RNA, 21 nt, Human
aaguauuuuuauaaauauaag

SEQ ID NO: 3555005 - RNA, 19 nt, Human
aaguauuuuuucaguauua

SEQ ID NO: 3555006 - RNA, 16 nt, Human
aagucaaaaggugccu

SEQ ID NO: 3555007 - RNA, 21 nt, Human
aagucaaaauauuuuuaaaag

SEQ ID NO: 3555008 - RNA, 20 nt, Human
aagucaaacacuugugacuu

SEQ ID NO: 3555009 - RNA, 20 nt, Human
aagucaaagcaaggaaacua

SEQ ID NO: 3555010 - RNA, 17 nt, Human
aagucaacaguaaacca

SEQ ID NO: 3555011 - RNA, 21 nt, Human
aagucaacaguaaaccacuga

SEQ ID NO: 3555012 - RNA, 13 nt, Human
aagucaaggagaa

SEQ ID NO: 3555013 - RNA, 22 nt, Human
aagucaaggcuuagacccucau

SEQ ID NO: 3555014 - RNA, 16 nt, Human
aagucaaucauuucuc

SEQ ID NO: 3555015 - RNA, 18 nt, Human
aagucaaucauuucucac

SEQ ID NO: 3555016 - RNA, 18 nt, Human
aagucacaauguucuuua

SEQ ID NO: 3555017 - RNA, 13 nt, Human
aagucacacagug

SEQ ID NO: 3555018 - RNA, 15 nt, Human
aagucacagggcagu

SEQ ID NO: 3555019 - RNA, 19 nt, Human
aagucacaucacaggacac

SEQ ID NO: 3555020 - RNA, 15 nt, Human
aagucacaugcguaa

SEQ ID NO: 3555021 - RNA, 21 nt, Human
aagucacccggcccccaugca

SEQ ID NO: 3555022 - RNA, 16 nt, Human
aagucacccuagcccu

SEQ ID NO: 3555023 - RNA, 22 nt, Human
aagucacccuagcccucucccu

SEQ ID NO: 3555024 - RNA, 23 nt, Human
aagucacccuagcccucucccuc

SEQ ID NO: 3555025 - RNA, 21 nt, Human
aagucacucaauuguuuuugu

SEQ ID NO: 3555026 - RNA, 23 nt, Human
aagucacucccaagcccccuccu

SEQ ID NO: 3555027 - RNA, 22 nt, Human
aagucacugcacagugcaucuc

SEQ ID NO: 3555028 - RNA, 20 nt, Human
aagucacuuacuauuguugc

SEQ ID NO: 3555029 - RNA, 18 nt, Human
aagucagaacagcagacu

SEQ ID NO: 3555030 - RNA, 12 nt, Human
aagucagaaguu

SEQ ID NO: 3555031 - RNA, 13 nt, Human
aagucagaaguuu

SEQ ID NO: 3555032 - RNA, 18 nt, Human
aagucagaaucagaagau

SEQ ID NO: 3555033 - RNA, 23 nt, Human
aagucagaaucagaagauagucu

SEQ ID NO: 3555034 - RNA, 22 nt, Human
aagucagaggauggccaguguc

SEQ ID NO: 3555035 - RNA, 20 nt, Human
aagucagauggaaaauucau

SEQ ID NO: 3555036 - RNA, 19 nt, Human
aagucagcccaacaggcag

SEQ ID NO: 3555037 - RNA, 15 nt, Human
aagucagcuccagcu

SEQ ID NO: 3555038 - RNA, 20 nt, Human
aagucagcuccagcuuucug

SEQ ID NO: 3555039 - RNA, 17 nt, Human
aagucaguacccaccac

SEQ ID NO: 3555040 - RNA, 16 nt, Human
aagucaguauggucua

SEQ ID NO: 3555041 - RNA, 23 nt, Human
aagucaguccaggaugcuaacau

SEQ ID NO: 3555042 - RNA, 20 nt, Human
aagucaguugcucaaaaaga

SEQ ID NO: 3555043 - RNA, 23 nt, Human
aagucaugaagcccaagugaaau

SEQ ID NO: 3555044 - RNA, 19 nt, Human
aagucaugauguuuuuaaa

SEQ ID NO: 3555045 - RNA, 22 nt, Human
aagucaugauguuuuuaaaauc

SEQ ID NO: 3555046 - RNA, 21 nt, Human
aagucaugcuccccugugcca

SEQ ID NO: 3555047 - RNA, 13 nt, Human
aagucauguaugu

SEQ ID NO: 3555048 - RNA, 16 nt, Human
aagucauguauguuuc

SEQ ID NO: 3555049 - RNA, 17 nt, Human
aagucauguauguuucu

SEQ ID NO: 3555050 - RNA, 16 nt, Human
aagucauuuuaacuuu

SEQ ID NO: 3555051 - RNA, 18 nt, Human
aaguccaagcauuuagau

SEQ ID NO: 3555052 - RNA, 18 nt, Human
aaguccaauuuuaauuua

SEQ ID NO: 3555053 - RNA, 19 nt, Human
aaguccaauuuuaauuuag

SEQ ID NO: 3555054 - RNA, 23 nt, Human
aaguccagauuuacacugggaga

SEQ ID NO: 3555055 - RNA, 13 nt, Human
aaguccagguccu

SEQ ID NO: 3555056 - RNA, 19 nt, Human
aaguccagguccugguggg

SEQ ID NO: 3555057 - RNA, 22 nt, Human
aaguccccaggccccaggaagc

SEQ ID NO: 3555058 - RNA, 19 nt, Human
aagucccugacucucugug

SEQ ID NO: 3555059 - RNA, 13 nt, Human
aagucccugcccc

SEQ ID NO: 3555060 - RNA, 18 nt, Human
aaguccgcagaagcccug

SEQ ID NO: 3555061 - RNA, 20 nt, Human
aaguccuacuuuuaaagaau

SEQ ID NO: 3555062 - RNA, 14 nt, Human
aaguccuauggaaa

SEQ ID NO: 3555063 - RNA, 21 nt, Human
aaguccucccugacuuuucug

SEQ ID NO: 3555064 - RNA, 13 nt, Human
aaguccugaagag

SEQ ID NO: 3555065 - RNA, 17 nt, Human
aaguccugaagaggcgg

SEQ ID NO: 3555066 - RNA, 12 nt, Human
aaguccuggcuu

SEQ ID NO: 3555067 - RNA, 17 nt, Human
aaguccuguaugucugu

SEQ ID NO: 3555068 - RNA, 15 nt, Human
aaugacaggccuguc

SEQ ID NO: 3555069 - RNA, 21 nt, Human
aaugacaugugucaagcugcu

SEQ ID NO: 3555070 - RNA, 21 nt, Human
aauaaaagcagcaucugcuaa

SEQ ID NO: 3555071 - RNA, 11 nt, Human
aauaaaagccu

SEQ ID NO: 3555072 - RNA, 14 nt, Human
aauaaaaggaaaag

SEQ ID NO: 3555073 - RNA, 20 nt, Human
aauaaaaggaagccaaagag

SEQ ID NO: 3555074 - RNA, 21 nt, Human
aauaaaaggaagccaaagagu

SEQ ID NO: 3555075 - RNA, 15 nt, Human
aauaaaauauaauug

SEQ ID NO: 3555076 - RNA, 20 nt, Human
aauaaaauauaucuuauaaa

SEQ ID NO: 3555077 - RNA, 12 nt, Human
aauaaaauauca

SEQ ID NO: 3555078 - RNA, 17 nt, Human
aauaaaauaucauucag

SEQ ID NO: 3555079 - RNA, 15 nt, Human
aauaaaauauuuucu

SEQ ID NO: 3555080 - RNA, 18 nt, Human
aauaaaauauuuucugug

SEQ ID NO: 3555081 - RNA, 16 nt, Human
aauaaaaucuugaaaa

SEQ ID NO: 3555082 - RNA, 13 nt, Human
aauaaaaugaaaa

SEQ ID NO: 3555083 - RNA, 14 nt, Human
aauaaaauggguuu

SEQ ID NO: 3555084 - RNA, 19 nt, Human
aauaaaauggguuuuacug

SEQ ID NO: 3555085 - RNA, 14 nt, Human
aauaaaaugugauu

SEQ ID NO: 3555086 - RNA, 21 nt, Human
aauaaaaugugauuuuucuga

SEQ ID NO: 3555087 - RNA, 17 nt, Human
aauaaaauguugaaaag

SEQ ID NO: 3555088 - RNA, 23 nt, Human
aauaaaauuaaagcugaaaacug

SEQ ID NO: 3555089 - RNA, 14 nt, Human
aauaaaauuaagaa

SEQ ID NO: 3555090 - RNA, 17 nt, Human
aauaaaauuauuugcag

SEQ ID NO: 3555091 - RNA, 12 nt, Human
aauaaaauugua

SEQ ID NO: 3555092 - RNA, 15 nt, Human
aauaaaauuucuaag

SEQ ID NO: 3555093 - RNA, 21 nt, Human
aauaaaauuucuaagagagcu

SEQ ID NO: 3555094 - RNA, 14 nt, Human
aauaaaauuuguug

SEQ ID NO: 3555095 - RNA, 16 nt, Human
aauaaaauuuguugca

SEQ ID NO: 3555096 - RNA, 17 nt, Human
aauaaaauuuuaguuga

SEQ ID NO: 3555097 - RNA, 18 nt, Human
aauaaacacauagauuca

SEQ ID NO: 3555098 - RNA, 21 nt, Human
aauaaacacauagauucaccu

SEQ ID NO: 3555099 - RNA, 10 nt, Human
aauaaacacu

SEQ ID NO: 3555100 - RNA, 16 nt, Human
aauaaacacucuugaa

SEQ ID NO: 3555101 - RNA, 12 nt, Human
aauaaacacugu

SEQ ID NO: 3555102 - RNA, 21 nt, Human
aauaaacagcuucaugccuuu

SEQ ID NO: 3555103 - RNA, 16 nt, Human
aauaaaccaaaggaca

SEQ ID NO: 3555104 - RNA, 15 nt, Human
aauaaacccucagag

SEQ ID NO: 3555105 - RNA, 20 nt, Human
aauaaaccucaaaaugucua

SEQ ID NO: 3555106 - RNA, 15 nt, Human
aauaaacuauuggaa

SEQ ID NO: 3555107 - RNA, 18 nt, Human
aauaaacucaaugagcuc

SEQ ID NO: 3555108 - RNA, 18 nt, Human
aauaaacuggcagcucag

SEQ ID NO: 3555109 - RNA, 17 nt, Human
aauaaacuguguuuacu

SEQ ID NO: 3555110 - RNA, 16 nt, Human
aauaaacuuaacuuua

SEQ ID NO: 3555111 - RNA, 21 nt, Human
aauaaacuuagaauaaaauug

SEQ ID NO: 3555112 - RNA, 13 nt, Human
aauaaacuuuaau

SEQ ID NO: 3555113 - RNA, 18 nt, Human
aauaaacuuuuuuucaau

SEQ ID NO: 3555114 - RNA, 20 nt, Human
aauaaacuuuuuuucaaugu

SEQ ID NO: 3555115 - RNA, 17 nt, Human
aauaaagaaaagaugca

SEQ ID NO: 3555116 - RNA, 20 nt, Human
aauaaagaaaagaugcacuu

SEQ ID NO: 3555117 - RNA, 13 nt, Human
aauaaagaauacu

SEQ ID NO: 3555118 - RNA, 15 nt, Human
aauaaagaauacuug

SEQ ID NO: 3555119 - RNA, 19 nt, Human
aauaaagaauacuugaacu

SEQ ID NO: 3555120 - RNA, 12 nt, Human
aauaaagacagg

SEQ ID NO: 3555121 - RNA, 14 nt, Human
aauaaagaucaugu

SEQ ID NO: 3555122 - RNA, 18 nt, Human
aaugucauauacugccau

SEQ ID NO: 3555123 - RNA, 19 nt, Human
aaugucauauacugccaug

SEQ ID NO: 3555124 - RNA, 17 nt, Human
aaugucaugcugccuua

SEQ ID NO: 3555125 - RNA, 19 nt, Human
aaugucaugcugccuuauu

SEQ ID NO: 3555126 - RNA, 14 nt, Human
aaugucauuuuggu

SEQ ID NO: 3555127 - RNA, 17 nt, Human
aauguccaguaagauca

SEQ ID NO: 3555128 - RNA, 19 nt, Human
aauguccaguaagaucacu

SEQ ID NO: 3555129 - RNA, 15 nt, Human
aaugucuaaaugcug

SEQ ID NO: 3555130 - RNA, 16 nt, Human
aaugucuaauguauuu

SEQ ID NO: 3555131 - RNA, 19 nt, Human
aaugucucacugagcacug

SEQ ID NO: 3555132 - RNA, 17 nt, Human
aaugucugagugaaccu

SEQ ID NO: 3555133 - RNA, 15 nt, Human
aaugucugcugagga

SEQ ID NO: 3555134 - RNA, 16 nt, Human
aaugucugcugaggag

SEQ ID NO: 3555135 - RNA, 14 nt, Human
aaugucuggagacc

SEQ ID NO: 3555136 - RNA, 14 nt, Human
aaugucuguaaaua

SEQ ID NO: 3555137 - RNA, 16 nt, Human
aaugucuguaauaaua

SEQ ID NO: 3555138 - RNA, 19 nt, Human
aaugucuguaauaauagac

SEQ ID NO: 3555139 - RNA, 23 nt, Human
aaugucuguaauaauagacugua

SEQ ID NO: 3555140 - RNA, 17 nt, Human
aaugucuucauuucauu

SEQ ID NO: 3555141 - RNA, 21 nt, Human
aaugucuucauuucauuguau

SEQ ID NO: 3555142 - RNA, 14 nt, Human
aaugucuugagcuc

SEQ ID NO: 3555143 - RNA, 19 nt, Human
aaugucuugagcucuauua

SEQ ID NO: 3555144 - RNA, 17 nt, Human
aaugucuuguaagcaaa

SEQ ID NO: 3555145 - RNA, 11 nt, Human
aaugucuugug

SEQ ID NO: 3555146 - RNA, 13 nt, Human
aaugucuuguguu

SEQ ID NO: 3555147 - RNA, 13 nt, Human
aaugucuuguuaa

SEQ ID NO: 3555148 - RNA, 20 nt, Human
aaugucuuuaaugcaauaua

SEQ ID NO: 3555149 - RNA, 15 nt, Human
aaugucuuuccaaau

SEQ ID NO: 3555150 - RNA, 23 nt, Human
aaugucuuuccaaauuauuucuu

SEQ ID NO: 3555151 - RNA, 15 nt, Human
aaugucuuuguaagu

SEQ ID NO: 3555152 - RNA, 22 nt, Human
aaugucuuuguaagucaguguu

SEQ ID NO: 3555153 - RNA, 22 nt, Human
aaugucuuuguuggaaaagaau

SEQ ID NO: 3555154 - RNA, 17 nt, Human
aaugucuuuugaauauu

SEQ ID NO: 3555155 - RNA, 22 nt, Human
aaugucuuuuuuuuaaugugcu

SEQ ID NO: 3555156 - RNA, 15 nt, Human
aaugugaaaagaaaa

SEQ ID NO: 3555157 - RNA, 19 nt, Human
aaugugaaaagaaaaauga

SEQ ID NO: 3555158 - RNA, 22 nt, Human
aaugugaaaaugguccaggaga

SEQ ID NO: 3555159 - RNA, 20 nt, Human
aaugugaacuagcuggaauu

SEQ ID NO: 3555160 - RNA, 15 nt, Human
aaugugaacuuuauu

SEQ ID NO: 3555161 - RNA, 12 nt, Human
aaugugaagaug

SEQ ID NO: 3555162 - RNA, 22 nt, Human
aaugugaagaugcauuguaguu

SEQ ID NO: 3555163 - RNA, 16 nt, Human
aaugugaauaaaauua

SEQ ID NO: 3555164 - RNA, 23 nt, Human
aaugugaaucagacccuacccca

SEQ ID NO: 3555165 - RNA, 12 nt, Human
aaugugaauuac

SEQ ID NO: 3555166 - RNA, 17 nt, Human
aaugugaauuacuaacu

SEQ ID NO: 3555167 - RNA, 14 nt, Human
aaugugacucaaga

SEQ ID NO: 3555168 - RNA, 15 nt, Human
aaugugagaagccag

SEQ ID NO: 3555169 - RNA, 16 nt, Human
aaugugauaaaacccc

SEQ ID NO: 3555170 - RNA, 22 nt, Human
aaugugaucuauguuucaucuu

SEQ ID NO: 3555171 - RNA, 20 nt, Human
aaugugaugaauacuguauu

SEQ ID NO: 3555172 - RNA, 18 nt, Human
aaugugaugauguaauug

SEQ ID NO: 3555173 - RNA, 20 nt, Human
aaugugaugauguaauugac

SEQ ID NO: 3555174 - RNA, 16 nt, Human
aaugugauguucuaag

SEQ ID NO: 3555175 - RNA, 17 nt, Human
aaugugauguucuaagg

SEQ ID NO: 3555176 - RNA, 16 nt, Human
aaugugauuuuucuga

SEQ ID NO: 3555177 - RNA, 22 nt, Human
aaugugcagguuuguuacauag

SEQ ID NO: 3555178 - RNA, 18 nt, Human
aaugugcuauacugcaua

SEQ ID NO: 3555179 - RNA, 21 nt, Human
aaugugcugaaugguuuucaa

SEQ ID NO: 3555180 - RNA, 14 nt, Human
aaugugcuguguaa

SEQ ID NO: 3555181 - RNA, 19 nt, Human
aaugugcuguguaaaguua

SEQ ID NO: 3555182 - RNA, 21 nt, Human
aaugugcuguguaaaguuagu

SEQ ID NO: 3555183 - RNA, 17 nt, Human
aauguggcagcugucuc

SEQ ID NO: 3555184 - RNA, 21 nt, Human
aauguggccccugaacaagaa

SEQ ID NO: 3555185 - RNA, 21 nt, Human
aauguggcuugagaaauaugg

SEQ ID NO: 3555186 - RNA, 21 nt, Human
aaugugggaagaaacaaaccc

SEQ ID NO: 3555187 - RNA, 16 nt, Human
aaugugguagccucac

SEQ ID NO: 3555188 - RNA, 19 nt, Human
aaugugguuauuucucuga

SEQ ID NO: 3555189 - RNA, 23 nt, Human
aaugugguuauuucucugauuug

SEQ ID NO: 3555190 - RNA, 21 nt, Human
aauguguaguucauguaaaua

SEQ ID NO: 3555191 - RNA, 22 nt, Human
aauguguaguucauguaaauaa

SEQ ID NO: 3555192 - RNA, 14 nt, Human
aauguguccuaucu

SEQ ID NO: 3555193 - RNA, 23 nt, Human
aauguguccuaucuaucuuccaa

SEQ ID NO: 3555194 - RNA, 23 nt, Human
aaugugucuuuagauagcccugu

SEQ ID NO: 3555195 - RNA, 15 nt, Human
aaugugucuuucuaa

SEQ ID NO: 3555196 - RNA, 22 nt, Human
aaugugucuuucuuuuuggaca

SEQ ID NO: 3555197 - RNA, 22 nt, Human
aaugugugaaaaagaugccaau

SEQ ID NO: 3555198 - RNA, 21 nt, Human
aaugugugguggccucagcug

SEQ ID NO: 3555199 - RNA, 13 nt, Human
aauguguguauau

SEQ ID NO: 3555200 - RNA, 17 nt, Human
aauguguguauauggac

SEQ ID NO: 3555201 - RNA, 13 nt, Human
aauguguguaugu

SEQ ID NO: 3555202 - RNA, 21 nt, Human
aauguguguauguguauuuau

SEQ ID NO: 3555203 - RNA, 16 nt, Human
aaugugugucaauuua

SEQ ID NO: 3555204 - RNA, 21 nt, Human
aaugugugugaugugacauuu

SEQ ID NO: 3555205 - RNA, 22 nt, Human
aaugugugugguuuuuuuucua

SEQ ID NO: 3555206 - RNA, 16 nt, Human
aauguguugaaacugc

SEQ ID NO: 3555207 - RNA, 14 nt, Human
aauguguuggacaa

SEQ ID NO: 3555208 - RNA, 18 nt, Human
aauguguuucaaacugua

SEQ ID NO: 3555209 - RNA, 13 nt, Human
aauguguuucugu

SEQ ID NO: 3555210 - RNA, 22 nt, Human
aauguguuuuagaguaagaaau

SEQ ID NO: 3555211 - RNA, 17 nt, Human
aauguguuuuguacaug

SEQ ID NO: 3555212 - RNA, 16 nt, Human
aauguguuuuucucca

SEQ ID NO: 3555213 - RNA, 15 nt, Human
aauguuaaaaugugu

SEQ ID NO: 3555214 - RNA, 16 nt, Human
aauguuaaaauguguu

SEQ ID NO: 3555215 - RNA, 23 nt, Human
acaaugcugugcccuaaagugua

SEQ ID NO: 3555216 - RNA, 24 nt, Human
acaaugcugugcccuaaaguguau

SEQ ID NO: 3555217 - RNA, 14 nt, Human
acaauggaaacuga

SEQ ID NO: 3555218 - RNA, 21 nt, Human
acaauggcuaauucccagagu

SEQ ID NO: 3555219 - RNA, 21 nt, Human
acaaugguuuucuuguguguu

SEQ ID NO: 3555220 - RNA, 14 nt, Human
acaauguacacacu

SEQ ID NO: 3555221 - RNA, 17 nt, Human
acaauguagauaagugu

SEQ ID NO: 3555222 - RNA, 15 nt, Human
acaaugucaguauuu

SEQ ID NO: 3555223 - RNA, 22 nt, Human
acaaugucaguauuucagugua

SEQ ID NO: 3555224 - RNA, 23 nt, Human
acaaugucaguauuucaguguag

SEQ ID NO: 3555225 - RNA, 12 nt, Human
acaaugugaacu

SEQ ID NO: 3555226 - RNA, 19 nt, Human
acaaugugaacuuuauuaa

SEQ ID NO: 3555227 - RNA, 20 nt, Human
acaaugugacuuugaaaaua

SEQ ID NO: 3555228 - RNA, 14 nt, Human
acaaugugucugag

SEQ ID NO: 3555229 - RNA, 22 nt, Human
acaaugugucuuucuuuuugga

SEQ ID NO: 3555230 - RNA, 19 nt, Human
acaauguuaaggaaacucu

SEQ ID NO: 3555231 - RNA, 13 nt, Human
acaauguucuuua

SEQ ID NO: 3555232 - RNA, 16 nt, Human
acaauuacuuuagaaa

SEQ ID NO: 3555233 - RNA, 20 nt, Human
acaauuauuccaaaccaaau

SEQ ID NO: 3555234 - RNA, 18 nt, Human
acaauuauuuuuacaguu

SEQ ID NO: 3555235 - RNA, 21 nt, Human
acaauuauuuuuacaguucuc

SEQ ID NO: 3555236 - RNA, 19 nt, Human
acaauucaaagaaucaccu

SEQ ID NO: 3555237 - RNA, 15 nt, Human
acaauucaugaacuu

SEQ ID NO: 3555238 - RNA, 20 nt, Human
acaauucaugaacuucgcau

SEQ ID NO: 3555239 - RNA, 18 nt, Human
acaauuccaaaggaaucu

SEQ ID NO: 3555240 - RNA, 13 nt, Human
acaauuccaugac

SEQ ID NO: 3555241 - RNA, 15 nt, Human
acaauucccugcugu

SEQ ID NO: 3555242 - RNA, 16 nt, Human
acaauucccugcuguc

SEQ ID NO: 3555243 - RNA, 12 nt, Human
acaauucuaaaa

SEQ ID NO: 3555244 - RNA, 17 nt, Human
acaauucuaaaaugauu

SEQ ID NO: 3555245 - RNA, 23 nt, Human
acaauucuaaaaugauuguagua

SEQ ID NO: 3555246 - RNA, 17 nt, Human
acaauucuguuuuuaau

SEQ ID NO: 3555247 - RNA, 16 nt, Human
acaauucuuuauacaa

SEQ ID NO: 3555248 - RNA, 19 nt, Human
acaauucuuuauacaacag

SEQ ID NO: 3555249 - RNA, 21 nt, Human
acaauucuuuauacaacagug

SEQ ID NO: 3555250 - RNA, 22 nt, Human
acaauugaaguaaacuuuuugu

SEQ ID NO: 3555251 - RNA, 22 nt, Human
acaauugagguaaguuuuuuga

SEQ ID NO: 3555252 - RNA, 13 nt, Human
acaauugggagcu

SEQ ID NO: 3555253 - RNA, 20 nt, Human
acaauuguaaaacugaggca

SEQ ID NO: 3555254 - RNA, 21 nt, Human
acaauugucgaaaagagucuu

SEQ ID NO: 3555255 - RNA, 21 nt, Human
acaauuguguagccuuuuugu

SEQ ID NO: 3555256 - RNA, 18 nt, Human
acaauuguuuuaaucuga

SEQ ID NO: 3555257 - RNA, 20 nt, Human
acaauuguuuuaaucugaaa

SEQ ID NO: 3555258 - RNA, 13 nt, Human
acaauuuaaagca

SEQ ID NO: 3555259 - RNA, 14 nt, Human
acaauuuaaagcaa

SEQ ID NO: 3555260 - RNA, 13 nt, Human
acaauuuacaaag

SEQ ID NO: 3555261 - RNA, 14 nt, Human
acaauuuauuaugg

SEQ ID NO: 3555262 - RNA, 15 nt, Human
acaauuuauuauggc

SEQ ID NO: 3555263 - RNA, 16 nt, Human
acaauuuauuauggca

SEQ ID NO: 3555264 - RNA, 20 nt, Human
acaauuuccuuuauauuuag

SEQ ID NO: 3555265 - RNA, 14 nt, Human
acaauuugauacau

SEQ ID NO: 3555266 - RNA, 14 nt, Human
acaauuuggcaauu

SEQ ID NO: 3555267 - RNA, 22 nt, Human
acaauuuggcaauuuugugguu

SEQ ID NO: 3555268 - RNA, 23 nt, Human
acaauuugggcuuccuguuugua

SEQ ID NO: 3555269 - RNA, 19 nt, Human
acaauuuucagauuugcac

SEQ ID NO: 3555270 - RNA, 22 nt, Human
acaauuuucagauuugcacaaa

SEQ ID NO: 3555271 - RNA, 17 nt, Human
acaauuuuguuucugua

SEQ ID NO: 3555272 - RNA, 14 nt, Human
acaauuuuuaaugg

SEQ ID NO: 3555273 - RNA, 15 nt, Human
acaauuuuuaauggc

SEQ ID NO: 3555274 - RNA, 21 nt, Human
acaauuuuuuuaauuuuguau

SEQ ID NO: 3555275 - RNA, 17 nt, Human
acacaaaacaaauccug

SEQ ID NO: 3555276 - RNA, 12 nt, Human
acacaaaaucaa

SEQ ID NO: 3555277 - RNA, 19 nt, Human
acacaaaccacaacugaca

SEQ ID NO: 3555278 - RNA, 15 nt, Human
acacaaaccugccug

SEQ ID NO: 3555279 - RNA, 15 nt, Human
acacaaacuguaaau

SEQ ID NO: 3555280 - RNA, 19 nt, Human
acacaaacuguaaauaaaa

SEQ ID NO: 3555281 - RNA, 11 nt, Human
aauaaagcaau

SEQ ID NO: 3555282 - RNA, 13 nt, Human
aauaaagcaauuu

SEQ ID NO: 3555283 - RNA, 18 nt, Human
aauaaagcaauuuuccuu

SEQ ID NO: 3555284 - RNA, 22 nt, Human
aauaaagcaauuuuccuugaag

SEQ ID NO: 3555285 - RNA, 21 nt, Human
aauaaagccuugugaucacuu

SEQ ID NO: 3555286 - RNA, 19 nt, Human
aauaaagcuguguggcagu

SEQ ID NO: 3555287 - RNA, 18 nt, Human
aauaaaggacuguaaucu

SEQ ID NO: 3555288 - RNA, 16 nt, Human
aauaaaggaugugauu

SEQ ID NO: 3555289 - RNA, 15 nt, Human
aauaaaggcaguuuu

SEQ ID NO: 3555290 - RNA, 18 nt, Human
aauaaaggcaguuuucua

SEQ ID NO: 3555291 - RNA, 19 nt, Human
aauaaaggcaguuuucuaa

SEQ ID NO: 3555292 - RNA, 18 nt, Human
aauaaagguuguuuugaa

SEQ ID NO: 3555293 - RNA, 14 nt, Human
aauaaaguaauuau

SEQ ID NO: 3555294 - RNA, 16 nt, Human
aauaaaguacaagagc

SEQ ID NO: 3555295 - RNA, 15 nt, Human
aauaaaguauauaau

SEQ ID NO: 3555296 - RNA, 15 nt, Human
aauaaaguaucaugc

SEQ ID NO: 3555297 - RNA, 19 nt, Human
aauaaaguaucaugcauuc

SEQ ID NO: 3555298 - RNA, 15 nt, Human
aauaaaguauuccac

SEQ ID NO: 3555299 - RNA, 14 nt, Human
aauaaaguauuuaa

SEQ ID NO: 3555300 - RNA, 19 nt, Human
aauaaaguauuuaauuagu

SEQ ID NO: 3555301 - RNA, 20 nt, Human
aauaaaguauuuaauuagug

SEQ ID NO: 3555302 - RNA, 12 nt, Human
aauaaaguguau

SEQ ID NO: 3555303 - RNA, 15 nt, Human
aauaaaguguuuuca

SEQ ID NO: 3555304 - RNA, 18 nt, Human
aauaaaguguuuucagag

SEQ ID NO: 3555305 - RNA, 19 nt, Human
aauaaaguguuuucagagc

SEQ ID NO: 3555306 - RNA, 19 nt, Human
aauaaaguuggucuuuuga

SEQ ID NO: 3555307 - RNA, 19 nt, Human
aauaaaguuugaucuuccu

SEQ ID NO: 3555308 - RNA, 14 nt, Human
aauaaauaaaugca

SEQ ID NO: 3555309 - RNA, 20 nt, Human
aauaaauaccucuuagcuga

SEQ ID NO: 3555310 - RNA, 21 nt, Human
aauaaauagagcaauuacaag

SEQ ID NO: 3555311 - RNA, 10 nt, Human
aauaaauagu

SEQ ID NO: 3555312 - RNA, 12 nt, Human
aauaaauauaua

SEQ ID NO: 3555313 - RNA, 16 nt, Human
aauaaauauauauaaa

SEQ ID NO: 3555314 - RNA, 19 nt, Human
aauaaauauauauaaaccu

SEQ ID NO: 3555315 - RNA, 15 nt, Human
aauaaauauauauau

SEQ ID NO: 3555316 - RNA, 16 nt, Human
aauaaaucauaaaacu

SEQ ID NO: 3555317 - RNA, 16 nt, Human
aauaaaucugacccag

SEQ ID NO: 3555318 - RNA, 17 nt, Human
aauaaaucugacccagu

SEQ ID NO: 3555319 - RNA, 20 nt, Human
aauaaaucugguagaaaaau

SEQ ID NO: 3555320 - RNA, 22 nt, Human
aauaaaucuguugccaagcugg

SEQ ID NO: 3555321 - RNA, 14 nt, Human
aauaaaucuuccua

SEQ ID NO: 3555322 - RNA, 15 nt, Human
aauaaaucuuuggaa

SEQ ID NO: 3555323 - RNA, 16 nt, Human
aauaaaugagcuaugu

SEQ ID NO: 3555324 - RNA, 16 nt, Human
aauaaaugcccucuuc

SEQ ID NO: 3555325 - RNA, 17 nt, Human
aauaaaugguauagcaa

SEQ ID NO: 3555326 - RNA, 21 nt, Human
aauaaaugguauagcaaaugu

SEQ ID NO: 3555327 - RNA, 22 nt, Human
aauaaaugguauagcaaauguu

SEQ ID NO: 3555328 - RNA, 13 nt, Human
aauaaaugucacu

SEQ ID NO: 3555329 - RNA, 13 nt, Human
aauaaaugucauu

SEQ ID NO: 3555330 - RNA, 17 nt, Human
aauaaaugucauuaaaa

SEQ ID NO: 3555331 - RNA, 13 nt, Human
aauaaaugucuuu

SEQ ID NO: 3555332 - RNA, 23 nt, Human
aauaaaugucuuuuuuuuaaugu

SEQ ID NO: 3555333 - RNA, 12 nt, Human
aauaaaugugcc

SEQ ID NO: 3555334 - RNA, 18 nt, Human
aauaaauuaaaacaugca

SEQ ID NO: 3555335 - RNA, 21 nt, Human
aauaaauuaaauaaaauaacc

SEQ ID NO: 3555336 - RNA, 14 nt, Human
aauaaauuaguugu

SEQ ID NO: 3555337 - RNA, 14 nt, Human
aauaaauugaaauu

SEQ ID NO: 3555338 - RNA, 22 nt, Human
aauaaauugauuuuuauaaaua

SEQ ID NO: 3555339 - RNA, 20 nt, Human
aauaaauugcaugcugcuuu

SEQ ID NO: 3555340 - RNA, 19 nt, Human
aauaaauugcuaauguugc

SEQ ID NO: 3555341 - RNA, 14 nt, Human
aauaaauuggaguu

SEQ ID NO: 3555342 - RNA, 15 nt, Human
aauaaauuguauauu

SEQ ID NO: 3555343 - RNA, 17 nt, Human
aauaaauuguauauuca

SEQ ID NO: 3555344 - RNA, 13 nt, Human
aauaaauuguuug

SEQ ID NO: 3555345 - RNA, 12 nt, Human
aauaaauuuuga

SEQ ID NO: 3555346 - RNA, 22 nt, Human
aauaaauuuugaaaaguaauau

SEQ ID NO: 3555347 - RNA, 22 nt, Human
aauaaauuuuuuauaaaagugu

SEQ ID NO: 3555348 - RNA, 15 nt, Human
aauaacaaagcccuu

SEQ ID NO: 3555349 - RNA, 19 nt, Human
aauaacaaugugcucucgg

SEQ ID NO: 3555350 - RNA, 19 nt, Human
aauaacacuaaaauuuuag

SEQ ID NO: 3555351 - RNA, 13 nt, Human
aauaacagccgcu

SEQ ID NO: 3555352 - RNA, 16 nt, Human
aauaacauaacaaaua

SEQ ID NO: 3555353 - RNA, 20 nt, Human
aauaacauaauuuguacaua

SEQ ID NO: 3555354 - RNA, 15 nt, Human
aauaacauuaccuua

SEQ ID NO: 3555355 - RNA, 20 nt, Human
aauaacauuaccuuacugug

SEQ ID NO: 3555356 - RNA, 17 nt, Human
aauaaccggauauauac

SEQ ID NO: 3555357 - RNA, 16 nt, Human
aauaaccguaaagguu

SEQ ID NO: 3555358 - RNA, 15 nt, Human
aauaacuaaaaugua

SEQ ID NO: 3555359 - RNA, 13 nt, Human
aauaacuacugug

SEQ ID NO: 3555360 - RNA, 17 nt, Human
aauauauuucuaaaugu

SEQ ID NO: 3555361 - RNA, 13 nt, Human
aauauauuugugu

SEQ ID NO: 3555362 - RNA, 14 nt, Human
aauauauuugugua

SEQ ID NO: 3555363 - RNA, 12 nt, Human
aauauauuuuag

SEQ ID NO: 3555364 - RNA, 17 nt, Human
aauauauuuuguaugca

SEQ ID NO: 3555365 - RNA, 20 nt, Human
aauaucaaagucauuaaaga

SEQ ID NO: 3555366 - RNA, 21 nt, Human
aauaucaaaugcaguauauuu

SEQ ID NO: 3555367 - RNA, 19 nt, Human
aauaucaaauuaauugugu

SEQ ID NO: 3555368 - RNA, 19 nt, Human
aauaucaccaaaaaccuau

SEQ ID NO: 3555369 - RNA, 20 nt, Human
aauaucaccaaaaaccuauu

SEQ ID NO: 3555370 - RNA, 20 nt, Human
aauaucacuugucaauaaaa

SEQ ID NO: 3555371 - RNA, 13 nt, Human
aauaucagacuuu

SEQ ID NO: 3555372 - RNA, 22 nt, Human
aauaucauaucaucacauugag

SEQ ID NO: 3555373 - RNA, 13 nt, Human
aauaucauuuauu

SEQ ID NO: 3555374 - RNA, 23 nt, Human
aauauccaggucaacagaaugaa

SEQ ID NO: 3555375 - RNA, 24 nt, Human
aauauccaggucaacagaaugaaa

SEQ ID NO: 3555376 - RNA, 18 nt, Human
aauaucccuacauguauu

SEQ ID NO: 3555377 - RNA, 12 nt, Human
aauaucccuccu

SEQ ID NO: 3555378 - RNA, 21 nt, Human
aauaucccuuggacauuuuau

SEQ ID NO: 3555379 - RNA, 18 nt, Human
aauauccuaaacaucauu

SEQ ID NO: 3555380 - RNA, 19 nt, Human
aauauccuaauaaaaaggu

SEQ ID NO: 3555381 - RNA, 12 nt, Human
aauauccuuugc

SEQ ID NO: 3555382 - RNA, 12 nt, Human
aauaucuaaagu

SEQ ID NO: 3555383 - RNA, 15 nt, Human
aauaucuaaaguuau

SEQ ID NO: 3555384 - RNA, 16 nt, Human
aauaucuaaaguuaua

SEQ ID NO: 3555385 - RNA, 16 nt, Human
aauaucuaguaauaua

SEQ ID NO: 3555386 - RNA, 16 nt, Human
aauaucuauuaauaua

SEQ ID NO: 3555387 - RNA, 16 nt, Human
aauaucuccgucaacu

SEQ ID NO: 3555388 - RNA, 15 nt, Human
aauaucucuauuuaa

SEQ ID NO: 3555389 - RNA, 16 nt, Human
aauaucucuauuuaau

SEQ ID NO: 3555390 - RNA, 23 nt, Human
aauaucucuauuuaauuuugaca

SEQ ID NO: 3555391 - RNA, 16 nt, Human
aauaucugaaaaugua

SEQ ID NO: 3555392 - RNA, 12 nt, Human
aauaucugaagc

SEQ ID NO: 3555393 - RNA, 13 nt, Human
aauaucugcugua

SEQ ID NO: 3555394 - RNA, 15 nt, Human
aauaucuuggccuaa

SEQ ID NO: 3555395 - RNA, 12 nt, Human
aauaucuuucug

SEQ ID NO: 3555396 - RNA, 19 nt, Human
aauaucuuugugauaauuu

SEQ ID NO: 3555397 - RNA, 22 nt, Human
aauaucuuugugauaauuuaag

SEQ ID NO: 3555398 - RNA, 14 nt, Human
aauaucuuuuaugu

SEQ ID NO: 3555399 - RNA, 19 nt, Human
aauaucuuuuuuuuaauaa

SEQ ID NO: 3555400 - RNA, 13 nt, Human
aauaugaaaacuu

SEQ ID NO: 3555401 - RNA, 14 nt, Human
aauaugaaaacuua

SEQ ID NO: 3555402 - RNA, 20 nt, Human
aauaugaaauuuuuuuucau

SEQ ID NO: 3555403 - RNA, 21 nt, Human
aauaugaacccuuuguuucuu

SEQ ID NO: 3555404 - RNA, 12 nt, Human
aauaugaaugcc

SEQ ID NO: 3555405 - RNA, 22 nt, Human
aauaugaaugcccccagcuggc

SEQ ID NO: 3555406 - RNA, 19 nt, Human
aauaugacuuuuuauaaaa

SEQ ID NO: 3555407 - RNA, 16 nt, Human
aauaugagaaucagau

SEQ ID NO: 3555408 - RNA, 19 nt, Human
aauaugaggcauuuggcau

SEQ ID NO: 3555409 - RNA, 16 nt, Human
aauaugaguacaaaug

SEQ ID NO: 3555410 - RNA, 17 nt, Human
aauaugaguacaaaugc

SEQ ID NO: 3555411 - RNA, 11 nt, Human
aauaugaugac

SEQ ID NO: 3555412 - RNA, 14 nt, Human
aauaugaugacaau

SEQ ID NO: 3555413 - RNA, 18 nt, Human
aauaugauuaaaaauauc

SEQ ID NO: 3555414 - RNA, 18 nt, Human
aauaugauuaguaaagaa

SEQ ID NO: 3555415 - RNA, 12 nt, Human
aauaugauuuua

SEQ ID NO: 3555416 - RNA, 22 nt, Human
aauaugauuuuuuaaaagaaau

SEQ ID NO: 3555417 - RNA, 24 nt, Human
aauaugcaaagcacugacuucuaa

SEQ ID NO: 3555418 - RNA, 18 nt, Human
aauaugcaaagucuaggu

SEQ ID NO: 3555419 - RNA, 20 nt, Human
aauaugccuaguaacacaua

SEQ ID NO: 3555420 - RNA, 16 nt, Human
aauaugcuaauucuca

SEQ ID NO: 3555421 - RNA, 13 nt, Human
aauaugcuaauuu

SEQ ID NO: 3555422 - RNA, 14 nt, Human
aauaugcugccaaa

SEQ ID NO: 3555423 - RNA, 16 nt, Human
aauaugcuuaaaauaa

SEQ ID NO: 3555424 - RNA, 23 nt, Human
aauaugcuuaaaauaagcaggug

SEQ ID NO: 3555425 - RNA, 11 nt, Human
aauaugcuuac

SEQ ID NO: 3555426 - RNA, 23 nt, Human
aauaugcuuucaucuucuguugc

SEQ ID NO: 3555427 - RNA, 14 nt, Human
aauauggaacuuac

SEQ ID NO: 3555428 - RNA, 24 nt, Human
aauauggaacuuacauuguucaau

SEQ ID NO: 3555429 - RNA, 20 nt, Human
aauauggaacuucuaauaua

SEQ ID NO: 3555430 - RNA, 18 nt, Human
aauaugguguacauucuu

SEQ ID NO: 3555431 - RNA, 16 nt, Human
aauauguacauuucua

SEQ ID NO: 3555432 - RNA, 15 nt, Human
aauauguaccaagaa

SEQ ID NO: 3555433 - RNA, 15 nt, Human
aauauguauaacuuu

SEQ ID NO: 3555434 - RNA, 21 nt, Human
aauauguauucuguaaaagaa

SEQ ID NO: 3555435 - RNA, 20 nt, Human
aauauguauuuuauguaugu

SEQ ID NO: 3555436 - RNA, 11 nt, Human
aauaugucagu

SEQ ID NO: 3555437 - RNA, 17 nt, Human
aauauguccauaucuaa

SEQ ID NO: 3555438 - RNA, 19 nt, Human
aauauguccauaucuaacc

SEQ ID NO: 3555439 - RNA, 19 nt, Human
aauaugugaaggaccuuca

SEQ ID NO: 3555440 - RNA, 21 nt, Human
aauauguuaaccucaguguca

SEQ ID NO: 3555441 - RNA, 16 nt, Human
aauauguuagcaaaga

SEQ ID NO: 3555442 - RNA, 13 nt, Human
aauauguuuccuu

SEQ ID NO: 3555443 - RNA, 19 nt, Human
aauauguuuccuuguuuau

SEQ ID NO: 3555444 - RNA, 21 nt, Human
aauauuaaaaaacuucaugua

SEQ ID NO: 3555445 - RNA, 13 nt, Human
aauauuaaaaagu

SEQ ID NO: 3555446 - RNA, 17 nt, Human
aauauuaaaaagucuuu

SEQ ID NO: 3555447 - RNA, 20 nt, Human
aauauuaaaaagucuuuuaa

SEQ ID NO: 3555448 - RNA, 19 nt, Human
aauauuaaaagucacaaug

SEQ ID NO: 3555449 - RNA, 17 nt, Human
aauauuaaacccuggau

SEQ ID NO: 3555450 - RNA, 12 nt, Human
aauauuaaagcc

SEQ ID NO: 3555451 - RNA, 16 nt, Human
aauauuaaagccaugu

SEQ ID NO: 3555452 - RNA, 18 nt, Human
aauauuaaagccauguuu

SEQ ID NO: 3555453 - RNA, 17 nt, Human
aauauuaaauacagaca

SEQ ID NO: 3555454 - RNA, 19 nt, Human
aauauuaaauacagacacu

SEQ ID NO: 3555455 - RNA, 21 nt, Human
aauauuaaaucugcuggaguu

SEQ ID NO: 3555456 - RNA, 22 nt, Human
aauauuaaugccuuuaaaguau

SEQ ID NO: 3555457 - RNA, 13 nt, Human
aauauuagaaaca

SEQ ID NO: 3555458 - RNA, 12 nt, Human
aauauuagaugu

SEQ ID NO: 3555459 - RNA, 20 nt, Human
aauauuagaugugauuuaau

SEQ ID NO: 3555460 - RNA, 22 nt, Human
aauauuaggcuuaaaaacugaa

SEQ ID NO: 3555461 - RNA, 14 nt, Human
aauauuaguuaaug

SEQ ID NO: 3555462 - RNA, 18 nt, Human
aauauuaguuaauggauu

SEQ ID NO: 3555463 - RNA, 22 nt, Human
aauauuauacuaagaaaagaua

SEQ ID NO: 3555464 - RNA, 17 nt, Human
aauauuauauuuggaug

SEQ ID NO: 3555465 - RNA, 11 nt, Human
aauauuaucuu

SEQ ID NO: 3555466 - RNA, 18 nt, Human
aauauuaugagaugcugg

SEQ ID NO: 3555467 - RNA, 21 nt, Human
aauauuaugcaaauucccaga

SEQ ID NO: 3555468 - RNA, 15 nt, Human
aauauucagaaucuu

SEQ ID NO: 3555469 - RNA, 20 nt, Human
aauauucagacaaaauggau

SEQ ID NO: 3555470 - RNA, 18 nt, Human
aauauucauaguuuaauu

SEQ ID NO: 3555471 - RNA, 18 nt, Human
aauauuccagaucuuuca

SEQ ID NO: 3555472 - RNA, 22 nt, Human
aauauuccagaucuuucagaaa

SEQ ID NO: 3555473 - RNA, 15 nt, Human
aauauuccugaauga

SEQ ID NO: 3555474 - RNA, 15 nt, Human
aauauuccugcauuu

SEQ ID NO: 3555475 - RNA, 20 nt, Human
aauauucuauaugaauuuaa

SEQ ID NO: 3555476 - RNA, 14 nt, Human
aauauucucuauuu

SEQ ID NO: 3555477 - RNA, 15 nt, Human
aauauucucuguaca

SEQ ID NO: 3555478 - RNA, 14 nt, Human
aauauugaaaauug

SEQ ID NO: 3555479 - RNA, 16 nt, Human
aauauugaaaauugaa

SEQ ID NO: 3555480 - RNA, 14 nt, Human
aauauugaaguacu

SEQ ID NO: 3555481 - RNA, 20 nt, Human
aauauugacauuuguaguug

SEQ ID NO: 3555482 - RNA, 14 nt, Human
aauauugacuugua

SEQ ID NO: 3555483 - RNA, 16 nt, Human
aauauugacuuugucu

SEQ ID NO: 3555484 - RNA, 16 nt, Human
aauauugagaaagaaa

SEQ ID NO: 3555485 - RNA, 17 nt, Human
aauauugaggcuuugug

SEQ ID NO: 3555486 - RNA, 15 nt, Human
acacgugaugugaua

SEQ ID NO: 3555487 - RNA, 23 nt, Human
acacgugcaauuuguuugugcuu

SEQ ID NO: 3555488 - RNA, 20 nt, Human
acacguggaggaaugcuccc

SEQ ID NO: 3555489 - RNA, 21 nt, Human
acacguggaggaaugcucccc

SEQ ID NO: 3555490 - RNA, 18 nt, Human
acacgugggcuccccucu

SEQ ID NO: 3555491 - RNA, 23 nt, Human
acacgugggcuccccucuuccuc

SEQ ID NO: 3555492 - RNA, 16 nt, Human
acacguuuuaaggacu

SEQ ID NO: 3555493 - RNA, 14 nt, Human
acacuaaaauuuua

SEQ ID NO: 3555494 - RNA, 15 nt, Human
acacuaaaauuuuag

SEQ ID NO: 3555495 - RNA, 20 nt, Human
acacuaaacagacuauuuaa

SEQ ID NO: 3555496 - RNA, 21 nt, Human
acacuaaacagacuauuuaac

SEQ ID NO: 3555497 - RNA, 17 nt, Human
acacuaaagauccaaga

SEQ ID NO: 3555498 - RNA, 12 nt, Human
acacuaaauguu

SEQ ID NO: 3555499 - RNA, 13 nt, Human
acacuaaauguua

SEQ ID NO: 3555500 - RNA, 14 nt, Human
acacuaaccaaauc

SEQ ID NO: 3555501 - RNA, 22 nt, Human
acacuaaccaagcugaguuucc

SEQ ID NO: 3555502 - RNA, 14 nt, Human
acacuaaccacgcu

SEQ ID NO: 3555503 - RNA, 16 nt, Human
acacuaaccacgcugg

SEQ ID NO: 3555504 - RNA, 19 nt, Human
acacuaaccacgcuggacc

SEQ ID NO: 3555505 - RNA, 18 nt, Human
acaaagcacaguuugaac

SEQ ID NO: 3555506 - RNA, 15 nt, Human
acaaagcacuagaga

SEQ ID NO: 3555507 - RNA, 11 nt, Human
acaaagcccaa

SEQ ID NO: 3555508 - RNA, 18 nt, Human
acaaagcccuuccauguc

SEQ ID NO: 3555509 - RNA, 18 nt, Human
acaaagcuguuaaacugu

SEQ ID NO: 3555510 - RNA, 16 nt, Human
acaaagcuuagcagga

SEQ ID NO: 3555511 - RNA, 22 nt, Human
acaaagcuuuugcauauugcau

SEQ ID NO: 3555512 - RNA, 23 nt, Human
acaaagcuuuugcauauugcaua

SEQ ID NO: 3555513 - RNA, 18 nt, Human
acaaaggaauggaggcuc

SEQ ID NO: 3555514 - RNA, 13 nt, Human
acaaaggagccug

SEQ ID NO: 3555515 - RNA, 16 nt, Human
acaaaggagccuguga

SEQ ID NO: 3555516 - RNA, 17 nt, Human
acaaaggccaaacugcu

SEQ ID NO: 3555517 - RNA, 19 nt, Human
acaaaggcuguauucagca

SEQ ID NO: 3555518 - RNA, 22 nt, Human
acaaagggcacagcaucuguag

SEQ ID NO: 3555519 - RNA, 17 nt, Human
acaaaggggcuuaauua

SEQ ID NO: 3555520 - RNA, 15 nt, Human
acaaaggguuuuaau

SEQ ID NO: 3555521 - RNA, 22 nt, Human
acaaagguuuaaaugaacaaga

SEQ ID NO: 3555522 - RNA, 16 nt, Human
acaaaguaauuuggaa

SEQ ID NO: 3555523 - RNA, 15 nt, Human
acaaaguauuaagca

SEQ ID NO: 3555524 - RNA, 15 nt, Human
acaaaguggaaggaa

SEQ ID NO: 3555525 - RNA, 23 nt, Human
acaaaguggaaggaaagaugcuc

SEQ ID NO: 3555526 - RNA, 13 nt, Human
acaaaguguguau

SEQ ID NO: 3555527 - RNA, 16 nt, Human
acaaaguguguauuaa

SEQ ID NO: 3555528 - RNA, 17 nt, Human
acaaaguguguauuaaa

SEQ ID NO: 3555529 - RNA, 18 nt, Human
acaaaguuaaaauuguua

SEQ ID NO: 3555530 - RNA, 19 nt, Human
acaaaguuuaccagaaagc

SEQ ID NO: 3555531 - RNA, 19 nt, Human
acaaaguuucaauuuguuu

SEQ ID NO: 3555532 - RNA, 20 nt, Human
acaaaguuucagaguauauu

SEQ ID NO: 3555533 - RNA, 14 nt, Human
acaaauaacaacuu

SEQ ID NO: 3555534 - RNA, 15 nt, Human
acaaauaacaacuuu

SEQ ID NO: 3555535 - RNA, 16 nt, Human
acaaauaacaagaaua

SEQ ID NO: 3555536 - RNA, 12 nt, Human
acaaauaaucac

SEQ ID NO: 3555537 - RNA, 14 nt, Human
acaaauaauuuaga

SEQ ID NO: 3555538 - RNA, 19 nt, Human
acaaauacaauacauagga

SEQ ID NO: 3555539 - RNA, 23 nt, Human
acaaauacucuuaggaagagaaa

SEQ ID NO: 3555540 - RNA, 15 nt, Human
acaaauacuuauuca

SEQ ID NO: 3555541 - RNA, 16 nt, Human
acaaauacuuauucau

SEQ ID NO: 3555542 - RNA, 17 nt, Human
acaaauacuuauucauu

SEQ ID NO: 3555543 - RNA, 21 nt, Human
acaaauacuuauucauugugg

SEQ ID NO: 3555544 - RNA, 13 nt, Human
acaaauagaaaau

SEQ ID NO: 3555545 - RNA, 16 nt, Human
acaaauagaaaauggu

SEQ ID NO: 3555546 - RNA, 16 nt, Human
acaaauauaagaauaa

SEQ ID NO: 3555547 - RNA, 17 nt, Human
acaaauauaagaauaaa

SEQ ID NO: 3555548 - RNA, 14 nt, Human
acaaauauaagauu

SEQ ID NO: 3555549 - RNA, 15 nt, Human
acaaauauauuguua

SEQ ID NO: 3555550 - RNA, 11 nt, Human
acaaauaugca

SEQ ID NO: 3555551 - RNA, 17 nt, Human
acaaauaugcuaauuug

SEQ ID NO: 3555552 - RNA, 18 nt, Human
acaaauaugcuaauuugg

SEQ ID NO: 3555553 - RNA, 18 nt, Human
acaaauauuaaaaagucu

SEQ ID NO: 3555554 - RNA, 21 nt, Human
acaaauauugguguugucagu

SEQ ID NO: 3555555 - RNA, 22 nt, Human
acaaauauuuauuuucuuucug

SEQ ID NO: 3555556 - RNA, 23 nt, Human
acaaauauuuauuuucuuucugu

SEQ ID NO: 3555557 - RNA, 20 nt, Human
acaaauauuucuagacacuu

SEQ ID NO: 3555558 - RNA, 17 nt, Human
acaaaucaacagaagca

SEQ ID NO: 3555559 - RNA, 17 nt, Human
acaaaucaaguuuccaa

SEQ ID NO: 3555560 - RNA, 20 nt, Human
acaaaucaaguuuccaagca

SEQ ID NO: 3555561 - RNA, 12 nt, Human
acaaaucaguaa

SEQ ID NO: 3555562 - RNA, 13 nt, Human
acaaaucaguaau

SEQ ID NO: 3555563 - RNA, 16 nt, Human
acaaaucaguaauuuu

SEQ ID NO: 3555564 - RNA, 14 nt, Human
acaaaucuauuuaa

SEQ ID NO: 3555565 - RNA, 19 nt, Human
acaaaucugcaaagcaugu

SEQ ID NO: 3555566 - RNA, 14 nt, Human
acaaaucugucugc

SEQ ID NO: 3555567 - RNA, 19 nt, Human
acaaaucuguguauauuau

SEQ ID NO: 3555568 - RNA, 15 nt, Human
acaaaugacuuuauu

SEQ ID NO: 3555569 - RNA, 17 nt, Human
acaaaugacuuuauuau

SEQ ID NO: 3555570 - RNA, 16 nt, Human
acaaaugauugcuuuu

SEQ ID NO: 3555571 - RNA, 19 nt, Human
acaaaugauugcuuuuaaa

SEQ ID NO: 3555572 - RNA, 21 nt, Human
acaaaugauugcuuuuaaaau

SEQ ID NO: 3555573 - RNA, 20 nt, Human
acaaaugcaucuuugaugug

SEQ ID NO: 3555574 - RNA, 17 nt, Human
acaaaugcuauuaaagu

SEQ ID NO: 3555575 - RNA, 15 nt, Human
acaaauggacauagg

SEQ ID NO: 3555576 - RNA, 14 nt, Human
acaaaugugaagau

SEQ ID NO: 3555577 - RNA, 17 nt, Human
acaaaugugaagaugca

SEQ ID NO: 3555578 - RNA, 21 nt, Human
acaaaugugaagaugcauugu

SEQ ID NO: 3555579 - RNA, 19 nt, Human
acaaauguuaaaauguguu

SEQ ID NO: 3555580 - RNA, 14 nt, Human
acaaauuaaaaaga

SEQ ID NO: 3555581 - RNA, 16 nt, Human
acaaauuaaaaagauu

SEQ ID NO: 3555582 - RNA, 15 nt, Human
acaaauuauaaugua

SEQ ID NO: 3555583 - RNA, 15 nt, Human
acaaauuaucuuaaa

SEQ ID NO: 3555584 - RNA, 17 nt, Human
acaaauuauuaaugaaa

SEQ ID NO: 3555585 - RNA, 14 nt, Human
acaaauuauuuuug

SEQ ID NO: 3555586 - RNA, 21 nt, Human
acaaauucugucucuggauua

SEQ ID NO: 3555587 - RNA, 15 nt, Human
acaaauugagacagu

SEQ ID NO: 3555588 - RNA, 20 nt, Human
acaaauugcacagaaguccu

SEQ ID NO: 3555589 - RNA, 20 nt, Human
acaaauugcuuacuuuggaa

SEQ ID NO: 3555590 - RNA, 18 nt, Human
acaaauugcuugaaagaa

SEQ ID NO: 3555591 - RNA, 18 nt, Human
acaaauuuaaaacaaaca

SEQ ID NO: 3555592 - RNA, 17 nt, Human
acaaauuuacagagaca

SEQ ID NO: 3555593 - RNA, 18 nt, Human
acaaauuuuuauuucuaa

SEQ ID NO: 3555594 - RNA, 21 nt, Human
acaaauuuuuauuucuaaaau

SEQ ID NO: 3555595 - RNA, 11 nt, Human
acaacaaaaau

SEQ ID NO: 3555596 - RNA, 15 nt, Human
acaacaaccugguca

SEQ ID NO: 3555597 - RNA, 13 nt, Human
acaacaagaguuu

SEQ ID NO: 3555598 - RNA, 15 nt, Human
acaacacaaccaacg

SEQ ID NO: 3555599 - RNA, 23 nt, Human
acaacacuguaguaaauaaugcu

SEQ ID NO: 3555600 - RNA, 22 nt, Human
acaacagagacugaaauguguu

SEQ ID NO: 3555601 - RNA, 13 nt, Human
acaacagauuugu

SEQ ID NO: 3555602 - RNA, 16 nt, Human
acaacagauuugugaa

SEQ ID NO: 3555603 - RNA, 15 nt, Human
acaacagcugaagca

SEQ ID NO: 3555604 - RNA, 16 nt, Human
acaacagcugaagcac

SEQ ID NO: 3555605 - RNA, 15 nt, Human
acaacagcuggugcc

SEQ ID NO: 3555606 - RNA, 22 nt, Human
acaacauagcagaucuguuuug

SEQ ID NO: 3555607 - RNA, 23 nt, Human
acaacauccaaguggccuccguc

SEQ ID NO: 3555608 - RNA, 23 nt, Human
acaacauccauguccuaugugug

SEQ ID NO: 3555609 - RNA, 14 nt, Human
acaacauguauaau

SEQ ID NO: 3555610 - RNA, 21 nt, Human
acaaccaagcgcauccaaucu

SEQ ID NO: 3555611 - RNA, 16 nt, Human
acaaccaauggaaugu

SEQ ID NO: 3555612 - RNA, 20 nt, Human
acaaccaccgcuccccagcc

SEQ ID NO: 3555613 - RNA, 17 nt, Human
acaaccacucauucaaa

SEQ ID NO: 3555614 - RNA, 18 nt, Human
acaaccauuaaagucaga

SEQ ID NO: 3555615 - RNA, 11 nt, Human
acaacccaucu

SEQ ID NO: 3555616 - RNA, 14 nt, Human
acaacccugcaaag

SEQ ID NO: 3555617 - RNA, 18 nt, Human
acaacccuguuuuauacu

SEQ ID NO: 3555618 - RNA, 13 nt, Human
acaaccguuggaa

SEQ ID NO: 3555619 - RNA, 15 nt, Human
acaaccucaacugcc

SEQ ID NO: 3555620 - RNA, 16 nt, Human
acaaccucaacugccu

SEQ ID NO: 3555621 - RNA, 15 nt, Human
acaaccucccucuug

SEQ ID NO: 3555622 - RNA, 17 nt, Human
acaaccucccucuuguu

SEQ ID NO: 3555623 - RNA, 20 nt, Human
acaaccucccucuuguuuug

SEQ ID NO: 3555624 - RNA, 22 nt, Human
acaaccucccucuuguuuuguu

SEQ ID NO: 3555625 - RNA, 23 nt, Human
acaaccucccucuuguuuuguuu

SEQ ID NO: 3555626 - RNA, 23 nt, Human
acaaccugcuuggguggagaagc

SEQ ID NO: 3555627 - RNA, 23 nt, Human
acaaccuucauuuaaaaagguuu

SEQ ID NO: 3555628 - RNA, 15 nt, Human
acaacgaggaagccc

SEQ ID NO: 3555629 - RNA, 22 nt, Human
acaacggaggccugcgacccug

SEQ ID NO: 3555630 - RNA, 20 nt, Human
acaacggagucaaaaauuaa

SEQ ID NO: 3555631 - RNA, 16 nt, Human
acaacgugcauugugc

SEQ ID NO: 3555632 - RNA, 17 nt, Human
acaacgugcauugugcu

SEQ ID NO: 3555633 - RNA, 20 nt, Human
acaacuacagaaaaaccaga

SEQ ID NO: 3555634 - RNA, 16 nt, Human
acaacuaggcuucagc

SEQ ID NO: 3555635 - RNA, 13 nt, Human
acaacuauauugu

SEQ ID NO: 3555636 - RNA, 19 nt, Human
acaacucacuccuuuuaaa

SEQ ID NO: 3555637 - RNA, 20 nt, Human
acaacuccuagggccacuga

SEQ ID NO: 3555638 - RNA, 15 nt, Human
acaacugacacagga

SEQ ID NO: 3555639 - RNA, 16 nt, Human
acaacugacacaggaa

SEQ ID NO: 3555640 - RNA, 15 nt, Human
acaacugcaaagaaa

SEQ ID NO: 3555641 - RNA, 21 nt, Human
acaacugcaauaacuucugac

SEQ ID NO: 3555642 - RNA, 22 nt, Human
acaacugccucgaaacacagaa

SEQ ID NO: 3555643 - RNA, 17 nt, Human
acaacugcucccaccuc

SEQ ID NO: 3555644 - RNA, 14 nt, Human
acaacugugacugu

SEQ ID NO: 3555645 - RNA, 15 nt, Human
acaacuuaaaaaguc

SEQ ID NO: 3555646 - RNA, 14 nt, Human
acacuuaaauuaug

SEQ ID NO: 3555647 - RNA, 11 nt, Human
acacuuaacag

SEQ ID NO: 3555648 - RNA, 20 nt, Human
acacuuaaggguuuuagaaa

SEQ ID NO: 3555649 - RNA, 14 nt, Human
acacuuaauucugu

SEQ ID NO: 3555650 - RNA, 18 nt, Human
aauccuaccaaccucuga

SEQ ID NO: 3555651 - RNA, 15 nt, Human
aauccuaccuguuuu

SEQ ID NO: 3555652 - RNA, 20 nt, Human
aauccuaccuugcuuuugcu

SEQ ID NO: 3555653 - RNA, 17 nt, Human
aauccuauauagaaugc

SEQ ID NO: 3555654 - RNA, 20 nt, Human
aauccuaugugauuuuaacu

SEQ ID NO: 3555655 - RNA, 21 nt, Human
aauccuaugugauuuuaacuc

SEQ ID NO: 3555656 - RNA, 14 nt, Human
acaacuuaaauaau

SEQ ID NO: 3555657 - RNA, 22 nt, Human
acaacuuaaguugguccuuuac

SEQ ID NO: 3555658 - RNA, 17 nt, Human
acaacuucaauauccaa

SEQ ID NO: 3555659 - RNA, 14 nt, Human
acaacuucagcagu

SEQ ID NO: 3555660 - RNA, 17 nt, Human
acaacuucuaauugcca

SEQ ID NO: 3555661 - RNA, 15 nt, Human
acaacuuuuuuuucu

SEQ ID NO: 3555662 - RNA, 18 nt, Human
acaacuuuuuuuucuuuu

SEQ ID NO: 3555663 - RNA, 16 nt, Human
acaagaaaaaaugaau

SEQ ID NO: 3555664 - RNA, 17 nt, Human
acaagaaaaauaaagaa

SEQ ID NO: 3555665 - RNA, 20 nt, Human
acaagaaaaauaaagaaaag

SEQ ID NO: 3555666 - RNA, 23 nt, Human
acaagaaaaauaaagaaaagaug

SEQ ID NO: 3555667 - RNA, 19 nt, Human
acaagaaaauaagagcuca

SEQ ID NO: 3555668 - RNA, 23 nt, Human
acaagaaaauaagagcucaggau

SEQ ID NO: 3555669 - RNA, 13 nt, Human
acaagaaaggaga

SEQ ID NO: 3555670 - RNA, 22 nt, Human
acaagaaaggcugcuguacuga

SEQ ID NO: 3555671 - RNA, 17 nt, Human
acaagaaaguuucccca

SEQ ID NO: 3555672 - RNA, 21 nt, Human
acaagaaaguuuccccaccag

SEQ ID NO: 3555673 - RNA, 21 nt, Human
acaagaaaucccuguuuaaua

SEQ ID NO: 3555674 - RNA, 13 nt, Human
acaagaaaugaaa

SEQ ID NO: 3555675 - RNA, 15 nt, Human
acaagaaaugaaagc

SEQ ID NO: 3555676 - RNA, 14 nt, Human
acaagaaguuuauu

SEQ ID NO: 3555677 - RNA, 17 nt, Human
acaagaauaaaggcagc

SEQ ID NO: 3555678 - RNA, 18 nt, Human
acaagaauaaaggcagcu

SEQ ID NO: 3555679 - RNA, 15 nt, Human
acaagaaugaagguu

SEQ ID NO: 3555680 - RNA, 13 nt, Human
acaagaauggauc

SEQ ID NO: 3555681 - RNA, 16 nt, Human
acaagaccacguuucu

SEQ ID NO: 3555682 - RNA, 19 nt, Human
acaagacccuugugguccc

SEQ ID NO: 3555683 - RNA, 17 nt, Human
acaagacuucaguaugu

SEQ ID NO: 3555684 - RNA, 15 nt, Human
acaagagaagcauuc

SEQ ID NO: 3555685 - RNA, 19 nt, Human
acaagagaagcauucucau

SEQ ID NO: 3555686 - RNA, 15 nt, Human
acaagagcacuacau

SEQ ID NO: 3555687 - RNA, 16 nt, Human
acaagagcagccugug

SEQ ID NO: 3555688 - RNA, 20 nt, Human
acaagagcagccuguggcau

SEQ ID NO: 3555689 - RNA, 18 nt, Human
acaagagcccaggccucc

SEQ ID NO: 3555690 - RNA, 19 nt, Human
acaagagguacaggguuuu

SEQ ID NO: 3555691 - RNA, 22 nt, Human
acaagaguuuauuuccaaauaa

SEQ ID NO: 3555692 - RNA, 18 nt, Human
acaagauauuguacauaa

SEQ ID NO: 3555693 - RNA, 17 nt, Human
acaagaugguucuagca

SEQ ID NO: 3555694 - RNA, 17 nt, Human
acaagauucccagagac

SEQ ID NO: 3555695 - RNA, 21 nt, Human
acaagauugcuuaauaaauug

SEQ ID NO: 3555696 - RNA, 18 nt, Human
acaagauugguguuuuuu

SEQ ID NO: 3555697 - RNA, 20 nt, Human
acaagauuuccuugugcaaa

SEQ ID NO: 3555698 - RNA, 21 nt, Human
acaagauuuuuuaauuguuua

SEQ ID NO: 3555699 - RNA, 22 nt, Human
acaagcaauuagacaagaacuu

SEQ ID NO: 3555700 - RNA, 18 nt, Human
acaagcacuaaacaaaga

SEQ ID NO: 3555701 - RNA, 14 nt, Human
acaagccaacuugu

SEQ ID NO: 3555702 - RNA, 20 nt, Human
acaagccacaagucuuccag

SEQ ID NO: 3555703 - RNA, 12 nt, Human
acaagccacaga

SEQ ID NO: 3555704 - RNA, 22 nt, Human
acaagccagaacuugacccuga

SEQ ID NO: 3555705 - RNA, 11 nt, Human
acaagccaggg

SEQ ID NO: 3555706 - RNA, 13 nt, Human
acaagccucugcc

SEQ ID NO: 3555707 - RNA, 20 nt, Human
acaagccugguaggaaaggg

SEQ ID NO: 3555708 - RNA, 17 nt, Human
acaagcgugagccacug

SEQ ID NO: 3555709 - RNA, 23 nt, Human
acaagcuauucccucaaaucuga

SEQ ID NO: 3555710 - RNA, 22 nt, Human
acaagcucacagaccuuugaac

SEQ ID NO: 3555711 - RNA, 19 nt, Human
acaagcuccaagcucccag

SEQ ID NO: 3555712 - RNA, 17 nt, Human
acaagcuccauuuaaac

SEQ ID NO: 3555713 - RNA, 22 nt, Human
acaagcugcaaaucagccaugu

SEQ ID NO: 3555714 - RNA, 11 nt, Human
acaagcugccu

SEQ ID NO: 3555715 - RNA, 13 nt, Human
acaagcugccucc

SEQ ID NO: 3555716 - RNA, 22 nt, Human
acaagcuguugaccaggcaccu

SEQ ID NO: 3555717 - RNA, 21 nt, Human
acaaggauagaugcuggccca

SEQ ID NO: 3555718 - RNA, 22 nt, Human
acaaggauagaugcuggcccag

SEQ ID NO: 3555719 - RNA, 21 nt, Human
acaaggaugaauuaaguuuuu

SEQ ID NO: 3555720 - RNA, 16 nt, Human
acaaggauugcuacug

SEQ ID NO: 3555721 - RNA, 15 nt, Human
acaaggcaaaaacaa

SEQ ID NO: 3555722 - RNA, 12 nt, Human
acaaggcaaggc

SEQ ID NO: 3555723 - RNA, 15 nt, Human
acaaggcaaggcugu

SEQ ID NO: 3555724 - RNA, 22 nt, Human
acaaggcagcaaggcccgagca

SEQ ID NO: 3555725 - RNA, 16 nt, Human
acaaggccccagagac

SEQ ID NO: 3555726 - RNA, 17 nt, Human
acaaggcuagaucauga

SEQ ID NO: 3555727 - RNA, 15 nt, Human
acaaggcuguugcau

SEQ ID NO: 3555728 - RNA, 19 nt, Human
acaagggagagaccucauc

SEQ ID NO: 3555729 - RNA, 16 nt, Human
acaagggcaguggagg

SEQ ID NO: 3555730 - RNA, 21 nt, Human
acaagggcaguggaggugcug

SEQ ID NO: 3555731 - RNA, 13 nt, Human
acaaggggcccuu

SEQ ID NO: 3555732 - RNA, 20 nt, Human
acaaggucauggccacacug

SEQ ID NO: 3555733 - RNA, 24 nt, Human
acaaggucauggccacacugugac

SEQ ID NO: 3555734 - RNA, 15 nt, Human
acaaguaaaacugug

SEQ ID NO: 3555735 - RNA, 18 nt, Human
acaaguaguucuguauuu

SEQ ID NO: 3555736 - RNA, 19 nt, Human
acaaguaguucuguauuug

SEQ ID NO: 3555737 - RNA, 22 nt, Human
acaaguaguucuguauuugaaa

SEQ ID NO: 3555738 - RNA, 16 nt, Human
acaaguauacuuauau

SEQ ID NO: 3555739 - RNA, 22 nt, Human
acaaguauuuguuaauuuagaa

SEQ ID NO: 3555740 - RNA, 12 nt, Human
acaaguauuuuu

SEQ ID NO: 3555741 - RNA, 15 nt, Human
acaaguauuuuuaau

SEQ ID NO: 3555742 - RNA, 17 nt, Human
acaagucccuguaauug

SEQ ID NO: 3555743 - RNA, 21 nt, Human
acaaguccuggauguugugug

SEQ ID NO: 3555744 - RNA, 15 nt, Human
acaaguccugugaau

SEQ ID NO: 3555745 - RNA, 23 nt, Human
acaagugaaauaacaaaauggac

SEQ ID NO: 3555746 - RNA, 23 nt, Human
acaagugaugcuaaaaccugaaa

SEQ ID NO: 3555747 - RNA, 14 nt, Human
acaagugcccucca

SEQ ID NO: 3555748 - RNA, 23 nt, Human
acaagugccgcaaauuguaccuu

SEQ ID NO: 3555749 - RNA, 15 nt, Human
acaaguggacucagg

SEQ ID NO: 3555750 - RNA, 18 nt, Human
acaaguggacucagggca

SEQ ID NO: 3555751 - RNA, 13 nt, Human
acaaguguaauga

SEQ ID NO: 3555752 - RNA, 16 nt, Human
acaaguuggagucacu

SEQ ID NO: 3555753 - RNA, 14 nt, Human
acaaguuuuaaaua

SEQ ID NO: 3555754 - RNA, 15 nt, Human
acaaguuuuaaugua

SEQ ID NO: 3555755 - RNA, 15 nt, Human
acaaguuuuucuguc

SEQ ID NO: 3555756 - RNA, 20 nt, Human
acaauaaaaauggcucagau

SEQ ID NO: 3555757 - RNA, 16 nt, Human
acaauaaaacauuaau

SEQ ID NO: 3555758 - RNA, 14 nt, Human
acaauaaaauuuuu

SEQ ID NO: 3555759 - RNA, 23 nt, Human
acaauaaaauuuuuuuucauguu

SEQ ID NO: 3555760 - RNA, 12 nt, Human
acaauaaaugua

SEQ ID NO: 3555761 - RNA, 19 nt, Human
acaauaaauguauucaaau

SEQ ID NO: 3555762 - RNA, 14 nt, Human
acaauaaaugugca

SEQ ID NO: 3555763 - RNA, 21 nt, Human
acaauaacacuaaaauuuuag

SEQ ID NO: 3555764 - RNA, 21 nt, Human
acaauaacuacuguguuccug

SEQ ID NO: 3555765 - RNA, 15 nt, Human
acaauaacuccuccc

SEQ ID NO: 3555766 - RNA, 21 nt, Human
acaauaaguuaacuauuuuau

SEQ ID NO: 3555767 - RNA, 22 nt, Human
acaauaauauuguuguauaauu

SEQ ID NO: 3555768 - RNA, 21 nt, Human
acaauaauucuggagauacug

SEQ ID NO: 3555769 - RNA, 14 nt, Human
acaauaauuuucua

SEQ ID NO: 3555770 - RNA, 12 nt, Human
acaauacagaua

SEQ ID NO: 3555771 - RNA, 17 nt, Human
acaauacagaucaucuu

SEQ ID NO: 3555772 - RNA, 16 nt, Human
acaauacaugcugcua

SEQ ID NO: 3555773 - RNA, 19 nt, Human
acaauacucauaaugugaa

SEQ ID NO: 3555774 - RNA, 23 nt, Human
acaauaggaguggugauuugaaa

SEQ ID NO: 3555775 - RNA, 18 nt, Human
acaauaggugcuuauucu

SEQ ID NO: 3555776 - RNA, 18 nt, Human
acaauaguaaccugggua

SEQ ID NO: 3555777 - RNA, 18 nt, Human
acaauauaaaacuguacu

SEQ ID NO: 3555778 - RNA, 23 nt, Human
acaauauauagcuggcaagaaug

SEQ ID NO: 3555779 - RNA, 14 nt, Human
acaauaugcaaugu

SEQ ID NO: 3555780 - RNA, 18 nt, Human
acaauaugcccuuucugg

SEQ ID NO: 3555781 - RNA, 17 nt, Human
acaauauguacauuucu

SEQ ID NO: 3555782 - RNA, 18 nt, Human
acaauauugauugggaaa

SEQ ID NO: 3555783 - RNA, 14 nt, Human
acaauauuguuucu

SEQ ID NO: 3555784 - RNA, 15 nt, Human
acaauauuguuucua

SEQ ID NO: 3555785 - RNA, 16 nt, Human
acaauauuuaaaauuu

SEQ ID NO: 3555786 - RNA, 18 nt, Human
acaauauuugugugcuaa

SEQ ID NO: 3555787 - RNA, 19 nt, Human
acaauauuugugugcuaaa

SEQ ID NO: 3555788 - RNA, 16 nt, Human
acaauauuuuaagcau

SEQ ID NO: 3555789 - RNA, 17 nt, Human
acaauauuuuguggcuu

SEQ ID NO: 3555790 - RNA, 14 nt, Human
acaaucaaaggaaa

SEQ ID NO: 3555791 - RNA, 17 nt, Human
acaaucaaaggaaaaua

SEQ ID NO: 3555792 - RNA, 18 nt, Human
acaaucagcuccuuccug

SEQ ID NO: 3555793 - RNA, 14 nt, Human
acaaucagcugcuu

SEQ ID NO: 3555794 - RNA, 13 nt, Human
acacuuaaaaaug

SEQ ID NO: 3555795 - RNA, 13 nt, Human
acacuuaacagau

SEQ ID NO: 3555796 - RNA, 14 nt, Human
acacuuaacagaug

SEQ ID NO: 3555797 - RNA, 21 nt, Human
acacuuacacuuuaugcacaa

SEQ ID NO: 3555798 - RNA, 18 nt, Human
acacuuacuguaagacau

SEQ ID NO: 3555799 - RNA, 21 nt, Human
acacuuacuguaagacauuag

SEQ ID NO: 3555800 - RNA, 23 nt, Human
acacuuacuguuguccuauggga

SEQ ID NO: 3555801 - RNA, 16 nt, Human
acacuucaaacuacuu

SEQ ID NO: 3555802 - RNA, 19 nt, Human
acacuucaauaauugucca

SEQ ID NO: 3555803 - RNA, 13 nt, Human
acacuucagagag

SEQ ID NO: 3555804 - RNA, 16 nt, Human
acacuucagagagcug

SEQ ID NO: 3555805 - RNA, 15 nt, Human
acacuucaggcucuu

SEQ ID NO: 3555806 - RNA, 19 nt, Human
acacuucaggcucuucucc

SEQ ID NO: 3555807 - RNA, 12 nt, Human
acacuuccagac

SEQ ID NO: 3555808 - RNA, 14 nt, Human
acacuuccauaauc

SEQ ID NO: 3555809 - RNA, 18 nt, Human
acacuucccucuguuucu

SEQ ID NO: 3555810 - RNA, 22 nt, Human
acacuucccucuguuucucuuu

SEQ ID NO: 3555811 - RNA, 14 nt, Human
acacuucccuggcg

SEQ ID NO: 3555812 - RNA, 16 nt, Human
acacuucguucgcaga

SEQ ID NO: 3555813 - RNA, 24 nt, Human
acacuucucaggacacaggccugu

SEQ ID NO: 3555814 - RNA, 20 nt, Human
acacuucuuacgcaaugcuu

SEQ ID NO: 3555815 - RNA, 22 nt, Human
acacuugaaccugggaggugga

SEQ ID NO: 3555816 - RNA, 21 nt, Human
acacuugagaggaugaaugua

SEQ ID NO: 3555817 - RNA, 16 nt, Human
acacuugagaugauuu

SEQ ID NO: 3555818 - RNA, 23 nt, Human
acacuugauggagugugagccac

SEQ ID NO: 3555819 - RNA, 21 nt, Human
acacuugcccugcucccucuc

SEQ ID NO: 3555820 - RNA, 17 nt, Human
acacuuguauaaaugua

SEQ ID NO: 3555821 - RNA, 17 nt, Human
acacuuguccacauagg

SEQ ID NO: 3555822 - RNA, 19 nt, Human
acacuuguccccaaauccg

SEQ ID NO: 3555823 - RNA, 14 nt, Human
acacuugucggcuc

SEQ ID NO: 3555824 - RNA, 18 nt, Human
acacuugugugugggcug

SEQ ID NO: 3555825 - RNA, 12 nt, Human
acacuuuacaau

SEQ ID NO: 3555826 - RNA, 13 nt, Human
acacuuuacaaug

SEQ ID NO: 3555827 - RNA, 23 nt, Human
acacuuuaugccggaugugcuuu

SEQ ID NO: 3555828 - RNA, 12 nt, Human
acacuuucucuu

SEQ ID NO: 3555829 - RNA, 22 nt, Human
acacuuugcacugauauaucau

SEQ ID NO: 3555830 - RNA, 19 nt, Human
acacuuugccauauuuuca

SEQ ID NO: 3555831 - RNA, 15 nt, Human
acacuuuggaccuua

SEQ ID NO: 3555832 - RNA, 16 nt, Human
acacuuuucauaucau

SEQ ID NO: 3555833 - RNA, 17 nt, Human
acacuuuuggaaccaug

SEQ ID NO: 3555834 - RNA, 23 nt, Human
acacuuuuuuggggauaugcuua

SEQ ID NO: 3555835 - RNA, 19 nt, Human
acagaaaaauauguaccaa

SEQ ID NO: 3555836 - RNA, 15 nt, Human
acagaaaaaucuugu

SEQ ID NO: 3555837 - RNA, 11 nt, Human
acagaaaacaa

SEQ ID NO: 3555838 - RNA, 20 nt, Human
acagaaaacgguuaaaacug

SEQ ID NO: 3555839 - RNA, 13 nt, Human
acagaaaacuaga

SEQ ID NO: 3555840 - RNA, 14 nt, Human
acagaaaacuagaa

SEQ ID NO: 3555841 - RNA, 17 nt, Human
acagaaaacuagaauuu

SEQ ID NO: 3555842 - RNA, 13 nt, Human
acagaaaagcaua

SEQ ID NO: 3555843 - RNA, 14 nt, Human
acagaaaauauacu

SEQ ID NO: 3555844 - RNA, 19 nt, Human
acagaaaauauacuguaaa

SEQ ID NO: 3555845 - RNA, 20 nt, Human
acagaaaauauacuguaaag

SEQ ID NO: 3555846 - RNA, 12 nt, Human
acagaaaauaug

SEQ ID NO: 3555847 - RNA, 14 nt, Human
acagaaaauaugua

SEQ ID NO: 3555848 - RNA, 14 nt, Human
acagaaacacugcc

SEQ ID NO: 3555849 - RNA, 19 nt, Human
acagaaacacugccuuuuu

SEQ ID NO: 3555850 - RNA, 17 nt, Human
acagaaaccuauccuca

SEQ ID NO: 3555851 - RNA, 12 nt, Human
acagaaagagag

SEQ ID NO: 3555852 - RNA, 13 nt, Human
acagaaagcugcc

SEQ ID NO: 3555853 - RNA, 24 nt, Human
acagaaagggcaacaauaaaauag

SEQ ID NO: 3555854 - RNA, 17 nt, Human
acagaaaguggugcuca

SEQ ID NO: 3555855 - RNA, 19 nt, Human
acagaaauauaauaaaaug

SEQ ID NO: 3555856 - RNA, 20 nt, Human
acaguagugagaagaauauu

SEQ ID NO: 3555857 - RNA, 21 nt, Human
acaguagugagaagaauauug

SEQ ID NO: 3555858 - RNA, 20 nt, Human
acaguauaauuaacauguua

SEQ ID NO: 3555859 - RNA, 23 nt, Human
acaguauaauuaacauguuaaac

SEQ ID NO: 3555860 - RNA, 15 nt, Human
acaguauauuuuauu

SEQ ID NO: 3555861 - RNA, 17 nt, Human
acaguauauuuuauuuc

SEQ ID NO: 3555862 - RNA, 19 nt, Human
acaguaugagucaaugugc

SEQ ID NO: 3555863 - RNA, 21 nt, Human
acaguaugagucaaugugcag

SEQ ID NO: 3555864 - RNA, 23 nt, Human
acaguaugguaacuuugcaaaug

SEQ ID NO: 3555865 - RNA, 16 nt, Human
acaguauuacuucugc

SEQ ID NO: 3555866 - RNA, 14 nt, Human
acaguauucuguac

SEQ ID NO: 3555867 - RNA, 12 nt, Human
acaguauugcuc

SEQ ID NO: 3555868 - RNA, 18 nt, Human
acaguauuuauuuuguaa

SEQ ID NO: 3555869 - RNA, 15 nt, Human
acaguauuucauugc

SEQ ID NO: 3555870 - RNA, 18 nt, Human
acagucaaaaccaaguca

SEQ ID NO: 3555871 - RNA, 19 nt, Human
acagucaaaauaauucuaa

SEQ ID NO: 3555872 - RNA, 15 nt, Human
acagucaacaagccu

SEQ ID NO: 3555873 - RNA, 17 nt, Human
acagucaaccaacccca

SEQ ID NO: 3555874 - RNA, 19 nt, Human
acagucacugccacuuugc

SEQ ID NO: 3555875 - RNA, 22 nt, Human
acagucacugccacuuugcaca

SEQ ID NO: 3555876 - RNA, 21 nt, Human
acagucagauuuccagucucc

SEQ ID NO: 3555877 - RNA, 19 nt, Human
acagucaucaucagggccu

SEQ ID NO: 3555878 - RNA, 21 nt, Human
acagucaucgcucguguguuc

SEQ ID NO: 3555879 - RNA, 16 nt, Human
acaguccagccuggag

SEQ ID NO: 3555880 - RNA, 13 nt, Human
acaguccucccau

SEQ ID NO: 3555881 - RNA, 23 nt, Human
acaguccugggagaaccucaggc

SEQ ID NO: 3555882 - RNA, 18 nt, Human
acaguccuuaaaaaucac

SEQ ID NO: 3555883 - RNA, 21 nt, Human
acaguccuuaccagcagagca

SEQ ID NO: 3555884 - RNA, 12 nt, Human
acagucuaaagc

SEQ ID NO: 3555885 - RNA, 13 nt, Human
acagucuaauuuu

SEQ ID NO: 3555886 - RNA, 12 nt, Human
acagucucacca

SEQ ID NO: 3555887 - RNA, 13 nt, Human
acagucuccccca

SEQ ID NO: 3555888 - RNA, 14 nt, Human
acagucucuuuaau

SEQ ID NO: 3555889 - RNA, 20 nt, Human
acagucugaucgugacgcug

SEQ ID NO: 3555890 - RNA, 22 nt, Human
acagucugaucgugacgcugaa

SEQ ID NO: 3555891 - RNA, 11 nt, Human
acagucugucu

SEQ ID NO: 3555892 - RNA, 15 nt, Human
acagucugucuucug

SEQ ID NO: 3555893 - RNA, 20 nt, Human
acagucugucuucuguauau

SEQ ID NO: 3555894 - RNA, 14 nt, Human
acagucuucauuuu

SEQ ID NO: 3555895 - RNA, 13 nt, Human
acagucuuccaca

SEQ ID NO: 3555896 - RNA, 14 nt, Human
acagucuuccauuu

SEQ ID NO: 3555897 - RNA, 20 nt, Human
acagugaaagaaaauaacaa

SEQ ID NO: 3555898 - RNA, 18 nt, Human
acagugaagacagaaguu

SEQ ID NO: 3555899 - RNA, 14 nt, Human
acagugaagcaaau

SEQ ID NO: 3555900 - RNA, 23 nt, Human
acagugaaguuuuacugucuauu

SEQ ID NO: 3555901 - RNA, 20 nt, Human
acagugacucgggcuccugu

SEQ ID NO: 3555902 - RNA, 15 nt, Human
acagugacuucugag

SEQ ID NO: 3555903 - RNA, 17 nt, Human
acagugacuucugagau

SEQ ID NO: 3555904 - RNA, 18 nt, Human
acagugagacucugucuc

SEQ ID NO: 3555905 - RNA, 23 nt, Human
acagugagagacuccauaguuug

SEQ ID NO: 3555906 - RNA, 12 nt, Human
acagugagccaa

SEQ ID NO: 3555907 - RNA, 13 nt, Human
acagugagccaag

SEQ ID NO: 3555908 - RNA, 18 nt, Human
acagugagggagauccca

SEQ ID NO: 3555909 - RNA, 16 nt, Human
acagugagguccuggg

SEQ ID NO: 3555910 - RNA, 19 nt, Human
acagugagguccugggggc

SEQ ID NO: 3555911 - RNA, 20 nt, Human
acagugagguccugggggcc

SEQ ID NO: 3555912 - RNA, 23 nt, Human
acagugagucgaggacagggagg

SEQ ID NO: 3555913 - RNA, 21 nt, Human
acagugaucuccauauguuac

SEQ ID NO: 3555914 - RNA, 10 nt, Human
acagugauuu

SEQ ID NO: 3555915 - RNA, 23 nt, Human
acagugauuuuuuuuuagaacag

SEQ ID NO: 3555916 - RNA, 14 nt, Human
acagugcacaugaa

SEQ ID NO: 3555917 - RNA, 15 nt, Human
acagugcacaugaac

SEQ ID NO: 3555918 - RNA, 22 nt, Human
acagugcagagccuucucagaa

SEQ ID NO: 3555919 - RNA, 17 nt, Human
acagugcaucucagccc

SEQ ID NO: 3555920 - RNA, 20 nt, Human
acagugccugggaauguauu

SEQ ID NO: 3555921 - RNA, 20 nt, Human
acagugccuucaauaaaugg

SEQ ID NO: 3555922 - RNA, 15 nt, Human
acagugcuacugaaa

SEQ ID NO: 3555923 - RNA, 17 nt, Human
acagugcuacugaaagg

SEQ ID NO: 3555924 - RNA, 15 nt, Human
acagugcucuuuucu

SEQ ID NO: 3555925 - RNA, 17 nt, Human
acagugcucuuuucucc

SEQ ID NO: 3555926 - RNA, 20 nt, Human
acagugcugcagcucccugg

SEQ ID NO: 3555927 - RNA, 18 nt, Human
acagugcuucagccugag

SEQ ID NO: 3555928 - RNA, 18 nt, Human
acaguggaauauaaggaa

SEQ ID NO: 3555929 - RNA, 17 nt, Human
acaguggaucacaaagu

SEQ ID NO: 3555930 - RNA, 17 nt, Human
acaguggauugcauuuc

SEQ ID NO: 3555931 - RNA, 21 nt, Human
acaguggcucacgccuguaau

SEQ ID NO: 3555932 - RNA, 14 nt, Human
acagugggaaauau

SEQ ID NO: 3555933 - RNA, 15 nt, Human
acagugggagccagg

SEQ ID NO: 3555934 - RNA, 16 nt, Human
acagugggagccaggg

SEQ ID NO: 3555935 - RNA, 21 nt, Human
acagugggugccccccuugcc

SEQ ID NO: 3555936 - RNA, 18 nt, Human
acagugguuuuauacuga

SEQ ID NO: 3555937 - RNA, 16 nt, Human
acaguguagcuugccc

SEQ ID NO: 3555938 - RNA, 13 nt, Human
acaguguauguag

SEQ ID NO: 3555939 - RNA, 16 nt, Human
acagacuauugacauc

SEQ ID NO: 3555940 - RNA, 15 nt, Human
acagacucauccuga

SEQ ID NO: 3555941 - RNA, 19 nt, Human
acagacuggaagcacagcu

SEQ ID NO: 3555942 - RNA, 21 nt, Human
acagacuggaagcacagcuuc

SEQ ID NO: 3555943 - RNA, 20 nt, Human
acagacuggccugaggagca

SEQ ID NO: 3555944 - RNA, 20 nt, Human
acagacuguugucccugcac

SEQ ID NO: 3555945 - RNA, 17 nt, Human
acagacuucuccagacc

SEQ ID NO: 3555946 - RNA, 17 nt, Human
acagacuuuagcuuucu

SEQ ID NO: 3555947 - RNA, 13 nt, Human
acagagaaaccag

SEQ ID NO: 3555948 - RNA, 14 nt, Human
acagagaaaccagc

SEQ ID NO: 3555949 - RNA, 14 nt, Human
acagagaaagaaau

SEQ ID NO: 3555950 - RNA, 11 nt, Human
acagagaaagu

SEQ ID NO: 3555951 - RNA, 18 nt, Human
acagagaaaguacuucuc

SEQ ID NO: 3555952 - RNA, 14 nt, Human
acagagaaccugga

SEQ ID NO: 3555953 - RNA, 16 nt, Human
acagagaagacaaaau

SEQ ID NO: 3555954 - RNA, 11 nt, Human
acagagaagcc

SEQ ID NO: 3555955 - RNA, 12 nt, Human
acagagaagcca

SEQ ID NO: 3555956 - RNA, 13 nt, Human
acagagaagccag

SEQ ID NO: 3555957 - RNA, 17 nt, Human
acagagaagccagcuug

SEQ ID NO: 3555958 - RNA, 14 nt, Human
acagagaagccauc

SEQ ID NO: 3555959 - RNA, 15 nt, Human
acagagaagccauca

SEQ ID NO: 3555960 - RNA, 13 nt, Human
acagagaagccuu

SEQ ID NO: 3555961 - RNA, 22 nt, Human
acagagaagccuucaagcucug

SEQ ID NO: 3555962 - RNA, 14 nt, Human
acagagaagcuggg

SEQ ID NO: 3555963 - RNA, 12 nt, Human
acagagaaggaa

SEQ ID NO: 3555964 - RNA, 13 nt, Human
acagagaaggaau

SEQ ID NO: 3555965 - RNA, 15 nt, Human
acagagaaggaaugu

SEQ ID NO: 3555966 - RNA, 21 nt, Human
acagagaagucacagggcagu

SEQ ID NO: 3555967 - RNA, 17 nt, Human
acagagaauaugucugc

SEQ ID NO: 3555968 - RNA, 14 nt, Human
acagagacaccugc

SEQ ID NO: 3555969 - RNA, 16 nt, Human
acagagacauuccucc

SEQ ID NO: 3555970 - RNA, 12 nt, Human
acagagaccaag

SEQ ID NO: 3555971 - RNA, 22 nt, Human
acagagaccugcccucaagagc

SEQ ID NO: 3555972 - RNA, 20 nt, Human
acagagagacagacuugaga

SEQ ID NO: 3555973 - RNA, 20 nt, Human
acagagagagauacucuggg

SEQ ID NO: 3555974 - RNA, 18 nt, Human
acagagaggagaaacaca

SEQ ID NO: 3555975 - RNA, 14 nt, Human
acagagagucugga

SEQ ID NO: 3555976 - RNA, 23 nt, Human
acagagcaaccccuggaccccag

SEQ ID NO: 3555977 - RNA, 15 nt, Human
acagagcaagacucu

SEQ ID NO: 3555978 - RNA, 21 nt, Human
acagagcaagugagacccugu

SEQ ID NO: 3555979 - RNA, 20 nt, Human
acagagcacuagguucaauu

SEQ ID NO: 3555980 - RNA, 13 nt, Human
acagagccaggag

SEQ ID NO: 3555981 - RNA, 14 nt, Human
acagagccaggaga

SEQ ID NO: 3555982 - RNA, 16 nt, Human
acagagccaggagaag

SEQ ID NO: 3555983 - RNA, 15 nt, Human
acagagcccacgccc

SEQ ID NO: 3555984 - RNA, 19 nt, Human
acagagccugccccagcgc

SEQ ID NO: 3555985 - RNA, 17 nt, Human
acagagcgacagagcag

SEQ ID NO: 3555986 - RNA, 22 nt, Human
acagagcgugagcugagcaggc

SEQ ID NO: 3555987 - RNA, 18 nt, Human
acagagcuacacagggga

SEQ ID NO: 3555988 - RNA, 10 nt, Human
acagagcugg

SEQ ID NO: 3555989 - RNA, 23 nt, Human
acagagcuggagaugaggccaga

SEQ ID NO: 3555990 - RNA, 14 nt, Human
acagagcugggaug

SEQ ID NO: 3555991 - RNA, 22 nt, Human
acagagcuguggaggauugcua

SEQ ID NO: 3555992 - RNA, 16 nt, Human
acagagcuucccugac

SEQ ID NO: 3555993 - RNA, 16 nt, Human
acagaggaagagcagg

SEQ ID NO: 3555994 - RNA, 18 nt, Human
acagaggaagagcaggca

SEQ ID NO: 3555995 - RNA, 20 nt, Human
acagaggagggcgugacuca

SEQ ID NO: 3555996 - RNA, 14 nt, Human
acagaggcagcccc

SEQ ID NO: 3555997 - RNA, 17 nt, Human
acagaggccauggcaga

SEQ ID NO: 3555998 - RNA, 21 nt, Human
acagaggccaugggccuccug

SEQ ID NO: 3555999 - RNA, 23 nt, Human
acagaggccaugggccuccugug

SEQ ID NO: 3556000 - RNA, 16 nt, Human
acagaggccccagccu

SEQ ID NO: 3556001 - RNA, 18 nt, Human
acagaggccccagccucc

SEQ ID NO: 3556002 - RNA, 22 nt, Human
acagaggccccagccucccuga

SEQ ID NO: 3556003 - RNA, 20 nt, Human
acagaggcccucaagucuuu

SEQ ID NO: 3556004 - RNA, 20 nt, Human
acagagggaagaaaagagcu

SEQ ID NO: 3556005 - RNA, 15 nt, Human
acagaggggacucug

SEQ ID NO: 3556006 - RNA, 16 nt, Human
acagaggggacucugg

SEQ ID NO: 3556007 - RNA, 24 nt, Human
acagagguagucucacugcuugaa

SEQ ID NO: 3556008 - RNA, 17 nt, Human
acagaguaagacauugg

SEQ ID NO: 3556009 - RNA, 19 nt, Human
acagaguagccagguucug

SEQ ID NO: 3556010 - RNA, 14 nt, Human
acagagucucacug

SEQ ID NO: 3556011 - RNA, 19 nt, Human
acagagucuuccucugucu

SEQ ID NO: 3556012 - RNA, 15 nt, Human
acagagugagacucu

SEQ ID NO: 3556013 - RNA, 21 nt, Human
acagagugagacucugucuca

SEQ ID NO: 3556014 - RNA, 22 nt, Human
acagagugccaacuucuuucau

SEQ ID NO: 3556015 - RNA, 22 nt, Human
acagaguggaauaagacagaga

SEQ ID NO: 3556016 - RNA, 23 nt, Human
acagaguggaauaagacagagac

SEQ ID NO: 3556017 - RNA, 18 nt, Human
acaguuuucugagaaaga

SEQ ID NO: 3556018 - RNA, 21 nt, Human
acaguuuucugagaaagacua

SEQ ID NO: 3556019 - RNA, 14 nt, Human
acaguuuucuucau

SEQ ID NO: 3556020 - RNA, 13 nt, Human
acaguuuugagaa

SEQ ID NO: 3556021 - RNA, 23 nt, Human
acaguuuugucagucuuucuuag

SEQ ID NO: 3556022 - RNA, 19 nt, Human
acaguuuuuaacucuacug

SEQ ID NO: 3556023 - RNA, 21 nt, Human
acauaaaaacaacuuuauacc

SEQ ID NO: 3556024 - RNA, 15 nt, Human
acauaaaaaggacau

SEQ ID NO: 3556025 - RNA, 13 nt, Human
acauaaaaaguua

SEQ ID NO: 3556026 - RNA, 14 nt, Human
acauaaaagaaaua

SEQ ID NO: 3556027 - RNA, 17 nt, Human
acauaaaagaaauaaac

SEQ ID NO: 3556028 - RNA, 15 nt, Human
acauaaacugacuuu

SEQ ID NO: 3556029 - RNA, 20 nt, Human
acauaaagacuaaguagccc

SEQ ID NO: 3556030 - RNA, 13 nt, Human
acauaaagcaaau

SEQ ID NO: 3556031 - RNA, 15 nt, Human
acauaaagcaaauag

SEQ ID NO: 3556032 - RNA, 18 nt, Human
acauaaagcaaauagaca

SEQ ID NO: 3556033 - RNA, 16 nt, Human
acauaaagccauguuu

SEQ ID NO: 3556034 - RNA, 16 nt, Human
acauaaaggaaaagac

SEQ ID NO: 3556035 - RNA, 13 nt, Human
acauaaaggauaa

SEQ ID NO: 3556036 - RNA, 17 nt, Human
acauaaaggauaaacuu

SEQ ID NO: 3556037 - RNA, 18 nt, Human
acauaaagguaaaacaaa

SEQ ID NO: 3556038 - RNA, 18 nt, Human
acauaaagguuauuuucu

SEQ ID NO: 3556039 - RNA, 22 nt, Human
acauaaagguuauuuucuccug

SEQ ID NO: 3556040 - RNA, 23 nt, Human
acauaaagguuauuuucuccuga

SEQ ID NO: 3556041 - RNA, 12 nt, Human
acauaaaguuga

SEQ ID NO: 3556042 - RNA, 15 nt, Human
acauaaaucugugaa

SEQ ID NO: 3556043 - RNA, 18 nt, Human
acauaaaucugugaacuu

SEQ ID NO: 3556044 - RNA, 17 nt, Human
acauaaaugcagcccau

SEQ ID NO: 3556045 - RNA, 13 nt, Human
acauaaauuagag

SEQ ID NO: 3556046 - RNA, 16 nt, Human
acauaacaggguaaau

SEQ ID NO: 3556047 - RNA, 22 nt, Human
acauaacguuuuuccuuuaaaa

SEQ ID NO: 3556048 - RNA, 23 nt, Human
acauaacguuuuuccuuuaaaaa

SEQ ID NO: 3556049 - RNA, 15 nt, Human
acauaacuaaauuug

SEQ ID NO: 3556050 - RNA, 12 nt, Human
acauaacugaaa

SEQ ID NO: 3556051 - RNA, 14 nt, Human
acauaagcucagaa

SEQ ID NO: 3556052 - RNA, 20 nt, Human
acauaagggguuugccauuu

SEQ ID NO: 3556053 - RNA, 20 nt, Human
acauaaguaauucaagaaaa

SEQ ID NO: 3556054 - RNA, 20 nt, Human
acauaaguauuuaauucaug

SEQ ID NO: 3556055 - RNA, 14 nt, Human
acauaauaaauuaa

SEQ ID NO: 3556056 - RNA, 16 nt, Human
acauaauacugaacca

SEQ ID NO: 3556057 - RNA, 18 nt, Human
acauaauacugaaccacu

SEQ ID NO: 3556058 - RNA, 19 nt, Human
acauaaucuaguuuacaga

SEQ ID NO: 3556059 - RNA, 23 nt, Human
acauaaucuucugccuucucaug

SEQ ID NO: 3556060 - RNA, 18 nt, Human
acauaaugcuuaauuucu

SEQ ID NO: 3556061 - RNA, 21 nt, Human
acauaaugggccacugaaauc

SEQ ID NO: 3556062 - RNA, 22 nt, Human
acauaaugggccacugaaaucu

SEQ ID NO: 3556063 - RNA, 23 nt, Human
acauaaugggccacugaaaucug

SEQ ID NO: 3556064 - RNA, 13 nt, Human
acauaauuaaagu

SEQ ID NO: 3556065 - RNA, 13 nt, Human
acauaauucuuau

SEQ ID NO: 3556066 - RNA, 19 nt, Human
acauaauuuaguuguuucu

SEQ ID NO: 3556067 - RNA, 22 nt, Human
acauacaauuauuuuuacaguu

SEQ ID NO: 3556068 - RNA, 16 nt, Human
acauacaauuccaaac

SEQ ID NO: 3556069 - RNA, 16 nt, Human
acauacacacauaugu

SEQ ID NO: 3556070 - RNA, 13 nt, Human
acauacaccagca

SEQ ID NO: 3556071 - RNA, 15 nt, Human
acauacaccagcauu

SEQ ID NO: 3556072 - RNA, 15 nt, Human
acauacaguuuuaug

SEQ ID NO: 3556073 - RNA, 10 nt, Human
acauacauug

SEQ ID NO: 3556074 - RNA, 14 nt, Human
acauacccccuccc

SEQ ID NO: 3556075 - RNA, 17 nt, Human
acauacccgccuagcug

SEQ ID NO: 3556076 - RNA, 16 nt, Human
acauacccugaccugg

SEQ ID NO: 3556077 - RNA, 21 nt, Human
acauacccuggccgcccccug

SEQ ID NO: 3556078 - RNA, 15 nt, Human
acauaccuggcccug

SEQ ID NO: 3556079 - RNA, 20 nt, Human
acauaccuggguauguguag

SEQ ID NO: 3556080 - RNA, 17 nt, Human
acauacgaaacacaaac

SEQ ID NO: 3556081 - RNA, 15 nt, Human
acauacgauuuaagg

SEQ ID NO: 3556082 - RNA, 18 nt, Human
acauacgauuuaagguau

SEQ ID NO: 3556083 - RNA, 21 nt, Human
acauacggucagguuuaacau

SEQ ID NO: 3556084 - RNA, 23 nt, Human
acaguaugugggauauugaaugu

SEQ ID NO: 3556085 - RNA, 19 nt, Human
acaguauuacuucugcuac

SEQ ID NO: 3556086 - RNA, 15 nt, Human
acaguauugcucacc

SEQ ID NO: 3556087 - RNA, 16 nt, Human
acaguauugcucaccc

SEQ ID NO: 3556088 - RNA, 14 nt, Human
acaguauuuguaau

SEQ ID NO: 3556089 - RNA, 18 nt, Human
acaguauuuguaauuaaa

SEQ ID NO: 3556090 - RNA, 17 nt, Human
acagucaaaacagagau

SEQ ID NO: 3556091 - RNA, 16 nt, Human
acagucaagauagaaa

SEQ ID NO: 3556092 - RNA, 17 nt, Human
acagucaaggaguggcu

SEQ ID NO: 3556093 - RNA, 22 nt, Human
acagucaaggaguggcuuacua

SEQ ID NO: 3556094 - RNA, 17 nt, Human
acagucacaugcuugau

SEQ ID NO: 3556095 - RNA, 16 nt, Human
acagucacauuccaag

SEQ ID NO: 3556096 - RNA, 16 nt, Human
acagucaccucaugga

SEQ ID NO: 3556097 - RNA, 17 nt, Human
acagucaccucauggaa

SEQ ID NO: 3556098 - RNA, 18 nt, Human
acagucacugauguacaa

SEQ ID NO: 3556099 - RNA, 14 nt, Human
acagucauuuaaaa

SEQ ID NO: 3556100 - RNA, 18 nt, Human
acaguccagccuggagau

SEQ ID NO: 3556101 - RNA, 15 nt, Human
acagucccacugugc

SEQ ID NO: 3556102 - RNA, 17 nt, Human
acagucccuaaagaaaa

SEQ ID NO: 3556103 - RNA, 18 nt, Human
acagucccuauggaaaga

SEQ ID NO: 3556104 - RNA, 12 nt, Human
acagucccugcc

SEQ ID NO: 3556105 - RNA, 14 nt, Human
acaguccucccauc

SEQ ID NO: 3556106 - RNA, 12 nt, Human
acaguccuggga

SEQ ID NO: 3556107 - RNA, 21 nt, Human
acaguccugggagaaccucag

SEQ ID NO: 3556108 - RNA, 22 nt, Human
acaguccugggagaaccucagg

SEQ ID NO: 3556109 - RNA, 18 nt, Human
acaguccuuaccagcaga

SEQ ID NO: 3556110 - RNA, 20 nt, Human
acaguccuuaccagcagagc

SEQ ID NO: 3556111 - RNA, 14 nt, Human
acagucuaaagcug

SEQ ID NO: 3556112 - RNA, 14 nt, Human
acagucuaauuuuu

SEQ ID NO: 3556113 - RNA, 23 nt, Human
acagucuauuugagacuccucag

SEQ ID NO: 3556114 - RNA, 18 nt, Human
acagucucaccauuuccc

SEQ ID NO: 3556115 - RNA, 13 nt, Human
acagucucaggaa

SEQ ID NO: 3556116 - RNA, 15 nt, Human
acagucucaggaaau

SEQ ID NO: 3556117 - RNA, 17 nt, Human
acagucucaggaaauca

SEQ ID NO: 3556118 - RNA, 19 nt, Human
acagucugaucgugacgcu

SEQ ID NO: 3556119 - RNA, 12 nt, Human
acagucugucuu

SEQ ID NO: 3556120 - RNA, 16 nt, Human
acagucugucuucugu

SEQ ID NO: 3556121 - RNA, 18 nt, Human
acagucugucuucuguau

SEQ ID NO: 3556122 - RNA, 19 nt, Human
acagucugucuucuguaua

SEQ ID NO: 3556123 - RNA, 23 nt, Human
acagucugucuucuguauauaaa

SEQ ID NO: 3556124 - RNA, 19 nt, Human
acagucuuccauuugcaag

SEQ ID NO: 3556125 - RNA, 15 nt, Human
acagucuugcagcag

SEQ ID NO: 3556126 - RNA, 14 nt, Human
acagucuuguauua

SEQ ID NO: 3556127 - RNA, 14 nt, Human
acagugaaaaugua

SEQ ID NO: 3556128 - RNA, 18 nt, Human
acagugaaaauguaagcu

SEQ ID NO: 3556129 - RNA, 21 nt, Human
acagugaaaauguaagcuguu

SEQ ID NO: 3556130 - RNA, 14 nt, Human
acagugagccugaa

SEQ ID NO: 3556131 - RNA, 18 nt, Human
acagugagccugaauuuu

SEQ ID NO: 3556132 - RNA, 23 nt, Human
acagugagcuuggaaaggaccag

SEQ ID NO: 3556133 - RNA, 22 nt, Human
acagugagguccugggggccug

SEQ ID NO: 3556134 - RNA, 22 nt, Human
acagugagucgaggacagggag

SEQ ID NO: 3556135 - RNA, 14 nt, Human
acagugaucuccau

SEQ ID NO: 3556136 - RNA, 18 nt, Human
acagugaucuccauaugu

SEQ ID NO: 3556137 - RNA, 19 nt, Human
acagugaucuccauauguu

SEQ ID NO: 3556138 - RNA, 22 nt, Human
acagugaucuccauauguuaca

SEQ ID NO: 3556139 - RNA, 21 nt, Human
acagugauuaccagggacuga

SEQ ID NO: 3556140 - RNA, 19 nt, Human
acagugcagagccuucuca

SEQ ID NO: 3556141 - RNA, 21 nt, Human
acagugcauauuccuuucuau

SEQ ID NO: 3556142 - RNA, 18 nt, Human
acagugccugggaaugua

SEQ ID NO: 3556143 - RNA, 21 nt, Human
acagugccugggaauguauua

SEQ ID NO: 3556144 - RNA, 17 nt, Human
acagugccuucaauaaa

SEQ ID NO: 3556145 - RNA, 21 nt, Human
acagugcucuuuucuccucac

SEQ ID NO: 3556146 - RNA, 23 nt, Human
acagugcugucugaucugugcuu

SEQ ID NO: 3556147 - RNA, 17 nt, Human
acagugcuucagccuga

SEQ ID NO: 3556148 - RNA, 18 nt, Human
acaguggcaggacaggaa

SEQ ID NO: 3556149 - RNA, 20 nt, Human
acaguggcaggacaggaaaa

SEQ ID NO: 3556150 - RNA, 13 nt, Human
acagugggagcca

SEQ ID NO: 3556151 - RNA, 14 nt, Human
acagugggagccag

SEQ ID NO: 3556152 - RNA, 23 nt, Human
acagugguggcagggccuagcug

SEQ ID NO: 3556153 - RNA, 13 nt, Human
acaguguacaguc

SEQ ID NO: 3556154 - RNA, 12 nt, Human
acaguguaugua

SEQ ID NO: 3556155 - RNA, 24 nt, Human
acagugucccccagguuccgaaga

SEQ ID NO: 3556156 - RNA, 19 nt, Human
acagugucugggcugacug

SEQ ID NO: 3556157 - RNA, 24 nt, Human
acagugucuguaucggagacagug

SEQ ID NO: 3556158 - RNA, 14 nt, Human
acagugucuuuuuu

SEQ ID NO: 3556159 - RNA, 15 nt, Human
acagugugaaguuag

SEQ ID NO: 3556160 - RNA, 18 nt, Human
acagugugaaguuagaau

SEQ ID NO: 3556161 - RNA, 19 nt, Human
acagugugaaguuagaauu

SEQ ID NO: 3556162 - RNA, 22 nt, Human
acagugugaaguuagaauuccu

SEQ ID NO: 3556163 - RNA, 13 nt, Human
acagugugcaagg

SEQ ID NO: 3556164 - RNA, 15 nt, Human
acagugugguaguua

SEQ ID NO: 3556165 - RNA, 20 nt, Human
acagugugguaguuaauaaa

SEQ ID NO: 3556166 - RNA, 17 nt, Human
acaguguguaaacaaaa

SEQ ID NO: 3556167 - RNA, 18 nt, Human
acaguguguaaacaaaau

SEQ ID NO: 3556168 - RNA, 17 nt, Human
acaguguuaggccuggc

SEQ ID NO: 3556169 - RNA, 22 nt, Human
acaguguuaggccuggcacagu

SEQ ID NO: 3556170 - RNA, 11 nt, Human
acaguguuccg

SEQ ID NO: 3556171 - RNA, 16 nt, Human
acaguguugagaacua

SEQ ID NO: 3556172 - RNA, 23 nt, Human
acaguguuucccauaauuuucuu

SEQ ID NO: 3556173 - RNA, 14 nt, Human
acaguguuuucaga

SEQ ID NO: 3556174 - RNA, 16 nt, Human
acaguguuuuuguaaa

SEQ ID NO: 3556175 - RNA, 18 nt, Human
acaguguuuuuguaaagu

SEQ ID NO: 3556176 - RNA, 22 nt, Human
acaguguuuuuguaaagugugg

SEQ ID NO: 3556177 - RNA, 21 nt, Human
acaguuaaaugagaacaugaa

SEQ ID NO: 3556178 - RNA, 16 nt, Human
acaguuaaggaauaua

SEQ ID NO: 3556179 - RNA, 21 nt, Human
acaguuaccucugccucagaa

SEQ ID NO: 3556180 - RNA, 13 nt, Human
acaguuacucaga

SEQ ID NO: 3556181 - RNA, 20 nt, Human
acaguuacucagaauucucu

SEQ ID NO: 3556182 - RNA, 12 nt, Human
acaguuacuuuu

SEQ ID NO: 3556183 - RNA, 13 nt, Human
acaguuacuuuuc

SEQ ID NO: 3556184 - RNA, 15 nt, Human
acaguuacuuuuccu

SEQ ID NO: 3556185 - RNA, 19 nt, Human
acaguuauaaaauuaaaag

SEQ ID NO: 3556186 - RNA, 21 nt, Human
acaguucaguggcagggcuca

SEQ ID NO: 3556187 - RNA, 16 nt, Human
acaguucaguuccucu

SEQ ID NO: 3556188 - RNA, 20 nt, Human
acaguucauguuugcuucau

SEQ ID NO: 3556189 - RNA, 19 nt, Human
acaguucauucagggccga

SEQ ID NO: 3556190 - RNA, 18 nt, Human
acaguuccccuaugugga

SEQ ID NO: 3556191 - RNA, 19 nt, Human
acaguuccccuauguggaa

SEQ ID NO: 3556192 - RNA, 14 nt, Human
acaguuccucgccc

SEQ ID NO: 3556193 - RNA, 19 nt, Human
acaguuccucgcccugggu

SEQ ID NO: 3556194 - RNA, 13 nt, Human
acaguuccuggga

SEQ ID NO: 3556195 - RNA, 15 nt, Human
acaguucugaagaau

SEQ ID NO: 3556196 - RNA, 16 nt, Human
acaguucugcucuggu

SEQ ID NO: 3556197 - RNA, 13 nt, Human
acaguucugucau

SEQ ID NO: 3556198 - RNA, 12 nt, Human
acaguucugugg

SEQ ID NO: 3556199 - RNA, 22 nt, Human
acaguucugugguuucauguua

SEQ ID NO: 3556200 - RNA, 23 nt, Human
acaguugcacagcaucucagcuc

SEQ ID NO: 3556201 - RNA, 23 nt, Human
acaguugccaccaccucuguggc

SEQ ID NO: 3556202 - RNA, 14 nt, Human
acaguugguaacuu

SEQ ID NO: 3556203 - RNA, 20 nt, Human
acaguugucuagagauauau

SEQ ID NO: 3556204 - RNA, 15 nt, Human
acaguuguuggccuc

SEQ ID NO: 3556205 - RNA, 22 nt, Human
acaguuguuugaugcauuaaaa

SEQ ID NO: 3556206 - RNA, 22 nt, Human
acaguuuaccaguugccuuuua

SEQ ID NO: 3556207 - RNA, 20 nt, Human
acaguuuaucaugaagccug

SEQ ID NO: 3556208 - RNA, 12 nt, Human
acaguuucuuag

SEQ ID NO: 3556209 - RNA, 18 nt, Human
acaguuucuuagcuuuuu

SEQ ID NO: 3556210 - RNA, 20 nt, Human
acaguuucuuagcuuuuuaa

SEQ ID NO: 3556211 - RNA, 15 nt, Human
acaguuugaacaaaa

SEQ ID NO: 3556212 - RNA, 14 nt, Human
acaguuugcucuag

SEQ ID NO: 3556213 - RNA, 13 nt, Human
acaguuuguaaau

SEQ ID NO: 3556214 - RNA, 19 nt, Human
acaguuuguaaauguuauu

SEQ ID NO: 3556215 - RNA, 22 nt, Human
acaguuuguaaauguuauuucu

SEQ ID NO: 3556216 - RNA, 14 nt, Human
acaguuugucacau

SEQ ID NO: 3556217 - RNA, 14 nt, Human
acaguuuguuuaca

SEQ ID NO: 3556218 - RNA, 21 nt, Human
acaguuuuaacuguggauauu

SEQ ID NO: 3556219 - RNA, 14 nt, Human
acaguuuucagaaa

SEQ ID NO: 3556220 - RNA, 12 nt, Human
acaguuuuccau

SEQ ID NO: 3556221 - RNA, 15 nt, Human
acaguuuuccaugaa

SEQ ID NO: 3556222 - RNA, 16 nt, Human
acaguuuuccaugaaa

SEQ ID NO: 3556223 - RNA, 23 nt, Human
acaguuuuccaugaaaacguuuu

SEQ ID NO: 3556224 - RNA, 22 nt, Human
acaguuuuccuucucaucugug

SEQ ID NO: 3556225 - RNA, 22 nt, Human
accaauuuuuugugugugaagc

SEQ ID NO: 3556226 - RNA, 18 nt, Human
accaauuuuuuguucuuc

SEQ ID NO: 3556227 - RNA, 23 nt, Human
accaauuuuuuguucuucagaga

SEQ ID NO: 3556228 - RNA, 12 nt, Human
acaugauuucac

SEQ ID NO: 3556229 - RNA, 17 nt, Human
acaugauuucacaaaua

SEQ ID NO: 3556230 - RNA, 19 nt, Human
acaugauuucacaaauauu

SEQ ID NO: 3556231 - RNA, 18 nt, Human
acaugcaaaaagaaauga

SEQ ID NO: 3556232 - RNA, 23 nt, Human
acaugcaaaaagaaaugacuaau

SEQ ID NO: 3556233 - RNA, 16 nt, Human
acaugcaaggucauuu

SEQ ID NO: 3556234 - RNA, 18 nt, Human
acaugcaaggucauuuuu

SEQ ID NO: 3556235 - RNA, 19 nt, Human
acaugcaaggucauuuuuu

SEQ ID NO: 3556236 - RNA, 15 nt, Human
acaugcaauaaaauu

SEQ ID NO: 3556237 - RNA, 13 nt, Human
acaugcacgugug

SEQ ID NO: 3556238 - RNA, 17 nt, Human
acaugcacuaugaggaa

SEQ ID NO: 3556239 - RNA, 18 nt, Human
acaugcacucagcucuug

SEQ ID NO: 3556240 - RNA, 18 nt, Human
acaugcacugacccuucc

SEQ ID NO: 3556241 - RNA, 18 nt, Human
acaugcacuuggcugcau

SEQ ID NO: 3556242 - RNA, 22 nt, Human
acaugcagcccaugcccaccug

SEQ ID NO: 3556243 - RNA, 17 nt, Human
acaugcaguuugaaauu

SEQ ID NO: 3556244 - RNA, 18 nt, Human
acaugcaguuugaaauuc

SEQ ID NO: 3556245 - RNA, 12 nt, Human
acaugcauacac

SEQ ID NO: 3556246 - RNA, 17 nt, Human
accagagcacuguauac

SEQ ID NO: 3556247 - RNA, 12 nt, Human
accagagcagau

SEQ ID NO: 3556248 - RNA, 15 nt, Human
accagagcagaugca

SEQ ID NO: 3556249 - RNA, 22 nt, Human
accagagcagaugcagagagcc

SEQ ID NO: 3556250 - RNA, 13 nt, Human
accagagccaugg

SEQ ID NO: 3556251 - RNA, 12 nt, Human
accagagcccac

SEQ ID NO: 3556252 - RNA, 23 nt, Human
accagagcucuggagccaccugu

SEQ ID NO: 3556253 - RNA, 18 nt, Human
accagaggaaucacucuu

SEQ ID NO: 3556254 - RNA, 14 nt, Human
accagaggagccuu

SEQ ID NO: 3556255 - RNA, 15 nt, Human
accagaggagccuuu

SEQ ID NO: 3556256 - RNA, 16 nt, Human
accagaggagccuuuu

SEQ ID NO: 3556257 - RNA, 17 nt, Human
accagaggagccuuuuu

SEQ ID NO: 3556258 - RNA, 21 nt, Human
accagaggcugcagaaggcca

SEQ ID NO: 3556259 - RNA, 22 nt, Human
accagaggcugcagaaggccaa

SEQ ID NO: 3556260 - RNA, 19 nt, Human
accagauaacugaggaggg

SEQ ID NO: 3556261 - RNA, 14 nt, Human
accagauaacuuuu

SEQ ID NO: 3556262 - RNA, 21 nt, Human
accagauaagaaugcugguuu

SEQ ID NO: 3556263 - RNA, 13 nt, Human
accagaugagaau

SEQ ID NO: 3556264 - RNA, 17 nt, Human
accagcaauauguaaau

SEQ ID NO: 3556265 - RNA, 14 nt, Human
accagcacacuccc

SEQ ID NO: 3556266 - RNA, 20 nt, Human
accagcaccaucucuccucc

SEQ ID NO: 3556267 - RNA, 15 nt, Human
accagcacugucuca

SEQ ID NO: 3556268 - RNA, 16 nt, Human
accagcacugucucag

SEQ ID NO: 3556269 - RNA, 13 nt, Human
accagcagaaaug

SEQ ID NO: 3556270 - RNA, 15 nt, Human
accagcagaucccag

SEQ ID NO: 3556271 - RNA, 19 nt, Human
accagcagaucccagcuca

SEQ ID NO: 3556272 - RNA, 13 nt, Human
accagcagccugg

SEQ ID NO: 3556273 - RNA, 18 nt, Human
accagcagucugccugga

SEQ ID NO: 3556274 - RNA, 18 nt, Human
accagcaucaccugccug

SEQ ID NO: 3556275 - RNA, 19 nt, Human
accagcaucaccugccugu

SEQ ID NO: 3556276 - RNA, 19 nt, Human
accagccaggcucugugcu

SEQ ID NO: 3556277 - RNA, 20 nt, Human
accagccaggcucugugcug

SEQ ID NO: 3556278 - RNA, 19 nt, Human
accagccagggaaagacug

SEQ ID NO: 3556279 - RNA, 11 nt, Human
accagcccacg

SEQ ID NO: 3556280 - RNA, 19 nt, Human
accagcccaucgccacaaa

SEQ ID NO: 3556281 - RNA, 16 nt, Human
accagccccacccugu

SEQ ID NO: 3556282 - RNA, 16 nt, Human
accagccccacugcca

SEQ ID NO: 3556283 - RNA, 18 nt, Human
accagccccacugccagc

SEQ ID NO: 3556284 - RNA, 18 nt, Human
accagccccagugcccac

SEQ ID NO: 3556285 - RNA, 19 nt, Human
accagccccagugcccaca

SEQ ID NO: 3556286 - RNA, 18 nt, Human
accagcccuggggcuggg

SEQ ID NO: 3556287 - RNA, 22 nt, Human
accagcccuugagggagaacuu

SEQ ID NO: 3556288 - RNA, 19 nt, Human
accagccuccaugcugccu

SEQ ID NO: 3556289 - RNA, 20 nt, Human
accagccuccaugcugccuc

SEQ ID NO: 3556290 - RNA, 20 nt, Human
accagccuccguauuucaga

SEQ ID NO: 3556291 - RNA, 23 nt, Human
accagccucucuugguuuccuuc

SEQ ID NO: 3556292 - RNA, 15 nt, Human
accagccugaccaaa

SEQ ID NO: 3556293 - RNA, 23 nt, Human
accagccuguuggacccgcucug

SEQ ID NO: 3556294 - RNA, 17 nt, Human
accagccuuucucccag

SEQ ID NO: 3556295 - RNA, 22 nt, Human
accagccuuucucccaggccag

SEQ ID NO: 3556296 - RNA, 19 nt, Human
accagcgcucuaaaagcac

SEQ ID NO: 3556297 - RNA, 22 nt, Human
accagcgugugacuacuccccc

SEQ ID NO: 3556298 - RNA, 23 nt, Human
accagcuaagaaaagauuuuaau

SEQ ID NO: 3556299 - RNA, 13 nt, Human
accagcucagcac

SEQ ID NO: 3556300 - RNA, 14 nt, Human
accagcucagcacu

SEQ ID NO: 3556301 - RNA, 15 nt, Human
accagcucaggacag

SEQ ID NO: 3556302 - RNA, 14 nt, Human
accagcuccucccu

SEQ ID NO: 3556303 - RNA, 11 nt, Human
accagcugcaa

SEQ ID NO: 3556304 - RNA, 19 nt, Human
accagcugcaaaguguuuu

SEQ ID NO: 3556305 - RNA, 18 nt, Human
accagcugcgcuugcuuu

SEQ ID NO: 3556306 - RNA, 20 nt, Human
accagcugcgcuugcuuuuc

SEQ ID NO: 3556307 - RNA, 22 nt, Human
accagcugcuccgaggacccag

SEQ ID NO: 3556308 - RNA, 10 nt, Human
accagcuggg

SEQ ID NO: 3556309 - RNA, 20 nt, Human
accagcuggggcguggggag

SEQ ID NO: 3556310 - RNA, 16 nt, Human
accagcuuagauuuua

SEQ ID NO: 3556311 - RNA, 22 nt, Human
accagcuuccuucagagagcag

SEQ ID NO: 3556312 - RNA, 18 nt, Human
accagcuugcgaauaaca

SEQ ID NO: 3556313 - RNA, 20 nt, Human
accagcuuggcucaggcuga

SEQ ID NO: 3556314 - RNA, 22 nt, Human
accagcuuguaugcaauggauu

SEQ ID NO: 3556315 - RNA, 19 nt, Human
accagcuuuuaaccaucug

SEQ ID NO: 3556316 - RNA, 14 nt, Human
accaggacaggacc

SEQ ID NO: 3556317 - RNA, 12 nt, Human
accaggacccug

SEQ ID NO: 3556318 - RNA, 20 nt, Human
accaggacuauagcccaggu

SEQ ID NO: 3556319 - RNA, 16 nt, Human
accaggacucccuccu

SEQ ID NO: 3556320 - RNA, 17 nt, Human
accaggacucccuccuc

SEQ ID NO: 3556321 - RNA, 21 nt, Human
accaggacucccuccucaccu

SEQ ID NO: 3556322 - RNA, 14 nt, Human
accaggagcugcuc

SEQ ID NO: 3556323 - RNA, 17 nt, Human
accaggagucccuggua

SEQ ID NO: 3556324 - RNA, 16 nt, Human
accaggaguggguggg

SEQ ID NO: 3556325 - RNA, 13 nt, Human
accaggauuuuuu

SEQ ID NO: 3556326 - RNA, 19 nt, Human
accaggcaacuugggaacu

SEQ ID NO: 3556327 - RNA, 19 nt, Human
accaggcaccaaaagaagu

SEQ ID NO: 3556328 - RNA, 20 nt, Human
accaggcaccaaaagaagua

SEQ ID NO: 3556329 - RNA, 16 nt, Human
accaggcaccucuucc

SEQ ID NO: 3556330 - RNA, 20 nt, Human
accaggcacgaacccaccug

SEQ ID NO: 3556331 - RNA, 21 nt, Human
accaggcacgaacccaccugc

SEQ ID NO: 3556332 - RNA, 20 nt, Human
accaggcagccucugggggg

SEQ ID NO: 3556333 - RNA, 21 nt, Human
accaggcagccucuggggggu

SEQ ID NO: 3556334 - RNA, 14 nt, Human
accaggccaccucc

SEQ ID NO: 3556335 - RNA, 17 nt, Human
accaggccaccucccca

SEQ ID NO: 3556336 - RNA, 15 nt, Human
accaggccccccugu

SEQ ID NO: 3556337 - RNA, 12 nt, Human
accaggcccugg

SEQ ID NO: 3556338 - RNA, 18 nt, Human
accaggccguccucccgg

SEQ ID NO: 3556339 - RNA, 18 nt, Human
accaggcuggagugcagu

SEQ ID NO: 3556340 - RNA, 20 nt, Human
accaggcuggcgcagccaag

SEQ ID NO: 3556341 - RNA, 18 nt, Human
accaggcuugccugcagg

SEQ ID NO: 3556342 - RNA, 19 nt, Human
accaggcuugccugcaggc

SEQ ID NO: 3556343 - RNA, 21 nt, Human
accagggagaccgagcgcuuu

SEQ ID NO: 3556344 - RNA, 17 nt, Human
accagggcaucucuggg

SEQ ID NO: 3556345 - RNA, 17 nt, Human
accagggccagccucua

SEQ ID NO: 3556346 - RNA, 16 nt, Human
accagggccgaggagg

SEQ ID NO: 3556347 - RNA, 21 nt, Human
accagggccuuuucuggcacc

SEQ ID NO: 3556348 - RNA, 22 nt, Human
accagggcgaacgacaauagcu

SEQ ID NO: 3556349 - RNA, 16 nt, Human
accagggcuccagccc

SEQ ID NO: 3556350 - RNA, 13 nt, Human
accagggcuggaa

SEQ ID NO: 3556351 - RNA, 15 nt, Human
accaggggcaggcac

SEQ ID NO: 3556352 - RNA, 16 nt, Human
accaggggcaggcaca

SEQ ID NO: 3556353 - RNA, 19 nt, Human
accaggggcaggcacagca

SEQ ID NO: 3556354 - RNA, 21 nt, Human
accaggguccuuuugacacug

SEQ ID NO: 3556355 - RNA, 20 nt, Human
accaggguugaccccagagg

SEQ ID NO: 3556356 - RNA, 19 nt, Human
accaggguuggcaccuucc

SEQ ID NO: 3556357 - RNA, 17 nt, Human
accaggugccuuucaaa

SEQ ID NO: 3556358 - RNA, 18 nt, Human
accaguaaaguguaacau

SEQ ID NO: 3556359 - RNA, 19 nt, Human
accaguaaaguguaacaua

SEQ ID NO: 3556360 - RNA, 18 nt, Human
accaguaauugugaaaau

SEQ ID NO: 3556361 - RNA, 17 nt, Human
accaguacauucucagu

SEQ ID NO: 3556362 - RNA, 18 nt, Human
accaguauacaagauaag

SEQ ID NO: 3556363 - RNA, 20 nt, Human
accaguaucgcucauagauc

SEQ ID NO: 3556364 - RNA, 20 nt, Human
accaguauuguacaaaguau

SEQ ID NO: 3556365 - RNA, 23 nt, Human
accaguauuguacaaaguauuaa

SEQ ID NO: 3556366 - RNA, 16 nt, Human
accagucauuuuucag

SEQ ID NO: 3556367 - RNA, 15 nt, Human
accaguccccccacc

SEQ ID NO: 3556368 - RNA, 13 nt, Human
accagucugaagu

SEQ ID NO: 3556369 - RNA, 14 nt, Human
accagucugacccu

SEQ ID NO: 3556370 - RNA, 14 nt, Human
accagucugacugu

SEQ ID NO: 3556371 - RNA, 23 nt, Human
accagucuuuaaaggcccagccc

SEQ ID NO: 3556372 - RNA, 14 nt, Human
acccccuucucugc

SEQ ID NO: 3556373 - RNA, 20 nt, Human
acccccuucucugcuccacc

SEQ ID NO: 3556374 - RNA, 13 nt, Human
acccccuucuggg

SEQ ID NO: 3556375 - RNA, 16 nt, Human
acccccuucugggcau

SEQ ID NO: 3556376 - RNA, 16 nt, Human
accccgacgccacagc

SEQ ID NO: 3556377 - RNA, 12 nt, Human
accccgacuuuu

SEQ ID NO: 3556378 - RNA, 13 nt, Human
accccgagcccua

SEQ ID NO: 3556379 - RNA, 14 nt, Human
accccgaggcccug

SEQ ID NO: 3556380 - RNA, 16 nt, Human
accccgaggcccugca

SEQ ID NO: 3556381 - RNA, 22 nt, Human
accccgcaagcaccauccccuc

SEQ ID NO: 3556382 - RNA, 16 nt, Human
accccgcucugcaugc

SEQ ID NO: 3556383 - RNA, 22 nt, Human
accccgcucugcaugcggccca

SEQ ID NO: 3556384 - RNA, 23 nt, Human
accccgcucugcaugcggcccag

SEQ ID NO: 3556385 - RNA, 13 nt, Human
accccggcaggcc

SEQ ID NO: 3556386 - RNA, 22 nt, Human
accccggcaggcccugcagugu

SEQ ID NO: 3556387 - RNA, 17 nt, Human
accccgggcucucugcu

SEQ ID NO: 3556388 - RNA, 15 nt, Human
accccggggacccug

SEQ ID NO: 3556389 - RNA, 17 nt, Human
accccggggacccugug

SEQ ID NO: 3556390 - RNA, 18 nt, Human
accccggggacccuguga

SEQ ID NO: 3556391 - RNA, 13 nt, Human
accccggggugag

SEQ ID NO: 3556392 - RNA, 21 nt, Human
accccgguggcggccccagca

SEQ ID NO: 3556393 - RNA, 22 nt, Human
accccuaaaagaaacccugcac

SEQ ID NO: 3556394 - RNA, 22 nt, Human
accccuaaagagauacuuugau

SEQ ID NO: 3556395 - RNA, 12 nt, Human
accccuaggacu

SEQ ID NO: 3556396 - RNA, 15 nt, Human
accccuaguucccuc

SEQ ID NO: 3556397 - RNA, 17 nt, Human
accccuaguucccucug

SEQ ID NO: 3556398 - RNA, 19 nt, Human
accccuaguucccucugcu

SEQ ID NO: 3556399 - RNA, 22 nt, Human
accccucaccuugcaacacaca

SEQ ID NO: 3556400 - RNA, 23 nt, Human
accccucaccuugcaacacacag

SEQ ID NO: 3556401 - RNA, 17 nt, Human
accccucacucuggccu

SEQ ID NO: 3556402 - RNA, 13 nt, Human
accccucccagcu

SEQ ID NO: 3556403 - RNA, 11 nt, Human
accccucccau

SEQ ID NO: 3556404 - RNA, 12 nt, Human
accccuccccuc

SEQ ID NO: 3556405 - RNA, 18 nt, Human
accccucccuuucucccc

SEQ ID NO: 3556406 - RNA, 16 nt, Human
accccuccucacuggc

SEQ ID NO: 3556407 - RNA, 17 nt, Human
accccuccucacuggcc

SEQ ID NO: 3556408 - RNA, 23 nt, Human
accccuccucacuggccaucccu

SEQ ID NO: 3556409 - RNA, 18 nt, Human
accccuccuggggccagg

SEQ ID NO: 3556410 - RNA, 18 nt, Human
accccucgcccaguccca

SEQ ID NO: 3556411 - RNA, 22 nt, Human
accccucgcccagucccagcag

SEQ ID NO: 3556412 - RNA, 24 nt, Human
accccucgcccagucccagcagcc

SEQ ID NO: 3556413 - RNA, 16 nt, Human
accccucuaccaagcu

SEQ ID NO: 3556414 - RNA, 18 nt, Human
accccucuaccaagcugu

SEQ ID NO: 3556415 - RNA, 15 nt, Human
accccucuggccagg

SEQ ID NO: 3556416 - RNA, 23 nt, Human
accccugcauuggaacuggaggc

SEQ ID NO: 3556417 - RNA, 20 nt, Human
accccugcccccagccccgg

SEQ ID NO: 3556418 - RNA, 14 nt, Human
accccugcccuggg

SEQ ID NO: 3556419 - RNA, 16 nt, Human
accccugcccuugucc

SEQ ID NO: 3556420 - RNA, 13 nt, Human
accccugccucca

SEQ ID NO: 3556421 - RNA, 14 nt, Human
accccugccuccac

SEQ ID NO: 3556422 - RNA, 15 nt, Human
accccugccuccacc

SEQ ID NO: 3556423 - RNA, 16 nt, Human
accccugccuccaccc

SEQ ID NO: 3556424 - RNA, 17 nt, Human
accccugccuccacccu

SEQ ID NO: 3556425 - RNA, 19 nt, Human
accccugccuccacccucu

SEQ ID NO: 3556426 - RNA, 20 nt, Human
accccugccuccacccucug

SEQ ID NO: 3556427 - RNA, 21 nt, Human
accccugccuccacccucuga

SEQ ID NO: 3556428 - RNA, 14 nt, Human
accccugcggcagg

SEQ ID NO: 3556429 - RNA, 9 nt, Human
accccugcu

SEQ ID NO: 3556430 - RNA, 14 nt, Human
accccugcuucuga

SEQ ID NO: 3556431 - RNA, 12 nt, Human
accccuggaaga

SEQ ID NO: 3556432 - RNA, 18 nt, Human
accccuggaagagcccag

SEQ ID NO: 3556433 - RNA, 23 nt, Human
accccuggaagagcccagucugu

SEQ ID NO: 3556434 - RNA, 17 nt, Human
accccuggaccccagcc

SEQ ID NO: 3556435 - RNA, 18 nt, Human
accccuggaccccagccu

SEQ ID NO: 3556436 - RNA, 23 nt, Human
accccuggaccccagccucaaau

SEQ ID NO: 3556437 - RNA, 12 nt, Human
accccuggccuc

SEQ ID NO: 3556438 - RNA, 12 nt, Human
accccuggcuuu

SEQ ID NO: 3556439 - RNA, 15 nt, Human
accccuggcuuuuca

SEQ ID NO: 3556440 - RNA, 17 nt, Human
accccuggcuuuucacu

SEQ ID NO: 3556441 - RNA, 18 nt, Human
accccuggcuuuucacug

SEQ ID NO: 3556442 - RNA, 21 nt, Human
accccuggcuuuucacugcug

SEQ ID NO: 3556443 - RNA, 17 nt, Human
accccugggggcucuca

SEQ ID NO: 3556444 - RNA, 14 nt, Human
accccugguucuca

SEQ ID NO: 3556445 - RNA, 22 nt, Human
accagccccacugccagcagca

SEQ ID NO: 3556446 - RNA, 23 nt, Human
accagccccacugccagcagcag

SEQ ID NO: 3556447 - RNA, 16 nt, Human
accagccccagugccc

SEQ ID NO: 3556448 - RNA, 17 nt, Human
accagccccagugccca

SEQ ID NO: 3556449 - RNA, 11 nt, Human
accagccccug

SEQ ID NO: 3556450 - RNA, 18 nt, Human
accagccccugccccagc

SEQ ID NO: 3556451 - RNA, 14 nt, Human
accagcccggccug

SEQ ID NO: 3556452 - RNA, 16 nt, Human
accagcccggccugcu

SEQ ID NO: 3556453 - RNA, 15 nt, Human
accagcccuggggcu

SEQ ID NO: 3556454 - RNA, 16 nt, Human
accagcccuggggcug

SEQ ID NO: 3556455 - RNA, 17 nt, Human
accagcccuggggcugg

SEQ ID NO: 3556456 - RNA, 18 nt, Human
accagcccuugagggaga

SEQ ID NO: 3556457 - RNA, 14 nt, Human
accagccgugagca

SEQ ID NO: 3556458 - RNA, 19 nt, Human
accagccgugagcauguuu

SEQ ID NO: 3556459 - RNA, 14 nt, Human
accagccucaccag

SEQ ID NO: 3556460 - RNA, 19 nt, Human
accagccucgucuucauua

SEQ ID NO: 3556461 - RNA, 20 nt, Human
accagccugaccaacauggu

SEQ ID NO: 3556462 - RNA, 17 nt, Human
accagccuggccaacau

SEQ ID NO: 3556463 - RNA, 13 nt, Human
accagccugggca

SEQ ID NO: 3556464 - RNA, 14 nt, Human
accagcgaagggag

SEQ ID NO: 3556465 - RNA, 17 nt, Human
accagcgcccgcugggc

SEQ ID NO: 3556466 - RNA, 23 nt, Human
accagcgcccgcugggcugagcc

SEQ ID NO: 3556467 - RNA, 19 nt, Human
accagcgcuugaagccuga

SEQ ID NO: 3556468 - RNA, 22 nt, Human
accagcuaagaaaagauuuuaa

SEQ ID NO: 3556469 - RNA, 16 nt, Human
accagcuacccugugu

SEQ ID NO: 3556470 - RNA, 14 nt, Human
accagcucaggaca

SEQ ID NO: 3556471 - RNA, 23 nt, Human
accagcucaggacagaugccaca

SEQ ID NO: 3556472 - RNA, 13 nt, Human
accagcuccuccc

SEQ ID NO: 3556473 - RNA, 22 nt, Human
accagcucugccgucucuggag

SEQ ID NO: 3556474 - RNA, 23 nt, Human
accagcugaaguugcagauguua

SEQ ID NO: 3556475 - RNA, 13 nt, Human
accagcugcaaag

SEQ ID NO: 3556476 - RNA, 18 nt, Human
accagcugcaaaguguuu

SEQ ID NO: 3556477 - RNA, 20 nt, Human
accagcugcaaaguguuuug

SEQ ID NO: 3556478 - RNA, 14 nt, Human
accagcugccucuu

SEQ ID NO: 3556479 - RNA, 16 nt, Human
accagcugcgcuugcu

SEQ ID NO: 3556480 - RNA, 17 nt, Human
accagcugcugcucuga

SEQ ID NO: 3556481 - RNA, 11 nt, Human
accagcugggg

SEQ ID NO: 3556482 - RNA, 21 nt, Human
accagcuggggcguggggagg

SEQ ID NO: 3556483 - RNA, 13 nt, Human
accagcugugucc

SEQ ID NO: 3556484 - RNA, 18 nt, Human
accagcuguguccggccc

SEQ ID NO: 3556485 - RNA, 22 nt, Human
accagcuguucugucccuugga

SEQ ID NO: 3556486 - RNA, 18 nt, Human
accagcuuccuucagaga

SEQ ID NO: 3556487 - RNA, 15 nt, Human
accagcuuggcucag

SEQ ID NO: 3556488 - RNA, 15 nt, Human
accagcuuugacccg

SEQ ID NO: 3556489 - RNA, 15 nt, Human
accagcuuuuaacca

SEQ ID NO: 3556490 - RNA, 19 nt, Human
accaggaaaggauuuuaua

SEQ ID NO: 3556491 - RNA, 13 nt, Human
accaggaacagca

SEQ ID NO: 3556492 - RNA, 20 nt, Human
accaggaacucuggaguuca

SEQ ID NO: 3556493 - RNA, 12 nt, Human
accaggaagccg

SEQ ID NO: 3556494 - RNA, 17 nt, Human
accaggacaggaccaga

SEQ ID NO: 3556495 - RNA, 19 nt, Human
accaggacuauagcccagg

SEQ ID NO: 3556496 - RNA, 15 nt, Human
accaggacucccucc

SEQ ID NO: 3556497 - RNA, 18 nt, Human
accaggacucccuccuca

SEQ ID NO: 3556498 - RNA, 11 nt, Human
accaggagaca

SEQ ID NO: 3556499 - RNA, 12 nt, Human
accaggagacag

SEQ ID NO: 3556500 - RNA, 14 nt, Human
accaggauagagac

SEQ ID NO: 3556501 - RNA, 17 nt, Human
accaggauagagacugg

SEQ ID NO: 3556502 - RNA, 17 nt, Human
accaggcaccaaaagaa

SEQ ID NO: 3556503 - RNA, 21 nt, Human
accaggcaccaaaagaaguaa

SEQ ID NO: 3556504 - RNA, 15 nt, Human
accaggcaccaggca

SEQ ID NO: 3556505 - RNA, 15 nt, Human
accaggcaccucccc

SEQ ID NO: 3556506 - RNA, 23 nt, Human
accaggcacgaacccaccugcug

SEQ ID NO: 3556507 - RNA, 19 nt, Human
accaggccgccccagccuc

SEQ ID NO: 3556508 - RNA, 19 nt, Human
accaggccguccucccggg

SEQ ID NO: 3556509 - RNA, 17 nt, Human
accaggcugccucccuu

SEQ ID NO: 3556510 - RNA, 16 nt, Human
accaggcuggcgcagc

SEQ ID NO: 3556511 - RNA, 19 nt, Human
accaggcuggcgcagccaa

SEQ ID NO: 3556512 - RNA, 13 nt, Human
accaggcuguguc

SEQ ID NO: 3556513 - RNA, 21 nt, Human
accagggaugaugcaacaucc

SEQ ID NO: 3556514 - RNA, 19 nt, Human
accagggauuguuucuguu

SEQ ID NO: 3556515 - RNA, 15 nt, Human
accagggcagggcca

SEQ ID NO: 3556516 - RNA, 22 nt, Human
accagggcaucucugggcugga

SEQ ID NO: 3556517 - RNA, 18 nt, Human
acaaaguguguauuaaaa

SEQ ID NO: 3556518 - RNA, 15 nt, Human
acaaaguuguaugug

SEQ ID NO: 3556519 - RNA, 16 nt, Human
acaaauaacaaugugc

SEQ ID NO: 3556520 - RNA, 20 nt, Human
acaaauaauuuuuaaauaua

SEQ ID NO: 3556521 - RNA, 16 nt, Human
acaaauacuaaaaaga

SEQ ID NO: 3556522 - RNA, 16 nt, Human
acaaauacucaugugu

SEQ ID NO: 3556523 - RNA, 17 nt, Human
acaaauacucaugugua

SEQ ID NO: 3556524 - RNA, 15 nt, Human
acaaauagaaaaugg

SEQ ID NO: 3556525 - RNA, 17 nt, Human
acaaauaguaggcaaga

SEQ ID NO: 3556526 - RNA, 19 nt, Human
acaaauaguaggcaagaug

SEQ ID NO: 3556527 - RNA, 21 nt, Human
acaaauaguaggcaagauggc

SEQ ID NO: 3556528 - RNA, 15 nt, Human
acaaauauaaaucuu

SEQ ID NO: 3556529 - RNA, 16 nt, Human
acaaauauuaaaaagu

SEQ ID NO: 3556530 - RNA, 13 nt, Human
acaaauauuauuu

SEQ ID NO: 3556531 - RNA, 15 nt, Human
acaaauauuauuugu

SEQ ID NO: 3556532 - RNA, 21 nt, Human
acaaaucaacagaagcauuug

SEQ ID NO: 3556533 - RNA, 13 nt, Human
acaaaucaaguuu

SEQ ID NO: 3556534 - RNA, 15 nt, Human
acaaaucaaguuucc

SEQ ID NO: 3556535 - RNA, 15 nt, Human
acaaaucagaaguca

SEQ ID NO: 3556536 - RNA, 16 nt, Human
acaaaucagaagucau

SEQ ID NO: 3556537 - RNA, 14 nt, Human
acaaaucuaugcca

SEQ ID NO: 3556538 - RNA, 22 nt, Human
acaaaucugcaaagcauguuuu

SEQ ID NO: 3556539 - RNA, 20 nt, Human
acaaaucuguguauauuauu

SEQ ID NO: 3556540 - RNA, 15 nt, Human
acaaaucuuuccaua

SEQ ID NO: 3556541 - RNA, 13 nt, Human
acaaaugacuuua

SEQ ID NO: 3556542 - RNA, 21 nt, Human
acaaaugacuuuauuauuuau

SEQ ID NO: 3556543 - RNA, 15 nt, Human
acaaaugauugcuuu

SEQ ID NO: 3556544 - RNA, 18 nt, Human
acaaaugauugcuuuuaa

SEQ ID NO: 3556545 - RNA, 15 nt, Human
acaaaugcaucuuug

SEQ ID NO: 3556546 - RNA, 16 nt, Human
acaaaugcaucuuuga

SEQ ID NO: 3556547 - RNA, 18 nt, Human
acaaaugcaugaacaagu

SEQ ID NO: 3556548 - RNA, 22 nt, Human
acaaaugccaaauuaaaaaaga

SEQ ID NO: 3556549 - RNA, 15 nt, Human
acaaaugccacacau

SEQ ID NO: 3556550 - RNA, 19 nt, Human
acaaaugccuuaaaaugga

SEQ ID NO: 3556551 - RNA, 20 nt, Human
acaaaugccuuaaaauggaa

SEQ ID NO: 3556552 - RNA, 21 nt, Human
acaaaugggcgccccccccuc

SEQ ID NO: 3556553 - RNA, 22 nt, Human
acaaaugggcgccccccccucc

SEQ ID NO: 3556554 - RNA, 18 nt, Human
acaaauguuaaaaugugu

SEQ ID NO: 3556555 - RNA, 23 nt, Human
acaaauguuuugcucaauagauu

SEQ ID NO: 3556556 - RNA, 17 nt, Human
acaaauuaaaaagauuc

SEQ ID NO: 3556557 - RNA, 21 nt, Human
acaaauuaaaaagauucuuuu

SEQ ID NO: 3556558 - RNA, 13 nt, Human
acaaauuaauuuu

SEQ ID NO: 3556559 - RNA, 22 nt, Human
acaaauuagaaaauguuauuua

SEQ ID NO: 3556560 - RNA, 20 nt, Human
acaaauuauaauguauucau

SEQ ID NO: 3556561 - RNA, 18 nt, Human
acaaauuaugcuaagaau

SEQ ID NO: 3556562 - RNA, 17 nt, Human
acaaauucauauucugu

SEQ ID NO: 3556563 - RNA, 21 nt, Human
acaaauucugaauauuuuuug

SEQ ID NO: 3556564 - RNA, 18 nt, Human
acaaauucugucucugga

SEQ ID NO: 3556565 - RNA, 15 nt, Human
acaaauucuguuucu

SEQ ID NO: 3556566 - RNA, 16 nt, Human
acaaauucuguuucuu

SEQ ID NO: 3556567 - RNA, 22 nt, Human
acaaauugcuugaaagaaaaua

SEQ ID NO: 3556568 - RNA, 22 nt, Human
acaaauuguuacuccauauaua

SEQ ID NO: 3556569 - RNA, 14 nt, Human
acaaauuuaaaaca

SEQ ID NO: 3556570 - RNA, 16 nt, Human
acaaauuuaaaacaaa

SEQ ID NO: 3556571 - RNA, 23 nt, Human
acaaauuuuucugcuuuaaaaau

SEQ ID NO: 3556572 - RNA, 10 nt, Human
acaacaaaaa

SEQ ID NO: 3556573 - RNA, 14 nt, Human
acaacaaaaaauaa

SEQ ID NO: 3556574 - RNA, 13 nt, Human
acaacaaaaauuu

SEQ ID NO: 3556575 - RNA, 15 nt, Human
acaacaaaaauuuga

SEQ ID NO: 3556576 - RNA, 15 nt, Human
acaacaacaaaauga

SEQ ID NO: 3556577 - RNA, 18 nt, Human
acaacaauugguaaaacu

SEQ ID NO: 3556578 - RNA, 19 nt, Human
acaacaauugguaaaacuc

SEQ ID NO: 3556579 - RNA, 20 nt, Human
acaacacacacuguucugaa

SEQ ID NO: 3556580 - RNA, 12 nt, Human
acaacacucaca

SEQ ID NO: 3556581 - RNA, 15 nt, Human
acaacacuuuaaugg

SEQ ID NO: 3556582 - RNA, 19 nt, Human
acaacagaagcuucagaag

SEQ ID NO: 3556583 - RNA, 11 nt, Human
acaacagaagu

SEQ ID NO: 3556584 - RNA, 18 nt, Human
acaacagauuggauuuua

SEQ ID NO: 3556585 - RNA, 22 nt, Human
acaacagauuggauuuuauguu

SEQ ID NO: 3556586 - RNA, 15 nt, Human
acaacagauuuguga

SEQ ID NO: 3556587 - RNA, 17 nt, Human
acaacagauuugugaac

SEQ ID NO: 3556588 - RNA, 16 nt, Human
acaacagccaacagcu

SEQ ID NO: 3556589 - RNA, 17 nt, Human
acaacagccaacagcua

SEQ ID NO: 3556590 - RNA, 20 nt, Human
acaacagcucgauccaaauu

SEQ ID NO: 3556591 - RNA, 14 nt, Human
acaacagcugccug

SEQ ID NO: 3556592 - RNA, 17 nt, Human
acaacauccauguccua

SEQ ID NO: 3556593 - RNA, 19 nt, Human
acaacauccauguccuaug

SEQ ID NO: 3556594 - RNA, 16 nt, Human
acaacauguuuccagc

SEQ ID NO: 3556595 - RNA, 21 nt, Human
acaacauguuuccagcauucc

SEQ ID NO: 3556596 - RNA, 14 nt, Human
acaacauuucuaua

SEQ ID NO: 3556597 - RNA, 22 nt, Human
acaacauuucuauagccaaaaa

SEQ ID NO: 3556598 - RNA, 18 nt, Human
acaaccaagcucucugca

SEQ ID NO: 3556599 - RNA, 18 nt, Human
acaaccacauacaacaca

SEQ ID NO: 3556600 - RNA, 19 nt, Human
acaaccaccgcuccccagc

SEQ ID NO: 3556601 - RNA, 13 nt, Human
acaacccccagcu

SEQ ID NO: 3556602 - RNA, 14 nt, Human
acaacccccagcuc

SEQ ID NO: 3556603 - RNA, 23 nt, Human
acaaccccccaucacaaacuuaa

SEQ ID NO: 3556604 - RNA, 19 nt, Human
acaaccgaugcuccagcca

SEQ ID NO: 3556605 - RNA, 20 nt, Human
acaaccgaugcuccagccaa

SEQ ID NO: 3556606 - RNA, 22 nt, Human
acaaccuccauucuauuuuaga

SEQ ID NO: 3556607 - RNA, 16 nt, Human
acaaccucccucuugu

SEQ ID NO: 3556608 - RNA, 13 nt, Human
acaaccugaaccu

SEQ ID NO: 3556609 - RNA, 12 nt, Human
acaaccuggaga

SEQ ID NO: 3556610 - RNA, 16 nt, Human
acaacgagccuuuuca

SEQ ID NO: 3556611 - RNA, 19 nt, Human
accaugauggccaggcuga

SEQ ID NO: 3556612 - RNA, 20 nt, Human
accaugccaggcuaauuuuu

SEQ ID NO: 3556613 - RNA, 22 nt, Human
accaugcccggcuaauuuuugu

SEQ ID NO: 3556614 - RNA, 20 nt, Human
accaugcucaucugcugguc

SEQ ID NO: 3556615 - RNA, 16 nt, Human
accaugcugcugggga

SEQ ID NO: 3556616 - RNA, 17 nt, Human
accaugcugucuggcac

SEQ ID NO: 3556617 - RNA, 18 nt, Human
accaugcugucuggcaca

SEQ ID NO: 3556618 - RNA, 22 nt, Human
accaugcugucuggcacagccu

SEQ ID NO: 3556619 - RNA, 23 nt, Human
accaugcugucuggcacagccug

SEQ ID NO: 3556620 - RNA, 21 nt, Human
accauggacacuacacccagc

SEQ ID NO: 3556621 - RNA, 22 nt, Human
accauggacacuacacccagca

SEQ ID NO: 3556622 - RNA, 19 nt, Human
accaugggauaaaugccau

SEQ ID NO: 3556623 - RNA, 16 nt, Human
accauggugaagugcu

SEQ ID NO: 3556624 - RNA, 19 nt, Human
accaugguuaagaguccaa

SEQ ID NO: 3556625 - RNA, 14 nt, Human
accauguaaaacaa

SEQ ID NO: 3556626 - RNA, 22 nt, Human
accauguaaaacaaaaaacaau

SEQ ID NO: 3556627 - RNA, 11 nt, Human
accauguacau

SEQ ID NO: 3556628 - RNA, 14 nt, Human
accauguacauagc

SEQ ID NO: 3556629 - RNA, 16 nt, Human
accauguauuuuguaa

SEQ ID NO: 3556630 - RNA, 19 nt, Human
accaugucguaguuacucu

SEQ ID NO: 3556631 - RNA, 16 nt, Human
accaugugagcucuuc

SEQ ID NO: 3556632 - RNA, 19 nt, Human
accaugugagcucuuccua

SEQ ID NO: 3556633 - RNA, 22 nt, Human
accaugugcuacaggggccaga

SEQ ID NO: 3556634 - RNA, 14 nt, Human
accauguggccaca

SEQ ID NO: 3556635 - RNA, 15 nt, Human
accaugugucacuug

SEQ ID NO: 3556636 - RNA, 16 nt, Human
accaugugucacuugu

SEQ ID NO: 3556637 - RNA, 17 nt, Human
accauguguuauguuuu

SEQ ID NO: 3556638 - RNA, 20 nt, Human
accauguuggccaggcugcu

SEQ ID NO: 3556639 - RNA, 21 nt, Human
accauguuggccaggcugguc

SEQ ID NO: 3556640 - RNA, 23 nt, Human
accauguugguugcacuuuguag

SEQ ID NO: 3556641 - RNA, 19 nt, Human
accauguuugagcucagac

SEQ ID NO: 3556642 - RNA, 20 nt, Human
accauuaaaacugaagucug

SEQ ID NO: 3556643 - RNA, 22 nt, Human
accauuaaaacugaagucugaa

SEQ ID NO: 3556644 - RNA, 23 nt, Human
accauuaaaacugaagucugaaa

SEQ ID NO: 3556645 - RNA, 20 nt, Human
accauuaaaacugcuuuuuu

SEQ ID NO: 3556646 - RNA, 12 nt, Human
accauuauuuuu

SEQ ID NO: 3556647 - RNA, 19 nt, Human
accauucacaauaaaagcu

SEQ ID NO: 3556648 - RNA, 20 nt, Human
accauucacaauaaaagcuu

SEQ ID NO: 3556649 - RNA, 20 nt, Human
accauucaggaaccuggacc

SEQ ID NO: 3556650 - RNA, 21 nt, Human
accauucuccaccugccaggg

SEQ ID NO: 3556651 - RNA, 13 nt, Human
accauucugacuc

SEQ ID NO: 3556652 - RNA, 15 nt, Human
accauugaacuguac

SEQ ID NO: 3556653 - RNA, 13 nt, Human
accauugacacau

SEQ ID NO: 3556654 - RNA, 16 nt, Human
accauugcugcuccuu

SEQ ID NO: 3556655 - RNA, 23 nt, Human
accauugcugcuccuuagcugcc

SEQ ID NO: 3556656 - RNA, 11 nt, Human
accauugcuuc

SEQ ID NO: 3556657 - RNA, 16 nt, Human
accauugcuucacuac

SEQ ID NO: 3556658 - RNA, 21 nt, Human
accauugcuucacuacccauc

SEQ ID NO: 3556659 - RNA, 18 nt, Human
accauuggaaauuucacg

SEQ ID NO: 3556660 - RNA, 19 nt, Human
accauuggaaauuucacgu

SEQ ID NO: 3556661 - RNA, 21 nt, Human
acaagacuucaguauguuguc

SEQ ID NO: 3556662 - RNA, 17 nt, Human
acaagagaagcauucuc

SEQ ID NO: 3556663 - RNA, 14 nt, Human
acaagagcagccug

SEQ ID NO: 3556664 - RNA, 15 nt, Human
acaagagcagccugu

SEQ ID NO: 3556665 - RNA, 19 nt, Human
acaagagcagccuguggca

SEQ ID NO: 3556666 - RNA, 13 nt, Human
acaagagcccagc

SEQ ID NO: 3556667 - RNA, 17 nt, Human
acaagagcccaggccuc

SEQ ID NO: 3556668 - RNA, 22 nt, Human
acaagagccugaucucuuccug

SEQ ID NO: 3556669 - RNA, 17 nt, Human
acaagagcgaaacuccg

SEQ ID NO: 3556670 - RNA, 18 nt, Human
acaagaguuuauuuccaa

SEQ ID NO: 3556671 - RNA, 17 nt, Human
acaagauauuguacaua

SEQ ID NO: 3556672 - RNA, 20 nt, Human
acaagaucuuucaggaaaga

SEQ ID NO: 3556673 - RNA, 18 nt, Human
acaagauggaauuuauca

SEQ ID NO: 3556674 - RNA, 18 nt, Human
acaagauuauaauauuuu

SEQ ID NO: 3556675 - RNA, 14 nt, Human
acaagauucccaga

SEQ ID NO: 3556676 - RNA, 16 nt, Human
acaagauucccagaga

SEQ ID NO: 3556677 - RNA, 18 nt, Human
acaagauucccagagaca

SEQ ID NO: 3556678 - RNA, 22 nt, Human
acaagauugguguuuuuuucua

SEQ ID NO: 3556679 - RNA, 19 nt, Human
acaagauugucauuaguga

SEQ ID NO: 3556680 - RNA, 15 nt, Human
acaagauuuuuuaau

SEQ ID NO: 3556681 - RNA, 20 nt, Human
acaagauuuuuuaauuguuu

SEQ ID NO: 3556682 - RNA, 19 nt, Human
acaagcaaacccagacggc

SEQ ID NO: 3556683 - RNA, 19 nt, Human
acaagcagauacugcugug

SEQ ID NO: 3556684 - RNA, 17 nt, Human
acaagcauauaaaaugg

SEQ ID NO: 3556685 - RNA, 19 nt, Human
acaagcaugcagcuuugca

SEQ ID NO: 3556686 - RNA, 12 nt, Human
acaagccacccc

SEQ ID NO: 3556687 - RNA, 12 nt, Human
acaagccagcca

SEQ ID NO: 3556688 - RNA, 15 nt, Human
acaagccagcuggag

SEQ ID NO: 3556689 - RNA, 15 nt, Human
acaagccccaggcag

SEQ ID NO: 3556690 - RNA, 19 nt, Human
acaagccccaggcaggcug

SEQ ID NO: 3556691 - RNA, 17 nt, Human
acaagcccccccuucca

SEQ ID NO: 3556692 - RNA, 18 nt, Human
acaagcccccccuuccac

SEQ ID NO: 3556693 - RNA, 18 nt, Human
acaagccucugcccaggc

SEQ ID NO: 3556694 - RNA, 20 nt, Human
acaagccucugcccaggcac

SEQ ID NO: 3556695 - RNA, 14 nt, Human
acaagcuaaaauua

SEQ ID NO: 3556696 - RNA, 17 nt, Human
acaagcuaggugcuaau

SEQ ID NO: 3556697 - RNA, 22 nt, Human
acaagcuccaagcucccaggca

SEQ ID NO: 3556698 - RNA, 22 nt, Human
acaagcugcacccucaggcagg

SEQ ID NO: 3556699 - RNA, 19 nt, Human
acaagcuggcuuacacugg

SEQ ID NO: 3556700 - RNA, 16 nt, Human
acaagcuucugagacg

SEQ ID NO: 3556701 - RNA, 20 nt, Human
acaagcuuuuuuacacaaau

SEQ ID NO: 3556702 - RNA, 21 nt, Human
acaaggaagucaaagcaagga

SEQ ID NO: 3556703 - RNA, 22 nt, Human
acaaggacacgcgccccccucc

SEQ ID NO: 3556704 - RNA, 18 nt, Human
acaaggacuaggguccug

SEQ ID NO: 3556705 - RNA, 15 nt, Human
acaaggacuuccugu

SEQ ID NO: 3556706 - RNA, 14 nt, Human
acaaggagggcaca

SEQ ID NO: 3556707 - RNA, 17 nt, Human
acaaggauugaaaauuc

SEQ ID NO: 3556708 - RNA, 17 nt, Human
acaaggauugcuacugu

SEQ ID NO: 3556709 - RNA, 20 nt, Human
acaaggcaaggcugucaauu

SEQ ID NO: 3556710 - RNA, 20 nt, Human
acaaggcacuucauguaaag

SEQ ID NO: 3556711 - RNA, 18 nt, Human
acaaggcagcaaggcccg

SEQ ID NO: 3556712 - RNA, 23 nt, Human
acaaggcauucaaguguacagug

SEQ ID NO: 3556713 - RNA, 11 nt, Human
acaaggcccca

SEQ ID NO: 3556714 - RNA, 17 nt, Human
acaaggccccagagacu

SEQ ID NO: 3556715 - RNA, 18 nt, Human
acaaggccccagagacuc

SEQ ID NO: 3556716 - RNA, 13 nt, Human
acaaggcugacca

SEQ ID NO: 3556717 - RNA, 18 nt, Human
acaaggcugaccaagaga

SEQ ID NO: 3556718 - RNA, 22 nt, Human
acaaggcuugcugcagauacua

SEQ ID NO: 3556719 - RNA, 20 nt, Human
acaagggaagauuuauguuu

SEQ ID NO: 3556720 - RNA, 16 nt, Human
acaagggaaggacaga

SEQ ID NO: 3556721 - RNA, 18 nt, Human
acaagggagagaccucau

SEQ ID NO: 3556722 - RNA, 21 nt, Human
acaagguaccccuuucuggcu

SEQ ID NO: 3556723 - RNA, 17 nt, Human
acaaggucauggccaca

SEQ ID NO: 3556724 - RNA, 19 nt, Human
acaaggucauggccacacu

SEQ ID NO: 3556725 - RNA, 21 nt, Human
acaaggucauggccacacugu

SEQ ID NO: 3556726 - RNA, 17 nt, Human
acaagguccaagauacc

SEQ ID NO: 3556727 - RNA, 23 nt, Human
acaagguccucugucagucacag

SEQ ID NO: 3556728 - RNA, 16 nt, Human
acaaggugcaggcagg

SEQ ID NO: 3556729 - RNA, 14 nt, Human
acaaggugggcagg

SEQ ID NO: 3556730 - RNA, 15 nt, Human
acaaggugggcaggg

SEQ ID NO: 3556731 - RNA, 19 nt, Human
acaagguucccucugagaa

SEQ ID NO: 3556732 - RNA, 13 nt, Human
acaagguucuucc

SEQ ID NO: 3556733 - RNA, 23 nt, Human
acaaguaagagacucagccugca

SEQ ID NO: 3556734 - RNA, 19 nt, Human
acaaguauacuuauauuuc

SEQ ID NO: 3556735 - RNA, 14 nt, Human
acaaguauuuguua

SEQ ID NO: 3556736 - RNA, 17 nt, Human
acaaguauuuguuaauu

SEQ ID NO: 3556737 - RNA, 18 nt, Human
acaagugacuguaucugu

SEQ ID NO: 3556738 - RNA, 21 nt, Human
acaagugagacaaaaagcacu

SEQ ID NO: 3556739 - RNA, 18 nt, Human
acaagugccgcaaauugu

SEQ ID NO: 3556740 - RNA, 20 nt, Human
acaagugccgcaaauuguac

SEQ ID NO: 3556741 - RNA, 12 nt, Human
acaagugcuggc

SEQ ID NO: 3556742 - RNA, 18 nt, Human
acaaguggcaaccugcuu

SEQ ID NO: 3556743 - RNA, 16 nt, Human
acaaguguaaugaaua

SEQ ID NO: 3556744 - RNA, 20 nt, Human
acaaguguaaugaauaccuu

SEQ ID NO: 3556745 - RNA, 18 nt, Human
acaaguguauaucagaaa

SEQ ID NO: 3556746 - RNA, 15 nt, Human
acaaguuaagauucu

SEQ ID NO: 3556747 - RNA, 20 nt, Human
acaaguugagcuaugacuua

SEQ ID NO: 3556748 - RNA, 21 nt, Human
acaaguugagcuaugacuuaa

SEQ ID NO: 3556749 - RNA, 18 nt, Human
acaaguugcuuuuaccug

SEQ ID NO: 3556750 - RNA, 17 nt, Human
acaaguuggagucacuc

SEQ ID NO: 3556751 - RNA, 18 nt, Human
acaaguuggagucacucu

SEQ ID NO: 3556752 - RNA, 15 nt, Human
acaaguuguguuuga

SEQ ID NO: 3556753 - RNA, 21 nt, Human
acaaguuuucauaagcacacu

SEQ ID NO: 3556754 - RNA, 14 nt, Human
acaauaaaaauguu

SEQ ID NO: 3556755 - RNA, 15 nt, Human
acaauaaaacauuau

SEQ ID NO: 3556756 - RNA, 13 nt, Human
acaauaaaagcuu

SEQ ID NO: 3556757 - RNA, 12 nt, Human
acaauaaaauau

SEQ ID NO: 3556758 - RNA, 21 nt, Human
acaauaaaauuuuuuuucaug

SEQ ID NO: 3556759 - RNA, 12 nt, Human
acaauaaagaga

SEQ ID NO: 3556760 - RNA, 14 nt, Human
acaauaaagagauu

SEQ ID NO: 3556761 - RNA, 23 nt, Human
acaauaaagaucgcccccaccuc

SEQ ID NO: 3556762 - RNA, 16 nt, Human
acaauaaauugcuaau

SEQ ID NO: 3556763 - RNA, 17 nt, Human
acaauaacuacuguguu

SEQ ID NO: 3556764 - RNA, 19 nt, Human
acaauaacuacuguguucc

SEQ ID NO: 3556765 - RNA, 20 nt, Human
acaauaacuacuguguuccu

SEQ ID NO: 3556766 - RNA, 18 nt, Human
acaauaauauuguuguau

SEQ ID NO: 3556767 - RNA, 14 nt, Human
acaauacaaaugga

SEQ ID NO: 3556768 - RNA, 15 nt, Human
acaauacaaauggau

SEQ ID NO: 3556769 - RNA, 14 nt, Human
acaauacagauaac

SEQ ID NO: 3556770 - RNA, 13 nt, Human
accggagagagaa

SEQ ID NO: 3556771 - RNA, 20 nt, Human
accggaggcaaaaggcagug

SEQ ID NO: 3556772 - RNA, 16 nt, Human
accggauccugggugg

SEQ ID NO: 3556773 - RNA, 17 nt, Human
accggcaauuuccggcc

SEQ ID NO: 3556774 - RNA, 17 nt, Human
accggccugccaggagg

SEQ ID NO: 3556775 - RNA, 11 nt, Human
accggcgcgcu

SEQ ID NO: 3556776 - RNA, 14 nt, Human
accggcgcgcucuu

SEQ ID NO: 3556777 - RNA, 14 nt, Human
accggcugcuuuuc

SEQ ID NO: 3556778 - RNA, 22 nt, Human
accggcuggcagggcuggcccc

SEQ ID NO: 3556779 - RNA, 19 nt, Human
accggcuggccuggccccu

SEQ ID NO: 3556780 - RNA, 19 nt, Human
accggcuuuaccaaaccgc

SEQ ID NO: 3556781 - RNA, 14 nt, Human
accgggcacucaga

SEQ ID NO: 3556782 - RNA, 19 nt, Human
accgggcacucagaagaca

SEQ ID NO: 3556783 - RNA, 15 nt, Human
accgggccacagaga

SEQ ID NO: 3556784 - RNA, 12 nt, Human
accgggccacuc

SEQ ID NO: 3556785 - RNA, 15 nt, Human
accgggcccuggguu

SEQ ID NO: 3556786 - RNA, 22 nt, Human
accggggagcccccgccccgcc

SEQ ID NO: 3556787 - RNA, 17 nt, Human
accgguccagcuggccu

SEQ ID NO: 3556788 - RNA, 16 nt, Human
accguaaagguuuauu

SEQ ID NO: 3556789 - RNA, 23 nt, Human
accgucauggcuuaauguuuauu

SEQ ID NO: 3556790 - RNA, 15 nt, Human
accguccccucccag

SEQ ID NO: 3556791 - RNA, 14 nt, Human
accguccgcccugc

SEQ ID NO: 3556792 - RNA, 15 nt, Human
accguccgcccugcu

SEQ ID NO: 3556793 - RNA, 12 nt, Human
accguccucacc

SEQ ID NO: 3556794 - RNA, 16 nt, Human
accgucgggggcugag

SEQ ID NO: 3556795 - RNA, 15 nt, Human
accgucuacauuuca

SEQ ID NO: 3556796 - RNA, 18 nt, Human
accguggaccuuccugcc

SEQ ID NO: 3556797 - RNA, 18 nt, Human
accguggaggaggaaggc

SEQ ID NO: 3556798 - RNA, 20 nt, Human
accguggcccugcccucucc

SEQ ID NO: 3556799 - RNA, 16 nt, Human
accguggcccuuccug

SEQ ID NO: 3556800 - RNA, 17 nt, Human
accguggcccuuccugg

SEQ ID NO: 3556801 - RNA, 18 nt, Human
accguggcccuuccugga

SEQ ID NO: 3556802 - RNA, 15 nt, Human
accgugggcggggcc

SEQ ID NO: 3556803 - RNA, 17 nt, Human
accgugggcggggccuu

SEQ ID NO: 3556804 - RNA, 20 nt, Human
accgugggcggggccuugcg

SEQ ID NO: 3556805 - RNA, 17 nt, Human
accgugguaugucugcc

SEQ ID NO: 3556806 - RNA, 16 nt, Human
accgggcacucagaag

SEQ ID NO: 3556807 - RNA, 19 nt, Human
accgggcccuggguuccuc

SEQ ID NO: 3556808 - RNA, 16 nt, Human
accgggccgcuagaug

SEQ ID NO: 3556809 - RNA, 18 nt, Human
accggguuccagcaccac

SEQ ID NO: 3556810 - RNA, 15 nt, Human
accgguccagcuggc

SEQ ID NO: 3556811 - RNA, 18 nt, Human
accgguccagcuggccug

SEQ ID NO: 3556812 - RNA, 23 nt, Human
accgguccagcuggccuggacag

SEQ ID NO: 3556813 - RNA, 14 nt, Human
accgguggggcugg

SEQ ID NO: 3556814 - RNA, 15 nt, Human
accgguugcuucugg

SEQ ID NO: 3556815 - RNA, 16 nt, Human
accgguugcuucuggg

SEQ ID NO: 3556816 - RNA, 23 nt, Human
accguaaagguuuauuuuucugu

SEQ ID NO: 3556817 - RNA, 17 nt, Human
accguaauaauuauuau

SEQ ID NO: 3556818 - RNA, 22 nt, Human
accgucauggcuuaauguuuau

SEQ ID NO: 3556819 - RNA, 16 nt, Human
accguccgcccugcuc

SEQ ID NO: 3556820 - RNA, 13 nt, Human
accguccucaccc

SEQ ID NO: 3556821 - RNA, 15 nt, Human
accguccucaccccu

SEQ ID NO: 3556822 - RNA, 18 nt, Human
accguccucaccccuguc

SEQ ID NO: 3556823 - RNA, 16 nt, Human
accgucuacauuucac

SEQ ID NO: 3556824 - RNA, 20 nt, Human
accgugaagauacuuuguau

SEQ ID NO: 3556825 - RNA, 18 nt, Human
accgugagcgacaaagau

SEQ ID NO: 3556826 - RNA, 16 nt, Human
accgugaggccagaga

SEQ ID NO: 3556827 - RNA, 23 nt, Human
accgugaggccagagacacaagc

SEQ ID NO: 3556828 - RNA, 17 nt, Human
accguggaccuuccugc

SEQ ID NO: 3556829 - RNA, 15 nt, Human
accguggaggaggaa

SEQ ID NO: 3556830 - RNA, 16 nt, Human
accgugggcagggagc

SEQ ID NO: 3556831 - RNA, 14 nt, Human
accgugggcucccu

SEQ ID NO: 3556832 - RNA, 20 nt, Human
accgugguaugucugccaug

SEQ ID NO: 3556833 - RNA, 22 nt, Human
accguguuggucuguacugauu

SEQ ID NO: 3556834 - RNA, 14 nt, Human
accguucugugcac

SEQ ID NO: 3556835 - RNA, 18 nt, Human
accguuggggauugggga

SEQ ID NO: 3556836 - RNA, 15 nt, Human
accuaaaaaagauau

SEQ ID NO: 3556837 - RNA, 16 nt, Human
accuaaaaaagauaua

SEQ ID NO: 3556838 - RNA, 22 nt, Human
accuaaaaggaaaucucacccc

SEQ ID NO: 3556839 - RNA, 12 nt, Human
accuaaagaaaa

SEQ ID NO: 3556840 - RNA, 17 nt, Human
accuaaagaaaaacaaa

SEQ ID NO: 3556841 - RNA, 15 nt, Human
accuaaauggccuca

SEQ ID NO: 3556842 - RNA, 11 nt, Human
accuaacauuc

SEQ ID NO: 3556843 - RNA, 14 nt, Human
accuaaccagggcc

SEQ ID NO: 3556844 - RNA, 15 nt, Human
accuaaccccuuucc

SEQ ID NO: 3556845 - RNA, 15 nt, Human
accuaaccugugucu

SEQ ID NO: 3556846 - RNA, 18 nt, Human
accuaacucuucuuucau

SEQ ID NO: 3556847 - RNA, 12 nt, Human
accuaacuguau

SEQ ID NO: 3556848 - RNA, 15 nt, Human
accuaacuguaucuu

SEQ ID NO: 3556849 - RNA, 21 nt, Human
accuaagauuacaaaucagaa

SEQ ID NO: 3556850 - RNA, 13 nt, Human
accuaaguacugu

SEQ ID NO: 3556851 - RNA, 15 nt, Human
accuaagucucugug

SEQ ID NO: 3556852 - RNA, 18 nt, Human
accuaagucucugugaau

SEQ ID NO: 3556853 - RNA, 18 nt, Human
accuaagugacauuugua

SEQ ID NO: 3556854 - RNA, 15 nt, Human
accuaauccaggcag

SEQ ID NO: 3556855 - RNA, 21 nt, Human
accuaaugaaagugaugacau

SEQ ID NO: 3556856 - RNA, 22 nt, Human
accuaaugaaagugaugacaua

SEQ ID NO: 3556857 - RNA, 15 nt, Human
accuaauuaauauau

SEQ ID NO: 3556858 - RNA, 15 nt, Human
accuaauuaauuuca

SEQ ID NO: 3556859 - RNA, 19 nt, Human
accuaauuagagcagauga

SEQ ID NO: 3556860 - RNA, 21 nt, Human
accuaauucgaugaaggcugc

SEQ ID NO: 3556861 - RNA, 15 nt, Human
accuaauugcacaac

SEQ ID NO: 3556862 - RNA, 17 nt, Human
accuacaguguacaguc

SEQ ID NO: 3556863 - RNA, 13 nt, Human
accuacauguauu

SEQ ID NO: 3556864 - RNA, 14 nt, Human
accuacauguauuu

SEQ ID NO: 3556865 - RNA, 19 nt, Human
accuacauguuauucuagu

SEQ ID NO: 3556866 - RNA, 16 nt, Human
accuaccacagugucu

SEQ ID NO: 3556867 - RNA, 19 nt, Human
accuaccacagugucugua

SEQ ID NO: 3556868 - RNA, 15 nt, Human
accuaccacaugcca

SEQ ID NO: 3556869 - RNA, 15 nt, Human
accuaccacuacauu

SEQ ID NO: 3556870 - RNA, 20 nt, Human
accuaccacucacaugacac

SEQ ID NO: 3556871 - RNA, 14 nt, Human
accuaccucagguu

SEQ ID NO: 3556872 - RNA, 13 nt, Human
accuaccucccac

SEQ ID NO: 3556873 - RNA, 18 nt, Human
accuaccuucauuucagg

SEQ ID NO: 3556874 - RNA, 14 nt, Human
accuacucacacag

SEQ ID NO: 3556875 - RNA, 17 nt, Human
accuacucacacaggca

SEQ ID NO: 3556876 - RNA, 23 nt, Human
accuacugcccaggcacugcaaa

SEQ ID NO: 3556877 - RNA, 15 nt, Human
accuacuguucuaaa

SEQ ID NO: 3556878 - RNA, 23 nt, Human
accuacuguucuaaagcucugac

SEQ ID NO: 3556879 - RNA, 17 nt, Human
accuagagaagauaauu

SEQ ID NO: 3556880 - RNA, 21 nt, Human
accuagcgggauggggcuccc

SEQ ID NO: 3556881 - RNA, 18 nt, Human
accuagcugaauguuuuu

SEQ ID NO: 3556882 - RNA, 20 nt, Human
accuagcugaauguuuuucu

SEQ ID NO: 3556883 - RNA, 21 nt, Human
accuagcugaauguuuuucua

SEQ ID NO: 3556884 - RNA, 17 nt, Human
accuaggaagccucaga

SEQ ID NO: 3556885 - RNA, 22 nt, Human
accuaggaagccucagauuccu

SEQ ID NO: 3556886 - RNA, 19 nt, Human
accuaggcaguaggccggu

SEQ ID NO: 3556887 - RNA, 20 nt, Human
accuaggcucauggacgaga

SEQ ID NO: 3556888 - RNA, 17 nt, Human
accuagggaggaccuua

SEQ ID NO: 3556889 - RNA, 15 nt, Human
accuaggggcgccgc

SEQ ID NO: 3556890 - RNA, 15 nt, Human
accuaggucuccagu

SEQ ID NO: 3556891 - RNA, 13 nt, Human
accuagugaaacu

SEQ ID NO: 3556892 - RNA, 19 nt, Human
accuagugaaacuuuucua

SEQ ID NO: 3556893 - RNA, 20 nt, Human
accuagugaaacuuuucuag

SEQ ID NO: 3556894 - RNA, 16 nt, Human
accuaguggcugucca

SEQ ID NO: 3556895 - RNA, 23 nt, Human
accuaguggcuguccagugccca

SEQ ID NO: 3556896 - RNA, 22 nt, Human
accuaguuaaagaaaggaaaag

SEQ ID NO: 3556897 - RNA, 15 nt, Human
accuauaaaacaggu

SEQ ID NO: 3556898 - RNA, 18 nt, Human
accuauaccuguguuucu

SEQ ID NO: 3556899 - RNA, 22 nt, Human
accuauauaauaaagcuacuga

SEQ ID NO: 3556900 - RNA, 17 nt, Human
accuaucccaccuccau

SEQ ID NO: 3556901 - RNA, 15 nt, Human
accuauccucacugc

SEQ ID NO: 3556902 - RNA, 17 nt, Human
accuaucucgugggaga

SEQ ID NO: 3556903 - RNA, 14 nt, Human
accuaugaagcaau

SEQ ID NO: 3556904 - RNA, 22 nt, Human
accuaugucauuucauuuccua

SEQ ID NO: 3556905 - RNA, 19 nt, Human
accuauguccuaaggacac

SEQ ID NO: 3556906 - RNA, 22 nt, Human
accuauguccuaaggacacacu

SEQ ID NO: 3556907 - RNA, 12 nt, Human
accuauuuccau

SEQ ID NO: 3556908 - RNA, 11 nt, Human
accuauuucuc

SEQ ID NO: 3556909 - RNA, 16 nt, Human
accuauuuuagacaaa

SEQ ID NO: 3556910 - RNA, 16 nt, Human
accucaaaaugucuaa

SEQ ID NO: 3556911 - RNA, 16 nt, Human
accucaaacuaucugg

SEQ ID NO: 3556912 - RNA, 20 nt, Human
accucaaaugaugugccugc

SEQ ID NO: 3556913 - RNA, 12 nt, Human
accucaaauuua

SEQ ID NO: 3556914 - RNA, 17 nt, Human
accucaacaagaagaau

SEQ ID NO: 3556915 - RNA, 19 nt, Human
accucaacccccauuucua

SEQ ID NO: 3556916 - RNA, 17 nt, Human
accucaaccuguaaauu

SEQ ID NO: 3556917 - RNA, 16 nt, Human
accucaaccugugaug

SEQ ID NO: 3556918 - RNA, 22 nt, Human
accucaacugccuacuccaaaa

SEQ ID NO: 3556919 - RNA, 10 nt, Human
accucaaggg

SEQ ID NO: 3556920 - RNA, 15 nt, Human
accucaagggggacu

SEQ ID NO: 3556921 - RNA, 19 nt, Human
accucaaguuuuuguuuug

SEQ ID NO: 3556922 - RNA, 19 nt, Human
accucaaucagucucagaa

SEQ ID NO: 3556923 - RNA, 13 nt, Human
accucaauguccc

SEQ ID NO: 3556924 - RNA, 14 nt, Human
accucaauguuuga

SEQ ID NO: 3556925 - RNA, 18 nt, Human
accucaauuuucacugug

SEQ ID NO: 3556926 - RNA, 18 nt, Human
accucacagaaaugagau

SEQ ID NO: 3556927 - RNA, 19 nt, Human
accucacagugacccuucc

SEQ ID NO: 3556928 - RNA, 15 nt, Human
accucaccaacuccu

SEQ ID NO: 3556929 - RNA, 16 nt, Human
accucaccaacuccua

SEQ ID NO: 3556930 - RNA, 17 nt, Human
accucaccaagcugcug

SEQ ID NO: 3556931 - RNA, 19 nt, Human
accucaccccgaggcccug

SEQ ID NO: 3556932 - RNA, 20 nt, Human
accucaccccgaggcccugc

SEQ ID NO: 3556933 - RNA, 12 nt, Human
accucacccugc

SEQ ID NO: 3556934 - RNA, 15 nt, Human
accucaccuagaaau

SEQ ID NO: 3556935 - RNA, 15 nt, Human
accucacgcaccucc

SEQ ID NO: 3556936 - RNA, 18 nt, Human
accucacgcaccucccau

SEQ ID NO: 3556937 - RNA, 19 nt, Human
accucacgcaccucccauc

SEQ ID NO: 3556938 - RNA, 17 nt, Human
accucacucagcaccac

SEQ ID NO: 3556939 - RNA, 13 nt, Human
accucacuccugu

SEQ ID NO: 3556940 - RNA, 15 nt, Human
accucacucugcuac

SEQ ID NO: 3556941 - RNA, 16 nt, Human
accucacucugcuacc

SEQ ID NO: 3556942 - RNA, 24 nt, Human
accucacucugcuaccuugcccca

SEQ ID NO: 3556943 - RNA, 14 nt, Human
accucacucuuuau

SEQ ID NO: 3556944 - RNA, 13 nt, Human
accucagaaguaa

SEQ ID NO: 3556945 - RNA, 22 nt, Human
accucagacuuaccaggaagca

SEQ ID NO: 3556946 - RNA, 15 nt, Human
accucagagccccgc

SEQ ID NO: 3556947 - RNA, 17 nt, Human
accucagaguccaggcc

SEQ ID NO: 3556948 - RNA, 14 nt, Human
accucagauggcag

SEQ ID NO: 3556949 - RNA, 16 nt, Human
accucagauggcagcu

SEQ ID NO: 3556950 - RNA, 20 nt, Human
accucagauggcagcuuuua

SEQ ID NO: 3556951 - RNA, 14 nt, Human
accucagccaugag

SEQ ID NO: 3556952 - RNA, 18 nt, Human
acacuucagagagcuggu

SEQ ID NO: 3556953 - RNA, 20 nt, Human
acacuucagagagcugguag

SEQ ID NO: 3556954 - RNA, 22 nt, Human
acacuucaggcucuucuccuuu

SEQ ID NO: 3556955 - RNA, 15 nt, Human
acacuuccaccagcc

SEQ ID NO: 3556956 - RNA, 17 nt, Human
acacuuccaccagccug

SEQ ID NO: 3556957 - RNA, 19 nt, Human
acacuuccaccagccugca

SEQ ID NO: 3556958 - RNA, 15 nt, Human
acacuucccucuguu

SEQ ID NO: 3556959 - RNA, 14 nt, Human
acacuucucaggac

SEQ ID NO: 3556960 - RNA, 16 nt, Human
acacuucucaggacac

SEQ ID NO: 3556961 - RNA, 20 nt, Human
acacuucucaggacacaggc

SEQ ID NO: 3556962 - RNA, 23 nt, Human
acacuucugugagacccccacac

SEQ ID NO: 3556963 - RNA, 14 nt, Human
acacuugaaaccuu

SEQ ID NO: 3556964 - RNA, 18 nt, Human
acacuugaaccugggagg

SEQ ID NO: 3556965 - RNA, 18 nt, Human
acacuugagaggaugaau

SEQ ID NO: 3556966 - RNA, 13 nt, Human
acacuugcaaccu

SEQ ID NO: 3556967 - RNA, 17 nt, Human
acacuugcccugcuccc

SEQ ID NO: 3556968 - RNA, 20 nt, Human
acacuugcccugcucccucu

SEQ ID NO: 3556969 - RNA, 18 nt, Human
acacuugccuucuucacc

SEQ ID NO: 3556970 - RNA, 15 nt, Human
acacuuggugcuggg

SEQ ID NO: 3556971 - RNA, 20 nt, Human
acacuugguuggguccucac

SEQ ID NO: 3556972 - RNA, 13 nt, Human
acacuugugaaua

SEQ ID NO: 3556973 - RNA, 22 nt, Human
acacuugugugugggcugugag

SEQ ID NO: 3556974 - RNA, 20 nt, Human
acacuuguuccagcucuuug

SEQ ID NO: 3556975 - RNA, 20 nt, Human
acacuuguugauuaauggaa

SEQ ID NO: 3556976 - RNA, 23 nt, Human
acacuuguugauuaauggaaaug

SEQ ID NO: 3556977 - RNA, 13 nt, Human
acacuuuaauggg

SEQ ID NO: 3556978 - RNA, 22 nt, Human
acacuuuaauuaccaaccuguu

SEQ ID NO: 3556979 - RNA, 17 nt, Human
acacuuugaaauguguu

SEQ ID NO: 3556980 - RNA, 23 nt, Human
acacuuugaaauguguuucugua

SEQ ID NO: 3556981 - RNA, 17 nt, Human
acacuuugcacugauau

SEQ ID NO: 3556982 - RNA, 19 nt, Human
acacuuugcacugauauau

SEQ ID NO: 3556983 - RNA, 19 nt, Human
acacuuugccuccugugua

SEQ ID NO: 3556984 - RNA, 22 nt, Human
acacuuuggaaguuuguguucu

SEQ ID NO: 3556985 - RNA, 15 nt, Human
acacuuuucaccucc

SEQ ID NO: 3556986 - RNA, 17 nt, Human
acacuuuucauaucauu

SEQ ID NO: 3556987 - RNA, 18 nt, Human
acacuuuucauaucauuu

SEQ ID NO: 3556988 - RNA, 14 nt, Human
accuucaaagcuga

SEQ ID NO: 3556989 - RNA, 12 nt, Human
accuucaagcug

SEQ ID NO: 3556990 - RNA, 14 nt, Human
accuucaagcugcu

SEQ ID NO: 3556991 - RNA, 20 nt, Human
accuucaagcugcuuuuugu

SEQ ID NO: 3556992 - RNA, 20 nt, Human
accuucaauaaaguaucuac

SEQ ID NO: 3556993 - RNA, 18 nt, Human
accuucaauuccugggcc

SEQ ID NO: 3556994 - RNA, 19 nt, Human
accuucacucuaagauguu

SEQ ID NO: 3556995 - RNA, 20 nt, Human
accuucacucuaagauguua

SEQ ID NO: 3556996 - RNA, 21 nt, Human
accuucacucuaagauguuau

SEQ ID NO: 3556997 - RNA, 22 nt, Human
accuucacugugaccuugagaa

SEQ ID NO: 3556998 - RNA, 17 nt, Human
accuucagauccuaccc

SEQ ID NO: 3556999 - RNA, 22 nt, Human
accuucaguaacccccacugga

SEQ ID NO: 3557000 - RNA, 19 nt, Human
accuucaguuaugauuuuu

SEQ ID NO: 3557001 - RNA, 15 nt, Human
accuucauuuaaaaa

SEQ ID NO: 3557002 - RNA, 22 nt, Human
accuucauuucauguauaguuu

SEQ ID NO: 3557003 - RNA, 15 nt, Human
accuucauuuugagg

SEQ ID NO: 3557004 - RNA, 16 nt, Human
accuuccaagagccug

SEQ ID NO: 3557005 - RNA, 15 nt, Human
accuuccagaaauac

SEQ ID NO: 3557006 - RNA, 22 nt, Human
accuucccaaacgccuccccug

SEQ ID NO: 3557007 - RNA, 12 nt, Human
accuucccagcu

SEQ ID NO: 3557008 - RNA, 20 nt, Human
accuucccccucccccagcc

SEQ ID NO: 3557009 - RNA, 19 nt, Human
accuucccucucaccaucc

SEQ ID NO: 3557010 - RNA, 14 nt, Human
accuucccuugcca

SEQ ID NO: 3557011 - RNA, 17 nt, Human
accuuccucacuuccau

SEQ ID NO: 3557012 - RNA, 15 nt, Human
accuuccucgcagag

SEQ ID NO: 3557013 - RNA, 16 nt, Human
accuuccucgcagaga

SEQ ID NO: 3557014 - RNA, 17 nt, Human
accuuccucgcagagag

SEQ ID NO: 3557015 - RNA, 15 nt, Human
accuuccucuggggc

SEQ ID NO: 3557016 - RNA, 11 nt, Human
accuuccugcc

SEQ ID NO: 3557017 - RNA, 18 nt, Human
accuuccugccaccaguc

SEQ ID NO: 3557018 - RNA, 19 nt, Human
accuuccuucccugggcug

SEQ ID NO: 3557019 - RNA, 15 nt, Human
accuucgccaccugg

SEQ ID NO: 3557020 - RNA, 15 nt, Human
accuucgggcugugc

SEQ ID NO: 3557021 - RNA, 17 nt, Human
accuucgggcugugccc

SEQ ID NO: 3557022 - RNA, 22 nt, Human
accuucguuuacuaugccugug

SEQ ID NO: 3557023 - RNA, 23 nt, Human
accuucguuuacuaugccugugu

SEQ ID NO: 3557024 - RNA, 17 nt, Human
accuucuauagcaucac

SEQ ID NO: 3557025 - RNA, 20 nt, Human
accuucuauagcaucacuua

SEQ ID NO: 3557026 - RNA, 14 nt, Human
accuucuccaaaug

SEQ ID NO: 3557027 - RNA, 18 nt, Human
accuucuccccagcuccc

SEQ ID NO: 3557028 - RNA, 23 nt, Human
accuucuccccagcucccaggac

SEQ ID NO: 3557029 - RNA, 17 nt, Human
accuucuccccauucug

SEQ ID NO: 3557030 - RNA, 16 nt, Human
accuucucuauaucau

SEQ ID NO: 3557031 - RNA, 15 nt, Human
accuucucuggagcc

SEQ ID NO: 3557032 - RNA, 17 nt, Human
accuucucuggagccaa

SEQ ID NO: 3557033 - RNA, 13 nt, Human
accuucugacuuu

SEQ ID NO: 3557034 - RNA, 19 nt, Human
accuucugccuuugauguu

SEQ ID NO: 3557035 - RNA, 13 nt, Human
accuucuguggcu

SEQ ID NO: 3557036 - RNA, 15 nt, Human
accuucuguggcuca

SEQ ID NO: 3557037 - RNA, 19 nt, Human
accuucuucagccaccucu

SEQ ID NO: 3557038 - RNA, 16 nt, Human
accuugaaaaaaaaca

SEQ ID NO: 3557039 - RNA, 18 nt, Human
accuugaacacuggggga

SEQ ID NO: 3557040 - RNA, 21 nt, Human
accuugaacacugggggaggg

SEQ ID NO: 3557041 - RNA, 15 nt, Human
accuugaacugaagg

SEQ ID NO: 3557042 - RNA, 13 nt, Human
accuugaaugcug

SEQ ID NO: 3557043 - RNA, 15 nt, Human
accuugaaugcugcc

SEQ ID NO: 3557044 - RNA, 18 nt, Human
accuugaaugcugccagu

SEQ ID NO: 3557045 - RNA, 16 nt, Human
accuugacagggcaca

SEQ ID NO: 3557046 - RNA, 18 nt, Human
accuugaccuuuguacag

SEQ ID NO: 3557047 - RNA, 11 nt, Human
accuugagguc

SEQ ID NO: 3557048 - RNA, 12 nt, Human
accuugccccaa

SEQ ID NO: 3557049 - RNA, 18 nt, Human
accuugccccaacccuuc

SEQ ID NO: 3557050 - RNA, 22 nt, Human
accuugccccaacccuucuuca

SEQ ID NO: 3557051 - RNA, 18 nt, Human
accuugccugaacauccu

SEQ ID NO: 3557052 - RNA, 24 nt, Human
accuugccugaacauccuuccuuc

SEQ ID NO: 3557053 - RNA, 18 nt, Human
accuugccugguacagua

SEQ ID NO: 3557054 - RNA, 22 nt, Human
accuugcugcaagcacagcccu

SEQ ID NO: 3557055 - RNA, 12 nt, Human
accuugcugucc

SEQ ID NO: 3557056 - RNA, 22 nt, Human
accuugcuucuuacugauaauu

SEQ ID NO: 3557057 - RNA, 18 nt, Human
accuuggacauccuccuc

SEQ ID NO: 3557058 - RNA, 15 nt, Human
accuuggccugggcc

SEQ ID NO: 3557059 - RNA, 14 nt, Human
accuuggcugcagg

SEQ ID NO: 3557060 - RNA, 18 nt, Human
accuuggcugcagggagu

SEQ ID NO: 3557061 - RNA, 21 nt, Human
accuuggcuuggcccuggcag

SEQ ID NO: 3557062 - RNA, 12 nt, Human
accuugggccaa

SEQ ID NO: 3557063 - RNA, 23 nt, Human
accuuggguuagaccuacagggg

SEQ ID NO: 3557064 - RNA, 19 nt, Human
accuuguauaaauuauuca

SEQ ID NO: 3557065 - RNA, 12 nt, Human
accuugugccug

SEQ ID NO: 3557066 - RNA, 16 nt, Human
accuugugccuggggu

SEQ ID NO: 3557067 - RNA, 13 nt, Human
accuugugucugu

SEQ ID NO: 3557068 - RNA, 15 nt, Human
accuugugucuguac

SEQ ID NO: 3557069 - RNA, 15 nt, Human
accuuguuacuucug

SEQ ID NO: 3557070 - RNA, 17 nt, Human
accuuguuauuucucag

SEQ ID NO: 3557071 - RNA, 14 nt, Human
accuuguucacacu

SEQ ID NO: 3557072 - RNA, 16 nt, Human
accuuguucacacucu

SEQ ID NO: 3557073 - RNA, 18 nt, Human
accuuguuguuguuaaau

SEQ ID NO: 3557074 - RNA, 15 nt, Human
accuuuaagagaaau

SEQ ID NO: 3557075 - RNA, 21 nt, Human
accuuuaaguagauaagcaga

SEQ ID NO: 3557076 - RNA, 18 nt, Human
accuuuaccccaucccug

SEQ ID NO: 3557077 - RNA, 21 nt, Human
accuuuagaaacucaaaaacu

SEQ ID NO: 3557078 - RNA, 15 nt, Human
accuuuagggcagcu

SEQ ID NO: 3557079 - RNA, 15 nt, Human
accuuuaugguuucu

SEQ ID NO: 3557080 - RNA, 14 nt, Human
accuuuauuaaaau

SEQ ID NO: 3557081 - RNA, 17 nt, Human
accuuuauuaaaaucuu

SEQ ID NO: 3557082 - RNA, 20 nt, Human
accuuuauuaaaaucuuaaa

SEQ ID NO: 3557083 - RNA, 17 nt, Human
accuuuauucuuuucca

SEQ ID NO: 3557084 - RNA, 22 nt, Human
accuuuauuggguaucaagaca

SEQ ID NO: 3557085 - RNA, 15 nt, Human
accuuucaaagccau

SEQ ID NO: 3557086 - RNA, 18 nt, Human
accuuucaaagccauuuu

SEQ ID NO: 3557087 - RNA, 18 nt, Human
accuuucauaaucuuugc

SEQ ID NO: 3557088 - RNA, 23 nt, Human
accuuuccaaaguuaacagauuu

SEQ ID NO: 3557089 - RNA, 18 nt, Human
accuuucccaucuuccaa

SEQ ID NO: 3557090 - RNA, 13 nt, Human
accuuucccucac

SEQ ID NO: 3557091 - RNA, 17 nt, Human
accuuucccucaccccc

SEQ ID NO: 3557092 - RNA, 20 nt, Human
accuuucuauaauuuuacaa

SEQ ID NO: 3557093 - RNA, 18 nt, Human
accuuugacaaagguaaa

SEQ ID NO: 3557094 - RNA, 17 nt, Human
accuuuggaaagcucug

SEQ ID NO: 3557095 - RNA, 18 nt, Human
accuuuguacagcccaga

SEQ ID NO: 3557096 - RNA, 21 nt, Human
acuagagucugaacagcugua

SEQ ID NO: 3557097 - RNA, 20 nt, Human
acuagaguuuagcuggaaaa

SEQ ID NO: 3557098 - RNA, 13 nt, Human
acuagaugaccuc

SEQ ID NO: 3557099 - RNA, 15 nt, Human
acuagaugaccucau

SEQ ID NO: 3557100 - RNA, 18 nt, Human
acuagaugaccucauuaa

SEQ ID NO: 3557101 - RNA, 15 nt, Human
acuagauggcgagca

SEQ ID NO: 3557102 - RNA, 12 nt, Human
acuagauguagu

SEQ ID NO: 3557103 - RNA, 13 nt, Human
acuagauguagua

SEQ ID NO: 3557104 - RNA, 16 nt, Human
acuagauguaguauuu

SEQ ID NO: 3557105 - RNA, 13 nt, Human
acuagauugacua

SEQ ID NO: 3557106 - RNA, 15 nt, Human
acuagauugugaucc

SEQ ID NO: 3557107 - RNA, 20 nt, Human
acuagauuuucacuuaugaa

SEQ ID NO: 3557108 - RNA, 18 nt, Human
acuagcaaaauaaaacau

SEQ ID NO: 3557109 - RNA, 14 nt, Human
acuagccaaaccag

SEQ ID NO: 3557110 - RNA, 17 nt, Human
acuagccaaaccucacc

SEQ ID NO: 3557111 - RNA, 19 nt, Human
acuagccaaaccucaccaa

SEQ ID NO: 3557112 - RNA, 22 nt, Human
acuagccaaaccucaccaacuc

SEQ ID NO: 3557113 - RNA, 21 nt, Human
acuagccaacggccccagcuu

SEQ ID NO: 3557114 - RNA, 16 nt, Human
acuagccaccaacucu

SEQ ID NO: 3557115 - RNA, 20 nt, Human
acuagccaggaaguacuucc

SEQ ID NO: 3557116 - RNA, 21 nt, Human
acuagccaugauaacugcaau

SEQ ID NO: 3557117 - RNA, 21 nt, Human
acuagccuaggucauaaagag

SEQ ID NO: 3557118 - RNA, 15 nt, Human
acuagccucuccagg

SEQ ID NO: 3557119 - RNA, 17 nt, Human
acuagccuuuggcucug

SEQ ID NO: 3557120 - RNA, 19 nt, Human
acuagcuaucuagguggag

SEQ ID NO: 3557121 - RNA, 13 nt, Human
acuagcucuuguu

SEQ ID NO: 3557122 - RNA, 17 nt, Human
acuagcuggaauuuuuu

SEQ ID NO: 3557123 - RNA, 19 nt, Human
acuagcuuacaugagaaca

SEQ ID NO: 3557124 - RNA, 15 nt, Human
acuaggaaaauugga

SEQ ID NO: 3557125 - RNA, 21 nt, Human
acuaggagcuuugacucagga

SEQ ID NO: 3557126 - RNA, 22 nt, Human
acuaggagcuuugacucaggag

SEQ ID NO: 3557127 - RNA, 23 nt, Human
acuaggagcuuugacucaggagc

SEQ ID NO: 3557128 - RNA, 20 nt, Human
acuaggcccccacuugccuc

SEQ ID NO: 3557129 - RNA, 14 nt, Human
acuaggcugagcaa

SEQ ID NO: 3557130 - RNA, 21 nt, Human
acuaggcugggugcccacagc

SEQ ID NO: 3557131 - RNA, 14 nt, Human
acuagggagccaug

SEQ ID NO: 3557132 - RNA, 19 nt, Human
acuagggagccauguuuca

SEQ ID NO: 3557133 - RNA, 17 nt, Human
acuaggggacaaagcaa

SEQ ID NO: 3557134 - RNA, 15 nt, Human
acuaggguccugggg

SEQ ID NO: 3557135 - RNA, 18 nt, Human
acuagguaacuucauauu

SEQ ID NO: 3557136 - RNA, 23 nt, Human
acuaguaccuucagauccuaccc

SEQ ID NO: 3557137 - RNA, 16 nt, Human
acuagugacagcuugu

SEQ ID NO: 3557138 - RNA, 19 nt, Human
acuagugaccccuucccug

SEQ ID NO: 3557139 - RNA, 13 nt, Human
acuagugcaaauc

SEQ ID NO: 3557140 - RNA, 14 nt, Human
acuagugcugaagc

SEQ ID NO: 3557141 - RNA, 17 nt, Human
acuagugcugaagcuua

SEQ ID NO: 3557142 - RNA, 20 nt, Human
acuagugggguuuccuggca

SEQ ID NO: 3557143 - RNA, 15 nt, Human
acuaguguugcuugg

SEQ ID NO: 3557144 - RNA, 15 nt, Human
acuaguuacacaucu

SEQ ID NO: 3557145 - RNA, 20 nt, Human
acuaguugugaccuuagugu

SEQ ID NO: 3557146 - RNA, 20 nt, Human
acuaguugugucuggcaguu

SEQ ID NO: 3557147 - RNA, 19 nt, Human
acuaguuuaguuaaaugag

SEQ ID NO: 3557148 - RNA, 21 nt, Human
acuaguuuuuccuaucauguu

SEQ ID NO: 3557149 - RNA, 14 nt, Human
acuauaaaacaaaa

SEQ ID NO: 3557150 - RNA, 18 nt, Human
acuauaaaaugucuucaa

SEQ ID NO: 3557151 - RNA, 23 nt, Human
acuauaacauagaauugcaaucu

SEQ ID NO: 3557152 - RNA, 11 nt, Human
acuauaaugua

SEQ ID NO: 3557153 - RNA, 15 nt, Human
acuauacuugaacaa

SEQ ID NO: 3557154 - RNA, 16 nt, Human
acuauagcaaaguagu

SEQ ID NO: 3557155 - RNA, 14 nt, Human
acuauagcccaggu

SEQ ID NO: 3557156 - RNA, 17 nt, Human
acuauagccuaggugac

SEQ ID NO: 3557157 - RNA, 18 nt, Human
acuauagccuaggugaca

SEQ ID NO: 3557158 - RNA, 20 nt, Human
acuauagccuaggugacaga

SEQ ID NO: 3557159 - RNA, 18 nt, Human
acuauagcggcauauaga

SEQ ID NO: 3557160 - RNA, 21 nt, Human
acuauauaauuuauuuccacu

SEQ ID NO: 3557161 - RNA, 15 nt, Human
acuauauacaugugu

SEQ ID NO: 3557162 - RNA, 16 nt, Human
acuauauacaugugug

SEQ ID NO: 3557163 - RNA, 17 nt, Human
acuauauacaugugugu

SEQ ID NO: 3557164 - RNA, 18 nt, Human
acuauauacaugugugua

SEQ ID NO: 3557165 - RNA, 21 nt, Human
acuauauacauguguguauau

SEQ ID NO: 3557166 - RNA, 20 nt, Human
acuauauauauaaauguaua

SEQ ID NO: 3557167 - RNA, 14 nt, Human
acuauaucuguaua

SEQ ID NO: 3557168 - RNA, 18 nt, Human
acuauaucuguauauaaa

SEQ ID NO: 3557169 - RNA, 22 nt, Human
acuauaucuguauauaaaauau

SEQ ID NO: 3557170 - RNA, 16 nt, Human
acuauaucuguuuuac

SEQ ID NO: 3557171 - RNA, 14 nt, Human
acuauaugcaaaca

SEQ ID NO: 3557172 - RNA, 13 nt, Human
acuauauguaugg

SEQ ID NO: 3557173 - RNA, 19 nt, Human
acuauauugauuguccuuu

SEQ ID NO: 3557174 - RNA, 15 nt, Human
acuauauuguacaca

SEQ ID NO: 3557175 - RNA, 17 nt, Human
acuauauuguuugcuaa

SEQ ID NO: 3557176 - RNA, 14 nt, Human
acuaucaaacugaa

SEQ ID NO: 3557177 - RNA, 17 nt, Human
acuaucacugguuuggu

SEQ ID NO: 3557178 - RNA, 20 nt, Human
acuaucagcccaagaugcuu

SEQ ID NO: 3557179 - RNA, 17 nt, Human
acuauccaugcaccaaa

SEQ ID NO: 3557180 - RNA, 18 nt, Human
acuauccaugcaccaaac

SEQ ID NO: 3557181 - RNA, 15 nt, Human
acuauccugacuucu

SEQ ID NO: 3557182 - RNA, 16 nt, Human
acuaucuaaauguuga

SEQ ID NO: 3557183 - RNA, 21 nt, Human
acuaucuaaauguugaaagau

SEQ ID NO: 3557184 - RNA, 15 nt, Human
acuaucuacucuccu

SEQ ID NO: 3557185 - RNA, 13 nt, Human
acuaucucagaga

SEQ ID NO: 3557186 - RNA, 12 nt, Human
acuaucugcuuu

SEQ ID NO: 3557187 - RNA, 17 nt, Human
acuaucugucugguggc

SEQ ID NO: 3557188 - RNA, 22 nt, Human
acuaucuuaucucagauauuug

SEQ ID NO: 3557189 - RNA, 20 nt, Human
acuaugaaaagcuagaauug

SEQ ID NO: 3557190 - RNA, 21 nt, Human
acuaugaaaagcuagaauuga

SEQ ID NO: 3557191 - RNA, 18 nt, Human
acuaugaaaaugcuggcu

SEQ ID NO: 3557192 - RNA, 22 nt, Human
acuaugaaguuuuuuuuauaca

SEQ ID NO: 3557193 - RNA, 15 nt, Human
acaggagguuggagg

SEQ ID NO: 3557194 - RNA, 21 nt, Human
acaggaugaggugguggagug

SEQ ID NO: 3557195 - RNA, 16 nt, Human
acaggauggucucugc

SEQ ID NO: 3557196 - RNA, 22 nt, Human
acaggaugguucccuugaugaa

SEQ ID NO: 3557197 - RNA, 22 nt, Human
acaggauguguuugcuuucuga

SEQ ID NO: 3557198 - RNA, 14 nt, Human
acaggauuauugga

SEQ ID NO: 3557199 - RNA, 20 nt, Human
acaggauuugaacucagauc

SEQ ID NO: 3557200 - RNA, 19 nt, Human
acaggcaaaauccuugcuu

SEQ ID NO: 3557201 - RNA, 16 nt, Human
acaggcaacugaggca

SEQ ID NO: 3557202 - RNA, 14 nt, Human
acaggcaaugcugg

SEQ ID NO: 3557203 - RNA, 16 nt, Human
acaggcaaugcuggcu

SEQ ID NO: 3557204 - RNA, 17 nt, Human
acaggcaaugcuggcug

SEQ ID NO: 3557205 - RNA, 13 nt, Human
acaggcaauuccg

SEQ ID NO: 3557206 - RNA, 13 nt, Human
acaggcacuuggc

SEQ ID NO: 3557207 - RNA, 13 nt, Human
acaggcagcagag

SEQ ID NO: 3557208 - RNA, 15 nt, Human
acaggcagccagugc

SEQ ID NO: 3557209 - RNA, 19 nt, Human
acaggcagccagugcccug

SEQ ID NO: 3557210 - RNA, 23 nt, Human
acaggcagggcaggaccagccca

SEQ ID NO: 3557211 - RNA, 18 nt, Human
acaggcagucucucucuu

SEQ ID NO: 3557212 - RNA, 21 nt, Human
acaggcauaaaauagaguaaa

SEQ ID NO: 3557213 - RNA, 22 nt, Human
acaggcaugggugcaaggaaaa

SEQ ID NO: 3557214 - RNA, 19 nt, Human
acaggcaugugucaccaug

SEQ ID NO: 3557215 - RNA, 14 nt, Human
acaggcauguucuc

SEQ ID NO: 3557216 - RNA, 19 nt, Human
acaggcauguucucugagg

SEQ ID NO: 3557217 - RNA, 22 nt, Human
acaggcauguucucugaggaca

SEQ ID NO: 3557218 - RNA, 20 nt, Human
acaggcauuuccuggguggc

SEQ ID NO: 3557219 - RNA, 19 nt, Human
acaggccauugugaaccaa

SEQ ID NO: 3557220 - RNA, 22 nt, Human
acaggcccaagagaugaagagu

SEQ ID NO: 3557221 - RNA, 11 nt, Human
acaggcccagc

SEQ ID NO: 3557222 - RNA, 18 nt, Human
acaggcccagcauugcug

SEQ ID NO: 3557223 - RNA, 23 nt, Human
acaggcccagcauugcugguucu

SEQ ID NO: 3557224 - RNA, 12 nt, Human
acaggcccccuu

SEQ ID NO: 3557225 - RNA, 18 nt, Human
acaggcccggcuccaggc

SEQ ID NO: 3557226 - RNA, 21 nt, Human
acaggcccggcuccaggcucc

SEQ ID NO: 3557227 - RNA, 22 nt, Human
acaggcccucccuguuccccag

SEQ ID NO: 3557228 - RNA, 19 nt, Human
acaggcccugcuccugcag

SEQ ID NO: 3557229 - RNA, 20 nt, Human
acaggcccugcuccugcagc

SEQ ID NO: 3557230 - RNA, 13 nt, Human
acaggcccuuccu

SEQ ID NO: 3557231 - RNA, 19 nt, Human
acaggcccuuuccucaggc

SEQ ID NO: 3557232 - RNA, 16 nt, Human
acaggccgcccugcgg

SEQ ID NO: 3557233 - RNA, 14 nt, Human
acaggccucaccuc

SEQ ID NO: 3557234 - RNA, 15 nt, Human
acaggccucaccucu

SEQ ID NO: 3557235 - RNA, 20 nt, Human
acaggccucaccucuaccca

SEQ ID NO: 3557236 - RNA, 21 nt, Human
acaggccucaccucuacccaa

SEQ ID NO: 3557237 - RNA, 16 nt, Human
acaggccucccuguuu

SEQ ID NO: 3557238 - RNA, 15 nt, Human
acaggccugagauuu

SEQ ID NO: 3557239 - RNA, 13 nt, Human
acaggcgagagag

SEQ ID NO: 3557240 - RNA, 18 nt, Human
acuaagccuaccugcucu

SEQ ID NO: 3557241 - RNA, 19 nt, Human
acuaagccuaccugcucuc

SEQ ID NO: 3557242 - RNA, 20 nt, Human
acuaagcuuugccagcugcu

SEQ ID NO: 3557243 - RNA, 22 nt, Human
acuaaggggcccggccagccau

SEQ ID NO: 3557244 - RNA, 18 nt, Human
acuaagucucuuuuuuac

SEQ ID NO: 3557245 - RNA, 17 nt, Human
acuaaguuauaguauau

SEQ ID NO: 3557246 - RNA, 22 nt, Human
acuaauaaaagcauaaaugcaa

SEQ ID NO: 3557247 - RNA, 13 nt, Human
acuaauaaaauau

SEQ ID NO: 3557248 - RNA, 22 nt, Human
acuaauaaaauauuuucugugu

SEQ ID NO: 3557249 - RNA, 23 nt, Human
acuaauaaaauauuuucugugug

SEQ ID NO: 3557250 - RNA, 17 nt, Human
acuaauacagcugagcu

SEQ ID NO: 3557251 - RNA, 16 nt, Human
acuaauagaaaaguau

SEQ ID NO: 3557252 - RNA, 16 nt, Human
acuaauagaauaaagg

SEQ ID NO: 3557253 - RNA, 18 nt, Human
acuaauauauuuaaaaau

SEQ ID NO: 3557254 - RNA, 19 nt, Human
acuaaucgaacuaugaacu

SEQ ID NO: 3557255 - RNA, 22 nt, Human
acuaaucuauuggguucauuau

SEQ ID NO: 3557256 - RNA, 19 nt, Human
acuaaucugggaagggaag

SEQ ID NO: 3557257 - RNA, 14 nt, Human
acuaaucuuucugc

SEQ ID NO: 3557258 - RNA, 24 nt, Human
acuaaugccuuacucuucuugaaa

SEQ ID NO: 3557259 - RNA, 15 nt, Human
acuaauguaaaauga

SEQ ID NO: 3557260 - RNA, 21 nt, Human
acuaauuauacuacuuuguua

SEQ ID NO: 3557261 - RNA, 23 nt, Human
acuaauuccacaccuuuuauuga

SEQ ID NO: 3557262 - RNA, 14 nt, Human
acuaauucuugcau

SEQ ID NO: 3557263 - RNA, 22 nt, Human
acuaauucuugcauauuuugua

SEQ ID NO: 3557264 - RNA, 20 nt, Human
acuaauuggccucuuuaaga

SEQ ID NO: 3557265 - RNA, 15 nt, Human
acuaauuguauaaca

SEQ ID NO: 3557266 - RNA, 16 nt, Human
acuaauuguauaacag

SEQ ID NO: 3557267 - RNA, 18 nt, Human
acuaauuguauaacaggu

SEQ ID NO: 3557268 - RNA, 20 nt, Human
acuaauuguauaacagguua

SEQ ID NO: 3557269 - RNA, 14 nt, Human
acuaauuucaaaau

SEQ ID NO: 3557270 - RNA, 12 nt, Human
acuaauuucuuc

SEQ ID NO: 3557271 - RNA, 15 nt, Human
acuaauuuuacaugu

SEQ ID NO: 3557272 - RNA, 15 nt, Human
acuaauuuuacuucu

SEQ ID NO: 3557273 - RNA, 23 nt, Human
acuaauuuugcaugcguauuuau

SEQ ID NO: 3557274 - RNA, 15 nt, Human
acuaauuuuuauuuu

SEQ ID NO: 3557275 - RNA, 16 nt, Human
acuacaaaauuugaaa

SEQ ID NO: 3557276 - RNA, 18 nt, Human
acuacaaacaaaauuucu

SEQ ID NO: 3557277 - RNA, 20 nt, Human
acuacaaacaaaauuucuau

SEQ ID NO: 3557278 - RNA, 19 nt, Human
acuacaaagguuuaaauga

SEQ ID NO: 3557279 - RNA, 19 nt, Human
acuacaaaucaaguauuug

SEQ ID NO: 3557280 - RNA, 19 nt, Human
acuacaaccaagcucucug

SEQ ID NO: 3557281 - RNA, 13 nt, Human
acuacaauaugua

SEQ ID NO: 3557282 - RNA, 21 nt, Human
acuacacauauguauuccuga

SEQ ID NO: 3557283 - RNA, 23 nt, Human
acuacacaucccuaaugugugcc

SEQ ID NO: 3557284 - RNA, 16 nt, Human
acuacacauuuuuaaa

SEQ ID NO: 3557285 - RNA, 20 nt, Human
acuacacauuuuuaaauugu

SEQ ID NO: 3557286 - RNA, 23 nt, Human
acuacaccacacacaacagccaa

SEQ ID NO: 3557287 - RNA, 21 nt, Human
acuacaccuugccuugcuguu

SEQ ID NO: 3557288 - RNA, 20 nt, Human
acuacacuccagccugagca

SEQ ID NO: 3557289 - RNA, 16 nt, Human
acuacacugaggagag

SEQ ID NO: 3557290 - RNA, 14 nt, Human
acuacagaaaugag

SEQ ID NO: 3557291 - RNA, 23 nt, Human
acuacagaaaugaggaggaugcu

SEQ ID NO: 3557292 - RNA, 17 nt, Human
acuacagaccugcuuuu

SEQ ID NO: 3557293 - RNA, 19 nt, Human
acuacagaccugcuuuuug

SEQ ID NO: 3557294 - RNA, 17 nt, Human
acuacagcuaugaagaa

SEQ ID NO: 3557295 - RNA, 18 nt, Human
acuacagcuaugaagaaa

SEQ ID NO: 3557296 - RNA, 19 nt, Human
acuacagcucuuaaaugua

SEQ ID NO: 3557297 - RNA, 20 nt, Human
acuacaggcacacaccacca

SEQ ID NO: 3557298 - RNA, 15 nt, Human
acuacagucaggaaa

SEQ ID NO: 3557299 - RNA, 15 nt, Human
acuacaguccuccca

SEQ ID NO: 3557300 - RNA, 14 nt, Human
acuacaguuuguua

SEQ ID NO: 3557301 - RNA, 23 nt, Human
acuacauaaacugacuuuauccu

SEQ ID NO: 3557302 - RNA, 18 nt, Human
acuacaucuuuaaacagu

SEQ ID NO: 3557303 - RNA, 20 nt, Human
acuacaugagaacaaacaga

SEQ ID NO: 3557304 - RNA, 15 nt, Human
acuacaugugguuua

SEQ ID NO: 3557305 - RNA, 11 nt, Human
acuacauucug

SEQ ID NO: 3557306 - RNA, 14 nt, Human
acuacauucuguua

SEQ ID NO: 3557307 - RNA, 11 nt, Human
acuacauuuau

SEQ ID NO: 3557308 - RNA, 12 nt, Human
acuacauuuuaa

SEQ ID NO: 3557309 - RNA, 14 nt, Human
acuacauuuuaaca

SEQ ID NO: 3557310 - RNA, 16 nt, Human
acuacauuuuaacaug

SEQ ID NO: 3557311 - RNA, 23 nt, Human
acuacccacguucucacacccac

SEQ ID NO: 3557312 - RNA, 19 nt, Human
acuacccagguuaagaaaa

SEQ ID NO: 3557313 - RNA, 21 nt, Human
acuaccccuugauuuuccauc

SEQ ID NO: 3557314 - RNA, 16 nt, Human
acuaccgaaugugucu

SEQ ID NO: 3557315 - RNA, 17 nt, Human
acuaccuccucagggau

SEQ ID NO: 3557316 - RNA, 12 nt, Human
acuaccuggcug

SEQ ID NO: 3557317 - RNA, 18 nt, Human
acuaccuguauuuaaaaa

SEQ ID NO: 3557318 - RNA, 19 nt, Human
acuaccuuuggcuuaauuc

SEQ ID NO: 3557319 - RNA, 14 nt, Human
acuacuagauugac

SEQ ID NO: 3557320 - RNA, 21 nt, Human
acuacuaguuuuuacuuuuau

SEQ ID NO: 3557321 - RNA, 15 nt, Human
acuacucagggaaug

SEQ ID NO: 3557322 - RNA, 17 nt, Human
acuacucccccaggugg

SEQ ID NO: 3557323 - RNA, 20 nt, Human
acuacuccggagacaggguu

SEQ ID NO: 3557324 - RNA, 19 nt, Human
acuacugaccagacaagcu

SEQ ID NO: 3557325 - RNA, 15 nt, Human
acuacugcaccauuu

SEQ ID NO: 3557326 - RNA, 12 nt, Human
acuacugcagca

SEQ ID NO: 3557327 - RNA, 18 nt, Human
acuacugggcaaagagug

SEQ ID NO: 3557328 - RNA, 12 nt, Human
acuacugggugu

SEQ ID NO: 3557329 - RNA, 14 nt, Human
acuacuggguguca

SEQ ID NO: 3557330 - RNA, 16 nt, Human
acuacuguguuaugca

SEQ ID NO: 3557331 - RNA, 13 nt, Human
acuacuguguucc

SEQ ID NO: 3557332 - RNA, 15 nt, Human
acuacuuaccauuug

SEQ ID NO: 3557333 - RNA, 21 nt, Human
acuacuuugccuucuuuugua

SEQ ID NO: 3557334 - RNA, 19 nt, Human
acuacuuuguuaggauuuu

SEQ ID NO: 3557335 - RNA, 14 nt, Human
acuagaaccuggag

SEQ ID NO: 3557336 - RNA, 15 nt, Human
acuagaacucuccau

SEQ ID NO: 3557337 - RNA, 16 nt, Human
acuagaacugaauuuu

SEQ ID NO: 3557338 - RNA, 17 nt, Human
acuagaacugaauuuug

SEQ ID NO: 3557339 - RNA, 18 nt, Human
acuagaacugaauuuugu

SEQ ID NO: 3557340 - RNA, 19 nt, Human
acuagaacugaauuuuguc

SEQ ID NO: 3557341 - RNA, 13 nt, Human
acuagaagaugaa

SEQ ID NO: 3557342 - RNA, 14 nt, Human
acuagaagggccag

SEQ ID NO: 3557343 - RNA, 18 nt, Human
acuagaauucuagugcug

SEQ ID NO: 3557344 - RNA, 13 nt, Human
acuagaauucugu

SEQ ID NO: 3557345 - RNA, 22 nt, Human
acuagaauuucauuuauuuugu

SEQ ID NO: 3557346 - RNA, 12 nt, Human
acuagacaagcc

SEQ ID NO: 3557347 - RNA, 13 nt, Human
acuagacacacaa

SEQ ID NO: 3557348 - RNA, 17 nt, Human
acuagacaccaaaguuc

SEQ ID NO: 3557349 - RNA, 15 nt, Human
acuagacauucuguc

SEQ ID NO: 3557350 - RNA, 20 nt, Human
acuagacauucugucgccuu

SEQ ID NO: 3557351 - RNA, 16 nt, Human
acuagacguucauuug

SEQ ID NO: 3557352 - RNA, 19 nt, Human
acuagacucuucacuguua

SEQ ID NO: 3557353 - RNA, 22 nt, Human
acuagacugguggcaggggcuu

SEQ ID NO: 3557354 - RNA, 12 nt, Human
acuagagaaugc

SEQ ID NO: 3557355 - RNA, 16 nt, Human
acuagagaaugcacag

SEQ ID NO: 3557356 - RNA, 19 nt, Human
acuagagauauuuuguaaa

SEQ ID NO: 3557357 - RNA, 14 nt, Human
acaguaagcugcuc

SEQ ID NO: 3557358 - RNA, 16 nt, Human
acaguaaguuccuacu

SEQ ID NO: 3557359 - RNA, 17 nt, Human
acaguaauuguguuuac

SEQ ID NO: 3557360 - RNA, 18 nt, Human
acaguaauuguguuuaca

SEQ ID NO: 3557361 - RNA, 21 nt, Human
acaguaauuguguuuacauuu

SEQ ID NO: 3557362 - RNA, 13 nt, Human
acaguacaggcag

SEQ ID NO: 3557363 - RNA, 16 nt, Human
acaguacaggcagcac

SEQ ID NO: 3557364 - RNA, 15 nt, Human
acaguaccaucugaa

SEQ ID NO: 3557365 - RNA, 14 nt, Human
acaguacuuugaau

SEQ ID NO: 3557366 - RNA, 18 nt, Human
acaguagaacugucugug

SEQ ID NO: 3557367 - RNA, 16 nt, Human
acaguagagccagcuu

SEQ ID NO: 3557368 - RNA, 18 nt, Human
acaguaggugacacuaua

SEQ ID NO: 3557369 - RNA, 17 nt, Human
acaguagugagaagaau

SEQ ID NO: 3557370 - RNA, 23 nt, Human
acaguaguuagaauuauaucacu

SEQ ID NO: 3557371 - RNA, 16 nt, Human
acaguauaaaaauaga

SEQ ID NO: 3557372 - RNA, 21 nt, Human
acaguauauuuuauuucaaug

SEQ ID NO: 3557373 - RNA, 23 nt, Human
acaguauauuuuauuucaaugua

SEQ ID NO: 3557374 - RNA, 21 nt, Human
acaguaucacugucuuuccua

SEQ ID NO: 3557375 - RNA, 23 nt, Human
acaguaucacugucuuuccuaga

SEQ ID NO: 3557376 - RNA, 23 nt, Human
acaguaugagucaaugugcagug

SEQ ID NO: 3557377 - RNA, 23 nt, Human
acaguauggggguuguaaauugg

SEQ ID NO: 3557378 - RNA, 22 nt, Human
acaguaugguaacuuugcaaau

SEQ ID NO: 3557379 - RNA, 17 nt, Human
acaguauuacuucugcu

SEQ ID NO: 3557380 - RNA, 20 nt, Human
acaguauuauacgcuggcaa

SEQ ID NO: 3557381 - RNA, 22 nt, Human
acaguauugcucacccagugcc

SEQ ID NO: 3557382 - RNA, 16 nt, Human
acaguauuuauuuugu

SEQ ID NO: 3557383 - RNA, 12 nt, Human
acaguauuucca

SEQ ID NO: 3557384 - RNA, 13 nt, Human
acuccucccuccg

SEQ ID NO: 3557385 - RNA, 13 nt, Human
acuccuccuagcc

SEQ ID NO: 3557386 - RNA, 16 nt, Human
acuccuccuagccacc

SEQ ID NO: 3557387 - RNA, 15 nt, Human
acuccuccucuuucu

SEQ ID NO: 3557388 - RNA, 18 nt, Human
acuccucgguacucccau

SEQ ID NO: 3557389 - RNA, 17 nt, Human
acuccucugcagugccu

SEQ ID NO: 3557390 - RNA, 20 nt, Human
acuccucugcagugccuugg

SEQ ID NO: 3557391 - RNA, 23 nt, Human
acuccucugcgucuauccugugu

SEQ ID NO: 3557392 - RNA, 21 nt, Human
acuccucugcugaccugcuga

SEQ ID NO: 3557393 - RNA, 16 nt, Human
acuccugaaaaaaaac

SEQ ID NO: 3557394 - RNA, 15 nt, Human
acuccugacagucuu

SEQ ID NO: 3557395 - RNA, 14 nt, Human
acuccugaccucag

SEQ ID NO: 3557396 - RNA, 17 nt, Human
acuccugaccucaggca

SEQ ID NO: 3557397 - RNA, 23 nt, Human
acuccugacgucugaagcuugac

SEQ ID NO: 3557398 - RNA, 11 nt, Human
acuccugacuc

SEQ ID NO: 3557399 - RNA, 23 nt, Human
acuccugagaccccuggccuccg

SEQ ID NO: 3557400 - RNA, 21 nt, Human
acuccugaggacagcuguccu

SEQ ID NO: 3557401 - RNA, 21 nt, Human
acuccugccccuguucucuuc

SEQ ID NO: 3557402 - RNA, 22 nt, Human
acuccugcccuguuguguauag

SEQ ID NO: 3557403 - RNA, 13 nt, Human
acaugacacugac

SEQ ID NO: 3557404 - RNA, 21 nt, Human
acaugacccuaaaucuugacu

SEQ ID NO: 3557405 - RNA, 19 nt, Human
acaugacgacaaagcugcu

SEQ ID NO: 3557406 - RNA, 15 nt, Human
acaugacucuuuauu

SEQ ID NO: 3557407 - RNA, 23 nt, Human
acaugacucuuuauugucuguaa

SEQ ID NO: 3557408 - RNA, 15 nt, Human
acaugagaacaaaca

SEQ ID NO: 3557409 - RNA, 23 nt, Human
acaugagauguguggacuguggc

SEQ ID NO: 3557410 - RNA, 19 nt, Human
acaugagcaucaggccagg

SEQ ID NO: 3557411 - RNA, 18 nt, Human
acaugaggacucuauucu

SEQ ID NO: 3557412 - RNA, 13 nt, Human
acaugaggccacu

SEQ ID NO: 3557413 - RNA, 16 nt, Human
acaugaggggacauuu

SEQ ID NO: 3557414 - RNA, 16 nt, Human
acaugagguacugaga

SEQ ID NO: 3557415 - RNA, 19 nt, Human
acaugaucuucuuuauaau

SEQ ID NO: 3557416 - RNA, 18 nt, Human
acaugaugcuuuuacuga

SEQ ID NO: 3557417 - RNA, 23 nt, Human
acaugaugcuuuuacugaacuuu

SEQ ID NO: 3557418 - RNA, 22 nt, Human
acaugauguuauguaccauaug

SEQ ID NO: 3557419 - RNA, 15 nt, Human
acaugauuucacaaa

SEQ ID NO: 3557420 - RNA, 18 nt, Human
acaugauuucacaaauau

SEQ ID NO: 3557421 - RNA, 20 nt, Human
acaugauuucacaaauauua

SEQ ID NO: 3557422 - RNA, 13 nt, Human
acaugauuuccuu

SEQ ID NO: 3557423 - RNA, 17 nt, Human
acaugauuuccuugaau

SEQ ID NO: 3557424 - RNA, 21 nt, Human
acaugcaaaaagaaaugacua

SEQ ID NO: 3557425 - RNA, 13 nt, Human
acaugcaauaaaa

SEQ ID NO: 3557426 - RNA, 14 nt, Human
acaugcaauaaaau

SEQ ID NO: 3557427 - RNA, 11 nt, Human
acaugcacaca

SEQ ID NO: 3557428 - RNA, 20 nt, Human
acaugcacagcuaacaugga

SEQ ID NO: 3557429 - RNA, 16 nt, Human
acaugcacuaugagga

SEQ ID NO: 3557430 - RNA, 13 nt, Human
acaugcacugacc

SEQ ID NO: 3557431 - RNA, 14 nt, Human
acaugcacugaccc

SEQ ID NO: 3557432 - RNA, 19 nt, Human
acaugcacugacccuucca

SEQ ID NO: 3557433 - RNA, 23 nt, Human
acaugcagccacuuaggacaaau

SEQ ID NO: 3557434 - RNA, 15 nt, Human
acaugcagcccaugc

SEQ ID NO: 3557435 - RNA, 17 nt, Human
acaugcagcccaugccc

SEQ ID NO: 3557436 - RNA, 18 nt, Human
acaugcagcccaugccca

SEQ ID NO: 3557437 - RNA, 23 nt, Human
acaugcagcugcacccucccucc

SEQ ID NO: 3557438 - RNA, 10 nt, Human
acaugcaguu

SEQ ID NO: 3557439 - RNA, 15 nt, Human
acaugcaguuugaaa

SEQ ID NO: 3557440 - RNA, 16 nt, Human
acaugcaguuugaaau

SEQ ID NO: 3557441 - RNA, 23 nt, Human
acaugcaguuugaaauucugaau

SEQ ID NO: 3557442 - RNA, 13 nt, Human
acaugcauacaca

SEQ ID NO: 3557443 - RNA, 15 nt, Human
acaugcauacacaca

SEQ ID NO: 3557444 - RNA, 16 nt, Human
acaugcauacauacac

SEQ ID NO: 3557445 - RNA, 17 nt, Human
acaugcauacuucaaaa

SEQ ID NO: 3557446 - RNA, 19 nt, Human
acaugcauacuucaaaagu

SEQ ID NO: 3557447 - RNA, 18 nt, Human
acaugcauauaaugaaua

SEQ ID NO: 3557448 - RNA, 19 nt, Human
acaugccacaucaaaccuu

SEQ ID NO: 3557449 - RNA, 20 nt, Human
acaugccagccacugugaua

SEQ ID NO: 3557450 - RNA, 17 nt, Human
acaugccauuuguacug

SEQ ID NO: 3557451 - RNA, 12 nt, Human
acaugcccccug

SEQ ID NO: 3557452 - RNA, 23 nt, Human
acaugcccucccuucucccugga

SEQ ID NO: 3557453 - RNA, 14 nt, Human
acaugccuaccaau

SEQ ID NO: 3557454 - RNA, 17 nt, Human
acaugcggagaacaaau

SEQ ID NO: 3557455 - RNA, 16 nt, Human
acaugcgggcugggca

SEQ ID NO: 3557456 - RNA, 19 nt, Human
acaugcgggcugggcagcu

SEQ ID NO: 3557457 - RNA, 22 nt, Human
acaugcgggcugggcagcuguu

SEQ ID NO: 3557458 - RNA, 17 nt, Human
acaugcgguagccagca

SEQ ID NO: 3557459 - RNA, 18 nt, Human
acaugcgguagccagcac

SEQ ID NO: 3557460 - RNA, 20 nt, Human
acaugcgguagccagcacac

SEQ ID NO: 3557461 - RNA, 17 nt, Human
acaugcuaagagaagua

SEQ ID NO: 3557462 - RNA, 18 nt, Human
acaugcuaagagaaguag

SEQ ID NO: 3557463 - RNA, 14 nt, Human
acaugcugaacauc

SEQ ID NO: 3557464 - RNA, 14 nt, Human
acaugcugagucuc

SEQ ID NO: 3557465 - RNA, 22 nt, Human
acaugcuggacaggucugggag

SEQ ID NO: 3557466 - RNA, 16 nt, Human
acaugcuggccagccu

SEQ ID NO: 3557467 - RNA, 17 nt, Human
acaugcuguacauacuu

SEQ ID NO: 3557468 - RNA, 20 nt, Human
acaugcuguacauacuuuuu

SEQ ID NO: 3557469 - RNA, 21 nt, Human
acaugcuguacauacuuuuug

SEQ ID NO: 3557470 - RNA, 20 nt, Human
acaugcuguguaagcugugu

SEQ ID NO: 3557471 - RNA, 18 nt, Human
acaugcuuauuccaugac

SEQ ID NO: 3557472 - RNA, 23 nt, Human
acaugcuuauuccaugacugcuu

SEQ ID NO: 3557473 - RNA, 13 nt, Human
acaugcuucccuu

SEQ ID NO: 3557474 - RNA, 14 nt, Human
acauggaaguacua

SEQ ID NO: 3557475 - RNA, 13 nt, Human
acauggacccgga

SEQ ID NO: 3557476 - RNA, 16 nt, Human
acauggacccggagcu

SEQ ID NO: 3557477 - RNA, 22 nt, Human
acauggacccggagcuaacacu

SEQ ID NO: 3557478 - RNA, 15 nt, Human
acauggacuuguaua

SEQ ID NO: 3557479 - RNA, 18 nt, Human
acauggacuuguauauuu

SEQ ID NO: 3557480 - RNA, 16 nt, Human
acauggagacuccugc

SEQ ID NO: 3557481 - RNA, 16 nt, Human
acauggagguucuaag

SEQ ID NO: 3557482 - RNA, 15 nt, Human
acauggaguauaugu

SEQ ID NO: 3557483 - RNA, 19 nt, Human
acauggaguauaugucaag

SEQ ID NO: 3557484 - RNA, 14 nt, Human
acauggauucaguu

SEQ ID NO: 3557485 - RNA, 13 nt, Human
acauggcacagag

SEQ ID NO: 3557486 - RNA, 14 nt, Human
acauggccagugug

SEQ ID NO: 3557487 - RNA, 21 nt, Human
acauggccccucccccugcca

SEQ ID NO: 3557488 - RNA, 17 nt, Human
acauggccuaugcacau

SEQ ID NO: 3557489 - RNA, 19 nt, Human
acauggcucuggacucuaa

SEQ ID NO: 3557490 - RNA, 20 nt, Human
acauggcucuggacucuaaa

SEQ ID NO: 3557491 - RNA, 22 nt, Human
acauggcuggagcuagaauuug

SEQ ID NO: 3557492 - RNA, 22 nt, Human
acaugggaaaggaggcaugccu

SEQ ID NO: 3557493 - RNA, 11 nt, Human
acaugggacau

SEQ ID NO: 3557494 - RNA, 14 nt, Human
acaugggacauuug

SEQ ID NO: 3557495 - RNA, 21 nt, Human
acaugggacauuugcucaugg

SEQ ID NO: 3557496 - RNA, 17 nt, Human
acaugggacuaugcuuu

SEQ ID NO: 3557497 - RNA, 18 nt, Human
acaugggacuaugcuuuu

SEQ ID NO: 3557498 - RNA, 20 nt, Human
acaugggagcaguccaugca

SEQ ID NO: 3557499 - RNA, 15 nt, Human
acauggggaggagga

SEQ ID NO: 3557500 - RNA, 20 nt, Human
acauggggaguguuucaugg

SEQ ID NO: 3557501 - RNA, 20 nt, Human
acaugggguuggcugggccc

SEQ ID NO: 3557502 - RNA, 22 nt, Human
acaugggguuuucaauuuugca

SEQ ID NO: 3557503 - RNA, 21 nt, Human
acauggugaaaccucaucucu

SEQ ID NO: 3557504 - RNA, 11 nt, Human
acauggugaug

SEQ ID NO: 3557505 - RNA, 20 nt, Human
acaugguuaccucugcauaa

SEQ ID NO: 3557506 - RNA, 17 nt, Human
acaugguuugacucccg

SEQ ID NO: 3557507 - RNA, 23 nt, Human
acauguaauaaaaaguauauguu

SEQ ID NO: 3557508 - RNA, 22 nt, Human
acauguaauuaaguacuaugua

SEQ ID NO: 3557509 - RNA, 23 nt, Human
acauguaauuaaguacuauguau

SEQ ID NO: 3557510 - RNA, 15 nt, Human
acauguaauuugugu

SEQ ID NO: 3557511 - RNA, 23 nt, Human
acauguagguguuuguucaucug

SEQ ID NO: 3557512 - RNA, 14 nt, Human
acauguauaauauu

SEQ ID NO: 3557513 - RNA, 19 nt, Human
acauguauaauauuuuuaa

SEQ ID NO: 3557514 - RNA, 20 nt, Human
acauguauaauauuuuuaau

SEQ ID NO: 3557515 - RNA, 21 nt, Human
acauguaucuaugcauuuucu

SEQ ID NO: 3557516 - RNA, 11 nt, Human
acauguauguu

SEQ ID NO: 3557517 - RNA, 14 nt, Human
acauguauguuuug

SEQ ID NO: 3557518 - RNA, 14 nt, Human
acauguauuaaauu

SEQ ID NO: 3557519 - RNA, 19 nt, Human
acauguauuaaauuacauu

SEQ ID NO: 3557520 - RNA, 18 nt, Human
acauguauugcacauugu

SEQ ID NO: 3557521 - RNA, 18 nt, Human
acauguauuuguuugcau

SEQ ID NO: 3557522 - RNA, 19 nt, Human
acauguauuuguuugcaua

SEQ ID NO: 3557523 - RNA, 15 nt, Human
acauguccaagaagc

SEQ ID NO: 3557524 - RNA, 19 nt, Human
acauguccaagaagcccag

SEQ ID NO: 3557525 - RNA, 21 nt, Human
acauguccagugggaggugag

SEQ ID NO: 3557526 - RNA, 15 nt, Human
acaugucccuacacc

SEQ ID NO: 3557527 - RNA, 16 nt, Human
acauguccuugugugu

SEQ ID NO: 3557528 - RNA, 17 nt, Human
acugauaguuacuguug

SEQ ID NO: 3557529 - RNA, 18 nt, Human
acugauaguuacuguugu

SEQ ID NO: 3557530 - RNA, 20 nt, Human
acugauaguuacuguuguga

SEQ ID NO: 3557531 - RNA, 16 nt, Human
acugauauauuuuaca

SEQ ID NO: 3557532 - RNA, 19 nt, Human
acugauaugggucuugaua

SEQ ID NO: 3557533 - RNA, 13 nt, Human
acugauauucaga

SEQ ID NO: 3557534 - RNA, 15 nt, Human
acugaucacaaaaac

SEQ ID NO: 3557535 - RNA, 18 nt, Human
acugaucaggaccuccaa

SEQ ID NO: 3557536 - RNA, 15 nt, Human
acugaucaugcauug

SEQ ID NO: 3557537 - RNA, 16 nt, Human
acugaucaugcauugu

SEQ ID NO: 3557538 - RNA, 21 nt, Human
acugaucauguuuaugagaaa

SEQ ID NO: 3557539 - RNA, 23 nt, Human
acugaucauguuuaugagaaacu

SEQ ID NO: 3557540 - RNA, 16 nt, Human
acugauccagcccuga

SEQ ID NO: 3557541 - RNA, 14 nt, Human
acugaucucguuuu

SEQ ID NO: 3557542 - RNA, 12 nt, Human
acugaugcugcc

SEQ ID NO: 3557543 - RNA, 18 nt, Human
acugauggaaacaaagug

SEQ ID NO: 3557544 - RNA, 12 nt, Human
acugauggaauu

SEQ ID NO: 3557545 - RNA, 22 nt, Human
acugauggaauuuuuuuguacg

SEQ ID NO: 3557546 - RNA, 21 nt, Human
acugauguuacaucacagugu

SEQ ID NO: 3557547 - RNA, 19 nt, Human
acugauguuaggcugggcc

SEQ ID NO: 3557548 - RNA, 21 nt, Human
acugauguuaggcugggccca

SEQ ID NO: 3557549 - RNA, 17 nt, Human
acugauguuguguuuuu

SEQ ID NO: 3557550 - RNA, 18 nt, Human
acugauguuguguuuuua

SEQ ID NO: 3557551 - RNA, 16 nt, Human
acugauguuugugcag

SEQ ID NO: 3557552 - RNA, 14 nt, Human
acugauuacugccu

SEQ ID NO: 3557553 - RNA, 22 nt, Human
acugauuaguaagucuugccua

SEQ ID NO: 3557554 - RNA, 20 nt, Human
acugauucauaauaaauauc

SEQ ID NO: 3557555 - RNA, 20 nt, Human
acugauucugggaugcuccu

SEQ ID NO: 3557556 - RNA, 12 nt, Human
acugauucuuca

SEQ ID NO: 3557557 - RNA, 15 nt, Human
acuccugcucugcuc

SEQ ID NO: 3557558 - RNA, 16 nt, Human
acuccugcucugcucg

SEQ ID NO: 3557559 - RNA, 13 nt, Human
acuccugcuuaau

SEQ ID NO: 3557560 - RNA, 13 nt, Human
acuccuggaagcu

SEQ ID NO: 3557561 - RNA, 16 nt, Human
acuccuggaagcugug

SEQ ID NO: 3557562 - RNA, 13 nt, Human
acuccuggccuca

SEQ ID NO: 3557563 - RNA, 15 nt, Human
acuccugggcucaag

SEQ ID NO: 3557564 - RNA, 17 nt, Human
acuccuggguugagcug

SEQ ID NO: 3557565 - RNA, 13 nt, Human
acuccuguacacu

SEQ ID NO: 3557566 - RNA, 15 nt, Human
acuccuguacacuga

SEQ ID NO: 3557567 - RNA, 15 nt, Human
acuccugucuucugc

SEQ ID NO: 3557568 - RNA, 16 nt, Human
acuccugucuucugcu

SEQ ID NO: 3557569 - RNA, 19 nt, Human
acuccugucuucugcuuug

SEQ ID NO: 3557570 - RNA, 19 nt, Human
acuccugugggagccucgc

SEQ ID NO: 3557571 - RNA, 15 nt, Human
acuccuuauuuggcg

SEQ ID NO: 3557572 - RNA, 20 nt, Human
acuccuucaacaauucuaaa

SEQ ID NO: 3557573 - RNA, 23 nt, Human
acuccuuccaguguccuuagaac

SEQ ID NO: 3557574 - RNA, 21 nt, Human
acuccuuccugccaccugcug

SEQ ID NO: 3557575 - RNA, 14 nt, Human
acuccuuccuggcc

SEQ ID NO: 3557576 - RNA, 16 nt, Human
acuccuuccuggccug

SEQ ID NO: 3557577 - RNA, 17 nt, Human
acuccuuccuggccuga

SEQ ID NO: 3557578 - RNA, 11 nt, Human
acuccuugcau

SEQ ID NO: 3557579 - RNA, 12 nt, Human
acuccuugcauc

SEQ ID NO: 3557580 - RNA, 15 nt, Human
acuccuugcaucaag

SEQ ID NO: 3557581 - RNA, 12 nt, Human
acuccuuggccu

SEQ ID NO: 3557582 - RNA, 14 nt, Human
acuccuuggccuag

SEQ ID NO: 3557583 - RNA, 18 nt, Human
acuccuuggccuagccca

SEQ ID NO: 3557584 - RNA, 20 nt, Human
acuccuugugguuuauguca

SEQ ID NO: 3557585 - RNA, 21 nt, Human
acuccuuuugguguguuggac

SEQ ID NO: 3557586 - RNA, 16 nt, Human
acucgagaccuuuuca

SEQ ID NO: 3557587 - RNA, 18 nt, Human
acucgagucacacucaag

SEQ ID NO: 3557588 - RNA, 14 nt, Human
acucgagucugagg

SEQ ID NO: 3557589 - RNA, 17 nt, Human
acucgcccgcccacugu

SEQ ID NO: 3557590 - RNA, 22 nt, Human
acucgcccgcccacuguccugg

SEQ ID NO: 3557591 - RNA, 12 nt, Human
acucgcuucccc

SEQ ID NO: 3557592 - RNA, 12 nt, Human
acucgcuuguaa

SEQ ID NO: 3557593 - RNA, 15 nt, Human
acucgcuuguaaaua

SEQ ID NO: 3557594 - RNA, 17 nt, Human
acucggaaucuauuuuc

SEQ ID NO: 3557595 - RNA, 16 nt, Human
acucgggaggcugagg

SEQ ID NO: 3557596 - RNA, 20 nt, Human
acucgggaggcugaggcaca

SEQ ID NO: 3557597 - RNA, 14 nt, Human
acucggugucccca

SEQ ID NO: 3557598 - RNA, 18 nt, Human
acucgguguccccaccau

SEQ ID NO: 3557599 - RNA, 15 nt, Human
acucgucucccccaa

SEQ ID NO: 3557600 - RNA, 15 nt, Human
acucguggcugucaa

SEQ ID NO: 3557601 - RNA, 15 nt, Human
acucguguguuucua

SEQ ID NO: 3557602 - RNA, 14 nt, Human
acucguuaauuugu

SEQ ID NO: 3557603 - RNA, 14 nt, Human
acucguuuuuuaca

SEQ ID NO: 3557604 - RNA, 15 nt, Human
acucuaaaagauccu

SEQ ID NO: 3557605 - RNA, 21 nt, Human
acucuaaaagauccuuuuuaa

SEQ ID NO: 3557606 - RNA, 19 nt, Human
acucuaaaagguucaggga

SEQ ID NO: 3557607 - RNA, 15 nt, Human
acucuaaaauuauaa

SEQ ID NO: 3557608 - RNA, 13 nt, Human
acucuaaagcaaa

SEQ ID NO: 3557609 - RNA, 17 nt, Human
acucuaaauucuuuauu

SEQ ID NO: 3557610 - RNA, 14 nt, Human
acucuaagaaagaa

SEQ ID NO: 3557611 - RNA, 19 nt, Human
acucuaagauguuauauuu

SEQ ID NO: 3557612 - RNA, 14 nt, Human
acucuaauagugcu

SEQ ID NO: 3557613 - RNA, 15 nt, Human
acucuaauucuaacc

SEQ ID NO: 3557614 - RNA, 16 nt, Human
acucuacacugugaac

SEQ ID NO: 3557615 - RNA, 14 nt, Human
acucuaccagacug

SEQ ID NO: 3557616 - RNA, 19 nt, Human
acucuaccagacuguguau

SEQ ID NO: 3557617 - RNA, 17 nt, Human
acucuaccagugcaggc

SEQ ID NO: 3557618 - RNA, 22 nt, Human
acucuaccagugcaggcuggcc

SEQ ID NO: 3557619 - RNA, 15 nt, Human
acucuacccucccac

SEQ ID NO: 3557620 - RNA, 18 nt, Human
acucuacccucuuagaaa

SEQ ID NO: 3557621 - RNA, 14 nt, Human
acucuacuguguaa

SEQ ID NO: 3557622 - RNA, 19 nt, Human
acucuagaguccaagguuu

SEQ ID NO: 3557623 - RNA, 20 nt, Human
acucuagaguccaagguuua

SEQ ID NO: 3557624 - RNA, 21 nt, Human
acucuagauaccuaaaacaua

SEQ ID NO: 3557625 - RNA, 14 nt, Human
acucuagauuuugu

SEQ ID NO: 3557626 - RNA, 20 nt, Human
acucuagcugggggugggcc

SEQ ID NO: 3557627 - RNA, 22 nt, Human
acucuaggauguauauuuuaua

SEQ ID NO: 3557628 - RNA, 15 nt, Human
acucuagggaaaaac

SEQ ID NO: 3557629 - RNA, 17 nt, Human
acucuaggugcccuugg

SEQ ID NO: 3557630 - RNA, 15 nt, Human
acucuauagacucua

SEQ ID NO: 3557631 - RNA, 22 nt, Human
acucuauauagcugaucaguuu

SEQ ID NO: 3557632 - RNA, 14 nt, Human
acucuaucaaguau

SEQ ID NO: 3557633 - RNA, 18 nt, Human
acucuaucugggccuggg

SEQ ID NO: 3557634 - RNA, 17 nt, Human
acucuaugccccaaaua

SEQ ID NO: 3557635 - RNA, 21 nt, Human
acucuaugccccaaauauagc

SEQ ID NO: 3557636 - RNA, 16 nt, Human
acucuauuuuuacauu

SEQ ID NO: 3557637 - RNA, 20 nt, Human
acucuauuuuuacauuuaaa

SEQ ID NO: 3557638 - RNA, 21 nt, Human
acucucacacugguucucaau

SEQ ID NO: 3557639 - RNA, 14 nt, Human
acucucacauguuu

SEQ ID NO: 3557640 - RNA, 14 nt, Human
acucucagaggccc

SEQ ID NO: 3557641 - RNA, 15 nt, Human
acucucagaggcccc

SEQ ID NO: 3557642 - RNA, 22 nt, Human
acucucagcccagaagaaaauu

SEQ ID NO: 3557643 - RNA, 22 nt, Human
acucucaggaucaagaaagugu

SEQ ID NO: 3557644 - RNA, 13 nt, Human
acucucagucucu

SEQ ID NO: 3557645 - RNA, 14 nt, Human
acucucagucucug

SEQ ID NO: 3557646 - RNA, 18 nt, Human
acucucagucucugagca

SEQ ID NO: 3557647 - RNA, 22 nt, Human
acucucagugcuucuuacuauu

SEQ ID NO: 3557648 - RNA, 16 nt, Human
acucucaucacuacag

SEQ ID NO: 3557649 - RNA, 17 nt, Human
acucucaucacuacagu

SEQ ID NO: 3557650 - RNA, 18 nt, Human
acucucaucacuacagua

SEQ ID NO: 3557651 - RNA, 17 nt, Human
acucucauuccccaggu

SEQ ID NO: 3557652 - RNA, 21 nt, Human
acucucauuccccagguggcu

SEQ ID NO: 3557653 - RNA, 19 nt, Human
acucuccaaccuggacaac

SEQ ID NO: 3557654 - RNA, 15 nt, Human
acucuccaggggucc

SEQ ID NO: 3557655 - RNA, 10 nt, Human
acucucccca

SEQ ID NO: 3557656 - RNA, 20 nt, Human
acucuccccacgagggcugg

SEQ ID NO: 3557657 - RNA, 10 nt, Human
acucuccccc

SEQ ID NO: 3557658 - RNA, 20 nt, Human
acucucccccacccccuccc

SEQ ID NO: 3557659 - RNA, 14 nt, Human
acucuccccucuua

SEQ ID NO: 3557660 - RNA, 23 nt, Human
acucuccuaggcauucuggaccu

SEQ ID NO: 3557661 - RNA, 16 nt, Human
acucuccuaugccuuu

SEQ ID NO: 3557662 - RNA, 20 nt, Human
acucuccucggcccccucca

SEQ ID NO: 3557663 - RNA, 13 nt, Human
acucuccucugcu

SEQ ID NO: 3557664 - RNA, 19 nt, Human
acucuccucugcugcuggc

SEQ ID NO: 3557665 - RNA, 17 nt, Human
acucuccuggaaauauu

SEQ ID NO: 3557666 - RNA, 18 nt, Human
acucuccuggaaauauua

SEQ ID NO: 3557667 - RNA, 15 nt, Human
acucuccuggacugc

SEQ ID NO: 3557668 - RNA, 13 nt, Human
acucuccugggcc

SEQ ID NO: 3557669 - RNA, 16 nt, Human
acucuccugggccccu

SEQ ID NO: 3557670 - RNA, 15 nt, Human
acucuccuugcaguu

SEQ ID NO: 3557671 - RNA, 18 nt, Human
acucucugaaccccuccc

SEQ ID NO: 3557672 - RNA, 21 nt, Human
acucucuuauugccucacuuc

SEQ ID NO: 3557673 - RNA, 15 nt, Human
acucucuucuucuca

SEQ ID NO: 3557674 - RNA, 10 nt, Human
acugccucug

SEQ ID NO: 3557675 - RNA, 11 nt, Human
acugccucugc

SEQ ID NO: 3557676 - RNA, 12 nt, Human
acugccucugcc

SEQ ID NO: 3557677 - RNA, 14 nt, Human
acugccugaauaaa

SEQ ID NO: 3557678 - RNA, 24 nt, Human
acugccugcagaggucugugcuga

SEQ ID NO: 3557679 - RNA, 13 nt, Human
acugccugcccac

SEQ ID NO: 3557680 - RNA, 23 nt, Human
acugccugcccacccguggagau

SEQ ID NO: 3557681 - RNA, 13 nt, Human
acugccugccuua

SEQ ID NO: 3557682 - RNA, 15 nt, Human
acugccuuaaaacuu

SEQ ID NO: 3557683 - RNA, 16 nt, Human
acugccuuaaaacuuu

SEQ ID NO: 3557684 - RNA, 22 nt, Human
acugccuucgcuucuugccucu

SEQ ID NO: 3557685 - RNA, 19 nt, Human
acugccuucucaacuccaa

SEQ ID NO: 3557686 - RNA, 18 nt, Human
acugccuuggcuucaggg

SEQ ID NO: 3557687 - RNA, 19 nt, Human
acugccuuuggcagaguuc

SEQ ID NO: 3557688 - RNA, 21 nt, Human
acugcgaagacccucuugccc

SEQ ID NO: 3557689 - RNA, 19 nt, Human
acugcgggaugguccuggg

SEQ ID NO: 3557690 - RNA, 13 nt, Human
acugcuaaauaaa

SEQ ID NO: 3557691 - RNA, 18 nt, Human
acugcuaagaauauuuga

SEQ ID NO: 3557692 - RNA, 19 nt, Human
acugcuaaguauuucccag

SEQ ID NO: 3557693 - RNA, 16 nt, Human
acugcuacagcaauuu

SEQ ID NO: 3557694 - RNA, 13 nt, Human
acugcuacuguaa

SEQ ID NO: 3557695 - RNA, 22 nt, Human
acugcuacuguaauuuuauaug

SEQ ID NO: 3557696 - RNA, 19 nt, Human
acugcuaggcgagugccag

SEQ ID NO: 3557697 - RNA, 20 nt, Human
acugcuaggcgagugccagg

SEQ ID NO: 3557698 - RNA, 21 nt, Human
acugcuaggcgagugccagga

SEQ ID NO: 3557699 - RNA, 23 nt, Human
acugcuaggcgagugccaggacu

SEQ ID NO: 3557700 - RNA, 19 nt, Human
acugcuagucuuaagaacu

SEQ ID NO: 3557701 - RNA, 16 nt, Human
acugcuaguguucugu

SEQ ID NO: 3557702 - RNA, 16 nt, Human
acugcucaagaagaca

SEQ ID NO: 3557703 - RNA, 19 nt, Human
acugcucaucauuccuuga

SEQ ID NO: 3557704 - RNA, 16 nt, Human
acugcucccaccuccu

SEQ ID NO: 3557705 - RNA, 18 nt, Human
acugcucccaccuccuga

SEQ ID NO: 3557706 - RNA, 19 nt, Human
acugcucccaccuccugac

SEQ ID NO: 3557707 - RNA, 21 nt, Human
acugcucccuaagccagccug

SEQ ID NO: 3557708 - RNA, 15 nt, Human
acugcucccugaagc

SEQ ID NO: 3557709 - RNA, 16 nt, Human
acugcucccugaagcc

SEQ ID NO: 3557710 - RNA, 19 nt, Human
acugcucccugaagccagc

SEQ ID NO: 3557711 - RNA, 22 nt, Human
acugcucccugaagccagccuu

SEQ ID NO: 3557712 - RNA, 13 nt, Human
acugcuccuccuc

SEQ ID NO: 3557713 - RNA, 15 nt, Human
acugcuccugagccc

SEQ ID NO: 3557714 - RNA, 16 nt, Human
acugcuccugagcccc

SEQ ID NO: 3557715 - RNA, 17 nt, Human
acugcuccugagccccc

SEQ ID NO: 3557716 - RNA, 17 nt, Human
acugcucuaagcacacg

SEQ ID NO: 3557717 - RNA, 19 nt, Human
acugcucuaagcacacgga

SEQ ID NO: 3557718 - RNA, 11 nt, Human
acugcucucac

SEQ ID NO: 3557719 - RNA, 23 nt, Human
acucugcugucuaaccugugacc

SEQ ID NO: 3557720 - RNA, 18 nt, Human
acucugcuucucugacuu

SEQ ID NO: 3557721 - RNA, 22 nt, Human
acucugcuucucugacuucugc

SEQ ID NO: 3557722 - RNA, 12 nt, Human
acucuggaaaag

SEQ ID NO: 3557723 - RNA, 17 nt, Human
acucuggacuuucucua

SEQ ID NO: 3557724 - RNA, 21 nt, Human
acucuggacuuucucuaauaa

SEQ ID NO: 3557725 - RNA, 22 nt, Human
acucuggacuuucucuaauaau

SEQ ID NO: 3557726 - RNA, 17 nt, Human
acucuggcaaagcuuuu

SEQ ID NO: 3557727 - RNA, 15 nt, Human
acucuggcagcaccg

SEQ ID NO: 3557728 - RNA, 20 nt, Human
acucuggcagcaccgccucu

SEQ ID NO: 3557729 - RNA, 14 nt, Human
acucuggcccuggc

SEQ ID NO: 3557730 - RNA, 16 nt, Human
acucuggcccuggccc

SEQ ID NO: 3557731 - RNA, 16 nt, Human
acucuggccucuguca

SEQ ID NO: 3557732 - RNA, 16 nt, Human
acucuggcuuggccua

SEQ ID NO: 3557733 - RNA, 19 nt, Human
acucugggaaauaagagag

SEQ ID NO: 3557734 - RNA, 11 nt, Human
acucugggaac

SEQ ID NO: 3557735 - RNA, 18 nt, Human
acucugggcuauggacac

SEQ ID NO: 3557736 - RNA, 20 nt, Human
acucugggcuauggacacag

SEQ ID NO: 3557737 - RNA, 22 nt, Human
acucugggcuauggacacaggg

SEQ ID NO: 3557738 - RNA, 14 nt, Human
acucugggcuccag

SEQ ID NO: 3557739 - RNA, 12 nt, Human
acucugggcugu

SEQ ID NO: 3557740 - RNA, 14 nt, Human
acucuggugccucc

SEQ ID NO: 3557741 - RNA, 15 nt, Human
acucuguaaaaacac

SEQ ID NO: 3557742 - RNA, 12 nt, Human
acucuguaauug

SEQ ID NO: 3557743 - RNA, 14 nt, Human
acucugucagaugg

SEQ ID NO: 3557744 - RNA, 20 nt, Human
acucuguccugaaggccuga

SEQ ID NO: 3557745 - RNA, 17 nt, Human
acucugucucaguccau

SEQ ID NO: 3557746 - RNA, 18 nt, Human
acucugucucaguccaug

SEQ ID NO: 3557747 - RNA, 17 nt, Human
acucugucuucaccuga

SEQ ID NO: 3557748 - RNA, 11 nt, Human
acucugugcca

SEQ ID NO: 3557749 - RNA, 20 nt, Human
acucugugccagagccuggg

SEQ ID NO: 3557750 - RNA, 23 nt, Human
acucugugccagagccuggggcu

SEQ ID NO: 3557751 - RNA, 15 nt, Human
acucugugcccaugg

SEQ ID NO: 3557752 - RNA, 16 nt, Human
acucugugcuggccag

SEQ ID NO: 3557753 - RNA, 21 nt, Human
acucugugucagguggggcag

SEQ ID NO: 3557754 - RNA, 16 nt, Human
acucuguuauuuagac

SEQ ID NO: 3557755 - RNA, 20 nt, Human
acucuguucauuccuccagg

SEQ ID NO: 3557756 - RNA, 12 nt, Human
acucuguuccug

SEQ ID NO: 3557757 - RNA, 14 nt, Human
acucuguuccuuca

SEQ ID NO: 3557758 - RNA, 22 nt, Human
acucuguuccuucacauccugu

SEQ ID NO: 3557759 - RNA, 18 nt, Human
acucuuaaaacccaagug

SEQ ID NO: 3557760 - RNA, 17 nt, Human
acucuuaaaugaucugc

SEQ ID NO: 3557761 - RNA, 15 nt, Human
acucuuaagaagacu

SEQ ID NO: 3557762 - RNA, 14 nt, Human
acucuuaagccauc

SEQ ID NO: 3557763 - RNA, 17 nt, Human
acucuuaaguuucucag

SEQ ID NO: 3557764 - RNA, 19 nt, Human
acucuuaaguuucucagcu

SEQ ID NO: 3557765 - RNA, 22 nt, Human
acucuuaccauauguuugguaa

SEQ ID NO: 3557766 - RNA, 17 nt, Human
acucuuaggaagagaaa

SEQ ID NO: 3557767 - RNA, 10 nt, Human
acucuuaggc

SEQ ID NO: 3557768 - RNA, 19 nt, Human
acucuuaggcacuuugggg

SEQ ID NO: 3557769 - RNA, 16 nt, Human
acucuuauaaauuucu

SEQ ID NO: 3557770 - RNA, 16 nt, Human
acucuuauaucuauau

SEQ ID NO: 3557771 - RNA, 19 nt, Human
acucuuauaucuauauuuu

SEQ ID NO: 3557772 - RNA, 22 nt, Human
acucuuauaucuauauuuuaca

SEQ ID NO: 3557773 - RNA, 22 nt, Human
acucuuaucucagucaugcaua

SEQ ID NO: 3557774 - RNA, 21 nt, Human
acucuuaugcuguacccaguu

SEQ ID NO: 3557775 - RNA, 19 nt, Human
acucuuauugcccacgcug

SEQ ID NO: 3557776 - RNA, 18 nt, Human
acucuucaaaaacuguuu

SEQ ID NO: 3557777 - RNA, 15 nt, Human
acucuucaaaugccu

SEQ ID NO: 3557778 - RNA, 19 nt, Human
acucuucaaggacuuucug

SEQ ID NO: 3557779 - RNA, 20 nt, Human
acucuucaaggucugcuuuu

SEQ ID NO: 3557780 - RNA, 15 nt, Human
acucuucagagaaau

SEQ ID NO: 3557781 - RNA, 21 nt, Human
acucuucaguuaagccuuugg

SEQ ID NO: 3557782 - RNA, 20 nt, Human
acucuuccuccaaggacaga

SEQ ID NO: 3557783 - RNA, 15 nt, Human
acucuuccugcaagg

SEQ ID NO: 3557784 - RNA, 16 nt, Human
acucuuccugcaagga

SEQ ID NO: 3557785 - RNA, 18 nt, Human
acucuucucauuacuugu

SEQ ID NO: 3557786 - RNA, 13 nt, Human
acucuucucucug

SEQ ID NO: 3557787 - RNA, 23 nt, Human
acucuucugagcaccuacuuaca

SEQ ID NO: 3557788 - RNA, 20 nt, Human
acucuucuuaacuuaaauuu

SEQ ID NO: 3557789 - RNA, 14 nt, Human
acucuugaaaaaug

SEQ ID NO: 3557790 - RNA, 14 nt, Human
acucuugaccucag

SEQ ID NO: 3557791 - RNA, 15 nt, Human
acucuugaccucagg

SEQ ID NO: 3557792 - RNA, 16 nt, Human
acucuugaguuguuuu

SEQ ID NO: 3557793 - RNA, 20 nt, Human
acucuugaguuguuuuugua

SEQ ID NO: 3557794 - RNA, 14 nt, Human
acucuugccuguuu

SEQ ID NO: 3557795 - RNA, 16 nt, Human
acucuugcucuuucua

SEQ ID NO: 3557796 - RNA, 14 nt, Human
acucuuggagccug

SEQ ID NO: 3557797 - RNA, 15 nt, Human
acucuuggagccugc

SEQ ID NO: 3557798 - RNA, 16 nt, Human
acucuugguuucuuca

SEQ ID NO: 3557799 - RNA, 15 nt, Human
acucuuguaagauuu

SEQ ID NO: 3557800 - RNA, 18 nt, Human
acucuuguaagauuuuga

SEQ ID NO: 3557801 - RNA, 22 nt, Human
acucuuguaagauuuugaaaac

SEQ ID NO: 3557802 - RNA, 18 nt, Human
acucuuguggauguuuua

SEQ ID NO: 3557803 - RNA, 17 nt, Human
acucuuuacccuugagc

SEQ ID NO: 3557804 - RNA, 17 nt, Human
acucuuuaugcuugcaa

SEQ ID NO: 3557805 - RNA, 15 nt, Human
acucuuuauugucug

SEQ ID NO: 3557806 - RNA, 23 nt, Human
acucuuucgguagguggaagcua

SEQ ID NO: 3557807 - RNA, 21 nt, Human
acucuuucuguauauacuuuu

SEQ ID NO: 3557808 - RNA, 18 nt, Human
acucuuugaaugacaaag

SEQ ID NO: 3557809 - RNA, 13 nt, Human
acucuuugagaaa

SEQ ID NO: 3557810 - RNA, 16 nt, Human
acucuuugagaaacaa

SEQ ID NO: 3557811 - RNA, 12 nt, Human
acucuuugagag

SEQ ID NO: 3557812 - RNA, 23 nt, Human
acucuuugagauagaagaacugc

SEQ ID NO: 3557813 - RNA, 15 nt, Human
acucuuugcugcugc

SEQ ID NO: 3557814 - RNA, 11 nt, Human
acucuuuggau

SEQ ID NO: 3557815 - RNA, 19 nt, Human
acucuuuggucguuuuuuu

SEQ ID NO: 3557816 - RNA, 13 nt, Human
acucuuuguaaga

SEQ ID NO: 3557817 - RNA, 21 nt, Human
acucuuuuccaaacacaggca

SEQ ID NO: 3557818 - RNA, 14 nt, Human
acucuuuugcuuua

SEQ ID NO: 3557819 - RNA, 17 nt, Human
accagagccccacacgg

SEQ ID NO: 3557820 - RNA, 15 nt, Human
accagagcucuggag

SEQ ID NO: 3557821 - RNA, 17 nt, Human
accagagcucuggagcc

SEQ ID NO: 3557822 - RNA, 12 nt, Human
accagagcugcc

SEQ ID NO: 3557823 - RNA, 13 nt, Human
accagaggcagcu

SEQ ID NO: 3557824 - RNA, 19 nt, Human
accagaggcugcagaaggc

SEQ ID NO: 3557825 - RNA, 22 nt, Human
accagauaccuuaucuuacaau

SEQ ID NO: 3557826 - RNA, 14 nt, Human
accagaugcagcuc

SEQ ID NO: 3557827 - RNA, 21 nt, Human
accagaugcgucccaagaugu

SEQ ID NO: 3557828 - RNA, 22 nt, Human
accagaugcgucccaagauguu

SEQ ID NO: 3557829 - RNA, 11 nt, Human
accagaugcug

SEQ ID NO: 3557830 - RNA, 20 nt, Human
accagauucuauccucaucu

SEQ ID NO: 3557831 - RNA, 21 nt, Human
accagauucuauccucaucuu

SEQ ID NO: 3557832 - RNA, 16 nt, Human
accagcaacuugaacu

SEQ ID NO: 3557833 - RNA, 23 nt, Human
accagcaacuugucuuuuucugg

SEQ ID NO: 3557834 - RNA, 17 nt, Human
accagcaauauaucuga

SEQ ID NO: 3557835 - RNA, 13 nt, Human
accagcacacucc

SEQ ID NO: 3557836 - RNA, 15 nt, Human
accagcacacucccg

SEQ ID NO: 3557837 - RNA, 18 nt, Human
accagcacacucccgaga

SEQ ID NO: 3557838 - RNA, 20 nt, Human
accagcagacagagccagga

SEQ ID NO: 3557839 - RNA, 14 nt, Human
accagccagauccu

SEQ ID NO: 3557840 - RNA, 17 nt, Human
accagccaguaaauggg

SEQ ID NO: 3557841 - RNA, 21 nt, Human
accagccauuggcuauuuaaa

SEQ ID NO: 3557842 - RNA, 17 nt, Human
accagcccacgcugacu

SEQ ID NO: 3557843 - RNA, 21 nt, Human
accagcccacgcugacuacag

SEQ ID NO: 3557844 - RNA, 20 nt, Human
accagccccagugcccacag

SEQ ID NO: 3557845 - RNA, 15 nt, Human
accagccccugcccc

SEQ ID NO: 3557846 - RNA, 15 nt, Human
accagcccggccugc

SEQ ID NO: 3557847 - RNA, 21 nt, Human
accagcccggccugcucccag

SEQ ID NO: 3557848 - RNA, 11 nt, Human
accagcccugg

SEQ ID NO: 3557849 - RNA, 20 nt, Human
accagcccuggggcugggcc

SEQ ID NO: 3557850 - RNA, 22 nt, Human
accagccgugagcauguuugga

SEQ ID NO: 3557851 - RNA, 14 nt, Human
accagccuccaugc

SEQ ID NO: 3557852 - RNA, 11 nt, Human
accagccuggc

SEQ ID NO: 3557853 - RNA, 14 nt, Human
accagccuggccca

SEQ ID NO: 3557854 - RNA, 14 nt, Human
accagccugggcag

SEQ ID NO: 3557855 - RNA, 14 nt, Human
accagccuguugga

SEQ ID NO: 3557856 - RNA, 19 nt, Human
accagccuuucucccaggc

SEQ ID NO: 3557857 - RNA, 13 nt, Human
accagcgcccgcu

SEQ ID NO: 3557858 - RNA, 15 nt, Human
accagcgcccgcugg

SEQ ID NO: 3557859 - RNA, 19 nt, Human
accagcgcccgcugggcug

SEQ ID NO: 3557860 - RNA, 20 nt, Human
accagcgcccgcugggcuga

SEQ ID NO: 3557861 - RNA, 21 nt, Human
accagcguauauauaagaaag

SEQ ID NO: 3557862 - RNA, 23 nt, Human
accagcguauauauaagaaagac

SEQ ID NO: 3557863 - RNA, 16 nt, Human
accagcucagcacugc

SEQ ID NO: 3557864 - RNA, 16 nt, Human
accagcucaggacaga

SEQ ID NO: 3557865 - RNA, 19 nt, Human
accagcucccccucccucc

SEQ ID NO: 3557866 - RNA, 20 nt, Human
accagcucccccucccuccc

SEQ ID NO: 3557867 - RNA, 12 nt, Human
accagcugaaag

SEQ ID NO: 3557868 - RNA, 10 nt, Human
accagcugca

SEQ ID NO: 3557869 - RNA, 16 nt, Human
accagcugcaaagugu

SEQ ID NO: 3557870 - RNA, 22 nt, Human
accagcugcaaaguguuuugua

SEQ ID NO: 3557871 - RNA, 16 nt, Human
accagcugccucuucu

SEQ ID NO: 3557872 - RNA, 19 nt, Human
accagcugcgcuugcuuuu

SEQ ID NO: 3557873 - RNA, 17 nt, Human
accagcuguaacacagc

SEQ ID NO: 3557874 - RNA, 23 nt, Human
accagcuguucugucccuuggag

SEQ ID NO: 3557875 - RNA, 18 nt, Human
accagcuucuccaggcuc

SEQ ID NO: 3557876 - RNA, 20 nt, Human
accagcuucuccaggcucuu

SEQ ID NO: 3557877 - RNA, 19 nt, Human
accagcuuggcucaggcug

SEQ ID NO: 3557878 - RNA, 21 nt, Human
accagcuuguaugcaauggau

SEQ ID NO: 3557879 - RNA, 21 nt, Human
accaggaaaggauuuuauaau

SEQ ID NO: 3557880 - RNA, 17 nt, Human
accaggaaccucuucag

SEQ ID NO: 3557881 - RNA, 15 nt, Human
accaggacaggacca

SEQ ID NO: 3557882 - RNA, 14 nt, Human
accaggacucccuc

SEQ ID NO: 3557883 - RNA, 18 nt, Human
accaggagaaccacuaca

SEQ ID NO: 3557884 - RNA, 19 nt, Human
accaggagaaccacuacau

SEQ ID NO: 3557885 - RNA, 16 nt, Human
accaggagcugcucac

SEQ ID NO: 3557886 - RNA, 16 nt, Human
accaggaggcggcagu

SEQ ID NO: 3557887 - RNA, 20 nt, Human
accaggaguggguggggagu

SEQ ID NO: 3557888 - RNA, 14 nt, Human
accaggauggcccu

SEQ ID NO: 3557889 - RNA, 14 nt, Human
accaggauuucuaa

SEQ ID NO: 3557890 - RNA, 19 nt, Human
accaggcaccuccccuccc

SEQ ID NO: 3557891 - RNA, 23 nt, Human
accaggcaccuccccucccgccc

SEQ ID NO: 3557892 - RNA, 22 nt, Human
accaggcacgaacccaccugcu

SEQ ID NO: 3557893 - RNA, 11 nt, Human
accaggcaggg

SEQ ID NO: 3557894 - RNA, 15 nt, Human
accaggccauucugc

SEQ ID NO: 3557895 - RNA, 15 nt, Human
accaggcccuggcua

SEQ ID NO: 3557896 - RNA, 16 nt, Human
accaggccguccuccc

SEQ ID NO: 3557897 - RNA, 20 nt, Human
accaggccguccucccgggc

SEQ ID NO: 3557898 - RNA, 12 nt, Human
accaggccuggg

SEQ ID NO: 3557899 - RNA, 23 nt, Human
accaggcgagagacuuguggccu

SEQ ID NO: 3557900 - RNA, 19 nt, Human
accaggcugcucagggcug

SEQ ID NO: 3557901 - RNA, 17 nt, Human
accaggcuggcgcagcc

SEQ ID NO: 3557902 - RNA, 22 nt, Human
accaggcuggcgcagccaaggc

SEQ ID NO: 3557903 - RNA, 14 nt, Human
accagggacugagg

SEQ ID NO: 3557904 - RNA, 20 nt, Human
accagggagccccuuugaug

SEQ ID NO: 3557905 - RNA, 19 nt, Human
accagggagcugcaggggc

SEQ ID NO: 3557906 - RNA, 16 nt, Human
accagggauuguuucu

SEQ ID NO: 3557907 - RNA, 18 nt, Human
accagggauuguuucugu

SEQ ID NO: 3557908 - RNA, 18 nt, Human
accagggcaccaagccca

SEQ ID NO: 3557909 - RNA, 14 nt, Human
accagggcagggcc

SEQ ID NO: 3557910 - RNA, 18 nt, Human
accagggcaucucugggc

SEQ ID NO: 3557911 - RNA, 19 nt, Human
accagggcaucucugggcu

SEQ ID NO: 3557912 - RNA, 20 nt, Human
accagggcaucucugggcug

SEQ ID NO: 3557913 - RNA, 21 nt, Human
accagggcaucucugggcugg

SEQ ID NO: 3557914 - RNA, 15 nt, Human
accagggcuccagcc

SEQ ID NO: 3557915 - RNA, 18 nt, Human
accaggggcaggcacagc

SEQ ID NO: 3557916 - RNA, 24 nt, Human
accaggggugauuucagagagggc

SEQ ID NO: 3557917 - RNA, 19 nt, Human
acuucauucuugaaagcug

SEQ ID NO: 3557918 - RNA, 21 nt, Human
acuucauucuugaaagcugug

SEQ ID NO: 3557919 - RNA, 21 nt, Human
acuucauugagaguuuugucu

SEQ ID NO: 3557920 - RNA, 16 nt, Human
acuuccaaaauucuua

SEQ ID NO: 3557921 - RNA, 19 nt, Human
acuuccaaaauucuuauuu

SEQ ID NO: 3557922 - RNA, 20 nt, Human
acuuccaaaccugacagaug

SEQ ID NO: 3557923 - RNA, 14 nt, Human
acuuccaaacuaau

SEQ ID NO: 3557924 - RNA, 17 nt, Human
acuuccaaacuaauuuu

SEQ ID NO: 3557925 - RNA, 16 nt, Human
acuuccaaagaaaguu

SEQ ID NO: 3557926 - RNA, 15 nt, Human
acuuccaaagaaugu

SEQ ID NO: 3557927 - RNA, 23 nt, Human
acuuccaaagaauguuagagcac

SEQ ID NO: 3557928 - RNA, 22 nt, Human
acuuccaagaccugacucaggc

SEQ ID NO: 3557929 - RNA, 16 nt, Human
acuuccaggggaaccu

SEQ ID NO: 3557930 - RNA, 21 nt, Human
acuuccagguguuacuguaau

SEQ ID NO: 3557931 - RNA, 15 nt, Human
acuuccaugaauuuu

SEQ ID NO: 3557932 - RNA, 17 nt, Human
acuuccaugaggccaaa

SEQ ID NO: 3557933 - RNA, 12 nt, Human
acuuccaugccu

SEQ ID NO: 3557934 - RNA, 17 nt, Human
acuucccacccugcccc

SEQ ID NO: 3557935 - RNA, 11 nt, Human
acuucccagcu

SEQ ID NO: 3557936 - RNA, 24 nt, Human
acuucccaguucaggagucccaag

SEQ ID NO: 3557937 - RNA, 19 nt, Human
acuucccauuuuggaaguu

SEQ ID NO: 3557938 - RNA, 12 nt, Human
acuuccccuccu

SEQ ID NO: 3557939 - RNA, 13 nt, Human
acuuccccuuccu

SEQ ID NO: 3557940 - RNA, 19 nt, Human
acuuccccuuccuaauucc

SEQ ID NO: 3557941 - RNA, 20 nt, Human
acuucccgggccagggcugc

SEQ ID NO: 3557942 - RNA, 20 nt, Human
acuucccgucccauauccug

SEQ ID NO: 3557943 - RNA, 22 nt, Human
acuucccgucccauauccugcc

SEQ ID NO: 3557944 - RNA, 17 nt, Human
acuucccuaacacuuac

SEQ ID NO: 3557945 - RNA, 17 nt, Human
acuucccucaucucucc

SEQ ID NO: 3557946 - RNA, 11 nt, Human
acuucccuggc

SEQ ID NO: 3557947 - RNA, 21 nt, Human
acuucccuggguuagacugcc

SEQ ID NO: 3557948 - RNA, 23 nt, Human
acuucccuggguuagacugccag

SEQ ID NO: 3557949 - RNA, 12 nt, Human
acuucccugugu

SEQ ID NO: 3557950 - RNA, 15 nt, Human
acuuccuccucccca

SEQ ID NO: 3557951 - RNA, 18 nt, Human
acuuccucgccucuccca

SEQ ID NO: 3557952 - RNA, 22 nt, Human
acuuccucucgcggcccucagu

SEQ ID NO: 3557953 - RNA, 17 nt, Human
acuuccugccuggucuc

SEQ ID NO: 3557954 - RNA, 14 nt, Human
acuuccuguccaga

SEQ ID NO: 3557955 - RNA, 15 nt, Human
acuuccugugacuuc

SEQ ID NO: 3557956 - RNA, 18 nt, Human
acuuccuguuugggcccc

SEQ ID NO: 3557957 - RNA, 19 nt, Human
acuuccuugcucucccucu

SEQ ID NO: 3557958 - RNA, 14 nt, Human
acuuccuuuuaacu

SEQ ID NO: 3557959 - RNA, 15 nt, Human
acuucgacucaggau

SEQ ID NO: 3557960 - RNA, 19 nt, Human
acuucgacucaggauccag

SEQ ID NO: 3557961 - RNA, 23 nt, Human
acuucgcaucaaaagacaauucu

SEQ ID NO: 3557962 - RNA, 20 nt, Human
acuucgggaggucgaggcag

SEQ ID NO: 3557963 - RNA, 18 nt, Human
acuucgucuucuaauuuc

SEQ ID NO: 3557964 - RNA, 13 nt, Human
acuucgugggauc

SEQ ID NO: 3557965 - RNA, 23 nt, Human
acuucgugggaucugccccuccc

SEQ ID NO: 3557966 - RNA, 23 nt, Human
acuucguuuugguuaaguuggcu

SEQ ID NO: 3557967 - RNA, 14 nt, Human
acuucuaaaacugu

SEQ ID NO: 3557968 - RNA, 19 nt, Human
acuucuaaaacuguacuuu

SEQ ID NO: 3557969 - RNA, 21 nt, Human
acuucuaaaacuguacuuuga

SEQ ID NO: 3557970 - RNA, 17 nt, Human
acuucuaaaugcauauc

SEQ ID NO: 3557971 - RNA, 17 nt, Human
acuucuaagacuuuacu

SEQ ID NO: 3557972 - RNA, 19 nt, Human
acuucuaagacuuuacuua

SEQ ID NO: 3557973 - RNA, 23 nt, Human
acuucuaaguugaguauauuaua

SEQ ID NO: 3557974 - RNA, 22 nt, Human
acuucuaauauauuuuuauauu

SEQ ID NO: 3557975 - RNA, 14 nt, Human
acuucuaccugccc

SEQ ID NO: 3557976 - RNA, 22 nt, Human
acuucucaggacacaggccugu

SEQ ID NO: 3557977 - RNA, 16 nt, Human
acuucucaucacacac

SEQ ID NO: 3557978 - RNA, 18 nt, Human
acuucuccacccugcucu

SEQ ID NO: 3557979 - RNA, 21 nt, Human
acuucucuacccaucuuaaaa

SEQ ID NO: 3557980 - RNA, 16 nt, Human
acuucucucuaaggag

SEQ ID NO: 3557981 - RNA, 13 nt, Human
acuucucugaagg

SEQ ID NO: 3557982 - RNA, 21 nt, Human
acuucucugccuuugacauuu

SEQ ID NO: 3557983 - RNA, 19 nt, Human
acuucucuuaaacuuguga

SEQ ID NO: 3557984 - RNA, 17 nt, Human
acuucucuugcuuucua

SEQ ID NO: 3557985 - RNA, 14 nt, Human
acuucucuuugccu

SEQ ID NO: 3557986 - RNA, 15 nt, Human
acuucucuuugccuc

SEQ ID NO: 3557987 - RNA, 16 nt, Human
acuucucuuugccuca

SEQ ID NO: 3557988 - RNA, 16 nt, Human
acuucugacagccuca

SEQ ID NO: 3557989 - RNA, 18 nt, Human
acuucugacucuucccca

SEQ ID NO: 3557990 - RNA, 16 nt, Human
acuucugcaacaagca

SEQ ID NO: 3557991 - RNA, 24 nt, Human
acuucugcaacaagcaugcagcuu

SEQ ID NO: 3557992 - RNA, 14 nt, Human
acuucugcuggcau

SEQ ID NO: 3557993 - RNA, 14 nt, Human
acuucugcuuucca

SEQ ID NO: 3557994 - RNA, 16 nt, Human
acuucuggcucccucu

SEQ ID NO: 3557995 - RNA, 18 nt, Human
acuucuggcucccucuuc

SEQ ID NO: 3557996 - RNA, 13 nt, Human
acuucuggcuccu

SEQ ID NO: 3557997 - RNA, 15 nt, Human
acuucuggcuccuca

SEQ ID NO: 3557998 - RNA, 16 nt, Human
acuucuggcuccucaa

SEQ ID NO: 3557999 - RNA, 15 nt, Human
acuucuggucaauca

SEQ ID NO: 3558000 - RNA, 15 nt, Human
acuucuguaauugug

SEQ ID NO: 3558001 - RNA, 22 nt, Human
acuucugucuucacaacagauu

SEQ ID NO: 3558002 - RNA, 20 nt, Human
acuucugugagacccccaca

SEQ ID NO: 3558003 - RNA, 16 nt, Human
acuucuuaaauaucuu

SEQ ID NO: 3558004 - RNA, 19 nt, Human
acuucuuaaauaucuuuua

SEQ ID NO: 3558005 - RNA, 20 nt, Human
acuucuuaaauaucuuuuau

SEQ ID NO: 3558006 - RNA, 18 nt, Human
acuucuuauacauuugau

SEQ ID NO: 3558007 - RNA, 16 nt, Human
acuucuuauggaauug

SEQ ID NO: 3558008 - RNA, 17 nt, Human
acuucuuauggaauuga

SEQ ID NO: 3558009 - RNA, 20 nt, Human
acuucuuauggaauugauuu

SEQ ID NO: 3558010 - RNA, 17 nt, Human
acuucuuccuuucucuu

SEQ ID NO: 3558011 - RNA, 14 nt, Human
acuucuucuccauc

SEQ ID NO: 3558012 - RNA, 17 nt, Human
acuucuucuccaucccu

SEQ ID NO: 3558013 - RNA, 14 nt, Human
acuucuucuguaau

SEQ ID NO: 3558014 - RNA, 20 nt, Human
acuucuugaaggugcugacg

SEQ ID NO: 3558015 - RNA, 13 nt, Human
acuucuugaauau

SEQ ID NO: 3558016 - RNA, 13 nt, Human
acuucuugucaga

SEQ ID NO: 3558017 - RNA, 12 nt, Human
acuucuuucacu

SEQ ID NO: 3558018 - RNA, 14 nt, Human
acuucuuucuauuu

SEQ ID NO: 3558019 - RNA, 16 nt, Human
acuucuuugcuuugcc

SEQ ID NO: 3558020 - RNA, 18 nt, Human
acuucuuugcuuugccca

SEQ ID NO: 3558021 - RNA, 14 nt, Human
acuucuuuucacau

SEQ ID NO: 3558022 - RNA, 21 nt, Human
acuucuuuucacauucuuaua

SEQ ID NO: 3558023 - RNA, 21 nt, Human
acuucuuuuuucaaaagaaag

SEQ ID NO: 3558024 - RNA, 23 nt, Human
acuucuuuuuucaaaagaaaguc

SEQ ID NO: 3558025 - RNA, 11 nt, Human
acuugaaaaga

SEQ ID NO: 3558026 - RNA, 15 nt, Human
acuugaaaagagaca

SEQ ID NO: 3558027 - RNA, 22 nt, Human
acuugaaaagagacaggcaggu

SEQ ID NO: 3558028 - RNA, 16 nt, Human
acuugaaaauuaacau

SEQ ID NO: 3558029 - RNA, 18 nt, Human
acuugaaaauuaacauga

SEQ ID NO: 3558030 - RNA, 12 nt, Human
acuugaaagaaa

SEQ ID NO: 3558031 - RNA, 13 nt, Human
acuugaaagcauc

SEQ ID NO: 3558032 - RNA, 14 nt, Human
acuugaaagcaucc

SEQ ID NO: 3558033 - RNA, 18 nt, Human
acuugaaauaccagugaa

SEQ ID NO: 3558034 - RNA, 14 nt, Human
acuugaaauguuag

SEQ ID NO: 3558035 - RNA, 23 nt, Human
acuugaaauguuagucauuguua

SEQ ID NO: 3558036 - RNA, 23 nt, Human
acuugaaauuauaucuguggucu

SEQ ID NO: 3558037 - RNA, 19 nt, Human
acuugaaauuugaauuuug

SEQ ID NO: 3558038 - RNA, 17 nt, Human
acuugaacaaaaucugu

SEQ ID NO: 3558039 - RNA, 19 nt, Human
acuugaacaaaaucuguug

SEQ ID NO: 3558040 - RNA, 14 nt, Human
acuugaaccauaaa

SEQ ID NO: 3558041 - RNA, 16 nt, Human
acuugaaccauaaaau

SEQ ID NO: 3558042 - RNA, 17 nt, Human
acuugaaccauaaaaug

SEQ ID NO: 3558043 - RNA, 22 nt, Human
acuugaaccauaaaauguccag

SEQ ID NO: 3558044 - RNA, 19 nt, Human
acuugaacccgggaggcag

SEQ ID NO: 3558045 - RNA, 20 nt, Human
acuugaacccgggaggcaga

SEQ ID NO: 3558046 - RNA, 21 nt, Human
acuugaacccgggaggcagag

SEQ ID NO: 3558047 - RNA, 22 nt, Human
acuugaacccgggaggcagagg

SEQ ID NO: 3558048 - RNA, 23 nt, Human
acuugaacccgggaggcagaggu

SEQ ID NO: 3558049 - RNA, 21 nt, Human
acuugaacguuuucuaauugc

SEQ ID NO: 3558050 - RNA, 14 nt, Human
acuugaagccugcu

SEQ ID NO: 3558051 - RNA, 15 nt, Human
acuugaagggccaga

SEQ ID NO: 3558052 - RNA, 18 nt, Human
acuugaagggccagagcc

SEQ ID NO: 3558053 - RNA, 20 nt, Human
acuugaagggccagagccag

SEQ ID NO: 3558054 - RNA, 12 nt, Human
acuugaaguugu

SEQ ID NO: 3558055 - RNA, 13 nt, Human
acuugaaguuguu

SEQ ID NO: 3558056 - RNA, 20 nt, Human
acuugaaguuguuacuaacu

SEQ ID NO: 3558057 - RNA, 20 nt, Human
acuugaauaaccaucugaaa

SEQ ID NO: 3558058 - RNA, 19 nt, Human
acuugaauaauaguaugag

SEQ ID NO: 3558059 - RNA, 13 nt, Human
acuugaaugaaaa

SEQ ID NO: 3558060 - RNA, 15 nt, Human
acuugaaugugucag

SEQ ID NO: 3558061 - RNA, 20 nt, Human
acuugaauucauagaaaaag

SEQ ID NO: 3558062 - RNA, 20 nt, Human
acuugaauuuucccacugca

SEQ ID NO: 3558063 - RNA, 12 nt, Human
acuugacagugg

SEQ ID NO: 3558064 - RNA, 14 nt, Human
acuugacaguggaa

SEQ ID NO: 3558065 - RNA, 19 nt, Human
acuugacccccuugagggu

SEQ ID NO: 3558066 - RNA, 14 nt, Human
acugcuguggccag

SEQ ID NO: 3558067 - RNA, 20 nt, Human
acugcuguggccaggaggug

SEQ ID NO: 3558068 - RNA, 15 nt, Human
acugcuguuauauuu

SEQ ID NO: 3558069 - RNA, 18 nt, Human
acugcuuaacuucacaua

SEQ ID NO: 3558070 - RNA, 20 nt, Human
acugcuuaacuucacauauu

SEQ ID NO: 3558071 - RNA, 16 nt, Human
acugcuuaauucaaau

SEQ ID NO: 3558072 - RNA, 19 nt, Human
acugcuucaugacauuccu

SEQ ID NO: 3558073 - RNA, 18 nt, Human
acugcuuccagugaggcu

SEQ ID NO: 3558074 - RNA, 23 nt, Human
acugcuuccagugaggcucugcc

SEQ ID NO: 3558075 - RNA, 15 nt, Human
acugcuucccauccu

SEQ ID NO: 3558076 - RNA, 17 nt, Human
acugcuucccauccuac

SEQ ID NO: 3558077 - RNA, 17 nt, Human
acugcuuccuauaauuu

SEQ ID NO: 3558078 - RNA, 22 nt, Human
acugcuuccuauaauuuugaua

SEQ ID NO: 3558079 - RNA, 18 nt, Human
acugcuuccuuucuugau

SEQ ID NO: 3558080 - RNA, 20 nt, Human
acugcuugaugaagcaagga

SEQ ID NO: 3558081 - RNA, 13 nt, Human
acugcuuggagcu

SEQ ID NO: 3558082 - RNA, 16 nt, Human
acugcuuggagcugag

SEQ ID NO: 3558083 - RNA, 21 nt, Human
acugcuugugaaaggaaagag

SEQ ID NO: 3558084 - RNA, 16 nt, Human
acugcuuguuuccuag

SEQ ID NO: 3558085 - RNA, 17 nt, Human
acugcuuucuguuccaa

SEQ ID NO: 3558086 - RNA, 19 nt, Human
acugcuuucuguuccaaau

SEQ ID NO: 3558087 - RNA, 23 nt, Human
acugcuuucuuucguuuguuugu

SEQ ID NO: 3558088 - RNA, 23 nt, Human
acugcuuugggauuuaauuucca

SEQ ID NO: 3558089 - RNA, 14 nt, Human
acugcuuuuggucu

SEQ ID NO: 3558090 - RNA, 19 nt, Human
acuggaaaacagaacacuu

SEQ ID NO: 3558091 - RNA, 17 nt, Human
acuggaaaggggagagc

SEQ ID NO: 3558092 - RNA, 23 nt, Human
acuggaaaggggagagccugcug

SEQ ID NO: 3558093 - RNA, 16 nt, Human
acuggaacccuuuuaa

SEQ ID NO: 3558094 - RNA, 17 nt, Human
acuggaacuugaacuga

SEQ ID NO: 3558095 - RNA, 14 nt, Human
acuggaagcacagc

SEQ ID NO: 3558096 - RNA, 17 nt, Human
acuggaagcacagcuuc

SEQ ID NO: 3558097 - RNA, 19 nt, Human
acuggaagcacagcuucau

SEQ ID NO: 3558098 - RNA, 18 nt, Human
acuggaaggggaagggac

SEQ ID NO: 3558099 - RNA, 22 nt, Human
acuggaaguucauaccuaagua

SEQ ID NO: 3558100 - RNA, 14 nt, Human
acuggacagcuugu

SEQ ID NO: 3558101 - RNA, 16 nt, Human
acuggaccacugggca

SEQ ID NO: 3558102 - RNA, 20 nt, Human
acuggaccacugggcaauga

SEQ ID NO: 3558103 - RNA, 17 nt, Human
acuggacccuguugcua

SEQ ID NO: 3558104 - RNA, 19 nt, Human
acuggacccuguugcuaag

SEQ ID NO: 3558105 - RNA, 20 nt, Human
acuggacucaggaugcccag

SEQ ID NO: 3558106 - RNA, 21 nt, Human
acuggacucaggaugcccagg

SEQ ID NO: 3558107 - RNA, 20 nt, Human
acuugcagcugauguuggaa

SEQ ID NO: 3558108 - RNA, 13 nt, Human
acuugcaucugug

SEQ ID NO: 3558109 - RNA, 19 nt, Human
acuugcauugaauauauua

SEQ ID NO: 3558110 - RNA, 14 nt, Human
acuugccagaaguu

SEQ ID NO: 3558111 - RNA, 16 nt, Human
acuugcccugaccaug

SEQ ID NO: 3558112 - RNA, 21 nt, Human
acuugcccugaccaugcauuu

SEQ ID NO: 3558113 - RNA, 18 nt, Human
acuugcccugcucccucu

SEQ ID NO: 3558114 - RNA, 23 nt, Human
acuugccgcgucgcccucccagg

SEQ ID NO: 3558115 - RNA, 13 nt, Human
acuugccucugca

SEQ ID NO: 3558116 - RNA, 20 nt, Human
acuugccucuuuuaccugcu

SEQ ID NO: 3558117 - RNA, 13 nt, Human
acuugccugccuu

SEQ ID NO: 3558118 - RNA, 14 nt, Human
acuugccugccuuu

SEQ ID NO: 3558119 - RNA, 18 nt, Human
acuugccugccuuuccau

SEQ ID NO: 3558120 - RNA, 21 nt, Human
acuugccuuccuaagccugug

SEQ ID NO: 3558121 - RNA, 24 nt, Human
acuugccuuccuaagccuguggcu

SEQ ID NO: 3558122 - RNA, 20 nt, Human
acuugccuucuucacccagc

SEQ ID NO: 3558123 - RNA, 15 nt, Human
acuugccuuugaaga

SEQ ID NO: 3558124 - RNA, 14 nt, Human
acuugcuacccuga

SEQ ID NO: 3558125 - RNA, 20 nt, Human
acuugcucagguacuuguaa

SEQ ID NO: 3558126 - RNA, 16 nt, Human
acuugcucuggaccug

SEQ ID NO: 3558127 - RNA, 18 nt, Human
acuugcucuggaccugcc

SEQ ID NO: 3558128 - RNA, 14 nt, Human
acuugcucuugaug

SEQ ID NO: 3558129 - RNA, 16 nt, Human
acuugcucuugaugcc

SEQ ID NO: 3558130 - RNA, 12 nt, Human
acuugcugccuc

SEQ ID NO: 3558131 - RNA, 20 nt, Human
acuugcugcugucuuguugc

SEQ ID NO: 3558132 - RNA, 18 nt, Human
acuugcuuaaaugugaau

SEQ ID NO: 3558133 - RNA, 16 nt, Human
acuugcuuaaauuucu

SEQ ID NO: 3558134 - RNA, 18 nt, Human
acuugcuuaaauuucuua

SEQ ID NO: 3558135 - RNA, 16 nt, Human
acuugcuuauuugaca

SEQ ID NO: 3558136 - RNA, 15 nt, Human
acuugcuucucuagc

SEQ ID NO: 3558137 - RNA, 22 nt, Human
acuugcuuuaugccuucuuauu

SEQ ID NO: 3558138 - RNA, 23 nt, Human
acuuggaacugaagggggcggcc

SEQ ID NO: 3558139 - RNA, 23 nt, Human
acuuggaccagcauccuuaagua

SEQ ID NO: 3558140 - RNA, 15 nt, Human
acuuggacucuugcu

SEQ ID NO: 3558141 - RNA, 16 nt, Human
acuuggacucuugcuc

SEQ ID NO: 3558142 - RNA, 19 nt, Human
acuuggacucuugcucuuu

SEQ ID NO: 3558143 - RNA, 19 nt, Human
acuuggagccccagugcca

SEQ ID NO: 3558144 - RNA, 16 nt, Human
acuuggcaacagaagc

SEQ ID NO: 3558145 - RNA, 13 nt, Human
acuuggcagccuu

SEQ ID NO: 3558146 - RNA, 19 nt, Human
acuuggcucacacucgaca

SEQ ID NO: 3558147 - RNA, 20 nt, Human
acuugggagaccuguaauca

SEQ ID NO: 3558148 - RNA, 17 nt, Human
acuugggcacccccagc

SEQ ID NO: 3558149 - RNA, 18 nt, Human
acuuggggaaauugcuuu

SEQ ID NO: 3558150 - RNA, 21 nt, Human
acuuggggaguuaagaccugg

SEQ ID NO: 3558151 - RNA, 15 nt, Human
acuugggggcucagc

SEQ ID NO: 3558152 - RNA, 23 nt, Human
acuugggggcucagcaaggccac

SEQ ID NO: 3558153 - RNA, 19 nt, Human
acuuggggguucaggcccg

SEQ ID NO: 3558154 - RNA, 16 nt, Human
acuugguaauuguacu

SEQ ID NO: 3558155 - RNA, 20 nt, Human
acuuggucugugagaugcua

SEQ ID NO: 3558156 - RNA, 17 nt, Human
acuugguucugcuucaa

SEQ ID NO: 3558157 - RNA, 18 nt, Human
acuuguaaaggaauuuaa

SEQ ID NO: 3558158 - RNA, 14 nt, Human
acuuguaaauauaa

SEQ ID NO: 3558159 - RNA, 15 nt, Human
acuuguaaauauaaa

SEQ ID NO: 3558160 - RNA, 18 nt, Human
acuuguaaaugugguaaa

SEQ ID NO: 3558161 - RNA, 22 nt, Human
acuuguaauauuuuuauauaca

SEQ ID NO: 3558162 - RNA, 13 nt, Human
acuuguaauuaug

SEQ ID NO: 3558163 - RNA, 18 nt, Human
acuuguacaaaauaaaca

SEQ ID NO: 3558164 - RNA, 15 nt, Human
acuuguagauuugau

SEQ ID NO: 3558165 - RNA, 17 nt, Human
acuuguagcuguaaaac

SEQ ID NO: 3558166 - RNA, 21 nt, Human
acuuguagcuguaaaacgcug

SEQ ID NO: 3558167 - RNA, 16 nt, Human
acuuguaguuuagugu

SEQ ID NO: 3558168 - RNA, 20 nt, Human
acuuguauaaauguauauac

SEQ ID NO: 3558169 - RNA, 19 nt, Human
acuuguauauucuauuuua

SEQ ID NO: 3558170 - RNA, 18 nt, Human
acuuguauauuuguacaa

SEQ ID NO: 3558171 - RNA, 14 nt, Human
acuuguauauuuua

SEQ ID NO: 3558172 - RNA, 20 nt, Human
acuuguauauuuuaagaaau

SEQ ID NO: 3558173 - RNA, 15 nt, Human
acuuguauuaugugu

SEQ ID NO: 3558174 - RNA, 15 nt, Human
acuugucaaagaagg

SEQ ID NO: 3558175 - RNA, 13 nt, Human
acuugucaauauu

SEQ ID NO: 3558176 - RNA, 14 nt, Human
acuugucaauauuu

SEQ ID NO: 3558177 - RNA, 20 nt, Human
acuugucacagaugcagauu

SEQ ID NO: 3558178 - RNA, 21 nt, Human
acuugucacugacacaaagga

SEQ ID NO: 3558179 - RNA, 14 nt, Human
acuugucacuugca

SEQ ID NO: 3558180 - RNA, 17 nt, Human
acuugucacuugcaugu

SEQ ID NO: 3558181 - RNA, 23 nt, Human
acuugucaggguauaaaaugaca

SEQ ID NO: 3558182 - RNA, 20 nt, Human
acuugucauauguagccuuc

SEQ ID NO: 3558183 - RNA, 23 nt, Human
acuugucauuguuauauaaucau

SEQ ID NO: 3558184 - RNA, 18 nt, Human
acuugucccacuaucugg

SEQ ID NO: 3558185 - RNA, 17 nt, Human
acuuguccccaaauccg

SEQ ID NO: 3558186 - RNA, 21 nt, Human
acuuguccuuagccuggaccu

SEQ ID NO: 3558187 - RNA, 22 nt, Human
acuugucuaaauaaguuugcaa

SEQ ID NO: 3558188 - RNA, 19 nt, Human
acuugucucauuuuaaugu

SEQ ID NO: 3558189 - RNA, 13 nt, Human
acuugucuuucug

SEQ ID NO: 3558190 - RNA, 14 nt, Human
acuugucuuucugg

SEQ ID NO: 3558191 - RNA, 17 nt, Human
acuugugaaacacagcu

SEQ ID NO: 3558192 - RNA, 18 nt, Human
acuugugaaacacagcug

SEQ ID NO: 3558193 - RNA, 12 nt, Human
acuugugaaugc

SEQ ID NO: 3558194 - RNA, 17 nt, Human
acuugugaaugcuucuc

SEQ ID NO: 3558195 - RNA, 17 nt, Human
acuugugacuuuugcuu

SEQ ID NO: 3558196 - RNA, 21 nt, Human
acuugugcccucccuguccuu

SEQ ID NO: 3558197 - RNA, 16 nt, Human
acuuguggacacagcu

SEQ ID NO: 3558198 - RNA, 19 nt, Human
acuuguggacacagcucuu

SEQ ID NO: 3558199 - RNA, 22 nt, Human
acuuguggacacagcucuucuc

SEQ ID NO: 3558200 - RNA, 19 nt, Human
acuuguggacuaaaagaua

SEQ ID NO: 3558201 - RNA, 21 nt, Human
acuuguucuuccaaagcagag

SEQ ID NO: 3558202 - RNA, 19 nt, Human
acuuguugauuaauggaaa

SEQ ID NO: 3558203 - RNA, 21 nt, Human
acuuguugauuaauggaaaug

SEQ ID NO: 3558204 - RNA, 18 nt, Human
acuuguuguuuaauguuu

SEQ ID NO: 3558205 - RNA, 13 nt, Human
acuuguuuaauaa

SEQ ID NO: 3558206 - RNA, 14 nt, Human
acuuguuuaauaaa

SEQ ID NO: 3558207 - RNA, 19 nt, Human
acuuguuucucuguuguaa

SEQ ID NO: 3558208 - RNA, 16 nt, Human
acuuguuucugaucua

SEQ ID NO: 3558209 - RNA, 18 nt, Human
acuuguuuucaaaccagu

SEQ ID NO: 3558210 - RNA, 16 nt, Human
acuuguuuucugggaa

SEQ ID NO: 3558211 - RNA, 12 nt, Human
acuuuaaaagug

SEQ ID NO: 3558212 - RNA, 15 nt, Human
acuuuaaaauaaaau

SEQ ID NO: 3558213 - RNA, 15 nt, Human
acuuuaagagagaaa

SEQ ID NO: 3558214 - RNA, 16 nt, Human
acuuuaauauguauuu

SEQ ID NO: 3558215 - RNA, 22 nt, Human
acuuuaauuaccaaccuguuac

SEQ ID NO: 3558216 - RNA, 19 nt, Human
acuuuacaauguucauccc

SEQ ID NO: 3558217 - RNA, 20 nt, Human
acuuuacaauguucauccca

SEQ ID NO: 3558218 - RNA, 20 nt, Human
acuuuacacaauagaauuau

SEQ ID NO: 3558219 - RNA, 18 nt, Human
acuuuacacucggcuuug

SEQ ID NO: 3558220 - RNA, 15 nt, Human
acuuuacaugacaca

SEQ ID NO: 3558221 - RNA, 18 nt, Human
acuuuacaugacacagcu

SEQ ID NO: 3558222 - RNA, 20 nt, Human
acuuuacaugacacagcuuu

SEQ ID NO: 3558223 - RNA, 17 nt, Human
acuuuacccaaaaacua

SEQ ID NO: 3558224 - RNA, 18 nt, Human
acuuuacccaccuagaac

SEQ ID NO: 3558225 - RNA, 14 nt, Human
acugguccugugug

SEQ ID NO: 3558226 - RNA, 13 nt, Human
acuggucugcugu

SEQ ID NO: 3558227 - RNA, 12 nt, Human
acuggugacugc

SEQ ID NO: 3558228 - RNA, 13 nt, Human
acuggugauauau

SEQ ID NO: 3558229 - RNA, 18 nt, Human
acuggugcacuuuguaaa

SEQ ID NO: 3558230 - RNA, 20 nt, Human
acuggugcacuuuguaaauu

SEQ ID NO: 3558231 - RNA, 13 nt, Human
acuggugcccucc

SEQ ID NO: 3558232 - RNA, 20 nt, Human
acugguggcccgacagccug

SEQ ID NO: 3558233 - RNA, 23 nt, Human
acugguggcccgacagccuggca

SEQ ID NO: 3558234 - RNA, 14 nt, Human
acugguguccagcu

SEQ ID NO: 3558235 - RNA, 21 nt, Human
acuggugugaccugagggcag

SEQ ID NO: 3558236 - RNA, 12 nt, Human
acugguucucaa

SEQ ID NO: 3558237 - RNA, 13 nt, Human
acugguugcaugg

SEQ ID NO: 3558238 - RNA, 15 nt, Human
acugguugcauggaa

SEQ ID NO: 3558239 - RNA, 14 nt, Human
acugguuugagauu

SEQ ID NO: 3558240 - RNA, 17 nt, Human
acugguuuguucccugu

SEQ ID NO: 3558241 - RNA, 14 nt, Human
acugguuuucacau

SEQ ID NO: 3558242 - RNA, 15 nt, Human
acugguuuucugcca

SEQ ID NO: 3558243 - RNA, 15 nt, Human
acuguaaaaugcaaa

SEQ ID NO: 3558244 - RNA, 16 nt, Human
acuguaaaaugcaaaa

SEQ ID NO: 3558245 - RNA, 19 nt, Human
acuguaaaaugcaaaaaau

SEQ ID NO: 3558246 - RNA, 21 nt, Human
acuguaaaaugcaaaaaaucu

SEQ ID NO: 3558247 - RNA, 13 nt, Human
acuguaaagaaag

SEQ ID NO: 3558248 - RNA, 14 nt, Human
acuguaaagaaaga

SEQ ID NO: 3558249 - RNA, 19 nt, Human
acuguaaagaaagagagaa

SEQ ID NO: 3558250 - RNA, 20 nt, Human
acuguaaagaaagagagaaa

SEQ ID NO: 3558251 - RNA, 20 nt, Human
acuguaacacuuuacaaugu

SEQ ID NO: 3558252 - RNA, 22 nt, Human
acuugauggucagacacaaaca

SEQ ID NO: 3558253 - RNA, 23 nt, Human
acuugauuaagauuuuacaaaag

SEQ ID NO: 3558254 - RNA, 17 nt, Human
acuugauuugagauuuu

SEQ ID NO: 3558255 - RNA, 23 nt, Human
acuugcaaaaagggucaguaugg

SEQ ID NO: 3558256 - RNA, 17 nt, Human
acuugcaaaaucaguuu

SEQ ID NO: 3558257 - RNA, 19 nt, Human
acuugcacgcccaugugug

SEQ ID NO: 3558258 - RNA, 22 nt, Human
acuugcagacucuacagaggcc

SEQ ID NO: 3558259 - RNA, 23 nt, Human
acuugcagacucuacagaggcca

SEQ ID NO: 3558260 - RNA, 14 nt, Human
acuugcaucacuua

SEQ ID NO: 3558261 - RNA, 12 nt, Human
acuugcaugucc

SEQ ID NO: 3558262 - RNA, 19 nt, Human
acuugcaugucccaucacg

SEQ ID NO: 3558263 - RNA, 14 nt, Human
acuugcauuuuugc

SEQ ID NO: 3558264 - RNA, 20 nt, Human
acuugccagaaguuguggau

SEQ ID NO: 3558265 - RNA, 21 nt, Human
acuugccaugugacucuggcu

SEQ ID NO: 3558266 - RNA, 22 nt, Human
acuugccaugugacucuggcuu

SEQ ID NO: 3558267 - RNA, 21 nt, Human
acuugcccacaccgagggcga

SEQ ID NO: 3558268 - RNA, 20 nt, Human
acuugcccugaccaugcauu

SEQ ID NO: 3558269 - RNA, 15 nt, Human
acuugcccugcuccc

SEQ ID NO: 3558270 - RNA, 16 nt, Human
acuugcccugcucccu

SEQ ID NO: 3558271 - RNA, 12 nt, Human
acuugccucuuc

SEQ ID NO: 3558272 - RNA, 21 nt, Human
acuugccucuuuuaccugcug

SEQ ID NO: 3558273 - RNA, 14 nt, Human
acuugccuuugaag

SEQ ID NO: 3558274 - RNA, 16 nt, Human
acuugccuuugaagag

SEQ ID NO: 3558275 - RNA, 16 nt, Human
agaaagggccaggaga

SEQ ID NO: 3558276 - RNA, 20 nt, Human
agaaagggccaggagaugga

SEQ ID NO: 3558277 - RNA, 23 nt, Human
agaaagggcccugggccugccuc

SEQ ID NO: 3558278 - RNA, 16 nt, Human
agaaaggggagcccac

SEQ ID NO: 3558279 - RNA, 20 nt, Human
agaaaggggcaguuuaaagc

SEQ ID NO: 3558280 - RNA, 17 nt, Human
agaaaggguguuuuucu

SEQ ID NO: 3558281 - RNA, 16 nt, Human
agaaagguucugcccg

SEQ ID NO: 3558282 - RNA, 17 nt, Human
agaaaguaaauaaaagg

SEQ ID NO: 3558283 - RNA, 22 nt, Human
agaaaguaaggugcuuggaguu

SEQ ID NO: 3558284 - RNA, 23 nt, Human
agaaaguacuucuccacccugcu

SEQ ID NO: 3558285 - RNA, 14 nt, Human
agaaagugagcagu

SEQ ID NO: 3558286 - RNA, 22 nt, Human
agaaagugccugacacacuaac

SEQ ID NO: 3558287 - RNA, 20 nt, Human
agaaaguggaaaacaaggaa

SEQ ID NO: 3558288 - RNA, 18 nt, Human
agaaagugggaggucagg

SEQ ID NO: 3558289 - RNA, 21 nt, Human
agaaagugggugagaugcugg

SEQ ID NO: 3558290 - RNA, 19 nt, Human
agaaaguggucuuaagaaa

SEQ ID NO: 3558291 - RNA, 13 nt, Human
agaaaguguaaau

SEQ ID NO: 3558292 - RNA, 13 nt, Human
agaaaguguauuu

SEQ ID NO: 3558293 - RNA, 23 nt, Human
agaaagugugagcaaacuaacuu

SEQ ID NO: 3558294 - RNA, 15 nt, Human
agaaagugugcuuua

SEQ ID NO: 3558295 - RNA, 18 nt, Human
agaaaguguucuguuaca

SEQ ID NO: 3558296 - RNA, 11 nt, Human
agaaaguuauu

SEQ ID NO: 3558297 - RNA, 23 nt, Human
agaaaguuauugauaaguucaua

SEQ ID NO: 3558298 - RNA, 14 nt, Human
agaaaguucaugcu

SEQ ID NO: 3558299 - RNA, 12 nt, Human
agaaaguugauu

SEQ ID NO: 3558300 - RNA, 22 nt, Human
agaaaguugcaaggcaaauguu

SEQ ID NO: 3558301 - RNA, 15 nt, Human
agaaauaaaacuguu

SEQ ID NO: 3558302 - RNA, 17 nt, Human
agaaauaaaaggaagcc

SEQ ID NO: 3558303 - RNA, 19 nt, Human
agaaauaagugcccucucc

SEQ ID NO: 3558304 - RNA, 22 nt, Human
agaaauaagugguuauuucuca

SEQ ID NO: 3558305 - RNA, 13 nt, Human
agaaauaaguuuu

SEQ ID NO: 3558306 - RNA, 14 nt, Human
agaaauaaguuuuu

SEQ ID NO: 3558307 - RNA, 14 nt, Human
agaaauaauaaaaa

SEQ ID NO: 3558308 - RNA, 16 nt, Human
agaaauaauaugcauu

SEQ ID NO: 3558309 - RNA, 19 nt, Human
agaaauaaugucaaaaaua

SEQ ID NO: 3558310 - RNA, 18 nt, Human
agaaauacagauaaauga

SEQ ID NO: 3558311 - RNA, 20 nt, Human
agaaauacagauaaaugauu

SEQ ID NO: 3558312 - RNA, 16 nt, Human
agaaauacagauuuug

SEQ ID NO: 3558313 - RNA, 21 nt, Human
agaaauacagauuuugauagc

SEQ ID NO: 3558314 - RNA, 13 nt, Human
agaaauacuguac

SEQ ID NO: 3558315 - RNA, 14 nt, Human
agaaauagacaaaa

SEQ ID NO: 3558316 - RNA, 17 nt, Human
agaaauagacaaaaagu

SEQ ID NO: 3558317 - RNA, 21 nt, Human
agaaauagacaaaaaguauau

SEQ ID NO: 3558318 - RNA, 19 nt, Human
agaaauagcuccguggagc

SEQ ID NO: 3558319 - RNA, 15 nt, Human
agaaauagucgguga

SEQ ID NO: 3558320 - RNA, 18 nt, Human
agaaauauaacacauuuu

SEQ ID NO: 3558321 - RNA, 16 nt, Human
agaaauauauauacau

SEQ ID NO: 3558322 - RNA, 17 nt, Human
agaaauauauauacaua

SEQ ID NO: 3558323 - RNA, 20 nt, Human
agaaauauauauacauaugu

SEQ ID NO: 3558324 - RNA, 19 nt, Human
agaaauaucugaaaaugua

SEQ ID NO: 3558325 - RNA, 19 nt, Human
agaaauaucugugaaauau

SEQ ID NO: 3558326 - RNA, 20 nt, Human
agaaauaucuucacuuguca

SEQ ID NO: 3558327 - RNA, 21 nt, Human
agaaauaugcacaauagcagu

SEQ ID NO: 3558328 - RNA, 16 nt, Human
agaaauaugugagauu

SEQ ID NO: 3558329 - RNA, 14 nt, Human
agaaauaugugguu

SEQ ID NO: 3558330 - RNA, 17 nt, Human
agaaauauuaagcaugu

SEQ ID NO: 3558331 - RNA, 20 nt, Human
agaaauauuugugacaaaaa

SEQ ID NO: 3558332 - RNA, 21 nt, Human
agaaauauuuuaaaaucagcu

SEQ ID NO: 3558333 - RNA, 21 nt, Human
agaaauauuuuaauuuuuaaa

SEQ ID NO: 3558334 - RNA, 23 nt, Human
agaaauauuuuaauuuuuaaaug

SEQ ID NO: 3558335 - RNA, 17 nt, Human
agaaaucaaagagagaa

SEQ ID NO: 3558336 - RNA, 19 nt, Human
agaaaucaaguaaugaauc

SEQ ID NO: 3558337 - RNA, 14 nt, Human
agaaaucauguuau

SEQ ID NO: 3558338 - RNA, 21 nt, Human
agaaaucauuuggguuaauau

SEQ ID NO: 3558339 - RNA, 17 nt, Human
agaaaucauuuugcaau

SEQ ID NO: 3558340 - RNA, 22 nt, Human
agaaaucauuuugcaaucccuu

SEQ ID NO: 3558341 - RNA, 14 nt, Human
agaaaucuagaaga

SEQ ID NO: 3558342 - RNA, 21 nt, Human
agaaaucuauagaaaguguuc

SEQ ID NO: 3558343 - RNA, 13 nt, Human
agaaaucuauuuc

SEQ ID NO: 3558344 - RNA, 18 nt, Human
agaaaucucacuuuucuc

SEQ ID NO: 3558345 - RNA, 16 nt, Human
agaaaugaaaaaauau

SEQ ID NO: 3558346 - RNA, 17 nt, Human
agaaaugaaaaaauaua

SEQ ID NO: 3558347 - RNA, 18 nt, Human
agaaaugaaaaaauauau

SEQ ID NO: 3558348 - RNA, 18 nt, Human
agaaaugaaauuuuacca

SEQ ID NO: 3558349 - RNA, 13 nt, Human
agaaaugaacauu

SEQ ID NO: 3558350 - RNA, 12 nt, Human
agaaaugaauaa

SEQ ID NO: 3558351 - RNA, 23 nt, Human
agaaaugacuuugaaaaccuggc

SEQ ID NO: 3558352 - RNA, 17 nt, Human
agaaaugagaucaggcu

SEQ ID NO: 3558353 - RNA, 22 nt, Human
agaaaugaggaggaugcuaaaa

SEQ ID NO: 3558354 - RNA, 16 nt, Human
agaaaugcaaauucuc

SEQ ID NO: 3558355 - RNA, 18 nt, Human
agaaaugcaaauucucaa

SEQ ID NO: 3558356 - RNA, 12 nt, Human
agaaaugcagaa

SEQ ID NO: 3558357 - RNA, 16 nt, Human
agaaaugcauauugua

SEQ ID NO: 3558358 - RNA, 14 nt, Human
agaaaugccaagca

SEQ ID NO: 3558359 - RNA, 22 nt, Human
agaaaugccaagcacuucuuuu

SEQ ID NO: 3558360 - RNA, 15 nt, Human
agaaaugccuuaccc

SEQ ID NO: 3558361 - RNA, 22 nt, Human
agaaaugcugccugccugucug

SEQ ID NO: 3558362 - RNA, 13 nt, Human
agaaaugcugcug

SEQ ID NO: 3558363 - RNA, 14 nt, Human
agaaaugcugcugg

SEQ ID NO: 3558364 - RNA, 21 nt, Human
agaaaugcugguuuuucaguu

SEQ ID NO: 3558365 - RNA, 15 nt, Human
agaaaugcuuagaaa

SEQ ID NO: 3558366 - RNA, 16 nt, Human
agaaauggaaauuuug

SEQ ID NO: 3558367 - RNA, 21 nt, Human
agaaaugggaaaugccuaaga

SEQ ID NO: 3558368 - RNA, 16 nt, Human
agaaauggugaaaaua

SEQ ID NO: 3558369 - RNA, 20 nt, Human
agaaaugguuguauuagaug

SEQ ID NO: 3558370 - RNA, 21 nt, Human
agaaaugguuguauuagaugu

SEQ ID NO: 3558371 - RNA, 22 nt, Human
agaaaugguuguauuagauguu

SEQ ID NO: 3558372 - RNA, 18 nt, Human
agaaauguaaacugccau

SEQ ID NO: 3558373 - RNA, 17 nt, Human
agaaauguacagcaagg

SEQ ID NO: 3558374 - RNA, 10 nt, Human
agaaauguag

SEQ ID NO: 3558375 - RNA, 20 nt, Human
agaaaugucuaaaugcugaa

SEQ ID NO: 3558376 - RNA, 17 nt, Human
agaaaugucuggagaau

SEQ ID NO: 3558377 - RNA, 19 nt, Human
agaaaugucuggagaauaa

SEQ ID NO: 3558378 - RNA, 12 nt, Human
agaaauuaacuu

SEQ ID NO: 3558379 - RNA, 15 nt, Human
agaaauuagccgggc

SEQ ID NO: 3558380 - RNA, 15 nt, Human
agaaauuagcugugu

SEQ ID NO: 3558381 - RNA, 13 nt, Human
agaaauuagggcu

SEQ ID NO: 3558382 - RNA, 20 nt, Human
agaaauuagggcucuaauuu

SEQ ID NO: 3558383 - RNA, 14 nt, Human
agaaauuauuuaau

SEQ ID NO: 3558384 - RNA, 16 nt, Human
agaaauuauuuaauaa

SEQ ID NO: 3558385 - RNA, 19 nt, Human
agaaauucaauuuggauuu

SEQ ID NO: 3558386 - RNA, 24 nt, Human
agaaauucccuggaccagaugcug

SEQ ID NO: 3558387 - RNA, 13 nt, Human
agaaauuccugua

SEQ ID NO: 3558388 - RNA, 20 nt, Human
agaaauuccuguagcaucuu

SEQ ID NO: 3558389 - RNA, 20 nt, Human
agaaauucguguguuuuuuu

SEQ ID NO: 3558390 - RNA, 11 nt, Human
agaaauucugu

SEQ ID NO: 3558391 - RNA, 21 nt, Human
agaaauucugucauagaaagu

SEQ ID NO: 3558392 - RNA, 18 nt, Human
agaaauucuguuaaaauc

SEQ ID NO: 3558393 - RNA, 21 nt, Human
agaaauucuguuuuuaaaaau

SEQ ID NO: 3558394 - RNA, 17 nt, Human
agaaauugcauuuccug

SEQ ID NO: 3558395 - RNA, 20 nt, Human
agaaauugccuauccugcug

SEQ ID NO: 3558396 - RNA, 19 nt, Human
acccuguuuggauuuuuaa

SEQ ID NO: 3558397 - RNA, 13 nt, Human
acccuuacaguag

SEQ ID NO: 3558398 - RNA, 19 nt, Human
acccuuacaguaggagccc

SEQ ID NO: 3558399 - RNA, 22 nt, Human
acccuuaccaugugccugaucc

SEQ ID NO: 3558400 - RNA, 22 nt, Human
acccuuaccccuuagccucccu

SEQ ID NO: 3558401 - RNA, 13 nt, Human
acccuuagaaucc

SEQ ID NO: 3558402 - RNA, 17 nt, Human
acccuuauugcuguccu

SEQ ID NO: 3558403 - RNA, 19 nt, Human
acccuuauugcuguccugg

SEQ ID NO: 3558404 - RNA, 21 nt, Human
acccuucaacguuucuucacu

SEQ ID NO: 3558405 - RNA, 22 nt, Human
acccuucaacguuucuucacuu

SEQ ID NO: 3558406 - RNA, 19 nt, Human
acccuucaucuuccugugu

SEQ ID NO: 3558407 - RNA, 13 nt, Human
acccuuccagaca

SEQ ID NO: 3558408 - RNA, 22 nt, Human
acccuuccccuccuucucccuu

SEQ ID NO: 3558409 - RNA, 19 nt, Human
acccuucccuugagcccuc

SEQ ID NO: 3558410 - RNA, 20 nt, Human
acccuucccuugagcccucu

SEQ ID NO: 3558411 - RNA, 11 nt, Human
acccuuccuuc

SEQ ID NO: 3558412 - RNA, 16 nt, Human
acccuucucccacucu

SEQ ID NO: 3558413 - RNA, 14 nt, Human
acccuucugugccc

SEQ ID NO: 3558414 - RNA, 16 nt, Human
acccuucugugcccag

SEQ ID NO: 3558415 - RNA, 17 nt, Human
acccuucugugcccagc

SEQ ID NO: 3558416 - RNA, 17 nt, Human
acccuucuucauguuca

SEQ ID NO: 3558417 - RNA, 22 nt, Human
acccuucuucauguucaauuau

SEQ ID NO: 3558418 - RNA, 15 nt, Human
acccuucuuuccucu

SEQ ID NO: 3558419 - RNA, 16 nt, Human
acccuucuuuccucuu

SEQ ID NO: 3558420 - RNA, 11 nt, Human
acccuugacac

SEQ ID NO: 3558421 - RNA, 16 nt, Human
acccuugcccacccca

SEQ ID NO: 3558422 - RNA, 17 nt, Human
acccuugcccaccccac

SEQ ID NO: 3558423 - RNA, 15 nt, Human
acccuuggacuugag

SEQ ID NO: 3558424 - RNA, 13 nt, Human
acccuuggccugu

SEQ ID NO: 3558425 - RNA, 17 nt, Human
acccuuggcucaauccu

SEQ ID NO: 3558426 - RNA, 16 nt, Human
acccuugggccagaag

SEQ ID NO: 3558427 - RNA, 17 nt, Human
acccuugguuccuaacu

SEQ ID NO: 3558428 - RNA, 19 nt, Human
acccuuuccuuccuucccu

SEQ ID NO: 3558429 - RNA, 23 nt, Human
acccuuuccuuccuucccuggcu

SEQ ID NO: 3558430 - RNA, 19 nt, Human
acccuuucuacuuccaaga

SEQ ID NO: 3558431 - RNA, 12 nt, Human
acccuuugcccc

SEQ ID NO: 3558432 - RNA, 13 nt, Human
acccuuugggggu

SEQ ID NO: 3558433 - RNA, 21 nt, Human
acccuuugguuuuuuucuucu

SEQ ID NO: 3558434 - RNA, 15 nt, Human
agaacacccucuaaa

SEQ ID NO: 3558435 - RNA, 12 nt, Human
agaacacuaacc

SEQ ID NO: 3558436 - RNA, 18 nt, Human
agaacacuaacucaccag

SEQ ID NO: 3558437 - RNA, 20 nt, Human
agaacacuaacucaccagcc

SEQ ID NO: 3558438 - RNA, 19 nt, Human
agaacacuaauucauaauc

SEQ ID NO: 3558439 - RNA, 22 nt, Human
agaacacuauuuucagaaucug

SEQ ID NO: 3558440 - RNA, 13 nt, Human
agaacacugccaa

SEQ ID NO: 3558441 - RNA, 17 nt, Human
agaacacugugaaaaca

SEQ ID NO: 3558442 - RNA, 12 nt, Human
agaacagaaaac

SEQ ID NO: 3558443 - RNA, 22 nt, Human
agaacagaaaacaacaaaaaau

SEQ ID NO: 3558444 - RNA, 16 nt, Human
agaacagacuggccug

SEQ ID NO: 3558445 - RNA, 13 nt, Human
agaacagcagagg

SEQ ID NO: 3558446 - RNA, 17 nt, Human
agaacagcaggcccacc

SEQ ID NO: 3558447 - RNA, 23 nt, Human
agaacagcaggguagucugguuu

SEQ ID NO: 3558448 - RNA, 20 nt, Human
agaacagccgcuccugucug

SEQ ID NO: 3558449 - RNA, 12 nt, Human
agaacagcuuca

SEQ ID NO: 3558450 - RNA, 13 nt, Human
agaacagcuucag

SEQ ID NO: 3558451 - RNA, 14 nt, Human
agaacagcuucagg

SEQ ID NO: 3558452 - RNA, 18 nt, Human
agaacagcuucagguuau

SEQ ID NO: 3558453 - RNA, 22 nt, Human
agaacagcuucagguuaucgaa

SEQ ID NO: 3558454 - RNA, 11 nt, Human
agaacaggacu

SEQ ID NO: 3558455 - RNA, 12 nt, Human
agaacaggacua

SEQ ID NO: 3558456 - RNA, 22 nt, Human
agaacagggaaaauaggcagga

SEQ ID NO: 3558457 - RNA, 23 nt, Human
agaacagguguuggugacaauug

SEQ ID NO: 3558458 - RNA, 17 nt, Human
agaacagguuuuuuugu

SEQ ID NO: 3558459 - RNA, 21 nt, Human
agaacagguuuuuuuguuugu

SEQ ID NO: 3558460 - RNA, 14 nt, Human
agaacaguaugaau

SEQ ID NO: 3558461 - RNA, 17 nt, Human
agaacaguaugaauuug

SEQ ID NO: 3558462 - RNA, 20 nt, Human
agaacaguaugaauuugagc

SEQ ID NO: 3558463 - RNA, 22 nt, Human
agaacagugauuaccagggacu

SEQ ID NO: 3558464 - RNA, 22 nt, Human
agaacaguggaaacuauguguu

SEQ ID NO: 3558465 - RNA, 17 nt, Human
agaacaguuaagcagcc

SEQ ID NO: 3558466 - RNA, 20 nt, Human
agaacaguuaagcagccgcc

SEQ ID NO: 3558467 - RNA, 15 nt, Human
agaacaguuuguaca

SEQ ID NO: 3558468 - RNA, 21 nt, Human
agaacauagacagaagaaaca

SEQ ID NO: 3558469 - RNA, 15 nt, Human
agaacaucauuagaa

SEQ ID NO: 3558470 - RNA, 18 nt, Human
agaacaucauuagaacaa

SEQ ID NO: 3558471 - RNA, 15 nt, Human
agaacauccaaggag

SEQ ID NO: 3558472 - RNA, 18 nt, Human
agaacauccaaggagaaa

SEQ ID NO: 3558473 - RNA, 17 nt, Human
agaacaucccuccuggg

SEQ ID NO: 3558474 - RNA, 17 nt, Human
agaacaucccugccagc

SEQ ID NO: 3558475 - RNA, 19 nt, Human
agaacaucccugccagcuc

SEQ ID NO: 3558476 - RNA, 17 nt, Human
agaacaugcaguuugaa

SEQ ID NO: 3558477 - RNA, 18 nt, Human
agaacaugcaguuugaaa

SEQ ID NO: 3558478 - RNA, 19 nt, Human
agaacaugcaguuugaaau

SEQ ID NO: 3558479 - RNA, 22 nt, Human
agaacaugcaguuugaaauucu

SEQ ID NO: 3558480 - RNA, 19 nt, Human
agaacauggacuuguauau

SEQ ID NO: 3558481 - RNA, 14 nt, Human
agaacauguagaaa

SEQ ID NO: 3558482 - RNA, 17 nt, Human
agaacauguagaaaaca

SEQ ID NO: 3558483 - RNA, 22 nt, Human
agaacaugugagagguuugacu

SEQ ID NO: 3558484 - RNA, 16 nt, Human
agaacauguugguauu

SEQ ID NO: 3558485 - RNA, 22 nt, Human
agaacauguugguauuuaucua

SEQ ID NO: 3558486 - RNA, 16 nt, Human
agaacauuuuaauuca

SEQ ID NO: 3558487 - RNA, 20 nt, Human
agaaccaaaaguuuuccuga

SEQ ID NO: 3558488 - RNA, 16 nt, Human
agaaccaaagaagaaa

SEQ ID NO: 3558489 - RNA, 19 nt, Human
agaaccaaagaagaaaguc

SEQ ID NO: 3558490 - RNA, 13 nt, Human
agaaccaaauuaa

SEQ ID NO: 3558491 - RNA, 16 nt, Human
agaaccacacuugaaa

SEQ ID NO: 3558492 - RNA, 19 nt, Human
agaaccacacuugaaaccu

SEQ ID NO: 3558493 - RNA, 20 nt, Human
agaaccacacuugaaaccuu

SEQ ID NO: 3558494 - RNA, 21 nt, Human
agaaccacacuugaaaccuuu

SEQ ID NO: 3558495 - RNA, 22 nt, Human
agaaccaccccggcccccugcc

SEQ ID NO: 3558496 - RNA, 20 nt, Human
agaaccagccauauacacuu

SEQ ID NO: 3558497 - RNA, 20 nt, Human
agaaccaggcaacuugggaa

SEQ ID NO: 3558498 - RNA, 16 nt, Human
agaaccaggcuacaag

SEQ ID NO: 3558499 - RNA, 16 nt, Human
agaaccagucccccca

SEQ ID NO: 3558500 - RNA, 20 nt, Human
agaaccaguccccccacccu

SEQ ID NO: 3558501 - RNA, 14 nt, Human
agaacccagggcuc

SEQ ID NO: 3558502 - RNA, 19 nt, Human
agaacccagggcucugccc

SEQ ID NO: 3558503 - RNA, 22 nt, Human
agaacccagggcucugccccag

SEQ ID NO: 3558504 - RNA, 21 nt, Human
agaacccauggaaaaaugcca

SEQ ID NO: 3558505 - RNA, 23 nt, Human
agaacccugccauggaacuguuu

SEQ ID NO: 3558506 - RNA, 20 nt, Human
agaacccugcguggggacag

SEQ ID NO: 3558507 - RNA, 20 nt, Human
agaacccuuggcuugcccac

SEQ ID NO: 3558508 - RNA, 15 nt, Human
agaaccuaacuguau

SEQ ID NO: 3558509 - RNA, 19 nt, Human
agaaccuaacuguaucuug

SEQ ID NO: 3558510 - RNA, 13 nt, Human
agaaccucuuccc

SEQ ID NO: 3558511 - RNA, 22 nt, Human
agaaccucuuugucuacaccau

SEQ ID NO: 3558512 - RNA, 13 nt, Human
agaaccuggaacu

SEQ ID NO: 3558513 - RNA, 21 nt, Human
agaaccuggaacuuggggagu

SEQ ID NO: 3558514 - RNA, 15 nt, Human
agaaccuggaagggc

SEQ ID NO: 3558515 - RNA, 16 nt, Human
agaaccuggaagggcu

SEQ ID NO: 3558516 - RNA, 13 nt, Human
agaaccuggccuu

SEQ ID NO: 3558517 - RNA, 22 nt, Human
agaaccuggccuucaguguacc

SEQ ID NO: 3558518 - RNA, 21 nt, Human
agaaccuguccuugcacacuc

SEQ ID NO: 3558519 - RNA, 19 nt, Human
agaaccuugccugaacauc

SEQ ID NO: 3558520 - RNA, 23 nt, Human
agaaccuugugccuggcucagag

SEQ ID NO: 3558521 - RNA, 22 nt, Human
agaacgccagggaccccagaau

SEQ ID NO: 3558522 - RNA, 13 nt, Human
agaacggaagaag

SEQ ID NO: 3558523 - RNA, 19 nt, Human
agaacggggcucuucucau

SEQ ID NO: 3558524 - RNA, 17 nt, Human
agaacguggcucugcug

SEQ ID NO: 3558525 - RNA, 16 nt, Human
agaacguuuuuuccuc

SEQ ID NO: 3558526 - RNA, 19 nt, Human
agaacuaaacuaguuuuuc

SEQ ID NO: 3558527 - RNA, 18 nt, Human
agaacuaaacucauuuau

SEQ ID NO: 3558528 - RNA, 18 nt, Human
agaacuaaagguggccac

SEQ ID NO: 3558529 - RNA, 16 nt, Human
agaacuaaauguucua

SEQ ID NO: 3558530 - RNA, 18 nt, Human
agaacuaccaccugacau

SEQ ID NO: 3558531 - RNA, 19 nt, Human
agaacuacucagggaauga

SEQ ID NO: 3558532 - RNA, 21 nt, Human
agaacuagccaaaccaggacc

SEQ ID NO: 3558533 - RNA, 16 nt, Human
agaacuauaugugaau

SEQ ID NO: 3558534 - RNA, 21 nt, Human
agaacuauugugcucagagac

SEQ ID NO: 3558535 - RNA, 17 nt, Human
agaacucaguuuuaacu

SEQ ID NO: 3558536 - RNA, 15 nt, Human
agaacuccaggcccu

SEQ ID NO: 3558537 - RNA, 14 nt, Human
agaacucccuuuca

SEQ ID NO: 3558538 - RNA, 17 nt, Human
agaacucccuuucaaca

SEQ ID NO: 3558539 - RNA, 15 nt, Human
agaacuccugacugu

SEQ ID NO: 3558540 - RNA, 21 nt, Human
accguguugguuuugacugga

SEQ ID NO: 3558541 - RNA, 13 nt, Human
accguugucucau

SEQ ID NO: 3558542 - RNA, 17 nt, Human
accuaaaaaaagagaau

SEQ ID NO: 3558543 - RNA, 13 nt, Human
accuaaaaaagau

SEQ ID NO: 3558544 - RNA, 13 nt, Human
accuaaaagagau

SEQ ID NO: 3558545 - RNA, 21 nt, Human
accuaaaauuugcccucccau

SEQ ID NO: 3558546 - RNA, 22 nt, Human
accuaaaauuugcccucccauc

SEQ ID NO: 3558547 - RNA, 15 nt, Human
accuaaacagauaua

SEQ ID NO: 3558548 - RNA, 13 nt, Human
accuaaagaaaaa

SEQ ID NO: 3558549 - RNA, 20 nt, Human
accuaaagguguauuuaaac

SEQ ID NO: 3558550 - RNA, 16 nt, Human
accuaaauaaccaauc

SEQ ID NO: 3558551 - RNA, 13 nt, Human
accuaaaugaaua

SEQ ID NO: 3558552 - RNA, 12 nt, Human
accuaacauucg

SEQ ID NO: 3558553 - RNA, 13 nt, Human
accuaacccagaa

SEQ ID NO: 3558554 - RNA, 16 nt, Human
accuaaccccuuuccu

SEQ ID NO: 3558555 - RNA, 17 nt, Human
accuaaccccuuuccug

SEQ ID NO: 3558556 - RNA, 12 nt, Human
accuaaccugug

SEQ ID NO: 3558557 - RNA, 17 nt, Human
accuaaccugugucugc

SEQ ID NO: 3558558 - RNA, 21 nt, Human
accuaacucaccuaacucaua

SEQ ID NO: 3558559 - RNA, 17 nt, Human
accuaacucuucuuuca

SEQ ID NO: 3558560 - RNA, 15 nt, Human
accuaaguacuguaa

SEQ ID NO: 3558561 - RNA, 16 nt, Human
accuaagucucuguga

SEQ ID NO: 3558562 - RNA, 16 nt, Human
accuaaucaggcugag

SEQ ID NO: 3558563 - RNA, 17 nt, Human
accuaaucaggcugagg

SEQ ID NO: 3558564 - RNA, 22 nt, Human
accuaauccaggcagauccagg

SEQ ID NO: 3558565 - RNA, 21 nt, Human
accuaaucucuguaaagcuaa

SEQ ID NO: 3558566 - RNA, 20 nt, Human
accuaaugcuccuuguuccu

SEQ ID NO: 3558567 - RNA, 22 nt, Human
accuaauucgaugaaggcugcc

SEQ ID NO: 3558568 - RNA, 23 nt, Human
accuaauugcacaacagagacug

SEQ ID NO: 3558569 - RNA, 16 nt, Human
accuacacacugucau

SEQ ID NO: 3558570 - RNA, 23 nt, Human
accuacacacugucaugcuucau

SEQ ID NO: 3558571 - RNA, 13 nt, Human
accuacagaauac

SEQ ID NO: 3558572 - RNA, 17 nt, Human
accuacagggggucugg

SEQ ID NO: 3558573 - RNA, 19 nt, Human
accuacagggggucuggcu

SEQ ID NO: 3558574 - RNA, 22 nt, Human
accuacagggggucuggcuggu

SEQ ID NO: 3558575 - RNA, 23 nt, Human
accuacagggggucuggcuggug

SEQ ID NO: 3558576 - RNA, 11 nt, Human
accuacaguuu

SEQ ID NO: 3558577 - RNA, 15 nt, Human
accuacauguauuug

SEQ ID NO: 3558578 - RNA, 14 nt, Human
accuaccaaaaugg

SEQ ID NO: 3558579 - RNA, 15 nt, Human
accuaccacaguguc

SEQ ID NO: 3558580 - RNA, 20 nt, Human
accuaccccugacuucuguu

SEQ ID NO: 3558581 - RNA, 12 nt, Human
accuaccucagg

SEQ ID NO: 3558582 - RNA, 19 nt, Human
accuacugcccaggcacug

SEQ ID NO: 3558583 - RNA, 13 nt, Human
accuacuuucuuc

SEQ ID NO: 3558584 - RNA, 21 nt, Human
accuacuuugacuuuuugcau

SEQ ID NO: 3558585 - RNA, 12 nt, Human
accuagaaaaca

SEQ ID NO: 3558586 - RNA, 22 nt, Human
accuagaaauugacacaagugg

SEQ ID NO: 3558587 - RNA, 22 nt, Human
accuagagaacaggugguuuuu

SEQ ID NO: 3558588 - RNA, 13 nt, Human
accuagagaagau

SEQ ID NO: 3558589 - RNA, 21 nt, Human
accuagcagcaccguucugug

SEQ ID NO: 3558590 - RNA, 16 nt, Human
accuagcuaauuauuu

SEQ ID NO: 3558591 - RNA, 19 nt, Human
accuagcugaauguuuuuc

SEQ ID NO: 3558592 - RNA, 22 nt, Human
accuagcugaauguuuuucuaa

SEQ ID NO: 3558593 - RNA, 16 nt, Human
agaagaaagaggugac

SEQ ID NO: 3558594 - RNA, 12 nt, Human
agaagaaaugaa

SEQ ID NO: 3558595 - RNA, 17 nt, Human
agaagaaaugaaauuuu

SEQ ID NO: 3558596 - RNA, 14 nt, Human
agaagaaaugaaua

SEQ ID NO: 3558597 - RNA, 13 nt, Human
agaagaacaucca

SEQ ID NO: 3558598 - RNA, 13 nt, Human
agaagaacugaaa

SEQ ID NO: 3558599 - RNA, 21 nt, Human
agaagaacugaaaucauacuu

SEQ ID NO: 3558600 - RNA, 10 nt, Human
agaagaagaa

SEQ ID NO: 3558601 - RNA, 11 nt, Human
agaagaagaaa

SEQ ID NO: 3558602 - RNA, 14 nt, Human
agaagaagaaaaaa

SEQ ID NO: 3558603 - RNA, 14 nt, Human
agaagaagaaaaga

SEQ ID NO: 3558604 - RNA, 15 nt, Human
agaagaagaaaagag

SEQ ID NO: 3558605 - RNA, 17 nt, Human
agaagaaggaaaugaau

SEQ ID NO: 3558606 - RNA, 21 nt, Human
agaagaaggaaaugaauuucu

SEQ ID NO: 3558607 - RNA, 16 nt, Human
agaagaaguucauguc

SEQ ID NO: 3558608 - RNA, 15 nt, Human
agaagaauauucagg

SEQ ID NO: 3558609 - RNA, 16 nt, Human
agaagaauauuguauu

SEQ ID NO: 3558610 - RNA, 22 nt, Human
agaagaaugcaugcuuuccaua

SEQ ID NO: 3558611 - RNA, 13 nt, Human
agaagacaaaauu

SEQ ID NO: 3558612 - RNA, 16 nt, Human
agaagacaaacuuugc

SEQ ID NO: 3558613 - RNA, 17 nt, Human
agaagacaccagagcag

SEQ ID NO: 3558614 - RNA, 18 nt, Human
agaagacaccagagcaga

SEQ ID NO: 3558615 - RNA, 23 nt, Human
agaagacaccagagcagaugcag

SEQ ID NO: 3558616 - RNA, 12 nt, Human
agaagacacugc

SEQ ID NO: 3558617 - RNA, 19 nt, Human
agaagacauggagacuccu

SEQ ID NO: 3558618 - RNA, 20 nt, Human
agaagacauggagacuccug

SEQ ID NO: 3558619 - RNA, 15 nt, Human
agaagacauuugcca

SEQ ID NO: 3558620 - RNA, 16 nt, Human
agaagagaggagagga

SEQ ID NO: 3558621 - RNA, 22 nt, Human
agaagagaugggcuuguuuucu

SEQ ID NO: 3558622 - RNA, 13 nt, Human
agaagagccacag

SEQ ID NO: 3558623 - RNA, 14 nt, Human
agaagagccccacu

SEQ ID NO: 3558624 - RNA, 22 nt, Human
agaagagccccacucucagagg

SEQ ID NO: 3558625 - RNA, 20 nt, Human
agaagagccggagccuccag

SEQ ID NO: 3558626 - RNA, 24 nt, Human
agaagagcgagagaucaaagauga

SEQ ID NO: 3558627 - RNA, 21 nt, Human
agaagagcuguucacagccag

SEQ ID NO: 3558628 - RNA, 17 nt, Human
agaagaggcagauucaa

SEQ ID NO: 3558629 - RNA, 14 nt, Human
agaagagggccugu

SEQ ID NO: 3558630 - RNA, 16 nt, Human
agaagagggccugugg

SEQ ID NO: 3558631 - RNA, 15 nt, Human
agaagagggguuuuu

SEQ ID NO: 3558632 - RNA, 17 nt, Human
agaagauaauuguugaa

SEQ ID NO: 3558633 - RNA, 22 nt, Human
agaagauauuagucuuggggca

SEQ ID NO: 3558634 - RNA, 18 nt, Human
agaagauccuaaaacaaa

SEQ ID NO: 3558635 - RNA, 16 nt, Human
agaagauccuacccca

SEQ ID NO: 3558636 - RNA, 12 nt, Human
agaagaugaaaa

SEQ ID NO: 3558637 - RNA, 13 nt, Human
agaagaugaauac

SEQ ID NO: 3558638 - RNA, 14 nt, Human
agaagaugaauaca

SEQ ID NO: 3558639 - RNA, 16 nt, Human
agaagaugaucagacc

SEQ ID NO: 3558640 - RNA, 14 nt, Human
agaagaugcuccag

SEQ ID NO: 3558641 - RNA, 18 nt, Human
agaagaugguaccaccag

SEQ ID NO: 3558642 - RNA, 19 nt, Human
agaagauuugaugcuggag

SEQ ID NO: 3558643 - RNA, 22 nt, Human
agaagauuugaugcuggagagg

SEQ ID NO: 3558644 - RNA, 23 nt, Human
agaagauuugaugcuggagaggu

SEQ ID NO: 3558645 - RNA, 18 nt, Human
agaagauuuugaaauuuu

SEQ ID NO: 3558646 - RNA, 13 nt, Human
agaagcaaguaaa

SEQ ID NO: 3558647 - RNA, 19 nt, Human
agaagcacagaauauuuuu

SEQ ID NO: 3558648 - RNA, 21 nt, Human
agaagcacagaauauuuuuau

SEQ ID NO: 3558649 - RNA, 19 nt, Human
agaagcaccaaucaugaau

SEQ ID NO: 3558650 - RNA, 12 nt, Human
agaagcagcucu

SEQ ID NO: 3558651 - RNA, 14 nt, Human
agaagcaggcugga

SEQ ID NO: 3558652 - RNA, 13 nt, Human
agaagcagugagc

SEQ ID NO: 3558653 - RNA, 14 nt, Human
agaagcagugagcc

SEQ ID NO: 3558654 - RNA, 23 nt, Human
agaagcaguuguaccaagugaaa

SEQ ID NO: 3558655 - RNA, 13 nt, Human
agaagcaugaaaa

SEQ ID NO: 3558656 - RNA, 17 nt, Human
agaagcaugaagucuua

SEQ ID NO: 3558657 - RNA, 19 nt, Human
agaagcauuccuucuuuga

SEQ ID NO: 3558658 - RNA, 20 nt, Human
agaagcauuccuucuuugau

SEQ ID NO: 3558659 - RNA, 22 nt, Human
agaagcauuccuucuuugauaa

SEQ ID NO: 3558660 - RNA, 22 nt, Human
agaagcauucucauuggaaauu

SEQ ID NO: 3558661 - RNA, 18 nt, Human
agaagccaagggaaaggg

SEQ ID NO: 3558662 - RNA, 22 nt, Human
agaagccaagggaaaggggugc

SEQ ID NO: 3558663 - RNA, 22 nt, Human
agaagccaaucuacaaucucuu

SEQ ID NO: 3558664 - RNA, 17 nt, Human
agaagccacaggccuga

SEQ ID NO: 3558665 - RNA, 21 nt, Human
agaagccacaggccugagauu

SEQ ID NO: 3558666 - RNA, 14 nt, Human
agaagccagcuugu

SEQ ID NO: 3558667 - RNA, 15 nt, Human
agaagccagcuuguu

SEQ ID NO: 3558668 - RNA, 20 nt, Human
agaagccaucaccucagaug

SEQ ID NO: 3558669 - RNA, 10 nt, Human
agaagccauu

SEQ ID NO: 3558670 - RNA, 14 nt, Human
agaagccauugucu

SEQ ID NO: 3558671 - RNA, 12 nt, Human
agaagcccagga

SEQ ID NO: 3558672 - RNA, 21 nt, Human
agaagccccacccugccucac

SEQ ID NO: 3558673 - RNA, 14 nt, Human
agaagcccccagcu

SEQ ID NO: 3558674 - RNA, 15 nt, Human
agaagccccuucccc

SEQ ID NO: 3558675 - RNA, 13 nt, Human
agaagcccggcuc

SEQ ID NO: 3558676 - RNA, 15 nt, Human
agaagcccggcuccu

SEQ ID NO: 3558677 - RNA, 18 nt, Human
agaagcccggcuccuggu

SEQ ID NO: 3558678 - RNA, 20 nt, Human
agaagcccgugugagaagug

SEQ ID NO: 3558679 - RNA, 18 nt, Human
agaagccgggaacagaca

SEQ ID NO: 3558680 - RNA, 14 nt, Human
agaagccuauugua

SEQ ID NO: 3558681 - RNA, 22 nt, Human
agaagccuauuguaaauacaag

SEQ ID NO: 3558682 - RNA, 23 nt, Human
agaagccuauuguaaauacaagu

SEQ ID NO: 3558683 - RNA, 14 nt, Human
agaagccucuggcu

SEQ ID NO: 3558684 - RNA, 22 nt, Human
agaagccucugggucagugguc

SEQ ID NO: 3558685 - RNA, 15 nt, Human
accucugcuuuuauc

SEQ ID NO: 3558686 - RNA, 18 nt, Human
accucuggauucauuguc

SEQ ID NO: 3558687 - RNA, 14 nt, Human
accucugggagcug

SEQ ID NO: 3558688 - RNA, 10 nt, Human
accucugggc

SEQ ID NO: 3558689 - RNA, 23 nt, Human
accucuguaauuuuucagcucuc

SEQ ID NO: 3558690 - RNA, 17 nt, Human
accucugugaccucagg

SEQ ID NO: 3558691 - RNA, 19 nt, Human
accucugugaccucaggca

SEQ ID NO: 3558692 - RNA, 16 nt, Human
accucugugccucugu

SEQ ID NO: 3558693 - RNA, 20 nt, Human
accucuguuguccuccccuu

SEQ ID NO: 3558694 - RNA, 21 nt, Human
accucuuaaagaaaacccacc

SEQ ID NO: 3558695 - RNA, 20 nt, Human
accucuuaacaauuucuguc

SEQ ID NO: 3558696 - RNA, 16 nt, Human
accucuucucuuccug

SEQ ID NO: 3558697 - RNA, 17 nt, Human
accucuucucuuccugu

SEQ ID NO: 3558698 - RNA, 14 nt, Human
accucuucuggcuc

SEQ ID NO: 3558699 - RNA, 21 nt, Human
accucuugagccuugaacuuu

SEQ ID NO: 3558700 - RNA, 15 nt, Human
accucuugcugucuc

SEQ ID NO: 3558701 - RNA, 18 nt, Human
accucuugcugucucugc

SEQ ID NO: 3558702 - RNA, 17 nt, Human
accucuuuaaguauuga

SEQ ID NO: 3558703 - RNA, 19 nt, Human
accucuuuauuuuuugauu

SEQ ID NO: 3558704 - RNA, 18 nt, Human
accugaaaacacugugca

SEQ ID NO: 3558705 - RNA, 21 nt, Human
accugaaaacacugugcacau

SEQ ID NO: 3558706 - RNA, 12 nt, Human
accugaaaagau

SEQ ID NO: 3558707 - RNA, 14 nt, Human
accugaaccuagga

SEQ ID NO: 3558708 - RNA, 15 nt, Human
accugaagucuuugu

SEQ ID NO: 3558709 - RNA, 15 nt, Human
accugaaguucacca

SEQ ID NO: 3558710 - RNA, 18 nt, Human
accugaauaaagaaugaa

SEQ ID NO: 3558711 - RNA, 16 nt, Human
accugaaugcucugua

SEQ ID NO: 3558712 - RNA, 12 nt, Human
accugacagaug

SEQ ID NO: 3558713 - RNA, 17 nt, Human
accugacagccccuccc

SEQ ID NO: 3558714 - RNA, 17 nt, Human
accugaccaacauggag

SEQ ID NO: 3558715 - RNA, 16 nt, Human
accugaccucuugcug

SEQ ID NO: 3558716 - RNA, 22 nt, Human
accugaccucuugcugucucug

SEQ ID NO: 3558717 - RNA, 17 nt, Human
accugacucaggcauca

SEQ ID NO: 3558718 - RNA, 13 nt, Human
accugacucugaa

SEQ ID NO: 3558719 - RNA, 22 nt, Human
accugacucugaaaucugaaga

SEQ ID NO: 3558720 - RNA, 23 nt, Human
accugagaccaguugggagcacu

SEQ ID NO: 3558721 - RNA, 16 nt, Human
accugagauggcccuc

SEQ ID NO: 3558722 - RNA, 21 nt, Human
accugagauggcccucuggua

SEQ ID NO: 3558723 - RNA, 21 nt, Human
accugagcccggaugcuucuc

SEQ ID NO: 3558724 - RNA, 14 nt, Human
accugagccugccg

SEQ ID NO: 3558725 - RNA, 15 nt, Human
accugagcuccccac

SEQ ID NO: 3558726 - RNA, 20 nt, Human
accugaggacauggcuucug

SEQ ID NO: 3558727 - RNA, 15 nt, Human
accugaggcccuucu

SEQ ID NO: 3558728 - RNA, 16 nt, Human
accugaggcccuucuc

SEQ ID NO: 3558729 - RNA, 22 nt, Human
accugaggcccuucucuccagc

SEQ ID NO: 3558730 - RNA, 23 nt, Human
accugaggcccuucucuccagcc

SEQ ID NO: 3558731 - RNA, 14 nt, Human
accugaggcugguu

SEQ ID NO: 3558732 - RNA, 14 nt, Human
accugaggcugugg

SEQ ID NO: 3558733 - RNA, 23 nt, Human
accugagggcagaaagguucugc

SEQ ID NO: 3558734 - RNA, 14 nt, Human
accugaggggccuc

SEQ ID NO: 3558735 - RNA, 17 nt, Human
accugagggucuguagg

SEQ ID NO: 3558736 - RNA, 18 nt, Human
accugagggucuguaggu

SEQ ID NO: 3558737 - RNA, 22 nt, Human
accugaggucgggaguuggaga

SEQ ID NO: 3558738 - RNA, 18 nt, Human
accugaggugggcccagg

SEQ ID NO: 3558739 - RNA, 22 nt, Human
accugagucacccuaccugugc

SEQ ID NO: 3558740 - RNA, 21 nt, Human
accugagucguacagaaagcu

SEQ ID NO: 3558741 - RNA, 19 nt, Human
accugauacggcuccccag

SEQ ID NO: 3558742 - RNA, 17 nt, Human
accugaucaaugacaga

SEQ ID NO: 3558743 - RNA, 18 nt, Human
accugaucacuagccugu

SEQ ID NO: 3558744 - RNA, 19 nt, Human
accugaucacuagccuguc

SEQ ID NO: 3558745 - RNA, 22 nt, Human
accugauccuggaggcccaguu

SEQ ID NO: 3558746 - RNA, 14 nt, Human
accugaugaaaaua

SEQ ID NO: 3558747 - RNA, 15 nt, Human
accugaugaaaauaa

SEQ ID NO: 3558748 - RNA, 18 nt, Human
accugaugaaaauaaaga

SEQ ID NO: 3558749 - RNA, 21 nt, Human
accugaugaaaauaaagaaug

SEQ ID NO: 3558750 - RNA, 15 nt, Human
accugauguguacau

SEQ ID NO: 3558751 - RNA, 22 nt, Human
accugauuaacugaggcaucca

SEQ ID NO: 3558752 - RNA, 19 nt, Human
accugauucaacuaaaaaa

SEQ ID NO: 3558753 - RNA, 14 nt, Human
accugauugugucu

SEQ ID NO: 3558754 - RNA, 15 nt, Human
accugauugugucuc

SEQ ID NO: 3558755 - RNA, 17 nt, Human
accugauugugucucuu

SEQ ID NO: 3558756 - RNA, 18 nt, Human
accugauugugucucuug

SEQ ID NO: 3558757 - RNA, 17 nt, Human
accugauuuuuuuuccu

SEQ ID NO: 3558758 - RNA, 20 nt, Human
accugcaagggcuccccacu

SEQ ID NO: 3558759 - RNA, 16 nt, Human
accugcaccucccccc

SEQ ID NO: 3558760 - RNA, 18 nt, Human
accugcaccuccccccac

SEQ ID NO: 3558761 - RNA, 17 nt, Human
accugcacuaacagagu

SEQ ID NO: 3558762 - RNA, 23 nt, Human
accugcacuggggagcccgucuc

SEQ ID NO: 3558763 - RNA, 19 nt, Human
accugcaggccaagagcag

SEQ ID NO: 3558764 - RNA, 17 nt, Human
accugcagguugggcca

SEQ ID NO: 3558765 - RNA, 14 nt, Human
accugcauaaaaag

SEQ ID NO: 3558766 - RNA, 16 nt, Human
accugcaucuggggcc

SEQ ID NO: 3558767 - RNA, 17 nt, Human
accugccacccugggcc

SEQ ID NO: 3558768 - RNA, 21 nt, Human
accugccacucacacagccag

SEQ ID NO: 3558769 - RNA, 16 nt, Human
accugccagccuggcu

SEQ ID NO: 3558770 - RNA, 12 nt, Human
accugccaggaa

SEQ ID NO: 3558771 - RNA, 19 nt, Human
accugccaggaagccagca

SEQ ID NO: 3558772 - RNA, 12 nt, Human
accugccaggga

SEQ ID NO: 3558773 - RNA, 13 nt, Human
accugccagggac

SEQ ID NO: 3558774 - RNA, 15 nt, Human
accugccagggacag

SEQ ID NO: 3558775 - RNA, 16 nt, Human
accugccagggacaga

SEQ ID NO: 3558776 - RNA, 18 nt, Human
accugccagggagacaga

SEQ ID NO: 3558777 - RNA, 21 nt, Human
accugccagggagacagagcu

SEQ ID NO: 3558778 - RNA, 16 nt, Human
accugccaugccagga

SEQ ID NO: 3558779 - RNA, 15 nt, Human
accugccauuugcac

SEQ ID NO: 3558780 - RNA, 22 nt, Human
accugcccagaucccagaagga

SEQ ID NO: 3558781 - RNA, 22 nt, Human
accugccccacuuguccuuagc

SEQ ID NO: 3558782 - RNA, 14 nt, Human
accugccccauccc

SEQ ID NO: 3558783 - RNA, 22 nt, Human
accugcccccuucucccacacu

SEQ ID NO: 3558784 - RNA, 15 nt, Human
accugccccucaacu

SEQ ID NO: 3558785 - RNA, 18 nt, Human
accugccccuccucucug

SEQ ID NO: 3558786 - RNA, 14 nt, Human
accugcccucaagg

SEQ ID NO: 3558787 - RNA, 17 nt, Human
accugcccugcccugcc

SEQ ID NO: 3558788 - RNA, 21 nt, Human
accugcccugcccugccaccu

SEQ ID NO: 3558789 - RNA, 14 nt, Human
agaauuuugugaaa

SEQ ID NO: 3558790 - RNA, 22 nt, Human
agaauuuugugaaacagacuug

SEQ ID NO: 3558791 - RNA, 16 nt, Human
agaauuuuuuugucuu

SEQ ID NO: 3558792 - RNA, 14 nt, Human
agaauuuuuuuugu

SEQ ID NO: 3558793 - RNA, 15 nt, Human
agaauuuuuuuuguu

SEQ ID NO: 3558794 - RNA, 12 nt, Human
agacaaaaagua

SEQ ID NO: 3558795 - RNA, 17 nt, Human
agacaaaaauacucuaa

SEQ ID NO: 3558796 - RNA, 19 nt, Human
agacaaaacauacauuuug

SEQ ID NO: 3558797 - RNA, 15 nt, Human
agacaaaagagcagu

SEQ ID NO: 3558798 - RNA, 14 nt, Human
agacaaaauguuuu

SEQ ID NO: 3558799 - RNA, 21 nt, Human
agacaaacuguaaaaaaugug

SEQ ID NO: 3558800 - RNA, 18 nt, Human
agacaaagguuuuccucu

SEQ ID NO: 3558801 - RNA, 19 nt, Human
agacaaauagaaaaugguc

SEQ ID NO: 3558802 - RNA, 18 nt, Human
agacaaaucaacagaagc

SEQ ID NO: 3558803 - RNA, 21 nt, Human
agacaaaucaacagaagcauu

SEQ ID NO: 3558804 - RNA, 23 nt, Human
agacaaaucuaugccacucagaa

SEQ ID NO: 3558805 - RNA, 18 nt, Human
agacaaaugcugcgcccu

SEQ ID NO: 3558806 - RNA, 18 nt, Human
agacaaauggaggaauau

SEQ ID NO: 3558807 - RNA, 13 nt, Human
agacaagaaaucc

SEQ ID NO: 3558808 - RNA, 18 nt, Human
agacaagaaaucccuguu

SEQ ID NO: 3558809 - RNA, 15 nt, Human
agacaagagauggga

SEQ ID NO: 3558810 - RNA, 15 nt, Human
agacaagauauugua

SEQ ID NO: 3558811 - RNA, 21 nt, Human
agacaagauauuguacauaaa

SEQ ID NO: 3558812 - RNA, 22 nt, Human
agacaagauauuguacauaaaa

SEQ ID NO: 3558813 - RNA, 21 nt, Human
agacaagauuuuuuaauuguu

SEQ ID NO: 3558814 - RNA, 14 nt, Human
agacaagcaacagg

SEQ ID NO: 3558815 - RNA, 15 nt, Human
agacaagccagaacu

SEQ ID NO: 3558816 - RNA, 20 nt, Human
agacaagugacuguaucugu

SEQ ID NO: 3558817 - RNA, 22 nt, Human
agacaauaaacccucagagccu

SEQ ID NO: 3558818 - RNA, 20 nt, Human
agacaauaugugagugccuu

SEQ ID NO: 3558819 - RNA, 21 nt, Human
agacaauaugugagugccuuu

SEQ ID NO: 3558820 - RNA, 14 nt, Human
agacaaucuucugu

SEQ ID NO: 3558821 - RNA, 20 nt, Human
agacaaugacuuacuguaca

SEQ ID NO: 3558822 - RNA, 22 nt, Human
agacaaugacuuacuguacaug

SEQ ID NO: 3558823 - RNA, 17 nt, Human
agacaaugcagaugcca

SEQ ID NO: 3558824 - RNA, 18 nt, Human
agacaauggacccuuuuu

SEQ ID NO: 3558825 - RNA, 21 nt, Human
agacaaugucugcagcccuga

SEQ ID NO: 3558826 - RNA, 21 nt, Human
agacaauuuauuauggcacau

SEQ ID NO: 3558827 - RNA, 16 nt, Human
agacaauuugauacau

SEQ ID NO: 3558828 - RNA, 22 nt, Human
agacaauuugauacauaauaaa

SEQ ID NO: 3558829 - RNA, 20 nt, Human
accuggaauauauaaccagu

SEQ ID NO: 3558830 - RNA, 16 nt, Human
accuggaccaaagcug

SEQ ID NO: 3558831 - RNA, 20 nt, Human
accuggagagcuagaaccug

SEQ ID NO: 3558832 - RNA, 16 nt, Human
accuggagauggugga

SEQ ID NO: 3558833 - RNA, 16 nt, Human
accuggagccccuggg

SEQ ID NO: 3558834 - RNA, 18 nt, Human
accuggagccccugggug

SEQ ID NO: 3558835 - RNA, 20 nt, Human
accuggagggcuagaaccug

SEQ ID NO: 3558836 - RNA, 23 nt, Human
accuggagggcuagaaccuggag

SEQ ID NO: 3558837 - RNA, 19 nt, Human
accuggaguuccugaaccu

SEQ ID NO: 3558838 - RNA, 20 nt, Human
accuggcaagcuagaaccug

SEQ ID NO: 3558839 - RNA, 14 nt, Human
accuggcacugcug

SEQ ID NO: 3558840 - RNA, 17 nt, Human
accuggcacugcugugc

SEQ ID NO: 3558841 - RNA, 17 nt, Human
accuggcccaucagggu

SEQ ID NO: 3558842 - RNA, 18 nt, Human
accuggcccucucugaag

SEQ ID NO: 3558843 - RNA, 17 nt, Human
accuggcccuggggccu

SEQ ID NO: 3558844 - RNA, 19 nt, Human
accuggcugagguuccucu

SEQ ID NO: 3558845 - RNA, 22 nt, Human
accuggcugagguuccucugcc

SEQ ID NO: 3558846 - RNA, 16 nt, Human
accuggcugccauacu

SEQ ID NO: 3558847 - RNA, 20 nt, Human
accuggcuuuucuuucuacc

SEQ ID NO: 3558848 - RNA, 22 nt, Human
accugggaggcggauguugaag

SEQ ID NO: 3558849 - RNA, 14 nt, Human
accugggcaccugg

SEQ ID NO: 3558850 - RNA, 15 nt, Human
accugggcauaucca

SEQ ID NO: 3558851 - RNA, 14 nt, Human
accuggggagccag

SEQ ID NO: 3558852 - RNA, 13 nt, Human
accuggggagugg

SEQ ID NO: 3558853 - RNA, 18 nt, Human
accuggggcacaguccag

SEQ ID NO: 3558854 - RNA, 19 nt, Human
accuggggcagucaccugc

SEQ ID NO: 3558855 - RNA, 14 nt, Human
accuggggcugcug

SEQ ID NO: 3558856 - RNA, 15 nt, Human
accuggggcugcugg

SEQ ID NO: 3558857 - RNA, 20 nt, Human
accuggggcugcuggccuga

SEQ ID NO: 3558858 - RNA, 19 nt, Human
accuggggcugcugugaag

SEQ ID NO: 3558859 - RNA, 21 nt, Human
accuggggugugggaggcccg

SEQ ID NO: 3558860 - RNA, 19 nt, Human
accuggguaaaugcagcgu

SEQ ID NO: 3558861 - RNA, 19 nt, Human
accuggguauguguaggca

SEQ ID NO: 3558862 - RNA, 14 nt, Human
accuggguccaaau

SEQ ID NO: 3558863 - RNA, 15 nt, Human
accuggguccaaaua

SEQ ID NO: 3558864 - RNA, 17 nt, Human
accuggguccaaauaaa

SEQ ID NO: 3558865 - RNA, 21 nt, Human
accuggucacaggacucugcc

SEQ ID NO: 3558866 - RNA, 22 nt, Human
accuggucacaggacucugccu

SEQ ID NO: 3558867 - RNA, 23 nt, Human
accuggucacaggacucugccuc

SEQ ID NO: 3558868 - RNA, 11 nt, Human
accuggugcug

SEQ ID NO: 3558869 - RNA, 13 nt, Human
accuggugcugga

SEQ ID NO: 3558870 - RNA, 15 nt, Human
accugguggccucug

SEQ ID NO: 3558871 - RNA, 14 nt, Human
accuguaaaacuuu

SEQ ID NO: 3558872 - RNA, 16 nt, Human
accuguaaaacuuuau

SEQ ID NO: 3558873 - RNA, 17 nt, Human
accuguaaaacuuuauu

SEQ ID NO: 3558874 - RNA, 21 nt, Human
accuguaaaacuuuauuuuau

SEQ ID NO: 3558875 - RNA, 22 nt, Human
accuguaaaacuuuauuuuaua

SEQ ID NO: 3558876 - RNA, 19 nt, Human
accuguaaauuauuuuaaa

SEQ ID NO: 3558877 - RNA, 17 nt, Human
accuguaacuuuuguaa

SEQ ID NO: 3558878 - RNA, 20 nt, Human
accuguaaugacaggccugu

SEQ ID NO: 3558879 - RNA, 15 nt, Human
accuguacuggagag

SEQ ID NO: 3558880 - RNA, 17 nt, Human
accuguagucccagcua

SEQ ID NO: 3558881 - RNA, 17 nt, Human
accuguauaacccuguu

SEQ ID NO: 3558882 - RNA, 12 nt, Human
accuguaucuuu

SEQ ID NO: 3558883 - RNA, 18 nt, Human
accuguaucuuucuaugc

SEQ ID NO: 3558884 - RNA, 12 nt, Human
accuguauuuaa

SEQ ID NO: 3558885 - RNA, 18 nt, Human
accuguauuuaaaaauag

SEQ ID NO: 3558886 - RNA, 15 nt, Human
accuguauuuaagca

SEQ ID NO: 3558887 - RNA, 18 nt, Human
accuguauuuaagcaaau

SEQ ID NO: 3558888 - RNA, 19 nt, Human
accugucaaacaaagccag

SEQ ID NO: 3558889 - RNA, 13 nt, Human
accugucacauug

SEQ ID NO: 3558890 - RNA, 16 nt, Human
accugucacauugcau

SEQ ID NO: 3558891 - RNA, 22 nt, Human
accugucacauugcauucuauu

SEQ ID NO: 3558892 - RNA, 18 nt, Human
accugucaccgugagcag

SEQ ID NO: 3558893 - RNA, 15 nt, Human
accugucaugccccc

SEQ ID NO: 3558894 - RNA, 13 nt, Human
accugucccaccu

SEQ ID NO: 3558895 - RNA, 12 nt, Human
accugucccccu

SEQ ID NO: 3558896 - RNA, 15 nt, Human
accugucccccugac

SEQ ID NO: 3558897 - RNA, 22 nt, Human
accuguccuaaggaaccuuccu

SEQ ID NO: 3558898 - RNA, 13 nt, Human
accugucucacca

SEQ ID NO: 3558899 - RNA, 18 nt, Human
accugucucaccuggacu

SEQ ID NO: 3558900 - RNA, 18 nt, Human
accugucugacuguagcu

SEQ ID NO: 3558901 - RNA, 11 nt, Human
accugucugcu

SEQ ID NO: 3558902 - RNA, 20 nt, Human
accugucugcuccagcucug

SEQ ID NO: 3558903 - RNA, 11 nt, Human
accugucuguc

SEQ ID NO: 3558904 - RNA, 14 nt, Human
accugucugucugu

SEQ ID NO: 3558905 - RNA, 18 nt, Human
accugucugucugucugu

SEQ ID NO: 3558906 - RNA, 22 nt, Human
accugucuugccuuuuucauua

SEQ ID NO: 3558907 - RNA, 15 nt, Human
accugucuuuuggga

SEQ ID NO: 3558908 - RNA, 15 nt, Human
accugugaagcugaa

SEQ ID NO: 3558909 - RNA, 14 nt, Human
accugugaccagca

SEQ ID NO: 3558910 - RNA, 23 nt, Human
accugugaccagcacugucucag

SEQ ID NO: 3558911 - RNA, 18 nt, Human
accugugagcccagcugg

SEQ ID NO: 3558912 - RNA, 21 nt, Human
accugugagcugcaccaggua

SEQ ID NO: 3558913 - RNA, 16 nt, Human
accugugaguaaauau

SEQ ID NO: 3558914 - RNA, 18 nt, Human
accugugaguuuaaagca

SEQ ID NO: 3558915 - RNA, 17 nt, Human
accuguggccaaguucu

SEQ ID NO: 3558916 - RNA, 18 nt, Human
accuguggccaaguucuu

SEQ ID NO: 3558917 - RNA, 19 nt, Human
accuguggggauuucuccc

SEQ ID NO: 3558918 - RNA, 18 nt, Human
accuguguauuuuuuaaa

SEQ ID NO: 3558919 - RNA, 20 nt, Human
accugugucugcgaaguccu

SEQ ID NO: 3558920 - RNA, 18 nt, Human
accuguguuucuugccuc

SEQ ID NO: 3558921 - RNA, 19 nt, Human
accuguguuucuugccuca

SEQ ID NO: 3558922 - RNA, 20 nt, Human
accuguguuucuugccucau

SEQ ID NO: 3558923 - RNA, 17 nt, Human
accuguucagugucccg

SEQ ID NO: 3558924 - RNA, 18 nt, Human
accuguucagugucccgg

SEQ ID NO: 3558925 - RNA, 19 nt, Human
accuguugagcaucacaga

SEQ ID NO: 3558926 - RNA, 21 nt, Human
accuguugagcaucacagaau

SEQ ID NO: 3558927 - RNA, 16 nt, Human
accuguugguuccaag

SEQ ID NO: 3558928 - RNA, 16 nt, Human
accuguuuaaauauuu

SEQ ID NO: 3558929 - RNA, 13 nt, Human
accuguuuaaauu

SEQ ID NO: 3558930 - RNA, 15 nt, Human
accuguuucucugcc

SEQ ID NO: 3558931 - RNA, 19 nt, Human
accuguuucugcagccacu

SEQ ID NO: 3558932 - RNA, 18 nt, Human
accuguuuucgcaccuac

SEQ ID NO: 3558933 - RNA, 18 nt, Human
accuguuuuuaagcuguu

SEQ ID NO: 3558934 - RNA, 20 nt, Human
accuguuuuuaagcuguuuc

SEQ ID NO: 3558935 - RNA, 18 nt, Human
accuguuuuuuuucuuuu

SEQ ID NO: 3558936 - RNA, 18 nt, Human
accuguuuuuuuuucauu

SEQ ID NO: 3558937 - RNA, 15 nt, Human
accuuaaaauuugaa

SEQ ID NO: 3558938 - RNA, 20 nt, Human
accuuaaaauuugaaacauu

SEQ ID NO: 3558939 - RNA, 16 nt, Human
accuuaaacaccccuc

SEQ ID NO: 3558940 - RNA, 22 nt, Human
accuuaaacaccccucaguugu

SEQ ID NO: 3558941 - RNA, 12 nt, Human
accuuaaauuaa

SEQ ID NO: 3558942 - RNA, 22 nt, Human
accuuaaauuaaacaauuuauu

SEQ ID NO: 3558943 - RNA, 22 nt, Human
accuuaagaccuacuguucuaa

SEQ ID NO: 3558944 - RNA, 22 nt, Human
agaagucacauuccugaacagg

SEQ ID NO: 3558945 - RNA, 18 nt, Human
agaagucacucaauuguu

SEQ ID NO: 3558946 - RNA, 22 nt, Human
agaagucaucuugcuaccagua

SEQ ID NO: 3558947 - RNA, 17 nt, Human
agaagucaugaagccca

SEQ ID NO: 3558948 - RNA, 20 nt, Human
agaagucaugaagcccaagu

SEQ ID NO: 3558949 - RNA, 22 nt, Human
agaagucucagcuaagcucacg

SEQ ID NO: 3558950 - RNA, 19 nt, Human
agaagucuuagauguauau

SEQ ID NO: 3558951 - RNA, 16 nt, Human
agaagucuucaugaaa

SEQ ID NO: 3558952 - RNA, 18 nt, Human
agaagucuucuauuuauu

SEQ ID NO: 3558953 - RNA, 16 nt, Human
agaagucuuucaagaa

SEQ ID NO: 3558954 - RNA, 15 nt, Human
agaagugaagaaugc

SEQ ID NO: 3558955 - RNA, 19 nt, Human
agaagugaaugcugggacu

SEQ ID NO: 3558956 - RNA, 14 nt, Human
agaagugacaggga

SEQ ID NO: 3558957 - RNA, 18 nt, Human
agaagugacagggaagcu

SEQ ID NO: 3558958 - RNA, 22 nt, Human
agaagugacagggaagcuacag

SEQ ID NO: 3558959 - RNA, 17 nt, Human
agaagugacauugcauc

SEQ ID NO: 3558960 - RNA, 18 nt, Human
agaagugaccaaggagga

SEQ ID NO: 3558961 - RNA, 17 nt, Human
agaagugaguguuucua

SEQ ID NO: 3558962 - RNA, 15 nt, Human
agaagugcuccccuc

SEQ ID NO: 3558963 - RNA, 23 nt, Human
agaagugggccaggacaggcccg

SEQ ID NO: 3558964 - RNA, 20 nt, Human
agaaguggggacagagcaga

SEQ ID NO: 3558965 - RNA, 23 nt, Human
agaagugugauugggaauaaaua

SEQ ID NO: 3558966 - RNA, 22 nt, Human
agaaguguggggauuuucacug

SEQ ID NO: 3558967 - RNA, 16 nt, Human
agaaguguuucaugca

SEQ ID NO: 3558968 - RNA, 15 nt, Human
agaaguuacugaaug

SEQ ID NO: 3558969 - RNA, 16 nt, Human
agaaguuaguuuguau

SEQ ID NO: 3558970 - RNA, 19 nt, Human
agaaguucaauauaagcuu

SEQ ID NO: 3558971 - RNA, 21 nt, Human
agaaguucuuugauucuguaa

SEQ ID NO: 3558972 - RNA, 19 nt, Human
agaaguugaaugggcacag

SEQ ID NO: 3558973 - RNA, 14 nt, Human
agaauggagaggaa

SEQ ID NO: 3558974 - RNA, 23 nt, Human
agaauggauaaaauaaugcugca

SEQ ID NO: 3558975 - RNA, 19 nt, Human
agaauggaucacaagaugg

SEQ ID NO: 3558976 - RNA, 14 nt, Human
agaauggcauuugc

SEQ ID NO: 3558977 - RNA, 21 nt, Human
agaauggcauuugcaauaaaa

SEQ ID NO: 3558978 - RNA, 21 nt, Human
agaauggcgccaccagcucug

SEQ ID NO: 3558979 - RNA, 15 nt, Human
agaauggggugcaug

SEQ ID NO: 3558980 - RNA, 20 nt, Human
agaauggugugaacccggga

SEQ ID NO: 3558981 - RNA, 15 nt, Human
agaauguaaagcaac

SEQ ID NO: 3558982 - RNA, 17 nt, Human
agaauguaaaugucuca

SEQ ID NO: 3558983 - RNA, 19 nt, Human
agaauguaagguauaucau

SEQ ID NO: 3558984 - RNA, 23 nt, Human
agaauguaagguauaucauucua

SEQ ID NO: 3558985 - RNA, 21 nt, Human
agaauguacguccagccugcc

SEQ ID NO: 3558986 - RNA, 14 nt, Human
agaauguagccauu

SEQ ID NO: 3558987 - RNA, 13 nt, Human
agaauguauugua

SEQ ID NO: 3558988 - RNA, 14 nt, Human
agaauguauuguac

SEQ ID NO: 3558989 - RNA, 23 nt, Human
agaauguauuguaccuuuuaaca

SEQ ID NO: 3558990 - RNA, 16 nt, Human
agaauguauuuuauau

SEQ ID NO: 3558991 - RNA, 14 nt, Human
agaaugucagaaaa

SEQ ID NO: 3558992 - RNA, 18 nt, Human
agaaugucagauuccuuu

SEQ ID NO: 3558993 - RNA, 19 nt, Human
agaaugucagauuccuuuc

SEQ ID NO: 3558994 - RNA, 21 nt, Human
agaaugucagauuccuuuccc

SEQ ID NO: 3558995 - RNA, 20 nt, Human
agaaugucauuuugguacuu

SEQ ID NO: 3558996 - RNA, 21 nt, Human
agaaugugugucaauuuauaa

SEQ ID NO: 3558997 - RNA, 14 nt, Human
agaauguuaagacu

SEQ ID NO: 3558998 - RNA, 13 nt, Human
agaauguuccaga

SEQ ID NO: 3558999 - RNA, 19 nt, Human
agaauguuccagacauucu

SEQ ID NO: 3559000 - RNA, 20 nt, Human
agaauguugguuuacuuuca

SEQ ID NO: 3559001 - RNA, 21 nt, Human
agaauguugguuuacuuucaa

SEQ ID NO: 3559002 - RNA, 15 nt, Human
agaauguuguauuca

SEQ ID NO: 3559003 - RNA, 19 nt, Human
agaauguuuuacugugaaa

SEQ ID NO: 3559004 - RNA, 12 nt, Human
agaauguuuuca

SEQ ID NO: 3559005 - RNA, 23 nt, Human
agaauuaacacaugauccugcaa

SEQ ID NO: 3559006 - RNA, 21 nt, Human
agaauuaagcccuaagguccu

SEQ ID NO: 3559007 - RNA, 19 nt, Human
agaauuaccauuuguuaau

SEQ ID NO: 3559008 - RNA, 14 nt, Human
agaauuacuguaac

SEQ ID NO: 3559009 - RNA, 20 nt, Human
agaauuacuguaacugauua

SEQ ID NO: 3559010 - RNA, 14 nt, Human
agaauuagcugcuu

SEQ ID NO: 3559011 - RNA, 16 nt, Human
agaauuagcugcuucu

SEQ ID NO: 3559012 - RNA, 15 nt, Human
agaauuagcuuuuuc

SEQ ID NO: 3559013 - RNA, 19 nt, Human
agaauuagugccagaauuu

SEQ ID NO: 3559014 - RNA, 21 nt, Human
agaauuagugccagaauuuua

SEQ ID NO: 3559015 - RNA, 19 nt, Human
agaauuaguggcacuugcu

SEQ ID NO: 3559016 - RNA, 22 nt, Human
agaauuauauagguugugcaaa

SEQ ID NO: 3559017 - RNA, 19 nt, Human
agaauuauuuuuaaaaaga

SEQ ID NO: 3559018 - RNA, 12 nt, Human
agaauucaaauu

SEQ ID NO: 3559019 - RNA, 18 nt, Human
agaauucagaagaccccu

SEQ ID NO: 3559020 - RNA, 13 nt, Human
agaauucagacau

SEQ ID NO: 3559021 - RNA, 14 nt, Human
agaauucagcugcc

SEQ ID NO: 3559022 - RNA, 15 nt, Human
agaauucagcugccc

SEQ ID NO: 3559023 - RNA, 13 nt, Human
agaauucauucau

SEQ ID NO: 3559024 - RNA, 21 nt, Human
agaauucauucauacuuaaaa

SEQ ID NO: 3559025 - RNA, 16 nt, Human
agaauuccaaagcaaa

SEQ ID NO: 3559026 - RNA, 20 nt, Human
agaauuccaggguauggcca

SEQ ID NO: 3559027 - RNA, 20 nt, Human
agaauucccucucucugacu

SEQ ID NO: 3559028 - RNA, 23 nt, Human
agaauucuagugcugcugaagau

SEQ ID NO: 3559029 - RNA, 20 nt, Human
agaauucucagaaucucaaa

SEQ ID NO: 3559030 - RNA, 20 nt, Human
agaauucugcuaccucacug

SEQ ID NO: 3559031 - RNA, 18 nt, Human
agaauucuguauuggaua

SEQ ID NO: 3559032 - RNA, 20 nt, Human
agaauucuuacauguuuucu

SEQ ID NO: 3559033 - RNA, 23 nt, Human
agaauucuuacauguuuucuuug

SEQ ID NO: 3559034 - RNA, 17 nt, Human
agaauucuucaggugga

SEQ ID NO: 3559035 - RNA, 19 nt, Human
agaauugaaaaguuuuugu

SEQ ID NO: 3559036 - RNA, 14 nt, Human
agaauugaaacacu

SEQ ID NO: 3559037 - RNA, 17 nt, Human
agaauugaaacacuuuu

SEQ ID NO: 3559038 - RNA, 16 nt, Human
agaauugaacccagga

SEQ ID NO: 3559039 - RNA, 13 nt, Human
agaauugaagguu

SEQ ID NO: 3559040 - RNA, 15 nt, Human
agaauugaagguuuu

SEQ ID NO: 3559041 - RNA, 15 nt, Human
agaauugacauugaa

SEQ ID NO: 3559042 - RNA, 18 nt, Human
agaauugaguaauggugu

SEQ ID NO: 3559043 - RNA, 23 nt, Human
agaauugauugggcacaucauuu

SEQ ID NO: 3559044 - RNA, 18 nt, Human
agaauuggaaaagacuaa

SEQ ID NO: 3559045 - RNA, 22 nt, Human
agaauuggcugaacucaugaga

SEQ ID NO: 3559046 - RNA, 22 nt, Human
agaauugugguuuauauauuua

SEQ ID NO: 3559047 - RNA, 17 nt, Human
agaauuguugagauacu

SEQ ID NO: 3559048 - RNA, 12 nt, Human
agaauuuaaaga

SEQ ID NO: 3559049 - RNA, 13 nt, Human
agaauuuaaagaa

SEQ ID NO: 3559050 - RNA, 14 nt, Human
agaauuuaguauua

SEQ ID NO: 3559051 - RNA, 16 nt, Human
agaauuuaguauuauc

SEQ ID NO: 3559052 - RNA, 14 nt, Human
agaauuuaguguau

SEQ ID NO: 3559053 - RNA, 13 nt, Human
agaauuuauucaa

SEQ ID NO: 3559054 - RNA, 16 nt, Human
agaauuucaauuuguu

SEQ ID NO: 3559055 - RNA, 17 nt, Human
agaauuucccaaagcag

SEQ ID NO: 3559056 - RNA, 17 nt, Human
agaauuucuaaaaagau

SEQ ID NO: 3559057 - RNA, 21 nt, Human
agaauuucuaccauuucagag

SEQ ID NO: 3559058 - RNA, 13 nt, Human
agaauuucuagga

SEQ ID NO: 3559059 - RNA, 13 nt, Human
agaauuucuuggu

SEQ ID NO: 3559060 - RNA, 22 nt, Human
agaauuucuugguaagaagccg

SEQ ID NO: 3559061 - RNA, 13 nt, Human
agaauuugcauac

SEQ ID NO: 3559062 - RNA, 15 nt, Human
agaauuuggaaaucc

SEQ ID NO: 3559063 - RNA, 17 nt, Human
agaauuuuaaaaaugaa

SEQ ID NO: 3559064 - RNA, 15 nt, Human
agaauuuuaaauuau

SEQ ID NO: 3559065 - RNA, 22 nt, Human
agaauuuuaagugcuuuguaau

SEQ ID NO: 3559066 - RNA, 13 nt, Human
agaauuuuaggaa

SEQ ID NO: 3559067 - RNA, 18 nt, Human
agaauuuuauacuuuccc

SEQ ID NO: 3559068 - RNA, 21 nt, Human
agaauuuuauacuuucccuac

SEQ ID NO: 3559069 - RNA, 23 nt, Human
agaauuuuccugagacaaauuuu

SEQ ID NO: 3559070 - RNA, 12 nt, Human
agaauuuuggaa

SEQ ID NO: 3559071 - RNA, 15 nt, Human
agaauuuuuuugucu

SEQ ID NO: 3559072 - RNA, 17 nt, Human
agacaaaaacagccuca

SEQ ID NO: 3559073 - RNA, 22 nt, Human
agacaaaaacagccucacagaa

SEQ ID NO: 3559074 - RNA, 14 nt, Human
agacaaaaagacaa

SEQ ID NO: 3559075 - RNA, 15 nt, Human
agacaaaaagacaaa

SEQ ID NO: 3559076 - RNA, 14 nt, Human
agacaaaaauacuc

SEQ ID NO: 3559077 - RNA, 22 nt, Human
agacaaaaauacucuaauucua

SEQ ID NO: 3559078 - RNA, 23 nt, Human
agacaaaaauacucuaauucuaa

SEQ ID NO: 3559079 - RNA, 21 nt, Human
agacaaaaauuaucuauuugu

SEQ ID NO: 3559080 - RNA, 22 nt, Human
agacaaaauggauacauaaaga

SEQ ID NO: 3559081 - RNA, 19 nt, Human
agacaaacaccucccagga

SEQ ID NO: 3559082 - RNA, 17 nt, Human
agacaaaccagaagcaa

SEQ ID NO: 3559083 - RNA, 18 nt, Human
agacaaacuguaaaaaau

SEQ ID NO: 3559084 - RNA, 20 nt, Human
agacaaauacucauguguau

SEQ ID NO: 3559085 - RNA, 22 nt, Human
agacaaauauuccuuugcauau

SEQ ID NO: 3559086 - RNA, 16 nt, Human
agacaaauauuuggag

SEQ ID NO: 3559087 - RNA, 16 nt, Human
agacaaaucaaagcag

SEQ ID NO: 3559088 - RNA, 19 nt, Human
agacaaauucuguuucuug

SEQ ID NO: 3559089 - RNA, 23 nt, Human
agacaacagguaaaacagggcca

SEQ ID NO: 3559090 - RNA, 21 nt, Human
agacaacccugcaaaggacug

SEQ ID NO: 3559091 - RNA, 16 nt, Human
agacaacgugcucuuu

SEQ ID NO: 3559092 - RNA, 19 nt, Human
agacaacgugcucuuuguu

SEQ ID NO: 3559093 - RNA, 20 nt, Human
agacaacgugcucuuuguuu

SEQ ID NO: 3559094 - RNA, 21 nt, Human
agacaagacuucaguauguug

SEQ ID NO: 3559095 - RNA, 18 nt, Human
agacaagcuguugaccag

SEQ ID NO: 3559096 - RNA, 22 nt, Human
agacaagcuguugaccaggcac

SEQ ID NO: 3559097 - RNA, 18 nt, Human
agacaaguaauuucagug

SEQ ID NO: 3559098 - RNA, 22 nt, Human
agacaagugacuguaucugugu

SEQ ID NO: 3559099 - RNA, 15 nt, Human
agacaaguuccaugg

SEQ ID NO: 3559100 - RNA, 17 nt, Human
agacaauaaacccucag

SEQ ID NO: 3559101 - RNA, 17 nt, Human
agacaauacguuugaua

SEQ ID NO: 3559102 - RNA, 21 nt, Human
accuuaaguaagcaacagcau

SEQ ID NO: 3559103 - RNA, 15 nt, Human
accuuaauuuauuau

SEQ ID NO: 3559104 - RNA, 20 nt, Human
accuuacauuugaaaucuau

SEQ ID NO: 3559105 - RNA, 15 nt, Human
accuuaccaacuuuc

SEQ ID NO: 3559106 - RNA, 19 nt, Human
accuuaccaacuuucugua

SEQ ID NO: 3559107 - RNA, 18 nt, Human
accuuacgaucaggcaca

SEQ ID NO: 3559108 - RNA, 19 nt, Human
accuuacgaucaggcacag

SEQ ID NO: 3559109 - RNA, 21 nt, Human
accuuacuguggaggaaggau

SEQ ID NO: 3559110 - RNA, 21 nt, Human
accuuagaagguauuaagauu

SEQ ID NO: 3559111 - RNA, 14 nt, Human
accuuagaauacag

SEQ ID NO: 3559112 - RNA, 19 nt, Human
accuuagacagucccugcc

SEQ ID NO: 3559113 - RNA, 19 nt, Human
accuuagaccaccaagccu

SEQ ID NO: 3559114 - RNA, 21 nt, Human
accuuagauuuaguaguguaa

SEQ ID NO: 3559115 - RNA, 20 nt, Human
accuuagcucccucccgcac

SEQ ID NO: 3559116 - RNA, 12 nt, Human
acuaaggggccc

SEQ ID NO: 3559117 - RNA, 18 nt, Human
acuaaguagcccauaagg

SEQ ID NO: 3559118 - RNA, 20 nt, Human
acuaagucucuuuuuuacaa

SEQ ID NO: 3559119 - RNA, 22 nt, Human
acuaagucucuuuuuuacaaag

SEQ ID NO: 3559120 - RNA, 13 nt, Human
acuaaguucacau

SEQ ID NO: 3559121 - RNA, 15 nt, Human
acuaaguuuuuaugg

SEQ ID NO: 3559122 - RNA, 12 nt, Human
acuaauaaaaua

SEQ ID NO: 3559123 - RNA, 17 nt, Human
acuaauaaaauauuuuc

SEQ ID NO: 3559124 - RNA, 18 nt, Human
acuaauaaaauauuuucu

SEQ ID NO: 3559125 - RNA, 20 nt, Human
acuaauaaaauauuuucugu

SEQ ID NO: 3559126 - RNA, 15 nt, Human
acuaauaaauacaua

SEQ ID NO: 3559127 - RNA, 18 nt, Human
acuaauauaaaaugagua

SEQ ID NO: 3559128 - RNA, 17 nt, Human
acuaauauauuuaaaaa

SEQ ID NO: 3559129 - RNA, 19 nt, Human
acuaauauauuuaaaaaua

SEQ ID NO: 3559130 - RNA, 15 nt, Human
acuaauaugggcauu

SEQ ID NO: 3559131 - RNA, 14 nt, Human
acuaauauuucugu

SEQ ID NO: 3559132 - RNA, 15 nt, Human
acuaauauuucugua

SEQ ID NO: 3559133 - RNA, 19 nt, Human
acuaaugccuuacucuucu

SEQ ID NO: 3559134 - RNA, 13 nt, Human
acuaauggcauga

SEQ ID NO: 3559135 - RNA, 21 nt, Human
acuaauggcaugagaaauaca

SEQ ID NO: 3559136 - RNA, 16 nt, Human
acuaauguaaaaugau

SEQ ID NO: 3559137 - RNA, 15 nt, Human
acuaauuaacauaua

SEQ ID NO: 3559138 - RNA, 18 nt, Human
acuaauuaacauauaaua

SEQ ID NO: 3559139 - RNA, 20 nt, Human
acuaauuaggguacauuuau

SEQ ID NO: 3559140 - RNA, 23 nt, Human
acuaauuaggguacauuuauaau

SEQ ID NO: 3559141 - RNA, 17 nt, Human
acuaauuauacuacuuu

SEQ ID NO: 3559142 - RNA, 14 nt, Human
acuaauuguauaac

SEQ ID NO: 3559143 - RNA, 15 nt, Human
acuaauuuuaaaaug

SEQ ID NO: 3559144 - RNA, 23 nt, Human
acuaauuuuacacauuagauuuu

SEQ ID NO: 3559145 - RNA, 21 nt, Human
acuaauuuuacauguuuauaa

SEQ ID NO: 3559146 - RNA, 21 nt, Human
acuaauuuuaguauucauucu

SEQ ID NO: 3559147 - RNA, 18 nt, Human
acuaauuuuuguauuauu

SEQ ID NO: 3559148 - RNA, 21 nt, Human
acuacaaaaaaguuguuaacu

SEQ ID NO: 3559149 - RNA, 14 nt, Human
acuacaaaauuuga

SEQ ID NO: 3559150 - RNA, 21 nt, Human
acuacaaacaaaauuucuauu

SEQ ID NO: 3559151 - RNA, 22 nt, Human
acuacaaacaaaauuucuauua

SEQ ID NO: 3559152 - RNA, 11 nt, Human
agacuguggcu

SEQ ID NO: 3559153 - RNA, 19 nt, Human
agacuguggcuagugacaa

SEQ ID NO: 3559154 - RNA, 20 nt, Human
agacuguggcugcuagcacu

SEQ ID NO: 3559155 - RNA, 22 nt, Human
agacugugugugcccucugggc

SEQ ID NO: 3559156 - RNA, 21 nt, Human
agacuguguuugguccuguag

SEQ ID NO: 3559157 - RNA, 23 nt, Human
agacuguugggguggguauaaaa

SEQ ID NO: 3559158 - RNA, 23 nt, Human
agacuguuuuucagggagguggc

SEQ ID NO: 3559159 - RNA, 20 nt, Human
agacuuaaugagacuuuaaa

SEQ ID NO: 3559160 - RNA, 15 nt, Human
agacuuacuauuaca

SEQ ID NO: 3559161 - RNA, 16 nt, Human
agacuuacucuaagau

SEQ ID NO: 3559162 - RNA, 18 nt, Human
agacuuacucuaagaucu

SEQ ID NO: 3559163 - RNA, 18 nt, Human
agacuuaguauauuuucu

SEQ ID NO: 3559164 - RNA, 22 nt, Human
agacuuaguauauuuucuuuuc

SEQ ID NO: 3559165 - RNA, 19 nt, Human
agacuucaagcauggcuau

SEQ ID NO: 3559166 - RNA, 22 nt, Human
agacuucagggagucagcuguu

SEQ ID NO: 3559167 - RNA, 19 nt, Human
agacuucaguauguuguca

SEQ ID NO: 3559168 - RNA, 17 nt, Human
agacuucaucccucugg

SEQ ID NO: 3559169 - RNA, 17 nt, Human
agacuuccaaagaaugu

SEQ ID NO: 3559170 - RNA, 22 nt, Human
agacuucucuacccaucuuaaa

SEQ ID NO: 3559171 - RNA, 12 nt, Human
agacuucugcuu

SEQ ID NO: 3559172 - RNA, 15 nt, Human
agacuucuguuuuca

SEQ ID NO: 3559173 - RNA, 18 nt, Human
agacuucuguuuucaauc

SEQ ID NO: 3559174 - RNA, 12 nt, Human
agacuugaaaag

SEQ ID NO: 3559175 - RNA, 15 nt, Human
agacuugaaaagaga

SEQ ID NO: 3559176 - RNA, 20 nt, Human
agacuugaaaagagacaggc

SEQ ID NO: 3559177 - RNA, 15 nt, Human
agacuugacagugga

SEQ ID NO: 3559178 - RNA, 16 nt, Human
agacuugccagagccg

SEQ ID NO: 3559179 - RNA, 11 nt, Human
agacuugccuu

SEQ ID NO: 3559180 - RNA, 13 nt, Human
agacuugccuucc

SEQ ID NO: 3559181 - RNA, 22 nt, Human
agacuugccuuccuaagccugu

SEQ ID NO: 3559182 - RNA, 18 nt, Human
agacuuggaaaugggaga

SEQ ID NO: 3559183 - RNA, 19 nt, Human
agacuugguguccuuuccc

SEQ ID NO: 3559184 - RNA, 21 nt, Human
agacuugguugguaggguggg

SEQ ID NO: 3559185 - RNA, 18 nt, Human
agacuuguauauucuauu

SEQ ID NO: 3559186 - RNA, 22 nt, Human
agacuugucaagccugugcaaa

SEQ ID NO: 3559187 - RNA, 12 nt, Human
agacuuuaacau

SEQ ID NO: 3559188 - RNA, 16 nt, Human
agacuuuagaaauaaa

SEQ ID NO: 3559189 - RNA, 18 nt, Human
agacuuuagaaauaaaug

SEQ ID NO: 3559190 - RNA, 17 nt, Human
agacuuuagcuuucuga

SEQ ID NO: 3559191 - RNA, 12 nt, Human
agacuuucuguu

SEQ ID NO: 3559192 - RNA, 14 nt, Human
agacuuucuuuaaa

SEQ ID NO: 3559193 - RNA, 11 nt, Human
agacuuugaug

SEQ ID NO: 3559194 - RNA, 13 nt, Human
agacuuugauguc

SEQ ID NO: 3559195 - RNA, 14 nt, Human
agacuuugauguca

SEQ ID NO: 3559196 - RNA, 18 nt, Human
agacuuugaugucagcag

SEQ ID NO: 3559197 - RNA, 17 nt, Human
agacuuugguuauuuua

SEQ ID NO: 3559198 - RNA, 12 nt, Human
agacuuuuauga

SEQ ID NO: 3559199 - RNA, 15 nt, Human
agacuuuuaugauac

SEQ ID NO: 3559200 - RNA, 21 nt, Human
agacuuuuccaauaugugauu

SEQ ID NO: 3559201 - RNA, 13 nt, Human
agacuuuuguaca

SEQ ID NO: 3559202 - RNA, 15 nt, Human
agacuuuuuucuagu

SEQ ID NO: 3559203 - RNA, 21 nt, Human
agagaaaaaaaguuugccaga

SEQ ID NO: 3559204 - RNA, 21 nt, Human
agagaaaaagaaaugcaaaaa

SEQ ID NO: 3559205 - RNA, 12 nt, Human
agagaaaaagag

SEQ ID NO: 3559206 - RNA, 20 nt, Human
agagaaaaagcagaggccaa

SEQ ID NO: 3559207 - RNA, 16 nt, Human
agagaaaacaugcaga

SEQ ID NO: 3559208 - RNA, 19 nt, Human
agagaaaacuuauuugagu

SEQ ID NO: 3559209 - RNA, 12 nt, Human
agagaaaagaaa

SEQ ID NO: 3559210 - RNA, 13 nt, Human
agagaaaagaaaa

SEQ ID NO: 3559211 - RNA, 15 nt, Human
agagaaaagaaaaaa

SEQ ID NO: 3559212 - RNA, 14 nt, Human
agagaaaauaaaaa

SEQ ID NO: 3559213 - RNA, 15 nt, Human
agagaaaauaaaaag

SEQ ID NO: 3559214 - RNA, 19 nt, Human
agagaaaauaaaaaguuaa

SEQ ID NO: 3559215 - RNA, 12 nt, Human
agagaaaauaua

SEQ ID NO: 3559216 - RNA, 20 nt, Human
agagaaaaugcgguuauaaa

SEQ ID NO: 3559217 - RNA, 16 nt, Human
agagaaaauguaaaua

SEQ ID NO: 3559218 - RNA, 14 nt, Human
agagaaacaaacuu

SEQ ID NO: 3559219 - RNA, 15 nt, Human
agagaaacaaacuuu

SEQ ID NO: 3559220 - RNA, 13 nt, Human
agagaaacaguug

SEQ ID NO: 3559221 - RNA, 16 nt, Human
agagaaacaguuggua

SEQ ID NO: 3559222 - RNA, 13 nt, Human
agagaaaccagcu

SEQ ID NO: 3559223 - RNA, 17 nt, Human
agagaaaccagcuuccu

SEQ ID NO: 3559224 - RNA, 20 nt, Human
agagaaaccagcuuccuuca

SEQ ID NO: 3559225 - RNA, 20 nt, Human
agagaaaccguccucuuuuu

SEQ ID NO: 3559226 - RNA, 21 nt, Human
agagaaacuuuauacauuagu

SEQ ID NO: 3559227 - RNA, 13 nt, Human
agagaaagaaauu

SEQ ID NO: 3559228 - RNA, 16 nt, Human
agagaaagaagagaca

SEQ ID NO: 3559229 - RNA, 14 nt, Human
agagaaagagagag

SEQ ID NO: 3559230 - RNA, 16 nt, Human
agagaaagccaggcag

SEQ ID NO: 3559231 - RNA, 19 nt, Human
agagaaagccaggcaggua

SEQ ID NO: 3559232 - RNA, 11 nt, Human
agagaaaucuc

SEQ ID NO: 3559233 - RNA, 12 nt, Human
agagaaauucug

SEQ ID NO: 3559234 - RNA, 13 nt, Human
agagaaauucugu

SEQ ID NO: 3559235 - RNA, 18 nt, Human
agagaaauucuguuaaaa

SEQ ID NO: 3559236 - RNA, 13 nt, Human
agagaacaggacu

SEQ ID NO: 3559237 - RNA, 14 nt, Human
agagaacaggacua

SEQ ID NO: 3559238 - RNA, 15 nt, Human
agagaacccagccca

SEQ ID NO: 3559239 - RNA, 20 nt, Human
agagaaccgagcaaagauca

SEQ ID NO: 3559240 - RNA, 20 nt, Human
agagaaccuggaguuccuga

SEQ ID NO: 3559241 - RNA, 22 nt, Human
agagaacuaacacuauuuuaug

SEQ ID NO: 3559242 - RNA, 13 nt, Human
agagaacuagugg

SEQ ID NO: 3559243 - RNA, 15 nt, Human
agagaacugaaaaga

SEQ ID NO: 3559244 - RNA, 17 nt, Human
agagaacugaaaagaga

SEQ ID NO: 3559245 - RNA, 17 nt, Human
agagaacuuccagaucc

SEQ ID NO: 3559246 - RNA, 10 nt, Human
agagaagaag

SEQ ID NO: 3559247 - RNA, 12 nt, Human
agagaagaauga

SEQ ID NO: 3559248 - RNA, 13 nt, Human
agagaagagcccc

SEQ ID NO: 3559249 - RNA, 16 nt, Human
agagaagagccccacu

SEQ ID NO: 3559250 - RNA, 18 nt, Human
agagaagagccccacucu

SEQ ID NO: 3559251 - RNA, 21 nt, Human
agagaagauaauuguugaaau

SEQ ID NO: 3559252 - RNA, 16 nt, Human
agagaagcaaguggug

SEQ ID NO: 3559253 - RNA, 11 nt, Human
agagaagccag

SEQ ID NO: 3559254 - RNA, 13 nt, Human
agagaagccugug

SEQ ID NO: 3559255 - RNA, 13 nt, Human
agagaagccuuca

SEQ ID NO: 3559256 - RNA, 14 nt, Human
agagaagccuuggu

SEQ ID NO: 3559257 - RNA, 14 nt, Human
agagaagcugcuga

SEQ ID NO: 3559258 - RNA, 16 nt, Human
agagaaggaaugucuu

SEQ ID NO: 3559259 - RNA, 12 nt, Human
agagaaggagcc

SEQ ID NO: 3559260 - RNA, 13 nt, Human
agagaaggcagga

SEQ ID NO: 3559261 - RNA, 16 nt, Human
agagaaguagaaauca

SEQ ID NO: 3559262 - RNA, 16 nt, Human
agagaaguauuauaaa

SEQ ID NO: 3559263 - RNA, 16 nt, Human
agagccugccuggagc

SEQ ID NO: 3559264 - RNA, 12 nt, Human
agagccugcugc

SEQ ID NO: 3559265 - RNA, 14 nt, Human
agagccuggagaag

SEQ ID NO: 3559266 - RNA, 16 nt, Human
agagccuguaaacuuu

SEQ ID NO: 3559267 - RNA, 13 nt, Human
agagccuuaaaac

SEQ ID NO: 3559268 - RNA, 16 nt, Human
agagccuuccacccag

SEQ ID NO: 3559269 - RNA, 17 nt, Human
agagccuuccaggggug

SEQ ID NO: 3559270 - RNA, 15 nt, Human
agagccuucucagaa

SEQ ID NO: 3559271 - RNA, 16 nt, Human
agagccuucucagaag

SEQ ID NO: 3559272 - RNA, 22 nt, Human
agagccuucugaugucucuaaa

SEQ ID NO: 3559273 - RNA, 22 nt, Human
agagccuugguguccaccuggc

SEQ ID NO: 3559274 - RNA, 21 nt, Human
agagccuuuggaugaccagaa

SEQ ID NO: 3559275 - RNA, 23 nt, Human
agagcgaggcugagccuacagau

SEQ ID NO: 3559276 - RNA, 14 nt, Human
agagcgcacaggga

SEQ ID NO: 3559277 - RNA, 21 nt, Human
agagcgccgugaguucucagg

SEQ ID NO: 3559278 - RNA, 14 nt, Human
agagcgccugcccc

SEQ ID NO: 3559279 - RNA, 20 nt, Human
agagcgccugccccucccag

SEQ ID NO: 3559280 - RNA, 18 nt, Human
agagcgugagcugagcag

SEQ ID NO: 3559281 - RNA, 15 nt, Human
agagcguugaaguug

SEQ ID NO: 3559282 - RNA, 19 nt, Human
agagcuaaacuccuuccug

SEQ ID NO: 3559283 - RNA, 18 nt, Human
agagcuaagggugggugc

SEQ ID NO: 3559284 - RNA, 17 nt, Human
agagcuacguauuuaau

SEQ ID NO: 3559285 - RNA, 16 nt, Human
agagcuagaaccugga

SEQ ID NO: 3559286 - RNA, 22 nt, Human
agagcuagaaccuggagaacua

SEQ ID NO: 3559287 - RNA, 14 nt, Human
agagcuagagaaau

SEQ ID NO: 3559288 - RNA, 20 nt, Human
agagcuagcagcagggaggg

SEQ ID NO: 3559289 - RNA, 14 nt, Human
agagcuagcgcugc

SEQ ID NO: 3559290 - RNA, 17 nt, Human
agagcuaucaggagaaa

SEQ ID NO: 3559291 - RNA, 19 nt, Human
agagcuauggacagcauug

SEQ ID NO: 3559292 - RNA, 12 nt, Human
agagcucaggau

SEQ ID NO: 3559293 - RNA, 21 nt, Human
agagcuccccuacggaccagg

SEQ ID NO: 3559294 - RNA, 16 nt, Human
agagcucuccagcucc

SEQ ID NO: 3559295 - RNA, 13 nt, Human
agagcucucucua

SEQ ID NO: 3559296 - RNA, 23 nt, Human
agagcugaagguuguggccuuug

SEQ ID NO: 3559297 - RNA, 14 nt, Human
agagcugauccaga

SEQ ID NO: 3559298 - RNA, 18 nt, Human
agagcugauggagaagga

SEQ ID NO: 3559299 - RNA, 19 nt, Human
agagcugauggagaaggaa

SEQ ID NO: 3559300 - RNA, 14 nt, Human
agagcugccaccug

SEQ ID NO: 3559301 - RNA, 12 nt, Human
agagcugccagu

SEQ ID NO: 3559302 - RNA, 15 nt, Human
agagcugcccucucc

SEQ ID NO: 3559303 - RNA, 16 nt, Human
agagcugcccucuccu

SEQ ID NO: 3559304 - RNA, 19 nt, Human
agagcugcccucuccuggg

SEQ ID NO: 3559305 - RNA, 20 nt, Human
agagcugcccucuccugggc

SEQ ID NO: 3559306 - RNA, 18 nt, Human
agagcugccuaagaggca

SEQ ID NO: 3559307 - RNA, 14 nt, Human
agagcugccucucg

SEQ ID NO: 3559308 - RNA, 14 nt, Human
agagcugcgggcug

SEQ ID NO: 3559309 - RNA, 15 nt, Human
agagcuggcaaaggu

SEQ ID NO: 3559310 - RNA, 18 nt, Human
agagcuggcaaagguggc

SEQ ID NO: 3559311 - RNA, 22 nt, Human
agagcugggaggcauggcccug

SEQ ID NO: 3559312 - RNA, 23 nt, Human
agagcugggaggcauggcccugg

SEQ ID NO: 3559313 - RNA, 18 nt, Human
agagcuggggcugaggga

SEQ ID NO: 3559314 - RNA, 21 nt, Human
agagacccucugccaccagag

SEQ ID NO: 3559315 - RNA, 13 nt, Human
agagaccgaggag

SEQ ID NO: 3559316 - RNA, 22 nt, Human
agagaccguccucaccccuguc

SEQ ID NO: 3559317 - RNA, 20 nt, Human
agagaccgucgggggcugag

SEQ ID NO: 3559318 - RNA, 15 nt, Human
agagaccuaccucag

SEQ ID NO: 3559319 - RNA, 17 nt, Human
agagaccuaccucaggu

SEQ ID NO: 3559320 - RNA, 20 nt, Human
agagaccuaccucagguugc

SEQ ID NO: 3559321 - RNA, 16 nt, Human
agagaccucaucagga

SEQ ID NO: 3559322 - RNA, 16 nt, Human
agagaccugaagugug

SEQ ID NO: 3559323 - RNA, 14 nt, Human
agagacucagccug

SEQ ID NO: 3559324 - RNA, 16 nt, Human
agagacucagccugca

SEQ ID NO: 3559325 - RNA, 18 nt, Human
agagacucagccugcagu

SEQ ID NO: 3559326 - RNA, 18 nt, Human
agagacucccaugaagcc

SEQ ID NO: 3559327 - RNA, 19 nt, Human
agagacucccaugaagccu

SEQ ID NO: 3559328 - RNA, 13 nt, Human
agagacuccugca

SEQ ID NO: 3559329 - RNA, 22 nt, Human
agagacuccugcaggcagccag

SEQ ID NO: 3559330 - RNA, 23 nt, Human
agagacuccugcaggcagccagg

SEQ ID NO: 3559331 - RNA, 21 nt, Human
agagacuccuugagagaccag

SEQ ID NO: 3559332 - RNA, 22 nt, Human
agagacucuggccuccacaguu

SEQ ID NO: 3559333 - RNA, 22 nt, Human
agagacugaauagauaugaaag

SEQ ID NO: 3559334 - RNA, 22 nt, Human
agagacugcguucugcaagcau

SEQ ID NO: 3559335 - RNA, 13 nt, Human
agagacuggagca

SEQ ID NO: 3559336 - RNA, 21 nt, Human
agagacuggagcaucugacuc

SEQ ID NO: 3559337 - RNA, 23 nt, Human
agagacugggaagauaggcucug

SEQ ID NO: 3559338 - RNA, 15 nt, Human
agagacuguagauug

SEQ ID NO: 3559339 - RNA, 15 nt, Human
agagacuugggaaug

SEQ ID NO: 3559340 - RNA, 17 nt, Human
agagacuuuagggggug

SEQ ID NO: 3559341 - RNA, 19 nt, Human
agagagaaaaaaaaaauag

SEQ ID NO: 3559342 - RNA, 15 nt, Human
agagagaaaauaaaa

SEQ ID NO: 3559343 - RNA, 22 nt, Human
agagagaaaauaaaaaguuaaa

SEQ ID NO: 3559344 - RNA, 21 nt, Human
agagagaaagaaguaggcaug

SEQ ID NO: 3559345 - RNA, 14 nt, Human
agagagaaagagag

SEQ ID NO: 3559346 - RNA, 12 nt, Human
agagagaaaucu

SEQ ID NO: 3559347 - RNA, 19 nt, Human
agagagaaauucuguuaaa

SEQ ID NO: 3559348 - RNA, 16 nt, Human
agagagaagagcccca

SEQ ID NO: 3559349 - RNA, 14 nt, Human
agagagacaagaag

SEQ ID NO: 3559350 - RNA, 10 nt, Human
agagagagaa

SEQ ID NO: 3559351 - RNA, 11 nt, Human
agagagagaga

SEQ ID NO: 3559352 - RNA, 14 nt, Human
agagagagagaaaa

SEQ ID NO: 3559353 - RNA, 15 nt, Human
agagagagagagagg

SEQ ID NO: 3559354 - RNA, 13 nt, Human
agagagagagagg

SEQ ID NO: 3559355 - RNA, 14 nt, Human
agagagagaggaca

SEQ ID NO: 3559356 - RNA, 14 nt, Human
agagagagagggcc

SEQ ID NO: 3559357 - RNA, 14 nt, Human
agagagaggcagaa

SEQ ID NO: 3559358 - RNA, 21 nt, Human
agagagaucaaauggaaagga

SEQ ID NO: 3559359 - RNA, 15 nt, Human
agagagcagugcuuu

SEQ ID NO: 3559360 - RNA, 15 nt, Human
agagagccugcagga

SEQ ID NO: 3559361 - RNA, 18 nt, Human
agagagccugcaggaucu

SEQ ID NO: 3559362 - RNA, 19 nt, Human
agagagcugagugagcuga

SEQ ID NO: 3559363 - RNA, 20 nt, Human
agagaggaaauucuccacug

SEQ ID NO: 3559364 - RNA, 14 nt, Human
agagaggagaaaca

SEQ ID NO: 3559365 - RNA, 17 nt, Human
agagaggagaggagaga

SEQ ID NO: 3559366 - RNA, 20 nt, Human
agagaggagucagagagaau

SEQ ID NO: 3559367 - RNA, 18 nt, Human
agagaggaguucaaugau

SEQ ID NO: 3559368 - RNA, 22 nt, Human
agagaggccauucuuucccaac

SEQ ID NO: 3559369 - RNA, 16 nt, Human
agagaggccuuguccc

SEQ ID NO: 3559370 - RNA, 18 nt, Human
agagaggcuaaaauguuu

SEQ ID NO: 3559371 - RNA, 17 nt, Human
agagagggaauucucuu

SEQ ID NO: 3559372 - RNA, 16 nt, Human
agagagggagaagaag

SEQ ID NO: 3559373 - RNA, 19 nt, Human
agagagggagaagaaguca

SEQ ID NO: 3559374 - RNA, 15 nt, Human
agagagggcaggcau

SEQ ID NO: 3559375 - RNA, 14 nt, Human
agagagggggccac

SEQ ID NO: 3559376 - RNA, 19 nt, Human
agagagggggccaccuccc

SEQ ID NO: 3559377 - RNA, 22 nt, Human
agagaggguggugaccucugcc

SEQ ID NO: 3559378 - RNA, 23 nt, Human
agagaggguggugaccucugccu

SEQ ID NO: 3559379 - RNA, 23 nt, Human
agagaggucaagcccaggaggac

SEQ ID NO: 3559380 - RNA, 20 nt, Human
agagagucccacugccucag

SEQ ID NO: 3559381 - RNA, 21 nt, Human
agagagucccacugccucagg

SEQ ID NO: 3559382 - RNA, 15 nt, Human
agagaguccucugga

SEQ ID NO: 3559383 - RNA, 16 nt, Human
agagaguccucuggau

SEQ ID NO: 3559384 - RNA, 14 nt, Human
agagaguggcuccu

SEQ ID NO: 3559385 - RNA, 14 nt, Human
agagaguggcuggg

SEQ ID NO: 3559386 - RNA, 16 nt, Human
agagaguggcuggggc

SEQ ID NO: 3559387 - RNA, 17 nt, Human
agagaguggcuggggca

SEQ ID NO: 3559388 - RNA, 16 nt, Human
agagaguguugaaacg

SEQ ID NO: 3559389 - RNA, 14 nt, Human
agagaguuaaucaa

SEQ ID NO: 3559390 - RNA, 19 nt, Human
agagauaccaagaugccau

SEQ ID NO: 3559391 - RNA, 16 nt, Human
agagauagaaccugga

SEQ ID NO: 3559392 - RNA, 17 nt, Human
agagauagccuguggcc

SEQ ID NO: 3559393 - RNA, 13 nt, Human
agagauauauaua

SEQ ID NO: 3559394 - RNA, 15 nt, Human
agagauauaucugaa

SEQ ID NO: 3559395 - RNA, 23 nt, Human
agagauauaucugaaaacuggaa

SEQ ID NO: 3559396 - RNA, 18 nt, Human
agagauauuuugggcaug

SEQ ID NO: 3559397 - RNA, 15 nt, Human
agagaucaaagauga

SEQ ID NO: 3559398 - RNA, 22 nt, Human
agagaucaaccccuucgcuccu

SEQ ID NO: 3559399 - RNA, 13 nt, Human
agagaucauggaa

SEQ ID NO: 3559400 - RNA, 15 nt, Human
agagauccaaagacu

SEQ ID NO: 3559401 - RNA, 21 nt, Human
agagaucccaaguagaaucuc

SEQ ID NO: 3559402 - RNA, 18 nt, Human
agagaugacugaguccuc

SEQ ID NO: 3559403 - RNA, 13 nt, Human
agagaugcagaaa

SEQ ID NO: 3559404 - RNA, 16 nt, Human
agagaugccuccaccg

SEQ ID NO: 3559405 - RNA, 21 nt, Human
agagaugcuguaacuuaaaau

SEQ ID NO: 3559406 - RNA, 22 nt, Human
agagauggacaguucacacccu

SEQ ID NO: 3559407 - RNA, 18 nt, Human
agagauggaggaggaggc

SEQ ID NO: 3559408 - RNA, 23 nt, Human
agaggccagccccacccaggagg

SEQ ID NO: 3559409 - RNA, 15 nt, Human
agaggccagccuggc

SEQ ID NO: 3559410 - RNA, 23 nt, Human
agaggccaggcaggagcccuucu

SEQ ID NO: 3559411 - RNA, 14 nt, Human
agaggccauggcag

SEQ ID NO: 3559412 - RNA, 20 nt, Human
agaggccauggcagaauaau

SEQ ID NO: 3559413 - RNA, 15 nt, Human
agaggcccaggcugc

SEQ ID NO: 3559414 - RNA, 16 nt, Human
agaggcccaggcugcc

SEQ ID NO: 3559415 - RNA, 12 nt, Human
agaggccccagc

SEQ ID NO: 3559416 - RNA, 15 nt, Human
agaggccccagccuc

SEQ ID NO: 3559417 - RNA, 23 nt, Human
agaggccccagccucccugaagc

SEQ ID NO: 3559418 - RNA, 14 nt, Human
agaggcccccagcc

SEQ ID NO: 3559419 - RNA, 16 nt, Human
agaggcccccagccca

SEQ ID NO: 3559420 - RNA, 21 nt, Human
agaggcccccagcccagggcu

SEQ ID NO: 3559421 - RNA, 14 nt, Human
agaggcccucaagu

SEQ ID NO: 3559422 - RNA, 14 nt, Human
agaggcccucgcug

SEQ ID NO: 3559423 - RNA, 19 nt, Human
agaggcccucgcugccagc

SEQ ID NO: 3559424 - RNA, 18 nt, Human
agaggcccucuggagugg

SEQ ID NO: 3559425 - RNA, 22 nt, Human
agaggcccucuggaguggccac

SEQ ID NO: 3559426 - RNA, 23 nt, Human
agaggcccucuggaguggccacu

SEQ ID NO: 3559427 - RNA, 24 nt, Human
agaggcccucuggaguggccacua

SEQ ID NO: 3559428 - RNA, 12 nt, Human
agaggcccugga

SEQ ID NO: 3559429 - RNA, 21 nt, Human
agaggcccuggaucagcgugg

SEQ ID NO: 3559430 - RNA, 22 nt, Human
agaggcccuggaucagcguggc

SEQ ID NO: 3559431 - RNA, 23 nt, Human
agaggcccuggaucagcguggcc

SEQ ID NO: 3559432 - RNA, 23 nt, Human
agaggccugaaauccugguuccu

SEQ ID NO: 3559433 - RNA, 13 nt, Human
agaggccugcccg

SEQ ID NO: 3559434 - RNA, 21 nt, Human
agaggccugccuccagggcug

SEQ ID NO: 3559435 - RNA, 18 nt, Human
agaggccugggcugggaa

SEQ ID NO: 3559436 - RNA, 18 nt, Human
agaggccuguuuggccuc

SEQ ID NO: 3559437 - RNA, 15 nt, Human
agaggcgggccagcc

SEQ ID NO: 3559438 - RNA, 19 nt, Human
agaggcuaaauuacucagg

SEQ ID NO: 3559439 - RNA, 21 nt, Human
agaggcuaaauuacucaggaa

SEQ ID NO: 3559440 - RNA, 16 nt, Human
agaggcuagcuucugc

SEQ ID NO: 3559441 - RNA, 19 nt, Human
agaggcuauuauuuucacu

SEQ ID NO: 3559442 - RNA, 19 nt, Human
agaggcugaaagaggccaa

SEQ ID NO: 3559443 - RNA, 12 nt, Human
agaggcugagac

SEQ ID NO: 3559444 - RNA, 17 nt, Human
agaggcugaggccugga

SEQ ID NO: 3559445 - RNA, 16 nt, Human
agaggcugaggcuggc

SEQ ID NO: 3559446 - RNA, 19 nt, Human
agaggcugaggcuggcaca

SEQ ID NO: 3559447 - RNA, 12 nt, Human
agaggcugcagc

SEQ ID NO: 3559448 - RNA, 16 nt, Human
agaggcugcagccagg

SEQ ID NO: 3559449 - RNA, 22 nt, Human
agaggcugccucucccaucacu

SEQ ID NO: 3559450 - RNA, 19 nt, Human
agaggcuggaggcagggcc

SEQ ID NO: 3559451 - RNA, 16 nt, Human
agaggcuggugcugug

SEQ ID NO: 3559452 - RNA, 21 nt, Human
agaggcuggugcuguggccag

SEQ ID NO: 3559453 - RNA, 22 nt, Human
agaggcuggugcuguggccagg

SEQ ID NO: 3559454 - RNA, 18 nt, Human
agaggcugguuuuggcau

SEQ ID NO: 3559455 - RNA, 23 nt, Human
agaggcuucuccgccagccuccu

SEQ ID NO: 3559456 - RNA, 13 nt, Human
agagggaaaaugu

SEQ ID NO: 3559457 - RNA, 20 nt, Human
agagggaaacgugcccucug

SEQ ID NO: 3559458 - RNA, 15 nt, Human
agagggaagaaaaga

SEQ ID NO: 3559459 - RNA, 23 nt, Human
agagggaagaaaagagcuuucuu

SEQ ID NO: 3559460 - RNA, 12 nt, Human
agagggaaugug

SEQ ID NO: 3559461 - RNA, 16 nt, Human
agagggaaugugaaau

SEQ ID NO: 3559462 - RNA, 16 nt, Human
agagggaccucuccca

SEQ ID NO: 3559463 - RNA, 15 nt, Human
agagggacgccuggg

SEQ ID NO: 3559464 - RNA, 15 nt, Human
agagggagaagaagu

SEQ ID NO: 3559465 - RNA, 17 nt, Human
agagggaggcaagcccu

SEQ ID NO: 3559466 - RNA, 16 nt, Human
agagggagggagggcu

SEQ ID NO: 3559467 - RNA, 20 nt, Human
agagggagggagggcuccag

SEQ ID NO: 3559468 - RNA, 22 nt, Human
agagggagggagggcuccagac

SEQ ID NO: 3559469 - RNA, 16 nt, Human
agagggaggggccuag

SEQ ID NO: 3559470 - RNA, 15 nt, Human
agagggagguaagga

SEQ ID NO: 3559471 - RNA, 22 nt, Human
agagggaggucacuggaaaggg

SEQ ID NO: 3559472 - RNA, 20 nt, Human
agagggagugacagaggcag

SEQ ID NO: 3559473 - RNA, 22 nt, Human
agagcaggacuccaggcccaag

SEQ ID NO: 3559474 - RNA, 12 nt, Human
agagcaggcaca

SEQ ID NO: 3559475 - RNA, 20 nt, Human
agagcaggcacauggaggag

SEQ ID NO: 3559476 - RNA, 13 nt, Human
agagcaggccagg

SEQ ID NO: 3559477 - RNA, 19 nt, Human
agagcaggcguucagcuca

SEQ ID NO: 3559478 - RNA, 13 nt, Human
agagcaggcuggc

SEQ ID NO: 3559479 - RNA, 22 nt, Human
agagcaggcuggcagcucucca

SEQ ID NO: 3559480 - RNA, 23 nt, Human
agagcaggcuggcagcucuccag

SEQ ID NO: 3559481 - RNA, 22 nt, Human
agagcagggguccuugguguga

SEQ ID NO: 3559482 - RNA, 18 nt, Human
agagcaguccauuucuac

SEQ ID NO: 3559483 - RNA, 12 nt, Human
agagcagugcuu

SEQ ID NO: 3559484 - RNA, 16 nt, Human
agagcagugggccugg

SEQ ID NO: 3559485 - RNA, 17 nt, Human
agagcagugguaagaau

SEQ ID NO: 3559486 - RNA, 15 nt, Human
agagcaucaggccua

SEQ ID NO: 3559487 - RNA, 15 nt, Human
agagcaucaugccuc

SEQ ID NO: 3559488 - RNA, 18 nt, Human
agagcaucaugccucuga

SEQ ID NO: 3559489 - RNA, 21 nt, Human
agagcaucaugccucugaggc

SEQ ID NO: 3559490 - RNA, 23 nt, Human
agagcaucaugccucugaggcca

SEQ ID NO: 3559491 - RNA, 12 nt, Human
agagcaugaaau

SEQ ID NO: 3559492 - RNA, 17 nt, Human
agagcauuacgugagcc

SEQ ID NO: 3559493 - RNA, 21 nt, Human
agagcauuacgugagccaggu

SEQ ID NO: 3559494 - RNA, 17 nt, Human
agagcauugcauggaca

SEQ ID NO: 3559495 - RNA, 20 nt, Human
agagcauuuccaacaccaca

SEQ ID NO: 3559496 - RNA, 23 nt, Human
agagccaauggaguagaccccug

SEQ ID NO: 3559497 - RNA, 17 nt, Human
agagccacaggucuuua

SEQ ID NO: 3559498 - RNA, 18 nt, Human
agagccagagaagugaca

SEQ ID NO: 3559499 - RNA, 14 nt, Human
agagccagcccucc

SEQ ID NO: 3559500 - RNA, 17 nt, Human
agagccagcccucccug

SEQ ID NO: 3559501 - RNA, 20 nt, Human
agagccagcccucccugucc

SEQ ID NO: 3559502 - RNA, 13 nt, Human
agagccagcuccc

SEQ ID NO: 3559503 - RNA, 13 nt, Human
agagccagcuugg

SEQ ID NO: 3559504 - RNA, 19 nt, Human
agagccaggagaagcucag

SEQ ID NO: 3559505 - RNA, 16 nt, Human
agagccauacauaaaa

SEQ ID NO: 3559506 - RNA, 20 nt, Human
agagccauauaaguuugaag

SEQ ID NO: 3559507 - RNA, 16 nt, Human
agagccaugcugggaa

SEQ ID NO: 3559508 - RNA, 18 nt, Human
agagccauguagaagcug

SEQ ID NO: 3559509 - RNA, 20 nt, Human
agagccauguagaagcugca

SEQ ID NO: 3559510 - RNA, 19 nt, Human
agagccaugucuucucccu

SEQ ID NO: 3559511 - RNA, 16 nt, Human
agagccauuuugugaa

SEQ ID NO: 3559512 - RNA, 19 nt, Human
agagcccaccuuggcucaa

SEQ ID NO: 3559513 - RNA, 16 nt, Human
agagcccagagguaac

SEQ ID NO: 3559514 - RNA, 15 nt, Human
agagcccagaguccc

SEQ ID NO: 3559515 - RNA, 17 nt, Human
agagcccaggagcuccc

SEQ ID NO: 3559516 - RNA, 13 nt, Human
agagcccaggcuc

SEQ ID NO: 3559517 - RNA, 15 nt, Human
agagccccacagccc

SEQ ID NO: 3559518 - RNA, 14 nt, Human
agagccccagcuga

SEQ ID NO: 3559519 - RNA, 15 nt, Human
agagccccagcugac

SEQ ID NO: 3559520 - RNA, 12 nt, Human
agagcccccagg

SEQ ID NO: 3559521 - RNA, 13 nt, Human
agagcccccagga

SEQ ID NO: 3559522 - RNA, 19 nt, Human
agagccccuccuccagccc

SEQ ID NO: 3559523 - RNA, 23 nt, Human
agagccccuccuccagccccugu

SEQ ID NO: 3559524 - RNA, 16 nt, Human
agagcccugcucccuc

SEQ ID NO: 3559525 - RNA, 18 nt, Human
agagcccugcucccuccg

SEQ ID NO: 3559526 - RNA, 12 nt, Human
agagcccuggga

SEQ ID NO: 3559527 - RNA, 15 nt, Human
agagcccuucauuug

SEQ ID NO: 3559528 - RNA, 19 nt, Human
agagccggcccgccucucc

SEQ ID NO: 3559529 - RNA, 21 nt, Human
agagccggcccgccucuccuc

SEQ ID NO: 3559530 - RNA, 18 nt, Human
agagccggguguccccaa

SEQ ID NO: 3559531 - RNA, 17 nt, Human
agagccucaaaugagaa

SEQ ID NO: 3559532 - RNA, 15 nt, Human
agagccugagaguga

SEQ ID NO: 3559533 - RNA, 17 nt, Human
agagccugcaggugcug

SEQ ID NO: 3559534 - RNA, 13 nt, Human
agagccugcccca

SEQ ID NO: 3559535 - RNA, 15 nt, Human
agagccugccuggag

SEQ ID NO: 3559536 - RNA, 17 nt, Human
agagccugccuggagcg

SEQ ID NO: 3559537 - RNA, 17 nt, Human
agagccugcugcauggg

SEQ ID NO: 3559538 - RNA, 12 nt, Human
agagccugcugg

SEQ ID NO: 3559539 - RNA, 13 nt, Human
agagccugcugga

SEQ ID NO: 3559540 - RNA, 16 nt, Human
agagccugcuggaucu

SEQ ID NO: 3559541 - RNA, 16 nt, Human
agagccuggagaagcu

SEQ ID NO: 3559542 - RNA, 10 nt, Human
agagccuggg

SEQ ID NO: 3559543 - RNA, 13 nt, Human
agagccuggggcu

SEQ ID NO: 3559544 - RNA, 16 nt, Human
agagccuggggcucua

SEQ ID NO: 3559545 - RNA, 18 nt, Human
agagccuggugcugcugc

SEQ ID NO: 3559546 - RNA, 15 nt, Human
agagccuuaaaacau

SEQ ID NO: 3559547 - RNA, 16 nt, Human
agagccuucagccuua

SEQ ID NO: 3559548 - RNA, 17 nt, Human
agagccuuccacccagg

SEQ ID NO: 3559549 - RNA, 20 nt, Human
agagccuuccacccaggggc

SEQ ID NO: 3559550 - RNA, 19 nt, Human
agagccuucucagaagcac

SEQ ID NO: 3559551 - RNA, 21 nt, Human
agagccuugguguccaccugg

SEQ ID NO: 3559552 - RNA, 23 nt, Human
agagccuugguucaucaguguua

SEQ ID NO: 3559553 - RNA, 22 nt, Human
agaucauaguuuuauuuauauu

SEQ ID NO: 3559554 - RNA, 21 nt, Human
agaucauccagaaguuccuca

SEQ ID NO: 3559555 - RNA, 21 nt, Human
agaucauugugaaauuauuca

SEQ ID NO: 3559556 - RNA, 17 nt, Human
agaucauuugaguucag

SEQ ID NO: 3559557 - RNA, 14 nt, Human
agauccacacacag

SEQ ID NO: 3559558 - RNA, 16 nt, Human
agauccacacacagag

SEQ ID NO: 3559559 - RNA, 13 nt, Human
agauccagccugg

SEQ ID NO: 3559560 - RNA, 17 nt, Human
agauccaggagcuccag

SEQ ID NO: 3559561 - RNA, 22 nt, Human
agauccagggacagaggcccca

SEQ ID NO: 3559562 - RNA, 15 nt, Human
agauccauuaauuua

SEQ ID NO: 3559563 - RNA, 18 nt, Human
agauccauuaauuuaaau

SEQ ID NO: 3559564 - RNA, 19 nt, Human
agauccauuuccauugcuu

SEQ ID NO: 3559565 - RNA, 22 nt, Human
agaucccagaaggaccuccuga

SEQ ID NO: 3559566 - RNA, 13 nt, Human
agaucccagcuca

SEQ ID NO: 3559567 - RNA, 19 nt, Human
agaucccccagaaaagaaa

SEQ ID NO: 3559568 - RNA, 14 nt, Human
agaucccccagacu

SEQ ID NO: 3559569 - RNA, 16 nt, Human
agauccuaagaugugu

SEQ ID NO: 3559570 - RNA, 14 nt, Human
agauccuaaggguc

SEQ ID NO: 3559571 - RNA, 12 nt, Human
agauccuccuca

SEQ ID NO: 3559572 - RNA, 15 nt, Human
agauccuccucauuc

SEQ ID NO: 3559573 - RNA, 14 nt, Human
agauccucucuggg

SEQ ID NO: 3559574 - RNA, 17 nt, Human
agauccucucuggggcu

SEQ ID NO: 3559575 - RNA, 20 nt, Human
agauccugaucuuaagaggc

SEQ ID NO: 3559576 - RNA, 22 nt, Human
agauccugaucuuaagaggcug

SEQ ID NO: 3559577 - RNA, 13 nt, Human
agauccuggaaau

SEQ ID NO: 3559578 - RNA, 14 nt, Human
agauccuuguuuca

SEQ ID NO: 3559579 - RNA, 18 nt, Human
agaucgagaccauccugg

SEQ ID NO: 3559580 - RNA, 14 nt, Human
agaucggggccaga

SEQ ID NO: 3559581 - RNA, 17 nt, Human
agaucggggccagaggc

SEQ ID NO: 3559582 - RNA, 14 nt, Human
agaucgguuaacaa

SEQ ID NO: 3559583 - RNA, 14 nt, Human
agaucgucaggacc

SEQ ID NO: 3559584 - RNA, 22 nt, Human
agaucgugccguuacucuccaa

SEQ ID NO: 3559585 - RNA, 14 nt, Human
agaucguguauuga

SEQ ID NO: 3559586 - RNA, 23 nt, Human
agaucguguauugagauuucuua

SEQ ID NO: 3559587 - RNA, 22 nt, Human
agaucuaaaaauaacuguaauu

SEQ ID NO: 3559588 - RNA, 18 nt, Human
agaucuaaauaaaaugcu

SEQ ID NO: 3559589 - RNA, 22 nt, Human
agaucuaaggaugucacagggc

SEQ ID NO: 3559590 - RNA, 16 nt, Human
agaucuauaaagcgau

SEQ ID NO: 3559591 - RNA, 16 nt, Human
agaucucacucugccc

SEQ ID NO: 3559592 - RNA, 21 nt, Human
agaucucccacaugccagggg

SEQ ID NO: 3559593 - RNA, 18 nt, Human
agaucucuaacuucacca

SEQ ID NO: 3559594 - RNA, 18 nt, Human
agaucucugcuuuggaaa

SEQ ID NO: 3559595 - RNA, 13 nt, Human
agaucugccuaag

SEQ ID NO: 3559596 - RNA, 12 nt, Human
agaucugguuuu

SEQ ID NO: 3559597 - RNA, 17 nt, Human
agaucugguuuugcuau

SEQ ID NO: 3559598 - RNA, 18 nt, Human
agaucuguaauuuuuauu

SEQ ID NO: 3559599 - RNA, 15 nt, Human
agaucuguccucagc

SEQ ID NO: 3559600 - RNA, 14 nt, Human
agaucugugcccca

SEQ ID NO: 3559601 - RNA, 19 nt, Human
agaucugugccccaugccu

SEQ ID NO: 3559602 - RNA, 12 nt, Human
agaucuuaauau

SEQ ID NO: 3559603 - RNA, 14 nt, Human
agaucuuagauucu

SEQ ID NO: 3559604 - RNA, 13 nt, Human
agaucuuagguau

SEQ ID NO: 3559605 - RNA, 18 nt, Human
agaucuugcagaaguucu

SEQ ID NO: 3559606 - RNA, 12 nt, Human
agaucuuucagg

SEQ ID NO: 3559607 - RNA, 17 nt, Human
agaugaaaaagcaugua

SEQ ID NO: 3559608 - RNA, 21 nt, Human
agaugaaaaagcauguacagu

SEQ ID NO: 3559609 - RNA, 23 nt, Human
agaugaaagaggagguuuggggu

SEQ ID NO: 3559610 - RNA, 17 nt, Human
agaugaaauuccauuug

SEQ ID NO: 3559611 - RNA, 18 nt, Human
agaugaaauuccauuugu

SEQ ID NO: 3559612 - RNA, 18 nt, Human
agaugaacagacugaccu

SEQ ID NO: 3559613 - RNA, 19 nt, Human
agaugaagcaaacacauua

SEQ ID NO: 3559614 - RNA, 17 nt, Human
agaugaaggucuguuuu

SEQ ID NO: 3559615 - RNA, 22 nt, Human
agaugaaguuuguaguuguuuu

SEQ ID NO: 3559616 - RNA, 22 nt, Human
agaugaauacaaacaauggaaa

SEQ ID NO: 3559617 - RNA, 19 nt, Human
agaugaaugaagcaaaugu

SEQ ID NO: 3559618 - RNA, 16 nt, Human
agaugaaugccgugga

SEQ ID NO: 3559619 - RNA, 15 nt, Human
agaugaaugucaguu

SEQ ID NO: 3559620 - RNA, 21 nt, Human
agaugaauuauccuauuucag

SEQ ID NO: 3559621 - RNA, 18 nt, Human
agaugacaagaaaggcug

SEQ ID NO: 3559622 - RNA, 18 nt, Human
agaugacauugacuauuu

SEQ ID NO: 3559623 - RNA, 20 nt, Human
agaugaccauaaccacugaa

SEQ ID NO: 3559624 - RNA, 20 nt, Human
agaugaccccugcccagauc

SEQ ID NO: 3559625 - RNA, 15 nt, Human
agaugacugaguccu

SEQ ID NO: 3559626 - RNA, 13 nt, Human
agaugagaacaaa

SEQ ID NO: 3559627 - RNA, 19 nt, Human
agaugagaacaaagcuguu

SEQ ID NO: 3559628 - RNA, 17 nt, Human
agaugagaacagauaaa

SEQ ID NO: 3559629 - RNA, 13 nt, Human
agaugagaauuag

SEQ ID NO: 3559630 - RNA, 23 nt, Human
agaugagaggggagagcugaaca

SEQ ID NO: 3559631 - RNA, 19 nt, Human
agaugagauuggcauggcu

SEQ ID NO: 3559632 - RNA, 16 nt, Human
agaugagcuuucuuuu

SEQ ID NO: 3559633 - RNA, 13 nt, Human
agaugagcuuuuc

SEQ ID NO: 3559634 - RNA, 16 nt, Human
agaugagcuuuucuag

SEQ ID NO: 3559635 - RNA, 21 nt, Human
agaugaggccagaccauggac

SEQ ID NO: 3559636 - RNA, 18 nt, Human
agaugaggucaguugugu

SEQ ID NO: 3559637 - RNA, 20 nt, Human
agaugaguuaucuaagaaua

SEQ ID NO: 3559638 - RNA, 19 nt, Human
agaugauggaugccaauau

SEQ ID NO: 3559639 - RNA, 17 nt, Human
agaugcaaagaggcaag

SEQ ID NO: 3559640 - RNA, 18 nt, Human
agaugcaaugugcuacug

SEQ ID NO: 3559641 - RNA, 19 nt, Human
agaugcaaugugcuacuga

SEQ ID NO: 3559642 - RNA, 23 nt, Human
agaugcaccaccaagccaaggga

SEQ ID NO: 3559643 - RNA, 14 nt, Human
agaugcaccagccc

SEQ ID NO: 3559644 - RNA, 23 nt, Human
agaugcacuuaaguuagccucca

SEQ ID NO: 3559645 - RNA, 19 nt, Human
agaugcacuuugcuuuaau

SEQ ID NO: 3559646 - RNA, 17 nt, Human
agaugcagagagccauu

SEQ ID NO: 3559647 - RNA, 18 nt, Human
agaugcagagagccauuu

SEQ ID NO: 3559648 - RNA, 19 nt, Human
agaugcagagagccauuuu

SEQ ID NO: 3559649 - RNA, 13 nt, Human
agaugcagcucuu

SEQ ID NO: 3559650 - RNA, 16 nt, Human
agaugcaguucugaag

SEQ ID NO: 3559651 - RNA, 17 nt, Human
agaugcauguugaccau

SEQ ID NO: 3559652 - RNA, 16 nt, Human
agaugcauuguaguuu

SEQ ID NO: 3559653 - RNA, 14 nt, Human
agaugcauuuggaa

SEQ ID NO: 3559654 - RNA, 18 nt, Human
agaugcauuuggguccag

SEQ ID NO: 3559655 - RNA, 21 nt, Human
agaugccacuaccccuugauu

SEQ ID NO: 3559656 - RNA, 21 nt, Human
agaugccagagcaaagggcca

SEQ ID NO: 3559657 - RNA, 18 nt, Human
agaugccauucauagaga

SEQ ID NO: 3559658 - RNA, 15 nt, Human
agaugcccaaauccu

SEQ ID NO: 3559659 - RNA, 17 nt, Human
agaugccccagagcugu

SEQ ID NO: 3559660 - RNA, 22 nt, Human
agaugccuccaccccccagaac

SEQ ID NO: 3559661 - RNA, 15 nt, Human
agaugccuccaccgc

SEQ ID NO: 3559662 - RNA, 21 nt, Human
agaugccuccaccgcugccua

SEQ ID NO: 3559663 - RNA, 18 nt, Human
agaugcgcagccccaucu

SEQ ID NO: 3559664 - RNA, 20 nt, Human
agaugcgucccaagauguug

SEQ ID NO: 3559665 - RNA, 20 nt, Human
agaugcuaaaaucccuggau

SEQ ID NO: 3559666 - RNA, 19 nt, Human
agaugcuagaacucccuuu

SEQ ID NO: 3559667 - RNA, 10 nt, Human
agaugcucaa

SEQ ID NO: 3559668 - RNA, 13 nt, Human
agaugcuccaaga

SEQ ID NO: 3559669 - RNA, 19 nt, Human
agaugcuccaagauucuag

SEQ ID NO: 3559670 - RNA, 20 nt, Human
agaugcuccuugggcccuuu

SEQ ID NO: 3559671 - RNA, 13 nt, Human
agaugcucuuuua

SEQ ID NO: 3559672 - RNA, 21 nt, Human
agaugcugaaacaggagagaa

SEQ ID NO: 3559673 - RNA, 15 nt, Human
agaugcugauguuca

SEQ ID NO: 3559674 - RNA, 17 nt, Human
agaugcugauguucagu

SEQ ID NO: 3559675 - RNA, 15 nt, Human
agaugccauucauag

SEQ ID NO: 3559676 - RNA, 21 nt, Human
agaugcccagagggcccaggc

SEQ ID NO: 3559677 - RNA, 18 nt, Human
agaugcccgagggagggg

SEQ ID NO: 3559678 - RNA, 19 nt, Human
agaugcccgagggagggga

SEQ ID NO: 3559679 - RNA, 14 nt, Human
agaugcccugcuag

SEQ ID NO: 3559680 - RNA, 12 nt, Human
agaugccuccac

SEQ ID NO: 3559681 - RNA, 14 nt, Human
agaugccuccaccg

SEQ ID NO: 3559682 - RNA, 19 nt, Human
agaugccucccugacccug

SEQ ID NO: 3559683 - RNA, 22 nt, Human
agaugccucccugacccugcag

SEQ ID NO: 3559684 - RNA, 23 nt, Human
agaugccucccugacccugcaga

SEQ ID NO: 3559685 - RNA, 13 nt, Human
agaugccuccuuc

SEQ ID NO: 3559686 - RNA, 16 nt, Human
agaugccuccuuccuc

SEQ ID NO: 3559687 - RNA, 22 nt, Human
agaugcgcauucuaaccuggag

SEQ ID NO: 3559688 - RNA, 15 nt, Human
agaugcgucccaaga

SEQ ID NO: 3559689 - RNA, 16 nt, Human
agaugcuacuaagaaa

SEQ ID NO: 3559690 - RNA, 14 nt, Human
agaugcuagaacuc

SEQ ID NO: 3559691 - RNA, 15 nt, Human
agaugcuagaacucc

SEQ ID NO: 3559692 - RNA, 21 nt, Human
agaugcuagaacucccuuuca

SEQ ID NO: 3559693 - RNA, 23 nt, Human
agaugcuagaacucccuuucaac

SEQ ID NO: 3559694 - RNA, 20 nt, Human
agaugcuagcgcguugccug

SEQ ID NO: 3559695 - RNA, 20 nt, Human
agaugcucaaaguuguuuuu

SEQ ID NO: 3559696 - RNA, 20 nt, Human
agaugcucagguacagagaa

SEQ ID NO: 3559697 - RNA, 15 nt, Human
acucuguucauuccu

SEQ ID NO: 3559698 - RNA, 16 nt, Human
acucuguucauuccuc

SEQ ID NO: 3559699 - RNA, 17 nt, Human
acucuguuccuucacau

SEQ ID NO: 3559700 - RNA, 18 nt, Human
acucuguuccuucacauc

SEQ ID NO: 3559701 - RNA, 20 nt, Human
acucuguuccuucacauccu

SEQ ID NO: 3559702 - RNA, 20 nt, Human
acucuguugcaagugcaaua

SEQ ID NO: 3559703 - RNA, 11 nt, Human
acucuuaaaac

SEQ ID NO: 3559704 - RNA, 13 nt, Human
acucuuaaagcaa

SEQ ID NO: 3559705 - RNA, 20 nt, Human
acucuuaaaugaucugccuc

SEQ ID NO: 3559706 - RNA, 14 nt, Human
acucuuaagaagac

SEQ ID NO: 3559707 - RNA, 20 nt, Human
acucuuaagaagacugcauu

SEQ ID NO: 3559708 - RNA, 13 nt, Human
acucuuaagccau

SEQ ID NO: 3559709 - RNA, 22 nt, Human
acucuuaagccaucuugguaaa

SEQ ID NO: 3559710 - RNA, 16 nt, Human
acucuuaaguuucuca

SEQ ID NO: 3559711 - RNA, 22 nt, Human
acucuuaaguuucucagcuccc

SEQ ID NO: 3559712 - RNA, 14 nt, Human
acucuuaaucaaau

SEQ ID NO: 3559713 - RNA, 19 nt, Human
acucuuaggaagagaaacc

SEQ ID NO: 3559714 - RNA, 20 nt, Human
acucuuaggaagagaaacca

SEQ ID NO: 3559715 - RNA, 21 nt, Human
acucuuaggcacuuugggggu

SEQ ID NO: 3559716 - RNA, 15 nt, Human
acucuuaguuacuca

SEQ ID NO: 3559717 - RNA, 12 nt, Human
acucuucacugu

SEQ ID NO: 3559718 - RNA, 20 nt, Human
acucuucaguuaagccuuug

SEQ ID NO: 3559719 - RNA, 17 nt, Human
acucuuccagaauccca

SEQ ID NO: 3559720 - RNA, 20 nt, Human
acucuuccgaaaaauccucu

SEQ ID NO: 3559721 - RNA, 22 nt, Human
acucuuccgaaaaauccucuuc

SEQ ID NO: 3559722 - RNA, 17 nt, Human
acucuuccuccaaggac

SEQ ID NO: 3559723 - RNA, 20 nt, Human
acucuucgaagccuugccua

SEQ ID NO: 3559724 - RNA, 23 nt, Human
acucuucucaucuugacagagcc

SEQ ID NO: 3559725 - RNA, 17 nt, Human
acucuucucucugcucu

SEQ ID NO: 3559726 - RNA, 15 nt, Human
acucuucuugaaauu

SEQ ID NO: 3559727 - RNA, 16 nt, Human
acucuucuugaaauuu

SEQ ID NO: 3559728 - RNA, 19 nt, Human
acucuucuugaaauuuuaa

SEQ ID NO: 3559729 - RNA, 12 nt, Human
acucuugacagc

SEQ ID NO: 3559730 - RNA, 15 nt, Human
acucuugacucuugc

SEQ ID NO: 3559731 - RNA, 21 nt, Human
acucuugaguuguuuuuguau

SEQ ID NO: 3559732 - RNA, 22 nt, Human
acucuugcacagucacugcucu

SEQ ID NO: 3559733 - RNA, 18 nt, Human
acucuugccuguuuccca

SEQ ID NO: 3559734 - RNA, 13 nt, Human
acucuugcucuuu

SEQ ID NO: 3559735 - RNA, 16 nt, Human
acucuuggagccugca

SEQ ID NO: 3559736 - RNA, 12 nt, Human
acucuuguaaga

SEQ ID NO: 3559737 - RNA, 16 nt, Human
acucuuguaagauuuu

SEQ ID NO: 3559738 - RNA, 19 nt, Human
acucuuguaagauuuugaa

SEQ ID NO: 3559739 - RNA, 20 nt, Human
acucuuguaagauuuugaaa

SEQ ID NO: 3559740 - RNA, 16 nt, Human
acucuuguugaguucu

SEQ ID NO: 3559741 - RNA, 15 nt, Human
acucuuguuuccuua

SEQ ID NO: 3559742 - RNA, 18 nt, Human
acucuuuaugaucuggcc

SEQ ID NO: 3559743 - RNA, 16 nt, Human
acucuuuauugucugu

SEQ ID NO: 3559744 - RNA, 20 nt, Human
acucuuuauugucuguaaau

SEQ ID NO: 3559745 - RNA, 13 nt, Human
acucuuucaaaac

SEQ ID NO: 3559746 - RNA, 17 nt, Human
acucuuucuaaugcuga

SEQ ID NO: 3559747 - RNA, 15 nt, Human
acucuuucugagugc

SEQ ID NO: 3559748 - RNA, 20 nt, Human
acucuuucugagugccuucu

SEQ ID NO: 3559749 - RNA, 19 nt, Human
acucuuucuuucaauaaaa

SEQ ID NO: 3559750 - RNA, 17 nt, Human
acucuuugaaugacaaa

SEQ ID NO: 3559751 - RNA, 16 nt, Human
acucuuugagauagaa

SEQ ID NO: 3559752 - RNA, 19 nt, Human
acucuuugagauagaagaa

SEQ ID NO: 3559753 - RNA, 18 nt, Human
acucuuuuccuucccuuu

SEQ ID NO: 3559754 - RNA, 21 nt, Human
acucuuuugcuuuauuccaga

SEQ ID NO: 3559755 - RNA, 17 nt, Human
acucuuuuugggcuccu

SEQ ID NO: 3559756 - RNA, 18 nt, Human
acucuuuuugggcuccuu

SEQ ID NO: 3559757 - RNA, 16 nt, Human
acugaaaaaauauaug

SEQ ID NO: 3559758 - RNA, 14 nt, Human
acugaaaacauaaa

SEQ ID NO: 3559759 - RNA, 18 nt, Human
acugaaaacauaaaaagu

SEQ ID NO: 3559760 - RNA, 19 nt, Human
acugaaaacauaaaaaguu

SEQ ID NO: 3559761 - RNA, 14 nt, Human
acugaaaacaucug

SEQ ID NO: 3559762 - RNA, 19 nt, Human
acugaaaagacucaguguu

SEQ ID NO: 3559763 - RNA, 14 nt, Human
acugaaaagagagc

SEQ ID NO: 3559764 - RNA, 20 nt, Human
acugaaaagagagcagagaa

SEQ ID NO: 3559765 - RNA, 20 nt, Human
acugaaaagguucuucaucc

SEQ ID NO: 3559766 - RNA, 19 nt, Human
acugaaaauaccaucaggc

SEQ ID NO: 3559767 - RNA, 15 nt, Human
acugaaaaugugcua

SEQ ID NO: 3559768 - RNA, 19 nt, Human
acugaaaaugugcuauacu

SEQ ID NO: 3559769 - RNA, 14 nt, Human
acugaaacagauuu

SEQ ID NO: 3559770 - RNA, 19 nt, Human
acugaaaccuuuaagaaaa

SEQ ID NO: 3559771 - RNA, 21 nt, Human
acugaaagacaccauuuaucu

SEQ ID NO: 3559772 - RNA, 17 nt, Human
acugaaaggcuuuucaa

SEQ ID NO: 3559773 - RNA, 13 nt, Human
acugaaagguuac

SEQ ID NO: 3559774 - RNA, 17 nt, Human
acugaaagugguuugaa

SEQ ID NO: 3559775 - RNA, 16 nt, Human
acugaaaguuuuguaa

SEQ ID NO: 3559776 - RNA, 17 nt, Human
acugaaaguuuuguaaa

SEQ ID NO: 3559777 - RNA, 18 nt, Human
acugaaaguuuuguaaaa

SEQ ID NO: 3559778 - RNA, 23 nt, Human
acugaaaguuuuguaaaagaaau

SEQ ID NO: 3559779 - RNA, 17 nt, Human
acugaaaucugucaaga

SEQ ID NO: 3559780 - RNA, 12 nt, Human
acugaacaaaaa

SEQ ID NO: 3559781 - RNA, 19 nt, Human
acugaacaucugaguccug

SEQ ID NO: 3559782 - RNA, 23 nt, Human
acugaacaucugaguccuggaug

SEQ ID NO: 3559783 - RNA, 24 nt, Human
acugaacaucugaguccuggauga

SEQ ID NO: 3559784 - RNA, 22 nt, Human
acugaaccugggaaagagauuu

SEQ ID NO: 3559785 - RNA, 20 nt, Human
acugaacgauccuucaaagu

SEQ ID NO: 3559786 - RNA, 18 nt, Human
acugaacucacuuuccuc

SEQ ID NO: 3559787 - RNA, 21 nt, Human
acugaacuucaggauaauaaa

SEQ ID NO: 3559788 - RNA, 19 nt, Human
acugaacuuugaagacccg

SEQ ID NO: 3559789 - RNA, 16 nt, Human
acugaacuuugcugag

SEQ ID NO: 3559790 - RNA, 19 nt, Human
acugaacuuugcugagccu

SEQ ID NO: 3559791 - RNA, 12 nt, Human
acugaagaagca

SEQ ID NO: 3559792 - RNA, 14 nt, Human
acugaagaggagga

SEQ ID NO: 3559793 - RNA, 14 nt, Human
acugaagauagaag

SEQ ID NO: 3559794 - RNA, 16 nt, Human
acugaagauguugaga

SEQ ID NO: 3559795 - RNA, 21 nt, Human
acugaagcagccucuccccag

SEQ ID NO: 3559796 - RNA, 18 nt, Human
acugaagccagaaauaaa

SEQ ID NO: 3559797 - RNA, 15 nt, Human
acugaagccugcagg

SEQ ID NO: 3559798 - RNA, 11 nt, Human
acugaaggaga

SEQ ID NO: 3559799 - RNA, 21 nt, Human
acugaaggccacuugaguugg

SEQ ID NO: 3559800 - RNA, 20 nt, Human
acugaaggccuggcccacag

SEQ ID NO: 3559801 - RNA, 19 nt, Human
acugaaguagugugcaguu

SEQ ID NO: 3559802 - RNA, 14 nt, Human
acugaauaccacuc

SEQ ID NO: 3559803 - RNA, 15 nt, Human
acugaauauuuauau

SEQ ID NO: 3559804 - RNA, 16 nt, Human
acugaaugaaaccccc

SEQ ID NO: 3559805 - RNA, 19 nt, Human
acugaaugaaacccccaca

SEQ ID NO: 3559806 - RNA, 23 nt, Human
acugaaugaaacccccacacaca

SEQ ID NO: 3559807 - RNA, 17 nt, Human
acugaaugaacaaccuc

SEQ ID NO: 3559808 - RNA, 21 nt, Human
acugaaugaagcaguauuuug

SEQ ID NO: 3559809 - RNA, 22 nt, Human
acugaaugcuucugacuucaua

SEQ ID NO: 3559810 - RNA, 17 nt, Human
acugaauggacuuugca

SEQ ID NO: 3559811 - RNA, 19 nt, Human
acugaauguuuauuccuug

SEQ ID NO: 3559812 - RNA, 13 nt, Human
acugaauuuggag

SEQ ID NO: 3559813 - RNA, 19 nt, Human
acugaauuuuuauguguga

SEQ ID NO: 3559814 - RNA, 13 nt, Human
acugacaaaucaa

SEQ ID NO: 3559815 - RNA, 17 nt, Human
acugacaagcuccauuu

SEQ ID NO: 3559816 - RNA, 13 nt, Human
acugacacacacg

SEQ ID NO: 3559817 - RNA, 12 nt, Human
acugacagcaug

SEQ ID NO: 3559818 - RNA, 13 nt, Human
acugacagcaugu

SEQ ID NO: 3559819 - RNA, 20 nt, Human
acugacaggcagccuggaca

SEQ ID NO: 3559820 - RNA, 23 nt, Human
acugacaugauuagcagaagaaa

SEQ ID NO: 3559821 - RNA, 17 nt, Human
acugacaugcccucccu

SEQ ID NO: 3559822 - RNA, 12 nt, Human
acugacaugugg

SEQ ID NO: 3559823 - RNA, 17 nt, Human
acugacauuguuggcca

SEQ ID NO: 3559824 - RNA, 23 nt, Human
acugacauuguuggccaaagcca

SEQ ID NO: 3559825 - RNA, 20 nt, Human
acugaccaauauuguacagu

SEQ ID NO: 3559826 - RNA, 22 nt, Human
acugaccaauauuguacaguuu

SEQ ID NO: 3559827 - RNA, 12 nt, Human
acugaccagaac

SEQ ID NO: 3559828 - RNA, 20 nt, Human
acugaccagccuccaugcug

SEQ ID NO: 3559829 - RNA, 22 nt, Human
acugaccauccacucuacccuc

SEQ ID NO: 3559830 - RNA, 13 nt, Human
acugacccugggg

SEQ ID NO: 3559831 - RNA, 21 nt, Human
acugaccugguccacagggca

SEQ ID NO: 3559832 - RNA, 22 nt, Human
acugaccugguccacagggcac

SEQ ID NO: 3559833 - RNA, 13 nt, Human
agauuauaacuug

SEQ ID NO: 3559834 - RNA, 13 nt, Human
agauuauaauaaa

SEQ ID NO: 3559835 - RNA, 23 nt, Human
agauuauagauucuaaagauucu

SEQ ID NO: 3559836 - RNA, 16 nt, Human
agauuauaucaaagua

SEQ ID NO: 3559837 - RNA, 15 nt, Human
agauuaucguuuucu

SEQ ID NO: 3559838 - RNA, 16 nt, Human
agauuauucacugauu

SEQ ID NO: 3559839 - RNA, 14 nt, Human
agauuauugaaaua

SEQ ID NO: 3559840 - RNA, 16 nt, Human
agauuauugaaauauu

SEQ ID NO: 3559841 - RNA, 14 nt, Human
agauuuuauuuuac

SEQ ID NO: 3559842 - RNA, 15 nt, Human
agauuuuauuuuacu

SEQ ID NO: 3559843 - RNA, 20 nt, Human
agauuuuguguuuauucuug

SEQ ID NO: 3559844 - RNA, 17 nt, Human
agauuuuguuuugcuuu

SEQ ID NO: 3559845 - RNA, 23 nt, Human
agauuuuguuuugcuuuuucuga

SEQ ID NO: 3559846 - RNA, 19 nt, Human
agauuuuuaaaaaauauuu

SEQ ID NO: 3559847 - RNA, 16 nt, Human
agauuuuuaacgaaug

SEQ ID NO: 3559848 - RNA, 22 nt, Human
agauuuuucucaaaguuuugaa

SEQ ID NO: 3559849 - RNA, 13 nt, Human
agauuuuuuaaua

SEQ ID NO: 3559850 - RNA, 16 nt, Human
agauuuuuuauugcua

SEQ ID NO: 3559851 - RNA, 23 nt, Human
agauuuuuuuguuguuuguuuag

SEQ ID NO: 3559852 - RNA, 14 nt, Human
agcaaaaaagaaaa

SEQ ID NO: 3559853 - RNA, 16 nt, Human
agcaaaaaauaaugac

SEQ ID NO: 3559854 - RNA, 19 nt, Human
agcaaaaacgaaagcuggg

SEQ ID NO: 3559855 - RNA, 15 nt, Human
agcaaaaagcaaaau

SEQ ID NO: 3559856 - RNA, 12 nt, Human
agcaaaaagugg

SEQ ID NO: 3559857 - RNA, 17 nt, Human
agcaaaaauauuuuaug

SEQ ID NO: 3559858 - RNA, 18 nt, Human
agcaaaaauauuuuauga

SEQ ID NO: 3559859 - RNA, 19 nt, Human
agcaaaaauauuuuaugau

SEQ ID NO: 3559860 - RNA, 23 nt, Human
agcaaaaauauuuuaugauccag

SEQ ID NO: 3559861 - RNA, 16 nt, Human
agcaaaaaugcuaaua

SEQ ID NO: 3559862 - RNA, 21 nt, Human
agcaaaaccaaauauuccaga

SEQ ID NO: 3559863 - RNA, 19 nt, Human
agcaaaaccauugcuucac

SEQ ID NO: 3559864 - RNA, 16 nt, Human
agcaaaacuuuuaaac

SEQ ID NO: 3559865 - RNA, 16 nt, Human
agcaaaagaaguaaca

SEQ ID NO: 3559866 - RNA, 15 nt, Human
agcaaaauaaaaacu

SEQ ID NO: 3559867 - RNA, 17 nt, Human
agcaaaauaaaaacuau

SEQ ID NO: 3559868 - RNA, 15 nt, Human
agcaaaauaaaacau

SEQ ID NO: 3559869 - RNA, 21 nt, Human
agcaaaauaauuuuaaacaaa

SEQ ID NO: 3559870 - RNA, 14 nt, Human
agcaaaaucauuuu

SEQ ID NO: 3559871 - RNA, 23 nt, Human
agcaaaaugugaaugggaaaaga

SEQ ID NO: 3559872 - RNA, 19 nt, Human
agcaaaauugauguguuua

SEQ ID NO: 3559873 - RNA, 14 nt, Human
agcaaaccaagaga

SEQ ID NO: 3559874 - RNA, 17 nt, Human
agcaaaccaagagauug

SEQ ID NO: 3559875 - RNA, 22 nt, Human
agcaaaccaagagauugcuaau

SEQ ID NO: 3559876 - RNA, 23 nt, Human
agcaaaccauuuuuaaaguagaa

SEQ ID NO: 3559877 - RNA, 21 nt, Human
agcaaacccugucaaacauua

SEQ ID NO: 3559878 - RNA, 14 nt, Human
agcaaacucugcug

SEQ ID NO: 3559879 - RNA, 17 nt, Human
agcaaacucuuuuccca

SEQ ID NO: 3559880 - RNA, 20 nt, Human
agcaaacugcaugcccagag

SEQ ID NO: 3559881 - RNA, 20 nt, Human
agcaaagauaucucaucucu

SEQ ID NO: 3559882 - RNA, 17 nt, Human
agcaaagaucaaaauaa

SEQ ID NO: 3559883 - RNA, 12 nt, Human
agcaaagcacag

SEQ ID NO: 3559884 - RNA, 22 nt, Human
agcaaagcaccagcuucuccag

SEQ ID NO: 3559885 - RNA, 22 nt, Human
agcaaagccccaugcuggagcc

SEQ ID NO: 3559886 - RNA, 23 nt, Human
agcaaagccccaugcuggagccu

SEQ ID NO: 3559887 - RNA, 22 nt, Human
agcaaagccuguucauggcaga

SEQ ID NO: 3559888 - RNA, 21 nt, Human
agcaaagcugaugacaacuuc

SEQ ID NO: 3559889 - RNA, 24 nt, Human
agcaaaguaguacuucuucuguaa

SEQ ID NO: 3559890 - RNA, 14 nt, Human
agcaaagucuaaag

SEQ ID NO: 3559891 - RNA, 20 nt, Human
agcaaagucuaaaguuuaca

SEQ ID NO: 3559892 - RNA, 19 nt, Human
agcaaauaaacuaggaaau

SEQ ID NO: 3559893 - RNA, 12 nt, Human
agcaaauacuua

SEQ ID NO: 3559894 - RNA, 21 nt, Human
agcaaauacuuagcaaaaagu

SEQ ID NO: 3559895 - RNA, 16 nt, Human
agcaaaucagaaacuu

SEQ ID NO: 3559896 - RNA, 20 nt, Human
agcaaauggccucaugucaa

SEQ ID NO: 3559897 - RNA, 17 nt, Human
agcaaaugucuuccugg

SEQ ID NO: 3559898 - RNA, 17 nt, Human
agcaaauguuaugcaua

SEQ ID NO: 3559899 - RNA, 16 nt, Human
agcaaauguuucugca

SEQ ID NO: 3559900 - RNA, 17 nt, Human
agcaaauguuucugcag

SEQ ID NO: 3559901 - RNA, 14 nt, Human
agcaaauuuauaau

SEQ ID NO: 3559902 - RNA, 15 nt, Human
agcaaauuuauaauu

SEQ ID NO: 3559903 - RNA, 18 nt, Human
agcaaauuuauaauuuua

SEQ ID NO: 3559904 - RNA, 21 nt, Human
agcaaauuuauaauuuuaaga

SEQ ID NO: 3559905 - RNA, 18 nt, Human
agcaaauuucaaaagaca

SEQ ID NO: 3559906 - RNA, 13 nt, Human
agcaacaauaaau

SEQ ID NO: 3559907 - RNA, 15 nt, Human
agcaacaauuuauga

SEQ ID NO: 3559908 - RNA, 21 nt, Human
agcaacaauuuaugaauugaa

SEQ ID NO: 3559909 - RNA, 15 nt, Human
agcaacaauuuucag

SEQ ID NO: 3559910 - RNA, 16 nt, Human
agcaacaauuuucaga

SEQ ID NO: 3559911 - RNA, 21 nt, Human
agcaacacaauguuauucguu

SEQ ID NO: 3559912 - RNA, 13 nt, Human
agcaacacagccu

SEQ ID NO: 3559913 - RNA, 20 nt, Human
agcaacagagugagacccug

SEQ ID NO: 3559914 - RNA, 22 nt, Human
agcaacagagugagacccuguc

SEQ ID NO: 3559915 - RNA, 16 nt, Human
agcaacaucagcuuga

SEQ ID NO: 3559916 - RNA, 20 nt, Human
agcaacaugcuucaugaaaa

SEQ ID NO: 3559917 - RNA, 18 nt, Human
agcaaccagagcacugua

SEQ ID NO: 3559918 - RNA, 15 nt, Human
agcaaccaguuggcu

SEQ ID NO: 3559919 - RNA, 18 nt, Human
agcaaccccuggacccca

SEQ ID NO: 3559920 - RNA, 20 nt, Human
agcaaccccuggaccccagc

SEQ ID NO: 3559921 - RNA, 24 nt, Human
agcaaccccuggaccccagccuca

SEQ ID NO: 3559922 - RNA, 22 nt, Human
agcaacccuccuaucaccuccc

SEQ ID NO: 3559923 - RNA, 20 nt, Human
agcaaccgccucaaaaugug

SEQ ID NO: 3559924 - RNA, 15 nt, Human
agcaaccguggcccu

SEQ ID NO: 3559925 - RNA, 19 nt, Human
agcaaccguggcccuuccu

SEQ ID NO: 3559926 - RNA, 15 nt, Human
agcaaccugggucca

SEQ ID NO: 3559927 - RNA, 19 nt, Human
agcaaccuuucaccuuugu

SEQ ID NO: 3559928 - RNA, 19 nt, Human
agcaacgcuauuccagcug

SEQ ID NO: 3559929 - RNA, 23 nt, Human
agcaacgcuuguagaacucacuc

SEQ ID NO: 3559930 - RNA, 21 nt, Human
agcaacuaaaaugugucuugc

SEQ ID NO: 3559931 - RNA, 21 nt, Human
agcaacuacagucuaaagcug

SEQ ID NO: 3559932 - RNA, 16 nt, Human
agcaacuaggccuuca

SEQ ID NO: 3559933 - RNA, 22 nt, Human
agcaacugucuauuucugcuga

SEQ ID NO: 3559934 - RNA, 18 nt, Human
agcaacuguuaugaaaua

SEQ ID NO: 3559935 - RNA, 20 nt, Human
agcaacuguuaugaaauaaa

SEQ ID NO: 3559936 - RNA, 21 nt, Human
agcaacuguuaugaaauaaag

SEQ ID NO: 3559937 - RNA, 22 nt, Human
agcaacuugaacuucaccugca

SEQ ID NO: 3559938 - RNA, 20 nt, Human
agcaacuugucuuuuucugg

SEQ ID NO: 3559939 - RNA, 20 nt, Human
agcaagaaaaaaaaaugcca

SEQ ID NO: 3559940 - RNA, 21 nt, Human
agcaagaagauccuaaaacaa

SEQ ID NO: 3559941 - RNA, 19 nt, Human
agcaagaaggcaaaaauag

SEQ ID NO: 3559942 - RNA, 13 nt, Human
agcaagacgcugu

SEQ ID NO: 3559943 - RNA, 16 nt, Human
agcaagacgcugugcu

SEQ ID NO: 3559944 - RNA, 20 nt, Human
agcaagacgcugugcugccc

SEQ ID NO: 3559945 - RNA, 21 nt, Human
agcaagacuucucuuugccuc

SEQ ID NO: 3559946 - RNA, 18 nt, Human
agcaagagagcagcaagg

SEQ ID NO: 3559947 - RNA, 16 nt, Human
agcaagagauauuuug

SEQ ID NO: 3559948 - RNA, 22 nt, Human
agcaagaggcaagcugaaauuu

SEQ ID NO: 3559949 - RNA, 21 nt, Human
agcaagauccugucuuuaagg

SEQ ID NO: 3559950 - RNA, 15 nt, Human
agcaagauguacuau

SEQ ID NO: 3559951 - RNA, 14 nt, Human
agcaagauuucaga

SEQ ID NO: 3559952 - RNA, 15 nt, Human
agcaagcauucagaa

SEQ ID NO: 3559953 - RNA, 16 nt, Human
agcaaggaaaacuuau

SEQ ID NO: 3559954 - RNA, 14 nt, Human
agcaaggagauuua

SEQ ID NO: 3559955 - RNA, 21 nt, Human
agcaaggccaccucuuccugg

SEQ ID NO: 3559956 - RNA, 22 nt, Human
agcaaggccaccucuuccuggc

SEQ ID NO: 3559957 - RNA, 18 nt, Human
agcaaggcccgagcagcu

SEQ ID NO: 3559958 - RNA, 12 nt, Human
agcaaggcccug

SEQ ID NO: 3559959 - RNA, 16 nt, Human
agcaaggcccugcugc

SEQ ID NO: 3559960 - RNA, 16 nt, Human
agcaaggggcucugcc

SEQ ID NO: 3559961 - RNA, 19 nt, Human
agcaagguggaguggaugc

SEQ ID NO: 3559962 - RNA, 21 nt, Human
agcaagugugaauacugcuug

SEQ ID NO: 3559963 - RNA, 16 nt, Human
agcaaguuacagugau

SEQ ID NO: 3559964 - RNA, 18 nt, Human
agcaaguucgucuguugu

SEQ ID NO: 3559965 - RNA, 20 nt, Human
agcaaguucuagagaagagg

SEQ ID NO: 3559966 - RNA, 15 nt, Human
agcaauaaaauuuuu

SEQ ID NO: 3559967 - RNA, 14 nt, Human
agcaauaaagaaga

SEQ ID NO: 3559968 - RNA, 23 nt, Human
agcaauaauggucccauccaggc

SEQ ID NO: 3559969 - RNA, 12 nt, Human
agcaauaauuuc

SEQ ID NO: 3559970 - RNA, 14 nt, Human
agcaauagaaacaa

SEQ ID NO: 3559971 - RNA, 15 nt, Human
agcaauaucaguuau

SEQ ID NO: 3559972 - RNA, 21 nt, Human
agcaauaucaguuauuuuuug

SEQ ID NO: 3559973 - RNA, 13 nt, Human
agcaauaucugcu

SEQ ID NO: 3559974 - RNA, 12 nt, Human
agcaauaugcau

SEQ ID NO: 3559975 - RNA, 13 nt, Human
agcaauauuguau

SEQ ID NO: 3559976 - RNA, 16 nt, Human
agcaauauuuaaggag

SEQ ID NO: 3559977 - RNA, 17 nt, Human
agcaauauuuaaggaga

SEQ ID NO: 3559978 - RNA, 16 nt, Human
agcaauauuuauggau

SEQ ID NO: 3559979 - RNA, 21 nt, Human
agcaaucagauuuuccugugg

SEQ ID NO: 3559980 - RNA, 14 nt, Human
agcaauccuccuga

SEQ ID NO: 3559981 - RNA, 12 nt, Human
agcaaucuuuga

SEQ ID NO: 3559982 - RNA, 18 nt, Human
agcaaugacaucucaggg

SEQ ID NO: 3559983 - RNA, 19 nt, Human
agcaaugacaucucagggg

SEQ ID NO: 3559984 - RNA, 13 nt, Human
acuggcugugggc

SEQ ID NO: 3559985 - RNA, 15 nt, Human
acuggcuucagcaag

SEQ ID NO: 3559986 - RNA, 15 nt, Human
acuggcuuuggcuuc

SEQ ID NO: 3559987 - RNA, 18 nt, Human
acuggcuuuggcuucuug

SEQ ID NO: 3559988 - RNA, 16 nt, Human
acuggcuuugucccac

SEQ ID NO: 3559989 - RNA, 22 nt, Human
acuggcuuugucccacagcuug

SEQ ID NO: 3559990 - RNA, 18 nt, Human
acuggcuuuuauuaaugc

SEQ ID NO: 3559991 - RNA, 21 nt, Human
acuggcuuuuauuaaugcacu

SEQ ID NO: 3559992 - RNA, 23 nt, Human
acuggcuuuuauuaaugcacuuu

SEQ ID NO: 3559993 - RNA, 16 nt, Human
acugggaaccccuuuc

SEQ ID NO: 3559994 - RNA, 20 nt, Human
acugggaaccccuuucccac

SEQ ID NO: 3559995 - RNA, 12 nt, Human
acugggaaggcu

SEQ ID NO: 3559996 - RNA, 17 nt, Human
acugggaaggcuacuuc

SEQ ID NO: 3559997 - RNA, 21 nt, Human
acugggaccuuuagugguggc

SEQ ID NO: 3559998 - RNA, 23 nt, Human
acugggagaggugccagcaacug

SEQ ID NO: 3559999 - RNA, 17 nt, Human
acugggagcccccagcc

SEQ ID NO: 3560000 - RNA, 13 nt, Human
acugggcaaugau

SEQ ID NO: 3560001 - RNA, 15 nt, Human
acugggcaugagggg

SEQ ID NO: 3560002 - RNA, 17 nt, Human
acugggcccugagucug

SEQ ID NO: 3560003 - RNA, 22 nt, Human
acugggcucccgggccccacag

SEQ ID NO: 3560004 - RNA, 13 nt, Human
acugggcugaggg

SEQ ID NO: 3560005 - RNA, 19 nt, Human
acuggggaaaacuccaccu

SEQ ID NO: 3560006 - RNA, 15 nt, Human
acuggggaaacuggc

SEQ ID NO: 3560007 - RNA, 18 nt, Human
acuggggaaacuggccau

SEQ ID NO: 3560008 - RNA, 17 nt, Human
acuggggacuuggccuc

SEQ ID NO: 3560009 - RNA, 18 nt, Human
acuggggacuuggccucu

SEQ ID NO: 3560010 - RNA, 16 nt, Human
acuggggaugugggag

SEQ ID NO: 3560011 - RNA, 12 nt, Human
acuggggccucc

SEQ ID NO: 3560012 - RNA, 13 nt, Human
acuggggcucaga

SEQ ID NO: 3560013 - RNA, 16 nt, Human
acuggggcucagagcc

SEQ ID NO: 3560014 - RNA, 16 nt, Human
acuggggcuggcacaa

SEQ ID NO: 3560015 - RNA, 19 nt, Human
acuggggcuggggaaggaa

SEQ ID NO: 3560016 - RNA, 13 nt, Human
acugggggagggg

SEQ ID NO: 3560017 - RNA, 19 nt, Human
acuggggguugcgggggga

SEQ ID NO: 3560018 - RNA, 15 nt, Human
acuggggugccgccu

SEQ ID NO: 3560019 - RNA, 20 nt, Human
acuggguaaugaaacaaaga

SEQ ID NO: 3560020 - RNA, 15 nt, Human
acuggguacuugugg

SEQ ID NO: 3560021 - RNA, 18 nt, Human
acuggguacuuguggaca

SEQ ID NO: 3560022 - RNA, 22 nt, Human
acugggugguggccuggucccu

SEQ ID NO: 3560023 - RNA, 17 nt, Human
acuggguguaaacacau

SEQ ID NO: 3560024 - RNA, 22 nt, Human
acugggugucauuucauuccau

SEQ ID NO: 3560025 - RNA, 16 nt, Human
acuggguuuggacccc

SEQ ID NO: 3560026 - RNA, 20 nt, Human
acuggguuuggaccccagcu

SEQ ID NO: 3560027 - RNA, 17 nt, Human
acugguaagauuguuau

SEQ ID NO: 3560028 - RNA, 20 nt, Human
acugguacuuagaguuucug

SEQ ID NO: 3560029 - RNA, 22 nt, Human
acuggucacggauuugugucug

SEQ ID NO: 3560030 - RNA, 22 nt, Human
acugguccaaaagauugcugaa

SEQ ID NO: 3560031 - RNA, 18 nt, Human
acuggugacugauucuuc

SEQ ID NO: 3560032 - RNA, 16 nt, Human
acuggugagcagacug

SEQ ID NO: 3560033 - RNA, 23 nt, Human
acuggugcaaguugaggacuucu

SEQ ID NO: 3560034 - RNA, 13 nt, Human
acuggugcacuuu

SEQ ID NO: 3560035 - RNA, 22 nt, Human
acuggugcacuuuguaaauucc

SEQ ID NO: 3560036 - RNA, 21 nt, Human
acugguggcccgacagccugg

SEQ ID NO: 3560037 - RNA, 22 nt, Human
acugguggcccgacagccuggc

SEQ ID NO: 3560038 - RNA, 20 nt, Human
acuggugggaucugugccca

SEQ ID NO: 3560039 - RNA, 13 nt, Human
agcaucacagaau

SEQ ID NO: 3560040 - RNA, 13 nt, Human
agcaucaccugcc

SEQ ID NO: 3560041 - RNA, 12 nt, Human
agcaucacuccc

SEQ ID NO: 3560042 - RNA, 16 nt, Human
agcaucaggccuagag

SEQ ID NO: 3560043 - RNA, 21 nt, Human
agcaucaggccuagaggccug

SEQ ID NO: 3560044 - RNA, 20 nt, Human
agcaucaguacuuguuucua

SEQ ID NO: 3560045 - RNA, 19 nt, Human
agcaucaugccucugaggc

SEQ ID NO: 3560046 - RNA, 22 nt, Human
agcaucaugccucugaggccag

SEQ ID NO: 3560047 - RNA, 22 nt, Human
agcaucauuauuuauguauugu

SEQ ID NO: 3560048 - RNA, 16 nt, Human
agcaucauuuugcauu

SEQ ID NO: 3560049 - RNA, 16 nt, Human
agcauccaccuccuuc

SEQ ID NO: 3560050 - RNA, 20 nt, Human
agcaucccugaggagccagg

SEQ ID NO: 3560051 - RNA, 17 nt, Human
agcauccuaagaaauau

SEQ ID NO: 3560052 - RNA, 22 nt, Human
agcauccuaagaaauaugugag

SEQ ID NO: 3560053 - RNA, 22 nt, Human
agcauccugccuuagagccagg

SEQ ID NO: 3560054 - RNA, 15 nt, Human
agcauccuggaauau

SEQ ID NO: 3560055 - RNA, 19 nt, Human
agcauccuuuucugcagag

SEQ ID NO: 3560056 - RNA, 19 nt, Human
agcaucgcacucuggcagc

SEQ ID NO: 3560057 - RNA, 19 nt, Human
agcaucgcuuaggagaagu

SEQ ID NO: 3560058 - RNA, 21 nt, Human
agcaucggccuagggccccca

SEQ ID NO: 3560059 - RNA, 14 nt, Human
agcaucuaaacuuu

SEQ ID NO: 3560060 - RNA, 16 nt, Human
agcaucuaaacuuuaa

SEQ ID NO: 3560061 - RNA, 23 nt, Human
agcaucuaaguuauaagacucuc

SEQ ID NO: 3560062 - RNA, 14 nt, Human
agcaucucaugagu

SEQ ID NO: 3560063 - RNA, 17 nt, Human
agcaucuccaagcagcu

SEQ ID NO: 3560064 - RNA, 20 nt, Human
agcaucucccucacugaaac

SEQ ID NO: 3560065 - RNA, 12 nt, Human
agcaucuguaca

SEQ ID NO: 3560066 - RNA, 12 nt, Human
agcaucuucugg

SEQ ID NO: 3560067 - RNA, 14 nt, Human
agcaugaaaaagca

SEQ ID NO: 3560068 - RNA, 17 nt, Human
agcaugaaauaaaauau

SEQ ID NO: 3560069 - RNA, 16 nt, Human
agcaugaaaugugaau

SEQ ID NO: 3560070 - RNA, 22 nt, Human
agcaugaaaugugaauuuuuau

SEQ ID NO: 3560071 - RNA, 20 nt, Human
agcaugaagucuuaaggaca

SEQ ID NO: 3560072 - RNA, 16 nt, Human
agcaugaauuuguaau

SEQ ID NO: 3560073 - RNA, 18 nt, Human
agcaugacaagccccagg

SEQ ID NO: 3560074 - RNA, 22 nt, Human
agcaugacaagccccaggcagg

SEQ ID NO: 3560075 - RNA, 15 nt, Human
agcaugacagccugc

SEQ ID NO: 3560076 - RNA, 16 nt, Human
agcaugacauaacagu

SEQ ID NO: 3560077 - RNA, 17 nt, Human
agcaugaucugaaaaau

SEQ ID NO: 3560078 - RNA, 13 nt, Human
agcaugcacaaag

SEQ ID NO: 3560079 - RNA, 14 nt, Human
agcaugcacaaauu

SEQ ID NO: 3560080 - RNA, 15 nt, Human
agcaugcaccacggg

SEQ ID NO: 3560081 - RNA, 19 nt, Human
agcaugccaacaagaaugc

SEQ ID NO: 3560082 - RNA, 20 nt, Human
agcaugccuggauggggcug

SEQ ID NO: 3560083 - RNA, 23 nt, Human
agcaugccuggauggggcugcac

SEQ ID NO: 3560084 - RNA, 17 nt, Human
agcaugcuugugaaaau

SEQ ID NO: 3560085 - RNA, 23 nt, Human
agcaugcuugugaaaauguguuc

SEQ ID NO: 3560086 - RNA, 17 nt, Human
agcauggaacacuucga

SEQ ID NO: 3560087 - RNA, 17 nt, Human
agcauggacauuuagaa

SEQ ID NO: 3560088 - RNA, 18 nt, Human
agcauggacauuuagaag

SEQ ID NO: 3560089 - RNA, 17 nt, Human
agcauggcugugaggau

SEQ ID NO: 3560090 - RNA, 17 nt, Human
agcauggugcaugccgc

SEQ ID NO: 3560091 - RNA, 14 nt, Human
agcauguacagugu

SEQ ID NO: 3560092 - RNA, 21 nt, Human
agcauguacggauuuucaguu

SEQ ID NO: 3560093 - RNA, 14 nt, Human
agcauguauugugu

SEQ ID NO: 3560094 - RNA, 16 nt, Human
agcaugucacuaaagc

SEQ ID NO: 3560095 - RNA, 19 nt, Human
agcaugucuauucagcuuc

SEQ ID NO: 3560096 - RNA, 17 nt, Human
agcaugucuuauuuaaa

SEQ ID NO: 3560097 - RNA, 16 nt, Human
agcaugugcccuccug

SEQ ID NO: 3560098 - RNA, 16 nt, Human
agcaugugucaugcau

SEQ ID NO: 3560099 - RNA, 16 nt, Human
agcauguugagccagg

SEQ ID NO: 3560100 - RNA, 15 nt, Human
agcauguuguagaua

SEQ ID NO: 3560101 - RNA, 24 nt, Human
agcauguuuagacuuuaacauaag

SEQ ID NO: 3560102 - RNA, 16 nt, Human
agcauguuugcugaac

SEQ ID NO: 3560103 - RNA, 16 nt, Human
agcauguuuuguauac

SEQ ID NO: 3560104 - RNA, 19 nt, Human
agcauguuuuguauacaaa

SEQ ID NO: 3560105 - RNA, 14 nt, Human
agcauuaacuaauc

SEQ ID NO: 3560106 - RNA, 18 nt, Human
agcauuaacuaaucuauu

SEQ ID NO: 3560107 - RNA, 18 nt, Human
agcauuaacuucucugga

SEQ ID NO: 3560108 - RNA, 17 nt, Human
agcauuaagaacacuuu

SEQ ID NO: 3560109 - RNA, 19 nt, Human
agcauuaccucuuuggaaa

SEQ ID NO: 3560110 - RNA, 18 nt, Human
agcauuacgugagccagg

SEQ ID NO: 3560111 - RNA, 20 nt, Human
agcauuacgugagccaggua

SEQ ID NO: 3560112 - RNA, 16 nt, Human
agcauuacucuuguaa

SEQ ID NO: 3560113 - RNA, 19 nt, Human
agcauuacucuuguaagau

SEQ ID NO: 3560114 - RNA, 16 nt, Human
agcauuaugcaauuag

SEQ ID NO: 3560115 - RNA, 14 nt, Human
agcauucagaagaa

SEQ ID NO: 3560116 - RNA, 13 nt, Human
agcauuccaacaa

SEQ ID NO: 3560117 - RNA, 14 nt, Human
agcauuccaacaaa

SEQ ID NO: 3560118 - RNA, 15 nt, Human
agcauuccaacaaag

SEQ ID NO: 3560119 - RNA, 16 nt, Human
agcauuccuucuuuga

SEQ ID NO: 3560120 - RNA, 19 nt, Human
agcauuccuucuuugauaa

SEQ ID NO: 3560121 - RNA, 22 nt, Human
agcauuccuucuuugauaaugu

SEQ ID NO: 3560122 - RNA, 19 nt, Human
agcauucucaggcaccagu

SEQ ID NO: 3560123 - RNA, 14 nt, Human
agcauucucauugg

SEQ ID NO: 3560124 - RNA, 22 nt, Human
agcauucucauuggaaauuuag

SEQ ID NO: 3560125 - RNA, 12 nt, Human
agcauucucucc

SEQ ID NO: 3560126 - RNA, 22 nt, Human
agcauucuugucacaauaaaug

SEQ ID NO: 3560127 - RNA, 16 nt, Human
agcauugaaauuauag

SEQ ID NO: 3560128 - RNA, 14 nt, Human
acuguaugaucaaa

SEQ ID NO: 3560129 - RNA, 24 nt, Human
acuguaugaucaaauguuuaauca

SEQ ID NO: 3560130 - RNA, 11 nt, Human
acuguauggaa

SEQ ID NO: 3560131 - RNA, 21 nt, Human
acuguauuaagagugaaaauu

SEQ ID NO: 3560132 - RNA, 12 nt, Human
acuguauugaug

SEQ ID NO: 3560133 - RNA, 13 nt, Human
acuguauuuguau

SEQ ID NO: 3560134 - RNA, 14 nt, Human
acuguauuuguauc

SEQ ID NO: 3560135 - RNA, 15 nt, Human
acuguauuugugacu

SEQ ID NO: 3560136 - RNA, 16 nt, Human
acuguauuugugacua

SEQ ID NO: 3560137 - RNA, 23 nt, Human
acuguauuugugacuaauuguau

SEQ ID NO: 3560138 - RNA, 14 nt, Human
acugucaauaaaca

SEQ ID NO: 3560139 - RNA, 15 nt, Human
acugucaauaaacag

SEQ ID NO: 3560140 - RNA, 17 nt, Human
acugucaauaaacagcu

SEQ ID NO: 3560141 - RNA, 21 nt, Human
acugucaauaaacagcuucau

SEQ ID NO: 3560142 - RNA, 14 nt, Human
acugucacucauug

SEQ ID NO: 3560143 - RNA, 15 nt, Human
acugucacuguuucu

SEQ ID NO: 3560144 - RNA, 20 nt, Human
acugucacuguuucucugcu

SEQ ID NO: 3560145 - RNA, 18 nt, Human
acugucacuuugcucugg

SEQ ID NO: 3560146 - RNA, 12 nt, Human
acugucaggaag

SEQ ID NO: 3560147 - RNA, 22 nt, Human
acugucaggaagaaaucacaga

SEQ ID NO: 3560148 - RNA, 20 nt, Human
acugucaggcugaaaacaau

SEQ ID NO: 3560149 - RNA, 21 nt, Human
acugucauccucaaagaaagu

SEQ ID NO: 3560150 - RNA, 22 nt, Human
acugucauccucaaagaaagug

SEQ ID NO: 3560151 - RNA, 14 nt, Human
acuguccagagagc

SEQ ID NO: 3560152 - RNA, 15 nt, Human
acuguccagagagca

SEQ ID NO: 3560153 - RNA, 14 nt, Human
acugucccucaaau

SEQ ID NO: 3560154 - RNA, 12 nt, Human
acugucccuccu

SEQ ID NO: 3560155 - RNA, 17 nt, Human
acugucccuccuggugu

SEQ ID NO: 3560156 - RNA, 16 nt, Human
acugucccuugccuca

SEQ ID NO: 3560157 - RNA, 15 nt, Human
acuguccuauuauau

SEQ ID NO: 3560158 - RNA, 16 nt, Human
acuguccuauuauauu

SEQ ID NO: 3560159 - RNA, 18 nt, Human
acuguccuauuauauuca

SEQ ID NO: 3560160 - RNA, 16 nt, Human
acuguccuccaagcca

SEQ ID NO: 3560161 - RNA, 18 nt, Human
acuguccucuuucagaaa

SEQ ID NO: 3560162 - RNA, 12 nt, Human
acuguccugcuc

SEQ ID NO: 3560163 - RNA, 19 nt, Human
acuguccugcuccacagug

SEQ ID NO: 3560164 - RNA, 17 nt, Human
acuguccugggccugca

SEQ ID NO: 3560165 - RNA, 19 nt, Human
acuguccugggccugcaga

SEQ ID NO: 3560166 - RNA, 17 nt, Human
acuguccuguccugcuc

SEQ ID NO: 3560167 - RNA, 21 nt, Human
acugucuaagauuaauagcau

SEQ ID NO: 3560168 - RNA, 17 nt, Human
acugucuagcacuuccu

SEQ ID NO: 3560169 - RNA, 18 nt, Human
acugucuagcacuuccuu

SEQ ID NO: 3560170 - RNA, 21 nt, Human
acugucuagcacuuccuugcc

SEQ ID NO: 3560171 - RNA, 24 nt, Human
acugucuagcacuuccuugccagu

SEQ ID NO: 3560172 - RNA, 17 nt, Human
acugucuauuucugcug

SEQ ID NO: 3560173 - RNA, 19 nt, Human
acugucucaagagggcacu

SEQ ID NO: 3560174 - RNA, 23 nt, Human
acugucucaagagggcacuggug

SEQ ID NO: 3560175 - RNA, 21 nt, Human
acugucucgaugcaaugaaca

SEQ ID NO: 3560176 - RNA, 18 nt, Human
acugucucucaugaaccu

SEQ ID NO: 3560177 - RNA, 20 nt, Human
acugucucucuucucagagu

SEQ ID NO: 3560178 - RNA, 18 nt, Human
acugucugauuggcuugu

SEQ ID NO: 3560179 - RNA, 17 nt, Human
acugucugguuuuaaca

SEQ ID NO: 3560180 - RNA, 17 nt, Human
acugucuuaauuaagua

SEQ ID NO: 3560181 - RNA, 19 nt, Human
acugucuuaauuaaguaaa

SEQ ID NO: 3560182 - RNA, 20 nt, Human
acugucuuccucaaaauaaa

SEQ ID NO: 3560183 - RNA, 17 nt, Human
acugucuucucccugca

SEQ ID NO: 3560184 - RNA, 17 nt, Human
acugucuuuaaaagaga

SEQ ID NO: 3560185 - RNA, 12 nt, Human
acugucuuuccu

SEQ ID NO: 3560186 - RNA, 21 nt, Human
acugucuuuggaaaaauguuu

SEQ ID NO: 3560187 - RNA, 23 nt, Human
acugucuuuggaaaaauguuugu

SEQ ID NO: 3560188 - RNA, 16 nt, Human
acugucuuuuuucuaa

SEQ ID NO: 3560189 - RNA, 15 nt, Human
acugugaagagcugg

SEQ ID NO: 3560190 - RNA, 15 nt, Human
acugugaaggacccu

SEQ ID NO: 3560191 - RNA, 23 nt, Human
acugugacucuuuuuagggccag

SEQ ID NO: 3560192 - RNA, 11 nt, Human
acugugacuga

SEQ ID NO: 3560193 - RNA, 23 nt, Human
acugugaucaggcuauguaugga

SEQ ID NO: 3560194 - RNA, 13 nt, Human
acugugaugccac

SEQ ID NO: 3560195 - RNA, 20 nt, Human
acugugaugccacacagagu

SEQ ID NO: 3560196 - RNA, 18 nt, Human
acugugaugcccugcccu

SEQ ID NO: 3560197 - RNA, 20 nt, Human
acugugcacaucugugucuu

SEQ ID NO: 3560198 - RNA, 18 nt, Human
acugugcaccaagcagga

SEQ ID NO: 3560199 - RNA, 19 nt, Human
agccaaauuuaaaacuguu

SEQ ID NO: 3560200 - RNA, 19 nt, Human
agccaacacccaucuguuu

SEQ ID NO: 3560201 - RNA, 18 nt, Human
agccaacacgcaccugcc

SEQ ID NO: 3560202 - RNA, 14 nt, Human
agccaacagcuaca

SEQ ID NO: 3560203 - RNA, 20 nt, Human
agccaacagcuacaacagcc

SEQ ID NO: 3560204 - RNA, 17 nt, Human
agccaacagguggcagg

SEQ ID NO: 3560205 - RNA, 16 nt, Human
agccaacauguggcuc

SEQ ID NO: 3560206 - RNA, 20 nt, Human
agccaacauguggcuccucc

SEQ ID NO: 3560207 - RNA, 19 nt, Human
agccaaccuuacuuacagc

SEQ ID NO: 3560208 - RNA, 21 nt, Human
agccaacgacaaagccaaacu

SEQ ID NO: 3560209 - RNA, 17 nt, Human
agccaacuauggccugu

SEQ ID NO: 3560210 - RNA, 21 nt, Human
agccaacugcugcuuuuugag

SEQ ID NO: 3560211 - RNA, 19 nt, Human
agccaacuuggcuuucccg

SEQ ID NO: 3560212 - RNA, 18 nt, Human
agccaacuuguaaauaca

SEQ ID NO: 3560213 - RNA, 19 nt, Human
agccaacuuguaaauacac

SEQ ID NO: 3560214 - RNA, 19 nt, Human
agccaagaucgcgccacug

SEQ ID NO: 3560215 - RNA, 20 nt, Human
agccaagauuuuccucuugu

SEQ ID NO: 3560216 - RNA, 13 nt, Human
agccaagcacagu

SEQ ID NO: 3560217 - RNA, 21 nt, Human
agccaagcuuguuaucagcuu

SEQ ID NO: 3560218 - RNA, 19 nt, Human
agccaagcuuuaaauuaug

SEQ ID NO: 3560219 - RNA, 22 nt, Human
agccaagcuuuaaauuauguga

SEQ ID NO: 3560220 - RNA, 20 nt, Human
agccaaggccaaaggaagca

SEQ ID NO: 3560221 - RNA, 23 nt, Human
agccaaggcccugaguuggcagu

SEQ ID NO: 3560222 - RNA, 20 nt, Human
agccaaggccgaagcucugg

SEQ ID NO: 3560223 - RNA, 16 nt, Human
agccaaggcucuguuu

SEQ ID NO: 3560224 - RNA, 14 nt, Human
agccaagggaaagg

SEQ ID NO: 3560225 - RNA, 19 nt, Human
agccaagggaaccuguguc

SEQ ID NO: 3560226 - RNA, 11 nt, Human
agccaagggau

SEQ ID NO: 3560227 - RNA, 14 nt, Human
agccaagggaugga

SEQ ID NO: 3560228 - RNA, 23 nt, Human
agccaaggugggcugagcccugg

SEQ ID NO: 3560229 - RNA, 13 nt, Human
agccaaguccaga

SEQ ID NO: 3560230 - RNA, 18 nt, Human
agccaaguccagauuuac

SEQ ID NO: 3560231 - RNA, 23 nt, Human
agccaagugugguagagugugcc

SEQ ID NO: 3560232 - RNA, 22 nt, Human
agccaaguuuuauaauccuuaa

SEQ ID NO: 3560233 - RNA, 18 nt, Human
agccaauaacacacagcu

SEQ ID NO: 3560234 - RNA, 14 nt, Human
agccaauauuuuuc

SEQ ID NO: 3560235 - RNA, 20 nt, Human
agccaauuuaaagaaaacug

SEQ ID NO: 3560236 - RNA, 19 nt, Human
agccacaaaauaaauguug

SEQ ID NO: 3560237 - RNA, 17 nt, Human
agccacaaccacauaca

SEQ ID NO: 3560238 - RNA, 16 nt, Human
agccacaagucuucca

SEQ ID NO: 3560239 - RNA, 18 nt, Human
agccacaagucuuccaga

SEQ ID NO: 3560240 - RNA, 17 nt, Human
agccacacaaacguuua

SEQ ID NO: 3560241 - RNA, 10 nt, Human
agccacacac

SEQ ID NO: 3560242 - RNA, 12 nt, Human
agccacacacac

SEQ ID NO: 3560243 - RNA, 17 nt, Human
agccacacacacagaaa

SEQ ID NO: 3560244 - RNA, 21 nt, Human
agccacacacacagaaaauau

SEQ ID NO: 3560245 - RNA, 22 nt, Human
agccacacacacagaaaauaua

SEQ ID NO: 3560246 - RNA, 23 nt, Human
agccacacacacagaaaauauac

SEQ ID NO: 3560247 - RNA, 21 nt, Human
agccacacucugggcuccaga

SEQ ID NO: 3560248 - RNA, 20 nt, Human
agccacacuucucaggacac

SEQ ID NO: 3560249 - RNA, 12 nt, Human
agccacagaagc

SEQ ID NO: 3560250 - RNA, 19 nt, Human
agccacagaagccaggagc

SEQ ID NO: 3560251 - RNA, 20 nt, Human
agccacagaagccaggagca

SEQ ID NO: 3560252 - RNA, 12 nt, Human
agccacagccca

SEQ ID NO: 3560253 - RNA, 17 nt, Human
agccacagcccaggccu

SEQ ID NO: 3560254 - RNA, 21 nt, Human
agccacaggccugagauuuca

SEQ ID NO: 3560255 - RNA, 20 nt, Human
agccacaguuccccuaugug

SEQ ID NO: 3560256 - RNA, 23 nt, Human
agccacaucccuuugaaacaaga

SEQ ID NO: 3560257 - RNA, 18 nt, Human
agccacauuccugaugcu

SEQ ID NO: 3560258 - RNA, 21 nt, Human
agccacauuuggaauacuuuu

SEQ ID NO: 3560259 - RNA, 16 nt, Human
agccaccaucuuugca

SEQ ID NO: 3560260 - RNA, 17 nt, Human
agccaccaucuuugcag

SEQ ID NO: 3560261 - RNA, 23 nt, Human
agccaccaugcccagcucagagg

SEQ ID NO: 3560262 - RNA, 18 nt, Human
agccaccccagaaauggu

SEQ ID NO: 3560263 - RNA, 19 nt, Human
agccaccccaugcuggccu

SEQ ID NO: 3560264 - RNA, 14 nt, Human
agccaccccgggcu

SEQ ID NO: 3560265 - RNA, 19 nt, Human
agccaccccgggcucucug

SEQ ID NO: 3560266 - RNA, 20 nt, Human
agccaccccgggcucucugc

SEQ ID NO: 3560267 - RNA, 23 nt, Human
agccaccccgggcucucugcugu

SEQ ID NO: 3560268 - RNA, 12 nt, Human
agccacccugag

SEQ ID NO: 3560269 - RNA, 16 nt, Human
agccaccucugucauu

SEQ ID NO: 3560270 - RNA, 13 nt, Human
agccaccuguccc

SEQ ID NO: 3560271 - RNA, 14 nt, Human
agccaccuguccca

SEQ ID NO: 3560272 - RNA, 15 nt, Human
agccacggccaggcc

SEQ ID NO: 3560273 - RNA, 16 nt, Human
agccacggccaggcca

SEQ ID NO: 3560274 - RNA, 18 nt, Human
agccacgggugccagaag

SEQ ID NO: 3560275 - RNA, 18 nt, Human
agccacguuccuuacugc

SEQ ID NO: 3560276 - RNA, 22 nt, Human
agccacguuccuuacugcagaa

SEQ ID NO: 3560277 - RNA, 23 nt, Human
agccacguuccuuacugcagaau

SEQ ID NO: 3560278 - RNA, 13 nt, Human
agccacuaacuag

SEQ ID NO: 3560279 - RNA, 19 nt, Human
agccacuaagaaccccucu

SEQ ID NO: 3560280 - RNA, 17 nt, Human
agccacuccccagccag

SEQ ID NO: 3560281 - RNA, 23 nt, Human
agccacuccccagccagccuggc

SEQ ID NO: 3560282 - RNA, 17 nt, Human
agccacuccccggcaug

SEQ ID NO: 3560283 - RNA, 15 nt, Human
agccacuccucugac

SEQ ID NO: 3560284 - RNA, 21 nt, Human
agccacuccucugacucaggg

SEQ ID NO: 3560285 - RNA, 20 nt, Human
agccacucucuucccuuucc

SEQ ID NO: 3560286 - RNA, 17 nt, Human
agccacucugucccuuc

SEQ ID NO: 3560287 - RNA, 13 nt, Human
agccacucuguuc

SEQ ID NO: 3560288 - RNA, 15 nt, Human
agccacucuguuccu

SEQ ID NO: 3560289 - RNA, 13 nt, Human
agccacugaagua

SEQ ID NO: 3560290 - RNA, 13 nt, Human
agccacugcaccg

SEQ ID NO: 3560291 - RNA, 16 nt, Human
agccacugcaccgggc

SEQ ID NO: 3560292 - RNA, 14 nt, Human
agccacugccucuc

SEQ ID NO: 3560293 - RNA, 17 nt, Human
agccacugccucucccu

SEQ ID NO: 3560294 - RNA, 14 nt, Human
agccacugugcuga

SEQ ID NO: 3560295 - RNA, 22 nt, Human
agccacuuaccuucaauaaagu

SEQ ID NO: 3560296 - RNA, 22 nt, Human
agccacuugccugugcuacaau

SEQ ID NO: 3560297 - RNA, 22 nt, Human
agccagaacguggcucugcugg

SEQ ID NO: 3560298 - RNA, 18 nt, Human
agccagaacucugugucc

SEQ ID NO: 3560299 - RNA, 18 nt, Human
agccagaaucagcacaga

SEQ ID NO: 3560300 - RNA, 14 nt, Human
agccagacacucug

SEQ ID NO: 3560301 - RNA, 22 nt, Human
agccagacacucugcucugccc

SEQ ID NO: 3560302 - RNA, 12 nt, Human
agccagacagac

SEQ ID NO: 3560303 - RNA, 18 nt, Human
agccagaccuauuccucc

SEQ ID NO: 3560304 - RNA, 20 nt, Human
agccagaccuauuccuccug

SEQ ID NO: 3560305 - RNA, 16 nt, Human
agccagacucuggucu

SEQ ID NO: 3560306 - RNA, 14 nt, Human
agccagagaaguga

SEQ ID NO: 3560307 - RNA, 15 nt, Human
agccagagaagugac

SEQ ID NO: 3560308 - RNA, 19 nt, Human
agccagagaagugacaggg

SEQ ID NO: 3560309 - RNA, 11 nt, Human
agccagaggag

SEQ ID NO: 3560310 - RNA, 15 nt, Human
agccagaggcugggu

SEQ ID NO: 3560311 - RNA, 15 nt, Human
agccagaguuccugc

SEQ ID NO: 3560312 - RNA, 12 nt, Human
agccagauccuc

SEQ ID NO: 3560313 - RNA, 14 nt, Human
agccagauccucuu

SEQ ID NO: 3560314 - RNA, 18 nt, Human
agccagauuugucuuuuu

SEQ ID NO: 3560315 - RNA, 15 nt, Human
agccagauuuuccug

SEQ ID NO: 3560316 - RNA, 22 nt, Human
agccagauuuuuuaaaauuuau

SEQ ID NO: 3560317 - RNA, 22 nt, Human
agccagcaaugauguccagaag

SEQ ID NO: 3560318 - RNA, 20 nt, Human
agccagcaccggaccagccu

SEQ ID NO: 3560319 - RNA, 21 nt, Human
agccagcaccggaccagccug

SEQ ID NO: 3560320 - RNA, 22 nt, Human
agccagcaccggaccagccugg

SEQ ID NO: 3560321 - RNA, 23 nt, Human
agccagcaccggaccagccuggc

SEQ ID NO: 3560322 - RNA, 23 nt, Human
agccagcaccuggcaucgcacca

SEQ ID NO: 3560323 - RNA, 21 nt, Human
agccagcacuuguccagcuga

SEQ ID NO: 3560324 - RNA, 22 nt, Human
agccagcacuuguccagcugag

SEQ ID NO: 3560325 - RNA, 22 nt, Human
agccagcagacauugucagcaa

SEQ ID NO: 3560326 - RNA, 16 nt, Human
agccagcaggcucuca

SEQ ID NO: 3560327 - RNA, 21 nt, Human
agccagcaggcucucaggcca

SEQ ID NO: 3560328 - RNA, 17 nt, Human
agccagcaguucagagc

SEQ ID NO: 3560329 - RNA, 17 nt, Human
agccagcaucugggccu

SEQ ID NO: 3560330 - RNA, 20 nt, Human
agccagccaagcuuuaaauu

SEQ ID NO: 3560331 - RNA, 12 nt, Human
agccagccacuc

SEQ ID NO: 3560332 - RNA, 13 nt, Human
agccagccacucu

SEQ ID NO: 3560333 - RNA, 16 nt, Human
agccagccacucuacc

SEQ ID NO: 3560334 - RNA, 18 nt, Human
agccagcccagcccagcu

SEQ ID NO: 3560335 - RNA, 15 nt, Human
agccagcccucccug

SEQ ID NO: 3560336 - RNA, 23 nt, Human
agccagcccucccuguccuccuc

SEQ ID NO: 3560337 - RNA, 18 nt, Human
agccagcccugccuggag

SEQ ID NO: 3560338 - RNA, 19 nt, Human
agccagcccugccuggagg

SEQ ID NO: 3560339 - RNA, 24 nt, Human
agccagcccugccuggaggaccug

SEQ ID NO: 3560340 - RNA, 18 nt, Human
agccagccuucuuccauc

SEQ ID NO: 3560341 - RNA, 21 nt, Human
agccagccuucuuccauccca

SEQ ID NO: 3560342 - RNA, 23 nt, Human
agccagccuucuuccaucccagg

SEQ ID NO: 3560343 - RNA, 23 nt, Human
agccagcgccucccuccacccca

SEQ ID NO: 3560344 - RNA, 17 nt, Human
agccagcguccuccucu

SEQ ID NO: 3560345 - RNA, 23 nt, Human
agccagcucacagugcugugugc

SEQ ID NO: 3560346 - RNA, 14 nt, Human
agccagcucccucu

SEQ ID NO: 3560347 - RNA, 13 nt, Human
agcauaaagcuca

SEQ ID NO: 3560348 - RNA, 13 nt, Human
agcauaaaugcaa

SEQ ID NO: 3560349 - RNA, 13 nt, Human
agcauaacauaug

SEQ ID NO: 3560350 - RNA, 17 nt, Human
agcauaaguauacaguu

SEQ ID NO: 3560351 - RNA, 14 nt, Human
agcauacauuuaua

SEQ ID NO: 3560352 - RNA, 17 nt, Human
agcauacguacacauuu

SEQ ID NO: 3560353 - RNA, 15 nt, Human
agcauacuucuagga

SEQ ID NO: 3560354 - RNA, 15 nt, Human
agcauagauaauauu

SEQ ID NO: 3560355 - RNA, 19 nt, Human
agcauagauaauauuguuu

SEQ ID NO: 3560356 - RNA, 18 nt, Human
agcauagcuuauuauuga

SEQ ID NO: 3560357 - RNA, 20 nt, Human
agcauagcuuauuauugaag

SEQ ID NO: 3560358 - RNA, 23 nt, Human
agcauaggugauccauguaacug

SEQ ID NO: 3560359 - RNA, 23 nt, Human
agcauauaaaauggcaacaaacu

SEQ ID NO: 3560360 - RNA, 22 nt, Human
agcauauauuuuuauauuuacu

SEQ ID NO: 3560361 - RNA, 16 nt, Human
agcauaugacaaaugu

SEQ ID NO: 3560362 - RNA, 12 nt, Human
agcauaugagga

SEQ ID NO: 3560363 - RNA, 20 nt, Human
agcauaugaguuucauagcu

SEQ ID NO: 3560364 - RNA, 18 nt, Human
agcauauguguuggcuug

SEQ ID NO: 3560365 - RNA, 17 nt, Human
agcauauucaggaagcu

SEQ ID NO: 3560366 - RNA, 21 nt, Human
agcauauucaggaagcucagg

SEQ ID NO: 3560367 - RNA, 22 nt, Human
agcauauucaggaagcucaggg

SEQ ID NO: 3560368 - RNA, 21 nt, Human
agcauauucuuuucugcaaaa

SEQ ID NO: 3560369 - RNA, 20 nt, Human
agcauauuuguauaguugcu

SEQ ID NO: 3560370 - RNA, 21 nt, Human
agcauauuuguauaguugcuu

SEQ ID NO: 3560371 - RNA, 13 nt, Human
agcaucaaacucu

SEQ ID NO: 3560372 - RNA, 14 nt, Human
agcaucacagaaug

SEQ ID NO: 3560373 - RNA, 17 nt, Human
agcaucacaguuuuggu

SEQ ID NO: 3560374 - RNA, 18 nt, Human
agcaucaccuagaaacuu

SEQ ID NO: 3560375 - RNA, 13 nt, Human
agcaucaccucag

SEQ ID NO: 3560376 - RNA, 16 nt, Human
agcaucaccucaggcc

SEQ ID NO: 3560377 - RNA, 20 nt, Human
agcaucacuccccaaggaag

SEQ ID NO: 3560378 - RNA, 16 nt, Human
agcaucacuuaaaaca

SEQ ID NO: 3560379 - RNA, 12 nt, Human
agcaucaggcca

SEQ ID NO: 3560380 - RNA, 13 nt, Human
agcaucaggccag

SEQ ID NO: 3560381 - RNA, 14 nt, Human
agcaucaggccagg

SEQ ID NO: 3560382 - RNA, 19 nt, Human
agcaucaggccaggcccuc

SEQ ID NO: 3560383 - RNA, 22 nt, Human
agcaucaggccaggcccucugc

SEQ ID NO: 3560384 - RNA, 22 nt, Human
agcaucaggguuaagaagacuu

SEQ ID NO: 3560385 - RNA, 20 nt, Human
agcaucaucugggaacuugu

SEQ ID NO: 3560386 - RNA, 23 nt, Human
agcaucaugccucugaggccagc

SEQ ID NO: 3560387 - RNA, 18 nt, Human
agcaucauuauuuaugua

SEQ ID NO: 3560388 - RNA, 19 nt, Human
agcaucauuauuuauguau

SEQ ID NO: 3560389 - RNA, 21 nt, Human
agcaucauuauuuauguauug

SEQ ID NO: 3560390 - RNA, 18 nt, Human
agcaucauuuugcauuca

SEQ ID NO: 3560391 - RNA, 16 nt, Human
agcauccaaguggcau

SEQ ID NO: 3560392 - RNA, 15 nt, Human
agcauccaccuccuu

SEQ ID NO: 3560393 - RNA, 18 nt, Human
agcauccaccuccuucuc

SEQ ID NO: 3560394 - RNA, 20 nt, Human
agcaucccccaaaguucaca

SEQ ID NO: 3560395 - RNA, 20 nt, Human
agcauccccuugaacucuuc

SEQ ID NO: 3560396 - RNA, 20 nt, Human
agcaucccggaggaaaucug

SEQ ID NO: 3560397 - RNA, 23 nt, Human
agcaucccuugaccaggccuggg

SEQ ID NO: 3560398 - RNA, 19 nt, Human
agcauccuaagaaauaugu

SEQ ID NO: 3560399 - RNA, 21 nt, Human
agcauccuaagaaauauguga

SEQ ID NO: 3560400 - RNA, 16 nt, Human
agcauccugagccccg

SEQ ID NO: 3560401 - RNA, 17 nt, Human
agcauccugagccccgc

SEQ ID NO: 3560402 - RNA, 23 nt, Human
agcauccugagccccgcccucuu

SEQ ID NO: 3560403 - RNA, 21 nt, Human
agcauccugccuuagagccag

SEQ ID NO: 3560404 - RNA, 23 nt, Human
agcauccugccuuagagccaggc

SEQ ID NO: 3560405 - RNA, 14 nt, Human
agcauccuggaaua

SEQ ID NO: 3560406 - RNA, 14 nt, Human
agcauccuggcacc

SEQ ID NO: 3560407 - RNA, 22 nt, Human
agcauccuggcacccggccccu

SEQ ID NO: 3560408 - RNA, 14 nt, Human
agcaucggccuagg

SEQ ID NO: 3560409 - RNA, 15 nt, Human
agcaucggccuaggg

SEQ ID NO: 3560410 - RNA, 22 nt, Human
agcaucuaaacuuuaauaugua

SEQ ID NO: 3560411 - RNA, 22 nt, Human
agcaucuaaguuauaagacucu

SEQ ID NO: 3560412 - RNA, 16 nt, Human
agcaucuaugugagac

SEQ ID NO: 3560413 - RNA, 15 nt, Human
agcaucucagcucau

SEQ ID NO: 3560414 - RNA, 23 nt, Human
acuucccagcuaggaagagcagg

SEQ ID NO: 3560415 - RNA, 17 nt, Human
acuucccagugaauucu

SEQ ID NO: 3560416 - RNA, 21 nt, Human
acuuccccaauaucuugcuug

SEQ ID NO: 3560417 - RNA, 22 nt, Human
acuuccccaauaucuugcuuga

SEQ ID NO: 3560418 - RNA, 16 nt, Human
acuucccccaaauuua

SEQ ID NO: 3560419 - RNA, 21 nt, Human
acuuccccuccuaccccuccc

SEQ ID NO: 3560420 - RNA, 15 nt, Human
acuucccgggccagg

SEQ ID NO: 3560421 - RNA, 18 nt, Human
acuucccgggccagggcu

SEQ ID NO: 3560422 - RNA, 14 nt, Human
acuucccugcugcc

SEQ ID NO: 3560423 - RNA, 10 nt, Human
acuucccugg

SEQ ID NO: 3560424 - RNA, 22 nt, Human
acuucccuggguuagacugcca

SEQ ID NO: 3560425 - RNA, 17 nt, Human
acuuccuccuccccacu

SEQ ID NO: 3560426 - RNA, 18 nt, Human
acuuccuccuccccacuu

SEQ ID NO: 3560427 - RNA, 21 nt, Human
acuuccugauugguuucucuu

SEQ ID NO: 3560428 - RNA, 12 nt, Human
acuuccugccua

SEQ ID NO: 3560429 - RNA, 21 nt, Human
acuuccugccuggucuccugc

SEQ ID NO: 3560430 - RNA, 22 nt, Human
acuuccugccuggucuccugcc

SEQ ID NO: 3560431 - RNA, 16 nt, Human
acuuccugcuuccuca

SEQ ID NO: 3560432 - RNA, 17 nt, Human
acuuccugcuuccucag

SEQ ID NO: 3560433 - RNA, 12 nt, Human
acuuccuguacu

SEQ ID NO: 3560434 - RNA, 18 nt, Human
acuuccuguccagcucca

SEQ ID NO: 3560435 - RNA, 21 nt, Human
acuuccuguuugggccccucu

SEQ ID NO: 3560436 - RNA, 16 nt, Human
acuucgacacuguucu

SEQ ID NO: 3560437 - RNA, 14 nt, Human
acuucgacugugac

SEQ ID NO: 3560438 - RNA, 22 nt, Human
acuucgcaccggagugucugga

SEQ ID NO: 3560439 - RNA, 16 nt, Human
acuucgcaucaaaaga

SEQ ID NO: 3560440 - RNA, 20 nt, Human
acuucgcaucaaaagacaau

SEQ ID NO: 3560441 - RNA, 23 nt, Human
acuucgccaagguuguagcaugg

SEQ ID NO: 3560442 - RNA, 17 nt, Human
acuucgggaggucgagg

SEQ ID NO: 3560443 - RNA, 14 nt, Human
acuucgggcuggcc

SEQ ID NO: 3560444 - RNA, 16 nt, Human
acuucgggcuguguaa

SEQ ID NO: 3560445 - RNA, 17 nt, Human
acuucgggcuguguaaa

SEQ ID NO: 3560446 - RNA, 20 nt, Human
acuucgucuucuaauuucaa

SEQ ID NO: 3560447 - RNA, 18 nt, Human
acuucguuuaaugaaugc

SEQ ID NO: 3560448 - RNA, 20 nt, Human
acuucguuuugguuaaguug

SEQ ID NO: 3560449 - RNA, 22 nt, Human
acuucuaaaacuguacuuugau

SEQ ID NO: 3560450 - RNA, 21 nt, Human
acuucuaaguaaaaccacagc

SEQ ID NO: 3560451 - RNA, 23 nt, Human
acuucuaaguaaaaccacagcag

SEQ ID NO: 3560452 - RNA, 11 nt, Human
acuucuaauau

SEQ ID NO: 3560453 - RNA, 15 nt, Human
acuucuaauauauuu

SEQ ID NO: 3560454 - RNA, 16 nt, Human
acuucuaccugcccuc

SEQ ID NO: 3560455 - RNA, 17 nt, Human
acuucuaccugcccuca

SEQ ID NO: 3560456 - RNA, 23 nt, Human
acuucuacuucugcccuugccaa

SEQ ID NO: 3560457 - RNA, 22 nt, Human
acuucucaaaccuguuuaaaua

SEQ ID NO: 3560458 - RNA, 17 nt, Human
acuucucacuaauuugu

SEQ ID NO: 3560459 - RNA, 20 nt, Human
acuucucaggacacaggccu

SEQ ID NO: 3560460 - RNA, 15 nt, Human
acuucucaucacaca

SEQ ID NO: 3560461 - RNA, 17 nt, Human
acuucucaucacacaca

SEQ ID NO: 3560462 - RNA, 19 nt, Human
acuucucaucacacacaug

SEQ ID NO: 3560463 - RNA, 16 nt, Human
acuucuccacccugcu

SEQ ID NO: 3560464 - RNA, 13 nt, Human
acuucuccagccu

SEQ ID NO: 3560465 - RNA, 10 nt, Human
acuucuccca

SEQ ID NO: 3560466 - RNA, 23 nt, Human
acuucucuauaaaaaauauguau

SEQ ID NO: 3560467 - RNA, 22 nt, Human
acuucucucuaaggagaauggc

SEQ ID NO: 3560468 - RNA, 17 nt, Human
acuucucugaagggagg

SEQ ID NO: 3560469 - RNA, 20 nt, Human
acuucucuggaaagggggga

SEQ ID NO: 3560470 - RNA, 21 nt, Human
acuucucuuaaacuugugaau

SEQ ID NO: 3560471 - RNA, 14 nt, Human
acuucucuugcuuu

SEQ ID NO: 3560472 - RNA, 21 nt, Human
acuucucuuugccucaaauaa

SEQ ID NO: 3560473 - RNA, 12 nt, Human
acuucugagauc

SEQ ID NO: 3560474 - RNA, 20 nt, Human
acuucugagaucuguugauu

SEQ ID NO: 3560475 - RNA, 20 nt, Human
acuucugccauauucuguug

SEQ ID NO: 3560476 - RNA, 13 nt, Human
acuucugccucuu

SEQ ID NO: 3560477 - RNA, 16 nt, Human
acuucugccuggagac

SEQ ID NO: 3560478 - RNA, 12 nt, Human
acuucugccugu

SEQ ID NO: 3560479 - RNA, 16 nt, Human
acuucugcuuuccaca

SEQ ID NO: 3560480 - RNA, 22 nt, Human
acuucuggcucccucuucuuuc

SEQ ID NO: 3560481 - RNA, 17 nt, Human
acuucugggcuucaucu

SEQ ID NO: 3560482 - RNA, 19 nt, Human
acuucugggcuucaucugg

SEQ ID NO: 3560483 - RNA, 22 nt, Human
acuucugggcuucaucuggcaa

SEQ ID NO: 3560484 - RNA, 16 nt, Human
acuucuggguggggca

SEQ ID NO: 3560485 - RNA, 17 nt, Human
acuucuggguggggcag

SEQ ID NO: 3560486 - RNA, 21 nt, Human
acuucugucuucacaacagau

SEQ ID NO: 3560487 - RNA, 14 nt, Human
acuucuguuuucaa

SEQ ID NO: 3560488 - RNA, 15 nt, Human
acuucuguuuucaau

SEQ ID NO: 3560489 - RNA, 17 nt, Human
acuucuguuuucaaucu

SEQ ID NO: 3560490 - RNA, 22 nt, Human
acuucuguuuucaaucucguau

SEQ ID NO: 3560491 - RNA, 16 nt, Human
acuucuuaaaaguugu

SEQ ID NO: 3560492 - RNA, 12 nt, Human
acuucuuaaaua

SEQ ID NO: 3560493 - RNA, 14 nt, Human
acuucuuaaauauc

SEQ ID NO: 3560494 - RNA, 17 nt, Human
acuucuuaaauaucuuu

SEQ ID NO: 3560495 - RNA, 18 nt, Human
acuucuuaaauaucuuuu

SEQ ID NO: 3560496 - RNA, 22 nt, Human
acuucuuaaauaucuuuuaugu

SEQ ID NO: 3560497 - RNA, 13 nt, Human
acuucuucagagc

SEQ ID NO: 3560498 - RNA, 16 nt, Human
acuucuucagagcuga

SEQ ID NO: 3560499 - RNA, 20 nt, Human
acuucuucagagcugacaca

SEQ ID NO: 3560500 - RNA, 13 nt, Human
acuucuucucuua

SEQ ID NO: 3560501 - RNA, 21 nt, Human
acuucuucuguaauauuuaca

SEQ ID NO: 3560502 - RNA, 16 nt, Human
acuucuugaaggugcu

SEQ ID NO: 3560503 - RNA, 16 nt, Human
acuucuugcccugggg

SEQ ID NO: 3560504 - RNA, 18 nt, Human
acuucuugcccuggggau

SEQ ID NO: 3560505 - RNA, 19 nt, Human
acuucuugcuucuuucuag

SEQ ID NO: 3560506 - RNA, 19 nt, Human
acuucuugucagacauaaa

SEQ ID NO: 3560507 - RNA, 24 nt, Human
acuucuugucagacauaaagccau

SEQ ID NO: 3560508 - RNA, 15 nt, Human
acuucuuguguguau

SEQ ID NO: 3560509 - RNA, 21 nt, Human
acuucuuuaauuuuggaauuu

SEQ ID NO: 3560510 - RNA, 12 nt, Human
acuucuuucccu

SEQ ID NO: 3560511 - RNA, 18 nt, Human
acuucuuucccuuccucc

SEQ ID NO: 3560512 - RNA, 12 nt, Human
acuucuuucuau

SEQ ID NO: 3560513 - RNA, 13 nt, Human
acuucuuucuauu

SEQ ID NO: 3560514 - RNA, 14 nt, Human
acuucuuugcaguu

SEQ ID NO: 3560515 - RNA, 17 nt, Human
acuucuuuucacauucu

SEQ ID NO: 3560516 - RNA, 18 nt, Human
acuucuuuucacauucuu

SEQ ID NO: 3560517 - RNA, 19 nt, Human
acuucuuuugcucuuagcu

SEQ ID NO: 3560518 - RNA, 22 nt, Human
acuucuuuuuucaaaagaaagu

SEQ ID NO: 3560519 - RNA, 17 nt, Human
acuugaaaagagacagg

SEQ ID NO: 3560520 - RNA, 18 nt, Human
acuugaaagcauccaugu

SEQ ID NO: 3560521 - RNA, 19 nt, Human
acuugaaauaccagugaac

SEQ ID NO: 3560522 - RNA, 18 nt, Human
acuugaaaucuaggauua

SEQ ID NO: 3560523 - RNA, 13 nt, Human
acuugaacaaaag

SEQ ID NO: 3560524 - RNA, 18 nt, Human
acuugaacaaaaggguca

SEQ ID NO: 3560525 - RNA, 20 nt, Human
acuugaaccuaugaagcaau

SEQ ID NO: 3560526 - RNA, 22 nt, Human
acuugaacguuuucuaauugcu

SEQ ID NO: 3560527 - RNA, 13 nt, Human
acuugaacugauu

SEQ ID NO: 3560528 - RNA, 16 nt, Human
acuugaacuuuccugg

SEQ ID NO: 3560529 - RNA, 20 nt, Human
acuugaagccaucuaaagua

SEQ ID NO: 3560530 - RNA, 16 nt, Human
acuugaagccugcucc

SEQ ID NO: 3560531 - RNA, 22 nt, Human
acuugaagucuaaaagcagaaa

SEQ ID NO: 3560532 - RNA, 11 nt, Human
acuugaaguug

SEQ ID NO: 3560533 - RNA, 16 nt, Human
acuugaauaguauugu

SEQ ID NO: 3560534 - RNA, 17 nt, Human
acuugacagaacacugu

SEQ ID NO: 3560535 - RNA, 18 nt, Human
acuugacagaacacuguc

SEQ ID NO: 3560536 - RNA, 20 nt, Human
acuugacagaacacugucuu

SEQ ID NO: 3560537 - RNA, 22 nt, Human
acuugaccccgacgccacagcc

SEQ ID NO: 3560538 - RNA, 21 nt, Human
acuugacuccauuucaucauu

SEQ ID NO: 3560539 - RNA, 16 nt, Human
acuugagaggaugaau

SEQ ID NO: 3560540 - RNA, 19 nt, Human
acuugagauguaugaaggc

SEQ ID NO: 3560541 - RNA, 20 nt, Human
acuugagcaccgucauggcu

SEQ ID NO: 3560542 - RNA, 15 nt, Human
acuugaggaaaccag

SEQ ID NO: 3560543 - RNA, 15 nt, Human
acuugaggacacaug

SEQ ID NO: 3560544 - RNA, 18 nt, Human
acuugaggacacaugucc

SEQ ID NO: 3560545 - RNA, 19 nt, Human
acuugaggacacaugucca

SEQ ID NO: 3560546 - RNA, 12 nt, Human
acuugaggauuu

SEQ ID NO: 3560547 - RNA, 17 nt, Human
acuugagggcccagagc

SEQ ID NO: 3560548 - RNA, 14 nt, Human
agcccccucuuccc

SEQ ID NO: 3560549 - RNA, 12 nt, Human
agcccccugacc

SEQ ID NO: 3560550 - RNA, 19 nt, Human
agcccccugaccacucaga

SEQ ID NO: 3560551 - RNA, 14 nt, Human
agcccccuggccuc

SEQ ID NO: 3560552 - RNA, 12 nt, Human
agcccccugguc

SEQ ID NO: 3560553 - RNA, 16 nt, Human
agcccccuugacaccg

SEQ ID NO: 3560554 - RNA, 20 nt, Human
agcccccuuugggcccaggg

SEQ ID NO: 3560555 - RNA, 14 nt, Human
agccccgacuccag

SEQ ID NO: 3560556 - RNA, 15 nt, Human
agccccgacuccagc

SEQ ID NO: 3560557 - RNA, 18 nt, Human
agccccgacuccagccag

SEQ ID NO: 3560558 - RNA, 17 nt, Human
agccucugucaggccuu

SEQ ID NO: 3560559 - RNA, 14 nt, Human
agccucugucuggc

SEQ ID NO: 3560560 - RNA, 13 nt, Human
agccucuguguca

SEQ ID NO: 3560561 - RNA, 18 nt, Human
agccucugugucacuggc

SEQ ID NO: 3560562 - RNA, 22 nt, Human
agccucuuaaagcugccuguag

SEQ ID NO: 3560563 - RNA, 15 nt, Human
agccucuuucugucc

SEQ ID NO: 3560564 - RNA, 20 nt, Human
agccugaauuuuguugcugu

SEQ ID NO: 3560565 - RNA, 20 nt, Human
agccugaccaacauggagaa

SEQ ID NO: 3560566 - RNA, 16 nt, Human
agccugagcaacucuu

SEQ ID NO: 3560567 - RNA, 19 nt, Human
agccugagcgacagugaga

SEQ ID NO: 3560568 - RNA, 14 nt, Human
agccugagggaaag

SEQ ID NO: 3560569 - RNA, 15 nt, Human
agccugagggaaagg

SEQ ID NO: 3560570 - RNA, 21 nt, Human
agccugagggaaaggccagca

SEQ ID NO: 3560571 - RNA, 22 nt, Human
agccugagggaaaggccagcac

SEQ ID NO: 3560572 - RNA, 22 nt, Human
agccugaguaaaguuaaaagaa

SEQ ID NO: 3560573 - RNA, 19 nt, Human
agccugaguacuccacacu

SEQ ID NO: 3560574 - RNA, 22 nt, Human
agccugaguacuccacacugca

SEQ ID NO: 3560575 - RNA, 23 nt, Human
agccugaguagaaaggccuuuaa

SEQ ID NO: 3560576 - RNA, 20 nt, Human
agccugagucagggcccaga

SEQ ID NO: 3560577 - RNA, 21 nt, Human
agccugagucagggcccagag

SEQ ID NO: 3560578 - RNA, 23 nt, Human
agccugaguccacgaccuaggca

SEQ ID NO: 3560579 - RNA, 13 nt, Human
agccugaucucuu

SEQ ID NO: 3560580 - RNA, 15 nt, Human
agccugaucucuucc

SEQ ID NO: 3560581 - RNA, 16 nt, Human
agccugaucucuuccu

SEQ ID NO: 3560582 - RNA, 20 nt, Human
agccugaucucuuccuguuu

SEQ ID NO: 3560583 - RNA, 18 nt, Human
agccugaugagauuuuua

SEQ ID NO: 3560584 - RNA, 17 nt, Human
agccugcaaacucacug

SEQ ID NO: 3560585 - RNA, 21 nt, Human
agccugcaacucaucuuucau

SEQ ID NO: 3560586 - RNA, 18 nt, Human
agccugcacggugaaugg

SEQ ID NO: 3560587 - RNA, 20 nt, Human
agccugcacuugggggcuca

SEQ ID NO: 3560588 - RNA, 14 nt, Human
agccugcacuuuga

SEQ ID NO: 3560589 - RNA, 16 nt, Human
agccugcacuuugaug

SEQ ID NO: 3560590 - RNA, 21 nt, Human
agccugcaggaccucgugcca

SEQ ID NO: 3560591 - RNA, 23 nt, Human
agccugcaggaucucaccaggca

SEQ ID NO: 3560592 - RNA, 23 nt, Human
agccugcagggaagccccacaug

SEQ ID NO: 3560593 - RNA, 12 nt, Human
agccugcagggu

SEQ ID NO: 3560594 - RNA, 17 nt, Human
agccugcaggugcugcu

SEQ ID NO: 3560595 - RNA, 19 nt, Human
agccugcaggugcugcugc

SEQ ID NO: 3560596 - RNA, 20 nt, Human
agccugcaggugcugcugcg

SEQ ID NO: 3560597 - RNA, 22 nt, Human
agccugcaggugcugcugcgug

SEQ ID NO: 3560598 - RNA, 21 nt, Human
agccugcccaagcccaggcca

SEQ ID NO: 3560599 - RNA, 22 nt, Human
agccugcccaagcccaggccac

SEQ ID NO: 3560600 - RNA, 14 nt, Human
agccugccccagcg

SEQ ID NO: 3560601 - RNA, 16 nt, Human
agccugccccagcgcu

SEQ ID NO: 3560602 - RNA, 18 nt, Human
agccugccccagcgcuga

SEQ ID NO: 3560603 - RNA, 13 nt, Human
agccugcccuugu

SEQ ID NO: 3560604 - RNA, 11 nt, Human
agccugccugg

SEQ ID NO: 3560605 - RNA, 15 nt, Human
agccugccuggagcg

SEQ ID NO: 3560606 - RNA, 14 nt, Human
agccugccuggagu

SEQ ID NO: 3560607 - RNA, 23 nt, Human
agccugccuugcccacuccugcu

SEQ ID NO: 3560608 - RNA, 16 nt, Human
agccugcgccugcugc

SEQ ID NO: 3560609 - RNA, 18 nt, Human
agccugcgccugcugcau

SEQ ID NO: 3560610 - RNA, 20 nt, Human
agccugcgccugcugcaugc

SEQ ID NO: 3560611 - RNA, 9 nt, Human
agccugcua

SEQ ID NO: 3560612 - RNA, 15 nt, Human
agccugcuccagcug

SEQ ID NO: 3560613 - RNA, 16 nt, Human
agccugcuccagcugu

SEQ ID NO: 3560614 - RNA, 17 nt, Human
agccugcuccagcuguu

SEQ ID NO: 3560615 - RNA, 19 nt, Human
agccugcuccagcuguuca

SEQ ID NO: 3560616 - RNA, 15 nt, Human
agccugcucccccac

SEQ ID NO: 3560617 - RNA, 14 nt, Human
agccugcuggaagc

SEQ ID NO: 3560618 - RNA, 19 nt, Human
agccugcuggaagcccagc

SEQ ID NO: 3560619 - RNA, 12 nt, Human
agccugcuggau

SEQ ID NO: 3560620 - RNA, 11 nt, Human
agccugcuggc

SEQ ID NO: 3560621 - RNA, 17 nt, Human
agccugcuggcacccac

SEQ ID NO: 3560622 - RNA, 22 nt, Human
agccugcuucccaccucccugc

SEQ ID NO: 3560623 - RNA, 14 nt, Human
agccugcuuuuuaa

SEQ ID NO: 3560624 - RNA, 19 nt, Human
agccuggaaaccugucuga

SEQ ID NO: 3560625 - RNA, 19 nt, Human
agccuggaacaucaucaag

SEQ ID NO: 3560626 - RNA, 20 nt, Human
agccuggaacaucaucaagg

SEQ ID NO: 3560627 - RNA, 21 nt, Human
agccuggaacaucaucaaggc

SEQ ID NO: 3560628 - RNA, 15 nt, Human
agccuggacccccag

SEQ ID NO: 3560629 - RNA, 24 nt, Human
agccuggaccucugacagcagcau

SEQ ID NO: 3560630 - RNA, 15 nt, Human
agccuggaugccauc

SEQ ID NO: 3560631 - RNA, 16 nt, Human
agccuggcacaggacu

SEQ ID NO: 3560632 - RNA, 16 nt, Human
agccuggccacgcagc

SEQ ID NO: 3560633 - RNA, 22 nt, Human
agccuggccacgcagccaggac

SEQ ID NO: 3560634 - RNA, 16 nt, Human
agccuggccagacaca

SEQ ID NO: 3560635 - RNA, 18 nt, Human
agccuggccagacacagg

SEQ ID NO: 3560636 - RNA, 21 nt, Human
agccuggccagacacaggccc

SEQ ID NO: 3560637 - RNA, 14 nt, Human
agccuggcccagcu

SEQ ID NO: 3560638 - RNA, 16 nt, Human
agccuggcccagcucc

SEQ ID NO: 3560639 - RNA, 17 nt, Human
agccuggcccauagaaa

SEQ ID NO: 3560640 - RNA, 19 nt, Human
agccuggcccauagaaaca

SEQ ID NO: 3560641 - RNA, 19 nt, Human
agccuggccuccugccucu

SEQ ID NO: 3560642 - RNA, 19 nt, Human
agccuggcuauguccuaau

SEQ ID NO: 3560643 - RNA, 16 nt, Human
agccuggcuccccugg

SEQ ID NO: 3560644 - RNA, 17 nt, Human
agccuggcuccccuggg

SEQ ID NO: 3560645 - RNA, 14 nt, Human
agccuggcuucugg

SEQ ID NO: 3560646 - RNA, 18 nt, Human
agccuggcuucuggagcc

SEQ ID NO: 3560647 - RNA, 15 nt, Human
agccugggaggcaca

SEQ ID NO: 3560648 - RNA, 16 nt, Human
agccugggaggcacag

SEQ ID NO: 3560649 - RNA, 18 nt, Human
agccugggaggcacagca

SEQ ID NO: 3560650 - RNA, 20 nt, Human
agccugggaggucaaggcug

SEQ ID NO: 3560651 - RNA, 22 nt, Human
agccugggauaggggcagagga

SEQ ID NO: 3560652 - RNA, 18 nt, Human
agccugggcaacagagca

SEQ ID NO: 3560653 - RNA, 21 nt, Human
agccugggcaacagagcaaga

SEQ ID NO: 3560654 - RNA, 15 nt, Human
agccugggcagccag

SEQ ID NO: 3560655 - RNA, 19 nt, Human
agccugggcagccaggcug

SEQ ID NO: 3560656 - RNA, 20 nt, Human
agccugggcagccaggcugc

SEQ ID NO: 3560657 - RNA, 22 nt, Human
agccugggcccaucucccugcu

SEQ ID NO: 3560658 - RNA, 23 nt, Human
agccugggcccaucucccugcuu

SEQ ID NO: 3560659 - RNA, 16 nt, Human
agccugggccccagcu

SEQ ID NO: 3560660 - RNA, 13 nt, Human
agccuggggccug

SEQ ID NO: 3560661 - RNA, 14 nt, Human
agccuggggccugg

SEQ ID NO: 3560662 - RNA, 14 nt, Human
agccuggggcucua

SEQ ID NO: 3560663 - RNA, 15 nt, Human
agccuggggcucuaa

SEQ ID NO: 3560664 - RNA, 21 nt, Human
agccuggggcucuaacgccug

SEQ ID NO: 3560665 - RNA, 14 nt, Human
agccuggggcuggc

SEQ ID NO: 3560666 - RNA, 16 nt, Human
agccugggggccuggc

SEQ ID NO: 3560667 - RNA, 21 nt, Human
agccugggggccuggcuggcu

SEQ ID NO: 3560668 - RNA, 15 nt, Human
agccuggggucugga

SEQ ID NO: 3560669 - RNA, 19 nt, Human
agccugggugacaaagcga

SEQ ID NO: 3560670 - RNA, 21 nt, Human
agccugggugacagagugaga

SEQ ID NO: 3560671 - RNA, 12 nt, Human
agccugggugua

SEQ ID NO: 3560672 - RNA, 20 nt, Human
agccuggguguaaaaccugg

SEQ ID NO: 3560673 - RNA, 21 nt, Human
agccuggguguaaaaccugga

SEQ ID NO: 3560674 - RNA, 22 nt, Human
agccuggucccacgagggugcc

SEQ ID NO: 3560675 - RNA, 18 nt, Human
agccuggugggccuccuc

SEQ ID NO: 3560676 - RNA, 21 nt, Human
agccuggugggccuccucugu

SEQ ID NO: 3560677 - RNA, 22 nt, Human
agccuguaaacuuuaucacuua

SEQ ID NO: 3560678 - RNA, 16 nt, Human
agccuguaagccugca

SEQ ID NO: 3560679 - RNA, 17 nt, Human
agccuguaaucccagcu

SEQ ID NO: 3560680 - RNA, 18 nt, Human
agccuguaaucccagcua

SEQ ID NO: 3560681 - RNA, 16 nt, Human
agccugucauccuugg

SEQ ID NO: 3560682 - RNA, 15 nt, Human
agccuguccugccug

SEQ ID NO: 3560683 - RNA, 20 nt, Human
agccuguccugccuguggcc

SEQ ID NO: 3560684 - RNA, 14 nt, Human
agccugucucuucc

SEQ ID NO: 3560685 - RNA, 15 nt, Human
agccugucucuucca

SEQ ID NO: 3560686 - RNA, 17 nt, Human
agccugugaacccagga

SEQ ID NO: 3560687 - RNA, 22 nt, Human
agccugugacauacccccuccc

SEQ ID NO: 3560688 - RNA, 21 nt, Human
agccugugccucugggacugg

SEQ ID NO: 3560689 - RNA, 20 nt, Human
agccuguggaugaucaaucc

SEQ ID NO: 3560690 - RNA, 23 nt, Human
agccuguggaugaucaauccuuu

SEQ ID NO: 3560691 - RNA, 22 nt, Human
agccuguggcaucuuugccuug

SEQ ID NO: 3560692 - RNA, 15 nt, Human
agccuguggcccugu

SEQ ID NO: 3560693 - RNA, 19 nt, Human
agccuguggcccuguccug

SEQ ID NO: 3560694 - RNA, 17 nt, Human
agccuguggccuuugca

SEQ ID NO: 3560695 - RNA, 18 nt, Human
agccuguggcggugccug

SEQ ID NO: 3560696 - RNA, 15 nt, Human
agccuguggcugugg

SEQ ID NO: 3560697 - RNA, 15 nt, Human
agccuguguaacagc

SEQ ID NO: 3560698 - RNA, 20 nt, Human
agccuguguaacagcuccuu

SEQ ID NO: 3560699 - RNA, 14 nt, Human
agccuguucauggc

SEQ ID NO: 3560700 - RNA, 17 nt, Human
agccuguucauggcaga

SEQ ID NO: 3560701 - RNA, 14 nt, Human
agccuguuccccuc

SEQ ID NO: 3560702 - RNA, 16 nt, Human
agcggacaguggcagg

SEQ ID NO: 3560703 - RNA, 16 nt, Human
agcggagaaaggaagg

SEQ ID NO: 3560704 - RNA, 16 nt, Human
agcggaggcugugugc

SEQ ID NO: 3560705 - RNA, 12 nt, Human
agcggccccucc

SEQ ID NO: 3560706 - RNA, 23 nt, Human
agcggccccuugacucuggggac

SEQ ID NO: 3560707 - RNA, 18 nt, Human
agcggcccugucauccag

SEQ ID NO: 3560708 - RNA, 19 nt, Human
agcggcugagucaugaucu

SEQ ID NO: 3560709 - RNA, 21 nt, Human
agcggcugagucaugaucucc

SEQ ID NO: 3560710 - RNA, 20 nt, Human
agcggcuggaauuggguggg

SEQ ID NO: 3560711 - RNA, 19 nt, Human
acuuuaccuuuuuuauaca

SEQ ID NO: 3560712 - RNA, 15 nt, Human
acuuuagaagccugc

SEQ ID NO: 3560713 - RNA, 16 nt, Human
acuuuagaagccugca

SEQ ID NO: 3560714 - RNA, 21 nt, Human
acuuuagaaguagaauugaca

SEQ ID NO: 3560715 - RNA, 21 nt, Human
acuuuagaagugcauuucuga

SEQ ID NO: 3560716 - RNA, 14 nt, Human
acuuuaggcuuuca

SEQ ID NO: 3560717 - RNA, 21 nt, Human
acuuuaggcuuucagcuuaca

SEQ ID NO: 3560718 - RNA, 13 nt, Human
acuuuagggaagu

SEQ ID NO: 3560719 - RNA, 23 nt, Human
acuuuagggaaguacuuuuggca

SEQ ID NO: 3560720 - RNA, 15 nt, Human
acuuuagggcuguaa

SEQ ID NO: 3560721 - RNA, 23 nt, Human
acuuuaguaugacgcugauacau

SEQ ID NO: 3560722 - RNA, 18 nt, Human
acuuuagucugcaaaaug

SEQ ID NO: 3560723 - RNA, 13 nt, Human
acuuuauaaaucc

SEQ ID NO: 3560724 - RNA, 17 nt, Human
acuuuauagaagaaugc

SEQ ID NO: 3560725 - RNA, 18 nt, Human
acuuuaucaugaaugcuu

SEQ ID NO: 3560726 - RNA, 13 nt, Human
acuuuaucuaaag

SEQ ID NO: 3560727 - RNA, 23 nt, Human
acuuuaucuaauaccucugugug

SEQ ID NO: 3560728 - RNA, 22 nt, Human
acuuuaucuugaauaauguaag

SEQ ID NO: 3560729 - RNA, 15 nt, Human
acuuuaugccggaug

SEQ ID NO: 3560730 - RNA, 17 nt, Human
acuuuaugcuaagugaa

SEQ ID NO: 3560731 - RNA, 13 nt, Human
acuuuauguaguu

SEQ ID NO: 3560732 - RNA, 15 nt, Human
acuuuauuaaauaca

SEQ ID NO: 3560733 - RNA, 19 nt, Human
acuuuauucuugaaagaag

SEQ ID NO: 3560734 - RNA, 17 nt, Human
acuuuauugacaaguga

SEQ ID NO: 3560735 - RNA, 21 nt, Human
acuuuauugccuuuuaauuuu

SEQ ID NO: 3560736 - RNA, 21 nt, Human
acuuuauuuuauauaauaaag

SEQ ID NO: 3560737 - RNA, 23 nt, Human
acuuuauuuuauauaauaaagua

SEQ ID NO: 3560738 - RNA, 22 nt, Human
acuuuauuuucuauaauuuaaa

SEQ ID NO: 3560739 - RNA, 13 nt, Human
acuuuauuuucug

SEQ ID NO: 3560740 - RNA, 24 nt, Human
acuuuauuuucugguagauagaaa

SEQ ID NO: 3560741 - RNA, 18 nt, Human
acuuucaaaauuaaaucu

SEQ ID NO: 3560742 - RNA, 20 nt, Human
acuuucaaaauuaaaucugu

SEQ ID NO: 3560743 - RNA, 20 nt, Human
acuuucaauugucacuuuuu

SEQ ID NO: 3560744 - RNA, 16 nt, Human
acuuucacuauaaugu

SEQ ID NO: 3560745 - RNA, 20 nt, Human
acuuucacuauaaugugaaa

SEQ ID NO: 3560746 - RNA, 23 nt, Human
acuuucacuauaaugugaaaugu

SEQ ID NO: 3560747 - RNA, 13 nt, Human
acuuucagcuguc

SEQ ID NO: 3560748 - RNA, 22 nt, Human
acuuucagcugucuuuuggagg

SEQ ID NO: 3560749 - RNA, 22 nt, Human
acuuucaggccacauggcuaaa

SEQ ID NO: 3560750 - RNA, 22 nt, Human
acuuucauauuuuaaacagagg

SEQ ID NO: 3560751 - RNA, 21 nt, Human
acuuucauccugacucugccc

SEQ ID NO: 3560752 - RNA, 23 nt, Human
acuuucauccugacucugccccc

SEQ ID NO: 3560753 - RNA, 19 nt, Human
acuuucauuaaagcauuua

SEQ ID NO: 3560754 - RNA, 18 nt, Human
acuuucauugccaguguc

SEQ ID NO: 3560755 - RNA, 20 nt, Human
acuuucauugccagugucuu

SEQ ID NO: 3560756 - RNA, 18 nt, Human
acuuuccaauucuccuuu

SEQ ID NO: 3560757 - RNA, 17 nt, Human
acuuuccauuacaagua

SEQ ID NO: 3560758 - RNA, 21 nt, Human
acuuuccauuacaaguauuuu

SEQ ID NO: 3560759 - RNA, 21 nt, Human
acuuucccagguucuguuuau

SEQ ID NO: 3560760 - RNA, 17 nt, Human
acuuuccccaccagaug

SEQ ID NO: 3560761 - RNA, 20 nt, Human
acuuuccccaccagaugcug

SEQ ID NO: 3560762 - RNA, 23 nt, Human
acuuuccccaccagaugcugaaa

SEQ ID NO: 3560763 - RNA, 21 nt, Human
acuuuccccauacucugucuc

SEQ ID NO: 3560764 - RNA, 22 nt, Human
acuuuccccauacucugucucc

SEQ ID NO: 3560765 - RNA, 17 nt, Human
acuuucccuugcuuuuc

SEQ ID NO: 3560766 - RNA, 22 nt, Human
acuuucccuugcuuuucccucu

SEQ ID NO: 3560767 - RNA, 21 nt, Human
acuuuccucuuagucgagcca

SEQ ID NO: 3560768 - RNA, 21 nt, Human
acuuuccucuuuggucuacac

SEQ ID NO: 3560769 - RNA, 17 nt, Human
acuuuccuuuccccagc

SEQ ID NO: 3560770 - RNA, 21 nt, Human
acuuuccuuuucuauuccuuc

SEQ ID NO: 3560771 - RNA, 15 nt, Human
acuuucguacauugg

SEQ ID NO: 3560772 - RNA, 17 nt, Human
acuuucuaauguuucug

SEQ ID NO: 3560773 - RNA, 17 nt, Human
acuuucuacaaugugaa

SEQ ID NO: 3560774 - RNA, 21 nt, Human
acuuucuacaaugugaacuuu

SEQ ID NO: 3560775 - RNA, 17 nt, Human
acuuucucaguuuucau

SEQ ID NO: 3560776 - RNA, 18 nt, Human
acuuucucaguuuucaua

SEQ ID NO: 3560777 - RNA, 14 nt, Human
acuuucucuaauaa

SEQ ID NO: 3560778 - RNA, 15 nt, Human
acuuucucuaauaau

SEQ ID NO: 3560779 - RNA, 17 nt, Human
acuuucucuaauaauaa

SEQ ID NO: 3560780 - RNA, 16 nt, Human
acuuucucugccauca

SEQ ID NO: 3560781 - RNA, 19 nt, Human
acuuucugaaauucacaaa

SEQ ID NO: 3560782 - RNA, 23 nt, Human
acuuucuggggccuaauaaaacu

SEQ ID NO: 3560783 - RNA, 18 nt, Human
acuuucuguuaugggcuu

SEQ ID NO: 3560784 - RNA, 14 nt, Human
acuuucuuauccua

SEQ ID NO: 3560785 - RNA, 23 nt, Human
acuuucuuuaaauuauguuuuua

SEQ ID NO: 3560786 - RNA, 19 nt, Human
acuuucuuuucuggaaugu

SEQ ID NO: 3560787 - RNA, 23 nt, Human
acuuucuuuuuguagcuggggcu

SEQ ID NO: 3560788 - RNA, 22 nt, Human
acuuucuuuuuuuucuauuuca

SEQ ID NO: 3560789 - RNA, 23 nt, Human
acuuucuuuuuuuucuauuucac

SEQ ID NO: 3560790 - RNA, 18 nt, Human
acuuugaaaggagauguc

SEQ ID NO: 3560791 - RNA, 14 nt, Human
acuuugaaauaccu

SEQ ID NO: 3560792 - RNA, 16 nt, Human
acuuugaaauaccuca

SEQ ID NO: 3560793 - RNA, 20 nt, Human
acuuugaaauaccucauguu

SEQ ID NO: 3560794 - RNA, 23 nt, Human
acuuugaaauaccucauguuuau

SEQ ID NO: 3560795 - RNA, 21 nt, Human
acuuugaagacccgcuacaaa

SEQ ID NO: 3560796 - RNA, 15 nt, Human
acuuugaagauguca

SEQ ID NO: 3560797 - RNA, 17 nt, Human
acuuugaaguuagcuuu

SEQ ID NO: 3560798 - RNA, 14 nt, Human
acuuugaauaaaga

SEQ ID NO: 3560799 - RNA, 22 nt, Human
acuuugaauaaagaauacuuga

SEQ ID NO: 3560800 - RNA, 22 nt, Human
acuuugaauguguuucacaguu

SEQ ID NO: 3560801 - RNA, 17 nt, Human
acuuugacacuuuucau

SEQ ID NO: 3560802 - RNA, 19 nt, Human
acuuugacagcgcacagcu

SEQ ID NO: 3560803 - RNA, 14 nt, Human
acuuugaccucugc

SEQ ID NO: 3560804 - RNA, 20 nt, Human
acuuugacuuuuugcauuua

SEQ ID NO: 3560805 - RNA, 16 nt, Human
acuuugagaucuaaaa

SEQ ID NO: 3560806 - RNA, 18 nt, Human
acuuugagccugggaaau

SEQ ID NO: 3560807 - RNA, 19 nt, Human
acuuugaggguguauauuu

SEQ ID NO: 3560808 - RNA, 23 nt, Human
acuuugaggguguauauuuucug

SEQ ID NO: 3560809 - RNA, 14 nt, Human
acuuugaugucaug

SEQ ID NO: 3560810 - RNA, 22 nt, Human
acuuugcacacuuuggcccagg

SEQ ID NO: 3560811 - RNA, 14 nt, Human
acuuugcacauuuu

SEQ ID NO: 3560812 - RNA, 15 nt, Human
acuuugcacauuuug

SEQ ID NO: 3560813 - RNA, 20 nt, Human
acuuugcacauuuugauuuu

SEQ ID NO: 3560814 - RNA, 17 nt, Human
acuuugcacugauauau

SEQ ID NO: 3560815 - RNA, 21 nt, Human
acuuugcacugauauaucaug

SEQ ID NO: 3560816 - RNA, 16 nt, Human
acuuugcaucucagua

SEQ ID NO: 3560817 - RNA, 16 nt, Human
acuuugcauugucugu

SEQ ID NO: 3560818 - RNA, 20 nt, Human
acuuugccuuuccauaauca

SEQ ID NO: 3560819 - RNA, 20 nt, Human
acuuugcuaaagacaugaag

SEQ ID NO: 3560820 - RNA, 13 nt, Human
acuuugcuccuca

SEQ ID NO: 3560821 - RNA, 15 nt, Human
acuuugcuugcuuug

SEQ ID NO: 3560822 - RNA, 15 nt, Human
acuuugcuuuaauau

SEQ ID NO: 3560823 - RNA, 15 nt, Human
acuuugcuuucauga

SEQ ID NO: 3560824 - RNA, 12 nt, Human
acuuuggaaaga

SEQ ID NO: 3560825 - RNA, 23 nt, Human
acuuuggaaagaguaggaagacu

SEQ ID NO: 3560826 - RNA, 15 nt, Human
acuuuggaacaagau

SEQ ID NO: 3560827 - RNA, 21 nt, Human
acuuuggaaguuuguguucug

SEQ ID NO: 3560828 - RNA, 18 nt, Human
acuuuggaauacauuucu

SEQ ID NO: 3560829 - RNA, 19 nt, Human
acuuuggauaauaaggaaa

SEQ ID NO: 3560830 - RNA, 16 nt, Human
acuuuggaucaggaaa

SEQ ID NO: 3560831 - RNA, 13 nt, Human
acuuuggcugcau

SEQ ID NO: 3560832 - RNA, 21 nt, Human
acuuuggcuuauaauucuuuc

SEQ ID NO: 3560833 - RNA, 19 nt, Human
acuuugggaggccaaggug

SEQ ID NO: 3560834 - RNA, 20 nt, Human
acuuugggaggccaaggugg

SEQ ID NO: 3560835 - RNA, 17 nt, Human
acuuugggaggcugagg

SEQ ID NO: 3560836 - RNA, 19 nt, Human
acuuugggaggcugaggcg

SEQ ID NO: 3560837 - RNA, 20 nt, Human
acuuugggauaggaaaaaug

SEQ ID NO: 3560838 - RNA, 14 nt, Human
acuuugggggagga

SEQ ID NO: 3560839 - RNA, 19 nt, Human
acuuugguacauggccagu

SEQ ID NO: 3560840 - RNA, 21 nt, Human
acuuugguuauuuuacuuuuu

SEQ ID NO: 3560841 - RNA, 17 nt, Human
acuuuguaaaaaucuuu

SEQ ID NO: 3560842 - RNA, 21 nt, Human
acuuuguaaauucugauuucu

SEQ ID NO: 3560843 - RNA, 18 nt, Human
acuuuguaccccccaacc

SEQ ID NO: 3560844 - RNA, 15 nt, Human
agaacaaagcuguua

SEQ ID NO: 3560845 - RNA, 17 nt, Human
agaacaaagcuguuaaa

SEQ ID NO: 3560846 - RNA, 20 nt, Human
agaacaaagcuguuaaacug

SEQ ID NO: 3560847 - RNA, 22 nt, Human
agaacaaagcuguuaaacuguu

SEQ ID NO: 3560848 - RNA, 24 nt, Human
agaacaaauauucagaauauucau

SEQ ID NO: 3560849 - RNA, 18 nt, Human
agaacaacauauacaaca

SEQ ID NO: 3560850 - RNA, 15 nt, Human
agaacaacuaccuga

SEQ ID NO: 3560851 - RNA, 17 nt, Human
agaacaauauugacuuu

SEQ ID NO: 3560852 - RNA, 20 nt, Human
agaacaauauugacuuuguc

SEQ ID NO: 3560853 - RNA, 13 nt, Human
agaacaauugucc

SEQ ID NO: 3560854 - RNA, 15 nt, Human
agaacacaaagcggg

SEQ ID NO: 3560855 - RNA, 16 nt, Human
agaacacaaggucauu

SEQ ID NO: 3560856 - RNA, 14 nt, Human
agaacacacacacu

SEQ ID NO: 3560857 - RNA, 22 nt, Human
agaacacacacauauacacgaa

SEQ ID NO: 3560858 - RNA, 21 nt, Human
agaacacagaaagccuaucaa

SEQ ID NO: 3560859 - RNA, 20 nt, Human
agaacacagcaauuccucag

SEQ ID NO: 3560860 - RNA, 14 nt, Human
agaacacgcguauu

SEQ ID NO: 3560861 - RNA, 14 nt, Human
agaacacgcuuuca

SEQ ID NO: 3560862 - RNA, 18 nt, Human
agaacacggcucacgcuu

SEQ ID NO: 3560863 - RNA, 13 nt, Human
agaacacuaaccu

SEQ ID NO: 3560864 - RNA, 11 nt, Human
agaacacuaau

SEQ ID NO: 3560865 - RNA, 15 nt, Human
agaacacuaauucau

SEQ ID NO: 3560866 - RNA, 11 nt, Human
agaacacuggu

SEQ ID NO: 3560867 - RNA, 14 nt, Human
agaacacugugaaa

SEQ ID NO: 3560868 - RNA, 10 nt, Human
agaacagaaa

SEQ ID NO: 3560869 - RNA, 20 nt, Human
agaacagaaaacaacaaaaa

SEQ ID NO: 3560870 - RNA, 19 nt, Human
agaacagaucuccaaagcu

SEQ ID NO: 3560871 - RNA, 16 nt, Human
agaacagaucuuuuac

SEQ ID NO: 3560872 - RNA, 18 nt, Human
agaacagcagacucagcu

SEQ ID NO: 3560873 - RNA, 18 nt, Human
agaacagcagagguucuu

SEQ ID NO: 3560874 - RNA, 18 nt, Human
agaacagcaggcccaccu

SEQ ID NO: 3560875 - RNA, 18 nt, Human
agaacagccgcuccuguc

SEQ ID NO: 3560876 - RNA, 15 nt, Human
agaacagcuguugac

SEQ ID NO: 3560877 - RNA, 17 nt, Human
agaacaggccucuccau

SEQ ID NO: 3560878 - RNA, 19 nt, Human
agaacagggaaaauaggca

SEQ ID NO: 3560879 - RNA, 20 nt, Human
agaacagggaaaauaggcag

SEQ ID NO: 3560880 - RNA, 13 nt, Human
agaacaguaaaca

SEQ ID NO: 3560881 - RNA, 14 nt, Human
agaacaguaaacau

SEQ ID NO: 3560882 - RNA, 22 nt, Human
agaacaguaucuuugcacucca

SEQ ID NO: 3560883 - RNA, 14 nt, Human
agaacauaaagcaa

SEQ ID NO: 3560884 - RNA, 17 nt, Human
agaacauaaagguaaaa

SEQ ID NO: 3560885 - RNA, 11 nt, Human
agaacauagaa

SEQ ID NO: 3560886 - RNA, 19 nt, Human
agaacauagacagaagaaa

SEQ ID NO: 3560887 - RNA, 14 nt, Human
agaacaucauuaga

SEQ ID NO: 3560888 - RNA, 20 nt, Human
agaacaucauuagaacaaag

SEQ ID NO: 3560889 - RNA, 13 nt, Human
agaacaucccucc

SEQ ID NO: 3560890 - RNA, 18 nt, Human
agaacaucccugccagcu

SEQ ID NO: 3560891 - RNA, 22 nt, Human
agaacaucuuugacacucugca

SEQ ID NO: 3560892 - RNA, 23 nt, Human
agaacaucuuugacacucugcag

SEQ ID NO: 3560893 - RNA, 20 nt, Human
agaacaugcaguuugaaauu

SEQ ID NO: 3560894 - RNA, 23 nt, Human
agaacaugcaguuugaaauucug

SEQ ID NO: 3560895 - RNA, 13 nt, Human
agaacaugugaga

SEQ ID NO: 3560896 - RNA, 19 nt, Human
agaacauguugguauuuau

SEQ ID NO: 3560897 - RNA, 20 nt, Human
agaacauguugguauuuauc

SEQ ID NO: 3560898 - RNA, 19 nt, Human
agaacauugguauucgcuu

SEQ ID NO: 3560899 - RNA, 11 nt, Human
agaacauugua

SEQ ID NO: 3560900 - RNA, 13 nt, Human
agaacauuuuaau

SEQ ID NO: 3560901 - RNA, 21 nt, Human
agaaccaaaaagaggcuaugu

SEQ ID NO: 3560902 - RNA, 11 nt, Human
agaaccaaaga

SEQ ID NO: 3560903 - RNA, 16 nt, Human
agaaccaaaucuggaa

SEQ ID NO: 3560904 - RNA, 23 nt, Human
agaaccaccccggcccccugccc

SEQ ID NO: 3560905 - RNA, 24 nt, Human
agaaccagauucuauccucaucuu

SEQ ID NO: 3560906 - RNA, 16 nt, Human
agcugcaaaggacaga

SEQ ID NO: 3560907 - RNA, 19 nt, Human
agcugcaaaggacagaucc

SEQ ID NO: 3560908 - RNA, 14 nt, Human
agcugcaaaguguu

SEQ ID NO: 3560909 - RNA, 19 nt, Human
agcugcaaaguguuuugua

SEQ ID NO: 3560910 - RNA, 21 nt, Human
agcugcaagguacucugguga

SEQ ID NO: 3560911 - RNA, 23 nt, Human
agcugcaagguacucuggugagu

SEQ ID NO: 3560912 - RNA, 21 nt, Human
agcugcaagugacaucucuuu

SEQ ID NO: 3560913 - RNA, 23 nt, Human
agcugcacagggcagcugggccc

SEQ ID NO: 3560914 - RNA, 23 nt, Human
agcugcaccagagcaaccucuca

SEQ ID NO: 3560915 - RNA, 15 nt, Human
agcugcaccccuucc

SEQ ID NO: 3560916 - RNA, 17 nt, Human
agcugcaccccuuccug

SEQ ID NO: 3560917 - RNA, 13 nt, Human
agcugcacccuca

SEQ ID NO: 3560918 - RNA, 19 nt, Human
agcugcacccucaggcagg

SEQ ID NO: 3560919 - RNA, 20 nt, Human
agcugcacccucaggcaggu

SEQ ID NO: 3560920 - RNA, 22 nt, Human
agcugcaccugccagccuggcu

SEQ ID NO: 3560921 - RNA, 21 nt, Human
agcugcagaaacgaagccauc

SEQ ID NO: 3560922 - RNA, 17 nt, Human
agcugcagagacagaga

SEQ ID NO: 3560923 - RNA, 19 nt, Human
agcugcagagacagagagg

SEQ ID NO: 3560924 - RNA, 16 nt, Human
agcugcagagauuucu

SEQ ID NO: 3560925 - RNA, 19 nt, Human
agcugcagagauuucucau

SEQ ID NO: 3560926 - RNA, 13 nt, Human
agcugcagcuucc

SEQ ID NO: 3560927 - RNA, 13 nt, Human
agcugcagcuugg

SEQ ID NO: 3560928 - RNA, 17 nt, Human
agcugcaggaaucaaaa

SEQ ID NO: 3560929 - RNA, 20 nt, Human
agcugcaggaaucaaaaauu

SEQ ID NO: 3560930 - RNA, 22 nt, Human
agcugcaggaaucaaaaauuga

SEQ ID NO: 3560931 - RNA, 23 nt, Human
agcugcaucauccuugcaggugg

SEQ ID NO: 3560932 - RNA, 19 nt, Human
agcugcauccuccaagaau

SEQ ID NO: 3560933 - RNA, 15 nt, Human
agcugccaaguaaau

SEQ ID NO: 3560934 - RNA, 13 nt, Human
agcugccaccugc

SEQ ID NO: 3560935 - RNA, 19 nt, Human
agcugccaggugagaaacu

SEQ ID NO: 3560936 - RNA, 14 nt, Human
agcugccauggcua

SEQ ID NO: 3560937 - RNA, 24 nt, Human
agcugcccacuguuucucuugagc

SEQ ID NO: 3560938 - RNA, 17 nt, Human
agcugcccccagagcca

SEQ ID NO: 3560939 - RNA, 16 nt, Human
agcugccccucccugc

SEQ ID NO: 3560940 - RNA, 14 nt, Human
agcugccccucucu

SEQ ID NO: 3560941 - RNA, 18 nt, Human
agcugcccuaugggccug

SEQ ID NO: 3560942 - RNA, 19 nt, Human
agcugcccuaugggccugc

SEQ ID NO: 3560943 - RNA, 22 nt, Human
agcugcccuccuuguccaccca

SEQ ID NO: 3560944 - RNA, 14 nt, Human
agcugcccucuccu

SEQ ID NO: 3560945 - RNA, 16 nt, Human
agcugcccucuccugg

SEQ ID NO: 3560946 - RNA, 18 nt, Human
agcugcccucuccugggc

SEQ ID NO: 3560947 - RNA, 19 nt, Human
agcugcccucuccugggca

SEQ ID NO: 3560948 - RNA, 17 nt, Human
agcugccgaccagagcc

SEQ ID NO: 3560949 - RNA, 18 nt, Human
agcugccgggccugauuu

SEQ ID NO: 3560950 - RNA, 16 nt, Human
agcugccggucgcccu

SEQ ID NO: 3560951 - RNA, 21 nt, Human
agcugccuagcaagcuggccu

SEQ ID NO: 3560952 - RNA, 22 nt, Human
agcugccuagcaagcuggccuc

SEQ ID NO: 3560953 - RNA, 22 nt, Human
agcugccuccccuccucugcuu

SEQ ID NO: 3560954 - RNA, 20 nt, Human
agcugccucucgguggccag

SEQ ID NO: 3560955 - RNA, 14 nt, Human
agcugccucuucug

SEQ ID NO: 3560956 - RNA, 23 nt, Human
agcugccugcuuuucacugcugc

SEQ ID NO: 3560957 - RNA, 13 nt, Human
agcugccuggacc

SEQ ID NO: 3560958 - RNA, 14 nt, Human
agcugccuggaccc

SEQ ID NO: 3560959 - RNA, 15 nt, Human
agcugccuggacccg

SEQ ID NO: 3560960 - RNA, 13 nt, Human
agcugccugggau

SEQ ID NO: 3560961 - RNA, 19 nt, Human
agcugccugggaucccuca

SEQ ID NO: 3560962 - RNA, 15 nt, Human
agcugccugguauau

SEQ ID NO: 3560963 - RNA, 13 nt, Human
agcugccuguuca

SEQ ID NO: 3560964 - RNA, 19 nt, Human
agcugccuguucagcucca

SEQ ID NO: 3560965 - RNA, 20 nt, Human
agcugccuguucagcuccag

SEQ ID NO: 3560966 - RNA, 18 nt, Human
agcugccuuagcuucagg

SEQ ID NO: 3560967 - RNA, 22 nt, Human
agcugccuuagcuucaggaacc

SEQ ID NO: 3560968 - RNA, 14 nt, Human
agcugccuucccua

SEQ ID NO: 3560969 - RNA, 16 nt, Human
agcugccuucccuagc

SEQ ID NO: 3560970 - RNA, 17 nt, Human
agcugccuucccuagcu

SEQ ID NO: 3560971 - RNA, 19 nt, Human
agcugccuuggcucagaca

SEQ ID NO: 3560972 - RNA, 20 nt, Human
agcugcgguccacccaggag

SEQ ID NO: 3560973 - RNA, 23 nt, Human
agcugcgguccacccaggagccc

SEQ ID NO: 3560974 - RNA, 18 nt, Human
agcugcggugucucccug

SEQ ID NO: 3560975 - RNA, 14 nt, Human
agcugcuaaaucuc

SEQ ID NO: 3560976 - RNA, 19 nt, Human
agcugcuacaaagaagaca

SEQ ID NO: 3560977 - RNA, 21 nt, Human
agcugcuacucgugagcgcca

SEQ ID NO: 3560978 - RNA, 16 nt, Human
agcugcuauagccugg

SEQ ID NO: 3560979 - RNA, 20 nt, Human
agcugcuauuuauuuuccua

SEQ ID NO: 3560980 - RNA, 20 nt, Human
agcugcucaacuugcaaaau

SEQ ID NO: 3560981 - RNA, 16 nt, Human
agcugcucagggaaaa

SEQ ID NO: 3560982 - RNA, 12 nt, Human
agcugcuccccu

SEQ ID NO: 3560983 - RNA, 18 nt, Human
agcugcuccgaggaccca

SEQ ID NO: 3560984 - RNA, 20 nt, Human
agcugcuccgaggacccagg

SEQ ID NO: 3560985 - RNA, 17 nt, Human
agcugcuccuagaggga

SEQ ID NO: 3560986 - RNA, 20 nt, Human
agcugcuccuagagggaggg

SEQ ID NO: 3560987 - RNA, 15 nt, Human
agcugcucugagcca

SEQ ID NO: 3560988 - RNA, 16 nt, Human
agaacugcagucacug

SEQ ID NO: 3560989 - RNA, 18 nt, Human
agaacugcagucacugca

SEQ ID NO: 3560990 - RNA, 23 nt, Human
agaacugcagucacugcacguuu

SEQ ID NO: 3560991 - RNA, 20 nt, Human
agaacugcauauguuucgcu

SEQ ID NO: 3560992 - RNA, 17 nt, Human
agaacugcauggaccua

SEQ ID NO: 3560993 - RNA, 22 nt, Human
agaacugccuuuggcagaguuc

SEQ ID NO: 3560994 - RNA, 22 nt, Human
agaacugcuuuaucccacggaa

SEQ ID NO: 3560995 - RNA, 15 nt, Human
agaacuggacucagg

SEQ ID NO: 3560996 - RNA, 19 nt, Human
agaacuggguaaaugcaaa

SEQ ID NO: 3560997 - RNA, 21 nt, Human
agaacugucggaggaaagaca

SEQ ID NO: 3560998 - RNA, 16 nt, Human
agaacugugccacaau

SEQ ID NO: 3560999 - RNA, 18 nt, Human
agaacuucagaaagacuu

SEQ ID NO: 3561000 - RNA, 20 nt, Human
agaacuuccccauacaaaua

SEQ ID NO: 3561001 - RNA, 20 nt, Human
agaacuucuccguccucgau

SEQ ID NO: 3561002 - RNA, 12 nt, Human
agaacuuguuua

SEQ ID NO: 3561003 - RNA, 15 nt, Human
agaacuuuauuucca

SEQ ID NO: 3561004 - RNA, 16 nt, Human
agaacuuucauuuuuu

SEQ ID NO: 3561005 - RNA, 18 nt, Human
agaacuuucauuuuuuuc

SEQ ID NO: 3561006 - RNA, 20 nt, Human
agaacuuugagcuacugccg

SEQ ID NO: 3561007 - RNA, 16 nt, Human
agaacuuuuuuaaaua

SEQ ID NO: 3561008 - RNA, 19 nt, Human
agaacuuuuuuaaauaaac

SEQ ID NO: 3561009 - RNA, 20 nt, Human
agaacuuuuuuaaauaaacu

SEQ ID NO: 3561010 - RNA, 11 nt, Human
agaagaaaaaa

SEQ ID NO: 3561011 - RNA, 13 nt, Human
agaagaaaaaaac

SEQ ID NO: 3561012 - RNA, 13 nt, Human
agaagaaaaagaa

SEQ ID NO: 3561013 - RNA, 23 nt, Human
agaagaaaacaucuauucucucc

SEQ ID NO: 3561014 - RNA, 19 nt, Human
agaagaaaauagaauugac

SEQ ID NO: 3561015 - RNA, 16 nt, Human
agaagaaaauugcugu

SEQ ID NO: 3561016 - RNA, 18 nt, Human
agaagaaacgucuaugug

SEQ ID NO: 3561017 - RNA, 13 nt, Human
agaagaaagaacu

SEQ ID NO: 3561018 - RNA, 12 nt, Human
agaagaaagaug

SEQ ID NO: 3561019 - RNA, 13 nt, Human
agaagaaagaugu

SEQ ID NO: 3561020 - RNA, 15 nt, Human
agaagaaagauguuu

SEQ ID NO: 3561021 - RNA, 14 nt, Human
agaagaaaugaaau

SEQ ID NO: 3561022 - RNA, 22 nt, Human
agaagaaauucugucauagaaa

SEQ ID NO: 3561023 - RNA, 12 nt, Human
agaagaacagua

SEQ ID NO: 3561024 - RNA, 14 nt, Human
agaagaacugaaau

SEQ ID NO: 3561025 - RNA, 21 nt, Human
agaagaacuugcauggagcag

SEQ ID NO: 3561026 - RNA, 15 nt, Human
agaagaagaaaaaaa

SEQ ID NO: 3561027 - RNA, 15 nt, Human
agaagaagaagaaaa

SEQ ID NO: 3561028 - RNA, 15 nt, Human
agaagaagaagaaga

SEQ ID NO: 3561029 - RNA, 14 nt, Human
agaagaaggaaaug

SEQ ID NO: 3561030 - RNA, 14 nt, Human
agaagaaguguguc

SEQ ID NO: 3561031 - RNA, 22 nt, Human
agaagaaguuucaucauuuuuu

SEQ ID NO: 3561032 - RNA, 16 nt, Human
agaagaauauucagga

SEQ ID NO: 3561033 - RNA, 22 nt, Human
agaagaauauuguuccuaaguu

SEQ ID NO: 3561034 - RNA, 22 nt, Human
agaagaaucucaucucagugaa

SEQ ID NO: 3561035 - RNA, 19 nt, Human
agaagaaugcuuaaucaga

SEQ ID NO: 3561036 - RNA, 20 nt, Human
agaagaauguguuucaaacu

SEQ ID NO: 3561037 - RNA, 17 nt, Human
agaagaauugaacccag

SEQ ID NO: 3561038 - RNA, 22 nt, Human
agaagaauuuucagaccccagc

SEQ ID NO: 3561039 - RNA, 13 nt, Human
agaagacaaaaag

SEQ ID NO: 3561040 - RNA, 15 nt, Human
agaagacaaacugcu

SEQ ID NO: 3561041 - RNA, 14 nt, Human
agaagacaccagag

SEQ ID NO: 3561042 - RNA, 15 nt, Human
agaagacaccagagc

SEQ ID NO: 3561043 - RNA, 16 nt, Human
agaagacaccagagca

SEQ ID NO: 3561044 - RNA, 19 nt, Human
agaagacaccagagcagau

SEQ ID NO: 3561045 - RNA, 22 nt, Human
agaagacaccagagcagaugca

SEQ ID NO: 3561046 - RNA, 21 nt, Human
agaagacacugaugggcaacc

SEQ ID NO: 3561047 - RNA, 13 nt, Human
agaagacaggcug

SEQ ID NO: 3561048 - RNA, 12 nt, Human
agaagacaugaa

SEQ ID NO: 3561049 - RNA, 14 nt, Human
agaagacauggaga

SEQ ID NO: 3561050 - RNA, 15 nt, Human
agaagacauguuuua

SEQ ID NO: 3561051 - RNA, 16 nt, Human
agaagacauguuuuag

SEQ ID NO: 3561052 - RNA, 14 nt, Human
agaagacccuucuc

SEQ ID NO: 3561053 - RNA, 17 nt, Human
agaagaccugagaaugu

SEQ ID NO: 3561054 - RNA, 21 nt, Human
agaagacugcauuauauuuau

SEQ ID NO: 3561055 - RNA, 15 nt, Human
agaagagaaugcaca

SEQ ID NO: 3561056 - RNA, 18 nt, Human
agaagagacucuuugcau

SEQ ID NO: 3561057 - RNA, 15 nt, Human
agaagagagaucaaa

SEQ ID NO: 3561058 - RNA, 13 nt, Human
agaagagaggaga

SEQ ID NO: 3561059 - RNA, 20 nt, Human
agaagagaggagaggagaga

SEQ ID NO: 3561060 - RNA, 22 nt, Human
agaagagaggagaggagagagg

SEQ ID NO: 3561061 - RNA, 20 nt, Human
agaagagaugggcuuguuuu

SEQ ID NO: 3561062 - RNA, 20 nt, Human
agaagagccccacucucaga

SEQ ID NO: 3561063 - RNA, 12 nt, Human
agaagagcgcag

SEQ ID NO: 3561064 - RNA, 18 nt, Human
agcugggccccagcccac

SEQ ID NO: 3561065 - RNA, 20 nt, Human
agcugggccccagcccaccc

SEQ ID NO: 3561066 - RNA, 21 nt, Human
agcugggcccgacauggcucc

SEQ ID NO: 3561067 - RNA, 18 nt, Human
agcugggccgggacccag

SEQ ID NO: 3561068 - RNA, 17 nt, Human
agcugggcuaaguaaau

SEQ ID NO: 3561069 - RNA, 14 nt, Human
agcugggcucugcc

SEQ ID NO: 3561070 - RNA, 16 nt, Human
agcugggcuggggagg

SEQ ID NO: 3561071 - RNA, 20 nt, Human
agcugggcuggggaggaccu

SEQ ID NO: 3561072 - RNA, 15 nt, Human
agcuggggaucccuc

SEQ ID NO: 3561073 - RNA, 20 nt, Human
agcuggggcguggggagggc

SEQ ID NO: 3561074 - RNA, 16 nt, Human
agcugggggccaugag

SEQ ID NO: 3561075 - RNA, 18 nt, Human
agcugggggccaugagcu

SEQ ID NO: 3561076 - RNA, 20 nt, Human
agcugggggccaugagcucc

SEQ ID NO: 3561077 - RNA, 17 nt, Human
agcugggggugggccag

SEQ ID NO: 3561078 - RNA, 22 nt, Human
agcugggugaguggggagacac

SEQ ID NO: 3561079 - RNA, 22 nt, Human
agcugggugucaagagggucug

SEQ ID NO: 3561080 - RNA, 16 nt, Human
agcuggguuggaaaac

SEQ ID NO: 3561081 - RNA, 21 nt, Human
agcugguaguuaguagcaugu

SEQ ID NO: 3561082 - RNA, 16 nt, Human
agcuggucccacucag

SEQ ID NO: 3561083 - RNA, 12 nt, Human
agcuggugcauu

SEQ ID NO: 3561084 - RNA, 14 nt, Human
agcuggugcauuac

SEQ ID NO: 3561085 - RNA, 20 nt, Human
agcuggugcauuacagagag

SEQ ID NO: 3561086 - RNA, 14 nt, Human
agcuggugcccugc

SEQ ID NO: 3561087 - RNA, 15 nt, Human
agcugguggcagagu

SEQ ID NO: 3561088 - RNA, 15 nt, Human
agcuggugggaagcg

SEQ ID NO: 3561089 - RNA, 21 nt, Human
agcuggugggugaaagaaauc

SEQ ID NO: 3561090 - RNA, 23 nt, Human
agcuggugggugaaagaaaucau

SEQ ID NO: 3561091 - RNA, 14 nt, Human
agcugguguagcua

SEQ ID NO: 3561092 - RNA, 21 nt, Human
agcugguguagcuacagagaa

SEQ ID NO: 3561093 - RNA, 22 nt, Human
agcugguguagcuacagagaaa

SEQ ID NO: 3561094 - RNA, 15 nt, Human
agcugguuagaaaug

SEQ ID NO: 3561095 - RNA, 16 nt, Human
agcugguuccugcuag

SEQ ID NO: 3561096 - RNA, 14 nt, Human
agcugguuuuuagc

SEQ ID NO: 3561097 - RNA, 22 nt, Human
agcugguuuuuagcggagacgg

SEQ ID NO: 3561098 - RNA, 22 nt, Human
agcuguaaacuuccaauuucua

SEQ ID NO: 3561099 - RNA, 16 nt, Human
agcuguaacaguucuu

SEQ ID NO: 3561100 - RNA, 17 nt, Human
agcuguaacaguucuuu

SEQ ID NO: 3561101 - RNA, 19 nt, Human
agcuguaaggcaugaagga

SEQ ID NO: 3561102 - RNA, 21 nt, Human
agcuguacuucgucuucuaau

SEQ ID NO: 3561103 - RNA, 20 nt, Human
agcuguaguagcccuuucug

SEQ ID NO: 3561104 - RNA, 21 nt, Human
agcuguaguagcccuuucugu

SEQ ID NO: 3561105 - RNA, 22 nt, Human
agcuguaguagcccuuucugug

SEQ ID NO: 3561106 - RNA, 15 nt, Human
agcugucacaacuug

SEQ ID NO: 3561107 - RNA, 21 nt, Human
agcugucacuucgcgugcccu

SEQ ID NO: 3561108 - RNA, 14 nt, Human
agcuguccccccac

SEQ ID NO: 3561109 - RNA, 16 nt, Human
agcugucccugcccuu

SEQ ID NO: 3561110 - RNA, 14 nt, Human
agcugucccuguca

SEQ ID NO: 3561111 - RNA, 17 nt, Human
agcuguccucccuccac

SEQ ID NO: 3561112 - RNA, 22 nt, Human
agcuguccugcagcaaacacuc

SEQ ID NO: 3561113 - RNA, 18 nt, Human
agcuguccuuuuuccucu

SEQ ID NO: 3561114 - RNA, 20 nt, Human
agcuguccuuuuuccucucc

SEQ ID NO: 3561115 - RNA, 23 nt, Human
agcuguccuuuuuccucuccaca

SEQ ID NO: 3561116 - RNA, 15 nt, Human
agcugucucuaacuu

SEQ ID NO: 3561117 - RNA, 11 nt, Human
agcugucugcu

SEQ ID NO: 3561118 - RNA, 16 nt, Human
agcugucuguggcuuc

SEQ ID NO: 3561119 - RNA, 14 nt, Human
agcugucuuuugga

SEQ ID NO: 3561120 - RNA, 17 nt, Human
agcugugaccucucccc

SEQ ID NO: 3561121 - RNA, 14 nt, Human
agcugugaccugcu

SEQ ID NO: 3561122 - RNA, 15 nt, Human
agcugugagccuugg

SEQ ID NO: 3561123 - RNA, 17 nt, Human
agcugugagccuuggcu

SEQ ID NO: 3561124 - RNA, 12 nt, Human
agcugugauuuu

SEQ ID NO: 3561125 - RNA, 10 nt, Human
agcugugcag

SEQ ID NO: 3561126 - RNA, 18 nt, Human
agcugugccacccugggc

SEQ ID NO: 3561127 - RNA, 20 nt, Human
agcugugccacccugggcuc

SEQ ID NO: 3561128 - RNA, 21 nt, Human
agcugugcucuggacaggcau

SEQ ID NO: 3561129 - RNA, 22 nt, Human
agcuguggaggauugcuaucug

SEQ ID NO: 3561130 - RNA, 20 nt, Human
agcuguguccggcccaguuu

SEQ ID NO: 3561131 - RNA, 24 nt, Human
agcuguguccuugcaccugcaucc

SEQ ID NO: 3561132 - RNA, 23 nt, Human
agcugugugaaauaccagugugg

SEQ ID NO: 3561133 - RNA, 21 nt, Human
ugcaaaaugaggaauguauau

SEQ ID NO: 3561134 - RNA, 21 nt, Human
ugcaaaauuuccaguaccuuu

SEQ ID NO: 3561135 - RNA, 22 nt, Human
ugcaaaauuugaugccaggaca

SEQ ID NO: 3561136 - RNA, 23 nt, Human
ugcaaacacacaaagguauaauu

SEQ ID NO: 3561137 - RNA, 22 nt, Human
ugcaaaccugaccccugcucag

SEQ ID NO: 3561138 - RNA, 17 nt, Human
ugcaaacgcugccugcc

SEQ ID NO: 3561139 - RNA, 16 nt, Human
ugcaaagaaaaucaga

SEQ ID NO: 3561140 - RNA, 23 nt, Human
ugcaaagaaagaaaaaaaaccau

SEQ ID NO: 3561141 - RNA, 15 nt, Human
ugcaaagaggcaaga

SEQ ID NO: 3561142 - RNA, 12 nt, Human
ugcaaagaucug

SEQ ID NO: 3561143 - RNA, 22 nt, Human
ugcaaagcacugacuucuaagu

SEQ ID NO: 3561144 - RNA, 14 nt, Human
ugcaaagcccagcu

SEQ ID NO: 3561145 - RNA, 15 nt, Human
ugcaaagcccagcuu

SEQ ID NO: 3561146 - RNA, 16 nt, Human
ugcaaaggaaauacca

SEQ ID NO: 3561147 - RNA, 12 nt, Human
ugcaaaggcugg

SEQ ID NO: 3561148 - RNA, 13 nt, Human
ugcaaaggcuggg

SEQ ID NO: 3561149 - RNA, 21 nt, Human
ugcaaaggguaucaggugcug

SEQ ID NO: 3561150 - RNA, 13 nt, Human
ugcaaaguacugu

SEQ ID NO: 3561151 - RNA, 14 nt, Human
ugcaaaguacugua

SEQ ID NO: 3561152 - RNA, 22 nt, Human
ugcaaaguauaaauuuguguaa

SEQ ID NO: 3561153 - RNA, 19 nt, Human
ugcaaaguguuuuguacca

SEQ ID NO: 3561154 - RNA, 18 nt, Human
ugcaaauaaguguauuuu

SEQ ID NO: 3561155 - RNA, 17 nt, Human
ugcaaauauaaacaucu

SEQ ID NO: 3561156 - RNA, 18 nt, Human
ugcaaauauuuuuuugua

SEQ ID NO: 3561157 - RNA, 20 nt, Human
ugcaaaucaggcuuuuguuu

SEQ ID NO: 3561158 - RNA, 21 nt, Human
ugcaaauccuaugugauuuua

SEQ ID NO: 3561159 - RNA, 22 nt, Human
ugcaaaugucagauacaaugua

SEQ ID NO: 3561160 - RNA, 13 nt, Human
ugcaacacacaga

SEQ ID NO: 3561161 - RNA, 22 nt, Human
ugcaacacuggucugcuguucc

SEQ ID NO: 3561162 - RNA, 13 nt, Human
ugcaacagacaag

SEQ ID NO: 3561163 - RNA, 17 nt, Human
ugcaacagcacuggcuc

SEQ ID NO: 3561164 - RNA, 13 nt, Human
ugcaacaggcugg

SEQ ID NO: 3561165 - RNA, 13 nt, Human
ugcaacaguagca

SEQ ID NO: 3561166 - RNA, 14 nt, Human
ugcaacaguagcau

SEQ ID NO: 3561167 - RNA, 15 nt, Human
ugcaacaugaugagg

SEQ ID NO: 3561168 - RNA, 21 nt, Human
ugcaaccagggagcugcaggg

SEQ ID NO: 3561169 - RNA, 20 nt, Human
ugcaacccaaggacugaggg

SEQ ID NO: 3561170 - RNA, 15 nt, Human
ugcaacccuuacccc

SEQ ID NO: 3561171 - RNA, 13 nt, Human
ugcaaccuccacc

SEQ ID NO: 3561172 - RNA, 20 nt, Human
ugcaaccuccaccuccuggg

SEQ ID NO: 3561173 - RNA, 18 nt, Human
ugcaaccuccgccucuug

SEQ ID NO: 3561174 - RNA, 14 nt, Human
ugcaaccucgcugg

SEQ ID NO: 3561175 - RNA, 19 nt, Human
ugcaaccucugcuucccag

SEQ ID NO: 3561176 - RNA, 18 nt, Human
ugcaaccucuuggccuga

SEQ ID NO: 3561177 - RNA, 18 nt, Human
ugcaacugacacucccac

SEQ ID NO: 3561178 - RNA, 21 nt, Human
ugcaacuucuuuuuauuuucu

SEQ ID NO: 3561179 - RNA, 14 nt, Human
ugcaacuuggacuu

SEQ ID NO: 3561180 - RNA, 16 nt, Human
ugcaacuuguaaaugu

SEQ ID NO: 3561181 - RNA, 19 nt, Human
ugcaacuuuaagcagcucu

SEQ ID NO: 3561182 - RNA, 22 nt, Human
ugcaagaacucaucacuguggc

SEQ ID NO: 3561183 - RNA, 23 nt, Human
ugcaagagggagcacgugacugu

SEQ ID NO: 3561184 - RNA, 14 nt, Human
ugcaagaugugaau

SEQ ID NO: 3561185 - RNA, 18 nt, Human
ugcaagaugugaauuauu

SEQ ID NO: 3561186 - RNA, 18 nt, Human
ugcaagauucugaaacau

SEQ ID NO: 3561187 - RNA, 15 nt, Human
ugcaagcacagcccu

SEQ ID NO: 3561188 - RNA, 16 nt, Human
ugcaagcacagcccuu

SEQ ID NO: 3561189 - RNA, 16 nt, Human
ugcaagcagaggacca

SEQ ID NO: 3561190 - RNA, 22 nt, Human
ugcaagcagaggaccagggccu

SEQ ID NO: 3561191 - RNA, 15 nt, Human
ugcaagcaguuucaa

SEQ ID NO: 3561192 - RNA, 21 nt, Human
ugcaagcaguuucaauaaagu

SEQ ID NO: 3561193 - RNA, 19 nt, Human
ugcaagccugucugagacu

SEQ ID NO: 3561194 - RNA, 13 nt, Human
ugcaaggcaaaga

SEQ ID NO: 3561195 - RNA, 17 nt, Human
ugcaaggcacuguacua

SEQ ID NO: 3561196 - RNA, 16 nt, Human
ugcaaggcagccgugg

SEQ ID NO: 3561197 - RNA, 17 nt, Human
ugcaaggcccacaggag

SEQ ID NO: 3561198 - RNA, 14 nt, Human
ugcaaggccuuucu

SEQ ID NO: 3561199 - RNA, 20 nt, Human
ugcaagggaguuagggaaau

SEQ ID NO: 3561200 - RNA, 20 nt, Human
ugcaagggcagaacacuaac

SEQ ID NO: 3561201 - RNA, 21 nt, Human
ugcaagggcagaacacuaacc

SEQ ID NO: 3561202 - RNA, 15 nt, Human
ugcaagggcucccca

SEQ ID NO: 3561203 - RNA, 18 nt, Human
ugcaaggggaaaaucuca

SEQ ID NO: 3561204 - RNA, 16 nt, Human
ugcaagguaaaauuuu

SEQ ID NO: 3561205 - RNA, 18 nt, Human
ugcaagguacucugguga

SEQ ID NO: 3561206 - RNA, 22 nt, Human
ugcaagguauuacacucuguaa

SEQ ID NO: 3561207 - RNA, 13 nt, Human
ugcaagguuccac

SEQ ID NO: 3561208 - RNA, 15 nt, Human
ugcaagguuccacag

SEQ ID NO: 3561209 - RNA, 17 nt, Human
ugcaaguauacuaggga

SEQ ID NO: 3561210 - RNA, 15 nt, Human
ugcaaguaugugagu

SEQ ID NO: 3561211 - RNA, 22 nt, Human
ugcaaguaugugagugugucca

SEQ ID NO: 3561212 - RNA, 19 nt, Human
ugcaaguauguuuuagcau

SEQ ID NO: 3561213 - RNA, 21 nt, Human
ugcaaguauguuuuagcaugu

SEQ ID NO: 3561214 - RNA, 22 nt, Human
ugcaaguauguuuuagcaugug

SEQ ID NO: 3561215 - RNA, 15 nt, Human
ugcaaguauucucau

SEQ ID NO: 3561216 - RNA, 12 nt, Human
ugcaagucucuu

SEQ ID NO: 3561217 - RNA, 16 nt, Human
ugcaagugacaucucu

SEQ ID NO: 3561218 - RNA, 23 nt, Human
ugcaagugagcaaaccugcccca

SEQ ID NO: 3561219 - RNA, 18 nt, Human
ugcaagugucugugugca

SEQ ID NO: 3561220 - RNA, 22 nt, Human
ugcaaguguguaugugcgugug

SEQ ID NO: 3561221 - RNA, 23 nt, Human
ugcaagugugugcacaugugugc

SEQ ID NO: 3561222 - RNA, 16 nt, Human
ugcaaguuuaucagua

SEQ ID NO: 3561223 - RNA, 17 nt, Human
ugcaauaaaauggguuu

SEQ ID NO: 3561224 - RNA, 21 nt, Human
ugcaauaaaauggguuuuacu

SEQ ID NO: 3561225 - RNA, 20 nt, Human
ugcaauaaaauuauuugcag

SEQ ID NO: 3561226 - RNA, 22 nt, Human
ugcaauaaaauuauuugcaggu

SEQ ID NO: 3561227 - RNA, 16 nt, Human
ugcaauaaaauuuaaa

SEQ ID NO: 3561228 - RNA, 16 nt, Human
ugcaauaaaguauaau

SEQ ID NO: 3561229 - RNA, 12 nt, Human
ugcaauaacagc

SEQ ID NO: 3561230 - RNA, 16 nt, Human
ugcaauaacuucugac

SEQ ID NO: 3561231 - RNA, 19 nt, Human
ugcaauaacuucugaccuu

SEQ ID NO: 3561232 - RNA, 12 nt, Human
ugcaauaaugca

SEQ ID NO: 3561233 - RNA, 20 nt, Human
ugcaauaaugcaguauggua

SEQ ID NO: 3561234 - RNA, 14 nt, Human
ugcaauacauacca

SEQ ID NO: 3561235 - RNA, 13 nt, Human
ugcaauagaaauc

SEQ ID NO: 3561236 - RNA, 16 nt, Human
ugcaauagaaggugau

SEQ ID NO: 3561237 - RNA, 19 nt, Human
ugcaauagagacuguagau

SEQ ID NO: 3561238 - RNA, 20 nt, Human
ugcaauauacuggaaagcuu

SEQ ID NO: 3561239 - RNA, 22 nt, Human
ugcaauauaucuaaauugaaua

SEQ ID NO: 3561240 - RNA, 14 nt, Human
ugcaauauguauua

SEQ ID NO: 3561241 - RNA, 21 nt, Human
ugcaauauuaaugccuuuaaa

SEQ ID NO: 3561242 - RNA, 16 nt, Human
ugcaaucauaugugau

SEQ ID NO: 3561243 - RNA, 17 nt, Human
ugcaaucauaugugauc

SEQ ID NO: 3561244 - RNA, 22 nt, Human
ugcaaucauaugugaucugucu

SEQ ID NO: 3561245 - RNA, 23 nt, Human
ugcaaucauaugugaucugucuu

SEQ ID NO: 3561246 - RNA, 17 nt, Human
ugcaauccuuacaaaug

SEQ ID NO: 3561247 - RNA, 22 nt, Human
ugcaaugaaagguacuauauuu

SEQ ID NO: 3561248 - RNA, 22 nt, Human
ugcaaugaagucucugaaguga

SEQ ID NO: 3561249 - RNA, 21 nt, Human
ugcaaugacacagucuuggcu

SEQ ID NO: 3561250 - RNA, 17 nt, Human
ugcaaugaccuuucaau

SEQ ID NO: 3561251 - RNA, 19 nt, Human
ugcaaugaccuuucaauag

SEQ ID NO: 3561252 - RNA, 13 nt, Human
ugcaauggcagcc

SEQ ID NO: 3561253 - RNA, 14 nt, Human
ugcaauggcagccu

SEQ ID NO: 3561254 - RNA, 16 nt, Human
ugcaauggcagccuug

SEQ ID NO: 3561255 - RNA, 15 nt, Human
ugcaaugggcacugg

SEQ ID NO: 3561256 - RNA, 19 nt, Human
ugcaauguaucccuucuca

SEQ ID NO: 3561257 - RNA, 16 nt, Human
ugcaaugugcuacuga

SEQ ID NO: 3561258 - RNA, 15 nt, Human
ugcaauguuuuccuu

SEQ ID NO: 3561259 - RNA, 22 nt, Human
ugcaauuaaacuuccaaagaaa

SEQ ID NO: 3561260 - RNA, 24 nt, Human
ugcaauuaaacuuccaaagaaagu

SEQ ID NO: 3561261 - RNA, 20 nt, Human
ugcaauuagguuuuuccuua

SEQ ID NO: 3561262 - RNA, 20 nt, Human
uggggcuagggggagccccu

SEQ ID NO: 3561263 - RNA, 17 nt, Human
uggggcucacacaccug

SEQ ID NO: 3561264 - RNA, 17 nt, Human
uggggcucagagccggg

SEQ ID NO: 3561265 - RNA, 12 nt, Human
uggggcucccag

SEQ ID NO: 3561266 - RNA, 13 nt, Human
uggggcucccagc

SEQ ID NO: 3561267 - RNA, 15 nt, Human
uggggcucccagcca

SEQ ID NO: 3561268 - RNA, 16 nt, Human
uggggcucccgccucc

SEQ ID NO: 3561269 - RNA, 23 nt, Human
uggggcucccgccuccaaccccu

SEQ ID NO: 3561270 - RNA, 21 nt, Human
uggggcuccuuucuccagcca

SEQ ID NO: 3561271 - RNA, 23 nt, Human
uggggcuccuuucuccagccagc

SEQ ID NO: 3561272 - RNA, 13 nt, Human
uggggcucgccau

SEQ ID NO: 3561273 - RNA, 23 nt, Human
uggggcucuaacgccugagccca

SEQ ID NO: 3561274 - RNA, 18 nt, Human
uggggcugaccuuccucg

SEQ ID NO: 3561275 - RNA, 23 nt, Human
uggggcugaccuuccucgcagag

SEQ ID NO: 3561276 - RNA, 22 nt, Human
uggggcugcaccggcuggccug

SEQ ID NO: 3561277 - RNA, 14 nt, Human
uggggcugcuccuc

SEQ ID NO: 3561278 - RNA, 17 nt, Human
uggggcugcuccuccag

SEQ ID NO: 3561279 - RNA, 21 nt, Human
uggggcugcuccuccagggcc

SEQ ID NO: 3561280 - RNA, 13 nt, Human
uggggcuggcuuu

SEQ ID NO: 3561281 - RNA, 18 nt, Human
uggggcuggcuuuucugu

SEQ ID NO: 3561282 - RNA, 16 nt, Human
uggggcuugggggcuc

SEQ ID NO: 3561283 - RNA, 22 nt, Human
ugggggaaagcaaagcacagag

SEQ ID NO: 3561284 - RNA, 17 nt, Human
ugggggagagcaggcug

SEQ ID NO: 3561285 - RNA, 20 nt, Human
ugggggaggggagacuuuga

SEQ ID NO: 3561286 - RNA, 21 nt, Human
ugggggaguagaucuuucuag

SEQ ID NO: 3561287 - RNA, 19 nt, Human
ugggggagucugaagcaga

SEQ ID NO: 3561288 - RNA, 17 nt, Human
ugggggaguuuuccucu

SEQ ID NO: 3561289 - RNA, 20 nt, Human
ugggggaucacagccucuga

SEQ ID NO: 3561290 - RNA, 20 nt, Human
ugggggaugacuagaggcag

SEQ ID NO: 3561291 - RNA, 17 nt, Human
ugggggaugggccugag

SEQ ID NO: 3561292 - RNA, 13 nt, Human
ugggggcaagaag

SEQ ID NO: 3561293 - RNA, 23 nt, Human
ugggggcaagaagaucacgcucc

SEQ ID NO: 3561294 - RNA, 17 nt, Human
ugggggcagccugcgug

SEQ ID NO: 3561295 - RNA, 19 nt, Human
ugggggcagccugcguggc

SEQ ID NO: 3561296 - RNA, 17 nt, Human
ugggggccaccugccug

SEQ ID NO: 3561297 - RNA, 16 nt, Human
ugggggccaugagcuc

SEQ ID NO: 3561298 - RNA, 19 nt, Human
ugggggccccgucucaggu

SEQ ID NO: 3561299 - RNA, 23 nt, Human
ugggggccccgucucaggucuga

SEQ ID NO: 3561300 - RNA, 19 nt, Human
ugggggccugaccuccccc

SEQ ID NO: 3561301 - RNA, 14 nt, Human
ugggggccuggauu

SEQ ID NO: 3561302 - RNA, 17 nt, Human
ugggggccuggcuggcu

SEQ ID NO: 3561303 - RNA, 20 nt, Human
ugggggccuggcuggcugag

SEQ ID NO: 3561304 - RNA, 21 nt, Human
ugggggcggggugggaaagau

SEQ ID NO: 3561305 - RNA, 14 nt, Human
ugggggcuagggag

SEQ ID NO: 3561306 - RNA, 13 nt, Human
ugggggcugcagu

SEQ ID NO: 3561307 - RNA, 19 nt, Human
ugggggcugggcagaggaa

SEQ ID NO: 3561308 - RNA, 13 nt, Human
ugggggcuggugc

SEQ ID NO: 3561309 - RNA, 13 nt, Human
uggggggaacgcc

SEQ ID NO: 3561310 - RNA, 19 nt, Human
uggggggaacgcccacuuc

SEQ ID NO: 3561311 - RNA, 19 nt, Human
uggggggacccagugcaga

SEQ ID NO: 3561312 - RNA, 11 nt, Human
uggggggaggc

SEQ ID NO: 3561313 - RNA, 13 nt, Human
uggggggaggcug

SEQ ID NO: 3561314 - RNA, 15 nt, Human
uggggggcauugagu

SEQ ID NO: 3561315 - RNA, 13 nt, Human
uggggggggugcu

SEQ ID NO: 3561316 - RNA, 23 nt, Human
uggggggguggccgcugaguggc

SEQ ID NO: 3561317 - RNA, 20 nt, Human
uggggggugaugagggcagc

SEQ ID NO: 3561318 - RNA, 16 nt, Human
ugggggguggccaggc

SEQ ID NO: 3561319 - RNA, 20 nt, Human
uggggguaaaaaauauagcc

SEQ ID NO: 3561320 - RNA, 21 nt, Human
uggggguagagcugauccaga

SEQ ID NO: 3561321 - RNA, 16 nt, Human
uggggguagcagcugg

SEQ ID NO: 3561322 - RNA, 18 nt, Human
ugggggucagugcugccu

SEQ ID NO: 3561323 - RNA, 14 nt, Human
ugggggucugugug

SEQ ID NO: 3561324 - RNA, 15 nt, Human
ugggggugcauuuga

SEQ ID NO: 3561325 - RNA, 19 nt, Human
uggggguucuuucuuccuc

SEQ ID NO: 3561326 - RNA, 22 nt, Human
uggggguucuuucuuccucugc

SEQ ID NO: 3561327 - RNA, 16 nt, Human
ugggguacccacugcu

SEQ ID NO: 3561328 - RNA, 16 nt, Human
ugggguagggcugacu

SEQ ID NO: 3561329 - RNA, 20 nt, Human
uggggucaagaaacagccag

SEQ ID NO: 3561330 - RNA, 21 nt, Human
uggggucaagaaacagccagc

SEQ ID NO: 3561331 - RNA, 17 nt, Human
uggggucagagacugcu

SEQ ID NO: 3561332 - RNA, 19 nt, Human
uggggucagccagggccag

SEQ ID NO: 3561333 - RNA, 22 nt, Human
uggggucaggccgggcagagca

SEQ ID NO: 3561334 - RNA, 18 nt, Human
uggggucaugcccuccuc

SEQ ID NO: 3561335 - RNA, 20 nt, Human
uggggucaugcccuccucuc

SEQ ID NO: 3561336 - RNA, 21 nt, Human
uggggucccagcagcugccag

SEQ ID NO: 3561337 - RNA, 12 nt, Human
ugggguccccag

SEQ ID NO: 3561338 - RNA, 13 nt, Human
ugggguccccauc

SEQ ID NO: 3561339 - RNA, 13 nt, Human
uggggucccucua

SEQ ID NO: 3561340 - RNA, 12 nt, Human
ugggguccuggc

SEQ ID NO: 3561341 - RNA, 19 nt, Human
uggggucuacacugcaauc

SEQ ID NO: 3561342 - RNA, 21 nt, Human
uggggucucacaguguugccc

SEQ ID NO: 3561343 - RNA, 19 nt, Human
uggggucucccucuccugc

SEQ ID NO: 3561344 - RNA, 21 nt, Human
uggggucucccucuccugccu

SEQ ID NO: 3561345 - RNA, 19 nt, Human
uggggucuccucaggacca

SEQ ID NO: 3561346 - RNA, 22 nt, Human
uggggucuccucaggaccaggg

SEQ ID NO: 3561347 - RNA, 21 nt, Human
uggggucuggaguugaucugg

SEQ ID NO: 3561348 - RNA, 14 nt, Human
uggggucuggcagc

SEQ ID NO: 3561349 - RNA, 16 nt, Human
uggggucuguaaaauc

SEQ ID NO: 3561350 - RNA, 12 nt, Human
uggggugacagu

SEQ ID NO: 3561351 - RNA, 15 nt, Human
uggggugacagucau

SEQ ID NO: 3561352 - RNA, 17 nt, Human
uggggugacagucauca

SEQ ID NO: 3561353 - RNA, 19 nt, Human
uggggugcccuccacugcc

SEQ ID NO: 3561354 - RNA, 15 nt, Human
uggggugccgccugc

SEQ ID NO: 3561355 - RNA, 17 nt, Human
uggggugccgccugccc

SEQ ID NO: 3561356 - RNA, 14 nt, Human
ugggguggcugcag

SEQ ID NO: 3561357 - RNA, 20 nt, Human
ugggguggcugcagccucag

SEQ ID NO: 3561358 - RNA, 21 nt, Human
ugggguggggggggguccuaa

SEQ ID NO: 3561359 - RNA, 18 nt, Human
ugggguuaucucuguguu

SEQ ID NO: 3561360 - RNA, 19 nt, Human
ugggguuaucucuguguua

SEQ ID NO: 3561361 - RNA, 14 nt, Human
ugggguucagcccc

SEQ ID NO: 3561362 - RNA, 19 nt, Human
ugggguuuaucagaauucu

SEQ ID NO: 3561363 - RNA, 16 nt, Human
uggguaaaauacuuuu

SEQ ID NO: 3561364 - RNA, 15 nt, Human
uggguaaaugcaaag

SEQ ID NO: 3561365 - RNA, 23 nt, Human
uggguaauccaggcacagcugag

SEQ ID NO: 3561366 - RNA, 15 nt, Human
uggguacagagaggu

SEQ ID NO: 3561367 - RNA, 19 nt, Human
uggguacuucuugaaggug

SEQ ID NO: 3561368 - RNA, 18 nt, Human
uggguaggguaaaucagu

SEQ ID NO: 3561369 - RNA, 14 nt, Human
uggguauaaaagau

SEQ ID NO: 3561370 - RNA, 18 nt, Human
uggguauagauguugcua

SEQ ID NO: 3561371 - RNA, 19 nt, Human
uggguauauucauuucaaa

SEQ ID NO: 3561372 - RNA, 22 nt, Human
uggguaucaccacuggagauca

SEQ ID NO: 3561373 - RNA, 14 nt, Human
uggguauguguagg

SEQ ID NO: 3561374 - RNA, 13 nt, Human
ugggucaaggaau

SEQ ID NO: 3561375 - RNA, 21 nt, Human
ugggucaccagacggggcugg

SEQ ID NO: 3561376 - RNA, 23 nt, Human
ugggucaguguccaaagcagggu

SEQ ID NO: 3561377 - RNA, 22 nt, Human
ugggucaugaugcucuuuccca

SEQ ID NO: 3561378 - RNA, 13 nt, Human
uggguccaaauaa

SEQ ID NO: 3561379 - RNA, 18 nt, Human
uggguccaaauaaaaacu

SEQ ID NO: 3561380 - RNA, 20 nt, Human
uggguccaggauuccucuuu

SEQ ID NO: 3561381 - RNA, 17 nt, Human
uggguccaugggcagag

SEQ ID NO: 3561382 - RNA, 20 nt, Human
ugggucccacuuccccuccu

SEQ ID NO: 3561383 - RNA, 13 nt, Human
ugggucccaggac

SEQ ID NO: 3561384 - RNA, 16 nt, Human
uggguccccagcccuu

SEQ ID NO: 3561385 - RNA, 22 nt, Human
ugggucccccucagcaagcccu

SEQ ID NO: 3561386 - RNA, 19 nt, Human
ugggucccggcucuguggg

SEQ ID NO: 3561387 - RNA, 18 nt, Human
uggguccgauaauaucuu

SEQ ID NO: 3561388 - RNA, 16 nt, Human
ugggucgcccaugaga

SEQ ID NO: 3561389 - RNA, 16 nt, Human
ugggucgcccuggacu

SEQ ID NO: 3561390 - RNA, 21 nt, Human
ugggucgcccuggacugugug

SEQ ID NO: 3561391 - RNA, 21 nt, Human
ugggucuaggacacaguuccu

SEQ ID NO: 3561392 - RNA, 22 nt, Human
ugggucucgcuuuguugcccag

SEQ ID NO: 3561393 - RNA, 18 nt, Human
ugggucucucuugcccca

SEQ ID NO: 3561394 - RNA, 21 nt, Human
ugggucucucuugccccaccu

SEQ ID NO: 3561395 - RNA, 13 nt, Human
ugggucuggagga

SEQ ID NO: 3561396 - RNA, 21 nt, Human
ugggucuggaggaccugcccg

SEQ ID NO: 3561397 - RNA, 17 nt, Human
ugggucuggcugagcug

SEQ ID NO: 3561398 - RNA, 20 nt, Human
ugggucugugucucuuuucu

SEQ ID NO: 3561399 - RNA, 12 nt, Human
ugggucugugug

SEQ ID NO: 3561400 - RNA, 14 nt, Human
ugggucuuccaggg

SEQ ID NO: 3561401 - RNA, 15 nt, Human
ugggugaagacagag

SEQ ID NO: 3561402 - RNA, 18 nt, Human
ugggugacaagagccuga

SEQ ID NO: 3561403 - RNA, 17 nt, Human
ugggugacagagcaaga

SEQ ID NO: 3561404 - RNA, 21 nt, Human
ugggugagaugcuggagaaga

SEQ ID NO: 3561405 - RNA, 18 nt, Human
ugggugcccacagcccgc

SEQ ID NO: 3561406 - RNA, 16 nt, Human
aagcugugccacccug

SEQ ID NO: 3561407 - RNA, 23 nt, Human
aagcugugucugcccaaugaaua

SEQ ID NO: 3561408 - RNA, 14 nt, Human
aagcuguuaaacug

SEQ ID NO: 3561409 - RNA, 15 nt, Human
aagcuguuaaacugu

SEQ ID NO: 3561410 - RNA, 17 nt, Human
aagcuguuaaacuguua

SEQ ID NO: 3561411 - RNA, 12 nt, Human
aagcuguuguac

SEQ ID NO: 3561412 - RNA, 14 nt, Human
aagcuguuuggaaa

SEQ ID NO: 3561413 - RNA, 19 nt, Human
aagcuguuugguuuuaaaa

SEQ ID NO: 3561414 - RNA, 13 nt, Human
aagcuuaaaacuu

SEQ ID NO: 3561415 - RNA, 17 nt, Human
aagcuuaaaacuuugaa

SEQ ID NO: 3561416 - RNA, 10 nt, Human
aagcuuagaa

SEQ ID NO: 3561417 - RNA, 20 nt, Human
aagcuuagcaggagaggaga

SEQ ID NO: 3561418 - RNA, 13 nt, Human
aagcuuaggcagg

SEQ ID NO: 3561419 - RNA, 18 nt, Human
aagcuuauccauaaaaaa

SEQ ID NO: 3561420 - RNA, 14 nt, Human
aagcuuauuaaugc

SEQ ID NO: 3561421 - RNA, 16 nt, Human
aagcuuauuaaugcua

SEQ ID NO: 3561422 - RNA, 13 nt, Human
uggugccccagga

SEQ ID NO: 3561423 - RNA, 20 nt, Human
uggugccccaggaccagcuc

SEQ ID NO: 3561424 - RNA, 14 nt, Human
uggugcccugcuuu

SEQ ID NO: 3561425 - RNA, 19 nt, Human
uggugcccugcuuucagau

SEQ ID NO: 3561426 - RNA, 19 nt, Human
uggugcccuggaugcccag

SEQ ID NO: 3561427 - RNA, 19 nt, Human
uggugccuaguauugacaa

SEQ ID NO: 3561428 - RNA, 10 nt, Human
uggugccuga

SEQ ID NO: 3561429 - RNA, 13 nt, Human
uggugccugagag

SEQ ID NO: 3561430 - RNA, 17 nt, Human
uggugccuggccuggca

SEQ ID NO: 3561431 - RNA, 22 nt, Human
uggugccuggccuggcacacau

SEQ ID NO: 3561432 - RNA, 23 nt, Human
uggugccuggccuggcacacauc

SEQ ID NO: 3561433 - RNA, 14 nt, Human
uggugccuucauuu

SEQ ID NO: 3561434 - RNA, 13 nt, Human
uggugccuuuccu

SEQ ID NO: 3561435 - RNA, 19 nt, Human
uggugccuuuccuguucag

SEQ ID NO: 3561436 - RNA, 22 nt, Human
uggugccuuuccuguucagcau

SEQ ID NO: 3561437 - RNA, 16 nt, Human
uggugcgaucuggguu

SEQ ID NO: 3561438 - RNA, 14 nt, Human
uggugcggcuggcc

SEQ ID NO: 3561439 - RNA, 16 nt, Human
uggugcggcuggccau

SEQ ID NO: 3561440 - RNA, 16 nt, Human
uggugcuacgccugca

SEQ ID NO: 3561441 - RNA, 23 nt, Human
uggugcuauaggcuggagaagcu

SEQ ID NO: 3561442 - RNA, 17 nt, Human
uggugcucaguuguaga

SEQ ID NO: 3561443 - RNA, 14 nt, Human
uggugcucauuuca

SEQ ID NO: 3561444 - RNA, 13 nt, Human
uggugcugaccuc

SEQ ID NO: 3561445 - RNA, 15 nt, Human
uggugcugagaagcu

SEQ ID NO: 3561446 - RNA, 23 nt, Human
uggugcugaguagaugcgcagcc

SEQ ID NO: 3561447 - RNA, 18 nt, Human
uggugcuggauauuuuca

SEQ ID NO: 3561448 - RNA, 13 nt, Human
uggugcugggacu

SEQ ID NO: 3561449 - RNA, 14 nt, Human
uggugcugggacug

SEQ ID NO: 3561450 - RNA, 16 nt, Human
uggugcugggacugag

SEQ ID NO: 3561451 - RNA, 19 nt, Human
uggugcugggacugagcca

SEQ ID NO: 3561452 - RNA, 13 nt, Human
uggugcugggaga

SEQ ID NO: 3561453 - RNA, 17 nt, Human
uggugcuguggccaggg

SEQ ID NO: 3561454 - RNA, 16 nt, Human
uggugcuuaaguucca

SEQ ID NO: 3561455 - RNA, 19 nt, Human
ugguggaagaggggacagg

SEQ ID NO: 3561456 - RNA, 17 nt, Human
ugguggacaguccuggg

SEQ ID NO: 3561457 - RNA, 21 nt, Human
ugguggagaggcccggccucu

SEQ ID NO: 3561458 - RNA, 21 nt, Human
ugguggaugauccccacgcca

SEQ ID NO: 3561459 - RNA, 15 nt, Human
ugguggauguaaaua

SEQ ID NO: 3561460 - RNA, 19 nt, Human
ugguggcaacauucauugc

SEQ ID NO: 3561461 - RNA, 17 nt, Human
ugguggcacugagcccc

SEQ ID NO: 3561462 - RNA, 15 nt, Human
ugguggcagagugga

SEQ ID NO: 3561463 - RNA, 19 nt, Human
ugguggcagauuuuacaaa

SEQ ID NO: 3561464 - RNA, 13 nt, Human
ugguggcagcugc

SEQ ID NO: 3561465 - RNA, 12 nt, Human
ugguggcagugg

SEQ ID NO: 3561466 - RNA, 18 nt, Human
ugguggcagugggagcug

SEQ ID NO: 3561467 - RNA, 19 nt, Human
ugguggcccucuccccugc

SEQ ID NO: 3561468 - RNA, 10 nt, Human
ugguggccuc

SEQ ID NO: 3561469 - RNA, 21 nt, Human
ugguggccucugccccgucuc

SEQ ID NO: 3561470 - RNA, 15 nt, Human
ugguggccugguccc

SEQ ID NO: 3561471 - RNA, 13 nt, Human
ugguggcuuugca

SEQ ID NO: 3561472 - RNA, 12 nt, Human
uggugggagggg

SEQ ID NO: 3561473 - RNA, 17 nt, Human
uggugggcauucucucu

SEQ ID NO: 3561474 - RNA, 18 nt, Human
uggugggcuucagggcag

SEQ ID NO: 3561475 - RNA, 20 nt, Human
ugguggggaggggcgcuggc

SEQ ID NO: 3561476 - RNA, 18 nt, Human
uggugggggccucggugu

SEQ ID NO: 3561477 - RNA, 17 nt, Human
ugguggggucuccucag

SEQ ID NO: 3561478 - RNA, 17 nt, Human
ugguggguccaugggca

SEQ ID NO: 3561479 - RNA, 18 nt, Human
ugguggguccaugggcag

SEQ ID NO: 3561480 - RNA, 21 nt, Human
ugguggguucaggggacucag

SEQ ID NO: 3561481 - RNA, 17 nt, Human
uggugguaacccuggug

SEQ ID NO: 3561482 - RNA, 14 nt, Human
uggugguagagaag

SEQ ID NO: 3561483 - RNA, 16 nt, Human
uggugguauuuucaau

SEQ ID NO: 3561484 - RNA, 15 nt, Human
ugguggucccugggu

SEQ ID NO: 3561485 - RNA, 15 nt, Human
ugguggucuguuggc

SEQ ID NO: 3561486 - RNA, 14 nt, Human
uggugguugcuguu

SEQ ID NO: 3561487 - RNA, 17 nt, Human
uggugguuucagaaaug

SEQ ID NO: 3561488 - RNA, 19 nt, Human
uggugguuuucuguucuuu

SEQ ID NO: 3561489 - RNA, 23 nt, Human
ugguguaaccugagauggcccuc

SEQ ID NO: 3561490 - RNA, 15 nt, Human
ugguguaauaagaca

SEQ ID NO: 3561491 - RNA, 15 nt, Human
ugguguagaacacua

SEQ ID NO: 3561492 - RNA, 17 nt, Human
ugguguagaacacuaau

SEQ ID NO: 3561493 - RNA, 15 nt, Human
ugguguagcuacaga

SEQ ID NO: 3561494 - RNA, 18 nt, Human
ugguguagcuacagagaa

SEQ ID NO: 3561495 - RNA, 22 nt, Human
ugguguagcuacagagaaacca

SEQ ID NO: 3561496 - RNA, 21 nt, Human
uggugucaccccagagccaca

SEQ ID NO: 3561497 - RNA, 15 nt, Human
uggugucacuguccc

SEQ ID NO: 3561498 - RNA, 18 nt, Human
uggugucagacccuggag

SEQ ID NO: 3561499 - RNA, 19 nt, Human
uggugucagacccuggagg

SEQ ID NO: 3561500 - RNA, 17 nt, Human
uggugucauagaauagc

SEQ ID NO: 3561501 - RNA, 17 nt, Human
ugguguccaccuggccc

SEQ ID NO: 3561502 - RNA, 21 nt, Human
ugguguccagacagagcccug

SEQ ID NO: 3561503 - RNA, 20 nt, Human
ugguguccugaccacccucc

SEQ ID NO: 3561504 - RNA, 21 nt, Human
ugguguccugaccacccuccc

SEQ ID NO: 3561505 - RNA, 21 nt, Human
uggugucgcgccuucuccccc

SEQ ID NO: 3561506 - RNA, 18 nt, Human
uggugucgggcaugacac

SEQ ID NO: 3561507 - RNA, 19 nt, Human
uggugucgggcaugacacg

SEQ ID NO: 3561508 - RNA, 11 nt, Human
uggugucucca

SEQ ID NO: 3561509 - RNA, 13 nt, Human
uggugucugccug

SEQ ID NO: 3561510 - RNA, 19 nt, Human
uggugucuggauucccagg

SEQ ID NO: 3561511 - RNA, 22 nt, Human
uggugugaacuaaacuuucaca

SEQ ID NO: 3561512 - RNA, 16 nt, Human
ugguguggcaaagccu

SEQ ID NO: 3561513 - RNA, 15 nt, Human
ugguguggccugugg

SEQ ID NO: 3561514 - RNA, 16 nt, Human
ugguguggguguccug

SEQ ID NO: 3561515 - RNA, 23 nt, Human
ugguguggguguccugccugucu

SEQ ID NO: 3561516 - RNA, 17 nt, Human
uggugugguacagagaa

SEQ ID NO: 3561517 - RNA, 18 nt, Human
uggugugguacagagaag

SEQ ID NO: 3561518 - RNA, 20 nt, Human
uggugugguacagagaagcc

SEQ ID NO: 3561519 - RNA, 21 nt, Human
uggugugguacagagaagcca

SEQ ID NO: 3561520 - RNA, 19 nt, Human
uggugugucccccucuguc

SEQ ID NO: 3561521 - RNA, 16 nt, Human
ugguguguuggacaga

SEQ ID NO: 3561522 - RNA, 22 nt, Human
ugguguuaaaacacuucugucc

SEQ ID NO: 3561523 - RNA, 14 nt, Human
ugguguuaacagaa

SEQ ID NO: 3561524 - RNA, 18 nt, Human
ugguguuacugcaguuga

SEQ ID NO: 3561525 - RNA, 19 nt, Human
ugguguuagggugcagcca

SEQ ID NO: 3561526 - RNA, 21 nt, Human
ugguguucaaaaaacuuguaa

SEQ ID NO: 3561527 - RNA, 20 nt, Human
ugguguugccaguuguccuc

SEQ ID NO: 3561528 - RNA, 17 nt, Human
ugguguuuccuggcacu

SEQ ID NO: 3561529 - RNA, 21 nt, Human
ugguguuuuaaagagaaugua

SEQ ID NO: 3561530 - RNA, 19 nt, Human
ugguguuuuggauuuggag

SEQ ID NO: 3561531 - RNA, 13 nt, Human
ugguuaagagucc

SEQ ID NO: 3561532 - RNA, 14 nt, Human
ugguuaagagucca

SEQ ID NO: 3561533 - RNA, 17 nt, Human
ugguuaagaguccaaga

SEQ ID NO: 3561534 - RNA, 13 nt, Human
ugguuaaugccau

SEQ ID NO: 3561535 - RNA, 14 nt, Human
ugguuacuucuucu

SEQ ID NO: 3561536 - RNA, 17 nt, Human
uguacaguuaucuaagu

SEQ ID NO: 3561537 - RNA, 18 nt, Human
uguacaguuaucuaaguu

SEQ ID NO: 3561538 - RNA, 17 nt, Human
uguacaguuauuuaugc

SEQ ID NO: 3561539 - RNA, 15 nt, Human
uguacaguuugcugu

SEQ ID NO: 3561540 - RNA, 13 nt, Human
uguacaguuuguu

SEQ ID NO: 3561541 - RNA, 16 nt, Human
uguacaguuuguuuac

SEQ ID NO: 3561542 - RNA, 17 nt, Human
uguacaguuuguuuaca

SEQ ID NO: 3561543 - RNA, 19 nt, Human
uguacauaaacaaugaugc

SEQ ID NO: 3561544 - RNA, 14 nt, Human
uguacauaacucug

SEQ ID NO: 3561545 - RNA, 23 nt, Human
uguacauaacucuguaaaaacac

SEQ ID NO: 3561546 - RNA, 20 nt, Human
uguacauaaugcgugcauac

SEQ ID NO: 3561547 - RNA, 23 nt, Human
uguacauaaugcuuaauuucuaa

SEQ ID NO: 3561548 - RNA, 21 nt, Human
uguacauacccuggccgcccc

SEQ ID NO: 3561549 - RNA, 21 nt, Human
uguacauacgauuuaagguau

SEQ ID NO: 3561550 - RNA, 20 nt, Human
uguacauacuuuuuggguuu

SEQ ID NO: 3561551 - RNA, 14 nt, Human
uguacauagauuua

SEQ ID NO: 3561552 - RNA, 21 nt, Human
uguacauagugcuaacaugaa

SEQ ID NO: 3561553 - RNA, 16 nt, Human
uguacauaguguaaug

SEQ ID NO: 3561554 - RNA, 13 nt, Human
uguacauauguaa

SEQ ID NO: 3561555 - RNA, 16 nt, Human
uguacauauguaaaau

SEQ ID NO: 3561556 - RNA, 19 nt, Human
uguacauauguaaaauaaa

SEQ ID NO: 3561557 - RNA, 15 nt, Human
uguacauaugugcug

SEQ ID NO: 3561558 - RNA, 17 nt, Human
uguacaucccauguaac

SEQ ID NO: 3561559 - RNA, 15 nt, Human
uguacaucuggcuua

SEQ ID NO: 3561560 - RNA, 17 nt, Human
uguacaucuggcuuauu

SEQ ID NO: 3561561 - RNA, 18 nt, Human
uguacaugaaaacacauu

SEQ ID NO: 3561562 - RNA, 23 nt, Human
uguacaugggacuaugcuuuucu

SEQ ID NO: 3561563 - RNA, 14 nt, Human
uguacauguauuaa

SEQ ID NO: 3561564 - RNA, 21 nt, Human
uguacauuuaugauuuaauaa

SEQ ID NO: 3561565 - RNA, 20 nt, Human
uguacauuucacaggcuaau

SEQ ID NO: 3561566 - RNA, 18 nt, Human
uguacauuuccaaauuca

SEQ ID NO: 3561567 - RNA, 21 nt, Human
uguacauuuccaaauucacaa

SEQ ID NO: 3561568 - RNA, 12 nt, Human
uguacauuucua

SEQ ID NO: 3561569 - RNA, 15 nt, Human
uguacauuucuaagu

SEQ ID NO: 3561570 - RNA, 19 nt, Human
uguacauuucuaagucaaa

SEQ ID NO: 3561571 - RNA, 16 nt, Human
uguacauuucuauaaa

SEQ ID NO: 3561572 - RNA, 13 nt, Human
uguacauuucuga

SEQ ID NO: 3561573 - RNA, 16 nt, Human
uguacauuuuguugua

SEQ ID NO: 3561574 - RNA, 17 nt, Human
uguacauuuuguuguaa

SEQ ID NO: 3561575 - RNA, 17 nt, Human
uguaccaaaauuuuaaa

SEQ ID NO: 3561576 - RNA, 14 nt, Human
uguaccaagugaaa

SEQ ID NO: 3561577 - RNA, 17 nt, Human
uguaccacuuuugcaaa

SEQ ID NO: 3561578 - RNA, 17 nt, Human
uguaccagcccagaugu

SEQ ID NO: 3561579 - RNA, 20 nt, Human
uguaccagugaauuuuugca

SEQ ID NO: 3561580 - RNA, 21 nt, Human
uguaccagugaauuuuugcaa

SEQ ID NO: 3561581 - RNA, 22 nt, Human
uguaccagugaauuuuugcaau

SEQ ID NO: 3561582 - RNA, 11 nt, Human
uguaccaguua

SEQ ID NO: 3561583 - RNA, 12 nt, Human
uguaccaguuaa

SEQ ID NO: 3561584 - RNA, 14 nt, Human
uguaccaguuaauu

SEQ ID NO: 3561585 - RNA, 13 nt, Human
uguaccauuaaaa

SEQ ID NO: 3561586 - RNA, 23 nt, Human
uguaccauuaaaauaugcacuaa

SEQ ID NO: 3561587 - RNA, 16 nt, Human
uguacccaccgggcca

SEQ ID NO: 3561588 - RNA, 16 nt, Human
uguaccccccaacccc

SEQ ID NO: 3561589 - RNA, 12 nt, Human
uguacccuuaag

SEQ ID NO: 3561590 - RNA, 22 nt, Human
uguacccuuaagucacccuagc

SEQ ID NO: 3561591 - RNA, 21 nt, Human
uguaccgcgucuacccuggga

SEQ ID NO: 3561592 - RNA, 22 nt, Human
uguaccgcgucuacccugggau

SEQ ID NO: 3561593 - RNA, 19 nt, Human
uguaccuccucucaguguu

SEQ ID NO: 3561594 - RNA, 14 nt, Human
uguaccucugccuc

SEQ ID NO: 3561595 - RNA, 17 nt, Human
uguaccucuggcugacu

SEQ ID NO: 3561596 - RNA, 23 nt, Human
uguaccucuugagccuugaacuu

SEQ ID NO: 3561597 - RNA, 18 nt, Human
uguaccuggugaccccuu

SEQ ID NO: 3561598 - RNA, 17 nt, Human
uguaccuguuccuuaga

SEQ ID NO: 3561599 - RNA, 22 nt, Human
uguaccuuuuaacaccugaugu

SEQ ID NO: 3561600 - RNA, 23 nt, Human
uguaccuuuuaacaccugaugug

SEQ ID NO: 3561601 - RNA, 22 nt, Human
uguacgaagaguauuuuugaca

SEQ ID NO: 3561602 - RNA, 23 nt, Human
uguacgacacggguggggaaagg

SEQ ID NO: 3561603 - RNA, 16 nt, Human
uguacgucugacaggc

SEQ ID NO: 3561604 - RNA, 15 nt, Human
uguacuaaagccaaa

SEQ ID NO: 3561605 - RNA, 21 nt, Human
uguacuaauuaacauauaaua

SEQ ID NO: 3561606 - RNA, 19 nt, Human
uguacuaguacuguguacu

SEQ ID NO: 3561607 - RNA, 20 nt, Human
uguacuauaacauagaauug

SEQ ID NO: 3561608 - RNA, 18 nt, Human
uguacuaucuuaucucag

SEQ ID NO: 3561609 - RNA, 14 nt, Human
uguacuauuuaacu

SEQ ID NO: 3561610 - RNA, 12 nt, Human
uguacucccagg

SEQ ID NO: 3561611 - RNA, 19 nt, Human
uguacucuggggugcugcc

SEQ ID NO: 3561612 - RNA, 14 nt, Human
uguacucuuccgaa

SEQ ID NO: 3561613 - RNA, 14 nt, Human
uguacugaaguaaa

SEQ ID NO: 3561614 - RNA, 14 nt, Human
uguacugaauuuuu

SEQ ID NO: 3561615 - RNA, 15 nt, Human
uguacugacuugagg

SEQ ID NO: 3561616 - RNA, 20 nt, Human
uguacugagccuuguaauuc

SEQ ID NO: 3561617 - RNA, 17 nt, Human
uguacugauuucaguaa

SEQ ID NO: 3561618 - RNA, 20 nt, Human
uguacugcucaggcugcagc

SEQ ID NO: 3561619 - RNA, 12 nt, Human
uguacuggagag

SEQ ID NO: 3561620 - RNA, 13 nt, Human
uguacuggggguu

SEQ ID NO: 3561621 - RNA, 18 nt, Human
uguacuguaaagagaccu

SEQ ID NO: 3561622 - RNA, 17 nt, Human
uguacuuccugaguggc

SEQ ID NO: 3561623 - RNA, 21 nt, Human
uguacuucgucuucuaauuuc

SEQ ID NO: 3561624 - RNA, 16 nt, Human
uguacuucuugaauau

SEQ ID NO: 3561625 - RNA, 19 nt, Human
uguacuugcucuugaugcc

SEQ ID NO: 3561626 - RNA, 23 nt, Human
uguacuugcucuugaugccuggc

SEQ ID NO: 3561627 - RNA, 15 nt, Human
uguacuugucaaaga

SEQ ID NO: 3561628 - RNA, 14 nt, Human
uguacuuguuugca

SEQ ID NO: 3561629 - RNA, 19 nt, Human
uguacuuuaucaugaaugc

SEQ ID NO: 3561630 - RNA, 13 nt, Human
uguacuuucuguu

SEQ ID NO: 3561631 - RNA, 15 nt, Human
uguacuuucuguuaa

SEQ ID NO: 3561632 - RNA, 19 nt, Human
uguacuuugauucacaugu

SEQ ID NO: 3561633 - RNA, 11 nt, Human
uguacuuugug

SEQ ID NO: 3561634 - RNA, 16 nt, Human
uguacuuuuaaggcag

SEQ ID NO: 3561635 - RNA, 15 nt, Human
uguacuuuuuaguaa

SEQ ID NO: 3561636 - RNA, 15 nt, Human
uguacuuuuuggcau

SEQ ID NO: 3561637 - RNA, 16 nt, Human
uguacuuuuuggcaua

SEQ ID NO: 3561638 - RNA, 18 nt, Human
uguagaaaagggaacuga

SEQ ID NO: 3561639 - RNA, 20 nt, Human
uguagaaaagggaacugaac

SEQ ID NO: 3561640 - RNA, 21 nt, Human
uguagaaaugaugauguggaa

SEQ ID NO: 3561641 - RNA, 17 nt, Human
uguagaacucacucugg

SEQ ID NO: 3561642 - RNA, 21 nt, Human
uguagaacucacucugggcug

SEQ ID NO: 3561643 - RNA, 13 nt, Human
uguagaagcauuc

SEQ ID NO: 3561644 - RNA, 15 nt, Human
uguagaagcauuccu

SEQ ID NO: 3561645 - RNA, 13 nt, Human
uguagaaggcaca

SEQ ID NO: 3561646 - RNA, 21 nt, Human
uguagaagucacauuccugaa

SEQ ID NO: 3561647 - RNA, 15 nt, Human
uguagaauauucaga

SEQ ID NO: 3561648 - RNA, 16 nt, Human
uguagacuauauacau

SEQ ID NO: 3561649 - RNA, 17 nt, Human
uguagacuauauacaug

SEQ ID NO: 3561650 - RNA, 20 nt, Human
uguagacuauauacaugugu

SEQ ID NO: 3561651 - RNA, 23 nt, Human
uguagacuauauacaugugugua

SEQ ID NO: 3561652 - RNA, 14 nt, Human
uguagacuguggcu

SEQ ID NO: 3561653 - RNA, 17 nt, Human
uguagagaaaacaugca

SEQ ID NO: 3561654 - RNA, 19 nt, Human
uguagagaaaacaugcaga

SEQ ID NO: 3561655 - RNA, 16 nt, Human
uguagagccagggucu

SEQ ID NO: 3561656 - RNA, 13 nt, Human
uguagagugggag

SEQ ID NO: 3561657 - RNA, 15 nt, Human
uguagaguuaagaag

SEQ ID NO: 3561658 - RNA, 16 nt, Human
uguagaguuaagaagc

SEQ ID NO: 3561659 - RNA, 21 nt, Human
uguagaguuaagaagcuguug

SEQ ID NO: 3561660 - RNA, 18 nt, Human
uguagauacaaucagcug

SEQ ID NO: 3561661 - RNA, 20 nt, Human
uguagauacaaucagcugcu

SEQ ID NO: 3561662 - RNA, 21 nt, Human
uguagauacaaucagcugcuu

SEQ ID NO: 3561663 - RNA, 19 nt, Human
uguagauauugugaaguac

SEQ ID NO: 3561664 - RNA, 22 nt, Human
uguagauauugugaaguacaua

SEQ ID NO: 3561665 - RNA, 15 nt, Human
uguagauauuuggcu

SEQ ID NO: 3561666 - RNA, 17 nt, Human
uguagauauuuggcuua

SEQ ID NO: 3561667 - RNA, 20 nt, Human
uguagaucaacucauguuaa

SEQ ID NO: 3561668 - RNA, 11 nt, Human
uguagaugaaa

SEQ ID NO: 3561669 - RNA, 13 nt, Human
uguagaugaaaaa

SEQ ID NO: 3561670 - RNA, 23 nt, Human
uguagaugaaaaagcauguacag

SEQ ID NO: 3561671 - RNA, 15 nt, Human
uguagaugauguauu

SEQ ID NO: 3561672 - RNA, 16 nt, Human
uguagauggaaaaacu

SEQ ID NO: 3561673 - RNA, 14 nt, Human
uguagauguaugca

SEQ ID NO: 3561674 - RNA, 18 nt, Human
uguagauguaugcacaca

SEQ ID NO: 3561675 - RNA, 15 nt, Human
uguagauucugugga

SEQ ID NO: 3561676 - RNA, 21 nt, Human
uguccugugagguuucccaau

SEQ ID NO: 3561677 - RNA, 15 nt, Human
uguccuguugauuaa

SEQ ID NO: 3561678 - RNA, 14 nt, Human
uguccuuagccugg

SEQ ID NO: 3561679 - RNA, 17 nt, Human
uguccuuagccuggacc

SEQ ID NO: 3561680 - RNA, 16 nt, Human
uguccuucccugcauu

SEQ ID NO: 3561681 - RNA, 16 nt, Human
uguccuugaaugccau

SEQ ID NO: 3561682 - RNA, 17 nt, Human
uguccuugaaugccaua

SEQ ID NO: 3561683 - RNA, 13 nt, Human
uguccuugcaccu

SEQ ID NO: 3561684 - RNA, 15 nt, Human
uguccuugcaccugc

SEQ ID NO: 3561685 - RNA, 18 nt, Human
uguccuuggaaguuucau

SEQ ID NO: 3561686 - RNA, 16 nt, Human
uguccuuuaaaaaaga

SEQ ID NO: 3561687 - RNA, 18 nt, Human
uguccuuuaaaaaagaaa

SEQ ID NO: 3561688 - RNA, 19 nt, Human
uguccuuuaccaaagauga

SEQ ID NO: 3561689 - RNA, 21 nt, Human
uguccuuuaccaaagaugaau

SEQ ID NO: 3561690 - RNA, 13 nt, Human
uguccuuucccuc

SEQ ID NO: 3561691 - RNA, 18 nt, Human
uguccuuucccuccacuc

SEQ ID NO: 3561692 - RNA, 13 nt, Human
uguccuuucccuu

SEQ ID NO: 3561693 - RNA, 23 nt, Human
uguccuuucccuucaguacccuc

SEQ ID NO: 3561694 - RNA, 20 nt, Human
ugucgaaaagagucuuccaa

SEQ ID NO: 3561695 - RNA, 13 nt, Human
ugucgagacacuu

SEQ ID NO: 3561696 - RNA, 15 nt, Human
ugucgagacacuugc

SEQ ID NO: 3561697 - RNA, 19 nt, Human
ugucgauauuuccaucauu

SEQ ID NO: 3561698 - RNA, 22 nt, Human
ugucgauguaggcauucuggag

SEQ ID NO: 3561699 - RNA, 22 nt, Human
ugucgauuaaaaucacucucag

SEQ ID NO: 3561700 - RNA, 14 nt, Human
ugucgcccagucug

SEQ ID NO: 3561701 - RNA, 17 nt, Human
ugucgcccagugcccug

SEQ ID NO: 3561702 - RNA, 14 nt, Human
ugucgcgccuucuc

SEQ ID NO: 3561703 - RNA, 14 nt, Human
ugucgcgcucagca

SEQ ID NO: 3561704 - RNA, 22 nt, Human
ugucgcucaugugugcaacagg

SEQ ID NO: 3561705 - RNA, 17 nt, Human
ugucgcucugcuggccu

SEQ ID NO: 3561706 - RNA, 19 nt, Human
ugucgcucugcuggccugg

SEQ ID NO: 3561707 - RNA, 14 nt, Human
ugucggaggaaaga

SEQ ID NO: 3561708 - RNA, 17 nt, Human
ugucggaggaaagacaa

SEQ ID NO: 3561709 - RNA, 20 nt, Human
ugucggccccaccagugccu

SEQ ID NO: 3561710 - RNA, 23 nt, Human
ugucggccccaccagugccucuc

SEQ ID NO: 3561711 - RNA, 21 nt, Human
ugucggccucuaaccccaggc

SEQ ID NO: 3561712 - RNA, 22 nt, Human
ugucggccucuaaccccaggcc

SEQ ID NO: 3561713 - RNA, 19 nt, Human
ugucggccugguguucugu

SEQ ID NO: 3561714 - RNA, 12 nt, Human
ugucggcuccag

SEQ ID NO: 3561715 - RNA, 17 nt, Human
ugucggcuccagucccc

SEQ ID NO: 3561716 - RNA, 19 nt, Human
ugucggcuccaguccccag

SEQ ID NO: 3561717 - RNA, 12 nt, Human
ugucggcugcuu

SEQ ID NO: 3561718 - RNA, 23 nt, Human
ugucgguuuuuuuuaaauaaaag

SEQ ID NO: 3561719 - RNA, 21 nt, Human
ugucguuaaaaaguuguuugu

SEQ ID NO: 3561720 - RNA, 23 nt, Human
ugucguuaaaaaguuguuuguuu

SEQ ID NO: 3561721 - RNA, 18 nt, Human
ugucuaaauuugaauguu

SEQ ID NO: 3561722 - RNA, 21 nt, Human
ugucuaacuuuugugaagaac

SEQ ID NO: 3561723 - RNA, 16 nt, Human
ugucuaagaaacauug

SEQ ID NO: 3561724 - RNA, 13 nt, Human
ugucuaagauucu

SEQ ID NO: 3561725 - RNA, 17 nt, Human
ugucuaagauucuagau

SEQ ID NO: 3561726 - RNA, 13 nt, Human
ugucuaauuaaaa

SEQ ID NO: 3561727 - RNA, 18 nt, Human
ugucuaauugcaucucaa

SEQ ID NO: 3561728 - RNA, 19 nt, Human
ugucuaauugcaucucaaa

SEQ ID NO: 3561729 - RNA, 13 nt, Human
ugucuacaaauau

SEQ ID NO: 3561730 - RNA, 18 nt, Human
ugucuacaccauuaugug

SEQ ID NO: 3561731 - RNA, 15 nt, Human
ugucuagcacuuccu

SEQ ID NO: 3561732 - RNA, 21 nt, Human
ugucuagcacuuccuugccag

SEQ ID NO: 3561733 - RNA, 17 nt, Human
ugucuaggcaggaccug

SEQ ID NO: 3561734 - RNA, 18 nt, Human
ugucuaggucaguaccca

SEQ ID NO: 3561735 - RNA, 21 nt, Human
ugucuaggucaguacccaccu

SEQ ID NO: 3561736 - RNA, 13 nt, Human
ugucuauaaagca

SEQ ID NO: 3561737 - RNA, 18 nt, Human
ugucuauaguugucagua

SEQ ID NO: 3561738 - RNA, 20 nt, Human
ugucuauggauuugccuucu

SEQ ID NO: 3561739 - RNA, 14 nt, Human
ugucuaugggacuc

SEQ ID NO: 3561740 - RNA, 15 nt, Human
ugucuaugggacuca

SEQ ID NO: 3561741 - RNA, 12 nt, Human
ugucuauugucc

SEQ ID NO: 3561742 - RNA, 14 nt, Human
ugucuauuucugcu

SEQ ID NO: 3561743 - RNA, 12 nt, Human
ugucuauuuuaa

SEQ ID NO: 3561744 - RNA, 18 nt, Human
ugucucaagagggcacug

SEQ ID NO: 3561745 - RNA, 20 nt, Human
ugucucaagagggcacuggu

SEQ ID NO: 3561746 - RNA, 21 nt, Human
ugucucaagagggcacuggug

SEQ ID NO: 3561747 - RNA, 19 nt, Human
ugucucaagcucuuccuua

SEQ ID NO: 3561748 - RNA, 14 nt, Human
ugucucacacuggc

SEQ ID NO: 3561749 - RNA, 14 nt, Human
ugucucacauggga

SEQ ID NO: 3561750 - RNA, 16 nt, Human
ugucucaccuggacuu

SEQ ID NO: 3561751 - RNA, 17 nt, Human
ugucucacugaaacauu

SEQ ID NO: 3561752 - RNA, 20 nt, Human
ugucucagacuuuuguacau

SEQ ID NO: 3561753 - RNA, 13 nt, Human
ugucucagccucc

SEQ ID NO: 3561754 - RNA, 15 nt, Human
ugucucagccuccca

SEQ ID NO: 3561755 - RNA, 16 nt, Human
ugucucagccuccuga

SEQ ID NO: 3561756 - RNA, 17 nt, Human
ugucucaggcugccuga

SEQ ID NO: 3561757 - RNA, 18 nt, Human
ugucucaggcugccugag

SEQ ID NO: 3561758 - RNA, 16 nt, Human
ugucucaggucccugc

SEQ ID NO: 3561759 - RNA, 17 nt, Human
ugucucaggucccugca

SEQ ID NO: 3561760 - RNA, 15 nt, Human
ugucucaguuggaaa

SEQ ID NO: 3561761 - RNA, 16 nt, Human
ugucucauccaucauc

SEQ ID NO: 3561762 - RNA, 16 nt, Human
ugucucauccccaggg

SEQ ID NO: 3561763 - RNA, 11 nt, Human
ugucuccaacc

SEQ ID NO: 3561764 - RNA, 17 nt, Human
ugucuccaaccccccag

SEQ ID NO: 3561765 - RNA, 20 nt, Human
ugucuccaaccccccagcac

SEQ ID NO: 3561766 - RNA, 21 nt, Human
ugucuccaaccccccagcacu

SEQ ID NO: 3561767 - RNA, 22 nt, Human
ugucuccaaccccccagcacug

SEQ ID NO: 3561768 - RNA, 19 nt, Human
ugucuccagacccccaccc

SEQ ID NO: 3561769 - RNA, 12 nt, Human
ugucuccagcuu

SEQ ID NO: 3561770 - RNA, 15 nt, Human
ugucuccagcuuccc

SEQ ID NO: 3561771 - RNA, 14 nt, Human
ugucuccccucugc

SEQ ID NO: 3561772 - RNA, 15 nt, Human
ugucucccuggcccu

SEQ ID NO: 3561773 - RNA, 16 nt, Human
ugucucccuggcccuc

SEQ ID NO: 3561774 - RNA, 13 nt, Human
ugucuccuaagca

SEQ ID NO: 3561775 - RNA, 16 nt, Human
ugucuccuaagcaccu

SEQ ID NO: 3561776 - RNA, 16 nt, Human
ugucuccuaccucugc

SEQ ID NO: 3561777 - RNA, 17 nt, Human
ugucuccuacuccugac

SEQ ID NO: 3561778 - RNA, 15 nt, Human
ugucuccuacugagg

SEQ ID NO: 3561779 - RNA, 12 nt, Human
ugucuccuaucc

SEQ ID NO: 3561780 - RNA, 21 nt, Human
ugucuccuggcgguuccucgu

SEQ ID NO: 3561781 - RNA, 17 nt, Human
ugucuccuuaacacuga

SEQ ID NO: 3561782 - RNA, 18 nt, Human
ugucuccuuaacacugag

SEQ ID NO: 3561783 - RNA, 17 nt, Human
ugucuccuuaagcugca

SEQ ID NO: 3561784 - RNA, 19 nt, Human
ugucucggaaccugugagc

SEQ ID NO: 3561785 - RNA, 18 nt, Human
ugucucguuugugauucu

SEQ ID NO: 3561786 - RNA, 16 nt, Human
ugucucuaacuuauuu

SEQ ID NO: 3561787 - RNA, 18 nt, Human
ugucucucagggccaggc

SEQ ID NO: 3561788 - RNA, 12 nt, Human
ugucucuccuuu

SEQ ID NO: 3561789 - RNA, 16 nt, Human
ugucucuccuuuucuu

SEQ ID NO: 3561790 - RNA, 22 nt, Human
ugucucugcucgcccuccuuuc

SEQ ID NO: 3561791 - RNA, 23 nt, Human
ugucucugggcuuggggcuuccu

SEQ ID NO: 3561792 - RNA, 20 nt, Human
ugucucuucaucuaauauga

SEQ ID NO: 3561793 - RNA, 13 nt, Human
ugucucuucugag

SEQ ID NO: 3561794 - RNA, 12 nt, Human
ugucucuucugg

SEQ ID NO: 3561795 - RNA, 13 nt, Human
ugucucuuucaug

SEQ ID NO: 3561796 - RNA, 22 nt, Human
ugucugaaaaauuccuuugugu

SEQ ID NO: 3561797 - RNA, 13 nt, Human
ugucugaacuugc

SEQ ID NO: 3561798 - RNA, 16 nt, Human
ugucugagaugcuggu

SEQ ID NO: 3561799 - RNA, 15 nt, Human
ugucugaguuuggua

SEQ ID NO: 3561800 - RNA, 15 nt, Human
ugucugauuggcuug

SEQ ID NO: 3561801 - RNA, 16 nt, Human
ugucugcacccagggg

SEQ ID NO: 3561802 - RNA, 12 nt, Human
ugucugcagccc

SEQ ID NO: 3561803 - RNA, 13 nt, Human
ugucugcagcccu

SEQ ID NO: 3561804 - RNA, 12 nt, Human
ugucugcagccu

SEQ ID NO: 3561805 - RNA, 16 nt, Human
ugugauguauucuagc

SEQ ID NO: 3561806 - RNA, 15 nt, Human
ugugaugugaagcca

SEQ ID NO: 3561807 - RNA, 19 nt, Human
ugugaugugacauuuguca

SEQ ID NO: 3561808 - RNA, 18 nt, Human
ugugauguucuaaggcuc

SEQ ID NO: 3561809 - RNA, 22 nt, Human
ugugauuagacagaacaccuau

SEQ ID NO: 3561810 - RNA, 17 nt, Human
ugugauuauuucacuuu

SEQ ID NO: 3561811 - RNA, 14 nt, Human
ugugauucaaucug

SEQ ID NO: 3561812 - RNA, 16 nt, Human
ugugauucaaucugua

SEQ ID NO: 3561813 - RNA, 19 nt, Human
ugugauuccuuugaagagg

SEQ ID NO: 3561814 - RNA, 16 nt, Human
ugugauucuaaugucu

SEQ ID NO: 3561815 - RNA, 20 nt, Human
ugugauucuuccagauguga

SEQ ID NO: 3561816 - RNA, 17 nt, Human
ugugauugggaauaaau

SEQ ID NO: 3561817 - RNA, 17 nt, Human
ugugauuuaauaguguu

SEQ ID NO: 3561818 - RNA, 18 nt, Human
ugugauuuagaacuguau

SEQ ID NO: 3561819 - RNA, 23 nt, Human
ugugauuuagaacuguaugucag

SEQ ID NO: 3561820 - RNA, 20 nt, Human
ugugauuucccguggcccca

SEQ ID NO: 3561821 - RNA, 23 nt, Human
ugugauuuccuacuaaccuguuc

SEQ ID NO: 3561822 - RNA, 21 nt, Human
ugugauuucuuuaaaagaaug

SEQ ID NO: 3561823 - RNA, 22 nt, Human
ugugauuugacuguuuuuaccc

SEQ ID NO: 3561824 - RNA, 20 nt, Human
ugugauuuuugguauuugaa

SEQ ID NO: 3561825 - RNA, 11 nt, Human
ugugauuuuuu

SEQ ID NO: 3561826 - RNA, 14 nt, Human
ugugcaaaaauuuu

SEQ ID NO: 3561827 - RNA, 17 nt, Human
ugugcaaaaauuuuugg

SEQ ID NO: 3561828 - RNA, 19 nt, Human
ugugcaaaaccuuuuacug

SEQ ID NO: 3561829 - RNA, 15 nt, Human
ugugcaacagacaag

SEQ ID NO: 3561830 - RNA, 17 nt, Human
ugugcaaguaugugagu

SEQ ID NO: 3561831 - RNA, 16 nt, Human
ugugcaaguguaugca

SEQ ID NO: 3561832 - RNA, 12 nt, Human
ugugcaagugug

SEQ ID NO: 3561833 - RNA, 17 nt, Human
ugugcaauaauuuacau

SEQ ID NO: 3561834 - RNA, 13 nt, Human
ugugcaauagaag

SEQ ID NO: 3561835 - RNA, 18 nt, Human
ugugcaauguaaauauuu

SEQ ID NO: 3561836 - RNA, 16 nt, Human
ugugcaauguguauaa

SEQ ID NO: 3561837 - RNA, 22 nt, Human
ugugcaauguguauaaacaaga

SEQ ID NO: 3561838 - RNA, 17 nt, Human
ugugcacaaaguggcau

SEQ ID NO: 3561839 - RNA, 15 nt, Human
ugugcacaauucugu

SEQ ID NO: 3561840 - RNA, 20 nt, Human
ugugcacacacacacacaug

SEQ ID NO: 3561841 - RNA, 19 nt, Human
ugugcacacacaccacaca

SEQ ID NO: 3561842 - RNA, 13 nt, Human
ugugcacaucucu

SEQ ID NO: 3561843 - RNA, 14 nt, Human
ugugcacaucucug

SEQ ID NO: 3561844 - RNA, 20 nt, Human
ugugcacaucugugucuugu

SEQ ID NO: 3561845 - RNA, 21 nt, Human
ugugcacaucugugucuuguu

SEQ ID NO: 3561846 - RNA, 22 nt, Human
ugugcacaugcacgugugugca

SEQ ID NO: 3561847 - RNA, 18 nt, Human
ugugcacaugugugcgug

SEQ ID NO: 3561848 - RNA, 21 nt, Human
ugugcaccaccacacccggcu

SEQ ID NO: 3561849 - RNA, 21 nt, Human
ugugcacgagugggaaggacu

SEQ ID NO: 3561850 - RNA, 20 nt, Human
ugugcacguaaaguacuugu

SEQ ID NO: 3561851 - RNA, 17 nt, Human
ugugcacuaaggggccc

SEQ ID NO: 3561852 - RNA, 23 nt, Human
ugugcacuaaggggcccggccag

SEQ ID NO: 3561853 - RNA, 21 nt, Human
ugugcacugucacuuugcucu

SEQ ID NO: 3561854 - RNA, 17 nt, Human
ugugcacuuauuuauga

SEQ ID NO: 3561855 - RNA, 22 nt, Human
ugugcagccccgccuccaggcc

SEQ ID NO: 3561856 - RNA, 15 nt, Human
ugugcagcgcagcug

SEQ ID NO: 3561857 - RNA, 12 nt, Human
ugugcagcuuuu

SEQ ID NO: 3561858 - RNA, 17 nt, Human
ugugcaggagcggcaga

SEQ ID NO: 3561859 - RNA, 15 nt, Human
ugugcagggagggca

SEQ ID NO: 3561860 - RNA, 17 nt, Human
ugugcagggagggcagu

SEQ ID NO: 3561861 - RNA, 17 nt, Human
ugugcagguuuguuaca

SEQ ID NO: 3561862 - RNA, 20 nt, Human
ugugcaguccugggaugugg

SEQ ID NO: 3561863 - RNA, 13 nt, Human
ugugcaguucuag

SEQ ID NO: 3561864 - RNA, 15 nt, Human
ugugcaugggagcaa

SEQ ID NO: 3561865 - RNA, 19 nt, Human
ugugcaugggugaagggag

SEQ ID NO: 3561866 - RNA, 15 nt, Human
ugugcaugguggcac

SEQ ID NO: 3561867 - RNA, 17 nt, Human
ugugcauguguguauaa

SEQ ID NO: 3561868 - RNA, 14 nt, Human
ugugcauuaucuag

SEQ ID NO: 3561869 - RNA, 16 nt, Human
ugugcauuaucuagau

SEQ ID NO: 3561870 - RNA, 19 nt, Human
ugugcauuaucuagauacu

SEQ ID NO: 3561871 - RNA, 16 nt, Human
ugugcauuauuuucca

SEQ ID NO: 3561872 - RNA, 23 nt, Human
ugugcauucuuuuaaaagacaag

SEQ ID NO: 3561873 - RNA, 14 nt, Human
ugugcauugcugug

SEQ ID NO: 3561874 - RNA, 22 nt, Human
ugugcauuuuugugaaaugaaa

SEQ ID NO: 3561875 - RNA, 19 nt, Human
ugugccaaccuauuuugaa

SEQ ID NO: 3561876 - RNA, 16 nt, Human
ugugccaauauguauu

SEQ ID NO: 3561877 - RNA, 18 nt, Human
ugugccaauauguauugu

SEQ ID NO: 3561878 - RNA, 22 nt, Human
ugugccacagaguguagccagg

SEQ ID NO: 3561879 - RNA, 16 nt, Human
ugugccacaggcuuag

SEQ ID NO: 3561880 - RNA, 16 nt, Human
ugugccacccaccagg

SEQ ID NO: 3561881 - RNA, 12 nt, Human
ugugccacccug

SEQ ID NO: 3561882 - RNA, 15 nt, Human
ugugccacccugggc

SEQ ID NO: 3561883 - RNA, 17 nt, Human
ugugccacccugggcuc

SEQ ID NO: 3561884 - RNA, 23 nt, Human
ugugccacucaccgaagccacuu

SEQ ID NO: 3561885 - RNA, 12 nt, Human
ugugccagagcc

SEQ ID NO: 3561886 - RNA, 20 nt, Human
ugugccagaggaauccuggc

SEQ ID NO: 3561887 - RNA, 22 nt, Human
ugugccagaggaauccuggcag

SEQ ID NO: 3561888 - RNA, 20 nt, Human
ugugccagguuuuuggucug

SEQ ID NO: 3561889 - RNA, 21 nt, Human
ugugccauagaguuuaacaca

SEQ ID NO: 3561890 - RNA, 18 nt, Human
ugugccauagucacaugg

SEQ ID NO: 3561891 - RNA, 12 nt, Human
ugugccaucugu

SEQ ID NO: 3561892 - RNA, 16 nt, Human
ugugccaugucaaaca

SEQ ID NO: 3561893 - RNA, 21 nt, Human
ugugccaugucaaacaaauag

SEQ ID NO: 3561894 - RNA, 12 nt, Human
ugugcccagcuc

SEQ ID NO: 3561895 - RNA, 14 nt, Human
ugugcccaugggca

SEQ ID NO: 3561896 - RNA, 15 nt, Human
ugugccccaugccug

SEQ ID NO: 3561897 - RNA, 21 nt, Human
ugugcccccauguaagcaccc

SEQ ID NO: 3561898 - RNA, 15 nt, Human
ugugccccccauccu

SEQ ID NO: 3561899 - RNA, 16 nt, Human
ugugccccccauccug

SEQ ID NO: 3561900 - RNA, 18 nt, Human
ugugccccccauccuggc

SEQ ID NO: 3561901 - RNA, 19 nt, Human
ugugccccccauccuggcc

SEQ ID NO: 3561902 - RNA, 20 nt, Human
ugugccccccauccuggccc

SEQ ID NO: 3561903 - RNA, 23 nt, Human
ugugccccccauccuggcccauc

SEQ ID NO: 3561904 - RNA, 23 nt, Human
ugugccccuugacaacuggcagg

SEQ ID NO: 3561905 - RNA, 21 nt, Human
ugugcccuaaaguguauuuuu

SEQ ID NO: 3561906 - RNA, 12 nt, Human
ugugcccuccug

SEQ ID NO: 3561907 - RNA, 15 nt, Human
ugugcccucugggcu

SEQ ID NO: 3561908 - RNA, 11 nt, Human
ugugcccuggu

SEQ ID NO: 3561909 - RNA, 17 nt, Human
ugugccgacacuguucu

SEQ ID NO: 3561910 - RNA, 16 nt, Human
ugugccuaacaccagc

SEQ ID NO: 3561911 - RNA, 20 nt, Human
ugugccuauagucccagcua

SEQ ID NO: 3561912 - RNA, 14 nt, Human
ugugccucagagac

SEQ ID NO: 3561913 - RNA, 13 nt, Human
ugugccuccuccc

SEQ ID NO: 3561914 - RNA, 14 nt, Human
ugugccuccucccu

SEQ ID NO: 3561915 - RNA, 21 nt, Human
ugugccucgcuccccacucug

SEQ ID NO: 3561916 - RNA, 21 nt, Human
ugugccucggcuuuucucagc

SEQ ID NO: 3561917 - RNA, 15 nt, Human
ugugccucuagcuga

SEQ ID NO: 3561918 - RNA, 14 nt, Human
ugugccucugccug

SEQ ID NO: 3561919 - RNA, 15 nt, Human
ugugccucugccugu

SEQ ID NO: 3561920 - RNA, 13 nt, Human
ugugccucuggga

SEQ ID NO: 3561921 - RNA, 15 nt, Human
ugugccucugggacu

SEQ ID NO: 3561922 - RNA, 15 nt, Human
ugugccucuuugucu

SEQ ID NO: 3561923 - RNA, 14 nt, Human
ugugccugcuucag

SEQ ID NO: 3561924 - RNA, 13 nt, Human
ugugccuggcuca

SEQ ID NO: 3561925 - RNA, 22 nt, Human
ugugccugggggaguuuuccuc

SEQ ID NO: 3561926 - RNA, 17 nt, Human
ugugccuuggugugcug

SEQ ID NO: 3561927 - RNA, 19 nt, Human
ugugccuugucacgccaga

SEQ ID NO: 3561928 - RNA, 13 nt, Human
ugugccuuguuuu

SEQ ID NO: 3561929 - RNA, 18 nt, Human
ugugccuuguuuuuuguu

SEQ ID NO: 3561930 - RNA, 15 nt, Human
ugugccuuuuauagc

SEQ ID NO: 3561931 - RNA, 16 nt, Human
ugugccuuuuauagcu

SEQ ID NO: 3561932 - RNA, 19 nt, Human
ugugcgccuacaggaguga

SEQ ID NO: 3561933 - RNA, 15 nt, Human
ugugcggcugugugu

SEQ ID NO: 3561934 - RNA, 17 nt, Human
ugugcggcugugugugc

SEQ ID NO: 3561935 - RNA, 15 nt, Human
ugugcgugaaacaca

SEQ ID NO: 3561936 - RNA, 20 nt, Human
ugugcgugcuugaguguguu

SEQ ID NO: 3561937 - RNA, 16 nt, Human
ugugcguggugguccc

SEQ ID NO: 3561938 - RNA, 21 nt, Human
ugugcguguguccaugugugu

SEQ ID NO: 3561939 - RNA, 20 nt, Human
ugugcuacaggggccagaag

SEQ ID NO: 3561940 - RNA, 17 nt, Human
ugugcuacaugacgaca

SEQ ID NO: 3561941 - RNA, 23 nt, Human
ugugggagaccggccugccagga

SEQ ID NO: 3561942 - RNA, 13 nt, Human
ugugggagcagcg

SEQ ID NO: 3561943 - RNA, 12 nt, Human
ugugggagccuc

SEQ ID NO: 3561944 - RNA, 16 nt, Human
ugugggaggcuccugu

SEQ ID NO: 3561945 - RNA, 21 nt, Human
ugugggagggagcagacagga

SEQ ID NO: 3561946 - RNA, 13 nt, Human
ugugggauuaugg

SEQ ID NO: 3561947 - RNA, 16 nt, Human
ugugggauuauggguc

SEQ ID NO: 3561948 - RNA, 17 nt, Human
ugugggcacuggcccag

SEQ ID NO: 3561949 - RNA, 18 nt, Human
ugugggcacuggcccagg

SEQ ID NO: 3561950 - RNA, 21 nt, Human
ugugggcagcuuagggcccug

SEQ ID NO: 3561951 - RNA, 16 nt, Human
ugugggcaggaaguga

SEQ ID NO: 3561952 - RNA, 11 nt, Human
ugugggccugg

SEQ ID NO: 3561953 - RNA, 15 nt, Human
ugugggccugggcuc

SEQ ID NO: 3561954 - RNA, 22 nt, Human
ugugggcgugagaccugccccu

SEQ ID NO: 3561955 - RNA, 14 nt, Human
ugugggcugcacuc

SEQ ID NO: 3561956 - RNA, 20 nt, Human
ugugggcugcacucugugcc

SEQ ID NO: 3561957 - RNA, 22 nt, Human
ugugggcugcacucugugccca

SEQ ID NO: 3561958 - RNA, 13 nt, Human
ugugggcugugag

SEQ ID NO: 3561959 - RNA, 20 nt, Human
uguggggcugguagcucagg

SEQ ID NO: 3561960 - RNA, 13 nt, Human
uguggggggaggc

SEQ ID NO: 3561961 - RNA, 23 nt, Human
uguggggggaggcugacuccugg

SEQ ID NO: 3561962 - RNA, 19 nt, Human
ugugggggguaaucccugc

SEQ ID NO: 3561963 - RNA, 22 nt, Human
ugugggggguaaucccugcuuu

SEQ ID NO: 3561964 - RNA, 14 nt, Human
ugugggggguccuu

SEQ ID NO: 3561965 - RNA, 18 nt, Human
uguuaauaucacucauua

SEQ ID NO: 3561966 - RNA, 18 nt, Human
uguuaauauucuuucaau

SEQ ID NO: 3561967 - RNA, 19 nt, Human
uguuaauauugauuuauua

SEQ ID NO: 3561968 - RNA, 12 nt, Human
uguuaaucaauu

SEQ ID NO: 3561969 - RNA, 13 nt, Human
uguuaaucaauuu

SEQ ID NO: 3561970 - RNA, 14 nt, Human
uguuaauccuagcu

SEQ ID NO: 3561971 - RNA, 21 nt, Human
uguuaaucucuguuauguacu

SEQ ID NO: 3561972 - RNA, 17 nt, Human
uguuaaucuuaauguau

SEQ ID NO: 3561973 - RNA, 22 nt, Human
uguuaaucuuaauguauaucgu

SEQ ID NO: 3561974 - RNA, 15 nt, Human
uguuaaugcuuucug

SEQ ID NO: 3561975 - RNA, 19 nt, Human
uguuaauggauuucagaag

SEQ ID NO: 3561976 - RNA, 18 nt, Human
uguuaauguauuuguuca

SEQ ID NO: 3561977 - RNA, 22 nt, Human
uguuaauguauuuguucauguu

SEQ ID NO: 3561978 - RNA, 15 nt, Human
uguuaauuuaaguuu

SEQ ID NO: 3561979 - RNA, 16 nt, Human
uguuaauuuaaguuuu

SEQ ID NO: 3561980 - RNA, 15 nt, Human
uguuaauuuagaaaa

SEQ ID NO: 3561981 - RNA, 20 nt, Human
uguuaauuuguguguuuuua

SEQ ID NO: 3561982 - RNA, 13 nt, Human
uguuaauuuuuga

SEQ ID NO: 3561983 - RNA, 16 nt, Human
uguuaauuuuugauac

SEQ ID NO: 3561984 - RNA, 14 nt, Human
uguuacaaaaugua

SEQ ID NO: 3561985 - RNA, 17 nt, Human
uguuacaaaauguaacu

SEQ ID NO: 3561986 - RNA, 19 nt, Human
uguuacaaaauguaacugu

SEQ ID NO: 3561987 - RNA, 21 nt, Human
uguuacaaaauguaacuguua

SEQ ID NO: 3561988 - RNA, 15 nt, Human
uguuacaauguaacu

SEQ ID NO: 3561989 - RNA, 22 nt, Human
uguuacacaaugguuuuuaaau

SEQ ID NO: 3561990 - RNA, 17 nt, Human
uguuacaguaaugucau

SEQ ID NO: 3561991 - RNA, 15 nt, Human
uguuacauaguguag

SEQ ID NO: 3561992 - RNA, 12 nt, Human
uguuacaucaca

SEQ ID NO: 3561993 - RNA, 13 nt, Human
uguuacauuuuua

SEQ ID NO: 3561994 - RNA, 15 nt, Human
uguuaccauucacaa

SEQ ID NO: 3561995 - RNA, 16 nt, Human
uguuaccauuggaaau

SEQ ID NO: 3561996 - RNA, 17 nt, Human
uguuaccauuggaaauu

SEQ ID NO: 3561997 - RNA, 23 nt, Human
uguuaccauuggaaauuucacgu

SEQ ID NO: 3561998 - RNA, 21 nt, Human
uguuacccaguaacucaucug

SEQ ID NO: 3561999 - RNA, 17 nt, Human
uguuaccgccugucucu

SEQ ID NO: 3562000 - RNA, 14 nt, Human
uguuaccucugaau

SEQ ID NO: 3562001 - RNA, 13 nt, Human
uguuaccugugug

SEQ ID NO: 3562002 - RNA, 17 nt, Human
uguuaccugugugcuug

SEQ ID NO: 3562003 - RNA, 17 nt, Human
uguuacuaacuaaacuc

SEQ ID NO: 3562004 - RNA, 14 nt, Human
uguuacuaaguuuu

SEQ ID NO: 3562005 - RNA, 13 nt, Human
uguuacucugguu

SEQ ID NO: 3562006 - RNA, 17 nt, Human
uguuacucugguucuuu

SEQ ID NO: 3562007 - RNA, 14 nt, Human
uguuacugaucaug

SEQ ID NO: 3562008 - RNA, 17 nt, Human
uguuacugguguccagc

SEQ ID NO: 3562009 - RNA, 9 nt, Human
uguuacugu

SEQ ID NO: 3562010 - RNA, 12 nt, Human
uguuacuguaau

SEQ ID NO: 3562011 - RNA, 15 nt, Human
uguuacugucuucag

SEQ ID NO: 3562012 - RNA, 16 nt, Human
uguuacugucuucagu

SEQ ID NO: 3562013 - RNA, 11 nt, Human
uguuacuguuc

SEQ ID NO: 3562014 - RNA, 12 nt, Human
uguuacuguucu

SEQ ID NO: 3562015 - RNA, 16 nt, Human
uguuacuguucuugcu

SEQ ID NO: 3562016 - RNA, 17 nt, Human
uguuacuguucuugcug

SEQ ID NO: 3562017 - RNA, 18 nt, Human
uguuacuguucuugcugc

SEQ ID NO: 3562018 - RNA, 21 nt, Human
uguuacuguucuugcugcuag

SEQ ID NO: 3562019 - RNA, 22 nt, Human
uguuacuguucuugcugcuaga

SEQ ID NO: 3562020 - RNA, 23 nt, Human
uguuacuguucuugcugcuagaa

SEQ ID NO: 3562021 - RNA, 15 nt, Human
uguuacuuuauacag

SEQ ID NO: 3562022 - RNA, 14 nt, Human
uguuagaacacuau

SEQ ID NO: 3562023 - RNA, 19 nt, Human
uguuagaacacuauuuuca

SEQ ID NO: 3562024 - RNA, 23 nt, Human
uguuagaacacuauuuucagaau

SEQ ID NO: 3562025 - RNA, 13 nt, Human
uguuagaauguaa

SEQ ID NO: 3562026 - RNA, 21 nt, Human
uguuagauagaauuuccaaua

SEQ ID NO: 3562027 - RNA, 16 nt, Human
uguuagaucuaguuca

SEQ ID NO: 3562028 - RNA, 17 nt, Human
uguuagcacuguugaug

SEQ ID NO: 3562029 - RNA, 20 nt, Human
uguuagcacuguugauguau

SEQ ID NO: 3562030 - RNA, 22 nt, Human
uguuagcacuguugauguaucu

SEQ ID NO: 3562031 - RNA, 21 nt, Human
uguuagcaugcuggugagcca

SEQ ID NO: 3562032 - RNA, 21 nt, Human
uguuaggccaaagacaaauag

SEQ ID NO: 3562033 - RNA, 16 nt, Human
uguuaggccuggcaca

SEQ ID NO: 3562034 - RNA, 21 nt, Human
uguuaggccuggcacaguguc

SEQ ID NO: 3562035 - RNA, 16 nt, Human
uguuaggcugggccca

SEQ ID NO: 3562036 - RNA, 18 nt, Human
uguuaggcugggcccaga

SEQ ID NO: 3562037 - RNA, 19 nt, Human
uguuaguaugaggcauuug

SEQ ID NO: 3562038 - RNA, 17 nt, Human
uguuaguuauagauguc

SEQ ID NO: 3562039 - RNA, 14 nt, Human
uguuaguuucuugg

SEQ ID NO: 3562040 - RNA, 14 nt, Human
uguuaguuuuccuu

SEQ ID NO: 3562041 - RNA, 14 nt, Human
uguuauaacuacuc

SEQ ID NO: 3562042 - RNA, 15 nt, Human
uguuauaacucugca

SEQ ID NO: 3562043 - RNA, 17 nt, Human
uguuauaacucugcacu

SEQ ID NO: 3562044 - RNA, 15 nt, Human
uguuauaaucuuuca

SEQ ID NO: 3562045 - RNA, 19 nt, Human
uguuauagaacuucaugga

SEQ ID NO: 3562046 - RNA, 20 nt, Human
uguuauagaacuucauggau

SEQ ID NO: 3562047 - RNA, 13 nt, Human
uguuauauaaaug

SEQ ID NO: 3562048 - RNA, 14 nt, Human
uguuauauaaaugg

SEQ ID NO: 3562049 - RNA, 15 nt, Human
uguuauauaaucauu

SEQ ID NO: 3562050 - RNA, 16 nt, Human
uguuauauaaucauua

SEQ ID NO: 3562051 - RNA, 15 nt, Human
uguuauaucauaugu

SEQ ID NO: 3562052 - RNA, 22 nt, Human
uguuauauccugacaagauuau

SEQ ID NO: 3562053 - RNA, 12 nt, Human
uguuauaugaac

SEQ ID NO: 3562054 - RNA, 14 nt, Human
uguuauaugaacau

SEQ ID NO: 3562055 - RNA, 23 nt, Human
uguuauauuuaaugcauuaaacc

SEQ ID NO: 3562056 - RNA, 13 nt, Human
uguuauauuucau

SEQ ID NO: 3562057 - RNA, 16 nt, Human
uguuauauuuuucuua

SEQ ID NO: 3562058 - RNA, 14 nt, Human
uguuaucagcuuuc

SEQ ID NO: 3562059 - RNA, 13 nt, Human
uguuaucauuuuu

SEQ ID NO: 3562060 - RNA, 22 nt, Human
uguuaucuuauacuguacaaua

SEQ ID NO: 3562061 - RNA, 14 nt, Human
uguuaucuuggugu

SEQ ID NO: 3562062 - RNA, 13 nt, Human
uguuaugaaauaa

SEQ ID NO: 3562063 - RNA, 16 nt, Human
uguuaugaaauaaaga

SEQ ID NO: 3562064 - RNA, 21 nt, Human
uguuaugaaauaaagaaauug

SEQ ID NO: 3562065 - RNA, 16 nt, Human
uguuaugacuauguaa

SEQ ID NO: 3562066 - RNA, 17 nt, Human
uguuaugacuccagaau

SEQ ID NO: 3562067 - RNA, 15 nt, Human
uguuaugauaaaaaa

SEQ ID NO: 3562068 - RNA, 16 nt, Human
uguuaugaugugcuua

SEQ ID NO: 3562069 - RNA, 17 nt, Human
uguuaugguagaaaaau

SEQ ID NO: 3562070 - RNA, 22 nt, Human
uguuauguaaaaggccaaaccu

SEQ ID NO: 3562071 - RNA, 18 nt, Human
uguucagcguuuugcaag

SEQ ID NO: 3562072 - RNA, 17 nt, Human
uguucagcuuuuauucc

SEQ ID NO: 3562073 - RNA, 21 nt, Human
uguucaggaaaagguugaaua

SEQ ID NO: 3562074 - RNA, 23 nt, Human
uguucaggaaaagguugaauaau

SEQ ID NO: 3562075 - RNA, 18 nt, Human
uguucaggaaguccuuau

SEQ ID NO: 3562076 - RNA, 22 nt, Human
uguucaguaacagggccuugcu

SEQ ID NO: 3562077 - RNA, 15 nt, Human
uguucaguguaauuu

SEQ ID NO: 3562078 - RNA, 17 nt, Human
uguucaguguaauuucu

SEQ ID NO: 3562079 - RNA, 22 nt, Human
uguucaguguaauuucuuugcc

SEQ ID NO: 3562080 - RNA, 16 nt, Human
uguucaguuacagaaa

SEQ ID NO: 3562081 - RNA, 17 nt, Human
uguucaguuacagaaag

SEQ ID NO: 3562082 - RNA, 23 nt, Human
uguucauacauauuuuuguagca

SEQ ID NO: 3562083 - RNA, 18 nt, Human
uguucauagacccucuca

SEQ ID NO: 3562084 - RNA, 17 nt, Human
uguucauauuaagaaug

SEQ ID NO: 3562085 - RNA, 18 nt, Human
uguucaucauccagaugu

SEQ ID NO: 3562086 - RNA, 11 nt, Human
uguucauccca

SEQ ID NO: 3562087 - RNA, 21 nt, Human
uguucaucuguaacucuaaaa

SEQ ID NO: 3562088 - RNA, 20 nt, Human
uguucaugaaagauucaaug

SEQ ID NO: 3562089 - RNA, 13 nt, Human
uguucauguuugg

SEQ ID NO: 3562090 - RNA, 17 nt, Human
uguucauguuuggugca

SEQ ID NO: 3562091 - RNA, 22 nt, Human
uguucauuaaagcaugaauggu

SEQ ID NO: 3562092 - RNA, 15 nt, Human
uguucauuccuccag

SEQ ID NO: 3562093 - RNA, 16 nt, Human
uguucauuccuccagg

SEQ ID NO: 3562094 - RNA, 12 nt, Human
uguucauuguaa

SEQ ID NO: 3562095 - RNA, 13 nt, Human
uguucauuguaau

SEQ ID NO: 3562096 - RNA, 14 nt, Human
uguucauuguaaug

SEQ ID NO: 3562097 - RNA, 22 nt, Human
uguucauuguaauguuacugau

SEQ ID NO: 3562098 - RNA, 23 nt, Human
uguucauuguaauguuacugauc

SEQ ID NO: 3562099 - RNA, 17 nt, Human
uguuccaaauucaguuu

SEQ ID NO: 3562100 - RNA, 19 nt, Human
uguuccaaauucaguuuca

SEQ ID NO: 3562101 - RNA, 14 nt, Human
uguuccaagacauu

SEQ ID NO: 3562102 - RNA, 19 nt, Human
uguuccaagacauugucaa

SEQ ID NO: 3562103 - RNA, 15 nt, Human
uguuccaauaaacag

SEQ ID NO: 3562104 - RNA, 21 nt, Human
uguuccaaugccacauacuug

SEQ ID NO: 3562105 - RNA, 14 nt, Human
uguuccagcucuuu

SEQ ID NO: 3562106 - RNA, 10 nt, Human
uguuccaguu

SEQ ID NO: 3562107 - RNA, 15 nt, Human
uguuccauuaaacga

SEQ ID NO: 3562108 - RNA, 16 nt, Human
uguucccaagagcauc

SEQ ID NO: 3562109 - RNA, 20 nt, Human
uguucccaccaggcugcuca

SEQ ID NO: 3562110 - RNA, 15 nt, Human
uguuccccacuggag

SEQ ID NO: 3562111 - RNA, 16 nt, Human
uguuccccacuggagc

SEQ ID NO: 3562112 - RNA, 21 nt, Human
uguuccccucacuggaugaaa

SEQ ID NO: 3562113 - RNA, 15 nt, Human
uguuccccucucccu

SEQ ID NO: 3562114 - RNA, 19 nt, Human
uguuccccucuugucuccc

SEQ ID NO: 3562115 - RNA, 22 nt, Human
uguuccccucuugucuccccug

SEQ ID NO: 3562116 - RNA, 18 nt, Human
uguucccucugcuccugg

SEQ ID NO: 3562117 - RNA, 19 nt, Human
uguucccucugcuccugga

SEQ ID NO: 3562118 - RNA, 22 nt, Human
uguuccgaaaccaaagaagaaa

SEQ ID NO: 3562119 - RNA, 18 nt, Human
uguuccuaaguucuuaga

SEQ ID NO: 3562120 - RNA, 20 nt, Human
uguuccuaaguucuuagaua

SEQ ID NO: 3562121 - RNA, 22 nt, Human
uguuccucaaagcuuggauuaa

SEQ ID NO: 3562122 - RNA, 21 nt, Human
uguuccuggcaauaguguguu

SEQ ID NO: 3562123 - RNA, 18 nt, Human
uguuccuucacauccugu

SEQ ID NO: 3562124 - RNA, 17 nt, Human
uguuccuuggcagugga

SEQ ID NO: 3562125 - RNA, 20 nt, Human
uguucgacagugaauauuca

SEQ ID NO: 3562126 - RNA, 20 nt, Human
uguucgcauggucacacacu

SEQ ID NO: 3562127 - RNA, 20 nt, Human
uguucggaagggguuccuca

SEQ ID NO: 3562128 - RNA, 18 nt, Human
uguucuaaagcucugaca

SEQ ID NO: 3562129 - RNA, 16 nt, Human
uguucuaacauguaau

SEQ ID NO: 3562130 - RNA, 10 nt, Human
uguucuaagg

SEQ ID NO: 3562131 - RNA, 12 nt, Human
uguucuaaggcu

SEQ ID NO: 3562132 - RNA, 18 nt, Human
uguucuaaggcucugaga

SEQ ID NO: 3562133 - RNA, 17 nt, Human
uguucuaagucuuucca

SEQ ID NO: 3562134 - RNA, 12 nt, Human
uguucuaaguuu

SEQ ID NO: 3562135 - RNA, 18 nt, Human
uguucuaaguuucuaaga

SEQ ID NO: 3562136 - RNA, 22 nt, Human
uguucuaauuaauaaauuauuu

SEQ ID NO: 3562137 - RNA, 18 nt, Human
uguucuacccguuccaaa

SEQ ID NO: 3562138 - RNA, 19 nt, Human
uguucuacccguuccaaaa

SEQ ID NO: 3562139 - RNA, 18 nt, Human
uguucuacucauauauau

SEQ ID NO: 3562140 - RNA, 15 nt, Human
uguucuacuuuguuc

SEQ ID NO: 3562141 - RNA, 18 nt, Human
uguucuagcauggcugcc

SEQ ID NO: 3562142 - RNA, 16 nt, Human
uguucuaguuuucagu

SEQ ID NO: 3562143 - RNA, 14 nt, Human
uguucuaugaacaa

SEQ ID NO: 3562144 - RNA, 18 nt, Human
uguucuaugguuaugaaa

SEQ ID NO: 3562145 - RNA, 22 nt, Human
uguucucacacuggucugcugu

SEQ ID NO: 3562146 - RNA, 12 nt, Human
uguucucagauu

SEQ ID NO: 3562147 - RNA, 14 nt, Human
uguucucagcuccc

SEQ ID NO: 3562148 - RNA, 22 nt, Human
uguucuccuagacugacccuga

SEQ ID NO: 3562149 - RNA, 13 nt, Human
uguucuccugcug

SEQ ID NO: 3562150 - RNA, 23 nt, Human
uguucuccugcugcucccucaga

SEQ ID NO: 3562151 - RNA, 20 nt, Human
uguucucuaucauuuaauaa

SEQ ID NO: 3562152 - RNA, 14 nt, Human
uguucucugggaga

SEQ ID NO: 3562153 - RNA, 16 nt, Human
uguucucugggagaaa

SEQ ID NO: 3562154 - RNA, 14 nt, Human
uguucucuucuuca

SEQ ID NO: 3562155 - RNA, 15 nt, Human
uguucucuucuucau

SEQ ID NO: 3562156 - RNA, 20 nt, Human
uguucucuucuucauucuau

SEQ ID NO: 3562157 - RNA, 15 nt, Human
uguucugaacugugg

SEQ ID NO: 3562158 - RNA, 15 nt, Human
uguucugacauuaac

SEQ ID NO: 3562159 - RNA, 16 nt, Human
uguucugacauuaaca

SEQ ID NO: 3562160 - RNA, 17 nt, Human
uguucugacauuaacag

SEQ ID NO: 3562161 - RNA, 15 nt, Human
uguucugauaaugaa

SEQ ID NO: 3562162 - RNA, 15 nt, Human
uguucugauauuaau

SEQ ID NO: 3562163 - RNA, 19 nt, Human
uguucugauuagaaaugac

SEQ ID NO: 3562164 - RNA, 14 nt, Human
uguucugcacugaa

SEQ ID NO: 3562165 - RNA, 14 nt, Human
uguucugcccccag

SEQ ID NO: 3562166 - RNA, 14 nt, Human
uguucugcuguucu

SEQ ID NO: 3562167 - RNA, 15 nt, Human
uguucugcuuuccuc

SEQ ID NO: 3562168 - RNA, 13 nt, Human
uguuucuguuauu

SEQ ID NO: 3562169 - RNA, 23 nt, Human
uguuucuuaauuuggaaacuaau

SEQ ID NO: 3562170 - RNA, 13 nt, Human
uguuucuuccugc

SEQ ID NO: 3562171 - RNA, 18 nt, Human
uguuucuuccuguuaaug

SEQ ID NO: 3562172 - RNA, 14 nt, Human
uguuucuugccuca

SEQ ID NO: 3562173 - RNA, 13 nt, Human
uguuucuugcuug

SEQ ID NO: 3562174 - RNA, 14 nt, Human
uguuucuuguuuau

SEQ ID NO: 3562175 - RNA, 15 nt, Human
uguuucuuuaaaauu

SEQ ID NO: 3562176 - RNA, 16 nt, Human
uguuucuuuaguuuuu

SEQ ID NO: 3562177 - RNA, 18 nt, Human
uguuucuuugaauuuuca

SEQ ID NO: 3562178 - RNA, 14 nt, Human
uguuucuuuguguu

SEQ ID NO: 3562179 - RNA, 13 nt, Human
uguuucuuuugua

SEQ ID NO: 3562180 - RNA, 15 nt, Human
uguuucuuuuguuug

SEQ ID NO: 3562181 - RNA, 21 nt, Human
uguuucuuuuguuugguaaau

SEQ ID NO: 3562182 - RNA, 19 nt, Human
uguuugaaaacuucagaag

SEQ ID NO: 3562183 - RNA, 16 nt, Human
uguuugaaaauauuau

SEQ ID NO: 3562184 - RNA, 19 nt, Human
uguuugaaaauauuaucuu

SEQ ID NO: 3562185 - RNA, 13 nt, Human
uguuugaaaguag

SEQ ID NO: 3562186 - RNA, 21 nt, Human
uguuugaaaugaggucuguuu

SEQ ID NO: 3562187 - RNA, 15 nt, Human
uguuugaauauggac

SEQ ID NO: 3562188 - RNA, 18 nt, Human
uguuugagauucucaaag

SEQ ID NO: 3562189 - RNA, 22 nt, Human
uguuugagcaucgcuuaggaga

SEQ ID NO: 3562190 - RNA, 23 nt, Human
uguuugagcucagacccccacuc

SEQ ID NO: 3562191 - RNA, 22 nt, Human
uguuugaggauauauuuucacu

SEQ ID NO: 3562192 - RNA, 13 nt, Human
uguuugauagauu

SEQ ID NO: 3562193 - RNA, 21 nt, Human
uguuugauauaccaaauuaaa

SEQ ID NO: 3562194 - RNA, 16 nt, Human
uguuugcaauaucgau

SEQ ID NO: 3562195 - RNA, 18 nt, Human
uguuugcaauaucgauca

SEQ ID NO: 3562196 - RNA, 20 nt, Human
uguuugcaccuuucuaguug

SEQ ID NO: 3562197 - RNA, 23 nt, Human
uguuugcaccuuucuaguugaaa

SEQ ID NO: 3562198 - RNA, 22 nt, Human
uguuugcauaaacauucuuuua

SEQ ID NO: 3562199 - RNA, 14 nt, Human
uguuugcauauaag

SEQ ID NO: 3562200 - RNA, 15 nt, Human
uguuugcaucugaaa

SEQ ID NO: 3562201 - RNA, 16 nt, Human
uguuugccaggacaug

SEQ ID NO: 3562202 - RNA, 19 nt, Human
uguuugccaggacaugcaa

SEQ ID NO: 3562203 - RNA, 14 nt, Human
uguuugccucugcc

SEQ ID NO: 3562204 - RNA, 16 nt, Human
uguuugccucugccuc

SEQ ID NO: 3562205 - RNA, 20 nt, Human
uguuugccuucuacuuuuaa

SEQ ID NO: 3562206 - RNA, 12 nt, Human
uguuugcucccc

SEQ ID NO: 3562207 - RNA, 23 nt, Human
uguuugcuccccuuccccuuccu

SEQ ID NO: 3562208 - RNA, 23 nt, Human
uguuugcucucccgguucuucca

SEQ ID NO: 3562209 - RNA, 13 nt, Human
uguuugcugcuau

SEQ ID NO: 3562210 - RNA, 18 nt, Human
uguuugcuuauuguucca

SEQ ID NO: 3562211 - RNA, 21 nt, Human
uguuugcuuauuguuccaaga

SEQ ID NO: 3562212 - RNA, 21 nt, Human
uguuugcuucaugugucccag

SEQ ID NO: 3562213 - RNA, 12 nt, Human
uguuugcuuucu

SEQ ID NO: 3562214 - RNA, 20 nt, Human
uguuuggaauguuagaauga

SEQ ID NO: 3562215 - RNA, 19 nt, Human
uguuuggagacguuuauaa

SEQ ID NO: 3562216 - RNA, 21 nt, Human
uguuuggauguaauuuagggu

SEQ ID NO: 3562217 - RNA, 22 nt, Human
uguuuggcguagcagaguuaaa

SEQ ID NO: 3562218 - RNA, 20 nt, Human
uguuugggaagagcuuagaa

SEQ ID NO: 3562219 - RNA, 15 nt, Human
uguuuggggcaggag

SEQ ID NO: 3562220 - RNA, 20 nt, Human
uguuugggggacguuucuca

SEQ ID NO: 3562221 - RNA, 23 nt, Human
uguuuggguauccugcccagugu

SEQ ID NO: 3562222 - RNA, 14 nt, Human
uguuugguaaaugu

SEQ ID NO: 3562223 - RNA, 15 nt, Human
uguuugguaaauguu

SEQ ID NO: 3562224 - RNA, 19 nt, Human
uguuuggugcauagaacug

SEQ ID NO: 3562225 - RNA, 14 nt, Human
uguuugguuuacau

SEQ ID NO: 3562226 - RNA, 16 nt, Human
uguuuguaaaaaugua

SEQ ID NO: 3562227 - RNA, 18 nt, Human
uguuuguaaauaagagau

SEQ ID NO: 3562228 - RNA, 17 nt, Human
uguuuguaagugaagug

SEQ ID NO: 3562229 - RNA, 18 nt, Human
uguuuguacaagauuguc

SEQ ID NO: 3562230 - RNA, 20 nt, Human
uguuuguacaagauugucau

SEQ ID NO: 3562231 - RNA, 15 nt, Human
uguuuguauguauaa

SEQ ID NO: 3562232 - RNA, 15 nt, Human
uguuugucauuagcc

SEQ ID NO: 3562233 - RNA, 17 nt, Human
uguuugucauuagccug

SEQ ID NO: 3562234 - RNA, 15 nt, Human
uguuugucccuucua

SEQ ID NO: 3562235 - RNA, 19 nt, Human
uguuugucucuccuuuucu

SEQ ID NO: 3562236 - RNA, 17 nt, Human
uguuugucugucuucau

SEQ ID NO: 3562237 - RNA, 16 nt, Human
uguuugucuucucccc

SEQ ID NO: 3562238 - RNA, 17 nt, Human
uguuugugcaguaacuu

SEQ ID NO: 3562239 - RNA, 23 nt, Human
uguuugugcaguaacuugggagu

SEQ ID NO: 3562240 - RNA, 15 nt, Human
uguuugugcuguggu

SEQ ID NO: 3562241 - RNA, 13 nt, Human
uguuugugcuucu

SEQ ID NO: 3562242 - RNA, 14 nt, Human
uguuugugcuucua

SEQ ID NO: 3562243 - RNA, 14 nt, Human
uguuuguggccuca

SEQ ID NO: 3562244 - RNA, 14 nt, Human
uguuugugugagag

SEQ ID NO: 3562245 - RNA, 16 nt, Human
uguuugugugucaagu

SEQ ID NO: 3562246 - RNA, 15 nt, Human
uguuuguucaucugu

SEQ ID NO: 3562247 - RNA, 14 nt, Human
uguuuguucuuguu

SEQ ID NO: 3562248 - RNA, 16 nt, Human
uguuuguugucagcug

SEQ ID NO: 3562249 - RNA, 14 nt, Human
uguuuguuuaauuu

SEQ ID NO: 3562250 - RNA, 18 nt, Human
uguuuguuuauuagauga

SEQ ID NO: 3562251 - RNA, 15 nt, Human
uguuuguuucuuugu

SEQ ID NO: 3562252 - RNA, 16 nt, Human
uguuuguuugucuguu

SEQ ID NO: 3562253 - RNA, 12 nt, Human
uguuuuaaaaaa

SEQ ID NO: 3562254 - RNA, 18 nt, Human
uguuuuaaaaaggaacug

SEQ ID NO: 3562255 - RNA, 18 nt, Human
uguuuuaaaacuggaccu

SEQ ID NO: 3562256 - RNA, 18 nt, Human
uguuuuaaaaugagaaau

SEQ ID NO: 3562257 - RNA, 23 nt, Human
uguuuuaaaaugagaaaucuaaa

SEQ ID NO: 3562258 - RNA, 22 nt, Human
uguuuuaaagaauaugacuuuu

SEQ ID NO: 3562259 - RNA, 23 nt, Human
uguuuuaaauguacagacauauu

SEQ ID NO: 3562260 - RNA, 14 nt, Human
uguuuuaaauucug

SEQ ID NO: 3562261 - RNA, 15 nt, Human
uguuuuaaauucuga

SEQ ID NO: 3562262 - RNA, 22 nt, Human
uguuuuaaauucugagacaugu

SEQ ID NO: 3562263 - RNA, 22 nt, Human
uguuuuaaauuuauuucaaaaa

SEQ ID NO: 3562264 - RNA, 11 nt, Human
uguuuuaacaa

SEQ ID NO: 3562265 - RNA, 15 nt, Human
uguuuuaagaaaugu

SEQ ID NO: 3562266 - RNA, 20 nt, Human
uguuuuaagaggcagggucu

SEQ ID NO: 3562267 - RNA, 17 nt, Human
uguuuuaaggaagaaaa

SEQ ID NO: 3562268 - RNA, 16 nt, Human
uguuuuaauaacuuau

SEQ ID NO: 3562269 - RNA, 20 nt, Human
uguuuuaaucugaaauucua

SEQ ID NO: 3562270 - RNA, 14 nt, Human
uguuuuaauuccau

SEQ ID NO: 3562271 - RNA, 16 nt, Human
uguuuuaauuccauga

SEQ ID NO: 3562272 - RNA, 21 nt, Human
uguuuuacaauaguucugugg

SEQ ID NO: 3562273 - RNA, 22 nt, Human
uguuuuacaauaguucuguggg

SEQ ID NO: 3562274 - RNA, 21 nt, Human
uguuuuacuaaagaaagauua

SEQ ID NO: 3562275 - RNA, 14 nt, Human
uguuuuacugcuuu

SEQ ID NO: 3562276 - RNA, 18 nt, Human
uguuuuacugugaaacug

SEQ ID NO: 3562277 - RNA, 13 nt, Human
uguuuuauaaaau

SEQ ID NO: 3562278 - RNA, 22 nt, Human
uguuuuauaaguucacaaaaug

SEQ ID NO: 3562279 - RNA, 17 nt, Human
uguuuuauauagcaaga

SEQ ID NO: 3562280 - RNA, 21 nt, Human
uguuuuauauagcaagacauu

SEQ ID NO: 3562281 - RNA, 12 nt, Human
uguuuuaucaug

SEQ ID NO: 3562282 - RNA, 16 nt, Human
uguuuuaugagaaagc

SEQ ID NO: 3562283 - RNA, 19 nt, Human
uguuuuaugagaaagccuu

SEQ ID NO: 3562284 - RNA, 15 nt, Human
uguuuuauuccugua

SEQ ID NO: 3562285 - RNA, 21 nt, Human
uguuuuauuuaaccucuaaau

SEQ ID NO: 3562286 - RNA, 16 nt, Human
uguuuuauuucauugg

SEQ ID NO: 3562287 - RNA, 18 nt, Human
uguuuuauuucauugguu

SEQ ID NO: 3562288 - RNA, 21 nt, Human
uguuuuauuuuaauucaguug

SEQ ID NO: 3562289 - RNA, 21 nt, Human
uguuuuauuuucaaaaccagg

SEQ ID NO: 3562290 - RNA, 22 nt, Human
uguuuucaaaccaguauacaag

SEQ ID NO: 3562291 - RNA, 15 nt, Human
uguuuucaguguaca

SEQ ID NO: 3562292 - RNA, 17 nt, Human
uguuuucaguguacaug

SEQ ID NO: 3562293 - RNA, 20 nt, Human
uguuuucauguaaauaaaua

SEQ ID NO: 3562294 - RNA, 17 nt, Human
uguuuuccagcuccuca

SEQ ID NO: 3562295 - RNA, 18 nt, Human
uguuuuccauuguuugaa

SEQ ID NO: 3562296 - RNA, 22 nt, Human
uguuuucccgagcaaagucuaa

SEQ ID NO: 3562297 - RNA, 16 nt, Human
uguuuuccgugaaaac

SEQ ID NO: 3562298 - RNA, 21 nt, Human
uguuuuccucccuucugcuac

SEQ ID NO: 3562299 - RNA, 15 nt, Human
uguuuuccuuucuca

SEQ ID NO: 3562300 - RNA, 14 nt, Human
uguuuucuagugua

SEQ ID NO: 3562301 - RNA, 18 nt, Human
uguuuucuaguguaucaa

SEQ ID NO: 3562302 - RNA, 15 nt, Human
uguuuucucuugaga

SEQ ID NO: 3562303 - RNA, 12 nt, Human
uguuuucugaau

SEQ ID NO: 3562304 - RNA, 17 nt, Human
uguuuucugacuaauua

SEQ ID NO: 3562305 - RNA, 23 nt, Human
uguuuucugagcccgggcugccu

SEQ ID NO: 3562306 - RNA, 12 nt, Human
uguuuucugugu

SEQ ID NO: 3562307 - RNA, 16 nt, Human
uguuuucuuucuuuaa

SEQ ID NO: 3562308 - RNA, 22 nt, Human
uguuuugaaaucaaugcaagag

SEQ ID NO: 3562309 - RNA, 18 nt, Human
uguuuugagcuuuccaug

SEQ ID NO: 3562310 - RNA, 18 nt, Human
uguuuugauaaaguagua

SEQ ID NO: 3562311 - RNA, 15 nt, Human
uguuuugcaagugcu

SEQ ID NO: 3562312 - RNA, 18 nt, Human
uguuuugcacagccaaau

SEQ ID NO: 3562313 - RNA, 13 nt, Human
uguuuugcaugua

SEQ ID NO: 3562314 - RNA, 19 nt, Human
uguuuugccaauuugcaca

SEQ ID NO: 3562315 - RNA, 17 nt, Human
uguuuugccagcccauu

SEQ ID NO: 3562316 - RNA, 17 nt, Human
uguuuugcuuccccucc

SEQ ID NO: 3562317 - RNA, 17 nt, Human
uguuuugcuuuuucuga

SEQ ID NO: 3562318 - RNA, 20 nt, Human
uuaagaguagcaaguucuag

SEQ ID NO: 3562319 - RNA, 21 nt, Human
uuaagagugggggagagcagg

SEQ ID NO: 3562320 - RNA, 21 nt, Human
uuaagauaauaguuuacaugu

SEQ ID NO: 3562321 - RNA, 20 nt, Human
uuaagauacaaauuaauuuu

SEQ ID NO: 3562322 - RNA, 17 nt, Human
uuaagauaguguaacuu

SEQ ID NO: 3562323 - RNA, 17 nt, Human
uuaagauggauucucag

SEQ ID NO: 3562324 - RNA, 23 nt, Human
uuaagauggauucucagauauuu

SEQ ID NO: 3562325 - RNA, 12 nt, Human
uuaagaugugaa

SEQ ID NO: 3562326 - RNA, 15 nt, Human
uuaagaugugaaaau

SEQ ID NO: 3562327 - RNA, 17 nt, Human
uuaagaugugucuucaa

SEQ ID NO: 3562328 - RNA, 15 nt, Human
uuaagauuauaauug

SEQ ID NO: 3562329 - RNA, 16 nt, Human
uuaagauuauaauugu

SEQ ID NO: 3562330 - RNA, 13 nt, Human
uuaagauuuaauu

SEQ ID NO: 3562331 - RNA, 15 nt, Human
uuaagauuuuacaaa

SEQ ID NO: 3562332 - RNA, 16 nt, Human
uuaagauuuuucucaa

SEQ ID NO: 3562333 - RNA, 14 nt, Human
uuaagcacuacaua

SEQ ID NO: 3562334 - RNA, 17 nt, Human
uuaagcacuacauaaac

SEQ ID NO: 3562335 - RNA, 15 nt, Human
uuaagcagaauugga

SEQ ID NO: 3562336 - RNA, 18 nt, Human
uuaagcagaauuggaaaa

SEQ ID NO: 3562337 - RNA, 12 nt, Human
uuaagcagcucu

SEQ ID NO: 3562338 - RNA, 17 nt, Human
uuaagcagcucuugcua

SEQ ID NO: 3562339 - RNA, 20 nt, Human
uuaagcagcucuugcuaauc

SEQ ID NO: 3562340 - RNA, 13 nt, Human
uuaagcauauauu

SEQ ID NO: 3562341 - RNA, 18 nt, Human
uuaagcauauauuuuuau

SEQ ID NO: 3562342 - RNA, 15 nt, Human
uuaagcaucacaaau

SEQ ID NO: 3562343 - RNA, 18 nt, Human
uuaagcauuaccacucag

SEQ ID NO: 3562344 - RNA, 20 nt, Human
uuaagcauuacucuuguaag

SEQ ID NO: 3562345 - RNA, 20 nt, Human
uuaagcauuggguggguaaa

SEQ ID NO: 3562346 - RNA, 23 nt, Human
uuaagcauuguuugcuuauuguu

SEQ ID NO: 3562347 - RNA, 16 nt, Human
uuaagccacugccucu

SEQ ID NO: 3562348 - RNA, 16 nt, Human
uuaagccaucuuggua

SEQ ID NO: 3562349 - RNA, 15 nt, Human
uuaagccuaaagauu

SEQ ID NO: 3562350 - RNA, 16 nt, Human
uuaagccuaaagauuu

SEQ ID NO: 3562351 - RNA, 22 nt, Human
uuaagccucauauuuaaagaca

SEQ ID NO: 3562352 - RNA, 15 nt, Human
uuaagccuuuggaaa

SEQ ID NO: 3562353 - RNA, 15 nt, Human
uuaagcucugagcug

SEQ ID NO: 3562354 - RNA, 17 nt, Human
uuaagcuguuacugucu

SEQ ID NO: 3562355 - RNA, 14 nt, Human
uuaagcuguuucca

SEQ ID NO: 3562356 - RNA, 12 nt, Human
uuaagcuuauuu

SEQ ID NO: 3562357 - RNA, 14 nt, Human
uuaagcuuuuugga

SEQ ID NO: 3562358 - RNA, 22 nt, Human
uuaaggagaaucauguuucuuu

SEQ ID NO: 3562359 - RNA, 19 nt, Human
uuaaggagauguaagagcu

SEQ ID NO: 3562360 - RNA, 17 nt, Human
uuaaggaugcuuguaca

SEQ ID NO: 3562361 - RNA, 22 nt, Human
uuaaggaugcuuguacauaaug

SEQ ID NO: 3562362 - RNA, 13 nt, Human
uuaaggauuuuau

SEQ ID NO: 3562363 - RNA, 15 nt, Human
uuaaggauuuuaugc

SEQ ID NO: 3562364 - RNA, 18 nt, Human
uuaaggauuuuaugcuuu

SEQ ID NO: 3562365 - RNA, 20 nt, Human
uuaaggauuuuaugcuuuaa

SEQ ID NO: 3562366 - RNA, 22 nt, Human
uuaaggcaacugaacaaaaaaa

SEQ ID NO: 3562367 - RNA, 13 nt, Human
uuaaggcauuugu

SEQ ID NO: 3562368 - RNA, 15 nt, Human
uuaaggccugaauca

SEQ ID NO: 3562369 - RNA, 16 nt, Human
uuaagggcaugccuug

SEQ ID NO: 3562370 - RNA, 19 nt, Human
uuaagggcaugccuugugc

SEQ ID NO: 3562371 - RNA, 22 nt, Human
uuaagggccaccuacaauacau

SEQ ID NO: 3562372 - RNA, 17 nt, Human
uuaaggggaagaaugaa

SEQ ID NO: 3562373 - RNA, 18 nt, Human
uuaaggggaagaaugaaa

SEQ ID NO: 3562374 - RNA, 17 nt, Human
uuaaggucucucuuugg

SEQ ID NO: 3562375 - RNA, 19 nt, Human
uuaaggugagcauaaauca

SEQ ID NO: 3562376 - RNA, 14 nt, Human
uuaagguguagcca

SEQ ID NO: 3562377 - RNA, 16 nt, Human
uuaagguguuugaaaa

SEQ ID NO: 3562378 - RNA, 17 nt, Human
uuaagguguuugaaaau

SEQ ID NO: 3562379 - RNA, 21 nt, Human
uuaaguaauguggaagaaaau

SEQ ID NO: 3562380 - RNA, 13 nt, Human
uuaaguagauuuc

SEQ ID NO: 3562381 - RNA, 14 nt, Human
uuaaguaucuuuuu

SEQ ID NO: 3562382 - RNA, 19 nt, Human
uuaaguaucuuuuuucaaa

SEQ ID NO: 3562383 - RNA, 19 nt, Human
uuaaguauuuauauauuua

SEQ ID NO: 3562384 - RNA, 15 nt, Human
uuaagugaaauuuau

SEQ ID NO: 3562385 - RNA, 23 nt, Human
uuaagugaggaaaucaaagugcu

SEQ ID NO: 3562386 - RNA, 16 nt, Human
uuaagugaugaacauu

SEQ ID NO: 3562387 - RNA, 17 nt, Human
uuaagugcguguguaga

SEQ ID NO: 3562388 - RNA, 14 nt, Human
uuaagugcugcauu

SEQ ID NO: 3562389 - RNA, 16 nt, Human
uuaagugcugcauuua

SEQ ID NO: 3562390 - RNA, 16 nt, Human
uuaagugcuuuguaau

SEQ ID NO: 3562391 - RNA, 16 nt, Human
uuaagugguuugauca

SEQ ID NO: 3562392 - RNA, 21 nt, Human
uuaaguguuguaaauauuuau

SEQ ID NO: 3562393 - RNA, 22 nt, Human
uuaaguuacacauuuuucagau

SEQ ID NO: 3562394 - RNA, 18 nt, Human
uuaaguuagggaauggca

SEQ ID NO: 3562395 - RNA, 20 nt, Human
uuaaguuauuuuaccuguuu

SEQ ID NO: 3562396 - RNA, 13 nt, Human
uuaaguuccagca

SEQ ID NO: 3562397 - RNA, 19 nt, Human
uuaaguucucaaugugaaa

SEQ ID NO: 3562398 - RNA, 19 nt, Human
uuaaguuguuugcauguga

SEQ ID NO: 3562399 - RNA, 22 nt, Human
uuaaguuucaaacuuacuauuu

SEQ ID NO: 3562400 - RNA, 11 nt, Human
uuaaguuucuc

SEQ ID NO: 3562401 - RNA, 17 nt, Human
uuaaguuucucugcaga

SEQ ID NO: 3562402 - RNA, 13 nt, Human
uuaauaaaaagac

SEQ ID NO: 3562403 - RNA, 14 nt, Human
uuaauaaaaaggca

SEQ ID NO: 3562404 - RNA, 12 nt, Human
uuaauaaaagaa

SEQ ID NO: 3562405 - RNA, 16 nt, Human
uuaauaaaaguacaug

SEQ ID NO: 3562406 - RNA, 14 nt, Human
uuaauaaacuacuc

SEQ ID NO: 3562407 - RNA, 21 nt, Human
uuaauaaagaauuaacagaga

SEQ ID NO: 3562408 - RNA, 15 nt, Human
uuaauaaguuucacu

SEQ ID NO: 3562409 - RNA, 14 nt, Human
uuaauaauauacuu

SEQ ID NO: 3562410 - RNA, 18 nt, Human
uuaauaauguuucaaaca

SEQ ID NO: 3562411 - RNA, 19 nt, Human
uuaauaauuuagacuucaa

SEQ ID NO: 3562412 - RNA, 15 nt, Human
uuaauaccacagcuu

SEQ ID NO: 3562413 - RNA, 22 nt, Human
uuaauacucaaaugaguaacau

SEQ ID NO: 3562414 - RNA, 20 nt, Human
uuaauacucauccuuguaua

SEQ ID NO: 3562415 - RNA, 14 nt, Human
uuaauacucuauuu

SEQ ID NO: 3562416 - RNA, 14 nt, Human
uuaauacuguuauu

SEQ ID NO: 3562417 - RNA, 23 nt, Human
uuaauacuguuauucuuugcacu

SEQ ID NO: 3562418 - RNA, 23 nt, Human
uuaauagagaaggaaagcuuugg

SEQ ID NO: 3562419 - RNA, 16 nt, Human
uuaauagcaaagaauu

SEQ ID NO: 3562420 - RNA, 20 nt, Human
uuaauagcgucauaacuaga

SEQ ID NO: 3562421 - RNA, 18 nt, Human
uuaauagcuuuuauugua

SEQ ID NO: 3562422 - RNA, 20 nt, Human
uuaauagcuuuuauuguaua

SEQ ID NO: 3562423 - RNA, 22 nt, Human
uuaauagcuuuuauuguauaaa

SEQ ID NO: 3562424 - RNA, 19 nt, Human
uuaauaguaauuuguaaag

SEQ ID NO: 3562425 - RNA, 17 nt, Human
uuaauaguguuaaucaa

SEQ ID NO: 3562426 - RNA, 19 nt, Human
uuaauaguguuaaucaauu

SEQ ID NO: 3562427 - RNA, 15 nt, Human
uuaauaguuugucua

SEQ ID NO: 3562428 - RNA, 19 nt, Human
uuaauaguuugucuauuuu

SEQ ID NO: 3562429 - RNA, 22 nt, Human
uuaauauaaaguaguccuguga

SEQ ID NO: 3562430 - RNA, 14 nt, Human
uuaauauaaaugca

SEQ ID NO: 3562431 - RNA, 14 nt, Human
uuaauauaaauuca

SEQ ID NO: 3562432 - RNA, 14 nt, Human
uuaauuugauuaac

SEQ ID NO: 3562433 - RNA, 19 nt, Human
uuaauuugauuaacaaaua

SEQ ID NO: 3562434 - RNA, 21 nt, Human
uuaauuugauuaacaaauaug

SEQ ID NO: 3562435 - RNA, 11 nt, Human
uuaauuuggaa

SEQ ID NO: 3562436 - RNA, 19 nt, Human
uuaauuuggaccauuuucc

SEQ ID NO: 3562437 - RNA, 21 nt, Human
uuaauuuggaccauuuuccug

SEQ ID NO: 3562438 - RNA, 13 nt, Human
uuaauuugugugu

SEQ ID NO: 3562439 - RNA, 17 nt, Human
uuaauuuuauucaagaa

SEQ ID NO: 3562440 - RNA, 13 nt, Human
uuaauuuuccugg

SEQ ID NO: 3562441 - RNA, 20 nt, Human
uuaauuuugaagugcuguuu

SEQ ID NO: 3562442 - RNA, 23 nt, Human
uuaauuuugaagugcuguuuauu

SEQ ID NO: 3562443 - RNA, 18 nt, Human
uuaauuuugguuguauuc

SEQ ID NO: 3562444 - RNA, 23 nt, Human
uuaauuuuguaaaggugaaaaaa

SEQ ID NO: 3562445 - RNA, 17 nt, Human
uuaauuuuguauuuucc

SEQ ID NO: 3562446 - RNA, 12 nt, Human
uuaauuuugucu

SEQ ID NO: 3562447 - RNA, 17 nt, Human
uuaauuuuuaaugauga

SEQ ID NO: 3562448 - RNA, 18 nt, Human
uuaauuuuuauuucuucc

SEQ ID NO: 3562449 - RNA, 18 nt, Human
uuaauuuuuccaacuacu

SEQ ID NO: 3562450 - RNA, 18 nt, Human
uuaauuuuuugguacaaa

SEQ ID NO: 3562451 - RNA, 20 nt, Human
uuaauuuuuugguacaaaaa

SEQ ID NO: 3562452 - RNA, 18 nt, Human
uuaauuuuuuuaaccaaa

SEQ ID NO: 3562453 - RNA, 19 nt, Human
uuacaaaaacacuucguuc

SEQ ID NO: 3562454 - RNA, 15 nt, Human
uuacaaaaagacacu

SEQ ID NO: 3562455 - RNA, 18 nt, Human
uuacaaaacaaacucauu

SEQ ID NO: 3562456 - RNA, 14 nt, Human
uuacaaaagaugua

SEQ ID NO: 3562457 - RNA, 18 nt, Human
uuacaaaagauguauccu

SEQ ID NO: 3562458 - RNA, 12 nt, Human
uuacaaaaugua

SEQ ID NO: 3562459 - RNA, 13 nt, Human
uuacaaaauguaa

SEQ ID NO: 3562460 - RNA, 16 nt, Human
uuacaaaauguaacug

SEQ ID NO: 3562461 - RNA, 17 nt, Human
uuacaaaauguaacugu

SEQ ID NO: 3562462 - RNA, 18 nt, Human
uuacaaaauguaacuguu

SEQ ID NO: 3562463 - RNA, 19 nt, Human
uuacaaaauguaacuguua

SEQ ID NO: 3562464 - RNA, 13 nt, Human
uuacaaacuacag

SEQ ID NO: 3562465 - RNA, 14 nt, Human
uuacaaacugcaau

SEQ ID NO: 3562466 - RNA, 15 nt, Human
uuacaaacugcaaua

SEQ ID NO: 3562467 - RNA, 22 nt, Human
uuacaaacugcaauagagacug

SEQ ID NO: 3562468 - RNA, 23 nt, Human
uuacaaacugcaauagagacugu

SEQ ID NO: 3562469 - RNA, 15 nt, Human
uuacaaaguguguau

SEQ ID NO: 3562470 - RNA, 22 nt, Human
uuacaaaucagaagucaucuug

SEQ ID NO: 3562471 - RNA, 12 nt, Human
uuacaaaugauu

SEQ ID NO: 3562472 - RNA, 20 nt, Human
uuacaaaugauugcuuuuaa

SEQ ID NO: 3562473 - RNA, 21 nt, Human
uuacaaaugauugcuuuuaaa

SEQ ID NO: 3562474 - RNA, 18 nt, Human
uuacaaauguuaaaaugu

SEQ ID NO: 3562475 - RNA, 14 nt, Human
uuacaacacuuuaa

SEQ ID NO: 3562476 - RNA, 18 nt, Human
uuacaacagauuugugaa

SEQ ID NO: 3562477 - RNA, 21 nt, Human
uuacaacagauuugugaacuc

SEQ ID NO: 3562478 - RNA, 16 nt, Human
uuacaaccuagaagua

SEQ ID NO: 3562479 - RNA, 19 nt, Human
uuacaacggagucaaaaau

SEQ ID NO: 3562480 - RNA, 20 nt, Human
uuacaagcgugagccacugc

SEQ ID NO: 3562481 - RNA, 21 nt, Human
uuacaagcgugagccacugca

SEQ ID NO: 3562482 - RNA, 17 nt, Human
uuacaaguaacaaaaau

SEQ ID NO: 3562483 - RNA, 19 nt, Human
uuacaaguaacaaaaauaa

SEQ ID NO: 3562484 - RNA, 18 nt, Human
uuacaauauuugugugcu

SEQ ID NO: 3562485 - RNA, 22 nt, Human
uuacaauauuugugugcuaaac

SEQ ID NO: 3562486 - RNA, 12 nt, Human
uuacaaucaaag

SEQ ID NO: 3562487 - RNA, 17 nt, Human
uuacaaucauugcugaa

SEQ ID NO: 3562488 - RNA, 14 nt, Human
uuacaauguaauua

SEQ ID NO: 3562489 - RNA, 15 nt, Human
uuacaauguaauuau

SEQ ID NO: 3562490 - RNA, 16 nt, Human
uuacaauguaauuauu

SEQ ID NO: 3562491 - RNA, 14 nt, Human
uuacaauugaaaug

SEQ ID NO: 3562492 - RNA, 13 nt, Human
uuacaauuuacaa

SEQ ID NO: 3562493 - RNA, 16 nt, Human
uuacaauuuacaaagu

SEQ ID NO: 3562494 - RNA, 15 nt, Human
uuacaauuuuuuauc

SEQ ID NO: 3562495 - RNA, 17 nt, Human
uuacaauuuuuuaucau

SEQ ID NO: 3562496 - RNA, 20 nt, Human
uuacaauuuuuuaucaugca

SEQ ID NO: 3562497 - RNA, 22 nt, Human
uuacaauuuuuuuaauuuugua

SEQ ID NO: 3562498 - RNA, 16 nt, Human
uuacacaaaacaaaug

SEQ ID NO: 3562499 - RNA, 19 nt, Human
uuacacacgugcaauuugu

SEQ ID NO: 3562500 - RNA, 19 nt, Human
uuacacagaaaugcugcug

SEQ ID NO: 3562501 - RNA, 17 nt, Human
uuacacagugugaauaa

SEQ ID NO: 3562502 - RNA, 16 nt, Human
uuacacauuuguacag

SEQ ID NO: 3562503 - RNA, 15 nt, Human
uuacacauuuuucag

SEQ ID NO: 3562504 - RNA, 21 nt, Human
uuacaccagccucgucuucau

SEQ ID NO: 3562505 - RNA, 22 nt, Human
uuacacuacacacuguguacug

SEQ ID NO: 3562506 - RNA, 14 nt, Human
uuacacucuuugua

SEQ ID NO: 3562507 - RNA, 15 nt, Human
uuacacucuuuguaa

SEQ ID NO: 3562508 - RNA, 21 nt, Human
uuacacugccuguauacuuua

SEQ ID NO: 3562509 - RNA, 21 nt, Human
uuacacuggcaaugguaguuu

SEQ ID NO: 3562510 - RNA, 14 nt, Human
uuacacuguauuug

SEQ ID NO: 3562511 - RNA, 17 nt, Human
uuacacuguauuuguau

SEQ ID NO: 3562512 - RNA, 17 nt, Human
uuacacuguuagaacac

SEQ ID NO: 3562513 - RNA, 19 nt, Human
uuacacuguuagaacacua

SEQ ID NO: 3562514 - RNA, 20 nt, Human
uuacacuguuagaacacuau

SEQ ID NO: 3562515 - RNA, 20 nt, Human
uuacacuuuaugcacaaaau

SEQ ID NO: 3562516 - RNA, 13 nt, Human
uuacagaaaaaga

SEQ ID NO: 3562517 - RNA, 15 nt, Human
uuacagaaauacuau

SEQ ID NO: 3562518 - RNA, 23 nt, Human
uuacagaauugcuuguuugcuuc

SEQ ID NO: 3562519 - RNA, 19 nt, Human
uuacagacgcugcugucac

SEQ ID NO: 3562520 - RNA, 20 nt, Human
uuacagagacagaaagcaga

SEQ ID NO: 3562521 - RNA, 18 nt, Human
uuacagauaggccuucuu

SEQ ID NO: 3562522 - RNA, 23 nt, Human
uuacagauaguaucuagcaauca

SEQ ID NO: 3562523 - RNA, 18 nt, Human
uuacagauauuugucaug

SEQ ID NO: 3562524 - RNA, 21 nt, Human
uuacagauuuauuccuuuguu

SEQ ID NO: 3562525 - RNA, 19 nt, Human
uuacagcucauuaaacuuu

SEQ ID NO: 3562526 - RNA, 21 nt, Human
uuacagcucugacuuuacacu

SEQ ID NO: 3562527 - RNA, 20 nt, Human
uuacagcuggguggcacugc

SEQ ID NO: 3562528 - RNA, 15 nt, Human
uuacaggaaguacug

SEQ ID NO: 3562529 - RNA, 22 nt, Human
uuacaggaaguacuggagaaaa

SEQ ID NO: 3562530 - RNA, 17 nt, Human
uuacaggcaccgagaau

SEQ ID NO: 3562531 - RNA, 16 nt, Human
uuacaggcuccugcca

SEQ ID NO: 3562532 - RNA, 18 nt, Human
uuacaggcuccugccacc

SEQ ID NO: 3562533 - RNA, 15 nt, Human
uuacagggagccucc

SEQ ID NO: 3562534 - RNA, 21 nt, Human
uuacagggagccuccugccca

SEQ ID NO: 3562535 - RNA, 20 nt, Human
uuacagggaugagccaccgc

SEQ ID NO: 3562536 - RNA, 20 nt, Human
uuacagggcacaggccaugg

SEQ ID NO: 3562537 - RNA, 17 nt, Human
uuacagguaccaguucu

SEQ ID NO: 3562538 - RNA, 15 nt, Human
uuacaggugauuaac

SEQ ID NO: 3562539 - RNA, 20 nt, Human
uuacaggugauuaacuugga

SEQ ID NO: 3562540 - RNA, 19 nt, Human
uuacaguaggagcccagcu

SEQ ID NO: 3562541 - RNA, 18 nt, Human
uuacaguauaauuaacau

SEQ ID NO: 3562542 - RNA, 20 nt, Human
uuacaguauaauuaacaugu

SEQ ID NO: 3562543 - RNA, 17 nt, Human
uuacaguaugcuugcuc

SEQ ID NO: 3562544 - RNA, 20 nt, Human
uuacagugaaaauguaagcu

SEQ ID NO: 3562545 - RNA, 14 nt, Human
uuacagugcagugc

SEQ ID NO: 3562546 - RNA, 18 nt, Human
uuacagugccuaaaauaa

SEQ ID NO: 3562547 - RNA, 17 nt, Human
uuacaguggauugcuca

SEQ ID NO: 3562548 - RNA, 17 nt, Human
uuacaguuaaggaauau

SEQ ID NO: 3562549 - RNA, 13 nt, Human
uuacaguuacuuu

SEQ ID NO: 3562550 - RNA, 16 nt, Human
uuacaguuacuuuucc

SEQ ID NO: 3562551 - RNA, 16 nt, Human
uuacaguuauagaaag

SEQ ID NO: 3562552 - RNA, 11 nt, Human
uuacaguucug

SEQ ID NO: 3562553 - RNA, 13 nt, Human
uuacaguucugug

SEQ ID NO: 3562554 - RNA, 13 nt, Human
uuacauaacugcc

SEQ ID NO: 3562555 - RNA, 15 nt, Human
uuacauaacugccuu

SEQ ID NO: 3562556 - RNA, 17 nt, Human
uuacauaacugccuuga

SEQ ID NO: 3562557 - RNA, 21 nt, Human
uuacauaauuuaguuguuucu

SEQ ID NO: 3562558 - RNA, 16 nt, Human
uuacauagguauauau

SEQ ID NO: 3562559 - RNA, 18 nt, Human
uuacauagucugaaguga

SEQ ID NO: 3562560 - RNA, 16 nt, Human
uuacauaguguaggcu

SEQ ID NO: 3562561 - RNA, 22 nt, Human
uuacauaguuuuaaacucauuu

SEQ ID NO: 3562562 - RNA, 22 nt, Human
uuacauaucaccucauggccua

SEQ ID NO: 3562563 - RNA, 22 nt, Human
uuacauauuugcauauguauga

SEQ ID NO: 3562564 - RNA, 14 nt, Human
uuacaucauuucuu

SEQ ID NO: 3562565 - RNA, 18 nt, Human
uuacaucauuuuuguauc

SEQ ID NO: 3562566 - RNA, 17 nt, Human
uuacauccuuguggcac

SEQ ID NO: 3562567 - RNA, 21 nt, Human
uuacauccuuguggcacauuu

SEQ ID NO: 3562568 - RNA, 16 nt, Human
uuacaugaaguauuuu

SEQ ID NO: 3562569 - RNA, 15 nt, Human
uuacaugagaacaga

SEQ ID NO: 3562570 - RNA, 17 nt, Human
uuacaugagaacagacu

SEQ ID NO: 3562571 - RNA, 22 nt, Human
uuacaugcagccacuuaggaca

SEQ ID NO: 3562572 - RNA, 20 nt, Human
uuacaugcuuauuccaugac

SEQ ID NO: 3562573 - RNA, 18 nt, Human
uuacauguguagccuaug

SEQ ID NO: 3562574 - RNA, 14 nt, Human
uuacauguuugcac

SEQ ID NO: 3562575 - RNA, 16 nt, Human
uuacauguuuuaaaga

SEQ ID NO: 3562576 - RNA, 14 nt, Human
uuacauuaauguua

SEQ ID NO: 3562577 - RNA, 19 nt, Human
uuacauugcuggucuugua

SEQ ID NO: 3562578 - RNA, 22 nt, Human
uuacauugcuggucuuguaaga

SEQ ID NO: 3562579 - RNA, 16 nt, Human
uuacauuguucaauua

SEQ ID NO: 3562580 - RNA, 17 nt, Human
uuacauuguuugucugu

SEQ ID NO: 3562581 - RNA, 17 nt, Human
uuacauuuaaaccuuuu

SEQ ID NO: 3562582 - RNA, 16 nt, Human
uuacauuuaaagcauu

SEQ ID NO: 3562583 - RNA, 22 nt, Human
uuacauuuaaagcauugcuguu

SEQ ID NO: 3562584 - RNA, 15 nt, Human
uuacauuucgauguu

SEQ ID NO: 3562585 - RNA, 13 nt, Human
uuacauuuguaau

SEQ ID NO: 3562586 - RNA, 14 nt, Human
uuacauuuguaauu

SEQ ID NO: 3562587 - RNA, 18 nt, Human
uuacauuuuaaacacauu

SEQ ID NO: 3562588 - RNA, 14 nt, Human
uuacauuuuacaca

SEQ ID NO: 3562589 - RNA, 20 nt, Human
uuacauuuuauuaagcuuuu

SEQ ID NO: 3562590 - RNA, 12 nt, Human
uuacauuuucag

SEQ ID NO: 3562591 - RNA, 14 nt, Human
uuacauuuuguaua

SEQ ID NO: 3562592 - RNA, 16 nt, Human
uuacauuuuuacaaua

SEQ ID NO: 3562593 - RNA, 17 nt, Human
uuacauuuuuacaauaa

SEQ ID NO: 3562594 - RNA, 13 nt, Human
uuacauuuuuauu

SEQ ID NO: 3562595 - RNA, 18 nt, Human
uuacauuuuuauuuauga

SEQ ID NO: 3562596 - RNA, 17 nt, Human
uuaccaaacagcaaacc

SEQ ID NO: 3562597 - RNA, 13 nt, Human
uuaccaaccuguu

SEQ ID NO: 3562598 - RNA, 13 nt, Human
uuaccaacuuucu

SEQ ID NO: 3562599 - RNA, 14 nt, Human
uuaccaacuuucug

SEQ ID NO: 3562600 - RNA, 18 nt, Human
uuaccaacuuucuguaaa

SEQ ID NO: 3562601 - RNA, 23 nt, Human
uuaccaauugaaguaaaaugugg

SEQ ID NO: 3562602 - RNA, 18 nt, Human
uuaccacacaucuaugau

SEQ ID NO: 3562603 - RNA, 12 nt, Human
uuaccaccccca

SEQ ID NO: 3562604 - RNA, 13 nt, Human
uuaccacugaaga

SEQ ID NO: 3562605 - RNA, 21 nt, Human
uuaccagacgguucaccagcc

SEQ ID NO: 3562606 - RNA, 22 nt, Human
uuaccagacgguucaccagccu

SEQ ID NO: 3562607 - RNA, 22 nt, Human
uuaccagcaagaauaaaaaaga

SEQ ID NO: 3562608 - RNA, 21 nt, Human
uuaccagccuccguauuucag

SEQ ID NO: 3562609 - RNA, 23 nt, Human
uuaccagccuccguauuucagac

SEQ ID NO: 3562610 - RNA, 17 nt, Human
uuaccagggauguagau

SEQ ID NO: 3562611 - RNA, 20 nt, Human
uuaccaguaaaguguaacau

SEQ ID NO: 3562612 - RNA, 21 nt, Human
uuaccaguauuuaacuucuga

SEQ ID NO: 3562613 - RNA, 21 nt, Human
uuaccagucuuuaaaggccca

SEQ ID NO: 3562614 - RNA, 17 nt, Human
uuaccauaguuuucuca

SEQ ID NO: 3562615 - RNA, 21 nt, Human
uuaccauuugcuacuguacau

SEQ ID NO: 3562616 - RNA, 23 nt, Human
uuaccauuuguaauaaaguauau

SEQ ID NO: 3562617 - RNA, 19 nt, Human
uuaccauuuguuaauauca

SEQ ID NO: 3562618 - RNA, 18 nt, Human
uuacccacucggucccag

SEQ ID NO: 3562619 - RNA, 16 nt, Human
uuacccagaaugucag

SEQ ID NO: 3562620 - RNA, 22 nt, Human
uuacccagagaauauauacauu

SEQ ID NO: 3562621 - RNA, 16 nt, Human
uuacccaggugggucc

SEQ ID NO: 3562622 - RNA, 16 nt, Human
uuacccauauccccuc

SEQ ID NO: 3562623 - RNA, 17 nt, Human
uuacccauauccccucu

SEQ ID NO: 3562624 - RNA, 13 nt, Human
uuacccaugaaaa

SEQ ID NO: 3562625 - RNA, 22 nt, Human
uuaccccacaacgugcaacuga

SEQ ID NO: 3562626 - RNA, 14 nt, Human
uuaccccuuagccu

SEQ ID NO: 3562627 - RNA, 17 nt, Human
uuacccgguuucuuuuu

SEQ ID NO: 3562628 - RNA, 17 nt, Human
uuacccuauaucuauaa

SEQ ID NO: 3562629 - RNA, 18 nt, Human
uuacccuggccccucucc

SEQ ID NO: 3562630 - RNA, 20 nt, Human
uuacccuggccccucucccu

SEQ ID NO: 3562631 - RNA, 13 nt, Human
uuacccuuagaau

SEQ ID NO: 3562632 - RNA, 12 nt, Human
uuacccuucugu

SEQ ID NO: 3562633 - RNA, 22 nt, Human
uuacccuucugugcccagcuca

SEQ ID NO: 3562634 - RNA, 22 nt, Human
uuaccgcguaaugcgccaauaa

SEQ ID NO: 3562635 - RNA, 15 nt, Human
uuaccgcguuguaaa

SEQ ID NO: 3562636 - RNA, 16 nt, Human
uuaccgcguuguaaaa

SEQ ID NO: 3562637 - RNA, 18 nt, Human
uuaccuaaacagauauaa

SEQ ID NO: 3562638 - RNA, 21 nt, Human
uuaccuaaacagauauaaaug

SEQ ID NO: 3562639 - RNA, 19 nt, Human
uuaccuaccacaugccaag

SEQ ID NO: 3562640 - RNA, 23 nt, Human
uuaccuacuuugacuuuuugcau

SEQ ID NO: 3562641 - RNA, 18 nt, Human
uuaccuagcuaauuauuu

SEQ ID NO: 3562642 - RNA, 20 nt, Human
uuaccuaguagucauuucau

SEQ ID NO: 3562643 - RNA, 15 nt, Human
uuaccuagugaaacu

SEQ ID NO: 3562644 - RNA, 12 nt, Human
uuaccucagccu

SEQ ID NO: 3562645 - RNA, 18 nt, Human
uuaccucagccugggcgc

SEQ ID NO: 3562646 - RNA, 18 nt, Human
uuaccuccaacagaacua

SEQ ID NO: 3562647 - RNA, 23 nt, Human
uuaccuccaacagaacuaaaugu

SEQ ID NO: 3562648 - RNA, 11 nt, Human
uuaccuccuga

SEQ ID NO: 3562649 - RNA, 13 nt, Human
uuaccuccugccc

SEQ ID NO: 3562650 - RNA, 11 nt, Human
uuaccucugau

SEQ ID NO: 3562651 - RNA, 15 nt, Human
uuaccucuuaacaau

SEQ ID NO: 3562652 - RNA, 16 nt, Human
uuaccucuuuggaaaa

SEQ ID NO: 3562653 - RNA, 22 nt, Human
uuaccugaagggguuuucuuga

SEQ ID NO: 3562654 - RNA, 19 nt, Human
uuaccugaccucuugcugu

SEQ ID NO: 3562655 - RNA, 23 nt, Human
uuaccugaccucuugcugucucu

SEQ ID NO: 3562656 - RNA, 18 nt, Human
uuaccugaguugaagagg

SEQ ID NO: 3562657 - RNA, 21 nt, Human
uuaccuggcuuauuuaauaug

SEQ ID NO: 3562658 - RNA, 18 nt, Human
uuaccugggcauucuugu

SEQ ID NO: 3562659 - RNA, 15 nt, Human
uuaccuguauacagu

SEQ ID NO: 3562660 - RNA, 13 nt, Human
uuaccugucacau

SEQ ID NO: 3562661 - RNA, 23 nt, Human
uuaccuuaaaacuaggcauuugu

SEQ ID NO: 3562662 - RNA, 14 nt, Human
uuaccuuacagaag

SEQ ID NO: 3562663 - RNA, 22 nt, Human
uuaccuuagauuagcucuggac

SEQ ID NO: 3562664 - RNA, 15 nt, Human
uuaccuuauugcacu

SEQ ID NO: 3562665 - RNA, 16 nt, Human
uuaccuucaauaaagu

SEQ ID NO: 3562666 - RNA, 18 nt, Human
uuaccuugaacugaaggc

SEQ ID NO: 3562667 - RNA, 16 nt, Human
uuaccuuguauacugu

SEQ ID NO: 3562668 - RNA, 16 nt, Human
uuaccuugucauuuug

SEQ ID NO: 3562669 - RNA, 13 nt, Human
uuaccuuugacaa

SEQ ID NO: 3562670 - RNA, 19 nt, Human
uuaccuuuuaauuaaugaa

SEQ ID NO: 3562671 - RNA, 20 nt, Human
uuaccuuuuaccagcuuuua

SEQ ID NO: 3562672 - RNA, 18 nt, Human
uuaccuuuuuauuugcau

SEQ ID NO: 3562673 - RNA, 19 nt, Human
uuaccuuuuuuauacauaa

SEQ ID NO: 3562674 - RNA, 22 nt, Human
uuaccuuuuuuauacauaaaca

SEQ ID NO: 3562675 - RNA, 16 nt, Human
uuacgaauauuuucag

SEQ ID NO: 3562676 - RNA, 13 nt, Human
uuacgcuuugauu

SEQ ID NO: 3562677 - RNA, 16 nt, Human
uuacgcuuugauucau

SEQ ID NO: 3562678 - RNA, 16 nt, Human
uuacgguaguuaggau

SEQ ID NO: 3562679 - RNA, 20 nt, Human
uuacguaguguagauuuguu

SEQ ID NO: 3562680 - RNA, 17 nt, Human
uuacguguuuaaaaaaa

SEQ ID NO: 3562681 - RNA, 17 nt, Human
uuacuaaaaaguauaaa

SEQ ID NO: 3562682 - RNA, 17 nt, Human
uuacuaaaauauauaua

SEQ ID NO: 3562683 - RNA, 16 nt, Human
uuacuaaaauggacug

SEQ ID NO: 3562684 - RNA, 17 nt, Human
uuacuaaaauggacugu

SEQ ID NO: 3562685 - RNA, 16 nt, Human
uuacuaaacauuuugu

SEQ ID NO: 3562686 - RNA, 18 nt, Human
uuacuaaagaaaauaucu

SEQ ID NO: 3562687 - RNA, 22 nt, Human
uuacuaaagaaaauaucugaaa

SEQ ID NO: 3562688 - RNA, 15 nt, Human
uuacuaaagaaagau

SEQ ID NO: 3562689 - RNA, 18 nt, Human
uuacuaaagaaagauuac

SEQ ID NO: 3562690 - RNA, 20 nt, Human
uuacuaacuaaacucucuuu

SEQ ID NO: 3562691 - RNA, 11 nt, Human
uuacuaacuuc

SEQ ID NO: 3562692 - RNA, 21 nt, Human
uuacuaacuucuaaaacugua

SEQ ID NO: 3562693 - RNA, 15 nt, Human
uuacuaagaagaaaa

SEQ ID NO: 3562694 - RNA, 21 nt, Human
uuacuaagaugacauugcuaa

SEQ ID NO: 3562695 - RNA, 18 nt, Human
uuacuaagccacaagaaa

SEQ ID NO: 3562696 - RNA, 16 nt, Human
uuacuaauagacaauu

SEQ ID NO: 3562697 - RNA, 16 nt, Human
uuacuaauguaaaaug

SEQ ID NO: 3562698 - RNA, 14 nt, Human
uuacuacaaaauuu

SEQ ID NO: 3562699 - RNA, 20 nt, Human
uuacuacaaaauuugaaauu

SEQ ID NO: 3562700 - RNA, 19 nt, Human
uuacuacaauauguacauu

SEQ ID NO: 3562701 - RNA, 15 nt, Human
uuacuacaguuuuua

SEQ ID NO: 3562702 - RNA, 14 nt, Human
uuacuacaugcacu

SEQ ID NO: 3562703 - RNA, 21 nt, Human
uuacuacuucucucuguauuu

SEQ ID NO: 3562704 - RNA, 20 nt, Human
uuacuagggaucccucaucu

SEQ ID NO: 3562705 - RNA, 23 nt, Human
uuacuagggaucccucaucuguc

SEQ ID NO: 3562706 - RNA, 17 nt, Human
uuacuagguaacuucau

SEQ ID NO: 3562707 - RNA, 15 nt, Human
uuacuauaagaacuu

SEQ ID NO: 3562708 - RNA, 17 nt, Human
uuacuauagcaaaguag

SEQ ID NO: 3562709 - RNA, 18 nt, Human
uuacuauagcaaaguagu

SEQ ID NO: 3562710 - RNA, 16 nt, Human
uuacuaugcacaauuu

SEQ ID NO: 3562711 - RNA, 22 nt, Human
uuagguuuuguacaauugaacu

SEQ ID NO: 3562712 - RNA, 16 nt, Human
uuagguuuuuccuuau

SEQ ID NO: 3562713 - RNA, 17 nt, Human
uuaguaaaaaaucaauu

SEQ ID NO: 3562714 - RNA, 22 nt, Human
uuaguaaaaaaucaauuaacca

SEQ ID NO: 3562715 - RNA, 16 nt, Human
uuaguaaaugucuuug

SEQ ID NO: 3562716 - RNA, 24 nt, Human
uuaguaacaugaggggacauuuug

SEQ ID NO: 3562717 - RNA, 12 nt, Human
uuaguaacaugu

SEQ ID NO: 3562718 - RNA, 20 nt, Human
uuaguaaggcuguguacacu

SEQ ID NO: 3562719 - RNA, 13 nt, Human
uuaguaagucuug

SEQ ID NO: 3562720 - RNA, 14 nt, Human
uuaguaauaccucu

SEQ ID NO: 3562721 - RNA, 15 nt, Human
uuaguaaucuguaca

SEQ ID NO: 3562722 - RNA, 21 nt, Human
uuaguaaucuguacauuuugu

SEQ ID NO: 3562723 - RNA, 15 nt, Human
uuaguaaucuguaua

SEQ ID NO: 3562724 - RNA, 22 nt, Human
uuaguaaugcuacgugugauuu

SEQ ID NO: 3562725 - RNA, 14 nt, Human
uuaguacaaaguuu

SEQ ID NO: 3562726 - RNA, 18 nt, Human
uuaguacccaccugagcu

SEQ ID NO: 3562727 - RNA, 19 nt, Human
uuaguacuauaucuguuuu

SEQ ID NO: 3562728 - RNA, 21 nt, Human
uuaguagaaauuuuacaauag

SEQ ID NO: 3562729 - RNA, 23 nt, Human
uuaguagagguacacuugugaau

SEQ ID NO: 3562730 - RNA, 12 nt, Human
uuaguagcaugu

SEQ ID NO: 3562731 - RNA, 19 nt, Human
uuaguauauuuauauaauu

SEQ ID NO: 3562732 - RNA, 15 nt, Human
uuaguaucaguguuu

SEQ ID NO: 3562733 - RNA, 19 nt, Human
uuaguaucaguguuuuaaa

SEQ ID NO: 3562734 - RNA, 16 nt, Human
uuaguaugaggcauuu

SEQ ID NO: 3562735 - RNA, 19 nt, Human
uuaguauuuauuuauguac

SEQ ID NO: 3562736 - RNA, 20 nt, Human
uuaguauuuauuuauguacu

SEQ ID NO: 3562737 - RNA, 13 nt, Human
uuagucacuuuuu

SEQ ID NO: 3562738 - RNA, 15 nt, Human
uuagucauagaagaa

SEQ ID NO: 3562739 - RNA, 16 nt, Human
uuagucauagaagaac

SEQ ID NO: 3562740 - RNA, 19 nt, Human
uuagucauguuuaucugcu

SEQ ID NO: 3562741 - RNA, 13 nt, Human
uuagucgugagcu

SEQ ID NO: 3562742 - RNA, 18 nt, Human
uuagucucuaaagaguuu

SEQ ID NO: 3562743 - RNA, 22 nt, Human
uuagucuuagggauuuauuuuc

SEQ ID NO: 3562744 - RNA, 13 nt, Human
uuagucuucucau

SEQ ID NO: 3562745 - RNA, 19 nt, Human
uuagugaccucagcuuuga

SEQ ID NO: 3562746 - RNA, 15 nt, Human
uuagugacuaaacca

SEQ ID NO: 3562747 - RNA, 16 nt, Human
uuagugagacauauuu

SEQ ID NO: 3562748 - RNA, 14 nt, Human
uuagugaguuauuc

SEQ ID NO: 3562749 - RNA, 14 nt, Human
uuagugauauuucu

SEQ ID NO: 3562750 - RNA, 19 nt, Human
uuagugauauuucucuagu

SEQ ID NO: 3562751 - RNA, 14 nt, Human
uuagugauguaauu

SEQ ID NO: 3562752 - RNA, 18 nt, Human
uuagugaugucaucuguc

SEQ ID NO: 3562753 - RNA, 14 nt, Human
uuagugcauccagu

SEQ ID NO: 3562754 - RNA, 14 nt, Human
uuagugccagaauu

SEQ ID NO: 3562755 - RNA, 17 nt, Human
uuagugcggacaaguuu

SEQ ID NO: 3562756 - RNA, 19 nt, Human
uuagugcggacaaguuuua

SEQ ID NO: 3562757 - RNA, 19 nt, Human
uuaguggacccugaaaugu

SEQ ID NO: 3562758 - RNA, 12 nt, Human
uuaguggcaccg

SEQ ID NO: 3562759 - RNA, 13 nt, Human
uuaguggcaccgc

SEQ ID NO: 3562760 - RNA, 12 nt, Human
uuaguggcuuca

SEQ ID NO: 3562761 - RNA, 15 nt, Human
uuaguguaaaaauga

SEQ ID NO: 3562762 - RNA, 14 nt, Human
uuaguguuauauga

SEQ ID NO: 3562763 - RNA, 12 nt, Human
uuaguguuucug

SEQ ID NO: 3562764 - RNA, 18 nt, Human
uuaguguuucugugcaug

SEQ ID NO: 3562765 - RNA, 16 nt, Human
uuaguguuuuuuuauu

SEQ ID NO: 3562766 - RNA, 13 nt, Human
uuaguuaauauau

SEQ ID NO: 3562767 - RNA, 16 nt, Human
uuaguuaccuuauagu

SEQ ID NO: 3562768 - RNA, 20 nt, Human
uuaguuaccuuauaguuacu

SEQ ID NO: 3562769 - RNA, 18 nt, Human
uuaguuauaguuucagau

SEQ ID NO: 3562770 - RNA, 22 nt, Human
uuaguuauaguuucagauauau

SEQ ID NO: 3562771 - RNA, 16 nt, Human
uuaguuccacugagac

SEQ ID NO: 3562772 - RNA, 12 nt, Human
uuaguuccugug

SEQ ID NO: 3562773 - RNA, 15 nt, Human
uuaguucuuuguuau

SEQ ID NO: 3562774 - RNA, 13 nt, Human
uuaguugcaacuu

SEQ ID NO: 3562775 - RNA, 20 nt, Human
uuaguuuacccgguuucuuu

SEQ ID NO: 3562776 - RNA, 11 nt, Human
uuaguuuagaa

SEQ ID NO: 3562777 - RNA, 14 nt, Human
uuaguuuggauucu

SEQ ID NO: 3562778 - RNA, 15 nt, Human
uuaguuuguguguug

SEQ ID NO: 3562779 - RNA, 17 nt, Human
uuaguuuuauuuucuaa

SEQ ID NO: 3562780 - RNA, 12 nt, Human
uuaguuuugauu

SEQ ID NO: 3562781 - RNA, 22 nt, Human
uuaguuuugugcuuaguuaaau

SEQ ID NO: 3562782 - RNA, 13 nt, Human
uuaguuuuucauu

SEQ ID NO: 3562783 - RNA, 22 nt, Human
uuauaaaaaaaaugaaauguuu

SEQ ID NO: 3562784 - RNA, 15 nt, Human
uuauaaaaaaugguu

SEQ ID NO: 3562785 - RNA, 20 nt, Human
uuauaaaaauaaauagaaaa

SEQ ID NO: 3562786 - RNA, 22 nt, Human
uuauaaaaccaucaaaaauauu

SEQ ID NO: 3562787 - RNA, 15 nt, Human
uuauaaaagugaaua

SEQ ID NO: 3562788 - RNA, 14 nt, Human
uuauaaaauuaaaa

SEQ ID NO: 3562789 - RNA, 20 nt, Human
uuauaaaauuaaagaaaaua

SEQ ID NO: 3562790 - RNA, 17 nt, Human
uuauaaaauuagaaagc

SEQ ID NO: 3562791 - RNA, 20 nt, Human
uuauaaacaagaaugaaggu

SEQ ID NO: 3562792 - RNA, 19 nt, Human
uuauaaacagacaauaugu

SEQ ID NO: 3562793 - RNA, 21 nt, Human
uuauaaacagacaauauguga

SEQ ID NO: 3562794 - RNA, 16 nt, Human
uuauaaaccucuaauu

SEQ ID NO: 3562795 - RNA, 23 nt, Human
uuauaaaccucuaauuuauuuug

SEQ ID NO: 3562796 - RNA, 13 nt, Human
uuauaaacuuuac

SEQ ID NO: 3562797 - RNA, 16 nt, Human
uuauaaacuuuuuucu

SEQ ID NO: 3562798 - RNA, 18 nt, Human
uuauaaagugcuugugua

SEQ ID NO: 3562799 - RNA, 19 nt, Human
uuauaaauaaacuguugcu

SEQ ID NO: 3562800 - RNA, 21 nt, Human
uuauaaauauaagccuuuuau

SEQ ID NO: 3562801 - RNA, 21 nt, Human
uuauaaauaugaagcucaccu

SEQ ID NO: 3562802 - RNA, 21 nt, Human
uuauaaaucauauugaugaaa

SEQ ID NO: 3562803 - RNA, 11 nt, Human
uuauuagauaa

SEQ ID NO: 3562804 - RNA, 12 nt, Human
uuauuagaugaa

SEQ ID NO: 3562805 - RNA, 13 nt, Human
uuauuagaugaau

SEQ ID NO: 3562806 - RNA, 21 nt, Human
uuauuagcagcugacuuucaa

SEQ ID NO: 3562807 - RNA, 23 nt, Human
uuauuagcccugcauuuucauag

SEQ ID NO: 3562808 - RNA, 17 nt, Human
uuauuagggagaaaauu

SEQ ID NO: 3562809 - RNA, 19 nt, Human
uuauuagggagaaaauuca

SEQ ID NO: 3562810 - RNA, 18 nt, Human
uuauuaguauuguugucc

SEQ ID NO: 3562811 - RNA, 15 nt, Human
uuauuaguuaauaua

SEQ ID NO: 3562812 - RNA, 14 nt, Human
uuauuaguuuacau

SEQ ID NO: 3562813 - RNA, 13 nt, Human
uuauuaguuuugc

SEQ ID NO: 3562814 - RNA, 22 nt, Human
uuauuaucauuguucuuuucaa

SEQ ID NO: 3562815 - RNA, 16 nt, Human
uuauuaucuaaagugu

SEQ ID NO: 3562816 - RNA, 20 nt, Human
uuauuaugaaacuuguguaa

SEQ ID NO: 3562817 - RNA, 22 nt, Human
uuauuaugaaacuuguguaaau

SEQ ID NO: 3562818 - RNA, 12 nt, Human
uuauuaugcaug

SEQ ID NO: 3562819 - RNA, 13 nt, Human
uuauuaugcauga

SEQ ID NO: 3562820 - RNA, 16 nt, Human
uuauuauguaaauccc

SEQ ID NO: 3562821 - RNA, 13 nt, Human
uuauuauuaacaa

SEQ ID NO: 3562822 - RNA, 15 nt, Human
uuauuauuuuggggu

SEQ ID NO: 3562823 - RNA, 15 nt, Human
uuauucaaagaaaua

SEQ ID NO: 3562824 - RNA, 13 nt, Human
uuauucaacagca

SEQ ID NO: 3562825 - RNA, 12 nt, Human
uuauucaauaaa

SEQ ID NO: 3562826 - RNA, 23 nt, Human
uuauucaauaaaaaaaagaaaug

SEQ ID NO: 3562827 - RNA, 14 nt, Human
uuauucaauaaagu

SEQ ID NO: 3562828 - RNA, 17 nt, Human
uuauucaauaaaguauu

SEQ ID NO: 3562829 - RNA, 14 nt, Human
uuauucacaaaaau

SEQ ID NO: 3562830 - RNA, 20 nt, Human
uuauucaccauguaaaacaa

SEQ ID NO: 3562831 - RNA, 22 nt, Human
uuauucaggaaaagccucugug

SEQ ID NO: 3562832 - RNA, 15 nt, Human
uuauucagggaagga

SEQ ID NO: 3562833 - RNA, 16 nt, Human
uuauucauuagcugug

SEQ ID NO: 3562834 - RNA, 18 nt, Human
uuauucauuaguuuugaa

SEQ ID NO: 3562835 - RNA, 23 nt, Human
uuauucauucugugaucauuuau

SEQ ID NO: 3562836 - RNA, 13 nt, Human
uuauucauuuaaa

SEQ ID NO: 3562837 - RNA, 14 nt, Human
uuauucauuugagu

SEQ ID NO: 3562838 - RNA, 22 nt, Human
uuauuccaagggaauauugcca

SEQ ID NO: 3562839 - RNA, 12 nt, Human
uuauuccacauc

SEQ ID NO: 3562840 - RNA, 12 nt, Human
uuauuccauauu

SEQ ID NO: 3562841 - RNA, 19 nt, Human
uuauucccuuucacaaaau

SEQ ID NO: 3562842 - RNA, 20 nt, Human
uuauuccuauauaguuuauu

SEQ ID NO: 3562843 - RNA, 20 nt, Human
uuauuccugauaauaauuga

SEQ ID NO: 3562844 - RNA, 21 nt, Human
uuauuccugauaauaauugau

SEQ ID NO: 3562845 - RNA, 15 nt, Human
uuauuccuguauguu

SEQ ID NO: 3562846 - RNA, 16 nt, Human
uuauuccuugaucauu

SEQ ID NO: 3562847 - RNA, 17 nt, Human
uuauucucacuccacca

SEQ ID NO: 3562848 - RNA, 11 nt, Human
uuauucugcuc

SEQ ID NO: 3562849 - RNA, 22 nt, Human
uuauucugggcaccacaaaaua

SEQ ID NO: 3562850 - RNA, 18 nt, Human
uuauucuugaaagaagaa

SEQ ID NO: 3562851 - RNA, 11 nt, Human
uuauucuugau

SEQ ID NO: 3562852 - RNA, 14 nt, Human
uuauucuugaugaa

SEQ ID NO: 3562853 - RNA, 15 nt, Human
uuauucuuucuccuu

SEQ ID NO: 3562854 - RNA, 17 nt, Human
uuauucuuugcacuuuu

SEQ ID NO: 3562855 - RNA, 19 nt, Human
uuauugacacagaaaaugu

SEQ ID NO: 3562856 - RNA, 11 nt, Human
uuauugacacu

SEQ ID NO: 3562857 - RNA, 14 nt, Human
uuauugacacugaa

SEQ ID NO: 3562858 - RNA, 15 nt, Human
uuauugacacugaac

SEQ ID NO: 3562859 - RNA, 17 nt, Human
uuauugacacugaacuu

SEQ ID NO: 3562860 - RNA, 18 nt, Human
uuauugacaguugugcag

SEQ ID NO: 3562861 - RNA, 16 nt, Human
uuauugacucuggguc

SEQ ID NO: 3562862 - RNA, 22 nt, Human
uuauugacucuggguccuuccu

SEQ ID NO: 3562863 - RNA, 16 nt, Human
uuauugacucuugagu

SEQ ID NO: 3562864 - RNA, 21 nt, Human
uuauugacucuugaguuguuu

SEQ ID NO: 3562865 - RNA, 23 nt, Human
uuauugagaaagagcacuuaaga

SEQ ID NO: 3562866 - RNA, 21 nt, Human
uuauugaggaaaaauauguga

SEQ ID NO: 3562867 - RNA, 20 nt, Human
uuauugauaaguucauacau

SEQ ID NO: 3562868 - RNA, 21 nt, Human
uuauugcaaaauagcauuugu

SEQ ID NO: 3562869 - RNA, 15 nt, Human
uuauugcacauuguu

SEQ ID NO: 3562870 - RNA, 17 nt, Human
uuauugcacauuguuca

SEQ ID NO: 3562871 - RNA, 20 nt, Human
uuauugccaaaacccagcug

SEQ ID NO: 3562872 - RNA, 22 nt, Human
uuauugccaaaacccagcugca

SEQ ID NO: 3562873 - RNA, 14 nt, Human
uuauugccuucuca

SEQ ID NO: 3562874 - RNA, 20 nt, Human
uuauugccuucucaccagcu

SEQ ID NO: 3562875 - RNA, 15 nt, Human
uuauugcuguugcuu

SEQ ID NO: 3562876 - RNA, 17 nt, Human
uuauugcuuaguaaaau

SEQ ID NO: 3562877 - RNA, 17 nt, Human
uuauugcuuauugcuua

SEQ ID NO: 3562878 - RNA, 20 nt, Human
uuauugcuuauugcuuagua

SEQ ID NO: 3562879 - RNA, 23 nt, Human
uuauugcuugauacuuuugacaa

SEQ ID NO: 3562880 - RNA, 14 nt, Human
uuauuggcugagau

SEQ ID NO: 3562881 - RNA, 16 nt, Human
uuauuggcugagauau

SEQ ID NO: 3562882 - RNA, 18 nt, Human
uuauuggcuuuucugauc

SEQ ID NO: 3562883 - RNA, 15 nt, Human
uuauugguuuugcag

SEQ ID NO: 3562884 - RNA, 16 nt, Human
uuauuguaacagacau

SEQ ID NO: 3562885 - RNA, 17 nt, Human
uuauuguaacagacauu

SEQ ID NO: 3562886 - RNA, 20 nt, Human
uuauuguaacagacauuguu

SEQ ID NO: 3562887 - RNA, 19 nt, Human
uuauuguacagcuguuuaa

SEQ ID NO: 3562888 - RNA, 12 nt, Human
uuauuguaccuc

SEQ ID NO: 3562889 - RNA, 14 nt, Human
uuauuguaccucuc

SEQ ID NO: 3562890 - RNA, 12 nt, Human
uuauuguacuug

SEQ ID NO: 3562891 - RNA, 14 nt, Human
uuauuguauucugg

SEQ ID NO: 3562892 - RNA, 17 nt, Human
uuauugucaaaguggug

SEQ ID NO: 3562893 - RNA, 18 nt, Human
uuauugucaaagugguga

SEQ ID NO: 3562894 - RNA, 16 nt, Human
uuauugugauuucccg

SEQ ID NO: 3562895 - RNA, 17 nt, Human
uuaggaggcucaacaau

SEQ ID NO: 3562896 - RNA, 19 nt, Human
uuaggagggaguuaucuaa

SEQ ID NO: 3562897 - RNA, 15 nt, Human
uuaggauggcaggac

SEQ ID NO: 3562898 - RNA, 14 nt, Human
uuaggauuuaacag

SEQ ID NO: 3562899 - RNA, 21 nt, Human
uuaggauuuaacagucauuua

SEQ ID NO: 3562900 - RNA, 18 nt, Human
uuaggcagggauuugagg

SEQ ID NO: 3562901 - RNA, 19 nt, Human
uuaggcagggauuugagga

SEQ ID NO: 3562902 - RNA, 18 nt, Human
uuaggcaugcacagcugu

SEQ ID NO: 3562903 - RNA, 18 nt, Human
uuaggcaugguuuugggc

SEQ ID NO: 3562904 - RNA, 15 nt, Human
uuaggccaaagacaa

SEQ ID NO: 3562905 - RNA, 16 nt, Human
uuaggccacaugggag

SEQ ID NO: 3562906 - RNA, 15 nt, Human
uuaggcuauucacaa

SEQ ID NO: 3562907 - RNA, 17 nt, Human
uuaggcugcugggaugg

SEQ ID NO: 3562908 - RNA, 17 nt, Human
uuaggcugggcccagag

SEQ ID NO: 3562909 - RNA, 16 nt, Human
uuaggcugguggccca

SEQ ID NO: 3562910 - RNA, 17 nt, Human
uuaggcugguggcccag

SEQ ID NO: 3562911 - RNA, 19 nt, Human
uuaggcugguggcccagga

SEQ ID NO: 3562912 - RNA, 17 nt, Human
uuaggcuguaacuacuu

SEQ ID NO: 3562913 - RNA, 20 nt, Human
uuaggcuguaacuacuuuau

SEQ ID NO: 3562914 - RNA, 15 nt, Human
uuaggcuuaaaaacu

SEQ ID NO: 3562915 - RNA, 17 nt, Human
uuagggaaaacauucca

SEQ ID NO: 3562916 - RNA, 14 nt, Human
uuagggaagagaaa

SEQ ID NO: 3562917 - RNA, 21 nt, Human
uuagggacaggaccccagcuc

SEQ ID NO: 3562918 - RNA, 21 nt, Human
uuagggagagucauauuuuga

SEQ ID NO: 3562919 - RNA, 12 nt, Human
uuagggaggggu

SEQ ID NO: 3562920 - RNA, 14 nt, Human
uuagggauuuauuu

SEQ ID NO: 3562921 - RNA, 14 nt, Human
uuagggcagcuugc

SEQ ID NO: 3562922 - RNA, 15 nt, Human
uuagggccaggcagg

SEQ ID NO: 3562923 - RNA, 15 nt, Human
uuagggcucuaauuu

SEQ ID NO: 3562924 - RNA, 15 nt, Human
uuaggguacuaaauu

SEQ ID NO: 3562925 - RNA, 15 nt, Human
uuagggugaaccacu

SEQ ID NO: 3562926 - RNA, 21 nt, Human
uuagggugaaccacuucauuc

SEQ ID NO: 3562927 - RNA, 15 nt, Human
uuaggugaggaagca

SEQ ID NO: 3562928 - RNA, 14 nt, Human
uuaggugucugucc

SEQ ID NO: 3562929 - RNA, 19 nt, Human
uuaggugugggggaagcac

SEQ ID NO: 3562930 - RNA, 20 nt, Human
uuagguuaaaaaaaggcauu

SEQ ID NO: 3562931 - RNA, 18 nt, Human
uuagguuaacuauguaca

SEQ ID NO: 3562932 - RNA, 19 nt, Human
uuagguuaacuauguacaa

SEQ ID NO: 3562933 - RNA, 22 nt, Human
uuagguuccauccuuuacgugu

SEQ ID NO: 3562934 - RNA, 20 nt, Human
uuagguucuaaaguucuaag

SEQ ID NO: 3562935 - RNA, 18 nt, Human
uuagguuggcaaaaaggc

SEQ ID NO: 3562936 - RNA, 12 nt, Human
uuagguugugaa

SEQ ID NO: 3562937 - RNA, 14 nt, Human
uucagugauaacuc

SEQ ID NO: 3562938 - RNA, 15 nt, Human
uucagugaugugccu

SEQ ID NO: 3562939 - RNA, 10 nt, Human
uucagugccc

SEQ ID NO: 3562940 - RNA, 12 nt, Human
uucagugccuua

SEQ ID NO: 3562941 - RNA, 13 nt, Human
uucagugccuuau

SEQ ID NO: 3562942 - RNA, 21 nt, Human
uucagugccuuauggaacacu

SEQ ID NO: 3562943 - RNA, 12 nt, Human
uucaguggagaa

SEQ ID NO: 3562944 - RNA, 16 nt, Human
uucaguggcagggcuc

SEQ ID NO: 3562945 - RNA, 14 nt, Human
uucagugggagaaa

SEQ ID NO: 3562946 - RNA, 14 nt, Human
uucaguggggcagu

SEQ ID NO: 3562947 - RNA, 16 nt, Human
uucaguguaaagugug

SEQ ID NO: 3562948 - RNA, 13 nt, Human
uucaguguaaaua

SEQ ID NO: 3562949 - RNA, 20 nt, Human
uucaguguaauuucuuugcc

SEQ ID NO: 3562950 - RNA, 14 nt, Human
uucaguguaguuaa

SEQ ID NO: 3562951 - RNA, 19 nt, Human
uucaguguaguuaauuuau

SEQ ID NO: 3562952 - RNA, 18 nt, Human
uucaguguuaaaugugau

SEQ ID NO: 3562953 - RNA, 22 nt, Human
uucaguguuaaaugugaugaau

SEQ ID NO: 3562954 - RNA, 21 nt, Human
uucaguguuucuggggagcug

SEQ ID NO: 3562955 - RNA, 17 nt, Human
uucaguuaagaaaaaaa

SEQ ID NO: 3562956 - RNA, 14 nt, Human
uucaguuacagaaa

SEQ ID NO: 3562957 - RNA, 17 nt, Human
uucaguuacagaaagug

SEQ ID NO: 3562958 - RNA, 23 nt, Human
uucaguuauuauauuuacaaaug

SEQ ID NO: 3562959 - RNA, 17 nt, Human
uucaguucaaagucaug

SEQ ID NO: 3562960 - RNA, 18 nt, Human
uugacuuauaguacauga

SEQ ID NO: 3562961 - RNA, 13 nt, Human
uugacuucagauu

SEQ ID NO: 3562962 - RNA, 21 nt, Human
uugacuugacagaacacuguc

SEQ ID NO: 3562963 - RNA, 13 nt, Human
uugacuuuaauuu

SEQ ID NO: 3562964 - RNA, 13 nt, Human
uugacuuucaggu

SEQ ID NO: 3562965 - RNA, 14 nt, Human
uugacuuucaggua

SEQ ID NO: 3562966 - RNA, 15 nt, Human
uugacuuucagguac

SEQ ID NO: 3562967 - RNA, 19 nt, Human
uugacuuuccccaccagau

SEQ ID NO: 3562968 - RNA, 20 nt, Human
uugacuuuuauaaagcaugu

SEQ ID NO: 3562969 - RNA, 21 nt, Human
uugacuuuuauaaagcauguu

SEQ ID NO: 3562970 - RNA, 13 nt, Human
uugacuuuucugu

SEQ ID NO: 3562971 - RNA, 12 nt, Human
uugacuuuuuau

SEQ ID NO: 3562972 - RNA, 17 nt, Human
uugacuuuuugcauuua

SEQ ID NO: 3562973 - RNA, 17 nt, Human
uugacuuuuuuuguaug

SEQ ID NO: 3562974 - RNA, 19 nt, Human
uugagaaaaauauauacua

SEQ ID NO: 3562975 - RNA, 20 nt, Human
uugagaaacaaauaauuugu

SEQ ID NO: 3562976 - RNA, 23 nt, Human
uugagaaaccuuauuguaccucu

SEQ ID NO: 3562977 - RNA, 21 nt, Human
uugagaacuaccuggauuugu

SEQ ID NO: 3562978 - RNA, 18 nt, Human
uugagaaguuuuguacag

SEQ ID NO: 3562979 - RNA, 23 nt, Human
uugagaaucccaaauuugauuga

SEQ ID NO: 3562980 - RNA, 16 nt, Human
uugagaauggaaacca

SEQ ID NO: 3562981 - RNA, 22 nt, Human
uugagaauugugcucaaaauuu

SEQ ID NO: 3562982 - RNA, 17 nt, Human
uugagacaaaaauuauc

SEQ ID NO: 3562983 - RNA, 22 nt, Human
uugagacacugguuuacacuuu

SEQ ID NO: 3562984 - RNA, 11 nt, Human
uugagacagag

SEQ ID NO: 3562985 - RNA, 12 nt, Human
uugagacaguuu

SEQ ID NO: 3562986 - RNA, 13 nt, Human
uugagacaguuuc

SEQ ID NO: 3562987 - RNA, 15 nt, Human
uugagaccagccugg

SEQ ID NO: 3562988 - RNA, 17 nt, Human
uugagaccucagccaug

SEQ ID NO: 3562989 - RNA, 22 nt, Human
uugagacuccucaguucuugcc

SEQ ID NO: 3562990 - RNA, 16 nt, Human
uugagacuuuuuggug

SEQ ID NO: 3562991 - RNA, 16 nt, Human
uugagagaauuugugc

SEQ ID NO: 3562992 - RNA, 17 nt, Human
uugagagaccaggcaaa

SEQ ID NO: 3562993 - RNA, 14 nt, Human
uugagagagaugug

SEQ ID NO: 3562994 - RNA, 22 nt, Human
uugagagagauguguaauuuuu

SEQ ID NO: 3562995 - RNA, 16 nt, Human
uugagagagcagccag

SEQ ID NO: 3562996 - RNA, 13 nt, Human
uugagagugugac

SEQ ID NO: 3562997 - RNA, 22 nt, Human
uugagauacuuuuucuuuugua

SEQ ID NO: 3562998 - RNA, 18 nt, Human
uugagauagaagaacugc

SEQ ID NO: 3562999 - RNA, 21 nt, Human
uugagaugcuguaggugguau

SEQ ID NO: 3563000 - RNA, 21 nt, Human
uugagauggagucuugcucug

SEQ ID NO: 3563001 - RNA, 13 nt, Human
uugagauguauga

SEQ ID NO: 3563002 - RNA, 17 nt, Human
uugagauguaugaaggc

SEQ ID NO: 3563003 - RNA, 17 nt, Human
uugagauuagagggagg

SEQ ID NO: 3563004 - RNA, 15 nt, Human
uugagauugccccag
